United States Patent Application Publication US 2019/0224279 A1 - sequence listing, part 2

SEQ ID NO: 7360 - protein, 42 aa, Artificial Sequence
  Non-cyclic GFR-binding peptide
  MOD_RES (5), (39), (41): Xaa is C or S
  MOD_RES (19), (20), (21), (22), (23): Xaa is A or G
  MOD_RES (24), (25), (26), (27): Xaa is A or G or is absent
TKPTXAPTKLSAISVLYLXXXXXXXXXLKNYQNMVVRSXGXH

SEQ ID NO: 7361 - protein, 42 aa, Artificial Sequence
  Non-cyclic GFR-binding peptide
  MOD_RES (4), (5), (39), (41): Xaa is C or S
  MOD_RES (19), (20), (21), (22), (23): Xaa is A or G
  MOD_RES (24), (25), (26), (27): Xaa is A or G or is absent
PKAXXVPTELNAISMLYFXXXXXXXXXLKKYREMVVEGXGXR

SEQ ID NO: 7362 - protein, 33 aa, Artificial Sequence
  Non-cyclic GFR-binding peptide
  MOD_RES (1), (2): Xaa is C or S
XXAPTKLSAISVLYLDSSNNVILKNYQNMVVKA

SEQ ID NO: 7363 - protein, 33 aa, Artificial Sequence
  Non-cyclic GFR-binding peptide
  MOD_RES (31), (33): Xaa is C or S
VPQDLSAISILYLVGRTPKVLKNYQMVVKSXKX

SEQ ID NO: 7364 - protein, 34 aa, Artificial Sequence
  Non-cyclic GFR-binding peptide
PTQVQLSAISVLYLEIVRKKPIFLKNYQTLEDHL

SEQ ID NO: 7365 - protein, 37 aa, Artificial Sequence
  Non-cyclic GFR-binding peptide
  MOD_RES (3), (3): Xaa is C or S
VQXRPTQVQLNAISVLYFEIVRKKPIFLKKYRTLEDH

SEQ ID NO: 7366 - protein, 33 aa, Artificial Sequence
  Non-cyclic GFR-binding peptide
  MOD_RES (1), (2): Xaa is C or S
XXAPTKLSPISVLYKDDSSNVILKYHYNMVVRS

SEQ ID NO: 7367 - protein, 38 aa, Artificial Sequence
  Non-cyclic GFR-binding peptide
  MOD_RES (5), (6): Xaa is C or S
  MOD_RES (20), (21), (22), (23), (24): Xaa is A or G
  MOD_RES (25), (26), (27), (28): Xaa is A or G or is absent
SAAPXXVPQALSAISILYLXXXXXXXXXLKNYQMIVRS

SEQ ID NO: 7368 - protein, 35 aa, Artificial Sequence
  Non-cyclic GFR-binding peptide
  MOD_RES (2), (3), (34): Xaa is C or S
PXXVPQDLSATSILYYVGRTPKVLRKHRMVVKSXK

SEQ ID NO: 7369 - protein, 40 aa, Artificial Sequence
  Non-cyclic GFR-binding peptide
  MOD_RES (6), (7): Xaa is C or S
  MOD_RES (21), (22), (23), (24), (25): Xaa is A or G
  MOD_RES (26), (27), (28), (29): Xaa is A or G or is absent
AVPKAXXAPTKLSPISVLYKXXXXXXXXXLKYHYNMVVKA

SEQ ID NO: 7370 - protein, 41 aa, Artificial Sequence
  Non-cyclic GFR-binding peptide
  MOD_RES (5), (6), (38), (40): Xaa is C or S
VPKPXXAPTQLSATSVLYYDDSSNVILRKHRNMVVRAXGXH

SEQ ID NO: 7371 - protein, 33 aa, Artificial Sequence
  Non-cyclic GFR-binding peptide
  MOD_RES (1), (33): Xaa is C or S
XAPTKLSPISVLYKDDSSNVILKYHYNMVVRSX

SEQ ID NO: 7372 - protein, 38 aa, Artificial Sequence
  Non-cyclic GFR-binding peptide
  MOD_RES (1), (38): Xaa is C or S
  MOD_RES (17), (18), (19), (20), (21): Xaa is A or G
  MOD_RES (22), (23), (24), (25): Xaa is A or G or is absent
XRPTQVQLSAISVLYLXXXXXXXXXLKNYQTLEDHLAX

SEQ ID NO: 7373 - protein, 38 aa, Artificial Sequence
  Non-cyclic GFR-binding peptide
  MOD_RES (4), (5), (36), (38): Xaa is C or S
AAPXXVPQALSATSILYYVGRKPKVLRKHRMIVRSXKX

SEQ ID NO: 7374 - protein, 34 aa, Artificial Sequence
  Non-cyclic GFR-binding peptide
  MOD_RES (32), (34): Xaa is C or S
APTKLNAISVLYFDSSNNVILKKYRNMVVKAXGX

SEQ ID NO: 7375 - protein, 34 aa, Artificial Sequence
  Non-cyclic GFR-binding peptide
  MOD_RES (3), (4): Xaa is C or S
KPXXAPTQLSATSVLYYDDSSNVILRKHRNMVVR

SEQ ID NO: 7376 - protein, 43 aa, Artificial Sequence
  Non-cyclic GFR-binding peptide
  MOD_RES (6), (7), (42): Xaa is C or S
  MOD_RES (21), (22), (23), (24), (25): Xaa is A or G
  MOD_RES (26), (27), (28), (29): Xaa is A or G or is absent
KVGKAXXVPTKLNAISVLYFXXXXXXXXXLKKYREGMSVAEXG

SEQ ID NO: 7377 - protein, 43 aa, Artificial Sequence
  Non-cyclic GFR-binding peptide
  MOD_RES (5), (42): Xaa is C or S
RNVQXRPTQVQLSPISVLYKEIVRKKPIFLKYHYTLEDHLAXK

SEQ ID NO: 7378 - protein, 34 aa, Artificial Sequence
  Non-cyclic GFR-binding peptide
  MOD_RES (1), (33): Xaa is C or S
XVPTELNAISMLYFDENEKVVLKKYRDMVVEGXG

SEQ ID NO: 7379 - protein, 38 aa, Artificial Sequence
  Non-cyclic GFR-binding peptide
  MOD_RES (5), (6): Xaa is C or S
  MOD_RES (20), (21), (22), (23), (24): Xaa is A or G
  MOD_RES (25), (26), (27), (28): Xaa is A or G or is absent
VPKAXXAPTKLSAISVLYLXXXXXXXXXLKNYQNMVVK

SEQ ID NO: 7380 - protein, 42 aa, Artificial Sequence
  Non-cyclic GFR-binding peptide
  MOD_RES (5), (42): Xaa is C or S
  MOD_RES (21), (22), (23), (24), (25): Xaa is A or G
  MOD_RES (26), (27), (28), (29): Xaa is A or G or is absent
RNVQXRPTQVQLSATSVLYYXXXXXXXXXLRKHRTLEDHLAX

SEQ ID NO: 7381 - protein, 42 aa, Artificial Sequence
  Non-cyclic GFR-binding peptide
  MOD_RES (6), (7), (39), (41): Xaa is C or S
YVPKPXXAPTKLSPISVLYKDDSSNVILKYHYNMVVRSXGXH

SEQ ID NO: 7382 - protein, 35 aa, Artificial Sequence
  Non-cyclic GFR-binding peptide
  MOD_RES (2), (3), (34): Xaa is C or S
PXXVPQALSAISILYLVGRKPKVLKNYQMIVRSXK

SEQ ID NO: 7383 - protein, 33 aa, Artificial Sequence
  Non-cyclic GFR-binding peptide
  MOD_RES (1), (2), (33): Xaa is C or S
XXVPQDLSPISILYKVGRTPKVLKYHYMVVKSX

SEQ ID NO: 7384 - protein, 35 aa, Artificial Sequence
  Non-cyclic GFR-binding peptide
  MOD_RES (1), (2), (33), (35): Xaa is C or S
XXVPQDLNAISILYFVGRTPKVLKKYRMVVKSXKX

SEQ ID NO: 7385 - protein, 35 aa, Artificial Sequence
  Non-cyclic GFR-binding peptide
  MOD_RES (4), (5): Xaa is C or S
PKAXXAPTKLNAISVLYFDSSNNVILKKYRNMVVK

SEQ ID NO: 7386 - protein, 40 aa, Artificial Sequence
  Non-cyclic GFR-binding peptide
  MOD_RES (5), (6): Xaa is C or S
  MOD_RES (20), (21), (22), (23), (24): Xaa is A or G
  MOD_RES (25), (26), (27), (28): Xaa is A or G or is absent
VGKAXXVPTKLSATSVLYYXXXXXXXXXLRKHREGMSVAE

SEQ ID NO: 7387 - protein, 33 aa, Artificial Sequence
  Non-cyclic GFR-binding peptide
  MOD_RES (2), (3): Xaa is C or S
PXXVPQDLNAISILYFVGRTPKVLKKYRMVVKS

SEQ ID NO: 7388 - protein, 36 aa, Artificial Sequence
  Non-cyclic GFR-binding peptide
  MOD_RES (1), (2), (35): Xaa is C or S
  MOD_RES (16), (17), (18), (19), (20): Xaa is A or G
  MOD_RES (21), (22), (23), (24): Xaa is A or G or is absent
XXVSQDLNAISILYFXXXXXXXXXLKKYRMIVKSXK

SEQ ID NO: 7389 - protein, 33 aa, Artificial Sequence
  Non-cyclic GFR-binding peptide
  MOD_RES (2), (3): Xaa is C or S
PXXVPQALSAISILYLVGRKPKVLKNYQMIVRS

SEQ ID NO: 7390 - protein, 40 aa, Artificial Sequence
  Non-cyclic GFR-binding peptide
  MOD_RES (5), (6): Xaa is C or S
  MOD_RES (20), (21), (22), (23), (24): Xaa is A or G
  MOD_RES (25), (26), (27), (28): Xaa is A or G or is absent
VGKAXXVPTKLSAISVLYLXXXXXXXXXLKNYQEGMSVAE

SEQ ID NO: 7391 - protein, 34 aa, Artificial Sequence
  Non-cyclic GFR-binding peptide
  MOD_RES (31), (33): Xaa is C or S
VPQALSATSILYYVGRKPKVLRKHRMIVRSXKXS

SEQ ID NO: 7392 - protein, 40 aa, Artificial Sequence
  Non-cyclic GFR-binding peptide
  MOD_RES (5), (39): Xaa is C or S
  MOD_RES (19), (20), (21), (22), (23): Xaa is A or G
  MOD_RES (24), (25), (26), (27): Xaa is A or G or is absent
TKPTXAPTKLSAISVLYLXXXXXXXXXLKNYQNMVVRSXG

SEQ ID NO: 7393 - protein, 34 aa, Artificial Sequence
  Non-cyclic GFR-binding peptide
  MOD_RES (1), (34): Xaa is C or S
  MOD_RES (15), (16), (17), (18), (19): Xaa is A or G
  MOD_RES (20), (21), (22), (23): Xaa is A or G or is absent
XVPQDLSPISILYKXXXXXXXXXLKYHYMVVKSX

SEQ ID NO: 7394 - protein, 41 aa, Artificial Sequence
  Non-cyclic GFR-binding peptide
  MOD_RES (4), (5), (39), (41): Xaa is C or S
  MOD_RES (19), (20), (21), (22), (23): Xaa is A or G
  MOD_RES (24), (25), (26), (27): Xaa is A or G or is absent
PKPXXAPTKLSPISVLYKXXXXXXXXXLKYHYNMVVRSXGX

SEQ ID NO: 7395 - protein, 36 aa, Artificial Sequence
  Non-cyclic GFR-binding peptide
  MOD_RES (33), (35): Xaa is C or S
VPTKLNAISVLYFDDMGVPTLKKYREGMSVAEXGXR

SEQ ID NO: 7396 - protein, 33 aa, Artificial Sequence
  Non-cyclic GFR-binding peptide
  MOD_RES (2), (3): Xaa is C or S
PXXAPTKLSAISVLYLDDSSNVILKNYQNMVVR

SEQ ID NO: 7397 - protein, 38 aa, Artificial Sequence
  Non-cyclic GFR-binding peptide
  MOD_RES (5), (6), (37): Xaa is C or S
SAAPXXVPQALNAISILYFVGRKPKVLKKYRMIVRSXK

SEQ ID NO: 7398 - protein, 36 aa, Artificial Sequence
  Non-cyclic GFR-binding peptide
  MOD_RES (2), (3), (36): Xaa is C or S
  MOD_RES (17), (18), (19), (20), (21): Xaa is A or G
  MOD_RES (22), (23), (24), (25): Xaa is A or G or is absent
PXXVPQDLNAISILYFXXXXXXXXXLKKYRMVVKSX

SEQ ID NO: 7399 - protein, 35 aa, Artificial Sequence
  Non-cyclic GFR-binding peptide
  MOD_RES (32), (34): Xaa is C or S
VPTELSATSMLYYDENEKVVLRKHRDMVVEGXGXR

SEQ ID NO: 7400 - protein, 34 aa, Artificial Sequence
  Non-cyclic GFR-binding peptide
  MOD_RES (33), (33): Xaa is C or S
  MOD_RES (14), (15), (16), (17), (18): Xaa is A or G
  MOD_RES (19), (20), (21), (22): Xaa is A or G or is absent
VPQDLNAISILYFXXXXXXXXXLKKYRMVVKSXK

SEQ ID NO: 7401 - protein, 34 aa, Artificial Sequence
  Non-cyclic GFR-binding peptide
  MOD_RES (1), (2), (34): Xaa is C or S
XXVPTELSATSMLYYDEYDKVVLRKHREMVVEGX

SEQ ID NO: 7402 - protein, 35 aa, Artificial Sequence
  Non-cyclic GFR-binding peptide
  MOD_RES (1), (2), (34): Xaa is C or S
XXVPTELSPISMLYKDEYDKVVLKYHYEMVVEGXG

SEQ ID NO: 7403 - protein, 33 aa, Artificial Sequence
  Non-cyclic GFR-binding peptide
  MOD_RES (1), (2), (33): Xaa is C or S
XXVPQALNAISILYFVGRKPKVLKKYRMIVRSX

SEQ ID NO: 7404 - protein, 36 aa, Artificial Sequence
  Non-cyclic GFR-binding peptide
  MOD_RES (36), (36): Xaa is C or S
  MOD_RES (15), (16), (17), (18), (19): Xaa is A or G
  MOD_RES (20), (21), (22), (23): Xaa is A or G or is absent
PTQVQLNAISVLYFXXXXXXXXXLKKYRTLEDHLAX

SEQ ID NO: 7405 - protein, 38 aa, Artificial Sequence
  Non-cyclic GFR-binding peptide
  MOD_RES (2), (3), (36), (38): Xaa is C or S
AXXVPTKLNAISVLYFDDMGVPTLKKYREGMSVAEXGX

SEQ ID NO: 7406 - protein, 41 aa, Artificial Sequence
  Non-cyclic GFR-binding peptide
  MOD_RES (5), (6), (40): Xaa is C or S
  MOD_RES (20), (21), (22), (23), (24): Xaa is A or G
  MOD_RES (25), (26), (27), (28): Xaa is A or G or is absent
VPKAXXAPTKLSAISVLYLXXXXXXXXXLKNYQNMVVKAXG

SEQ ID NO: 7407 - protein, 36 aa, Artificial Sequence
  Non-cyclic GFR-binding peptide
  MOD_RES (4), (5): Xaa is C or S
PKAXXVPTELSPISMLYKDENEKVVLKYHYDMVVEG

SEQ ID NO: 7408 - protein, 39 aa, Artificial Sequence
  Non-cyclic GFR-binding peptide
  MOD_RES (5), (6), (38): Xaa is C or S
IPKAXXVPTELSATSMLYYDENEKVVLRKHRDMVVEGXG

SEQ ID NO: 7409 - protein, 35 aa, Artificial Sequence
  Non-cyclic GFR-binding peptide
  MOD_RES (2), (3): Xaa is C or S
  MOD_RES (17), (18), (19), (20), (21): Xaa is A or G
  MOD_RES (22), (23), (24), (25): Xaa is A or G or is absent
PXXAPTQLSATSVLYYXXXXXXXXXLRKHRNMVVR

SEQ ID NO: 7410 - protein, 32 aa, Artificial Sequence
  Non-cyclic GFR-binding peptide
  MOD_RES (31), (31): Xaa is C or S
VSQDLSAISILYLIGKTPKILKNYQMIVKSXK

SEQ ID NO: 7411 - protein, 34 aa, Artificial Sequence
  Non-cyclic GFR-binding peptide
  MOD_RES (1), (2): Xaa is C or S
XXVPTKLSAISVLYLDDMGVPTLKNYQEGMSVAE

SEQ ID NO: 7412 - protein, 39 aa, Artificial Sequence
  Non-cyclic GFR-binding peptide
  MOD_RES (7), (7): Xaa is C or S
  MOD_RES (21), (22), (23), (24), (25): Xaa is A or G
  MOD_RES (26), (27), (28), (29): Xaa is A or G or is absent
HVTKPTXAPTKLSATSVLYYXXXXXXXXXLRKHRNMVVR

SEQ ID NO: 7413 - protein, 36 aa, Artificial Sequence
  Non-cyclic GFR-binding peptide
  MOD_RES (5), (6): Xaa is C or S
VPKPXXAPTQLSATSVLYYDDSSNVILRKHRNMVVR

SEQ ID NO: 7414 - protein, 38 aa, Artificial Sequence
  Non-cyclic GFR-binding peptide
  MOD_RES (4), (5), (37): Xaa is C or S
PKPXXAPTQLSAISVLYLDDSSNVILKNYQNMVVRAXG

SEQ ID NO: 7415 - protein, 39 aa, Artificial Sequence
  Non-cyclic GFR-binding peptide
  MOD_RES (4), (5), (36), (38): Xaa is C or S
ASPXXVSQDLSAISILYLIGKTPKILKNYQMIVKSXKXS

SEQ ID NO: 7416 - protein, 35 aa, Artificial Sequence
  Non-cyclic GFR-binding peptide
  MOD_RES (2), (3): Xaa is C or S
  MOD_RES (17), (18), (19), (20), (21): Xaa is A or G
  MOD_RES (22), (23), (24), (25): Xaa is A or G or is absent
AXXAPTKLNAISVLYFXXXXXXXXXLKKYRNMVVK

SEQ ID NO: 7417 - protein, 33 aa, Artificial Sequence
  Non-cyclic GFR-binding peptide
  MOD_RES (2), (3): Xaa is C or S
AXXVPTELSATSMLYYDENEKVVLRKHRDMVVE

SEQ ID NO: 7418 - protein, 32 aa, Artificial Sequence
  Non-cyclic GFR-binding peptide
  MOD_RES (14), (15), (16), (17), (18): Xaa is A or G
  MOD_RES (19), (20), (21), (22): Xaa is A or G or is absent
VPTELNAISMLYFXXXXXXXXXLKKYREMVVE

SEQ ID NO: 7419 - protein, 43 aa, Artificial Sequence
  Non-cyclic GFR-binding peptide
  MOD_RES (6), (7), (40), (42): Xaa is C or S
  MOD_RES (21), (22), (23), (24), (25): Xaa is A or G
  MOD_RES (26), (27), (28), (29): Xaa is A or G or is absent
ASASPXXVSQDLNAISILYFXXXXXXXXXLKKYRMIVKSXKXS

SEQ ID NO: 7420 - protein, 39 aa, Artificial Sequence
  Non-cyclic GFR-binding peptide
  MOD_RES (37), (39): Xaa is C or S
RPTQVQLSPISVLYKEIVRKKPIFLKYHYTLEDHLAXKX

SEQ ID NO: 7421 - protein, 38 aa, Artificial Sequence
  Non-cyclic GFR-binding peptide
  MOD_RES (4), (5), (38): Xaa is C or S
GKAXXVPTKLSAISVLYLDDMGVPTLKNYQEGMSVAEX

SEQ ID NO: 7422 - protein, 39 aa, Artificial Sequence
  Non-cyclic GFR-binding peptide
  MOD_RES (5), (6), (38): Xaa is C or S
VPKPXXAPTQLSAISVLYLDDSSNVILKNYQNMVVRAXG

SEQ ID NO: 7423 - protein, 41 aa, Artificial Sequence
  Non-cyclic GFR-binding peptide
  MOD_RES (5), (6), (40): Xaa is C or S
  MOD_RES (20), (21), (22), (23), (24): Xaa is A or G
  MOD_RES (25), (26), (27), (28): Xaa is A or G or is absent
VPKPXXAPTQLSAISVLYLXXXXXXXXXLKNYQNMVVRAXG

SEQ ID NO: 7424 - protein, 36 aa, Artificial Sequence
  Non-cyclic GFR-binding peptide
  MOD_RES (33), (35): Xaa is C or S
  MOD_RES (14), (15), (16), (17), (18): Xaa is A or G
  MOD_RES (19), (20), (21), (22): Xaa is A or G or is absent
VPQDLNAISILYFXXXXXXXXXLKKYRMVVKSXKXS

SEQ ID NO: 7425 - protein, 36 aa, Artificial Sequence
  Non-cyclic GFR-binding peptide
  MOD_RES (2), (3), (36): Xaa is C or S
  MOD_RES (17), (18), (19), (20), (21): Xaa is A or G
  MOD_RES (22), (23), (24), (25): Xaa is A or G or is absent
PXXVSQDLSATSILYYXXXXXXXXXLRKHRMIVKSX

SEQ ID NO: 7426 - protein, 34 aa, Artificial Sequence
  Non-cyclic GFR-binding peptide
  MOD_RES (1), (32), (34): Xaa is C or S
XVSQDLNAISILYFIGKTPKILKKYRMIVKSXKX

SEQ ID NO: 7427 - protein, 34 aa, Artificial Sequence
  Non-cyclic GFR-binding peptide
  MOD_RES (14), (15), (16), (17), (18): Xaa is A or G
  MOD_RES (19), (20), (21), (22): Xaa is A or G or is absent
VPTKLSAISVLYLXXXXXXXXXLKNYQEGMSVAE

SEQ ID NO: 7428 - protein, 40 aa, Artificial Sequence
  Non-cyclic GFR-binding peptide
  MOD_RES (3), (4), (37), (39): Xaa is C or S
  MOD_RES (18), (19), (20), (21), (22): Xaa is A or G
  MOD_RES (23), (24), (25), (26): Xaa is A or G or is absent
SPXXVPQDLSAISILYLXXXXXXXXXLKNYQMVVKSXKXS

SEQ ID NO: 7429 - protein, 35 aa, Artificial Sequence
  Non-cyclic GFR-binding peptide
  MOD_RES (2), (3), (35): Xaa is C or S
AXXVPTELSPISMLYKDEYDKVVLKYHYEMVVEGX

SEQ ID NO: 7430 - protein, 44 aa, Artificial Sequence
  Non-cyclic GFR-binding peptide
  MOD_RES (6), (7), (41), (43): Xaa is C or S
  MOD_RES (21), (22), (23), (24), (25): Xaa is A or G
  MOD_RES (26), (27), (28), (29): Xaa is A or G or is absent
YVPKPXXAPTKLSAISVLYLXXXXXXXXXLKNYQNMVVRSXGXH

SEQ ID NO: 7431 - protein, 34 aa, Artificial Sequence
  Non-cyclic GFR-binding peptide
  MOD_RES (14), (15), (16), (17), (18): Xaa is A or G
  MOD_RES (19), (20), (21), (22): Xaa is A or G or is absent
VPTKLSATSVLYYXXXXXXXXXLRKHREGMSVAE

SEQ ID NO: 7432 - protein, 38 aa, Artificial Sequence
  Non-cyclic GFR-binding peptide
  MOD_RES (3), (4), (37): Xaa is C or S
  MOD_RES (18), (19), (20), (21), (22): Xaa is A or G
  MOD_RES (23), (24), (25), (26): Xaa is A or G or is absent
SPXXVPQDLNAISILYFXXXXXXXXXLKKYRMVVKSXK

SEQ ID NO: 7433 - protein, 39 aa, Artificial Sequence
  Non-cyclic GFR-binding peptide
  MOD_RES (5), (6): Xaa is C or S
  MOD_RES (20), (21), (22), (23), (24): Xaa is A or G
  MOD_RES (25), (26), (27), (28): Xaa is A or G or is absent
VPKPXXAPTKLSATSVLYYXXXXXXXXXLRKHRNMVVRS

SEQ ID NO: 7434 - protein, 37 aa, Artificial Sequence
  Non-cyclic GFR-binding peptide
  MOD_RES (3), (4), (36): Xaa is C or S
KPXXAPTKLSAISVLYLDDSSNVILKNYQNMVVRSXG

SEQ ID NO: 7435 - protein, 33 aa, Artificial Sequence
  Non-cyclic GFR-binding peptide
  MOD_RES (32), (32): Xaa is C or S
VPTELSATSMLYYDEYDKVVLRKHREMVVEGXG

SEQ ID NO: 7436 - protein, 40 aa, Artificial Sequence
  Non-cyclic GFR-binding peptide
  MOD_RES (1), (2), (37), (39): Xaa is C or S
  MOD_RES (16), (17), (18), (19), (20): Xaa is A or G
  MOD_RES (21), (22), (23), (24): Xaa is A or G or is absent
XXVPTKLNAISVLYFXXXXXXXXXLKKYREGMSVAEXGXR

SEQ ID NO: 7437 - protein, 39 aa, Artificial Sequence
  Non-cyclic GFR-binding peptide
  MOD_RES (5), (6), (39): Xaa is C or S
  MOD_RES (20), (21), (22), (23), (24): Xaa is A or G
  MOD_RES (25), (26), (27), (28): Xaa is A or G or is absent
SASPXXVSQDLSPISILYKXXXXXXXXXLKYHYMIVKSX

SEQ ID NO: 7438 - protein, 36 aa, Artificial Sequence
  Non-cyclic GFR-binding peptide
  MOD_RES (3), (4): Xaa is C or S
  MOD_RES (18), (19), (20), (21), (22): Xaa is A or G
  MOD_RES (23), (24), (25), (26): Xaa is A or G or is absent
KPXXAPTQLSPISVLYKXXXXXXXXXLKYHYNMVVR

SEQ ID NO: 7439 - protein, 38 aa, Artificial Sequence
  Non-cyclic GFR-binding peptide
  MOD_RES (1), (35), (37): Xaa is C or S
  MOD_RES (15), (16), (17), (18), (19): Xaa is A or G
  MOD_RES (20), (21), (22), (23): Xaa is A or G or is absent
XVPTELSPISMLYKXXXXXXXXXLKYHYEMVVEGXGXR

SEQ ID NO: 7440 - protein, 38 aa, Artificial Sequence
  Non-cyclic GFR-binding peptide
  MOD_RES (37), (37): Xaa is C or S
RPTQVQLSATSVLYYEIVRKKPIFLRKHRTLEDHLAXK

SEQ ID NO: 7441 - protein, 34 aa, Artificial Sequence
  Non-cyclic GFR-binding peptide
  MOD_RES (1), (2): Xaa is C or S
  MOD_RES (16), (17), (18), (19), (20): Xaa is A or G
  MOD_RES (21), (22), (23), (24): Xaa is A or G or is absent
XXVPQDLSAISILYLXXXXXXXXXLKNYQMVVKS

SEQ ID NO: 7442 - protein, 35 aa, Artificial Sequence
  Non-cyclic GFR-binding peptide
  MOD_RES (4), (5): Xaa is C or S
ASPXXVPQDLSATSILYYVGRTPKVLRKHRMVVKS

SEQ ID NO: 7443 - protein, 40 aa, Artificial Sequence
  Non-cyclic GFR-binding peptide
  MOD_RES (5), (6), (39): Xaa is C or S
  MOD_RES (20), (21), (22), (23), (24): Xaa is A or G
  MOD_RES (25), (26), (27), (28): Xaa is A or G or is absent
SASPXXVSQDLSPISILYKXXXXXXXXXLKYHYMIVKSXK

SEQ ID NO: 7444 - protein, 39 aa, Artificial Sequence
  Non-cyclic GFR-binding peptide
  MOD_RES (5), (6), (39): Xaa is C or S
  MOD_RES (20), (21), (22), (23), (24): Xaa is A or G
  MOD_RES (25), (26), (27), (28): Xaa is A or G or is absent
SAAPXXVPQALNAISILYFXXXXXXXXXLKKYRMIVRSX

SEQ ID NO: 7445 - protein, 39 aa, Artificial Sequence
  Non-cyclic GFR-binding peptide
  MOD_RES (6), (7): Xaa is C or S
  MOD_RES (21), (22), (23), (24), (25): Xaa is A or G
  MOD_RES (26), (27), (28), (29): Xaa is A or G or is absent
ASASPXXVSQDLSPISILYKXXXXXXXXXLKYHYMIVKS

SEQ ID NO: 7446 - protein, 37 aa, Artificial Sequence
  Non-cyclic GFR-binding peptide
  MOD_RES (4), (5), (36): Xaa is C or S
ASPXXVSQDLSPISILYKIGKTPKILKYHYMIVKSXK

SEQ ID NO: 7447 - protein, 34 aa, Artificial Sequence
  Non-cyclic GFR-binding peptide
  MOD_RES (1), (2), (33): Xaa is C or S
XXVSQDLSAISILYLIGKTPKILKNYQMIVKSXK

SEQ ID NO: 7448 - protein, 36 aa, Artificial Sequence
  Non-cyclic GFR-binding peptide
  MOD_RES (3), (4): Xaa is C or S
  MOD_RES (18), (19), (20), (21), (22): Xaa is A or G
  MOD_RES (23), (24), (25), (26): Xaa is A or G or is absent
APXXVPQALSATSILYYXXXXXXXXXLRKHRMIVRS

SEQ ID NO: 7449 - protein, 41 aa, Artificial Sequence
  Non-cyclic GFR-binding peptide
  MOD_RES (6), (7), (39), (41): Xaa is C or S
YVPKPXXAPTKLSAISVLYLDDSSNVILKNYQNMVVRSXGX

SEQ ID NO: 7450 - protein, 38 aa, Artificial Sequence
  Non-cyclic GFR-binding peptide
  MOD_RES (6), (7), (38): Xaa is C or S
ASASPXXVSQDLSAISILYLIGKTPKILKNYQMIVKSX

SEQ ID NO: 7451 - protein, 35 aa, Artificial Sequence
  Non-cyclic GFR-binding peptide
  MOD_RES (2), (3), (35): Xaa is C or S
AXXAPTKLSPISVLYKDSSNNVILKYHYNMVVKAX

SEQ ID NO: 7452 - protein, 38 aa, Artificial Sequence
  Non-cyclic GFR-binding peptide
  MOD_RES (4), (5), (36), (38): Xaa is C or S
ASPXXVPQDLSAISILYLVGRTPKVLKNYQMVVKSXKX

SEQ ID NO: 7453 - protein, 41 aa, Artificial Sequence
  Non-cyclic GFR-binding peptide
  MOD_RES (6), (7), (39), (41): Xaa is C or S
YVPKPXXAPTKLSPISVLYKDDSSNVILKYHYNMVVRSXGX

SEQ ID NO: 7454 - protein, 38 aa, Artificial Sequence
  Non-cyclic GFR-binding peptide
  MOD_RES (36), (38): Xaa is C or S
  MOD_RES (15), (16), (17), (18), (19): Xaa is A or G
  MOD_RES (20), (21), (22), (23): Xaa is A or G or is absent
PTQVQLSAISVLYLXXXXXXXXXLKNYQTLEDHLAXKX

SEQ ID NO: 7455 - protein, 36 aa, Artificial Sequence
  Non-cyclic GFR-binding peptide
  MOD_RES (2), (3), (36): Xaa is C or S
  MOD_RES (17), (18), (19), (20), (21): Xaa is A or G
  MOD_RES (22), (23), (24), (25): Xaa is A or G or is absent
PXXVSQDLSAISILYLXXXXXXXXXLKNYQMIVKSX

SEQ ID NO: 7456 - protein, 42 aa, Artificial Sequence
  Non-cyclic GFR-binding peptide
  MOD_RES (6), (7), (40), (42): Xaa is C or S
  MOD_RES (21), (22), (23), (24), (25): Xaa is A or G
  MOD_RES (26), (27), (28), (29): Xaa is A or G or is absent
ASASPXXVPQDLSPISILYKXXXXXXXXXLKYHYMVVKSXKX

SEQ ID NO: 7457 - protein, 40 aa, Artificial Sequence
  Non-cyclic GFR-binding peptide
  MOD_RES (4), (5), (39): Xaa is C or S
  MOD_RES (19), (20), (21), (22), (23): Xaa is A or G
  MOD_RES (24), (25), (26), (27): Xaa is A or G or is absent
PKPXXAPTKLSATSVLYYXXXXXXXXXLRKHRNMVVRSXG

SEQ ID NO: 7458 - protein, 40 aa, Artificial Sequence
  Non-cyclic GFR-binding peptide
  MOD_RES (5), (6), (39): Xaa is C or S
  MOD_RES (20), (21), (22), (23), (24): Xaa is A or G
  MOD_RES (25), (26), (27), (28): Xaa is A or G or is absent
SASPXXVPQDLSAISILYLXXXXXXXXXLKNYQMVVKSXK

SEQ ID NO: 7459 - protein, 37 aa, Artificial Sequence
  Non-cyclic GFR-binding peptide
  MOD_RES (3), (4), (36): Xaa is C or S
KAXXVPTELNAISMLYFDEYDKVVLKKYREMVVEGXG

SEQ ID NO: 7460 - protein, 39 aa, Artificial Sequence
  Non-cyclic GFR-binding peptide
  MOD_RES (5), (6): Xaa is C or S
  MOD_RES (20), (21), (22), (23), (24): Xaa is A or G
  MOD_RES (25), (26), (27), (28): Xaa is A or G or is absent
IPKAXXVPTELSPISMLYKXXXXXXXXXLKYHYDMVVEG

SEQ ID NO: 7461 - protein, 34 aa, Artificial Sequence
  Non-cyclic GFR-binding peptide
  MOD_RES (33), (33): Xaa is C or S
  MOD_RES (14), (15), (16), (17), (18): Xaa is A or G
  MOD_RES (19), (20), (21), (22): Xaa is A or G or is absent
VSQDLNAISILYFXXXXXXXXXLKKYRMIVKSXK

SEQ ID NO: 7462 - protein, 39 aa, Artificial Sequence
  Non-cyclic GFR-binding peptide
  MOD_RES (6), (7), (39): Xaa is C or S
TVPKPXXAPTQLSATSVLYYDDSSNVILRKHRNMVVRAX

SEQ ID NO: 7463 - protein, 37 aa, Artificial Sequence
  Non-cyclic GFR-binding peptide
  MOD_RES (2), (3), (34), (36): Xaa is C or S
PXXVPQDLSAISILYLVGRTPKVLKNYQMVVKSXKXS

SEQ ID NO: 7464 - protein, 43 aa, Artificial Sequence
  Non-cyclic GFR-binding peptide
  MOD_RES (4), (5), (40), (42): Xaa is C or S
  MOD_RES (19), (20), (21), (22), (23): Xaa is A or G
  MOD_RES (24), (25), (26), (27): Xaa is A or G or is absent
GKAXXVPTKLSAISVLYLXXXXXXXXXLKNYQEGMSVAEXGXR

SEQ ID NO: 7465 - protein, 41 aa, Artificial Sequence
  Non-cyclic GFR-binding peptide
  MOD_RES (6), (7), (39), (41): Xaa is C or S
KIPKAXXVPTELSATSMLYYDENEKVVLRKHRDMVVEGXGX

SEQ ID NO: 7466 - protein, 42 aa, Artificial Sequence
  Non-cyclic GFR-binding peptide
  MOD_RES (5), (6), (40), (42): Xaa is C or S
  MOD_RES (20), (21), (22), (23), (24): Xaa is A or G
  MOD_RES (25), (26), (27), (28): Xaa is A or G or is absent
VPKPXXAPTKLSATSVLYYXXXXXXXXXLRKHRNMVVRSXGX

SEQ ID NO: 7467 - protein, 36 aa, Artificial Sequence
  Non-cyclic GFR-binding peptide
  MOD_RES (2), (36): Xaa is C or S
  MOD_RES (16), (17), (18), (19), (20): Xaa is A or G
  MOD_RES (21), (22), (23), (24): Xaa is A or G or is absent
TXAPTKLSAISVLYLXXXXXXXXXLKNYQNMVVRSX

SEQ ID NO: 7468 - protein, 41 aa, Artificial Sequence
  Non-cyclic GFR-binding peptide
  MOD_RES (4), (41): Xaa is C or S
  MOD_RES (20), (21), (22), (23), (24): Xaa is A or G
  MOD_RES (25), (26), (27), (28): Xaa is A or G or is absent
NVQXRPTQVQLSAISVLYLXXXXXXXXXLKNYQTLEDHLAX

SEQ ID NO: 7469 - protein, 37 aa, Artificial Sequence
  Non-cyclic GFR-binding peptide
  MOD_RES (2), (3), (36): Xaa is C or S
  MOD_RES (17), (18), (19), (20), (21): Xaa is A or G
  MOD_RES (22), (23), (24), (25): Xaa is A or G or is absent
PXXVSQDLSATSILYYXXXXXXXXXLRKHRMIVKSXK

SEQ ID NO: 7470 - protein, 34 aa, Artificial Sequence
  Non-cyclic GFR-binding peptide
  MOD_RES (34), (34): Xaa is C or S
  MOD_RES (14), (15), (16), (17), (18): Xaa is A or G
  MOD_RES (19), (20), (21), (22): Xaa is A or G or is absent
APTKLSAISVLYLXXXXXXXXXLKNYQNMVVKAX

SEQ ID NO: 7471 - protein, 35 aa, Artificial Sequence
  Non-cyclic GFR-binding peptide
  MOD_RES (1), (2): Xaa is C or S
  MOD_RES (16), (17), (18), (19), (20): Xaa is A or G
  MOD_RES (21), (22), (23), (24): Xaa is A or G or is absent
XXVPTELNAISMLYFXXXXXXXXXLKKYREMVVEG

SEQ ID NO: 7472 - protein, 39 aa, Artificial Sequence
  Non-cyclic GFR-binding peptide
  MOD_RES (3), (4), (38): Xaa is C or S
  MOD_RES (18), (19), (20), (21), (22): Xaa is A or G
  MOD_RES (23), (24), (25), (26): Xaa is A or G or is absent
KAXXVPTELNAISMLYFXXXXXXXXXLKKYRDMVVEGXG

SEQ ID NO: 7473 - protein, 37 aa, Artificial Sequence
  Non-cyclic GFR-binding peptide
  MOD_RES (4), (36): Xaa is C or S
KPTXAPTKLSATSVLYYDDSSNVILRKHRNMVVRSXG

SEQ ID NO: 7474 - protein, 37 aa, Artificial Sequence
  Non-cyclic GFR-binding peptide
  MOD_RES (4), (5): Xaa is C or S
  MOD_RES (19), (20), (21), (22), (23): Xaa is A or G
  MOD_RES (24), (25), (26), (27): Xaa is A or G or is absent
ASPXXVPQDLSATSILYYXXXXXXXXXLRKHRMVVKS

SEQ ID NO: 7475 - protein, 43 aa, Artificial Sequence
  Non-cyclic GFR-binding peptide
  MOD_RES (6), (40), (42): Xaa is C or S
  MOD_RES (20), (21), (22), (23), (24): Xaa is A or G
  MOD_RES (25), (26), (27), (28): Xaa is A or G or is absent
VTKPTXAPTKLSATSVLYYXXXXXXXXXLRKHRNMVVRSXGXH

SEQ ID NO: 7476 - protein, 37 aa, Artificial Sequence
  Non-cyclic GFR-binding peptide
  MOD_RES (2), (3), (35), (37): Xaa is C or S
PXXAPTKLSATSVLYYDDSSNVILRKHRNMVVRSXGX

SEQ ID NO: 7477 - protein, 33 aa, Artificial Sequence
  Non-cyclic GFR-binding peptide
  MOD_RES (2), (3): Xaa is C or S
PXXAPTKLSATSVLYYDDSSNVILRKHRNMVVR

SEQ ID NO: 7478 - protein, 37 aa, Artificial Sequence
  Non-cyclic GFR-binding peptide
  MOD_RES (3), (4): Xaa is C or S
  MOD_RES (18), (19), (20), (21), (22): Xaa is A or G
  MOD_RES (23), (24), (25), (26): Xaa is A or G or is absent
KPXXAPTQLSATSVLYYXXXXXXXXXLRKHRNMVVRA

SEQ ID NO: 7479 - protein, 36 aa, Artificial Sequence
  Non-cyclic GFR-binding peptide
  MOD_RES (4), (36): Xaa is C or S
KPTXAPTKLSAISVLYLDDSSNVILKNYQNMVVRSX

SEQ ID NO: 7480 - protein, 35 aa, Artificial Sequence
  Non-cyclic GFR-binding peptide
  MOD_RES (2), (3): Xaa is C or S
  MOD_RES (17), (18), (19), (20), (21): Xaa is A or G
  MOD_RES (22), (23), (24), (25): Xaa is A or G or is absent
PXXVSQDLNAISILYFXXXXXXXXXLKKYRMIVKS

SEQ ID NO: 7481 - protein, 36 aa, Artificial Sequence
  Non-cyclic GFR-binding peptide
  MOD_RES (34), (36): Xaa is C or S
  MOD_RES (14), (15), (16), (17), (18): Xaa is A or G
  MOD_RES (19), (20), (21), (22): Xaa is A or G or is absent
APTQLSATSVLYYXXXXXXXXXLRKHRNMVVRAXGX

SEQ ID NO: 7482 - protein, 42 aa, Artificial Sequence
  Non-cyclic GFR-binding peptide
  MOD_RES (7), (39), (41): Xaa is C or S
HVTKPTXAPTKLSATSVLYYDDSSNVILRKHRNMVVRSXGXH

SEQ ID NO: 7483 - protein, 34 aa, Artificial Sequence
  Non-cyclic GFR-binding peptide
  MOD_RES (16), (17), (18), (19), (20): Xaa is A or G
  MOD_RES (21), (22), (23), (24): Xaa is A or G or is absent
RPTQVQLNAISVLYFXXXXXXXXXLKKYRTLEDH

SEQ ID NO: 7484 - protein, 35 aa, Artificial Sequence
  Non-cyclic GFR-binding peptide
  MOD_RES (3), (4): Xaa is C or S
KAXXVPTELSATSMLYYDEYDKVVLRKHREMVVEG

SEQ ID NO: 7485 - protein, 37 aa, Artificial Sequence
  Non-cyclic GFR-binding peptide
  MOD_RES (1), (35), (37): Xaa is C or S
  MOD_RES (15), (16), (17), (18), (19): Xaa is A or G
  MOD_RES (20), (21), (22), (23): Xaa is A or G or is absent
XAPTQLSPISVLYKXXXXXXXXXLKYHYNMVVRAXGX

SEQ ID NO: 7486 - protein, 38 aa, Artificial Sequence
  Non-cyclic GFR-binding peptide
  MOD_RES (2), (3), (35), (37): Xaa is C or S
AXXAPTKLSPISVLYKDSSNNVILKYHYNMVVKAXGXH

SEQ ID NO: 7487 - protein, 34 aa, Artificial Sequence
  Non-cyclic GFR-binding peptide
  MOD_RES (31), (33): Xaa is C or S
VPQALSAISILYLVGRKPKVLKNYQMIVRSXKXS

SEQ ID NO: 7488 - protein, 37 aa, Artificial Sequence
  Non-cyclic GFR-binding peptide
  MOD_RES (5), (5): Xaa is C or S
  MOD_RES (19), (20), (21), (22), (23): Xaa is A or G
  MOD_RES (24), (25), (26), (27): Xaa is A or G or is absent
TKPTXAPTKLSAISVLYLXXXXXXXXXLKNYQNMVVR

SEQ ID NO: 7489 - protein, 41 aa, Artificial Sequence
  Non-cyclic GFR-binding peptide
  MOD_RES (2), (3), (38), (40): Xaa is C or S
  MOD_RES (17), (18), (19), (20), (21): Xaa is A or G
  MOD_RES (22), (23), (24), (25): Xaa is A or G or is absent
AXXVPTKLSATSVLYYXXXXXXXXXLRKHREGMSVAEXGXR

SEQ ID NO: 7490 - protein, 39 aa, Artificial Sequence
  Non-cyclic GFR-binding peptide
  MOD_RES (4), (5), (39): Xaa is C or S
  MOD_RES (19), (20), (21), (22), (23): Xaa is A or G
  MOD_RES (24), (25), (26), (27): Xaa is A or G or is absent
PKAXXVPTELSPISMLYKXXXXXXXXXLKYHYDMVVEGX

SEQ ID NO: 7491 - protein, 38 aa, Artificial Sequence
  Non-cyclic GFR-binding peptide
  MOD_RES (3), (35), (37): Xaa is C or S
PTXAPTKLSATSVLYYDDSSNVILRKHRNMVVRSXGXH

SEQ ID NO: 7492 - protein, 43 aa, Artificial Sequence
  Non-cyclic GFR-binding peptide
  MOD_RES (3), (40), (42): Xaa is C or S
  MOD_RES (19), (20), (21), (22), (23): Xaa is A or G
  MOD_RES (24), (25), (26), (27): Xaa is A or G or is absent
VQXRPTQVQLSATSVLYYXXXXXXXXXLRKHRTLEDHLAXKXE

SEQ ID NO: 7493 - protein, 35 aa, Artificial Sequence
  Non-cyclic GFR-binding peptide
  MOD_RES (32), (34): Xaa is C or S
APTKLSPISVLYKDSSNNVILKYHYNMVVKAXGXH

SEQ ID NO: 7494 - protein, 34 aa, Artificial Sequence
  Non-cyclic GFR-binding peptide
  MOD_RES (1), (2), (33): Xaa is C or S
XXVSQDLNAISILYFIGKTPKILKKYRMIVKSXK

SEQ ID NO: 7495 - protein, 34 aa, Artificial Sequence
  Non-cyclic GFR-binding peptide
  MOD_RES (2), (3): Xaa is C or S
AXXAPTKLSPISVLYKDSSNNVILKYHYNMVVKA

SEQ ID NO: 7496 - protein, 34 aa, Artificial Sequence
  Non-cyclic GFR-binding peptide
  MOD_RES (1), (33): Xaa is C or S
XAPTKLNAISVLYFDSSNNVILKKYRNMVVKAXG

SEQ ID NO: 7497 - protein, 37 aa, Artificial Sequence
  Non-cyclic GFR-binding peptide
  MOD_RES (4), (4): Xaa is C or S
  MOD_RES (18), (19), (20), (21), (22): Xaa is A or G
  MOD_RES (23), (24), (25), (26): Xaa is A or G or is absent
KPTXAPTKLSATSVLYYXXXXXXXXXLRKHRNMVVRS

SEQ ID NO: 7498 - protein, 38 aa, Artificial Sequence
  Non-cyclic GFR-binding peptide
  MOD_RES (5), (37): Xaa is C or S
TKPTXAPTKLSAISVLYLDDSSNVILKNYQNMVVRSXG

SEQ ID NO: 7499 - protein, 40 aa, Artificial Sequence
  Non-cyclic GFR-binding peptide
  MOD_RES (6), (7), (38), (40): Xaa is C or S
ASASPXXVSQDLSATSILYYIGKTPKILRKHRMIVKSXKX

SEQ ID NO: 7500 - protein, 39 aa, Artificial Sequence
  Non-cyclic GFR-binding peptide
  MOD_RES (3), (4), (36), (38): Xaa is C or S
KPXXAPTQLSAISVLYLDDSSNVILKNYQNMVVRAXGXH

SEQ ID NO: 7501 - protein, 41 aa, Artificial Sequence
  Non-cyclic GFR-binding peptide
  MOD_RES (3), (4), (38), (40): Xaa is C or S
  MOD_RES (18), (19), (20), (21), (22): Xaa is A or G
  MOD_RES (23), (24), (25), (26): Xaa is A or G or is absent
KPXXAPTKLSATSVLYYXXXXXXXXXLRKHRNMVVRSXGXH

SEQ ID NO: 7502 - protein, 39 aa, Artificial Sequence
  Non-cyclic GFR-binding peptide
  MOD_RES (3), (3): Xaa is C or S
  MOD_RES (19), (20), (21), (22), (23): Xaa is A or G
  MOD_RES (24), (25), (26), (27): Xaa is A or G or is absent
VQXRPTQVQLSPISVLYKXXXXXXXXXLKYHYTLEDHLA

SEQ ID NO: 7503 - protein, 41 aa, Artificial Sequence
  Non-cyclic GFR-binding peptide
  MOD_RES (7), (41): Xaa is C or S
  MOD_RES (21), (22), (23), (24), (25): Xaa is A or G
  MOD_RES (26), (27), (28), (29): Xaa is A or G or is absent
HVTKPTXAPTKLSAISVLYLXXXXXXXXXLKNYQNMVVRSX

SEQ ID NO: 7504 - protein, 38 aa, Artificial Sequence
  Non-cyclic GFR-binding peptide
  MOD_RES (3), (4), (38): Xaa is C or S
  MOD_RES (18), (19), (20), (21), (22): Xaa is A or G
  MOD_RES (23), (24), (25), (26): Xaa is A or G or is absent
KAXXVPTELSATSMLYYXXXXXXXXXLRKHREMVVEGX

SEQ ID NO: 7505 - protein, 40 aa, Artificial Sequence
  Non-cyclic GFR-binding peptide
  MOD_RES (5), (6), (40): Xaa is C or S
  MOD_RES (20), (21), (22), (23), (24): Xaa is A or G
  MOD_RES (25), (26), (27), (28): Xaa is A or G or is absent
IPKAXXVPTELSATSMLYYXXXXXXXXXLRKHREMVVEGX

SEQ ID NO: 7506 - protein, 34 aa, Artificial Sequence
  Non-cyclic GFR-binding peptide
  MOD_RES (3), (4): Xaa is C or S
KAXXVPTELSPISMLYKDEYDKVVLKYHYEMVVE

SEQ ID NO: 7507 - protein, 40 aa, Artificial Sequence
  Non-cyclic GFR-binding peptide
  MOD_RES (6), (7): Xaa is C or S
  MOD_RES (21), (22), (23), (24), (25): Xaa is A or G
  MOD_RES (26), (27), (28), (29): Xaa is A or G or is absent
SIPKAXXVPTELNAISMLYFXXXXXXXXXLKKYREMVVEG

SEQ ID NO: 7508 - protein, 33 aa, Artificial Sequence
  Non-cyclic GFR-binding peptide
  MOD_RES (1), (1): Xaa is C or S
  MOD_RES (15), (16), (17), (18), (19): Xaa is A or G
  MOD_RES (20), (21), (22), (23): Xaa is A or G or is absent
XAPTKLSAISVLYLXXXXXXXXXLKNYQNMVVR

SEQ ID NO: 7509 - protein, 33 aa, Artificial Sequence
  Non-cyclic GFR-binding peptide
  MOD_RES (1), (1): Xaa is C or S
  MOD_RES (15), (16), (17), (18), (19): Xaa is A or G
  MOD_RES (20), (21), (22), (23): Xaa is A or G or is absent
XAPTKLSAISVLYLXXXXXXXXXLKNYQNMVVK

SEQ ID NO: 7510 - protein, 38 aa, Artificial Sequence
  Non-cyclic GFR-binding peptide
  MOD_RES (2), (3), (36), (38): Xaa is C or S
  MOD_RES (17), (18), (19), (20), (21): Xaa is A or G
  MOD_RES (22), (23), (24), (25): Xaa is A or G or is absent
PXXVPQALSATSILYYXXXXXXXXXLRKHRMIVRSXKX

SEQ ID NO: 7511 - protein, 39 aa, Artificial Sequence
  Non-cyclic GFR-binding peptide
  MOD_RES (2), (3), (36), (38): Xaa is C or S
  MOD_RES (17), (18), (19), (20), (21): Xaa is A or G
  MOD_RES (22), (23), (24), (25): Xaa is A or G or is absent
PXXVPQDLSATSILYYXXXXXXXXXLRKHRMVVKSXKXS

SEQ ID NO: 7512 - protein, 38 aa, Artificial Sequence
  Non-cyclic GFR-binding peptide
  MOD_RES (5), (6), (38): Xaa is C or S
VPKPXXAPTKLSATSVLYYDDSSNVILRKHRNMVVRSX

SEQ ID NO: 7513 - protein, 37 aa, Artificial Sequence
  Non-cyclic GFR-binding peptide
  MOD_RES (2), (3), (37): Xaa is C or S
  MOD_RES (17), (18), (19), (20), (21): Xaa is A or G
  MOD_RES (22), (23), (24), (25): Xaa is A or G or is absent
AXXAPTKLSPISVLYKXXXXXXXXXLKYHYNMVVKAX

SEQ ID NO: 7514 - protein, 33 aa, Artificial Sequence
  Non-cyclic GFR-binding peptide
  MOD_RES (15), (16), (17), (18), (19): Xaa is A or G
  MOD_RES (20), (21), (22), (23): Xaa is A or G or is absent
PTQVQLSATSVLYYXXXXXXXXXLRKHRTLEDH

SEQ ID NO: 7515 - protein, 39 aa, Artificial Sequence
  Non-cyclic GFR-binding peptide
  MOD_RES (37), (39): Xaa is C or S
RPTQVQLSATSVLYYEIVRKKPIFLRKHRTLEDHLAXKX

SEQ ID NO: 7516 - protein, 36 aa, Artificial Sequence
  Non-cyclic GFR-binding peptide
  MOD_RES (3), (3): Xaa is C or S
  MOD_RES (17), (18), (19), (20), (21): Xaa is A or G
  MOD_RES (22), (23), (24), (25): Xaa is A or G or is absent
PTXAPTKLSATSVLYYXXXXXXXXXLRKHRNMVVRS

SEQ ID NO: 7517 - protein, 38 aa, Artificial Sequence
  Non-cyclic GFR-binding peptide
  MOD_RES (2), (3), (36), (38): Xaa is C or S
  MOD_RES (17), (18), (19), (20), (21): Xaa is A or G
  MOD_RES (22), (23), (24), (25): Xaa is A or G or is absent
PXXVSQDLNAISILYFXXXXXXXXXLKKYRMIVKSXKX

SEQ ID NO: 7518 - protein, 37 aa, Artificial Sequence
  Non-cyclic GFR-binding peptide
  MOD_RES (1), (35), (37): Xaa is C or S
  MOD_RES (15), (16), (17), (18), (19): Xaa is A or G
  MOD_RES (20), (21), (22), (23): Xaa is A or G or is absent
XAPTKLSATSVLYYXXXXXXXXXLRKHRNMVVRSXGX

SEQ ID NO: 7519 - protein, 36 aa, Artificial Sequence
  Non-cyclic GFR-binding peptide
  MOD_RES (3), (4), (35): Xaa is C or S
SPXXVSQDLSATSILYYIGKTPKILRKHRMIVKSXK

SEQ ID NO: 7520 - protein, 37 aa, Artificial Sequence
  Non-cyclic GFR-binding peptide
  MOD_RES (36), (36): Xaa is C or S
  MOD_RES (15), (16), (17), (18), (19): Xaa is A or G
  MOD_RES (20), (21), (22), (23): Xaa is A or G or is absent
PTQVQLSAISVLYLXXXXXXXXXLKNYQTLEDHLAXK

SEQ ID NO: 7521 - protein, 39 aa, Artificial Sequence
  Non-cyclic GFR-binding peptide
  MOD_RES (4), (5), (37), (39): Xaa is C or S
PKAXXVPTELNAISMLYFDEYDKVVLKKYREMVVEGXGX

SEQ ID NO: 7522 - protein, 43 aa, Artificial Sequence
  Non-cyclic GFR-binding peptide
  MOD_RES (5), (6), (40), (42): Xaa is C or S
  MOD_RES (20), (21), (22), (23), (24): Xaa is A or G
  MOD_RES (25), (26), (27), (28): Xaa is A or G or is absent
VPKAXXAPTKLSAISVLYLXXXXXXXXXLKNYQNMVVKAXGXH

SEQ ID NO: 7523 - protein, 37 aa, Artificial Sequence
  Non-cyclic GFR-binding peptide
  MOD_RES (34), (36): Xaa is C or S
  MOD_RES (14), (15), (16), (17), (18): Xaa is A or G
  MOD_RES (19), (20), (21), (22): Xaa is A or G or is absent
VPTELSPISMLYKXXXXXXXXXLKYHYEMVVEGXGXR

SEQ ID NO: 7524 - protein, 37 aa, Artificial Sequence
  Non-cyclic GFR-binding peptide
  MOD_RES (3), (4): Xaa is C or S
  MOD_RES (18), (19), (20), (21), (22): Xaa is A or G
  MOD_RES (23), (24), (25), (26): Xaa is A or G or is absent
KPXXAPTKLSATSVLYYXXXXXXXXXLRKHRNMVVRS

SEQ ID NO: 7525 - protein, 41 aa, Artificial Sequence
  Non-cyclic GFR-binding peptide
  MOD_RES (2), (39), (41): Xaa is C or S
  MOD_RES (18), (19), (20), (21), (22): Xaa is A or G
  MOD_RES (23), (24), (25), (26): Xaa is A or G or is absent
QXRPTQVQLNAISVLYFXXXXXXXXXLKKYRTLEDHLAXKX

SEQ ID NO: 7526 - protein, 41 aa, Artificial Sequence
  Non-cyclic GFR-binding peptide
  MOD_RES (6), (7), (39), (41): Xaa is C or S
KIPKAXXVPTELSPISMLYKDENEKVVLKYHYDMVVEGXGX

SEQ ID NO: 7527 - protein, 39 aa, Artificial Sequence
  Non-cyclic GFR-binding peptide
  MOD_RES (5), (5): Xaa is C or S
  MOD_RES (21), (22), (23), (24), (25): Xaa is A or G
  MOD_RES (26), (27), (28), (29): Xaa is A or G or is absent
RNVQXRPTQVQLSATSVLYYXXXXXXXXXLRKHRTLEDH

SEQ ID NO: 7528 - protein, 40 aa, Artificial Sequence
  Non-cyclic GFR-binding peptide
  MOD_RES (4), (5), (38), (40): Xaa is C or S
  MOD_RES (19), (20), (21), (22), (23): Xaa is A or G
  MOD_RES (24), (25), (26), (27): Xaa is A or G or is absent
ASPXXVPQDLSAISILYLXXXXXXXXXLKNYQMVVKSXKX

SEQ ID NO: 7529 - protein, 38 aa, Artificial Sequence
  Non-cyclic GFR-binding peptide
  MOD_RES (6), (7): Xaa is C or S
KIPKAXXVPTELSPISMLYKDENEKVVLKYHYDMVVEG

SEQ ID NO: 7530 - protein, 32 aa, Artificial Sequence
  Non-cyclic GFR-binding peptide
  MOD_RES (14), (15), (16), (17), (18): Xaa is A or G
  MOD_RES (19), (20), (21), (22): Xaa is A or G or is absent
VPQALSATSILYYXXXXXXXXXLRKHRMIVRS

SEQ ID NO: 7531 - protein, 37 aa, Artificial Sequence
  Non-cyclic GFR-binding peptide
  MOD_RES (2), (2): Xaa is C or S
  MOD_RES (18), (19), (20), (21), (22): Xaa is A or G
  MOD_RES (23), (24), (25), (26): Xaa is A or G or is absent
QXRPTQVQLSATSVLYYXXXXXXXXXLRKHRTLEDHL

SEQ ID NO: 7532 - protein, 37 aa, Artificial Sequence
  Non-cyclic GFR-binding peptide
  MOD_RES (2), (3), (36): Xaa is C or S
  MOD_RES (17), (18), (19), (20), (21): Xaa is A or G
  MOD_RES (22), (23), (24), (25): Xaa is A or G or is absent
PXXVPQALSAISILYLXXXXXXXXXLKNYQMIVRSXK

SEQ ID NO: 7533 - protein, 35 aa, Artificial Sequence
  Non-cyclic GFR-binding peptide
  MOD_RES (34), (34): Xaa is C or S
  MOD_RES (14), (15), (16), (17), (18): Xaa is A or G
  MOD_RES (19), (20), (21), (22): Xaa is A or G or is absent
APTQLSATSVLYYXXXXXXXXXLRKHRNMVVRAXG

SEQ ID NO: 7534 - protein, 31 aa, Artificial Sequence
  Non-cyclic GFR-binding peptide
APTKLSAISVLYLDDSSNVILKNYQNMVVRS

SEQ ID NO: 7535 - protein, 41 aa, Artificial Sequence
  Non-cyclic GFR-binding peptide
  MOD_RES (5), (5): Xaa is C or S
RNVQXRPTQVQLNAISVLYFEIVRKKPIFLKKYRTLEDHLA

SEQ ID NO: 7536 - protein, 38 aa, Artificial Sequence
  Non-cyclic GFR-binding peptide
  MOD_RES (1), (35), (37): Xaa is C or S
  MOD_RES (15), (16), (17), (18), (19): Xaa is A or G
  MOD_RES (20), (21), (22), (23): Xaa is A or G or is absent
XVPTELSATSMLYYXXXXXXXXXLRKHREMVVEGXGXR

SEQ ID NO: 7537 - protein, 35 aa, Artificial Sequence
  Non-cyclic GFR-binding peptide
  MOD_RES (1), (34): Xaa is C or S
  MOD_RES (15), (16), (17), (18), (19): Xaa is A or G
  MOD_RES (20), (21), (22), (23): Xaa is A or G or is absent
XVSQDLNAISILYFXXXXXXXXXLKKYRMIVKSXK

SEQ ID NO: 7538 - protein, 37 aa, Artificial Sequence
  Non-cyclic GFR-binding peptide
  MOD_RES (2), (3), (37): Xaa is C or S
  MOD_RES (17), (18), (19), (20), (21): Xaa is A or G
  MOD_RES (22), (23), (24), (25): Xaa is A or G or is absent
AXXVPTELNAISMLYFXXXXXXXXXLKKYRDMVVEGX

SEQ ID NO: 7539 - protein, 36 aa, Artificial Sequence
  Non-cyclic GFR-binding peptide
RPTQVQLSPISVLYKEIVRKKPIFLKYHYTLEDHLA

SEQ ID NO: 7540 - protein, 33 aa, Artificial Sequence
  Non-cyclic GFR-binding peptide
  MOD_RES (3), (3): Xaa is C or S
PTXAPTKLSAISVLYLDDSSNVILKNYQNMVVR

SEQ ID NO: 7541 - protein, 33 aa, Artificial Sequence
  Non-cyclic GFR-binding peptide
  MOD_RES (1), (2), (33): Xaa is C or S
XXVPQALSAISILYLVGRKPKVLKNYQMIVRSX

SEQ ID NO: 7542 - protein, 37 aa, Artificial Sequence
  Non-cyclic GFR-binding peptide
  MOD_RES (1), (2), (36): Xaa is C or S
  MOD_RES (16), (17), (18), (19), (20): Xaa is A or G
  MOD_RES (21), (22), (23), (24): Xaa is A or G or is absent
XXVPTELSATSMLYYXXXXXXXXXLRKHREMVVEGXG

SEQ ID NO: 7543 - protein, 37 aa, Artificial Sequence
  Non-cyclic GFR-binding peptide
  MOD_RES (2), (3), (37): Xaa is C or S
  MOD_RES (17), (18), (19), (20), (21): Xaa is A or G
  MOD_RES (22), (23), (24), (25): Xaa is A or G or is absent
PXXAPTQLSPISVLYKXXXXXXXXXLKYHYNMVVRAX

SEQ ID NO: 7544 - protein, 41 aa, Artificial Sequence
  Non-cyclic GFR-binding peptide
  MOD_RES (6), (7), (41): Xaa is C or S
  MOD_RES (21), (22), (23), (24), (25): Xaa is A or G
  MOD_RES (26), (27), (28), (29): Xaa is A or G or is absent
TVPKPXXAPTQLSAISVLYLXXXXXXXXXLKNYQNMVVRAX

SEQ ID NO: 7545 - protein, 36 aa, Artificial Sequence
  Non-cyclic GFR-binding peptide
  MOD_RES (3), (4), (36): Xaa is C or S
KPXXAPTQLSAISVLYLDDSSNVILKNYQNMVVRAX

SEQ ID NO: 7546 - protein, 36 aa, Artificial Sequence
  Non-cyclic GFR-binding peptide
  MOD_RES (3), (4): Xaa is C or S
  MOD_RES (18), (19), (20), (21), (22): Xaa is A or G
  MOD_RES (23), (24), (25), (26): Xaa is A or G or is absent
KAXXAPTKLNAISVLYFXXXXXXXXXLKKYRNMVVK

SEQ ID NO: 7547 - protein, 40 aa, Artificial Sequence
  Non-cyclic GFR-binding peptide
  MOD_RES (5), (6), (38), (40): Xaa is C or S
VPKPXXAPTQLSATSVLYYDDSSNVILRKHRNMVVRAXGX

SEQ ID NO: 7548 - protein, 34 aa, Artificial Sequence
  Non-cyclic GFR-binding peptide
  MOD_RES (1), (32), (34): Xaa is C or S
XVPQALSATSILYYVGRKPKVLRKHRMIVRSXKX

SEQ ID NO: 7549 - protein, 34 aa, Artificial Sequence
  Non-cyclic GFR-binding peptide
  MOD_RES (1), (32), (34): Xaa is C or S
XVPQDLNAISILYFVGRTPKVLKKYRMVVKSXKX

SEQ ID NO: 7550 - protein, 38 aa, Artificial Sequence
  Non-cyclic GFR-binding peptide
  MOD_RES (3), (4), (38): Xaa is C or S
  MOD_RES (18), (19), (20), (21), (22): Xaa is A or G
  MOD_RES (23), (24), (25), (26): Xaa is A or G or is absent
KPXXAPTKLSPISVLYKXXXXXXXXXLKYHYNMVVRSX

SEQ ID NO: 7551 - protein, 36 aa, Artificial Sequence
  Non-cyclic GFR-binding peptide
  MOD_RES (1), (1): Xaa is C or S
  MOD_RES (17), (18), (19), (20), (21): Xaa is A or G
  MOD_RES (22), (23), (24), (25): Xaa is A or G or is absent
XRPTQVQLSAISVLYLXXXXXXXXXLKNYQTLEDHL

SEQ ID NO: 7552 - protein, 37 aa, Artificial Sequence
  Non-cyclic GFR-binding peptide
  MOD_RES (1), (1): Xaa is C or S
  MOD_RES (17), (18), (19), (20), (21): Xaa is A or G
  MOD_RES (22), (23), (24), (25): Xaa is A or G or is absent
XRPTQVQLSAISVLYLXXXXXXXXXLKNYQTLEDHLA

SEQ ID NO: 7553 - protein, 42 aa, Artificial Sequence
  Non-cyclic GFR-binding peptide
  MOD_RES (5), (39), (41): Xaa is C or S
  MOD_RES (19), (20), (21), (22), (23): Xaa is A or G
  MOD_RES (24), (25), (26), (27): Xaa is A or G or is absent
TKPTXAPTKLSATSVLYYXXXXXXXXXLRKHRNMVVRSXGXH

SEQ ID NO: 7554 - protein, 36 aa, Artificial Sequence
  Non-cyclic GFR-binding peptide
  MOD_RES (1), (2), (33), (35): Xaa is C or S
XXVSQDLSPISILYKIGKTPKILKYHYMIVKSXKXS

SEQ ID NO: 7555 - protein, 38 aa, Artificial Sequence
  Non-cyclic GFR-binding peptide
  MOD_RES (2), (3), (38): Xaa is C or S
  MOD_RES (17), (18), (19), (20), (21): Xaa is A or G
  MOD_RES (22), (23), (24), (25): Xaa is A or G or is absent
AXXVPTKLSAISVLYLXXXXXXXXXLKNYQEGMSVAEX

SEQ ID NO: 7556 - protein, 34 aa, Artificial Sequence
  Non-cyclic GFR-binding peptide
  MOD_RES (3), (4): Xaa is C or S
KAXXAPTKLSPISVLYKDSSNNVILKYHYNMVVK

SEQ ID NO: 7557 - protein, 38 aa, Artificial Sequence
  Non-cyclic GFR-binding peptide
  MOD_RES (3), (3): Xaa is C or S
VQXRPTQVQLSATSVLYYEIVRKKPIFLRKHRTLEDHL

SEQ ID NO: 7558 - protein, 38 aa, Artificial Sequence
  Non-cyclic GFR-binding peptide
  MOD_RES (36), (38): Xaa is C or S
PTQVQLNAISVLYFEIVRKKPIFLKKYRTLEDHLAXKX

SEQ ID NO: 7559 - protein, 40 aa, Artificial Sequence
  Non-cyclic GFR-binding peptide
  MOD_RES (6), (38), (40): Xaa is C or S
VTKPTXAPTKLSATSVLYYDDSSNVILRKHRNMVVRSXGX

SEQ ID NO: 7560 - protein, 36 aa, Artificial Sequence
  Non-cyclic GFR-binding peptide
  MOD_RES (1), (2), (34), (36): Xaa is C or S
XXAPTKLSAISVLYLDDSSNVILKNYQNMVVRSXGX

SEQ ID NO: 7561 - protein, 43 aa, Artificial Sequence
  Non-cyclic GFR-binding peptide
  MOD_RES (7), (41), (43): Xaa is C or S
  MOD_RES (21), (22), (23), (24), (25): Xaa is A or G
  MOD_RES (26), (27), (28), (29): Xaa is A or G or is absent
HVTKPTXAPTKLSPISVLYKXXXXXXXXXLKYHYNMVVRSXGX

SEQ ID NO: 7562 - protein, 37 aa, Artificial Sequence
  Non-cyclic GFR-binding peptide
  MOD_RES (3), (4), (36): Xaa is C or S
KAXXAPTKLSAISVLYLDSSNNVILKNYQNMVVKAXG

SEQ ID NO: 7563 - protein, 40 aa, Artificial Sequence
  Non-cyclic GFR-binding peptide
  MOD_RES (5), (6), (40): Xaa is C or S
  MOD_RES (20), (21), (22), (23), (24): Xaa is A or G
  MOD_RES (25), (26), (27), (28): Xaa is A or G or is absent
VPKAXXAPTKLSPISVLYKXXXXXXXXXLKYHYNMVVKAX

SEQ ID NO: 7564 - protein, 33 aa, Artificial Sequence
  Non-cyclic GFR-binding peptide
  MOD_RES (1), (33): Xaa is C or S
XAPTQLSPISVLYKDDSSNVILKYHYNMVVRAX

SEQ ID NO: 7565 - protein, 38 aa, Artificial Sequence
  Non-cyclic GFR-binding peptide
  MOD_RES (2), (3), (36), (38): Xaa is C or S
AXXVPTKLSAISVLYLDDMGVPTLKNYQEGMSVAEXGX

SEQ ID NO: 7566 - protein, 31 aa, Artificial Sequence
  Non-cyclic GFR-binding peptide
  MOD_RES (31), (31): Xaa is C or S
VSQDLSATSILYYIGKTPKILRKHRMIVKSX

SEQ ID NO: 7567 - protein, 43 aa, Artificial Sequence
  Non-cyclic GFR-binding peptide
  MOD_RES (5), (42): Xaa is C or S
  MOD_RES (21), (22), (23), (24), (25): Xaa is A or G
  MOD_RES (26), (27), (28), (29): Xaa is A or G or is absent
RNVQXRPTQVQLNAISVLYFXXXXXXXXXLKKYRTLEDHLAXK

SEQ ID NO: 7568 - protein, 41 aa, Artificial Sequence
  Non-cyclic GFR-binding peptide
  MOD_RES (3), (4), (38), (40): Xaa is C or S
  MOD_RES (18), (19), (20), (21), (22): Xaa is A or G
  MOD_RES (23), (24), (25), (26): Xaa is A or G or is absent
KPXXAPTKLSPISVLYKXXXXXXXXXLKYHYNMVVRSXGXH

SEQ ID NO: 7569 - protein, 37 aa, Artificial Sequence
  Non-cyclic GFR-binding peptide
  MOD_RES (3), (35), (37): Xaa is C or S
PTXAPTKLSAISVLYLDDSSNVILKNYQNMVVRSXGX

SEQ ID NO: 7570 - protein, 36 aa, Artificial Sequence
  Non-cyclic GFR-binding peptide
  MOD_RES (4), (5), (36): Xaa is C or S
AAPXXVPQALSAISILYLVGRKPKVLKNYQMIVRSX

SEQ ID NO: 7571 - protein, 34 aa, Artificial Sequence
  Non-cyclic GFR-binding peptide
  MOD_RES (3), (4): Xaa is C or S
KAXXAPTKLSAISVLYLDSSNNVILKNYQNMVVK

SEQ ID NO: 7572 - protein, 33 aa, Artificial Sequence
  Non-cyclic GFR-binding peptide
  MOD_RES (31), (33): Xaa is C or S
VSQDLNAISILYFIGKTPKILKKYRMIVKSXKX

SEQ ID NO: 7573 - protein, 41 aa, Artificial Sequence
  Non-cyclic GFR-binding peptide
  MOD_RES (1), (38), (40): Xaa is C or S
  MOD_RES (17), (18), (19), (20), (21): Xaa is A or G
  MOD_RES (22), (23), (24), (25): Xaa is A or G or is absent
XRPTQVQLSATSVLYYXXXXXXXXXLRKHRTLEDHLAXKXE

SEQ ID NO: 7574 - protein, 37 aa, Artificial Sequence
  Non-cyclic GFR-binding peptide
  MOD_RES (3), (4), (36): Xaa is C or S
KPXXAPTQLSAISVLYLDDSSNVILKNYQNMVVRAXG

SEQ ID NO: 7575 - protein, 39 aa, Artificial Sequence
  Non-cyclic GFR-binding peptide
  MOD_RES (5), (6), (39): Xaa is C or S
  MOD_RES (20), (21), (22), (23), (24): Xaa is A or G
  MOD_RES (25), (26), (27), (28): Xaa is A or G or is absent
SASPXXVPQDLNAISILYFXXXXXXXXXLKKYRMVVKSX

SEQ ID NO: 7576 - protein, 37 aa, Artificial Sequence
  Non-cyclic GFR-binding peptide
  MOD_RES (1), (35), (37): Xaa is C or S
  MOD_RES (15), (16), (17), (18), (19): Xaa is A or G
  MOD_RES (20), (21), (22), (23): Xaa is A or G or is absent
XAPTKLSAISVLYLXXXXXXXXXLKNYQNMVVKAXGX

SEQ ID NO: 7577 - protein, 42 aa, Artificial Sequence
  Non-cyclic GFR-binding peptide
  MOD_RES (5), (6), (40), (42): Xaa is C or S
  MOD_RES (20), (21), (22), (23), (24): Xaa is A or G
  MOD_RES (25), (26), (27), (28): Xaa is A or G or is absent
IPKAXXVPTELNAISMLYFXXXXXXXXXLKKYRDMVVEGXGX

SEQ ID NO: 7578 - protein, 38 aa, Artificial Sequence
  Non-cyclic GFR-binding peptide
  MOD_RES (2), (3), (35), (37): Xaa is C or S
PXXAPTKLSAISVLYLDDSSNVILKNYQNMVVRSXGXH

SEQ ID NO: 7579 - protein, 35 aa, Artificial Sequence
  Non-cyclic GFR-binding peptide
  MOD_RES (3), (4): Xaa is C or S
KPXXAPTKLSPISVLYKDDSSNVILKYHYNMVVRS

SEQ ID NO: 7580 - protein, 38 aa, Artificial Sequence
  Non-cyclic GFR-binding peptide
  MOD_RES (6), (6): Xaa is C or S
  MOD_RES (20), (21), (22), (23), (24): Xaa is A or G
  MOD_RES (25), (26), (27), (28): Xaa is A or G or is absent
VTKPTXAPTKLSPISVLYKXXXXXXXXXLKYHYNMVVR

SEQ ID NO: 7581 - protein, 34 aa, Artificial Sequence
  Non-cyclic GFR-binding peptide
  MOD_RES (33), (33): Xaa is C or S
VPTKLSAISVLYLDDMGVPTLKNYQEGMSVAEXG

SEQ ID NO: 7582 - protein, 41 aa, Artificial Sequence
  Non-cyclic GFR-binding peptide
  MOD_RES (5), (6), (38), (40): Xaa is C or S
VPKAXXAPTKLNAISVLYFDSSNNVILKKYRNMVVKAXGXH

SEQ ID NO: 7583 - protein, 33 aa, Artificial Sequence
  Non-cyclic GFR-binding peptide
  MOD_RES (32), (32): Xaa is C or S
VPTELSPISMLYKDENEKVVLKYHYDMVVEGXG

SEQ ID NO: 7584 - protein, 38 aa, Artificial Sequence
  Non-cyclic GFR-binding peptide
  MOD_RES (4), (5), (36), (38): Xaa is C or S
ASPXXVPQDLNAISILYFVGRTPKVLKKYRMVVKSXKX

SEQ ID NO: 7585 - protein, 39 aa, Artificial Sequence
  Non-cyclic GFR-binding peptide
  MOD_RES (5), (6): Xaa is C or S
  MOD_RES (20), (21), (22), (23), (24): Xaa is A or G
  MOD_RES (25), (26), (27), (28): Xaa is A or G or is absent
VPKPXXAPTQLSATSVLYYXXXXXXXXXLRKHRNMVVRA

SEQ ID NO: 7586 - protein, 39 aa, Artificial Sequence
  Non-cyclic GFR-binding peptide
  MOD_RES (4), (5), (38): Xaa is C or S
  MOD_RES (19), (20), (21), (22), (23): Xaa is A or G
  MOD_RES (24), (25), (26), (27): Xaa is A or G or is absent
ASPXXVSQDLNAISILYFXXXXXXXXXLKKYRMIVKSXK

SEQ ID NO: 7587 - protein, 40 aa, Artificial Sequence
  Non-cyclic GFR-binding peptide
  MOD_RES (5), (6), (38), (40): Xaa is C or S
IPKAXXVPTELSPISMLYKDEYDKVVLKYHYEMVVEGXGX

SEQ ID NO: 7588 - protein, 38 aa, Artificial Sequence
  Non-cyclic GFR-binding peptide
  MOD_RES (4), (5), (38): Xaa is C or S
  MOD_RES (19), (20), (21), (22), (23): Xaa is A or G
  MOD_RES (24), (25), (26), (27): Xaa is A or G or is absent
ASPXXVPQDLSAISILYLXXXXXXXXXLKNYQMVVKSX

SEQ ID NO: 7589 - protein, 36 aa, Artificial Sequence
  Non-cyclic GFR-binding peptide
  MOD_RES (3), (4), (36): Xaa is C or S
KPXXAPTKLSATSVLYYDDSSNVILRKHRNMVVRSX

SEQ ID NO: 7590 - protein, 43 aa, Artificial Sequence
  Non-cyclic GFR-binding peptide
  MOD_RES (4), (41), (43): Xaa is C or S
NVQXRPTQVQLSAISVLYLEIVRKKPIFLKNYQTLEDHLAXKX

SEQ ID NO: 7591 - protein, 41 aa, Artificial Sequence
  Non-cyclic GFR-binding peptide
  MOD_RES (4), (5), (38), (40): Xaa is C or S
  MOD_RES (19), (20), (21), (22), (23): Xaa is A or G
  MOD_RES (24), (25), (26), (27): Xaa is A or G or is absent
ASPXXVSQDLSATSILYYXXXXXXXXXLRKHRMIVKSXKXS

SEQ ID NO: 7592 - protein, 38 aa, Artificial Sequence
  Non-cyclic GFR-binding peptide
  MOD_RES (4), (5), (36), (38): Xaa is C or S
ASPXXVSQDLNAISILYFIGKTPKILKKYRMIVKSXKX

SEQ ID NO: 7593 - protein, 37 aa, Artificial Sequence
  Non-cyclic GFR-binding peptide
  MOD_RES (4), (5), (36): Xaa is C or S
AAPXXVPQALSATSILYYVGRKPKVLRKHRMIVRSXK

SEQ ID NO: 7594 - protein, 37 aa, Artificial Sequence
  Non-cyclic GFR-binding peptide
  MOD_RES (6), (6): Xaa is C or S
VTKPTXAPTKLSPISVLYKDDSSNVILKYHYNMVVRS

SEQ ID NO: 7595 - protein, 39 aa, Artificial Sequence
  Non-cyclic GFR-binding peptide
  MOD_RES (5), (6), (37), (39): Xaa is C or S
SASPXXVPQDLSATSILYYVGRTPKVLRKHRMVVKSXKX

SEQ ID NO: 7596 - protein, 37 aa, Artificial Sequence
  Non-cyclic GFR-binding peptide
  MOD_RES (3), (35), (37): Xaa is C or S
PTXAPTKLSPISVLYKDDSSNVILKYHYNMVVRSXGX

SEQ ID NO: 7597 - protein, 31 aa, Artificial Sequence
  Non-cyclic GFR-binding peptide
  MOD_RES (31), (31): Xaa is C or S
VPQDLSPISILYKVGRTPKVLKYHYMVVKSX

SEQ ID NO: 7598 - protein, 38 aa, Artificial Sequence
  Non-cyclic GFR-binding peptide
  MOD_RES (4), (5), (38): Xaa is C or S
  MOD_RES (19), (20), (21), (22), (23): Xaa is A or G
  MOD_RES (24), (25), (26), (27): Xaa is A or G or is absent
ASPXXVPQDLSATSILYYXXXXXXXXXLRKHRMVVKSX

SEQ ID NO: 7599 - protein, 32 aa, Artificial Sequence
  Non-cyclic GFR-binding peptide
  MOD_RES (1), (1): Xaa is C or S
XVPTELSATSMLYYDENEKVVLRKHRDMVVEG

SEQ ID NO: 7600 - protein, 34 aa, Artificial Sequence
  Non-cyclic GFR-binding peptide
  MOD_RES (1), (1): Xaa is C or S
  MOD_RES (15), (16), (17), (18), (19): Xaa is A or G
  MOD_RES (20), (21), (22), (23): Xaa is A or G or is absent
XVPTELNAISMLYFXXXXXXXXXLKKYREMVVEG

SEQ ID NO: 7601 - protein, 39 aa, Artificial Sequence
  Non-cyclic GFR-binding peptide
  MOD_RES (2), (3), (38): Xaa is C or S
  MOD_RES (17), (18), (19), (20), (21): Xaa is A or G
  MOD_RES (22), (23), (24), (25): Xaa is A or G or is absent
AXXVPTKLNAISVLYFXXXXXXXXXLKKYREGMSVAEXG

SEQ ID NO: 7602 - protein, 38 aa, Artificial Sequence
  Non-cyclic GFR-binding peptide
  MOD_RES (1), (38): Xaa is C or S
  MOD_RES (17), (18), (19), (20), (21): Xaa is A or G
  MOD_RES (22), (23), (24), (25): Xaa is A or G or is absent
XRPTQVQLSPISVLYKXXXXXXXXXLKYHYTLEDHLAX

SEQ ID NO: 7603 - protein, 43 aa, Artificial Sequence
  Non-cyclic GFR-binding peptide
  MOD_RES (6), (40), (42): Xaa is C or S
  MOD_RES (20), (21), (22), (23), (24): Xaa is A or G
  MOD_RES (25), (26), (27), (28): Xaa is A or G or is absent
VTKPTXAPTKLSPISVLYKXXXXXXXXXLKYHYNMVVRSXGXH

SEQ ID NO: 7604 - protein, 31 aa, Artificial Sequence
  Non-cyclic GFR-binding peptide
VPTELNAISMLYFDENEKVVLKKYRDMVVEG

SEQ ID NO: 7605 - protein, 38 aa, Artificial Sequence
  Non-cyclic GFR-binding peptide
  MOD_RES (2), (3), (37): Xaa is C or S
  MOD_RES (17), (18), (19), (20), (21): Xaa is A or G
  MOD_RES (22), (23), (24), (25): Xaa is A or G or is absent
AXXAPTKLSPISVLYKXXXXXXXXXLKYHYNMVVKAXG

SEQ ID NO: 7606 - protein, 40 aa, Artificial Sequence
  Non-cyclic GFR-binding peptide
  MOD_RES (6), (7): Xaa is C or S
  MOD_RES (21), (22), (23), (24), (25): Xaa is A or G
  MOD_RES (26), (27), (28), (29): Xaa is A or G or is absent
TVPKPXXAPTQLSPISVLYKXXXXXXXXXLKYHYNMVVRA

SEQ ID NO: 7607 - protein, 40 aa, Artificial Sequence
  Non-cyclic GFR-binding peptide
  MOD_RES (5), (6), (38), (40): Xaa is C or S
VPKPXXAPTQLSAISVLYLDDSSNVILKNYQNMVVRAXGX

SEQ ID NO: 7608 - protein, 38 aa, Artificial Sequence
  Non-cyclic GFR-binding peptide
  MOD_RES (5), (6): Xaa is C or S
  MOD_RES (20), (21), (22), (23), (24): Xaa is A or G
  MOD_RES (25), (26), (27), (28): Xaa is A or G or is absent
SASPXXVPQDLNAISILYFXXXXXXXXXLKKYRMVVKS

SEQ ID NO: 7609 - protein, 39 aa, Artificial Sequence
  Non-cyclic GFR-binding peptide
  MOD_RES (5), (6), (37), (39): Xaa is C or S
SASPXXVSQDLSATSILYYIGKTPKILRKHRMIVKSXKX

SEQ ID NO: 7610 - protein, 37 aa, Artificial Sequence
  Non-cyclic GFR-binding peptide
  MOD_RES (5), (6): Xaa is C or S
VPKPXXAPTQLSATSVLYYDDSSNVILRKHRNMVVRA

SEQ ID NO: 7611 - protein, 37 aa, Artificial Sequence
  Non-cyclic GFR-binding peptide
  MOD_RES (1), (2), (36): Xaa is C or S
  MOD_RES (16), (17), (18), (19), (20): Xaa is A or G
  MOD_RES (21), (22), (23), (24): Xaa is A or G or is absent
XXAPTQLSPISVLYKXXXXXXXXXLKYHYNMVVRAXG

SEQ ID NO: 7612 - protein, 32 aa, Artificial Sequence
  Non-cyclic GFR-binding peptide
  MOD_RES (14), (15), (16), (17), (18): Xaa is A or G
  MOD_RES (19), (20), (21), (22): Xaa is A or G or is absent
VPTELSATSMLYYXXXXXXXXXLRKHREMVVE

SEQ ID NO: 7613 - protein, 33 aa, Artificial Sequence
  Non-cyclic GFR-binding peptide
  MOD_RES (33), (33): Xaa is C or S
  MOD_RES (14), (15), (16), (17), (18): Xaa is A or G
  MOD_RES (19), (20), (21), (22): Xaa is A or G or is absent
VSQDLSAISILYLXXXXXXXXXLKNYQMIVKSX

SEQ ID NO: 7614 - protein, 38 aa, Artificial Sequence
  Non-cyclic GFR-binding peptide
  MOD_RES (4), (4): Xaa is C or S
  MOD_RES (20), (21), (22), (23), (24): Xaa is A or G
  MOD_RES (25), (26), (27), (28): Xaa is A or G or is absent
NVQXRPTQVQLSATSVLYYXXXXXXXXXLRKHRTLEDH

SEQ ID NO: 7615 - protein, 37 aa, Artificial Sequence
  Non-cyclic GFR-binding peptide
  MOD_RES (1), (1): Xaa is C or S
  MOD_RES (17), (18), (19), (20), (21): Xaa is A or G
  MOD_RES (22), (23), (24), (25): Xaa is A or G or is absent
XRPTQVQLSATSVLYYXXXXXXXXXLRKHRTLEDHLA

SEQ ID NO: 7616 - protein, 40 aa, Artificial Sequence
  Non-cyclic GFR-binding peptide
  MOD_RES (6), (7), (39): Xaa is C or S
YVPKPXXAPTKLSATSVLYYDDSSNVILRKHRNMVVRSXG

SEQ ID NO: 7617 - protein, 40 aa, Artificial Sequence
  Non-cyclic GFR-binding peptide
  MOD_RES (1), (38), (40): Xaa is C or S
XRPTQVQLNAISVLYFEIVRKKPIFLKKYRTLEDHLAXKX

SEQ ID NO: 7618 - protein, 37 aa, Artificial Sequence
  Non-cyclic GFR-binding peptide
  MOD_RES (3), (4), (35), (37): Xaa is C or S
APXXVPQALSATSILYYVGRKPKVLRKHRMIVRSXKX

SEQ ID NO: 7619 - protein, 36 aa, Artificial Sequence
  Non-cyclic GFR-binding peptide
  MOD_RES (3), (4), (35): Xaa is C or S
SPXXVSQDLNAISILYFIGKTPKILKKYRMIVKSXK

SEQ ID NO: 7620 - protein, 42 aa, Artificial Sequence
  Non-cyclic GFR-binding peptide
  MOD_RES (5), (42): Xaa is C or S
RNVQXRPTQVQLSATSVLYYEIVRKKPIFLRKHRTLEDHLAX

SEQ ID NO: 7621 - protein, 36 aa, Artificial Sequence
  Non-cyclic GFR-binding peptide
  MOD_RES (35), (35): Xaa is C or S
TQVQLSPISVLYKEIVRKKPIFLKYHYTLEDHLAXK

SEQ ID NO: 7622 - protein, 32 aa, Artificial Sequence
  Non-cyclic GFR-binding peptide
  MOD_RES (1), (32): Xaa is C or S
XVPQDLNAISILYFVGRTPKVLKKYRMVVKSX

SEQ ID NO: 7623 - protein, 36 aa, Artificial Sequence
  Non-cyclic GFR-binding peptide
  MOD_RES (1), (2), (35): Xaa is C or S
  MOD_RES (16), (17), (18), (19), (20): Xaa is A or G
  MOD_RES (21), (22), (23), (24): Xaa is A or G or is absent
XXVPQDLNAISILYFXXXXXXXXXLKKYRMVVKSXK

SEQ ID NO: 7624 - protein, 38 aa, Artificial Sequence
  Non-cyclic GFR-binding peptide
  MOD_RES (1), (2), (36), (38): Xaa is C or S
  MOD_RES (16), (17), (18), (19), (20): Xaa is A or G
  MOD_RES (21), (22), (23), (24): Xaa is A or G or is absent
XXAPTQLSATSVLYYXXXXXXXXXLRKHRNMVVRAXGX

SEQ ID NO: 7625 - protein, 36 aa, Artificial Sequence
  Non-cyclic GFR-binding peptide
  MOD_RES (1), (35): Xaa is C or S
  MOD_RES (15), (16), (17), (18), (19): Xaa is A or G
  MOD_RES (20), (21), (22), (23): Xaa is A or G or is absent
XAPTKLSPISVLYKXXXXXXXXXLKYHYNMVVRSXG

SEQ ID NO: 7626 - protein, 34 aa, Artificial Sequence
  Non-cyclic GFR-binding peptide
  MOD_RES (14), (15), (16), (17), (18): Xaa is A or G
  MOD_RES (19), (20), (21), (22): Xaa is A or G or is absent
TQVQLSPISVLYKXXXXXXXXXLKYHYTLEDHLA

SEQ ID NO: 7627 - protein, 41 aa, Artificial Sequence
  Non-cyclic GFR-binding peptide
  MOD_RES (5), (6), (40): Xaa is C or S
  MOD_RES (20), (21), (22), (23), (24): Xaa is A or G
  MOD_RES (25), (26), (27), (28): Xaa is A or G or is absent
VPKAXXAPTKLSPISVLYKXXXXXXXXXLKYHYNMVVKAXG

SEQ ID NO: 7628 - protein, 34 aa, Artificial Sequence
  Non-cyclic GFR-binding peptide
  MOD_RES (1), (2): Xaa is C or S
  MOD_RES (16), (17), (18), (19), (20): Xaa is A or G
  MOD_RES (21), (22), (23), (24): Xaa is A or G or is absent
XXVPQALSATSILYYXXXXXXXXXLRKHRMIVRS

SEQ ID NO: 7629 - protein, 36 aa, Artificial Sequence
  Non-cyclic GFR-binding peptide
  MOD_RES (2), (3), (36): Xaa is C or S
  MOD_RES (17), (18), (19), (20), (21): Xaa is A or G
  MOD_RES (22), (23), (24), (25): Xaa is A or G or is absent
PXXVPQALSAISILYLXXXXXXXXXLKNYQMIVRSX

SEQ ID NO: 7630 - protein, 39 aa, Artificial Sequence
  Non-cyclic GFR-binding peptide
  MOD_RES (6), (7), (39): Xaa is C or S
AVPKAXXAPTKLNAISVLYFDSSNNVILKKYRNMVVKAX

SEQ ID NO: 7631 - protein, 34 aa, Artificial Sequence
  Non-cyclic GFR-binding peptide
  MOD_RES (1), (2), (33): Xaa is C or S
XXVPQDLNAISILYFVGRTPKVLKKYRMVVKSXK

SEQ ID NO: 7632 - protein, 37 aa, Artificial Sequence
  Non-cyclic GFR-binding peptide
  MOD_RES (1), (2), (36): Xaa is C or S
  MOD_RES (16), (17), (18), (19), (20): Xaa is A or G
  MOD_RES (21), (22), (23), (24): Xaa is A or G or is absent
XXAPTQLSAISVLYLXXXXXXXXXLKNYQNMVVRAXG

SEQ ID NO: 7633 - protein, 38 aa, Artificial Sequence
  Non-cyclic GFR-binding peptide
  MOD_RES (5), (6), (38): Xaa is C or S
VPKPXXAPTQLSAISVLYLDDSSNVILKNYQNMVVRAX

SEQ ID NO: 7634 - protein, 36 aa, Artificial Sequence
  Non-cyclic GFR-binding peptide
  MOD_RES (2), (3), (36): Xaa is C or S
  MOD_RES (17), (18), (19), (20), (21): Xaa is A or G
  MOD_RES (22), (23), (24), (25): Xaa is A or G or is absent
PXXVPQALSATSILYYXXXXXXXXXLRKHRMIVRSX

SEQ ID NO: 7635 - protein, 40 aa, Artificial Sequence
  Non-cyclic GFR-binding peptide
  MOD_RES (3), (37), (39): Xaa is C or S
  MOD_RES (17), (18), (19), (20), (21): Xaa is A or G
  MOD_RES (22), (23), (24), (25): Xaa is A or G or is absent
PTXAPTKLSATSVLYYXXXXXXXXXLRKHRNMVVRSXGXH

SEQ ID NO: 7636 - protein, 36 aa, Artificial Sequence
  Non-cyclic GFR-binding peptide
  MOD_RES (1), (2), (36): Xaa is C or S
  MOD_RES (16), (17), (18), (19), (20): Xaa is A or G
  MOD_RES (21), (22), (23), (24): Xaa is A or G or is absent
XXVPTELNAISMLYFXXXXXXXXXLKKYREMVVEGX

SEQ ID NO: 7637 - protein, 39 aa, Artificial Sequence
  Non-cyclic GFR-binding peptide
  MOD_RES (3), (4), (36), (38): Xaa is C or S
KAXXAPTKLSAISVLYLDSSNNVILKNYQNMVVKAXGXH

SEQ ID NO: 7638 - protein, 35 aa, Artificial Sequence
  Non-cyclic GFR-binding peptide
  MOD_RES (1), (2), (33), (35): Xaa is C or S
XXVPQDLSAISILYLVGRTPKVLKNYQMVVKSXKX

SEQ ID NO: 7639 - protein, 38 aa, Artificial Sequence
  Non-cyclic GFR-binding peptide
  MOD_RES (3), (4), (35), (37): Xaa is C or S
APXXVPQALNAISILYFVGRKPKVLKKYRMIVRSXKXS

SEQ ID NO: 7640 - protein, 34 aa, Artificial Sequence
  Non-cyclic GFR-binding peptide
  MOD_RES (1), (2), (34): Xaa is C or S
XXAPTKLNAISVLYFDSSNNVILKKYRNMVVKAX

SEQ ID NO: 7641 - protein, 36 aa, Artificial Sequence
  Non-cyclic GFR-binding peptide
  MOD_RES (35), (35): Xaa is C or S
  MOD_RES (14), (15), (16), (17), (18): Xaa is A or G
  MOD_RES (19), (20), (21), (22): Xaa is A or G or is absent
TQVQLNAISVLYFXXXXXXXXXLKKYRTLEDHLAXK

SEQ ID NO: 7642 - protein, 39 aa, Artificial Sequence
  Non-cyclic GFR-binding peptide
  MOD_RES (2), (39): Xaa is C or S
  MOD_RES (18), (19), (20), (21), (22): Xaa is A or G
  MOD_RES (23), (24), (25), (26): Xaa is A or G or is absent
QXRPTQVQLSAISVLYLXXXXXXXXXLKNYQTLEDHLAX

SEQ ID NO: 7643 - protein, 38 aa, Artificial Sequence
  Non-cyclic GFR-binding peptide
  MOD_RES (1), (2), (37): Xaa is C or S
  MOD_RES (16), (17), (18), (19), (20): Xaa is A or G
  MOD_RES (21), (22), (23), (24): Xaa is A or G or is absent
XXVPTKLNAISVLYFXXXXXXXXXLKKYREGMSVAEXG

SEQ ID NO: 7644 - protein, 44 aa, Artificial Sequence
  Non-cyclic GFR-binding peptide
  MOD_RES (7), (41), (43): Xaa is C or S
  MOD_RES (21), (22), (23), (24), (25): Xaa is A or G
  MOD_RES (26), (27), (28), (29): Xaa is A or G or is absent
HVTKPTXAPTKLSAISVLYLXXXXXXXXXLKNYQNMVVRSXGXH

SEQ ID NO: 7645 - protein, 38 aa, Artificial Sequence
  Non-cyclic GFR-binding peptide
  MOD_RES (2), (2): Xaa is C or S
  MOD_RES (18), (19), (20), (21), (22): Xaa is A or G
  MOD_RES (23), (24), (25), (26): Xaa is A or G or is absent
QXRPTQVQLSPISVLYKXXXXXXXXXLKYHYTLEDHLA

SEQ ID NO: 7646 - protein, 36 aa, Artificial Sequence
  Non-cyclic GFR-binding peptide
  MOD_RES (1), (2), (34), (36): Xaa is C or S
XXVPTELNAISMLYFDENEKVVLKKYRDMVVEGXGX

SEQ ID NO: 7647 - protein, 41 aa, Artificial Sequence
  Non-cyclic GFR-binding peptide
  MOD_RES (4), (5), (39), (41): Xaa is C or S
  MOD_RES (19), (20), (21), (22), (23): Xaa is A or G
  MOD_RES (24), (25), (26), (27): Xaa is A or G or is absent
PKAXXVPTELNAISMLYFXXXXXXXXXLKKYREMVVEGXGX

SEQ ID NO: 7648 - protein, 40 aa, Artificial Sequence
  Non-cyclic GFR-binding peptide
  MOD_RES (4), (4): Xaa is C or S
  MOD_RES (20), (21), (22), (23), (24): Xaa is A or G
  MOD_RES (25), (26), (27), (28): Xaa is A or G or is absent
NVQXRPTQVQLSPISVLYKXXXXXXXXXLKYHYTLEDHLA

SEQ ID NO: 7649 - protein, 37 aa, Artificial Sequence
  Non-cyclic GFR-binding peptide
  MOD_RES (5), (6), (37): Xaa is C or S
SAAPXXVPQALNAISILYFVGRKPKVLKKYRMIVRSX

SEQ ID NO: 7650 - protein, 33 aa, Artificial Sequence
  Non-cyclic GFR-binding peptide
  MOD_RES (1), (1): Xaa is C or S
  MOD_RES (15), (16), (17), (18), (19): Xaa is A or G
  MOD_RES (20), (21), (22), (23): Xaa is A or G or is absent
XAPTKLNAISVLYFXXXXXXXXXLKKYRNMVVK

SEQ ID NO: 7651 - protein, 34 aa, Artificial Sequence
  Non-cyclic GFR-binding peptide
  MOD_RES (1), (2): Xaa is C or S
  MOD_RES (16), (17), (18), (19), (20): Xaa is A or G
  MOD_RES (21), (22), (23), (24): Xaa is A or G or is absent
XXVPTELSATSMLYYXXXXXXXXXLRKHREMVVE

SEQ ID NO: 7652 - protein, 37 aa, Artificial Sequence
  Non-cyclic GFR-binding peptide
  MOD_RES (3), (3): Xaa is C or S
VQXRPTQVQLSAISVLYLEIVRKKPIFLKNYQTLEDH

SEQ ID NO: 7653 - protein, 41 aa, Artificial Sequence
  Non-cyclic GFR-binding peptide
  MOD_RES (3), (4), (38), (40): Xaa is C or S
  MOD_RES (18), (19), (20), (21), (22): Xaa is A or G
  MOD_RES (23), (24), (25), (26): Xaa is A or G or is absent
KPXXAPTKLSAISVLYLXXXXXXXXXLKNYQNMVVRSXGXH

SEQ ID NO: 7654 - protein, 43 aa, Artificial Sequence
  Non-cyclic GFR-binding peptide
  MOD_RES (6), (7), (40), (42): Xaa is C or S
  MOD_RES (21), (22), (23), (24), (25): Xaa is A or G
  MOD_RES (26), (27), (28), (29): Xaa is A or G or is absent
ASASPXXVPQDLSATSILYYXXXXXXXXXLRKHRMVVKSXKXS

SEQ ID NO: 7655 - protein, 37 aa, Artificial Sequence
  Non-cyclic GFR-binding peptide
  MOD_RES (3), (3): Xaa is C or S
VQXRPTQVQLSATSVLYYEIVRKKPIFLRKHRTLEDH

SEQ ID NO: 7656 - protein, 39 aa, Artificial Sequence
  Non-cyclic GFR-binding peptide
  MOD_RES (4), (5), (37), (39): Xaa is C or S
PKPXXAPTKLSATSVLYYDDSSNVILRKHRNMVVRSXGX

SEQ ID NO: 7657 - protein, 37 aa, Artificial Sequence
  Non-cyclic GFR-binding peptide
  MOD_RES (5), (6): Xaa is C or S
VPKPXXAPTKLSAISVLYLDDSSNVILKNYQNMVVRS

SEQ ID NO: 7658 - protein, 33 aa, Artificial Sequence
  Non-cyclic GFR-binding peptide
  MOD_RES (33), (33): Xaa is C or S
  MOD_RES (14), (15), (16), (17), (18): Xaa is A or G
  MOD_RES (19), (20), (21), (22): Xaa is A or G or is absent
VSQDLSATSILYYXXXXXXXXXLRKHRMIVKSX

SEQ ID NO: 7659 - protein, 38 aa, Artificial Sequence
  Non-cyclic GFR-binding peptide
  MOD_RES (1), (2), (35), (37): Xaa is C or S
  MOD_RES (16), (17), (18), (19), (20): Xaa is A or G
  MOD_RES (21), (22), (23), (24): Xaa is A or G or is absent
XXVSQDLNAISILYFXXXXXXXXXLKKYRMIVKSXKXS

SEQ ID NO: 7660 - protein, 33 aa, Artificial Sequence
  Non-cyclic GFR-binding peptide
  MOD_RES (2), (3): Xaa is C or S
AXXVPTELSPISMLYKDENEKVVLKYHYDMVVE

SEQ ID NO: 7661 - protein, 32 aa, Artificial Sequence
  Non-cyclic GFR-binding peptide
  MOD_RES (1), (2): Xaa is C or S
XXVPTELNAISMLYFDENEKVVLKKYRDMVVE

SEQ ID NO: 7662 - protein, 35 aa, Artificial Sequence
  Non-cyclic GFR-binding peptide
  MOD_RES (33), (35): Xaa is C or S
VPTKLSATSVLYYDDMGVPTLRKHREGMSVAEXGX

SEQ ID NO: 7663 - protein, 41 aa, Artificial Sequence
  Non-cyclic GFR-binding peptide
  MOD_RES (5), (6), (40): Xaa is C or S
  MOD_RES (20), (21), (22), (23), (24): Xaa is A or G
  MOD_RES (25), (26), (27), (28): Xaa is A or G or is absent
IPKAXXVPTELSPISMLYKXXXXXXXXXLKYHYEMVVEGXG

SEQ ID NO: 7664 - protein, 40 aa, Artificial Sequence
  Non-cyclic GFR-binding peptide
  MOD_RES (1), (38), (40): Xaa is C or S
  MOD_RES (17), (18), (19), (20), (21): Xaa is A or G
  MOD_RES (22), (23), (24), (25): Xaa is A or G or is absent
XRPTQVQLSATSVLYYXXXXXXXXXLRKHRTLEDHLAXKX

SEQ ID NO: 7665 - protein, 37 aa, Artificial Sequence
  Non-cyclic GFR-binding peptide
  MOD_RES (37), (37): Xaa is C or S
RPTQVQLNAISVLYFEIVRKKPIFLKKYRTLEDHLAX

SEQ ID NO: 7666 - protein, 41 aa, Artificial Sequence
  Non-cyclic GFR-binding peptide
  MOD_RES (5), (6), (39), (41): Xaa is C or S
  MOD_RES (20), (21), (22), (23), (24): Xaa is A or G
  MOD_RES (25), (26), (27), (28): Xaa is A or G or is absent
SASPXXVSQDLSATSILYYXXXXXXXXXLRKHRMIVKSXKX

SEQ ID NO: 7667 - protein, 40 aa, Artificial Sequence
  Non-cyclic GFR-binding peptide
  MOD_RES (6), (7), (38), (40): Xaa is C or S
ASASPXXVPQDLSPISILYKVGRTPKVLKYHYMVVKSXKX

SEQ ID NO: 7668 - protein, 41 aa, Artificial Sequence
  Non-cyclic GFR-binding peptide
  MOD_RES (1), (38), (40): Xaa is C or S
XRPTQVQLNAISVLYFEIVRKKPIFLKKYRTLEDHLAXKXE

SEQ ID NO: 7669 - protein, 37 aa, Artificial Sequence
  Non-cyclic GFR-binding peptide
  MOD_RES (1), (2), (36): Xaa is C or S
  MOD_RES (16), (17), (18), (19), (20): Xaa is A or G
  MOD_RES (21), (22), (23), (24): Xaa is A or G or is absent
XXVPTELSATSMLYYXXXXXXXXXLRKHRDMVVEGXG

SEQ ID NO: 7670 - protein, 33 aa, Artificial Sequence
  Non-cyclic GFR-binding peptide
  MOD_RES (14), (15), (16), (17), (18): Xaa is A or G
  MOD_RES (19), (20), (21), (22): Xaa is A or G or is absent
TQVQLSAISVLYLXXXXXXXXXLKNYQTLEDHL

SEQ ID NO: 7671 - protein, 39 aa, Artificial Sequence
  Non-cyclic GFR-binding peptide
  MOD_RES (4), (5), (39): Xaa is C or S
  MOD_RES (19), (20), (21), (22), (23): Xaa is A or G
  MOD_RES (24), (25), (26), (27): Xaa is A or G or is absent
PKAXXVPTELSATSMLYYXXXXXXXXXLRKHRDMVVEGX

SEQ ID NO: 7672 - protein, 34 aa, Artificial Sequence
  Non-cyclic GFR-binding peptide
  MOD_RES (1), (2): Xaa is C or S
  MOD_RES (16), (17), (18), (19), (20): Xaa is A or G
  MOD_RES (21), (22), (23), (24): Xaa is A or G or is absent
XXVPTELSPISMLYKXXXXXXXXXLKYHYDMVVE

SEQ ID NO: 7673 - protein, 39 aa, Artificial Sequence
  Non-cyclic GFR-binding peptide
  MOD_RES (2), (3), (37), (39): Xaa is C or S
  MOD_RES (17), (18), (19), (20), (21): Xaa is A or G
  MOD_RES (22), (23), (24), (25): Xaa is A or G or is absent
AXXVPTELNAISMLYFXXXXXXXXXLKKYRDMVVEGXGX

SEQ ID NO: 7674 - protein, 37 aa, Artificial Sequence
  Non-cyclic GFR-binding peptide
  MOD_RES (6), (7): Xaa is C or S
ASASPXXVPQDLNAISILYFVGRTPKVLKKYRMVVKS

SEQ ID NO: 7675 - protein, 33 aa, Artificial Sequence
  Non-cyclic GFR-binding peptide
  MOD_RES (1), (1): Xaa is C or S
  MOD_RES (15), (16), (17), (18), (19): Xaa is A or G
  MOD_RES (20), (21), (22), (23): Xaa is A or G or is absent
XAPTQLSATSVLYYXXXXXXXXXLRKHRNMVVR

SEQ ID NO: 7676 - protein, 33 aa, Artificial Sequence
  Non-cyclic GFR-binding peptide
  MOD_RES (2), (3): Xaa is C or S
PXXVSQDLNAISILYFIGKTPKILKKYRMIVKS

SEQ ID NO: 7677 - protein, 36 aa, Artificial Sequence
  Non-cyclic GFR-binding peptide
  MOD_RES (33), (35): Xaa is C or S
  MOD_RES (14), (15), (16), (17), (18): Xaa is A or G
  MOD_RES (19), (20), (21), (22): Xaa is A or G or is absent
VSQDLSPISILYKXXXXXXXXXLKYHYMIVKSXKXS

SEQ ID NO: 7678 - protein, 37 aa, Artificial Sequence
  Non-cyclic GFR-binding peptide
  MOD_RES (2), (3), (35), (37): Xaa is C or S
AXXVPTELNAISMLYFDEYDKVVLKKYREMVVEGXGX

SEQ ID NO: 7679 - protein, 38 aa, Artificial Sequence
  Non-cyclic GFR-binding peptide
  MOD_RES (37), (37): Xaa is C or S
  MOD_RES (16), (17), (18), (19), (20): Xaa is A or G
  MOD_RES (21), (22), (23), (24): Xaa is A or G or is absent
RPTQVQLNAISVLYFXXXXXXXXXLKKYRTLEDHLAXK

SEQ ID NO: 7680 - protein, 34 aa, Artificial Sequence
  Non-cyclic GFR-binding peptide
  MOD_RES (3), (4): Xaa is C or S
KAXXVPTELNAISMLYFDENEKVVLKKYRDMVVE

SEQ ID NO: 7681 - protein, 37 aa, Artificial Sequence
  Non-cyclic GFR-binding peptide
  MOD_RES (1), (35), (37): Xaa is C or S
  MOD_RES (15), (16), (17), (18), (19): Xaa is A or G
  MOD_RES (20), (21), (22), (23): Xaa is A or G or is absent
XAPTKLSPISVLYKXXXXXXXXXLKYHYNMVVRSXGX

SEQ ID NO: 7682 - protein, 38 aa, Artificial Sequence
  Non-cyclic GFR-binding peptide
  MOD_RES (3), (4), (36), (38): Xaa is C or S
KPXXAPTQLSATSVLYYDDSSNVILRKHRNMVVRAXGX

SEQ ID NO: 7683 - protein, 37 aa, Artificial Sequence
  Non-cyclic GFR-binding peptide
  MOD_RES (3), (4): Xaa is C or S
  MOD_RES (18), (19), (20), (21), (22): Xaa is A or G
  MOD_RES (23), (24), (25), (26): Xaa is A or G or is absent
KAXXAPTKLSPISVLYKXXXXXXXXXLKYHYNMVVKA

SEQ ID NO: 7684 - protein, 39 aa, Artificial Sequence
  Non-cyclic GFR-binding peptide
  MOD_RES (5), (5): Xaa is C or S
RNVQXRPTQVQLSAISVLYLEIVRKKPIFLKNYQTLEDH

SEQ ID NO: 7685 - protein, 35 aa, Artificial Sequence
  Non-cyclic GFR-binding peptide
  MOD_RES (1), (1): Xaa is C or S
XRPTQVQLSATSVLYYEIVRKKPIFLRKHRTLEDH

SEQ ID NO: 7686 - protein, 38 aa, Artificial Sequence
  Non-cyclic GFR-binding peptide
  MOD_RES (6), (7): Xaa is C or S
YVPKPXXAPTKLSPISVLYKDDSSNVILKYHYNMVVRS

SEQ ID NO: 7687 - protein, 39 aa, Artificial Sequence
  Non-cyclic GFR-binding peptide
  MOD_RES (4), (38): Xaa is C or S
  MOD_RES (18), (19), (20), (21), (22): Xaa is A or G
  MOD_RES (23), (24), (25), (26): Xaa is A or G or is absent
KPTXAPTKLSPISVLYKXXXXXXXXXLKYHYNMVVRSXG

SEQ ID NO: 7688 - protein, 39 aa, Artificial Sequence
  Non-cyclic GFR-binding peptide
  MOD_RES (5), (6): Xaa is C or S
  MOD_RES (20), (21), (22), (23), (24): Xaa is A or G
  MOD_RES (25), (26), (27), (28): Xaa is A or G or is absent
IPKAXXVPTELSATSMLYYXXXXXXXXXLRKHREMVVEG

SEQ ID NO: 7689 - protein, 33 aa, Artificial Sequence
  Non-cyclic GFR-binding peptide
  MOD_RES (31), (33): Xaa is C or S
VSQDLSAISILYLIGKTPKILKNYQMIVKSXKX

SEQ ID NO: 7690 - protein, 40 aa, Artificial Sequence
  Non-cyclic GFR-binding peptide
  MOD_RES (3), (4), (38), (40): Xaa is C or S
  MOD_RES (18), (19), (20), (21), (22): Xaa is A or G
  MOD_RES (23), (24), (25), (26): Xaa is A or G or is absent
KPXXAPTQLSAISVLYLXXXXXXXXXLKNYQNMVVRAXGX

SEQ ID NO: 7691 - protein, 37 aa, Artificial Sequence
  Non-cyclic GFR-binding peptide
  MOD_RES (3), (4): Xaa is C or S
  MOD_RES (18), (19), (20), (21), (22): Xaa is A or G
  MOD_RES (23), (24), (25), (26): Xaa is A or G or is absent
KAXXVPTELSPISMLYKXXXXXXXXXLKYHYEMVVEG

SEQ ID NO: 7692 - protein, 39 aa, Artificial Sequence
  Non-cyclic GFR-binding peptide
  MOD_RES (5), (6), (37), (39): Xaa is C or S
SAAPXXVPQALSAISILYLVGRKPKVLKNYQMIVRSXKX

SEQ ID NO: 7693 - protein, 37 aa, Artificial Sequence
  Non-cyclic GFR-binding peptide
  MOD_RES (37), (37): Xaa is C or S
  MOD_RES (16), (17), (18), (19), (20): Xaa is A or G
  MOD_RES (21), (22), (23), (24): Xaa is A or G or is absent
RPTQVQLSATSVLYYXXXXXXXXXLRKHRTLEDHLAX

SEQ ID NO: 7694 - protein, 33 aa, Artificial Sequence
  Non-cyclic GFR-binding peptide
  MOD_RES (31), (33): Xaa is C or S
VSQDLSPISILYKIGKTPKILKYHYMIVKSXKX

SEQ ID NO: 7695 - protein, 41 aa, Artificial Sequence
  Non-cyclic GFR-binding peptide
  MOD_RES (6), (7), (39), (41): Xaa is C or S
YVPKPXXAPTKLSATSVLYYDDSSNVILRKHRNMVVRSXGX

SEQ ID NO: 7696 - protein, 40 aa, Artificial Sequence
  Non-cyclic GFR-binding peptide
  MOD_RES (5), (6), (37), (39): Xaa is C or S
SAAPXXVPQALNAISILYFVGRKPKVLKKYRMIVRSXKXS

SEQ ID NO: 7697 - protein, 41 aa, Artificial Sequence
  Non-cyclic GFR-binding peptide
  MOD_RES (5), (6), (39), (41): Xaa is C or S
  MOD_RES (20), (21), (22), (23), (24): Xaa is A or G
  MOD_RES (25), (26), (27), (28): Xaa is A or G or is absent
SAAPXXVPQALSATSILYYXXXXXXXXXLRKHRMIVRSXKX

SEQ ID NO: 7698 - protein, 35 aa, Artificial Sequence
  Non-cyclic GFR-binding peptide
  MOD_RES (4), (4): Xaa is C or S
KPTXAPTKLSPISVLYKDDSSNVILKYHYNMVVRS

SEQ ID NO: 7699 - protein, 36 aa, Artificial Sequence
  Non-cyclic GFR-binding peptide
  MOD_RES (33), (35): Xaa is C or S
VPTKLSATSVLYYDDMGVPTLRKHREGMSVAEXGXR

SEQ ID NO: 7700 - protein, 42 aa, Artificial Sequence
  Non-cyclic GFR-binding peptide
  MOD_RES (2), (39), (41): Xaa is C or S
  MOD_RES (18), (19), (20), (21), (22): Xaa is A or G
  MOD_RES (23), (24), (25), (26): Xaa is A or G or is absent
QXRPTQVQLSATSVLYYXXXXXXXXXLRKHRTLEDHLAXKXE

SEQ ID NO: 7701 - protein, 41 aa, Artificial Sequence
  Non-cyclic GFR-binding peptide
  MOD_RES (3), (4), (38), (40): Xaa is C or S
  MOD_RES (18), (19), (20), (21), (22): Xaa is A or G
  MOD_RES (23), (24), (25), (26): Xaa is A or G or is absent
KAXXVPTELSATSMLYYXXXXXXXXXLRKHRDMVVEGXGXR

SEQ ID NO: 7702 - protein, 38 aa, Artificial Sequence
  Non-cyclic GFR-binding peptide
  MOD_RES (5), (6), (38): Xaa is C or S
VPKPXXAPTQLSATSVLYYDDSSNVILRKHRNMVVRAX

SEQ ID NO: 7703 - protein, 37 aa, Artificial Sequence
  Non-cyclic GFR-binding peptide
  MOD_RES (1), (2), (37): Xaa is C or S
  MOD_RES (16), (17), (18), (19), (20): Xaa is A or G
  MOD_RES (21), (22), (23), (24): Xaa is A or G or is absent
XXVPTKLSATSVLYYXXXXXXXXXLRKHREGMSVAEX

SEQ ID NO: 7704 - protein, 30 aa, Artificial Sequence
  Non-cyclic GFR-binding peptide
VPQDLSATSILYYVGRTPKVLRKHRMVVKS

SEQ ID NO: 7705 - protein, 36 aa, Artificial Sequence
  Non-cyclic GFR-binding peptide
  MOD_RES (3), (3): Xaa is C or S
  MOD_RES (17), (18), (19), (20), (21): Xaa is A or G
  MOD_RES (22), (23), (24), (25): Xaa is A or G or is absent
PTXAPTKLSPISVLYKXXXXXXXXXLKYHYNMVVRS

SEQ ID NO: 7706 - protein, 35 aa, Artificial Sequence
  Non-cyclic GFR-binding peptide
  MOD_RES (1), (35): Xaa is C or S
  MOD_RES (15), (16), (17), (18), (19): Xaa is A or G
  MOD_RES (20), (21), (22), (23): Xaa is A or G or is absent
XVPTELNAISMLYFXXXXXXXXXLKKYREMVVEGX

SEQ ID NO: 7707 - protein, 35 aa, Artificial Sequence
  Non-cyclic GFR-binding peptide
  MOD_RES (1), (2), (35): Xaa is C or S
  MOD_RES (16), (17), (18), (19), (20): Xaa is A or G
  MOD_RES (21), (22), (23), (24): Xaa is A or G or is absent
XXVPQALSPISILYKXXXXXXXXXLKYHYMIVRSX

SEQ ID NO: 7708 - protein, 36 aa, Artificial Sequence
  Non-cyclic GFR-binding peptide
  MOD_RES (5), (6): Xaa is C or S
SASPXXVSQDLSATSILYYIGKTPKILRKHRMIVKS

SEQ ID NO: 7709 - protein, 42 aa, Artificial Sequence
  Non-cyclic GFR-binding peptide
  MOD_RES (6), (7), (39), (41): Xaa is C or S
KIPKAXXVPTELSPISMLYKDENEKVVLKYHYDMVVEGXGXR

SEQ ID NO: 7710 - protein, 39 aa, Artificial Sequence
  Non-cyclic GFR-binding peptide
  MOD_RES (4), (4): Xaa is C or S
  MOD_RES (20), (21), (22), (23), (24): Xaa is A or G
  MOD_RES (25), (26), (27), (28): Xaa is A or G or is absent
NVQXRPTQVQLSPISVLYKXXXXXXXXXLKYHYTLEDHL

SEQ ID NO: 7711 - protein, 38 aa, Artificial Sequence
  Non-cyclic GFR-binding peptide
  MOD_RES (5), (6), (37): Xaa is C or S
SAAPXXVPQALSATSILYYVGRKPKVLRKHRMIVRSXK

SEQ ID NO: 7712 - protein, 38 aa, Artificial Sequence
  Non-cyclic GFR-binding peptide
  MOD_RES (5), (6), (37): Xaa is C or S
SAAPXXVPQALSAISILYLVGRKPKVLKNYQMIVRSXK

SEQ ID NO: 7713 - protein, 35 aa, Artificial Sequence
  Non-cyclic GFR-binding peptide
  MOD_RES (5), (5): Xaa is C or S
TKPTXAPTKLSATSVLYYDDSSNVILRKHRNMVVR

SEQ ID NO: 7714 - protein, 36 aa, Artificial Sequence
  Non-cyclic GFR-binding peptide
  MOD_RES (5), (6): Xaa is C or S
SAAPXXVPQALSAISILYLVGRKPKVLKNYQMIVRS

SEQ ID NO: 7715 - protein, 33 aa, Artificial Sequence
  Non-cyclic GFR-binding peptide
  MOD_RES (1), (1): Xaa is C or S
  MOD_RES (15), (16), (17), (18), (19): Xaa is A or G
  MOD_RES (20), (21), (22), (23): Xaa is A or G or is absent
XAPTQLSPISVLYKXXXXXXXXXLKYHYNMVVR

SEQ ID NO: 7716 - protein, 40 aa, Artificial Sequence
  Non-cyclic GFR-binding peptide
  MOD_RES (37), (39): Xaa is C or S
  MOD_RES (16), (17), (18), (19), (20): Xaa is A or G
  MOD_RES (21), (22), (23), (24): Xaa is A or G or is absent
RPTQVQLSPISVLYKXXXXXXXXXLKYHYTLEDHLAXKXE

SEQ ID NO: 7717 - protein, 33 aa, Artificial Sequence
  Non-cyclic GFR-binding peptide
  MOD_RES (31), (33): Xaa is C or S
VPQALSPISILYKVGRKPKVLKYHYMIVRSXKX

SEQ ID NO: 7718 - protein, 37 aa, Artificial Sequence
  Non-cyclic GFR-binding peptide
  MOD_RES (1), (2), (35), (37): Xaa is C or S
  MOD_RES (16), (17), (18), (19), (20): Xaa is A or G
  MOD_RES (21), (22), (23), (24): Xaa is A or G or is absent
XXVPQDLSATSILYYXXXXXXXXXLRKHRMVVKSXKX

SEQ ID NO: 7719 - protein, 34 aa, Artificial Sequence
  Non-cyclic GFR-binding peptide
  MOD_RES (3), (4): Xaa is C or S
KPXXAPTQLSAISVLYLDDSSNVILKNYQNMVVR

SEQ ID NO: 7720 - protein, 39 aa, Artificial Sequence
  Non-cyclic GFR-binding peptide
  MOD_RES (2), (3), (37), (39): Xaa is C or S
  MOD_RES (17), (18), (19), (20), (21): Xaa is A or G
  MOD_RES (22), (23), (24), (25): Xaa is A or G or is absent
PXXAPTKLSPISVLYKXXXXXXXXXLKYHYNMVVRSXGX

SEQ ID NO: 7721 - protein, 41 aa, Artificial Sequence
  Non-cyclic GFR-binding peptide
  MOD_RES (5), (6), (39), (41): Xaa is C or S
  MOD_RES (20), (21), (22), (23), (24): Xaa is A or G
  MOD_RES (25), (26), (27), (28): Xaa is A or G or is absent
SASPXXVPQDLSPISILYKXXXXXXXXXLKYHYMVVKSXKX

SEQ ID NO: 7722 - protein, 35 aa, Artificial Sequence
  Non-cyclic GFR-binding peptide
  MOD_RES (1), (1): Xaa is C or S
XRPTQVQLSAISVLYLEIVRKKPIFLKNYQTLEDH

SEQ ID NO: 7723 - protein, 41 aa, Artificial Sequence
  Non-cyclic GFR-binding peptide
  MOD_RES (5), (6), (40): Xaa is C or S
  MOD_RES (20), (21), (22), (23), (24): Xaa is A or G
  MOD_RES (25), (26), (27), (28): Xaa is A or G or is absent
VPKPXXAPTQLSPISVLYKXXXXXXXXXLKYHYNMVVRAXG

SEQ ID NO: 7724 - protein, 39 aa, Artificial Sequence
  Non-cyclic GFR-binding peptide
  MOD_RES (4), (5), (36), (38): Xaa is C or S
ASPXXVSQDLSPISILYKIGKTPKILKYHYMIVKSXKXS

SEQ ID NO: 7725 - protein, 33 aa, Artificial Sequence
  Non-cyclic GFR-binding peptide
  MOD_RES (31), (33): Xaa is C or S
VPQALSATSILYYVGRKPKVLRKHRMIVRSXKX

SEQ ID NO: 7726 - protein, 37 aa, Artificial Sequence
  Non-cyclic GFR-binding peptide
  MOD_RES (2), (3), (35), (37): Xaa is C or S
AXXAPTKLNAISVLYFDSSNNVILKKYRNMVVKAXGX

SEQ ID NO: 7727 - protein, 32 aa, Artificial Sequence
  Non-cyclic GFR-binding peptide
  MOD_RES (32), (32): Xaa is C or S
APTQLSATSVLYYDDSSNVILRKHRNMVVRAX

SEQ ID NO: 7728 - protein, 40 aa, Artificial Sequence
  Non-cyclic GFR-binding peptide
  MOD_RES (3), (4), (39): Xaa is C or S
  MOD_RES (18), (19), (20), (21), (22): Xaa is A or G
  MOD_RES (23), (24), (25), (26): Xaa is A or G or is absent
KAXXVPTKLSATSVLYYXXXXXXXXXLRKHREGMSVAEXG

SEQ ID NO: 7729 - protein, 33 aa, Artificial Sequence
  Non-cyclic GFR-binding peptide
  MOD_RES (14), (15), (16), (17), (18): Xaa is A or G
  MOD_RES (19), (20), (21), (22): Xaa is A or G or is absent
VPTELSPISMLYKXXXXXXXXXLKYHYEMVVEG

SEQ ID NO: 7730 - protein, 36 aa, Artificial Sequence
  Non-cyclic GFR-binding peptide
  MOD_RES (3), (4): Xaa is C or S
  MOD_RES (18), (19), (20), (21), (22): Xaa is A or G
  MOD_RES (23), (24), (25), (26): Xaa is A or G or is absent
SPXXVSQDLSAISILYLXXXXXXXXXLKNYQMIVKS

SEQ ID NO: 7731 - protein, 37 aa, Artificial Sequence
  Non-cyclic GFR-binding peptide
  MOD_RES (4), (5): Xaa is C or S
  MOD_RES (19), (20), (21), (22), (23): Xaa is A or G
  MOD_RES (24), (25), (26), (27): Xaa is A or G or is absent
PKPXXAPTQLSAISVLYLXXXXXXXXXLKNYQNMVVR

SEQ ID NO: 7732 - protein, 31 aa, Artificial Sequence
  Non-cyclic GFR-binding peptide
  MOD_RES (1), (1): Xaa is C or S
XVPQDLSATSILYYVGRTPKVLRKHRMVVKS

SEQ ID NO: 7733 - protein, 40 aa, Artificial Sequence
  Non-cyclic GFR-binding peptide
  MOD_RES (3), (37), (39): Xaa is C or S
  MOD_RES (17), (18), (19), (20), (21): Xaa is A or G
  MOD_RES (22), (23), (24), (25): Xaa is A or G or is absent
PTXAPTKLSPISVLYKXXXXXXXXXLKYHYNMVVRSXGXH

SEQ ID NO: 7734 - protein, 37 aa, Artificial Sequence
  Non-cyclic GFR-binding peptide
  MOD_RES (4), (5), (37): Xaa is C or S
PKAXXAPTKLSPISVLYKDSSNNVILKYHYNMVVKAX

SEQ ID NO: 7735 - protein, 36 aa, Artificial Sequence
  Non-cyclic GFR-binding peptide
  MOD_RES (3), (4): Xaa is C or S
  MOD_RES (18), (19), (20), (21), (22): Xaa is A or G
  MOD_RES (23), (24), (25), (26): Xaa is A or G or is absent
KPXXAPTKLSATSVLYYXXXXXXXXXLRKHRNMVVR

SEQ ID NO: 7736 - protein, 40 aa, Artificial Sequence
  Non-cyclic GFR-binding peptide
  MOD_RES (4), (5), (40): Xaa is C or S
  MOD_RES (19), (20), (21), (22), (23): Xaa is A or G
  MOD_RES (24), (25), (26), (27): Xaa is A or G or is absent
GKAXXVPTKLNAISVLYFXXXXXXXXXLKKYREGMSVAEX

SEQ ID NO: 7737 - protein, 37 aa, Artificial Sequence
  Non-cyclic GFR-binding peptide
  MOD_RES (5), (6): Xaa is C or S
IPKAXXVPTELNAISMLYFDENEKVVLKKYRDMVVEG

SEQ ID NO: 7738 - protein, 39 aa, Artificial Sequence
  Non-cyclic GFR-binding peptide
  MOD_RES (4), (5), (38): Xaa is C or S
GKAXXVPTKLNAISVLYFDDMGVPTLKKYREGMSVAEXG

SEQ ID NO: 7739 - protein, 33 aa, Artificial Sequence
  Non-cyclic GFR-binding peptide
  MOD_RES (1), (2), (33): Xaa is C or S
XXVSQDLNAISILYFIGKTPKILKKYRMIVKSX

SEQ ID NO: 7740 - protein, 37 aa, Artificial Sequence
  Non-cyclic GFR-binding peptide
  MOD_RES (6), (7): Xaa is C or S
KIPKAXXVPTELSPISMLYKDENEKVVLKYHYDMVVE

SEQ ID NO: 7741 - protein, 39 aa, Artificial Sequence
  Non-cyclic GFR-binding peptide
  MOD_RES (4), (5): Xaa is C or S
  MOD_RES (19), (20), (21), (22), (23): Xaa is A or G
  MOD_RES (24), (25), (26), (27): Xaa is A or G or is absent
GKAXXVPTKLSATSVLYYXXXXXXXXXLRKHREGMSVAE

SEQ ID NO: 7742 - protein, 33 aa, Artificial Sequence
  Non-cyclic GFR-binding peptide
  MOD_RES (1), (32): Xaa is C or S
XVPQALSAISILYLVGRKPKVLKNYQMIVRSXK

SEQ ID NO: 7743 - protein, 40 aa, Artificial Sequence
  Non-cyclic GFR-binding peptide
  MOD_RES (1), (38), (40): Xaa is C or S
  MOD_RES (17), (18), (19), (20), (21): Xaa is A or G
  MOD_RES (22), (23), (24), (25): Xaa is A or G or is absent
XRPTQVQLSPISVLYKXXXXXXXXXLKYHYTLEDHLAXKX

SEQ ID NO: 7744 - protein, 39 aa, Artificial Sequence
  Non-cyclic GFR-binding peptide
  MOD_RES (2), (3), (36), (38): Xaa is C or S
  MOD_RES (17), (18), (19), (20), (21): Xaa is A or G
  MOD_RES (22), (23), (24), (25): Xaa is A or G or is absent
PXXVPQALSATSILYYXXXXXXXXXLRKHRMIVRSXKXS

SEQ ID NO: 7745 - protein, 35 aa, Artificial Sequence
  Non-cyclic GFR-binding peptide
  MOD_RES (1), (2), (33), (35): Xaa is C or S
XXVPQDLSPISILYKVGRTPKVLKYHYMVVKSXKX

SEQ ID NO: 7746 - protein, 41 aa, Artificial Sequence
  Non-cyclic GFR-binding peptide
  MOD_RES (5), (6), (38), (40): Xaa is C or S
VPKAXXAPTKLSAISVLYLDSSNNVILKNYQNMVVKAXGXH

SEQ ID NO: 7747 - protein, 38 aa, Artificial Sequence
  Non-cyclic GFR-binding peptide
  MOD_RES (1), (2), (35), (37): Xaa is C or S
  MOD_RES (16), (17), (18), (19), (20): Xaa is A or G
  MOD_RES (21), (22), (23), (24): Xaa is A or G or is absent
XXVPQDLNAISILYFXXXXXXXXXLKKYRMVVKSXKXS

SEQ ID NO: 7748 - protein, 39 aa, Artificial Sequence
  Non-cyclic GFR-binding peptide
  MOD_RES (6), (7), (39): Xaa is C or S
TVPKPXXAPTQLSAISVLYLDDSSNVILKNYQNMVVRAX

SEQ ID NO: 7749 - protein, 36 aa, Artificial Sequence
  Non-cyclic GFR-binding peptide
  MOD_RES (5), (6): Xaa is C or S
SASPXXVPQDLSAISILYLVGRTPKVLKNYQMVVKS

SEQ ID NO: 7750 - protein, 36 aa, Artificial Sequence
  Non-cyclic GFR-binding peptide
  MOD_RES (2), (2): Xaa is C or S
  MOD_RES (18), (19), (20), (21), (22): Xaa is A or G
  MOD_RES (23), (24), (25), (26): Xaa is A or G or is absent
QXRPTQVQLSPISVLYKXXXXXXXXXLKYHYTLEDH

SEQ ID NO: 7751 - protein, 37 aa, Artificial Sequence
  Non-cyclic GFR-binding peptide
  MOD_RES (6), (7): Xaa is C or S
ASAAPXXVPQALSAISILYLVGRKPKVLKNYQMIVRS

SEQ ID NO: 7752 - protein, 36 aa, Artificial Sequence
  Non-cyclic GFR-binding peptide
  MOD_RES (4), (5), (36): Xaa is C or S
AAPXXVPQALSATSILYYVGRKPKVLRKHRMIVRSX

SEQ ID NO: 7753 - protein, 41 aa, Artificial Sequence
  Non-cyclic GFR-binding peptide
  MOD_RES (1), (38), (40): Xaa is C or S
  MOD_RES (17), (18), (19), (20), (21): Xaa is A or G
  MOD_RES (22), (23), (24), (25): Xaa is A or G or is absent
XRPTQVQLNAISVLYFXXXXXXXXXLKKYRTLEDHLAXKXE

SEQ ID NO: 7754 - protein, 37 aa, Artificial Sequence
  Non-cyclic GFR-binding peptide
  MOD_RES (4), (5): Xaa is C or S
  MOD_RES (19), (20), (21), (22), (23): Xaa is A or G
  MOD_RES (24), (25), (26), (27): Xaa is A or G or is absent
AAPXXVPQALSAISILYLXXXXXXXXXLKNYQMIVRS

SEQ ID NO: 7755 - protein, 43 aa, Artificial Sequence
  Non-cyclic GFR-binding peptide
  MOD_RES (3), (40), (42): Xaa is C or S
VQXRPTQVQLSATSVLYYEIVRKKPIFLRKHRTLEDHLAXKXE

SEQ ID NO: 7756 - protein, 38 aa, Artificial Sequence
  Non-cyclic GFR-binding peptide
  MOD_RES (2), (3), (35), (37): Xaa is C or S
AXXVPTELSPISMLYKDEYDKVVLKYHYEMVVEGXGXR

SEQ ID NO: 7757 - protein, 36 aa, Artificial Sequence
  Non-cyclic GFR-binding peptide
  MOD_RES (3), (4): Xaa is C or S
  MOD_RES (18), (19), (20), (21), (22): Xaa is A or G
  MOD_RES (23), (24), (25), (26): Xaa is A or G or is absent
KAXXAPTKLSPISVLYKXXXXXXXXXLKYHYNMVVK

SEQ ID NO: 7758 - protein, 37 aa, Artificial Sequence
  Non-cyclic GFR-binding peptide
  MOD_RES (2), (3), (37): Xaa is C or S
  MOD_RES (17), (18), (19), (20), (21): Xaa is A or G
  MOD_RES (22), (23), (24), (25): Xaa is A or G or is absent
AXXAPTKLSAISVLYLXXXXXXXXXLKNYQNMVVKAX

SEQ ID NO: 7759 - protein, 39 aa, Artificial Sequence
  Non-cyclic GFR-binding peptide
  MOD_RES (4), (5), (36), (38): Xaa is C or S
ASPXXVPQDLSAISILYLVGRTPKVLKNYQMVVKSXKXS

SEQ ID NO: 7760 - protein, 41 aa, Artificial Sequence
  Non-cyclic GFR-binding peptide
  MOD_RES (1), (38), (40): Xaa is C or S
  MOD_RES (17), (18), (19), (20), (21): Xaa is A or G
  MOD_RES (22), (23), (24), (25): Xaa is A or G or is absent
XRPTQVQLSPISVLYKXXXXXXXXXLKYHYTLEDHLAXKXE

SEQ ID NO: 7761 - protein, 44 aa, Artificial Sequence
  Non-cyclic GFR-binding peptide
  MOD_RES (4), (41), (43): Xaa is C or S
  MOD_RES (20), (21), (22), (23), (24): Xaa is A or G
  MOD_RES (25), (26), (27), (28): Xaa is A or G or is absent
NVQXRPTQVQLNAISVLYFXXXXXXXXXLKKYRTLEDHLAXKXE

SEQ ID NO: 7762 - protein, 32 aa, Artificial Sequence
  Non-cyclic GFR-binding peptide
  MOD_RES (1), (1): Xaa is C or S
XVPTELNAISMLYFDENEKVVLKKYRDMVVEG

SEQ ID NO: 7763 - protein, 39 aa, Artificial Sequence
  Non-cyclic GFR-binding peptide
  MOD_RES (4), (5): Xaa is C or S
  MOD_RES (19), (20), (21), (22), (23): Xaa is A or G
  MOD_RES (24), (25), (26), (27): Xaa is A or G or is absent
GKAXXVPTKLSAISVLYLXXXXXXXXXLKNYQEGMSVAE

SEQ ID NO: 7764 - protein, 37 aa, Artificial Sequence
  Non-cyclic GFR-binding peptide
  MOD_RES (2), (3), (35), (37): Xaa is C or S
PXXAPTKLSAISVLYLDDSSNVILKNYQNMVVRSXGX

SEQ ID NO: 7765 - protein, 36 aa, Artificial Sequence
  Non-cyclic GFR-binding peptide
  MOD_RES (4), (4): Xaa is C or S
  MOD_RES (18), (19), (20), (21), (22): Xaa is A or G
  MOD_RES (23), (24), (25), (26): Xaa is A or G or is absent
KPTXAPTKLSPISVLYKXXXXXXXXXLKYHYNMVVR

SEQ ID NO: 7766 - protein, 38 aa, Artificial Sequence
  Non-cyclic GFR-binding peptide
  MOD_RES (4), (5), (37): Xaa is C or S
PKAXXAPTKLSAISVLYLDSSNNVILKNYQNMVVKAXG

SEQ ID NO: 7767 - protein, 37 aa, Artificial Sequence
  Non-cyclic GFR-binding peptide
  MOD_RES (4), (5): Xaa is C or S
  MOD_RES (19), (20), (21), (22), (23): Xaa is A or G
  MOD_RES (24), (25), (26), (27): Xaa is A or G or is absent
ASPXXVSQDLSAISILYLXXXXXXXXXLKNYQMIVKS

SEQ ID NO: 7768 - protein, 36 aa, Artificial Sequence
  Non-cyclic GFR-binding peptide
  MOD_RES (3), (4): Xaa is C or S
  MOD_RES (18), (19), (20), (21), (22): Xaa is A or G
  MOD_RES (23), (24), (25), (26): Xaa is A or G or is absent
APXXVPQALSPISILYKXXXXXXXXXLKYHYMIVRS

SEQ ID NO: 7769 - protein, 41 aa, Artificial Sequence
  Non-cyclic GFR-binding peptide
  MOD_RES (6), (7), (41): Xaa is C or S
  MOD_RES (21), (22), (23), (24), (25): Xaa is A or G
  MOD_RES (26), (27), (28), (29): Xaa is A or G or is absent
SIPKAXXVPTELNAISMLYFXXXXXXXXXLKKYREMVVEGX

SEQ ID NO: 7770 - protein, 32 aa, Artificial Sequence
  Non-cyclic GFR-binding peptide
  MOD_RES (1), (1): Xaa is C or S
XVPTELNAISMLYFDEYDKVVLKKYREMVVEG

SEQ ID NO: 7771 - protein, 38 aa, Artificial Sequence
  Non-cyclic GFR-binding peptide
  MOD_RES (2), (3), (37): Xaa is C or S
  MOD_RES (17), (18), (19), (20), (21): Xaa is A or G
  MOD_RES (22), (23), (24), (25): Xaa is A or G or is absent
AXXVPTELSATSMLYYXXXXXXXXXLRKHRDMVVEGXG

SEQ ID NO: 7772 - protein, 40 aa, Artificial Sequence
  Non-cyclic GFR-binding peptide
  MOD_RES (5), (6), (39): Xaa is C or S
  MOD_RES (20), (21), (22), (23), (24): Xaa is A or G
  MOD_RES (25), (26), (27), (28): Xaa is A or G or is absent
SASPXXVSQDLSAISILYLXXXXXXXXXLKNYQMIVKSXK

SEQ ID NO: 7773 - protein, 36 aa, Artificial Sequence
  Non-cyclic GFR-binding peptide
  MOD_RES (2), (3), (34), (36): Xaa is C or S
PXXVSQDLSAISILYLIGKTPKILKNYQMIVKSXKX

SEQ ID NO: 7774 - protein, 39 aa, Artificial Sequence
  Non-cyclic GFR-binding peptide
  MOD_RES (4), (5), (39): Xaa is C or S
  MOD_RES (19), (20), (21), (22), (23): Xaa is A or G
  MOD_RES (24), (25), (26), (27): Xaa is A or G or is absent
PKAXXVPTELSPISMLYKXXXXXXXXXLKYHYEMVVEGX

SEQ ID NO: 7775 - protein, 37 aa, Artificial Sequence
  Non-cyclic GFR-binding peptide
  MOD_RES (34), (36): Xaa is C or S
  MOD_RES (14), (15), (16), (17), (18): Xaa is A or G
  MOD_RES (19), (20), (21), (22): Xaa is A or G or is absent
VPTELNAISMLYFXXXXXXXXXLKKYREMVVEGXGXR

SEQ ID NO: 7776 - protein, 36 aa, Artificial Sequence
  Non-cyclic GFR-binding peptide
  MOD_RES (2), (3), (34), (36): Xaa is C or S
PXXVPQALSAISILYLVGRKPKVLKNYQMIVRSXKX

SEQ ID NO: 7777 - protein, 36 aa, Artificial Sequence
  Non-cyclic GFR-binding peptide
  MOD_RES (1), (34), (36): Xaa is C or S
XVPTKLNAISVLYFDDMGVPTLKKYREGMSVAEXGX

SEQ ID NO: 7778 - protein, 40 aa, Artificial Sequence
  Non-cyclic GFR-binding peptide
  MOD_RES (6), (7), (39): Xaa is C or S
SIPKAXXVPTELNAISMLYFDEYDKVVLKKYREMVVEGXG

SEQ ID NO: 7779 - protein, 37 aa, Artificial Sequence
  Non-cyclic GFR-binding peptide
  MOD_RES (1), (2), (36): Xaa is C or S
  MOD_RES (16), (17), (18), (19), (20): Xaa is A or G
  MOD_RES (21), (22), (23), (24): Xaa is A or G or is absent
XXAPTKLSAISVLYLXXXXXXXXXLKNYQNMVVKAXG

SEQ ID NO: 7780 - protein, 34 aa, Artificial Sequence
  Non-cyclic GFR-binding peptide
  MOD_RES (3), (4): Xaa is C or S
KPXXAPTQLSPISVLYKDDSSNVILKYHYNMVVR

SEQ ID NO: 7781 - protein, 35 aa, Artificial Sequence
  Non-cyclic GFR-binding peptide
  MOD_RES (2), (3), (34): Xaa is C or S
PXXVSQDLSATSILYYIGKTPKILRKHRMIVKSXK

SEQ ID NO: 7782 - protein, 35 aa, Artificial Sequence
  Non-cyclic GFR-binding peptide
  MOD_RES (33), (35): Xaa is C or S
  MOD_RES (14), (15), (16), (17), (18): Xaa is A or G
  MOD_RES (19), (20), (21), (22): Xaa is A or G or is absent
VPQALNAISILYFXXXXXXXXXLKKYRMIVRSXKX

SEQ ID NO: 7783 - protein, 41 aa, Artificial Sequence
  Non-cyclic GFR-binding peptide
  MOD_RES (6), (7), (39), (41): Xaa is C or S
SIPKAXXVPTELNAISMLYFDEYDKVVLKKYREMVVEGXGX

SEQ ID NO: 7784 - protein, 36 aa, Artificial Sequence
  Non-cyclic GFR-binding peptide
  MOD_RES (5), (6): Xaa is C or S
SASPXXVPQDLSPISILYKVGRTPKVLKYHYMVVKS

SEQ ID NO: 7785 - protein, 40 aa, Artificial Sequence
  Non-cyclic GFR-binding peptide
  MOD_RES (4), (5), (37), (39): Xaa is C or S
PKAXXAPTKLNAISVLYFDSSNNVILKKYRNMVVKAXGXH

SEQ ID NO: 7786 - protein, 37 aa, Artificial Sequence
  Non-cyclic GFR-binding peptide
  MOD_RES (5), (6), (37): Xaa is C or S
SAAPXXVPQALSAISILYLVGRKPKVLKNYQMIVRSX

SEQ ID NO: 7787 - protein, 37 aa, Artificial Sequence
  Non-cyclic GFR-binding peptide
  MOD_RES (2), (3), (34), (36): Xaa is C or S
PXXVSQDLSAISILYLIGKTPKILKNYQMIVKSXKXS

SEQ ID NO: 7788 - protein, 31 aa, Artificial Sequence
  Non-cyclic GFR-binding peptide
  MOD_RES (1), (1): Xaa is C or S
XVSQDLSAISILYLIGKTPKILKNYQMIVKS

SEQ ID NO: 7789 - protein, 44 aa, Artificial Sequence
  Non-cyclic GFR-binding peptide
  MOD_RES (5), (6), (41), (43): Xaa is C or S
  MOD_RES (20), (21), (22), (23), (24): Xaa is A or G
  MOD_RES (25), (26), (27), (28): Xaa is A or G or is absent
VGKAXXVPTKLSATSVLYYXXXXXXXXXLRKHREGMSVAEXGXR

SEQ ID NO: 7790 - protein, 40 aa, Artificial Sequence
  Non-cyclic GFR-binding peptide
  MOD_RES (1), (2), (37), (39): Xaa is C or S
  MOD_RES (16), (17), (18), (19), (20): Xaa is A or G
  MOD_RES (21), (22), (23), (24): Xaa is A or G or is absent
XXVPTKLSATSVLYYXXXXXXXXXLRKHREGMSVAEXGXR

SEQ ID NO: 7791 - protein, 44 aa, Artificial Sequence
  Non-cyclic GFR-binding peptide
  MOD_RES (4), (41), (43): Xaa is C or S
  MOD_RES (20), (21), (22), (23), (24): Xaa is A or G
  MOD_RES (25), (26), (27), (28): Xaa is A or G or is absent
NVQXRPTQVQLSPISVLYKXXXXXXXXXLKYHYTLEDHLAXKXE

SEQ ID NO: 7792 - protein, 39 aa, Artificial Sequence
  Non-cyclic GFR-binding peptide
  MOD_RES (3), (4), (36), (38): Xaa is C or S
KAXXVPTELNAISMLYFDEYDKVVLKKYREMVVEGXGXR

SEQ ID NO: 7793 - protein, 34 aa, Artificial Sequence
  Non-cyclic GFR-binding peptide
  MOD_RES (1), (33): Xaa is C or S
XAPTKLSAISVLYLDDSSNVILKNYQNMVVRSXG

SEQ ID NO: 7794 - protein, 34 aa, Artificial Sequence
  Non-cyclic GFR-binding peptide
  MOD_RES (2), (3): Xaa is C or S
AXXVPTELSPISMLYKDEYDKVVLKYHYEMVVEG

SEQ ID NO: 7795 - protein, 37 aa, Artificial Sequence
  Non-cyclic GFR-binding peptide
  MOD_RES (1), (35), (37): Xaa is C or S
  MOD_RES (15), (16), (17), (18), (19): Xaa is A or G
  MOD_RES (20), (21), (22), (23): Xaa is A or G or is absent
XAPTKLSPISVLYKXXXXXXXXXLKYHYNMVVKAXGX

SEQ ID NO: 7796 - protein, 42 aa, Artificial Sequence
  Non-cyclic GFR-binding peptide
  MOD_RES (6), (7), (40), (42): Xaa is C or S
  MOD_RES (21), (22), (23), (24), (25): Xaa is A or G
  MOD_RES (26), (27), (28), (29): Xaa is A or G or is absent
ASASPXXVSQDLSAISILYLXXXXXXXXXLKNYQMIVKSXKX

SEQ ID NO: 7797 - protein, 41 aa, Artificial Sequence
  Non-cyclic GFR-binding peptide
  MOD_RES (5), (6), (39), (41): Xaa is C or S
  MOD_RES (20), (21), (22), (23), (24): Xaa is A or G
  MOD_RES (25), (26), (27), (28): Xaa is A or G or is absent
SASPXXVSQDLSAISILYLXXXXXXXXXLKNYQMIVKSXKX

SEQ ID NO: 7798 - protein, 37 aa, Artificial Sequence
  Non-cyclic GFR-binding peptide
  MOD_RES (6), (7): Xaa is C or S
ASASPXXVSQDLSATSILYYIGKTPKILRKHRMIVKS

SEQ ID NO: 7799 - protein, 41 aa, Artificial Sequence
  Non-cyclic GFR-binding peptide
  MOD_RES (4), (5), (39), (41): Xaa is C or S
  MOD_RES (19), (20), (21), (22), (23): Xaa is A or G
  MOD_RES (24), (25), (26), (27): Xaa is A or G or is absent
PKPXXAPTQLSAISVLYLXXXXXXXXXLKNYQNMVVRAXGX

SEQ ID NO: 7800 - protein, 31 aa, Artificial Sequence
  Non-cyclic GFR-binding peptide
  MOD_RES (1), (1): Xaa is C or S
XVSQDLSPISILYKIGKTPKILKYHYMIVKS

SEQ ID NO: 7801 - protein, 37 aa, Artificial Sequence
  Non-cyclic GFR-binding peptide
  MOD_RES (3), (4), (35), (37): Xaa is C or S
SPXXVSQDLNAISILYFIGKTPKILKKYRMIVKSXKX

SEQ ID NO: 7802 - protein, 34 aa, Artificial Sequence
  Non-cyclic GFR-binding peptide
  MOD_RES (1), (2), (34): Xaa is C or S
XXVPTELSATSMLYYDENEKVVLRKHRDMVVEGX

SEQ ID NO: 7803 - protein, 39 aa, Artificial Sequence
  Non-cyclic GFR-binding peptide
  MOD_RES (2), (3), (36), (38): Xaa is C or S
  MOD_RES (17), (18), (19), (20), (21): Xaa is A or G
  MOD_RES (22), (23), (24), (25): Xaa is A or G or is absent
PXXVSQDLNAISILYFXXXXXXXXXLKKYRMIVKSXKXS

SEQ ID NO: 7804 - protein, 43 aa, Artificial Sequence
  Non-cyclic GFR-binding peptide
  MOD_RES (5), (6), (41), (43): Xaa is C or S
  MOD_RES (20), (21), (22), (23), (24): Xaa is A or G
  MOD_RES (25), (26), (27), (28): Xaa is A or G or is absent
VGKAXXVPTKLSAISVLYLXXXXXXXXXLKNYQEGMSVAEXGX

SEQ ID NO: 7805 - protein, 35 aa, Artificial Sequence
  Non-cyclic GFR-binding peptide
  MOD_RES (1), (34): Xaa is C or S
  MOD_RES (15), (16), (17), (18), (19): Xaa is A or G
  MOD_RES (20), (21), (22), (23): Xaa is A or G or is absent
XVPQDLNAISILYFXXXXXXXXXLKKYRMVVKSXK

SEQ ID NO: 7806 - protein, 34 aa, Artificial Sequence
  Non-cyclic GFR-binding peptide
  MOD_RES (2), (3): Xaa is C or S
AXXVPTELSPISMLYKDENEKVVLKYHYDMVVEG

SEQ ID NO: 7807 - protein, 34 aa, Artificial Sequence
  Non-cyclic GFR-binding peptide
  MOD_RES (32), (34): Xaa is C or S
VPTELSPISMLYKDEYDKVVLKYHYEMVVEGXGX

SEQ ID NO: 7808 - protein, 37 aa, Artificial Sequence
  Non-cyclic GFR-binding peptide
  MOD_RES (1), (36): Xaa is C or S
  MOD_RES (15), (16), (17), (18), (19): Xaa is A or G
  MOD_RES (20), (21), (22), (23): Xaa is A or G or is absent
XVPTKLSAISVLYLXXXXXXXXXLKNYQEGMSVAEXG

SEQ ID NO: 7809 - protein, 38 aa, Artificial Sequence
  Non-cyclic GFR-binding peptide
  MOD_RES (7), (7): Xaa is C or S
HVTKPTXAPTKLSPISVLYKDDSSNVILKYHYNMVVRS

SEQ ID NO: 7810 - protein, 42 aa, Artificial Sequence
  Non-cyclic GFR-binding peptide
  MOD_RES (6), (7), (41): Xaa is C or S
  MOD_RES (21), (22), (23), (24), (25): Xaa is A or G
  MOD_RES (26), (27), (28), (29): Xaa is A or G or is absent
TVPKPXXAPTQLSPISVLYKXXXXXXXXXLKYHYNMVVRAXG

SEQ ID NO: 7811 - protein, 42 aa, Artificial Sequence
  Non-cyclic GFR-binding peptide
  MOD_RES (6), (7), (40), (42): Xaa is C or S
  MOD_RES (21), (22), (23), (24), (25): Xaa is A or G
  MOD_RES (26), (27), (28), (29): Xaa is A or G or is absent
ASAAPXXVPQALSAISILYLXXXXXXXXXLKNYQMIVRSXKX

SEQ ID NO: 7812 - protein, 38 aa, Artificial Sequence
  Non-cyclic GFR-binding peptide
  MOD_RES (1), (35), (37): Xaa is C or S
  MOD_RES (15), (16), (17), (18), (19): Xaa is A or G
  MOD_RES (20), (21), (22), (23): Xaa is A or G or is absent
XVPTELSPISMLYKXXXXXXXXXLKYHYDMVVEGXGXR

SEQ ID NO: 7813 - protein, 40 aa, Artificial Sequence
  Non-cyclic GFR-binding peptide
  MOD_RES (4), (5), (39): Xaa is C or S
  MOD_RES (19), (20), (21), (22), (23): Xaa is A or G
  MOD_RES (24), (25), (26), (27): Xaa is A or G or is absent
PKPXXAPTQLSPISVLYKXXXXXXXXXLKYHYNMVVRAXG

SEQ ID NO: 7814 - protein, 40 aa, Artificial Sequence
  Non-cyclic GFR-binding peptide
  MOD_RES (1), (38), (40): Xaa is C or S
  MOD_RES (17), (18), (19), (20), (21): Xaa is A or G
  MOD_RES (22), (23), (24), (25): Xaa is A or G or is absent
XRPTQVQLSAISVLYLXXXXXXXXXLKNYQTLEDHLAXKX

SEQ ID NO: 7815 - protein, 36 aa, Artificial Sequence
  Non-cyclic GFR-binding peptide
  MOD_RES (36), (36): Xaa is C or S
PTQVQLSATSVLYYEIVRKKPIFLRKHRTLEDHLAX

SEQ ID NO: 7816 - protein, 33 aa, Artificial Sequence
  Non-cyclic GFR-binding peptide
  MOD_RES (1), (33): Xaa is C or S
XVPTELSATSMLYYDEYDKVVLRKHREMVVEGX

SEQ ID NO: 7817 - protein, 41 aa, Artificial Sequence
  Non-cyclic GFR-binding peptide
  MOD_RES (2), (39), (41): Xaa is C or S
  MOD_RES (18), (19), (20), (21), (22): Xaa is A or G
  MOD_RES (23), (24), (25), (26): Xaa is A or G or is absent
QXRPTQVQLSPISVLYKXXXXXXXXXLKYHYTLEDHLAXKX

SEQ ID NO: 7818 - protein, 34 aa, Artificial Sequence
  Non-cyclic GFR-binding peptide
  MOD_RES (1), (32), (34): Xaa is C or S
XVPQDLSAISILYLVGRTPKVLKNYQMVVKSXKX

SEQ ID NO: 7819 - protein, 42 aa, Artificial Sequence
  Non-cyclic GFR-binding peptide
  MOD_RES (6), (7), (42): Xaa is C or S
  MOD_RES (21), (22), (23), (24), (25): Xaa is A or G
  MOD_RES (26), (27), (28), (29): Xaa is A or G or is absent
KVGKAXXVPTKLSAISVLYLXXXXXXXXXLKNYQEGMSVAEX

SEQ ID NO: 7820 - protein, 39 aa, Artificial Sequence
  Non-cyclic GFR-binding peptide
  MOD_RES (6), (7), (38): Xaa is C or S
ASASPXXVPQDLNAISILYFVGRTPKVLKKYRMVVKSXK

SEQ ID NO: 7821 - protein, 41 aa, Artificial Sequence
  Non-cyclic GFR-binding peptide
  MOD_RES (6), (7), (38), (40): Xaa is C or S
ASAAPXXVPQALSPISILYKVGRKPKVLKYHYMIVRSXKXS

SEQ ID NO: 7822 - protein, 39 aa, Artificial Sequence
  Non-cyclic GFR-binding peptide
  MOD_RES (37), (39): Xaa is C or S
RPTQVQLNAISVLYFEIVRKKPIFLKKYRTLEDHLAXKX

SEQ ID NO: 7823 - protein, 38 aa, Artificial Sequence
  Non-cyclic GFR-binding peptide
  MOD_RES (3), (4), (37): Xaa is C or S
  MOD_RES (18), (19), (20), (21), (22): Xaa is A or G
  MOD_RES (23), (24), (25), (26): Xaa is A or G or is absent
SPXXVSQDLNAISILYFXXXXXXXXXLKKYRMIVKSXK

SEQ ID NO: 7824 - protein, 36 aa, Artificial Sequence
  Non-cyclic GFR-binding peptide
  MOD_RES (1), (1): Xaa is C or S
  MOD_RES (17), (18), (19), (20), (21): Xaa is A or G
  MOD_RES (22), (23), (24), (25): Xaa is A or G or is absent
XRPTQVQLSPISVLYKXXXXXXXXXLKYHYTLEDHL

SEQ ID NO: 7825 - protein, 39 aa, Artificial Sequence
  Non-cyclic GFR-binding peptide
  MOD_RES (1), (2), (36), (38): Xaa is C or S
  MOD_RES (16), (17), (18), (19), (20): Xaa is A or G
  MOD_RES (21), (22), (23), (24): Xaa is A or G or is absent
XXVPTELNAISMLYFXXXXXXXXXLKKYRDMVVEGXGXR

SEQ ID NO: 7826 - protein, 38 aa, Artificial Sequence
  Non-cyclic GFR-binding peptide
  MOD_RES (2), (36), (38): Xaa is C or S
  MOD_RES (16), (17), (18), (19), (20): Xaa is A or G
  MOD_RES (21), (22), (23), (24): Xaa is A or G or is absent
TXAPTKLSPISVLYKXXXXXXXXXLKYHYNMVVRSXGX

SEQ ID NO: 7827 - protein, 36 aa, Artificial Sequence
  Non-cyclic GFR-binding peptide
  MOD_RES (3), (4), (36): Xaa is C or S
KPXXAPTQLSATSVLYYDDSSNVILRKHRNMVVRAX

SEQ ID NO: 7828 - protein, 35 aa, Artificial Sequence
  Non-cyclic GFR-binding peptide
  MOD_RES (1), (35): Xaa is C or S
  MOD_RES (15), (16), (17), (18), (19): Xaa is A or G
  MOD_RES (20), (21), (22), (23): Xaa is A or G or is absent
XVPTELSPISMLYKXXXXXXXXXLKYHYDMVVEGX

SEQ ID NO: 7829 - protein, 36 aa, Artificial Sequence
  Non-cyclic GFR-binding peptide
  MOD_RES (5), (6): Xaa is C or S
SAAPXXVPQALSPISILYKVGRKPKVLKYHYMIVRS

SEQ ID NO: 7830 - protein, 36 aa, Artificial Sequence
  Non-cyclic GFR-binding peptide
  MOD_RES (3), (4): Xaa is C or S
  MOD_RES (18), (19), (20), (21), (22): Xaa is A or G
  MOD_RES (23), (24), (25), (26): Xaa is A or G or is absent
SPXXVPQDLSATSILYYXXXXXXXXXLRKHRMVVKS

SEQ ID NO: 7831 - protein, 38 aa, Artificial Sequence
  Non-cyclic GFR-binding peptide
  MOD_RES (5), (6): Xaa is C or S
  MOD_RES (20), (21), (22), (23), (24): Xaa is A or G
  MOD_RES (25), (26), (27), (28): Xaa is A or G or is absent
IPKAXXVPTELSPISMLYKXXXXXXXXXLKYHYEMVVE

SEQ ID NO: 7832 - protein, 40 aa, Artificial Sequence
  Non-cyclic GFR-binding peptide
  MOD_RES (5), (6), (40): Xaa is C or S
  MOD_RES (20), (21), (22), (23), (24): Xaa is A or G
  MOD_RES (25), (26), (27), (28): Xaa is A or G or is absent
VPKPXXAPTQLSPISVLYKXXXXXXXXXLKYHYNMVVRAX

SEQ ID NO: 7833 - protein, 33 aa, Artificial Sequence
  Non-cyclic GFR-binding peptide
  MOD_RES (1), (2): Xaa is C or S
XXVPTELSATSMLYYDENEKVVLRKHRDMVVEG

SEQ ID NO: 7834 - protein, 35 aa, Artificial Sequence
  Non-cyclic GFR-binding peptide
  MOD_RES (16), (17), (18), (19), (20): Xaa is A or G
  MOD_RES (21), (22), (23), (24): Xaa is A or G or is absent
RPTQVQLSATSVLYYXXXXXXXXXLRKHRTLEDHL

SEQ ID NO: 7835 - protein, 45 aa, Artificial Sequence
  Non-cyclic GFR-binding peptide
  MOD_RES (6), (7), (42), (44): Xaa is C or S
  MOD_RES (21), (22), (23), (24), (25): Xaa is A or G
  MOD_RES (26), (27), (28), (29): Xaa is A or G or is absent
KVGKAXXVPTKLSATSVLYYXXXXXXXXXLRKHREGMSVAEXGXR

SEQ ID NO: 7836 - protein, 34 aa, Artificial Sequence
  Non-cyclic GFR-binding peptide
  MOD_RES (1), (2), (33): Xaa is C or S
XXVSQDLSATSILYYIGKTPKILRKHRMIVKSXK

SEQ ID NO: 7837 - protein, 37 aa, Artificial Sequence
  Non-cyclic GFR-binding peptide
  MOD_RES (36), (36): Xaa is C or S
PTQVQLNAISVLYFEIVRKKPIFLKKYRTLEDHLAXK

SEQ ID NO: 7838 - protein, 38 aa, Artificial Sequence
  Non-cyclic GFR-binding peptide
  MOD_RES (1), (36), (38): Xaa is C or S
  MOD_RES (15), (16), (17), (18), (19): Xaa is A or G
  MOD_RES (20), (21), (22), (23): Xaa is A or G or is absent
XVPTKLNAISVLYFXXXXXXXXXLKKYREGMSVAEXGX

SEQ ID NO: 7839 - protein, 36 aa, Artificial Sequence
  Non-cyclic GFR-binding peptide
  MOD_RES (34), (36): Xaa is C or S
  MOD_RES (14), (15), (16), (17), (18): Xaa is A or G
  MOD_RES (19), (20), (21), (22): Xaa is A or G or is absent
VPTELNAISMLYFXXXXXXXXXLKKYRDMVVEGXGX

SEQ ID NO: 7840 - protein, 38 aa, Artificial Sequence
  Non-cyclic GFR-binding peptide
  MOD_RES (1), (2), (36), (38): Xaa is C or S
  MOD_RES (16), (17), (18), (19), (20): Xaa is A or G
  MOD_RES (21), (22), (23), (24): Xaa is A or G or is absent
XXAPTQLSPISVLYKXXXXXXXXXLKYHYNMVVRAXGX

SEQ ID NO: 7841 - protein, 37 aa, Artificial Sequence
  Non-cyclic GFR-binding peptide
  MOD_RES (1), (34), (36): Xaa is C or S
  MOD_RES (15), (16), (17), (18), (19): Xaa is A or G
  MOD_RES (20), (21), (22), (23): Xaa is A or G or is absent
XVSQDLNAISILYFXXXXXXXXXLKKYRMIVKSXKXS

SEQ ID NO: 7842 - protein, 36 aa, Artificial Sequence
  Non-cyclic GFR-binding peptide
  MOD_RES (2), (36): Xaa is C or S
  MOD_RES (16), (17), (18), (19), (20): Xaa is A or G
  MOD_RES (21), (22), (23), (24): Xaa is A or G or is absent
TXAPTKLSATSVLYYXXXXXXXXXLRKHRNMVVRSX

SEQ ID NO: 7843 - protein, 42 aa, Artificial Sequence
  Non-cyclic GFR-binding peptide
  MOD_RES (3), (4), (39), (41): Xaa is C or S
  MOD_RES (18), (19), (20), (21), (22): Xaa is A or G
  MOD_RES (23), (24), (25), (26): Xaa is A or G or is absent
KAXXVPTKLSAISVLYLXXXXXXXXXLKNYQEGMSVAEXGXR

SEQ ID NO: 7844 - protein, 35 aa, Artificial Sequence
  Non-cyclic GFR-binding peptide
  MOD_RES (1), (1): Xaa is C or S
XRPTQVQLSPISVLYKEIVRKKPIFLKYHYTLEDH

SEQ ID NO: 7845 - protein, 40 aa, Artificial Sequence
  Non-cyclic GFR-binding peptide
  MOD_RES (4), (5), (39): Xaa is C or S
  MOD_RES (19), (20), (21), (22), (23): Xaa is A or G
  MOD_RES (24), (25), (26), (27): Xaa is A or G or is absent
PKAXXVPTELSPISMLYKXXXXXXXXXLKYHYEMVVEGXG

SEQ ID NO: 7846 - protein, 36 aa, Artificial Sequence
  Non-cyclic GFR-binding peptide
  MOD_RES (3), (4), (36): Xaa is C or S
KPXXAPTKLSAISVLYLDDSSNVILKNYQNMVVRSX

SEQ ID NO: 7847 - protein, 35 aa, Artificial Sequence
  Non-cyclic GFR-binding peptide
  MOD_RES (2), (3), (35): Xaa is C or S
PXXAPTKLSPISVLYKDDSSNVILKYHYNMVVRSX

SEQ ID NO: 7848 - protein, 37 aa, Artificial Sequence
  Non-cyclic GFR-binding peptide
  MOD_RES (1), (34), (36): Xaa is C or S
  MOD_RES (15), (16), (17), (18), (19): Xaa is A or G
  MOD_RES (20), (21), (22), (23): Xaa is A or G or is absent
XVPQALSATSILYYXXXXXXXXXLRKHRMIVRSXKXS

SEQ ID NO: 7849 - protein, 43 aa, Artificial Sequence
  Non-cyclic GFR-binding peptide
  MOD_RES (4), (41), (43): Xaa is C or S
NVQXRPTQVQLSPISVLYKEIVRKKPIFLKYHYTLEDHLAXKX

SEQ ID NO: 7850 - protein, 31 aa, Artificial Sequence
  Non-cyclic GFR-binding peptide
APTQLSATSVLYYDDSSNVILRKHRNMVVRA

SEQ ID NO: 7851 - protein, 33 aa, Artificial Sequence
  Non-cyclic GFR-binding peptide
  MOD_RES (1), (32): Xaa is C or S
XVSQDLSATSILYYIGKTPKILRKHRMIVKSXK

SEQ ID NO: 7852 - protein, 38 aa, Artificial Sequence
  Non-cyclic GFR-binding peptide
  MOD_RES (4), (36), (38): Xaa is C or S
KPTXAPTKLSPISVLYKDDSSNVILKYHYNMVVRSXGX

SEQ ID NO: 7853 - protein, 33 aa, Artificial Sequence
  Non-cyclic GFR-binding peptide
  MOD_RES (1), (2): Xaa is C or S
XXVPTELSATSMLYYDEYDKVVLRKHREMVVEG

SEQ ID NO: 7854 - protein, 35 aa, Artificial Sequence
  Non-cyclic GFR-binding peptide
  MOD_RES (3), (35): Xaa is C or S
PTXAPTKLSAISVLYLDDSSNVILKNYQNMVVRSX

SEQ ID NO: 7855 - protein, 37 aa, Artificial Sequence
  Non-cyclic GFR-binding peptide
  MOD_RES (3), (4), (36): Xaa is C or S
KAXXAPTKLNAISVLYFDSSNNVILKKYRNMVVKAXG

SEQ ID NO: 7856 - protein, 36 aa, Artificial Sequence
  Non-cyclic GFR-binding peptide
  MOD_RES (2), (3), (35): Xaa is C or S
PXXAPTKLSPISVLYKDDSSNVILKYHYNMVVRSXG

SEQ ID NO: 7857 - protein, 34 aa, Artificial Sequence
  Non-cyclic GFR-binding peptide
  MOD_RES (31), (33): Xaa is C or S
VPQALSPISILYKVGRKPKVLKYHYMIVRSXKXS

SEQ ID NO: 7858 - protein, 35 aa, Artificial Sequence
  Non-cyclic GFR-binding peptide
  MOD_RES (3), (4), (35): Xaa is C or S
SPXXVPQDLSAISILYLVGRTPKVLKNYQMVVKSX

SEQ ID NO: 7859 - protein, 39 aa, Artificial Sequence
  Non-cyclic GFR-binding peptide
  MOD_RES (6), (7): Xaa is C or S
  MOD_RES (21), (22), (23), (24), (25): Xaa is A or G
  MOD_RES (26), (27), (28), (29): Xaa is A or G or is absent
TVPKPXXAPTQLSAISVLYLXXXXXXXXXLKNYQNMVVR

SEQ ID NO: 7860 - protein, 36 aa, Artificial Sequence
  Non-cyclic GFR-binding peptide
  MOD_RES (3), (4): Xaa is C or S
  MOD_RES (18), (19), (20), (21), (22): Xaa is A or G
  MOD_RES (23), (24), (25), (26): Xaa is A or G or is absent
SPXXVPQDLSPISILYKXXXXXXXXXLKYHYMVVKS

SEQ ID NO: 7861 - protein, 36 aa, Artificial Sequence
  Non-cyclic GFR-binding peptide
  MOD_RES (2), (2): Xaa is C or S
  MOD_RES (18), (19), (20), (21), (22): Xaa is A or G
  MOD_RES (23), (24), (25), (26): Xaa is A or G or is absent
QXRPTQVQLSATSVLYYXXXXXXXXXLRKHRTLEDH

SEQ ID NO: 7862 - protein, 32 aa, Artificial Sequence
  Non-cyclic GFR-binding peptide
  MOD_RES (14), (15), (16), (17), (18): Xaa is A or G
  MOD_RES (19), (20), (21), (22): Xaa is A or G or is absent
VPTELSPISMLYKXXXXXXXXXLKYHYEMVVE

SEQ ID NO: 7863 - protein, 38 aa, Artificial Sequence
  Non-cyclic GFR-binding peptide
  MOD_RES (6), (7), (38): Xaa is C or S
ASASPXXVPQDLSATSILYYVGRTPKVLRKHRMVVKSX

SEQ ID NO: 7864 - protein, 33 aa, Artificial Sequence
  Non-cyclic GFR-binding peptide
  MOD_RES (1), (2), (33): Xaa is C or S
XXVSQDLSAISILYLIGKTPKILKNYQMIVKSX

SEQ ID NO: 7865 - protein, 40 aa, Artificial Sequence
  Non-cyclic GFR-binding peptide
  MOD_RES (3), (4), (39): Xaa is C or S
  MOD_RES (18), (19), (20), (21), (22): Xaa is A or G
  MOD_RES (23), (24), (25), (26): Xaa is A or G or is absent
KAXXVPTKLSAISVLYLXXXXXXXXXLKNYQEGMSVAEXG

SEQ ID NO: 7866 - protein, 37 aa, Artificial Sequence
  Non-cyclic GFR-binding peptide
  MOD_RES (2), (2): Xaa is C or S
  MOD_RES (18), (19), (20), (21), (22): Xaa is A or G
  MOD_RES (23), (24), (25), (26): Xaa is A or G or is absent
QXRPTQVQLSAISVLYLXXXXXXXXXLKNYQTLEDHL

SEQ ID NO: 7867 - protein, 36 aa, Artificial Sequence
  Non-cyclic GFR-binding peptide
  MOD_RES (1), (2), (33), (35): Xaa is C or S
XXVPQDLSATSILYYVGRTPKVLRKHRMVVKSXKXS

SEQ ID NO: 7868 - protein, 36 aa, Artificial Sequence
  Non-cyclic GFR-binding peptide
  MOD_RES (1), (33), (35): Xaa is C or S
XAPTKLSPISVLYKDDSSNVILKYHYNMVVRSXGXH

SEQ ID NO: 7869 - protein, 42 aa, Artificial Sequence
  Non-cyclic GFR-binding peptide
  MOD_RES (2), (39), (41): Xaa is C or S
QXRPTQVQLSATSVLYYEIVRKKPIFLRKHRTLEDHLAXKXE

SEQ ID NO: 7870 - protein, 35 aa, Artificial Sequence
  Non-cyclic GFR-binding peptide
  MOD_RES (34), (34): Xaa is C or S
  MOD_RES (14), (15), (16), (17), (18): Xaa is A or G
  MOD_RES (19), (20), (21), (22): Xaa is A or G or is absent
VPTELSPISMLYKXXXXXXXXXLKYHYEMVVEGXG

SEQ ID NO: 7871 - protein, 38 aa, Artificial Sequence
  Non-cyclic GFR-binding peptide
  MOD_RES (2), (3), (37): Xaa is C or S
  MOD_RES (17), (18), (19), (20), (21): Xaa is A or G
  MOD_RES (22), (23), (24), (25): Xaa is A or G or is absent
PXXAPTQLSAISVLYLXXXXXXXXXLKNYQNMVVRAXG

SEQ ID NO: 7872 - protein, 32 aa, Artificial Sequence
  Non-cyclic GFR-binding peptide
  MOD_RES (14), (15), (16), (17), (18): Xaa is A or G
  MOD_RES (19), (20), (21), (22): Xaa is A or G or is absent
VPQALSPISILYKXXXXXXXXXLKYHYMIVRS

SEQ ID NO: 7873 - protein, 40 aa, Artificial Sequence
  Non-cyclic GFR-binding peptide
  MOD_RES (3), (4), (37), (39): Xaa is C or S
  MOD_RES (18), (19), (20), (21), (22): Xaa is A or G
  MOD_RES (23), (24), (25), (26): Xaa is A or G or is absent
APXXVPQALSATSILYYXXXXXXXXXLRKHRMIVRSXKXS

SEQ ID NO: 7874 - protein, 43 aa, Artificial Sequence
  Non-cyclic GFR-binding peptide
  MOD_RES (6), (7), (41), (43): Xaa is C or S
  MOD_RES (21), (22), (23), (24), (25): Xaa is A or G
  MOD_RES (26), (27), (28), (29): Xaa is A or G or is absent
AVPKAXXAPTKLNAISVLYFXXXXXXXXXLKKYRNMVVKAXGX

SEQ ID NO: 7875 - protein, 40 aa, Artificial Sequence
  Non-cyclic GFR-binding peptide
  MOD_RES (7), (7): Xaa is C or S
  MOD_RES (21), (22), (23), (24), (25): Xaa is A or G
  MOD_RES (26), (27), (28), (29): Xaa is A or G or is absent
HVTKPTXAPTKLSPISVLYKXXXXXXXXXLKYHYNMVVRS

SEQ ID NO: 7876 - protein, 40 aa, Artificial Sequence
  Non-cyclic GFR-binding peptide
  MOD_RES (5), (5): Xaa is C or S
  MOD_RES (21), (22), (23), (24), (25): Xaa is A or G
  MOD_RES (26), (27), (28), (29): Xaa is A or G or is absent
RNVQXRPTQVQLSPISVLYKXXXXXXXXXLKYHYTLEDHL

SEQ ID NO: 7877 - protein, 38 aa, Artificial Sequence
  Non-cyclic GFR-binding peptide
  MOD_RES (3), (4), (35), (37): Xaa is C or S
SPXXVPQDLNAISILYFVGRTPKVLKKYRMVVKSXKXS

SEQ ID NO: 7878 - protein, 41 aa, Artificial Sequence
  Non-cyclic GFR-binding peptide
  MOD_RES (3), (40): Xaa is C or S
  MOD_RES (19), (20), (21), (22), (23): Xaa is A or G
  MOD_RES (24), (25), (26), (27): Xaa is A or G or is absent
VQXRPTQVQLSAISVLYLXXXXXXXXXLKNYQTLEDHLAXK

SEQ ID NO: 7879 - protein, 39 aa, Artificial Sequence
  Non-cyclic GFR-binding peptide
  MOD_RES (3), (4), (38): Xaa is C or S
  MOD_RES (18), (19), (20), (21), (22): Xaa is A or G
  MOD_RES (23), (24), (25), (26): Xaa is A or G or is absent
KAXXAPTKLSPISVLYKXXXXXXXXXLKYHYNMVVKAXG

SEQ ID NO: 7880 - protein, 36 aa, Artificial Sequence
  Non-cyclic GFR-binding peptide
  MOD_RES (1), (2): Xaa is C or S
  MOD_RES (16), (17), (18), (19), (20): Xaa is A or G
  MOD_RES (21), (22), (23), (24): Xaa is A or G or is absent
XXVPTKLNAISVLYFXXXXXXXXXLKKYREGMSVAE

SEQ ID NO: 7881 - protein, 38 aa, Artificial Sequence
  Non-cyclic GFR-binding peptide
  MOD_RES (5), (6): Xaa is C or S
  MOD_RES (20), (21), (22), (23), (24): Xaa is A or G
  MOD_RES (25), (26), (27), (28): Xaa is A or G or is absent
IPKAXXVPTELSATSMLYYXXXXXXXXXLRKHREMVVE

SEQ ID NO: 7882 - protein, 44 aa, Artificial Sequence
  Non-cyclic GFR-binding peptide
  MOD_RES (6), (7), (41), (43): Xaa is C or S
  MOD_RES (21), (22), (23), (24), (25): Xaa is A or G
  MOD_RES (26), (27), (28), (29): Xaa is A or G or is absent
TVPKPXXAPTQLSATSVLYYXXXXXXXXXLRKHRNMVVRAXGXH

SEQ ID NO: 7883 - protein, 38 aa, Artificial Sequence
  Non-cyclic GFR-binding peptide
  MOD_RES (5), (6), (37): Xaa is C or S
SASPXXVPQDLNAISILYFVGRTPKVLKKYRMVVKSXK

SEQ ID NO: 7884 - protein, 42 aa, Artificial Sequence
  Non-cyclic GFR-binding peptide
  MOD_RES (6), (7), (40), (42): Xaa is C or S
  MOD_RES (21), (22), (23), (24), (25): Xaa is A or G
  MOD_RES (26), (27), (28), (29): Xaa is A or G or is absent
ASAAPXXVPQALSATSILYYXXXXXXXXXLRKHRMIVRSXKX

SEQ ID NO: 7885 - protein, 43 aa, Artificial Sequence
  Non-cyclic GFR-binding peptide
  MOD_RES (6), (7), (41), (43): Xaa is C or S
  MOD_RES (21), (22), (23), (24), (25): Xaa is A or G
  MOD_RES (26), (27), (28), (29): Xaa is A or G or is absent
TVPKPXXAPTQLSPISVLYKXXXXXXXXXLKYHYNMVVRAXGX

SEQ ID NO: 7886 - protein, 36 aa, Artificial Sequence
  Non-cyclic GFR-binding peptide
  MOD_RES (1), (2), (34), (36): Xaa is C or S
XXVPTELSATSMLYYDEYDKVVLRKHREMVVEGXGX

SEQ ID NO: 7887 - protein, 42 aa, Artificial Sequence
  Non-cyclic GFR-binding peptide
  MOD_RES (4), (41): Xaa is C or S
NVQXRPTQVQLSAISVLYLEIVRKKPIFLKNYQTLEDHLAXK

SEQ ID NO: 7888 - protein, 34 aa, Artificial Sequence
  Non-cyclic GFR-binding peptide
TQVQLSPISVLYKEIVRKKPIFLKYHYTLEDHLA

SEQ ID NO: 7889 - protein, 34 aa, Artificial Sequence
  Non-cyclic GFR-binding peptide
  MOD_RES (16), (17), (18), (19), (20): Xaa is A or G
  MOD_RES (21), (22), (23), (24): Xaa is A or G or is absent
RPTQVQLSPISVLYKXXXXXXXXXLKYHYTLEDH

SEQ ID NO: 7890 - protein, 35 aa, Artificial Sequence
  Non-cyclic GFR-binding peptide
  MOD_RES (1), (2), (34): Xaa is C or S
XXVPTELNAISMLYFDENEKVVLKKYRDMVVEGXG

SEQ ID NO: 7891 - protein, 39 aa, Artificial Sequence
  Non-cyclic GFR-binding peptide
  MOD_RES (3), (4), (36), (38): Xaa is C or S
KPXXAPTKLSATSVLYYDDSSNVILRKHRNMVVRSXGXH

SEQ ID NO: 7892 - protein, 31 aa, Artificial Sequence
  Non-cyclic GFR-binding peptide
  MOD_RES (1), (1): Xaa is C or S
XVPQDLSPISILYKVGRTPKVLKYHYMVVKS

SEQ ID NO: 7893 - protein, 39 aa, Artificial Sequence
  Non-cyclic GFR-binding peptide
  MOD_RES (4), (5), (37), (39): Xaa is C or S
PKAXXAPTKLNAISVLYFDSSNNVILKKYRNMVVKAXGX

SEQ ID NO: 7894 - protein, 33 aa, Artificial Sequence
  Non-cyclic GFR-binding peptide
  MOD_RES (2), (3): Xaa is C or S
PXXVPQALSATSILYYVGRKPKVLRKHRMIVRS

SEQ ID NO: 7895 - protein, 37 aa, Artificial Sequence
  Non-cyclic GFR-binding peptide
  MOD_RES (3), (4), (35), (37): Xaa is C or S
SPXXVPQDLNAISILYFVGRTPKVLKKYRMVVKSXKX

SEQ ID NO: 7896 - protein, 39 aa, Artificial Sequence
  Non-cyclic GFR-binding peptide
  MOD_RES (2), (39): Xaa is C or S
QXRPTQVQLSPISVLYKEIVRKKPIFLKYHYTLEDHLAX

SEQ ID NO: 7897 - protein, 37 aa, Artificial Sequence
  Non-cyclic GFR-binding peptide
  MOD_RES (1), (2), (35), (37): Xaa is C or S
XXVPTKLSAISVLYLDDMGVPTLKNYQEGMSVAEXGX

SEQ ID NO: 7898 - protein, 37 aa, Artificial Sequence
  Non-cyclic GFR-binding peptide
  MOD_RES (1), (2), (35), (37): Xaa is C or S
  MOD_RES (16), (17), (18), (19), (20): Xaa is A or G
  MOD_RES (21), (22), (23), (24): Xaa is A or G or is absent
XXVPQDLSAISILYLXXXXXXXXXLKNYQMVVKSXKX

SEQ ID NO: 7899 - protein, 34 aa, Artificial Sequence
  Non-cyclic GFR-binding peptide
  MOD_RES (1), (34): Xaa is C or S
  MOD_RES (15), (16), (17), (18), (19): Xaa is A or G
  MOD_RES (20), (21), (22), (23): Xaa is A or G or is absent
XVPQDLSAISILYLXXXXXXXXXLKNYQMVVKSX

SEQ ID NO: 7900 - protein, 37 aa, Artificial Sequence
  Non-cyclic GFR-binding peptide
  MOD_RES (5), (6), (37): Xaa is C or S
SASPXXVSQDLSPISILYKIGKTPKILKYHYMIVKSX

SEQ ID NO: 7901 - protein, 37 aa, Artificial Sequence
  Non-cyclic GFR-binding peptide
  MOD_RES (1), (34), (36): Xaa is C or S
XVPTKLSAISVLYLDDMGVPTLKNYQEGMSVAEXGXR

SEQ ID NO: 7902 - protein, 37 aa, Artificial Sequence
  Non-cyclic GFR-binding peptide
  MOD_RES (6), (7): Xaa is C or S
ASAAPXXVPQALSPISILYKVGRKPKVLKYHYMIVRS

SEQ ID NO: 7903 - protein, 39 aa, Artificial Sequence
  Non-cyclic GFR-binding peptide
  MOD_RES (2), (3), (37), (39): Xaa is C or S
  MOD_RES (17), (18), (19), (20), (21): Xaa is A or G
  MOD_RES (22), (23), (24), (25): Xaa is A or G or is absent
PXXAPTKLSATSVLYYXXXXXXXXXLRKHRNMVVRSXGX

SEQ ID NO: 7904 - protein, 39 aa, Artificial Sequence
  Non-cyclic GFR-binding peptide
  MOD_RES (4), (5), (39): Xaa is C or S
  MOD_RES (19), (20), (21), (22), (23): Xaa is A or G
  MOD_RES (24), (25), (26), (27): Xaa is A or G or is absent
PKAXXAPTKLNAISVLYFXXXXXXXXXLKKYRNMVVKAX

SEQ ID NO: 7905 - protein, 36 aa, Artificial Sequence
  Non-cyclic GFR-binding peptide
  MOD_RES (2), (3), (35): Xaa is C or S
AXXVPTELSATSMLYYDEYDKVVLRKHREMVVEGXG

SEQ ID NO: 7906 - protein, 34 aa, Artificial Sequence
  Non-cyclic GFR-binding peptide
  MOD_RES (15), (16), (17), (18), (19): Xaa is A or G
  MOD_RES (20), (21), (22), (23): Xaa is A or G or is absent
PTQVQLSPISVLYKXXXXXXXXXLKYHYTLEDHL

SEQ ID NO: 7907 - protein, 40 aa, Artificial Sequence
  Non-cyclic GFR-binding peptide
  MOD_RES (37), (39): Xaa is C or S
RPTQVQLSPISVLYKEIVRKKPIFLKYHYTLEDHLAXKXE

SEQ ID NO: 7908 - protein, 43 aa, Artificial Sequence
  Non-cyclic GFR-binding peptide
  MOD_RES (5), (6), (40), (42): Xaa is C or S
  MOD_RES (20), (21), (22), (23), (24): Xaa is A or G
  MOD_RES (25), (26), (27), (28): Xaa is A or G or is absent
VPKPXXAPTQLSAISVLYLXXXXXXXXXLKNYQNMVVRAXGXH

SEQ ID NO: 7909 - protein, 40 aa, Artificial Sequence
  Non-cyclic GFR-binding peptide
  MOD_RES (4), (5), (39): Xaa is C or S
  MOD_RES (19), (20), (21), (22), (23): Xaa is A or G
  MOD_RES (24), (25), (26), (27): Xaa is A or G or is absent
PKAXXAPTKLSPISVLYKXXXXXXXXXLKYHYNMVVKAXG

SEQ ID NO: 7910 - protein, 42 aa, Artificial Sequence
  Non-cyclic GFR-binding peptide
  MOD_RES (4), (5), (39), (41): Xaa is C or S
  MOD_RES (19), (20), (21), (22), (23): Xaa is A or G
  MOD_RES (24), (25), (26), (27): Xaa is A or G or is absent
PKAXXVPTELSATSMLYYXXXXXXXXXLRKHREMVVEGXGXR

SEQ ID NO: 7911 - protein, 39 aa, Artificial Sequence
  Non-cyclic GFR-binding peptide
  MOD_RES (4), (4): Xaa is C or S
  MOD_RES (20), (21), (22), (23), (24): Xaa is A or G
  MOD_RES (25), (26), (27), (28): Xaa is A or G or is absent
NVQXRPTQVQLSATSVLYYXXXXXXXXXLRKHRTLEDHL

SEQ ID NO: 7912 - protein, 34 aa, Artificial Sequence
  Non-cyclic GFR-binding peptide
  MOD_RES (2), (34): Xaa is C or S
TXAPTKLSATSVLYYDDSSNVILRKHRNMVVRSX

SEQ ID NO: 7913 - protein, 36 aa, Artificial Sequence
  Non-cyclic GFR-binding peptide
  MOD_RES (1), (2), (35): Xaa is C or S
  MOD_RES (16), (17), (18), (19), (20): Xaa is A or G
  MOD_RES (21), (22), (23), (24): Xaa is A or G or is absent
XXVPQALNAISILYFXXXXXXXXXLKKYRMIVRSXK

SEQ ID NO: 7914 - protein, 33 aa, Artificial Sequence
  Non-cyclic GFR-binding peptide
  MOD_RES (2), (2): Xaa is C or S
TXAPTKLSPISVLYKDDSSNVILKYHYNMVVRS

SEQ ID NO: 7915 - protein, 33 aa, Artificial Sequence
  Non-cyclic GFR-binding peptide
  MOD_RES (2), (3): Xaa is C or S
PXXAPTKLSPISVLYKDDSSNVILKYHYNMVVR

SEQ ID NO: 7916 - protein, 40 aa, Artificial Sequence
  Non-cyclic GFR-binding peptide
  MOD_RES (3), (4), (37), (39): Xaa is C or S
KAXXVPTKLSATSVLYYDDMGVPTLRKHREGMSVAEXGXR

SEQ ID NO: 7917 - protein, 32 aa, Artificial Sequence
  Non-cyclic GFR-binding peptide
  MOD_RES (1), (1): Xaa is C or S
XAPTKLSAISVLYLDDSSNVILKNYQNMVVRS

SEQ ID NO: 7918 - protein, 36 aa, Artificial Sequence
  Non-cyclic GFR-binding peptide
  MOD_RES (5), (5): Xaa is C or S
TKPTXAPTKLSATSVLYYDDSSNVILRKHRNMVVRS

SEQ ID NO: 7919 - protein, 34 aa, Artificial Sequence
  Non-cyclic GFR-binding peptide
  MOD_RES (1), (34): Xaa is C or S
  MOD_RES (15), (16), (17), (18), (19): Xaa is A or G
  MOD_RES (20), (21), (22), (23): Xaa is A or G or is absent
XVPQDLSATSILYYXXXXXXXXXLRKHRMVVKSX

SEQ ID NO: 7920 - protein, 40 aa, Artificial Sequence
  Non-cyclic GFR-binding peptide
  MOD_RES (6), (7): Xaa is C or S
  MOD_RES (21), (22), (23), (24), (25): Xaa is A or G
  MOD_RES (26), (27), (28), (29): Xaa is A or G or is absent
AVPKAXXAPTKLSAISVLYLXXXXXXXXXLKNYQNMVVKA

SEQ ID NO: 7921 - protein, 37 aa, Artificial Sequence
  Non-cyclic GFR-binding peptide
  MOD_RES (6), (7): Xaa is C or S
ASASPXXVSQDLSPISILYKIGKTPKILKYHYMIVKS

SEQ ID NO: 7922 - protein, 35 aa, Artificial Sequence
  Non-cyclic GFR-binding peptide
  MOD_RES (1), (33), (35): Xaa is C or S
XAPTKLSPISVLYKDDSSNVILKYHYNMVVRSXGX

SEQ ID NO: 7923 - protein, 37 aa, Artificial Sequence
  Non-cyclic GFR-binding peptide
  MOD_RES (3), (3): Xaa is C or S
VQXRPTQVQLSPISVLYKEIVRKKPIFLKYHYTLEDH

SEQ ID NO: 7924 - protein, 38 aa, Artificial Sequence
  Non-cyclic GFR-binding peptide
  MOD_RES (1), (2), (35), (37): Xaa is C or S
XXVPTKLNAISVLYFDDMGVPTLKKYREGMSVAEXGXR

SEQ ID NO: 7925 - protein, 42 aa, Artificial Sequence
  Non-cyclic GFR-binding peptide
  MOD_RES (6), (7), (40), (42): Xaa is C or S
KVGKAXXVPTKLSAISVLYLDDMGVPTLKNYQEGMSVAEXGX

SEQ ID NO: 7926 - protein, 34 aa, Artificial Sequence
  Non-cyclic GFR-binding peptide
  MOD_RES (2), (3): Xaa is C or S
PXXAPTQLSATSVLYYDDSSNVILRKHRNMVVRA

SEQ ID NO: 7927 - protein, 39 aa, Artificial Sequence
  Non-cyclic GFR-binding peptide
  MOD_RES (2), (3), (37), (39): Xaa is C or S
  MOD_RES (17), (18), (19), (20), (21): Xaa is A or G
  MOD_RES (22), (23), (24), (25): Xaa is A or G or is absent
PXXAPTQLSPISVLYKXXXXXXXXXLKYHYNMVVRAXGX

SEQ ID NO: 7928 - protein, 37 aa, Artificial Sequence
  Non-cyclic GFR-binding peptide
  MOD_RES (5), (6): Xaa is C or S
IPKAXXVPTELNAISMLYFDEYDKVVLKKYREMVVEG

SEQ ID NO: 7929 - protein, 43 aa, Artificial Sequence
  Non-cyclic GFR-binding peptide
  MOD_RES (4), (41), (43): Xaa is C or S
NVQXRPTQVQLSATSVLYYEIVRKKPIFLRKHRTLEDHLAXKX

SEQ ID NO: 7930 - protein, 39 aa, Artificial Sequence
  Non-cyclic GFR-binding peptide
  MOD_RES (5), (6): Xaa is C or S
  MOD_RES (20), (21), (22), (23), (24): Xaa is A or G
  MOD_RES (25), (26), (27), (28): Xaa is A or G or is absent
IPKAXXVPTELSPISMLYKXXXXXXXXXLKYHYEMVVEG

SEQ ID NO: 7931 - protein, 38 aa, Artificial Sequence
  Non-cyclic GFR-binding peptide
  MOD_RES (1), (35), (37): Xaa is C or S
  MOD_RES (15), (16), (17), (18), (19): Xaa is A or G
  MOD_RES (20), (21), (22), (23): Xaa is A or G or is absent
XVPTELSATSMLYYXXXXXXXXXLRKHRDMVVEGXGXR

SEQ ID NO: 7932 - protein, 42 aa, Artificial Sequence
  Non-cyclic GFR-binding peptide
  MOD_RES (6), (7), (39), (41): Xaa is C or S
SIPKAXXVPTELSATSMLYYDEYDKVVLRKHREMVVEGXGXR

SEQ ID NO: 7933 - protein, 39 aa, Artificial Sequence
  Non-cyclic GFR-binding peptide
  MOD_RES (1), (38): Xaa is C or S
XRPTQVQLSAISVLYLEIVRKKPIFLKNYQTLEDHLAXK

SEQ ID NO: 7934 - protein, 41 aa, Artificial Sequence
  Non-cyclic GFR-binding peptide
  MOD_RES (4), (5), (38), (40): Xaa is C or S
  MOD_RES (19), (20), (21), (22), (23): Xaa is A or G
  MOD_RES (24), (25), (26), (27): Xaa is A or G or is absent
ASPXXVPQDLSPISILYKXXXXXXXXXLKYHYMVVKSXKXS

SEQ ID NO: 7935 - protein, 39 aa, Artificial Sequence
  Non-cyclic GFR-binding peptide
  MOD_RES (1), (2), (36), (38): Xaa is C or S
  MOD_RES (16), (17), (18), (19), (20): Xaa is A or G
  MOD_RES (21), (22), (23), (24): Xaa is A or G or is absent
XXVPTELSPISMLYKXXXXXXXXXLKYHYEMVVEGXGXR

SEQ ID NO: 7936 - protein, 40 aa, Artificial Sequence
  Non-cyclic GFR-binding peptide
  MOD_RES (6), (7), (39): Xaa is C or S
YVPKPXXAPTKLSAISVLYLDDSSNVILKNYQNMVVRSXG

SEQ ID NO: 7937 - protein, 38 aa, Artificial Sequence
  Non-cyclic GFR-binding peptide
  MOD_RES (6), (6): Xaa is C or S
  MOD_RES (20), (21), (22), (23), (24): Xaa is A or G
  MOD_RES (25), (26), (27), (28): Xaa is A or G or is absent
VTKPTXAPTKLSATSVLYYXXXXXXXXXLRKHRNMVVR

SEQ ID NO: 7938 - protein, 35 aa, Artificial Sequence
  Non-cyclic GFR-binding peptide
  MOD_RES (1), (33), (35): Xaa is C or S
XAPTQLSAISVLYLDDSSNVILKNYQNMVVRAXGX

SEQ ID NO: 7939 - protein, 39 aa, Artificial Sequence
  Non-cyclic GFR-binding peptide
  MOD_RES (5), (6): Xaa is C or S
  MOD_RES (20), (21), (22), (23), (24): Xaa is A or G
  MOD_RES (25), (26), (27), (28): Xaa is A or G or is absent
VPKPXXAPTQLSAISVLYLXXXXXXXXXLKNYQNMVVRA

SEQ ID NO: 7940 - protein, 39 aa, Artificial Sequence
  Non-cyclic GFR-binding peptide
  MOD_RES (3), (4), (38): Xaa is C or S
  MOD_RES (18), (19), (20), (21), (22): Xaa is A or G
  MOD_RES (23), (24), (25), (26): Xaa is A or G or is absent
KPXXAPTQLSPISVLYKXXXXXXXXXLKYHYNMVVRAXG

SEQ ID NO: 7941 - protein, 41 aa, Artificial Sequence
  Non-cyclic GFR-binding peptide
  MOD_RES (5), (6), (39), (41): Xaa is C or S
  MOD_RES (20), (21), (22), (23), (24): Xaa is A or G
  MOD_RES (25), (26), (27), (28): Xaa is A or G or is absent
SAAPXXVPQALSAISILYLXXXXXXXXXLKNYQMIVRSXKX

SEQ ID NO: 7942 - protein, 36 aa, Artificial Sequence
  Non-cyclic GFR-binding peptide
  MOD_RES (5), (6): Xaa is C or S
IPKAXXVPTELNAISMLYFDEYDKVVLKKYREMVVE

SEQ ID NO: 7943 - protein, 40 aa, Artificial Sequence
  Non-cyclic GFR-binding peptide
  MOD_RES (6), (7), (40): Xaa is C or S
KVGKAXXVPTKLSATSVLYYDDMGVPTLRKHREGMSVAEX

SEQ ID NO: 7944 - protein, 33 aa, Artificial Sequence
  Non-cyclic GFR-binding peptide
  MOD_RES (14), (15), (16), (17), (18): Xaa is A or G
  MOD_RES (19), (20), (21), (22): Xaa is A or G or is absent
TQVQLSATSVLYYXXXXXXXXXLRKHRTLEDHL

SEQ ID NO: 7945 - protein, 41 aa, Artificial Sequence
  Non-cyclic GFR-binding peptide
  MOD_RES (6), (40): Xaa is C or S
  MOD_RES (20), (21), (22), (23), (24): Xaa is A or G
  MOD_RES (25), (26), (27), (28): Xaa is A or G or is absent
VTKPTXAPTKLSATSVLYYXXXXXXXXXLRKHRNMVVRSXG

SEQ ID NO: 7946 - protein, 37 aa, Artificial Sequence
  Non-cyclic GFR-binding peptide
  MOD_RES (1), (36): Xaa is C or S
  MOD_RES (15), (16), (17), (18), (19): Xaa is A or G
  MOD_RES (20), (21), (22), (23): Xaa is A or G or is absent
XVPTKLSATSVLYYXXXXXXXXXLRKHREGMSVAEXG

SEQ ID NO: 7947 - protein, 36 aa, Artificial Sequence
  Non-cyclic GFR-binding peptide
  MOD_RES (5), (6): Xaa is C or S
SASPXXVSQDLSPISILYKIGKTPKILKYHYMIVKS

SEQ ID NO: 7948 - protein, 42 aa, Artificial Sequence
  Non-cyclic GFR-binding peptide
  MOD_RES (6), (7), (39), (41): Xaa is C or S
AVPKAXXAPTKLSAISVLYLDSSNNVILKNYQNMVVKAXGXH

SEQ ID NO: 7949 - protein, 36 aa, Artificial Sequence
  Non-cyclic GFR-binding peptide
  MOD_RES (3), (4), (36): Xaa is C or S
KAXXAPTKLNAISVLYFDSSNNVILKKYRNMVVKAX

SEQ ID NO: 7950 - protein, 41 aa, Artificial Sequence
  Non-cyclic GFR-binding peptide
  MOD_RES (5), (6), (41): Xaa is C or S
  MOD_RES (20), (21), (22), (23), (24): Xaa is A or G
  MOD_RES (25), (26), (27), (28): Xaa is A or G or is absent
VGKAXXVPTKLNAISVLYFXXXXXXXXXLKKYREGMSVAEX

SEQ ID NO: 7951 - protein, 36 aa, Artificial Sequence
  Non-cyclic GFR-binding peptide
  MOD_RES (3), (4): Xaa is C or S
  MOD_RES (18), (19), (20), (21), (22): Xaa is A or G
  MOD_RES (23), (24), (25), (26): Xaa is A or G or is absent
KPXXAPTQLSATSVLYYXXXXXXXXXLRKHRNMVVR

SEQ ID NO: 7952 - protein, 35 aa, Artificial Sequence
  Non-cyclic GFR-binding peptide
  MOD_RES (5), (5): Xaa is C or S
TKPTXAPTKLSPISVLYKDDSSNVILKYHYNMVVR

SEQ ID NO: 7953 - protein, 31 aa, Artificial Sequence
  Non-cyclic GFR-binding peptide
  MOD_RES (1), (1): Xaa is C or S
XVPTELSATSMLYYDENEKVVLRKHRDMVVE

SEQ ID NO: 7954 - protein, 35 aa, Artificial Sequence
  Non-cyclic GFR-binding peptide
  MOD_RES (1), (2), (33), (35): Xaa is C or S
XXVSQDLSAISILYLIGKTPKILKNYQMIVKSXKX

SEQ ID NO: 7955 - protein, 37 aa, Artificial Sequence
  Non-cyclic GFR-binding peptide
  MOD_RES (1), (2), (34), (36): Xaa is C or S
XXAPTQLSATSVLYYDDSSNVILRKHRNMVVRAXGXH

SEQ ID NO: 7956 - protein, 36 aa, Artificial Sequence
  Non-cyclic GFR-binding peptide
  MOD_RES (2), (3), (35): Xaa is C or S
AXXVPTELSPISMLYKDENEKVVLKYHYDMVVEGXG

SEQ ID NO: 7957 - protein, 41 aa, Artificial Sequence
  Non-cyclic GFR-binding peptide
  MOD_RES (6), (7), (41): Xaa is C or S
  MOD_RES (21), (22), (23), (24), (25): Xaa is A or G
  MOD_RES (26), (27), (28), (29): Xaa is A or G or is absent
YVPKPXXAPTKLSATSVLYYXXXXXXXXXLRKHRNMVVRSX

SEQ ID NO: 7958 - protein, 42 aa, Artificial Sequence
  Non-cyclic GFR-binding peptide
  MOD_RES (6), (7), (41): Xaa is C or S
  MOD_RES (21), (22), (23), (24), (25): Xaa is A or G
  MOD_RES (26), (27), (28), (29): Xaa is A or G or is absent
AVPKAXXAPTKLSAISVLYLXXXXXXXXXLKNYQNMVVKAXG

SEQ ID NO: 7959 - protein, 38 aa, Artificial Sequence
  Non-cyclic GFR-binding peptide
  MOD_RES (1), (2), (36), (38): Xaa is C or S
  MOD_RES (16), (17), (18), (19), (20): Xaa is A or G
  MOD_RES (21), (22), (23), (24): Xaa is A or G or is absent
XXAPTKLSAISVLYLXXXXXXXXXLKNYQNMVVKAXGX

SEQ ID NO: 7960 - protein, 38 aa, Artificial Sequence
  Non-cyclic GFR-binding peptide
  MOD_RES (6), (7): Xaa is C or S
AVPKAXXAPTKLNAISVLYFDSSNNVILKKYRNMVVKA

SEQ ID NO: 7961 - protein, 32 aa, Artificial Sequence
  Non-cyclic GFR-binding peptide
  MOD_RES (32), (32): Xaa is C or S
VPTELSATSMLYYDENEKVVLRKHRDMVVEGX

SEQ ID NO: 7962 - protein, 37 aa, Artificial Sequence
  Non-cyclic GFR-binding peptide
  MOD_RES (6), (7): Xaa is C or S
ASASPXXVPQDLSPISILYKVGRTPKVLKYHYMVVKS

SEQ ID NO: 7963 - protein, 38 aa, Artificial Sequence
  Non-cyclic GFR-binding peptide
  MOD_RES (3), (37): Xaa is C or S
  MOD_RES (17), (18), (19), (20), (21): Xaa is A or G
  MOD_RES (22), (23), (24), (25): Xaa is A or G or is absent
PTXAPTKLSPISVLYKXXXXXXXXXLKYHYNMVVRSXG

SEQ ID NO: 7964 - protein, 35 aa, Artificial Sequence
  Non-cyclic GFR-binding peptide
  MOD_RES (1), (33), (35): Xaa is C or S
XAPTKLSPISVLYKDSSNNVILKYHYNMVVKAXGX

SEQ ID NO: 7965 - protein, 36 aa, Artificial Sequence
  Non-cyclic GFR-binding peptide
  MOD_RES (2), (3): Xaa is C or S
  MOD_RES (17), (18), (19), (20), (21): Xaa is A or G
  MOD_RES (22), (23), (24), (25): Xaa is A or G or is absent
AXXAPTKLSAISVLYLXXXXXXXXXLKNYQNMVVKA

SEQ ID NO: 7966 - protein, 41 aa, Artificial Sequence
  Non-cyclic GFR-binding peptide
  MOD_RES (6), (7), (41): Xaa is C or S
  MOD_RES (21), (22), (23), (24), (25): Xaa is A or G
  MOD_RES (26), (27), (28), (29): Xaa is A or G or is absent
KIPKAXXVPTELSATSMLYYXXXXXXXXXLRKHRDMVVEGX

SEQ ID NO: 7967 - protein, 39 aa, Artificial Sequence
  Non-cyclic GFR-binding peptide
  MOD_RES (4), (36), (38): Xaa is C or S
KPTXAPTKLSATSVLYYDDSSNVILRKHRNMVVRSXGXH

SEQ ID NO: 7968 - protein, 41 aa, Artificial Sequence
  Non-cyclic GFR-binding peptide
  MOD_RES (5), (6), (40): Xaa is C or S
  MOD_RES (20), (21), (22), (23), (24): Xaa is A or G
  MOD_RES (25), (26), (27), (28): Xaa is A or G or is absent
IPKAXXVPTELSPISMLYKXXXXXXXXXLKYHYDMVVEGXG

SEQ ID NO: 7969 - protein, 38 aa, Artificial Sequence
  Non-cyclic GFR-binding peptide
  MOD_RES (2), (3), (35), (37): Xaa is C or S
PXXAPTQLSAISVLYLDDSSNVILKNYQNMVVRAXGXH

SEQ ID NO: 7970 - protein, 37 aa, Artificial Sequence
  Non-cyclic GFR-binding peptide
  MOD_RES (2), (2): Xaa is C or S
QXRPTQVQLSAISVLYLEIVRKKPIFLKNYQTLEDHL

SEQ ID NO: 7971 - protein, 38 aa, Artificial Sequence
  Non-cyclic GFR-binding peptide
  MOD_RES (3), (3): Xaa is C or S
VQXRPTQVQLSPISVLYKEIVRKKPIFLKYHYTLEDHL

SEQ ID NO: 7972 - protein, 38 aa, Artificial Sequence
  Non-cyclic GFR-binding peptide
  MOD_RES (5), (6): Xaa is C or S
  MOD_RES (20), (21), (22), (23), (24): Xaa is A or G
  MOD_RES (25), (26), (27), (28): Xaa is A or G or is absent
VPKPXXAPTQLSPISVLYKXXXXXXXXXLKYHYNMVVR

SEQ ID NO: 7973 - protein, 41 aa, Artificial Sequence
  Non-cyclic GFR-binding peptide
  MOD_RES (6), (7), (40): Xaa is C or S
KVGKAXXVPTKLSATSVLYYDDMGVPTLRKHREGMSVAEXG

SEQ ID NO: 7974 - protein, 40 aa, Artificial Sequence
  Non-cyclic GFR-binding peptide
  MOD_RES (5), (6), (39): Xaa is C or S
  MOD_RES (20), (21), (22), (23), (24): Xaa is A or G
  MOD_RES (25), (26), (27), (28): Xaa is A or G or is absent
SASPXXVPQDLSATSILYYXXXXXXXXXLRKHRMVVKSXK

SEQ ID NO: 7975 - protein, 36 aa, Artificial Sequence
  Non-cyclic GFR-binding peptide
  MOD_RES (4), (5), (36): Xaa is C or S
ASPXXVPQDLNAISILYFVGRTPKVLKKYRMVVKSX

SEQ ID NO: 7976 - protein, 31 aa, Artificial Sequence
  Non-cyclic GFR-binding peptide
APTKLSATSVLYYDDSSNVILRKHRNMVVRS

SEQ ID NO: 7977 - protein, 33 aa, Artificial Sequence
  Non-cyclic GFR-binding peptide
  MOD_RES (1), (1): Xaa is C or S
  MOD_RES (15), (16), (17), (18), (19): Xaa is A or G
  MOD_RES (20), (21), (22), (23): Xaa is A or G or is absent
XAPTKLSATSVLYYXXXXXXXXXLRKHRNMVVR

SEQ ID NO: 7978 - protein, 37 aa, Artificial Sequence
  Non-cyclic GFR-binding peptide
  MOD_RES (1), (2), (34), (36): Xaa is C or S
XXVPTELSPISMLYKDEYDKVVLKYHYEMVVEGXGXR

SEQ ID NO: 7979 - protein, 38 aa, Artificial Sequence
  Non-cyclic GFR-binding peptide
  MOD_RES (3), (4), (38): Xaa is C or S
  MOD_RES (18), (19), (20), (21), (22): Xaa is A or G
  MOD_RES (23), (24), (25), (26): Xaa is A or G or is absent
KAXXVPTELNAISMLYFXXXXXXXXXLKKYRDMVVEGX

SEQ ID NO: 7980 - protein, 38 aa, Artificial Sequence
  Non-cyclic GFR-binding peptide
  MOD_RES (5), (6): Xaa is C or S
  MOD_RES (20), (21), (22), (23), (24): Xaa is A or G
  MOD_RES (25), (26), (27), (28): Xaa is A or G or is absent
SAAPXXVPQALNAISILYFXXXXXXXXXLKKYRMIVRS

SEQ ID NO: 7981 - protein, 35 aa, Artificial Sequence
  Non-cyclic GFR-binding peptide
  MOD_RES (5), (5): Xaa is C or S
TKPTXAPTKLSAISVLYLDDSSNVILKNYQNMVVR

SEQ ID NO: 7982 - protein, 30 aa, Artificial Sequence
  Non-cyclic GFR-binding peptide
VPTELNAISMLYFDEYDKVVLKKYREMVVE

SEQ ID NO: 7983 - protein, 35 aa, Artificial Sequence
  Non-cyclic GFR-binding peptide
  MOD_RES (3), (4), (35): Xaa is C or S
APXXVPQALSATSILYYVGRKPKVLRKHRMIVRSX

SEQ ID NO: 7984 - protein, 41 aa, Artificial Sequence
  Non-cyclic GFR-binding peptide
  MOD_RES (7), (41): Xaa is C or S
  MOD_RES (21), (22), (23), (24), (25): Xaa is A or G
  MOD_RES (26), (27), (28), (29): Xaa is A or G or is absent
HVTKPTXAPTKLSATSVLYYXXXXXXXXXLRKHRNMVVRSX

SEQ ID NO: 7985 - protein, 34 aa, Artificial Sequence
  Non-cyclic GFR-binding peptide
  MOD_RES (16), (17), (18), (19), (20): Xaa is A or G
  MOD_RES (21), (22), (23), (24): Xaa is A or G or is absent
RPTQVQLSAISVLYLXXXXXXXXXLKNYQTLEDH

SEQ ID NO: 7986 - protein, 34 aa, Artificial Sequence
  Non-cyclic GFR-binding peptide
  MOD_RES (1), (33): Xaa is C or S
XAPTQLSPISVLYKDDSSNVILKYHYNMVVRAXG

SEQ ID NO: 7987 - protein, 31 aa, Artificial Sequence
  Non-cyclic GFR-binding peptide
  MOD_RES (31), (31): Xaa is C or S
VPQALSATSILYYVGRKPKVLRKHRMIVRSX

SEQ ID NO: 7988 - protein, 35 aa, Artificial Sequence
  Non-cyclic GFR-binding peptide
  MOD_RES (33), (35): Xaa is C or S
VPTKLNAISVLYFDDMGVPTLKKYREGMSVAEXGX

SEQ ID NO: 7989 - protein, 36 aa, Artificial Sequence
  Non-cyclic GFR-binding peptide
  MOD_RES (5), (6): Xaa is C or S
SASPXXVSQDLSAISILYLIGKTPKILKNYQMIVKS

SEQ ID NO: 7990 - protein, 37 aa, Artificial Sequence
  Non-cyclic GFR-binding peptide
  MOD_RES (7), (7): Xaa is C or S
HVTKPTXAPTKLSATSVLYYDDSSNVILRKHRNMVVR

SEQ ID NO: 7991 - protein, 32 aa, Artificial Sequence
  Non-cyclic GFR-binding peptide
  MOD_RES (1), (2): Xaa is C or S
XXVSQDLNAISILYFIGKTPKILKKYRMIVKS

SEQ ID NO: 7992 - protein, 36 aa, Artificial Sequence
  Non-cyclic GFR-binding peptide
  MOD_RES (1), (34), (36): Xaa is C or S
XVPTKLSATSVLYYDDMGVPTLRKHREGMSVAEXGX

SEQ ID NO: 7993 - protein, 33 aa, Artificial Sequence
  Non-cyclic GFR-binding peptide
  MOD_RES (31), (33): Xaa is C or S
VPQDLSPISILYKVGRTPKVLKYHYMVVKSXKX

SEQ ID NO: 7994 - protein, 41 aa, Artificial Sequence
  Non-cyclic GFR-binding peptide
  MOD_RES (5), (6), (38), (40): Xaa is C or S
VPKPXXAPTKLSPISVLYKDDSSNVILKYHYNMVVRSXGXH

SEQ ID NO: 7995 - protein, 37 aa, Artificial Sequence
  Non-cyclic GFR-binding peptide
  MOD_RES (36), (36): Xaa is C or S
  MOD_RES (15), (16), (17), (18), (19): Xaa is A or G
  MOD_RES (20), (21), (22), (23): Xaa is A or G or is absent
PTQVQLSPISVLYKXXXXXXXXXLKYHYTLEDHLAXK

SEQ ID NO: 7996 - protein, 36 aa, Artificial Sequence
  Non-cyclic GFR-binding peptide
  MOD_RES (3), (4): Xaa is C or S
  MOD_RES (18), (19), (20), (21), (22): Xaa is A or G
  MOD_RES (23), (24), (25), (26): Xaa is A or G or is absent
KAXXVPTELNAISMLYFXXXXXXXXXLKKYRDMVVE

SEQ ID NO: 7997 - protein, 39 aa, Artificial Sequence
  Non-cyclic GFR-binding peptide
  MOD_RES (3), (4), (38): Xaa is C or S
  MOD_RES (18), (19), (20), (21), (22): Xaa is A or G
  MOD_RES (23), (24), (25), (26): Xaa is A or G or is absent
KAXXVPTELSATSMLYYXXXXXXXXXLRKHREMVVEGXG

SEQ ID NO: 7998 - protein, 34 aa, Artificial Sequence
  Non-cyclic GFR-binding peptide
  MOD_RES (1), (2): Xaa is C or S
  MOD_RES (16), (17), (18), (19), (20): Xaa is A or G
  MOD_RES (21), (22), (23), (24): Xaa is A or G or is absent
XXVPQALNAISILYFXXXXXXXXXLKKYRMIVRS

SEQ ID NO: 7999 - protein, 37 aa, Artificial Sequence
  Non-cyclic GFR-binding peptide
  MOD_RES (3), (4), (36): Xaa is C or S
KPXXAPTQLSATSVLYYDDSSNVILRKHRNMVVRAXG

SEQ ID NO: 8000 - protein, 41 aa, Artificial Sequence
  Non-cyclic GFR-binding peptide
  MOD_RES (6), (7), (41): Xaa is C or S
  MOD_RES (21), (22), (23), (24), (25): Xaa is A or G
  MOD_RES (26), (27), (28), (29): Xaa is A or G or is absent
TVPKPXXAPTQLSATSVLYYXXXXXXXXXLRKHRNMVVRAX

SEQ ID NO: 8001 - protein, 34 aa, Artificial Sequence
  Non-cyclic GFR-binding peptide
  MOD_RES (1), (2): Xaa is C or S
XXVPTKLSATSVLYYDDMGVPTLRKHREGMSVAE

SEQ ID NO: 8002 - protein, 37 aa, Artificial Sequence
  Non-cyclic GFR-binding peptide
  MOD_RES (3), (4): Xaa is C or S
  MOD_RES (18), (19), (20), (21), (22): Xaa is A or G
  MOD_RES (23), (24), (25), (26): Xaa is A or G or is absent
KPXXAPTKLSPISVLYKXXXXXXXXXLKYHYNMVVRS

SEQ ID NO: 8003 - protein, 40 aa, Artificial Sequence
  Non-cyclic GFR-binding peptide
  MOD_RES (5), (37), (39): Xaa is C or S
TKPTXAPTKLSATSVLYYDDSSNVILRKHRNMVVRSXGXH

SEQ ID NO: 8004 - protein, 44 aa, Artificial Sequence
  Non-cyclic GFR-binding peptide
  MOD_RES (6), (7), (41), (43): Xaa is C or S
  MOD_RES (21), (22), (23), (24), (25): Xaa is A or G
  MOD_RES (26), (27), (28), (29): Xaa is A or G or is absent
KIPKAXXVPTELNAISMLYFXXXXXXXXXLKKYRDMVVEGXGXR

SEQ ID NO: 8005 - protein, 42 aa, Artificial Sequence
  Non-cyclic GFR-binding peptide
  MOD_RES (5), (6), (39), (41): Xaa is C or S
  MOD_RES (20), (21), (22), (23), (24): Xaa is A or G
  MOD_RES (25), (26), (27), (28): Xaa is A or G or is absent
SASPXXVSQDLNAISILYFXXXXXXXXXLKKYRMIVKSXKXS

SEQ ID NO: 8006 - protein, 37 aa, Artificial Sequence
  Non-cyclic GFR-binding peptide
  MOD_RES (5), (6): Xaa is C or S
VPKPXXAPTQLSAISVLYLDDSSNVILKNYQNMVVRA

SEQ ID NO: 8007 - protein, 33 aa, Artificial Sequence
  Non-cyclic GFR-binding peptide
  MOD_RES (33), (33): Xaa is C or S
  MOD_RES (14), (15), (16), (17), (18): Xaa is A or G
  MOD_RES (19), (20), (21), (22): Xaa is A or G or is absent
VSQDLSPISILYKXXXXXXXXXLKYHYMIVKSX

SEQ ID NO: 8008 - protein, 37 aa, Artificial Sequence
  Non-cyclic GFR-binding peptide
  MOD_RES (2), (36): Xaa is C or S
  MOD_RES (16), (17), (18), (19), (20): Xaa is A or G
  MOD_RES (21), (22), (23), (24): Xaa is A or G or is absent
TXAPTKLSATSVLYYXXXXXXXXXLRKHRNMVVRSXG

SEQ ID NO: 8009 - protein, 38 aa, Artificial Sequence
  Non-cyclic GFR-binding peptide
  MOD_RES (4), (5), (37): Xaa is C or S
PKAXXVPTELNAISMLYFDEYDKVVLKKYREMVVEGXG

SEQ ID NO: 8010 - protein, 32 aa, Artificial Sequence
  Non-cyclic GFR-binding peptide
  MOD_RES (32), (32): Xaa is C or S
APTKLNAISVLYFDSSNNVILKKYRNMVVKAX

SEQ ID NO: 8011 - protein, 40 aa, Artificial Sequence
  Non-cyclic GFR-binding peptide
  MOD_RES (2), (3), (37), (39): Xaa is C or S
  MOD_RES (17), (18), (19), (20), (21): Xaa is A or G
  MOD_RES (22), (23), (24), (25): Xaa is A or G or is absent
PXXAPTQLSAISVLYLXXXXXXXXXLKNYQNMVVRAXGXH

SEQ ID NO: 8012 - protein, 37 aa, Artificial Sequence
  Non-cyclic GFR-binding peptide
  MOD_RES (6), (7): Xaa is C or S
ASASPXXVSQDLSAISILYLIGKTPKILKNYQMIVKS

SEQ ID NO: 8013 - protein, 32 aa, Artificial Sequence
  Non-cyclic GFR-binding peptide
  MOD_RES (1), (32): Xaa is C or S
XVPQALSPISILYKVGRKPKVLKYHYMIVRSX

SEQ ID NO: 8014 - protein, 42 aa, Artificial Sequence
  Non-cyclic GFR-binding peptide
  MOD_RES (4), (41): Xaa is C or S
NVQXRPTQVQLSATSVLYYEIVRKKPIFLRKHRTLEDHLAXK

SEQ ID NO: 8015 - protein, 39 aa, Artificial Sequence
  Non-cyclic GFR-binding peptide
  MOD_RES (6), (7), (39): Xaa is C or S
KIPKAXXVPTELNAISMLYFDENEKVVLKKYRDMVVEGX

SEQ ID NO: 8016 - protein, 36 aa, Artificial Sequence
  Non-cyclic GFR-binding peptide
  MOD_RES (1), (2), (33), (35): Xaa is C or S
XXVPQALNAISILYFVGRKPKVLKKYRMIVRSXKXS

SEQ ID NO: 8017 - protein, 37 aa, Artificial Sequence
  Non-cyclic GFR-binding peptide
  MOD_RES (3), (4): Xaa is C or S
  MOD_RES (18), (19), (20), (21), (22): Xaa is A or G
  MOD_RES (23), (24), (25), (26): Xaa is A or G or is absent
KPXXAPTQLSAISVLYLXXXXXXXXXLKNYQNMVVRA

SEQ ID NO: 8018 - protein, 41 aa, Artificial Sequence
  Non-cyclic GFR-binding peptide
  MOD_RES (4), (5), (39), (41): Xaa is C or S
  MOD_RES (19), (20), (21), (22), (23): Xaa is A or G
  MOD_RES (24), (25), (26), (27): Xaa is A or G or is absent
PKPXXAPTKLSAISVLYLXXXXXXXXXLKNYQNMVVRSXGX

SEQ ID NO: 8019 - protein, 41 aa, Artificial Sequence
  Non-cyclic GFR-binding peptide
  MOD_RES (5), (6), (40): Xaa is C or S
  MOD_RES (20), (21), (22), (23), (24): Xaa is A or G
  MOD_RES (25), (26), (27), (28): Xaa is A or G or is absent
VPKPXXAPTKLSAISVLYLXXXXXXXXXLKNYQNMVVRSXG

SEQ ID NO: 8020 - protein, 31 aa, Artificial Sequence
  Non-cyclic GFR-binding peptide
  MOD_RES (1), (1): Xaa is C or S
XVPQDLSAISILYLVGRTPKVLKNYQMVVKS

SEQ ID NO: 8021 - protein, 38 aa, Artificial Sequence
  Non-cyclic GFR-binding peptide
  MOD_RES (6), (7): Xaa is C or S
AVPKAXXAPTKLSAISVLYLDSSNNVILKNYQNMVVKA

SEQ ID NO: 8022 - protein, 36 aa, Artificial Sequence
  Non-cyclic GFR-binding peptide
  MOD_RES (2), (3), (35): Xaa is C or S
AXXVPTELNAISMLYFDENEKVVLKKYRDMVVEGXG

SEQ ID NO: 8023 - protein, 36 aa, Artificial Sequence
  Non-cyclic GFR-binding peptide
  MOD_RES (3), (4), (36): Xaa is C or S
KAXXVPTELSATSMLYYDEYDKVVLRKHREMVVEGX

SEQ ID NO: 8024 - protein, 35 aa, Artificial Sequence
  Non-cyclic GFR-binding peptide
  MOD_RES (1), (33), (35): Xaa is C or S
XAPTQLSPISVLYKDDSSNVILKYHYNMVVRAXGX

SEQ ID NO: 8025 - protein, 42 aa, Artificial Sequence
  Non-cyclic GFR-binding peptide
  MOD_RES (7), (41): Xaa is C or S
  MOD_RES (21), (22), (23), (24), (25): Xaa is A or G
  MOD_RES (26), (27), (28), (29): Xaa is A or G or is absent
HVTKPTXAPTKLSAISVLYLXXXXXXXXXLKNYQNMVVRSXG

SEQ ID NO: 8026 - protein, 35 aa, Artificial Sequence
  Non-cyclic GFR-binding peptide
  MOD_RES (32), (34): Xaa is C or S
APTKLSPISVLYKDDSSNVILKYHYNMVVRSXGXH

SEQ ID NO: 8027 - protein, 41 aa, Artificial Sequence
  Non-cyclic GFR-binding peptide
  MOD_RES (6), (38), (40): Xaa is C or S
VTKPTXAPTKLSPISVLYKDDSSNVILKYHYNMVVRSXGXH

SEQ ID NO: 8028 - protein, 40 aa, Artificial Sequence
  Non-cyclic GFR-binding peptide
  MOD_RES (2), (39): Xaa is C or S
QXRPTQVQLNAISVLYFEIVRKKPIFLKKYRTLEDHLAXK

SEQ ID NO: 8029 - protein, 38 aa, Artificial Sequence
  Non-cyclic GFR-binding peptide
  MOD_RES (5), (6): Xaa is C or S
  MOD_RES (20), (21), (22), (23), (24): Xaa is A or G
  MOD_RES (25), (26), (27), (28): Xaa is A or G or is absent
VPKPXXAPTQLSAISVLYLXXXXXXXXXLKNYQNMVVR

SEQ ID NO: 8030 - protein, 43 aa, Artificial Sequence
  Non-cyclic GFR-binding peptide
  MOD_RES (6), (40), (42): Xaa is C or S
  MOD_RES (20), (21), (22), (23), (24): Xaa is A or G
  MOD_RES (25), (26), (27), (28): Xaa is A or G or is absent
VTKPTXAPTKLSAISVLYLXXXXXXXXXLKNYQNMVVRSXGXH

SEQ ID NO: 8031 - protein, 36 aa, Artificial Sequence
  Non-cyclic GFR-binding peptide
  MOD_RES (3), (4), (36): Xaa is C or S
KAXXVPTELSATSMLYYDENEKVVLRKHRDMVVEGX

SEQ ID NO: 8032 - protein, 37 aa, Artificial Sequence
  Non-cyclic GFR-binding peptide
  MOD_RES (3), (4): Xaa is C or S
  MOD_RES (18), (19), (20), (21), (22): Xaa is A or G
  MOD_RES (23), (24), (25), (26): Xaa is A or G or is absent
KAXXVPTELNAISMLYFXXXXXXXXXLKKYRDMVVEG

SEQ ID NO: 8033 - protein, 36 aa, Artificial Sequence
  Non-cyclic GFR-binding peptide
  MOD_RES (1), (2), (36): Xaa is C or S
  MOD_RES (16), (17), (18), (19), (20): Xaa is A or G
  MOD_RES (21), (22), (23), (24): Xaa is A or G or is absent
XXVPTELSPISMLYKXXXXXXXXXLKYHYDMVVEGX

SEQ ID NO: 8034 - protein, 37 aa, Artificial Sequence
  Non-cyclic GFR-binding peptide
  MOD_RES (5), (6), (37): Xaa is C or S
SASPXXVSQDLSATSILYYIGKTPKILRKHRMIVKSX

SEQ ID NO: 8035 - protein, 32 aa, Artificial Sequence
  Non-cyclic GFR-binding peptide
  MOD_RES (1), (2): Xaa is C or S
XXVPQALNAISILYFVGRKPKVLKKYRMIVRS

SEQ ID NO: 8036 - protein, 42 aa, Artificial Sequence
  Non-cyclic GFR-binding peptide
  MOD_RES (6), (7), (40), (42): Xaa is C or S
  MOD_RES (21), (22), (23), (24), (25): Xaa is A or G
  MOD_RES (26), (27), (28), (29): Xaa is A or G or is absent
ASASPXXVSQDLSATSILYYXXXXXXXXXLRKHRMIVKSXKX

SEQ ID NO: 8037 - protein, 30 aa, Artificial Sequence
  Non-cyclic GFR-binding peptide
APTQLSAISVLYLDDSSNVILKNYQNMVVR

SEQ ID NO: 8038 - protein, 35 aa, Artificial Sequence
  Non-cyclic GFR-binding peptide
  MOD_RES (1), (2), (34): Xaa is C or S
XXVPTELSPISMLYKDENEKVVLKYHYDMVVEGXG

SEQ ID NO: 8039 - protein, 34 aa, Artificial Sequence
  Non-cyclic GFR-binding peptide
  MOD_RES (1), (32), (34): Xaa is C or S
XVPQDLSPISILYKVGRTPKVLKYHYMVVKSXKX

SEQ ID NO: 8040 - protein, 38 aa, Artificial Sequence
  Non-cyclic GFR-binding peptide
  MOD_RES (4), (5), (38): Xaa is C or S
GKAXXVPTKLSATSVLYYDDMGVPTLRKHREGMSVAEX

SEQ ID NO: 8041 - protein, 34 aa, Artificial Sequence
  Non-cyclic GFR-binding peptide
  MOD_RES (1), (2): Xaa is C or S
  MOD_RES (16), (17), (18), (19), (20): Xaa is A or G
  MOD_RES (21), (22), (23), (24): Xaa is A or G or is absent
XXVPTELNAISMLYFXXXXXXXXXLKKYREMVVE

SEQ ID NO: 8042 - protein, 32 aa, Artificial Sequence
  Non-cyclic GFR-binding peptide
  MOD_RES (32), (32): Xaa is C or S
VPTELSATSMLYYDEYDKVVLRKHREMVVEGX

SEQ ID NO: 8043 - protein, 37 aa, Artificial Sequence
  Non-cyclic GFR-binding peptide
  MOD_RES (4), (5): Xaa is C or S
  MOD_RES (19), (20), (21), (22), (23): Xaa is A or G
  MOD_RES (24), (25), (26), (27): Xaa is A or G or is absent
ASPXXVPQDLSPISILYKXXXXXXXXXLKYHYMVVKS

SEQ ID NO: 8044 - protein, 33 aa, Artificial Sequence
  Non-cyclic GFR-binding peptide
  MOD_RES (14), (15), (16), (17), (18): Xaa is A or G
  MOD_RES (19), (20), (21), (22): Xaa is A or G or is absent
VPTELNAISMLYFXXXXXXXXXLKKYRDMVVEG

SEQ ID NO: 8045 - protein, 40 aa, Artificial Sequence
  Non-cyclic GFR-binding peptide
  MOD_RES (37), (39): Xaa is C or S
RPTQVQLNAISVLYFEIVRKKPIFLKKYRTLEDHLAXKXE

SEQ ID NO: 8046 - protein, 38 aa, Artificial Sequence
  Non-cyclic GFR-binding peptide
  MOD_RES (6), (7), (38): Xaa is C or S
ASASPXXVPQDLSPISILYKVGRTPKVLKYHYMVVKSX

SEQ ID NO: 8047 - protein, 36 aa, Artificial Sequence
  Non-cyclic GFR-binding peptide
  MOD_RES (3), (4), (35): Xaa is C or S
SPXXVPQDLNAISILYFVGRTPKVLKKYRMVVKSXK

SEQ ID NO: 8048 - protein, 38 aa, Artificial Sequence
  Non-cyclic GFR-binding peptide
  MOD_RES (3), (4), (38): Xaa is C or S
  MOD_RES (18), (19), (20), (21), (22): Xaa is A or G
  MOD_RES (23), (24), (25), (26): Xaa is A or G or is absent
KPXXAPTQLSPISVLYKXXXXXXXXXLKYHYNMVVRAX

SEQ ID NO: 8049 - protein, 37 aa, Artificial Sequence
  Non-cyclic GFR-binding peptide
  MOD_RES (5), (6), (37): Xaa is C or S
SASPXXVPQDLSPISILYKVGRTPKVLKYHYMVVKSX

SEQ ID NO: 8050 - protein, 32 aa, Artificial Sequence
  Non-cyclic GFR-binding peptide
VPTKLSAISVLYLDDMGVPTLKNYQEGMSVAE

SEQ ID NO: 8051 - protein, 44 aa, Artificial Sequence
  Non-cyclic GFR-binding peptide
  MOD_RES (6), (7), (41), (43): Xaa is C or S
  MOD_RES (21), (22), (23), (24), (25): Xaa is A or G
  MOD_RES (26), (27), (28), (29): Xaa is A or G or is absent
TVPKPXXAPTQLSPISVLYKXXXXXXXXXLKYHYNMVVRAXGXH

SEQ ID NO: 8052 - protein, 38 aa, Artificial Sequence
  Non-cyclic GFR-binding peptide
  MOD_RES (1), (38): Xaa is C or S
XRPTQVQLSAISVLYLEIVRKKPIFLKNYQTLEDHLAX

SEQ ID NO: 8053 - protein, 35 aa, Artificial Sequence
  Non-cyclic GFR-binding peptide
  MOD_RES (1), (33), (35): Xaa is C or S
XAPTKLSAISVLYLDSSNNVILKNYQNMVVKAXGX

SEQ ID NO: 8054 - protein, 33 aa, Artificial Sequence
  Non-cyclic GFR-binding peptide
  MOD_RES (1), (1): Xaa is C or S
  MOD_RES (15), (16), (17), (18), (19): Xaa is A or G
  MOD_RES (20), (21), (22), (23): Xaa is A or G or is absent
XAPTQLSAISVLYLXXXXXXXXXLKNYQNMVVR

SEQ ID NO: 8055 - protein, 42 aa, Artificial Sequence
  Non-cyclic GFR-binding peptide
  MOD_RES (4), (5), (39), (41): Xaa is C or S
  MOD_RES (19), (20), (21), (22), (23): Xaa is A or G
  MOD_RES (24), (25), (26), (27): Xaa is A or G or is absent
PKAXXVPTELSPISMLYKXXXXXXXXXLKYHYEMVVEGXGXR

SEQ ID NO: 8056 - protein, 35 aa, Artificial Sequence
  Non-cyclic GFR-binding peptide
  MOD_RES (3), (4), (35): Xaa is C or S
SPXXVPQDLNAISILYFVGRTPKVLKKYRMVVKSX

SEQ ID NO: 8057 - protein, 38 aa, Artificial Sequence
  Non-cyclic GFR-binding peptide
  MOD_RES (3), (4), (36), (38): Xaa is C or S
KPXXAPTKLSATSVLYYDDSSNVILRKHRNMVVRSXGX

SEQ ID NO: 8058 - protein, 39 aa, Artificial Sequence
  Non-cyclic GFR-binding peptide
  MOD_RES (2), (3), (37), (39): Xaa is C or S
  MOD_RES (17), (18), (19), (20), (21): Xaa is A or G
  MOD_RES (22), (23), (24), (25): Xaa is A or G or is absent
AXXAPTKLNAISVLYFXXXXXXXXXLKKYRNMVVKAXGX

SEQ ID NO: 8059 - protein, 36 aa, Artificial Sequence
  Non-cyclic GFR-binding peptide
  MOD_RES (4), (5): Xaa is C or S
PKPXXAPTKLSPISVLYKDDSSNVILKYHYNMVVRS

SEQ ID NO: 8060 - protein, 41 aa, Artificial Sequence
  Non-cyclic GFR-binding peptide
  MOD_RES (7), (39), (41): Xaa is C or S
HVTKPTXAPTKLSPISVLYKDDSSNVILKYHYNMVVRSXGX

SEQ ID NO: 8061 - protein, 38 aa, Artificial Sequence
  Non-cyclic GFR-binding peptide
  MOD_RES (5), (6), (38): Xaa is C or S
IPKAXXVPTELSPISMLYKDENEKVVLKYHYDMVVEGX

SEQ ID NO: 8062 - protein, 36 aa, Artificial Sequence
  Non-cyclic GFR-binding peptide
  MOD_RES (3), (4): Xaa is C or S
KAXXVPTKLNAISVLYFDDMGVPTLKKYREGMSVAE

SEQ ID NO: 8063 - protein, 35 aa, Artificial Sequence
  Non-cyclic GFR-binding peptide
  MOD_RES (1), (35): Xaa is C or S
  MOD_RES (15), (16), (17), (18), (19): Xaa is A or G
  MOD_RES (20), (21), (22), (23): Xaa is A or G or is absent
XAPTQLSAISVLYLXXXXXXXXXLKNYQNMVVRAX

SEQ ID NO: 8064 - protein, 36 aa, Artificial Sequence
  Non-cyclic GFR-binding peptide
  MOD_RES (1), (36): Xaa is C or S
  MOD_RES (15), (16), (17), (18), (19): Xaa is A or G
  MOD_RES (20), (21), (22), (23): Xaa is A or G or is absent
XVPTKLSATSVLYYXXXXXXXXXLRKHREGMSVAEX

SEQ ID NO: 8065 - protein, 44 aa, Artificial Sequence
  Non-cyclic GFR-binding peptide
  MOD_RES (5), (42), (44): Xaa is C or S
  MOD_RES (21), (22), (23), (24), (25): Xaa is A or G
  MOD_RES (26), (27), (28), (29): Xaa is A or G or is absent
RNVQXRPTQVQLNAISVLYFXXXXXXXXXLKKYRTLEDHLAXKX

SEQ ID NO: 8066 - protein, 37 aa, Artificial Sequence
  Non-cyclic GFR-binding peptide
  MOD_RES (3), (4), (36): Xaa is C or S
KAXXVPTELSATSMLYYDENEKVVLRKHRDMVVEGXG

SEQ ID NO: 8067 - protein, 39 aa, Artificial Sequence
  Non-cyclic GFR-binding peptide
  MOD_RES (6), (7): Xaa is C or S
  MOD_RES (21), (22), (23), (24), (25): Xaa is A or G
  MOD_RES (26), (27), (28), (29): Xaa is A or G or is absent
AVPKAXXAPTKLSAISVLYLXXXXXXXXXLKNYQNMVVK

SEQ ID NO: 8068 - protein, 31 aa, Artificial Sequence
  Non-cyclic GFR-binding peptide
  MOD_RES (31), (31): Xaa is C or S
VSQDLSPISILYKIGKTPKILKYHYMIVKSX

SEQ ID NO: 8069 - protein, 35 aa, Artificial Sequence
  Non-cyclic GFR-binding peptide
  MOD_RES (1), (2), (35): Xaa is C or S
  MOD_RES (16), (17), (18), (19), (20): Xaa is A or G
  MOD_RES (21), (22), (23), (24): Xaa is A or G or is absent
XXVPQALSAISILYLXXXXXXXXXLKNYQMIVRSX

SEQ ID NO: 8070 - protein, 39 aa, Artificial Sequence
  Non-cyclic GFR-binding peptide
  MOD_RES (3), (3): Xaa is C or S
VQXRPTQVQLSAISVLYLEIVRKKPIFLKNYQTLEDHLA

SEQ ID NO: 8071 - protein, 39 aa, Artificial Sequence
  Non-cyclic GFR-binding peptide
  MOD_RES (3), (3): Xaa is C or S
VQXRPTQVQLSATSVLYYEIVRKKPIFLRKHRTLEDHLA

SEQ ID NO: 8072 - protein, 39 aa, Artificial Sequence
  Non-cyclic GFR-binding peptide
  MOD_RES (4), (4): Xaa is C or S
NVQXRPTQVQLSATSVLYYEIVRKKPIFLRKHRTLEDHL

SEQ ID NO: 8073 - protein, 40 aa, Artificial Sequence
  Non-cyclic GFR-binding peptide
  MOD_RES (6), (7): Xaa is C or S
  MOD_RES (21), (22), (23), (24), (25): Xaa is A or G
  MOD_RES (26), (27), (28), (29): Xaa is A or G or is absent
KIPKAXXVPTELSPISMLYKXXXXXXXXXLKYHYDMVVEG

SEQ ID NO: 8074 - protein, 32 aa, Artificial Sequence
  Non-cyclic GFR-binding peptide
  MOD_RES (1), (2): Xaa is C or S
XXVPQALSAISILYLVGRKPKVLKNYQMIVRS

SEQ ID NO: 8075 - protein, 35 aa, Artificial Sequence
  Non-cyclic GFR-binding peptide
  MOD_RES (2), (2): Xaa is C or S
  MOD_RES (16), (17), (18), (19), (20): Xaa is A or G
  MOD_RES (21), (22), (23), (24): Xaa is A or G or is absent
TXAPTKLSPISVLYKXXXXXXXXXLKYHYNMVVRS

SEQ ID NO: 8076 - protein, 41 aa, Artificial Sequence
  Non-cyclic GFR-binding peptide
  MOD_RES (4), (5), (40): Xaa is C or S
  MOD_RES (19), (20), (21), (22), (23): Xaa is A or G
  MOD_RES (24), (25), (26), (27): Xaa is A or G or is absent
GKAXXVPTKLSAISVLYLXXXXXXXXXLKNYQEGMSVAEXG

SEQ ID NO: 8077 - protein, 37 aa, Artificial Sequence
  Non-cyclic GFR-binding peptide
  MOD_RES (1), (2), (35), (37): Xaa is C or S
  MOD_RES (16), (17), (18), (19), (20): Xaa is A or G
  MOD_RES (21), (22), (23), (24): Xaa is A or G or is absent
XXVPQDLNAISILYFXXXXXXXXXLKKYRMVVKSXKX

SEQ ID NO: 8078 - protein, 40 aa, Artificial Sequence
  Non-cyclic GFR-binding peptide
  MOD_RES (5), (6), (38), (40): Xaa is C or S
VPKAXXAPTKLSAISVLYLDSSNNVILKNYQNMVVKAXGX

SEQ ID NO: 8079 - protein, 35 aa, Artificial Sequence
  Non-cyclic GFR-binding peptide
  MOD_RES (1), (2), (34): Xaa is C or S
XXAPTKLNAISVLYFDSSNNVILKKYRNMVVKAXG

SEQ ID NO: 8080 - protein, 40 aa, Artificial Sequence
  Non-cyclic GFR-binding peptide
  MOD_RES (5), (6), (37), (39): Xaa is C or S
SAAPXXVPQALSAISILYLVGRKPKVLKNYQMIVRSXKXS

SEQ ID NO: 8081 - protein, 37 aa, Artificial Sequence
  Non-cyclic GFR-binding peptide
  MOD_RES (2), (3), (36): Xaa is C or S
  MOD_RES (17), (18), (19), (20), (21): Xaa is A or G
  MOD_RES (22), (23), (24), (25): Xaa is A or G or is absent
PXXVSQDLSPISILYKXXXXXXXXXLKYHYMIVKSXK

SEQ ID NO: 8082 - protein, 40 aa, Artificial Sequence
  Non-cyclic GFR-binding peptide
  MOD_RES (5), (6), (40): Xaa is C or S
  MOD_RES (20), (21), (22), (23), (24): Xaa is A or G
  MOD_RES (25), (26), (27), (28): Xaa is A or G or is absent
VPKPXXAPTQLSATSVLYYXXXXXXXXXLRKHRNMVVRAX

SEQ ID NO: 8083 - protein, 37 aa, Artificial Sequence
  Non-cyclic GFR-binding peptide
  MOD_RES (6), (7): Xaa is C or S
ASASPXXVSQDLNAISILYFIGKTPKILKKYRMIVKS

SEQ ID NO: 8084 - protein, 42 aa, Artificial Sequence
  Non-cyclic GFR-binding peptide
  MOD_RES (5), (6), (41): Xaa is C or S
  MOD_RES (20), (21), (22), (23), (24): Xaa is A or G
  MOD_RES (25), (26), (27), (28): Xaa is A or G or is absent
VGKAXXVPTKLNAISVLYFXXXXXXXXXLKKYREGMSVAEXG

SEQ ID NO: 8085 - protein, 41 aa, Artificial Sequence
  Non-cyclic GFR-binding peptide
  MOD_RES (6), (7), (38), (40): Xaa is C or S
ASAAPXXVPQALSAISILYLVGRKPKVLKNYQMIVRSXKXS

SEQ ID NO: 8086 - protein, 38 aa, Artificial Sequence
  Non-cyclic GFR-binding peptide
  MOD_RES (1), (2), (37): Xaa is C or S
  MOD_RES (16), (17), (18), (19), (20): Xaa is A or G
  MOD_RES (21), (22), (23), (24): Xaa is A or G or is absent
XXVPTKLSATSVLYYXXXXXXXXXLRKHREGMSVAEXG

SEQ ID NO: 8087 - protein, 35 aa, Artificial Sequence
  Non-cyclic GFR-binding peptide
  MOD_RES (2), (3): Xaa is C or S
  MOD_RES (17), (18), (19), (20), (21): Xaa is A or G
  MOD_RES (22), (23), (24), (25): Xaa is A or G or is absent
PXXVPQALSAISILYLXXXXXXXXXLKNYQMIVRS

SEQ ID NO: 8088 - protein, 39 aa, Artificial Sequence
  Non-cyclic GFR-binding peptide
  MOD_RES (1), (2), (36), (38): Xaa is C or S
  MOD_RES (16), (17), (18), (19), (20): Xaa is A or G
  MOD_RES (21), (22), (23), (24): Xaa is A or G or is absent
XXAPTQLSAISVLYLXXXXXXXXXLKNYQNMVVRAXGXH

SEQ ID NO: 8089 - protein, 34 aa, Artificial Sequence
  Non-cyclic GFR-binding peptide
  MOD_RES (34), (34): Xaa is C or S
  MOD_RES (14), (15), (16), (17), (18): Xaa is A or G
  MOD_RES (19), (20), (21), (22): Xaa is A or G or is absent
APTQLSPISVLYKXXXXXXXXXLKYHYNMVVRAX

SEQ ID NO: 8090 - protein, 35 aa, Artificial Sequence
  Non-cyclic GFR-binding peptide
  MOD_RES (2), (3): Xaa is C or S
AXXVPTKLSAISVLYLDDMGVPTLKNYQEGMSVAE

SEQ ID NO: 8091 - protein, 36 aa, Artificial Sequence
  Non-cyclic GFR-binding peptide
  MOD_RES (4), (5), (36): Xaa is C or S
ASPXXVPQDLSAISILYLVGRTPKVLKNYQMVVKSX

SEQ ID NO: 8092 - protein, 35 aa, Artificial Sequence
  Non-cyclic GFR-binding peptide
  MOD_RES (1), (2), (34): Xaa is C or S
XXVPTELSATSMLYYDEYDKVVLRKHREMVVEGXG

SEQ ID NO: 8093 - protein, 35 aa, Artificial Sequence
  Non-cyclic GFR-binding peptide
  MOD_RES (1), (32), (34): Xaa is C or S
XVPQDLSPISILYKVGRTPKVLKYHYMVVKSXKXS

SEQ ID NO: 8094 - protein, 31 aa, Artificial Sequence
  Non-cyclic GFR-binding peptide
  MOD_RES (1), (1): Xaa is C or S
XAPTQLSAISVLYLDDSSNVILKNYQNMVVR

SEQ ID NO: 8095 - protein, 40 aa, Artificial Sequence
  Non-cyclic GFR-binding peptide
  MOD_RES (2), (39): Xaa is C or S
  MOD_RES (18), (19), (20), (21), (22): Xaa is A or G
  MOD_RES (23), (24), (25), (26): Xaa is A or G or is absent
QXRPTQVQLSATSVLYYXXXXXXXXXLRKHRTLEDHLAXK

SEQ ID NO: 8096 - protein, 42 aa, Artificial Sequence
  Non-cyclic GFR-binding peptide
  MOD_RES (5), (6), (39), (41): Xaa is C or S
  MOD_RES (20), (21), (22), (23), (24): Xaa is A or G
  MOD_RES (25), (26), (27), (28): Xaa is A or G or is absent
SAAPXXVPQALSAISILYLXXXXXXXXXLKNYQMIVRSXKXS

SEQ ID NO: 8097 - protein, 34 aa, Artificial Sequence
  Non-cyclic GFR-binding peptide
  MOD_RES (1), (32), (34): Xaa is C or S
XVPQALSPISILYKVGRKPKVLKYHYMIVRSXKX

SEQ ID NO: 8098 - protein, 41 aa, Artificial Sequence
  Non-cyclic GFR-binding peptide
  MOD_RES (6), (7), (40): Xaa is C or S
  MOD_RES (21), (22), (23), (24), (25): Xaa is A or G
  MOD_RES (26), (27), (28), (29): Xaa is A or G or is absent
ASASPXXVSQDLSAISILYLXXXXXXXXXLKNYQMIVKSXK

SEQ ID NO: 8099 - protein, 41 aa, Artificial Sequence
  Non-cyclic GFR-binding peptide
  MOD_RES (6), (7), (40): Xaa is C or S
  MOD_RES (21), (22), (23), (24), (25): Xaa is A or G
  MOD_RES (26), (27), (28), (29): Xaa is A or G or is absent
ASASPXXVSQDLNAISILYFXXXXXXXXXLKKYRMIVKSXK

SEQ ID NO: 8100 - protein, 38 aa, Artificial Sequence
  Non-cyclic GFR-binding peptide
  MOD_RES (5), (6): Xaa is C or S
  MOD_RES (20), (21), (22), (23), (24): Xaa is A or G
  MOD_RES (25), (26), (27), (28): Xaa is A or G or is absent
VPKAXXAPTKLSPISVLYKXXXXXXXXXLKYHYNMVVK

SEQ ID NO: 8101 - protein, 39 aa, Artificial Sequence
  Non-cyclic GFR-binding peptide
  MOD_RES (2), (3), (37), (39): Xaa is C or S
  MOD_RES (17), (18), (19), (20), (21): Xaa is A or G
  MOD_RES (22), (23), (24), (25): Xaa is A or G or is absent
PXXAPTKLSAISVLYLXXXXXXXXXLKNYQNMVVRSXGX

SEQ ID NO: 8102 - protein, 35 aa, Artificial Sequence
  Non-cyclic GFR-binding peptide
  MOD_RES (32), (34): Xaa is C or S
APTKLSAISVLYLDDSSNVILKNYQNMVVRSXGXH

SEQ ID NO: 8103 - protein, 36 aa, Artificial Sequence
  Non-cyclic GFR-binding peptide
  MOD_RES (3), (4), (35): Xaa is C or S
APXXVPQALSATSILYYVGRKPKVLRKHRMIVRSXK

SEQ ID NO: 8104 - protein, 35 aa, Artificial Sequence
  Non-cyclic GFR-binding peptide
  MOD_RES (4), (5): Xaa is C or S
PKPXXAPTKLSATSVLYYDDSSNVILRKHRNMVVR

SEQ ID NO: 8105 - protein, 39 aa, Artificial Sequence
  Non-cyclic GFR-binding peptide
  MOD_RES (2), (3), (36), (38): Xaa is C or S
AXXVPTKLNAISVLYFDDMGVPTLKKYREGMSVAEXGXR

SEQ ID NO: 8106 - protein, 38 aa, Artificial Sequence
  Non-cyclic GFR-binding peptide
  MOD_RES (3), (4), (36), (38): Xaa is C or S
KAXXVPTELNAISMLYFDENEKVVLKKYRDMVVEGXGX

SEQ ID NO: 8107 - protein, 35 aa, Artificial Sequence
  Non-cyclic GFR-binding peptide
  MOD_RES (1), (2), (35): Xaa is C or S
  MOD_RES (16), (17), (18), (19), (20): Xaa is A or G
  MOD_RES (21), (22), (23), (24): Xaa is A or G or is absent
XXVPQALSATSILYYXXXXXXXXXLRKHRMIVRSX

SEQ ID NO: 8108 - protein, 45 aa, Artificial Sequence
  Non-cyclic GFR-binding peptide
  MOD_RES (6), (7), (42), (44): Xaa is C or S
  MOD_RES (21), (22), (23), (24), (25): Xaa is A or G
  MOD_RES (26), (27), (28), (29): Xaa is A or G or is absent
KVGKAXXVPTKLNAISVLYFXXXXXXXXXLKKYREGMSVAEXGXR

SEQ ID NO: 8109 - protein, 37 aa, Artificial Sequence
  Non-cyclic GFR-binding peptide
  MOD_RES (3), (4), (37): Xaa is C or S
KAXXVPTKLNAISVLYFDDMGVPTLKKYREGMSVAEX

SEQ ID NO: 8110 - protein, 36 aa, Artificial Sequence
  Non-cyclic GFR-binding peptide
  MOD_RES (1), (33), (35): Xaa is C or S
XVPTELSPISMLYKDEYDKVVLKYHYEMVVEGXGXR

SEQ ID NO: 8111 - protein, 33 aa, Artificial Sequence
  Non-cyclic GFR-binding peptide
  MOD_RES (1), (1): Xaa is C or S
  MOD_RES (15), (16), (17), (18), (19): Xaa is A or G
  MOD_RES (20), (21), (22), (23): Xaa is A or G or is absent
XVPTELNAISMLYFXXXXXXXXXLKKYRDMVVE

SEQ ID NO: 8112 - protein, 40 aa, Artificial Sequence
  Non-cyclic GFR-binding peptide
  MOD_RES (5), (6), (38), (40): Xaa is C or S
IPKAXXVPTELNAISMLYFDEYDKVVLKKYREMVVEGXGX

SEQ ID NO: 8113 - protein, 39 aa, Artificial Sequence
  Non-cyclic GFR-binding peptide
  MOD_RES (6), (7), (38): Xaa is C or S
ASASPXXVSQDLSAISILYLIGKTPKILKNYQMIVKSXK

SEQ ID NO: 8114 - protein, 40 aa, Artificial Sequence
  Non-cyclic GFR-binding peptide
  MOD_RES (4), (5), (39): Xaa is C or S
  MOD_RES (19), (20), (21), (22), (23): Xaa is A or G
  MOD_RES (24), (25), (26), (27): Xaa is A or G or is absent
PKPXXAPTQLSAISVLYLXXXXXXXXXLKNYQNMVVRAXG

SEQ ID NO: 8115 - protein, 39 aa, Artificial Sequence
  Non-cyclic GFR-binding peptide
  MOD_RES (2), (3), (37), (39): Xaa is C or S
  MOD_RES (17), (18), (19), (20), (21): Xaa is A or G
  MOD_RES (22), (23), (24), (25): Xaa is A or G or is absent
PXXAPTQLSATSVLYYXXXXXXXXXLRKHRNMVVRAXGX

SEQ ID NO: 8116 - protein, 36 aa, Artificial Sequence
  Non-cyclic GFR-binding peptide
  MOD_RES (2), (2): Xaa is C or S
QXRPTQVQLSAISVLYLEIVRKKPIFLKNYQTLEDH

SEQ ID NO: 8117 - protein, 32 aa, Artificial Sequence
  Non-cyclic GFR-binding peptide
  MOD_RES (14), (15), (16), (17), (18): Xaa is A or G
  MOD_RES (19), (20), (21), (22): Xaa is A or G or is absent
VPQDLSPISILYKXXXXXXXXXLKYHYMVVKS

SEQ ID NO: 8118 - protein, 32 aa, Artificial Sequence
  Non-cyclic GFR-binding peptide
  MOD_RES (31), (31): Xaa is C or S
VPQDLSPISILYKVGRTPKVLKYHYMVVKSXK

SEQ ID NO: 8119 - protein, 39 aa, Artificial Sequence
  Non-cyclic GFR-binding peptide
  MOD_RES (3), (4), (37), (39): Xaa is C or S
  MOD_RES (18), (19), (20), (21), (22): Xaa is A or G
  MOD_RES (23), (24), (25), (26): Xaa is A or G or is absent
APXXVPQALNAISILYFXXXXXXXXXLKKYRMIVRSXKX

SEQ ID NO: 8120 - protein, 39 aa, Artificial Sequence
  Non-cyclic GFR-binding peptide
  MOD_RES (4), (4): Xaa is C or S
  MOD_RES (20), (21), (22), (23), (24): Xaa is A or G
  MOD_RES (25), (26), (27), (28): Xaa is A or G or is absent
NVQXRPTQVQLSAISVLYLXXXXXXXXXLKNYQTLEDHL

SEQ ID NO: 8121 - protein, 35 aa, Artificial Sequence
  Non-cyclic GFR-binding peptide
  MOD_RES (1), (32), (34): Xaa is C or S
XVPQALSAISILYLVGRKPKVLKNYQMIVRSXKXS

SEQ ID NO: 8122 - protein, 37 aa, Artificial Sequence
  Non-cyclic GFR-binding peptide
  MOD_RES (2), (3): Xaa is C or S
  MOD_RES (17), (18), (19), (20), (21): Xaa is A or G
  MOD_RES (22), (23), (24), (25): Xaa is A or G or is absent
AXXVPTKLNAISVLYFXXXXXXXXXLKKYREGMSVAE

SEQ ID NO: 8123 - protein, 38 aa, Artificial Sequence
  Non-cyclic GFR-binding peptide
  MOD_RES (6), (7): Xaa is C or S
KIPKAXXVPTELSATSMLYYDENEKVVLRKHRDMVVEG

SEQ ID NO: 8124 - protein, 36 aa, Artificial Sequence
  Non-cyclic GFR-binding peptide
  MOD_RES (4), (5), (36): Xaa is C or S
ASPXXVSQDLSATSILYYIGKTPKILRKHRMIVKSX

SEQ ID NO: 8125 - protein, 37 aa, Artificial Sequence
  Non-cyclic GFR-binding peptide
  MOD_RES (2), (3), (37): Xaa is C or S
  MOD_RES (17), (18), (19), (20), (21): Xaa is A or G
  MOD_RES (22), (23), (24), (25): Xaa is A or G or is absent
AXXVPTELSATSMLYYXXXXXXXXXLRKHREMVVEGX

SEQ ID NO: 8126 - protein, 37 aa, Artificial Sequence
  Non-cyclic GFR-binding peptide
  MOD_RES (3), (3): Xaa is C or S
  MOD_RES (19), (20), (21), (22), (23): Xaa is A or G
  MOD_RES (24), (25), (26), (27): Xaa is A or G or is absent
VQXRPTQVQLSPISVLYKXXXXXXXXXLKYHYTLEDH

SEQ ID NO: 8127 - protein, 39 aa, Artificial Sequence
  Non-cyclic GFR-binding peptide
  MOD_RES (37), (39): Xaa is C or S
  MOD_RES (16), (17), (18), (19), (20): Xaa is A or G
  MOD_RES (21), (22), (23), (24): Xaa is A or G or is absent
RPTQVQLSATSVLYYXXXXXXXXXLRKHRTLEDHLAXKX

SEQ ID NO: 8128 - protein, 43 aa, Artificial Sequence
  Non-cyclic GFR-binding peptide
  MOD_RES (3), (40), (42): Xaa is C or S
VQXRPTQVQLSAISVLYLEIVRKKPIFLKNYQTLEDHLAXKXE

SEQ ID NO: 8129 - protein, 40 aa, Artificial Sequence
  Non-cyclic GFR-binding peptide
  MOD_RES (6), (7), (39): Xaa is C or S
KIPKAXXVPTELSATSMLYYDENEKVVLRKHRDMVVEGXG

SEQ ID NO: 8130 - protein, 38 aa, Artificial Sequence
  Non-cyclic GFR-binding peptide
  MOD_RES (3), (4), (38): Xaa is C or S
  MOD_RES (18), (19), (20), (21), (22): Xaa is A or G
  MOD_RES (23), (24), (25), (26): Xaa is A or G or is absent
KAXXAPTKLSPISVLYKXXXXXXXXXLKYHYNMVVKAX

SEQ ID NO: 8131 - protein, 41 aa, Artificial Sequence
  Non-cyclic GFR-binding peptide
  MOD_RES (5), (6), (38), (40): Xaa is C or S
IPKAXXVPTELSATSMLYYDEYDKVVLRKHREMVVEGXGXR

SEQ ID NO: 8132 - protein, 36 aa, Artificial Sequence
  Non-cyclic GFR-binding peptide
  MOD_RES (2), (3): Xaa is C or S
  MOD_RES (17), (18), (19), (20), (21): Xaa is A or G
  MOD_RES (22), (23), (24), (25): Xaa is A or G or is absent
PXXAPTKLSAISVLYLXXXXXXXXXLKNYQNMVVRS

SEQ ID NO: 8133 - protein, 35 aa, Artificial Sequence
  Non-cyclic GFR-binding peptide
  MOD_RES (2), (3), (35): Xaa is C or S
PXXAPTKLSAISVLYLDDSSNVILKNYQNMVVRSX

SEQ ID NO: 8134 - protein, 39 aa, Artificial Sequence
  Non-cyclic GFR-binding peptide
  MOD_RES (5), (6), (38): Xaa is C or S
VPKPXXAPTKLSPISVLYKDDSSNVILKYHYNMVVRSXG

SEQ ID NO: 8135 - protein, 42 aa, Artificial Sequence
  Non-cyclic GFR-binding peptide
  MOD_RES (3), (40), (42): Xaa is C or S
VQXRPTQVQLSAISVLYLEIVRKKPIFLKNYQTLEDHLAXKX

SEQ ID NO: 8136 - protein, 41 aa, Artificial Sequence
  Non-cyclic GFR-binding peptide
  MOD_RES (3), (40): Xaa is C or S
  MOD_RES (19), (20), (21), (22), (23): Xaa is A or G
  MOD_RES (24), (25), (26), (27): Xaa is A or G or is absent
VQXRPTQVQLSATSVLYYXXXXXXXXXLRKHRTLEDHLAXK

SEQ ID NO: 8137 - protein, 42 aa, Artificial Sequence
  Non-cyclic GFR-binding peptide
  MOD_RES (6), (7), (39), (41): Xaa is C or S
TVPKPXXAPTQLSAISVLYLDDSSNVILKNYQNMVVRAXGXH

SEQ ID NO: 8138 - protein, 31 aa, Artificial Sequence
  Non-cyclic GFR-binding peptide
  MOD_RES (1), (1): Xaa is C or S
XAPTKLSATSVLYYDDSSNVILRKHRNMVVR

SEQ ID NO: 8139 - protein, 35 aa, Artificial Sequence
  Non-cyclic GFR-binding peptide
  MOD_RES (1), (33), (35): Xaa is C or S
XVPTELNAISMLYFDENEKVVLKKYRDMVVEGXGX

SEQ ID NO: 8140 - protein, 33 aa, Artificial Sequence
  Non-cyclic GFR-binding peptide
  MOD_RES (2), (3): Xaa is C or S
AXXVPTELSPISMLYKDEYDKVVLKYHYEMVVE

SEQ ID NO: 8141 - protein, 40 aa, Artificial Sequence
  Non-cyclic GFR-binding peptide
  MOD_RES (3), (4), (37), (39): Xaa is C or S
  MOD_RES (18), (19), (20), (21), (22): Xaa is A or G
  MOD_RES (23), (24), (25), (26): Xaa is A or G or is absent
APXXVPQALNAISILYFXXXXXXXXXLKKYRMIVRSXKXS

SEQ ID NO: 8142 - protein, 39 aa, Artificial Sequence
  Non-cyclic GFR-binding peptide
  MOD_RES (6), (7), (38): Xaa is C or S
ASASPXXVPQDLSAISILYLVGRTPKVLKNYQMVVKSXK

SEQ ID NO: 8143 - protein, 36 aa, Artificial Sequence
  Non-cyclic GFR-binding peptide
  MOD_RES (2), (34), (36): Xaa is C or S
TXAPTKLSATSVLYYDDSSNVILRKHRNMVVRSXGX

SEQ ID NO: 8144 - protein, 32 aa, Artificial Sequence
  Non-cyclic GFR-binding peptide
  MOD_RES (1), (2): Xaa is C or S
XXVPQALSPISILYKVGRKPKVLKYHYMIVRS

SEQ ID NO: 8145 - protein, 35 aa, Artificial Sequence
  Non-cyclic GFR-binding peptide
  MOD_RES (1), (2): Xaa is C or S
  MOD_RES (16), (17), (18), (19), (20): Xaa is A or G
  MOD_RES (21), (22), (23), (24): Xaa is A or G or is absent
XXVPTELSPISMLYKXXXXXXXXXLKYHYEMVVEG

SEQ ID NO: 8146 - protein, 34 aa, Artificial Sequence
  Non-cyclic GFR-binding peptide
  MOD_RES (32), (34): Xaa is C or S
APTQLSAISVLYLDDSSNVILKNYQNMVVRAXGX

SEQ ID NO: 8147 - protein, 37 aa, Artificial Sequence
  Non-cyclic GFR-binding peptide
  MOD_RES (5), (6): Xaa is C or S
VPKPXXAPTQLSPISVLYKDDSSNVILKYHYNMVVRA

SEQ ID NO: 8148 - protein, 40 aa, Artificial Sequence
  Non-cyclic GFR-binding peptide
  MOD_RES (3), (4), (38), (40): Xaa is C or S
  MOD_RES (18), (19), (20), (21), (22): Xaa is A or G
  MOD_RES (23), (24), (25), (26): Xaa is A or G or is absent
KPXXAPTKLSPISVLYKXXXXXXXXXLKYHYNMVVRSXGX

SEQ ID NO: 8149 - protein, 36 aa, Artificial Sequence
  Non-cyclic GFR-binding peptide
  MOD_RES (35), (35): Xaa is C or S
  MOD_RES (14), (15), (16), (17), (18): Xaa is A or G
  MOD_RES (19), (20), (21), (22): Xaa is A or G or is absent
TQVQLSATSVLYYXXXXXXXXXLRKHRTLEDHLAXK

SEQ ID NO: 8150 - protein, 35 aa, Artificial Sequence
  Non-cyclic GFR-binding peptide
  MOD_RES (32), (34): Xaa is C or S
VPTELNAISMLYFDENEKVVLKKYRDMVVEGXGXR

SEQ ID NO: 8151 - protein, 39 aa, Artificial Sequence
  Non-cyclic GFR-binding peptide
  MOD_RES (2), (3), (36), (38): Xaa is C or S
  MOD_RES (17), (18), (19), (20), (21): Xaa is A or G
  MOD_RES (22), (23), (24), (25): Xaa is A or G or is absent
PXXVPQDLSPISILYKXXXXXXXXXLKYHYMVVKSXKXS

SEQ ID NO: 8152 - protein, 38 aa, Artificial Sequence
  Non-cyclic GFR-binding peptide
  MOD_RES (3), (4), (35), (37): Xaa is C or S
SPXXVSQDLSATSILYYIGKTPKILRKHRMIVKSXKXS

SEQ ID NO: 8153 - protein, 36 aa, Artificial Sequence
  Non-cyclic GFR-binding peptide
  MOD_RES (5), (6): Xaa is C or S
SAAPXXVPQALNAISILYFVGRKPKVLKKYRMIVRS

SEQ ID NO: 8154 - protein, 41 aa, Artificial Sequence
  Non-cyclic GFR-binding peptide
  MOD_RES (4), (5), (38), (40): Xaa is C or S
  MOD_RES (19), (20), (21), (22), (23): Xaa is A or G
  MOD_RES (24), (25), (26), (27): Xaa is A or G or is absent
AAPXXVPQALNAISILYFXXXXXXXXXLKKYRMIVRSXKXS

SEQ ID NO: 8155 - protein, 38 aa, Artificial Sequence
  Non-cyclic GFR-binding peptide
  MOD_RES (4), (5), (37): Xaa is C or S
PKPXXAPTQLSATSVLYYDDSSNVILRKHRNMVVRAXG

SEQ ID NO: 8156 - protein, 33 aa, Artificial Sequence
  Non-cyclic GFR-binding peptide
  MOD_RES (1), (2): Xaa is C or S
XXAPTQLSPISVLYKDDSSNVILKYHYNMVVRA

SEQ ID NO: 8157 - protein, 31 aa, Artificial Sequence
  Non-cyclic GFR-binding peptide
  MOD_RES (1), (1): Xaa is C or S
XAPTQLSPISVLYKDDSSNVILKYHYNMVVR

SEQ ID NO: 8158 - protein, 44 aa, Artificial Sequence
  Non-cyclic GFR-binding peptide
  MOD_RES (5), (6), (41), (43): Xaa is C or S
  MOD_RES (20), (21), (22), (23), (24): Xaa is A or G
  MOD_RES (25), (26), (27), (28): Xaa is A or G or is absent
VGKAXXVPTKLNAISVLYFXXXXXXXXXLKKYREGMSVAEXGXR

SEQ ID NO: 8159 - protein, 39 aa, Artificial Sequence
  Non-cyclic GFR-binding peptide
  MOD_RES (3), (4), (36), (38): Xaa is C or S
KAXXAPTKLNAISVLYFDSSNNVILKKYRNMVVKAXGXH

SEQ ID NO: 8160 - protein, 44 aa, Artificial Sequence
  Non-cyclic GFR-binding peptide
  MOD_RES (6), (7), (41), (43): Xaa is C or S
  MOD_RES (21), (22), (23), (24), (25): Xaa is A or G
  MOD_RES (26), (27), (28), (29): Xaa is A or G or is absent
AVPKAXXAPTKLSPISVLYKXXXXXXXXXLKYHYNMVVKAXGXH

SEQ ID NO: 8161 - protein, 42 aa, Artificial Sequence
  Non-cyclic GFR-binding peptide
  MOD_RES (6), (7), (41): Xaa is C or S
  MOD_RES (21), (22), (23), (24), (25): Xaa is A or G
  MOD_RES (26), (27), (28), (29): Xaa is A or G or is absent
YVPKPXXAPTKLSAISVLYLXXXXXXXXXLKNYQNMVVRSXG

SEQ ID NO: 8162 - protein, 38 aa, Artificial Sequence
  Non-cyclic GFR-binding peptide
  MOD_RES (5), (6), (38): Xaa is C or S
IPKAXXVPTELNAISMLYFDENEKVVLKKYRDMVVEGX

SEQ ID NO: 8163 - protein, 32 aa, Artificial Sequence
  Non-cyclic GFR-binding peptide
  MOD_RES (31), (31): Xaa is C or S
VPQDLNAISILYFVGRTPKVLKKYRMVVKSXK

SEQ ID NO: 8164 - protein, 42 aa, Artificial Sequence
  Non-cyclic GFR-binding peptide
  MOD_RES (4), (41): Xaa is C or S
  MOD_RES (20), (21), (22), (23), (24): Xaa is A or G
  MOD_RES (25), (26), (27), (28): Xaa is A or G or is absent
NVQXRPTQVQLSPISVLYKXXXXXXXXXLKYHYTLEDHLAXK

SEQ ID NO: 8165 - protein, 38 aa, Artificial Sequence
  Non-cyclic GFR-binding peptide
  MOD_RES (5), (6), (37): Xaa is C or S
SASPXXVSQDLSPISILYKIGKTPKILKYHYMIVKSXK

SEQ ID NO: 8166 - protein, 42 aa, Artificial Sequence
  Non-cyclic GFR-binding peptide
  MOD_RES (4), (5), (39), (41): Xaa is C or S
  MOD_RES (19), (20), (21), (22), (23): Xaa is A or G
  MOD_RES (24), (25), (26), (27): Xaa is A or G or is absent
PKAXXVPTELSPISMLYKXXXXXXXXXLKYHYDMVVEGXGXR

SEQ ID NO: 8167 - protein, 40 aa, Artificial Sequence
  Non-cyclic GFR-binding peptide
  MOD_RES (6), (40): Xaa is C or S
  MOD_RES (20), (21), (22), (23), (24): Xaa is A or G
  MOD_RES (25), (26), (27), (28): Xaa is A or G or is absent
VTKPTXAPTKLSATSVLYYXXXXXXXXXLRKHRNMVVRSX

SEQ ID NO: 8168 - protein, 39 aa, Artificial Sequence
  Non-cyclic GFR-binding peptide
  MOD_RES (36), (38): Xaa is C or S
PTQVQLSPISVLYKEIVRKKPIFLKYHYTLEDHLAXKXE

SEQ ID NO: 8169 - protein, 35 aa, Artificial Sequence
  Non-cyclic GFR-binding peptide
  MOD_RES (3), (3): Xaa is C or S
  MOD_RES (17), (18), (19), (20), (21): Xaa is A or G
  MOD_RES (22), (23), (24), (25): Xaa is A or G or is absent
PTXAPTKLSAISVLYLXXXXXXXXXLKNYQNMVVR

SEQ ID NO: 8170 - protein, 35 aa, Artificial Sequence
  Non-cyclic GFR-binding peptide
  MOD_RES (35), (35): Xaa is C or S
TQVQLSATSVLYYEIVRKKPIFLRKHRTLEDHLAX

SEQ ID NO: 8171 - protein, 39 aa, Artificial Sequence
  Non-cyclic GFR-binding peptide
  MOD_RES (1), (36), (38): Xaa is C or S
  MOD_RES (15), (16), (17), (18), (19): Xaa is A or G
  MOD_RES (20), (21), (22), (23): Xaa is A or G or is absent
XVPTKLNAISVLYFXXXXXXXXXLKKYREGMSVAEXGXR

SEQ ID NO: 8172 - protein, 33 aa, Artificial Sequence
  Non-cyclic GFR-binding peptide
  MOD_RES (1), (33): Xaa is C or S
XAPTKLSPISVLYKDSSNNVILKYHYNMVVKAX

SEQ ID NO: 8173 - protein, 30 aa, Artificial Sequence
  Non-cyclic GFR-binding peptide
VPTELSATSMLYYDENEKVVLRKHRDMVVE

SEQ ID NO: 8174 - protein, 38 aa, Artificial Sequence
  Non-cyclic GFR-binding peptide
  MOD_RES (36), (38): Xaa is C or S
PTQVQLSPISVLYKEIVRKKPIFLKYHYTLEDHLAXKX

SEQ ID NO: 8175 - protein, 35 aa, Artificial Sequence
  Non-cyclic GFR-binding peptide
  MOD_RES (1), (34): Xaa is C or S
  MOD_RES (15), (16), (17), (18), (19): Xaa is A or G
  MOD_RES (20), (21), (22), (23): Xaa is A or G or is absent
XVPQALSAISILYLXXXXXXXXXLKNYQMIVRSXK

SEQ ID NO: 8176 - protein, 39 aa, Artificial Sequence
  Non-cyclic GFR-binding peptide
  MOD_RES (4), (5), (39): Xaa is C or S
  MOD_RES (19), (20), (21), (22), (23): Xaa is A or G
  MOD_RES (24), (25), (26), (27): Xaa is A or G or is absent
PKPXXAPTQLSATSVLYYXXXXXXXXXLRKHRNMVVRAX

SEQ ID NO: 8177 - protein, 33 aa, Artificial Sequence
  Non-cyclic GFR-binding peptide
  MOD_RES (1), (33): Xaa is C or S
XVPTELNAISMLYFDEYDKVVLKKYREMVVEGX

SEQ ID NO: 8178 - protein, 41 aa, Artificial Sequence
  Non-cyclic GFR-binding peptide
  MOD_RES (4), (5), (39), (41): Xaa is C or S
  MOD_RES (19), (20), (21), (22), (23): Xaa is A or G
  MOD_RES (24), (25), (26), (27): Xaa is A or G or is absent
PKAXXAPTKLSPISVLYKXXXXXXXXXLKYHYNMVVKAXGX

SEQ ID NO: 8179 - protein, 40 aa, Artificial Sequence
  Non-cyclic GFR-binding peptide
  MOD_RES (6), (7), (38), (40): Xaa is C or S
ASAAPXXVPQALSATSILYYVGRKPKVLRKHRMIVRSXKX

SEQ ID NO: 8180 - protein, 39 aa, Artificial Sequence
  Non-cyclic GFR-binding peptide
  MOD_RES (7), (39): Xaa is C or S
HVTKPTXAPTKLSATSVLYYDDSSNVILRKHRNMVVRSX

SEQ ID NO: 8181 - protein, 39 aa, Artificial Sequence
  Non-cyclic GFR-binding peptide
  MOD_RES (36), (38): Xaa is C or S
PTQVQLSAISVLYLEIVRKKPIFLKNYQTLEDHLAXKXE

SEQ ID NO: 8182 - protein, 31 aa, Artificial Sequence
  Non-cyclic GFR-binding peptide
  MOD_RES (1), (1): Xaa is C or S
XVPQDLNAISILYFVGRTPKVLKKYRMVVKS

SEQ ID NO: 8183 - protein, 40 aa, Artificial Sequence
  Non-cyclic GFR-binding peptide
  MOD_RES (37), (39): Xaa is C or S
RPTQVQLSATSVLYYEIVRKKPIFLRKHRTLEDHLAXKXE

SEQ ID NO: 8184 - protein, 38 aa, Artificial Sequence
  Non-cyclic GFR-binding peptide
  MOD_RES (3), (4), (36), (38): Xaa is C or S
KAXXVPTELNAISMLYFDEYDKVVLKKYREMVVEGXGX

SEQ ID NO: 8185 - protein, 42 aa, Artificial Sequence
  Non-cyclic GFR-binding peptide
  MOD_RES (5), (6), (40), (42): Xaa is C or S
  MOD_RES (20), (21), (22), (23), (24): Xaa is A or G
  MOD_RES (25), (26), (27), (28): Xaa is A or G or is absent
VPKPXXAPTKLSAISVLYLXXXXXXXXXLKNYQNMVVRSXGX

SEQ ID NO: 8186 - protein, 40 aa, Artificial Sequence
  Non-cyclic GFR-binding peptide
  MOD_RES (2), (39): Xaa is C or S
  MOD_RES (18), (19), (20), (21), (22): Xaa is A or G
  MOD_RES (23), (24), (25), (26): Xaa is A or G or is absent
QXRPTQVQLSAISVLYLXXXXXXXXXLKNYQTLEDHLAXK

SEQ ID NO: 8187 - protein, 39 aa, Artificial Sequence
  Non-cyclic GFR-binding peptide
  MOD_RES (4), (36), (38): Xaa is C or S
KPTXAPTKLSPISVLYKDDSSNVILKYHYNMVVRSXGXH

SEQ ID NO: 8188 - protein, 32 aa, Artificial Sequence
  Non-cyclic GFR-binding peptide
  MOD_RES (1), (2): Xaa is C or S
XXAPTKLSPISVLYKDDSSNVILKYHYNMVVR

SEQ ID NO: 8189 - protein, 33 aa, Artificial Sequence
  Non-cyclic GFR-binding peptide
  MOD_RES (1), (2): Xaa is C or S
XXAPTKLNAISVLYFDSSNNVILKKYRNMVVKA

SEQ ID NO: 8190 - protein, 32 aa, Artificial Sequence
  Non-cyclic GFR-binding peptide
  MOD_RES (1), (2): Xaa is C or S
XXVPQDLNAISILYFVGRTPKVLKKYRMVVKS

SEQ ID NO: 8191 - protein, 39 aa, Artificial Sequence
  Non-cyclic GFR-binding peptide
  MOD_RES (4), (5), (37), (39): Xaa is C or S
PKAXXVPTELSPISMLYKDEYDKVVLKYHYEMVVEGXGX

SEQ ID NO: 8192 - protein, 34 aa, Artificial Sequence
  Non-cyclic GFR-binding peptide
  MOD_RES (1), (32), (34): Xaa is C or S
XVSQDLSAISILYLIGKTPKILKNYQMIVKSXKX

SEQ ID NO: 8193 - protein, 33 aa, Artificial Sequence
  Non-cyclic GFR-binding peptide
  MOD_RES (2), (3): Xaa is C or S
PXXVSQDLSPISILYKIGKTPKILKYHYMIVKS

SEQ ID NO: 8194 - protein, 39 aa, Artificial Sequence
  Non-cyclic GFR-binding peptide
  MOD_RES (7), (7): Xaa is C or S
  MOD_RES (21), (22), (23), (24), (25): Xaa is A or G
  MOD_RES (26), (27), (28), (29): Xaa is A or G or is absent
HVTKPTXAPTKLSAISVLYLXXXXXXXXXLKNYQNMVVR

SEQ ID NO: 8195 - protein, 45 aa, Artificial Sequence
  Non-cyclic GFR-binding peptide
  MOD_RES (6), (7), (42), (44): Xaa is C or S
  MOD_RES (21), (22), (23), (24), (25): Xaa is A or G
  MOD_RES (26), (27), (28), (29): Xaa is A or G or is absent
KVGKAXXVPTKLSAISVLYLXXXXXXXXXLKNYQEGMSVAEXGXR

SEQ ID NO: 8196 - protein, 37 aa, Artificial Sequence
  Non-cyclic GFR-binding peptide
  MOD_RES (6), (7): Xaa is C or S
ASASPXXVPQDLSAISILYLVGRTPKVLKNYQMVVKS

SEQ ID NO: 8197 - protein, 40 aa, Artificial Sequence
  Non-cyclic GFR-binding peptide
  MOD_RES (5), (6), (40): Xaa is C or S
  MOD_RES (20), (21), (22), (23), (24): Xaa is A or G
  MOD_RES (25), (26), (27), (28): Xaa is A or G or is absent
IPKAXXVPTELNAISMLYFXXXXXXXXXLKKYRDMVVEGX

SEQ ID NO: 8198 - protein, 41 aa, Artificial Sequence
  Non-cyclic GFR-binding peptide
  MOD_RES (3), (4), (38), (40): Xaa is C or S
  MOD_RES (18), (19), (20), (21), (22): Xaa is A or G
  MOD_RES (23), (24), (25), (26): Xaa is A or G or is absent
KAXXVPTELSATSMLYYXXXXXXXXXLRKHREMVVEGXGXR

SEQ ID NO: 8199 - protein, 34 aa, Artificial Sequence
  Non-cyclic GFR-binding peptide
  MOD_RES (1), (2): Xaa is C or S
  MOD_RES (16), (17), (18), (19), (20): Xaa is A or G
  MOD_RES (21), (22), (23), (24): Xaa is A or G or is absent
XXVSQDLSATSILYYXXXXXXXXXLRKHRMIVKS

SEQ ID NO: 8200 - protein, 36 aa, Artificial Sequence
  Non-cyclic GFR-binding peptide
  MOD_RES (3), (4): Xaa is C or S
  MOD_RES (18), (19), (20), (21), (22): Xaa is A or G
  MOD_RES (23), (24), (25), (26): Xaa is A or G or is absent
KAXXVPTELSPISMLYKXXXXXXXXXLKYHYDMVVE

SEQ ID NO: 8201 - protein, 35 aa, Artificial Sequence
  Non-cyclic GFR-binding peptide
  MOD_RES (3), (4): Xaa is C or S
KAXXVPTELSPISMLYKDENEKVVLKYHYDMVVEG

SEQ ID NO: 8202 - protein, 35 aa, Artificial Sequence
  Non-cyclic GFR-binding peptide
  MOD_RES (4), (5): Xaa is C or S
PKPXXAPTQLSPISVLYKDDSSNVILKYHYNMVVR

SEQ ID NO: 8203 - protein, 37 aa, Artificial Sequence
  Non-cyclic GFR-binding peptide
  MOD_RES (2), (3), (35), (37): Xaa is C or S
PXXAPTQLSATSVLYYDDSSNVILRKHRNMVVRAXGX

SEQ ID NO: 8204 - protein, 41 aa, Artificial Sequence
  Non-cyclic GFR-binding peptide
  MOD_RES (6), (7), (41): Xaa is C or S
  MOD_RES (21), (22), (23), (24), (25): Xaa is A or G
  MOD_RES (26), (27), (28), (29): Xaa is A or G or is absent
AVPKAXXAPTKLNAISVLYFXXXXXXXXXLKKYRNMVVKAX

SEQ ID NO: 8205 - protein, 37 aa, Artificial Sequence
  Non-cyclic GFR-binding peptide
  MOD_RES (3), (37): Xaa is C or S
  MOD_RES (17), (18), (19), (20), (21): Xaa is A or G
  MOD_RES (22), (23), (24), (25): Xaa is A or G or is absent
PTXAPTKLSATSVLYYXXXXXXXXXLRKHRNMVVRSX

SEQ ID NO: 8206 - protein, 34 aa, Artificial Sequence
  Non-cyclic GFR-binding peptide
  MOD_RES (1), (2): Xaa is C or S
  MOD_RES (16), (17), (18), (19), (20): Xaa is A or G
  MOD_RES (21), (22), (23), (24): Xaa is A or G or is absent
XXAPTKLSATSVLYYXXXXXXXXXLRKHRNMVVR

SEQ ID NO: 8207 - protein, 33 aa, Artificial Sequence
  Non-cyclic GFR-binding peptide
  MOD_RES (2), (3): Xaa is C or S
PXXVSQDLSAISILYLIGKTPKILKNYQMIVKS

SEQ ID NO: 8208 - protein, 35 aa, Artificial Sequence
  Non-cyclic GFR-binding peptide
  MOD_RES (2), (3): Xaa is C or S
AXXVPTKLNAISVLYFDDMGVPTLKKYREGMSVAE

SEQ ID NO: 8209 - protein, 33 aa, Artificial Sequence
  Non-cyclic GFR-binding peptide
  MOD_RES (1), (33): Xaa is C or S
XAPTKLNAISVLYFDSSNNVILKKYRNMVVKAX

SEQ ID NO: 8210 - protein, 40 aa, Artificial Sequence
  Non-cyclic GFR-binding peptide
  MOD_RES (6), (7): Xaa is C or S
  MOD_RES (21), (22), (23), (24), (25): Xaa is A or G
  MOD_RES (26), (27), (28), (29): Xaa is A or G or is absent
AVPKAXXAPTKLNAISVLYFXXXXXXXXXLKKYRNMVVKA

SEQ ID NO: 8211 - protein, 36 aa, Artificial Sequence
  Non-cyclic GFR-binding peptide
  MOD_RES (2), (34), (36): Xaa is C or S
TXAPTKLSAISVLYLDDSSNVILKNYQNMVVRSXGX

SEQ ID NO: 8212 - protein, 36 aa, Artificial Sequence
  Non-cyclic GFR-binding peptide
  MOD_RES (34), (36): Xaa is C or S
  MOD_RES (14), (15), (16), (17), (18): Xaa is A or G
  MOD_RES (19), (20), (21), (22): Xaa is A or G or is absent
APTKLSPISVLYKXXXXXXXXXLKYHYNMVVKAXGX

SEQ ID NO: 8213 - protein, 36 aa, Artificial Sequence
  Non-cyclic GFR-binding peptide
  MOD_RES (1), (34), (36): Xaa is C or S
  MOD_RES (15), (16), (17), (18), (19): Xaa is A or G
  MOD_RES (20), (21), (22), (23): Xaa is A or G or is absent
XVPQDLNAISILYFXXXXXXXXXLKKYRMVVKSXKX

SEQ ID NO: 8214 - protein, 37 aa, Artificial Sequence
  Non-cyclic GFR-binding peptide
  MOD_RES (35), (37): Xaa is C or S
  MOD_RES (14), (15), (16), (17), (18): Xaa is A or G
  MOD_RES (19), (20), (21), (22): Xaa is A or G or is absent
TQVQLNAISVLYFXXXXXXXXXLKKYRTLEDHLAXKX

SEQ ID NO: 8215 - protein, 36 aa, Artificial Sequence
  Non-cyclic GFR-binding peptide
  MOD_RES (33), (35): Xaa is C or S
  MOD_RES (14), (15), (16), (17), (18): Xaa is A or G
  MOD_RES (19), (20), (21), (22): Xaa is A or G or is absent
VSQDLNAISILYFXXXXXXXXXLKKYRMIVKSXKXS

SEQ ID NO: 8216 - protein, 39 aa, Artificial Sequence
  Non-cyclic GFR-binding peptide
  MOD_RES (3), (4), (37), (39): Xaa is C or S
  MOD_RES (18), (19), (20), (21), (22): Xaa is A or G
  MOD_RES (23), (24), (25), (26): Xaa is A or G or is absent
SPXXVPQDLNAISILYFXXXXXXXXXLKKYRMVVKSXKX

SEQ ID NO: 8217 - protein, 39 aa, Artificial Sequence
  Non-cyclic GFR-binding peptide
  MOD_RES (3), (37), (39): Xaa is C or S
  MOD_RES (17), (18), (19), (20), (21): Xaa is A or G
  MOD_RES (22), (23), (24), (25): Xaa is A or G or is absent
PTXAPTKLSAISVLYLXXXXXXXXXLKNYQNMVVRSXGX

SEQ ID NO: 8218 - protein, 41 aa, Artificial Sequence
  Non-cyclic GFR-binding peptide
  MOD_RES (6), (38), (40): Xaa is C or S
VTKPTXAPTKLSAISVLYLDDSSNVILKNYQNMVVRSXGXH

SEQ ID NO: 8219 - protein, 39 aa, Artificial Sequence
  Non-cyclic GFR-binding peptide
  MOD_RES (5), (6), (38): Xaa is C or S
VPKPXXAPTKLSAISVLYLDDSSNVILKNYQNMVVRSXG

SEQ ID NO: 8220 - protein, 34 aa, Artificial Sequence
  Non-cyclic GFR-binding peptide
  MOD_RES (34), (34): Xaa is C or S
  MOD_RES (14), (15), (16), (17), (18): Xaa is A or G
  MOD_RES (19), (20), (21), (22): Xaa is A or G or is absent
VPTELSPISMLYKXXXXXXXXXLKYHYDMVVEGX

SEQ ID NO: 8221 - protein, 32 aa, Artificial Sequence
  Non-cyclic GFR-binding peptide
  MOD_RES (14), (15), (16), (17), (18): Xaa is A or G
  MOD_RES (19), (20), (21), (22): Xaa is A or G or is absent
VPQDLSATSILYYXXXXXXXXXLRKHRMVVKS

SEQ ID NO: 8222 - protein, 37 aa, Artificial Sequence
  Non-cyclic GFR-binding peptide
  MOD_RES (34), (36): Xaa is C or S
  MOD_RES (14), (15), (16), (17), (18): Xaa is A or G
  MOD_RES (19), (20), (21), (22): Xaa is A or G or is absent
APTKLSAISVLYLXXXXXXXXXLKNYQNMVVKAXGXH

SEQ ID NO: 8223 - protein, 35 aa, Artificial Sequence
  Non-cyclic GFR-binding peptide
  MOD_RES (1), (34): Xaa is C or S
  MOD_RES (15), (16), (17), (18), (19): Xaa is A or G
  MOD_RES (20), (21), (22), (23): Xaa is A or G or is absent
XVPQDLSPISILYKXXXXXXXXXLKYHYMVVKSXK

SEQ ID NO: 8224 - protein, 40 aa, Artificial Sequence
  Non-cyclic GFR-binding peptide
  MOD_RES (5), (6), (38), (40): Xaa is C or S
VPKPXXAPTKLSATSVLYYDDSSNVILRKHRNMVVRSXGX

SEQ ID NO: 8225 - protein, 40 aa, Artificial Sequence
  Non-cyclic GFR-binding peptide
  MOD_RES (5), (6), (37), (39): Xaa is C or S
SASPXXVSQDLSAISILYLIGKTPKILKNYQMIVKSXKXS

SEQ ID NO: 8226 - protein, 38 aa, Artificial Sequence
  Non-cyclic GFR-binding peptide
  MOD_RES (35), (37): Xaa is C or S
  MOD_RES (14), (15), (16), (17), (18): Xaa is A or G
  MOD_RES (19), (20), (21), (22): Xaa is A or G or is absent
TQVQLSPISVLYKXXXXXXXXXLKYHYTLEDHLAXKXE

SEQ ID NO: 8227 - protein, 43 aa, Artificial Sequence
  Non-cyclic GFR-binding peptide
  MOD_RES (5), (6), (40), (42): Xaa is C or S
  MOD_RES (20), (21), (22), (23), (24): Xaa is A or G
  MOD_RES (25), (26), (27), (28): Xaa is A or G or is absent
IPKAXXVPTELNAISMLYFXXXXXXXXXLKKYRDMVVEGXGXR

SEQ ID NO: 8228 - protein, 40 aa, Artificial Sequence
  Non-cyclic GFR-binding peptide
  MOD_RES (6), (7): Xaa is C or S
  MOD_RES (21), (22), (23), (24), (25): Xaa is A or G
  MOD_RES (26), (27), (28), (29): Xaa is A or G or is absent
TVPKPXXAPTQLSAISVLYLXXXXXXXXXLKNYQNMVVRA

SEQ ID NO: 8229 - protein, 35 aa, Artificial Sequence
  Non-cyclic GFR-binding peptide
  MOD_RES (4), (5): Xaa is C or S
PKPXXAPTQLSAISVLYLDDSSNVILKNYQNMVVR

SEQ ID NO: 8230 - protein, 42 aa, Artificial Sequence
  Non-cyclic GFR-binding peptide
  MOD_RES (6), (7), (41): Xaa is C or S
  MOD_RES (21), (22), (23), (24), (25): Xaa is A or G
  MOD_RES (26), (27), (28), (29): Xaa is A or G or is absent
SIPKAXXVPTELNAISMLYFXXXXXXXXXLKKYREMVVEGXG

SEQ ID NO: 8231 - protein, 43 aa, Artificial Sequence
  Non-cyclic GFR-binding peptide
  MOD_RES (7), (41), (43): Xaa is C or S
  MOD_RES (21), (22), (23), (24), (25): Xaa is A or G
  MOD_RES (26), (27), (28), (29): Xaa is A or G or is absent
HVTKPTXAPTKLSATSVLYYXXXXXXXXXLRKHRNMVVRSXGX

SEQ ID NO: 8232 - protein, 36 aa, Artificial Sequence
  Non-cyclic GFR-binding peptide
  MOD_RES (5), (6): Xaa is C or S
SAAPXXVPQALSATSILYYVGRKPKVLRKHRMIVRS

SEQ ID NO: 8233 - protein, 41 aa, Artificial Sequence
  Non-cyclic GFR-binding peptide
  MOD_RES (4), (5), (40): Xaa is C or S
  MOD_RES (19), (20), (21), (22), (23): Xaa is A or G
  MOD_RES (24), (25), (26), (27): Xaa is A or G or is absent
GKAXXVPTKLSATSVLYYXXXXXXXXXLRKHREGMSVAEXG

SEQ ID NO: 8234 - protein, 40 aa, Artificial Sequence
  Non-cyclic GFR-binding peptide
  MOD_RES (5), (6), (40): Xaa is C or S
  MOD_RES (20), (21), (22), (23), (24): Xaa is A or G
  MOD_RES (25), (26), (27), (28): Xaa is A or G or is absent
IPKAXXVPTELSPISMLYKXXXXXXXXXLKYHYEMVVEGX

SEQ ID NO: 8235 - protein, 32 aa, Artificial Sequence
  Non-cyclic GFR-binding peptide
  MOD_RES (14), (15), (16), (17), (18): Xaa is A or G
  MOD_RES (19), (20), (21), (22): Xaa is A or G or is absent
TQVQLSAISVLYLXXXXXXXXXLKNYQTLEDH

SEQ ID NO: 8236 - protein, 40 aa, Artificial Sequence
  Non-cyclic GFR-binding peptide
  MOD_RES (1), (38), (40): Xaa is C or S
XRPTQVQLSPISVLYKEIVRKKPIFLKYHYTLEDHLAXKX

SEQ ID NO: 8237 - protein, 37 aa, Artificial Sequence
  Non-cyclic GFR-binding peptide
  MOD_RES (2), (3), (34), (36): Xaa is C or S
PXXVPQALSPISILYKVGRKPKVLKYHYMIVRSXKXS

SEQ ID NO: 8238 - protein, 43 aa, Artificial Sequence
  Non-cyclic GFR-binding peptide
  MOD_RES (5), (6), (40), (42): Xaa is C or S
  MOD_RES (20), (21), (22), (23), (24): Xaa is A or G
  MOD_RES (25), (26), (27), (28): Xaa is A or G or is absent
VPKPXXAPTQLSATSVLYYXXXXXXXXXLRKHRNMVVRAXGXH

SEQ ID NO: 8239 - protein, 41 aa, Artificial Sequence
  Non-cyclic GFR-binding peptide
  MOD_RES (3), (4), (38), (40): Xaa is C or S
  MOD_RES (18), (19), (20), (21), (22): Xaa is A or G
  MOD_RES (23), (24), (25), (26): Xaa is A or G or is absent
KPXXAPTQLSATSVLYYXXXXXXXXXLRKHRNMVVRAXGXH

SEQ ID NO: 8240 - protein, 39 aa, Artificial Sequence
  Non-cyclic GFR-binding peptide
  MOD_RES (1), (2), (36), (38): Xaa is C or S
  MOD_RES (16), (17), (18), (19), (20): Xaa is A or G
  MOD_RES (21), (22), (23), (24): Xaa is A or G or is absent
XXVPTELSATSMLYYXXXXXXXXXLRKHREMVVEGXGXR

SEQ ID NO: 8241 - protein, 41 aa, Artificial Sequence
  Non-cyclic GFR-binding peptide
  MOD_RES (5), (6), (40): Xaa is C or S
  MOD_RES (20), (21), (22), (23), (24): Xaa is A or G
  MOD_RES (25), (26), (27), (28): Xaa is A or G or is absent
IPKAXXVPTELSATSMLYYXXXXXXXXXLRKHREMVVEGXG

SEQ ID NO: 8242 - protein, 35 aa, Artificial Sequence
  Non-cyclic GFR-binding peptide
  MOD_RES (3), (4): Xaa is C or S
KAXXAPTKLSPISVLYKDSSNNVILKYHYNMVVKA

SEQ ID NO: 8243 - protein, 44 aa, Artificial Sequence
  Non-cyclic GFR-binding peptide
  MOD_RES (5), (42), (44): Xaa is C or S
RNVQXRPTQVQLSPISVLYKEIVRKKPIFLKYHYTLEDHLAXKX

SEQ ID NO: 8244 - protein, 39 aa, Artificial Sequence
  Non-cyclic GFR-binding peptide
  MOD_RES (3), (4), (37), (39): Xaa is C or S
  MOD_RES (18), (19), (20), (21), (22): Xaa is A or G
  MOD_RES (23), (24), (25), (26): Xaa is A or G or is absent
SPXXVSQDLNAISILYFXXXXXXXXXLKKYRMIVKSXKX

SEQ ID NO: 8245 - protein, 38 aa, Artificial Sequence
  Non-cyclic GFR-binding peptide
  MOD_RES (3), (4), (37): Xaa is C or S
  MOD_RES (18), (19), (20), (21), (22): Xaa is A or G
  MOD_RES (23), (24), (25), (26): Xaa is A or G or is absent
APXXVPQALNAISILYFXXXXXXXXXLKKYRMIVRSXK

SEQ ID NO: 8246 - protein, 35 aa, Artificial Sequence
  Non-cyclic GFR-binding peptide
  MOD_RES (1), (35): Xaa is C or S
  MOD_RES (15), (16), (17), (18), (19): Xaa is A or G
  MOD_RES (20), (21), (22), (23): Xaa is A or G or is absent
XVPTELNAISMLYFXXXXXXXXXLKKYRDMVVEGX

SEQ ID NO: 8247 - protein, 39 aa, Artificial Sequence
  Non-cyclic GFR-binding peptide
  MOD_RES (4), (5), (36), (38): Xaa is C or S
ASPXXVPQDLSPISILYKVGRTPKVLKYHYMVVKSXKXS

SEQ ID NO: 8248 - protein, 38 aa, Artificial Sequence
  Non-cyclic GFR-binding peptide
  MOD_RES (2), (3), (37): Xaa is C or S
  MOD_RES (17), (18), (19), (20), (21): Xaa is A or G
  MOD_RES (22), (23), (24), (25): Xaa is A or G or is absent
PXXAPTKLSPISVLYKXXXXXXXXXLKYHYNMVVRSXG

SEQ ID NO: 8249 - protein, 37 aa, Artificial Sequence
  Non-cyclic GFR-binding peptide
  MOD_RES (1), (2), (34), (36): Xaa is C or S
XXAPTKLSAISVLYLDDSSNVILKNYQNMVVRSXGXH

SEQ ID NO: 8250 - protein, 36 aa, Artificial Sequence
  Non-cyclic GFR-binding peptide
  MOD_RES (1), (34), (36): Xaa is C or S
  MOD_RES (15), (16), (17), (18), (19): Xaa is A or G
  MOD_RES (20), (21), (22), (23): Xaa is A or G or is absent
XVSQDLSPISILYKXXXXXXXXXLKYHYMIVKSXKX

SEQ ID NO: 8251 - protein, 39 aa, Artificial Sequence
  Non-cyclic GFR-binding peptide
  MOD_RES (6), (7): Xaa is C or S
  MOD_RES (21), (22), (23), (24), (25): Xaa is A or G
  MOD_RES (26), (27), (28), (29): Xaa is A or G or is absent
SIPKAXXVPTELSATSMLYYXXXXXXXXXLRKHREMVVE

SEQ ID NO: 8252 - protein, 41 aa, Artificial Sequence
  Non-cyclic GFR-binding peptide
  MOD_RES (2), (39), (41): Xaa is C or S
  MOD_RES (18), (19), (20), (21), (22): Xaa is A or G
  MOD_RES (23), (24), (25), (26): Xaa is A or G or is absent
QXRPTQVQLSAISVLYLXXXXXXXXXLKNYQTLEDHLAXKX

SEQ ID NO: 8253 - protein, 36 aa, Artificial Sequence
  Non-cyclic GFR-binding peptide
  MOD_RES (1), (35): Xaa is C or S
  MOD_RES (15), (16), (17), (18), (19): Xaa is A or G
  MOD_RES (20), (21), (22), (23): Xaa is A or G or is absent
XAPTQLSAISVLYLXXXXXXXXXLKNYQNMVVRAXG

SEQ ID NO: 8254 - protein, 31 aa, Artificial Sequence
  Non-cyclic GFR-binding peptide
  MOD_RES (1), (1): Xaa is C or S
XAPTKLNAISVLYFDSSNNVILKKYRNMVVK

SEQ ID NO: 8255 - protein, 44 aa, Artificial Sequence
  Non-cyclic GFR-binding peptide
  MOD_RES (5), (6), (41), (43): Xaa is C or S
  MOD_RES (20), (21), (22), (23), (24): Xaa is A or G
  MOD_RES (25), (26), (27), (28): Xaa is A or G or is absent
VGKAXXVPTKLSAISVLYLXXXXXXXXXLKNYQEGMSVAEXGXR

SEQ ID NO: 8256 - protein, 38 aa, Artificial Sequence
  Non-cyclic GFR-binding peptide
  MOD_RES (1), (2), (35), (37): Xaa is C or S
XXVPTKLSATSVLYYDDMGVPTLRKHREGMSVAEXGXR

SEQ ID NO: 8257 - protein, 41 aa, Artificial Sequence
  Non-cyclic GFR-binding peptide
  MOD_RES (6), (7), (39), (41): Xaa is C or S
AVPKAXXAPTKLSAISVLYLDSSNNVILKNYQNMVVKAXGX

SEQ ID NO: 8258 - protein, 34 aa, Artificial Sequence
  Non-cyclic GFR-binding peptide
  MOD_RES (31), (33): Xaa is C or S
VSQDLSATSILYYIGKTPKILRKHRMIVKSXKXS

SEQ ID NO: 8259 - protein, 36 aa, Artificial Sequence
  Non-cyclic GFR-binding peptide
  MOD_RES (3), (4): Xaa is C or S
  MOD_RES (18), (19), (20), (21), (22): Xaa is A or G
  MOD_RES (23), (24), (25), (26): Xaa is A or G or is absent
APXXVPQALSAISILYLXXXXXXXXXLKNYQMIVRS

SEQ ID NO: 8260 - protein, 34 aa, Artificial Sequence
  Non-cyclic GFR-binding peptide
  MOD_RES (2), (3), (34): Xaa is C or S
PXXVPQDLSATSILYYVGRTPKVLRKHRMVVKSX

SEQ ID NO: 8261 - protein, 39 aa, Artificial Sequence
  Non-cyclic GFR-binding peptide
  MOD_RES (4), (5), (37), (39): Xaa is C or S
PKAXXVPTELSPISMLYKDENEKVVLKYHYDMVVEGXGX

SEQ ID NO: 8262 - protein, 44 aa, Artificial Sequence
  Non-cyclic GFR-binding peptide
  MOD_RES (6), (7), (42), (44): Xaa is C or S
  MOD_RES (21), (22), (23), (24), (25): Xaa is A or G
  MOD_RES (26), (27), (28), (29): Xaa is A or G or is absent
KVGKAXXVPTKLSATSVLYYXXXXXXXXXLRKHREGMSVAEXGX

SEQ ID NO: 8263 - protein, 36 aa, Artificial Sequence
  Non-cyclic GFR-binding peptide
  MOD_RES (35), (35): Xaa is C or S
  MOD_RES (14), (15), (16), (17), (18): Xaa is A or G
  MOD_RES (19), (20), (21), (22): Xaa is A or G or is absent
VPTKLSATSVLYYXXXXXXXXXLRKHREGMSVAEXG

SEQ ID NO: 8264 - protein, 33 aa, Artificial Sequence
  Non-cyclic GFR-binding peptide
  MOD_RES (1), (1): Xaa is C or S
  MOD_RES (15), (16), (17), (18), (19): Xaa is A or G
  MOD_RES (20), (21), (22), (23): Xaa is A or G or is absent
XAPTKLSPISVLYKXXXXXXXXXLKYHYNMVVK

SEQ ID NO: 8265 - protein, 33 aa, Artificial Sequence
  Non-cyclic GFR-binding peptide
  MOD_RES (1), (33): Xaa is C or S
XVPTELSATSMLYYDENEKVVLRKHRDMVVEGX

SEQ ID NO: 8266 - protein, 33 aa, Artificial Sequence
  Non-cyclic GFR-binding peptide
  MOD_RES (1), (1): Xaa is C or S
  MOD_RES (15), (16), (17), (18), (19): Xaa is A or G
  MOD_RES (20), (21), (22), (23): Xaa is A or G or is absent
XAPTKLSPISVLYKXXXXXXXXXLKYHYNMVVR

SEQ ID NO: 8267 - protein, 33 aa, Artificial Sequence
  Non-cyclic GFR-binding peptide
  MOD_RES (1), (1): Xaa is C or S
  MOD_RES (15), (16), (17), (18), (19): Xaa is A or G
  MOD_RES (20), (21), (22), (23): Xaa is A or G or is absent
XVPQDLSATSILYYXXXXXXXXXLRKHRMVVKS

SEQ ID NO: 8268 - protein, 35 aa, Artificial Sequence
  Non-cyclic GFR-binding peptide
  MOD_RES (35), (35): Xaa is C or S
  MOD_RES (14), (15), (16), (17), (18): Xaa is A or G
  MOD_RES (19), (20), (21), (22): Xaa is A or G or is absent
TQVQLSAISVLYLXXXXXXXXXLKNYQTLEDHLAX

SEQ ID NO: 8269 - protein, 44 aa, Artificial Sequence
  Non-cyclic GFR-binding peptide
  MOD_RES (4), (41), (43): Xaa is C or S
NVQXRPTQVQLSPISVLYKEIVRKKPIFLKYHYTLEDHLAXKXE

SEQ ID NO: 8270 - protein, 32 aa, Artificial Sequence
  Non-cyclic GFR-binding peptide
  MOD_RES (1), (2): Xaa is C or S
XXAPTKLSAISVLYLDDSSNVILKNYQNMVVR

SEQ ID NO: 8271 - protein, 40 aa, Artificial Sequence
  Non-cyclic GFR-binding peptide
  MOD_RES (6), (7), (40): Xaa is C or S
  MOD_RES (21), (22), (23), (24), (25): Xaa is A or G
  MOD_RES (26), (27), (28), (29): Xaa is A or G or is absent
ASAAPXXVPQALSPISILYKXXXXXXXXXLKYHYMIVRSX

SEQ ID NO: 8272 - protein, 39 aa, Artificial Sequence
  Non-cyclic GFR-binding peptide
  MOD_RES (1), (38): Xaa is C or S
XRPTQVQLSPISVLYKEIVRKKPIFLKYHYTLEDHLAXK

SEQ ID NO: 8273 - protein, 35 aa, Artificial Sequence
  Non-cyclic GFR-binding peptide
  MOD_RES (33), (35): Xaa is C or S
  MOD_RES (14), (15), (16), (17), (18): Xaa is A or G
  MOD_RES (19), (20), (21), (22): Xaa is A or G or is absent
VSQDLNAISILYFXXXXXXXXXLKKYRMIVKSXKX

SEQ ID NO: 8274 - protein, 34 aa, Artificial Sequence
  Non-cyclic GFR-binding peptide
  MOD_RES (1), (33): Xaa is C or S
XVPTELSPISMLYKDEYDKVVLKYHYEMVVEGXG

SEQ ID NO: 8275 - protein, 33 aa, Artificial Sequence
  Non-cyclic GFR-binding peptide
  MOD_RES (1), (2), (33): Xaa is C or S
XXVPQDLSATSILYYVGRTPKVLRKHRMVVKSX

SEQ ID NO: 8276 - protein, 33 aa, Artificial Sequence
  Non-cyclic GFR-binding peptide
  MOD_RES (14), (15), (16), (17), (18): Xaa is A or G
  MOD_RES (19), (20), (21), (22): Xaa is A or G or is absent
VPTELNAISMLYFXXXXXXXXXLKKYREMVVEG

SEQ ID NO: 8277 - protein, 34 aa, Artificial Sequence
  Non-cyclic GFR-binding peptide
  MOD_RES (1), (33): Xaa is C or S
XAPTKLSAISVLYLDSSNNVILKNYQNMVVKAXG

SEQ ID NO: 8278 - protein, 39 aa, Artificial Sequence
  Non-cyclic GFR-binding peptide
  MOD_RES (1), (2), (36), (38): Xaa is C or S
  MOD_RES (16), (17), (18), (19), (20): Xaa is A or G
  MOD_RES (21), (22), (23), (24): Xaa is A or G or is absent
XXAPTQLSATSVLYYXXXXXXXXXLRKHRNMVVRAXGXH

SEQ ID NO: 8279 - protein, 31 aa, Artificial Sequence
  Non-cyclic GFR-binding peptide
  MOD_RES (31), (31): Xaa is C or S
VSQDLNAISILYFIGKTPKILKKYRMIVKSX

SEQ ID NO: 8280 - protein, 40 aa, Artificial Sequence
  Non-cyclic GFR-binding peptide
  MOD_RES (6), (7): Xaa is C or S
  MOD_RES (21), (22), (23), (24), (25): Xaa is A or G
  MOD_RES (26), (27), (28), (29): Xaa is A or G or is absent
KIPKAXXVPTELSATSMLYYXXXXXXXXXLRKHRDMVVEG

SEQ ID NO: 8281 - protein, 40 aa, Artificial Sequence
  Non-cyclic GFR-binding peptide
  MOD_RES (5), (6), (39): Xaa is C or S
  MOD_RES (20), (21), (22), (23), (24): Xaa is A or G
  MOD_RES (25), (26), (27), (28): Xaa is A or G or is absent
SAAPXXVPQALSAISILYLXXXXXXXXXLKNYQMIVRSXK

SEQ ID NO: 8282 - protein, 41 aa, Artificial Sequence
  Non-cyclic GFR-binding peptide
  MOD_RES (4), (5), (38), (40): Xaa is C or S
GKAXXVPTKLSAISVLYLDDMGVPTLKNYQEGMSVAEXGXR

SEQ ID NO: 8283 - protein, 38 aa, Artificial Sequence
  Non-cyclic GFR-binding peptide
  MOD_RES (2), (36), (38): Xaa is C or S
  MOD_RES (16), (17), (18), (19), (20): Xaa is A or G
  MOD_RES (21), (22), (23), (24): Xaa is A or G or is absent
TXAPTKLSATSVLYYXXXXXXXXXLRKHRNMVVRSXGX

SEQ ID NO: 8284 - protein, 37 aa, Artificial Sequence
  Non-cyclic GFR-binding peptide
  MOD_RES (3), (4), (37): Xaa is C or S
  MOD_RES (18), (19), (20), (21), (22): Xaa is A or G
  MOD_RES (23), (24), (25), (26): Xaa is A or G or is absent
APXXVPQALSATSILYYXXXXXXXXXLRKHRMIVRSX

SEQ ID NO: 8285 - protein, 39 aa, Artificial Sequence
  Non-cyclic GFR-binding peptide
  MOD_RES (1), (36), (38): Xaa is C or S
  MOD_RES (15), (16), (17), (18), (19): Xaa is A or G
  MOD_RES (20), (21), (22), (23): Xaa is A or G or is absent
XVPTKLSAISVLYLXXXXXXXXXLKNYQEGMSVAEXGXR

SEQ ID NO: 8286 - protein, 38 aa, Artificial Sequence
  Non-cyclic GFR-binding peptide
  MOD_RES (1), (36), (38): Xaa is C or S
  MOD_RES (15), (16), (17), (18), (19): Xaa is A or G
  MOD_RES (20), (21), (22), (23): Xaa is A or G or is absent
XVPTKLSATSVLYYXXXXXXXXXLRKHREGMSVAEXGX

SEQ ID NO: 8287 - protein, 43 aa, Artificial Sequence
  Non-cyclic GFR-binding peptide
  MOD_RES (6), (7), (40), (42): Xaa is C or S
  MOD_RES (21), (22), (23), (24), (25): Xaa is A or G
  MOD_RES (26), (27), (28), (29): Xaa is A or G or is absent
ASASPXXVPQDLSPISILYKXXXXXXXXXLKYHYMVVKSXKXS

SEQ ID NO: 8288 - protein, 41 aa, Artificial Sequence
  Non-cyclic GFR-binding peptide
  MOD_RES (6), (7), (40): Xaa is C or S
  MOD_RES (21), (22), (23), (24), (25): Xaa is A or G
  MOD_RES (26), (27), (28), (29): Xaa is A or G or is absent
ASAAPXXVPQALSPISILYKXXXXXXXXXLKYHYMIVRSXK

SEQ ID NO: 8289 - protein, 31 aa, Artificial Sequence
  Non-cyclic GFR-binding peptide
  MOD_RES (1), (1): Xaa is C or S
XVPQALSPISILYKVGRKPKVLKYHYMIVRS

SEQ ID NO: 8290 - protein, 37 aa, Artificial Sequence
  Non-cyclic GFR-binding peptide
  MOD_RES (6), (7): Xaa is C or S
ASASPXXVPQDLSATSILYYVGRTPKVLRKHRMVVKS

SEQ ID NO: 8291 - protein, 38 aa, Artificial Sequence
  Non-cyclic GFR-binding peptide
  MOD_RES (5), (6): Xaa is C or S
  MOD_RES (20), (21), (22), (23), (24): Xaa is A or G
  MOD_RES (25), (26), (27), (28): Xaa is A or G or is absent
SAAPXXVPQALSATSILYYXXXXXXXXXLRKHRMIVRS

SEQ ID NO: 8292 - protein, 39 aa, Artificial Sequence
  Non-cyclic GFR-binding peptide
  MOD_RES (3), (4), (39): Xaa is C or S
  MOD_RES (18), (19), (20), (21), (22): Xaa is A or G
  MOD_RES (23), (24), (25), (26): Xaa is A or G or is absent
KAXXVPTKLNAISVLYFXXXXXXXXXLKKYREGMSVAEX

SEQ ID NO: 8293 - protein, 43 aa, Artificial Sequence
  Non-cyclic GFR-binding peptide
  MOD_RES (6), (7), (41), (43): Xaa is C or S
  MOD_RES (21), (22), (23), (24), (25): Xaa is A or G
  MOD_RES (26), (27), (28), (29): Xaa is A or G or is absent
KIPKAXXVPTELSATSMLYYXXXXXXXXXLRKHRDMVVEGXGX

SEQ ID NO: 8294 - protein, 41 aa, Artificial Sequence
  Non-cyclic GFR-binding peptide
  MOD_RES (2), (39), (41): Xaa is C or S
  MOD_RES (18), (19), (20), (21), (22): Xaa is A or G
  MOD_RES (23), (24), (25), (26): Xaa is A or G or is absent
QXRPTQVQLSATSVLYYXXXXXXXXXLRKHRTLEDHLAXKX

SEQ ID NO: 8295 - protein, 37 aa, Artificial Sequence
  Non-cyclic GFR-binding peptide
  MOD_RES (4), (5), (36): Xaa is C or S
AAPXXVPQALSAISILYLVGRKPKVLKNYQMIVRSXK

SEQ ID NO: 8296 - protein, 36 aa, Artificial Sequence
  Non-cyclic GFR-binding peptide
  MOD_RES (4), (36): Xaa is C or S
KPTXAPTKLSATSVLYYDDSSNVILRKHRNMVVRSX

SEQ ID NO: 8297 - protein, 32 aa, Artificial Sequence
  Non-cyclic GFR-binding peptide
  MOD_RES (1), (2): Xaa is C or S
XXAPTKLSATSVLYYDDSSNVILRKHRNMVVR

SEQ ID NO: 8298 - protein, 44 aa, Artificial Sequence
  Non-cyclic GFR-binding peptide
  MOD_RES (6), (7), (41), (43): Xaa is C or S
  MOD_RES (21), (22), (23), (24), (25): Xaa is A or G
  MOD_RES (26), (27), (28), (29): Xaa is A or G or is absent
SIPKAXXVPTELNAISMLYFXXXXXXXXXLKKYREMVVEGXGXR

SEQ ID NO: 8299 - protein, 35 aa, Artificial Sequence
  Non-cyclic GFR-binding peptide
  MOD_RES (16), (17), (18), (19), (20): Xaa is A or G
  MOD_RES (21), (22), (23), (24): Xaa is A or G or is absent
RPTQVQLNAISVLYFXXXXXXXXXLKKYRTLEDHL

SEQ ID NO: 8300 - protein, 38 aa, Artificial Sequence
  Non-cyclic GFR-binding peptide
  MOD_RES (5), (6), (38): Xaa is C or S
VPKPXXAPTKLSAISVLYLDDSSNVILKNYQNMVVRSX

SEQ ID NO: 8301 - protein, 37 aa, Artificial Sequence
  Non-cyclic GFR-binding peptide
  MOD_RES (3), (4), (37): Xaa is C or S
  MOD_RES (18), (19), (20), (21), (22): Xaa is A or G
  MOD_RES (23), (24), (25), (26): Xaa is A or G or is absent
APXXVPQALSAISILYLXXXXXXXXXLKNYQMIVRSX

SEQ ID NO: 8302 - protein, 38 aa, Artificial Sequence
  Non-cyclic GFR-binding peptide
  MOD_RES (1), (2), (35), (37): Xaa is C or S
XXVPTKLSAISVLYLDDMGVPTLKNYQEGMSVAEXGXR

SEQ ID NO: 8303 - protein, 35 aa, Artificial Sequence
  Non-cyclic GFR-binding peptide
  MOD_RES (16), (17), (18), (19), (20): Xaa is A or G
  MOD_RES (21), (22), (23), (24): Xaa is A or G or is absent
RPTQVQLSAISVLYLXXXXXXXXXLKNYQTLEDHL

SEQ ID NO: 8304 - protein, 34 aa, Artificial Sequence
  Non-cyclic GFR-binding peptide
  MOD_RES (1), (33): Xaa is C or S
XAPTKLSPISVLYKDSSNNVILKYHYNMVVKAXG

SEQ ID NO: 8305 - protein, 39 aa, Artificial Sequence
  Non-cyclic GFR-binding peptide
  MOD_RES (4), (5), (38): Xaa is C or S
  MOD_RES (19), (20), (21), (22), (23): Xaa is A or G
  MOD_RES (24), (25), (26), (27): Xaa is A or G or is absent
AAPXXVPQALNAISILYFXXXXXXXXXLKKYRMIVRSXK

SEQ ID NO: 8306 - protein, 39 aa, Artificial Sequence
  Non-cyclic GFR-binding peptide
  MOD_RES (2), (3), (38): Xaa is C or S
  MOD_RES (17), (18), (19), (20), (21): Xaa is A or G
  MOD_RES (22), (23), (24), (25): Xaa is A or G or is absent
AXXVPTKLSAISVLYLXXXXXXXXXLKNYQEGMSVAEXG

SEQ ID NO: 8307 - protein, 36 aa, Artificial Sequence
  Non-cyclic GFR-binding peptide
  MOD_RES (1), (2), (33), (35): Xaa is C or S
XXVSQDLSATSILYYIGKTPKILRKHRMIVKSXKXS

SEQ ID NO: 8308 - protein, 38 aa, Artificial Sequence
  Non-cyclic GFR-binding peptide
  MOD_RES (4), (5), (37): Xaa is C or S
PKAXXVPTELSATSMLYYDENEKVVLRKHRDMVVEGXG

SEQ ID NO: 8309 - protein, 36 aa, Artificial Sequence
  Non-cyclic GFR-binding peptide
  MOD_RES (5), (6): Xaa is C or S
IPKAXXVPTELSPISMLYKDENEKVVLKYHYDMVVE

SEQ ID NO: 8310 - protein, 36 aa, Artificial Sequence
  Non-cyclic GFR-binding peptide
  MOD_RES (4), (5): Xaa is C or S
PKPXXAPTQLSATSVLYYDDSSNVILRKHRNMVVRA

SEQ ID NO: 8311 - protein, 36 aa, Artificial Sequence
  Non-cyclic GFR-binding peptide
  MOD_RES (3), (4): Xaa is C or S
  MOD_RES (18), (19), (20), (21), (22): Xaa is A or G
  MOD_RES (23), (24), (25), (26): Xaa is A or G or is absent
KAXXVPTELSATSMLYYXXXXXXXXXLRKHRDMVVE

SEQ ID NO: 8312 - protein, 32 aa, Artificial Sequence
  Non-cyclic GFR-binding peptide
  MOD_RES (1), (2): Xaa is C or S
XXAPTQLSAISVLYLDDSSNVILKNYQNMVVR

SEQ ID NO: 8313 - protein, 34 aa, Artificial Sequence
  Non-cyclic GFR-binding peptide
  MOD_RES (32), (34): Xaa is C or S
APTKLSPISVLYKDSSNNVILKYHYNMVVKAXGX

SEQ ID NO: 8314 - protein, 40 aa, Artificial Sequence
  Non-cyclic GFR-binding peptide
  MOD_RES (3), (37), (39): Xaa is C or S
  MOD_RES (17), (18), (19), (20), (21): Xaa is A or G
  MOD_RES (22), (23), (24), (25): Xaa is A or G or is absent
PTXAPTKLSAISVLYLXXXXXXXXXLKNYQNMVVRSXGXH

SEQ ID NO: 8315 - protein, 42 aa, Artificial Sequence
  Non-cyclic GFR-binding peptide
  MOD_RES (4), (5), (39), (41): Xaa is C or S
  MOD_RES (19), (20), (21), (22), (23): Xaa is A or G
  MOD_RES (24), (25), (26), (27): Xaa is A or G or is absent
PKAXXAPTKLSAISVLYLXXXXXXXXXLKNYQNMVVKAXGXH

SEQ ID NO: 8316 - protein, 34 aa, Artificial Sequence
  Non-cyclic GFR-binding peptide
  MOD_RES (3), (4): Xaa is C or S
APXXVPQALSATSILYYVGRKPKVLRKHRMIVRS

SEQ ID NO: 8317 - protein, 38 aa, Artificial Sequence
  Non-cyclic GFR-binding peptide
  MOD_RES (35), (37): Xaa is C or S
TQVQLSPISVLYKEIVRKKPIFLKYHYTLEDHLAXKXE

SEQ ID NO: 8318 - protein, 35 aa, Artificial Sequence
  Non-cyclic GFR-binding peptide
  MOD_RES (34), (34): Xaa is C or S
  MOD_RES (14), (15), (16), (17), (18): Xaa is A or G
  MOD_RES (19), (20), (21), (22): Xaa is A or G or is absent
APTKLSAISVLYLXXXXXXXXXLKNYQNMVVRSXG

SEQ ID NO: 8319 - protein, 34 aa, Artificial Sequence
  Non-cyclic GFR-binding peptide
  MOD_RES (33), (33): Xaa is C or S
  MOD_RES (14), (15), (16), (17), (18): Xaa is A or G
  MOD_RES (19), (20), (21), (22): Xaa is A or G or is absent
VPQALSAISILYLXXXXXXXXXLKNYQMIVRSXK

SEQ ID NO: 8320 - protein, 35 aa, Artificial Sequence
  Non-cyclic GFR-binding peptide
RPTQVQLSATSVLYYEIVRKKPIFLRKHRTLEDHL

SEQ ID NO: 8321 - protein, 39 aa, Artificial Sequence
  Non-cyclic GFR-binding peptide
  MOD_RES (4), (5), (39): Xaa is C or S
  MOD_RES (19), (20), (21), (22), (23): Xaa is A or G
  MOD_RES (24), (25), (26), (27): Xaa is A or G or is absent
PKAXXVPTELNAISMLYFXXXXXXXXXLKKYREMVVEGX

SEQ ID NO: 8322 - protein, 40 aa, Artificial Sequence
  Non-cyclic GFR-binding peptide
  MOD_RES (2), (3), (38), (40): Xaa is C or S
  MOD_RES (17), (18), (19), (20), (21): Xaa is A or G
  MOD_RES (22), (23), (24), (25): Xaa is A or G or is absent
AXXVPTKLNAISVLYFXXXXXXXXXLKKYREGMSVAEXGX

SEQ ID NO: 8323 - protein, 35 aa, Artificial Sequence
  Non-cyclic GFR-binding peptide
  MOD_RES (34), (34): Xaa is C or S
  MOD_RES (14), (15), (16), (17), (18): Xaa is A or G
  MOD_RES (19), (20), (21), (22): Xaa is A or G or is absent
VPTELNAISMLYFXXXXXXXXXLKKYRDMVVEGXG

SEQ ID NO: 8324 - protein, 37 aa, Artificial Sequence
  Non-cyclic GFR-binding peptide
  MOD_RES (4), (5), (37): Xaa is C or S
PKPXXAPTQLSPISVLYKDDSSNVILKYHYNMVVRAX

SEQ ID NO: 8325 - protein, 37 aa, Artificial Sequence
  Non-cyclic GFR-binding peptide
  MOD_RES (37), (37): Xaa is C or S
RPTQVQLSAISVLYLEIVRKKPIFLKNYQTLEDHLAX

SEQ ID NO: 8326 - protein, 43 aa, Artificial Sequence
  Non-cyclic GFR-binding peptide
  MOD_RES (5), (6), (41), (43): Xaa is C or S
  MOD_RES (20), (21), (22), (23), (24): Xaa is A or G
  MOD_RES (25), (26), (27), (28): Xaa is A or G or is absent
VGKAXXVPTKLSATSVLYYXXXXXXXXXLRKHREGMSVAEXGX

SEQ ID NO: 8327 - protein, 40 aa, Artificial Sequence
  Non-cyclic GFR-binding peptide
  MOD_RES (4), (5), (38), (40): Xaa is C or S
  MOD_RES (19), (20), (21), (22), (23): Xaa is A or G
  MOD_RES (24), (25), (26), (27): Xaa is A or G or is absent
ASPXXVPQDLNAISILYFXXXXXXXXXLKKYRMVVKSXKX

SEQ ID NO: 8328 - protein, 41 aa, Artificial Sequence
  Non-cyclic GFR-binding peptide
  MOD_RES (6), (7), (41): Xaa is C or S
  MOD_RES (21), (22), (23), (24), (25): Xaa is A or G
  MOD_RES (26), (27), (28), (29): Xaa is A or G or is absent
AVPKAXXAPTKLSPISVLYKXXXXXXXXXLKYHYNMVVKAX

SEQ ID NO: 8329 - protein, 34 aa, Artificial Sequence
  Non-cyclic GFR-binding peptide
  MOD_RES (2), (3): Xaa is C or S
PXXAPTKLSPISVLYKDDSSNVILKYHYNMVVRS

SEQ ID NO: 8330 - protein, 35 aa, Artificial Sequence
  Non-cyclic GFR-binding peptide
  MOD_RES (32), (34): Xaa is C or S
APTQLSPISVLYKDDSSNVILKYHYNMVVRAXGXH

SEQ ID NO: 8331 - protein, 38 aa, Artificial Sequence
  Non-cyclic GFR-binding peptide
  MOD_RES (5), (6): Xaa is C or S
  MOD_RES (20), (21), (22), (23), (24): Xaa is A or G
  MOD_RES (25), (26), (27), (28): Xaa is A or G or is absent
VPKPXXAPTQLSATSVLYYXXXXXXXXXLRKHRNMVVR

SEQ ID NO: 8332 - protein, 40 aa, Artificial Sequence
  Non-cyclic GFR-binding peptide
  MOD_RES (37), (39): Xaa is C or S
  MOD_RES (16), (17), (18), (19), (20): Xaa is A or G
  MOD_RES (21), (22), (23), (24): Xaa is A or G or is absent
RPTQVQLNAISVLYFXXXXXXXXXLKKYRTLEDHLAXKXE

SEQ ID NO: 8333 - protein, 34 aa, Artificial Sequence
  Non-cyclic GFR-binding peptide
  MOD_RES (3), (3): Xaa is C or S
PTXAPTKLSATSVLYYDDSSNVILRKHRNMVVRS

SEQ ID NO: 8334 - protein, 42 aa, Artificial Sequence
  Non-cyclic GFR-binding peptide
  MOD_RES (6), (7), (41): Xaa is C or S
  MOD_RES (21), (22), (23), (24), (25): Xaa is A or G
  MOD_RES (26), (27), (28), (29): Xaa is A or G or is absent
SIPKAXXVPTELSPISMLYKXXXXXXXXXLKYHYEMVVEGXG

SEQ ID NO: 8335 - protein, 32 aa, Artificial Sequence
  Non-cyclic GFR-binding peptide
  MOD_RES (1), (2): Xaa is C or S
XXAPTKLSPISVLYKDSSNNVILKYHYNMVVK

SEQ ID NO: 8336 - protein, 41 aa, Artificial Sequence
  Non-cyclic GFR-binding peptide
  MOD_RES (5), (6), (38), (40): Xaa is C or S
IPKAXXVPTELSATSMLYYDENEKVVLRKHRDMVVEGXGXR

SEQ ID NO: 8337 - protein, 39 aa, Artificial Sequence
  Non-cyclic GFR-binding peptide
  MOD_RES (3), (4), (37), (39): Xaa is C or S
KAXXVPTKLNAISVLYFDDMGVPTLKKYREGMSVAEXGX

SEQ ID NO: 8338 - protein, 35 aa, Artificial Sequence
  Non-cyclic GFR-binding peptide
  MOD_RES (1), (34): Xaa is C or S
  MOD_RES (15), (16), (17), (18), (19): Xaa is A or G
  MOD_RES (20), (21), (22), (23): Xaa is A or G or is absent
XVPQALSATSILYYXXXXXXXXXLRKHRMIVRSXK

SEQ ID NO: 8339 - protein, 34 aa, Artificial Sequence
  Non-cyclic GFR-binding peptide
RPTQVQLSAISVLYLEIVRKKPIFLKNYQTLEDH

SEQ ID NO: 8340 - protein, 38 aa, Artificial Sequence
  Non-cyclic GFR-binding peptide
  MOD_RES (37), (37): Xaa is C or S
  MOD_RES (16), (17), (18), (19), (20): Xaa is A or G
  MOD_RES (21), (22), (23), (24): Xaa is A or G or is absent
RPTQVQLSPISVLYKXXXXXXXXXLKYHYTLEDHLAXK

SEQ ID NO: 8341 - protein, 36 aa, Artificial Sequence
  Non-cyclic GFR-binding peptide
  MOD_RES (35), (35): Xaa is C or S
TQVQLSATSVLYYEIVRKKPIFLRKHRTLEDHLAXK

SEQ ID NO: 8342 - protein, 32 aa, Artificial Sequence
  Non-cyclic GFR-binding peptide
  MOD_RES (1), (1): Xaa is C or S
XAPTKLSATSVLYYDDSSNVILRKHRNMVVRS

SEQ ID NO: 8343 - protein, 32 aa, Artificial Sequence
  Non-cyclic GFR-binding peptide
  MOD_RES (1), (2): Xaa is C or S
XXAPTQLSPISVLYKDDSSNVILKYHYNMVVR

SEQ ID NO: 8344 - protein, 35 aa, Artificial Sequence
  Non-cyclic GFR-binding peptide
  MOD_RES (2), (3): Xaa is C or S
  MOD_RES (17), (18), (19), (20), (21): Xaa is A or G
  MOD_RES (22), (23), (24), (25): Xaa is A or G or is absent
PXXVSQDLSATSILYYXXXXXXXXXLRKHRMIVKS

SEQ ID NO: 8345 - protein, 38 aa, Artificial Sequence
  Non-cyclic GFR-binding peptide
  MOD_RES (2), (3), (37): Xaa is C or S
  MOD_RES (17), (18), (19), (20), (21): Xaa is A or G
  MOD_RES (22), (23), (24), (25): Xaa is A or G or is absent
AXXAPTKLSAISVLYLXXXXXXXXXLKNYQNMVVKAXG

SEQ ID NO: 8346 - protein, 36 aa, Artificial Sequence
  Non-cyclic GFR-binding peptide
  MOD_RES (1), (2), (36): Xaa is C or S
  MOD_RES (16), (17), (18), (19), (20): Xaa is A or G
  MOD_RES (21), (22), (23), (24): Xaa is A or G or is absent
XXVPTELSATSMLYYXXXXXXXXXLRKHRDMVVEGX

SEQ ID NO: 8347 - protein, 32 aa, Artificial Sequence
  Non-cyclic GFR-binding peptide
  MOD_RES (1), (32): Xaa is C or S
XVSQDLSPISILYKIGKTPKILKYHYMIVKSX

SEQ ID NO: 8348 - protein, 39 aa, Artificial Sequence
  Non-cyclic GFR-binding peptide
  MOD_RES (5), (6): Xaa is C or S
  MOD_RES (20), (21), (22), (23), (24): Xaa is A or G
  MOD_RES (25), (26), (27), (28): Xaa is A or G or is absent
VPKAXXAPTKLSAISVLYLXXXXXXXXXLKNYQNMVVKA

SEQ ID NO: 8349 - protein, 38 aa, Artificial Sequence
  Non-cyclic GFR-binding peptide
  MOD_RES (2), (3), (37): Xaa is C or S
  MOD_RES (17), (18), (19), (20), (21): Xaa is A or G
  MOD_RES (22), (23), (24), (25): Xaa is A or G or is absent
AXXVPTELSATSMLYYXXXXXXXXXLRKHREMVVEGXG

SEQ ID NO: 8350 - protein, 42 aa, Artificial Sequence
  Non-cyclic GFR-binding peptide
  MOD_RES (5), (6), (40), (42): Xaa is C or S
  MOD_RES (20), (21), (22), (23), (24): Xaa is A or G
  MOD_RES (25), (26), (27), (28): Xaa is A or G or is absent
IPKAXXVPTELSATSMLYYXXXXXXXXXLRKHREMVVEGXGX

SEQ ID NO: 8351 - protein, 35 aa, Artificial Sequence
  Non-cyclic GFR-binding peptide
  MOD_RES (34), (34): Xaa is C or S
  MOD_RES (14), (15), (16), (17), (18): Xaa is A or G
  MOD_RES (19), (20), (21), (22): Xaa is A or G or is absent
APTKLNAISVLYFXXXXXXXXXLKKYRNMVVKAXG

SEQ ID NO: 8352 - protein, 40 aa, Artificial Sequence
  Non-cyclic GFR-binding peptide
  MOD_RES (5), (6), (40): Xaa is C or S
  MOD_RES (20), (21), (22), (23), (24): Xaa is A or G
  MOD_RES (25), (26), (27), (28): Xaa is A or G or is absent
VPKAXXAPTKLSAISVLYLXXXXXXXXXLKNYQNMVVKAX

SEQ ID NO: 8353 - protein, 35 aa, Artificial Sequence
  Non-cyclic GFR-binding peptide
  MOD_RES (4), (5): Xaa is C or S
ASPXXVSQDLSPISILYKIGKTPKILKYHYMIVKS

SEQ ID NO: 8354 - protein, 40 aa, Artificial Sequence
  Non-cyclic GFR-binding peptide
  MOD_RES (37), (39): Xaa is C or S
  MOD_RES (16), (17), (18), (19), (20): Xaa is A or G
  MOD_RES (21), (22), (23), (24): Xaa is A or G or is absent
RPTQVQLSATSVLYYXXXXXXXXXLRKHRTLEDHLAXKXE

SEQ ID NO: 8355 - protein, 40 aa, Artificial Sequence
  Non-cyclic GFR-binding peptide
  MOD_RES (3), (4), (38), (40): Xaa is C or S
  MOD_RES (18), (19), (20), (21), (22): Xaa is A or G
  MOD_RES (23), (24), (25), (26): Xaa is A or G or is absent
KAXXVPTELNAISMLYFXXXXXXXXXLKKYREMVVEGXGX

SEQ ID NO: 8356 - protein, 35 aa, Artificial Sequence
  Non-cyclic GFR-binding peptide
  MOD_RES (2), (3): Xaa is C or S
  MOD_RES (17), (18), (19), (20), (21): Xaa is A or G
  MOD_RES (22), (23), (24), (25): Xaa is A or G or is absent
AXXVPTELSPISMLYKXXXXXXXXXLKYHYDMVVE

SEQ ID NO: 8357 - protein, 31 aa, Artificial Sequence
  Non-cyclic GFR-binding peptide
APTQLSAISVLYLDDSSNVILKNYQNMVVRA

SEQ ID NO: 8358 - protein, 36 aa, Artificial Sequence
  Non-cyclic GFR-binding peptide
  MOD_RES (1), (34), (36): Xaa is C or S
  MOD_RES (15), (16), (17), (18), (19): Xaa is A or G
  MOD_RES (20), (21), (22), (23): Xaa is A or G or is absent
XVPQALSAISILYLXXXXXXXXXLKNYQMIVRSXKX

SEQ ID NO: 8359 - protein, 33 aa, Artificial Sequence
  Non-cyclic GFR-binding peptide
  MOD_RES (1), (33): Xaa is C or S
XAPTQLSATSVLYYDDSSNVILRKHRNMVVRAX

SEQ ID NO: 8360 - protein, 39 aa, Artificial Sequence
  Non-cyclic GFR-binding peptide
  MOD_RES (6), (7): Xaa is C or S
  MOD_RES (21), (22), (23), (24), (25): Xaa is A or G
  MOD_RES (26), (27), (28), (29): Xaa is A or G or is absent
YVPKPXXAPTKLSPISVLYKXXXXXXXXXLKYHYNMVVR

SEQ ID NO: 8361 - protein, 43 aa, Artificial Sequence
  Non-cyclic GFR-binding peptide
  MOD_RES (3), (40), (42): Xaa is C or S
  MOD_RES (19), (20), (21), (22), (23): Xaa is A or G
  MOD_RES (24), (25), (26), (27): Xaa is A or G or is absent
VQXRPTQVQLNAISVLYFXXXXXXXXXLKKYRTLEDHLAXKXE

SEQ ID NO: 8362 - protein, 34 aa, Artificial Sequence
  Non-cyclic GFR-binding peptide
  MOD_RES (31), (33): Xaa is C or S
VPQDLNAISILYFVGRTPKVLKKYRMVVKSXKXS

SEQ ID NO: 8363 - protein, 41 aa, Artificial Sequence
  Non-cyclic GFR-binding peptide
  MOD_RES (4), (38), (40): Xaa is C or S
  MOD_RES (18), (19), (20), (21), (22): Xaa is A or G
  MOD_RES (23), (24), (25), (26): Xaa is A or G or is absent
KPTXAPTKLSPISVLYKXXXXXXXXXLKYHYNMVVRSXGXH

SEQ ID NO: 8364 - protein, 37 aa, Artificial Sequence
  Non-cyclic GFR-binding peptide
  MOD_RES (35), (37): Xaa is C or S
TQVQLSPISVLYKEIVRKKPIFLKYHYTLEDHLAXKX

SEQ ID NO: 8365 - protein, 37 aa, Artificial Sequence
  Non-cyclic GFR-binding peptide
  MOD_RES (2), (3), (35), (37): Xaa is C or S
PXXAPTKLSPISVLYKDDSSNVILKYHYNMVVRSXGX

SEQ ID NO: 8366 - protein, 37 aa, Artificial Sequence
  Non-cyclic GFR-binding peptide
  MOD_RES (4), (5), (37): Xaa is C or S
PKPXXAPTKLSATSVLYYDDSSNVILRKHRNMVVRSX

SEQ ID NO: 8367 - protein, 32 aa, Artificial Sequence
  Non-cyclic GFR-binding peptide
  MOD_RES (1), (2): Xaa is C or S
XXVPQDLSATSILYYVGRTPKVLRKHRMVVKS

SEQ ID NO: 8368 - protein, 35 aa, Artificial Sequence
  Non-cyclic GFR-binding peptide
  MOD_RES (1), (35): Xaa is C or S
  MOD_RES (15), (16), (17), (18), (19): Xaa is A or G
  MOD_RES (20), (21), (22), (23): Xaa is A or G or is absent
XVPTELSPISMLYKXXXXXXXXXLKYHYEMVVEGX

SEQ ID NO: 8369 - protein, 42 aa, Artificial Sequence
  Non-cyclic GFR-binding peptide
  MOD_RES (3), (4), (39), (41): Xaa is C or S
  MOD_RES (18), (19), (20), (21), (22): Xaa is A or G
  MOD_RES (23), (24), (25), (26): Xaa is A or G or is absent
KAXXVPTKLNAISVLYFXXXXXXXXXLKKYREGMSVAEXGXR

SEQ ID NO: 8370 - protein, 42 aa, Artificial Sequence
  Non-cyclic GFR-binding peptide
  MOD_RES (5), (6), (40), (42): Xaa is C or S
  MOD_RES (20), (21), (22), (23), (24): Xaa is A or G
  MOD_RES (25), (26), (27), (28): Xaa is A or G or is absent
VPKPXXAPTQLSATSVLYYXXXXXXXXXLRKHRNMVVRAXGX

SEQ ID NO: 8371 - protein, 40 aa, Artificial Sequence
  Non-cyclic GFR-binding peptide
  MOD_RES (5), (6), (38), (40): Xaa is C or S
VPKPXXAPTQLSPISVLYKDDSSNVILKYHYNMVVRAXGX

SEQ ID NO: 8372 - protein, 40 aa, Artificial Sequence
  Non-cyclic GFR-binding peptide
  MOD_RES (3), (40): Xaa is C or S
VQXRPTQVQLSPISVLYKEIVRKKPIFLKYHYTLEDHLAX

SEQ ID NO: 8373 - protein, 38 aa, Artificial Sequence
  Non-cyclic GFR-binding peptide
  MOD_RES (1), (2), (37): Xaa is C or S
  MOD_RES (16), (17), (18), (19), (20): Xaa is A or G
  MOD_RES (21), (22), (23), (24): Xaa is A or G or is absent
XXVPTKLSAISVLYLXXXXXXXXXLKNYQEGMSVAEXG

SEQ ID NO: 8374 - protein, 38 aa, Artificial Sequence
  Non-cyclic GFR-binding peptide
  MOD_RES (4), (5): Xaa is C or S
  MOD_RES (19), (20), (21), (22), (23): Xaa is A or G
  MOD_RES (24), (25), (26), (27): Xaa is A or G or is absent
PKAXXVPTELSATSMLYYXXXXXXXXXLRKHRDMVVEG

SEQ ID NO: 8375 - protein, 39 aa, Artificial Sequence
  Non-cyclic GFR-binding peptide
  MOD_RES (2), (3), (37), (39): Xaa is C or S
  MOD_RES (17), (18), (19), (20), (21): Xaa is A or G
  MOD_RES (22), (23), (24), (25): Xaa is A or G or is absent
AXXVPTELSPISMLYKXXXXXXXXXLKYHYEMVVEGXGX

SEQ ID NO: 8376 - protein, 38 aa, Artificial Sequence
  Non-cyclic GFR-binding peptide
  MOD_RES (6), (6): Xaa is C or S
  MOD_RES (20), (21), (22), (23), (24): Xaa is A or G
  MOD_RES (25), (26), (27), (28): Xaa is A or G or is absent
VTKPTXAPTKLSAISVLYLXXXXXXXXXLKNYQNMVVR

SEQ ID NO: 8377 - protein, 33 aa, Artificial Sequence
  Non-cyclic GFR-binding peptide
  MOD_RES (14), (15), (16), (17), (18): Xaa is A or G
  MOD_RES (19), (20), (21), (22): Xaa is A or G or is absent
APTKLNAISVLYFXXXXXXXXXLKKYRNMVVKA

SEQ ID NO: 8378 - protein, 35 aa, Artificial Sequence
  Non-cyclic GFR-binding peptide
  MOD_RES (2), (3), (34): Xaa is C or S
PXXVPQDLSAISILYLVGRTPKVLKNYQMVVKSXK

SEQ ID NO: 8379 - protein, 36 aa, Artificial Sequence
  Non-cyclic GFR-binding peptide
  MOD_RES (2), (3): Xaa is C or S
  MOD_RES (17), (18), (19), (20), (21): Xaa is A or G
  MOD_RES (22), (23), (24), (25): Xaa is A or G or is absent
AXXVPTELNAISMLYFXXXXXXXXXLKKYRDMVVEG

SEQ ID NO: 8380 - protein, 42 aa, Artificial Sequence
  Non-cyclic GFR-binding peptide
  MOD_RES (5), (6), (40), (42): Xaa is C or S
  MOD_RES (20), (21), (22), (23), (24): Xaa is A or G
  MOD_RES (25), (26), (27), (28): Xaa is A or G or is absent
IPKAXXVPTELNAISMLYFXXXXXXXXXLKKYREMVVEGXGX

SEQ ID NO: 8381 - protein, 34 aa, Artificial Sequence
  Non-cyclic GFR-binding peptide
  MOD_RES (16), (17), (18), (19), (20): Xaa is A or G
  MOD_RES (21), (22), (23), (24): Xaa is A or G or is absent
RPTQVQLSATSVLYYXXXXXXXXXLRKHRTLEDH

SEQ ID NO: 8382 - protein, 34 aa, Artificial Sequence
  Non-cyclic GFR-binding peptide
  MOD_RES (1), (2): Xaa is C or S
  MOD_RES (16), (17), (18), (19), (20): Xaa is A or G
  MOD_RES (21), (22), (23), (24): Xaa is A or G or is absent
XXVPQALSPISILYKXXXXXXXXXLKYHYMIVRS

SEQ ID NO: 8383 - protein, 38 aa, Artificial Sequence
  Non-cyclic GFR-binding peptide
  MOD_RES (1), (2), (36), (38): Xaa is C or S
  MOD_RES (16), (17), (18), (19), (20): Xaa is A or G
  MOD_RES (21), (22), (23), (24): Xaa is A or G or is absent
XXVPTELNAISMLYFXXXXXXXXXLKKYRDMVVEGXGX

SEQ ID NO: 8384 - protein, 34 aa, Artificial Sequence
  Non-cyclic GFR-binding peptide
  MOD_RES (2), (3), (34): Xaa is C or S
PXXVSQDLSPISILYKIGKTPKILKYHYMIVKSX

SEQ ID NO: 8385 - protein, 40 aa, Artificial Sequence
  Non-cyclic GFR-binding peptide
  MOD_RES (5), (6), (39): Xaa is C or S
  MOD_RES (20), (21), (22), (23), (24): Xaa is A or G
  MOD_RES (25), (26), (27), (28): Xaa is A or G or is absent
SAAPXXVPQALSPISILYKXXXXXXXXXLKYHYMIVRSXK

SEQ ID NO: 8386 - protein, 39 aa, Artificial Sequence
  Non-cyclic GFR-binding peptide
  MOD_RES (1), (2), (36), (38): Xaa is C or S
  MOD_RES (16), (17), (18), (19), (20): Xaa is A or G
  MOD_RES (21), (22), (23), (24): Xaa is A or G or is absent
XXVPTELSPISMLYKXXXXXXXXXLKYHYDMVVEGXGXR

SEQ ID NO: 8387 - protein, 32 aa, Artificial Sequence
  Non-cyclic GFR-binding peptide
  MOD_RES (1), (2): Xaa is C or S
XXAPTKLSAISVLYLDSSNNVILKNYQNMVVK

SEQ ID NO: 8388 - protein, 35 aa, Artificial Sequence
  Non-cyclic GFR-binding peptide
  MOD_RES (2), (3): Xaa is C or S
  MOD_RES (17), (18), (19), (20), (21): Xaa is A or G
  MOD_RES (22), (23), (24), (25): Xaa is A or G or is absent
PXXAPTKLSAISVLYLXXXXXXXXXLKNYQNMVVR

SEQ ID NO: 8389 - protein, 39 aa, Artificial Sequence
  Non-cyclic GFR-binding peptide
  MOD_RES (37), (39): Xaa is C or S
  MOD_RES (16), (17), (18), (19), (20): Xaa is A or G
  MOD_RES (21), (22), (23), (24): Xaa is A or G or is absent
RPTQVQLSAISVLYLXXXXXXXXXLKNYQTLEDHLAXKX

SEQ ID NO: 8390 - protein, 37 aa, Artificial Sequence
  Non-cyclic GFR-binding peptide
  MOD_RES (2), (3), (36): Xaa is C or S
  MOD_RES (17), (18), (19), (20), (21): Xaa is A or G
  MOD_RES (22), (23), (24), (25): Xaa is A or G or is absent
PXXVSQDLNAISILYFXXXXXXXXXLKKYRMIVKSXK

SEQ ID NO: 8391 - protein, 37 aa, Artificial Sequence
  Non-cyclic GFR-binding peptide
  MOD_RES (4), (5): Xaa is C or S
GKAXXVPTKLSAISVLYLDDMGVPTLKNYQEGMSVAE

SEQ ID NO: 8392 - protein, 33 aa, Artificial Sequence
  Non-cyclic GFR-binding peptide
  MOD_RES (14), (15), (16), (17), (18): Xaa is A or G
  MOD_RES (19), (20), (21), (22): Xaa is A or G or is absent
APTKLSAISVLYLXXXXXXXXXLKNYQNMVVKA

SEQ ID NO: 8393 - protein, 37 aa, Artificial Sequence
  Non-cyclic GFR-binding peptide
  MOD_RES (1), (2), (35), (37): Xaa is C or S
  MOD_RES (16), (17), (18), (19), (20): Xaa is A or G
  MOD_RES (21), (22), (23), (24): Xaa is A or G or is absent
XXVSQDLNAISILYFXXXXXXXXXLKKYRMIVKSXKX

SEQ ID NO: 8394 - protein, 33 aa, Artificial Sequence
  Non-cyclic GFR-binding peptide
  MOD_RES (1), (33): Xaa is C or S
XVPTELSPISMLYKDEYDKVVLKYHYEMVVEGX

SEQ ID NO: 8395 - protein, 41 aa, Artificial Sequence
  Non-cyclic GFR-binding peptide
  MOD_RES (5), (6), (39), (41): Xaa is C or S
  MOD_RES (20), (21), (22), (23), (24): Xaa is A or G
  MOD_RES (25), (26), (27), (28): Xaa is A or G or is absent
SASPXXVSQDLSPISILYKXXXXXXXXXLKYHYMIVKSXKX

SEQ ID NO: 8396 - protein, 36 aa, Artificial Sequence
  Non-cyclic GFR-binding peptide
  MOD_RES (1), (34), (36): Xaa is C or S
  MOD_RES (15), (16), (17), (18), (19): Xaa is A or G
  MOD_RES (20), (21), (22), (23): Xaa is A or G or is absent
XVPQALSATSILYYXXXXXXXXXLRKHRMIVRSXKX

SEQ ID NO: 8397 - protein, 45 aa, Artificial Sequence
  Non-cyclic GFR-binding peptide
  MOD_RES (5), (42), (44): Xaa is C or S
  MOD_RES (21), (22), (23), (24), (25): Xaa is A or G
  MOD_RES (26), (27), (28), (29): Xaa is A or G or is absent
RNVQXRPTQVQLSATSVLYYXXXXXXXXXLRKHRTLEDHLAXKXE

SEQ ID NO: 8398 - protein, 37 aa, Artificial Sequence
  Non-cyclic GFR-binding peptide
  MOD_RES (3), (4), (37): Xaa is C or S
  MOD_RES (18), (19), (20), (21), (22): Xaa is A or G
  MOD_RES (23), (24), (25), (26): Xaa is A or G or is absent
SPXXVPQDLNAISILYFXXXXXXXXXLKKYRMVVKSX

SEQ ID NO: 8399 - protein, 41 aa, Artificial Sequence
  Non-cyclic GFR-binding peptide
  MOD_RES (3), (4), (39), (41): Xaa is C or S
  MOD_RES (18), (19), (20), (21), (22): Xaa is A or G
  MOD_RES (23), (24), (25), (26): Xaa is A or G or is absent
KAXXVPTKLNAISVLYFXXXXXXXXXLKKYREGMSVAEXGX

SEQ ID NO: 8400 - protein, 40 aa, Artificial Sequence
  Non-cyclic GFR-binding peptide
  MOD_RES (4), (5), (37), (39): Xaa is C or S
PKPXXAPTQLSATSVLYYDDSSNVILRKHRNMVVRAXGXH

SEQ ID NO: 8401 - protein, 33 aa, Artificial Sequence
  Non-cyclic GFR-binding peptide
  MOD_RES (1), (1): Xaa is C or S
  MOD_RES (15), (16), (17), (18), (19): Xaa is A or G
  MOD_RES (20), (21), (22), (23): Xaa is A or G or is absent
XVPQDLSPISILYKXXXXXXXXXLKYHYMVVKS

SEQ ID NO: 8402 - protein, 39 aa, Artificial Sequence
  Non-cyclic GFR-binding peptide
  MOD_RES (3), (4), (36), (38): Xaa is C or S
KPXXAPTQLSPISVLYKDDSSNVILKYHYNMVVRAXGXH

SEQ ID NO: 8403 - protein, 34 aa, Artificial Sequence
  Non-cyclic GFR-binding peptide
  MOD_RES (1), (2), (34): Xaa is C or S
XXAPTQLSATSVLYYDDSSNVILRKHRNMVVRAX

SEQ ID NO: 8404 - protein, 43 aa, Artificial Sequence
  Non-cyclic GFR-binding peptide
  MOD_RES (6), (7), (41), (43): Xaa is C or S
  MOD_RES (21), (22), (23), (24), (25): Xaa is A or G
  MOD_RES (26), (27), (28), (29): Xaa is A or G or is absent
YVPKPXXAPTKLSPISVLYKXXXXXXXXXLKYHYNMVVRSXGX

SEQ ID NO: 8405 - protein, 38 aa, Artificial Sequence
  Non-cyclic GFR-binding peptide
  MOD_RES (37), (37): Xaa is C or S
RPTQVQLSPISVLYKEIVRKKPIFLKYHYTLEDHLAXK

SEQ ID NO: 8406 - protein, 39 aa, Artificial Sequence
  Non-cyclic GFR-binding peptide
  MOD_RES (6), (7): Xaa is C or S
  MOD_RES (21), (22), (23), (24), (25): Xaa is A or G
  MOD_RES (26), (27), (28), (29): Xaa is A or G or is absent
ASASPXXVSQDLSAISILYLXXXXXXXXXLKNYQMIVKS

SEQ ID NO: 8407 - protein, 36 aa, Artificial Sequence
  Non-cyclic GFR-binding peptide
  MOD_RES (1), (34), (36): Xaa is C or S
  MOD_RES (15), (16), (17), (18), (19): Xaa is A or G
  MOD_RES (20), (21), (22), (23): Xaa is A or G or is absent
XVPQALNAISILYFXXXXXXXXXLKKYRMIVRSXKX

SEQ ID NO: 8408 - protein, 38 aa, Artificial Sequence
  Non-cyclic GFR-binding peptide
  MOD_RES (5), (6), (37): Xaa is C or S
SASPXXVSQDLNAISILYFIGKTPKILKKYRMIVKSXK

SEQ ID NO: 8409 - protein, 36 aa, Artificial Sequence
  Non-cyclic GFR-binding peptide
  MOD_RES (1), (33), (35): Xaa is C or S
XVPTELNAISMLYFDEYDKVVLKKYREMVVEGXGXR

SEQ ID NO: 8410 - protein, 37 aa, Artificial Sequence
  Non-cyclic GFR-binding peptide
  MOD_RES (4), (5), (36): Xaa is C or S
AAPXXVPQALNAISILYFVGRKPKVLKKYRMIVRSXK

SEQ ID NO: 8411 - protein, 36 aa, Artificial Sequence
  Non-cyclic GFR-binding peptide
  MOD_RES (6), (6): Xaa is C or S
VTKPTXAPTKLSATSVLYYDDSSNVILRKHRNMVVR

SEQ ID NO: 8412 - protein, 41 aa, Artificial Sequence
  Non-cyclic GFR-binding peptide
  MOD_RES (6), (7), (41): Xaa is C or S
  MOD_RES (21), (22), (23), (24), (25): Xaa is A or G
  MOD_RES (26), (27), (28), (29): Xaa is A or G or is absent
KIPKAXXVPTELSPISMLYKXXXXXXXXXLKYHYDMVVEGX

SEQ ID NO: 8413 - protein, 34 aa, Artificial Sequence
  Non-cyclic GFR-binding peptide
  MOD_RES (3), (4): Xaa is C or S
APXXVPQALNAISILYFVGRKPKVLKKYRMIVRS

SEQ ID NO: 8414 - protein, 34 aa, Artificial Sequence
  Non-cyclic GFR-binding peptide
  MOD_RES (34), (34): Xaa is C or S
  MOD_RES (14), (15), (16), (17), (18): Xaa is A or G
  MOD_RES (19), (20), (21), (22): Xaa is A or G or is absent
APTQLSAISVLYLXXXXXXXXXLKNYQNMVVRAX

SEQ ID NO: 8415 - protein, 41 aa, Artificial Sequence
  Non-cyclic GFR-binding peptide
  MOD_RES (6), (7), (41): Xaa is C or S
  MOD_RES (21), (22), (23), (24), (25): Xaa is A or G
  MOD_RES (26), (27), (28), (29): Xaa is A or G or is absent
AVPKAXXAPTKLSAISVLYLXXXXXXXXXLKNYQNMVVKAX

SEQ ID NO: 8416 - protein, 40 aa, Artificial Sequence
  Non-cyclic GFR-binding peptide
  MOD_RES (4), (5), (37), (39): Xaa is C or S
PKPXXAPTQLSAISVLYLDDSSNVILKNYQNMVVRAXGXH

SEQ ID NO: 8417 - protein, 37 aa, Artificial Sequence
  Non-cyclic GFR-binding peptide
  MOD_RES (4), (5): Xaa is C or S
  MOD_RES (19), (20), (21), (22), (23): Xaa is A or G
  MOD_RES (24), (25), (26), (27): Xaa is A or G or is absent
ASPXXVSQDLNAISILYFXXXXXXXXXLKKYRMIVKS

SEQ ID NO: 8418 - protein, 32 aa, Artificial Sequence
  Non-cyclic GFR-binding peptide
  MOD_RES (1), (32): Xaa is C or S
XVPQDLSATSILYYVGRTPKVLRKHRMVVKSX

SEQ ID NO: 8419 - protein, 42 aa, Artificial Sequence
  Non-cyclic GFR-binding peptide
  MOD_RES (3), (40), (42): Xaa is C or S
  MOD_RES (19), (20), (21), (22), (23): Xaa is A or G
  MOD_RES (24), (25), (26), (27): Xaa is A or G or is absent
VQXRPTQVQLSATSVLYYXXXXXXXXXLRKHRTLEDHLAXKX

SEQ ID NO: 8420 - protein, 41 aa, Artificial Sequence
  Non-cyclic GFR-binding peptide
  MOD_RES (6), (7), (40): Xaa is C or S
  MOD_RES (21), (22), (23), (24), (25): Xaa is A or G
  MOD_RES (26), (27), (28), (29): Xaa is A or G or is absent
ASASPXXVSQDLSPISILYKXXXXXXXXXLKYHYMIVKSXK

SEQ ID NO: 8421 - protein, 41 aa, Artificial Sequence
  Non-cyclic GFR-binding peptide
  MOD_RES (5), (6), (39), (41): Xaa is C or S
  MOD_RES (20), (21), (22), (23), (24): Xaa is A or G
  MOD_RES (25), (26), (27), (28): Xaa is A or G or is absent
SAAPXXVPQALSPISILYKXXXXXXXXXLKYHYMIVRSXKX

SEQ ID NO: 8422 - protein, 39 aa, Artificial Sequence
  Non-cyclic GFR-binding peptide
  MOD_RES (1), (38): Xaa is C or S
  MOD_RES (17), (18), (19), (20), (21): Xaa is A or G
  MOD_RES (22), (23), (24), (25): Xaa is A or G or is absent
XRPTQVQLSPISVLYKXXXXXXXXXLKYHYTLEDHLAXK

SEQ ID NO: 8423 - protein, 40 aa, Artificial Sequence
  Non-cyclic GFR-binding peptide
  MOD_RES (3), (4), (38), (40): Xaa is C or S
  MOD_RES (18), (19), (20), (21), (22): Xaa is A or G
  MOD_RES (23), (24), (25), (26): Xaa is A or G or is absent
KAXXVPTELSATSMLYYXXXXXXXXXLRKHRDMVVEGXGX

SEQ ID NO: 8424 - protein, 38 aa, Artificial Sequence
  Non-cyclic GFR-binding peptide
  MOD_RES (2), (3), (37): Xaa is C or S
  MOD_RES (17), (18), (19), (20), (21): Xaa is A or G
  MOD_RES (22), (23), (24), (25): Xaa is A or G or is absent
PXXAPTQLSATSVLYYXXXXXXXXXLRKHRNMVVRAXG

SEQ ID NO: 8425 - protein, 36 aa, Artificial Sequence
  Non-cyclic GFR-binding peptide
  MOD_RES (2), (3): Xaa is C or S
  MOD_RES (17), (18), (19), (20), (21): Xaa is A or G
  MOD_RES (22), (23), (24), (25): Xaa is A or G or is absent
PXXAPTQLSAISVLYLXXXXXXXXXLKNYQNMVVRA

SEQ ID NO: 8426 - protein, 40 aa, Artificial Sequence
  Non-cyclic GFR-binding peptide
  MOD_RES (2), (3), (37), (39): Xaa is C or S
  MOD_RES (17), (18), (19), (20), (21): Xaa is A or G
  MOD_RES (22), (23), (24), (25): Xaa is A or G or is absent
PXXAPTQLSPISVLYKXXXXXXXXXLKYHYNMVVRAXGXH

SEQ ID NO: 8427 - protein, 31 aa, Artificial Sequence
  Non-cyclic GFR-binding peptide
  MOD_RES (31), (31): Xaa is C or S
VPQDLSATSILYYVGRTPKVLRKHRMVVKSX

SEQ ID NO: 8428 - protein, 41 aa, Artificial Sequence
  Non-cyclic GFR-binding peptide
  MOD_RES (6), (7), (38), (40): Xaa is C or S
ASASPXXVSQDLNAISILYFIGKTPKILKKYRMIVKSXKXS

SEQ ID NO: 8429 - protein, 35 aa, Artificial Sequence
  Non-cyclic GFR-binding peptide
  MOD_RES (2), (3): Xaa is C or S
  MOD_RES (17), (18), (19), (20), (21): Xaa is A or G
  MOD_RES (22), (23), (24), (25): Xaa is A or G or is absent
PXXAPTKLSPISVLYKXXXXXXXXXLKYHYNMVVR

SEQ ID NO: 8430 - protein, 35 aa, Artificial Sequence
  Non-cyclic GFR-binding peptide
  MOD_RES (35), (35): Xaa is C or S
  MOD_RES (14), (15), (16), (17), (18): Xaa is A or G
  MOD_RES (19), (20), (21), (22): Xaa is A or G or is absent
TQVQLSPISVLYKXXXXXXXXXLKYHYTLEDHLAX

SEQ ID NO: 8431 - protein, 39 aa, Artificial Sequence
  Non-cyclic GFR-binding peptide
  MOD_RES (4), (5), (36), (38): Xaa is C or S
AAPXXVPQALNAISILYFVGRKPKVLKKYRMIVRSXKXS

SEQ ID NO: 8432 - protein, 36 aa, Artificial Sequence
  Non-cyclic GFR-binding peptide
  MOD_RES (1), (2), (34), (36): Xaa is C or S
XXAPTKLSAISVLYLDSSNNVILKNYQNMVVKAXGX

SEQ ID NO: 8433 - protein, 34 aa, Artificial Sequence
  Non-cyclic GFR-binding peptide
  MOD_RES (34), (34): Xaa is C or S
  MOD_RES (14), (15), (16), (17), (18): Xaa is A or G
  MOD_RES (19), (20), (21), (22): Xaa is A or G or is absent
APTKLSPISVLYKXXXXXXXXXLKYHYNMVVKAX

SEQ ID NO: 8434 - protein, 33 aa, Artificial Sequence
  Non-cyclic GFR-binding peptide
  MOD_RES (32), (32): Xaa is C or S
APTQLSAISVLYLDDSSNVILKNYQNMVVRAXG

SEQ ID NO: 8435 - protein, 37 aa, Artificial Sequence
  Non-cyclic GFR-binding peptide
  MOD_RES (4), (5): Xaa is C or S
  MOD_RES (19), (20), (21), (22), (23): Xaa is A or G
  MOD_RES (24), (25), (26), (27): Xaa is A or G or is absent
PKAXXVPTELNAISMLYFXXXXXXXXXLKKYREMVVE

SEQ ID NO: 8436 - protein, 40 aa, Artificial Sequence
  Non-cyclic GFR-binding peptide
  MOD_RES (4), (5), (40): Xaa is C or S
  MOD_RES (19), (20), (21), (22), (23): Xaa is A or G
  MOD_RES (24), (25), (26), (27): Xaa is A or G or is absent
GKAXXVPTKLSAISVLYLXXXXXXXXXLKNYQEGMSVAEX

SEQ ID NO: 8437 - protein, 40 aa, Artificial Sequence
  Non-cyclic GFR-binding peptide
  MOD_RES (5), (6), (38), (40): Xaa is C or S
IPKAXXVPTELNAISMLYFDENEKVVLKKYRDMVVEGXGX

SEQ ID NO: 8438 - protein, 39 aa, Artificial Sequence
  Non-cyclic GFR-binding peptide
  MOD_RES (5), (6), (39): Xaa is C or S
VGKAXXVPTKLSATSVLYYDDMGVPTLRKHREGMSVAEX

SEQ ID NO: 8439 - protein, 34 aa, Artificial Sequence
  Non-cyclic GFR-binding peptide
  MOD_RES (3), (4): Xaa is C or S
KAXXVPTELSPISMLYKDENEKVVLKYHYDMVVE

SEQ ID NO: 8440 - protein, 39 aa, Artificial Sequence
  Non-cyclic GFR-binding peptide
  MOD_RES (5), (6), (38): Xaa is C or S
IPKAXXVPTELSATSMLYYDEYDKVVLRKHREMVVEGXG

SEQ ID NO: 8441 - protein, 39 aa, Artificial Sequence
  Non-cyclic GFR-binding peptide
  MOD_RES (6), (7): Xaa is C or S
  MOD_RES (21), (22), (23), (24), (25): Xaa is A or G
  MOD_RES (26), (27), (28), (29): Xaa is A or G or is absent
ASASPXXVPQDLNAISILYFXXXXXXXXXLKKYRMVVKS

SEQ ID NO: 8442 - protein, 34 aa, Artificial Sequence
  Non-cyclic GFR-binding peptide
  MOD_RES (1), (2): Xaa is C or S
  MOD_RES (16), (17), (18), (19), (20): Xaa is A or G
  MOD_RES (21), (22), (23), (24): Xaa is A or G or is absent
XXVSQDLSPISILYKXXXXXXXXXLKYHYMIVKS

SEQ ID NO: 8443 - protein, 39 aa, Artificial Sequence
  Non-cyclic GFR-binding peptide
  MOD_RES (4), (4): Xaa is C or S
  MOD_RES (20), (21), (22), (23), (24): Xaa is A or G
  MOD_RES (25), (26), (27), (28): Xaa is A or G or is absent
NVQXRPTQVQLNAISVLYFXXXXXXXXXLKKYRTLEDHL

SEQ ID NO: 8444 - protein, 36 aa, Artificial Sequence
  Non-cyclic GFR-binding peptide
  MOD_RES (35), (35): Xaa is C or S
  MOD_RES (14), (15), (16), (17), (18): Xaa is A or G
  MOD_RES (19), (20), (21), (22): Xaa is A or G or is absent
VPTKLSAISVLYLXXXXXXXXXLKNYQEGMSVAEXG

SEQ ID NO: 8445 - protein, 38 aa, Artificial Sequence
  Non-cyclic GFR-binding peptide
  MOD_RES (35), (37): Xaa is C or S
  MOD_RES (14), (15), (16), (17), (18): Xaa is A or G
  MOD_RES (19), (20), (21), (22): Xaa is A or G or is absent
TQVQLSAISVLYLXXXXXXXXXLKNYQTLEDHLAXKXE

SEQ ID NO: 8446 - protein, 39 aa, Artificial Sequence
  Non-cyclic GFR-binding peptide
  MOD_RES (1), (2), (37), (39): Xaa is C or S
  MOD_RES (16), (17), (18), (19), (20): Xaa is A or G
  MOD_RES (21), (22), (23), (24): Xaa is A or G or is absent
XXVPTKLNAISVLYFXXXXXXXXXLKKYREGMSVAEXGX

SEQ ID NO: 8447 - protein, 36 aa, Artificial Sequence
  Non-cyclic GFR-binding peptide
  MOD_RES (5), (6): Xaa is C or S
IPKAXXVPTELSPISMLYKDEYDKVVLKYHYEMVVE

SEQ ID NO: 8448 - protein, 39 aa, Artificial Sequence
  Non-cyclic GFR-binding peptide
  MOD_RES (2), (3), (38): Xaa is C or S
  MOD_RES (17), (18), (19), (20), (21): Xaa is A or G
  MOD_RES (22), (23), (24), (25): Xaa is A or G or is absent
AXXVPTKLSATSVLYYXXXXXXXXXLRKHREGMSVAEXG

SEQ ID NO: 8449 - protein, 42 aa, Artificial Sequence
  Non-cyclic GFR-binding peptide
  MOD_RES (6), (7), (40), (42): Xaa is C or S
  MOD_RES (21), (22), (23), (24), (25): Xaa is A or G
  MOD_RES (26), (27), (28), (29): Xaa is A or G or is absent
ASASPXXVPQDLNAISILYFXXXXXXXXXLKKYRMVVKSXKX

SEQ ID NO: 8450 - protein, 43 aa, Artificial Sequence
  Non-cyclic GFR-binding peptide
  MOD_RES (6), (7), (40), (42): Xaa is C or S
  MOD_RES (21), (22), (23), (24), (25): Xaa is A or G
  MOD_RES (26), (27), (28), (29): Xaa is A or G or is absent
ASASPXXVPQDLNAISILYFXXXXXXXXXLKKYRMVVKSXKXS

SEQ ID NO: 8451 - protein, 33 aa, Artificial Sequence
  Non-cyclic GFR-binding peptide
  MOD_RES (31), (33): Xaa is C or S
VPQDLNAISILYFVGRTPKVLKKYRMVVKSXKX

SEQ ID NO: 8452 - protein, 40 aa, Artificial Sequence
  Non-cyclic GFR-binding peptide
  MOD_RES (6), (40): Xaa is C or S
  MOD_RES (20), (21), (22), (23), (24): Xaa is A or G
  MOD_RES (25), (26), (27), (28): Xaa is A or G or is absent
VTKPTXAPTKLSAISVLYLXXXXXXXXXLKNYQNMVVRSX

SEQ ID NO: 8453 - protein, 41 aa, Artificial Sequence
  Non-cyclic GFR-binding peptide
  MOD_RES (5), (6), (38), (40): Xaa is C or S
VPKPXXAPTQLSPISVLYKDDSSNVILKYHYNMVVRAXGXH

SEQ ID NO: 8454 - protein, 35 aa, Artificial Sequence
  Non-cyclic GFR-binding peptide
  MOD_RES (34), (34): Xaa is C or S
  MOD_RES (14), (15), (16), (17), (18): Xaa is A or G
  MOD_RES (19), (20), (21), (22): Xaa is A or G or is absent
VPTELSATSMLYYXXXXXXXXXLRKHRDMVVEGXG

SEQ ID NO: 8455 - protein, 39 aa, Artificial Sequence
  Non-cyclic GFR-binding peptide
  MOD_RES (3), (4), (39): Xaa is C or S
  MOD_RES (18), (19), (20), (21), (22): Xaa is A or G
  MOD_RES (23), (24), (25), (26): Xaa is A or G or is absent
KAXXVPTKLSATSVLYYXXXXXXXXXLRKHREGMSVAEX

SEQ ID NO: 8456 - protein, 39 aa, Artificial Sequence
  Non-cyclic GFR-binding peptide
  MOD_RES (5), (37), (39): Xaa is C or S
TKPTXAPTKLSAISVLYLDDSSNVILKNYQNMVVRSXGX

SEQ ID NO: 8457 - protein, 41 aa, Artificial Sequence
  Non-cyclic GFR-binding peptide
  MOD_RES (3), (4), (38), (40): Xaa is C or S
  MOD_RES (18), (19), (20), (21), (22): Xaa is A or G
  MOD_RES (23), (24), (25), (26): Xaa is A or G or is absent
KAXXVPTELSPISMLYKXXXXXXXXXLKYHYDMVVEGXGXR

SEQ ID NO: 8458 - protein, 35 aa, Artificial Sequence
  Non-cyclic GFR-binding peptide
  MOD_RES (1), (35): Xaa is C or S
  MOD_RES (15), (16), (17), (18), (19): Xaa is A or G
  MOD_RES (20), (21), (22), (23): Xaa is A or G or is absent
XAPTKLSPISVLYKXXXXXXXXXLKYHYNMVVKAX

SEQ ID NO: 8459 - protein, 33 aa, Artificial Sequence
  Non-cyclic GFR-binding peptide
  MOD_RES (32), (32): Xaa is C or S
APTKLSAISVLYLDDSSNVILKNYQNMVVRSXG

SEQ ID NO: 8460 - protein, 39 aa, Artificial Sequence
  Non-cyclic GFR-binding peptide
  MOD_RES (2), (3), (36), (38): Xaa is C or S
  MOD_RES (17), (18), (19), (20), (21): Xaa is A or G
  MOD_RES (22), (23), (24), (25): Xaa is A or G or is absent
PXXVPQALSPISILYKXXXXXXXXXLKYHYMIVRSXKXS

SEQ ID NO: 8461 - protein, 36 aa, Artificial Sequence
  Non-cyclic GFR-binding peptide
  MOD_RES (1), (2), (34), (36): Xaa is C or S
XXAPTQLSATSVLYYDDSSNVILRKHRNMVVRAXGX

SEQ ID NO: 8462 - protein, 36 aa, Artificial Sequence
  Non-cyclic GFR-binding peptide
  MOD_RES (3), (4): Xaa is C or S
  MOD_RES (18), (19), (20), (21), (22): Xaa is A or G
  MOD_RES (23), (24), (25), (26): Xaa is A or G or is absent
SPXXVPQDLNAISILYFXXXXXXXXXLKKYRMVVKS

SEQ ID NO: 8463 - protein, 37 aa, Artificial Sequence
  Non-cyclic GFR-binding peptide
  MOD_RES (3), (4), (37): Xaa is C or S
  MOD_RES (18), (19), (20), (21), (22): Xaa is A or G
  MOD_RES (23), (24), (25), (26): Xaa is A or G or is absent
SPXXVSQDLNAISILYFXXXXXXXXXLKKYRMIVKSX

SEQ ID NO: 8464 - protein, 38 aa, Artificial Sequence
  Non-cyclic GFR-binding peptide
  MOD_RES (5), (6), (38): Xaa is C or S
IPKAXXVPTELSATSMLYYDENEKVVLRKHRDMVVEGX

SEQ ID NO: 8465 - protein, 40 aa, Artificial Sequence
  Non-cyclic GFR-binding peptide
  MOD_RES (4), (4): Xaa is C or S
NVQXRPTQVQLSPISVLYKEIVRKKPIFLKYHYTLEDHLA

SEQ ID NO: 8466 - protein, 37 aa, Artificial Sequence
  Non-cyclic GFR-binding peptide
  MOD_RES (3), (35), (37): Xaa is C or S
PTXAPTKLSATSVLYYDDSSNVILRKHRNMVVRSXGX

SEQ ID NO: 8467 - protein, 42 aa, Artificial Sequence
  Non-cyclic GFR-binding peptide
  MOD_RES (6), (40), (42): Xaa is C or S
  MOD_RES (20), (21), (22), (23), (24): Xaa is A or G
  MOD_RES (25), (26), (27), (28): Xaa is A or G or is absent
VTKPTXAPTKLSATSVLYYXXXXXXXXXLRKHRNMVVRSXGX

SEQ ID NO: 8468 - protein, 33 aa, Artificial Sequence
  Non-cyclic GFR-binding peptide
  MOD_RES (1), (32): Xaa is C or S
XVSQDLSAISILYLIGKTPKILKNYQMIVKSXK

SEQ ID NO: 8469 - protein, 40 aa, Artificial Sequence
  Non-cyclic GFR-binding peptide
  MOD_RES (5), (6), (40): Xaa is C or S
  MOD_RES (20), (21), (22), (23), (24): Xaa is A or G
  MOD_RES (25), (26), (27), (28): Xaa is A or G or is absent
VPKPXXAPTQLSAISVLYLXXXXXXXXXLKNYQNMVVRAX

SEQ ID NO: 8470 - protein, 35 aa, Artificial Sequence
  Non-cyclic GFR-binding peptide
  MOD_RES (1), (33), (35): Xaa is C or S
XVPTELNAISMLYFDEYDKVVLKKYREMVVEGXGX

SEQ ID NO: 8471 - protein, 39 aa, Artificial Sequence
  Non-cyclic GFR-binding peptide
  MOD_RES (5), (6): Xaa is C or S
  MOD_RES (20), (21), (22), (23), (24): Xaa is A or G
  MOD_RES (25), (26), (27), (28): Xaa is A or G or is absent
VPKAXXAPTKLNAISVLYFXXXXXXXXXLKKYRNMVVKA

SEQ ID NO: 8472 - protein, 40 aa, Artificial Sequence
  Non-cyclic GFR-binding peptide
  MOD_RES (4), (5), (39): Xaa is C or S
  MOD_RES (19), (20), (21), (22), (23): Xaa is A or G
  MOD_RES (24), (25), (26), (27): Xaa is A or G or is absent
PKPXXAPTKLSPISVLYKXXXXXXXXXLKYHYNMVVRSXG

SEQ ID NO: 8473 - protein, 37 aa, Artificial Sequence
  Non-cyclic GFR-binding peptide
  MOD_RES (1), (2), (35), (37): Xaa is C or S
  MOD_RES (16), (17), (18), (19), (20): Xaa is A or G
  MOD_RES (21), (22), (23), (24): Xaa is A or G or is absent
XXVPQALNAISILYFXXXXXXXXXLKKYRMIVRSXKX

SEQ ID NO: 8474 - protein, 37 aa, Artificial Sequence
  Non-cyclic GFR-binding peptide
  MOD_RES (3), (4), (36): Xaa is C or S
KAXXVPTELNAISMLYFDENEKVVLKKYRDMVVEGXG

SEQ ID NO: 8475 - protein, 37 aa, Artificial Sequence
  Non-cyclic GFR-binding peptide
  MOD_RES (2), (3), (37): Xaa is C or S
  MOD_RES (17), (18), (19), (20), (21): Xaa is A or G
  MOD_RES (22), (23), (24), (25): Xaa is A or G or is absent
PXXAPTKLSATSVLYYXXXXXXXXXLRKHRNMVVRSX

SEQ ID NO: 8476 - protein, 33 aa, Artificial Sequence
  Non-cyclic GFR-binding peptide
  MOD_RES (14), (15), (16), (17), (18): Xaa is A or G
  MOD_RES (19), (20), (21), (22): Xaa is A or G or is absent
APTKLSAISVLYLXXXXXXXXXLKNYQNMVVRS

SEQ ID NO: 8477 - protein, 35 aa, Artificial Sequence
  Non-cyclic GFR-binding peptide
  MOD_RES (3), (4), (35): Xaa is C or S
APXXVPQALNAISILYFVGRKPKVLKKYRMIVRSX

SEQ ID NO: 8478 - protein, 43 aa, Artificial Sequence
  Non-cyclic GFR-binding peptide
  MOD_RES (4), (5), (40), (42): Xaa is C or S
  MOD_RES (19), (20), (21), (22), (23): Xaa is A or G
  MOD_RES (24), (25), (26), (27): Xaa is A or G or is absent
GKAXXVPTKLSATSVLYYXXXXXXXXXLRKHREGMSVAEXGXR

SEQ ID NO: 8479 - protein, 43 aa, Artificial Sequence
  Non-cyclic GFR-binding peptide
  MOD_RES (6), (7), (41), (43): Xaa is C or S
  MOD_RES (21), (22), (23), (24), (25): Xaa is A or G
  MOD_RES (26), (27), (28), (29): Xaa is A or G or is absent
YVPKPXXAPTKLSAISVLYLXXXXXXXXXLKNYQNMVVRSXGX

SEQ ID NO: 8480 - protein, 35 aa, Artificial Sequence
  Non-cyclic GFR-binding peptide
  MOD_RES (2), (3), (34): Xaa is C or S
PXXVPQDLNAISILYFVGRTPKVLKKYRMVVKSXK

SEQ ID NO: 8481 - protein, 36 aa, Artificial Sequence
  Non-cyclic GFR-binding peptide
  MOD_RES (3), (4), (36): Xaa is C or S
KAXXAPTKLSAISVLYLDSSNNVILKNYQNMVVKAX

SEQ ID NO: 8482 - protein, 33 aa, Artificial Sequence
  Non-cyclic GFR-binding peptide
  MOD_RES (14), (15), (16), (17), (18): Xaa is A or G
  MOD_RES (19), (20), (21), (22): Xaa is A or G or is absent
TQVQLNAISVLYFXXXXXXXXXLKKYRTLEDHL

SEQ ID NO: 8483 - protein, 34 aa, Artificial Sequence
  Non-cyclic GFR-binding peptide
RPTQVQLSPISVLYKEIVRKKPIFLKYHYTLEDH

SEQ ID NO: 8484 - protein, 38 aa, Artificial Sequence
  Non-cyclic GFR-binding peptide
  MOD_RES (1), (2), (36), (38): Xaa is C or S
  MOD_RES (16), (17), (18), (19), (20): Xaa is A or G
  MOD_RES (21), (22), (23), (24): Xaa is A or G or is absent
XXAPTKLSPISVLYKXXXXXXXXXLKYHYNMVVKAXGX

SEQ ID NO: 8485 - protein, 41 aa, Artificial Sequence
  Non-cyclic GFR-binding peptide
  MOD_RES (6), (7), (38), (40): Xaa is C or S
ASASPXXVPQDLSATSILYYVGRTPKVLRKHRMVVKSXKXS

SEQ ID NO: 8486 - protein, 31 aa, Artificial Sequence
  Non-cyclic GFR-binding peptide
VPTELNAISMLYFDEYDKVVLKKYREMVVEG

SEQ ID NO: 8487 - protein, 39 aa, Artificial Sequence
  Non-cyclic GFR-binding peptide
  MOD_RES (3), (4), (38): Xaa is C or S
  MOD_RES (18), (19), (20), (21), (22): Xaa is A or G
  MOD_RES (23), (24), (25), (26): Xaa is A or G or is absent
KPXXAPTKLSPISVLYKXXXXXXXXXLKYHYNMVVRSXG

SEQ ID NO: 8488 - protein, 39 aa, Artificial Sequence
  Non-cyclic GFR-binding peptide
  MOD_RES (1), (2), (36), (38): Xaa is C or S
  MOD_RES (16), (17), (18), (19), (20): Xaa is A or G
  MOD_RES (21), (22), (23), (24): Xaa is A or G or is absent
XXAPTKLSAISVLYLXXXXXXXXXLKNYQNMVVKAXGXH

SEQ ID NO: 8489 - protein, 34 aa, Artificial Sequence
  Non-cyclic GFR-binding peptide
  MOD_RES (15), (16), (17), (18), (19): Xaa is A or G
  MOD_RES (20), (21), (22), (23): Xaa is A or G or is absent
PTQVQLSAISVLYLXXXXXXXXXLKNYQTLEDHL

SEQ ID NO: 8490 - protein, 37 aa, Artificial Sequence
  Non-cyclic GFR-binding peptide
  MOD_RES (34), (36): Xaa is C or S
  MOD_RES (14), (15), (16), (17), (18): Xaa is A or G
  MOD_RES (19), (20), (21), (22): Xaa is A or G or is absent
APTQLSAISVLYLXXXXXXXXXLKNYQNMVVRAXGXH

SEQ ID NO: 8491 - protein, 41 aa, Artificial Sequence
  Non-cyclic GFR-binding peptide
  MOD_RES (4), (5), (38), (40): Xaa is C or S
  MOD_RES (19), (20), (21), (22), (23): Xaa is A or G
  MOD_RES (24), (25), (26), (27): Xaa is A or G or is absent
AAPXXVPQALSPISILYKXXXXXXXXXLKYHYMIVRSXKXS

SEQ ID NO: 8492 - protein, 38 aa, Artificial Sequence
  Non-cyclic GFR-binding peptide
  MOD_RES (3), (4), (35), (37): Xaa is C or S
APXXVPQALSPISILYKVGRKPKVLKYHYMIVRSXKXS

SEQ ID NO: 8493 - protein, 37 aa, Artificial Sequence
  Non-cyclic GFR-binding peptide
  MOD_RES (5), (6): Xaa is C or S
VPKPXXAPTKLSATSVLYYDDSSNVILRKHRNMVVRS

SEQ ID NO: 8494 - protein, 39 aa, Artificial Sequence
  Non-cyclic GFR-binding peptide
  MOD_RES (5), (6), (38): Xaa is C or S
IPKAXXVPTELNAISMLYFDENEKVVLKKYRDMVVEGXG

SEQ ID NO: 8495 - protein, 36 aa, Artificial Sequence
  Non-cyclic GFR-binding peptide
  MOD_RES (33), (35): Xaa is C or S
  MOD_RES (14), (15), (16), (17), (18): Xaa is A or G
  MOD_RES (19), (20), (21), (22): Xaa is A or G or is absent
VPQALSPISILYKXXXXXXXXXLKYHYMIVRSXKXS

SEQ ID NO: 8496 - protein, 36 aa, Artificial Sequence
  Non-cyclic GFR-binding peptide
  MOD_RES (3), (4): Xaa is C or S
  MOD_RES (18), (19), (20), (21), (22): Xaa is A or G
  MOD_RES (23), (24), (25), (26): Xaa is A or G or is absent
KPXXAPTKLSAISVLYLXXXXXXXXXLKNYQNMVVR

SEQ ID NO: 8497 - protein, 37 aa, Artificial Sequence
  Non-cyclic GFR-binding peptide
  MOD_RES (4), (5), (37): Xaa is C or S
PKPXXAPTKLSPISVLYKDDSSNVILKYHYNMVVRSX

SEQ ID NO: 8498 - protein, 36 aa, Artificial Sequence
  Non-cyclic GFR-binding peptide
  MOD_RES (1), (2), (34), (36): Xaa is C or S
XXVPTELSPISMLYKDENEKVVLKYHYDMVVEGXGX

SEQ ID NO: 8499 - protein, 33 aa, Artificial Sequence
  Non-cyclic GFR-binding peptide
  MOD_RES (1), (1): Xaa is C or S
XVPTKLSATSVLYYDDMGVPTLRKHREGMSVAE

SEQ ID NO: 8500 - protein, 35 aa, Artificial Sequence
  Non-cyclic GFR-binding peptide
  MOD_RES (4), (5): Xaa is C or S
ASPXXVPQDLNAISILYFVGRTPKVLKKYRMVVKS

SEQ ID NO: 8501 - protein, 36 aa, Artificial Sequence
  Non-cyclic GFR-binding peptide
  MOD_RES (1), (33), (35): Xaa is C or S
XAPTQLSATSVLYYDDSSNVILRKHRNMVVRAXGXH

SEQ ID NO: 8502 - protein, 38 aa, Artificial Sequence
  Non-cyclic GFR-binding peptide
  MOD_RES (3), (4), (38): Xaa is C or S
  MOD_RES (18), (19), (20), (21), (22): Xaa is A or G
  MOD_RES (23), (24), (25), (26): Xaa is A or G or is absent
KAXXVPTELNAISMLYFXXXXXXXXXLKKYREMVVEGX

SEQ ID NO: 8503 - protein, 38 aa, Artificial Sequence
  Non-cyclic GFR-binding peptide
  MOD_RES (4), (4): Xaa is C or S
NVQXRPTQVQLSAISVLYLEIVRKKPIFLKNYQTLEDH

SEQ ID NO: 8504 - protein, 37 aa, Artificial Sequence
  Non-cyclic GFR-binding peptide
  MOD_RES (34), (36): Xaa is C or S
  MOD_RES (14), (15), (16), (17), (18): Xaa is A or G
  MOD_RES (19), (20), (21), (22): Xaa is A or G or is absent
VPTELSATSMLYYXXXXXXXXXLRKHREMVVEGXGXR

SEQ ID NO: 8505 - protein, 38 aa, Artificial Sequence
  Non-cyclic GFR-binding peptide
  MOD_RES (5), (6), (37): Xaa is C or S
SASPXXVSQDLSAISILYLIGKTPKILKNYQMIVKSXK

SEQ ID NO: 8506 - protein, 39 aa, Artificial Sequence
  Non-cyclic GFR-binding peptide
  MOD_RES (5), (5): Xaa is C or S
  MOD_RES (21), (22), (23), (24), (25): Xaa is A or G
  MOD_RES (26), (27), (28), (29): Xaa is A or G or is absent
RNVQXRPTQVQLNAISVLYFXXXXXXXXXLKKYRTLEDH

SEQ ID NO: 8507 - protein, 31 aa, Artificial Sequence
  Non-cyclic GFR-binding peptide
  MOD_RES (1), (1): Xaa is C or S
XVPTELSPISMLYKDENEKVVLKYHYDMVVE

SEQ ID NO: 8508 - protein, 35 aa, Artificial Sequence
  Non-cyclic GFR-binding peptide
  MOD_RES (1), (2): Xaa is C or S
  MOD_RES (16), (17), (18), (19), (20): Xaa is A or G
  MOD_RES (21), (22), (23), (24): Xaa is A or G or is absent
XXAPTQLSPISVLYKXXXXXXXXXLKYHYNMVVRA

SEQ ID NO: 8509 - protein, 34 aa, Artificial Sequence
  Non-cyclic GFR-binding peptide
  MOD_RES (1), (2), (34): Xaa is C or S
XXVPTELSPISMLYKDEYDKVVLKYHYEMVVEGX

SEQ ID NO: 8510 - protein, 39 aa, Artificial Sequence
  Non-cyclic GFR-binding peptide
  MOD_RES (6), (7): Xaa is C or S
  MOD_RES (21), (22), (23), (24), (25): Xaa is A or G
  MOD_RES (26), (27), (28), (29): Xaa is A or G or is absent
ASAAPXXVPQALSPISILYKXXXXXXXXXLKYHYMIVRS

SEQ ID NO: 8511 - protein, 43 aa, Artificial Sequence
  Non-cyclic GFR-binding peptide
  MOD_RES (6), (7), (40), (42): Xaa is C or S
KVGKAXXVPTKLSATSVLYYDDMGVPTLRKHREGMSVAEXGXR

SEQ ID NO: 8512 - protein, 41 aa, Artificial Sequence
  Non-cyclic GFR-binding peptide
  MOD_RES (6), (7), (39), (41): Xaa is C or S
AVPKAXXAPTKLNAISVLYFDSSNNVILKKYRNMVVKAXGX

SEQ ID NO: 8513 - protein, 37 aa, Artificial Sequence
  Non-cyclic GFR-binding peptide
  MOD_RES (3), (4), (37): Xaa is C or S
  MOD_RES (18), (19), (20), (21), (22): Xaa is A or G
  MOD_RES (23), (24), (25), (26): Xaa is A or G or is absent
SPXXVSQDLSATSILYYXXXXXXXXXLRKHRMIVKSX

SEQ ID NO: 8514 - protein, 39 aa, Artificial Sequence
  Non-cyclic GFR-binding peptide
  MOD_RES (4), (5), (36), (38): Xaa is C or S
ASPXXVSQDLNAISILYFIGKTPKILKKYRMIVKSXKXS

SEQ ID NO: 8515 - protein, 42 aa, Artificial Sequence
  Non-cyclic GFR-binding peptide
  MOD_RES (4), (5), (39), (41): Xaa is C or S
  MOD_RES (19), (20), (21), (22), (23): Xaa is A or G
  MOD_RES (24), (25), (26), (27): Xaa is A or G or is absent
PKPXXAPTQLSPISVLYKXXXXXXXXXLKYHYNMVVRAXGXH

SEQ ID NO: 8516 - protein, 33 aa, Artificial Sequence
  Non-cyclic GFR-binding peptide
  MOD_RES (32), (32): Xaa is C or S
APTKLSPISVLYKDDSSNVILKYHYNMVVRSXG

SEQ ID NO: 8517 - protein, 37 aa, Artificial Sequence
  Non-cyclic GFR-binding peptide
  MOD_RES (5), (6): Xaa is C or S
VPKAXXAPTKLSAISVLYLDSSNNVILKNYQNMVVKA

SEQ ID NO: 8518 - protein, 37 aa, Artificial Sequence
  Non-cyclic GFR-binding peptide
  MOD_RES (1), (34), (36): Xaa is C or S
  MOD_RES (15), (16), (17), (18), (19): Xaa is A or G
  MOD_RES (20), (21), (22), (23): Xaa is A or G or is absent
XVPQALSAISILYLXXXXXXXXXLKNYQMIVRSXKXS

SEQ ID NO: 8519 - protein, 36 aa, Artificial Sequence
  Non-cyclic GFR-binding peptide
  MOD_RES (4), (4): Xaa is C or S
  MOD_RES (18), (19), (20), (21), (22): Xaa is A or G
  MOD_RES (23), (24), (25), (26): Xaa is A or G or is absent
KPTXAPTKLSATSVLYYXXXXXXXXXLRKHRNMVVR

SEQ ID NO: 8520 - protein, 36 aa, Artificial Sequence
  Non-cyclic GFR-binding peptide
  MOD_RES (5), (6): Xaa is C or S
IPKAXXVPTELSATSMLYYDENEKVVLRKHRDMVVE

SEQ ID NO: 8521 - protein, 37 aa, Artificial Sequence
  Non-cyclic GFR-binding peptide
  MOD_RES (3), (4), (37): Xaa is C or S
  MOD_RES (18), (19), (20), (21), (22): Xaa is A or G
  MOD_RES (23), (24), (25), (26): Xaa is A or G or is absent
SPXXVSQDLSAISILYLXXXXXXXXXLKNYQMIVKSX

SEQ ID NO: 8522 - protein, 35 aa, Artificial Sequence
  Non-cyclic GFR-binding peptide
  MOD_RES (2), (3): Xaa is C or S
  MOD_RES (17), (18), (19), (20), (21): Xaa is A or G
  MOD_RES (22), (23), (24), (25): Xaa is A or G or is absent
PXXAPTKLSATSVLYYXXXXXXXXXLRKHRNMVVR

SEQ ID NO: 8523 - protein, 42 aa, Artificial Sequence
  Non-cyclic GFR-binding peptide
  MOD_RES (5), (6), (39), (41): Xaa is C or S
  MOD_RES (20), (21), (22), (23), (24): Xaa is A or G
  MOD_RES (25), (26), (27), (28): Xaa is A or G or is absent
SASPXXVSQDLSAISILYLXXXXXXXXXLKNYQMIVKSXKXS

SEQ ID NO: 8524 - protein, 42 aa, Artificial Sequence
  Non-cyclic GFR-binding peptide
  MOD_RES (6), (7), (39), (41): Xaa is C or S
TVPKPXXAPTQLSATSVLYYDDSSNVILRKHRNMVVRAXGXH

SEQ ID NO: 8525 - protein, 32 aa, Artificial Sequence
  Non-cyclic GFR-binding peptide
  MOD_RES (14), (15), (16), (17), (18): Xaa is A or G
  MOD_RES (19), (20), (21), (22): Xaa is A or G or is absent
VSQDLNAISILYFXXXXXXXXXLKKYRMIVKS

SEQ ID NO: 8526 - protein, 43 aa, Artificial Sequence
  Non-cyclic GFR-binding peptide
  MOD_RES (6), (7), (42): Xaa is C or S
  MOD_RES (21), (22), (23), (24), (25): Xaa is A or G
  MOD_RES (26), (27), (28), (29): Xaa is A or G or is absent
KVGKAXXVPTKLSATSVLYYXXXXXXXXXLRKHREGMSVAEXG

SEQ ID NO: 8527 - protein, 35 aa, Artificial Sequence
  Non-cyclic GFR-binding peptide
  MOD_RES (4), (5): Xaa is C or S
PKPXXAPTQLSATSVLYYDDSSNVILRKHRNMVVR

SEQ ID NO: 8528 - protein, 37 aa, Artificial Sequence
  Non-cyclic GFR-binding peptide
  MOD_RES (2), (3), (35), (37): Xaa is C or S
AXXVPTELSPISMLYKDEYDKVVLKYHYEMVVEGXGX

SEQ ID NO: 8529 - protein, 40 aa, Artificial Sequence
  Non-cyclic GFR-binding peptide
  MOD_RES (3), (4), (38), (40): Xaa is C or S
  MOD_RES (18), (19), (20), (21), (22): Xaa is A or G
  MOD_RES (23), (24), (25), (26): Xaa is A or G or is absent
KAXXVPTELSATSMLYYXXXXXXXXXLRKHREMVVEGXGX

SEQ ID NO: 8530 - protein, 38 aa, Artificial Sequence
  Non-cyclic GFR-binding peptide
  MOD_RES (3), (4), (37): Xaa is C or S
  MOD_RES (18), (19), (20), (21), (22): Xaa is A or G
  MOD_RES (23), (24), (25), (26): Xaa is A or G or is absent
SPXXVPQDLSATSILYYXXXXXXXXXLRKHRMVVKSXK

SEQ ID NO: 8531 - protein, 38 aa, Artificial Sequence
  Non-cyclic GFR-binding peptide
  MOD_RES (1), (2), (35), (37): Xaa is C or S
  MOD_RES (16), (17), (18), (19), (20): Xaa is A or G
  MOD_RES (21), (22), (23), (24): Xaa is A or G or is absent
XXVPQALNAISILYFXXXXXXXXXLKKYRMIVRSXKXS

SEQ ID NO: 8532 - protein, 34 aa, Artificial Sequence
  Non-cyclic GFR-binding peptide
  MOD_RES (3), (4): Xaa is C or S
APXXVPQALSPISILYKVGRKPKVLKYHYMIVRS

SEQ ID NO: 8533 - protein, 34 aa, Artificial Sequence
  Non-cyclic GFR-binding peptide
  MOD_RES (1), (1): Xaa is C or S
  MOD_RES (15), (16), (17), (18), (19): Xaa is A or G
  MOD_RES (20), (21), (22), (23): Xaa is A or G or is absent
XVPTELSPISMLYKXXXXXXXXXLKYHYEMVVEG

SEQ ID NO: 8534 - protein, 34 aa, Artificial Sequence
  Non-cyclic GFR-binding peptide
PTQVQLSATSVLYYEIVRKKPIFLRKHRTLEDHL

SEQ ID NO: 8535 - protein, 37 aa, Artificial Sequence
  Non-cyclic GFR-binding peptide
  MOD_RES (35), (37): Xaa is C or S
  MOD_RES (14), (15), (16), (17), (18): Xaa is A or G
  MOD_RES (19), (20), (21), (22): Xaa is A or G or is absent
VPTKLNAISVLYFXXXXXXXXXLKKYREGMSVAEXGX

SEQ ID NO: 8536 - protein, 38 aa, Artificial Sequence
  Non-cyclic GFR-binding peptide
  MOD_RES (3), (4), (38): Xaa is C or S
  MOD_RES (18), (19), (20), (21), (22): Xaa is A or G
  MOD_RES (23), (24), (25), (26): Xaa is A or G or is absent
KAXXAPTKLNAISVLYFXXXXXXXXXLKKYRNMVVKAX

SEQ ID NO: 8537 - protein, 42 aa, Artificial Sequence
  Non-cyclic GFR-binding peptide
  MOD_RES (5), (6), (40), (42): Xaa is C or S
  MOD_RES (20), (21), (22), (23), (24): Xaa is A or G
  MOD_RES (25), (26), (27), (28): Xaa is A or G or is absent
VPKPXXAPTKLSPISVLYKXXXXXXXXXLKYHYNMVVRSXGX

SEQ ID NO: 8538 - protein, 38 aa, Artificial Sequence
  Non-cyclic GFR-binding peptide
  MOD_RES (5), (6): Xaa is C or S
  MOD_RES (20), (21), (22), (23), (24): Xaa is A or G
  MOD_RES (25), (26), (27), (28): Xaa is A or G or is absent
SASPXXVSQDLSAISILYLXXXXXXXXXLKNYQMIVKS

SEQ ID NO: 8539 - protein, 34 aa, Artificial Sequence
  Non-cyclic GFR-binding peptide
  MOD_RES (1), (2): Xaa is C or S
  MOD_RES (16), (17), (18), (19), (20): Xaa is A or G
  MOD_RES (21), (22), (23), (24): Xaa is A or G or is absent
XXVPQALSAISILYLXXXXXXXXXLKNYQMIVRS

SEQ ID NO: 8540 - protein, 38 aa, Artificial Sequence
  Non-cyclic GFR-binding peptide
  MOD_RES (4), (5), (38): Xaa is C or S
  MOD_RES (19), (20), (21), (22), (23): Xaa is A or G
  MOD_RES (24), (25), (26), (27): Xaa is A or G or is absent
AAPXXVPQALSATSILYYXXXXXXXXXLRKHRMIVRSX

SEQ ID NO: 8541 - protein, 39 aa, Artificial Sequence
  Non-cyclic GFR-binding peptide
  MOD_RES (4), (5), (39): Xaa is C or S
  MOD_RES (19), (20), (21), (22), (23): Xaa is A or G
  MOD_RES (24), (25), (26), (27): Xaa is A or G or is absent
PKPXXAPTQLSAISVLYLXXXXXXXXXLKNYQNMVVRAX

SEQ ID NO: 8542 - protein, 38 aa, Artificial Sequence
  Non-cyclic GFR-binding peptide
  MOD_RES (4), (5), (38): Xaa is C or S
  MOD_RES (19), (20), (21), (22), (23): Xaa is A or G
  MOD_RES (24), (25), (26), (27): Xaa is A or G or is absent
AAPXXVPQALSAISILYLXXXXXXXXXLKNYQMIVRSX

SEQ ID NO: 8543 - protein, 40 aa, Artificial Sequence
  Non-cyclic GFR-binding peptide
  MOD_RES (7), (7): Xaa is C or S
  MOD_RES (21), (22), (23), (24), (25): Xaa is A or G
  MOD_RES (26), (27), (28), (29): Xaa is A or G or is absent
HVTKPTXAPTKLSATSVLYYXXXXXXXXXLRKHRNMVVRS

SEQ ID NO: 8544 - protein, 36 aa, Artificial Sequence
  Non-cyclic GFR-binding peptide
  MOD_RES (4), (5), (36): Xaa is C or S
ASPXXVPQDLSPISILYKVGRTPKVLKYHYMVVKSX

SEQ ID NO: 8545 - protein, 34 aa, Artificial Sequence
  Non-cyclic GFR-binding peptide
  MOD_RES (1), (2), (34): Xaa is C or S
XXVPTELNAISMLYFDEYDKVVLKKYREMVVEGX

SEQ ID NO: 8546 - protein, 35 aa, Artificial Sequence
  Non-cyclic GFR-binding peptide
  MOD_RES (35), (35): Xaa is C or S
  MOD_RES (14), (15), (16), (17), (18): Xaa is A or G
  MOD_RES (19), (20), (21), (22): Xaa is A or G or is absent
VPTKLSAISVLYLXXXXXXXXXLKNYQEGMSVAEX

SEQ ID NO: 8547 - protein, 37 aa, Artificial Sequence
  Non-cyclic GFR-binding peptide
  MOD_RES (4), (5), (36): Xaa is C or S
ASPXXVPQDLNAISILYFVGRTPKVLKKYRMVVKSXK

SEQ ID NO: 8548 - protein, 38 aa, Artificial Sequence
  Non-cyclic GFR-binding peptide
  MOD_RES (3), (4), (38): Xaa is C or S
  MOD_RES (18), (19), (20), (21), (22): Xaa is A or G
  MOD_RES (23), (24), (25), (26): Xaa is A or G or is absent
KAXXAPTKLSAISVLYLXXXXXXXXXLKNYQNMVVKAX

SEQ ID NO: 8549 - protein, 36 aa, Artificial Sequence
  Non-cyclic GFR-binding peptide
  MOD_RES (1), (2), (35): Xaa is C or S
XXVPTKLNAISVLYFDDMGVPTLKKYREGMSVAEXG

SEQ ID NO: 8550 - protein, 34 aa, Artificial Sequence
  Non-cyclic GFR-binding peptide
  MOD_RES (33), (33): Xaa is C or S
  MOD_RES (14), (15), (16), (17), (18): Xaa is A or G
  MOD_RES (19), (20), (21), (22): Xaa is A or G or is absent
VPQALSATSILYYXXXXXXXXXLRKHRMIVRSXK

SEQ ID NO: 8551 - protein, 41 aa, Artificial Sequence
  Non-cyclic GFR-binding peptide
  MOD_RES (4), (5), (38), (40): Xaa is C or S
GKAXXVPTKLSATSVLYYDDMGVPTLRKHREGMSVAEXGXR

SEQ ID NO: 8552 - protein, 43 aa, Artificial Sequence
  Non-cyclic GFR-binding peptide
  MOD_RES (6), (7), (42): Xaa is C or S
  MOD_RES (21), (22), (23), (24), (25): Xaa is A or G
  MOD_RES (26), (27), (28), (29): Xaa is A or G or is absent
KVGKAXXVPTKLSAISVLYLXXXXXXXXXLKNYQEGMSVAEXG

SEQ ID NO: 8553 - protein, 42 aa, Artificial Sequence
  Non-cyclic GFR-binding peptide
  MOD_RES (2), (39), (41): Xaa is C or S
QXRPTQVQLSAISVLYLEIVRKKPIFLKNYQTLEDHLAXKXE

SEQ ID NO: 8554 - protein, 35 aa, Artificial Sequence
  Non-cyclic GFR-binding peptide
  MOD_RES (2), (3), (34): Xaa is C or S
PXXVPQDLSPISILYKVGRTPKVLKYHYMVVKSXK

SEQ ID NO: 8555 - protein, 36 aa, Artificial Sequence
  Non-cyclic GFR-binding peptide
  MOD_RES (1), (35): Xaa is C or S
  MOD_RES (15), (16), (17), (18), (19): Xaa is A or G
  MOD_RES (20), (21), (22), (23): Xaa is A or G or is absent
XVPTELSPISMLYKXXXXXXXXXLKYHYEMVVEGXG

SEQ ID NO: 8556 - protein, 32 aa, Artificial Sequence
  Non-cyclic GFR-binding peptide
  MOD_RES (1), (32): Xaa is C or S
XVSQDLNAISILYFIGKTPKILKKYRMIVKSX

SEQ ID NO: 8557 - protein, 36 aa, Artificial Sequence
  Non-cyclic GFR-binding peptide
  MOD_RES (2), (3), (35): Xaa is C or S
AXXVPTELSATSMLYYDENEKVVLRKHRDMVVEGXG

SEQ ID NO: 8558 - protein, 40 aa, Artificial Sequence
  Non-cyclic GFR-binding peptide
  MOD_RES (6), (38), (40): Xaa is C or S
VTKPTXAPTKLSAISVLYLDDSSNVILKNYQNMVVRSXGX

SEQ ID NO: 8559 - protein, 36 aa, Artificial Sequence
  Non-cyclic GFR-binding peptide
  MOD_RES (2), (3): Xaa is C or S
  MOD_RES (17), (18), (19), (20), (21): Xaa is A or G
  MOD_RES (22), (23), (24), (25): Xaa is A or G or is absent
AXXVPTELNAISMLYFXXXXXXXXXLKKYREMVVEG

SEQ ID NO: 8560 - protein, 33 aa, Artificial Sequence
  Non-cyclic GFR-binding peptide
  MOD_RES (33), (33): Xaa is C or S
  MOD_RES (14), (15), (16), (17), (18): Xaa is A or G
  MOD_RES (19), (20), (21), (22): Xaa is A or G or is absent
VPQDLSATSILYYXXXXXXXXXLRKHRMVVKSX

SEQ ID NO: 8561 - protein, 37 aa, Artificial Sequence
  Non-cyclic GFR-binding peptide
  MOD_RES (4), (5): Xaa is C or S
GKAXXVPTKLSATSVLYYDDMGVPTLRKHREGMSVAE

SEQ ID NO: 8562 - protein, 40 aa, Artificial Sequence
  Non-cyclic GFR-binding peptide
  MOD_RES (37), (39): Xaa is C or S
RPTQVQLSAISVLYLEIVRKKPIFLKNYQTLEDHLAXKXE

SEQ ID NO: 8563 - protein, 39 aa, Artificial Sequence
  Non-cyclic GFR-binding peptide
  MOD_RES (3), (4), (36), (38): Xaa is C or S
KAXXVPTELSATSMLYYDENEKVVLRKHRDMVVEGXGXR

SEQ ID NO: 8564 - protein, 39 aa, Artificial Sequence
  Non-cyclic GFR-binding peptide
  MOD_RES (6), (7), (39): Xaa is C or S
YVPKPXXAPTKLSATSVLYYDDSSNVILRKHRNMVVRSX

SEQ ID NO: 8565 - protein, 38 aa, Artificial Sequence
  Non-cyclic GFR-binding peptide
  MOD_RES (35), (37): Xaa is C or S
TQVQLSATSVLYYEIVRKKPIFLRKHRTLEDHLAXKXE

SEQ ID NO: 8566 - protein, 34 aa, Artificial Sequence
  Non-cyclic GFR-binding peptide
  MOD_RES (1), (2): Xaa is C or S
  MOD_RES (16), (17), (18), (19), (20): Xaa is A or G
  MOD_RES (21), (22), (23), (24): Xaa is A or G or is absent
XXVPTELSPISMLYKXXXXXXXXXLKYHYEMVVE

SEQ ID NO: 8567 - protein, 39 aa, Artificial Sequence
  Non-cyclic GFR-binding peptide
  MOD_RES (2), (3), (37), (39): Xaa is C or S
  MOD_RES (17), (18), (19), (20), (21): Xaa is A or G
  MOD_RES (22), (23), (24), (25): Xaa is A or G or is absent
AXXVPTELSATSMLYYXXXXXXXXXLRKHRDMVVEGXGX

SEQ ID NO: 8568 - protein, 32 aa, Artificial Sequence
  Non-cyclic GFR-binding peptide
  MOD_RES (1), (32): Xaa is C or S
XVPQDLSAISILYLVGRTPKVLKNYQMVVKSX

SEQ ID NO: 8569 - protein, 37 aa, Artificial Sequence
  Non-cyclic GFR-binding peptide
  MOD_RES (5), (6): Xaa is C or S
IPKAXXVPTELSATSMLYYDENEKVVLRKHRDMVVEG

SEQ ID NO: 8570 - protein, 38 aa, Artificial Sequence
  Non-cyclic GFR-binding peptide
  MOD_RES (1), (35), (37): Xaa is C or S
  MOD_RES (15), (16), (17), (18), (19): Xaa is A or G
  MOD_RES (20), (21), (22), (23): Xaa is A or G or is absent
XAPTKLSAISVLYLXXXXXXXXXLKNYQNMVVRSXGXH

SEQ ID NO: 8571 - protein, 39 aa, Artificial Sequence
  Non-cyclic GFR-binding peptide
  MOD_RES (3), (4), (37), (39): Xaa is C or S
KAXXVPTKLSAISVLYLDDMGVPTLKNYQEGMSVAEXGX

SEQ ID NO: 8572 - protein, 38 aa, Artificial Sequence
  Non-cyclic GFR-binding peptide
  MOD_RES (1), (2), (35), (37): Xaa is C or S
  MOD_RES (16), (17), (18), (19), (20): Xaa is A or G
  MOD_RES (21), (22), (23), (24): Xaa is A or G or is absent
XXVPQDLSAISILYLXXXXXXXXXLKNYQMVVKSXKXS

SEQ ID NO: 8573 - protein, 36 aa, Artificial Sequence
  Non-cyclic GFR-binding peptide
  MOD_RES (1), (2), (36): Xaa is C or S
  MOD_RES (16), (17), (18), (19), (20): Xaa is A or G
  MOD_RES (21), (22), (23), (24): Xaa is A or G or is absent
XXAPTKLSAISVLYLXXXXXXXXXLKNYQNMVVRSX

SEQ ID NO: 8574 - protein, 34 aa, Artificial Sequence
  Non-cyclic GFR-binding peptide
RPTQVQLSATSVLYYEIVRKKPIFLRKHRTLEDH

SEQ ID NO: 8575 - protein, 34 aa, Artificial Sequence
  Non-cyclic GFR-binding peptide
  MOD_RES (32), (34): Xaa is C or S
VPTELSATSMLYYDEYDKVVLRKHREMVVEGXGX

SEQ ID NO: 8576 - protein, 40 aa, Artificial Sequence
  Non-cyclic GFR-binding peptide
  MOD_RES (3), (4), (38), (40): Xaa is C or S
  MOD_RES (18), (19), (20), (21), (22): Xaa is A or G
  MOD_RES (23), (24), (25), (26): Xaa is A or G or is absent
KPXXAPTQLSATSVLYYXXXXXXXXXLRKHRNMVVRAXGX

SEQ ID NO: 8577 - protein, 38 aa, Artificial Sequence
  Non-cyclic GFR-binding peptide
  MOD_RES (2), (3), (36), (38): Xaa is C or S
  MOD_RES (17), (18), (19), (20), (21): Xaa is A or G
  MOD_RES (22), (23), (24), (25): Xaa is A or G or is absent
PXXVPQALSPISILYKXXXXXXXXXLKYHYMIVRSXKX

SEQ ID NO: 8578 - protein, 37 aa, Artificial Sequence
  Non-cyclic GFR-binding peptide
  MOD_RES (4), (4): Xaa is C or S
  MOD_RES (18), (19), (20), (21), (22): Xaa is A or G
  MOD_RES (23), (24), (25), (26): Xaa is A or G or is absent
KPTXAPTKLSPISVLYKXXXXXXXXXLKYHYNMVVRS

SEQ ID NO: 8579 - protein, 31 aa, Artificial Sequence
  Non-cyclic GFR-binding peptide
  MOD_RES (31), (31): Xaa is C or S
VSQDLSAISILYLIGKTPKILKNYQMIVKSX

SEQ ID NO: 8580 - protein, 36 aa, Artificial Sequence
  Non-cyclic GFR-binding peptide
  MOD_RES (2), (3), (35): Xaa is C or S
AXXAPTKLSAISVLYLDSSNNVILKNYQNMVVKAXG

SEQ ID NO: 8581 - protein, 39 aa, Artificial Sequence
  Non-cyclic GFR-binding peptide
  MOD_RES (6), (7), (39): Xaa is C or S
KIPKAXXVPTELSATSMLYYDENEKVVLRKHRDMVVEGX

SEQ ID NO: 8582 - protein, 34 aa, Artificial Sequence
  Non-cyclic GFR-binding peptide
  MOD_RES (31), (33): Xaa is C or S
VSQDLSAISILYLIGKTPKILKNYQMIVKSXKXS

SEQ ID NO: 8583 - protein, 30 aa, Artificial Sequence
  Non-cyclic GFR-binding peptide
VPQALNAISILYFVGRKPKVLKKYRMIVRS

SEQ ID NO: 8584 - protein, 38 aa, Artificial Sequence
  Non-cyclic GFR-binding peptide
  MOD_RES (5), (6), (37): Xaa is C or S
SASPXXVPQDLSAISILYLVGRTPKVLKNYQMVVKSXK

SEQ ID NO: 8585 - protein, 38 aa, Artificial Sequence
  Non-cyclic GFR-binding peptide
  MOD_RES (6), (7): Xaa is C or S
TVPKPXXAPTQLSPISVLYKDDSSNVILKYHYNMVVRA

SEQ ID NO: 8586 - protein, 38 aa, Artificial Sequence
  Non-cyclic GFR-binding peptide
  MOD_RES (4), (5), (36), (38): Xaa is C or S
ASPXXVSQDLSAISILYLIGKTPKILKNYQMIVKSXKX

SEQ ID NO: 8587 - protein, 31 aa, Artificial Sequence
  Non-cyclic GFR-binding peptide
APTKLSPISVLYKDDSSNVILKYHYNMVVRS

SEQ ID NO: 8588 - protein, 41 aa, Artificial Sequence
  Non-cyclic GFR-binding peptide
  MOD_RES (5), (6), (41): Xaa is C or S
  MOD_RES (20), (21), (22), (23), (24): Xaa is A or G
  MOD_RES (25), (26), (27), (28): Xaa is A or G or is absent
VGKAXXVPTKLSAISVLYLXXXXXXXXXLKNYQEGMSVAEX

SEQ ID NO: 8589 - protein, 35 aa, Artificial Sequence
  Non-cyclic GFR-binding peptide
  MOD_RES (3), (4), (35): Xaa is C or S
APXXVPQALSAISILYLVGRKPKVLKNYQMIVRSX

SEQ ID NO: 8590 - protein, 39 aa, Artificial Sequence
  Non-cyclic GFR-binding peptide
  MOD_RES (5), (6): Xaa is C or S
  MOD_RES (20), (21), (22), (23), (24): Xaa is A or G
  MOD_RES (25), (26), (27), (28): Xaa is A or G or is absent
VPKPXXAPTKLSAISVLYLXXXXXXXXXLKNYQNMVVRS

SEQ ID NO: 8591 - protein, 37 aa, Artificial Sequence
  Non-cyclic GFR-binding peptide
  MOD_RES (37), (37): Xaa is C or S
  MOD_RES (16), (17), (18), (19), (20): Xaa is A or G
  MOD_RES (21), (22), (23), (24): Xaa is A or G or is absent
RPTQVQLNAISVLYFXXXXXXXXXLKKYRTLEDHLAX

SEQ ID NO: 8592 - protein, 40 aa, Artificial Sequence
  Non-cyclic GFR-binding peptide
  MOD_RES (4), (5), (37), (39): Xaa is C or S
PKAXXVPTELSPISMLYKDENEKVVLKYHYDMVVEGXGXR

SEQ ID NO: 8593 - protein, 38 aa, Artificial Sequence
  Non-cyclic GFR-binding peptide
  MOD_RES (5), (6): Xaa is C or S
  MOD_RES (20), (21), (22), (23), (24): Xaa is A or G
  MOD_RES (25), (26), (27), (28): Xaa is A or G or is absent
IPKAXXVPTELSPISMLYKXXXXXXXXXLKYHYDMVVE

SEQ ID NO: 8594 - protein, 40 aa, Artificial Sequence
  Non-cyclic GFR-binding peptide
  MOD_RES (6), (40): Xaa is C or S
  MOD_RES (20), (21), (22), (23), (24): Xaa is A or G
  MOD_RES (25), (26), (27), (28): Xaa is A or G or is absent
VTKPTXAPTKLSPISVLYKXXXXXXXXXLKYHYNMVVRSX

SEQ ID NO: 8595 - protein, 36 aa, Artificial Sequence
  Non-cyclic GFR-binding peptide
  MOD_RES (35), (35): Xaa is C or S
TQVQLSAISVLYLEIVRKKPIFLKNYQTLEDHLAXK

SEQ ID NO: 8596 - protein, 38 aa, Artificial Sequence
  Non-cyclic GFR-binding peptide
  MOD_RES (2), (3), (35), (37): Xaa is C or S
PXXAPTQLSPISVLYKDDSSNVILKYHYNMVVRAXGXH

SEQ ID NO: 8597 - protein, 36 aa, Artificial Sequence
  Non-cyclic GFR-binding peptide
  MOD_RES (35), (35): Xaa is C or S
  MOD_RES (14), (15), (16), (17), (18): Xaa is A or G
  MOD_RES (19), (20), (21), (22): Xaa is A or G or is absent
VPTKLNAISVLYFXXXXXXXXXLKKYREGMSVAEXG

SEQ ID NO: 8598 - protein, 34 aa, Artificial Sequence
  Non-cyclic GFR-binding peptide
  MOD_RES (1), (33): Xaa is C or S
XAPTKLSATSVLYYDDSSNVILRKHRNMVVRSXG

SEQ ID NO: 8599 - protein, 36 aa, Artificial Sequence
  Non-cyclic GFR-binding peptide
  MOD_RES (3), (4): Xaa is C or S
  MOD_RES (18), (19), (20), (21), (22): Xaa is A or G
  MOD_RES (23), (24), (25), (26): Xaa is A or G or is absent
KPXXAPTKLSPISVLYKXXXXXXXXXLKYHYNMVVR

SEQ ID NO: 8600 - protein, 37 aa, Artificial Sequence
  Non-cyclic GFR-binding peptide
  MOD_RES (2), (3), (36): Xaa is C or S
  MOD_RES (17), (18), (19), (20), (21): Xaa is A or G
  MOD_RES (22), (23), (24), (25): Xaa is A or G or is absent
PXXVSQDLSAISILYLXXXXXXXXXLKNYQMIVKSXK

SEQ ID NO: 8601 - protein, 39 aa, Artificial Sequence
  Non-cyclic GFR-binding peptide
  MOD_RES (7), (39): Xaa is C or S
HVTKPTXAPTKLSPISVLYKDDSSNVILKYHYNMVVRSX

SEQ ID NO: 8602 - protein, 39 aa, Artificial Sequence
  Non-cyclic GFR-binding peptide
  MOD_RES (3), (4), (36), (38): Xaa is C or S
KAXXVPTELSPISMLYKDEYDKVVLKYHYEMVVEGXGXR

SEQ ID NO: 8603 - protein, 45 aa, Artificial Sequence
  Non-cyclic GFR-binding peptide
  MOD_RES (5), (42), (44): Xaa is C or S
RNVQXRPTQVQLSPISVLYKEIVRKKPIFLKYHYTLEDHLAXKXE

SEQ ID NO: 8604 - protein, 34 aa, Artificial Sequence
  Non-cyclic GFR-binding peptide
  MOD_RES (3), (4): Xaa is C or S
APXXVPQALSAISILYLVGRKPKVLKNYQMIVRS

SEQ ID NO: 8605 - protein, 41 aa, Artificial Sequence
  Non-cyclic GFR-binding peptide
  MOD_RES (5), (6), (39), (41): Xaa is C or S
  MOD_RES (20), (21), (22), (23), (24): Xaa is A or G
  MOD_RES (25), (26), (27), (28): Xaa is A or G or is absent
SASPXXVPQDLSAISILYLXXXXXXXXXLKNYQMVVKSXKX

SEQ ID NO: 8606 - protein, 36 aa, Artificial Sequence
  Non-cyclic GFR-binding peptide
  MOD_RES (3), (4), (35): Xaa is C or S
APXXVPQALNAISILYFVGRKPKVLKKYRMIVRSXK

SEQ ID NO: 8607 - protein, 37 aa, Artificial Sequence
  Non-cyclic GFR-binding peptide
  MOD_RES (1), (2), (34), (36): Xaa is C or S
XXAPTKLSATSVLYYDDSSNVILRKHRNMVVRSXGXH

SEQ ID NO: 8608 - protein, 36 aa, Artificial Sequence
  Non-cyclic GFR-binding peptide
  MOD_RES (1), (2), (34), (36): Xaa is C or S
XXAPTKLSPISVLYKDDSSNVILKYHYNMVVRSXGX

SEQ ID NO: 8609 - protein, 39 aa, Artificial Sequence
  Non-cyclic GFR-binding peptide
  MOD_RES (6), (7): Xaa is C or S
  MOD_RES (21), (22), (23), (24), (25): Xaa is A or G
  MOD_RES (26), (27), (28), (29): Xaa is A or G or is absent
ASAAPXXVPQALSAISILYLXXXXXXXXXLKNYQMIVRS

SEQ ID NO: 8610 - protein, 35 aa, Artificial Sequence
  Non-cyclic GFR-binding peptide
  MOD_RES (2), (3), (34): Xaa is C or S
PXXVSQDLNAISILYFIGKTPKILKKYRMIVKSXK

SEQ ID NO: 8611 - protein, 39 aa, Artificial Sequence
  Non-cyclic GFR-binding peptide
  MOD_RES (5), (6), (38): Xaa is C or S
VPKAXXAPTKLNAISVLYFDSSNNVILKKYRNMVVKAXG

SEQ ID NO: 8612 - protein, 36 aa, Artificial Sequence
  Non-cyclic GFR-binding peptide
  MOD_RES (1), (1): Xaa is C or S
  MOD_RES (17), (18), (19), (20), (21): Xaa is A or G
  MOD_RES (22), (23), (24), (25): Xaa is A or G or is absent
XRPTQVQLNAISVLYFXXXXXXXXXLKKYRTLEDHL

SEQ ID NO: 8613 - protein, 34 aa, Artificial Sequence
  Non-cyclic GFR-binding peptide
  MOD_RES (1), (1): Xaa is C or S
  MOD_RES (15), (16), (17), (18), (19): Xaa is A or G
  MOD_RES (20), (21), (22), (23): Xaa is A or G or is absent
XVPTELSPISMLYKXXXXXXXXXLKYHYDMVVEG

SEQ ID NO: 8614 - protein, 38 aa, Artificial Sequence
  Non-cyclic GFR-binding peptide
  MOD_RES (5), (6): Xaa is C or S
  MOD_RES (20), (21), (22), (23), (24): Xaa is A or G
  MOD_RES (25), (26), (27), (28): Xaa is A or G or is absent
SASPXXVSQDLSPISILYKXXXXXXXXXLKYHYMIVKS

SEQ ID NO: 8615 - protein, 37 aa, Artificial Sequence
  Non-cyclic GFR-binding peptide
  MOD_RES (5), (6): Xaa is C or S
VPKAXXAPTKLNAISVLYFDSSNNVILKKYRNMVVKA

SEQ ID NO: 8616 - protein, 38 aa, Artificial Sequence
  Non-cyclic GFR-binding peptide
  MOD_RES (5), (6): Xaa is C or S
  MOD_RES (20), (21), (22), (23), (24): Xaa is A or G
  MOD_RES (25), (26), (27), (28): Xaa is A or G or is absent
SAAPXXVPQALSPISILYKXXXXXXXXXLKYHYMIVRS

SEQ ID NO: 8617 - protein, 36 aa, Artificial Sequence
  Non-cyclic GFR-binding peptide
  MOD_RES (33), (35): Xaa is C or S
  MOD_RES (14), (15), (16), (17), (18): Xaa is A or G
  MOD_RES (19), (20), (21), (22): Xaa is A or G or is absent
VSQDLSATSILYYXXXXXXXXXLRKHRMIVKSXKXS

SEQ ID NO: 8618 - protein, 39 aa, Artificial Sequence
  Non-cyclic GFR-binding peptide
  MOD_RES (6), (7), (38): Xaa is C or S
ASASPXXVSQDLSPISILYKIGKTPKILKYHYMIVKSXK

SEQ ID NO: 8619 - protein, 32 aa, Artificial Sequence
  Non-cyclic GFR-binding peptide
TQVQLSAISVLYLEIVRKKPIFLKNYQTLEDH

SEQ ID NO: 8620 - protein, 35 aa, Artificial Sequence
  Non-cyclic GFR-binding peptide
  MOD_RES (1), (2), (34): Xaa is C or S
XXAPTQLSPISVLYKDDSSNVILKYHYNMVVRAXG

SEQ ID NO: 8621 - protein, 41 aa, Artificial Sequence
  Non-cyclic GFR-binding peptide
  MOD_RES (3), (4), (38), (40): Xaa is C or S
  MOD_RES (18), (19), (20), (21), (22): Xaa is A or G
  MOD_RES (23), (24), (25), (26): Xaa is A or G or is absent
KAXXVPTELNAISMLYFXXXXXXXXXLKKYRDMVVEGXGXR

SEQ ID NO: 8622 - protein, 37 aa, Artificial Sequence
  Non-cyclic GFR-binding peptide
  MOD_RES (6), (7): Xaa is C or S
AVPKAXXAPTKLNAISVLYFDSSNNVILKKYRNMVVK

SEQ ID NO: 8623 - protein, 41 aa, Artificial Sequence
  Non-cyclic GFR-binding peptide
  MOD_RES (4), (5), (39), (41): Xaa is C or S
  MOD_RES (19), (20), (21), (22), (23): Xaa is A or G
  MOD_RES (24), (25), (26), (27): Xaa is A or G or is absent
PKAXXVPTELSATSMLYYXXXXXXXXXLRKHREMVVEGXGX

SEQ ID NO: 8624 - protein, 36 aa, Artificial Sequence
  Non-cyclic GFR-binding peptide
  MOD_RES (5), (5): Xaa is C or S
TKPTXAPTKLSAISVLYLDDSSNVILKNYQNMVVRS

SEQ ID NO: 8625 - protein, 37 aa, Artificial Sequence
  Non-cyclic GFR-binding peptide
  MOD_RES (2), (3), (34), (36): Xaa is C or S
PXXVSQDLSATSILYYIGKTPKILRKHRMIVKSXKXS

SEQ ID NO: 8626 - protein, 34 aa, Artificial Sequence
  Non-cyclic GFR-binding peptide
  MOD_RES (2), (3): Xaa is C or S
PXXAPTQLSAISVLYLDDSSNVILKNYQNMVVRA

SEQ ID NO: 8627 - protein, 36 aa, Artificial Sequence
  Non-cyclic GFR-binding peptide
  MOD_RES (1), (2), (35): Xaa is C or S
  MOD_RES (16), (17), (18), (19), (20): Xaa is A or G
  MOD_RES (21), (22), (23), (24): Xaa is A or G or is absent
XXVSQDLSPISILYKXXXXXXXXXLKYHYMIVKSXK

SEQ ID NO: 8628 - protein, 40 aa, Artificial Sequence
  Non-cyclic GFR-binding peptide
  MOD_RES (2), (3), (37), (39): Xaa is C or S
  MOD_RES (17), (18), (19), (20), (21): Xaa is A or G
  MOD_RES (22), (23), (24), (25): Xaa is A or G or is absent
AXXVPTELNAISMLYFXXXXXXXXXLKKYREMVVEGXGXR

SEQ ID NO: 8629 - protein, 40 aa, Artificial Sequence
  Non-cyclic GFR-binding peptide
  MOD_RES (3), (4), (38), (40): Xaa is C or S
  MOD_RES (18), (19), (20), (21), (22): Xaa is A or G
  MOD_RES (23), (24), (25), (26): Xaa is A or G or is absent
KPXXAPTKLSAISVLYLXXXXXXXXXLKNYQNMVVRSXGX

SEQ ID NO: 8630 - protein, 40 aa, Artificial Sequence
  Non-cyclic GFR-binding peptide
  MOD_RES (6), (7), (39): Xaa is C or S
AVPKAXXAPTKLSPISVLYKDSSNNVILKYHYNMVVKAXG

SEQ ID NO: 8631 - protein, 32 aa, Artificial Sequence
  Non-cyclic GFR-binding peptide
  MOD_RES (1), (2): Xaa is C or S
XXAPTKLNAISVLYFDSSNNVILKKYRNMVVK

SEQ ID NO: 8632 - protein, 45 aa, Artificial Sequence
  Non-cyclic GFR-binding peptide
  MOD_RES (5), (42), (44): Xaa is C or S
  MOD_RES (21), (22), (23), (24), (25): Xaa is A or G
  MOD_RES (26), (27), (28), (29): Xaa is A or G or is absent
RNVQXRPTQVQLSPISVLYKXXXXXXXXXLKYHYTLEDHLAXKXE

SEQ ID NO: 8633 - protein, 34 aa, Artificial Sequence
  Non-cyclic GFR-binding peptide
  MOD_RES (34), (34): Xaa is C or S
  MOD_RES (14), (15), (16), (17), (18): Xaa is A or G
  MOD_RES (19), (20), (21), (22): Xaa is A or G or is absent
VPTELNAISMLYFXXXXXXXXXLKKYRDMVVEGX

SEQ ID NO: 8634 - protein, 37 aa, Artificial Sequence
  Non-cyclic GFR-binding peptide
  MOD_RES (2), (2): Xaa is C or S
QXRPTQVQLSPISVLYKEIVRKKPIFLKYHYTLEDHL

SEQ ID NO: 8635 - protein, 39 aa, Artificial Sequence
  Non-cyclic GFR-binding peptide
  MOD_RES (5), (6), (39): Xaa is C or S
  MOD_RES (20), (21), (22), (23), (24): Xaa is A or G
  MOD_RES (25), (26), (27), (28): Xaa is A or G or is absent
SASPXXVSQDLSATSILYYXXXXXXXXXLRKHRMIVKSX

SEQ ID NO: 8636 - protein, 43 aa, Artificial Sequence
  Non-cyclic GFR-binding peptide
  MOD_RES (6), (7), (40), (42): Xaa is C or S
  MOD_RES (21), (22), (23), (24), (25): Xaa is A or G
  MOD_RES (26), (27), (28), (29): Xaa is A or G or is absent
ASAAPXXVPQALNAISILYFXXXXXXXXXLKKYRMIVRSXKXS

SEQ ID NO: 8637 - protein, 41 aa, Artificial Sequence
  Non-cyclic GFR-binding peptide
  MOD_RES (6), (7), (38), (40): Xaa is C or S
ASAAPXXVPQALNAISILYFVGRKPKVLKKYRMIVRSXKXS

SEQ ID NO: 8638 - protein, 35 aa, Artificial Sequence
  Non-cyclic GFR-binding peptide
  MOD_RES (4), (5): Xaa is C or S
ASPXXVSQDLSAISILYLIGKTPKILKNYQMIVKS

SEQ ID NO: 8639 - protein, 35 aa, Artificial Sequence
  Non-cyclic GFR-binding peptide
  MOD_RES (1), (2), (34): Xaa is C or S
XXVPTELNAISMLYFDEYDKVVLKKYREMVVEGXG

SEQ ID NO: 8640 - protein, 36 aa, Artificial Sequence
  Non-cyclic GFR-binding peptide
  MOD_RES (1), (33), (35): Xaa is C or S
XAPTKLNAISVLYFDSSNNVILKKYRNMVVKAXGXH

SEQ ID NO: 8641 - protein, 42 aa, Artificial Sequence
  Non-cyclic GFR-binding peptide
  MOD_RES (7), (41): Xaa is C or S
  MOD_RES (21), (22), (23), (24), (25): Xaa is A or G
  MOD_RES (26), (27), (28), (29): Xaa is A or G or is absent
HVTKPTXAPTKLSPISVLYKXXXXXXXXXLKYHYNMVVRSXG

SEQ ID NO: 8642 - protein, 39 aa, Artificial Sequence
  Non-cyclic GFR-binding peptide
  MOD_RES (5), (6), (39): Xaa is C or S
  MOD_RES (20), (21), (22), (23), (24): Xaa is A or G
  MOD_RES (25), (26), (27), (28): Xaa is A or G or is absent
SASPXXVSQDLSAISILYLXXXXXXXXXLKNYQMIVKSX

SEQ ID NO: 8643 - protein, 38 aa, Artificial Sequence
  Non-cyclic GFR-binding peptide
  MOD_RES (36), (38): Xaa is C or S
  MOD_RES (15), (16), (17), (18), (19): Xaa is A or G
  MOD_RES (20), (21), (22), (23): Xaa is A or G or is absent
PTQVQLSPISVLYKXXXXXXXXXLKYHYTLEDHLAXKX

SEQ ID NO: 8644 - protein, 38 aa, Artificial Sequence
  Non-cyclic GFR-binding peptide
  MOD_RES (3), (4), (36), (38): Xaa is C or S
KAXXAPTKLSAISVLYLDSSNNVILKNYQNMVVKAXGX

SEQ ID NO: 8645 - protein, 35 aa, Artificial Sequence
  Non-cyclic GFR-binding peptide
  MOD_RES (1), (35): Xaa is C or S
  MOD_RES (15), (16), (17), (18), (19): Xaa is A or G
  MOD_RES (20), (21), (22), (23): Xaa is A or G or is absent
XAPTKLSAISVLYLXXXXXXXXXLKNYQNMVVKAX

SEQ ID NO: 8646 - protein, 37 aa, Artificial Sequence
  Non-cyclic GFR-binding peptide
  MOD_RES (4), (5), (36): Xaa is C or S
ASPXXVSQDLSATSILYYIGKTPKILRKHRMIVKSXK

SEQ ID NO: 8647 - protein, 33 aa, Artificial Sequence
  Non-cyclic GFR-binding peptide
  MOD_RES (1), (2), (33): Xaa is C or S
XXVSQDLSATSILYYIGKTPKILRKHRMIVKSX

SEQ ID NO: 8648 - protein, 33 aa, Artificial Sequence
  Non-cyclic GFR-binding peptide
  MOD_RES (33), (33): Xaa is C or S
  MOD_RES (14), (15), (16), (17), (18): Xaa is A or G
  MOD_RES (19), (20), (21), (22): Xaa is A or G or is absent
VPQALSAISILYLXXXXXXXXXLKNYQMIVRSX

SEQ ID NO: 8649 - protein, 44 aa, Artificial Sequence
  Non-cyclic GFR-binding peptide
  MOD_RES (6), (7), (41), (43): Xaa is C or S
  MOD_RES (21), (22), (23), (24), (25): Xaa is A or G
  MOD_RES (26), (27), (28), (29): Xaa is A or G or is absent
KIPKAXXVPTELSPISMLYKXXXXXXXXXLKYHYDMVVEGXGXR

SEQ ID NO: 8650 - protein, 38 aa, Artificial Sequence
  Non-cyclic GFR-binding peptide
  MOD_RES (1), (35), (37): Xaa is C or S
  MOD_RES (15), (16), (17), (18), (19): Xaa is A or G
  MOD_RES (20), (21), (22), (23): Xaa is A or G or is absent
XAPTKLSATSVLYYXXXXXXXXXLRKHRNMVVRSXGXH

SEQ ID NO: 8651 - protein, 34 aa, Artificial Sequence
  Non-cyclic GFR-binding peptide
  MOD_RES (33), (33): Xaa is C or S
  MOD_RES (14), (15), (16), (17), (18): Xaa is A or G
  MOD_RES (19), (20), (21), (22): Xaa is A or G or is absent
VPQDLSPISILYKXXXXXXXXXLKYHYMVVKSXK

SEQ ID NO: 8652 - protein, 31 aa, Artificial Sequence
  Non-cyclic GFR-binding peptide
VPTELSPISMLYKDENEKVVLKYHYDMVVEG

SEQ ID NO: 8653 - protein, 32 aa, Artificial Sequence
  Non-cyclic GFR-binding peptide
  MOD_RES (31), (31): Xaa is C or S
VPQDLSAISILYLVGRTPKVLKNYQMVVKSXK

SEQ ID NO: 8654 - protein, 39 aa, Artificial Sequence
  Non-cyclic GFR-binding peptide
  MOD_RES (2), (3), (36), (38): Xaa is C or S
  MOD_RES (17), (18), (19), (20), (21): Xaa is A or G
  MOD_RES (22), (23), (24), (25): Xaa is A or G or is absent
PXXVSQDLSATSILYYXXXXXXXXXLRKHRMIVKSXKXS

SEQ ID NO: 8655 - protein, 39 aa, Artificial Sequence
  Non-cyclic GFR-binding peptide
  MOD_RES (2), (3), (36), (38): Xaa is C or S
  MOD_RES (17), (18), (19), (20), (21): Xaa is A or G
  MOD_RES (22), (23), (24), (25): Xaa is A or G or is absent
PXXVPQALNAISILYFXXXXXXXXXLKKYRMIVRSXKXS

SEQ ID NO: 8656 - protein, 33 aa, Artificial Sequence
  Non-cyclic GFR-binding peptide
  MOD_RES (33), (33): Xaa is C or S
  MOD_RES (14), (15), (16), (17), (18): Xaa is A or G
  MOD_RES (19), (20), (21), (22): Xaa is A or G or is absent
VPQALSATSILYYXXXXXXXXXLRKHRMIVRSX

SEQ ID NO: 8657 - protein, 36 aa, Artificial Sequence
  Non-cyclic GFR-binding peptide
  MOD_RES (3), (4), (35): Xaa is C or S
APXXVPQALSPISILYKVGRKPKVLKYHYMIVRSXK

SEQ ID NO: 8658 - protein, 38 aa, Artificial Sequence
  Non-cyclic GFR-binding peptide
  MOD_RES (3), (37): Xaa is C or S
  MOD_RES (17), (18), (19), (20), (21): Xaa is A or G
  MOD_RES (22), (23), (24), (25): Xaa is A or G or is absent
PTXAPTKLSAISVLYLXXXXXXXXXLKNYQNMVVRSXG

SEQ ID NO: 8659 - protein, 42 aa, Artificial Sequence
  Non-cyclic GFR-binding peptide
  MOD_RES (2), (39), (41): Xaa is C or S
QXRPTQVQLNAISVLYFEIVRKKPIFLKKYRTLEDHLAXKXE

SEQ ID NO: 8660 - protein, 39 aa, Artificial Sequence
  Non-cyclic GFR-binding peptide
  MOD_RES (4), (5), (36), (38): Xaa is C or S
ASPXXVPQDLSATSILYYVGRTPKVLRKHRMVVKSXKXS

SEQ ID NO: 8661 - protein, 36 aa, Artificial Sequence
  Non-cyclic GFR-binding peptide
  MOD_RES (2), (3): Xaa is C or S
  MOD_RES (17), (18), (19), (20), (21): Xaa is A or G
  MOD_RES (22), (23), (24), (25): Xaa is A or G or is absent
PXXAPTQLSPISVLYKXXXXXXXXXLKYHYNMVVRA

SEQ ID NO: 8662 - protein, 30 aa, Artificial Sequence
  Non-cyclic GFR-binding peptide
VPTELSPISMLYKDENEKVVLKYHYDMVVE

SEQ ID NO: 8663 - protein, 39 aa, Artificial Sequence
  Non-cyclic GFR-binding peptide
  MOD_RES (36), (38): Xaa is C or S
  MOD_RES (15), (16), (17), (18), (19): Xaa is A or G
  MOD_RES (20), (21), (22), (23): Xaa is A or G or is absent
PTQVQLSAISVLYLXXXXXXXXXLKNYQTLEDHLAXKXE

SEQ ID NO: 8664 - protein, 38 aa, Artificial Sequence
  Non-cyclic GFR-binding peptide
  MOD_RES (6), (7): Xaa is C or S
SIPKAXXVPTELNAISMLYFDEYDKVVLKKYREMVVEG

SEQ ID NO: 8665 - protein, 40 aa, Artificial Sequence
  Non-cyclic GFR-binding peptide
  MOD_RES (5), (6), (37), (39): Xaa is C or S
SASPXXVSQDLNAISILYFIGKTPKILKKYRMIVKSXKXS

SEQ ID NO: 8666 - protein, 37 aa, Artificial Sequence
  Non-cyclic GFR-binding peptide
  MOD_RES (4), (36): Xaa is C or S
KPTXAPTKLSAISVLYLDDSSNVILKNYQNMVVRSXG

SEQ ID NO: 8667 - protein, 41 aa, Artificial Sequence
  Non-cyclic GFR-binding peptide
  MOD_RES (3), (40): Xaa is C or S
VQXRPTQVQLSPISVLYKEIVRKKPIFLKYHYTLEDHLAXK

SEQ ID NO: 8668 - protein, 36 aa, Artificial Sequence
  Non-cyclic GFR-binding peptide
  MOD_RES (1), (34), (36): Xaa is C or S
  MOD_RES (15), (16), (17), (18), (19): Xaa is A or G
  MOD_RES (20), (21), (22), (23): Xaa is A or G or is absent
XVPQDLSATSILYYXXXXXXXXXLRKHRMVVKSXKX

SEQ ID NO: 8669 - protein, 39 aa, Artificial Sequence
  Non-cyclic GFR-binding peptide
  MOD_RES (2), (39): Xaa is C or S
QXRPTQVQLSAISVLYLEIVRKKPIFLKNYQTLEDHLAX

SEQ ID NO: 8670 - protein, 33 aa, Artificial Sequence
  Non-cyclic GFR-binding peptide
  MOD_RES (3), (3): Xaa is C or S
PTXAPTKLSATSVLYYDDSSNVILRKHRNMVVR

SEQ ID NO: 8671 - protein, 34 aa, Artificial Sequence
  Non-cyclic GFR-binding peptide
  MOD_RES (1), (33): Xaa is C or S
XVPTELSPISMLYKDENEKVVLKYHYDMVVEGXG

SEQ ID NO: 8672 - protein, 39 aa, Artificial Sequence
  Non-cyclic GFR-binding peptide
  MOD_RES (6), (7), (38): Xaa is C or S
ASASPXXVSQDLNAISILYFIGKTPKILKKYRMIVKSXK

SEQ ID NO: 8673 - protein, 38 aa, Artificial Sequence
  Non-cyclic GFR-binding peptide
  MOD_RES (35), (37): Xaa is C or S
  MOD_RES (14), (15), (16), (17), (18): Xaa is A or G
  MOD_RES (19), (20), (21), (22): Xaa is A or G or is absent
TQVQLSATSVLYYXXXXXXXXXLRKHRTLEDHLAXKXE

SEQ ID NO: 8674 - protein, 37 aa, Artificial Sequence
  Non-cyclic GFR-binding peptide
  MOD_RES (1), (2), (35), (37): Xaa is C or S
XXVPTKLNAISVLYFDDMGVPTLKKYREGMSVAEXGX

SEQ ID NO: 8675 - protein, 41 aa, Artificial Sequence
  Non-cyclic GFR-binding peptide
  MOD_RES (4), (5), (38), (40): Xaa is C or S
  MOD_RES (19), (20), (21), (22), (23): Xaa is A or G
  MOD_RES (24), (25), (26), (27): Xaa is A or G or is absent
ASPXXVPQDLSAISILYLXXXXXXXXXLKNYQMVVKSXKXS

SEQ ID NO: 8676 - protein, 34 aa, Artificial Sequence
  Non-cyclic GFR-binding peptide
  MOD_RES (34), (34): Xaa is C or S
  MOD_RES (14), (15), (16), (17), (18): Xaa is A or G
  MOD_RES (19), (20), (21), (22): Xaa is A or G or is absent
VPTELSATSMLYYXXXXXXXXXLRKHREMVVEGX

SEQ ID NO: 8677 - protein, 39 aa, Artificial Sequence
  Non-cyclic GFR-binding peptide
  MOD_RES (3), (3): Xaa is C or S
  MOD_RES (19), (20), (21), (22), (23): Xaa is A or G
  MOD_RES (24), (25), (26), (27): Xaa is A or G or is absent
VQXRPTQVQLSATSVLYYXXXXXXXXXLRKHRTLEDHLA

SEQ ID NO: 8678 - protein, 40 aa, Artificial Sequence
  Non-cyclic GFR-binding peptide
  MOD_RES (6), (7), (40): Xaa is C or S
KVGKAXXVPTKLNAISVLYFDDMGVPTLKKYREGMSVAEX

SEQ ID NO: 8679 - protein, 40 aa, Artificial Sequence
  Non-cyclic GFR-binding peptide
  MOD_RES (3), (40): Xaa is C or S
VQXRPTQVQLNAISVLYFEIVRKKPIFLKKYRTLEDHLAX

SEQ ID NO: 8680 - protein, 37 aa, Artificial Sequence
  Non-cyclic GFR-binding peptide
  MOD_RES (1), (2), (37): Xaa is C or S
  MOD_RES (16), (17), (18), (19), (20): Xaa is A or G
  MOD_RES (21), (22), (23), (24): Xaa is A or G or is absent
XXVPTKLNAISVLYFXXXXXXXXXLKKYREGMSVAEX

SEQ ID NO: 8681 - protein, 32 aa, Artificial Sequence
  Non-cyclic GFR-binding peptide
  MOD_RES (1), (1): Xaa is C or S
XAPTKLNAISVLYFDSSNNVILKKYRNMVVKA

SEQ ID NO: 8682 - protein, 39 aa, Artificial Sequence
  Non-cyclic GFR-binding peptide
  MOD_RES (6), (7): Xaa is C or S
  MOD_RES (21), (22), (23), (24), (25): Xaa is A or G
  MOD_RES (26), (27), (28), (29): Xaa is A or G or is absent
SIPKAXXVPTELSPISMLYKXXXXXXXXXLKYHYEMVVE

SEQ ID NO: 8683 - protein, 38 aa, Artificial Sequence
  Non-cyclic GFR-binding peptide
  MOD_RES (2), (2): Xaa is C or S
QXRPTQVQLSPISVLYKEIVRKKPIFLKYHYTLEDHLA

SEQ ID NO: 8684 - protein, 34 aa, Artificial Sequence
  Non-cyclic GFR-binding peptide
  MOD_RES (1), (32), (34): Xaa is C or S
XVPQALNAISILYFVGRKPKVLKKYRMIVRSXKX

SEQ ID NO: 8685 - protein, 40 aa, Artificial Sequence
  Non-cyclic GFR-binding peptide
  MOD_RES (5), (5): Xaa is C or S
RNVQXRPTQVQLNAISVLYFEIVRKKPIFLKKYRTLEDHL

SEQ ID NO: 8686 - protein, 40 aa, Artificial Sequence
  Non-cyclic GFR-binding peptide
  MOD_RES (5), (6), (39): Xaa is C or S
  MOD_RES (20), (21), (22), (23), (24): Xaa is A or G
  MOD_RES (25), (26), (27), (28): Xaa is A or G or is absent
SAAPXXVPQALNAISILYFXXXXXXXXXLKKYRMIVRSXK

SEQ ID NO: 8687 - protein, 32 aa, Artificial Sequence
  Non-cyclic GFR-binding peptide
  MOD_RES (2), (2): Xaa is C or S
TXAPTKLSATSVLYYDDSSNVILRKHRNMVVR

SEQ ID NO: 8688 - protein, 36 aa, Artificial Sequence
  Non-cyclic GFR-binding peptide
  MOD_RES (1), (33), (35): Xaa is C or S
XAPTKLSPISVLYKDSSNNVILKYHYNMVVKAXGXH

SEQ ID NO: 8689 - protein, 41 aa, Artificial Sequence
  Non-cyclic GFR-binding peptide
  MOD_RES (3), (4), (39), (41): Xaa is C or S
  MOD_RES (18), (19), (20), (21), (22): Xaa is A or G
  MOD_RES (23), (24), (25), (26): Xaa is A or G or is absent
KAXXVPTKLSAISVLYLXXXXXXXXXLKNYQEGMSVAEXGX

SEQ ID NO: 8690 - protein, 37 aa, Artificial Sequence
  Non-cyclic GFR-binding peptide
  MOD_RES (3), (4), (36): Xaa is C or S
KAXXVPTELSATSMLYYDEYDKVVLRKHREMVVEGXG

SEQ ID NO: 8691 - protein, 36 aa, Artificial Sequence
  Non-cyclic GFR-binding peptide
  MOD_RES (4), (5), (36): Xaa is C or S
ASPXXVPQDLSATSILYYVGRTPKVLRKHRMVVKSX

SEQ ID NO: 8692 - protein, 37 aa, Artificial Sequence
  Non-cyclic GFR-binding peptide
  MOD_RES (2), (3), (37): Xaa is C or S
  MOD_RES (17), (18), (19), (20), (21): Xaa is A or G
  MOD_RES (22), (23), (24), (25): Xaa is A or G or is absent
AXXVPTELSPISMLYKXXXXXXXXXLKYHYDMVVEGX

SEQ ID NO: 8693 - protein, 36 aa, Artificial Sequence
  Non-cyclic GFR-binding peptide
  MOD_RES (1), (35): Xaa is C or S
  MOD_RES (15), (16), (17), (18), (19): Xaa is A or G
  MOD_RES (20), (21), (22), (23): Xaa is A or G or is absent
XVPTELSPISMLYKXXXXXXXXXLKYHYDMVVEGXG

SEQ ID NO: 8694 - protein, 33 aa, Artificial Sequence
  Non-cyclic GFR-binding peptide
  MOD_RES (14), (15), (16), (17), (18): Xaa is A or G
  MOD_RES (19), (20), (21), (22): Xaa is A or G or is absent
VPTELSPISMLYKXXXXXXXXXLKYHYDMVVEG

SEQ ID NO: 8695 - protein, 36 aa, Artificial Sequence
  Non-cyclic GFR-binding peptide
  MOD_RES (33), (35): Xaa is C or S
  MOD_RES (14), (15), (16), (17), (18): Xaa is A or G
  MOD_RES (19), (20), (21), (22): Xaa is A or G or is absent
VPQDLSAISILYLXXXXXXXXXLKNYQMVVKSXKXS

SEQ ID NO: 8696 - protein, 33 aa, Artificial Sequence
  Non-cyclic GFR-binding peptide
  MOD_RES (1), (1): Xaa is C or S
  MOD_RES (15), (16), (17), (18), (19): Xaa is A or G
  MOD_RES (20), (21), (22), (23): Xaa is A or G or is absent
XVSQDLNAISILYFXXXXXXXXXLKKYRMIVKS

SEQ ID NO: 8697 - protein, 42 aa, Artificial Sequence
  Non-cyclic GFR-binding peptide
  MOD_RES (5), (6), (39), (41): Xaa is C or S
VGKAXXVPTKLSATSVLYYDDMGVPTLRKHREGMSVAEXGXR

SEQ ID NO: 8698 - protein, 40 aa, Artificial Sequence
  Non-cyclic GFR-binding peptide
  MOD_RES (2), (39): Xaa is C or S
QXRPTQVQLSAISVLYLEIVRKKPIFLKNYQTLEDHLAXK

SEQ ID NO: 8699 - protein, 38 aa, Artificial Sequence
  Non-cyclic GFR-binding peptide
  MOD_RES (3), (3): Xaa is C or S
VQXRPTQVQLNAISVLYFEIVRKKPIFLKKYRTLEDHL

SEQ ID NO: 8700 - protein, 41 aa, Artificial Sequence
  Non-cyclic GFR-binding peptide
  MOD_RES (3), (4), (38), (40): Xaa is C or S
  MOD_RES (18), (19), (20), (21), (22): Xaa is A or G
  MOD_RES (23), (24), (25), (26): Xaa is A or G or is absent
KPXXAPTQLSAISVLYLXXXXXXXXXLKNYQNMVVRAXGXH

SEQ ID NO: 8701 - protein, 38 aa, Artificial Sequence
  Non-cyclic GFR-binding peptide
  MOD_RES (4), (5), (37): Xaa is C or S
PKAXXVPTELNAISMLYFDENEKVVLKKYRDMVVEGXG

SEQ ID NO: 8702 - protein, 38 aa, Artificial Sequence
  Non-cyclic GFR-binding peptide
  MOD_RES (4), (5), (38): Xaa is C or S
  MOD_RES (19), (20), (21), (22), (23): Xaa is A or G
  MOD_RES (24), (25), (26), (27): Xaa is A or G or is absent
ASPXXVPQDLSPISILYKXXXXXXXXXLKYHYMVVKSX

SEQ ID NO: 8703 - protein, 34 aa, Artificial Sequence
  Non-cyclic GFR-binding peptide
  MOD_RES (3), (4): Xaa is C or S
KAXXAPTKLNAISVLYFDSSNNVILKKYRNMVVK

SEQ ID NO: 8704 - protein, 41 aa, Artificial Sequence
  Non-cyclic GFR-binding peptide
  MOD_RES (6), (7), (41): Xaa is C or S
  MOD_RES (21), (22), (23), (24), (25): Xaa is A or G
  MOD_RES (26), (27), (28), (29): Xaa is A or G or is absent
KIPKAXXVPTELNAISMLYFXXXXXXXXXLKKYRDMVVEGX

SEQ ID NO: 8705 - protein, 40 aa, Artificial Sequence
  Non-cyclic GFR-binding peptide
  MOD_RES (6), (7), (40): Xaa is C or S
  MOD_RES (21), (22), (23), (24), (25): Xaa is A or G
  MOD_RES (26), (27), (28), (29): Xaa is A or G or is absent
ASASPXXVPQDLSATSILYYXXXXXXXXXLRKHRMVVKSX

SEQ ID NO: 8706 - protein, 38 aa, Artificial Sequence
  Non-cyclic GFR-binding peptide
  MOD_RES (6), (7): Xaa is C or S
AVPKAXXAPTKLSPISVLYKDSSNNVILKYHYNMVVKA

SEQ ID NO: 8707 - protein, 32 aa, Artificial Sequence
  Non-cyclic GFR-binding peptide
  MOD_RES (31), (31): Xaa is C or S
VSQDLSPISILYKIGKTPKILKYHYMIVKSXK

SEQ ID NO: 8708 - protein, 39 aa, Artificial Sequence
  Non-cyclic GFR-binding peptide
  MOD_RES (5), (6), (39): Xaa is C or S
VGKAXXVPTKLNAISVLYFDDMGVPTLKKYREGMSVAEX

SEQ ID NO: 8709 - protein, 35 aa, Artificial Sequence
  Non-cyclic GFR-binding peptide
  MOD_RES (1), (2), (34): Xaa is C or S
XXAPTKLSAISVLYLDDSSNVILKNYQNMVVRSXG

SEQ ID NO: 8710 - protein, 34 aa, Artificial Sequence
  Non-cyclic GFR-binding peptide
  MOD_RES (32), (34): Xaa is C or S
VPTELSATSMLYYDENEKVVLRKHRDMVVEGXGX

SEQ ID NO: 8711 - protein, 30 aa, Artificial Sequence
  Non-cyclic GFR-binding peptide
VPQALSPISILYKVGRKPKVLKYHYMIVRS

SEQ ID NO: 8712 - protein, 37 aa, Artificial Sequence
  Non-cyclic GFR-binding peptide
  MOD_RES (2), (3), (35), (37): Xaa is C or S
AXXVPTELSPISMLYKDENEKVVLKYHYDMVVEGXGX

SEQ ID NO: 8713 - protein, 36 aa, Artificial Sequence
  Non-cyclic GFR-binding peptide
  MOD_RES (1), (34), (36): Xaa is C or S
  MOD_RES (15), (16), (17), (18), (19): Xaa is A or G
  MOD_RES (20), (21), (22), (23): Xaa is A or G or is absent
XVPQDLSAISILYLXXXXXXXXXLKNYQMVVKSXKX

SEQ ID NO: 8714 - protein, 36 aa, Artificial Sequence
  Non-cyclic GFR-binding peptide
  MOD_RES (1), (35): Xaa is C or S
  MOD_RES (15), (16), (17), (18), (19): Xaa is A or G
  MOD_RES (20), (21), (22), (23): Xaa is A or G or is absent
XAPTQLSPISVLYKXXXXXXXXXLKYHYNMVVRAXG

SEQ ID NO: 8715 - protein, 40 aa, Artificial Sequence
  Non-cyclic GFR-binding peptide
  MOD_RES (5), (6), (40): Xaa is C or S
  MOD_RES (20), (21), (22), (23), (24): Xaa is A or G
  MOD_RES (25), (26), (27), (28): Xaa is A or G or is absent
VPKAXXAPTKLNAISVLYFXXXXXXXXXLKKYRNMVVKAX

SEQ ID NO: 8716 - protein, 32 aa, Artificial Sequence
  Non-cyclic GFR-binding peptide
  MOD_RES (14), (15), (16), (17), (18): Xaa is A or G
  MOD_RES (19), (20), (21), (22): Xaa is A or G or is absent
VPQALNAISILYFXXXXXXXXXLKKYRMIVRS

SEQ ID NO: 8717 - protein, 36 aa, Artificial Sequence
  Non-cyclic GFR-binding peptide
  MOD_RES (6), (6): Xaa is C or S
VTKPTXAPTKLSAISVLYLDDSSNVILKNYQNMVVR

SEQ ID NO: 8718 - protein, 39 aa, Artificial Sequence
  Non-cyclic GFR-binding peptide
  MOD_RES (3), (3): Xaa is C or S
  MOD_RES (19), (20), (21), (22), (23): Xaa is A or G
  MOD_RES (24), (25), (26), (27): Xaa is A or G or is absent
VQXRPTQVQLSAISVLYLXXXXXXXXXLKNYQTLEDHLA

SEQ ID NO: 8719 - protein, 42 aa, Artificial Sequence
  Non-cyclic GFR-binding peptide
  MOD_RES (6), (7), (40), (42): Xaa is C or S
  MOD_RES (21), (22), (23), (24), (25): Xaa is A or G
  MOD_RES (26), (27), (28), (29): Xaa is A or G or is absent
ASASPXXVSQDLNAISILYFXXXXXXXXXLKKYRMIVKSXKX

SEQ ID NO: 8720 - protein, 40 aa, Artificial Sequence
  Non-cyclic GFR-binding peptide
  MOD_RES (6), (7), (40): Xaa is C or S
  MOD_RES (21), (22), (23), (24), (25): Xaa is A or G
  MOD_RES (26), (27), (28), (29): Xaa is A or G or is absent
ASASPXXVPQDLSAISILYLXXXXXXXXXLKNYQMVVKSX

SEQ ID NO: 8721 - protein, 40 aa, Artificial Sequence
  Non-cyclic GFR-binding peptide
  MOD_RES (5), (5): Xaa is C or S
RNVQXRPTQVQLSAISVLYLEIVRKKPIFLKNYQTLEDHL

SEQ ID NO: 8722 - protein, 37 aa, Artificial Sequence
  Non-cyclic GFR-binding peptide
  MOD_RES (4), (5), (37): Xaa is C or S
PKAXXVPTELSPISMLYKDENEKVVLKYHYDMVVEGX

SEQ ID NO: 8723 - protein, 33 aa, Artificial Sequence
  Non-cyclic GFR-binding peptide
  MOD_RES (1), (2): Xaa is C or S
XXVPTELSPISMLYKDEYDKVVLKYHYEMVVEG

SEQ ID NO: 8724 - protein, 39 aa, Artificial Sequence
  Non-cyclic GFR-binding peptide
  MOD_RES (4), (5), (37), (39): Xaa is C or S
PKPXXAPTKLSPISVLYKDDSSNVILKYHYNMVVRSXGX

SEQ ID NO: 8725 - protein, 40 aa, Artificial Sequence
  Non-cyclic GFR-binding peptide
  MOD_RES (5), (39): Xaa is C or S
  MOD_RES (19), (20), (21), (22), (23): Xaa is A or G
  MOD_RES (24), (25), (26), (27): Xaa is A or G or is absent
TKPTXAPTKLSATSVLYYXXXXXXXXXLRKHRNMVVRSXG

SEQ ID NO: 8726 - protein, 35 aa, Artificial Sequence
  Non-cyclic GFR-binding peptide
  MOD_RES (2), (3): Xaa is C or S
  MOD_RES (17), (18), (19), (20), (21): Xaa is A or G
  MOD_RES (22), (23), (24), (25): Xaa is A or G or is absent
PXXVSQDLSPISILYKXXXXXXXXXLKYHYMIVKS

SEQ ID NO: 8727 - protein, 36 aa, Artificial Sequence
  Non-cyclic GFR-binding peptide
  MOD_RES (3), (4), (36): Xaa is C or S
KAXXVPTELSPISMLYKDENEKVVLKYHYDMVVEGX

SEQ ID NO: 8728 - protein, 35 aa, Artificial Sequence
  Non-cyclic GFR-binding peptide
  MOD_RES (32), (34): Xaa is C or S
VPTELSATSMLYYDEYDKVVLRKHREMVVEGXGXR

SEQ ID NO: 8729 - protein, 36 aa, Artificial Sequence
  Non-cyclic GFR-binding peptide
  MOD_RES (35), (35): Xaa is C or S
  MOD_RES (14), (15), (16), (17), (18): Xaa is A or G
  MOD_RES (19), (20), (21), (22): Xaa is A or G or is absent
TQVQLSAISVLYLXXXXXXXXXLKNYQTLEDHLAXK

SEQ ID NO: 8730 - protein, 41 aa, Artificial Sequence
  Non-cyclic GFR-binding peptide
  MOD_RES (5), (6), (40): Xaa is C or S
  MOD_RES (20), (21), (22), (23), (24): Xaa is A or G
  MOD_RES (25), (26), (27), (28): Xaa is A or G or is absent
VPKPXXAPTKLSPISVLYKXXXXXXXXXLKYHYNMVVRSXG

SEQ ID NO: 8731 - protein, 35 aa, Artificial Sequence
  Non-cyclic GFR-binding peptide
  MOD_RES (4), (5): Xaa is C or S
ASPXXVSQDLSATSILYYIGKTPKILRKHRMIVKS

SEQ ID NO: 8732 - protein, 43 aa, Artificial Sequence
  Non-cyclic GFR-binding peptide
  MOD_RES (6), (7), (40), (42): Xaa is C or S
KVGKAXXVPTKLSAISVLYLDDMGVPTLKNYQEGMSVAEXGXR

SEQ ID NO: 8733 - protein, 39 aa, Artificial Sequence
  Non-cyclic GFR-binding peptide
  MOD_RES (5), (6), (39): Xaa is C or S
  MOD_RES (20), (21), (22), (23), (24): Xaa is A or G
  MOD_RES (25), (26), (27), (28): Xaa is A or G or is absent
SASPXXVPQDLSPISILYKXXXXXXXXXLKYHYMVVKSX

SEQ ID NO: 8734 - protein, 36 aa, Artificial Sequence
  Non-cyclic GFR-binding peptide
  MOD_RES (4), (5): Xaa is C or S
PKAXXVPTELSATSMLYYDEYDKVVLRKHREMVVEG

SEQ ID NO: 8735 - protein, 38 aa, Artificial Sequence
  Non-cyclic GFR-binding peptide
  MOD_RES (1), (2), (35), (37): Xaa is C or S
  MOD_RES (16), (17), (18), (19), (20): Xaa is A or G
  MOD_RES (21), (22), (23), (24): Xaa is A or G or is absent
XXVSQDLSATSILYYXXXXXXXXXLRKHRMIVKSXKXS

SEQ ID NO: 8736 - protein, 35 aa, Artificial Sequence
  Non-cyclic GFR-binding peptide
  MOD_RES (1), (35): Xaa is C or S
  MOD_RES (15), (16), (17), (18), (19): Xaa is A or G
  MOD_RES (20), (21), (22), (23): Xaa is A or G or is absent
XAPTQLSATSVLYYXXXXXXXXXLRKHRNMVVRAX

SEQ ID NO: 8737 - protein, 36 aa, Artificial Sequence
  Non-cyclic GFR-binding peptide
  MOD_RES (2), (3), (35): Xaa is C or S
PXXAPTKLSATSVLYYDDSSNVILRKHRNMVVRSXG

SEQ ID NO: 8738 - protein, 42 aa, Artificial Sequence
  Non-cyclic GFR-binding peptide
  MOD_RES (6), (7), (41): Xaa is C or S
  MOD_RES (21), (22), (23), (24), (25): Xaa is A or G
  MOD_RES (26), (27), (28), (29): Xaa is A or G or is absent
KIPKAXXVPTELSATSMLYYXXXXXXXXXLRKHRDMVVEGXG

SEQ ID NO: 8739 - protein, 37 aa, Artificial Sequence
  Non-cyclic GFR-binding peptide
  MOD_RES (3), (4): Xaa is C or S
  MOD_RES (18), (19), (20), (21), (22): Xaa is A or G
  MOD_RES (23), (24), (25), (26): Xaa is A or G or is absent
KAXXVPTELSATSMLYYXXXXXXXXXLRKHREMVVEG

SEQ ID NO: 8740 - protein, 35 aa, Artificial Sequence
  Non-cyclic GFR-binding peptide
  MOD_RES (1), (2): Xaa is C or S
  MOD_RES (16), (17), (18), (19), (20): Xaa is A or G
  MOD_RES (21), (22), (23), (24): Xaa is A or G or is absent
XXAPTKLNAISVLYFXXXXXXXXXLKKYRNMVVKA

SEQ ID NO: 8741 - protein, 40 aa, Artificial Sequence
  Non-cyclic GFR-binding peptide
  MOD_RES (4), (5), (38), (40): Xaa is C or S
  MOD_RES (19), (20), (21), (22), (23): Xaa is A or G
  MOD_RES (24), (25), (26), (27): Xaa is A or G or is absent
ASPXXVSQDLNAISILYFXXXXXXXXXLKKYRMIVKSXKX

SEQ ID NO: 8742 - protein, 39 aa, Artificial Sequence
  Non-cyclic GFR-binding peptide
  MOD_RES (36), (38): Xaa is C or S
PTQVQLSATSVLYYEIVRKKPIFLRKHRTLEDHLAXKXE

SEQ ID NO: 8743 - protein, 37 aa, Artificial Sequence
  Non-cyclic GFR-binding peptide
  MOD_RES (2), (3), (37): Xaa is C or S
  MOD_RES (17), (18), (19), (20), (21): Xaa is A or G
  MOD_RES (22), (23), (24), (25): Xaa is A or G or is absent
PXXAPTKLSAISVLYLXXXXXXXXXLKNYQNMVVRSX

SEQ ID NO: 8744 - protein, 36 aa, Artificial Sequence
  Non-cyclic GFR-binding peptide
  MOD_RES (1), (2), (33), (35): Xaa is C or S
XXVPQALSPISILYKVGRKPKVLKYHYMIVRSXKXS

SEQ ID NO: 8745 - protein, 39 aa, Artificial Sequence
  Non-cyclic GFR-binding peptide
  MOD_RES (4), (5), (39): Xaa is C or S
  MOD_RES (19), (20), (21), (22), (23): Xaa is A or G
  MOD_RES (24), (25), (26), (27): Xaa is A or G or is absent
PKPXXAPTQLSPISVLYKXXXXXXXXXLKYHYNMVVRAX

SEQ ID NO: 8746 - protein, 33 aa, Artificial Sequence
  Non-cyclic GFR-binding peptide
  MOD_RES (2), (3): Xaa is C or S
AXXVPTELSATSMLYYDEYDKVVLRKHREMVVE

SEQ ID NO: 8747 - protein, 41 aa, Artificial Sequence
  Non-cyclic GFR-binding peptide
  MOD_RES (6), (7), (41): Xaa is C or S
  MOD_RES (21), (22), (23), (24), (25): Xaa is A or G
  MOD_RES (26), (27), (28), (29): Xaa is A or G or is absent
SIPKAXXVPTELSATSMLYYXXXXXXXXXLRKHREMVVEGX

SEQ ID NO: 8748 - protein, 35 aa, Artificial Sequence
  Non-cyclic GFR-binding peptide
  MOD_RES (1), (2), (35): Xaa is C or S
  MOD_RES (16), (17), (18), (19), (20): Xaa is A or G
  MOD_RES (21), (22), (23), (24): Xaa is A or G or is absent
XXVPQDLSATSILYYXXXXXXXXXLRKHRMVVKSX

SEQ ID NO: 8749 - protein, 42 aa, Artificial Sequence
  Non-cyclic GFR-binding peptide
  MOD_RES (5), (42): Xaa is C or S
RNVQXRPTQVQLSAISVLYLEIVRKKPIFLKNYQTLEDHLAX

SEQ ID NO: 8750 - protein, 42 aa, Artificial Sequence
  Non-cyclic GFR-binding peptide
  MOD_RES (5), (6), (39), (41): Xaa is C or S
  MOD_RES (20), (21), (22), (23), (24): Xaa is A or G
  MOD_RES (25), (26), (27), (28): Xaa is A or G or is absent
SASPXXVPQDLSATSILYYXXXXXXXXXLRKHRMVVKSXKXS

SEQ ID NO: 8751 - protein, 36 aa, Artificial Sequence
  Non-cyclic GFR-binding peptide
  MOD_RES (4), (5): Xaa is C or S
PKAXXAPTKLSPISVLYKDSSNNVILKYHYNMVVKA

SEQ ID NO: 8752 - protein, 39 aa, Artificial Sequence
  Non-cyclic GFR-binding peptide
  MOD_RES (3), (37), (39): Xaa is C or S
  MOD_RES (17), (18), (19), (20), (21): Xaa is A or G
  MOD_RES (22), (23), (24), (25): Xaa is A or G or is absent
PTXAPTKLSPISVLYKXXXXXXXXXLKYHYNMVVRSXGX

SEQ ID NO: 8753 - protein, 33 aa, Artificial Sequence
  Non-cyclic GFR-binding peptide
  MOD_RES (32), (32): Xaa is C or S
APTQLSPISVLYKDDSSNVILKYHYNMVVRAXG

SEQ ID NO: 8754 - protein, 32 aa, Artificial Sequence
  Non-cyclic GFR-binding peptide
  MOD_RES (1), (32): Xaa is C or S
XVSQDLSAISILYLIGKTPKILKNYQMIVKSX

SEQ ID NO: 8755 - protein, 40 aa, Artificial Sequence
  Non-cyclic GFR-binding peptide
  MOD_RES (6), (7), (39): Xaa is C or S
SIPKAXXVPTELSATSMLYYDEYDKVVLRKHREMVVEGXG

SEQ ID NO: 8756 - protein, 40 aa, Artificial Sequence
  Non-cyclic GFR-binding peptide
  MOD_RES (7), (39): Xaa is C or S
HVTKPTXAPTKLSATSVLYYDDSSNVILRKHRNMVVRSXG

SEQ ID NO: 8757 - protein, 34 aa, Artificial Sequence
  Non-cyclic GFR-binding peptide
  MOD_RES (1), (1): Xaa is C or S
  MOD_RES (15), (16), (17), (18), (19): Xaa is A or G
  MOD_RES (20), (21), (22), (23): Xaa is A or G or is absent
XAPTKLSAISVLYLXXXXXXXXXLKNYQNMVVRS

SEQ ID NO: 8758 - protein, 43 aa, Artificial Sequence
  Non-cyclic GFR-binding peptide
  MOD_RES (6), (7), (41), (43): Xaa is C or S
  MOD_RES (21), (22), (23), (24), (25): Xaa is A or G
  MOD_RES (26), (27), (28), (29): Xaa is A or G or is absent
SIPKAXXVPTELSATSMLYYXXXXXXXXXLRKHREMVVEGXGX

SEQ ID NO: 8759 - protein, 40 aa, Artificial Sequence
  Non-cyclic GFR-binding peptide
  MOD_RES (4), (5), (39): Xaa is C or S
  MOD_RES (19), (20), (21), (22), (23): Xaa is A or G
  MOD_RES (24), (25), (26), (27): Xaa is A or G or is absent
PKAXXAPTKLSAISVLYLXXXXXXXXXLKNYQNMVVKAXG

SEQ ID NO: 8760 - protein, 36 aa, Artificial Sequence
  Non-cyclic GFR-binding peptide
  MOD_RES (4), (5): Xaa is C or S
PKPXXAPTKLSAISVLYLDDSSNVILKNYQNMVVRS

SEQ ID NO: 8761 - protein, 34 aa, Artificial Sequence
  Non-cyclic GFR-binding peptide
  MOD_RES (1), (1): Xaa is C or S
  MOD_RES (15), (16), (17), (18), (19): Xaa is A or G
  MOD_RES (20), (21), (22), (23): Xaa is A or G or is absent
XAPTKLNAISVLYFXXXXXXXXXLKKYRNMVVKA

SEQ ID NO: 8762 - protein, 37 aa, Artificial Sequence
  Non-cyclic GFR-binding peptide
  MOD_RES (34), (36): Xaa is C or S
  MOD_RES (14), (15), (16), (17), (18): Xaa is A or G
  MOD_RES (19), (20), (21), (22): Xaa is A or G or is absent
VPTELSPISMLYKXXXXXXXXXLKYHYDMVVEGXGXR

SEQ ID NO: 8763 - protein, 39 aa, Artificial Sequence
  Non-cyclic GFR-binding peptide
  MOD_RES (2), (3), (37), (39): Xaa is C or S
  MOD_RES (17), (18), (19), (20), (21): Xaa is A or G
  MOD_RES (22), (23), (24), (25): Xaa is A or G or is absent
AXXVPTELNAISMLYFXXXXXXXXXLKKYREMVVEGXGX

SEQ ID NO: 8764 - protein, 41 aa, Artificial Sequence
  Non-cyclic GFR-binding peptide
  MOD_RES (5), (6), (38), (40): Xaa is C or S
VPKAXXAPTKLSPISVLYKDSSNNVILKYHYNMVVKAXGXH

SEQ ID NO: 8765 - protein, 34 aa, Artificial Sequence
  Non-cyclic GFR-binding peptide
  MOD_RES (34), (34): Xaa is C or S
  MOD_RES (14), (15), (16), (17), (18): Xaa is A or G
  MOD_RES (19), (20), (21), (22): Xaa is A or G or is absent
APTQLSATSVLYYXXXXXXXXXLRKHRNMVVRAX

SEQ ID NO: 8766 - protein, 41 aa, Artificial Sequence
  Non-cyclic GFR-binding peptide
  MOD_RES (5), (6), (38), (40): Xaa is C or S
VPKPXXAPTKLSAISVLYLDDSSNVILKNYQNMVVRSXGXH

SEQ ID NO: 8767 - protein, 32 aa, Artificial Sequence
  Non-cyclic GFR-binding peptide
  MOD_RES (31), (31): Xaa is C or S
VSQDLNAISILYFIGKTPKILKKYRMIVKSXK

SEQ ID NO: 8768 - protein, 37 aa, Artificial Sequence
  Non-cyclic GFR-binding peptide
  MOD_RES (1), (34), (36): Xaa is C or S
  MOD_RES (15), (16), (17), (18), (19): Xaa is A or G
  MOD_RES (20), (21), (22), (23): Xaa is A or G or is absent
XVPQDLSATSILYYXXXXXXXXXLRKHRMVVKSXKXS

SEQ ID NO: 8769 - protein, 42 aa, Artificial Sequence
  Non-cyclic GFR-binding peptide
  MOD_RES (6), (7), (40), (42): Xaa is C or S
  MOD_RES (21), (22), (23), (24), (25): Xaa is A or G
  MOD_RES (26), (27), (28), (29): Xaa is A or G or is absent
ASAAPXXVPQALNAISILYFXXXXXXXXXLKKYRMIVRSXKX

SEQ ID NO: 8770 - protein, 38 aa, Artificial Sequence
  Non-cyclic GFR-binding peptide
  MOD_RES (3), (3): Xaa is C or S
VQXRPTQVQLSAISVLYLEIVRKKPIFLKNYQTLEDHL

SEQ ID NO: 8771 - protein, 41 aa, Artificial Sequence
  Non-cyclic GFR-binding peptide
  MOD_RES (4), (5), (39), (41): Xaa is C or S
  MOD_RES (19), (20), (21), (22), (23): Xaa is A or G
  MOD_RES (24), (25), (26), (27): Xaa is A or G or is absent
PKAXXAPTKLSAISVLYLXXXXXXXXXLKNYQNMVVKAXGX

SEQ ID NO: 8772 - protein, 37 aa, Artificial Sequence
  Non-cyclic GFR-binding peptide
  MOD_RES (1), (2), (34), (36): Xaa is C or S
XXAPTQLSAISVLYLDDSSNVILKNYQNMVVRAXGXH

SEQ ID NO: 8773 - protein, 39 aa, Artificial Sequence
  Non-cyclic GFR-binding peptide
  MOD_RES (5), (5): Xaa is C or S
RNVQXRPTQVQLNAISVLYFEIVRKKPIFLKKYRTLEDH

SEQ ID NO: 8774 - protein, 38 aa, Artificial Sequence
  Non-cyclic GFR-binding peptide
  MOD_RES (5), (6): Xaa is C or S
  MOD_RES (20), (21), (22), (23), (24): Xaa is A or G
  MOD_RES (25), (26), (27), (28): Xaa is A or G or is absent
IPKAXXVPTELSATSMLYYXXXXXXXXXLRKHRDMVVE

SEQ ID NO: 8775 - protein, 44 aa, Artificial Sequence
  Non-cyclic GFR-binding peptide
  MOD_RES (6), (7), (42), (44): Xaa is C or S
  MOD_RES (21), (22), (23), (24), (25): Xaa is A or G
  MOD_RES (26), (27), (28), (29): Xaa is A or G or is absent
KVGKAXXVPTKLSAISVLYLXXXXXXXXXLKNYQEGMSVAEXGX

SEQ ID NO: 8776 - protein, 35 aa, Artificial Sequence
  Non-cyclic GFR-binding peptide
  MOD_RES (4), (5): Xaa is C or S
PKAXXAPTKLSPISVLYKDSSNNVILKYHYNMVVK

SEQ ID NO: 8777 - protein, 36 aa, Artificial Sequence
  Non-cyclic GFR-binding peptide
  MOD_RES (3), (4), (36): Xaa is C or S
KAXXVPTELNAISMLYFDENEKVVLKKYRDMVVEGX

SEQ ID NO: 8778 - protein, 43 aa, Artificial Sequence
  Non-cyclic GFR-binding peptide
  MOD_RES (5), (6), (40), (42): Xaa is C or S
  MOD_RES (20), (21), (22), (23), (24): Xaa is A or G
  MOD_RES (25), (26), (27), (28): Xaa is A or G or is absent
VPKAXXAPTKLSPISVLYKXXXXXXXXXLKYHYNMVVKAXGXH

SEQ ID NO: 8779 - protein, 42 aa, Artificial Sequence
  Non-cyclic GFR-binding peptide
  MOD_RES (4), (41): Xaa is C or S
NVQXRPTQVQLSPISVLYKEIVRKKPIFLKYHYTLEDHLAXK

SEQ ID NO: 8780 - protein, 37 aa, Artificial Sequence
  Non-cyclic GFR-binding peptide
  MOD_RES (2), (3), (37): Xaa is C or S
  MOD_RES (17), (18), (19), (20), (21): Xaa is A or G
  MOD_RES (22), (23), (24), (25): Xaa is A or G or is absent
PXXAPTKLSPISVLYKXXXXXXXXXLKYHYNMVVRSX

SEQ ID NO: 8781 - protein, 39 aa, Artificial Sequence
  Non-cyclic GFR-binding peptide
  MOD_RES (4), (5), (37), (39): Xaa is C or S
PKAXXAPTKLSAISVLYLDSSNNVILKNYQNMVVKAXGX

SEQ ID NO: 8782 - protein, 35 aa, Artificial Sequence
  Non-cyclic GFR-binding peptide
  MOD_RES (2), (3), (34): Xaa is C or S
PXXVSQDLSPISILYKIGKTPKILKYHYMIVKSXK

SEQ ID NO: 8783 - protein, 43 aa, Artificial Sequence
  Non-cyclic GFR-binding peptide
  MOD_RES (6), (7), (41), (43): Xaa is C or S
  MOD_RES (21), (22), (23), (24), (25): Xaa is A or G
  MOD_RES (26), (27), (28), (29): Xaa is A or G or is absent
TVPKPXXAPTQLSAISVLYLXXXXXXXXXLKNYQNMVVRAXGX

SEQ ID NO: 8784 - protein, 43 aa, Artificial Sequence
  Non-cyclic GFR-binding peptide
  MOD_RES (5), (6), (40), (42): Xaa is C or S
  MOD_RES (20), (21), (22), (23), (24): Xaa is A or G
  MOD_RES (25), (26), (27), (28): Xaa is A or G or is absent
VPKPXXAPTKLSAISVLYLXXXXXXXXXLKNYQNMVVRSXGXH

SEQ ID NO: 8785 - protein, 35 aa, Artificial Sequence
  Non-cyclic GFR-binding peptide
  MOD_RES (4), (5): Xaa is C or S
PKAXXAPTKLSAISVLYLDSSNNVILKNYQNMVVK

SEQ ID NO: 8786 - protein, 40 aa, Artificial Sequence
  Non-cyclic GFR-binding peptide
  MOD_RES (3), (40): Xaa is C or S
  MOD_RES (19), (20), (21), (22), (23): Xaa is A or G
  MOD_RES (24), (25), (26), (27): Xaa is A or G or is absent
VQXRPTQVQLSATSVLYYXXXXXXXXXLRKHRTLEDHLAX

SEQ ID NO: 8787 - protein, 38 aa, Artificial Sequence
  Non-cyclic GFR-binding peptide
  MOD_RES (3), (4), (36), (38): Xaa is C or S
KPXXAPTQLSPISVLYKDDSSNVILKYHYNMVVRAXGX

SEQ ID NO: 8788 - protein, 40 aa, Artificial Sequence
  Non-cyclic GFR-binding peptide
  MOD_RES (6), (7), (39): Xaa is C or S
TVPKPXXAPTQLSATSVLYYDDSSNVILRKHRNMVVRAXG

SEQ ID NO: 8789 - protein, 33 aa, Artificial Sequence
  Non-cyclic GFR-binding peptide
  MOD_RES (1), (2), (33): Xaa is C or S
XXVSQDLSPISILYKIGKTPKILKYHYMIVKSX

SEQ ID NO: 8790 - protein, 31 aa, Artificial Sequence
  Non-cyclic GFR-binding peptide
  MOD_RES (1), (1): Xaa is C or S
XAPTQLSATSVLYYDDSSNVILRKHRNMVVR

SEQ ID NO: 8791 - protein, 39 aa, Artificial Sequence
  Non-cyclic GFR-binding peptide
  MOD_RES (2), (3), (36), (38): Xaa is C or S
  MOD_RES (17), (18), (19), (20), (21): Xaa is A or G
  MOD_RES (22), (23), (24), (25): Xaa is A or G or is absent
PXXVPQDLSAISILYLXXXXXXXXXLKNYQMVVKSXKXS

SEQ ID NO: 8792 - protein, 36 aa, Artificial Sequence
  Non-cyclic GFR-binding peptide
  MOD_RES (1), (35): Xaa is C or S
  MOD_RES (15), (16), (17), (18), (19): Xaa is A or G
  MOD_RES (20), (21), (22), (23): Xaa is A or G or is absent
XAPTKLSPISVLYKXXXXXXXXXLKYHYNMVVKAXG

SEQ ID NO: 8793 - protein, 35 aa, Artificial Sequence
  Non-cyclic GFR-binding peptide
  MOD_RES (2), (3): Xaa is C or S
  MOD_RES (17), (18), (19), (20), (21): Xaa is A or G
  MOD_RES (22), (23), (24), (25): Xaa is A or G or is absent
PXXVSQDLSAISILYLXXXXXXXXXLKNYQMIVKS

SEQ ID NO: 8794 - protein, 36 aa, Artificial Sequence
  Non-cyclic GFR-binding peptide
  MOD_RES (3), (3): Xaa is C or S
  MOD_RES (17), (18), (19), (20), (21): Xaa is A or G
  MOD_RES (22), (23), (24), (25): Xaa is A or G or is absent
PTXAPTKLSAISVLYLXXXXXXXXXLKNYQNMVVRS

SEQ ID NO: 8795 - protein, 39 aa, Artificial Sequence
  Non-cyclic GFR-binding peptide
  MOD_RES (6), (7): Xaa is C or S
  MOD_RES (21), (22), (23), (24), (25): Xaa is A or G
  MOD_RES (26), (27), (28), (29): Xaa is A or G or is absent
ASASPXXVSQDLSATSILYYXXXXXXXXXLRKHRMIVKS

SEQ ID NO: 8796 - protein, 36 aa, Artificial Sequence
  Non-cyclic GFR-binding peptide
  MOD_RES (1), (2), (34), (36): Xaa is C or S
XXVPTELSPISMLYKDEYDKVVLKYHYEMVVEGXGX

SEQ ID NO: 8797 - protein, 36 aa, Artificial Sequence
  Non-cyclic GFR-binding peptide
  MOD_RES (5), (6): Xaa is C or S
IPKAXXVPTELNAISMLYFDENEKVVLKKYRDMVVE

SEQ ID NO: 8798 - protein, 34 aa, Artificial Sequence
  Non-cyclic GFR-binding peptide
  MOD_RES (1), (2), (33): Xaa is C or S
XXVPQDLSAISILYLVGRTPKVLKNYQMVVKSXK

SEQ ID NO: 8799 - protein, 38 aa, Artificial Sequence
  Non-cyclic GFR-binding peptide
  MOD_RES (3), (4), (38): Xaa is C or S
  MOD_RES (18), (19), (20), (21), (22): Xaa is A or G
  MOD_RES (23), (24), (25), (26): Xaa is A or G or is absent
KAXXVPTELSPISMLYKXXXXXXXXXLKYHYEMVVEGX

SEQ ID NO: 8800 - protein, 40 aa, Artificial Sequence
  Non-cyclic GFR-binding peptide
  MOD_RES (5), (37), (39): Xaa is C or S
TKPTXAPTKLSAISVLYLDDSSNVILKNYQNMVVRSXGXH

SEQ ID NO: 8801 - protein, 42 aa, Artificial Sequence
  Non-cyclic GFR-binding peptide
  MOD_RES (3), (40), (42): Xaa is C or S
VQXRPTQVQLSATSVLYYEIVRKKPIFLRKHRTLEDHLAXKX

SEQ ID NO: 8802 - protein, 37 aa, Artificial Sequence
  Non-cyclic GFR-binding peptide
  MOD_RES (6), (7): Xaa is C or S
AVPKAXXAPTKLSAISVLYLDSSNNVILKNYQNMVVK

SEQ ID NO: 8803 - protein, 41 aa, Artificial Sequence
  Non-cyclic GFR-binding peptide
  MOD_RES (6), (7), (40): Xaa is C or S
  MOD_RES (21), (22), (23), (24), (25): Xaa is A or G
  MOD_RES (26), (27), (28), (29): Xaa is A or G or is absent
ASAAPXXVPQALNAISILYFXXXXXXXXXLKKYRMIVRSXK

SEQ ID NO: 8804 - protein, 37 aa, Artificial Sequence
  Non-cyclic GFR-binding peptide
  MOD_RES (4), (5): Xaa is C or S
  MOD_RES (19), (20), (21), (22), (23): Xaa is A or G
  MOD_RES (24), (25), (26), (27): Xaa is A or G or is absent
AAPXXVPQALNAISILYFXXXXXXXXXLKKYRMIVRS

SEQ ID NO: 8805 - protein, 35 aa, Artificial Sequence
  Non-cyclic GFR-binding peptide
  MOD_RES (1), (2), (35): Xaa is C or S
  MOD_RES (16), (17), (18), (19), (20): Xaa is A or G
  MOD_RES (21), (22), (23), (24): Xaa is A or G or is absent
XXVPQDLSAISILYLXXXXXXXXXLKNYQMVVKSX

SEQ ID NO: 8806 - protein, 42 aa, Artificial Sequence
  Non-cyclic GFR-binding peptide
  MOD_RES (6), (7), (40), (42): Xaa is C or S
KVGKAXXVPTKLNAISVLYFDDMGVPTLKKYREGMSVAEXGX

SEQ ID NO: 8807 - protein, 40 aa, Artificial Sequence
  Non-cyclic GFR-binding peptide
  MOD_RES (1), (38), (40): Xaa is C or S
  MOD_RES (17), (18), (19), (20), (21): Xaa is A or G
  MOD_RES (22), (23), (24), (25): Xaa is A or G or is absent
XRPTQVQLNAISVLYFXXXXXXXXXLKKYRTLEDHLAXKX

SEQ ID NO: 8808 - protein, 40 aa, Artificial Sequence
  Non-cyclic GFR-binding peptide
  MOD_RES (2), (39): Xaa is C or S
QXRPTQVQLSATSVLYYEIVRKKPIFLRKHRTLEDHLAXK

SEQ ID NO: 8809 - protein, 30 aa, Artificial Sequence
  Non-cyclic GFR-binding peptide
VPTELNAISMLYFDENEKVVLKKYRDMVVE

SEQ ID NO: 8810 - protein, 40 aa, Artificial Sequence
  Non-cyclic GFR-binding peptide
  MOD_RES (6), (7): Xaa is C or S
  MOD_RES (21), (22), (23), (24), (25): Xaa is A or G
  MOD_RES (26), (27), (28), (29): Xaa is A or G or is absent
YVPKPXXAPTKLSPISVLYKXXXXXXXXXLKYHYNMVVRS

SEQ ID NO: 8811 - protein, 42 aa, Artificial Sequence
  Non-cyclic GFR-binding peptide
  MOD_RES (5), (6), (39), (41): Xaa is C or S
VGKAXXVPTKLSAISVLYLDDMGVPTLKNYQEGMSVAEXGXR

SEQ ID NO: 8812 - protein, 44 aa, Artificial Sequence
  Non-cyclic GFR-binding peptide
  MOD_RES (6), (7), (41), (43): Xaa is C or S
  MOD_RES (21), (22), (23), (24), (25): Xaa is A or G
  MOD_RES (26), (27), (28), (29): Xaa is A or G or is absent
AVPKAXXAPTKLNAISVLYFXXXXXXXXXLKKYRNMVVKAXGXH

SEQ ID NO: 8813 - protein, 35 aa, Artificial Sequence
  Non-cyclic GFR-binding peptide
  MOD_RES (2), (3): Xaa is C or S
  MOD_RES (17), (18), (19), (20), (21): Xaa is A or G
  MOD_RES (22), (23), (24), (25): Xaa is A or G or is absent
PXXVPQALSPISILYKXXXXXXXXXLKYHYMIVRS

SEQ ID NO: 8814 - protein, 39 aa, Artificial Sequence
  Non-cyclic GFR-binding peptide
  MOD_RES (5), (6): Xaa is C or S
  MOD_RES (20), (21), (22), (23), (24): Xaa is A or G
  MOD_RES (25), (26), (27), (28): Xaa is A or G or is absent
VPKPXXAPTQLSPISVLYKXXXXXXXXXLKYHYNMVVRA

SEQ ID NO: 8815 - protein, 37 aa, Artificial Sequence
  Non-cyclic GFR-binding peptide
  MOD_RES (4), (5): Xaa is C or S
  MOD_RES (19), (20), (21), (22), (23): Xaa is A or G
  MOD_RES (24), (25), (26), (27): Xaa is A or G or is absent
PKAXXAPTKLNAISVLYFXXXXXXXXXLKKYRNMVVK

SEQ ID NO: 8816 - protein, 37 aa, Artificial Sequence
  Non-cyclic GFR-binding peptide
  MOD_RES (2), (3): Xaa is C or S
  MOD_RES (17), (18), (19), (20), (21): Xaa is A or G
  MOD_RES (22), (23), (24), (25): Xaa is A or G or is absent
AXXVPTKLSATSVLYYXXXXXXXXXLRKHREGMSVAE

SEQ ID NO: 8817 - protein, 38 aa, Artificial Sequence
  Non-cyclic GFR-binding peptide
  MOD_RES (2), (3), (38): Xaa is C or S
  MOD_RES (17), (18), (19), (20), (21): Xaa is A or G
  MOD_RES (22), (23), (24), (25): Xaa is A or G or is absent
AXXVPTKLNAISVLYFXXXXXXXXXLKKYREGMSVAEX

SEQ ID NO: 8818 - protein, 37 aa, Artificial Sequence
  Non-cyclic GFR-binding peptide
  MOD_RES (4), (36): Xaa is C or S
KPTXAPTKLSPISVLYKDDSSNVILKYHYNMVVRSXG

SEQ ID NO: 8819 - protein, 33 aa, Artificial Sequence
  Non-cyclic GFR-binding peptide
  MOD_RES (31), (33): Xaa is C or S
VPQALNAISILYFVGRKPKVLKKYRMIVRSXKX

SEQ ID NO: 8820 - protein, 39 aa, Artificial Sequence
  Non-cyclic GFR-binding peptide
  MOD_RES (5), (6): Xaa is C or S
  MOD_RES (20), (21), (22), (23), (24): Xaa is A or G
  MOD_RES (25), (26), (27), (28): Xaa is A or G or is absent
IPKAXXVPTELSATSMLYYXXXXXXXXXLRKHRDMVVEG

SEQ ID NO: 8821 - protein, 39 aa, Artificial Sequence
  Non-cyclic GFR-binding peptide
  MOD_RES (6), (7): Xaa is C or S
  MOD_RES (21), (22), (23), (24), (25): Xaa is A or G
  MOD_RES (26), (27), (28), (29): Xaa is A or G or is absent
KIPKAXXVPTELNAISMLYFXXXXXXXXXLKKYRDMVVE

SEQ ID NO: 8822 - protein, 40 aa, Artificial Sequence
  Non-cyclic GFR-binding peptide
  MOD_RES (5), (6), (39): Xaa is C or S
  MOD_RES (20), (21), (22), (23), (24): Xaa is A or G
  MOD_RES (25), (26), (27), (28): Xaa is A or G or is absent
SASPXXVSQDLNAISILYFXXXXXXXXXLKKYRMIVKSXK

SEQ ID NO: 8823 - protein, 37 aa, Artificial Sequence
  Non-cyclic GFR-binding peptide
  MOD_RES (2), (3), (36): Xaa is C or S
AXXVPTKLSATSVLYYDDMGVPTLRKHREGMSVAEXG

SEQ ID NO: 8824 - protein, 40 aa, Artificial Sequence
  Non-cyclic GFR-binding peptide
  MOD_RES (37), (39): Xaa is C or S
  MOD_RES (16), (17), (18), (19), (20): Xaa is A or G
  MOD_RES (21), (22), (23), (24): Xaa is A or G or is absent
RPTQVQLSAISVLYLXXXXXXXXXLKNYQTLEDHLAXKXE

SEQ ID NO: 8825 - protein, 35 aa, Artificial Sequence
  Non-cyclic GFR-binding peptide
  MOD_RES (1), (35): Xaa is C or S
  MOD_RES (15), (16), (17), (18), (19): Xaa is A or G
  MOD_RES (20), (21), (22), (23): Xaa is A or G or is absent
XVPTELSATSMLYYXXXXXXXXXLRKHREMVVEGX

SEQ ID NO: 8826 - protein, 35 aa, Artificial Sequence
  Non-cyclic GFR-binding peptide
  MOD_RES (4), (5): Xaa is C or S
ASPXXVPQDLSAISILYLVGRTPKVLKNYQMVVKS

SEQ ID NO: 8827 - protein, 35 aa, Artificial Sequence
  Non-cyclic GFR-binding peptide
  MOD_RES (2), (3): Xaa is C or S
  MOD_RES (17), (18), (19), (20), (21): Xaa is A or G
  MOD_RES (22), (23), (24), (25): Xaa is A or G or is absent
AXXVPTELSATSMLYYXXXXXXXXXLRKHRDMVVE

SEQ ID NO: 8828 - protein, 42 aa, Artificial Sequence
  Non-cyclic GFR-binding peptide
  MOD_RES (6), (7), (41): Xaa is C or S
  MOD_RES (21), (22), (23), (24), (25): Xaa is A or G
  MOD_RES (26), (27), (28), (29): Xaa is A or G or is absent
YVPKPXXAPTKLSPISVLYKXXXXXXXXXLKYHYNMVVRSXG

SEQ ID NO: 8829 - protein, 37 aa, Artificial Sequence
  Non-cyclic GFR-binding peptide
  MOD_RES (2), (3): Xaa is C or S
  MOD_RES (17), (18), (19), (20), (21): Xaa is A or G
  MOD_RES (22), (23), (24), (25): Xaa is A or G or is absent
AXXVPTKLSAISVLYLXXXXXXXXXLKNYQEGMSVAE

SEQ ID NO: 8830 - protein, 34 aa, Artificial Sequence
  Non-cyclic GFR-binding peptide
  MOD_RES (2), (3): Xaa is C or S
AXXVPTELNAISMLYFDEYDKVVLKKYREMVVEG

SEQ ID NO: 8831 - protein, 34 aa, Artificial Sequence
  Non-cyclic GFR-binding peptide
  MOD_RES (1), (2): Xaa is C or S
  MOD_RES (16), (17), (18), (19), (20): Xaa is A or G
  MOD_RES (21), (22), (23), (24): Xaa is A or G or is absent
XXAPTKLSPISVLYKXXXXXXXXXLKYHYNMVVK

SEQ ID NO: 8832 - protein, 35 aa, Artificial Sequence
  Non-cyclic GFR-binding peptide
  MOD_RES (1), (34): Xaa is C or S
  MOD_RES (15), (16), (17), (18), (19): Xaa is A or G
  MOD_RES (20), (21), (22), (23): Xaa is A or G or is absent
XVPQDLSAISILYLXXXXXXXXXLKNYQMVVKSXK

SEQ ID NO: 8833 - protein, 37 aa, Artificial Sequence
  Non-cyclic GFR-binding peptide
  MOD_RES (4), (5), (37): Xaa is C or S
PKAXXVPTELNAISMLYFDENEKVVLKKYRDMVVEGX

SEQ ID NO: 8834 - protein, 37 aa, Artificial Sequence
  Non-cyclic GFR-binding peptide
  MOD_RES (1), (2), (36): Xaa is C or S
  MOD_RES (16), (17), (18), (19), (20): Xaa is A or G
  MOD_RES (21), (22), (23), (24): Xaa is A or G or is absent
XXAPTKLSPISVLYKXXXXXXXXXLKYHYNMVVRSXG

SEQ ID NO: 8835 - protein, 38 aa, Artificial Sequence
  Non-cyclic GFR-binding peptide
  MOD_RES (3), (4), (36), (38): Xaa is C or S
KPXXAPTKLSPISVLYKDDSSNVILKYHYNMVVRSXGX

SEQ ID NO: 8836 - protein, 34 aa, Artificial Sequence
  Non-cyclic GFR-binding peptide
  MOD_RES (1), (2): Xaa is C or S
  MOD_RES (16), (17), (18), (19), (20): Xaa is A or G
  MOD_RES (21), (22), (23), (24): Xaa is A or G or is absent
XXVPTELNAISMLYFXXXXXXXXXLKKYRDMVVE

SEQ ID NO: 8837 - protein, 38 aa, Artificial Sequence
  Non-cyclic GFR-binding peptide
  MOD_RES (5), (37): Xaa is C or S
TKPTXAPTKLSPISVLYKDDSSNVILKYHYNMVVRSXG

SEQ ID NO: 8838 - protein, 39 aa, Artificial Sequence
  Non-cyclic GFR-binding peptide
  MOD_RES (37), (39): Xaa is C or S
RPTQVQLSAISVLYLEIVRKKPIFLKNYQTLEDHLAXKX

SEQ ID NO: 8839 - protein, 44 aa, Artificial Sequence
  Non-cyclic GFR-binding peptide
  MOD_RES (7), (41), (43): Xaa is C or S
  MOD_RES (21), (22), (23), (24), (25): Xaa is A or G
  MOD_RES (26), (27), (28), (29): Xaa is A or G or is absent
HVTKPTXAPTKLSPISVLYKXXXXXXXXXLKYHYNMVVRSXGXH

SEQ ID NO: 8840 - protein, 37 aa, Artificial Sequence
  Non-cyclic GFR-binding peptide
  MOD_RES (34), (36): Xaa is C or S
  MOD_RES (14), (15), (16), (17), (18): Xaa is A or G
  MOD_RES (19), (20), (21), (22): Xaa is A or G or is absent
APTQLSATSVLYYXXXXXXXXXLRKHRNMVVRAXGXH

SEQ ID NO: 8841 - protein, 30 aa, Artificial Sequence
  Non-cyclic GFR-binding peptide
VPQALSAISILYLVGRKPKVLKNYQMIVRS

SEQ ID NO: 8842 - protein, 39 aa, Artificial Sequence
  Non-cyclic GFR-binding peptide
  MOD_RES (6), (7): Xaa is C or S
  MOD_RES (21), (22), (23), (24), (25): Xaa is A or G
  MOD_RES (26), (27), (28), (29): Xaa is A or G or is absent
YVPKPXXAPTKLSATSVLYYXXXXXXXXXLRKHRNMVVR

SEQ ID NO: 8843 - protein, 40 aa, Artificial Sequence
  Non-cyclic GFR-binding peptide
  MOD_RES (6), (7), (39): Xaa is C or S
KIPKAXXVPTELNAISMLYFDENEKVVLKKYRDMVVEGXG

SEQ ID NO: 8844 - protein, 33 aa, Artificial Sequence
  Non-cyclic GFR-binding peptide
  MOD_RES (14), (15), (16), (17), (18): Xaa is A or G
  MOD_RES (19), (20), (21), (22): Xaa is A or G or is absent
APTQLSPISVLYKXXXXXXXXXLKYHYNMVVRA

SEQ ID NO: 8845 - protein, 37 aa, Artificial Sequence
  Non-cyclic GFR-binding peptide
  MOD_RES (3), (4), (35), (37): Xaa is C or S
SPXXVSQDLSAISILYLIGKTPKILKNYQMIVKSXKX

SEQ ID NO: 8846 - protein, 44 aa, Artificial Sequence
  Non-cyclic GFR-binding peptide
  MOD_RES (4), (41), (43): Xaa is C or S
  MOD_RES (20), (21), (22), (23), (24): Xaa is A or G
  MOD_RES (25), (26), (27), (28): Xaa is A or G or is absent
NVQXRPTQVQLSATSVLYYXXXXXXXXXLRKHRTLEDHLAXKXE

SEQ ID NO: 8847 - protein, 38 aa, Artificial Sequence
  Non-cyclic GFR-binding peptide
  MOD_RES (4), (4): Xaa is C or S
NVQXRPTQVQLSATSVLYYEIVRKKPIFLRKHRTLEDH

SEQ ID NO: 8848 - protein, 43 aa, Artificial Sequence
  Non-cyclic GFR-binding peptide
  MOD_RES (3), (40), (42): Xaa is C or S
VQXRPTQVQLNAISVLYFEIVRKKPIFLKKYRTLEDHLAXKXE

SEQ ID NO: 8849 - protein, 37 aa, Artificial Sequence
  Non-cyclic GFR-binding peptide
  MOD_RES (4), (5), (37): Xaa is C or S
PKAXXAPTKLSAISVLYLDSSNNVILKNYQNMVVKAX

SEQ ID NO: 8850 - protein, 42 aa, Artificial Sequence
  Non-cyclic GFR-binding peptide
  MOD_RES (6), (7), (39), (41): Xaa is C or S
YVPKPXXAPTKLSATSVLYYDDSSNVILRKHRNMVVRSXGXH

SEQ ID NO: 8851 - protein, 32 aa, Artificial Sequence
  Non-cyclic GFR-binding peptide
  MOD_RES (1), (2): Xaa is C or S
XXAPTQLSATSVLYYDDSSNVILRKHRNMVVR

SEQ ID NO: 8852 - protein, 35 aa, Artificial Sequence
  Non-cyclic GFR-binding peptide
  MOD_RES (15), (16), (17), (18), (19): Xaa is A or G
  MOD_RES (20), (21), (22), (23): Xaa is A or G or is absent
PTQVQLNAISVLYFXXXXXXXXXLKKYRTLEDHLA

SEQ ID NO: 8853 - protein, 40 aa, Artificial Sequence
  Non-cyclic GFR-binding peptide
  MOD_RES (4), (5), (38), (40): Xaa is C or S
  MOD_RES (19), (20), (21), (22), (23): Xaa is A or G
  MOD_RES (24), (25), (26), (27): Xaa is A or G or is absent
AAPXXVPQALNAISILYFXXXXXXXXXLKKYRMIVRSXKX

SEQ ID NO: 8854 - protein, 38 aa, Artificial Sequence
  Non-cyclic GFR-binding peptide
  MOD_RES (2), (3), (35), (37): Xaa is C or S
AXXVPTELSATSMLYYDENEKVVLRKHRDMVVEGXGXR

SEQ ID NO: 8855 - protein, 37 aa, Artificial Sequence
  Non-cyclic GFR-binding peptide
  MOD_RES (4), (5), (36): Xaa is C or S
ASPXXVPQDLSPISILYKVGRTPKVLKYHYMVVKSXK

SEQ ID NO: 8856 - protein, 38 aa, Artificial Sequence
  Non-cyclic GFR-binding peptide
  MOD_RES (5), (6): Xaa is C or S
  MOD_RES (20), (21), (22), (23), (24): Xaa is A or G
  MOD_RES (25), (26), (27), (28): Xaa is A or G or is absent
SASPXXVSQDLSATSILYYXXXXXXXXXLRKHRMIVKS

SEQ ID NO: 8857 - protein, 34 aa, Artificial Sequence
  Non-cyclic GFR-binding peptide
  MOD_RES (1), (2): Xaa is C or S
  MOD_RES (16), (17), (18), (19), (20): Xaa is A or G
  MOD_RES (21), (22), (23), (24): Xaa is A or G or is absent
XXAPTKLSPISVLYKXXXXXXXXXLKYHYNMVVR

SEQ ID NO: 8858 - protein, 37 aa, Artificial Sequence
  Non-cyclic GFR-binding peptide
  MOD_RES (3), (4), (37): Xaa is C or S
  MOD_RES (18), (19), (20), (21), (22): Xaa is A or G
  MOD_RES (23), (24), (25), (26): Xaa is A or G or is absent
SPXXVPQDLSPISILYKXXXXXXXXXLKYHYMVVKSX

SEQ ID NO: 8859 - protein, 38 aa, Artificial Sequence
  Non-cyclic GFR-binding peptide
  MOD_RES (6), (38): Xaa is C or S
VTKPTXAPTKLSATSVLYYDDSSNVILRKHRNMVVRSX

SEQ ID NO: 8860 - protein, 36 aa, Artificial Sequence
  Non-cyclic GFR-binding peptide
  MOD_RES (34), (36): Xaa is C or S
  MOD_RES (14), (15), (16), (17), (18): Xaa is A or G
  MOD_RES (19), (20), (21), (22): Xaa is A or G or is absent
VPTELSPISMLYKXXXXXXXXXLKYHYDMVVEGXGX

SEQ ID NO: 8861 - protein, 40 aa, Artificial Sequence
  Non-cyclic GFR-binding peptide
  MOD_RES (6), (7), (39): Xaa is C or S
AVPKAXXAPTKLSAISVLYLDSSNNVILKNYQNMVVKAXG

SEQ ID NO: 8862 - protein, 36 aa, Artificial Sequence
  Non-cyclic GFR-binding peptide
  MOD_RES (1), (34), (36): Xaa is C or S
XVPTKLSAISVLYLDDMGVPTLKNYQEGMSVAEXGX

SEQ ID NO: 8863 - protein, 35 aa, Artificial Sequence
  Non-cyclic GFR-binding peptide
  MOD_RES (1), (2), (34): Xaa is C or S
XXAPTQLSAISVLYLDDSSNVILKNYQNMVVRAXG

SEQ ID NO: 8864 - protein, 39 aa, Artificial Sequence
  Non-cyclic GFR-binding peptide
  MOD_RES (3), (4), (36), (38): Xaa is C or S
KPXXAPTKLSAISVLYLDDSSNVILKNYQNMVVRSXGXH

SEQ ID NO: 8865 - protein, 38 aa, Artificial Sequence
  Non-cyclic GFR-binding peptide
  MOD_RES (1), (35), (37): Xaa is C or S
  MOD_RES (15), (16), (17), (18), (19): Xaa is A or G
  MOD_RES (20), (21), (22), (23): Xaa is A or G or is absent
XVPTELNAISMLYFXXXXXXXXXLKKYRDMVVEGXGXR

SEQ ID NO: 8866 - protein, 37 aa, Artificial Sequence
  Non-cyclic GFR-binding peptide
  MOD_RES (1), (34), (36): Xaa is C or S
  MOD_RES (15), (16), (17), (18), (19): Xaa is A or G
  MOD_RES (20), (21), (22), (23): Xaa is A or G or is absent
XVSQDLSPISILYKXXXXXXXXXLKYHYMIVKSXKXS

SEQ ID NO: 8867 - protein, 32 aa, Artificial Sequence
  Non-cyclic GFR-binding peptide
  MOD_RES (1), (1): Xaa is C or S
XAPTKLSAISVLYLDSSNNVILKNYQNMVVKA

SEQ ID NO: 8868 - protein, 36 aa, Artificial Sequence
  Non-cyclic GFR-binding peptide
  MOD_RES (6), (6): Xaa is C or S
VTKPTXAPTKLSPISVLYKDDSSNVILKYHYNMVVR

SEQ ID NO: 8869 - protein, 40 aa, Artificial Sequence
  Non-cyclic GFR-binding peptide
  MOD_RES (4), (5), (37), (39): Xaa is C or S
PKPXXAPTKLSATSVLYYDDSSNVILRKHRNMVVRSXGXH

SEQ ID NO: 8870 - protein, 41 aa, Artificial Sequence
  Non-cyclic GFR-binding peptide
  MOD_RES (5), (6), (39), (41): Xaa is C or S
  MOD_RES (20), (21), (22), (23), (24): Xaa is A or G
  MOD_RES (25), (26), (27), (28): Xaa is A or G or is absent
SASPXXVPQDLSATSILYYXXXXXXXXXLRKHRMVVKSXKX

SEQ ID NO: 8871 - protein, 37 aa, Artificial Sequence
  Non-cyclic GFR-binding peptide
  MOD_RES (3), (4), (35), (37): Xaa is C or S
SPXXVPQDLSAISILYLVGRTPKVLKNYQMVVKSXKX

SEQ ID NO: 8872 - protein, 41 aa, Artificial Sequence
  Non-cyclic GFR-binding peptide
  MOD_RES (2), (39), (41): Xaa is C or S
QXRPTQVQLNAISVLYFEIVRKKPIFLKKYRTLEDHLAXKX

SEQ ID NO: 8873 - protein, 38 aa, Artificial Sequence
  Non-cyclic GFR-binding peptide
  MOD_RES (1), (36), (38): Xaa is C or S
  MOD_RES (15), (16), (17), (18), (19): Xaa is A or G
  MOD_RES (20), (21), (22), (23): Xaa is A or G or is absent
XVPTKLSAISVLYLXXXXXXXXXLKNYQEGMSVAEXGX

SEQ ID NO: 8874 - protein, 36 aa, Artificial Sequence
  Non-cyclic GFR-binding peptide
  MOD_RES (2), (3), (35): Xaa is C or S
AXXAPTKLSPISVLYKDSSNNVILKYHYNMVVKAXG

SEQ ID NO: 8875 - protein, 39 aa, Artificial Sequence
  Non-cyclic GFR-binding peptide
  MOD_RES (3), (4), (38): Xaa is C or S
  MOD_RES (18), (19), (20), (21), (22): Xaa is A or G
  MOD_RES (23), (24), (25), (26): Xaa is A or G or is absent
KAXXAPTKLSAISVLYLXXXXXXXXXLKNYQNMVVKAXG

SEQ ID NO: 8876 - protein, 35 aa, Artificial Sequence
  Non-cyclic GFR-binding peptide
  MOD_RES (1), (32), (34): Xaa is C or S
XVSQDLNAISILYFIGKTPKILKKYRMIVKSXKXS

SEQ ID NO: 8877 - protein, 36 aa, Artificial Sequence
  Non-cyclic GFR-binding peptide
  MOD_RES (2), (3), (36): Xaa is C or S
  MOD_RES (17), (18), (19), (20), (21): Xaa is A or G
  MOD_RES (22), (23), (24), (25): Xaa is A or G or is absent
PXXVSQDLSPISILYKXXXXXXXXXLKYHYMIVKSX

SEQ ID NO: 8878 - protein, 36 aa, Artificial Sequence
  Non-cyclic GFR-binding peptide
  MOD_RES (1), (2), (36): Xaa is C or S
  MOD_RES (16), (17), (18), (19), (20): Xaa is A or G
  MOD_RES (21), (22), (23), (24): Xaa is A or G or is absent
XXAPTKLSPISVLYKXXXXXXXXXLKYHYNMVVRSX

SEQ ID NO: 8879 - protein, 39 aa, Artificial Sequence
  Non-cyclic GFR-binding peptide
  MOD_RES (3), (4), (36), (38): Xaa is C or S
KAXXAPTKLSPISVLYKDSSNNVILKYHYNMVVKAXGXH

SEQ ID NO: 8880 - protein, 34 aa, Artificial Sequence
  Non-cyclic GFR-binding peptide
  MOD_RES (15), (16), (17), (18), (19): Xaa is A or G
  MOD_RES (20), (21), (22), (23): Xaa is A or G or is absent
PTQVQLNAISVLYFXXXXXXXXXLKKYRTLEDHL

SEQ ID NO: 8881 - protein, 33 aa, Artificial Sequence
  Non-cyclic GFR-binding peptide
  MOD_RES (2), (3): Xaa is C or S
AXXVPTELNAISMLYFDEYDKVVLKKYREMVVE

SEQ ID NO: 8882 - protein, 33 aa, Artificial Sequence
  Non-cyclic GFR-binding peptide
  MOD_RES (1), (32): Xaa is C or S
XVPQDLSAISILYLVGRTPKVLKNYQMVVKSXK

SEQ ID NO: 8883 - protein, 36 aa, Artificial Sequence
  Non-cyclic GFR-binding peptide
  MOD_RES (2), (4), (36): Xaa is C or S
HXGXSRVVMNNSLQEIVNSSDDYYVVPLPELKTPAX

SEQ ID NO: 8884 - protein, 35 aa, Artificial Sequence
  Non-cyclic GFR-binding peptide
  MOD_RES (1), (33), (34): Xaa is C or S
XGEVVMENSLQEVVKDYEDYYVMPLPELETPVXXA

SEQ ID NO: 8885 - protein, 34 aa, Artificial Sequence
  Non-cyclic GFR-binding peptide
  MOD_RES (2), (34): Xaa is C or S
GXARVVMNNSLQEIVNSSDDYYLVTLPELQTPAX

SEQ ID NO: 8886 - protein, 40 aa, Artificial Sequence
  Non-cyclic GFR-binding peptide
  MOD_RES (2), (34), (35): Xaa is C or S
GXGEVVMDNSLQEVVKENEDYYVMPLPELETPVXXAKPIK

SEQ ID NO: 8887 - protein, 35 aa, Artificial Sequence
  Non-cyclic GFR-binding peptide
  MOD_RES (1), (33), (34): Xaa is C or S
XSRVVMNEYQKYIVNSSDDIFLVSIPSLKTPAXXP

SEQ ID NO: 8888 - protein, 36 aa, Artificial Sequence
  Non-cyclic GFR-binding peptide
  MOD_RES (1), (35), (36): Xaa is C or S
  MOD_RES (13), (14), (15), (16), (17): Xaa is A or G
  MOD_RES (18), (19), (20), (21): Xaa is A or G or is absent
XGEVVMDNSLQEXXXXXXXXXYYVMPLPELETPVXX

SEQ ID NO: 8889 - protein, 41 aa, Artificial Sequence
  Non-cyclic GFR-binding peptide
  MOD_RES (1), (3), (37), (38): Xaa is C or S
  MOD_RES (15), (16), (17), (18), (19): Xaa is A or G
  MOD_RES (20), (21), (22), (23): Xaa is A or G or is absent
XGXGEVVMENSLQEXXXXXXXXXYYVMPLPELETPVXXAKP

SEQ ID NO: 8890 - protein, 35 aa, Artificial Sequence
  Non-cyclic GFR-binding peptide
  MOD_RES (1), (33), (34): Xaa is C or S
XSEVVMDNSLQEVVNNASDYYVIPLPELRTPVXXT

SEQ ID NO: 8891 - protein, 35 aa, Artificial Sequence
  Non-cyclic GFR-binding peptide
  MOD_RES (2), (34), (35): Xaa is C or S
GXGEVVMENSLQEVVKDYEDYYVMPLPELETPVXX

SEQ ID NO: 8892 - protein, 33 aa, Artificial Sequence
  Non-cyclic GFR-binding peptide
  MOD_RES (12), (13), (14), (15), (16): Xaa is A or G
  MOD_RES (17), (18), (19), (20): Xaa is A or G or is absent
GEVVMDNSLQEXXXXXXXXXYYVMPLPELETPV

SEQ ID NO: 8893 - protein, 39 aa, Artificial Sequence
  Non-cyclic GFR-binding peptide
  MOD_RES (1), (3), (37): Xaa is C or S
  MOD_RES (15), (16), (17), (18), (19): Xaa is A or G
  MOD_RES (20), (21), (22), (23): Xaa is A or G or is absent
XGXSRVVMNNSLQEXXXXXXXXXYYLVTLPELKTPAXTP

SEQ ID NO: 8894 - protein, 37 aa, Artificial Sequence
  Non-cyclic GFR-binding peptide
  MOD_RES (1), (34), (35): Xaa is C or S
  MOD_RES (12), (13), (14), (15), (16): Xaa is A or G
  MOD_RES (17), (18), (19), (20): Xaa is A or G or is absent
XSKVIMEYQKYXXXXXXXXXIFLISIPSLDQSVXXPS

SEQ ID NO: 8895 - protein, 36 aa, Artificial Sequence
  Non-cyclic GFR-binding peptide
  MOD_RES (2), (36): Xaa is C or S
  MOD_RES (14), (15), (16), (17), (18): Xaa is A or G
  MOD_RES (19), (20), (21), (22): Xaa is A or G or is absent
GXSEVVMDRYKKLXXXXXXXXXFYLISIANLRTPVX

SEQ ID NO: 8896 - protein, 37 aa, Artificial Sequence
  Non-cyclic GFR-binding peptide
  MOD_RES (32), (33): Xaa is C or S
GEVVMENSLQEVVKDYEDYYLMTLPELETPVXXAKPI

SEQ ID NO: 8897 - protein, 36 aa, Artificial Sequence
  Non-cyclic GFR-binding peptide
  MOD_RES (33), (34): Xaa is C or S
  MOD_RES (11), (12), (13), (14), (15): Xaa is A or G
  MOD_RES (16), (17), (18), (19): Xaa is A or G or is absent
SRVIMNSLQEXXXXXXXXXYYLITLPELAQPVXXPA

SEQ ID NO: 8898 - protein, 35 aa, Artificial Sequence
  Non-cyclic GFR-binding peptide
  MOD_RES (31), (32): Xaa is C or S
EVVMDNSLQEVVNNASDYYLITLPELRTPVXXTPP

SEQ ID NO: 8899 - protein, 41 aa, Artificial Sequence
  Non-cyclic GFR-binding peptide
  MOD_RES (1), (3), (36), (37): Xaa is C or S
  MOD_RES (14), (15), (16), (17), (18): Xaa is A or G
  MOD_RES (19), (20), (21), (22): Xaa is A or G or is absent
XKXSKVVMNSLQEXXXXXXXXXYYVIPLPELDQPVXXPSAS

SEQ ID NO: 8900 - protein, 39 aa, Artificial Sequence
  Non-cyclic GFR-binding peptide
  MOD_RES (1), (3), (36), (37): Xaa is C or S
  MOD_RES (14), (15), (16), (17), (18): Xaa is A or G
  MOD_RES (19), (20), (21), (22): Xaa is A or G or is absent
XKXSKVIMNSLQEXXXXXXXXXYYVIPLPELDQSVXXPS

SEQ ID NO: 8901 - protein, 33 aa, Artificial Sequence
  Non-cyclic GFR-binding peptide
  MOD_RES (2), (2): Xaa is C or S
GXSRVVMNEYQKYIVNSSDDIFLVSIPSLKTPA

SEQ ID NO: 8902 - protein, 37 aa, Artificial Sequence
  Non-cyclic GFR-binding peptide
  MOD_RES (1), (33), (34): Xaa is C or S
XSEVVMDNSLQEVVNNASDYYVIPLPELRTPVXXTPP

SEQ ID NO: 8903 - protein, 41 aa, Artificial Sequence
  Non-cyclic GFR-binding peptide
  MOD_RES (1), (3), (35), (36): Xaa is C or S
XGXSEVVMDQYNKLVVNNASDLYLISIASLRTPVXXTPPTS

SEQ ID NO: 8904 - protein, 36 aa, Artificial Sequence
  Non-cyclic GFR-binding peptide
  MOD_RES (1), (3): Xaa is C or S
  MOD_RES (15), (16), (17), (18), (19): Xaa is A or G
  MOD_RES (20), (21), (22), (23): Xaa is A or G or is absent
XGXGEVVMENSLQEXXXXXXXXXYYVMPLPELETPV

SEQ ID NO: 8905 - protein, 38 aa, Artificial Sequence
  Non-cyclic GFR-binding peptide
  MOD_RES (2), (4), (38): Xaa is C or S
  MOD_RES (16), (17), (18), (19), (20): Xaa is A or G
  MOD_RES (21), (22), (23), (24): Xaa is A or G or is absent
HXGXSRVVMNNSLQEXXXXXXXXXYYLVTLPELKTPAX

SEQ ID NO: 8906 - protein, 40 aa, Artificial Sequence
  Non-cyclic GFR-binding peptide
  MOD_RES (1), (3), (34), (35): Xaa is C or S
XKXSKVVMEYQKYVKPTRGVIFLISIPSLDQPVXXPSASA

SEQ ID NO: 8907 - protein, 35 aa, Artificial Sequence
  Non-cyclic GFR-binding peptide
  MOD_RES (2), (4): Xaa is C or S
HXGXSRVVMNNSLQEIVNSSDDYYVVPLPELKTPA

SEQ ID NO: 8908 - protein, 34 aa, Artificial Sequence
  Non-cyclic GFR-binding peptide
  MOD_RES (1), (1): Xaa is C or S
  MOD_RES (13), (14), (15), (16), (17): Xaa is A or G
  MOD_RES (18), (19), (20), (21): Xaa is A or G or is absent
XARVVMNEYQKYXXXXXXXXXIFLVSIPSLQTPA

SEQ ID NO: 8909 - protein, 38 aa, Artificial Sequence
  Non-cyclic GFR-binding peptide
  MOD_RES (33), (34): Xaa is C or S
  MOD_RES (11), (12), (13), (14), (15): Xaa is A or G
  MOD_RES (16), (17), (18), (19): Xaa is A or G or is absent
EVVMENSLQEXXXXXXXXXYYLMTLPELETPVXXAKPI

SEQ ID NO: 8910 - protein, 31 aa, Artificial Sequence
  Non-cyclic GFR-binding peptide
SRVVMNNSLQEIVNSSDDYYVVPLPELKTPA

SEQ ID NO: 8911 - protein, 40 aa, Artificial Sequence
  Non-cyclic GFR-binding peptide
  MOD_RES (2), (36), (37): Xaa is C or S
  MOD_RES (14), (15), (16), (17), (18): Xaa is A or G
  MOD_RES (19), (20), (21), (22): Xaa is A or G or is absent
GXGEVVMDEYQKYXXXXXXXXXIFLMSIPSLETPVXXAKP

SEQ ID NO: 8912 - protein, 32 aa, Artificial Sequence
  Non-cyclic GFR-binding peptide
  MOD_RES (1), (1): Xaa is C or S
XARVVMNNSLQEIVNSSDDYYLVTLPELQTPA

SEQ ID NO: 8913 - protein, 41 aa, Artificial Sequence
  Non-cyclic GFR-binding peptide
  MOD_RES (2), (4), (38), (39): Xaa is C or S
  MOD_RES (16), (17), (18), (19), (20): Xaa is A or G
  MOD_RES (21), (22), (23), (24): Xaa is A or G or is absent
HXGXARVVMNNSLQEXXXXXXXXXYYVVPLPELQTPAXXPK

SEQ ID NO: 8914 - protein, 35 aa, Artificial Sequence
  Non-cyclic GFR-binding peptide
  MOD_RES (31), (32): Xaa is C or S
EVVMDNSLQEVVKENEDYYLMTLPELETPVXXAKP

SEQ ID NO: 8915 - protein, 42 aa, Artificial Sequence
  Non-cyclic GFR-binding peptide
  MOD_RES (2), (4), (37), (38): Xaa is C or S
  MOD_RES (15), (16), (17), (18), (19): Xaa is A or G
  MOD_RES (20), (21), (22), (23): Xaa is A or G or is absent
SXKXSKVIMNSLQEXXXXXXXXXYYVIPLPELDQSVXXPSAS

SEQ ID NO: 8916 - protein, 36 aa, Artificial Sequence
  Non-cyclic GFR-binding peptide
  MOD_RES (1), (3), (36): Xaa is C or S
  MOD_RES (14), (15), (16), (17), (18): Xaa is A or G
  MOD_RES (19), (20), (21), (22): Xaa is A or G or is absent
XKXSRVIMEYQKYXXXXXXXXXIFLISIPSLAQPVX

SEQ ID NO: 8917 - protein, 37 aa, Artificial Sequence
  Non-cyclic GFR-binding peptide
  MOD_RES (1), (3), (37): Xaa is C or S
  MOD_RES (15), (16), (17), (18), (19): Xaa is A or G
  MOD_RES (20), (21), (22), (23): Xaa is A or G or is absent
XGXSEVVMDNSLQEXXXXXXXXXYYVIPLPELRTPVX

SEQ ID NO: 8918 - protein, 36 aa, Artificial Sequence
  Non-cyclic GFR-binding peptide
  MOD_RES (1), (33), (34): Xaa is C or S
XSEVVMDNSLQEVVNNASDYYLITLPELRTPVXXTP

SEQ ID NO: 8919 - protein, 37 aa, Artificial Sequence
  Non-cyclic GFR-binding peptide
  MOD_RES (2), (36), (37): Xaa is C or S
  MOD_RES (14), (15), (16), (17), (18): Xaa is A or G
  MOD_RES (19), (20), (21), (22): Xaa is A or G or is absent
GXSRVVMNNSLQEXXXXXXXXXYYVVPLPELKTPAXX

SEQ ID NO: 8920 - protein, 39 aa, Artificial Sequence
  Non-cyclic GFR-binding peptide
  MOD_RES (2), (4), (38): Xaa is C or S
  MOD_RES (16), (17), (18), (19), (20): Xaa is A or G
  MOD_RES (21), (22), (23), (24): Xaa is A or G or is absent
HXGXSRVVMNNSLQEXXXXXXXXXYYLVTLPELKTPAXT

SEQ ID NO: 8921 - protein, 37 aa, Artificial Sequence
  Non-cyclic GFR-binding peptide
  MOD_RES (2), (4): Xaa is C or S
  MOD_RES (16), (17), (18), (19), (20): Xaa is A or G
  MOD_RES (21), (22), (23), (24): Xaa is A or G or is absent
HXGXSRVVMNNSLQEXXXXXXXXXYYLVTLPELKTPA

SEQ ID NO: 8922 - protein, 41 aa, Artificial Sequence
  Non-cyclic GFR-binding peptide
  MOD_RES (2), (4), (36), (37): Xaa is C or S
RXGXGEVVMDEYQKYVVKENEDIFLMSIPSLETPVXXAKPI

SEQ ID NO: 8923 - protein, 40 aa, Artificial Sequence
  Non-cyclic GFR-binding peptide
  MOD_RES (1), (35), (36): Xaa is C or S
  MOD_RES (13), (14), (15), (16), (17): Xaa is A or G
  MOD_RES (18), (19), (20), (21): Xaa is A or G or is absent
XGEVVMEEYQKYXXXXXXXXXIFLMSIPSLETPVXXAKPI

SEQ ID NO: 8924 - protein, 32 aa, Artificial Sequence
  Non-cyclic GFR-binding peptide
  MOD_RES (31), (32): Xaa is C or S
RVVMNEYQKYIVNSSDDIFLVSIPSLKTPAXX

SEQ ID NO: 8925 - protein, 40 aa, Artificial Sequence
  Non-cyclic GFR-binding peptide
  MOD_RES (2), (4), (35), (36): Xaa is C or S
SXKXSRVIMEYQKYVKPKRGVIFLISIPSLAQPVXXPAAS

SEQ ID NO: 8926 - protein, 42 aa, Artificial Sequence
  Non-cyclic GFR-binding peptide
  MOD_RES (2), (4), (38): Xaa is C or S
  MOD_RES (16), (17), (18), (19), (20): Xaa is A or G
  MOD_RES (21), (22), (23), (24): Xaa is A or G or is absent
HXGXSRVVMNEYQKYXXXXXXXXXIFLVSIPSLKTPAXTPKT

SEQ ID NO: 8927 - protein, 36 aa, Artificial Sequence
  Non-cyclic GFR-binding peptide
  MOD_RES (1), (34), (35): Xaa is C or S
  MOD_RES (12), (13), (14), (15), (16): Xaa is A or G
  MOD_RES (17), (18), (19), (20): Xaa is A or G or is absent
XSRVIMEYQKYXXXXXXXXXIFLISIPSLAQPVXXP

SEQ ID NO: 8928 - protein, 32 aa, Artificial Sequence
  Non-cyclic GFR-binding peptide
  MOD_RES (32), (32): Xaa is C or S
GEVVMENSLQEVVKDYEDYYLMTLPELETPVX

SEQ ID NO: 8929 - protein, 39 aa, Artificial Sequence
  Non-cyclic GFR-binding peptide
  MOD_RES (1), (3), (35), (36): Xaa is C or S
XGXSRVVMNNSLQEIVNSSDDYYLVTLPELKTPAXXPKP

SEQ ID NO: 8930 - protein, 38 aa, Artificial Sequence
  Non-cyclic GFR-binding peptide
  MOD_RES (1), (35): Xaa is C or S
  MOD_RES (13), (14), (15), (16), (17): Xaa is A or G
  MOD_RES (18), (19), (20), (21): Xaa is A or G or is absent
XSRVVMNNSLQEXXXXXXXXXYYLVTLPELKTPAXTPK

SEQ ID NO: 8931 - protein, 43 aa, Artificial Sequence
  Non-cyclic GFR-binding peptide
  MOD_RES (2), (4), (37), (38): Xaa is C or S
  MOD_RES (15), (16), (17), (18), (19): Xaa is A or G
  MOD_RES (20), (21), (22), (23): Xaa is A or G or is absent
SXKXSRVIMEYQKYXXXXXXXXXIFLISIPSLAQPVXXPAASA

SEQ ID NO: 8932 - protein, 31 aa, Artificial Sequence
  Non-cyclic GFR-binding peptide
  MOD_RES (31), (31): Xaa is C or S
RVVMNEYQKYIVNSSDDIFLVSIPSLQTPAX

SEQ ID NO: 8933 - protein, 41 aa, Artificial Sequence
  Non-cyclic GFR-binding peptide
  MOD_RES (1), (3), (37), (38): Xaa is C or S
  MOD_RES (15), (16), (17), (18), (19): Xaa is A or G
  MOD_RES (20), (21), (22), (23): Xaa is A or G or is absent
XGXSEVVMDNSLQEXXXXXXXXXYYVIPLPELRTPVXXTPP

SEQ ID NO: 8934 - protein, 32 aa, Artificial Sequence
  Non-cyclic GFR-binding peptide
  MOD_RES (31), (32): Xaa is C or S
SRVIMEYQKYVKPKRGVIFLISIPSLAQPVXX

SEQ ID NO: 8935 - protein, 38 aa, Artificial Sequence
  Non-cyclic GFR-binding peptide
  MOD_RES (2), (4), (37), (38): Xaa is C or S
  MOD_RES (15), (16), (17), (18), (19): Xaa is A or G
  MOD_RES (20), (21), (22), (23): Xaa is A or G or is absent
SXKXSKVVMNSLQEXXXXXXXXXYYVIPLPELDQPVXX

SEQ ID NO: 8936 - protein, 39 aa, Artificial Sequence
  Non-cyclic GFR-binding peptide
  MOD_RES (33), (33): Xaa is C or S
  MOD_RES (11), (12), (13), (14), (15): Xaa is A or G
  MOD_RES (16), (17), (18), (19): Xaa is A or G or is absent
RVVMNNSLQEXXXXXXXXXYYVVPLPELKTPAXTPKTVH

SEQ ID NO: 8937 - protein, 35 aa, Artificial Sequence
  Non-cyclic GFR-binding peptide
  MOD_RES (33), (34): Xaa is C or S
  MOD_RES (11), (12), (13), (14), (15): Xaa is A or G
  MOD_RES (16), (17), (18), (19): Xaa is A or G or is absent
RVVMNNSLQEXXXXXXXXXYYVVPLPELQTPAXXP

SEQ ID NO: 8938 - protein, 37 aa, Artificial Sequence
  Non-cyclic GFR-binding peptide
  MOD_RES (34), (35): Xaa is C or S
  MOD_RES (12), (13), (14), (15), (16): Xaa is A or G
  MOD_RES (17), (18), (19), (20): Xaa is A or G or is absent
ARVVMNNSLQEXXXXXXXXXYYLVTLPELQTPAXXPK

SEQ ID NO: 8939 - protein, 34 aa, Artificial Sequence
  Non-cyclic GFR-binding peptide
  MOD_RES (31), (31): Xaa is C or S
RVVMNNSLQEIVNSSDDYYLVTLPELKTPAXTPK

SEQ ID NO: 8940 - protein, 44 aa, Artificial Sequence
  Non-cyclic GFR-binding peptide
  MOD_RES (2), (4), (38), (39): Xaa is C or S
  MOD_RES (16), (17), (18), (19), (20): Xaa is A or G
  MOD_RES (21), (22), (23), (24): Xaa is A or G or is absent
HXGXARVVMNEYQKYXXXXXXXXXIFLVSIPSLQTPAXXPKPVT

SEQ ID NO: 8941 - protein, 39 aa, Artificial Sequence
  Non-cyclic GFR-binding peptide
  MOD_RES (34), (35): Xaa is C or S
  MOD_RES (12), (13), (14), (15), (16): Xaa is A or G
  MOD_RES (17), (18), (19), (20): Xaa is A or G or is absent
SEVVMDNSLQEXXXXXXXXXYYLITLPELRTPVXXTPPT

SEQ ID NO: 8942 - protein, 42 aa, Artificial Sequence
  Non-cyclic GFR-binding peptide
  MOD_RES (1), (3), (37): Xaa is C or S
  MOD_RES (15), (16), (17), (18), (19): Xaa is A or G
  MOD_RES (20), (21), (22), (23): Xaa is A or G or is absent
XGXSRVVMNNSLQEXXXXXXXXXYYVVPLPELKTPAXTPKTV

SEQ ID NO: 8943 - protein, 39 aa, Artificial Sequence
  Non-cyclic GFR-binding peptide
  MOD_RES (2), (4), (37), (38): Xaa is C or S
  MOD_RES (15), (16), (17), (18), (19): Xaa is A or G
  MOD_RES (20), (21), (22), (23): Xaa is A or G or is absent
SXKXSKVIMNSLQEXXXXXXXXXYYVIPLPELDQSVXXP

SEQ ID NO: 8944 - protein, 41 aa, Artificial Sequence
  Non-cyclic GFR-binding peptide
  MOD_RES (1), (3), (37), (38): Xaa is C or S
  MOD_RES (15), (16), (17), (18), (19): Xaa is A or G
  MOD_RES (20), (21), (22), (23): Xaa is A or G or is absent
XGXARVVMNEYQKYXXXXXXXXXIFLVSIPSLQTPAXXPKP

SEQ ID NO: 8945 - protein, 37 aa, Artificial Sequence
  Non-cyclic GFR-binding peptide
  MOD_RES (2), (4), (37): Xaa is C or S
  MOD_RES (15), (16), (17), (18), (19): Xaa is A or G
  MOD_RES (20), (21), (22), (23): Xaa is A or G or is absent
SXKXSKVIMNSLQEXXXXXXXXXYYVIPLPELDQSVX

SEQ ID NO: 8946 - protein, 38 aa, Artificial Sequence
  Non-cyclic GFR-binding peptide
  MOD_RES (1), (33), (34): Xaa is C or S
XSEVVMDQYNKLVVNNASDLYLISIASLRTPVXXTPPT

SEQ ID NO: 8947 - protein, 39 aa, Artificial Sequence
  Non-cyclic GFR-binding peptide
  MOD_RES (1), (35), (36): Xaa is C or S
  MOD_RES (13), (14), (15), (16), (17): Xaa is A or G
  MOD_RES (18), (19), (20), (21): Xaa is A or G or is absent
XGEVVMDNSLQEXXXXXXXXXYYLMTLPELETPVXXAKP

SEQ ID NO: 8948 - protein, 36 aa, Artificial Sequence
  Non-cyclic GFR-binding peptide
  MOD_RES (33), (34): Xaa is C or S
  MOD_RES (11), (12), (13), (14), (15): Xaa is A or G
  MOD_RES (16), (17), (18), (19): Xaa is A or G or is absent
RVVMNNSLQEXXXXXXXXXYYLVTLPELQTPAXXPK

SEQ ID NO: 8949 - protein, 38 aa, Artificial Sequence
  Non-cyclic GFR-binding peptide
  MOD_RES (1), (3), (37), (38): Xaa is C or S
  MOD_RES (15), (16), (17), (18), (19): Xaa is A or G
  MOD_RES (20), (21), (22), (23): Xaa is A or G or is absent
XGXGEVVMDNSLQEXXXXXXXXXYYVMPLPELETPVXX

SEQ ID NO: 8950 - protein, 39 aa, Artificial Sequence
  Non-cyclic GFR-binding peptide
  MOD_RES (2), (34): Xaa is C or S
GXSRVVMNEYQKYIVNSSDDIFLVSIPSLKTPAXTPKTV

SEQ ID NO: 8951 - protein, 37 aa, Artificial Sequence
  Non-cyclic GFR-binding peptide
  MOD_RES (33), (34): Xaa is C or S
  MOD_RES (11), (12), (13), (14), (15): Xaa is A or G
  MOD_RES (16), (17), (18), (19): Xaa is A or G or is absent
SKVVMNSLQEXXXXXXXXXYYVIPLPELDQPVXXPSA

SEQ ID NO: 8952 - protein, 41 aa, Artificial Sequence
  Non-cyclic GFR-binding peptide
  MOD_RES (2), (35), (36): Xaa is C or S
  MOD_RES (13), (14), (15), (16), (17): Xaa is A or G
  MOD_RES (18), (19), (20), (21): Xaa is A or G or is absent
KXSKVIMNSLQEXXXXXXXXXYYVIPLPELDQSVXXPSASA

SEQ ID NO: 8953 - protein, 35 aa, Artificial Sequence
  Non-cyclic GFR-binding peptide
  MOD_RES (1), (3), (34), (35): Xaa is C or S
XKXSKVIMNSLQEIKPTKGIYYVIPLPELDQSVXX

SEQ ID NO: 8954 - protein, 38 aa, Artificial Sequence
  Non-cyclic GFR-binding peptide
  MOD_RES (2), (4), (36), (37): Xaa is C or S
RXGXGEVVMENSLQEVVKDYEDYYVMPLPELETPVXXA

SEQ ID NO: 8955 - protein, 35 aa, Artificial Sequence
  Non-cyclic GFR-binding peptide
  MOD_RES (1), (3): Xaa is C or S
  MOD_RES (14), (15), (16), (17), (18): Xaa is A or G
  MOD_RES (19), (20), (21), (22): Xaa is A or G or is absent
XKXSRVIMEYQKYXXXXXXXXXIFLISIPSLAQPV

SEQ ID NO: 8956 - protein, 34 aa, Artificial Sequence
  Non-cyclic GFR-binding peptide
  MOD_RES (32), (33): Xaa is C or S
ARVVMNNSLQEIVNSSDDYYVVPLPELQTPAXXP

SEQ ID NO: 8957 - protein, 40 aa, Artificial Sequence
  Non-cyclic GFR-binding peptide
  MOD_RES (2), (34), (35): Xaa is C or S
GXSEVVMDRYKKLVVNNASDFYLISIANLRTPVXXTPPTS

SEQ ID NO: 8958 - protein, 38 aa, Artificial Sequence
  Non-cyclic GFR-binding peptide
  MOD_RES (2), (4), (37), (38): Xaa is C or S
  MOD_RES (15), (16), (17), (18), (19): Xaa is A or G
  MOD_RES (20), (21), (22), (23): Xaa is A or G or is absent
SXKXSKVIMEYQKYXXXXXXXXXIFLISIPSLDQSVXX

SEQ ID NO: 8959 - protein, 34 aa, Artificial Sequence
  Non-cyclic GFR-binding peptide
  MOD_RES (1), (3): Xaa is C or S
XGXARVVMNEYQKYIVNSSDDIFLVSIPSLQTPA

SEQ ID NO: 8960 - protein, 41 aa, Artificial Sequence
  Non-cyclic GFR-binding peptide
  MOD_RES (1), (35): Xaa is C or S
  MOD_RES (13), (14), (15), (16), (17): Xaa is A or G
  MOD_RES (18), (19), (20), (21): Xaa is A or G or is absent
XSRVVMNNSLQEXXXXXXXXXYYLVTLPELKTPAXTPKTVH

SEQ ID NO: 8961 - protein, 30 aa, Artificial Sequence
  Non-cyclic GFR-binding peptide
EVVMDNSLQEVVKENEDYYLMTLPELETPV

SEQ ID NO: 8962 - protein, 40 aa, Artificial Sequence
  Non-cyclic GFR-binding peptide
  MOD_RES (34), (35): Xaa is C or S
  MOD_RES (12), (13), (14), (15), (16): Xaa is A or G
  MOD_RES (17), (18), (19), (20): Xaa is A or G or is absent
GEVVMENSLQEXXXXXXXXXYYVMPLPELETPVXXAKPIS

SEQ ID NO: 8963 - protein, 37 aa, Artificial Sequence
  Non-cyclic GFR-binding peptide
  MOD_RES (1), (3), (34), (35): Xaa is C or S
XKXSRVIMEYQKYVKPKRGVIFLISIPSLAQPVXXPA

SEQ ID NO: 8964 - protein, 32 aa, Artificial Sequence
  Non-cyclic GFR-binding peptide
  MOD_RES (11), (12), (13), (14), (15): Xaa is A or G
  MOD_RES (16), (17), (18), (19): Xaa is A or G or is absent
EVVMENSLQEXXXXXXXXXYYLMTLPELETPV

SEQ ID NO: 8965 - protein, 38 aa, Artificial Sequence
  Non-cyclic GFR-binding peptide
  MOD_RES (1), (35), (36): Xaa is C or S
  MOD_RES (13), (14), (15), (16), (17): Xaa is A or G
  MOD_RES (18), (19), (20), (21): Xaa is A or G or is absent
XGEVVMEEYQKYXXXXXXXXXIFLMSIPSLETPVXXAK

SEQ ID NO: 8966 - protein, 38 aa, Artificial Sequence
  Non-cyclic GFR-binding peptide
  MOD_RES (2), (4), (36), (37): Xaa is C or S
HXGXARVVMNNSLQEIVNSSDDYYVVPLPELQTPAXXP

SEQ ID NO: 8967 - protein, 37 aa, Artificial Sequence
  Non-cyclic GFR-binding peptide
  MOD_RES (1), (3), (37): Xaa is C or S
  MOD_RES (15), (16), (17), (18), (19): Xaa is A or G
  MOD_RES (20), (21), (22), (23): Xaa is A or G or is absent
XGXGEVVMDNSLQEXXXXXXXXXYYLMTLPELETPVX

SEQ ID NO: 8968 - protein, 38 aa, Artificial Sequence
  Non-cyclic GFR-binding peptide
  MOD_RES (33), (34): Xaa is C or S
  MOD_RES (11), (12), (13), (14), (15): Xaa is A or G
  MOD_RES (16), (17), (18), (19): Xaa is A or G or is absent
EVVMDEYQKYXXXXXXXXXIFLMSIPSLETPVXXAKPI

SEQ ID NO: 8969 - protein, 31 aa, Artificial Sequence
  Non-cyclic GFR-binding peptide
  MOD_RES (31), (31): Xaa is C or S
RVVMNNSLQEIVNSSDDYYVVPLPELKTPAX

SEQ ID NO: 8970 - protein, 36 aa, Artificial Sequence
  Non-cyclic GFR-binding peptide
  MOD_RES (2), (36): Xaa is C or S
  MOD_RES (14), (15), (16), (17), (18): Xaa is A or G
  MOD_RES (19), (20), (21), (22): Xaa is A or G or is absent
GXARVVMNEYQKYXXXXXXXXXIFLVSIPSLQTPAX

SEQ ID NO: 8971 - protein, 39 aa, Artificial Sequence
  Non-cyclic GFR-binding peptide
  MOD_RES (33), (34): Xaa is C or S
  MOD_RES (11), (12), (13), (14), (15): Xaa is A or G
  MOD_RES (16), (17), (18), (19): Xaa is A or G or is absent
RVVMNEYQKYXXXXXXXXXIFLVSIPSLKTPAXXPKPVY

SEQ ID NO: 8972 - protein, 36 aa, Artificial Sequence
  Non-cyclic GFR-binding peptide
  MOD_RES (2), (36): Xaa is C or S
  MOD_RES (14), (15), (16), (17), (18): Xaa is A or G
  MOD_RES (19), (20), (21), (22): Xaa is A or G or is absent
GXARVVMNNSLQEXXXXXXXXXYYLVTLPELQTPAX

SEQ ID NO: 8973 - protein, 41 aa, Artificial Sequence
  Non-cyclic GFR-binding peptide
  MOD_RES (2), (4), (35), (36): Xaa is C or S
SXKXSRVIMEYQKYVKPKRGVIFLISIPSLAQPVXXPAASA

SEQ ID NO: 8974 - protein, 37 aa, Artificial Sequence
  Non-cyclic GFR-binding peptide
  MOD_RES (31), (32): Xaa is C or S
SKVVMEYQKYVKPTRGVIFLISIPSLDQPVXXPSASA

SEQ ID NO: 8975 - protein, 36 aa, Artificial Sequence
  Non-cyclic GFR-binding peptide
  MOD_RES (32), (33): Xaa is C or S
ARVVMNNSLQEIVNSSDDYYLVTLPELQTPAXXPKP

SEQ ID NO: 8976 - protein, 37 aa, Artificial Sequence
  Non-cyclic GFR-binding peptide
  MOD_RES (1), (3), (37): Xaa is C or S
  MOD_RES (15), (16), (17), (18), (19): Xaa is A or G
  MOD_RES (20), (21), (22), (23): Xaa is A or G or is absent
XGXGEVVMENSLQEXXXXXXXXXYYLMTLPELETPVX

SEQ ID NO: 8977 - protein, 38 aa, Artificial Sequence
  Non-cyclic GFR-binding peptide
  MOD_RES (33), (34): Xaa is C or S
  MOD_RES (11), (12), (13), (14), (15): Xaa is A or G
  MOD_RES (16), (17), (18), (19): Xaa is A or G or is absent
EVVMDRYKKLXXXXXXXXXFYLISIANLRTPVXXTPPT

SEQ ID NO: 8978 - protein, 31 aa, Artificial Sequence
  Non-cyclic GFR-binding peptide
  MOD_RES (1), (1): Xaa is C or S
XSKVVMNSLQEVKPTRGVYYVIPLPELDQPV

SEQ ID NO: 8979 - protein, 32 aa, Artificial Sequence
  Non-cyclic GFR-binding peptide
  MOD_RES (11), (12), (13), (14), (15): Xaa is A or G
  MOD_RES (16), (17), (18), (19): Xaa is A or G or is absent
EVVMENSLQEXXXXXXXXXYYVMPLPELETPV

SEQ ID NO: 8980 - protein, 34 aa, Artificial Sequence
  Non-cyclic GFR-binding peptide
  MOD_RES (1), (3): Xaa is C or S
XGXGEVVMDNSLQEVVKENEDYYLMTLPELETPV

SEQ ID NO: 8981 - protein, 41 aa, Artificial Sequence
  Non-cyclic GFR-binding peptide
  MOD_RES (2), (36), (37): Xaa is C or S
  MOD_RES (14), (15), (16), (17), (18): Xaa is A or G
  MOD_RES (19), (20), (21), (22): Xaa is A or G or is absent
GXSEVVMDNSLQEXXXXXXXXXYYLITLPELRTPVXXTPPT

SEQ ID NO: 8982 - protein, 40 aa, Artificial Sequence
  Non-cyclic GFR-binding peptide
  MOD_RES (34), (35): Xaa is C or S
  MOD_RES (12), (13), (14), (15), (16): Xaa is A or G
  MOD_RES (17), (18), (19), (20): Xaa is A or G or is absent
ARVVMNNSLQEXXXXXXXXXYYLVTLPELQTPAXXPKPVT

SEQ ID NO: 8983 - protein, 34 aa, Artificial Sequence
  Non-cyclic GFR-binding peptide
  MOD_RES (2), (2): Xaa is C or S
  MOD_RES (13), (14), (15), (16), (17): Xaa is A or G
  MOD_RES (18), (19), (20), (21): Xaa is A or G or is absent
KXSRVIMEYQKYXXXXXXXXXIFLISIPSLAQPV

SEQ ID NO: 8984 - protein, 34 aa, Artificial Sequence
  Non-cyclic GFR-binding peptide
  MOD_RES (34), (34): Xaa is C or S
  MOD_RES (12), (13), (14), (15), (16): Xaa is A or G
  MOD_RES (17), (18), (19), (20): Xaa is A or G or is absent
ARVVMNNSLQEXXXXXXXXXYYVVPLPELQTPAX

SEQ ID NO: 8985 - protein, 39 aa, Artificial Sequence
  Non-cyclic GFR-binding peptide
  MOD_RES (1), (3), (37), (38): Xaa is C or S
  MOD_RES (15), (16), (17), (18), (19): Xaa is A or G
  MOD_RES (20), (21), (22), (23): Xaa is A or G or is absent
XGXGEVVMEEYQKYXXXXXXXXXIFLMSIPSLETPVXXA

SEQ ID NO: 8986 - protein, 34 aa, Artificial Sequence
  Non-cyclic GFR-binding peptide
  MOD_RES (1), (1): Xaa is C or S
  MOD_RES (13), (14), (15), (16), (17): Xaa is A or G
  MOD_RES (18), (19), (20), (21): Xaa is A or G or is absent
XSEVVMDNSLQEXXXXXXXXXYYVIPLPELRTPV

SEQ ID NO: 8987 - protein, 34 aa, Artificial Sequence
  Non-cyclic GFR-binding peptide
  MOD_RES (32), (33): Xaa is C or S
SEVVMDRYKKLVVNNASDFYLISIANLRTPVXXT

SEQ ID NO: 8988 - protein, 39 aa, Artificial Sequence
  Non-cyclic GFR-binding peptide
  MOD_RES (34), (35): Xaa is C or S
  MOD_RES (12), (13), (14), (15), (16): Xaa is A or G
  MOD_RES (17), (18), (19), (20): Xaa is A or G or is absent
GEVVMDNSLQEXXXXXXXXXYYLMTLPELETPVXXAKPI

SEQ ID NO: 8989 - protein, 41 aa, Artificial Sequence
  Non-cyclic GFR-binding peptide
  MOD_RES (2), (4), (36), (37): Xaa is C or S
RXGXSEVVMDNSLQEVVNNASDYYLITLPELRTPVXXTPPT

SEQ ID NO: 8990 - protein, 33 aa, Artificial Sequence
  Non-cyclic GFR-binding peptide
  MOD_RES (1), (33): Xaa is C or S
XGEVVMENSLQEVVKDYEDYYLMTLPELETPVX

SEQ ID NO: 8991 - protein, 35 aa, Artificial Sequence
  Non-cyclic GFR-binding peptide
  MOD_RES (1), (33), (34): Xaa is C or S
XGEVVMEEYQKYVVKDYEDIFLMSIPSLETPVXXA

SEQ ID NO: 8992 - protein, 37 aa, Artificial Sequence
  Non-cyclic GFR-binding peptide
  MOD_RES (32), (33): Xaa is C or S
GEVVMDNSLQEVVKENEDYYVMPLPELETPVXXAKPI

SEQ ID NO: 8993 - protein, 38 aa, Artificial Sequence
  Non-cyclic GFR-binding peptide
  MOD_RES (1), (33), (34): Xaa is C or S
XGEVVMEEYQKYVVKDYEDIFLMSIPSLETPVXXAKPI

SEQ ID NO: 8994 - protein, 37 aa, Artificial Sequence
  Non-cyclic GFR-binding peptide
  MOD_RES (1), (3), (34), (35): Xaa is C or S
XKXSRVIMNSLQEVKPKRGVYYLITLPELAQPVXXPA

SEQ ID NO: 8995 - protein, 35 aa, Artificial Sequence
  Non-cyclic GFR-binding peptide
  MOD_RES (1), (32), (33): Xaa is C or S
XSKVIMNSLQEIKPTKGIYYVIPLPELDQSVXXPS

SEQ ID NO: 8996 - protein, 40 aa, Artificial Sequence
  Non-cyclic GFR-binding peptide
  MOD_RES (2), (4), (38), (39): Xaa is C or S
  MOD_RES (16), (17), (18), (19), (20): Xaa is A or G
  MOD_RES (21), (22), (23), (24): Xaa is A or G or is absent
RXGXGEVVMENSLQEXXXXXXXXXYYVMPLPELETPVXXA

SEQ ID NO: 8997 - protein, 34 aa, Artificial Sequence
  Non-cyclic GFR-binding peptide
  MOD_RES (31), (32): Xaa is C or S
EVVMDEYQKYVVKENEDIFLMSIPSLETPVXXAK

SEQ ID NO: 8998 - protein, 40 aa, Artificial Sequence
  Non-cyclic GFR-binding peptide
  MOD_RES (1), (35), (36): Xaa is C or S
  MOD_RES (13), (14), (15), (16), (17): Xaa is A or G
  MOD_RES (18), (19), (20), (21): Xaa is A or G or is absent
XSRVVMNEYQKYXXXXXXXXXIFLVSIPSLKTPAXXPKPV

SEQ ID NO: 8999 - protein, 35 aa, Artificial Sequence
  Non-cyclic GFR-binding peptide
  MOD_RES (33), (34): Xaa is C or S
  MOD_RES (11), (12), (13), (14), (15): Xaa is A or G
  MOD_RES (16), (17), (18), (19): Xaa is A or G or is absent
RVVMNNSLQEXXXXXXXXXYYLVTLPELKTPAXXP

SEQ ID NO: 9000 - protein, 34 aa, Artificial Sequence
  Non-cyclic GFR-binding peptide
  MOD_RES (1), (33), (34): Xaa is C or S
XGEVVMDNSLQEVVKENEDYYLMTLPELETPVXX

SEQ ID NO: 9001 - protein, 34 aa, Artificial Sequence
  Non-cyclic GFR-binding peptide
  MOD_RES (1), (3): Xaa is C or S
XGXGEVVMEEYQKYVVKDYEDIFLMSIPSLETPV

SEQ ID NO: 9002 - protein, 34 aa, Artificial Sequence
  Non-cyclic GFR-binding peptide
  MOD_RES (32), (32): Xaa is C or S
SRVVMNNSLQEIVNSSDDYYLVTLPELKTPAXTP

SEQ ID NO: 9003 - protein, 37 aa, Artificial Sequence
  Non-cyclic GFR-binding peptide
  MOD_RES (1), (34), (35): Xaa is C or S
  MOD_RES (12), (13), (14), (15), (16): Xaa is A or G
  MOD_RES (17), (18), (19), (20): Xaa is A or G or is absent
XSKVVMNSLQEXXXXXXXXXYYVIPLPELDQPVXXPS

SEQ ID NO: 9004 - protein, 34 aa, Artificial Sequence
  Non-cyclic GFR-binding peptide
  MOD_RES (2), (33), (34): Xaa is C or S
KXSRVIMEYQKYVKPKRGVIFLISIPSLAQPVXX

SEQ ID NO: 9005 - protein, 40 aa, Artificial Sequence
  Non-cyclic GFR-binding peptide
  MOD_RES (34), (34): Xaa is C or S
  MOD_RES (12), (13), (14), (15), (16): Xaa is A or G
  MOD_RES (17), (18), (19), (20): Xaa is A or G or is absent
SRVVMNEYQKYXXXXXXXXXIFLVSIPSLKTPAXTPKTVH

SEQ ID NO: 9006 - protein, 39 aa, Artificial Sequence
  Non-cyclic GFR-binding peptide
  MOD_RES (34), (35): Xaa is C or S
  MOD_RES (12), (13), (14), (15), (16): Xaa is A or G
  MOD_RES (17), (18), (19), (20): Xaa is A or G or is absent
ARVVMNNSLQEXXXXXXXXXYYLVTLPELQTPAXXPKPV

SEQ ID NO: 9007 - protein, 35 aa, Artificial Sequence
  Non-cyclic GFR-binding peptide
  MOD_RES (1), (35): Xaa is C or S
  MOD_RES (13), (14), (15), (16), (17): Xaa is A or G
  MOD_RES (18), (19), (20), (21): Xaa is A or G or is absent
XSEVVMDNSLQEXXXXXXXXXYYLITLPELRTPVX

SEQ ID NO: 9008 - protein, 36 aa, Artificial Sequence
  Non-cyclic GFR-binding peptide
  MOD_RES (31), (31): Xaa is C or S
RVVMNEYQKYIVNSSDDIFLVSIPSLKTPAXTPKTV

SEQ ID NO: 9009 - protein, 39 aa, Artificial Sequence
  Non-cyclic GFR-binding peptide
  MOD_RES (33), (34): Xaa is C or S
  MOD_RES (11), (12), (13), (14), (15): Xaa is A or G
  MOD_RES (16), (17), (18), (19): Xaa is A or G or is absent
EVVMDQYNKLXXXXXXXXXLYLISIASLRTPVXXTPPTS

SEQ ID NO: 9010 - protein, 41 aa, Artificial Sequence
  Non-cyclic GFR-binding peptide
  MOD_RES (2), (4), (36), (37): Xaa is C or S
RXGXSEVVMDRYKKLVVNNASDFYLISIANLRTPVXXTPPT

SEQ ID NO: 9011 - protein, 39 aa, Artificial Sequence
  Non-cyclic GFR-binding peptide
  MOD_RES (2), (4), (38), (39): Xaa is C or S
  MOD_RES (16), (17), (18), (19), (20): Xaa is A or G
  MOD_RES (21), (22), (23), (24): Xaa is A or G or is absent
RXGXGEVVMDNSLQEXXXXXXXXXYYVMPLPELETPVXX

SEQ ID NO: 9012 - protein, 37 aa, Artificial Sequence
  Non-cyclic GFR-binding peptide
  MOD_RES (2), (35), (36): Xaa is C or S
  MOD_RES (13), (14), (15), (16), (17): Xaa is A or G
  MOD_RES (18), (19), (20), (21): Xaa is A or G or is absent
KXSKVIMEYQKYXXXXXXXXXIFLISIPSLDQSVXXP

SEQ ID NO: 9013 - protein, 34 aa, Artificial Sequence
  Non-cyclic GFR-binding peptide
  MOD_RES (1), (33), (34): Xaa is C or S
XGEVVMENSLQEVVKDYEDYYLMTLPELETPVXX

SEQ ID NO: 9014 - protein, 33 aa, Artificial Sequence
  Non-cyclic GFR-binding peptide
  MOD_RES (31), (32): Xaa is C or S
EVVMDQYNKLVVNNASDLYLISIASLRTPVXXT

SEQ ID NO: 9015 - protein, 30 aa, Artificial Sequence
  Non-cyclic GFR-binding peptide
EVVMDNSLQEVVKENEDYYVMPLPELETPV

SEQ ID NO: 9016 - protein, 37 aa, Artificial Sequence
  Non-cyclic GFR-binding peptide
  MOD_RES (1), (3), (36), (37): Xaa is C or S
  MOD_RES (14), (15), (16), (17), (18): Xaa is A or G
  MOD_RES (19), (20), (21), (22): Xaa is A or G or is absent
XKXSRVIMEYQKYXXXXXXXXXIFLISIPSLAQPVXX

SEQ ID NO: 9017 - protein, 42 aa, Artificial Sequence
  Non-cyclic GFR-binding peptide
  MOD_RES (1), (3), (37), (38): Xaa is C or S
  MOD_RES (15), (16), (17), (18), (19): Xaa is A or G
  MOD_RES (20), (21), (22), (23): Xaa is A or G or is absent
XGXSEVVMDQYNKLXXXXXXXXXLYLISIASLRTPVXXTPPT

SEQ ID NO: 9018 - protein, 36 aa, Artificial Sequence
  Non-cyclic GFR-binding peptide
  MOD_RES (34), (34): Xaa is C or S
  MOD_RES (12), (13), (14), (15), (16): Xaa is A or G
  MOD_RES (17), (18), (19), (20): Xaa is A or G or is absent
SRVVMNEYQKYXXXXXXXXXIFLVSIPSLKTPAXTP

SEQ ID NO: 9019 - protein, 39 aa, Artificial Sequence
  Non-cyclic GFR-binding peptide
  MOD_RES (2), (34), (35): Xaa is C or S
GXGEVVMDNSLQEVVKENEDYYLMTLPELETPVXXAKPI

SEQ ID NO: 9020 - protein, 35 aa, Artificial Sequence
  Non-cyclic GFR-binding peptide
  MOD_RES (34), (35): Xaa is C or S
  MOD_RES (12), (13), (14), (15), (16): Xaa is A or G
  MOD_RES (17), (18), (19), (20): Xaa is A or G or is absent
ARVVMNNSLQEXXXXXXXXXYYVVPLPELQTPAXX

SEQ ID NO: 9021 - protein, 35 aa, Artificial Sequence
  Non-cyclic GFR-binding peptide
  MOD_RES (31), (32): Xaa is C or S
RVVMNNSLQEIVNSSDDYYVVPLPELKTPAXXPKP

SEQ ID NO: 9022 - protein, 35 aa, Artificial Sequence
  Non-cyclic GFR-binding peptide
  MOD_RES (1), (33), (34): Xaa is C or S
XSRVVMNNSLQEIVNSSDDYYVVPLPELKTPAXXP

SEQ ID NO: 9023 - protein, 36 aa, Artificial Sequence
  Non-cyclic GFR-binding peptide
  MOD_RES (2), (34), (35): Xaa is C or S
GXGEVVMENSLQEVVKDYEDYYVMPLPELETPVXXA

SEQ ID NO: 9024 - protein, 36 aa, Artificial Sequence
  Non-cyclic GFR-binding peptide
  MOD_RES (2), (34), (35): Xaa is C or S
GXSRVVMNNSLQEIVNSSDDYYVVPLPELKTPAXXP

SEQ ID NO: 9025 - protein, 34 aa, Artificial Sequence
  Non-cyclic GFR-binding peptide
  MOD_RES (1), (3): Xaa is C or S
XGXSEVVMDRYKKLVVNNASDFYLISIANLRTPV

SEQ ID NO: 9026 - protein, 32 aa, Artificial Sequence
  Non-cyclic GFR-binding peptide
  MOD_RES (11), (12), (13), (14), (15): Xaa is A or G
  MOD_RES (16), (17), (18), (19): Xaa is A or G or is absent
EVVMDEYQKYXXXXXXXXXIFLMSIPSLETPV

SEQ ID NO: 9027 - protein, 39 aa, Artificial Sequence
  Non-cyclic GFR-binding peptide
  MOD_RES (1), (3), (35), (36): Xaa is C or S
XGXGEVVMDNSLQEVVKENEDYYLMTLPELETPVXXAKP

SEQ ID NO: 9028 - protein, 35 aa, Artificial Sequence
  Non-cyclic GFR-binding peptide
  MOD_RES (1), (33), (34): Xaa is C or S
XSEVVMDRYKKLVVNNASDFYLISIANLRTPVXXT

SEQ ID NO: 9029 - protein, 35 aa, Artificial Sequence
  Non-cyclic GFR-binding peptide
  MOD_RES (1), (33), (34): Xaa is C or S
XARVVMNEYQKYIVNSSDDIFLVSIPSLQTPAXXP

SEQ ID NO: 9030 - protein, 34 aa, Artificial Sequence
  Non-cyclic GFR-binding peptide
  MOD_RES (2), (34): Xaa is C or S
GXGEVVMEEYQKYVVKDYEDIFLMSIPSLETPVX

SEQ ID NO: 9031 - protein, 32 aa, Artificial Sequence
  Non-cyclic GFR-binding peptide
  MOD_RES (1), (1): Xaa is C or S
XGEVVMDNSLQEVVKENEDYYLMTLPELETPV

SEQ ID NO: 9032 - protein, 33 aa, Artificial Sequence
  Non-cyclic GFR-binding peptide
  MOD_RES (1), (1): Xaa is C or S
  MOD_RES (12), (13), (14), (15), (16): Xaa is A or G
  MOD_RES (17), (18), (19), (20): Xaa is A or G or is absent
XSRVIMEYQKYXXXXXXXXXIFLISIPSLAQPV

SEQ ID NO: 9033 - protein, 32 aa, Artificial Sequence
  Non-cyclic GFR-binding peptide
  MOD_RES (2), (2): Xaa is C or S
KXSRVIMEYQKYVKPKRGVIFLISIPSLAQPV

SEQ ID NO: 9034 - protein, 36 aa, Artificial Sequence
  Non-cyclic GFR-binding peptide
  MOD_RES (2), (4), (36): Xaa is C or S
HXGXARVVMNEYQKYIVNSSDDIFLVSIPSLQTPAX

SEQ ID NO: 9035 - protein, 42 aa, Artificial Sequence
  Non-cyclic GFR-binding peptide
  MOD_RES (2), (36), (37): Xaa is C or S
  MOD_RES (14), (15), (16), (17), (18): Xaa is A or G
  MOD_RES (19), (20), (21), (22): Xaa is A or G or is absent
GXGEVVMENSLQEXXXXXXXXXYYLMTLPELETPVXXAKPIS

SEQ ID NO: 9036 - protein, 40 aa, Artificial Sequence
  Non-cyclic GFR-binding peptide
  MOD_RES (1), (3), (37): Xaa is C or S
  MOD_RES (15), (16), (17), (18), (19): Xaa is A or G
  MOD_RES (20), (21), (22), (23): Xaa is A or G or is absent
XGXSRVVMNNSLQEXXXXXXXXXYYVVPLPELKTPAXTPK

SEQ ID NO: 9037 - protein, 43 aa, Artificial Sequence
  Non-cyclic GFR-binding peptide
  MOD_RES (2), (4), (37), (38): Xaa is C or S
  MOD_RES (15), (16), (17), (18), (19): Xaa is A or G
  MOD_RES (20), (21), (22), (23): Xaa is A or G or is absent
SXKXSKVIMNSLQEXXXXXXXXXYYVIPLPELDQSVXXPSASA

SEQ ID NO: 9038 - protein, 32 aa, Artificial Sequence
  Non-cyclic GFR-binding peptide
  MOD_RES (31), (32): Xaa is C or S
EVVMDRYKKLVVNNASDFYLISIANLRTPVXX

SEQ ID NO: 9039 - protein, 36 aa, Artificial Sequence
  Non-cyclic GFR-binding peptide
  MOD_RES (2), (4): Xaa is C or S
  MOD_RES (15), (16), (17), (18), (19): Xaa is A or G
  MOD_RES (20), (21), (22), (23): Xaa is A or G or is absent
SXKXSKVVMNSLQEXXXXXXXXXYYVIPLPELDQPV

SEQ ID NO: 9040 - protein, 31 aa, Artificial Sequence
  Non-cyclic GFR-binding peptide
  MOD_RES (31), (31): Xaa is C or S
EVVMENSLQEVVKDYEDYYVMPLPELETPVX

SEQ ID NO: 9041 - protein, 35 aa, Artificial Sequence
  Non-cyclic GFR-binding peptide
  MOD_RES (1), (33), (34): Xaa is C or S
XGEVVMDEYQKYVVKENEDIFLMSIPSLETPVXXA

SEQ ID NO: 9042 - protein, 39 aa, Artificial Sequence
  Non-cyclic GFR-binding peptide
  MOD_RES (1), (3), (35): Xaa is C or S
XGXSRVVMNEYQKYIVNSSDDIFLVSIPSLKTPAXTPKT

SEQ ID NO: 9043 - protein, 41 aa, Artificial Sequence
  Non-cyclic GFR-binding peptide
  MOD_RES (2), (4), (36): Xaa is C or S
HXGXSRVVMNNSLQEIVNSSDDYYLVTLPELKTPAXTPKTV

SEQ ID NO: 9044 - protein, 36 aa, Artificial Sequence
  Non-cyclic GFR-binding peptide
  MOD_RES (2), (34), (35): Xaa is C or S
GXSRVVMNEYQKYIVNSSDDIFLVSIPSLKTPAXXP

SEQ ID NO: 9045 - protein, 36 aa, Artificial Sequence
  Non-cyclic GFR-binding peptide
  MOD_RES (31), (32): Xaa is C or S
EVVMEEYQKYVVKDYEDIFLMSIPSLETPVXXAKPI

SEQ ID NO: 9046 - protein, 37 aa, Artificial Sequence
  Non-cyclic GFR-binding peptide
  MOD_RES (1), (3), (37): Xaa is C or S
  MOD_RES (15), (16), (17), (18), (19): Xaa is A or G
  MOD_RES (20), (21), (22), (23): Xaa is A or G or is absent
XGXSRVVMNNSLQEXXXXXXXXXYYLVTLPELKTPAX

SEQ ID NO: 9047 - protein, 37 aa, Artificial Sequence
  Non-cyclic GFR-binding peptide
  MOD_RES (34), (35): Xaa is C or S
  MOD_RES (12), (13), (14), (15), (16): Xaa is A or G
  MOD_RES (17), (18), (19), (20): Xaa is A or G or is absent
SRVVMNNSLQEXXXXXXXXXYYLVTLPELKTPAXXPK

SEQ ID NO: 9048 - protein, 36 aa, Artificial Sequence
  Non-cyclic GFR-binding peptide
  MOD_RES (1), (3): Xaa is C or S
  MOD_RES (15), (16), (17), (18), (19): Xaa is A or G
  MOD_RES (20), (21), (22), (23): Xaa is A or G or is absent
XGXARVVMNNSLQEXXXXXXXXXYYLVTLPELQTPA

SEQ ID NO: 9049 - protein, 40 aa, Artificial Sequence
  Non-cyclic GFR-binding peptide
  MOD_RES (1), (3), (35): Xaa is C or S
XGXSRVVMNNSLQEIVNSSDDYYLVTLPELKTPAXTPKTV

SEQ ID NO: 9050 - protein, 31 aa, Artificial Sequence
  Non-cyclic GFR-binding peptide
  MOD_RES (1), (1): Xaa is C or S
XSRVIMEYQKYVKPKRGVIFLISIPSLAQPV

SEQ ID NO: 9051 - protein, 42 aa, Artificial Sequence
  Non-cyclic GFR-binding peptide
  MOD_RES (2), (4), (36), (37): Xaa is C or S
RXGXGEVVMDNSLQEVVKENEDYYVMPLPELETPVXXAKPIK

SEQ ID NO: 9052 - protein, 37 aa, Artificial Sequence
  Non-cyclic GFR-binding peptide
  MOD_RES (2), (36), (37): Xaa is C or S
  MOD_RES (14), (15), (16), (17), (18): Xaa is A or G
  MOD_RES (19), (20), (21), (22): Xaa is A or G or is absent
GXGEVVMDNSLQEXXXXXXXXXYYVMPLPELETPVXX

SEQ ID NO: 9053 - protein, 42 aa, Artificial Sequence
  Non-cyclic GFR-binding peptide
  MOD_RES (1), (3), (36), (37): Xaa is C or S
  MOD_RES (14), (15), (16), (17), (18): Xaa is A or G
  MOD_RES (19), (20), (21), (22): Xaa is A or G or is absent
XKXSKVIMEYQKYXXXXXXXXXIFLISIPSLDQSVXXPSASA

SEQ ID NO: 9054 - protein, 36 aa, Artificial Sequence
  Non-cyclic GFR-binding peptide
  MOD_RES (2), (4), (35), (36): Xaa is C or S
SXKXSKVIMNSLQEIKPTKGIYYVIPLPELDQSVXX

SEQ ID NO: 9055 - protein, 33 aa, Artificial Sequence
  Non-cyclic GFR-binding peptide
  MOD_RES (1), (3): Xaa is C or S
XKXSRVIMNSLQEVKPKRGVYYLITLPELAQPV

SEQ ID NO: 9056 - protein, 38 aa, Artificial Sequence
  Non-cyclic GFR-binding peptide
  MOD_RES (34), (35): Xaa is C or S
  MOD_RES (12), (13), (14), (15), (16): Xaa is A or G
  MOD_RES (17), (18), (19), (20): Xaa is A or G or is absent
GEVVMENSLQEXXXXXXXXXYYVMPLPELETPVXXAKP

SEQ ID NO: 9057 - protein, 39 aa, Artificial Sequence
  Non-cyclic GFR-binding peptide
  MOD_RES (2), (4), (38), (39): Xaa is C or S
  MOD_RES (16), (17), (18), (19), (20): Xaa is A or G
  MOD_RES (21), (22), (23), (24): Xaa is A or G or is absent
RXGXGEVVMDNSLQEXXXXXXXXXYYLMTLPELETPVXX

SEQ ID NO: 9058 - protein, 36 aa, Artificial Sequence
  Non-cyclic GFR-binding peptide
  MOD_RES (31), (32): Xaa is C or S
EVVMDEYQKYVVKENEDIFLMSIPSLETPVXXAKPI

SEQ ID NO: 9059 - protein, 35 aa, Artificial Sequence
  Non-cyclic GFR-binding peptide
  MOD_RES (32), (33): Xaa is C or S
SEVVMDNSLQEVVNNASDYYLITLPELRTPVXXTP

SEQ ID NO: 9060 - protein, 33 aa, Artificial Sequence
  Non-cyclic GFR-binding peptide
  MOD_RES (31), (32): Xaa is C or S
EVVMDNSLQEVVNNASDYYLITLPELRTPVXXT

SEQ ID NO: 9061 - protein, 36 aa, Artificial Sequence
  Non-cyclic GFR-binding peptide
  MOD_RES (33), (34): Xaa is C or S
  MOD_RES (11), (12), (13), (14), (15): Xaa is A or G
  MOD_RES (16), (17), (18), (19): Xaa is A or G or is absent
EVVMDQYNKLXXXXXXXXXLYLISIASLRTPVXXTP

SEQ ID NO: 9062 - protein, 34 aa, Artificial Sequence
  Non-cyclic GFR-binding peptide
  MOD_RES (31), (32): Xaa is C or S
RVVMNEYQKYIVNSSDDIFLVSIPSLKTPAXXPK

SEQ ID NO: 9063 - protein, 38 aa, Artificial Sequence
  Non-cyclic GFR-binding peptide
  MOD_RES (1), (32), (33): Xaa is C or S
XSKVVMEYQKYVKPTRGVIFLISIPSLDQPVXXPSASA

SEQ ID NO: 9064 - protein, 37 aa, Artificial Sequence
  Non-cyclic GFR-binding peptide
  MOD_RES (31), (32): Xaa is C or S
RVVMNNSLQEIVNSSDDYYLVTLPELKTPAXXPKPVY

SEQ ID NO: 9065 - protein, 37 aa, Artificial Sequence
  Non-cyclic GFR-binding peptide
  MOD_RES (2), (4), (36), (37): Xaa is C or S
HXGXSRVVMNNSLQEIVNSSDDYYLVTLPELKTPAXX

SEQ ID NO: 9066 - protein, 38 aa, Artificial Sequence
  Non-cyclic GFR-binding peptide
  MOD_RES (2), (35), (36): Xaa is C or S
  MOD_RES (13), (14), (15), (16), (17): Xaa is A or G
  MOD_RES (18), (19), (20), (21): Xaa is A or G or is absent
KXSRVIMEYQKYXXXXXXXXXIFLISIPSLAQPVXXPA

SEQ ID NO: 9067 - protein, 38 aa, Artificial Sequence
  Non-cyclic GFR-binding peptide
  MOD_RES (1), (33), (34): Xaa is C or S
XGEVVMENSLQEVVKDYEDYYVMPLPELETPVXXAKPI

SEQ ID NO: 9068 - protein, 33 aa, Artificial Sequence
  Non-cyclic GFR-binding peptide
  MOD_RES (31), (32): Xaa is C or S
EVVMENSLQEVVKDYEDYYVMPLPELETPVXXA

SEQ ID NO: 9069 - protein, 38 aa, Artificial Sequence
  Non-cyclic GFR-binding peptide
  MOD_RES (1), (3), (34), (35): Xaa is C or S
XKXSRVIMNSLQEVKPKRGVYYLITLPELAQPVXXPAA

SEQ ID NO: 9070 - protein, 36 aa, Artificial Sequence
  Non-cyclic GFR-binding peptide
  MOD_RES (33), (34): Xaa is C or S
  MOD_RES (11), (12), (13), (14), (15): Xaa is A or G
  MOD_RES (16), (17), (18), (19): Xaa is A or G or is absent
RVVMNNSLQEXXXXXXXXXYYVVPLPELQTPAXXPK

SEQ ID NO: 9071 - protein, 34 aa, Artificial Sequence
  Non-cyclic GFR-binding peptide
  MOD_RES (1), (3): Xaa is C or S
XGXGEVVMENSLQEVVKDYEDYYVMPLPELETPV

SEQ ID NO: 9072 - protein, 35 aa, Artificial Sequence
  Non-cyclic GFR-binding peptide
  MOD_RES (2), (4), (35): Xaa is C or S
SXKXSKVVMEYQKYVKPTRGVIFLISIPSLDQPVX

SEQ ID NO: 9073 - protein, 40 aa, Artificial Sequence
  Non-cyclic GFR-binding peptide
  MOD_RES (1), (3), (36), (37): Xaa is C or S
  MOD_RES (14), (15), (16), (17), (18): Xaa is A or G
  MOD_RES (19), (20), (21), (22): Xaa is A or G or is absent
XKXSKVIMNSLQEXXXXXXXXXYYVIPLPELDQSVXXPSA

SEQ ID NO: 9074 - protein, 36 aa, Artificial Sequence
  Non-cyclic GFR-binding peptide
  MOD_RES (1), (32), (33): Xaa is C or S
XSKVIMNSLQEIKPTKGIYYVIPLPELDQSVXXPSA

SEQ ID NO: 9075 - protein, 40 aa, Artificial Sequence
  Non-cyclic GFR-binding peptide
  MOD_RES (1), (3), (35), (36): Xaa is C or S
XGXSRVVMNNSLQEIVNSSDDYYVVPLPELKTPAXXPKPV

SEQ ID NO: 9076 - protein, 40 aa, Artificial Sequence
  Non-cyclic GFR-binding peptide
  MOD_RES (2), (4), (36), (37): Xaa is C or S
RXGXGEVVMDNSLQEVVKENEDYYLMTLPELETPVXXAKP

SEQ ID NO: 9077 - protein, 36 aa, Artificial Sequence
  Non-cyclic GFR-binding peptide
  MOD_RES (34), (35): Xaa is C or S
  MOD_RES (12), (13), (14), (15), (16): Xaa is A or G
  MOD_RES (17), (18), (19), (20): Xaa is A or G or is absent
GEVVMDNSLQEXXXXXXXXXYYLMTLPELETPVXXA

SEQ ID NO: 9078 - protein, 35 aa, Artificial Sequence
  Non-cyclic GFR-binding peptide
  MOD_RES (33), (34): Xaa is C or S
  MOD_RES (11), (12), (13), (14), (15): Xaa is A or G
  MOD_RES (16), (17), (18), (19): Xaa is A or G or is absent
RVVMNNSLQEXXXXXXXXXYYLVTLPELQTPAXXP

SEQ ID NO: 9079 - protein, 35 aa, Artificial Sequence
  Non-cyclic GFR-binding peptide
  MOD_RES (1), (3), (35): Xaa is C or S
XGXGEVVMENSLQEVVKDYEDYYVMPLPELETPVX

SEQ ID NO: 9080 - protein, 38 aa, Artificial Sequence
  Non-cyclic GFR-binding peptide
  MOD_RES (2), (4), (38): Xaa is C or S
  MOD_RES (16), (17), (18), (19), (20): Xaa is A or G
  MOD_RES (21), (22), (23), (24): Xaa is A or G or is absent
HXGXSRVVMNNSLQEXXXXXXXXXYYVVPLPELKTPAX

SEQ ID NO: 9081 - protein, 37 aa, Artificial Sequence
  Non-cyclic GFR-binding peptide
  MOD_RES (2), (4): Xaa is C or S
  MOD_RES (16), (17), (18), (19), (20): Xaa is A or G
  MOD_RES (21), (22), (23), (24): Xaa is A or G or is absent
RXGXGEVVMDNSLQEXXXXXXXXXYYVMPLPELETPV

SEQ ID NO: 9082 - protein, 36 aa, Artificial Sequence
  Non-cyclic GFR-binding peptide
  MOD_RES (1), (3), (35): Xaa is C or S
XGXSRVVMNNSLQEIVNSSDDYYLVTLPELKTPAXT

SEQ ID NO: 9083 - protein, 39 aa, Artificial Sequence
  Non-cyclic GFR-binding peptide
  MOD_RES (33), (34): Xaa is C or S
  MOD_RES (11), (12), (13), (14), (15): Xaa is A or G
  MOD_RES (16), (17), (18), (19): Xaa is A or G or is absent
SKVIMNSLQEXXXXXXXXXYYVIPLPELDQSVXXPSASA

SEQ ID NO: 9084 - protein, 33 aa, Artificial Sequence
  Non-cyclic GFR-binding peptide
  MOD_RES (33), (33): Xaa is C or S
  MOD_RES (11), (12), (13), (14), (15): Xaa is A or G
  MOD_RES (16), (17), (18), (19): Xaa is A or G or is absent
SKVVMEYQKYXXXXXXXXXIFLISIPSLDQPVX

SEQ ID NO: 9085 - protein, 36 aa, Artificial Sequence
  Non-cyclic GFR-binding peptide
  MOD_RES (2), (34), (35): Xaa is C or S
GXSEVVMDRYKKLVVNNASDFYLISIANLRTPVXXT

SEQ ID NO: 9086 - protein, 37 aa, Artificial Sequence
  Non-cyclic GFR-binding peptide
  MOD_RES (2), (4): Xaa is C or S
  MOD_RES (16), (17), (18), (19), (20): Xaa is A or G
  MOD_RES (21), (22), (23), (24): Xaa is A or G or is absent
HXGXSRVVMNNSLQEXXXXXXXXXYYVVPLPELKTPA

SEQ ID NO: 9087 - protein, 38 aa, Artificial Sequence
  Non-cyclic GFR-binding peptide
  MOD_RES (2), (36), (37): Xaa is C or S
  MOD_RES (14), (15), (16), (17), (18): Xaa is A or G
  MOD_RES (19), (20), (21), (22): Xaa is A or G or is absent
GXGEVVMEEYQKYXXXXXXXXXIFLMSIPSLETPVXXA

SEQ ID NO: 9088 - protein, 37 aa, Artificial Sequence
  Non-cyclic GFR-binding peptide
  MOD_RES (31), (32): Xaa is C or S
EVVMEEYQKYVVKDYEDIFLMSIPSLETPVXXAKPIS

SEQ ID NO: 9089 - protein, 35 aa, Artificial Sequence
  Non-cyclic GFR-binding peptide
  MOD_RES (2), (4), (35): Xaa is C or S
SXKXSRVIMNSLQEVKPKRGVYYLITLPELAQPVX

SEQ ID NO: 9090 - protein, 35 aa, Artificial Sequence
  Non-cyclic GFR-binding peptide
  MOD_RES (31), (32): Xaa is C or S
RVVMNEYQKYIVNSSDDIFLVSIPSLQTPAXXPKP

SEQ ID NO: 9091 - protein, 40 aa, Artificial Sequence
  Non-cyclic GFR-binding peptide
  MOD_RES (2), (36), (37): Xaa is C or S
  MOD_RES (14), (15), (16), (17), (18): Xaa is A or G
  MOD_RES (19), (20), (21), (22): Xaa is A or G or is absent
GXGEVVMDNSLQEXXXXXXXXXYYLMTLPELETPVXXAKP

SEQ ID NO: 9092 - protein, 35 aa, Artificial Sequence
  Non-cyclic GFR-binding peptide
  MOD_RES (1), (35): Xaa is C or S
  MOD_RES (13), (14), (15), (16), (17): Xaa is A or G
  MOD_RES (18), (19), (20), (21): Xaa is A or G or is absent
XSEVVMDRYKKLXXXXXXXXXFYLISIANLRTPVX

SEQ ID NO: 9093 - protein, 42 aa, Artificial Sequence
  Non-cyclic GFR-binding peptide
  MOD_RES (2), (4), (38), (39): Xaa is C or S
  MOD_RES (16), (17), (18), (19), (20): Xaa is A or G
  MOD_RES (21), (22), (23), (24): Xaa is A or G or is absent
HXGXSRVVMNNSLQEXXXXXXXXXYYLVTLPELKTPAXXPKP

SEQ ID NO: 9094 - protein, 41 aa, Artificial Sequence
  Non-cyclic GFR-binding peptide
  MOD_RES (1), (35), (36): Xaa is C or S
  MOD_RES (13), (14), (15), (16), (17): Xaa is A or G
  MOD_RES (18), (19), (20), (21): Xaa is A or G or is absent
XGEVVMDEYQKYXXXXXXXXXIFLMSIPSLETPVXXAKPIK

SEQ ID NO: 9095 - protein, 35 aa, Artificial Sequence
  Non-cyclic GFR-binding peptide
  MOD_RES (1), (35): Xaa is C or S
  MOD_RES (13), (14), (15), (16), (17): Xaa is A or G
  MOD_RES (18), (19), (20), (21): Xaa is A or G or is absent
XARVVMNEYQKYXXXXXXXXXIFLVSIPSLQTPAX

SEQ ID NO: 9096 - protein, 36 aa, Artificial Sequence
  Non-cyclic GFR-binding peptide
  MOD_RES (33), (33): Xaa is C or S
  MOD_RES (11), (12), (13), (14), (15): Xaa is A or G
  MOD_RES (16), (17), (18), (19): Xaa is A or G or is absent
RVVMNEYQKYXXXXXXXXXIFLVSIPSLKTPAXTPK

SEQ ID NO: 9097 - protein, 38 aa, Artificial Sequence
  Non-cyclic GFR-binding peptide
  MOD_RES (1), (3), (34), (35): Xaa is C or S
XKXSKVIMNSLQEIKPTKGIYYVIPLPELDQSVXXPSA

SEQ ID NO: 9098 - protein, 38 aa, Artificial Sequence
  Non-cyclic GFR-binding peptide
  MOD_RES (34), (35): Xaa is C or S
  MOD_RES (12), (13), (14), (15), (16): Xaa is A or G
  MOD_RES (17), (18), (19), (20): Xaa is A or G or is absent
SEVVMDQYNKLXXXXXXXXXLYLISIASLRTPVXXTPP

SEQ ID NO: 9099 - protein, 33 aa, Artificial Sequence
  Non-cyclic GFR-binding peptide
  MOD_RES (31), (32): Xaa is C or S
RVVMNNSLQEIVNSSDDYYLVTLPELQTPAXXP

SEQ ID NO: 9100 - protein, 38 aa, Artificial Sequence
  Non-cyclic GFR-binding peptide
  MOD_RES (34), (35): Xaa is C or S
  MOD_RES (12), (13), (14), (15), (16): Xaa is A or G
  MOD_RES (17), (18), (19), (20): Xaa is A or G or is absent
ARVVMNNSLQEXXXXXXXXXYYVVPLPELQTPAXXPKP

SEQ ID NO: 9101 - protein, 34 aa, Artificial Sequence
  Non-cyclic GFR-binding peptide
  MOD_RES (1), (3), (34): Xaa is C or S
XKXSRVIMNSLQEVKPKRGVYYLITLPELAQPVX

SEQ ID NO: 9102 - protein, 39 aa, Artificial Sequence
  Non-cyclic GFR-binding peptide
  MOD_RES (2), (4), (36), (37): Xaa is C or S
RXGXSEVVMDNSLQEVVNNASDYYVIPLPELRTPVXXTP

SEQ ID NO: 9103 - protein, 39 aa, Artificial Sequence
  Non-cyclic GFR-binding peptide
  MOD_RES (2), (36), (37): Xaa is C or S
  MOD_RES (14), (15), (16), (17), (18): Xaa is A or G
  MOD_RES (19), (20), (21), (22): Xaa is A or G or is absent
GXSRVVMNNSLQEXXXXXXXXXYYVVPLPELKTPAXXPK

SEQ ID NO: 9104 - protein, 38 aa, Artificial Sequence
  Non-cyclic GFR-binding peptide
  MOD_RES (32), (33): Xaa is C or S
ARVVMNEYQKYIVNSSDDIFLVSIPSLQTPAXXPKPVT

SEQ ID NO: 9105 - protein, 31 aa, Artificial Sequence
  Non-cyclic GFR-binding peptide
SEVVMDNSLQEVVNNASDYYVIPLPELRTPV

SEQ ID NO: 9106 - protein, 41 aa, Artificial Sequence
  Non-cyclic GFR-binding peptide
  MOD_RES (2), (4), (36), (37): Xaa is C or S
RXGXGEVVMDNSLQEVVKENEDYYLMTLPELETPVXXAKPI

SEQ ID NO: 9107 - protein, 35 aa, Artificial Sequence
  Non-cyclic GFR-binding peptide
  MOD_RES (32), (33): Xaa is C or S
SEVVMDNSLQEVVNNASDYYVIPLPELRTPVXXTP

SEQ ID NO: 9108 - protein, 31 aa, Artificial Sequence
  Non-cyclic GFR-binding peptide
  MOD_RES (31), (31): Xaa is C or S
SRVIMNSLQEVKPKRGVYYLITLPELAQPVX

SEQ ID NO: 9109 - protein, 38 aa, Artificial Sequence
  Non-cyclic GFR-binding peptide
  MOD_RES (33), (34): Xaa is C or S
  MOD_RES (11), (12), (13), (14), (15): Xaa is A or G
  MOD_RES (16), (17), (18), (19): Xaa is A or G or is absent
EVVMENSLQEXXXXXXXXXYYVMPLPELETPVXXAKPI

SEQ ID NO: 9110 - protein, 42 aa, Artificial Sequence
  Non-cyclic GFR-binding peptide
  MOD_RES (1), (3), (37), (38): Xaa is C or S
  MOD_RES (15), (16), (17), (18), (19): Xaa is A or G
  MOD_RES (20), (21), (22), (23): Xaa is A or G or is absent
XGXGEVVMDNSLQEXXXXXXXXXYYVMPLPELETPVXXAKPI

SEQ ID NO: 9111 - protein, 34 aa, Artificial Sequence
  Non-cyclic GFR-binding peptide
  MOD_RES (1), (3), (34): Xaa is C or S
XKXSKVIMNSLQEIKPTKGIYYVIPLPELDQSVX

SEQ ID NO: 9112 - protein, 36 aa, Artificial Sequence
  Non-cyclic GFR-binding peptide
  MOD_RES (33), (34): Xaa is C or S
  MOD_RES (11), (12), (13), (14), (15): Xaa is A or G
  MOD_RES (16), (17), (18), (19): Xaa is A or G or is absent
SKVVMNSLQEXXXXXXXXXYYVIPLPELDQPVXXPS

SEQ ID NO: 9113 - protein, 38 aa, Artificial Sequence
  Non-cyclic GFR-binding peptide
  MOD_RES (34), (35): Xaa is C or S
  MOD_RES (12), (13), (14), (15), (16): Xaa is A or G
  MOD_RES (17), (18), (19), (20): Xaa is A or G or is absent
GEVVMDEYQKYXXXXXXXXXIFLMSIPSLETPVXXAKP

SEQ ID NO: 9114 - protein, 40 aa, Artificial Sequence
  Non-cyclic GFR-binding peptide
  MOD_RES (2), (4), (38), (39): Xaa is C or S
  MOD_RES (16), (17), (18), (19), (20): Xaa is A or G
  MOD_RES (21), (22), (23), (24): Xaa is A or G or is absent
RXGXGEVVMDNSLQEXXXXXXXXXYYLMTLPELETPVXXA

SEQ ID NO: 9115 - protein, 39 aa, Artificial Sequence
  Non-cyclic GFR-binding peptide
  MOD_RES (1), (35), (36): Xaa is C or S
  MOD_RES (13), (14), (15), (16), (17): Xaa is A or G
  MOD_RES (18), (19), (20), (21): Xaa is A or G or is absent
XGEVVMENSLQEXXXXXXXXXYYVMPLPELETPVXXAKP

SEQ ID NO: 9116 - protein, 41 aa, Artificial Sequence
  Non-cyclic GFR-binding peptide
  MOD_RES (2), (4), (36), (37): Xaa is C or S
HXGXSRVVMNEYQKYIVNSSDDIFLVSIPSLKTPAXXPKPV

SEQ ID NO: 9117 - protein, 35 aa, Artificial Sequence
  Non-cyclic GFR-binding peptide
  MOD_RES (1), (32), (33): Xaa is C or S
XSRVIMEYQKYVKPKRGVIFLISIPSLAQPVXXPA

SEQ ID NO: 9118 - protein, 39 aa, Artificial Sequence
  Non-cyclic GFR-binding peptide
  MOD_RES (34), (35): Xaa is C or S
  MOD_RES (12), (13), (14), (15), (16): Xaa is A or G
  MOD_RES (17), (18), (19), (20): Xaa is A or G or is absent
SRVVMNNSLQEXXXXXXXXXYYLVTLPELKTPAXXPKPV

SEQ ID NO: 9119 - protein, 41 aa, Artificial Sequence
  Non-cyclic GFR-binding peptide
  MOD_RES (1), (35), (36): Xaa is C or S
  MOD_RES (13), (14), (15), (16), (17): Xaa is A or G
  MOD_RES (18), (19), (20), (21): Xaa is A or G or is absent
XSRVVMNEYQKYXXXXXXXXXIFLVSIPSLKTPAXXPKPVY

SEQ ID NO: 9120 - protein, 33 aa, Artificial Sequence
  Non-cyclic GFR-binding peptide
  MOD_RES (32), (33): Xaa is C or S
SEVVMDQYNKLVVNNASDLYLISIASLRTPVXX

SEQ ID NO: 9121 - protein, 37 aa, Artificial Sequence
  Non-cyclic GFR-binding peptide
  MOD_RES (34), (35): Xaa is C or S
  MOD_RES (12), (13), (14), (15), (16): Xaa is A or G
  MOD_RES (17), (18), (19), (20): Xaa is A or G or is absent
SRVVMNEYQKYXXXXXXXXXIFLVSIPSLKTPAXXPK

SEQ ID NO: 9122 - protein, 34 aa, Artificial Sequence
  Non-cyclic GFR-binding peptide
  MOD_RES (31), (31): Xaa is C or S
RVVMNNSLQEIVNSSDDYYVVPLPELKTPAXTPK

SEQ ID NO: 9123 - protein, 35 aa, Artificial Sequence
  Non-cyclic GFR-binding peptide
  MOD_RES (34), (35): Xaa is C or S
  MOD_RES (12), (13), (14), (15), (16): Xaa is A or G
  MOD_RES (17), (18), (19), (20): Xaa is A or G or is absent
SRVVMNNSLQEXXXXXXXXXYYVVPLPELKTPAXX

SEQ ID NO: 9124 - protein, 37 aa, Artificial Sequence
  Non-cyclic GFR-binding peptide
  MOD_RES (34), (34): Xaa is C or S
  MOD_RES (12), (13), (14), (15), (16): Xaa is A or G
  MOD_RES (17), (18), (19), (20): Xaa is A or G or is absent
SRVVMNEYQKYXXXXXXXXXIFLVSIPSLKTPAXTPK

SEQ ID NO: 9125 - protein, 37 aa, Artificial Sequence
  Non-cyclic GFR-binding peptide
  MOD_RES (31), (31): Xaa is C or S
RVVMNNSLQEIVNSSDDYYVVPLPELKTPAXTPKTVH

SEQ ID NO: 9126 - protein, 32 aa, Artificial Sequence
  Non-cyclic GFR-binding peptide
  MOD_RES (32), (32): Xaa is C or S
SEVVMDRYKKLVVNNASDFYLISIANLRTPVX

SEQ ID NO: 9127 - protein, 41 aa, Artificial Sequence
  Non-cyclic GFR-binding peptide
  MOD_RES (2), (35), (36): Xaa is C or S
  MOD_RES (13), (14), (15), (16), (17): Xaa is A or G
  MOD_RES (18), (19), (20), (21): Xaa is A or G or is absent
KXSKVVMNSLQEXXXXXXXXXYYVIPLPELDQPVXXPSASA

SEQ ID NO: 9128 - protein, 34 aa, Artificial Sequence
  Non-cyclic GFR-binding peptide
  MOD_RES (33), (34): Xaa is C or S
  MOD_RES (11), (12), (13), (14), (15): Xaa is A or G
  MOD_RES (16), (17), (18), (19): Xaa is A or G or is absent
EVVMDEYQKYXXXXXXXXXIFLMSIPSLETPVXX

SEQ ID NO: 9129 - protein, 34 aa, Artificial Sequence
  Non-cyclic GFR-binding peptide
  MOD_RES (1), (33): Xaa is C or S
XSRVVMNNSLQEIVNSSDDYYLVTLPELKTPAXT

SEQ ID NO: 9130 - protein, 42 aa, Artificial Sequence
  Non-cyclic GFR-binding peptide
  MOD_RES (2), (36), (37): Xaa is C or S
  MOD_RES (14), (15), (16), (17), (18): Xaa is A or G
  MOD_RES (19), (20), (21), (22): Xaa is A or G or is absent
GXSEVVMDNSLQEXXXXXXXXXYYVIPLPELRTPVXXTPPTS

SEQ ID NO: 9131 - protein, 42 aa, Artificial Sequence
  Non-cyclic GFR-binding peptide
  MOD_RES (2), (36), (37): Xaa is C or S
  MOD_RES (14), (15), (16), (17), (18): Xaa is A or G
  MOD_RES (19), (20), (21), (22): Xaa is A or G or is absent
GXGEVVMEEYQKYXXXXXXXXXIFLMSIPSLETPVXXAKPIS

SEQ ID NO: 9132 - protein, 36 aa, Artificial Sequence
  Non-cyclic GFR-binding peptide
  MOD_RES (1), (33), (34): Xaa is C or S
XGEVVMDNSLQEVVKENEDYYLMTLPELETPVXXAK

SEQ ID NO: 9133 - protein, 33 aa, Artificial Sequence
  Non-cyclic GFR-binding peptide
  MOD_RES (31), (32): Xaa is C or S
SKVIMEYQKYIKPTKGIIFLISIPSLDQSVXXP

SEQ ID NO: 9134 - protein, 37 aa, Artificial Sequence
  Non-cyclic GFR-binding peptide
  MOD_RES (1), (32), (33): Xaa is C or S
XSKVIMEYQKYIKPTKGIIFLISIPSLDQSVXXPSAS

SEQ ID NO: 9135 - protein, 41 aa, Artificial Sequence
  Non-cyclic GFR-binding peptide
  MOD_RES (1), (35), (36): Xaa is C or S
  MOD_RES (13), (14), (15), (16), (17): Xaa is A or G
  MOD_RES (18), (19), (20), (21): Xaa is A or G or is absent
XSEVVMDQYNKLXXXXXXXXXLYLISIASLRTPVXXTPPTS

SEQ ID NO: 9136 - protein, 38 aa, Artificial Sequence
  Non-cyclic GFR-binding peptide
  MOD_RES (1), (3), (37), (38): Xaa is C or S
  MOD_RES (15), (16), (17), (18), (19): Xaa is A or G
  MOD_RES (20), (21), (22), (23): Xaa is A or G or is absent
XGXARVVMNNSLQEXXXXXXXXXYYLVTLPELQTPAXX

SEQ ID NO: 9137 - protein, 32 aa, Artificial Sequence
  Non-cyclic GFR-binding peptide
  MOD_RES (11), (12), (13), (14), (15): Xaa is A or G
  MOD_RES (16), (17), (18), (19): Xaa is A or G or is absent
EVVMDRYKKLXXXXXXXXXFYLISIANLRTPV

SEQ ID NO: 9138 - protein, 34 aa, Artificial Sequence
  Non-cyclic GFR-binding peptide
  MOD_RES (34), (34): Xaa is C or S
  MOD_RES (12), (13), (14), (15), (16): Xaa is A or G
  MOD_RES (17), (18), (19), (20): Xaa is A or G or is absent
SRVVMNNSLQEXXXXXXXXXYYVVPLPELKTPAX

SEQ ID NO: 9139 - protein, 40 aa, Artificial Sequence
  Non-cyclic GFR-binding peptide
  MOD_RES (2), (34): Xaa is C or S
GXSRVVMNNSLQEIVNSSDDYYVVPLPELKTPAXTPKTVH

SEQ ID NO: 9140 - protein, 40 aa, Artificial Sequence
  Non-cyclic GFR-binding peptide
  MOD_RES (1), (35), (36): Xaa is C or S
  MOD_RES (13), (14), (15), (16), (17): Xaa is A or G
  MOD_RES (18), (19), (20), (21): Xaa is A or G or is absent
XARVVMNNSLQEXXXXXXXXXYYVVPLPELQTPAXXPKPV

SEQ ID NO: 9141 - protein, 31 aa, Artificial Sequence
  Non-cyclic GFR-binding peptide
SRVVMNNSLQEIVNSSDDYYLVTLPELKTPA

SEQ ID NO: 9142 - protein, 35 aa, Artificial Sequence
  Non-cyclic GFR-binding peptide
  MOD_RES (2), (2): Xaa is C or S
  MOD_RES (14), (15), (16), (17), (18): Xaa is A or G
  MOD_RES (19), (20), (21), (22): Xaa is A or G or is absent
GXGEVVMDEYQKYXXXXXXXXXIFLMSIPSLETPV

SEQ ID NO: 9143 - protein, 37 aa, Artificial Sequence
  Non-cyclic GFR-binding peptide
  MOD_RES (34), (35): Xaa is C or S
  MOD_RES (12), (13), (14), (15), (16): Xaa is A or G
  MOD_RES (17), (18), (19), (20): Xaa is A or G or is absent
GEVVMDNSLQEXXXXXXXXXYYVMPLPELETPVXXAK

SEQ ID NO: 9144 - protein, 38 aa, Artificial Sequence
  Non-cyclic GFR-binding peptide
  MOD_RES (2), (4), (38): Xaa is C or S
  MOD_RES (16), (17), (18), (19), (20): Xaa is A or G
  MOD_RES (21), (22), (23), (24): Xaa is A or G or is absent
RXGXGEVVMDNSLQEXXXXXXXXXYYVMPLPELETPVX

SEQ ID NO: 9145 - protein, 36 aa, Artificial Sequence
  Non-cyclic GFR-binding peptide
  MOD_RES (1), (3), (35), (36): Xaa is C or S
XGXARVVMNNSLQEIVNSSDDYYLVTLPELQTPAXX

SEQ ID NO: 9146 - protein, 39 aa, Artificial Sequence
  Non-cyclic GFR-binding peptide
  MOD_RES (34), (35): Xaa is C or S
  MOD_RES (12), (13), (14), (15), (16): Xaa is A or G
  MOD_RES (17), (18), (19), (20): Xaa is A or G or is absent
GEVVMEEYQKYXXXXXXXXXIFLMSIPSLETPVXXAKPI

SEQ ID NO: 9147 - protein, 34 aa, Artificial Sequence
  Non-cyclic GFR-binding peptide
  MOD_RES (33), (34): Xaa is C or S
  MOD_RES (11), (12), (13), (14), (15): Xaa is A or G
  MOD_RES (16), (17), (18), (19): Xaa is A or G or is absent
SKVIMEYQKYXXXXXXXXXIFLISIPSLDQSVXX

SEQ ID NO: 9148 - protein, 38 aa, Artificial Sequence
  Non-cyclic GFR-binding peptide
  MOD_RES (1), (34), (35): Xaa is C or S
  MOD_RES (12), (13), (14), (15), (16): Xaa is A or G
  MOD_RES (17), (18), (19), (20): Xaa is A or G or is absent
XSRVIMEYQKYXXXXXXXXXIFLISIPSLAQPVXXPAA

SEQ ID NO: 9149 - protein, 42 aa, Artificial Sequence
  Non-cyclic GFR-binding peptide
  MOD_RES (1), (3), (37), (38): Xaa is C or S
  MOD_RES (15), (16), (17), (18), (19): Xaa is A or G
  MOD_RES (20), (21), (22), (23): Xaa is A or G or is absent
XGXGEVVMENSLQEXXXXXXXXXYYVMPLPELETPVXXAKPI

SEQ ID NO: 9150 - protein, 30 aa, Artificial Sequence
  Non-cyclic GFR-binding peptide
EVVMENSLQEVVKDYEDYYLMTLPELETPV

SEQ ID NO: 9151 - protein, 37 aa, Artificial Sequence
  Non-cyclic GFR-binding peptide
  MOD_RES (31), (32): Xaa is C or S
RVVMNNSLQEIVNSSDDYYVVPLPELKTPAXXPKPVY

SEQ ID NO: 9152 - protein, 36 aa, Artificial Sequence
  Non-cyclic GFR-binding peptide
  MOD_RES (2), (4), (36): Xaa is C or S
HXGXSRVVMNNSLQEIVNSSDDYYLVTLPELKTPAX

SEQ ID NO: 9153 - protein, 40 aa, Artificial Sequence
  Non-cyclic GFR-binding peptide
  MOD_RES (2), (34), (35): Xaa is C or S
GXSEVVMDNSLQEVVNNASDYYLITLPELRTPVXXTPPTS

SEQ ID NO: 9154 - protein, 40 aa, Artificial Sequence
  Non-cyclic GFR-binding peptide
  MOD_RES (2), (36), (37): Xaa is C or S
  MOD_RES (14), (15), (16), (17), (18): Xaa is A or G
  MOD_RES (19), (20), (21), (22): Xaa is A or G or is absent
GXSEVVMDQYNKLXXXXXXXXXLYLISIASLRTPVXXTPP

SEQ ID NO: 9155 - protein, 35 aa, Artificial Sequence
  Non-cyclic GFR-binding peptide
  MOD_RES (1), (3), (34), (35): Xaa is C or S
XKXSRVIMEYQKYVKPKRGVIFLISIPSLAQPVXX

SEQ ID NO: 9156 - protein, 41 aa, Artificial Sequence
  Non-cyclic GFR-binding peptide
  MOD_RES (1), (3), (36), (37): Xaa is C or S
  MOD_RES (14), (15), (16), (17), (18): Xaa is A or G
  MOD_RES (19), (20), (21), (22): Xaa is A or G or is absent
XKXSRVIMEYQKYXXXXXXXXXIFLISIPSLAQPVXXPAAS

SEQ ID NO: 9157 - protein, 36 aa, Artificial Sequence
  Non-cyclic GFR-binding peptide
  MOD_RES (32), (32): Xaa is C or S
SRVVMNNSLQEIVNSSDDYYVVPLPELKTPAXTPKT

SEQ ID NO: 9158 - protein, 35 aa, Artificial Sequence
  Non-cyclic GFR-binding peptide
  MOD_RES (1), (3), (34), (35): Xaa is C or S
XKXSKVIMEYQKYIKPTKGIIFLISIPSLDQSVXX

SEQ ID NO: 9159 - protein, 36 aa, Artificial Sequence
  Non-cyclic GFR-binding peptide
  MOD_RES (33), (34): Xaa is C or S
  MOD_RES (11), (12), (13), (14), (15): Xaa is A or G
  MOD_RES (16), (17), (18), (19): Xaa is A or G or is absent
SKVVMEYQKYXXXXXXXXXIFLISIPSLDQPVXXPS

SEQ ID NO: 9160 - protein, 39 aa, Artificial Sequence
  Non-cyclic GFR-binding peptide
  MOD_RES (2), (4), (38), (39): Xaa is C or S
  MOD_RES (16), (17), (18), (19), (20): Xaa is A or G
  MOD_RES (21), (22), (23), (24): Xaa is A or G or is absent
HXGXSRVVMNNSLQEXXXXXXXXXYYLVTLPELKTPAXX

SEQ ID NO: 9161 - protein, 41 aa, Artificial Sequence
  Non-cyclic GFR-binding peptide
  MOD_RES (1), (3), (36), (37): Xaa is C or S
  MOD_RES (14), (15), (16), (17), (18): Xaa is A or G
  MOD_RES (19), (20), (21), (22): Xaa is A or G or is absent
XKXSKVIMEYQKYXXXXXXXXXIFLISIPSLDQSVXXPSAS

SEQ ID NO: 9162 - protein, 41 aa, Artificial Sequence
  Non-cyclic GFR-binding peptide
  MOD_RES (2), (4), (38): Xaa is C or S
  MOD_RES (16), (17), (18), (19), (20): Xaa is A or G
  MOD_RES (21), (22), (23), (24): Xaa is A or G or is absent
HXGXSRVVMNNSLQEXXXXXXXXXYYLVTLPELKTPAXTPK

SEQ ID NO: 9163 - protein, 35 aa, Artificial Sequence
  Non-cyclic GFR-binding peptide
  MOD_RES (1), (3), (34), (35): Xaa is C or S
XKXSKVVMNSLQEVKPTRGVYYVIPLPELDQPVXX

SEQ ID NO: 9164 - protein, 37 aa, Artificial Sequence
  Non-cyclic GFR-binding peptide
  MOD_RES (1), (3), (35), (36): Xaa is C or S
XGXSEVVMDNSLQEVVNNASDYYVIPLPELRTPVXXT

SEQ ID NO: 9165 - protein, 36 aa, Artificial Sequence
  Non-cyclic GFR-binding peptide
  MOD_RES (34), (35): Xaa is C or S
  MOD_RES (12), (13), (14), (15), (16): Xaa is A or G
  MOD_RES (17), (18), (19), (20): Xaa is A or G or is absent
GEVVMDEYQKYXXXXXXXXXIFLMSIPSLETPVXXA

SEQ ID NO: 9166 - protein, 38 aa, Artificial Sequence
  Non-cyclic GFR-binding peptide
  MOD_RES (1), (3), (37), (38): Xaa is C or S
  MOD_RES (15), (16), (17), (18), (19): Xaa is A or G
  MOD_RES (20), (21), (22), (23): Xaa is A or G or is absent
XGXSRVVMNNSLQEXXXXXXXXXYYVVPLPELKTPAXX

SEQ ID NO: 9167 - protein, 38 aa, Artificial Sequence
  Non-cyclic GFR-binding peptide
  MOD_RES (34), (35): Xaa is C or S
  MOD_RES (12), (13), (14), (15), (16): Xaa is A or G
  MOD_RES (17), (18), (19), (20): Xaa is A or G or is absent
SEVVMDNSLQEXXXXXXXXXYYVIPLPELRTPVXXTPP

SEQ ID NO: 9168 - protein, 38 aa, Artificial Sequence
  Non-cyclic GFR-binding peptide
  MOD_RES (2), (36): Xaa is C or S
  MOD_RES (14), (15), (16), (17), (18): Xaa is A or G
  MOD_RES (19), (20), (21), (22): Xaa is A or G or is absent
GXSRVVMNNSLQEXXXXXXXXXYYVVPLPELKTPAXTP

SEQ ID NO: 9169 - protein, 31 aa, Artificial Sequence
  Non-cyclic GFR-binding peptide
GEVVMDNSLQEVVKENEDYYLMTLPELETPV

SEQ ID NO: 9170 - protein, 39 aa, Artificial Sequence
  Non-cyclic GFR-binding peptide
  MOD_RES (1), (3), (35): Xaa is C or S
XGXSRVVMNNSLQEIVNSSDDYYVVPLPELKTPAXTPKT

SEQ ID NO: 9171 - protein, 37 aa, Artificial Sequence
  Non-cyclic GFR-binding peptide
  MOD_RES (1), (33): Xaa is C or S
XSRVVMNNSLQEIVNSSDDYYLVTLPELKTPAXTPKT

SEQ ID NO: 9172 - protein, 33 aa, Artificial Sequence
  Non-cyclic GFR-binding peptide
  MOD_RES (31), (32): Xaa is C or S
SKVVMEYQKYVKPTRGVIFLISIPSLDQPVXXP

SEQ ID NO: 9173 - protein, 38 aa, Artificial Sequence
  Non-cyclic GFR-binding peptide
  MOD_RES (32), (33): Xaa is C or S
SEVVMDQYNKLVVNNASDLYLISIASLRTPVXXTPPTS

SEQ ID NO: 9174 - protein, 32 aa, Artificial Sequence
  Non-cyclic GFR-binding peptide
  MOD_RES (1), (32): Xaa is C or S
XSRVIMNSLQEVKPKRGVYYLITLPELAQPVX

SEQ ID NO: 9175 - protein, 34 aa, Artificial Sequence
  Non-cyclic GFR-binding peptide
  MOD_RES (1), (3), (34): Xaa is C or S
XKXSKVIMEYQKYIKPTKGIIFLISIPSLDQSVX

SEQ ID NO: 9176 - protein, 32 aa, Artificial Sequence
  Non-cyclic GFR-binding peptide
  MOD_RES (31), (31): Xaa is C or S
RVVMNNSLQEIVNSSDDYYLVTLPELKTPAXT

SEQ ID NO: 9177 - protein, 37 aa, Artificial Sequence
  Non-cyclic GFR-binding peptide
  MOD_RES (2), (36), (37): Xaa is C or S
  MOD_RES (14), (15), (16), (17), (18): Xaa is A or G
  MOD_RES (19), (20), (21), (22): Xaa is A or G or is absent
GXSEVVMDNSLQEXXXXXXXXXYYVIPLPELRTPVXX

SEQ ID NO: 9178 - protein, 34 aa, Artificial Sequence
  Non-cyclic GFR-binding peptide
  MOD_RES (1), (3), (34): Xaa is C or S
XKXSRVIMEYQKYVKPKRGVIFLISIPSLAQPVX

SEQ ID NO: 9179 - protein, 38 aa, Artificial Sequence
  Non-cyclic GFR-binding peptide
  MOD_RES (1), (35), (36): Xaa is C or S
  MOD_RES (13), (14), (15), (16), (17): Xaa is A or G
  MOD_RES (18), (19), (20), (21): Xaa is A or G or is absent
XGEVVMDEYQKYXXXXXXXXXIFLMSIPSLETPVXXAK

SEQ ID NO: 9180 - protein, 35 aa, Artificial Sequence
  Non-cyclic GFR-binding peptide
  MOD_RES (2), (2): Xaa is C or S
  MOD_RES (14), (15), (16), (17), (18): Xaa is A or G
  MOD_RES (19), (20), (21), (22): Xaa is A or G or is absent
GXARVVMNNSLQEXXXXXXXXXYYLVTLPELQTPA

SEQ ID NO: 9181 - protein, 34 aa, Artificial Sequence
  Non-cyclic GFR-binding peptide
  MOD_RES (33), (34): Xaa is C or S
  MOD_RES (11), (12), (13), (14), (15): Xaa is A or G
  MOD_RES (16), (17), (18), (19): Xaa is A or G or is absent
EVVMENSLQEXXXXXXXXXYYVMPLPELETPVXX

SEQ ID NO: 9182 - protein, 44 aa, Artificial Sequence
  Non-cyclic GFR-binding peptide
  MOD_RES (2), (4), (38), (39): Xaa is C or S
  MOD_RES (16), (17), (18), (19), (20): Xaa is A or G
  MOD_RES (21), (22), (23), (24): Xaa is A or G or is absent
RXGXGEVVMENSLQEXXXXXXXXXYYVMPLPELETPVXXAKPIS

SEQ ID NO: 9183 - protein, 38 aa, Artificial Sequence
  Non-cyclic GFR-binding peptide
  MOD_RES (32), (33): Xaa is C or S
ARVVMNNSLQEIVNSSDDYYLVTLPELQTPAXXPKPVT

SEQ ID NO: 9184 - protein, 37 aa, Artificial Sequence
  Non-cyclic GFR-binding peptide
  MOD_RES (1), (33), (34): Xaa is C or S
XGEVVMDNSLQEVVKENEDYYVMPLPELETPVXXAKP

SEQ ID NO: 9185 - protein, 37 aa, Artificial Sequence
  Non-cyclic GFR-binding peptide
  MOD_RES (1), (3), (35), (36): Xaa is C or S
XGXARVVMNNSLQEIVNSSDDYYLVTLPELQTPAXXP

SEQ ID NO: 9186 - protein, 35 aa, Artificial Sequence
  Non-cyclic GFR-binding peptide
  MOD_RES (1), (3), (35): Xaa is C or S
XGXARVVMNNSLQEIVNSSDDYYVVPLPELQTPAX

SEQ ID NO: 9187 - protein, 36 aa, Artificial Sequence
  Non-cyclic GFR-binding peptide
  MOD_RES (2), (34), (35): Xaa is C or S
GXSEVVMDQYNKLVVNNASDLYLISIASLRTPVXXT

SEQ ID NO: 9188 - protein, 37 aa, Artificial Sequence
  Non-cyclic GFR-binding peptide
  MOD_RES (1), (3), (35), (36): Xaa is C or S
XGXSRVVMNNSLQEIVNSSDDYYLVTLPELKTPAXXP

SEQ ID NO: 9189 - protein, 34 aa, Artificial Sequence
  Non-cyclic GFR-binding peptide
  MOD_RES (32), (32): Xaa is C or S
SRVVMNNSLQEIVNSSDDYYVVPLPELKTPAXTP

SEQ ID NO: 9190 - protein, 33 aa, Artificial Sequence
  Non-cyclic GFR-binding peptide
  MOD_RES (31), (32): Xaa is C or S
EVVMENSLQEVVKDYEDYYLMTLPELETPVXXA

SEQ ID NO: 9191 - protein, 33 aa, Artificial Sequence
  Non-cyclic GFR-binding peptide
  MOD_RES (2), (2): Xaa is C or S
GXGEVVMDNSLQEVVKENEDYYVMPLPELETPV

SEQ ID NO: 9192 - protein, 38 aa, Artificial Sequence
  Non-cyclic GFR-binding peptide
  MOD_RES (33), (33): Xaa is C or S
  MOD_RES (11), (12), (13), (14), (15): Xaa is A or G
  MOD_RES (16), (17), (18), (19): Xaa is A or G or is absent
RVVMNEYQKYXXXXXXXXXIFLVSIPSLKTPAXTPKTV

SEQ ID NO: 9193 - protein, 35 aa, Artificial Sequence
  Non-cyclic GFR-binding peptide
  MOD_RES (31), (32): Xaa is C or S
EVVMDNSLQEVVKENEDYYVMPLPELETPVXXAKP

SEQ ID NO: 9194 - protein, 36 aa, Artificial Sequence
  Non-cyclic GFR-binding peptide
  MOD_RES (1), (35): Xaa is C or S
  MOD_RES (13), (14), (15), (16), (17): Xaa is A or G
  MOD_RES (18), (19), (20), (21): Xaa is A or G or is absent
XSRVVMNNSLQEXXXXXXXXXYYVVPLPELKTPAXT

SEQ ID NO: 9195 - protein, 38 aa, Artificial Sequence
  Non-cyclic GFR-binding peptide
  MOD_RES (2), (4), (38): Xaa is C or S
  MOD_RES (16), (17), (18), (19), (20): Xaa is A or G
  MOD_RES (21), (22), (23), (24): Xaa is A or G or is absent
RXGXSEVVMDRYKKLXXXXXXXXXFYLISIANLRTPVX

SEQ ID NO: 9196 - protein, 38 aa, Artificial Sequence
  Non-cyclic GFR-binding peptide
  MOD_RES (1), (33), (34): Xaa is C or S
XSRVVMNNSLQEIVNSSDDYYLVTLPELKTPAXXPKPV

SEQ ID NO: 9197 - protein, 35 aa, Artificial Sequence
  Non-cyclic GFR-binding peptide
  MOD_RES (31), (32): Xaa is C or S
EVVMDNSLQEVVNNASDYYVIPLPELRTPVXXTPP

SEQ ID NO: 9198 - protein, 39 aa, Artificial Sequence
  Non-cyclic GFR-binding peptide
  MOD_RES (2), (36), (37): Xaa is C or S
  MOD_RES (14), (15), (16), (17), (18): Xaa is A or G
  MOD_RES (19), (20), (21), (22): Xaa is A or G or is absent
GXSEVVMDQYNKLXXXXXXXXXLYLISIASLRTPVXXTP

SEQ ID NO: 9199 - protein, 36 aa, Artificial Sequence
  Non-cyclic GFR-binding peptide
  MOD_RES (2), (4): Xaa is C or S
  MOD_RES (15), (16), (17), (18), (19): Xaa is A or G
  MOD_RES (20), (21), (22), (23): Xaa is A or G or is absent
SXKXSKVVMEYQKYXXXXXXXXXIFLISIPSLDQPV

SEQ ID NO: 9200 - protein, 34 aa, Artificial Sequence
  Non-cyclic GFR-binding peptide
  MOD_RES (1), (3), (34): Xaa is C or S
XKXSKVVMNSLQEVKPTRGVYYVIPLPELDQPVX

SEQ ID NO: 9201 - protein, 38 aa, Artificial Sequence
  Non-cyclic GFR-binding peptide
  MOD_RES (2), (4), (36), (37): Xaa is C or S
HXGXARVVMNNSLQEIVNSSDDYYLVTLPELQTPAXXP

SEQ ID NO: 9202 - protein, 40 aa, Artificial Sequence
  Non-cyclic GFR-binding peptide
  MOD_RES (2), (4), (38), (39): Xaa is C or S
  MOD_RES (16), (17), (18), (19), (20): Xaa is A or G
  MOD_RES (21), (22), (23), (24): Xaa is A or G or is absent
RXGXGEVVMDNSLQEXXXXXXXXXYYVMPLPELETPVXXA

SEQ ID NO: 9203 - protein, 38 aa, Artificial Sequence
  Non-cyclic GFR-binding peptide
  MOD_RES (1), (35): Xaa is C or S
  MOD_RES (13), (14), (15), (16), (17): Xaa is A or G
  MOD_RES (18), (19), (20), (21): Xaa is A or G or is absent
XSRVVMNNSLQEXXXXXXXXXYYVVPLPELKTPAXTPK

SEQ ID NO: 9204 - protein, 33 aa, Artificial Sequence
  Non-cyclic GFR-binding peptide
  MOD_RES (12), (13), (14), (15), (16): Xaa is A or G
  MOD_RES (17), (18), (19), (20): Xaa is A or G or is absent
GEVVMENSLQEXXXXXXXXXYYLMTLPELETPV

SEQ ID NO: 9205 - protein, 41 aa, Artificial Sequence
  Non-cyclic GFR-binding peptide
  MOD_RES (2), (4), (36), (37): Xaa is C or S
RXGXSEVVMDNSLQEVVNNASDYYVIPLPELRTPVXXTPPT

SEQ ID NO: 9206 - protein, 36 aa, Artificial Sequence
  Non-cyclic GFR-binding peptide
  MOD_RES (1), (33), (34): Xaa is C or S
XSEVVMDQYNKLVVNNASDLYLISIASLRTPVXXTP

SEQ ID NO: 9207 - protein, 37 aa, Artificial Sequence
  Non-cyclic GFR-binding peptide
  MOD_RES (2), (4), (35), (36): Xaa is C or S
SXKXSKVIMNSLQEIKPTKGIYYVIPLPELDQSVXXP

SEQ ID NO: 9208 - protein, 38 aa, Artificial Sequence
  Non-cyclic GFR-binding peptide
  MOD_RES (33), (34): Xaa is C or S
  MOD_RES (11), (12), (13), (14), (15): Xaa is A or G
  MOD_RES (16), (17), (18), (19): Xaa is A or G or is absent
EVVMDQYNKLXXXXXXXXXLYLISIASLRTPVXXTPPT

SEQ ID NO: 9209 - protein, 37 aa, Artificial Sequence
  Non-cyclic GFR-binding peptide
  MOD_RES (32), (33): Xaa is C or S
GEVVMEEYQKYVVKDYEDIFLMSIPSLETPVXXAKPI

SEQ ID NO: 9210 - protein, 41 aa, Artificial Sequence
  Non-cyclic GFR-binding peptide
  MOD_RES (2), (4), (38), (39): Xaa is C or S
  MOD_RES (16), (17), (18), (19), (20): Xaa is A or G
  MOD_RES (21), (22), (23), (24): Xaa is A or G or is absent
HXGXARVVMNNSLQEXXXXXXXXXYYLVTLPELQTPAXXPK

SEQ ID NO: 9211 - protein, 39 aa, Artificial Sequence
  Non-cyclic GFR-binding peptide
  MOD_RES (1), (3), (35), (36): Xaa is C or S
XGXGEVVMEEYQKYVVKDYEDIFLMSIPSLETPVXXAKP

SEQ ID NO: 9212 - protein, 32 aa, Artificial Sequence
  Non-cyclic GFR-binding peptide
  MOD_RES (31), (32): Xaa is C or S
EVVMDNSLQEVVKENEDYYLMTLPELETPVXX

SEQ ID NO: 9213 - protein, 35 aa, Artificial Sequence
  Non-cyclic GFR-binding peptide
  MOD_RES (1), (3): Xaa is C or S
  MOD_RES (14), (15), (16), (17), (18): Xaa is A or G
  MOD_RES (19), (20), (21), (22): Xaa is A or G or is absent
XKXSKVVMEYQKYXXXXXXXXXIFLISIPSLDQPV

SEQ ID NO: 9214 - protein, 39 aa, Artificial Sequence
  Non-cyclic GFR-binding peptide
  MOD_RES (1), (35), (36): Xaa is C or S
  MOD_RES (13), (14), (15), (16), (17): Xaa is A or G
  MOD_RES (18), (19), (20), (21): Xaa is A or G or is absent
XSEVVMDNSLQEXXXXXXXXXYYLITLPELRTPVXXTPP

SEQ ID NO: 9215 - protein, 37 aa, Artificial Sequence
  Non-cyclic GFR-binding peptide
  MOD_RES (1), (35), (36): Xaa is C or S
  MOD_RES (13), (14), (15), (16), (17): Xaa is A or G
  MOD_RES (18), (19), (20), (21): Xaa is A or G or is absent
XARVVMNNSLQEXXXXXXXXXYYVVPLPELQTPAXXP

SEQ ID NO: 9216 - protein, 34 aa, Artificial Sequence
  Non-cyclic GFR-binding peptide
  MOD_RES (33), (33): Xaa is C or S
  MOD_RES (11), (12), (13), (14), (15): Xaa is A or G
  MOD_RES (16), (17), (18), (19): Xaa is A or G or is absent
RVVMNNSLQEXXXXXXXXXYYVVPLPELKTPAXT

SEQ ID NO: 9217 - protein, 38 aa, Artificial Sequence
  Non-cyclic GFR-binding peptide
  MOD_RES (32), (33): Xaa is C or S
SEVVMDRYKKLVVNNASDFYLISIANLRTPVXXTPPTS

SEQ ID NO: 9218 - protein, 36 aa, Artificial Sequence
  Non-cyclic GFR-binding peptide
  MOD_RES (2), (34), (35): Xaa is C or S
GXSEVVMDNSLQEVVNNASDYYLITLPELRTPVXXT

SEQ ID NO: 9219 - protein, 34 aa, Artificial Sequence
  Non-cyclic GFR-binding peptide
  MOD_RES (2), (34): Xaa is C or S
GXSEVVMDNSLQEVVNNASDYYLITLPELRTPVX

SEQ ID NO: 9220 - protein, 36 aa, Artificial Sequence
  Non-cyclic GFR-binding peptide
  MOD_RES (1), (35), (36): Xaa is C or S
  MOD_RES (13), (14), (15), (16), (17): Xaa is A or G
  MOD_RES (18), (19), (20), (21): Xaa is A or G or is absent
XGEVVMENSLQEXXXXXXXXXYYVMPLPELETPVXX

SEQ ID NO: 9221 - protein, 44 aa, Artificial Sequence
  Non-cyclic GFR-binding peptide
  MOD_RES (2), (4), (38), (39): Xaa is C or S
  MOD_RES (16), (17), (18), (19), (20): Xaa is A or G
  MOD_RES (21), (22), (23), (24): Xaa is A or G or is absent
RXGXGEVVMDNSLQEXXXXXXXXXYYLMTLPELETPVXXAKPIK

SEQ ID NO: 9222 - protein, 41 aa, Artificial Sequence
  Non-cyclic GFR-binding peptide
  MOD_RES (2), (36), (37): Xaa is C or S
  MOD_RES (14), (15), (16), (17), (18): Xaa is A or G
  MOD_RES (19), (20), (21), (22): Xaa is A or G or is absent
GXGEVVMENSLQEXXXXXXXXXYYVMPLPELETPVXXAKPI

SEQ ID NO: 9223 - protein, 33 aa, Artificial Sequence
  Non-cyclic GFR-binding peptide
  MOD_RES (1), (32), (33): Xaa is C or S
XSRVIMEYQKYVKPKRGVIFLISIPSLAQPVXX

SEQ ID NO: 9224 - protein, 38 aa, Artificial Sequence
  Non-cyclic GFR-binding peptide
  MOD_RES (1), (3), (34), (35): Xaa is C or S
XKXSRVIMEYQKYVKPKRGVIFLISIPSLAQPVXXPAA

SEQ ID NO: 9225 - protein, 37 aa, Artificial Sequence
  Non-cyclic GFR-binding peptide
  MOD_RES (1), (33), (34): Xaa is C or S
XGEVVMDEYQKYVVKENEDIFLMSIPSLETPVXXAKP

SEQ ID NO: 9226 - protein, 36 aa, Artificial Sequence
  Non-cyclic GFR-binding peptide
  MOD_RES (31), (32): Xaa is C or S
EVVMDRYKKLVVNNASDFYLISIANLRTPVXXTPPT

SEQ ID NO: 9227 - protein, 38 aa, Artificial Sequence
  Non-cyclic GFR-binding peptide
  MOD_RES (1), (3), (35): Xaa is C or S
XGXSRVVMNNSLQEIVNSSDDYYVVPLPELKTPAXTPK

SEQ ID NO: 9228 - protein, 39 aa, Artificial Sequence
  Non-cyclic GFR-binding peptide
  MOD_RES (2), (4), (36), (37): Xaa is C or S
RXGXSEVVMDNSLQEVVNNASDYYLITLPELRTPVXXTP

SEQ ID NO: 9229 - protein, 42 aa, Artificial Sequence
  Non-cyclic GFR-binding peptide
  MOD_RES (2), (4), (36), (37): Xaa is C or S
HXGXSRVVMNEYQKYIVNSSDDIFLVSIPSLKTPAXXPKPVY

SEQ ID NO: 9230 - protein, 38 aa, Artificial Sequence
  Non-cyclic GFR-binding peptide
  MOD_RES (1), (3), (35), (36): Xaa is C or S
XGXGEVVMENSLQEVVKDYEDYYLMTLPELETPVXXAK

SEQ ID NO: 9231 - protein, 35 aa, Artificial Sequence
  Non-cyclic GFR-binding peptide
  MOD_RES (2), (2): Xaa is C or S
  MOD_RES (14), (15), (16), (17), (18): Xaa is A or G
  MOD_RES (19), (20), (21), (22): Xaa is A or G or is absent
GXSEVVMDRYKKLXXXXXXXXXFYLISIANLRTPV

SEQ ID NO: 9232 - protein, 42 aa, Artificial Sequence
  Non-cyclic GFR-binding peptide
  MOD_RES (2), (4), (36): Xaa is C or S
HXGXSRVVMNEYQKYIVNSSDDIFLVSIPSLKTPAXTPKTVH

SEQ ID NO: 9233 - protein, 40 aa, Artificial Sequence
  Non-cyclic GFR-binding peptide
  MOD_RES (2), (34), (35): Xaa is C or S
GXGEVVMEEYQKYVVKDYEDIFLMSIPSLETPVXXAKPIS

SEQ ID NO: 9234 - protein, 41 aa, Artificial Sequence
  Non-cyclic GFR-binding peptide
  MOD_RES (1), (3), (37), (38): Xaa is C or S
  MOD_RES (15), (16), (17), (18), (19): Xaa is A or G
  MOD_RES (20), (21), (22), (23): Xaa is A or G or is absent
XGXSEVVMDQYNKLXXXXXXXXXLYLISIASLRTPVXXTPP

SEQ ID NO: 9235 - protein, 33 aa, Artificial Sequence
  Non-cyclic GFR-binding peptide
  MOD_RES (2), (2): Xaa is C or S
GXSRVVMNNSLQEIVNSSDDYYVVPLPELKTPA

SEQ ID NO: 9236 - protein, 39 aa, Artificial Sequence
  Non-cyclic GFR-binding peptide
  MOD_RES (2), (4), (38): Xaa is C or S
  MOD_RES (16), (17), (18), (19), (20): Xaa is A or G
  MOD_RES (21), (22), (23), (24): Xaa is A or G or is absent
HXGXSRVVMNNSLQEXXXXXXXXXYYVVPLPELKTPAXT

SEQ ID NO: 9237 - protein, 38 aa, Artificial Sequence
  Non-cyclic GFR-binding peptide
  MOD_RES (1), (3), (37), (38): Xaa is C or S
  MOD_RES (15), (16), (17), (18), (19): Xaa is A or G
  MOD_RES (20), (21), (22), (23): Xaa is A or G or is absent
XGXGEVVMENSLQEXXXXXXXXXYYVMPLPELETPVXX

SEQ ID NO: 9238 - protein, 39 aa, Artificial Sequence
  Non-cyclic GFR-binding peptide
  MOD_RES (1), (3), (34), (35): Xaa is C or S
XKXSKVVMEYQKYVKPTRGVIFLISIPSLDQPVXXPSAS

SEQ ID NO: 9239 - protein, 38 aa, Artificial Sequence
  Non-cyclic GFR-binding peptide
  MOD_RES (1), (3), (35), (36): Xaa is C or S
XGXGEVVMDNSLQEVVKENEDYYVMPLPELETPVXXAK

SEQ ID NO: 9240 - protein, 35 aa, Artificial Sequence
  Non-cyclic GFR-binding peptide
  MOD_RES (31), (32): Xaa is C or S
EVVMENSLQEVVKDYEDYYLMTLPELETPVXXAKP

SEQ ID NO: 9241 - protein, 34 aa, Artificial Sequence
  Non-cyclic GFR-binding peptide
  MOD_RES (2), (34): Xaa is C or S
GXSRVVMNNSLQEIVNSSDDYYLVTLPELKTPAX

SEQ ID NO: 9242 - protein, 38 aa, Artificial Sequence
  Non-cyclic GFR-binding peptide
  MOD_RES (1), (3), (37): Xaa is C or S
  MOD_RES (15), (16), (17), (18), (19): Xaa is A or G
  MOD_RES (20), (21), (22), (23): Xaa is A or G or is absent
XGXSRVVMNEYQKYXXXXXXXXXIFLVSIPSLKTPAXT

SEQ ID NO: 9243 - protein, 38 aa, Artificial Sequence
  Non-cyclic GFR-binding peptide
  MOD_RES (1), (33), (34): Xaa is C or S
XSEVVMDNSLQEVVNNASDYYLITLPELRTPVXXTPPT

SEQ ID NO: 9244 - protein, 38 aa, Artificial Sequence
  Non-cyclic GFR-binding peptide
  MOD_RES (1), (35), (36): Xaa is C or S
  MOD_RES (13), (14), (15), (16), (17): Xaa is A or G
  MOD_RES (18), (19), (20), (21): Xaa is A or G or is absent
XGEVVMENSLQEXXXXXXXXXYYLMTLPELETPVXXAK

SEQ ID NO: 9245 - protein, 32 aa, Artificial Sequence
  Non-cyclic GFR-binding peptide
  MOD_RES (11), (12), (13), (14), (15): Xaa is A or G
  MOD_RES (16), (17), (18), (19): Xaa is A or G or is absent
EVVMDQYNKLXXXXXXXXXLYLISIASLRTPV

SEQ ID NO: 9246 - protein, 38 aa, Artificial Sequence
  Non-cyclic GFR-binding peptide
  MOD_RES (1), (3), (35), (36): Xaa is C or S
XGXGEVVMDEYQKYVVKENEDIFLMSIPSLETPVXXAK

SEQ ID NO: 9247 - protein, 33 aa, Artificial Sequence
  Non-cyclic GFR-binding peptide
  MOD_RES (33), (33): Xaa is C or S
  MOD_RES (11), (12), (13), (14), (15): Xaa is A or G
  MOD_RES (16), (17), (18), (19): Xaa is A or G or is absent
SRVIMEYQKYXXXXXXXXXIFLISIPSLAQPVX

SEQ ID NO: 9248 - protein, 36 aa, Artificial Sequence
  Non-cyclic GFR-binding peptide
  MOD_RES (1), (35), (36): Xaa is C or S
  MOD_RES (13), (14), (15), (16), (17): Xaa is A or G
  MOD_RES (18), (19), (20), (21): Xaa is A or G or is absent
XARVVMNEYQKYXXXXXXXXXIFLVSIPSLQTPAXX

SEQ ID NO: 9249 - protein, 32 aa, Artificial Sequence
  Non-cyclic GFR-binding peptide
  MOD_RES (11), (12), (13), (14), (15): Xaa is A or G
  MOD_RES (16), (17), (18), (19): Xaa is A or G or is absent
RVVMNEYQKYXXXXXXXXXIFLVSIPSLKTPA

SEQ ID NO: 9250 - protein, 33 aa, Artificial Sequence
  Non-cyclic GFR-binding peptide
  MOD_RES (1), (33): Xaa is C or S
XSRVVMNNSLQEIVNSSDDYYVVPLPELKTPAX

SEQ ID NO: 9251 - protein, 38 aa, Artificial Sequence
  Non-cyclic GFR-binding peptide
  MOD_RES (33), (33): Xaa is C or S
  MOD_RES (11), (12), (13), (14), (15): Xaa is A or G
  MOD_RES (16), (17), (18), (19): Xaa is A or G or is absent
RVVMNNSLQEXXXXXXXXXYYLVTLPELKTPAXTPKTV

SEQ ID NO: 9252 - protein, 39 aa, Artificial Sequence
  Non-cyclic GFR-binding peptide
  MOD_RES (1), (33), (34): Xaa is C or S
XGEVVMENSLQEVVKDYEDYYLMTLPELETPVXXAKPIS

SEQ ID NO: 9253 - protein, 36 aa, Artificial Sequence
  Non-cyclic GFR-binding peptide
  MOD_RES (32), (33): Xaa is C or S
ARVVMNNSLQEIVNSSDDYYVVPLPELQTPAXXPKP

SEQ ID NO: 9254 - protein, 42 aa, Artificial Sequence
  Non-cyclic GFR-binding peptide
  MOD_RES (2), (4), (38), (39): Xaa is C or S
  MOD_RES (16), (17), (18), (19), (20): Xaa is A or G
  MOD_RES (21), (22), (23), (24): Xaa is A or G or is absent
RXGXGEVVMENSLQEXXXXXXXXXYYVMPLPELETPVXXAKP

SEQ ID NO: 9255 - protein, 32 aa, Artificial Sequence
  Non-cyclic GFR-binding peptide
  MOD_RES (11), (12), (13), (14), (15): Xaa is A or G
  MOD_RES (16), (17), (18), (19): Xaa is A or G or is absent
SKVIMEYQKYXXXXXXXXXIFLISIPSLDQSV

SEQ ID NO: 9256 - protein, 40 aa, Artificial Sequence
  Non-cyclic GFR-binding peptide
  MOD_RES (2), (4), (36), (37): Xaa is C or S
RXGXGEVVMDNSLQEVVKENEDYYVMPLPELETPVXXAKP

SEQ ID NO: 9257 - protein, 39 aa, Artificial Sequence
  Non-cyclic GFR-binding peptide
  MOD_RES (2), (4), (37), (38): Xaa is C or S
  MOD_RES (15), (16), (17), (18), (19): Xaa is A or G
  MOD_RES (20), (21), (22), (23): Xaa is A or G or is absent
SXKXSRVIMNSLQEXXXXXXXXXYYLITLPELAQPVXXP

SEQ ID NO: 9258 - protein, 35 aa, Artificial Sequence
  Non-cyclic GFR-binding peptide
  MOD_RES (2), (4), (35): Xaa is C or S
SXKXSKVVMNSLQEVKPTRGVYYVIPLPELDQPVX

SEQ ID NO: 9259 - protein, 36 aa, Artificial Sequence
  Non-cyclic GFR-binding peptide
  MOD_RES (32), (33): Xaa is C or S
SEVVMDRYKKLVVNNASDFYLISIANLRTPVXXTPP

SEQ ID NO: 9260 - protein, 34 aa, Artificial Sequence
  Non-cyclic GFR-binding peptide
  MOD_RES (2), (4): Xaa is C or S
SXKXSRVIMNSLQEVKPKRGVYYLITLPELAQPV

SEQ ID NO: 9261 - protein, 37 aa, Artificial Sequence
  Non-cyclic GFR-binding peptide
  MOD_RES (2), (4), (37): Xaa is C or S
  MOD_RES (15), (16), (17), (18), (19): Xaa is A or G
  MOD_RES (20), (21), (22), (23): Xaa is A or G or is absent
SXKXSRVIMNSLQEXXXXXXXXXYYLITLPELAQPVX

SEQ ID NO: 9262 - protein, 37 aa, Artificial Sequence
  Non-cyclic GFR-binding peptide
  MOD_RES (2), (4): Xaa is C or S
  MOD_RES (16), (17), (18), (19), (20): Xaa is A or G
  MOD_RES (21), (22), (23), (24): Xaa is A or G or is absent
RXGXGEVVMENSLQEXXXXXXXXXYYVMPLPELETPV

SEQ ID NO: 9263 - protein, 33 aa, Artificial Sequence
  Non-cyclic GFR-binding peptide
  MOD_RES (2), (2): Xaa is C or S
GXSEVVMDNSLQEVVNNASDYYVIPLPELRTPV

SEQ ID NO: 9264 - protein, 35 aa, Artificial Sequence
  Non-cyclic GFR-binding peptide
  MOD_RES (1), (33), (34): Xaa is C or S
XGEVVMDNSLQEVVKENEDYYVMPLPELETPVXXA

SEQ ID NO: 9265 - protein, 40 aa, Artificial Sequence
  Non-cyclic GFR-binding peptide
  MOD_RES (2), (4), (36), (37): Xaa is C or S
HXGXSRVVMNEYQKYIVNSSDDIFLVSIPSLKTPAXXPKP

SEQ ID NO: 9266 - protein, 32 aa, Artificial Sequence
  Non-cyclic GFR-binding peptide
  MOD_RES (2), (2): Xaa is C or S
KXSKVVMEYQKYVKPTRGVIFLISIPSLDQPV

SEQ ID NO: 9267 - protein, 36 aa, Artificial Sequence
  Non-cyclic GFR-binding peptide
  MOD_RES (2), (35), (36): Xaa is C or S
  MOD_RES (13), (14), (15), (16), (17): Xaa is A or G
  MOD_RES (18), (19), (20), (21): Xaa is A or G or is absent
KXSKVVMNSLQEXXXXXXXXXYYVIPLPELDQPVXX

SEQ ID NO: 9268 - protein, 36 aa, Artificial Sequence
  Non-cyclic GFR-binding peptide
  MOD_RES (1), (35), (36): Xaa is C or S
  MOD_RES (13), (14), (15), (16), (17): Xaa is A or G
  MOD_RES (18), (19), (20), (21): Xaa is A or G or is absent
XSEVVMDRYKKLXXXXXXXXXFYLISIANLRTPVXX

SEQ ID NO: 9269 - protein, 34 aa, Artificial Sequence
  Non-cyclic GFR-binding peptide
  MOD_RES (33), (34): Xaa is C or S
  MOD_RES (11), (12), (13), (14), (15): Xaa is A or G
  MOD_RES (16), (17), (18), (19): Xaa is A or G or is absent
EVVMDRYKKLXXXXXXXXXFYLISIANLRTPVXX

SEQ ID NO: 9270 - protein, 36 aa, Artificial Sequence
  Non-cyclic GFR-binding peptide
  MOD_RES (34), (35): Xaa is C or S
  MOD_RES (12), (13), (14), (15), (16): Xaa is A or G
  MOD_RES (17), (18), (19), (20): Xaa is A or G or is absent
SEVVMDNSLQEXXXXXXXXXYYVIPLPELRTPVXXT

SEQ ID NO: 9271 - protein, 33 aa, Artificial Sequence
  Non-cyclic GFR-binding peptide
  MOD_RES (2), (33): Xaa is C or S
KXSRVIMEYQKYVKPKRGVIFLISIPSLAQPVX

SEQ ID NO: 9272 - protein, 36 aa, Artificial Sequence
  Non-cyclic GFR-binding peptide
  MOD_RES (32), (33): Xaa is C or S
SRVVMNEYQKYIVNSSDDIFLVSIPSLKTPAXXPKP

SEQ ID NO: 9273 - protein, 36 aa, Artificial Sequence
  Non-cyclic GFR-binding peptide
  MOD_RES (2), (34), (35): Xaa is C or S
GXARVVMNEYQKYIVNSSDDIFLVSIPSLQTPAXXP

SEQ ID NO: 9274 - protein, 35 aa, Artificial Sequence
  Non-cyclic GFR-binding peptide
  MOD_RES (33), (34): Xaa is C or S
  MOD_RES (11), (12), (13), (14), (15): Xaa is A or G
  MOD_RES (16), (17), (18), (19): Xaa is A or G or is absent
SKVIMNSLQEXXXXXXXXXYYVIPLPELDQSVXXP

SEQ ID NO: 9275 - protein, 42 aa, Artificial Sequence
  Non-cyclic GFR-binding peptide
  MOD_RES (2), (4), (36), (37): Xaa is C or S
HXGXSRVVMNNSLQEIVNSSDDYYVVPLPELKTPAXXPKPVY

SEQ ID NO: 9276 - protein, 34 aa, Artificial Sequence
  Non-cyclic GFR-binding peptide
  MOD_RES (32), (32): Xaa is C or S
SRVVMNEYQKYIVNSSDDIFLVSIPSLKTPAXTP

SEQ ID NO: 9277 - protein, 39 aa, Artificial Sequence
  Non-cyclic GFR-binding peptide
  MOD_RES (2), (34): Xaa is C or S
GXSRVVMNNSLQEIVNSSDDYYVVPLPELKTPAXTPKTV

SEQ ID NO: 9278 - protein, 34 aa, Artificial Sequence
  Non-cyclic GFR-binding peptide
  MOD_RES (33), (34): Xaa is C or S
  MOD_RES (11), (12), (13), (14), (15): Xaa is A or G
  MOD_RES (16), (17), (18), (19): Xaa is A or G or is absent
SRVIMNSLQEXXXXXXXXXYYLITLPELAQPVXX

SEQ ID NO: 9279 - protein, 35 aa, Artificial Sequence
  Non-cyclic GFR-binding peptide
  MOD_RES (2), (4): Xaa is C or S
RXGXGEVVMENSLQEVVKDYEDYYVMPLPELETPV

SEQ ID NO: 9280 - protein, 36 aa, Artificial Sequence
  Non-cyclic GFR-binding peptide
  MOD_RES (2), (4), (36): Xaa is C or S
HXGXARVVMNNSLQEIVNSSDDYYLVTLPELQTPAX

SEQ ID NO: 9281 - protein, 36 aa, Artificial Sequence
  Non-cyclic GFR-binding peptide
  MOD_RES (34), (35): Xaa is C or S
  MOD_RES (12), (13), (14), (15), (16): Xaa is A or G
  MOD_RES (17), (18), (19), (20): Xaa is A or G or is absent
ARVVMNNSLQEXXXXXXXXXYYVVPLPELQTPAXXP

SEQ ID NO: 9282 - protein, 37 aa, Artificial Sequence
  Non-cyclic GFR-binding peptide
  MOD_RES (31), (32): Xaa is C or S
RVVMNNSLQEIVNSSDDYYVVPLPELQTPAXXPKPVT

SEQ ID NO: 9283 - protein, 36 aa, Artificial Sequence
  Non-cyclic GFR-binding peptide
  MOD_RES (32), (33): Xaa is C or S
ARVVMNEYQKYIVNSSDDIFLVSIPSLQTPAXXPKP

SEQ ID NO: 9284 - protein, 36 aa, Artificial Sequence
  Non-cyclic GFR-binding peptide
  MOD_RES (31), (32): Xaa is C or S
RVVMNEYQKYIVNSSDDIFLVSIPSLKTPAXXPKPV

SEQ ID NO: 9285 - protein, 33 aa, Artificial Sequence
  Non-cyclic GFR-binding peptide
  MOD_RES (2), (2): Xaa is C or S
GXGEVVMENSLQEVVKDYEDYYLMTLPELETPV

SEQ ID NO: 9286 - protein, 34 aa, Artificial Sequence
  Non-cyclic GFR-binding peptide
  MOD_RES (1), (33), (34): Xaa is C or S
XSRVVMNNSLQEIVNSSDDYYLVTLPELKTPAXX

SEQ ID NO: 9287 - protein, 37 aa, Artificial Sequence
  Non-cyclic GFR-binding peptide
  MOD_RES (2), (34): Xaa is C or S
GXSRVVMNNSLQEIVNSSDDYYVVPLPELKTPAXTPK

SEQ ID NO: 9288 - protein, 37 aa, Artificial Sequence
  Non-cyclic GFR-binding peptide
  MOD_RES (1), (3), (37): Xaa is C or S
  MOD_RES (15), (16), (17), (18), (19): Xaa is A or G
  MOD_RES (20), (21), (22), (23): Xaa is A or G or is absent
XGXARVVMNEYQKYXXXXXXXXXIFLVSIPSLQTPAX

SEQ ID NO: 9289 - protein, 37 aa, Artificial Sequence
  Non-cyclic GFR-binding peptide
  MOD_RES (32), (33): Xaa is C or S
GEVVMDNSLQEVVKENEDYYLMTLPELETPVXXAKPI

SEQ ID NO: 9290 - protein, 36 aa, Artificial Sequence
  Non-cyclic GFR-binding peptide
  MOD_RES (1), (3), (36): Xaa is C or S
  MOD_RES (14), (15), (16), (17), (18): Xaa is A or G
  MOD_RES (19), (20), (21), (22): Xaa is A or G or is absent
XKXSKVIMNSLQEXXXXXXXXXYYVIPLPELDQSVX

SEQ ID NO: 9291 - protein, 38 aa, Artificial Sequence
  Non-cyclic GFR-binding peptide
  MOD_RES (33), (33): Xaa is C or S
  MOD_RES (11), (12), (13), (14), (15): Xaa is A or G
  MOD_RES (16), (17), (18), (19): Xaa is A or G or is absent
RVVMNNSLQEXXXXXXXXXYYVVPLPELKTPAXTPKTV

SEQ ID NO: 9292 - protein, 36 aa, Artificial Sequence
  Non-cyclic GFR-binding peptide
  MOD_RES (1), (35), (36): Xaa is C or S
  MOD_RES (13), (14), (15), (16), (17): Xaa is A or G
  MOD_RES (18), (19), (20), (21): Xaa is A or G or is absent
XSRVVMNNSLQEXXXXXXXXXYYVVPLPELKTPAXX

SEQ ID NO: 9293 - protein, 35 aa, Artificial Sequence
  Non-cyclic GFR-binding peptide
  MOD_RES (1), (3), (35): Xaa is C or S
XGXARVVMNEYQKYIVNSSDDIFLVSIPSLQTPAX

SEQ ID NO: 9294 - protein, 39 aa, Artificial Sequence
  Non-cyclic GFR-binding peptide
  MOD_RES (1), (3), (36), (37): Xaa is C or S
  MOD_RES (14), (15), (16), (17), (18): Xaa is A or G
  MOD_RES (19), (20), (21), (22): Xaa is A or G or is absent
XKXSRVIMNSLQEXXXXXXXXXYYLITLPELAQPVXXPA

SEQ ID NO: 9295 - protein, 35 aa, Artificial Sequence
  Non-cyclic GFR-binding peptide
  MOD_RES (2), (4): Xaa is C or S
HXGXARVVMNEYQKYIVNSSDDIFLVSIPSLQTPA

SEQ ID NO: 9296 - protein, 37 aa, Artificial Sequence
  Non-cyclic GFR-binding peptide
  MOD_RES (33), (34): Xaa is C or S
  MOD_RES (11), (12), (13), (14), (15): Xaa is A or G
  MOD_RES (16), (17), (18), (19): Xaa is A or G or is absent
SKVVMEYQKYXXXXXXXXXIFLISIPSLDQPVXXPSA

SEQ ID NO: 9297 - protein, 39 aa, Artificial Sequence
  Non-cyclic GFR-binding peptide
  MOD_RES (1), (3), (36), (37): Xaa is C or S
  MOD_RES (14), (15), (16), (17), (18): Xaa is A or G
  MOD_RES (19), (20), (21), (22): Xaa is A or G or is absent
XKXSKVVMEYQKYXXXXXXXXXIFLISIPSLDQPVXXPS

SEQ ID NO: 9298 - protein, 39 aa, Artificial Sequence
  Non-cyclic GFR-binding peptide
  MOD_RES (1), (3), (37), (38): Xaa is C or S
  MOD_RES (15), (16), (17), (18), (19): Xaa is A or G
  MOD_RES (20), (21), (22), (23): Xaa is A or G or is absent
XGXSRVVMNNSLQEXXXXXXXXXYYLVTLPELKTPAXXP

SEQ ID NO: 9299 - protein, 33 aa, Artificial Sequence
  Non-cyclic GFR-binding peptide
  MOD_RES (33), (33): Xaa is C or S
  MOD_RES (11), (12), (13), (14), (15): Xaa is A or G
  MOD_RES (16), (17), (18), (19): Xaa is A or G or is absent
EVVMEEYQKYXXXXXXXXXIFLMSIPSLETPVX

SEQ ID NO: 9300 - protein, 38 aa, Artificial Sequence
  Non-cyclic GFR-binding peptide
  MOD_RES (2), (36), (37): Xaa is C or S
  MOD_RES (14), (15), (16), (17), (18): Xaa is A or G
  MOD_RES (19), (20), (21), (22): Xaa is A or G or is absent
GXGEVVMDNSLQEXXXXXXXXXYYLMTLPELETPVXXA

SEQ ID NO: 9301 - protein, 39 aa, Artificial Sequence
  Non-cyclic GFR-binding peptide
  MOD_RES (2), (36), (37): Xaa is C or S
  MOD_RES (14), (15), (16), (17), (18): Xaa is A or G
  MOD_RES (19), (20), (21), (22): Xaa is A or G or is absent
GXGEVVMENSLQEXXXXXXXXXYYLMTLPELETPVXXAK

SEQ ID NO: 9302 - protein, 39 aa, Artificial Sequence
  Non-cyclic GFR-binding peptide
  MOD_RES (1), (3), (34), (35): Xaa is C or S
XKXSKVVMNSLQEVKPTRGVYYVIPLPELDQPVXXPSAS

SEQ ID NO: 9303 - protein, 34 aa, Artificial Sequence
  Non-cyclic GFR-binding peptide
  MOD_RES (33), (34): Xaa is C or S
  MOD_RES (11), (12), (13), (14), (15): Xaa is A or G
  MOD_RES (16), (17), (18), (19): Xaa is A or G or is absent
EVVMENSLQEXXXXXXXXXYYLMTLPELETPVXX

SEQ ID NO: 9304 - protein, 33 aa, Artificial Sequence
  Non-cyclic GFR-binding peptide
  MOD_RES (31), (32): Xaa is C or S
EVVMDNSLQEVVKENEDYYVMPLPELETPVXXA

SEQ ID NO: 9305 - protein, 40 aa, Artificial Sequence
  Non-cyclic GFR-binding peptide
  MOD_RES (1), (34), (35): Xaa is C or S
  MOD_RES (12), (13), (14), (15), (16): Xaa is A or G
  MOD_RES (17), (18), (19), (20): Xaa is A or G or is absent
XSKVVMEYQKYXXXXXXXXXIFLISIPSLDQPVXXPSASA

SEQ ID NO: 9306 - protein, 44 aa, Artificial Sequence
  Non-cyclic GFR-binding peptide
  MOD_RES (2), (4), (38), (39): Xaa is C or S
  MOD_RES (16), (17), (18), (19), (20): Xaa is A or G
  MOD_RES (21), (22), (23), (24): Xaa is A or G or is absent
HXGXSRVVMNEYQKYXXXXXXXXXIFLVSIPSLKTPAXXPKPVY

SEQ ID NO: 9307 - protein, 40 aa, Artificial Sequence
  Non-cyclic GFR-binding peptide
  MOD_RES (2), (36): Xaa is C or S
  MOD_RES (14), (15), (16), (17), (18): Xaa is A or G
  MOD_RES (19), (20), (21), (22): Xaa is A or G or is absent
GXSRVVMNEYQKYXXXXXXXXXIFLVSIPSLKTPAXTPKT

SEQ ID NO: 9308 - protein, 34 aa, Artificial Sequence
  Non-cyclic GFR-binding peptide
  MOD_RES (34), (34): Xaa is C or S
  MOD_RES (12), (13), (14), (15), (16): Xaa is A or G
  MOD_RES (17), (18), (19), (20): Xaa is A or G or is absent
GEVVMENSLQEXXXXXXXXXYYVMPLPELETPVX

SEQ ID NO: 9309 - protein, 38 aa, Artificial Sequence
  Non-cyclic GFR-binding peptide
  MOD_RES (2), (36), (37): Xaa is C or S
  MOD_RES (14), (15), (16), (17), (18): Xaa is A or G
  MOD_RES (19), (20), (21), (22): Xaa is A or G or is absent
GXSEVVMDNSLQEXXXXXXXXXYYLITLPELRTPVXXT

SEQ ID NO: 9310 - protein, 38 aa, Artificial Sequence
  Non-cyclic GFR-binding peptide
  MOD_RES (1), (3), (37), (38): Xaa is C or S
  MOD_RES (15), (16), (17), (18), (19): Xaa is A or G
  MOD_RES (20), (21), (22), (23): Xaa is A or G or is absent
XGXSRVVMNNSLQEXXXXXXXXXYYLVTLPELKTPAXX

SEQ ID NO: 9311 - protein, 40 aa, Artificial Sequence
  Non-cyclic GFR-binding peptide
  MOD_RES (2), (4), (37), (38): Xaa is C or S
  MOD_RES (15), (16), (17), (18), (19): Xaa is A or G
  MOD_RES (20), (21), (22), (23): Xaa is A or G or is absent
SXKXSRVIMNSLQEXXXXXXXXXYYLITLPELAQPVXXPA

SEQ ID NO: 9312 - protein, 32 aa, Artificial Sequence
  Non-cyclic GFR-binding peptide
  MOD_RES (31), (32): Xaa is C or S
SKVVMNSLQEVKPTRGVYYVIPLPELDQPVXX

SEQ ID NO: 9313 - protein, 35 aa, Artificial Sequence
  Non-cyclic GFR-binding peptide
  MOD_RES (1), (34), (35): Xaa is C or S
  MOD_RES (12), (13), (14), (15), (16): Xaa is A or G
  MOD_RES (17), (18), (19), (20): Xaa is A or G or is absent
XSKVVMEYQKYXXXXXXXXXIFLISIPSLDQPVXX

SEQ ID NO: 9314 - protein, 39 aa, Artificial Sequence
  Non-cyclic GFR-binding peptide
  MOD_RES (1), (3), (37), (38): Xaa is C or S
  MOD_RES (15), (16), (17), (18), (19): Xaa is A or G
  MOD_RES (20), (21), (22), (23): Xaa is A or G or is absent
XGXGEVVMDEYQKYXXXXXXXXXIFLMSIPSLETPVXXA

SEQ ID NO: 9315 - protein, 37 aa, Artificial Sequence
  Non-cyclic GFR-binding peptide
  MOD_RES (34), (35): Xaa is C or S
  MOD_RES (12), (13), (14), (15), (16): Xaa is A or G
  MOD_RES (17), (18), (19), (20): Xaa is A or G or is absent
SEVVMDRYKKLXXXXXXXXXFYLISIANLRTPVXXTP

SEQ ID NO: 9316 - protein, 34 aa, Artificial Sequence
  Non-cyclic GFR-binding peptide
  MOD_RES (31), (32): Xaa is C or S
EVVMEEYQKYVVKDYEDIFLMSIPSLETPVXXAK

SEQ ID NO: 9317 - protein, 41 aa, Artificial Sequence
  Non-cyclic GFR-binding peptide
  MOD_RES (1), (35), (36): Xaa is C or S
  MOD_RES (13), (14), (15), (16), (17): Xaa is A or G
  MOD_RES (18), (19), (20), (21): Xaa is A or G or is absent
XARVVMNNSLQEXXXXXXXXXYYLVTLPELQTPAXXPKPVT

SEQ ID NO: 9318 - protein, 36 aa, Artificial Sequence
  Non-cyclic GFR-binding peptide
  MOD_RES (31), (32): Xaa is C or S
SKVVMEYQKYVKPTRGVIFLISIPSLDQPVXXPSAS

SEQ ID NO: 9319 - protein, 32 aa, Artificial Sequence
  Non-cyclic GFR-binding peptide
  MOD_RES (1), (32): Xaa is C or S
XSKVIMNSLQEIKPTKGIYYVIPLPELDQSVX

SEQ ID NO: 9320 - protein, 42 aa, Artificial Sequence
  Non-cyclic GFR-binding peptide
  MOD_RES (2), (4), (38), (39): Xaa is C or S
  MOD_RES (16), (17), (18), (19), (20): Xaa is A or G
  MOD_RES (21), (22), (23), (24): Xaa is A or G or is absent
HXGXSRVVMNNSLQEXXXXXXXXXYYVVPLPELKTPAXXPKP

SEQ ID NO: 9321 - protein, 37 aa, Artificial Sequence
  Non-cyclic GFR-binding peptide
  MOD_RES (31), (32): Xaa is C or S
SRVIMEYQKYVKPKRGVIFLISIPSLAQPVXXPAASA

SEQ ID NO: 9322 - protein, 33 aa, Artificial Sequence
  Non-cyclic GFR-binding peptide
  MOD_RES (32), (32): Xaa is C or S
SRVVMNEYQKYIVNSSDDIFLVSIPSLKTPAXT

SEQ ID NO: 9323 - protein, 32 aa, Artificial Sequence
  Non-cyclic GFR-binding peptide
  MOD_RES (1), (1): Xaa is C or S
XSRVVMNNSLQEIVNSSDDYYLVTLPELKTPA

SEQ ID NO: 9324 - protein, 35 aa, Artificial Sequence
  Non-cyclic GFR-binding peptide
  MOD_RES (2), (34): Xaa is C or S
GXSRVVMNNSLQEIVNSSDDYYVVPLPELKTPAXT

SEQ ID NO: 9325 - protein, 40 aa, Artificial Sequence
  Non-cyclic GFR-binding peptide
  MOD_RES (34), (35): Xaa is C or S
  MOD_RES (12), (13), (14), (15), (16): Xaa is A or G
  MOD_RES (17), (18), (19), (20): Xaa is A or G or is absent
ARVVMNEYQKYXXXXXXXXXIFLVSIPSLQTPAXXPKPVT

SEQ ID NO: 9326 - protein, 35 aa, Artificial Sequence
  Non-cyclic GFR-binding peptide
  MOD_RES (2), (4): Xaa is C or S
HXGXARVVMNNSLQEIVNSSDDYYLVTLPELQTPA

SEQ ID NO: 9327 - protein, 37 aa, Artificial Sequence
  Non-cyclic GFR-binding peptide
  MOD_RES (34), (35): Xaa is C or S
  MOD_RES (12), (13), (14), (15), (16): Xaa is A or G
  MOD_RES (17), (18), (19), (20): Xaa is A or G or is absent
GEVVMENSLQEXXXXXXXXXYYLMTLPELETPVXXAK

SEQ ID NO: 9328 - protein, 41 aa, Artificial Sequence
  Non-cyclic GFR-binding peptide
  MOD_RES (2), (36), (37): Xaa is C or S
  MOD_RES (14), (15), (16), (17), (18): Xaa is A or G
  MOD_RES (19), (20), (21), (22): Xaa is A or G or is absent
GXARVVMNNSLQEXXXXXXXXXYYLVTLPELQTPAXXPKPV

SEQ ID NO: 9329 - protein, 40 aa, Artificial Sequence
  Non-cyclic GFR-binding peptide
  MOD_RES (2), (36), (37): Xaa is C or S
  MOD_RES (14), (15), (16), (17), (18): Xaa is A or G
  MOD_RES (19), (20), (21), (22): Xaa is A or G or is absent
GXARVVMNNSLQEXXXXXXXXXYYVVPLPELQTPAXXPKP

SEQ ID NO: 9330 - protein, 40 aa, Artificial Sequence
  Non-cyclic GFR-binding peptide
  MOD_RES (1), (3), (36), (37): Xaa is C or S
  MOD_RES (14), (15), (16), (17), (18): Xaa is A or G
  MOD_RES (19), (20), (21), (22): Xaa is A or G or is absent
XKXSRVIMNSLQEXXXXXXXXXYYLITLPELAQPVXXPAA

SEQ ID NO: 9331 - protein, 35 aa, Artificial Sequence
  Non-cyclic GFR-binding peptide
  MOD_RES (1), (3): Xaa is C or S
  MOD_RES (14), (15), (16), (17), (18): Xaa is A or G
  MOD_RES (19), (20), (21), (22): Xaa is A or G or is absent
XKXSKVIMNSLQEXXXXXXXXXYYVIPLPELDQSV

SEQ ID NO: 9332 - protein, 37 aa, Artificial Sequence
  Non-cyclic GFR-binding peptide
  MOD_RES (1), (32), (33): Xaa is C or S
XSKVVMNSLQEVKPTRGVYYVIPLPELDQPVXXPSAS

SEQ ID NO: 9333 - protein, 35 aa, Artificial Sequence
  Non-cyclic GFR-binding peptide
  MOD_RES (1), (3), (34), (35): Xaa is C or S
XKXSRVIMNSLQEVKPKRGVYYLITLPELAQPVXX

SEQ ID NO: 9334 - protein, 35 aa, Artificial Sequence
  Non-cyclic GFR-binding peptide
  MOD_RES (34), (35): Xaa is C or S
  MOD_RES (12), (13), (14), (15), (16): Xaa is A or G
  MOD_RES (17), (18), (19), (20): Xaa is A or G or is absent
GEVVMENSLQEXXXXXXXXXYYVMPLPELETPVXX

SEQ ID NO: 9335 - protein, 36 aa, Artificial Sequence
  Non-cyclic GFR-binding peptide
  MOD_RES (2), (4), (36): Xaa is C or S
RXGXGEVVMENSLQEVVKDYEDYYVMPLPELETPVX

SEQ ID NO: 9336 - protein, 42 aa, Artificial Sequence
  Non-cyclic GFR-binding peptide
  MOD_RES (2), (36), (37): Xaa is C or S
  MOD_RES (14), (15), (16), (17), (18): Xaa is A or G
  MOD_RES (19), (20), (21), (22): Xaa is A or G or is absent
GXARVVMNNSLQEXXXXXXXXXYYVVPLPELQTPAXXPKPVT

SEQ ID NO: 9337 - protein, 34 aa, Artificial Sequence
  Non-cyclic GFR-binding peptide
  MOD_RES (33), (34): Xaa is C or S
  MOD_RES (11), (12), (13), (14), (15): Xaa is A or G
  MOD_RES (16), (17), (18), (19): Xaa is A or G or is absent
SKVIMNSLQEXXXXXXXXXYYVIPLPELDQSVXX

SEQ ID NO: 9338 - protein, 35 aa, Artificial Sequence
  Non-cyclic GFR-binding peptide
  MOD_RES (2), (34), (35): Xaa is C or S
GXGEVVMDEYQKYVVKENEDIFLMSIPSLETPVXX

SEQ ID NO: 9339 - protein, 39 aa, Artificial Sequence
  Non-cyclic GFR-binding peptide
  MOD_RES (1), (35): Xaa is C or S
  MOD_RES (13), (14), (15), (16), (17): Xaa is A or G
  MOD_RES (18), (19), (20), (21): Xaa is A or G or is absent
XSRVVMNEYQKYXXXXXXXXXIFLVSIPSLKTPAXTPKT

SEQ ID NO: 9340 - protein, 39 aa, Artificial Sequence
  Non-cyclic GFR-binding peptide
  MOD_RES (1), (3), (34), (35): Xaa is C or S
XKXSKVIMEYQKYIKPTKGIIFLISIPSLDQSVXXPSAS

SEQ ID NO: 9341 - protein, 36 aa, Artificial Sequence
  Non-cyclic GFR-binding peptide
  MOD_RES (34), (34): Xaa is C or S
  MOD_RES (12), (13), (14), (15), (16): Xaa is A or G
  MOD_RES (17), (18), (19), (20): Xaa is A or G or is absent
SRVVMNNSLQEXXXXXXXXXYYLVTLPELKTPAXTP

SEQ ID NO: 9342 - protein, 39 aa, Artificial Sequence
  Non-cyclic GFR-binding peptide
  MOD_RES (33), (33): Xaa is C or S
  MOD_RES (11), (12), (13), (14), (15): Xaa is A or G
  MOD_RES (16), (17), (18), (19): Xaa is A or G or is absent
RVVMNNSLQEXXXXXXXXXYYLVTLPELKTPAXTPKTVH

SEQ ID NO: 9343 - protein, 32 aa, Artificial Sequence
  Non-cyclic GFR-binding peptide
  MOD_RES (32), (32): Xaa is C or S
GEVVMDNSLQEVVKENEDYYLMTLPELETPVX

SEQ ID NO: 9344 - protein, 43 aa, Artificial Sequence
  Non-cyclic GFR-binding peptide
  MOD_RES (1), (3), (37), (38): Xaa is C or S
  MOD_RES (15), (16), (17), (18), (19): Xaa is A or G
  MOD_RES (20), (21), (22), (23): Xaa is A or G or is absent
XGXSRVVMNEYQKYXXXXXXXXXIFLVSIPSLKTPAXXPKPVY

SEQ ID NO: 9345 - protein, 41 aa, Artificial Sequence
  Non-cyclic GFR-binding peptide
  MOD_RES (2), (4), (36), (37): Xaa is C or S
RXGXGEVVMDNSLQEVVKENEDYYVMPLPELETPVXXAKPI

SEQ ID NO: 9346 - protein, 39 aa, Artificial Sequence
  Non-cyclic GFR-binding peptide
  MOD_RES (2), (4), (38), (39): Xaa is C or S
  MOD_RES (16), (17), (18), (19), (20): Xaa is A or G
  MOD_RES (21), (22), (23), (24): Xaa is A or G or is absent
RXGXGEVVMENSLQEXXXXXXXXXYYVMPLPELETPVXX

SEQ ID NO: 9347 - protein, 42 aa, Artificial Sequence
  Non-cyclic GFR-binding peptide
  MOD_RES (2), (4), (38), (39): Xaa is C or S
  MOD_RES (16), (17), (18), (19), (20): Xaa is A or G
  MOD_RES (21), (22), (23), (24): Xaa is A or G or is absent
RXGXGEVVMDNSLQEXXXXXXXXXYYVMPLPELETPVXXAKP

SEQ ID NO: 9348 - protein, 33 aa, Artificial Sequence
  Non-cyclic GFR-binding peptide
  MOD_RES (1), (33): Xaa is C or S
XARVVMNEYQKYIVNSSDDIFLVSIPSLQTPAX

SEQ ID NO: 9349 - protein, 43 aa, Artificial Sequence
  Non-cyclic GFR-binding peptide
  MOD_RES (2), (4), (38), (39): Xaa is C or S
  MOD_RES (16), (17), (18), (19), (20): Xaa is A or G
  MOD_RES (21), (22), (23), (24): Xaa is A or G or is absent
RXGXGEVVMENSLQEXXXXXXXXXYYLMTLPELETPVXXAKPI

SEQ ID NO: 9350 - protein, 39 aa, Artificial Sequence
  Non-cyclic GFR-binding peptide
  MOD_RES (1), (3), (37), (38): Xaa is C or S
  MOD_RES (15), (16), (17), (18), (19): Xaa is A or G
  MOD_RES (20), (21), (22), (23): Xaa is A or G or is absent
XGXSEVVMDNSLQEXXXXXXXXXYYVIPLPELRTPVXXT

SEQ ID NO: 9351 - protein, 39 aa, Artificial Sequence
  Non-cyclic GFR-binding peptide
  MOD_RES (2), (4), (36), (37): Xaa is C or S
RXGXGEVVMDEYQKYVVKENEDIFLMSIPSLETPVXXAK

SEQ ID NO: 9352 - protein, 41 aa, Artificial Sequence
  Non-cyclic GFR-binding peptide
  MOD_RES (1), (3), (37), (38): Xaa is C or S
  MOD_RES (15), (16), (17), (18), (19): Xaa is A or G
  MOD_RES (20), (21), (22), (23): Xaa is A or G or is absent
XGXGEVVMDNSLQEXXXXXXXXXYYVMPLPELETPVXXAKP

SEQ ID NO: 9353 - protein, 37 aa, Artificial Sequence
  Non-cyclic GFR-binding peptide
  MOD_RES (2), (4): Xaa is C or S
  MOD_RES (16), (17), (18), (19), (20): Xaa is A or G
  MOD_RES (21), (22), (23), (24): Xaa is A or G or is absent
RXGXGEVVMEEYQKYXXXXXXXXXIFLMSIPSLETPV

SEQ ID NO: 9354 - protein, 35 aa, Artificial Sequence
  Non-cyclic GFR-binding peptide
  MOD_RES (31), (31): Xaa is C or S
RVVMNNSLQEIVNSSDDYYVVPLPELKTPAXTPKT

SEQ ID NO: 9355 - protein, 42 aa, Artificial Sequence
  Non-cyclic GFR-binding peptide
  MOD_RES (2), (4), (36), (37): Xaa is C or S
RXGXSEVVMDNSLQEVVNNASDYYVIPLPELRTPVXXTPPTS

SEQ ID NO: 9356 - protein, 42 aa, Artificial Sequence
  Non-cyclic GFR-binding peptide
  MOD_RES (2), (4), (36), (37): Xaa is C or S
HXGXSRVVMNNSLQEIVNSSDDYYLVTLPELKTPAXXPKPVY

SEQ ID NO: 9357 - protein, 36 aa, Artificial Sequence
  Non-cyclic GFR-binding peptide
  MOD_RES (1), (3): Xaa is C or S
  MOD_RES (15), (16), (17), (18), (19): Xaa is A or G
  MOD_RES (20), (21), (22), (23): Xaa is A or G or is absent
XGXSRVVMNNSLQEXXXXXXXXXYYVVPLPELKTPA

SEQ ID NO: 9358 - protein, 40 aa, Artificial Sequence
  Non-cyclic GFR-binding peptide
  MOD_RES (2), (4), (38): Xaa is C or S
  MOD_RES (16), (17), (18), (19), (20): Xaa is A or G
  MOD_RES (21), (22), (23), (24): Xaa is A or G or is absent
HXGXSRVVMNNSLQEXXXXXXXXXYYVVPLPELKTPAXTP

SEQ ID NO: 9359 - protein, 38 aa, Artificial Sequence
  Non-cyclic GFR-binding peptide
  MOD_RES (2), (34), (35): Xaa is C or S
GXGEVVMEEYQKYVVKDYEDIFLMSIPSLETPVXXAKP

SEQ ID NO: 9360 - protein, 35 aa, Artificial Sequence
  Non-cyclic GFR-binding peptide
  MOD_RES (1), (3), (35): Xaa is C or S
XGXSRVVMNNSLQEIVNSSDDYYVVPLPELKTPAX

SEQ ID NO: 9361 - protein, 35 aa, Artificial Sequence
  Non-cyclic GFR-binding peptide
  MOD_RES (1), (33), (34): Xaa is C or S
XARVVMNNSLQEIVNSSDDYYVVPLPELQTPAXXP

SEQ ID NO: 9362 - protein, 38 aa, Artificial Sequence
  Non-cyclic GFR-binding peptide
  MOD_RES (1), (3), (35): Xaa is C or S
XGXSRVVMNEYQKYIVNSSDDIFLVSIPSLKTPAXTPK

SEQ ID NO: 9363 - protein, 40 aa, Artificial Sequence
  Non-cyclic GFR-binding peptide
  MOD_RES (2), (34), (35): Xaa is C or S
GXSRVVMNNSLQEIVNSSDDYYLVTLPELKTPAXXPKPVY

SEQ ID NO: 9364 - protein, 40 aa, Artificial Sequence
  Non-cyclic GFR-binding peptide
  MOD_RES (1), (3), (37), (38): Xaa is C or S
  MOD_RES (15), (16), (17), (18), (19): Xaa is A or G
  MOD_RES (20), (21), (22), (23): Xaa is A or G or is absent
XGXGEVVMEEYQKYXXXXXXXXXIFLMSIPSLETPVXXAK

SEQ ID NO: 9365 - protein, 36 aa, Artificial Sequence
  Non-cyclic GFR-binding peptide
  MOD_RES (1), (34), (35): Xaa is C or S
  MOD_RES (12), (13), (14), (15), (16): Xaa is A or G
  MOD_RES (17), (18), (19), (20): Xaa is A or G or is absent
XSRVIMNSLQEXXXXXXXXXYYLITLPELAQPVXXP

SEQ ID NO: 9366 - protein, 37 aa, Artificial Sequence
  Non-cyclic GFR-binding peptide
  MOD_RES (1), (33), (34): Xaa is C or S
XGEVVMENSLQEVVKDYEDYYVMPLPELETPVXXAKP

SEQ ID NO: 9367 - protein, 40 aa, Artificial Sequence
  Non-cyclic GFR-binding peptide
  MOD_RES (1), (3), (34), (35): Xaa is C or S
XKXSKVVMNSLQEVKPTRGVYYVIPLPELDQPVXXPSASA

SEQ ID NO: 9368 - protein, 35 aa, Artificial Sequence
  Non-cyclic GFR-binding peptide
  MOD_RES (1), (3), (35): Xaa is C or S
XGXSRVVMNEYQKYIVNSSDDIFLVSIPSLKTPAX

SEQ ID NO: 9369 - protein, 32 aa, Artificial Sequence
  Non-cyclic GFR-binding peptide
  MOD_RES (31), (32): Xaa is C or S
EVVMEEYQKYVVKDYEDIFLMSIPSLETPVXX

SEQ ID NO: 9370 - protein, 39 aa, Artificial Sequence
  Non-cyclic GFR-binding peptide
  MOD_RES (2), (4), (37), (38): Xaa is C or S
  MOD_RES (15), (16), (17), (18), (19): Xaa is A or G
  MOD_RES (20), (21), (22), (23): Xaa is A or G or is absent
SXKXSKVIMEYQKYXXXXXXXXXIFLISIPSLDQSVXXP

SEQ ID NO: 9371 - protein, 38 aa, Artificial Sequence
  Non-cyclic GFR-binding peptide
  MOD_RES (2), (33), (34): Xaa is C or S
KXSRVIMNSLQEVKPKRGVYYLITLPELAQPVXXPAAS

SEQ ID NO: 9372 - protein, 37 aa, Artificial Sequence
  Non-cyclic GFR-binding peptide
  MOD_RES (2), (4): Xaa is C or S
  MOD_RES (16), (17), (18), (19), (20): Xaa is A or G
  MOD_RES (21), (22), (23), (24): Xaa is A or G or is absent
HXGXARVVMNNSLQEXXXXXXXXXYYLVTLPELQTPA

SEQ ID NO: 9373 - protein, 35 aa, Artificial Sequence
  Non-cyclic GFR-binding peptide
  MOD_RES (1), (3), (35): Xaa is C or S
XGXSEVVMDQYNKLVVNNASDLYLISIASLRTPVX

SEQ ID NO: 9374 - protein, 37 aa, Artificial Sequence
  Non-cyclic GFR-binding peptide
  MOD_RES (33), (34): Xaa is C or S
  MOD_RES (11), (12), (13), (14), (15): Xaa is A or G
  MOD_RES (16), (17), (18), (19): Xaa is A or G or is absent
EVVMDEYQKYXXXXXXXXXIFLMSIPSLETPVXXAKP

SEQ ID NO: 9375 - protein, 39 aa, Artificial Sequence
  Non-cyclic GFR-binding peptide
  MOD_RES (33), (34): Xaa is C or S
  MOD_RES (11), (12), (13), (14), (15): Xaa is A or G
  MOD_RES (16), (17), (18), (19): Xaa is A or G or is absent
EVVMDNSLQEXXXXXXXXXYYVIPLPELRTPVXXTPPTS

SEQ ID NO: 9376 - protein, 40 aa, Artificial Sequence
  Non-cyclic GFR-binding peptide
  MOD_RES (1), (3), (36), (37): Xaa is C or S
  MOD_RES (14), (15), (16), (17), (18): Xaa is A or G
  MOD_RES (19), (20), (21), (22): Xaa is A or G or is absent
XKXSKVVMEYQKYXXXXXXXXXIFLISIPSLDQPVXXPSA

SEQ ID NO: 9377 - protein, 42 aa, Artificial Sequence
  Non-cyclic GFR-binding peptide
  MOD_RES (2), (36), (37): Xaa is C or S
  MOD_RES (14), (15), (16), (17), (18): Xaa is A or G
  MOD_RES (19), (20), (21), (22): Xaa is A or G or is absent
GXGEVVMDEYQKYXXXXXXXXXIFLMSIPSLETPVXXAKPIK

SEQ ID NO: 9378 - protein, 31 aa, Artificial Sequence
  Non-cyclic GFR-binding peptide
  MOD_RES (1), (1): Xaa is C or S
XSKVIMEYQKYIKPTKGIIFLISIPSLDQSV

SEQ ID NO: 9379 - protein, 36 aa, Artificial Sequence
  Non-cyclic GFR-binding peptide
  MOD_RES (1), (35): Xaa is C or S
  MOD_RES (13), (14), (15), (16), (17): Xaa is A or G
  MOD_RES (18), (19), (20), (21): Xaa is A or G or is absent
XSRVVMNNSLQEXXXXXXXXXYYLVTLPELKTPAXT

SEQ ID NO: 9380 - protein, 37 aa, Artificial Sequence
  Non-cyclic GFR-binding peptide
  MOD_RES (32), (33): Xaa is C or S
SRVVMNNSLQEIVNSSDDYYLVTLPELKTPAXXPKPV

SEQ ID NO: 9381 - protein, 37 aa, Artificial Sequence
  Non-cyclic GFR-binding peptide
  MOD_RES (2), (4): Xaa is C or S
  MOD_RES (16), (17), (18), (19), (20): Xaa is A or G
  MOD_RES (21), (22), (23), (24): Xaa is A or G or is absent
RXGXGEVVMDNSLQEXXXXXXXXXYYLMTLPELETPV

SEQ ID NO: 9382 - protein, 36 aa, Artificial Sequence
  Non-cyclic GFR-binding peptide
  MOD_RES (2), (34), (35): Xaa is C or S
GXGEVVMDEYQKYVVKENEDIFLMSIPSLETPVXXA

SEQ ID NO: 9383 - protein, 37 aa, Artificial Sequence
  Non-cyclic GFR-binding peptide
  MOD_RES (2), (33), (34): Xaa is C or S
KXSKVVMNSLQEVKPTRGVYYVIPLPELDQPVXXPSA

SEQ ID NO: 9384 - protein, 35 aa, Artificial Sequence
  Non-cyclic GFR-binding peptide
  MOD_RES (1), (35): Xaa is C or S
  MOD_RES (13), (14), (15), (16), (17): Xaa is A or G
  MOD_RES (18), (19), (20), (21): Xaa is A or G or is absent
XSRVVMNNSLQEXXXXXXXXXYYVVPLPELKTPAX

SEQ ID NO: 9385 - protein, 34 aa, Artificial Sequence
  Non-cyclic GFR-binding peptide
  MOD_RES (1), (34): Xaa is C or S
  MOD_RES (12), (13), (14), (15), (16): Xaa is A or G
  MOD_RES (17), (18), (19), (20): Xaa is A or G or is absent
XSKVIMNSLQEXXXXXXXXXYYVIPLPELDQSVX

SEQ ID NO: 9386 - protein, 34 aa, Artificial Sequence
  Non-cyclic GFR-binding peptide
  MOD_RES (31), (32): Xaa is C or S
SRVIMNSLQEVKPKRGVYYLITLPELAQPVXXPA

SEQ ID NO: 9387 - protein, 41 aa, Artificial Sequence
  Non-cyclic GFR-binding peptide
  MOD_RES (2), (36): Xaa is C or S
  MOD_RES (14), (15), (16), (17), (18): Xaa is A or G
  MOD_RES (19), (20), (21), (22): Xaa is A or G or is absent
GXSRVVMNNSLQEXXXXXXXXXYYVVPLPELKTPAXTPKTV

SEQ ID NO: 9388 - protein, 37 aa, Artificial Sequence
  Non-cyclic GFR-binding peptide
  MOD_RES (1), (33), (34): Xaa is C or S
XSEVVMDQYNKLVVNNASDLYLISIASLRTPVXXTPP

SEQ ID NO: 9389 - protein, 39 aa, Artificial Sequence
  Non-cyclic GFR-binding peptide
  MOD_RES (33), (34): Xaa is C or S
  MOD_RES (11), (12), (13), (14), (15): Xaa is A or G
  MOD_RES (16), (17), (18), (19): Xaa is A or G or is absent
EVVMDRYKKLXXXXXXXXXFYLISIANLRTPVXXTPPTS

SEQ ID NO: 9390 - protein, 40 aa, Artificial Sequence
  Non-cyclic GFR-binding peptide
  MOD_RES (1), (34), (35): Xaa is C or S
  MOD_RES (12), (13), (14), (15), (16): Xaa is A or G
  MOD_RES (17), (18), (19), (20): Xaa is A or G or is absent
XSRVIMEYQKYXXXXXXXXXIFLISIPSLAQPVXXPAASA

SEQ ID NO: 9391 - protein, 36 aa, Artificial Sequence
  Non-cyclic GFR-binding peptide
  MOD_RES (1), (33), (34): Xaa is C or S
XSRVVMNNSLQEIVNSSDDYYLVTLPELKTPAXXPK

SEQ ID NO: 9392 - protein, 39 aa, Artificial Sequence
  Non-cyclic GFR-binding peptide
  MOD_RES (1), (33), (34): Xaa is C or S
XARVVMNNSLQEIVNSSDDYYLVTLPELQTPAXXPKPVT

SEQ ID NO: 9393 - protein, 35 aa, Artificial Sequence
  Non-cyclic GFR-binding peptide
  MOD_RES (2), (35): Xaa is C or S
  MOD_RES (13), (14), (15), (16), (17): Xaa is A or G
  MOD_RES (18), (19), (20), (21): Xaa is A or G or is absent
KXSKVVMNSLQEXXXXXXXXXYYVIPLPELDQPVX

SEQ ID NO: 9394 - protein, 36 aa, Artificial Sequence
  Non-cyclic GFR-binding peptide
  MOD_RES (33), (34): Xaa is C or S
  MOD_RES (11), (12), (13), (14), (15): Xaa is A or G
  MOD_RES (16), (17), (18), (19): Xaa is A or G or is absent
RVVMNNSLQEXXXXXXXXXYYVVPLPELKTPAXXPK

SEQ ID NO: 9395 - protein, 39 aa, Artificial Sequence
  Non-cyclic GFR-binding peptide
  MOD_RES (2), (34), (35): Xaa is C or S
GXGEVVMENSLQEVVKDYEDYYLMTLPELETPVXXAKPI

SEQ ID NO: 9396 - protein, 35 aa, Artificial Sequence
  Non-cyclic GFR-binding peptide
  MOD_RES (2), (2): Xaa is C or S
  MOD_RES (14), (15), (16), (17), (18): Xaa is A or G
  MOD_RES (19), (20), (21), (22): Xaa is A or G or is absent
GXSRVVMNNSLQEXXXXXXXXXYYLVTLPELKTPA

SEQ ID NO: 9397 - protein, 37 aa, Artificial Sequence
  Non-cyclic GFR-binding peptide
  MOD_RES (2), (36): Xaa is C or S
  MOD_RES (14), (15), (16), (17), (18): Xaa is A or G
  MOD_RES (19), (20), (21), (22): Xaa is A or G or is absent
GXSRVVMNNSLQEXXXXXXXXXYYLVTLPELKTPAXT

SEQ ID NO: 9398 - protein, 37 aa, Artificial Sequence
  Non-cyclic GFR-binding peptide
  MOD_RES (2), (4), (36), (37): Xaa is C or S
HXGXSRVVMNNSLQEIVNSSDDYYVVPLPELKTPAXX

SEQ ID NO: 9399 - protein, 40 aa, Artificial Sequence
  Non-cyclic GFR-binding peptide
  MOD_RES (1), (3), (35), (36): Xaa is C or S
XGXSEVVMDNSLQEVVNNASDYYVIPLPELRTPVXXTPPT

SEQ ID NO: 9400 - protein, 36 aa, Artificial Sequence
  Non-cyclic GFR-binding peptide
  MOD_RES (33), (34): Xaa is C or S
  MOD_RES (11), (12), (13), (14), (15): Xaa is A or G
  MOD_RES (16), (17), (18), (19): Xaa is A or G or is absent
EVVMDNSLQEXXXXXXXXXYYLMTLPELETPVXXAK

SEQ ID NO: 9401 - protein, 35 aa, Artificial Sequence
  Non-cyclic GFR-binding peptide
  MOD_RES (1), (3), (35): Xaa is C or S
XGXSEVVMDNSLQEVVNNASDYYLITLPELRTPVX

SEQ ID NO: 9402 - protein, 35 aa, Artificial Sequence
  Non-cyclic GFR-binding peptide
  MOD_RES (34), (34): Xaa is C or S
  MOD_RES (12), (13), (14), (15), (16): Xaa is A or G
  MOD_RES (17), (18), (19), (20): Xaa is A or G or is absent
SRVVMNNSLQEXXXXXXXXXYYVVPLPELKTPAXT

SEQ ID NO: 9403 - protein, 40 aa, Artificial Sequence
  Non-cyclic GFR-binding peptide
  MOD_RES (2), (36), (37): Xaa is C or S
  MOD_RES (14), (15), (16), (17), (18): Xaa is A or G
  MOD_RES (19), (20), (21), (22): Xaa is A or G or is absent
GXGEVVMENSLQEXXXXXXXXXYYLMTLPELETPVXXAKP

SEQ ID NO: 9404 - protein, 36 aa, Artificial Sequence
  Non-cyclic GFR-binding peptide
  MOD_RES (31), (32): Xaa is C or S
SRVIMEYQKYVKPKRGVIFLISIPSLAQPVXXPAAS

SEQ ID NO: 9405 - protein, 41 aa, Artificial Sequence
  Non-cyclic GFR-binding peptide
  MOD_RES (2), (4), (36), (37): Xaa is C or S
HXGXARVVMNEYQKYIVNSSDDIFLVSIPSLQTPAXXPKPV

SEQ ID NO: 9406 - protein, 40 aa, Artificial Sequence
  Non-cyclic GFR-binding peptide
  MOD_RES (1), (3), (34), (35): Xaa is C or S
XKXSKVIMEYQKYIKPTKGIIFLISIPSLDQSVXXPSASA

SEQ ID NO: 9407 - protein, 42 aa, Artificial Sequence
  Non-cyclic GFR-binding peptide
  MOD_RES (1), (3), (36), (37): Xaa is C or S
  MOD_RES (14), (15), (16), (17), (18): Xaa is A or G
  MOD_RES (19), (20), (21), (22): Xaa is A or G or is absent
XKXSKVVMNSLQEXXXXXXXXXYYVIPLPELDQPVXXPSASA

SEQ ID NO: 9408 - protein, 41 aa, Artificial Sequence
  Non-cyclic GFR-binding peptide
  MOD_RES (2), (4), (38), (39): Xaa is C or S
  MOD_RES (16), (17), (18), (19), (20): Xaa is A or G
  MOD_RES (21), (22), (23), (24): Xaa is A or G or is absent
RXGXSEVVMDQYNKLXXXXXXXXXLYLISIASLRTPVXXTP

SEQ ID NO: 9409 - protein, 37 aa, Artificial Sequence
  Non-cyclic GFR-binding peptide
  MOD_RES (34), (35): Xaa is C or S
  MOD_RES (12), (13), (14), (15), (16): Xaa is A or G
  MOD_RES (17), (18), (19), (20): Xaa is A or G or is absent
GEVVMEEYQKYXXXXXXXXXIFLMSIPSLETPVXXAK

SEQ ID NO: 9410 - protein, 40 aa, Artificial Sequence
  Non-cyclic GFR-binding peptide
  MOD_RES (1), (3), (34), (35): Xaa is C or S
XKXSKVIMNSLQEIKPTKGIYYVIPLPELDQSVXXPSASA

SEQ ID NO: 9411 - protein, 36 aa, Artificial Sequence
  Non-cyclic GFR-binding peptide
  MOD_RES (33), (34): Xaa is C or S
  MOD_RES (11), (12), (13), (14), (15): Xaa is A or G
  MOD_RES (16), (17), (18), (19): Xaa is A or G or is absent
EVVMDNSLQEXXXXXXXXXYYVMPLPELETPVXXAK

SEQ ID NO: 9412 - protein, 38 aa, Artificial Sequence
  Non-cyclic GFR-binding peptide
  MOD_RES (33), (34): Xaa is C or S
  MOD_RES (11), (12), (13), (14), (15): Xaa is A or G
  MOD_RES (16), (17), (18), (19): Xaa is A or G or is absent
SRVIMNSLQEXXXXXXXXXYYLITLPELAQPVXXPAAS

SEQ ID NO: 9413 - protein, 35 aa, Artificial Sequence
  Non-cyclic GFR-binding peptide
  MOD_RES (32), (33): Xaa is C or S
GEVVMENSLQEVVKDYEDYYLMTLPELETPVXXAK

SEQ ID NO: 9414 - protein, 36 aa, Artificial Sequence
  Non-cyclic GFR-binding peptide
  MOD_RES (33), (34): Xaa is C or S
  MOD_RES (11), (12), (13), (14), (15): Xaa is A or G
  MOD_RES (16), (17), (18), (19): Xaa is A or G or is absent
RVVMNNSLQEXXXXXXXXXYYLVTLPELKTPAXXPK

SEQ ID NO: 9415 - protein, 35 aa, Artificial Sequence
  Non-cyclic GFR-binding peptide
  MOD_RES (2), (4), (35): Xaa is C or S
SXKXSKVIMEYQKYIKPTKGIIFLISIPSLDQSVX

SEQ ID NO: 9416 - protein, 37 aa, Artificial Sequence
  Non-cyclic GFR-binding peptide
  MOD_RES (2), (35), (36): Xaa is C or S
  MOD_RES (13), (14), (15), (16), (17): Xaa is A or G
  MOD_RES (18), (19), (20), (21): Xaa is A or G or is absent
KXSKVVMEYQKYXXXXXXXXXIFLISIPSLDQPVXXP

SEQ ID NO: 9417 - protein, 33 aa, Artificial Sequence
  Non-cyclic GFR-binding peptide
  MOD_RES (1), (3): Xaa is C or S
XKXSRVIMEYQKYVKPKRGVIFLISIPSLAQPV

SEQ ID NO: 9418 - protein, 35 aa, Artificial Sequence
  Non-cyclic GFR-binding peptide
  MOD_RES (31), (32): Xaa is C or S
EVVMDQYNKLVVNNASDLYLISIASLRTPVXXTPP

SEQ ID NO: 9419 - protein, 38 aa, Artificial Sequence
  Non-cyclic GFR-binding peptide
  MOD_RES (1), (3), (36), (37): Xaa is C or S
  MOD_RES (14), (15), (16), (17), (18): Xaa is A or G
  MOD_RES (19), (20), (21), (22): Xaa is A or G or is absent
XKXSKVIMEYQKYXXXXXXXXXIFLISIPSLDQSVXXP

SEQ ID NO: 9420 - protein, 36 aa, Artificial Sequence
  Non-cyclic GFR-binding peptide
  MOD_RES (2), (4): Xaa is C or S
  MOD_RES (15), (16), (17), (18), (19): Xaa is A or G
  MOD_RES (20), (21), (22), (23): Xaa is A or G or is absent
SXKXSKVIMEYQKYXXXXXXXXXIFLISIPSLDQSV

SEQ ID NO: 9421 - protein, 37 aa, Artificial Sequence
  Non-cyclic GFR-binding peptide
  MOD_RES (1), (35), (36): Xaa is C or S
  MOD_RES (13), (14), (15), (16), (17): Xaa is A or G
  MOD_RES (18), (19), (20), (21): Xaa is A or G or is absent
XSRVVMNEYQKYXXXXXXXXXIFLVSIPSLKTPAXXP

SEQ ID NO: 9422 - protein, 35 aa, Artificial Sequence
  Non-cyclic GFR-binding peptide
  MOD_RES (2), (4): Xaa is C or S
HXGXARVVMNNSLQEIVNSSDDYYVVPLPELQTPA

SEQ ID NO: 9423 - protein, 32 aa, Artificial Sequence
  Non-cyclic GFR-binding peptide
  MOD_RES (11), (12), (13), (14), (15): Xaa is A or G
  MOD_RES (16), (17), (18), (19): Xaa is A or G or is absent
EVVMEEYQKYXXXXXXXXXIFLMSIPSLETPV

SEQ ID NO: 9424 - protein, 36 aa, Artificial Sequence
  Non-cyclic GFR-binding peptide
  MOD_RES (1), (32), (33): Xaa is C or S
XSKVIMEYQKYIKPTKGIIFLISIPSLDQSVXXPSA

SEQ ID NO: 9425 - protein, 36 aa, Artificial Sequence
  Non-cyclic GFR-binding peptide
  MOD_RES (1), (3): Xaa is C or S
  MOD_RES (15), (16), (17), (18), (19): Xaa is A or G
  MOD_RES (20), (21), (22), (23): Xaa is A or G or is absent
XGXARVVMNNSLQEXXXXXXXXXYYVVPLPELQTPA

SEQ ID NO: 9426 - protein, 36 aa, Artificial Sequence
  Non-cyclic GFR-binding peptide
  MOD_RES (33), (34): Xaa is C or S
  MOD_RES (11), (12), (13), (14), (15): Xaa is A or G
  MOD_RES (16), (17), (18), (19): Xaa is A or G or is absent
RVVMNEYQKYXXXXXXXXXIFLVSIPSLQTPAXXPK

SEQ ID NO: 9427 - protein, 36 aa, Artificial Sequence
  Non-cyclic GFR-binding peptide
  MOD_RES (34), (35): Xaa is C or S
  MOD_RES (12), (13), (14), (15), (16): Xaa is A or G
  MOD_RES (17), (18), (19), (20): Xaa is A or G or is absent
ARVVMNEYQKYXXXXXXXXXIFLVSIPSLQTPAXXP

SEQ ID NO: 9428 - protein, 38 aa, Artificial Sequence
  Non-cyclic GFR-binding peptide
  MOD_RES (2), (34), (35): Xaa is C or S
GXSRVVMNEYQKYIVNSSDDIFLVSIPSLKTPAXXPKP

SEQ ID NO: 9429 - protein, 32 aa, Artificial Sequence
  Non-cyclic GFR-binding peptide
  MOD_RES (11), (12), (13), (14), (15): Xaa is A or G
  MOD_RES (16), (17), (18), (19): Xaa is A or G or is absent
SRVIMEYQKYXXXXXXXXXIFLISIPSLAQPV

SEQ ID NO: 9430 - protein, 41 aa, Artificial Sequence
  Non-cyclic GFR-binding peptide
  MOD_RES (2), (36), (37): Xaa is C or S
  MOD_RES (14), (15), (16), (17), (18): Xaa is A or G
  MOD_RES (19), (20), (21), (22): Xaa is A or G or is absent
GXGEVVMDNSLQEXXXXXXXXXYYVMPLPELETPVXXAKPI

SEQ ID NO: 9431 - protein, 38 aa, Artificial Sequence
  Non-cyclic GFR-binding peptide
  MOD_RES (1), (3), (37), (38): Xaa is C or S
  MOD_RES (15), (16), (17), (18), (19): Xaa is A or G
  MOD_RES (20), (21), (22), (23): Xaa is A or G or is absent
XGXGEVVMDEYQKYXXXXXXXXXIFLMSIPSLETPVXX

SEQ ID NO: 9432 - protein, 39 aa, Artificial Sequence
  Non-cyclic GFR-binding peptide
  MOD_RES (1), (33): Xaa is C or S
XSRVVMNEYQKYIVNSSDDIFLVSIPSLKTPAXTPKTVH

SEQ ID NO: 9433 - protein, 42 aa, Artificial Sequence
  Non-cyclic GFR-binding peptide
  MOD_RES (1), (3), (37), (38): Xaa is C or S
  MOD_RES (15), (16), (17), (18), (19): Xaa is A or G
  MOD_RES (20), (21), (22), (23): Xaa is A or G or is absent
XGXSEVVMDNSLQEXXXXXXXXXYYLITLPELRTPVXXTPPT

SEQ ID NO: 9434 - protein, 36 aa, Artificial Sequence
  Non-cyclic GFR-binding peptide
  MOD_RES (2), (4), (36): Xaa is C or S
RXGXGEVVMENSLQEVVKDYEDYYLMTLPELETPVX

SEQ ID NO: 9435 - protein, 42 aa, Artificial Sequence
  Non-cyclic GFR-binding peptide
  MOD_RES (2), (4), (36), (37): Xaa is C or S
RXGXGEVVMDEYQKYVVKENEDIFLMSIPSLETPVXXAKPIK

SEQ ID NO: 9436 - protein, 39 aa, Artificial Sequence
  Non-cyclic GFR-binding peptide
  MOD_RES (2), (4), (35), (36): Xaa is C or S
SXKXSRVIMEYQKYVKPKRGVIFLISIPSLAQPVXXPAA

SEQ ID NO: 9437 - protein, 38 aa, Artificial Sequence
  Non-cyclic GFR-binding peptide
  MOD_RES (2), (4), (37), (38): Xaa is C or S
  MOD_RES (15), (16), (17), (18), (19): Xaa is A or G
  MOD_RES (20), (21), (22), (23): Xaa is A or G or is absent
SXKXSKVIMNSLQEXXXXXXXXXYYVIPLPELDQSVXX

SEQ ID NO: 9438 - protein, 33 aa, Artificial Sequence
  Non-cyclic GFR-binding peptide
  MOD_RES (1), (1): Xaa is C or S
  MOD_RES (12), (13), (14), (15), (16): Xaa is A or G
  MOD_RES (17), (18), (19), (20): Xaa is A or G or is absent
XSKVIMNSLQEXXXXXXXXXYYVIPLPELDQSV

SEQ ID NO: 9439 - protein, 38 aa, Artificial Sequence
  Non-cyclic GFR-binding peptide
  MOD_RES (1), (33), (34): Xaa is C or S
XSEVVMDNSLQEVVNNASDYYVIPLPELRTPVXXTPPT

SEQ ID NO: 9440 - protein, 38 aa, Artificial Sequence
  Non-cyclic GFR-binding peptide
  MOD_RES (2), (4), (37), (38): Xaa is C or S
  MOD_RES (15), (16), (17), (18), (19): Xaa is A or G
  MOD_RES (20), (21), (22), (23): Xaa is A or G or is absent
SXKXSKVVMEYQKYXXXXXXXXXIFLISIPSLDQPVXX

SEQ ID NO: 9441 - protein, 33 aa, Artificial Sequence
  Non-cyclic GFR-binding peptide
  MOD_RES (32), (33): Xaa is C or S
ARVVMNNSLQEIVNSSDDYYLVTLPELQTPAXX

SEQ ID NO: 9442 - protein, 37 aa, Artificial Sequence
  Non-cyclic GFR-binding peptide
  MOD_RES (1), (3), (35), (36): Xaa is C or S
XGXGEVVMENSLQEVVKDYEDYYVMPLPELETPVXXA

SEQ ID NO: 9443 - protein, 32 aa, Artificial Sequence
  Non-cyclic GFR-binding peptide
  MOD_RES (32), (32): Xaa is C or S
SEVVMDQYNKLVVNNASDLYLISIASLRTPVX

SEQ ID NO: 9444 - protein, 37 aa, Artificial Sequence
  Non-cyclic GFR-binding peptide
  MOD_RES (32), (33): Xaa is C or S
ARVVMNNSLQEIVNSSDDYYLVTLPELQTPAXXPKPV

SEQ ID NO: 9445 - protein, 37 aa, Artificial Sequence
  Non-cyclic GFR-binding peptide
  MOD_RES (2), (4): Xaa is C or S
  MOD_RES (16), (17), (18), (19), (20): Xaa is A or G
  MOD_RES (21), (22), (23), (24): Xaa is A or G or is absent
RXGXGEVVMENSLQEXXXXXXXXXYYLMTLPELETPV

SEQ ID NO: 9446 - protein, 42 aa, Artificial Sequence
  Non-cyclic GFR-binding peptide
  MOD_RES (1), (3), (37), (38): Xaa is C or S
  MOD_RES (15), (16), (17), (18), (19): Xaa is A or G
  MOD_RES (20), (21), (22), (23): Xaa is A or G or is absent
XGXGEVVMEEYQKYXXXXXXXXXIFLMSIPSLETPVXXAKPI

SEQ ID NO: 9447 - protein, 35 aa, Artificial Sequence
  Non-cyclic GFR-binding peptide
  MOD_RES (2), (34), (35): Xaa is C or S
GXGEVVMENSLQEVVKDYEDYYLMTLPELETPVXX

SEQ ID NO: 9448 - protein, 37 aa, Artificial Sequence
  Non-cyclic GFR-binding peptide
  MOD_RES (1), (33), (34): Xaa is C or S
XARVVMNNSLQEIVNSSDDYYVVPLPELQTPAXXPKP

SEQ ID NO: 9449 - protein, 39 aa, Artificial Sequence
  Non-cyclic GFR-binding peptide
  MOD_RES (1), (33), (34): Xaa is C or S
XSEVVMDNSLQEVVNNASDYYLITLPELRTPVXXTPPTS

SEQ ID NO: 9450 - protein, 36 aa, Artificial Sequence
  Non-cyclic GFR-binding peptide
  MOD_RES (1), (3), (34), (35): Xaa is C or S
XKXSRVIMEYQKYVKPKRGVIFLISIPSLAQPVXXP

SEQ ID NO: 9451 - protein, 39 aa, Artificial Sequence
  Non-cyclic GFR-binding peptide
  MOD_RES (33), (34): Xaa is C or S
  MOD_RES (11), (12), (13), (14), (15): Xaa is A or G
  MOD_RES (16), (17), (18), (19): Xaa is A or G or is absent
EVVMDNSLQEXXXXXXXXXYYLITLPELRTPVXXTPPTS

SEQ ID NO: 9452 - protein, 37 aa, Artificial Sequence
  Non-cyclic GFR-binding peptide
  MOD_RES (33), (34): Xaa is C or S
  MOD_RES (11), (12), (13), (14), (15): Xaa is A or G
  MOD_RES (16), (17), (18), (19): Xaa is A or G or is absent
EVVMENSLQEXXXXXXXXXYYLMTLPELETPVXXAKP

SEQ ID NO: 9453 - protein, 30 aa, Artificial Sequence
  Non-cyclic GFR-binding peptide
EVVMEEYQKYVVKDYEDIFLMSIPSLETPV

SEQ ID NO: 9454 - protein, 38 aa, Artificial Sequence
  Non-cyclic GFR-binding peptide
  MOD_RES (2), (34), (35): Xaa is C or S
GXGEVVMENSLQEVVKDYEDYYVMPLPELETPVXXAKP

SEQ ID NO: 9455 - protein, 36 aa, Artificial Sequence
  Non-cyclic GFR-binding peptide
  MOD_RES (2), (35), (36): Xaa is C or S
  MOD_RES (13), (14), (15), (16), (17): Xaa is A or G
  MOD_RES (18), (19), (20), (21): Xaa is A or G or is absent
KXSKVIMNSLQEXXXXXXXXXYYVIPLPELDQSVXX

SEQ ID NO: 9456 - protein, 37 aa, Artificial Sequence
  Non-cyclic GFR-binding peptide
  MOD_RES (2), (34), (35): Xaa is C or S
GXSEVVMDQYNKLVVNNASDLYLISIASLRTPVXXTP

SEQ ID NO: 9457 - protein, 33 aa, Artificial Sequence
  Non-cyclic GFR-binding peptide
  MOD_RES (31), (31): Xaa is C or S
RVVMNEYQKYIVNSSDDIFLVSIPSLKTPAXTP

SEQ ID NO: 9458 - protein, 41 aa, Artificial Sequence
  Non-cyclic GFR-binding peptide
  MOD_RES (1), (3), (35), (36): Xaa is C or S
XGXGEVVMEEYQKYVVKDYEDIFLMSIPSLETPVXXAKPIS

SEQ ID NO: 9459 - protein, 43 aa, Artificial Sequence
  Non-cyclic GFR-binding peptide
  MOD_RES (2), (4), (38), (39): Xaa is C or S
  MOD_RES (16), (17), (18), (19), (20): Xaa is A or G
  MOD_RES (21), (22), (23), (24): Xaa is A or G or is absent
HXGXSRVVMNNSLQEXXXXXXXXXYYVVPLPELKTPAXXPKPV

SEQ ID NO: 9460 - protein, 43 aa, Artificial Sequence
  Non-cyclic GFR-binding peptide
  MOD_RES (1), (3), (37), (38): Xaa is C or S
  MOD_RES (15), (16), (17), (18), (19): Xaa is A or G
  MOD_RES (20), (21), (22), (23): Xaa is A or G or is absent
XGXSEVVMDNSLQEXXXXXXXXXYYLITLPELRTPVXXTPPTS

SEQ ID NO: 9461 - protein, 33 aa, Artificial Sequence
  Non-cyclic GFR-binding peptide
  MOD_RES (1), (1): Xaa is C or S
  MOD_RES (12), (13), (14), (15), (16): Xaa is A or G
  MOD_RES (17), (18), (19), (20): Xaa is A or G or is absent
XSKVVMNSLQEXXXXXXXXXYYVIPLPELDQPV

SEQ ID NO: 9462 - protein, 40 aa, Artificial Sequence
  Non-cyclic GFR-binding peptide
  MOD_RES (2), (34), (35): Xaa is C or S
GXARVVMNEYQKYIVNSSDDIFLVSIPSLQTPAXXPKPVT

SEQ ID NO: 9463 - protein, 32 aa, Artificial Sequence
  Non-cyclic GFR-binding peptide
  MOD_RES (2), (2): Xaa is C or S
KXSKVIMNSLQEIKPTKGIYYVIPLPELDQSV

SEQ ID NO: 9464 - protein, 38 aa, Artificial Sequence
  Non-cyclic GFR-binding peptide
  MOD_RES (32), (33): Xaa is C or S
ARVVMNNSLQEIVNSSDDYYVVPLPELQTPAXXPKPVT

SEQ ID NO: 9465 - protein, 34 aa, Artificial Sequence
  Non-cyclic GFR-binding peptide
  MOD_RES (1), (3), (34): Xaa is C or S
XKXSKVVMEYQKYVKPTRGVIFLISIPSLDQPVX

SEQ ID NO: 9466 - protein, 35 aa, Artificial Sequence
  Non-cyclic GFR-binding peptide
  MOD_RES (32), (32): Xaa is C or S
SRVVMNEYQKYIVNSSDDIFLVSIPSLKTPAXTPK

SEQ ID NO: 9467 - protein, 35 aa, Artificial Sequence
  Non-cyclic GFR-binding peptide
  MOD_RES (31), (32): Xaa is C or S
SKVVMEYQKYVKPTRGVIFLISIPSLDQPVXXPSA

SEQ ID NO: 9468 - protein, 39 aa, Artificial Sequence
  Non-cyclic GFR-binding peptide
  MOD_RES (2), (36), (37): Xaa is C or S
  MOD_RES (14), (15), (16), (17), (18): Xaa is A or G
  MOD_RES (19), (20), (21), (22): Xaa is A or G or is absent
GXARVVMNEYQKYXXXXXXXXXIFLVSIPSLQTPAXXPK

SEQ ID NO: 9469 - protein, 33 aa, Artificial Sequence
  Non-cyclic GFR-binding peptide
  MOD_RES (33), (33): Xaa is C or S
  MOD_RES (11), (12), (13), (14), (15): Xaa is A or G
  MOD_RES (16), (17), (18), (19): Xaa is A or G or is absent
EVVMDNSLQEXXXXXXXXXYYLMTLPELETPVX

SEQ ID NO: 9470 - protein, 31 aa, Artificial Sequence
  Non-cyclic GFR-binding peptide
GEVVMDNSLQEVVKENEDYYVMPLPELETPV

SEQ ID NO: 9471 - protein, 39 aa, Artificial Sequence
  Non-cyclic GFR-binding peptide
  MOD_RES (34), (35): Xaa is C or S
  MOD_RES (12), (13), (14), (15), (16): Xaa is A or G
  MOD_RES (17), (18), (19), (20): Xaa is A or G or is absent
GEVVMENSLQEXXXXXXXXXYYLMTLPELETPVXXAKPI

SEQ ID NO: 9472 - protein, 40 aa, Artificial Sequence
  Non-cyclic GFR-binding peptide
  MOD_RES (2), (34), (35): Xaa is C or S
GXGEVVMDNSLQEVVKENEDYYLMTLPELETPVXXAKPIK

SEQ ID NO: 9473 - protein, 36 aa, Artificial Sequence
  Non-cyclic GFR-binding peptide
  MOD_RES (2), (36): Xaa is C or S
  MOD_RES (14), (15), (16), (17), (18): Xaa is A or G
  MOD_RES (19), (20), (21), (22): Xaa is A or G or is absent
GXSEVVMDNSLQEXXXXXXXXXYYVIPLPELRTPVX

SEQ ID NO: 9474 - protein, 40 aa, Artificial Sequence
  Non-cyclic GFR-binding peptide
  MOD_RES (2), (4), (37), (38): Xaa is C or S
  MOD_RES (15), (16), (17), (18), (19): Xaa is A or G
  MOD_RES (20), (21), (22), (23): Xaa is A or G or is absent
SXKXSKVVMEYQKYXXXXXXXXXIFLISIPSLDQPVXXPS

SEQ ID NO: 9475 - protein, 32 aa, Artificial Sequence
  Non-cyclic GFR-binding peptide
  MOD_RES (11), (12), (13), (14), (15): Xaa is A or G
  MOD_RES (16), (17), (18), (19): Xaa is A or G or is absent
EVVMDNSLQEXXXXXXXXXYYVMPLPELETPV

SEQ ID NO: 9476 - protein, 39 aa, Artificial Sequence
  Non-cyclic GFR-binding peptide
  MOD_RES (2), (34), (35): Xaa is C or S
GXGEVVMDNSLQEVVKENEDYYVMPLPELETPVXXAKPI

SEQ ID NO: 9477 - protein, 35 aa, Artificial Sequence
  Non-cyclic GFR-binding peptide
  MOD_RES (34), (35): Xaa is C or S
  MOD_RES (12), (13), (14), (15), (16): Xaa is A or G
  MOD_RES (17), (18), (19), (20): Xaa is A or G or is absent
GEVVMENSLQEXXXXXXXXXYYLMTLPELETPVXX

SEQ ID NO: 9478 - protein, 38 aa, Artificial Sequence
  Non-cyclic GFR-binding peptide
  MOD_RES (2), (34), (35): Xaa is C or S
GXARVVMNNSLQEIVNSSDDYYLVTLPELQTPAXXPKP

SEQ ID NO: 9479 - protein, 40 aa, Artificial Sequence
  Non-cyclic GFR-binding peptide
  MOD_RES (1), (3), (35), (36): Xaa is C or S
XGXSEVVMDRYKKLVVNNASDFYLISIANLRTPVXXTPPT

SEQ ID NO: 9480 - protein, 39 aa, Artificial Sequence
  Non-cyclic GFR-binding peptide
  MOD_RES (2), (4), (38), (39): Xaa is C or S
  MOD_RES (16), (17), (18), (19), (20): Xaa is A or G
  MOD_RES (21), (22), (23), (24): Xaa is A or G or is absent
RXGXSEVVMDRYKKLXXXXXXXXXFYLISIANLRTPVXX

SEQ ID NO: 9481 - protein, 38 aa, Artificial Sequence
  Non-cyclic GFR-binding peptide
  MOD_RES (1), (35), (36): Xaa is C or S
  MOD_RES (13), (14), (15), (16), (17): Xaa is A or G
  MOD_RES (18), (19), (20), (21): Xaa is A or G or is absent
XSRVVMNNSLQEXXXXXXXXXYYVVPLPELKTPAXXPK

SEQ ID NO: 9482 - protein, 34 aa, Artificial Sequence
  Non-cyclic GFR-binding peptide
  MOD_RES (1), (34): Xaa is C or S
  MOD_RES (12), (13), (14), (15), (16): Xaa is A or G
  MOD_RES (17), (18), (19), (20): Xaa is A or G or is absent
XSKVIMEYQKYXXXXXXXXXIFLISIPSLDQSVX

SEQ ID NO: 9483 - protein, 35 aa, Artificial Sequence
  Non-cyclic GFR-binding peptide
  MOD_RES (2), (4), (35): Xaa is C or S
SXKXSKVIMNSLQEIKPTKGIYYVIPLPELDQSVX

SEQ ID NO: 9484 - protein, 39 aa, Artificial Sequence
  Non-cyclic GFR-binding peptide
  MOD_RES (1), (3), (37), (38): Xaa is C or S
  MOD_RES (15), (16), (17), (18), (19): Xaa is A or G
  MOD_RES (20), (21), (22), (23): Xaa is A or G or is absent
XGXARVVMNNSLQEXXXXXXXXXYYLVTLPELQTPAXXP

SEQ ID NO: 9485 - protein, 39 aa, Artificial Sequence
  Non-cyclic GFR-binding peptide
  MOD_RES (2), (4), (38), (39): Xaa is C or S
  MOD_RES (16), (17), (18), (19), (20): Xaa is A or G
  MOD_RES (21), (22), (23), (24): Xaa is A or G or is absent
HXGXARVVMNEYQKYXXXXXXXXXIFLVSIPSLQTPAXX

SEQ ID NO: 9486 - protein, 38 aa, Artificial Sequence
  Non-cyclic GFR-binding peptide
  MOD_RES (2), (4), (36): Xaa is C or S
HXGXSRVVMNEYQKYIVNSSDDIFLVSIPSLKTPAXTP

SEQ ID NO: 9487 - protein, 39 aa, Artificial Sequence
  Non-cyclic GFR-binding peptide
  MOD_RES (2), (36): Xaa is C or S
  MOD_RES (14), (15), (16), (17), (18): Xaa is A or G
  MOD_RES (19), (20), (21), (22): Xaa is A or G or is absent
GXSRVVMNNSLQEXXXXXXXXXYYLVTLPELKTPAXTPK

SEQ ID NO: 9488 - protein, 39 aa, Artificial Sequence
  Non-cyclic GFR-binding peptide
  MOD_RES (1), (34), (35): Xaa is C or S
  MOD_RES (12), (13), (14), (15), (16): Xaa is A or G
  MOD_RES (17), (18), (19), (20): Xaa is A or G or is absent
XSKVVMEYQKYXXXXXXXXXIFLISIPSLDQPVXXPSAS

SEQ ID NO: 9489 - protein, 40 aa, Artificial Sequence
  Non-cyclic GFR-binding peptide
  MOD_RES (2), (4), (36), (37): Xaa is C or S
RXGXSEVVMDNSLQEVVNNASDYYLITLPELRTPVXXTPP

SEQ ID NO: 9490 - protein, 36 aa, Artificial Sequence
  Non-cyclic GFR-binding peptide
  MOD_RES (1), (33): Xaa is C or S
XSRVVMNEYQKYIVNSSDDIFLVSIPSLKTPAXTPK

SEQ ID NO: 9491 - protein, 37 aa, Artificial Sequence
  Non-cyclic GFR-binding peptide
  MOD_RES (1), (33), (34): Xaa is C or S
XGEVVMDNSLQEVVKENEDYYLMTLPELETPVXXAKP

SEQ ID NO: 9492 - protein, 36 aa, Artificial Sequence
  Non-cyclic GFR-binding peptide
  MOD_RES (2), (36): Xaa is C or S
  MOD_RES (14), (15), (16), (17), (18): Xaa is A or G
  MOD_RES (19), (20), (21), (22): Xaa is A or G or is absent
GXGEVVMDNSLQEXXXXXXXXXYYVMPLPELETPVX

SEQ ID NO: 9493 - protein, 33 aa, Artificial Sequence
  Non-cyclic GFR-binding peptide
  MOD_RES (32), (33): Xaa is C or S
GEVVMENSLQEVVKDYEDYYLMTLPELETPVXX

SEQ ID NO: 9494 - protein, 40 aa, Artificial Sequence
  Non-cyclic GFR-binding peptide
  MOD_RES (2), (36): Xaa is C or S
  MOD_RES (14), (15), (16), (17), (18): Xaa is A or G
  MOD_RES (19), (20), (21), (22): Xaa is A or G or is absent
GXSRVVMNNSLQEXXXXXXXXXYYLVTLPELKTPAXTPKT

SEQ ID NO: 9495 - protein, 34 aa, Artificial Sequence
  Non-cyclic GFR-binding peptide
  MOD_RES (34), (34): Xaa is C or S
  MOD_RES (12), (13), (14), (15), (16): Xaa is A or G
  MOD_RES (17), (18), (19), (20): Xaa is A or G or is absent
GEVVMDNSLQEXXXXXXXXXYYVMPLPELETPVX

SEQ ID NO: 9496 - protein, 37 aa, Artificial Sequence
  Non-cyclic GFR-binding peptide
  MOD_RES (1), (33): Xaa is C or S
XSRVVMNNSLQEIVNSSDDYYVVPLPELKTPAXTPKT

SEQ ID NO: 9497 - protein, 36 aa, Artificial Sequence
  Non-cyclic GFR-binding peptide
  MOD_RES (31), (32): Xaa is C or S
SKVIMEYQKYIKPTKGIIFLISIPSLDQSVXXPSAS

SEQ ID NO: 9498 - protein, 42 aa, Artificial Sequence
  Non-cyclic GFR-binding peptide
  MOD_RES (2), (4), (37), (38): Xaa is C or S
  MOD_RES (15), (16), (17), (18), (19): Xaa is A or G
  MOD_RES (20), (21), (22), (23): Xaa is A or G or is absent
SXKXSKVVMNSLQEXXXXXXXXXYYVIPLPELDQPVXXPSAS

SEQ ID NO: 9499 - protein, 35 aa, Artificial Sequence
  Non-cyclic GFR-binding peptide
  MOD_RES (31), (32): Xaa is C or S
SKVVMNSLQEVKPTRGVYYVIPLPELDQPVXXPSA

SEQ ID NO: 9500 - protein, 41 aa, Artificial Sequence
  Non-cyclic GFR-binding peptide
  MOD_RES (1), (35), (36): Xaa is C or S
  MOD_RES (13), (14), (15), (16), (17): Xaa is A or G
  MOD_RES (18), (19), (20), (21): Xaa is A or G or is absent
XGEVVMDNSLQEXXXXXXXXXYYLMTLPELETPVXXAKPIK

SEQ ID NO: 9501 - protein, 38 aa, Artificial Sequence
  Non-cyclic GFR-binding peptide
  MOD_RES (2), (35), (36): Xaa is C or S
  MOD_RES (13), (14), (15), (16), (17): Xaa is A or G
  MOD_RES (18), (19), (20), (21): Xaa is A or G or is absent
KXSKVVMEYQKYXXXXXXXXXIFLISIPSLDQPVXXPS

SEQ ID NO: 9502 - protein, 40 aa, Artificial Sequence
  Non-cyclic GFR-binding peptide
  MOD_RES (34), (34): Xaa is C or S
  MOD_RES (12), (13), (14), (15), (16): Xaa is A or G
  MOD_RES (17), (18), (19), (20): Xaa is A or G or is absent
SRVVMNNSLQEXXXXXXXXXYYLVTLPELKTPAXTPKTVH

SEQ ID NO: 9503 - protein, 37 aa, Artificial Sequence
  Non-cyclic GFR-binding peptide
  MOD_RES (2), (4), (36), (37): Xaa is C or S
RXGXGEVVMENSLQEVVKDYEDYYLMTLPELETPVXX

SEQ ID NO: 9504 - protein, 39 aa, Artificial Sequence
  Non-cyclic GFR-binding peptide
  MOD_RES (2), (4), (38), (39): Xaa is C or S
  MOD_RES (16), (17), (18), (19), (20): Xaa is A or G
  MOD_RES (21), (22), (23), (24): Xaa is A or G or is absent
RXGXSEVVMDNSLQEXXXXXXXXXYYVIPLPELRTPVXX

SEQ ID NO: 9505 - protein, 44 aa, Artificial Sequence
  Non-cyclic GFR-binding peptide
  MOD_RES (2), (4), (38), (39): Xaa is C or S
  MOD_RES (16), (17), (18), (19), (20): Xaa is A or G
  MOD_RES (21), (22), (23), (24): Xaa is A or G or is absent
RXGXSEVVMDRYKKLXXXXXXXXXFYLISIANLRTPVXXTPPTS

SEQ ID NO: 9506 - protein, 41 aa, Artificial Sequence
  Non-cyclic GFR-binding peptide
  MOD_RES (1), (3), (35), (36): Xaa is C or S
XGXARVVMNNSLQEIVNSSDDYYLVTLPELQTPAXXPKPVT

SEQ ID NO: 9507 - protein, 38 aa, Artificial Sequence
  Non-cyclic GFR-binding peptide
  MOD_RES (2), (4), (35), (36): Xaa is C or S
SXKXSKVVMEYQKYVKPTRGVIFLISIPSLDQPVXXPS

SEQ ID NO: 9508 - protein, 32 aa, Artificial Sequence
  Non-cyclic GFR-binding peptide
  MOD_RES (31), (32): Xaa is C or S
EVVMDEYQKYVVKENEDIFLMSIPSLETPVXX

SEQ ID NO: 9509 - protein, 37 aa, Artificial Sequence
  Non-cyclic GFR-binding peptide
  MOD_RES (31), (32): Xaa is C or S
EVVMDNSLQEVVNNASDYYVIPLPELRTPVXXTPPTS

SEQ ID NO: 9510 - protein, 37 aa, Artificial Sequence
  Non-cyclic GFR-binding peptide
  MOD_RES (1), (3), (37): Xaa is C or S
  MOD_RES (15), (16), (17), (18), (19): Xaa is A or G
  MOD_RES (20), (21), (22), (23): Xaa is A or G or is absent
XGXGEVVMDNSLQEXXXXXXXXXYYVMPLPELETPVX

SEQ ID NO: 9511 - protein, 34 aa, Artificial Sequence
  Non-cyclic GFR-binding peptide
  MOD_RES (1), (33), (34): Xaa is C or S
XSRVVMNNSLQEIVNSSDDYYVVPLPELKTPAXX

SEQ ID NO: 9512 - protein, 38 aa, Artificial Sequence
  Non-cyclic GFR-binding peptide
  MOD_RES (2), (4), (36), (37): Xaa is C or S
HXGXSRVVMNNSLQEIVNSSDDYYVVPLPELKTPAXXP

SEQ ID NO: 9513 - protein, 33 aa, Artificial Sequence
  Non-cyclic GFR-binding peptide
  MOD_RES (31), (31): Xaa is C or S
RVVMNNSLQEIVNSSDDYYVVPLPELKTPAXTP

SEQ ID NO: 9514 - protein, 38 aa, Artificial Sequence
  Non-cyclic GFR-binding peptide
  MOD_RES (2), (4), (36), (37): Xaa is C or S
HXGXARVVMNEYQKYIVNSSDDIFLVSIPSLQTPAXXP

SEQ ID NO: 9515 - protein, 40 aa, Artificial Sequence
  Non-cyclic GFR-binding peptide
  MOD_RES (34), (35): Xaa is C or S
  MOD_RES (12), (13), (14), (15), (16): Xaa is A or G
  MOD_RES (17), (18), (19), (20): Xaa is A or G or is absent
SEVVMDNSLQEXXXXXXXXXYYVIPLPELRTPVXXTPPTS

SEQ ID NO: 9516 - protein, 36 aa, Artificial Sequence
  Non-cyclic GFR-binding peptide
  MOD_RES (2), (33), (34): Xaa is C or S
KXSRVIMEYQKYVKPKRGVIFLISIPSLAQPVXXPA

SEQ ID NO: 9517 - protein, 39 aa, Artificial Sequence
  Non-cyclic GFR-binding peptide
  MOD_RES (1), (35), (36): Xaa is C or S
  MOD_RES (13), (14), (15), (16), (17): Xaa is A or G
  MOD_RES (18), (19), (20), (21): Xaa is A or G or is absent
XSEVVMDNSLQEXXXXXXXXXYYVIPLPELRTPVXXTPP

SEQ ID NO: 9518 - protein, 41 aa, Artificial Sequence
  Non-cyclic GFR-binding peptide
  MOD_RES (1), (3), (35), (36): Xaa is C or S
XGXGEVVMENSLQEVVKDYEDYYLMTLPELETPVXXAKPIS

SEQ ID NO: 9519 - protein, 41 aa, Artificial Sequence
  Non-cyclic GFR-binding peptide
  MOD_RES (1), (3), (37), (38): Xaa is C or S
  MOD_RES (15), (16), (17), (18), (19): Xaa is A or G
  MOD_RES (20), (21), (22), (23): Xaa is A or G or is absent
XGXARVVMNNSLQEXXXXXXXXXYYVVPLPELQTPAXXPKP

SEQ ID NO: 9520 - protein, 39 aa, Artificial Sequence
  Non-cyclic GFR-binding peptide
  MOD_RES (2), (4), (35), (36): Xaa is C or S
SXKXSKVIMNSLQEIKPTKGIYYVIPLPELDQSVXXPSA

SEQ ID NO: 9521 - protein, 34 aa, Artificial Sequence
  Non-cyclic GFR-binding peptide
  MOD_RES (31), (32): Xaa is C or S
RVVMNNSLQEIVNSSDDYYLVTLPELQTPAXXPK

SEQ ID NO: 9522 - protein, 34 aa, Artificial Sequence
  Non-cyclic GFR-binding peptide
  MOD_RES (31), (32): Xaa is C or S
RVVMNNSLQEIVNSSDDYYVVPLPELQTPAXXPK

SEQ ID NO: 9523 - protein, 43 aa, Artificial Sequence
  Non-cyclic GFR-binding peptide
  MOD_RES (2), (4), (38): Xaa is C or S
  MOD_RES (16), (17), (18), (19), (20): Xaa is A or G
  MOD_RES (21), (22), (23), (24): Xaa is A or G or is absent
HXGXSRVVMNNSLQEXXXXXXXXXYYVVPLPELKTPAXTPKTV

SEQ ID NO: 9524 - protein, 40 aa, Artificial Sequence
  Non-cyclic GFR-binding peptide
  MOD_RES (2), (4), (38): Xaa is C or S
  MOD_RES (16), (17), (18), (19), (20): Xaa is A or G
  MOD_RES (21), (22), (23), (24): Xaa is A or G or is absent
HXGXSRVVMNNSLQEXXXXXXXXXYYLVTLPELKTPAXTP

SEQ ID NO: 9525 - protein, 42 aa, Artificial Sequence
  Non-cyclic GFR-binding peptide
  MOD_RES (1), (3), (37), (38): Xaa is C or S
  MOD_RES (15), (16), (17), (18), (19): Xaa is A or G
  MOD_RES (20), (21), (22), (23): Xaa is A or G or is absent
XGXSEVVMDRYKKLXXXXXXXXXFYLISIANLRTPVXXTPPT

SEQ ID NO: 9526 - protein, 39 aa, Artificial Sequence
  Non-cyclic GFR-binding peptide
  MOD_RES (1), (3), (37), (38): Xaa is C or S
  MOD_RES (15), (16), (17), (18), (19): Xaa is A or G
  MOD_RES (20), (21), (22), (23): Xaa is A or G or is absent
XGXGEVVMDNSLQEXXXXXXXXXYYVMPLPELETPVXXA

SEQ ID NO: 9527 - protein, 38 aa, Artificial Sequence
  Non-cyclic GFR-binding peptide
  MOD_RES (2), (4), (36), (37): Xaa is C or S
RXGXGEVVMEEYQKYVVKDYEDIFLMSIPSLETPVXXA

SEQ ID NO: 9528 - protein, 38 aa, Artificial Sequence
  Non-cyclic GFR-binding peptide
  MOD_RES (1), (34), (35): Xaa is C or S
  MOD_RES (12), (13), (14), (15), (16): Xaa is A or G
  MOD_RES (17), (18), (19), (20): Xaa is A or G or is absent
XSKVIMEYQKYXXXXXXXXXIFLISIPSLDQSVXXPSA

SEQ ID NO: 9529 - protein, 40 aa, Artificial Sequence
  Non-cyclic GFR-binding peptide
  MOD_RES (34), (35): Xaa is C or S
  MOD_RES (12), (13), (14), (15), (16): Xaa is A or G
  MOD_RES (17), (18), (19), (20): Xaa is A or G or is absent
SRVVMNEYQKYXXXXXXXXXIFLVSIPSLKTPAXXPKPVY

SEQ ID NO: 9530 - protein, 42 aa, Artificial Sequence
  Non-cyclic GFR-binding peptide
  MOD_RES (2), (36), (37): Xaa is C or S
  MOD_RES (14), (15), (16), (17), (18): Xaa is A or G
  MOD_RES (19), (20), (21), (22): Xaa is A or G or is absent
GXSEVVMDRYKKLXXXXXXXXXFYLISIANLRTPVXXTPPTS

SEQ ID NO: 9531 - protein, 36 aa, Artificial Sequence
  Non-cyclic GFR-binding peptide
  MOD_RES (1), (33), (34): Xaa is C or S
XARVVMNNSLQEIVNSSDDYYLVTLPELQTPAXXPK

SEQ ID NO: 9532 - protein, 38 aa, Artificial Sequence
  Non-cyclic GFR-binding peptide
  MOD_RES (33), (34): Xaa is C or S
  MOD_RES (11), (12), (13), (14), (15): Xaa is A or G
  MOD_RES (16), (17), (18), (19): Xaa is A or G or is absent
EVVMEEYQKYXXXXXXXXXIFLMSIPSLETPVXXAKPI

SEQ ID NO: 9533 - protein, 36 aa, Artificial Sequence
  Non-cyclic GFR-binding peptide
  MOD_RES (2), (34), (35): Xaa is C or S
GXARVVMNNSLQEIVNSSDDYYVVPLPELQTPAXXP

SEQ ID NO: 9534 - protein, 42 aa, Artificial Sequence
  Non-cyclic GFR-binding peptide
  MOD_RES (2), (4), (36), (37): Xaa is C or S
RXGXSEVVMDNSLQEVVNNASDYYLITLPELRTPVXXTPPTS

SEQ ID NO: 9535 - protein, 32 aa, Artificial Sequence
  Non-cyclic GFR-binding peptide
  MOD_RES (1), (1): Xaa is C or S
XSEVVMDRYKKLVVNNASDFYLISIANLRTPV

SEQ ID NO: 9536 - protein, 33 aa, Artificial Sequence
  Non-cyclic GFR-binding peptide
  MOD_RES (2), (2): Xaa is C or S
GXARVVMNNSLQEIVNSSDDYYVVPLPELQTPA

SEQ ID NO: 9537 - protein, 32 aa, Artificial Sequence
  Non-cyclic GFR-binding peptide
  MOD_RES (32), (32): Xaa is C or S
SEVVMDNSLQEVVNNASDYYVIPLPELRTPVX

SEQ ID NO: 9538 - protein, 40 aa, Artificial Sequence
  Non-cyclic GFR-binding peptide
  MOD_RES (2), (35), (36): Xaa is C or S
  MOD_RES (13), (14), (15), (16), (17): Xaa is A or G
  MOD_RES (18), (19), (20), (21): Xaa is A or G or is absent
KXSRVIMNSLQEXXXXXXXXXYYLITLPELAQPVXXPAAS

SEQ ID NO: 9539 - protein, 40 aa, Artificial Sequence
  Non-cyclic GFR-binding peptide
  MOD_RES (2), (34), (35): Xaa is C or S
GXGEVVMENSLQEVVKDYEDYYVMPLPELETPVXXAKPIS

SEQ ID NO: 9540 - protein, 37 aa, Artificial Sequence
  Non-cyclic GFR-binding peptide
  MOD_RES (32), (32): Xaa is C or S
SRVVMNEYQKYIVNSSDDIFLVSIPSLKTPAXTPKTV

SEQ ID NO: 9541 - protein, 39 aa, Artificial Sequence
  Non-cyclic GFR-binding peptide
  MOD_RES (1), (35), (36): Xaa is C or S
  MOD_RES (13), (14), (15), (16), (17): Xaa is A or G
  MOD_RES (18), (19), (20), (21): Xaa is A or G or is absent
XGEVVMDEYQKYXXXXXXXXXIFLMSIPSLETPVXXAKP

SEQ ID NO: 9542 - protein, 32 aa, Artificial Sequence
  Non-cyclic GFR-binding peptide
  MOD_RES (31), (31): Xaa is C or S
RVVMNNSLQEIVNSSDDYYVVPLPELKTPAXT

SEQ ID NO: 9543 - protein, 35 aa, Artificial Sequence
  Non-cyclic GFR-binding peptide
  MOD_RES (34), (34): Xaa is C or S
  MOD_RES (12), (13), (14), (15), (16): Xaa is A or G
  MOD_RES (17), (18), (19), (20): Xaa is A or G or is absent
SRVVMNNSLQEXXXXXXXXXYYLVTLPELKTPAXT

SEQ ID NO: 9544 - protein, 35 aa, Artificial Sequence
  Non-cyclic GFR-binding peptide
  MOD_RES (31), (32): Xaa is C or S
EVVMDRYKKLVVNNASDFYLISIANLRTPVXXTPP

SEQ ID NO: 9545 - protein, 33 aa, Artificial Sequence
  Non-cyclic GFR-binding peptide
  MOD_RES (31), (32): Xaa is C or S
EVVMDNSLQEVVKENEDYYLMTLPELETPVXXA

SEQ ID NO: 9546 - protein, 36 aa, Artificial Sequence
  Non-cyclic GFR-binding peptide
  MOD_RES (2), (36): Xaa is C or S
  MOD_RES (14), (15), (16), (17), (18): Xaa is A or G
  MOD_RES (19), (20), (21), (22): Xaa is A or G or is absent
GXSRVVMNNSLQEXXXXXXXXXYYLVTLPELKTPAX

SEQ ID NO: 9547 - protein, 33 aa, Artificial Sequence
  Non-cyclic GFR-binding peptide
  MOD_RES (12), (13), (14), (15), (16): Xaa is A or G
  MOD_RES (17), (18), (19), (20): Xaa is A or G or is absent
ARVVMNNSLQEXXXXXXXXXYYLVTLPELQTPA

SEQ ID NO: 9548 - protein, 34 aa, Artificial Sequence
  Non-cyclic GFR-binding peptide
  MOD_RES (33), (33): Xaa is C or S
  MOD_RES (11), (12), (13), (14), (15): Xaa is A or G
  MOD_RES (16), (17), (18), (19): Xaa is A or G or is absent
RVVMNNSLQEXXXXXXXXXYYLVTLPELKTPAXT

SEQ ID NO: 9549 - protein, 32 aa, Artificial Sequence
  Non-cyclic GFR-binding peptide
  MOD_RES (2), (2): Xaa is C or S
KXSKVIMEYQKYIKPTKGIIFLISIPSLDQSV

SEQ ID NO: 9550 - protein, 42 aa, Artificial Sequence
  Non-cyclic GFR-binding peptide
  MOD_RES (2), (4), (37), (38): Xaa is C or S
  MOD_RES (15), (16), (17), (18), (19): Xaa is A or G
  MOD_RES (20), (21), (22), (23): Xaa is A or G or is absent
SXKXSKVIMEYQKYXXXXXXXXXIFLISIPSLDQSVXXPSAS

SEQ ID NO: 9551 - protein, 41 aa, Artificial Sequence
  Non-cyclic GFR-binding peptide
  MOD_RES (1), (3), (35), (36): Xaa is C or S
XGXSEVVMDNSLQEVVNNASDYYVIPLPELRTPVXXTPPTS

SEQ ID NO: 9552 - protein, 37 aa, Artificial Sequence
  Non-cyclic GFR-binding peptide
  MOD_RES (2), (34), (35): Xaa is C or S
GXGEVVMDNSLQEVVKENEDYYLMTLPELETPVXXAK

SEQ ID NO: 9553 - protein, 39 aa, Artificial Sequence
  Non-cyclic GFR-binding peptide
  MOD_RES (2), (4), (36), (37): Xaa is C or S
RXGXGEVVMDNSLQEVVKENEDYYLMTLPELETPVXXAK

SEQ ID NO: 9554 - protein, 41 aa, Artificial Sequence
  Non-cyclic GFR-binding peptide
  MOD_RES (1), (3), (35), (36): Xaa is C or S
XGXARVVMNEYQKYIVNSSDDIFLVSIPSLQTPAXXPKPVT

SEQ ID NO: 9555 - protein, 39 aa, Artificial Sequence
  Non-cyclic GFR-binding peptide
  MOD_RES (1), (3), (37), (38): Xaa is C or S
  MOD_RES (15), (16), (17), (18), (19): Xaa is A or G
  MOD_RES (20), (21), (22), (23): Xaa is A or G or is absent
XGXARVVMNEYQKYXXXXXXXXXIFLVSIPSLQTPAXXP

SEQ ID NO: 9556 - protein, 36 aa, Artificial Sequence
  Non-cyclic GFR-binding peptide
  MOD_RES (2), (4), (36): Xaa is C or S
RXGXGEVVMDEYQKYVVKENEDIFLMSIPSLETPVX

SEQ ID NO: 9557 - protein, 35 aa, Artificial Sequence
  Non-cyclic GFR-binding peptide
  MOD_RES (1), (3), (35): Xaa is C or S
XGXGEVVMDEYQKYVVKENEDIFLMSIPSLETPVX

SEQ ID NO: 9558 - protein, 40 aa, Artificial Sequence
  Non-cyclic GFR-binding peptide
  MOD_RES (1), (35), (36): Xaa is C or S
  MOD_RES (13), (14), (15), (16), (17): Xaa is A or G
  MOD_RES (18), (19), (20), (21): Xaa is A or G or is absent
XARVVMNEYQKYXXXXXXXXXIFLVSIPSLQTPAXXPKPV

SEQ ID NO: 9559 - protein, 38 aa, Artificial Sequence
  Non-cyclic GFR-binding peptide
  MOD_RES (1), (3), (34), (35): Xaa is C or S
XKXSKVIMEYQKYIKPTKGIIFLISIPSLDQSVXXPSA

SEQ ID NO: 9560 - protein, 37 aa, Artificial Sequence
  Non-cyclic GFR-binding peptide
  MOD_RES (34), (34): Xaa is C or S
  MOD_RES (12), (13), (14), (15), (16): Xaa is A or G
  MOD_RES (17), (18), (19), (20): Xaa is A or G or is absent
SRVVMNNSLQEXXXXXXXXXYYLVTLPELKTPAXTPK

SEQ ID NO: 9561 - protein, 43 aa, Artificial Sequence
  Non-cyclic GFR-binding peptide
  MOD_RES (1), (3), (37), (38): Xaa is C or S
  MOD_RES (15), (16), (17), (18), (19): Xaa is A or G
  MOD_RES (20), (21), (22), (23): Xaa is A or G or is absent
XGXSEVVMDRYKKLXXXXXXXXXFYLISIANLRTPVXXTPPTS

SEQ ID NO: 9562 - protein, 35 aa, Artificial Sequence
  Non-cyclic GFR-binding peptide
  MOD_RES (1), (35): Xaa is C or S
  MOD_RES (13), (14), (15), (16), (17): Xaa is A or G
  MOD_RES (18), (19), (20), (21): Xaa is A or G or is absent
XGEVVMDNSLQEXXXXXXXXXYYLMTLPELETPVX

SEQ ID NO: 9563 - protein, 36 aa, Artificial Sequence
  Non-cyclic GFR-binding peptide
  MOD_RES (2), (4), (36): Xaa is C or S
RXGXGEVVMDNSLQEVVKENEDYYLMTLPELETPVX

SEQ ID NO: 9564 - protein, 41 aa, Artificial Sequence
  Non-cyclic GFR-binding peptide
  MOD_RES (2), (36), (37): Xaa is C or S
  MOD_RES (14), (15), (16), (17), (18): Xaa is A or G
  MOD_RES (19), (20), (21), (22): Xaa is A or G or is absent
GXSEVVMDQYNKLXXXXXXXXXLYLISIASLRTPVXXTPPT

SEQ ID NO: 9565 - protein, 35 aa, Artificial Sequence
  Non-cyclic GFR-binding peptide
  MOD_RES (2), (34), (35): Xaa is C or S
GXSEVVMDNSLQEVVNNASDYYLITLPELRTPVXX

SEQ ID NO: 9566 - protein, 42 aa, Artificial Sequence
  Non-cyclic GFR-binding peptide
  MOD_RES (1), (3), (37), (38): Xaa is C or S
  MOD_RES (15), (16), (17), (18), (19): Xaa is A or G
  MOD_RES (20), (21), (22), (23): Xaa is A or G or is absent
XGXARVVMNNSLQEXXXXXXXXXYYLVTLPELQTPAXXPKPV

SEQ ID NO: 9567 - protein, 40 aa, Artificial Sequence
  Non-cyclic GFR-binding peptide
  MOD_RES (1), (3), (37), (38): Xaa is C or S
  MOD_RES (15), (16), (17), (18), (19): Xaa is A or G
  MOD_RES (20), (21), (22), (23): Xaa is A or G or is absent
XGXGEVVMDNSLQEXXXXXXXXXYYLMTLPELETPVXXAK

SEQ ID NO: 9568 - protein, 37 aa, Artificial Sequence
  Non-cyclic GFR-binding peptide
  MOD_RES (2), (36), (37): Xaa is C or S
  MOD_RES (14), (15), (16), (17), (18): Xaa is A or G
  MOD_RES (19), (20), (21), (22): Xaa is A or G or is absent
GXGEVVMENSLQEXXXXXXXXXYYLMTLPELETPVXX

SEQ ID NO: 9569 - protein, 38 aa, Artificial Sequence
  Non-cyclic GFR-binding peptide
  MOD_RES (33), (34): Xaa is C or S
  MOD_RES (11), (12), (13), (14), (15): Xaa is A or G
  MOD_RES (16), (17), (18), (19): Xaa is A or G or is absent
RVVMNNSLQEXXXXXXXXXYYVVPLPELKTPAXXPKPV

SEQ ID NO: 9570 - protein, 34 aa, Artificial Sequence
  Non-cyclic GFR-binding peptide
  MOD_RES (1), (3): Xaa is C or S
XGXSRVVMNNSLQEIVNSSDDYYLVTLPELKTPA

SEQ ID NO: 9571 - protein, 43 aa, Artificial Sequence
  Non-cyclic GFR-binding peptide
  MOD_RES (1), (3), (37), (38): Xaa is C or S
  MOD_RES (15), (16), (17), (18), (19): Xaa is A or G
  MOD_RES (20), (21), (22), (23): Xaa is A or G or is absent
XGXGEVVMDNSLQEXXXXXXXXXYYLMTLPELETPVXXAKPIK

SEQ ID NO: 9572 - protein, 32 aa, Artificial Sequence
  Non-cyclic GFR-binding peptide
  MOD_RES (1), (1): Xaa is C or S
XSRVVMNNSLQEIVNSSDDYYVVPLPELKTPA

SEQ ID NO: 9573 - protein, 37 aa, Artificial Sequence
  Non-cyclic GFR-binding peptide
  MOD_RES (1), (3), (35), (36): Xaa is C or S
XGXSEVVMDNSLQEVVNNASDYYLITLPELRTPVXXT

SEQ ID NO: 9574 - protein, 36 aa, Artificial Sequence
  Non-cyclic GFR-binding peptide
  MOD_RES (2), (4), (36): Xaa is C or S
HXGXSRVVMNEYQKYIVNSSDDIFLVSIPSLKTPAX

SEQ ID NO: 9575 - protein, 38 aa, Artificial Sequence
  Non-cyclic GFR-binding peptide
  MOD_RES (32), (33): Xaa is C or S
GEVVMDNSLQEVVKENEDYYVMPLPELETPVXXAKPIK

SEQ ID NO: 9576 - protein, 36 aa, Artificial Sequence
  Non-cyclic GFR-binding peptide
  MOD_RES (1), (34), (35): Xaa is C or S
  MOD_RES (12), (13), (14), (15), (16): Xaa is A or G
  MOD_RES (17), (18), (19), (20): Xaa is A or G or is absent
XSKVIMEYQKYXXXXXXXXXIFLISIPSLDQSVXXP

SEQ ID NO: 9577 - protein, 37 aa, Artificial Sequence
  Non-cyclic GFR-binding peptide
  MOD_RES (2), (4), (36): Xaa is C or S
HXGXSRVVMNEYQKYIVNSSDDIFLVSIPSLKTPAXT

SEQ ID NO: 9578 - protein, 39 aa, Artificial Sequence
  Non-cyclic GFR-binding peptide
  MOD_RES (34), (35): Xaa is C or S
  MOD_RES (12), (13), (14), (15), (16): Xaa is A or G
  MOD_RES (17), (18), (19), (20): Xaa is A or G or is absent
ARVVMNEYQKYXXXXXXXXXIFLVSIPSLQTPAXXPKPV

SEQ ID NO: 9579 - protein, 43 aa, Artificial Sequence
  Non-cyclic GFR-binding peptide
  MOD_RES (1), (3), (37): Xaa is C or S
  MOD_RES (15), (16), (17), (18), (19): Xaa is A or G
  MOD_RES (20), (21), (22), (23): Xaa is A or G or is absent
XGXSRVVMNNSLQEXXXXXXXXXYYLVTLPELKTPAXTPKTVH

SEQ ID NO: 9580 - protein, 31 aa, Artificial Sequence
  Non-cyclic GFR-binding peptide
  MOD_RES (31), (31): Xaa is C or S
EVVMDNSLQEVVKENEDYYVMPLPELETPVX

SEQ ID NO: 9581 - protein, 38 aa, Artificial Sequence
  Non-cyclic GFR-binding peptide
  MOD_RES (34), (35): Xaa is C or S
  MOD_RES (12), (13), (14), (15), (16): Xaa is A or G
  MOD_RES (17), (18), (19), (20): Xaa is A or G or is absent
SRVVMNNSLQEXXXXXXXXXYYLVTLPELKTPAXXPKP

SEQ ID NO: 9582 - protein, 34 aa, Artificial Sequence
  Non-cyclic GFR-binding peptide
  MOD_RES (1), (3): Xaa is C or S
XGXSRVVMNEYQKYIVNSSDDIFLVSIPSLKTPA

SEQ ID NO: 9583 - protein, 41 aa, Artificial Sequence
  Non-cyclic GFR-binding peptide
  MOD_RES (1), (3), (35), (36): Xaa is C or S
XGXGEVVMDNSLQEVVKENEDYYVMPLPELETPVXXAKPIK

SEQ ID NO: 9584 - protein, 30 aa, Artificial Sequence
  Non-cyclic GFR-binding peptide
EVVMENSLQEVVKDYEDYYVMPLPELETPV

SEQ ID NO: 9585 - protein, 33 aa, Artificial Sequence
  Non-cyclic GFR-binding peptide
  MOD_RES (32), (33): Xaa is C or S
SEVVMDRYKKLVVNNASDFYLISIANLRTPVXX

SEQ ID NO: 9586 - protein, 36 aa, Artificial Sequence
  Non-cyclic GFR-binding peptide
  MOD_RES (2), (34): Xaa is C or S
GXSRVVMNNSLQEIVNSSDDYYLVTLPELKTPAXTP

SEQ ID NO: 9587 - protein, 36 aa, Artificial Sequence
  Non-cyclic GFR-binding peptide
  MOD_RES (1), (35), (36): Xaa is C or S
  MOD_RES (13), (14), (15), (16), (17): Xaa is A or G
  MOD_RES (18), (19), (20), (21): Xaa is A or G or is absent
XGEVVMENSLQEXXXXXXXXXYYLMTLPELETPVXX

SEQ ID NO: 9588 - protein, 35 aa, Artificial Sequence
  Non-cyclic GFR-binding peptide
  MOD_RES (1), (3), (35): Xaa is C or S
XGXGEVVMDNSLQEVVKENEDYYLMTLPELETPVX

SEQ ID NO: 9589 - protein, 43 aa, Artificial Sequence
  Non-cyclic GFR-binding peptide
  MOD_RES (2), (4), (38), (39): Xaa is C or S
  MOD_RES (16), (17), (18), (19), (20): Xaa is A or G
  MOD_RES (21), (22), (23), (24): Xaa is A or G or is absent
RXGXSEVVMDNSLQEXXXXXXXXXYYLITLPELRTPVXXTPPT

SEQ ID NO: 9590 - protein, 36 aa, Artificial Sequence
  Non-cyclic GFR-binding peptide
  MOD_RES (2), (34), (35): Xaa is C or S
GXSRVVMNNSLQEIVNSSDDYYLVTLPELKTPAXXP

SEQ ID NO: 9591 - protein, 40 aa, Artificial Sequence
  Non-cyclic GFR-binding peptide
  MOD_RES (2), (34), (35): Xaa is C or S
GXARVVMNNSLQEIVNSSDDYYVVPLPELQTPAXXPKPVT

SEQ ID NO: 9592 - protein, 39 aa, Artificial Sequence
  Non-cyclic GFR-binding peptide
  MOD_RES (2), (4), (38), (39): Xaa is C or S
  MOD_RES (16), (17), (18), (19), (20): Xaa is A or G
  MOD_RES (21), (22), (23), (24): Xaa is A or G or is absent
HXGXARVVMNNSLQEXXXXXXXXXYYLVTLPELQTPAXX

SEQ ID NO: 9593 - protein, 32 aa, Artificial Sequence
  Non-cyclic GFR-binding peptide
  MOD_RES (2), (2): Xaa is C or S
KXSKVVMNSLQEVKPTRGVYYVIPLPELDQPV

SEQ ID NO: 9594 - protein, 37 aa, Artificial Sequence
  Non-cyclic GFR-binding peptide
  MOD_RES (31), (31): Xaa is C or S
RVVMNNSLQEIVNSSDDYYLVTLPELKTPAXTPKTVH

SEQ ID NO: 9595 - protein, 37 aa, Artificial Sequence
  Non-cyclic GFR-binding peptide
  MOD_RES (2), (34), (35): Xaa is C or S
GXGEVVMEEYQKYVVKDYEDIFLMSIPSLETPVXXAK

SEQ ID NO: 9596 - protein, 41 aa, Artificial Sequence
  Non-cyclic GFR-binding peptide
  MOD_RES (2), (35), (36): Xaa is C or S
  MOD_RES (13), (14), (15), (16), (17): Xaa is A or G
  MOD_RES (18), (19), (20), (21): Xaa is A or G or is absent
KXSKVVMEYQKYXXXXXXXXXIFLISIPSLDQPVXXPSASA

SEQ ID NO: 9597 - protein, 37 aa, Artificial Sequence
  Non-cyclic GFR-binding peptide
  MOD_RES (2), (34), (35): Xaa is C or S
GXSRVVMNEYQKYIVNSSDDIFLVSIPSLKTPAXXPK

SEQ ID NO: 9598 - protein, 40 aa, Artificial Sequence
  Non-cyclic GFR-binding peptide
  MOD_RES (1), (3), (36), (37): Xaa is C or S
  MOD_RES (14), (15), (16), (17), (18): Xaa is A or G
  MOD_RES (19), (20), (21), (22): Xaa is A or G or is absent
XKXSRVIMEYQKYXXXXXXXXXIFLISIPSLAQPVXXPAA

SEQ ID NO: 9599 - protein, 37 aa, Artificial Sequence
  Non-cyclic GFR-binding peptide
  MOD_RES (2), (4), (35), (36): Xaa is C or S
SXKXSKVVMEYQKYVKPTRGVIFLISIPSLDQPVXXP

SEQ ID NO: 9600 - protein, 34 aa, Artificial Sequence
  Non-cyclic GFR-binding peptide
  MOD_RES (34), (34): Xaa is C or S
  MOD_RES (12), (13), (14), (15), (16): Xaa is A or G
  MOD_RES (17), (18), (19), (20): Xaa is A or G or is absent
GEVVMENSLQEXXXXXXXXXYYLMTLPELETPVX

SEQ ID NO: 9601 - protein, 35 aa, Artificial Sequence
  Non-cyclic GFR-binding peptide
  MOD_RES (31), (32): Xaa is C or S
RVVMNNSLQEIVNSSDDYYLVTLPELQTPAXXPKP

SEQ ID NO: 9602 - protein, 37 aa, Artificial Sequence
  Non-cyclic GFR-binding peptide
  MOD_RES (2), (4), (36): Xaa is C or S
HXGXSRVVMNNSLQEIVNSSDDYYLVTLPELKTPAXT

SEQ ID NO: 9603 - protein, 41 aa, Artificial Sequence
  Non-cyclic GFR-binding peptide
  MOD_RES (2), (4), (37), (38): Xaa is C or S
  MOD_RES (15), (16), (17), (18), (19): Xaa is A or G
  MOD_RES (20), (21), (22), (23): Xaa is A or G or is absent
SXKXSKVIMNSLQEXXXXXXXXXYYVIPLPELDQSVXXPSA

SEQ ID NO: 9604 - protein, 38 aa, Artificial Sequence
  Non-cyclic GFR-binding peptide
  MOD_RES (1), (34), (35): Xaa is C or S
  MOD_RES (12), (13), (14), (15), (16): Xaa is A or G
  MOD_RES (17), (18), (19), (20): Xaa is A or G or is absent
XSKVVMEYQKYXXXXXXXXXIFLISIPSLDQPVXXPSA

SEQ ID NO: 9605 - protein, 37 aa, Artificial Sequence
  Non-cyclic GFR-binding peptide
  MOD_RES (1), (35), (36): Xaa is C or S
  MOD_RES (13), (14), (15), (16), (17): Xaa is A or G
  MOD_RES (18), (19), (20), (21): Xaa is A or G or is absent
XGEVVMEEYQKYXXXXXXXXXIFLMSIPSLETPVXXA

SEQ ID NO: 9606 - protein, 40 aa, Artificial Sequence
  Non-cyclic GFR-binding peptide
  MOD_RES (34), (35): Xaa is C or S
  MOD_RES (12), (13), (14), (15), (16): Xaa is A or G
  MOD_RES (17), (18), (19), (20): Xaa is A or G or is absent
GEVVMDNSLQEXXXXXXXXXYYVMPLPELETPVXXAKPIK

SEQ ID NO: 9607 - protein, 34 aa, Artificial Sequence
  Non-cyclic GFR-binding peptide
  MOD_RES (2), (34): Xaa is C or S
GXGEVVMDNSLQEVVKENEDYYVMPLPELETPVX

SEQ ID NO: 9608 - protein, 36 aa, Artificial Sequence
  Non-cyclic GFR-binding peptide
  MOD_RES (1), (35), (36): Xaa is C or S
  MOD_RES (13), (14), (15), (16), (17): Xaa is A or G
  MOD_RES (18), (19), (20), (21): Xaa is A or G or is absent
XARVVMNNSLQEXXXXXXXXXYYLVTLPELQTPAXX

SEQ ID NO: 9609 - protein, 40 aa, Artificial Sequence
  Non-cyclic GFR-binding peptide
  MOD_RES (34), (35): Xaa is C or S
  MOD_RES (12), (13), (14), (15), (16): Xaa is A or G
  MOD_RES (17), (18), (19), (20): Xaa is A or G or is absent
GEVVMDNSLQEXXXXXXXXXYYLMTLPELETPVXXAKPIK

SEQ ID NO: 9610 - protein, 40 aa, Artificial Sequence
  Non-cyclic GFR-binding peptide
  MOD_RES (2), (34): Xaa is C or S
GXSRVVMNNSLQEIVNSSDDYYLVTLPELKTPAXTPKTVH

SEQ ID NO: 9611 - protein, 37 aa, Artificial Sequence
  Non-cyclic GFR-binding peptide
  MOD_RES (2), (4): Xaa is C or S
  MOD_RES (16), (17), (18), (19), (20): Xaa is A or G
  MOD_RES (21), (22), (23), (24): Xaa is A or G or is absent
HXGXARVVMNNSLQEXXXXXXXXXYYVVPLPELQTPA

SEQ ID NO: 9612 - protein, 39 aa, Artificial Sequence
  Non-cyclic GFR-binding peptide
  MOD_RES (1), (33), (34): Xaa is C or S
XGEVVMDEYQKYVVKENEDIFLMSIPSLETPVXXAKPIK

SEQ ID NO: 9613 - protein, 37 aa, Artificial Sequence
  Non-cyclic GFR-binding peptide
  MOD_RES (2), (36), (37): Xaa is C or S
  MOD_RES (14), (15), (16), (17), (18): Xaa is A or G
  MOD_RES (19), (20), (21), (22): Xaa is A or G or is absent
GXGEVVMEEYQKYXXXXXXXXXIFLMSIPSLETPVXX

SEQ ID NO: 9614 - protein, 38 aa, Artificial Sequence
  Non-cyclic GFR-binding peptide
  MOD_RES (2), (34), (35): Xaa is C or S
GXSEVVMDQYNKLVVNNASDLYLISIASLRTPVXXTPP

SEQ ID NO: 9615 - protein, 37 aa, Artificial Sequence
  Non-cyclic GFR-binding peptide
  MOD_RES (2), (34), (35): Xaa is C or S
GXGEVVMENSLQEVVKDYEDYYVMPLPELETPVXXAK

SEQ ID NO: 9616 - protein, 39 aa, Artificial Sequence
  Non-cyclic GFR-binding peptide
  MOD_RES (2), (36), (37): Xaa is C or S
  MOD_RES (14), (15), (16), (17), (18): Xaa is A or G
  MOD_RES (19), (20), (21), (22): Xaa is A or G or is absent
GXGEVVMDNSLQEXXXXXXXXXYYVMPLPELETPVXXAK

SEQ ID NO: 9617 - protein, 36 aa, Artificial Sequence
  Non-cyclic GFR-binding peptide
  MOD_RES (31), (32): Xaa is C or S
EVVMDNSLQEVVKENEDYYLMTLPELETPVXXAKPI

SEQ ID NO: 9618 - protein, 37 aa, Artificial Sequence
  Non-cyclic GFR-binding peptide
  MOD_RES (2), (4), (36), (37): Xaa is C or S
HXGXARVVMNNSLQEIVNSSDDYYVVPLPELQTPAXX

SEQ ID NO: 9619 - protein, 37 aa, Artificial Sequence
  Non-cyclic GFR-binding peptide
  MOD_RES (1), (35), (36): Xaa is C or S
  MOD_RES (13), (14), (15), (16), (17): Xaa is A or G
  MOD_RES (18), (19), (20), (21): Xaa is A or G or is absent
XSEVVMDRYKKLXXXXXXXXXFYLISIANLRTPVXXT

SEQ ID NO: 9620 - protein, 30 aa, Artificial Sequence
  Non-cyclic GFR-binding peptide
RVVMNNSLQEIVNSSDDYYLVTLPELKTPA

SEQ ID NO: 9621 - protein, 38 aa, Artificial Sequence
  Non-cyclic GFR-binding peptide
  MOD_RES (1), (3), (37), (38): Xaa is C or S
  MOD_RES (15), (16), (17), (18), (19): Xaa is A or G
  MOD_RES (20), (21), (22), (23): Xaa is A or G or is absent
XGXARVVMNNSLQEXXXXXXXXXYYVVPLPELQTPAXX

SEQ ID NO: 9622 - protein, 39 aa, Artificial Sequence
  Non-cyclic GFR-binding peptide
  MOD_RES (2), (4), (36), (37): Xaa is C or S
HXGXARVVMNNSLQEIVNSSDDYYVVPLPELQTPAXXPK

SEQ ID NO: 9623 - protein, 39 aa, Artificial Sequence
  Non-cyclic GFR-binding peptide
  MOD_RES (33), (34): Xaa is C or S
  MOD_RES (11), (12), (13), (14), (15): Xaa is A or G
  MOD_RES (16), (17), (18), (19): Xaa is A or G or is absent
EVVMDEYQKYXXXXXXXXXIFLMSIPSLETPVXXAKPIK

SEQ ID NO: 9624 - protein, 43 aa, Artificial Sequence
  Non-cyclic GFR-binding peptide
  MOD_RES (2), (4), (38), (39): Xaa is C or S
  MOD_RES (16), (17), (18), (19), (20): Xaa is A or G
  MOD_RES (21), (22), (23), (24): Xaa is A or G or is absent
RXGXGEVVMDNSLQEXXXXXXXXXYYLMTLPELETPVXXAKPI

SEQ ID NO: 9625 - protein, 42 aa, Artificial Sequence
  Non-cyclic GFR-binding peptide
  MOD_RES (2), (4), (36), (37): Xaa is C or S
RXGXGEVVMENSLQEVVKDYEDYYVMPLPELETPVXXAKPIS

SEQ ID NO: 9626 - protein, 37 aa, Artificial Sequence
  Non-cyclic GFR-binding peptide
  MOD_RES (2), (34), (35): Xaa is C or S
GXSRVVMNNSLQEIVNSSDDYYLVTLPELKTPAXXPK

SEQ ID NO: 9627 - protein, 34 aa, Artificial Sequence
  Non-cyclic GFR-binding peptide
  MOD_RES (2), (33), (34): Xaa is C or S
KXSKVIMNSLQEIKPTKGIYYVIPLPELDQSVXX

SEQ ID NO: 9628 - protein, 38 aa, Artificial Sequence
  Non-cyclic GFR-binding peptide
  MOD_RES (2), (33), (34): Xaa is C or S
KXSKVIMNSLQEIKPTKGIYYVIPLPELDQSVXXPSAS

SEQ ID NO: 9629 - protein, 37 aa, Artificial Sequence
  Non-cyclic GFR-binding peptide
  MOD_RES (33), (33): Xaa is C or S
  MOD_RES (11), (12), (13), (14), (15): Xaa is A or G
  MOD_RES (16), (17), (18), (19): Xaa is A or G or is absent
RVVMNNSLQEXXXXXXXXXYYLVTLPELKTPAXTPKT

SEQ ID NO: 9630 - protein, 34 aa, Artificial Sequence
  Non-cyclic GFR-binding peptide
  MOD_RES (32), (33): Xaa is C or S
SRVVMNNSLQEIVNSSDDYYLVTLPELKTPAXXP

SEQ ID NO: 9631 - protein, 37 aa, Artificial Sequence
  Non-cyclic GFR-binding peptide
  MOD_RES (1), (33), (34): Xaa is C or S
XARVVMNNSLQEIVNSSDDYYLVTLPELQTPAXXPKP

SEQ ID NO: 9632 - protein, 42 aa, Artificial Sequence
  Non-cyclic GFR-binding peptide
  MOD_RES (2), (4), (36): Xaa is C or S
HXGXSRVVMNNSLQEIVNSSDDYYLVTLPELKTPAXTPKTVH

SEQ ID NO: 9633 - protein, 33 aa, Artificial Sequence
  Non-cyclic GFR-binding peptide
  MOD_RES (32), (33): Xaa is C or S
ARVVMNNSLQEIVNSSDDYYVVPLPELQTPAXX

SEQ ID NO: 9634 - protein, 40 aa, Artificial Sequence
  Non-cyclic GFR-binding peptide
  MOD_RES (1), (3), (35), (36): Xaa is C or S
XGXGEVVMDNSLQEVVKENEDYYVMPLPELETPVXXAKPI

SEQ ID NO: 9635 - protein, 31 aa, Artificial Sequence
  Non-cyclic GFR-binding peptide
  MOD_RES (31), (31): Xaa is C or S
RVVMNNSLQEIVNSSDDYYLVTLPELQTPAX

SEQ ID NO: 9636 - protein, 35 aa, Artificial Sequence
  Non-cyclic GFR-binding peptide
  MOD_RES (33), (34): Xaa is C or S
  MOD_RES (11), (12), (13), (14), (15): Xaa is A or G
  MOD_RES (16), (17), (18), (19): Xaa is A or G or is absent
EVVMEEYQKYXXXXXXXXXIFLMSIPSLETPVXXA

SEQ ID NO: 9637 - protein, 42 aa, Artificial Sequence
  Non-cyclic GFR-binding peptide
  MOD_RES (1), (3), (37): Xaa is C or S
  MOD_RES (15), (16), (17), (18), (19): Xaa is A or G
  MOD_RES (20), (21), (22), (23): Xaa is A or G or is absent
XGXSRVVMNNSLQEXXXXXXXXXYYLVTLPELKTPAXTPKTV

SEQ ID NO: 9638 - protein, 36 aa, Artificial Sequence
  Non-cyclic GFR-binding peptide
  MOD_RES (33), (34): Xaa is C or S
  MOD_RES (11), (12), (13), (14), (15): Xaa is A or G
  MOD_RES (16), (17), (18), (19): Xaa is A or G or is absent
EVVMDNSLQEXXXXXXXXXYYLITLPELRTPVXXTP

SEQ ID NO: 9639 - protein, 37 aa, Artificial Sequence
  Non-cyclic GFR-binding peptide
  MOD_RES (2), (4), (36), (37): Xaa is C or S
RXGXGEVVMEEYQKYVVKDYEDIFLMSIPSLETPVXX

SEQ ID NO: 9640 - protein, 33 aa, Artificial Sequence
  Non-cyclic GFR-binding peptide
  MOD_RES (33), (33): Xaa is C or S
  MOD_RES (11), (12), (13), (14), (15): Xaa is A or G
  MOD_RES (16), (17), (18), (19): Xaa is A or G or is absent
RVVMNNSLQEXXXXXXXXXYYVVPLPELKTPAX

SEQ ID NO: 9641 - protein, 40 aa, Artificial Sequence
  Non-cyclic GFR-binding peptide
  MOD_RES (2), (35), (36): Xaa is C or S
  MOD_RES (13), (14), (15), (16), (17): Xaa is A or G
  MOD_RES (18), (19), (20), (21): Xaa is A or G or is absent
KXSKVVMEYQKYXXXXXXXXXIFLISIPSLDQPVXXPSAS

SEQ ID NO: 9642 - protein, 37 aa, Artificial Sequence
  Non-cyclic GFR-binding peptide
  MOD_RES (33), (34): Xaa is C or S
  MOD_RES (11), (12), (13), (14), (15): Xaa is A or G
  MOD_RES (16), (17), (18), (19): Xaa is A or G or is absent
EVVMENSLQEXXXXXXXXXYYVMPLPELETPVXXAKP

SEQ ID NO: 9643 - protein, 33 aa, Artificial Sequence
  Non-cyclic GFR-binding peptide
  MOD_RES (33), (33): Xaa is C or S
  MOD_RES (11), (12), (13), (14), (15): Xaa is A or G
  MOD_RES (16), (17), (18), (19): Xaa is A or G or is absent
RVVMNNSLQEXXXXXXXXXYYLVTLPELKTPAX

SEQ ID NO: 9644 - protein, 40 aa, Artificial Sequence
  Non-cyclic GFR-binding peptide
  MOD_RES (2), (4), (35), (36): Xaa is C or S
SXKXSKVVMNSLQEVKPTRGVYYVIPLPELDQPVXXPSAS

SEQ ID NO: 9645 - protein, 36 aa, Artificial Sequence
  Non-cyclic GFR-binding peptide
  MOD_RES (2), (4): Xaa is C or S
  MOD_RES (15), (16), (17), (18), (19): Xaa is A or G
  MOD_RES (20), (21), (22), (23): Xaa is A or G or is absent
SXKXSKVIMNSLQEXXXXXXXXXYYVIPLPELDQSV

SEQ ID NO: 9646 - protein, 42 aa, Artificial Sequence
  Non-cyclic GFR-binding peptide
  MOD_RES (1), (3), (37), (38): Xaa is C or S
  MOD_RES (15), (16), (17), (18), (19): Xaa is A or G
  MOD_RES (20), (21), (22), (23): Xaa is A or G or is absent
XGXGEVVMENSLQEXXXXXXXXXYYLMTLPELETPVXXAKPI

SEQ ID NO: 9647 - protein, 32 aa, Artificial Sequence
  Non-cyclic GFR-binding peptide
  MOD_RES (1), (1): Xaa is C or S
XGEVVMENSLQEVVKDYEDYYLMTLPELETPV

SEQ ID NO: 9648 - protein, 32 aa, Artificial Sequence
  Non-cyclic GFR-binding peptide
  MOD_RES (11), (12), (13), (14), (15): Xaa is A or G
  MOD_RES (16), (17), (18), (19): Xaa is A or G or is absent
RVVMNNSLQEXXXXXXXXXYYVVPLPELKTPA

SEQ ID NO: 9649 - protein, 36 aa, Artificial Sequence
  Non-cyclic GFR-binding peptide
  MOD_RES (1), (3), (36): Xaa is C or S
  MOD_RES (14), (15), (16), (17), (18): Xaa is A or G
  MOD_RES (19), (20), (21), (22): Xaa is A or G or is absent
XKXSKVVMEYQKYXXXXXXXXXIFLISIPSLDQPVX

SEQ ID NO: 9650 - protein, 36 aa, Artificial Sequence
  Non-cyclic GFR-binding peptide
  MOD_RES (31), (32): Xaa is C or S
EVVMDNSLQEVVNNASDYYLITLPELRTPVXXTPPT

SEQ ID NO: 9651 - protein, 32 aa, Artificial Sequence
  Non-cyclic GFR-binding peptide
  MOD_RES (31), (32): Xaa is C or S
EVVMDNSLQEVVKENEDYYVMPLPELETPVXX

SEQ ID NO: 9652 - protein, 38 aa, Artificial Sequence
  Non-cyclic GFR-binding peptide
  MOD_RES (1), (3), (34), (35): Xaa is C or S
XKXSKVVMEYQKYVKPTRGVIFLISIPSLDQPVXXPSA

SEQ ID NO: 9653 - protein, 40 aa, Artificial Sequence
  Non-cyclic GFR-binding peptide
  MOD_RES (2), (36), (37): Xaa is C or S
  MOD_RES (14), (15), (16), (17), (18): Xaa is A or G
  MOD_RES (19), (20), (21), (22): Xaa is A or G or is absent
GXSRVVMNNSLQEXXXXXXXXXYYVVPLPELKTPAXXPKP

SEQ ID NO: 9654 - protein, 33 aa, Artificial Sequence
  Non-cyclic GFR-binding peptide
  MOD_RES (1), (3): Xaa is C or S
XKXSKVVMEYQKYVKPTRGVIFLISIPSLDQPV

SEQ ID NO: 9655 - protein, 36 aa, Artificial Sequence
  Non-cyclic GFR-binding peptide
  MOD_RES (1), (3): Xaa is C or S
  MOD_RES (15), (16), (17), (18), (19): Xaa is A or G
  MOD_RES (20), (21), (22), (23): Xaa is A or G or is absent
XGXGEVVMDEYQKYXXXXXXXXXIFLMSIPSLETPV

SEQ ID NO: 9656 - protein, 38 aa, Artificial Sequence
  Non-cyclic GFR-binding peptide
  MOD_RES (33), (34): Xaa is C or S
  MOD_RES (11), (12), (13), (14), (15): Xaa is A or G
  MOD_RES (16), (17), (18), (19): Xaa is A or G or is absent
RVVMNNSLQEXXXXXXXXXYYLVTLPELKTPAXXPKPV

SEQ ID NO: 9657 - protein, 40 aa, Artificial Sequence
  Non-cyclic GFR-binding peptide
  MOD_RES (1), (35), (36): Xaa is C or S
  MOD_RES (13), (14), (15), (16), (17): Xaa is A or G
  MOD_RES (18), (19), (20), (21): Xaa is A or G or is absent
XSRVVMNNSLQEXXXXXXXXXYYLVTLPELKTPAXXPKPV

SEQ ID NO: 9658 - protein, 34 aa, Artificial Sequence
  Non-cyclic GFR-binding peptide
  MOD_RES (32), (33): Xaa is C or S
GEVVMDEYQKYVVKENEDIFLMSIPSLETPVXXA

SEQ ID NO: 9659 - protein, 32 aa, Artificial Sequence
  Non-cyclic GFR-binding peptide
  MOD_RES (1), (32): Xaa is C or S
XSRVIMEYQKYVKPKRGVIFLISIPSLAQPVX

SEQ ID NO: 9660 - protein, 42 aa, Artificial Sequence
  Non-cyclic GFR-binding peptide
  MOD_RES (1), (3), (37), (38): Xaa is C or S
  MOD_RES (15), (16), (17), (18), (19): Xaa is A or G
  MOD_RES (20), (21), (22), (23): Xaa is A or G or is absent
XGXGEVVMDNSLQEXXXXXXXXXYYLMTLPELETPVXXAKPI

SEQ ID NO: 9661 - protein, 37 aa, Artificial Sequence
  Non-cyclic GFR-binding peptide
  MOD_RES (2), (34), (35): Xaa is C or S
GXARVVMNNSLQEIVNSSDDYYLVTLPELQTPAXXPK

SEQ ID NO: 9662 - protein, 41 aa, Artificial Sequence
  Non-cyclic GFR-binding peptide
  MOD_RES (2), (4), (37), (38): Xaa is C or S
  MOD_RES (15), (16), (17), (18), (19): Xaa is A or G
  MOD_RES (20), (21), (22), (23): Xaa is A or G or is absent
SXKXSRVIMEYQKYXXXXXXXXXIFLISIPSLAQPVXXPAA

SEQ ID NO: 9663 - protein, 39 aa, Artificial Sequence
  Non-cyclic GFR-binding peptide
  MOD_RES (1), (35): Xaa is C or S
  MOD_RES (13), (14), (15), (16), (17): Xaa is A or G
  MOD_RES (18), (19), (20), (21): Xaa is A or G or is absent
XSRVVMNNSLQEXXXXXXXXXYYLVTLPELKTPAXTPKT

SEQ ID NO: 9664 - protein, 38 aa, Artificial Sequence
  Non-cyclic GFR-binding peptide
  MOD_RES (2), (4), (38): Xaa is C or S
  MOD_RES (16), (17), (18), (19), (20): Xaa is A or G
  MOD_RES (21), (22), (23), (24): Xaa is A or G or is absent
HXGXARVVMNNSLQEXXXXXXXXXYYVVPLPELQTPAX

SEQ ID NO: 9665 - protein, 38 aa, Artificial Sequence
  Non-cyclic GFR-binding peptide
  MOD_RES (33), (34): Xaa is C or S
  MOD_RES (11), (12), (13), (14), (15): Xaa is A or G
  MOD_RES (16), (17), (18), (19): Xaa is A or G or is absent
SKVVMNSLQEXXXXXXXXXYYVIPLPELDQPVXXPSAS

SEQ ID NO: 9666 - protein, 40 aa, Artificial Sequence
  Non-cyclic GFR-binding peptide
  MOD_RES (34), (35): Xaa is C or S
  MOD_RES (12), (13), (14), (15), (16): Xaa is A or G
  MOD_RES (17), (18), (19), (20): Xaa is A or G or is absent
GEVVMENSLQEXXXXXXXXXYYLMTLPELETPVXXAKPIS

SEQ ID NO: 9667 - protein, 41 aa, Artificial Sequence
  Non-cyclic GFR-binding peptide
  MOD_RES (2), (4), (38), (39): Xaa is C or S
  MOD_RES (16), (17), (18), (19), (20): Xaa is A or G
  MOD_RES (21), (22), (23), (24): Xaa is A or G or is absent
HXGXSRVVMNNSLQEXXXXXXXXXYYLVTLPELKTPAXXPK

SEQ ID NO: 9668 - protein, 32 aa, Artificial Sequence
  Non-cyclic GFR-binding peptide
  MOD_RES (31), (31): Xaa is C or S
RVVMNEYQKYIVNSSDDIFLVSIPSLKTPAXT

SEQ ID NO: 9669 - protein, 37 aa, Artificial Sequence
  Non-cyclic GFR-binding peptide
  MOD_RES (2), (4), (37): Xaa is C or S
  MOD_RES (15), (16), (17), (18), (19): Xaa is A or G
  MOD_RES (20), (21), (22), (23): Xaa is A or G or is absent
SXKXSKVIMEYQKYXXXXXXXXXIFLISIPSLDQSVX

SEQ ID NO: 9670 - protein, 37 aa, Artificial Sequence
  Non-cyclic GFR-binding peptide
  MOD_RES (1), (3), (35): Xaa is C or S
XGXSRVVMNEYQKYIVNSSDDIFLVSIPSLKTPAXTP

SEQ ID NO: 9671 - protein, 37 aa, Artificial Sequence
  Non-cyclic GFR-binding peptide
  MOD_RES (33), (34): Xaa is C or S
  MOD_RES (11), (12), (13), (14), (15): Xaa is A or G
  MOD_RES (16), (17), (18), (19): Xaa is A or G or is absent
SRVIMEYQKYXXXXXXXXXIFLISIPSLAQPVXXPAA

SEQ ID NO: 9672 - protein, 37 aa, Artificial Sequence
  Non-cyclic GFR-binding peptide
  MOD_RES (33), (33): Xaa is C or S
  MOD_RES (11), (12), (13), (14), (15): Xaa is A or G
  MOD_RES (16), (17), (18), (19): Xaa is A or G or is absent
RVVMNNSLQEXXXXXXXXXYYVVPLPELKTPAXTPKT

SEQ ID NO: 9673 - protein, 40 aa, Artificial Sequence
  Non-cyclic GFR-binding peptide
  MOD_RES (2), (4), (38), (39): Xaa is C or S
  MOD_RES (16), (17), (18), (19), (20): Xaa is A or G
  MOD_RES (21), (22), (23), (24): Xaa is A or G or is absent
RXGXSEVVMDRYKKLXXXXXXXXXFYLISIANLRTPVXXT

SEQ ID NO: 9674 - protein, 37 aa, Artificial Sequence
  Non-cyclic GFR-binding peptide
  MOD_RES (2), (33), (34): Xaa is C or S
KXSKVVMEYQKYVKPTRGVIFLISIPSLDQPVXXPSA

SEQ ID NO: 9675 - protein, 36 aa, Artificial Sequence
  Non-cyclic GFR-binding peptide
  MOD_RES (33), (34): Xaa is C or S
  MOD_RES (11), (12), (13), (14), (15): Xaa is A or G
  MOD_RES (16), (17), (18), (19): Xaa is A or G or is absent
EVVMDNSLQEXXXXXXXXXYYVIPLPELRTPVXXTP

SEQ ID NO: 9676 - protein, 40 aa, Artificial Sequence
  Non-cyclic GFR-binding peptide
  MOD_RES (34), (35): Xaa is C or S
  MOD_RES (12), (13), (14), (15), (16): Xaa is A or G
  MOD_RES (17), (18), (19), (20): Xaa is A or G or is absent
SRVVMNNSLQEXXXXXXXXXYYVVPLPELKTPAXXPKPVY

SEQ ID NO: 9677 - protein, 37 aa, Artificial Sequence
  Non-cyclic GFR-binding peptide
  MOD_RES (2), (36), (37): Xaa is C or S
  MOD_RES (14), (15), (16), (17), (18): Xaa is A or G
  MOD_RES (19), (20), (21), (22): Xaa is A or G or is absent
GXSEVVMDRYKKLXXXXXXXXXFYLISIANLRTPVXX

SEQ ID NO: 9678 - protein, 41 aa, Artificial Sequence
  Non-cyclic GFR-binding peptide
  MOD_RES (1), (35), (36): Xaa is C or S
  MOD_RES (13), (14), (15), (16), (17): Xaa is A or G
  MOD_RES (18), (19), (20), (21): Xaa is A or G or is absent
XGEVVMEEYQKYXXXXXXXXXIFLMSIPSLETPVXXAKPIS

SEQ ID NO: 9679 - protein, 39 aa, Artificial Sequence
  Non-cyclic GFR-binding peptide
  MOD_RES (2), (36), (37): Xaa is C or S
  MOD_RES (14), (15), (16), (17), (18): Xaa is A or G
  MOD_RES (19), (20), (21), (22): Xaa is A or G or is absent
GXGEVVMDEYQKYXXXXXXXXXIFLMSIPSLETPVXXAK

SEQ ID NO: 9680 - protein, 39 aa, Artificial Sequence
  Non-cyclic GFR-binding peptide
  MOD_RES (2), (4), (35), (36): Xaa is C or S
SXKXSRVIMNSLQEVKPKRGVYYLITLPELAQPVXXPAA

SEQ ID NO: 9681 - protein, 40 aa, Artificial Sequence
  Non-cyclic GFR-binding peptide
  MOD_RES (1), (3), (35), (36): Xaa is C or S
XGXARVVMNNSLQEIVNSSDDYYVVPLPELQTPAXXPKPV

SEQ ID NO: 9682 - protein, 43 aa, Artificial Sequence
  Non-cyclic GFR-binding peptide
  MOD_RES (1), (3), (37), (38): Xaa is C or S
  MOD_RES (15), (16), (17), (18), (19): Xaa is A or G
  MOD_RES (20), (21), (22), (23): Xaa is A or G or is absent
XGXGEVVMDNSLQEXXXXXXXXXYYVMPLPELETPVXXAKPIK

SEQ ID NO: 9683 - protein, 33 aa, Artificial Sequence
  Non-cyclic GFR-binding peptide
  MOD_RES (12), (13), (14), (15), (16): Xaa is A or G
  MOD_RES (17), (18), (19), (20): Xaa is A or G or is absent
ARVVMNNSLQEXXXXXXXXXYYVVPLPELQTPA

SEQ ID NO: 9684 - protein, 32 aa, Artificial Sequence
  Non-cyclic GFR-binding peptide
  MOD_RES (31), (32): Xaa is C or S
RVVMNNSLQEIVNSSDDYYLVTLPELQTPAXX

SEQ ID NO: 9685 - protein, 42 aa, Artificial Sequence
  Non-cyclic GFR-binding peptide
  MOD_RES (2), (4), (38), (39): Xaa is C or S
  MOD_RES (16), (17), (18), (19), (20): Xaa is A or G
  MOD_RES (21), (22), (23), (24): Xaa is A or G or is absent
HXGXARVVMNNSLQEXXXXXXXXXYYLVTLPELQTPAXXPKP

SEQ ID NO: 9686 - protein, 34 aa, Artificial Sequence
  Non-cyclic GFR-binding peptide
  MOD_RES (32), (33): Xaa is C or S
SRVVMNNSLQEIVNSSDDYYVVPLPELKTPAXXP

SEQ ID NO: 9687 - protein, 40 aa, Artificial Sequence
  Non-cyclic GFR-binding peptide
  MOD_RES (2), (34): Xaa is C or S
GXSRVVMNEYQKYIVNSSDDIFLVSIPSLKTPAXTPKTVH

SEQ ID NO: 9688 - protein, 38 aa, Artificial Sequence
  Non-cyclic GFR-binding peptide
  MOD_RES (1), (32), (33): Xaa is C or S
XSKVIMEYQKYIKPTKGIIFLISIPSLDQSVXXPSASA

SEQ ID NO: 9689 - protein, 41 aa, Artificial Sequence
  Non-cyclic GFR-binding peptide
  MOD_RES (1), (3), (35), (36): Xaa is C or S
XGXSRVVMNNSLQEIVNSSDDYYVVPLPELKTPAXXPKPVY

SEQ ID NO: 9690 - protein, 35 aa, Artificial Sequence
  Non-cyclic GFR-binding peptide
  MOD_RES (1), (3), (35): Xaa is C or S
XGXGEVVMEEYQKYVVKDYEDIFLMSIPSLETPVX

SEQ ID NO: 9691 - protein, 34 aa, Artificial Sequence
  Non-cyclic GFR-binding peptide
  MOD_RES (2), (4): Xaa is C or S
SXKXSKVVMNSLQEVKPTRGVYYVIPLPELDQPV

SEQ ID NO: 9692 - protein, 40 aa, Artificial Sequence
  Non-cyclic GFR-binding peptide
  MOD_RES (1), (3), (36), (37): Xaa is C or S
  MOD_RES (14), (15), (16), (17), (18): Xaa is A or G
  MOD_RES (19), (20), (21), (22): Xaa is A or G or is absent
XKXSKVIMEYQKYXXXXXXXXXIFLISIPSLDQSVXXPSA

SEQ ID NO: 9693 - protein, 38 aa, Artificial Sequence
  Non-cyclic GFR-binding peptide
  MOD_RES (1), (3), (37): Xaa is C or S
  MOD_RES (15), (16), (17), (18), (19): Xaa is A or G
  MOD_RES (20), (21), (22), (23): Xaa is A or G or is absent
XGXSRVVMNNSLQEXXXXXXXXXYYLVTLPELKTPAXT

SEQ ID NO: 9694 - protein, 40 aa, Artificial Sequence
  Non-cyclic GFR-binding peptide
  MOD_RES (1), (3), (37), (38): Xaa is C or S
  MOD_RES (15), (16), (17), (18), (19): Xaa is A or G
  MOD_RES (20), (21), (22), (23): Xaa is A or G or is absent
XGXGEVVMENSLQEXXXXXXXXXYYVMPLPELETPVXXAK

SEQ ID NO: 9695 - protein, 36 aa, Artificial Sequence
  Non-cyclic GFR-binding peptide
  MOD_RES (1), (3), (35), (36): Xaa is C or S
XGXSRVVMNNSLQEIVNSSDDYYVVPLPELKTPAXX

SEQ ID NO: 9696 - protein, 36 aa, Artificial Sequence
  Non-cyclic GFR-binding peptide
  MOD_RES (2), (34): Xaa is C or S
GXSRVVMNEYQKYIVNSSDDIFLVSIPSLKTPAXTP

SEQ ID NO: 9697 - protein, 39 aa, Artificial Sequence
  Non-cyclic GFR-binding peptide
  MOD_RES (1), (33), (34): Xaa is C or S
XGEVVMENSLQEVVKDYEDYYVMPLPELETPVXXAKPIS

SEQ ID NO: 9698 - protein, 35 aa, Artificial Sequence
  Non-cyclic GFR-binding peptide
  MOD_RES (2), (2): Xaa is C or S
  MOD_RES (14), (15), (16), (17), (18): Xaa is A or G
  MOD_RES (19), (20), (21), (22): Xaa is A or G or is absent
GXGEVVMDNSLQEXXXXXXXXXYYLMTLPELETPV

SEQ ID NO: 9699 - protein, 39 aa, Artificial Sequence
  Non-cyclic GFR-binding peptide
  MOD_RES (1), (3), (35), (36): Xaa is C or S
XGXGEVVMENSLQEVVKDYEDYYVMPLPELETPVXXAKP

SEQ ID NO: 9700 - protein, 37 aa, Artificial Sequence
  Non-cyclic GFR-binding peptide
  MOD_RES (2), (4): Xaa is C or S
  MOD_RES (16), (17), (18), (19), (20): Xaa is A or G
  MOD_RES (21), (22), (23), (24): Xaa is A or G or is absent
HXGXARVVMNEYQKYXXXXXXXXXIFLVSIPSLQTPA

SEQ ID NO: 9701 - protein, 38 aa, Artificial Sequence
  Non-cyclic GFR-binding peptide
  MOD_RES (34), (35): Xaa is C or S
  MOD_RES (12), (13), (14), (15), (16): Xaa is A or G
  MOD_RES (17), (18), (19), (20): Xaa is A or G or is absent
SEVVMDNSLQEXXXXXXXXXYYLITLPELRTPVXXTPP

SEQ ID NO: 9702 - protein, 42 aa, Artificial Sequence
  Non-cyclic GFR-binding peptide
  MOD_RES (1), (3), (37), (38): Xaa is C or S
  MOD_RES (15), (16), (17), (18), (19): Xaa is A or G
  MOD_RES (20), (21), (22), (23): Xaa is A or G or is absent
XGXARVVMNNSLQEXXXXXXXXXYYVVPLPELQTPAXXPKPV

SEQ ID NO: 9703 - protein, 33 aa, Artificial Sequence
  Non-cyclic GFR-binding peptide
  MOD_RES (1), (3): Xaa is C or S
XKXSKVIMEYQKYIKPTKGIIFLISIPSLDQSV

SEQ ID NO: 9704 - protein, 35 aa, Artificial Sequence
  Non-cyclic GFR-binding peptide
  MOD_RES (1), (3), (35): Xaa is C or S
XGXGEVVMENSLQEVVKDYEDYYLMTLPELETPVX

SEQ ID NO: 9705 - protein, 37 aa, Artificial Sequence
  Non-cyclic GFR-binding peptide
  MOD_RES (1), (3), (35): Xaa is C or S
XGXSRVVMNNSLQEIVNSSDDYYLVTLPELKTPAXTP

SEQ ID NO: 9706 - protein, 34 aa, Artificial Sequence
  Non-cyclic GFR-binding peptide
  MOD_RES (1), (1): Xaa is C or S
  MOD_RES (13), (14), (15), (16), (17): Xaa is A or G
  MOD_RES (18), (19), (20), (21): Xaa is A or G or is absent
XGEVVMDNSLQEXXXXXXXXXYYLMTLPELETPV

SEQ ID NO: 9707 - protein, 43 aa, Artificial Sequence
  Non-cyclic GFR-binding peptide
  MOD_RES (2), (4), (38), (39): Xaa is C or S
  MOD_RES (16), (17), (18), (19), (20): Xaa is A or G
  MOD_RES (21), (22), (23), (24): Xaa is A or G or is absent
HXGXSRVVMNNSLQEXXXXXXXXXYYLVTLPELKTPAXXPKPV

SEQ ID NO: 9708 - protein, 42 aa, Artificial Sequence
  Non-cyclic GFR-binding peptide
  MOD_RES (1), (3), (37), (38): Xaa is C or S
  MOD_RES (15), (16), (17), (18), (19): Xaa is A or G
  MOD_RES (20), (21), (22), (23): Xaa is A or G or is absent
XGXSRVVMNEYQKYXXXXXXXXXIFLVSIPSLKTPAXXPKPV

SEQ ID NO: 9709 - protein, 40 aa, Artificial Sequence
  Non-cyclic GFR-binding peptide
  MOD_RES (1), (3), (37), (38): Xaa is C or S
  MOD_RES (15), (16), (17), (18), (19): Xaa is A or G
  MOD_RES (20), (21), (22), (23): Xaa is A or G or is absent
XGXGEVVMDNSLQEXXXXXXXXXYYVMPLPELETPVXXAK

SEQ ID NO: 9710 - protein, 36 aa, Artificial Sequence
  Non-cyclic GFR-binding peptide
  MOD_RES (2), (4), (36): Xaa is C or S
RXGXGEVVMEEYQKYVVKDYEDIFLMSIPSLETPVX

SEQ ID NO: 9711 - protein, 40 aa, Artificial Sequence
  Non-cyclic GFR-binding peptide
  MOD_RES (1), (3), (37), (38): Xaa is C or S
  MOD_RES (15), (16), (17), (18), (19): Xaa is A or G
  MOD_RES (20), (21), (22), (23): Xaa is A or G or is absent
XGXGEVVMENSLQEXXXXXXXXXYYLMTLPELETPVXXAK

SEQ ID NO: 9712 - protein, 38 aa, Artificial Sequence
  Non-cyclic GFR-binding peptide
  MOD_RES (1), (3), (35), (36): Xaa is C or S
XGXARVVMNNSLQEIVNSSDDYYVVPLPELQTPAXXPK

SEQ ID NO: 9713 - protein, 37 aa, Artificial Sequence
  Non-cyclic GFR-binding peptide
  MOD_RES (1), (3), (36), (37): Xaa is C or S
  MOD_RES (14), (15), (16), (17), (18): Xaa is A or G
  MOD_RES (19), (20), (21), (22): Xaa is A or G or is absent
XKXSKVVMEYQKYXXXXXXXXXIFLISIPSLDQPVXX

SEQ ID NO: 9714 - protein, 41 aa, Artificial Sequence
  Non-cyclic GFR-binding peptide
  MOD_RES (1), (35), (36): Xaa is C or S
  MOD_RES (13), (14), (15), (16), (17): Xaa is A or G
  MOD_RES (18), (19), (20), (21): Xaa is A or G or is absent
XARVVMNNSLQEXXXXXXXXXYYVVPLPELQTPAXXPKPVT

SEQ ID NO: 9715 - protein, 38 aa, Artificial Sequence
  Non-cyclic GFR-binding peptide
  MOD_RES (33), (34): Xaa is C or S
  MOD_RES (11), (12), (13), (14), (15): Xaa is A or G
  MOD_RES (16), (17), (18), (19): Xaa is A or G or is absent
SKVVMEYQKYXXXXXXXXXIFLISIPSLDQPVXXPSAS

SEQ ID NO: 9716 - protein, 32 aa, Artificial Sequence
  Non-cyclic GFR-binding peptide
  MOD_RES (31), (32): Xaa is C or S
RVVMNNSLQEIVNSSDDYYLVTLPELKTPAXX

SEQ ID NO: 9717 - protein, 42 aa, Artificial Sequence
  Non-cyclic GFR-binding peptide
  MOD_RES (2), (4), (38): Xaa is C or S
  MOD_RES (16), (17), (18), (19), (20): Xaa is A or G
  MOD_RES (21), (22), (23), (24): Xaa is A or G or is absent
HXGXSRVVMNNSLQEXXXXXXXXXYYVVPLPELKTPAXTPKT

SEQ ID NO: 9718 - protein, 35 aa, Artificial Sequence
  Non-cyclic GFR-binding peptide
  MOD_RES (2), (35): Xaa is C or S
  MOD_RES (13), (14), (15), (16), (17): Xaa is A or G
  MOD_RES (18), (19), (20), (21): Xaa is A or G or is absent
KXSRVIMEYQKYXXXXXXXXXIFLISIPSLAQPVX

SEQ ID NO: 9719 - protein, 37 aa, Artificial Sequence
  Non-cyclic GFR-binding peptide
  MOD_RES (2), (36), (37): Xaa is C or S
  MOD_RES (14), (15), (16), (17), (18): Xaa is A or G
  MOD_RES (19), (20), (21), (22): Xaa is A or G or is absent
GXARVVMNEYQKYXXXXXXXXXIFLVSIPSLQTPAXX

SEQ ID NO: 9720 - protein, 36 aa, Artificial Sequence
  Non-cyclic GFR-binding peptide
  MOD_RES (2), (34), (35): Xaa is C or S
GXGEVVMDNSLQEVVKENEDYYVMPLPELETPVXXA

SEQ ID NO: 9721 - protein, 38 aa, Artificial Sequence
  Non-cyclic GFR-binding peptide
  MOD_RES (1), (32), (33): Xaa is C or S
XSRVIMNSLQEVKPKRGVYYLITLPELAQPVXXPAASA

SEQ ID NO: 9722 - protein, 35 aa, Artificial Sequence
  Non-cyclic GFR-binding peptide
  MOD_RES (2), (4): Xaa is C or S
RXGXGEVVMDNSLQEVVKENEDYYVMPLPELETPV

SEQ ID NO: 9723 - protein, 40 aa, Artificial Sequence
  Non-cyclic GFR-binding peptide
  MOD_RES (1), (3), (35), (36): Xaa is C or S
XGXGEVVMENSLQEVVKDYEDYYVMPLPELETPVXXAKPI

SEQ ID NO: 9724 - protein, 40 aa, Artificial Sequence
  Non-cyclic GFR-binding peptide
  MOD_RES (1), (35), (36): Xaa is C or S
  MOD_RES (13), (14), (15), (16), (17): Xaa is A or G
  MOD_RES (18), (19), (20), (21): Xaa is A or G or is absent
XSEVVMDRYKKLXXXXXXXXXFYLISIANLRTPVXXTPPT

SEQ ID NO: 9725 - protein, 33 aa, Artificial Sequence
  Non-cyclic GFR-binding peptide
  MOD_RES (1), (32), (33): Xaa is C or S
XSKVIMEYQKYIKPTKGIIFLISIPSLDQSVXX

SEQ ID NO: 9726 - protein, 37 aa, Artificial Sequence
  Non-cyclic GFR-binding peptide
  MOD_RES (33), (34): Xaa is C or S
  MOD_RES (11), (12), (13), (14), (15): Xaa is A or G
  MOD_RES (16), (17), (18), (19): Xaa is A or G or is absent
EVVMDRYKKLXXXXXXXXXFYLISIANLRTPVXXTPP

SEQ ID NO: 9727 - protein, 37 aa, Artificial Sequence
  Non-cyclic GFR-binding peptide
  MOD_RES (2), (36), (37): Xaa is C or S
  MOD_RES (14), (15), (16), (17), (18): Xaa is A or G
  MOD_RES (19), (20), (21), (22): Xaa is A or G or is absent
GXGEVVMDEYQKYXXXXXXXXXIFLMSIPSLETPVXX

SEQ ID NO: 9728 - protein, 39 aa, Artificial Sequence
  Non-cyclic GFR-binding peptide
  MOD_RES (2), (35), (36): Xaa is C or S
  MOD_RES (13), (14), (15), (16), (17): Xaa is A or G
  MOD_RES (18), (19), (20), (21): Xaa is A or G or is absent
KXSRVIMNSLQEXXXXXXXXXYYLITLPELAQPVXXPAA

SEQ ID NO: 9729 - protein, 39 aa, Artificial Sequence
  Non-cyclic GFR-binding peptide
  MOD_RES (2), (4), (38), (39): Xaa is C or S
  MOD_RES (16), (17), (18), (19), (20): Xaa is A or G
  MOD_RES (21), (22), (23), (24): Xaa is A or G or is absent
RXGXGEVVMENSLQEXXXXXXXXXYYLMTLPELETPVXX

SEQ ID NO: 9730 - protein, 34 aa, Artificial Sequence
  Non-cyclic GFR-binding peptide
  MOD_RES (1), (1): Xaa is C or S
  MOD_RES (13), (14), (15), (16), (17): Xaa is A or G
  MOD_RES (18), (19), (20), (21): Xaa is A or G or is absent
XGEVVMEEYQKYXXXXXXXXXIFLMSIPSLETPV

SEQ ID NO: 9731 - protein, 35 aa, Artificial Sequence
  Non-cyclic GFR-binding peptide
  MOD_RES (34), (35): Xaa is C or S
  MOD_RES (12), (13), (14), (15), (16): Xaa is A or G
  MOD_RES (17), (18), (19), (20): Xaa is A or G or is absent
GEVVMDNSLQEXXXXXXXXXYYVMPLPELETPVXX

SEQ ID NO: 9732 - protein, 39 aa, Artificial Sequence
  Non-cyclic GFR-binding peptide
  MOD_RES (34), (35): Xaa is C or S
  MOD_RES (12), (13), (14), (15), (16): Xaa is A or G
  MOD_RES (17), (18), (19), (20): Xaa is A or G or is absent
GEVVMENSLQEXXXXXXXXXYYVMPLPELETPVXXAKPI

SEQ ID NO: 9733 - protein, 36 aa, Artificial Sequence
  Non-cyclic GFR-binding peptide
  MOD_RES (31), (32): Xaa is C or S
EVVMDNSLQEVVKENEDYYVMPLPELETPVXXAKPI

SEQ ID NO: 9734 - protein, 34 aa, Artificial Sequence
  Non-cyclic GFR-binding peptide
  MOD_RES (1), (3): Xaa is C or S
XGXSEVVMDQYNKLVVNNASDLYLISIASLRTPV

SEQ ID NO: 9735 - protein, 42 aa, Artificial Sequence
  Non-cyclic GFR-binding peptide
  MOD_RES (2), (4), (38), (39): Xaa is C or S
  MOD_RES (16), (17), (18), (19), (20): Xaa is A or G
  MOD_RES (21), (22), (23), (24): Xaa is A or G or is absent
RXGXSEVVMDNSLQEXXXXXXXXXYYLITLPELRTPVXXTPP

SEQ ID NO: 9736 - protein, 40 aa, Artificial Sequence
  Non-cyclic GFR-binding peptide
  MOD_RES (34), (35): Xaa is C or S
  MOD_RES (12), (13), (14), (15), (16): Xaa is A or G
  MOD_RES (17), (18), (19), (20): Xaa is A or G or is absent
SRVVMNNSLQEXXXXXXXXXYYLVTLPELKTPAXXPKPVY

SEQ ID NO: 9737 - protein, 43 aa, Artificial Sequence
  Non-cyclic GFR-binding peptide
  MOD_RES (2), (4), (38): Xaa is C or S
  MOD_RES (16), (17), (18), (19), (20): Xaa is A or G
  MOD_RES (21), (22), (23), (24): Xaa is A or G or is absent
HXGXSRVVMNEYQKYXXXXXXXXXIFLVSIPSLKTPAXTPKTV

SEQ ID NO: 9738 - protein, 32 aa, Artificial Sequence
  Non-cyclic GFR-binding peptide
  MOD_RES (31), (32): Xaa is C or S
RVVMNNSLQEIVNSSDDYYVVPLPELQTPAXX

SEQ ID NO: 9739 - protein, 40 aa, Artificial Sequence
  Non-cyclic GFR-binding peptide
  MOD_RES (2), (36), (37): Xaa is C or S
  MOD_RES (14), (15), (16), (17), (18): Xaa is A or G
  MOD_RES (19), (20), (21), (22): Xaa is A or G or is absent
GXSEVVMDNSLQEXXXXXXXXXYYLITLPELRTPVXXTPP

SEQ ID NO: 9740 - protein, 37 aa, Artificial Sequence
  Non-cyclic GFR-binding peptide
  MOD_RES (2), (34), (35): Xaa is C or S
GXGEVVMDEYQKYVVKENEDIFLMSIPSLETPVXXAK

SEQ ID NO: 9741 - protein, 40 aa, Artificial Sequence
  Non-cyclic GFR-binding peptide
  MOD_RES (2), (34), (35): Xaa is C or S
GXSRVVMNNSLQEIVNSSDDYYVVPLPELKTPAXXPKPVY

SEQ ID NO: 9742 - protein, 36 aa, Artificial Sequence
  Non-cyclic GFR-binding peptide
  MOD_RES (1), (32), (33): Xaa is C or S
XSRVIMEYQKYVKPKRGVIFLISIPSLAQPVXXPAA

SEQ ID NO: 9743 - protein, 42 aa, Artificial Sequence
  Non-cyclic GFR-binding peptide
  MOD_RES (2), (36), (37): Xaa is C or S
  MOD_RES (14), (15), (16), (17), (18): Xaa is A or G
  MOD_RES (19), (20), (21), (22): Xaa is A or G or is absent
GXGEVVMDNSLQEXXXXXXXXXYYLMTLPELETPVXXAKPIK

SEQ ID NO: 9744 - protein, 38 aa, Artificial Sequence
  Non-cyclic GFR-binding peptide
  MOD_RES (2), (36), (37): Xaa is C or S
  MOD_RES (14), (15), (16), (17), (18): Xaa is A or G
  MOD_RES (19), (20), (21), (22): Xaa is A or G or is absent
GXGEVVMENSLQEXXXXXXXXXYYLMTLPELETPVXXA

SEQ ID NO: 9745 - protein, 33 aa, Artificial Sequence
  Non-cyclic GFR-binding peptide
  MOD_RES (32), (33): Xaa is C or S
ARVVMNEYQKYIVNSSDDIFLVSIPSLQTPAXX

SEQ ID NO: 9746 - protein, 33 aa, Artificial Sequence
  Non-cyclic GFR-binding peptide
  MOD_RES (32), (33): Xaa is C or S
SEVVMDNSLQEVVNNASDYYLITLPELRTPVXX

SEQ ID NO: 9747 - protein, 33 aa, Artificial Sequence
  Non-cyclic GFR-binding peptide
  MOD_RES (33), (33): Xaa is C or S
  MOD_RES (11), (12), (13), (14), (15): Xaa is A or G
  MOD_RES (16), (17), (18), (19): Xaa is A or G or is absent
EVVMENSLQEXXXXXXXXXYYVMPLPELETPVX

SEQ ID NO: 9748 - protein, 40 aa, Artificial Sequence
  Non-cyclic GFR-binding peptide
  MOD_RES (2), (4), (37), (38): Xaa is C or S
  MOD_RES (15), (16), (17), (18), (19): Xaa is A or G
  MOD_RES (20), (21), (22), (23): Xaa is A or G or is absent
SXKXSRVIMEYQKYXXXXXXXXXIFLISIPSLAQPVXXPA

SEQ ID NO: 9749 - protein, 37 aa, Artificial Sequence
  Non-cyclic GFR-binding peptide
  MOD_RES (32), (33): Xaa is C or S
ARVVMNEYQKYIVNSSDDIFLVSIPSLQTPAXXPKPV

SEQ ID NO: 9750 - protein, 33 aa, Artificial Sequence
  Non-cyclic GFR-binding peptide
  MOD_RES (12), (13), (14), (15), (16): Xaa is A or G
  MOD_RES (17), (18), (19), (20): Xaa is A or G or is absent
ARVVMNEYQKYXXXXXXXXXIFLVSIPSLQTPA

SEQ ID NO: 9751 - protein, 39 aa, Artificial Sequence
  Non-cyclic GFR-binding peptide
  MOD_RES (1), (3), (35), (36): Xaa is C or S
XGXARVVMNNSLQEIVNSSDDYYVVPLPELQTPAXXPKP

SEQ ID NO: 9752 - protein, 34 aa, Artificial Sequence
  Non-cyclic GFR-binding peptide
  MOD_RES (33), (34): Xaa is C or S
  MOD_RES (11), (12), (13), (14), (15): Xaa is A or G
  MOD_RES (16), (17), (18), (19): Xaa is A or G or is absent
EVVMDNSLQEXXXXXXXXXYYVMPLPELETPVXX

SEQ ID NO: 9753 - protein, 33 aa, Artificial Sequence
  Non-cyclic GFR-binding peptide
  MOD_RES (2), (2): Xaa is C or S
GXSEVVMDNSLQEVVNNASDYYLITLPELRTPV

SEQ ID NO: 9754 - protein, 36 aa, Artificial Sequence
  Non-cyclic GFR-binding peptide
  MOD_RES (1), (35), (36): Xaa is C or S
  MOD_RES (13), (14), (15), (16), (17): Xaa is A or G
  MOD_RES (18), (19), (20), (21): Xaa is A or G or is absent
XGEVVMDEYQKYXXXXXXXXXIFLMSIPSLETPVXX

SEQ ID NO: 9755 - protein, 41 aa, Artificial Sequence
  Non-cyclic GFR-binding peptide
  MOD_RES (1), (35): Xaa is C or S
  MOD_RES (13), (14), (15), (16), (17): Xaa is A or G
  MOD_RES (18), (19), (20), (21): Xaa is A or G or is absent
XSRVVMNNSLQEXXXXXXXXXYYVVPLPELKTPAXTPKTVH

SEQ ID NO: 9756 - protein, 34 aa, Artificial Sequence
  Non-cyclic GFR-binding peptide
  MOD_RES (31), (32): Xaa is C or S
SRVIMEYQKYVKPKRGVIFLISIPSLAQPVXXPA

SEQ ID NO: 9757 - protein, 42 aa, Artificial Sequence
  Non-cyclic GFR-binding peptide
  MOD_RES (2), (4), (36), (37): Xaa is C or S
RXGXGEVVMDNSLQEVVKENEDYYLMTLPELETPVXXAKPIK

SEQ ID NO: 9758 - protein, 38 aa, Artificial Sequence
  Non-cyclic GFR-binding peptide
  MOD_RES (2), (4), (38): Xaa is C or S
  MOD_RES (16), (17), (18), (19), (20): Xaa is A or G
  MOD_RES (21), (22), (23), (24): Xaa is A or G or is absent
HXGXARVVMNEYQKYXXXXXXXXXIFLVSIPSLQTPAX

SEQ ID NO: 9759 - protein, 39 aa, Artificial Sequence
  Non-cyclic GFR-binding peptide
  MOD_RES (2), (4), (36), (37): Xaa is C or S
RXGXGEVVMENSLQEVVKDYEDYYLMTLPELETPVXXAK

SEQ ID NO: 9760 - protein, 38 aa, Artificial Sequence
  Non-cyclic GFR-binding peptide
  MOD_RES (2), (33), (34): Xaa is C or S
KXSKVVMNSLQEVKPTRGVYYVIPLPELDQPVXXPSAS

SEQ ID NO: 9761 - protein, 38 aa, Artificial Sequence
  Non-cyclic GFR-binding peptide
  MOD_RES (1), (3), (35), (36): Xaa is C or S
XGXSRVVMNNSLQEIVNSSDDYYVVPLPELKTPAXXPK

SEQ ID NO: 9762 - protein, 37 aa, Artificial Sequence
  Non-cyclic GFR-binding peptide
  MOD_RES (1), (35): Xaa is C or S
  MOD_RES (13), (14), (15), (16), (17): Xaa is A or G
  MOD_RES (18), (19), (20), (21): Xaa is A or G or is absent
XSRVVMNEYQKYXXXXXXXXXIFLVSIPSLKTPAXTP

SEQ ID NO: 9763 - protein, 35 aa, Artificial Sequence
  Non-cyclic GFR-binding peptide
  MOD_RES (32), (33): Xaa is C or S
SRVVMNNSLQEIVNSSDDYYVVPLPELKTPAXXPK

SEQ ID NO: 9764 - protein, 34 aa, Artificial Sequence
  Non-cyclic GFR-binding peptide
  MOD_RES (33), (34): Xaa is C or S
  MOD_RES (11), (12), (13), (14), (15): Xaa is A or G
  MOD_RES (16), (17), (18), (19): Xaa is A or G or is absent
RVVMNEYQKYXXXXXXXXXIFLVSIPSLQTPAXX

SEQ ID NO: 9765 - protein, 38 aa, Artificial Sequence
  Non-cyclic GFR-binding peptide
  MOD_RES (2), (36), (37): Xaa is C or S
  MOD_RES (14), (15), (16), (17), (18): Xaa is A or G
  MOD_RES (19), (20), (21), (22): Xaa is A or G or is absent
GXSEVVMDRYKKLXXXXXXXXXFYLISIANLRTPVXXT

SEQ ID NO: 9766 - protein, 40 aa, Artificial Sequence
  Non-cyclic GFR-binding peptide
  MOD_RES (1), (34), (35): Xaa is C or S
  MOD_RES (12), (13), (14), (15), (16): Xaa is A or G
  MOD_RES (17), (18), (19), (20): Xaa is A or G or is absent
XSKVIMNSLQEXXXXXXXXXYYVIPLPELDQSVXXPSASA

SEQ ID NO: 9767 - protein, 34 aa, Artificial Sequence
  Non-cyclic GFR-binding peptide
  MOD_RES (34), (34): Xaa is C or S
  MOD_RES (12), (13), (14), (15), (16): Xaa is A or G
  MOD_RES (17), (18), (19), (20): Xaa is A or G or is absent
ARVVMNEYQKYXXXXXXXXXIFLVSIPSLQTPAX

SEQ ID NO: 9768 - protein, 35 aa, Artificial Sequence
  Non-cyclic GFR-binding peptide
  MOD_RES (2), (34), (35): Xaa is C or S
GXGEVVMEEYQKYVVKDYEDIFLMSIPSLETPVXX

SEQ ID NO: 9769 - protein, 35 aa, Artificial Sequence
  Non-cyclic GFR-binding peptide
  MOD_RES (31), (32): Xaa is C or S
SKVIMNSLQEIKPTKGIYYVIPLPELDQSVXXPSA

SEQ ID NO: 9770 - protein, 37 aa, Artificial Sequence
  Non-cyclic GFR-binding peptide
  MOD_RES (34), (35): Xaa is C or S
  MOD_RES (12), (13), (14), (15), (16): Xaa is A or G
  MOD_RES (17), (18), (19), (20): Xaa is A or G or is absent
SEVVMDNSLQEXXXXXXXXXYYLITLPELRTPVXXTP

SEQ ID NO: 9771 - protein, 37 aa, Artificial Sequence
  Non-cyclic GFR-binding peptide
  MOD_RES (1), (3), (34), (35): Xaa is C or S
XKXSKVVMEYQKYVKPTRGVIFLISIPSLDQPVXXPS

SEQ ID NO: 9772 - protein, 34 aa, Artificial Sequence
  Non-cyclic GFR-binding peptide
  MOD_RES (1), (3): Xaa is C or S
XGXSEVVMDNSLQEVVNNASDYYVIPLPELRTPV

SEQ ID NO: 9773 - protein, 34 aa, Artificial Sequence
  Non-cyclic GFR-binding peptide
  MOD_RES (1), (1): Xaa is C or S
  MOD_RES (13), (14), (15), (16), (17): Xaa is A or G
  MOD_RES (18), (19), (20), (21): Xaa is A or G or is absent
XSEVVMDNSLQEXXXXXXXXXYYLITLPELRTPV

SEQ ID NO: 9774 - protein, 39 aa, Artificial Sequence
  Non-cyclic GFR-binding peptide
  MOD_RES (2), (35), (36): Xaa is C or S
  MOD_RES (13), (14), (15), (16), (17): Xaa is A or G
  MOD_RES (18), (19), (20), (21): Xaa is A or G or is absent
KXSKVVMEYQKYXXXXXXXXXIFLISIPSLDQPVXXPSA

SEQ ID NO: 9775 - protein, 39 aa, Artificial Sequence
  Non-cyclic GFR-binding peptide
  MOD_RES (1), (3), (35), (36): Xaa is C or S
XGXSEVVMDQYNKLVVNNASDLYLISIASLRTPVXXTPP

SEQ ID NO: 9776 - protein, 37 aa, Artificial Sequence
  Non-cyclic GFR-binding peptide
  MOD_RES (2), (4): Xaa is C or S
  MOD_RES (16), (17), (18), (19), (20): Xaa is A or G
  MOD_RES (21), (22), (23), (24): Xaa is A or G or is absent
RXGXSEVVMDNSLQEXXXXXXXXXYYVIPLPELRTPV

SEQ ID NO: 9777 - protein, 40 aa, Artificial Sequence
  Non-cyclic GFR-binding peptide
  MOD_RES (2), (4), (36): Xaa is C or S
HXGXSRVVMNNSLQEIVNSSDDYYVVPLPELKTPAXTPKT

SEQ ID NO: 9778 - protein, 38 aa, Artificial Sequence
  Non-cyclic GFR-binding peptide
  MOD_RES (2), (4), (38): Xaa is C or S
  MOD_RES (16), (17), (18), (19), (20): Xaa is A or G
  MOD_RES (21), (22), (23), (24): Xaa is A or G or is absent
RXGXSEVVMDQYNKLXXXXXXXXXLYLISIASLRTPVX

SEQ ID NO: 9779 - protein, 35 aa, Artificial Sequence
  Non-cyclic GFR-binding peptide
  MOD_RES (32), (33): Xaa is C or S
SEVVMDQYNKLVVNNASDLYLISIASLRTPVXXTP

SEQ ID NO: 9780 - protein, 39 aa, Artificial Sequence
  Non-cyclic GFR-binding peptide
  MOD_RES (1), (3), (35), (36): Xaa is C or S
XGXSRVVMNNSLQEIVNSSDDYYVVPLPELKTPAXXPKP

SEQ ID NO: 9781 - protein, 39 aa, Artificial Sequence
  Non-cyclic GFR-binding peptide
  MOD_RES (2), (34), (35): Xaa is C or S
GXGEVVMDEYQKYVVKENEDIFLMSIPSLETPVXXAKPI

SEQ ID NO: 9782 - protein, 41 aa, Artificial Sequence
  Non-cyclic GFR-binding peptide
  MOD_RES (1), (35), (36): Xaa is C or S
  MOD_RES (13), (14), (15), (16), (17): Xaa is A or G
  MOD_RES (18), (19), (20), (21): Xaa is A or G or is absent
XGEVVMDNSLQEXXXXXXXXXYYVMPLPELETPVXXAKPIK

SEQ ID NO: 9783 - protein, 37 aa, Artificial Sequence
  Non-cyclic GFR-binding peptide
  MOD_RES (1), (3), (36), (37): Xaa is C or S
  MOD_RES (14), (15), (16), (17), (18): Xaa is A or G
  MOD_RES (19), (20), (21), (22): Xaa is A or G or is absent
XKXSKVIMEYQKYXXXXXXXXXIFLISIPSLDQSVXX

SEQ ID NO: 9784 - protein, 37 aa, Artificial Sequence
  Non-cyclic GFR-binding peptide
  MOD_RES (1), (32), (33): Xaa is C or S
XSRVIMNSLQEVKPKRGVYYLITLPELAQPVXXPAAS

SEQ ID NO: 9785 - protein, 42 aa, Artificial Sequence
  Non-cyclic GFR-binding peptide
  MOD_RES (2), (36): Xaa is C or S
  MOD_RES (14), (15), (16), (17), (18): Xaa is A or G
  MOD_RES (19), (20), (21), (22): Xaa is A or G or is absent
GXSRVVMNNSLQEXXXXXXXXXYYVVPLPELKTPAXTPKTVH

SEQ ID NO: 9786 - protein, 41 aa, Artificial Sequence
  Non-cyclic GFR-binding peptide
  MOD_RES (1), (3), (35): Xaa is C or S
XGXSRVVMNNSLQEIVNSSDDYYVVPLPELKTPAXTPKTVH

SEQ ID NO: 9787 - protein, 35 aa, Artificial Sequence
  Non-cyclic GFR-binding peptide
  MOD_RES (31), (32): Xaa is C or S
RVVMNNSLQEIVNSSDDYYVVPLPELQTPAXXPKP

SEQ ID NO: 9788 - protein, 33 aa, Artificial Sequence
  Non-cyclic GFR-binding peptide
  MOD_RES (12), (13), (14), (15), (16): Xaa is A or G
  MOD_RES (17), (18), (19), (20): Xaa is A or G or is absent
GEVVMDNSLQEXXXXXXXXXYYLMTLPELETPV

SEQ ID NO: 9789 - protein, 38 aa, Artificial Sequence
  Non-cyclic GFR-binding peptide
  MOD_RES (2), (34), (35): Xaa is C or S
GXSRVVMNNSLQEIVNSSDDYYLVTLPELKTPAXXPKP

SEQ ID NO: 9790 - protein, 30 aa, Artificial Sequence
  Non-cyclic GFR-binding peptide
RVVMNNSLQEIVNSSDDYYLVTLPELQTPA

SEQ ID NO: 9791 - protein, 38 aa, Artificial Sequence
  Non-cyclic GFR-binding peptide
  MOD_RES (1), (3), (36), (37): Xaa is C or S
  MOD_RES (14), (15), (16), (17), (18): Xaa is A or G
  MOD_RES (19), (20), (21), (22): Xaa is A or G or is absent
XKXSKVVMNSLQEXXXXXXXXXYYVIPLPELDQPVXXP

SEQ ID NO: 9792 - protein, 43 aa, Artificial Sequence
  Non-cyclic GFR-binding peptide
  MOD_RES (2), (4), (38), (39): Xaa is C or S
  MOD_RES (16), (17), (18), (19), (20): Xaa is A or G
  MOD_RES (21), (22), (23), (24): Xaa is A or G or is absent
RXGXGEVVMENSLQEXXXXXXXXXYYVMPLPELETPVXXAKPI

SEQ ID NO: 9793 - protein, 35 aa, Artificial Sequence
  Non-cyclic GFR-binding peptide
  MOD_RES (2), (34), (35): Xaa is C or S
GXSEVVMDNSLQEVVNNASDYYVIPLPELRTPVXX

SEQ ID NO: 9794 - protein, 41 aa, Artificial Sequence
  Non-cyclic GFR-binding peptide
  MOD_RES (2), (4), (38), (39): Xaa is C or S
  MOD_RES (16), (17), (18), (19), (20): Xaa is A or G
  MOD_RES (21), (22), (23), (24): Xaa is A or G or is absent
RXGXSEVVMDRYKKLXXXXXXXXXFYLISIANLRTPVXXTP

SEQ ID NO: 9795 - protein, 41 aa, Artificial Sequence
  Non-cyclic GFR-binding peptide
  MOD_RES (2), (4), (38), (39): Xaa is C or S
  MOD_RES (16), (17), (18), (19), (20): Xaa is A or G
  MOD_RES (21), (22), (23), (24): Xaa is A or G or is absent
RXGXSEVVMDNSLQEXXXXXXXXXYYVIPLPELRTPVXXTP

SEQ ID NO: 9796 - protein, 37 aa, Artificial Sequence
  Non-cyclic GFR-binding peptide
  MOD_RES (32), (33): Xaa is C or S
GEVVMENSLQEVVKDYEDYYVMPLPELETPVXXAKPI

SEQ ID NO: 9797 - protein, 37 aa, Artificial Sequence
  Non-cyclic GFR-binding peptide
  MOD_RES (1), (3), (37): Xaa is C or S
  MOD_RES (15), (16), (17), (18), (19): Xaa is A or G
  MOD_RES (20), (21), (22), (23): Xaa is A or G or is absent
XGXGEVVMENSLQEXXXXXXXXXYYVMPLPELETPVX

SEQ ID NO: 9798 - protein, 31 aa, Artificial Sequence
  Non-cyclic GFR-binding peptide
  MOD_RES (31), (31): Xaa is C or S
EVVMDEYQKYVVKENEDIFLMSIPSLETPVX

SEQ ID NO: 9799 - protein, 38 aa, Artificial Sequence
  Non-cyclic GFR-binding peptide
  MOD_RES (34), (35): Xaa is C or S
  MOD_RES (12), (13), (14), (15), (16): Xaa is A or G
  MOD_RES (17), (18), (19), (20): Xaa is A or G or is absent
SRVVMNNSLQEXXXXXXXXXYYVVPLPELKTPAXXPKP

SEQ ID NO: 9800 - protein, 39 aa, Artificial Sequence
  Non-cyclic GFR-binding peptide
  MOD_RES (1), (3), (37), (38): Xaa is C or S
  MOD_RES (15), (16), (17), (18), (19): Xaa is A or G
  MOD_RES (20), (21), (22), (23): Xaa is A or G or is absent
XGXGEVVMDNSLQEXXXXXXXXXYYLMTLPELETPVXXA

SEQ ID NO: 9801 - protein, 34 aa, Artificial Sequence
  Non-cyclic GFR-binding peptide
  MOD_RES (1), (32), (33): Xaa is C or S
XSKVVMEYQKYVKPTRGVIFLISIPSLDQPVXXP

SEQ ID NO: 9802 - protein, 41 aa, Artificial Sequence
  Non-cyclic GFR-binding peptide
  MOD_RES (2), (36), (37): Xaa is C or S
  MOD_RES (14), (15), (16), (17), (18): Xaa is A or G
  MOD_RES (19), (20), (21), (22): Xaa is A or G or is absent
GXSRVVMNNSLQEXXXXXXXXXYYVVPLPELKTPAXXPKPV

SEQ ID NO: 9803 - protein, 32 aa, Artificial Sequence
  Non-cyclic GFR-binding peptide
  MOD_RES (32), (32): Xaa is C or S
GEVVMEEYQKYVVKDYEDIFLMSIPSLETPVX

SEQ ID NO: 9804 - protein, 35 aa, Artificial Sequence
  Non-cyclic GFR-binding peptide
  MOD_RES (32), (33): Xaa is C or S
SEVVMDRYKKLVVNNASDFYLISIANLRTPVXXTP

SEQ ID NO: 9805 - protein, 39 aa, Artificial Sequence
  Non-cyclic GFR-binding peptide
  MOD_RES (2), (4), (36): Xaa is C or S
HXGXSRVVMNEYQKYIVNSSDDIFLVSIPSLKTPAXTPK

SEQ ID NO: 9806 - protein, 35 aa, Artificial Sequence
  Non-cyclic GFR-binding peptide
  MOD_RES (33), (34): Xaa is C or S
  MOD_RES (11), (12), (13), (14), (15): Xaa is A or G
  MOD_RES (16), (17), (18), (19): Xaa is A or G or is absent
SKVVMEYQKYXXXXXXXXXIFLISIPSLDQPVXXP

SEQ ID NO: 9807 - protein, 34 aa, Artificial Sequence
  Non-cyclic GFR-binding peptide
  MOD_RES (2), (4): Xaa is C or S
SXKXSKVIMEYQKYIKPTKGIIFLISIPSLDQSV

SEQ ID NO: 9808 - protein, 35 aa, Artificial Sequence
  Non-cyclic GFR-binding peptide
  MOD_RES (1), (34), (35): Xaa is C or S
  MOD_RES (12), (13), (14), (15), (16): Xaa is A or G
  MOD_RES (17), (18), (19), (20): Xaa is A or G or is absent
XSKVIMNSLQEXXXXXXXXXYYVIPLPELDQSVXX

SEQ ID NO: 9809 - protein, 38 aa, Artificial Sequence
  Non-cyclic GFR-binding peptide
  MOD_RES (1), (33), (34): Xaa is C or S
XGEVVMDEYQKYVVKENEDIFLMSIPSLETPVXXAKPI

SEQ ID NO: 9810 - protein, 40 aa, Artificial Sequence
  Non-cyclic GFR-binding peptide
  MOD_RES (2), (4), (36), (37): Xaa is C or S
RXGXGEVVMENSLQEVVKDYEDYYVMPLPELETPVXXAKP

SEQ ID NO: 9811 - protein, 33 aa, Artificial Sequence
  Non-cyclic GFR-binding peptide
  MOD_RES (32), (33): Xaa is C or S
GEVVMENSLQEVVKDYEDYYVMPLPELETPVXX

SEQ ID NO: 9812 - protein, 38 aa, Artificial Sequence
  Non-cyclic GFR-binding peptide
  MOD_RES (1), (33): Xaa is C or S
XSRVVMNEYQKYIVNSSDDIFLVSIPSLKTPAXTPKTV

SEQ ID NO: 9813 - protein, 38 aa, Artificial Sequence
  Non-cyclic GFR-binding peptide
  MOD_RES (1), (3), (35), (36): Xaa is C or S
XGXSEVVMDQYNKLVVNNASDLYLISIASLRTPVXXTP

SEQ ID NO: 9814 - protein, 36 aa, Artificial Sequence
  Non-cyclic GFR-binding peptide
  MOD_RES (2), (36): Xaa is C or S
  MOD_RES (14), (15), (16), (17), (18): Xaa is A or G
  MOD_RES (19), (20), (21), (22): Xaa is A or G or is absent
GXGEVVMENSLQEXXXXXXXXXYYVMPLPELETPVX

SEQ ID NO: 9815 - protein, 37 aa, Artificial Sequence
  Non-cyclic GFR-binding peptide
  MOD_RES (1), (35), (36): Xaa is C or S
  MOD_RES (13), (14), (15), (16), (17): Xaa is A or G
  MOD_RES (18), (19), (20), (21): Xaa is A or G or is absent
XARVVMNNSLQEXXXXXXXXXYYLVTLPELQTPAXXP

SEQ ID NO: 9816 - protein, 41 aa, Artificial Sequence
  Non-cyclic GFR-binding peptide
  MOD_RES (1), (3), (37), (38): Xaa is C or S
  MOD_RES (15), (16), (17), (18), (19): Xaa is A or G
  MOD_RES (20), (21), (22), (23): Xaa is A or G or is absent
XGXGEVVMENSLQEXXXXXXXXXYYLMTLPELETPVXXAKP

SEQ ID NO: 9817 - protein, 37 aa, Artificial Sequence
  Non-cyclic GFR-binding peptide
  MOD_RES (2), (4): Xaa is C or S
  MOD_RES (16), (17), (18), (19), (20): Xaa is A or G
  MOD_RES (21), (22), (23), (24): Xaa is A or G or is absent
RXGXSEVVMDRYKKLXXXXXXXXXFYLISIANLRTPV

SEQ ID NO: 9818 - protein, 35 aa, Artificial Sequence
  Non-cyclic GFR-binding peptide
  MOD_RES (1), (35): Xaa is C or S
  MOD_RES (13), (14), (15), (16), (17): Xaa is A or G
  MOD_RES (18), (19), (20), (21): Xaa is A or G or is absent
XSEVVMDNSLQEXXXXXXXXXYYVIPLPELRTPVX

SEQ ID NO: 9819 - protein, 39 aa, Artificial Sequence
  Non-cyclic GFR-binding peptide
  MOD_RES (2), (34): Xaa is C or S
GXSRVVMNNSLQEIVNSSDDYYLVTLPELKTPAXTPKTV

SEQ ID NO: 9820 - protein, 33 aa, Artificial Sequence
  Non-cyclic GFR-binding peptide
  MOD_RES (31), (31): Xaa is C or S
RVVMNNSLQEIVNSSDDYYLVTLPELKTPAXTP

SEQ ID NO: 9821 - protein, 36 aa, Artificial Sequence
  Non-cyclic GFR-binding peptide
  MOD_RES (1), (33), (34): Xaa is C or S
XSRVVMNEYQKYIVNSSDDIFLVSIPSLKTPAXXPK

SEQ ID NO: 9822 - protein, 44 aa, Artificial Sequence
  Non-cyclic GFR-binding peptide
  MOD_RES (2), (4), (38), (39): Xaa is C or S
  MOD_RES (16), (17), (18), (19), (20): Xaa is A or G
  MOD_RES (21), (22), (23), (24): Xaa is A or G or is absent
HXGXSRVVMNNSLQEXXXXXXXXXYYLVTLPELKTPAXXPKPVY

SEQ ID NO: 9823 - protein, 41 aa, Artificial Sequence
  Non-cyclic GFR-binding peptide
  MOD_RES (1), (35), (36): Xaa is C or S
  MOD_RES (13), (14), (15), (16), (17): Xaa is A or G
  MOD_RES (18), (19), (20), (21): Xaa is A or G or is absent
XSEVVMDRYKKLXXXXXXXXXFYLISIANLRTPVXXTPPTS

SEQ ID NO: 9824 - protein, 41 aa, Artificial Sequence
  Non-cyclic GFR-binding peptide
  MOD_RES (2), (4), (38), (39): Xaa is C or S
  MOD_RES (16), (17), (18), (19), (20): Xaa is A or G
  MOD_RES (21), (22), (23), (24): Xaa is A or G or is absent
RXGXGEVVMEEYQKYXXXXXXXXXIFLMSIPSLETPVXXAK

SEQ ID NO: 9825 - protein, 39 aa, Artificial Sequence
  Non-cyclic GFR-binding peptide
  MOD_RES (1), (3), (34), (35): Xaa is C or S
XKXSRVIMNSLQEVKPKRGVYYLITLPELAQPVXXPAAS

SEQ ID NO: 9826 - protein, 34 aa, Artificial Sequence
  Non-cyclic GFR-binding peptide
  MOD_RES (1), (33), (34): Xaa is C or S
XSEVVMDQYNKLVVNNASDLYLISIASLRTPVXX

SEQ ID NO: 9827 - protein, 34 aa, Artificial Sequence
  Non-cyclic GFR-binding peptide
  MOD_RES (34), (34): Xaa is C or S
  MOD_RES (12), (13), (14), (15), (16): Xaa is A or G
  MOD_RES (17), (18), (19), (20): Xaa is A or G or is absent
ARVVMNNSLQEXXXXXXXXXYYLVTLPELQTPAX

SEQ ID NO: 9828 - protein, 42 aa, Artificial Sequence
  Non-cyclic GFR-binding peptide
  MOD_RES (1), (3), (36), (37): Xaa is C or S
  MOD_RES (14), (15), (16), (17), (18): Xaa is A or G
  MOD_RES (19), (20), (21), (22): Xaa is A or G or is absent
XKXSRVIMEYQKYXXXXXXXXXIFLISIPSLAQPVXXPAASA

SEQ ID NO: 9829 - protein, 40 aa, Artificial Sequence
  Non-cyclic GFR-binding peptide
  MOD_RES (1), (34), (35): Xaa is C or S
  MOD_RES (12), (13), (14), (15), (16): Xaa is A or G
  MOD_RES (17), (18), (19), (20): Xaa is A or G or is absent
XSRVIMNSLQEXXXXXXXXXYYLITLPELAQPVXXPAASA

SEQ ID NO: 9830 - protein, 38 aa, Artificial Sequence
  Non-cyclic GFR-binding peptide
  MOD_RES (2), (4), (38): Xaa is C or S
  MOD_RES (16), (17), (18), (19), (20): Xaa is A or G
  MOD_RES (21), (22), (23), (24): Xaa is A or G or is absent
RXGXGEVVMENSLQEXXXXXXXXXYYVMPLPELETPVX

SEQ ID NO: 9831 - protein, 42 aa, Artificial Sequence
  Non-cyclic GFR-binding peptide
  MOD_RES (2), (4), (38), (39): Xaa is C or S
  MOD_RES (16), (17), (18), (19), (20): Xaa is A or G
  MOD_RES (21), (22), (23), (24): Xaa is A or G or is absent
RXGXGEVVMENSLQEXXXXXXXXXYYLMTLPELETPVXXAKP

SEQ ID NO: 9832 - protein, 37 aa, Artificial Sequence
  Non-cyclic GFR-binding peptide
  MOD_RES (2), (36): Xaa is C or S
  MOD_RES (14), (15), (16), (17), (18): Xaa is A or G
  MOD_RES (19), (20), (21), (22): Xaa is A or G or is absent
GXSRVVMNEYQKYXXXXXXXXXIFLVSIPSLKTPAXT

SEQ ID NO: 9833 - protein, 35 aa, Artificial Sequence
  Non-cyclic GFR-binding peptide
  MOD_RES (2), (2): Xaa is C or S
  MOD_RES (14), (15), (16), (17), (18): Xaa is A or G
  MOD_RES (19), (20), (21), (22): Xaa is A or G or is absent
GXSRVVMNEYQKYXXXXXXXXXIFLVSIPSLKTPA

SEQ ID NO: 9834 - protein, 41 aa, Artificial Sequence
  Non-cyclic GFR-binding peptide
  MOD_RES (2), (36), (37): Xaa is C or S
  MOD_RES (14), (15), (16), (17), (18): Xaa is A or G
  MOD_RES (19), (20), (21), (22): Xaa is A or G or is absent
GXARVVMNEYQKYXXXXXXXXXIFLVSIPSLQTPAXXPKPV

SEQ ID NO: 9835 - protein, 39 aa, Artificial Sequence
  Non-cyclic GFR-binding peptide
  MOD_RES (1), (3), (35), (36): Xaa is C or S
XGXSEVVMDNSLQEVVNNASDYYVIPLPELRTPVXXTPP

SEQ ID NO: 9836 - protein, 40 aa, Artificial Sequence
  Non-cyclic GFR-binding peptide
  MOD_RES (2), (35), (36): Xaa is C or S
  MOD_RES (13), (14), (15), (16), (17): Xaa is A or G
  MOD_RES (18), (19), (20), (21): Xaa is A or G or is absent
KXSKVIMNSLQEXXXXXXXXXYYVIPLPELDQSVXXPSAS

SEQ ID NO: 9837 - protein, 38 aa, Artificial Sequence
  Non-cyclic GFR-binding peptide
  MOD_RES (1), (35), (36): Xaa is C or S
  MOD_RES (13), (14), (15), (16), (17): Xaa is A or G
  MOD_RES (18), (19), (20), (21): Xaa is A or G or is absent
XGEVVMDNSLQEXXXXXXXXXYYLMTLPELETPVXXAK

SEQ ID NO: 9838 - protein, 34 aa, Artificial Sequence
  Non-cyclic GFR-binding peptide
  MOD_RES (32), (33): Xaa is C or S
SEVVMDNSLQEVVNNASDYYLITLPELRTPVXXT

SEQ ID NO: 9839 - protein, 39 aa, Artificial Sequence
  Non-cyclic GFR-binding peptide
  MOD_RES (34), (34): Xaa is C or S
  MOD_RES (12), (13), (14), (15), (16): Xaa is A or G
  MOD_RES (17), (18), (19), (20): Xaa is A or G or is absent
SRVVMNNSLQEXXXXXXXXXYYLVTLPELKTPAXTPKTV

SEQ ID NO: 9840 - protein, 34 aa, Artificial Sequence
  Non-cyclic GFR-binding peptide
  MOD_RES (31), (32): Xaa is C or S
RVVMNNSLQEIVNSSDDYYLVTLPELKTPAXXPK

SEQ ID NO: 9841 - protein, 31 aa, Artificial Sequence
  Non-cyclic GFR-binding peptide
  MOD_RES (31), (31): Xaa is C or S
RVVMNNSLQEIVNSSDDYYLVTLPELKTPAX

SEQ ID NO: 9842 - protein, 33 aa, Artificial Sequence
  Non-cyclic GFR-binding peptide
  MOD_RES (32), (33): Xaa is C or S
GEVVMEEYQKYVVKDYEDIFLMSIPSLETPVXX

SEQ ID NO: 9843 - protein, 34 aa, Artificial Sequence
  Non-cyclic GFR-binding peptide
  MOD_RES (1), (3): Xaa is C or S
XGXARVVMNNSLQEIVNSSDDYYLVTLPELQTPA

SEQ ID NO: 9844 - protein, 38 aa, Artificial Sequence
  Non-cyclic GFR-binding peptide
  MOD_RES (1), (3), (35), (36): Xaa is C or S
XGXSEVVMDNSLQEVVNNASDYYVIPLPELRTPVXXTP

SEQ ID NO: 9845 - protein, 38 aa, Artificial Sequence
  Non-cyclic GFR-binding peptide
  MOD_RES (2), (36), (37): Xaa is C or S
  MOD_RES (14), (15), (16), (17), (18): Xaa is A or G
  MOD_RES (19), (20), (21), (22): Xaa is A or G or is absent
GXGEVVMDEYQKYXXXXXXXXXIFLMSIPSLETPVXXA

SEQ ID NO: 9846 - protein, 38 aa, Artificial Sequence
  Non-cyclic GFR-binding peptide
  MOD_RES (2), (4), (38): Xaa is C or S
  MOD_RES (16), (17), (18), (19), (20): Xaa is A or G
  MOD_RES (21), (22), (23), (24): Xaa is A or G or is absent
RXGXGEVVMDNSLQEXXXXXXXXXYYLMTLPELETPVX

SEQ ID NO: 9847 - protein, 34 aa, Artificial Sequence
  Non-cyclic GFR-binding peptide
  MOD_RES (32), (33): Xaa is C or S
SRVVMNEYQKYIVNSSDDIFLVSIPSLKTPAXXP

SEQ ID NO: 9848 - protein, 40 aa, Artificial Sequence
  Non-cyclic GFR-binding peptide
  MOD_RES (2), (4), (36), (37): Xaa is C or S
RXGXGEVVMDEYQKYVVKENEDIFLMSIPSLETPVXXAKP

SEQ ID NO: 9849 - protein, 40 aa, Artificial Sequence
  Non-cyclic GFR-binding peptide
  MOD_RES (2), (36), (37): Xaa is C or S
  MOD_RES (14), (15), (16), (17), (18): Xaa is A or G
  MOD_RES (19), (20), (21), (22): Xaa is A or G or is absent
GXGEVVMEEYQKYXXXXXXXXXIFLMSIPSLETPVXXAKP

SEQ ID NO: 9850 - protein, 43 aa, Artificial Sequence
  Non-cyclic GFR-binding peptide
  MOD_RES (2), (4), (38), (39): Xaa is C or S
  MOD_RES (16), (17), (18), (19), (20): Xaa is A or G
  MOD_RES (21), (22), (23), (24): Xaa is A or G or is absent
HXGXARVVMNEYQKYXXXXXXXXXIFLVSIPSLQTPAXXPKPV

SEQ ID NO: 9851 - protein, 38 aa, Artificial Sequence
  Non-cyclic GFR-binding peptide
  MOD_RES (2), (34), (35): Xaa is C or S
GXGEVVMDNSLQEVVKENEDYYLMTLPELETPVXXAKP

SEQ ID NO: 9852 - protein, 37 aa, Artificial Sequence
  Non-cyclic GFR-binding peptide
  MOD_RES (1), (3), (34), (35): Xaa is C or S
XKXSKVIMEYQKYIKPTKGIIFLISIPSLDQSVXXPS

SEQ ID NO: 9853 - protein, 34 aa, Artificial Sequence
  Non-cyclic GFR-binding peptide
  MOD_RES (2), (33), (34): Xaa is C or S
KXSKVVMNSLQEVKPTRGVYYVIPLPELDQPVXX

SEQ ID NO: 9854 - protein, 39 aa, Artificial Sequence
  Non-cyclic GFR-binding peptide
  MOD_RES (2), (4), (36), (37): Xaa is C or S
RXGXSEVVMDRYKKLVVNNASDFYLISIANLRTPVXXTP

SEQ ID NO: 9855 - protein, 39 aa, Artificial Sequence
  Non-cyclic GFR-binding peptide
  MOD_RES (2), (36), (37): Xaa is C or S
  MOD_RES (14), (15), (16), (17), (18): Xaa is A or G
  MOD_RES (19), (20), (21), (22): Xaa is A or G or is absent
GXGEVVMEEYQKYXXXXXXXXXIFLMSIPSLETPVXXAK

SEQ ID NO: 9856 - protein, 34 aa, Artificial Sequence
  Non-cyclic GFR-binding peptide
  MOD_RES (33), (34): Xaa is C or S
  MOD_RES (11), (12), (13), (14), (15): Xaa is A or G
  MOD_RES (16), (17), (18), (19): Xaa is A or G or is absent
EVVMDQYNKLXXXXXXXXXLYLISIASLRTPVXX

SEQ ID NO: 9857 - protein, 35 aa, Artificial Sequence
  Non-cyclic GFR-binding peptide
  MOD_RES (1), (32), (33): Xaa is C or S
XSKVVMNSLQEVKPTRGVYYVIPLPELDQPVXXPS

SEQ ID NO: 9858 - protein, 37 aa, Artificial Sequence
  Non-cyclic GFR-binding peptide
  MOD_RES (33), (33): Xaa is C or S
  MOD_RES (11), (12), (13), (14), (15): Xaa is A or G
  MOD_RES (16), (17), (18), (19): Xaa is A or G or is absent
RVVMNEYQKYXXXXXXXXXIFLVSIPSLKTPAXTPKT

SEQ ID NO: 9859 - protein, 41 aa, Artificial Sequence
  Non-cyclic GFR-binding peptide
  MOD_RES (2), (36), (37): Xaa is C or S
  MOD_RES (14), (15), (16), (17), (18): Xaa is A or G
  MOD_RES (19), (20), (21), (22): Xaa is A or G or is absent
GXGEVVMDEYQKYXXXXXXXXXIFLMSIPSLETPVXXAKPI

SEQ ID NO: 9860 - protein, 42 aa, Artificial Sequence
  Non-cyclic GFR-binding peptide
  MOD_RES (1), (3), (37), (38): Xaa is C or S
  MOD_RES (15), (16), (17), (18), (19): Xaa is A or G
  MOD_RES (20), (21), (22), (23): Xaa is A or G or is absent
XGXSEVVMDNSLQEXXXXXXXXXYYVIPLPELRTPVXXTPPT

SEQ ID NO: 9861 - protein, 34 aa, Artificial Sequence
  Non-cyclic GFR-binding peptide
  MOD_RES (2), (34): Xaa is C or S
GXSRVVMNNSLQEIVNSSDDYYVVPLPELKTPAX

SEQ ID NO: 9862 - protein, 35 aa, Artificial Sequence
  Non-cyclic GFR-binding peptide
  MOD_RES (31), (32): Xaa is C or S
RVVMNNSLQEIVNSSDDYYLVTLPELKTPAXXPKP

SEQ ID NO: 9863 - protein, 36 aa, Artificial Sequence
  Non-cyclic GFR-binding peptide
  MOD_RES (1), (3), (35), (36): Xaa is C or S
XGXGEVVMENSLQEVVKDYEDYYVMPLPELETPVXX

SEQ ID NO: 9864 - protein, 39 aa, Artificial Sequence
  Non-cyclic GFR-binding peptide
  MOD_RES (2), (35), (36): Xaa is C or S
  MOD_RES (13), (14), (15), (16), (17): Xaa is A or G
  MOD_RES (18), (19), (20), (21): Xaa is A or G or is absent
KXSKVIMNSLQEXXXXXXXXXYYVIPLPELDQSVXXPSA

SEQ ID NO: 9865 - protein, 41 aa, Artificial Sequence
  Non-cyclic GFR-binding peptide
  MOD_RES (2), (36): Xaa is C or S
  MOD_RES (14), (15), (16), (17), (18): Xaa is A or G
  MOD_RES (19), (20), (21), (22): Xaa is A or G or is absent
GXSRVVMNEYQKYXXXXXXXXXIFLVSIPSLKTPAXTPKTV

SEQ ID NO: 9866 - protein, 38 aa, Artificial Sequence
  Non-cyclic GFR-binding peptide
  MOD_RES (2), (4), (36), (37): Xaa is C or S
RXGXSEVVMDRYKKLVVNNASDFYLISIANLRTPVXXT

SEQ ID NO: 9867 - protein, 42 aa, Artificial Sequence
  Non-cyclic GFR-binding peptide
  MOD_RES (2), (36), (37): Xaa is C or S
  MOD_RES (14), (15), (16), (17), (18): Xaa is A or G
  MOD_RES (19), (20), (21), (22): Xaa is A or G or is absent
GXSRVVMNNSLQEXXXXXXXXXYYVVPLPELKTPAXXPKPVY

SEQ ID NO: 9868 - protein, 33 aa, Artificial Sequence
  Non-cyclic GFR-binding peptide
  MOD_RES (1), (32), (33): Xaa is C or S
XSKVVMEYQKYVKPTRGVIFLISIPSLDQPVXX

SEQ ID NO: 9869 - protein, 37 aa, Artificial Sequence
  Non-cyclic GFR-binding peptide
  MOD_RES (33), (34): Xaa is C or S
  MOD_RES (11), (12), (13), (14), (15): Xaa is A or G
  MOD_RES (16), (17), (18), (19): Xaa is A or G or is absent
SRVIMNSLQEXXXXXXXXXYYLITLPELAQPVXXPAA

SEQ ID NO: 9870 - protein, 43 aa, Artificial Sequence
  Non-cyclic GFR-binding peptide
  MOD_RES (2), (4), (37), (38): Xaa is C or S
  MOD_RES (15), (16), (17), (18), (19): Xaa is A or G
  MOD_RES (20), (21), (22), (23): Xaa is A or G or is absent
SXKXSKVVMEYQKYXXXXXXXXXIFLISIPSLDQPVXXPSASA

SEQ ID NO: 9871 - protein, 36 aa, Artificial Sequence
  Non-cyclic GFR-binding peptide
  MOD_RES (34), (35): Xaa is C or S
  MOD_RES (12), (13), (14), (15), (16): Xaa is A or G
  MOD_RES (17), (18), (19), (20): Xaa is A or G or is absent
SEVVMDQYNKLXXXXXXXXXLYLISIASLRTPVXXT

SEQ ID NO: 9872 - protein, 44 aa, Artificial Sequence
  Non-cyclic GFR-binding peptide
  MOD_RES (2), (4), (38), (39): Xaa is C or S
  MOD_RES (16), (17), (18), (19), (20): Xaa is A or G
  MOD_RES (21), (22), (23), (24): Xaa is A or G or is absent
RXGXSEVVMDQYNKLXXXXXXXXXLYLISIASLRTPVXXTPPTS

SEQ ID NO: 9873 - protein, 37 aa, Artificial Sequence
  Non-cyclic GFR-binding peptide
  MOD_RES (33), (34): Xaa is C or S
  MOD_RES (11), (12), (13), (14), (15): Xaa is A or G
  MOD_RES (16), (17), (18), (19): Xaa is A or G or is absent
RVVMNNSLQEXXXXXXXXXYYVVPLPELQTPAXXPKP

SEQ ID NO: 9874 - protein, 38 aa, Artificial Sequence
  Non-cyclic GFR-binding peptide
  MOD_RES (1), (35), (36): Xaa is C or S
  MOD_RES (13), (14), (15), (16), (17): Xaa is A or G
  MOD_RES (18), (19), (20), (21): Xaa is A or G or is absent
XSRVVMNNSLQEXXXXXXXXXYYLVTLPELKTPAXXPK

SEQ ID NO: 9875 - protein, 35 aa, Artificial Sequence
  Non-cyclic GFR-binding peptide
  MOD_RES (2), (34): Xaa is C or S
GXSRVVMNEYQKYIVNSSDDIFLVSIPSLKTPAXT

SEQ ID NO: 9876 - protein, 38 aa, Artificial Sequence
  Non-cyclic GFR-binding peptide
  MOD_RES (2), (4), (37), (38): Xaa is C or S
  MOD_RES (15), (16), (17), (18), (19): Xaa is A or G
  MOD_RES (20), (21), (22), (23): Xaa is A or G or is absent
SXKXSRVIMEYQKYXXXXXXXXXIFLISIPSLAQPVXX

SEQ ID NO: 9877 - protein, 37 aa, Artificial Sequence
  Non-cyclic GFR-binding peptide
  MOD_RES (33), (34): Xaa is C or S
  MOD_RES (11), (12), (13), (14), (15): Xaa is A or G
  MOD_RES (16), (17), (18), (19): Xaa is A or G or is absent
EVVMEEYQKYXXXXXXXXXIFLMSIPSLETPVXXAKP

SEQ ID NO: 9878 - protein, 35 aa, Artificial Sequence
  Non-cyclic GFR-binding peptide
  MOD_RES (32), (33): Xaa is C or S
GEVVMDNSLQEVVKENEDYYVMPLPELETPVXXAK

SEQ ID NO: 9879 - protein, 34 aa, Artificial Sequence
  Non-cyclic GFR-binding peptide
  MOD_RES (33), (33): Xaa is C or S
  MOD_RES (11), (12), (13), (14), (15): Xaa is A or G
  MOD_RES (16), (17), (18), (19): Xaa is A or G or is absent
RVVMNEYQKYXXXXXXXXXIFLVSIPSLKTPAXT

SEQ ID NO: 9880 - protein, 40 aa, Artificial Sequence
  Non-cyclic GFR-binding peptide
  MOD_RES (2), (4), (35), (36): Xaa is C or S
SXKXSRVIMNSLQEVKPKRGVYYLITLPELAQPVXXPAAS

SEQ ID NO: 9881 - protein, 41 aa, Artificial Sequence
  Non-cyclic GFR-binding peptide
  MOD_RES (1), (3), (37), (38): Xaa is C or S
  MOD_RES (15), (16), (17), (18), (19): Xaa is A or G
  MOD_RES (20), (21), (22), (23): Xaa is A or G or is absent
XGXSRVVMNEYQKYXXXXXXXXXIFLVSIPSLKTPAXXPKP

SEQ ID NO: 9882 - protein, 36 aa, Artificial Sequence
  Non-cyclic GFR-binding peptide
  MOD_RES (1), (34), (35): Xaa is C or S
  MOD_RES (12), (13), (14), (15), (16): Xaa is A or G
  MOD_RES (17), (18), (19), (20): Xaa is A or G or is absent
XSKVVMNSLQEXXXXXXXXXYYVIPLPELDQPVXXP

SEQ ID NO: 9883 - protein, 39 aa, Artificial Sequence
  Non-cyclic GFR-binding peptide
  MOD_RES (33), (34): Xaa is C or S
  MOD_RES (11), (12), (13), (14), (15): Xaa is A or G
  MOD_RES (16), (17), (18), (19): Xaa is A or G or is absent
SKVVMEYQKYXXXXXXXXXIFLISIPSLDQPVXXPSASA

SEQ ID NO: 9884 - protein, 38 aa, Artificial Sequence
  Non-cyclic GFR-binding peptide
  MOD_RES (2), (34), (35): Xaa is C or S
GXGEVVMDEYQKYVVKENEDIFLMSIPSLETPVXXAKP

SEQ ID NO: 9885 - protein, 33 aa, Artificial Sequence
  Non-cyclic GFR-binding peptide
  MOD_RES (33), (33): Xaa is C or S
  MOD_RES (11), (12), (13), (14), (15): Xaa is A or G
  MOD_RES (16), (17), (18), (19): Xaa is A or G or is absent
EVVMENSLQEXXXXXXXXXYYLMTLPELETPVX

SEQ ID NO: 9886 - protein, 33 aa, Artificial Sequence
  Non-cyclic GFR-binding peptide
  MOD_RES (1), (33): Xaa is C or S
XSEVVMDQYNKLVVNNASDLYLISIASLRTPVX

SEQ ID NO: 9887 - protein, 38 aa, Artificial Sequence
  Non-cyclic GFR-binding peptide
  MOD_RES (2), (36): Xaa is C or S
  MOD_RES (14), (15), (16), (17), (18): Xaa is A or G
  MOD_RES (19), (20), (21), (22): Xaa is A or G or is absent
GXSRVVMNEYQKYXXXXXXXXXIFLVSIPSLKTPAXTP

SEQ ID NO: 9888 - protein, 34 aa, Artificial Sequence
  Non-cyclic GFR-binding peptide
  MOD_RES (33), (34): Xaa is C or S
  MOD_RES (11), (12), (13), (14), (15): Xaa is A or G
  MOD_RES (16), (17), (18), (19): Xaa is A or G or is absent
EVVMDNSLQEXXXXXXXXXYYLMTLPELETPVXX

SEQ ID NO: 9889 - protein, 41 aa, Artificial Sequence
  Non-cyclic GFR-binding peptide
  MOD_RES (2), (4), (36), (37): Xaa is C or S
HXGXSRVVMNNSLQEIVNSSDDYYVVPLPELKTPAXXPKPV

SEQ ID NO: 9890 - protein, 36 aa, Artificial Sequence
  Non-cyclic GFR-binding peptide
  MOD_RES (2), (35), (36): Xaa is C or S
  MOD_RES (13), (14), (15), (16), (17): Xaa is A or G
  MOD_RES (18), (19), (20), (21): Xaa is A or G or is absent
KXSRVIMNSLQEXXXXXXXXXYYLITLPELAQPVXX

SEQ ID NO: 9891 - protein, 40 aa, Artificial Sequence
  Non-cyclic GFR-binding peptide
  MOD_RES (1), (3), (37), (38): Xaa is C or S
  MOD_RES (15), (16), (17), (18), (19): Xaa is A or G
  MOD_RES (20), (21), (22), (23): Xaa is A or G or is absent
XGXARVVMNNSLQEXXXXXXXXXYYLVTLPELQTPAXXPK

SEQ ID NO: 9892 - protein, 39 aa, Artificial Sequence
  Non-cyclic GFR-binding peptide
  MOD_RES (2), (34), (35): Xaa is C or S
GXGEVVMENSLQEVVKDYEDYYVMPLPELETPVXXAKPI

SEQ ID NO: 9893 - protein, 32 aa, Artificial Sequence
  Non-cyclic GFR-binding peptide
  MOD_RES (1), (1): Xaa is C or S
XSEVVMDQYNKLVVNNASDLYLISIASLRTPV

SEQ ID NO: 9894 - protein, 43 aa, Artificial Sequence
  Non-cyclic GFR-binding peptide
  MOD_RES (1), (3), (37), (38): Xaa is C or S
  MOD_RES (15), (16), (17), (18), (19): Xaa is A or G
  MOD_RES (20), (21), (22), (23): Xaa is A or G or is absent
XGXGEVVMENSLQEXXXXXXXXXYYLMTLPELETPVXXAKPIS

SEQ ID NO: 9895 - protein, 39 aa, Artificial Sequence
  Non-cyclic GFR-binding peptide
  MOD_RES (34), (34): Xaa is C or S
  MOD_RES (12), (13), (14), (15), (16): Xaa is A or G
  MOD_RES (17), (18), (19), (20): Xaa is A or G or is absent
SRVVMNNSLQEXXXXXXXXXYYVVPLPELKTPAXTPKTV

SEQ ID NO: 9896 - protein, 38 aa, Artificial Sequence
  Non-cyclic GFR-binding peptide
  MOD_RES (2), (36), (37): Xaa is C or S
  MOD_RES (14), (15), (16), (17), (18): Xaa is A or G
  MOD_RES (19), (20), (21), (22): Xaa is A or G or is absent
GXSRVVMNNSLQEXXXXXXXXXYYVVPLPELKTPAXXP

SEQ ID NO: 9897 - protein, 44 aa, Artificial Sequence
  Non-cyclic GFR-binding peptide
  MOD_RES (2), (4), (38), (39): Xaa is C or S
  MOD_RES (16), (17), (18), (19), (20): Xaa is A or G
  MOD_RES (21), (22), (23), (24): Xaa is A or G or is absent
RXGXGEVVMENSLQEXXXXXXXXXYYLMTLPELETPVXXAKPIS

SEQ ID NO: 9898 - protein, 34 aa, Artificial Sequence
  Non-cyclic GFR-binding peptide
  MOD_RES (32), (33): Xaa is C or S
GEVVMDNSLQEVVKENEDYYLMTLPELETPVXXA

SEQ ID NO: 9899 - protein, 37 aa, Artificial Sequence
  Non-cyclic GFR-binding peptide
  MOD_RES (1), (33), (34): Xaa is C or S
XSRVVMNEYQKYIVNSSDDIFLVSIPSLKTPAXXPKP

SEQ ID NO: 9900 - protein, 32 aa, Artificial Sequence
  Non-cyclic GFR-binding peptide
  MOD_RES (11), (12), (13), (14), (15): Xaa is A or G
  MOD_RES (16), (17), (18), (19): Xaa is A or G or is absent
SRVIMNSLQEXXXXXXXXXYYLITLPELAQPV

SEQ ID NO: 9901 - protein, 40 aa, Artificial Sequence
  Non-cyclic GFR-binding peptide
  MOD_RES (1), (3), (37): Xaa is C or S
  MOD_RES (15), (16), (17), (18), (19): Xaa is A or G
  MOD_RES (20), (21), (22), (23): Xaa is A or G or is absent
XGXSRVVMNEYQKYXXXXXXXXXIFLVSIPSLKTPAXTPK

SEQ ID NO: 9902 - protein, 37 aa, Artificial Sequence
  Non-cyclic GFR-binding peptide
  MOD_RES (33), (34): Xaa is C or S
  MOD_RES (11), (12), (13), (14), (15): Xaa is A or G
  MOD_RES (16), (17), (18), (19): Xaa is A or G or is absent
RVVMNNSLQEXXXXXXXXXYYLVTLPELQTPAXXPKP

SEQ ID NO: 9903 - protein, 34 aa, Artificial Sequence
  Non-cyclic GFR-binding peptide
  MOD_RES (34), (34): Xaa is C or S
  MOD_RES (12), (13), (14), (15), (16): Xaa is A or G
  MOD_RES (17), (18), (19), (20): Xaa is A or G or is absent
GEVVMDEYQKYXXXXXXXXXIFLMSIPSLETPVX

SEQ ID NO: 9904 - protein, 38 aa, Artificial Sequence
  Non-cyclic GFR-binding peptide
  MOD_RES (2), (4), (38): Xaa is C or S
  MOD_RES (16), (17), (18), (19), (20): Xaa is A or G
  MOD_RES (21), (22), (23), (24): Xaa is A or G or is absent
RXGXGEVVMEEYQKYXXXXXXXXXIFLMSIPSLETPVX

SEQ ID NO: 9905 - protein, 40 aa, Artificial Sequence
  Non-cyclic GFR-binding peptide
  MOD_RES (2), (4), (38), (39): Xaa is C or S
  MOD_RES (16), (17), (18), (19), (20): Xaa is A or G
  MOD_RES (21), (22), (23), (24): Xaa is A or G or is absent
RXGXGEVVMENSLQEXXXXXXXXXYYLMTLPELETPVXXA

SEQ ID NO: 9906 - protein, 31 aa, Artificial Sequence
  Non-cyclic GFR-binding peptide
SRVVMNEYQKYIVNSSDDIFLVSIPSLKTPA

SEQ ID NO: 9907 - protein, 40 aa, Artificial Sequence
  Non-cyclic GFR-binding peptide
  MOD_RES (2), (34), (35): Xaa is C or S
GXGEVVMDEYQKYVVKENEDIFLMSIPSLETPVXXAKPIK

SEQ ID NO: 9908 - protein, 34 aa, Artificial Sequence
  Non-cyclic GFR-binding peptide
  MOD_RES (1), (34): Xaa is C or S
  MOD_RES (12), (13), (14), (15), (16): Xaa is A or G
  MOD_RES (17), (18), (19), (20): Xaa is A or G or is absent
XSKVVMNSLQEXXXXXXXXXYYVIPLPELDQPVX

SEQ ID NO: 9909 - protein, 35 aa, Artificial Sequence
  Non-cyclic GFR-binding peptide
  MOD_RES (2), (4): Xaa is C or S
RXGXSEVVMDNSLQEVVNNASDYYVIPLPELRTPV

SEQ ID NO: 9910 - protein, 40 aa, Artificial Sequence
  Non-cyclic GFR-binding peptide
  MOD_RES (1), (3), (34), (35): Xaa is C or S
XKXSRVIMNSLQEVKPKRGVYYLITLPELAQPVXXPAASA

SEQ ID NO: 9911 - protein, 33 aa, Artificial Sequence
  Non-cyclic GFR-binding peptide
  MOD_RES (2), (33): Xaa is C or S
KXSKVVMNSLQEVKPTRGVYYVIPLPELDQPVX

SEQ ID NO: 9912 - protein, 32 aa, Artificial Sequence
  Non-cyclic GFR-binding peptide
  MOD_RES (32), (32): Xaa is C or S
ARVVMNEYQKYIVNSSDDIFLVSIPSLQTPAX

SEQ ID NO: 9913 - protein, 34 aa, Artificial Sequence
  Non-cyclic GFR-binding peptide
  MOD_RES (1), (32), (33): Xaa is C or S
XSRVIMNSLQEVKPKRGVYYLITLPELAQPVXXP

SEQ ID NO: 9914 - protein, 37 aa, Artificial Sequence
  Non-cyclic GFR-binding peptide
  MOD_RES (31), (32): Xaa is C or S
RVVMNNSLQEIVNSSDDYYLVTLPELQTPAXXPKPVT

SEQ ID NO: 9915 - protein, 37 aa, Artificial Sequence
  Non-cyclic GFR-binding peptide
  MOD_RES (32), (33): Xaa is C or S
ARVVMNNSLQEIVNSSDDYYVVPLPELQTPAXXPKPV

SEQ ID NO: 9916 - protein, 35 aa, Artificial Sequence
  Non-cyclic GFR-binding peptide
  MOD_RES (33), (34): Xaa is C or S
  MOD_RES (11), (12), (13), (14), (15): Xaa is A or G
  MOD_RES (16), (17), (18), (19): Xaa is A or G or is absent
EVVMDNSLQEXXXXXXXXXYYLITLPELRTPVXXT

SEQ ID NO: 9917 - protein, 39 aa, Artificial Sequence
  Non-cyclic GFR-binding peptide
  MOD_RES (1), (35), (36): Xaa is C or S
  MOD_RES (13), (14), (15), (16), (17): Xaa is A or G
  MOD_RES (18), (19), (20), (21): Xaa is A or G or is absent
XGEVVMENSLQEXXXXXXXXXYYLMTLPELETPVXXAKP

SEQ ID NO: 9918 - protein, 32 aa, Artificial Sequence
  Non-cyclic GFR-binding peptide
  MOD_RES (32), (32): Xaa is C or S
GEVVMENSLQEVVKDYEDYYVMPLPELETPVX

SEQ ID NO: 9919 - protein, 31 aa, Artificial Sequence
  Non-cyclic GFR-binding peptide
GEVVMDEYQKYVVKENEDIFLMSIPSLETPV

SEQ ID NO: 9920 - protein, 44 aa, Artificial Sequence
  Non-cyclic GFR-binding peptide
  MOD_RES (2), (4), (38), (39): Xaa is C or S
  MOD_RES (16), (17), (18), (19), (20): Xaa is A or G
  MOD_RES (21), (22), (23), (24): Xaa is A or G or is absent
HXGXARVVMNNSLQEXXXXXXXXXYYLVTLPELQTPAXXPKPVT

SEQ ID NO: 9921 - protein, 36 aa, Artificial Sequence
  Non-cyclic GFR-binding peptide
  MOD_RES (2), (36): Xaa is C or S
  MOD_RES (14), (15), (16), (17), (18): Xaa is A or G
  MOD_RES (19), (20), (21), (22): Xaa is A or G or is absent
GXARVVMNNSLQEXXXXXXXXXYYVVPLPELQTPAX

SEQ ID NO: 9922 - protein, 38 aa, Artificial Sequence
  Non-cyclic GFR-binding peptide
  MOD_RES (2), (34), (35): Xaa is C or S
GXARVVMNEYQKYIVNSSDDIFLVSIPSLQTPAXXPKP

SEQ ID NO: 9923 - protein, 37 aa, Artificial Sequence
  Non-cyclic GFR-binding peptide
  MOD_RES (1), (3), (35), (36): Xaa is C or S
XGXGEVVMDNSLQEVVKENEDYYVMPLPELETPVXXA

SEQ ID NO: 9924 - protein, 32 aa, Artificial Sequence
  Non-cyclic GFR-binding peptide
  MOD_RES (11), (12), (13), (14), (15): Xaa is A or G
  MOD_RES (16), (17), (18), (19): Xaa is A or G or is absent
SKVIMNSLQEXXXXXXXXXYYVIPLPELDQSV

SEQ ID NO: 9925 - protein, 37 aa, Artificial Sequence
  Non-cyclic GFR-binding peptide
  MOD_RES (2), (33), (34): Xaa is C or S
KXSRVIMNSLQEVKPKRGVYYLITLPELAQPVXXPAA

SEQ ID NO: 9926 - protein, 33 aa, Artificial Sequence
  Non-cyclic GFR-binding peptide
  MOD_RES (33), (33): Xaa is C or S
  MOD_RES (11), (12), (13), (14), (15): Xaa is A or G
  MOD_RES (16), (17), (18), (19): Xaa is A or G or is absent
SRVIMNSLQEXXXXXXXXXYYLITLPELAQPVX

SEQ ID NO: 9927 - protein, 33 aa, Artificial Sequence
  Non-cyclic GFR-binding peptide
  MOD_RES (33), (33): Xaa is C or S
  MOD_RES (11), (12), (13), (14), (15): Xaa is A or G
  MOD_RES (16), (17), (18), (19): Xaa is A or G or is absent
SKVIMNSLQEXXXXXXXXXYYVIPLPELDQSVX

SEQ ID NO: 9928 - protein, 39 aa, Artificial Sequence
  Non-cyclic GFR-binding peptide
  MOD_RES (34), (34): Xaa is C or S
  MOD_RES (12), (13), (14), (15), (16): Xaa is A or G
  MOD_RES (17), (18), (19), (20): Xaa is A or G or is absent
SRVVMNEYQKYXXXXXXXXXIFLVSIPSLKTPAXTPKTV

SEQ ID NO: 9929 - protein, 40 aa, Artificial Sequence
  Non-cyclic GFR-binding peptide
  MOD_RES (2), (4), (37), (38): Xaa is C or S
  MOD_RES (15), (16), (17), (18), (19): Xaa is A or G
  MOD_RES (20), (21), (22), (23): Xaa is A or G or is absent
SXKXSKVIMNSLQEXXXXXXXXXYYVIPLPELDQSVXXPS

SEQ ID NO: 9930 - protein, 34 aa, Artificial Sequence
  Non-cyclic GFR-binding peptide
  MOD_RES (32), (33): Xaa is C or S
SEVVMDQYNKLVVNNASDLYLISIASLRTPVXXT

SEQ ID NO: 9931 - protein, 39 aa, Artificial Sequence
  Non-cyclic GFR-binding peptide
  MOD_RES (2), (4), (37), (38): Xaa is C or S
  MOD_RES (15), (16), (17), (18), (19): Xaa is A or G
  MOD_RES (20), (21), (22), (23): Xaa is A or G or is absent
SXKXSRVIMEYQKYXXXXXXXXXIFLISIPSLAQPVXXP

SEQ ID NO: 9932 - protein, 35 aa, Artificial Sequence
  Non-cyclic GFR-binding peptide
  MOD_RES (33), (34): Xaa is C or S
  MOD_RES (11), (12), (13), (14), (15): Xaa is A or G
  MOD_RES (16), (17), (18), (19): Xaa is A or G or is absent
RVVMNEYQKYXXXXXXXXXIFLVSIPSLQTPAXXP

SEQ ID NO: 9933 - protein, 38 aa, Artificial Sequence
  Non-cyclic GFR-binding peptide
  MOD_RES (2), (4), (36), (37): Xaa is C or S
RXGXGEVVMENSLQEVVKDYEDYYLMTLPELETPVXXA

SEQ ID NO: 9934 - protein, 37 aa, Artificial Sequence
  Non-cyclic GFR-binding peptide
  MOD_RES (2), (33), (34): Xaa is C or S
KXSKVIMEYQKYIKPTKGIIFLISIPSLDQSVXXPSA

SEQ ID NO: 9935 - protein, 39 aa, Artificial Sequence
  Non-cyclic GFR-binding peptide
  MOD_RES (2), (4), (36): Xaa is C or S
HXGXSRVVMNNSLQEIVNSSDDYYLVTLPELKTPAXTPK

SEQ ID NO: 9936 - protein, 40 aa, Artificial Sequence
  Non-cyclic GFR-binding peptide
  MOD_RES (1), (3), (37), (38): Xaa is C or S
  MOD_RES (15), (16), (17), (18), (19): Xaa is A or G
  MOD_RES (20), (21), (22), (23): Xaa is A or G or is absent
XGXARVVMNNSLQEXXXXXXXXXYYVVPLPELQTPAXXPK

SEQ ID NO: 9937 - protein, 34 aa, Artificial Sequence
  Non-cyclic GFR-binding peptide
  MOD_RES (34), (34): Xaa is C or S
  MOD_RES (12), (13), (14), (15), (16): Xaa is A or G
  MOD_RES (17), (18), (19), (20): Xaa is A or G or is absent
GEVVMDNSLQEXXXXXXXXXYYLMTLPELETPVX

SEQ ID NO: 9938 - protein, 36 aa, Artificial Sequence
  Non-cyclic GFR-binding peptide
  MOD_RES (2), (4), (35), (36): Xaa is C or S
SXKXSKVVMEYQKYVKPTRGVIFLISIPSLDQPVXX

SEQ ID NO: 9939 - protein, 41 aa, Artificial Sequence
  Non-cyclic GFR-binding peptide
  MOD_RES (2), (4), (36): Xaa is C or S
HXGXSRVVMNNSLQEIVNSSDDYYVVPLPELKTPAXTPKTV

SEQ ID NO: 9940 - protein, 34 aa, Artificial Sequence
  Non-cyclic GFR-binding peptide
  MOD_RES (1), (1): Xaa is C or S
  MOD_RES (13), (14), (15), (16), (17): Xaa is A or G
  MOD_RES (18), (19), (20), (21): Xaa is A or G or is absent
XGEVVMDNSLQEXXXXXXXXXYYVMPLPELETPV

SEQ ID NO: 9941 - protein, 36 aa, Artificial Sequence
  Non-cyclic GFR-binding peptide
  MOD_RES (32), (33): Xaa is C or S
SEVVMDNSLQEVVNNASDYYVIPLPELRTPVXXTPP

SEQ ID NO: 9942 - protein, 40 aa, Artificial Sequence
  Non-cyclic GFR-binding peptide
  MOD_RES (1), (35), (36): Xaa is C or S
  MOD_RES (13), (14), (15), (16), (17): Xaa is A or G
  MOD_RES (18), (19), (20), (21): Xaa is A or G or is absent
XGEVVMDNSLQEXXXXXXXXXYYLMTLPELETPVXXAKPI

SEQ ID NO: 9943 - protein, 33 aa, Artificial Sequence
  Non-cyclic GFR-binding peptide
  MOD_RES (2), (2): Xaa is C or S
GXSEVVMDQYNKLVVNNASDLYLISIASLRTPV

SEQ ID NO: 9944 - protein, 35 aa, Artificial Sequence
  Non-cyclic GFR-binding peptide
  MOD_RES (2), (2): Xaa is C or S
  MOD_RES (14), (15), (16), (17), (18): Xaa is A or G
  MOD_RES (19), (20), (21), (22): Xaa is A or G or is absent
GXSEVVMDNSLQEXXXXXXXXXYYLITLPELRTPV

SEQ ID NO: 9945 - protein, 36 aa, Artificial Sequence
  Non-cyclic GFR-binding peptide
  MOD_RES (1), (3), (35), (36): Xaa is C or S
XGXGEVVMDNSLQEVVKENEDYYVMPLPELETPVXX

SEQ ID NO: 9946 - protein, 34 aa, Artificial Sequence
  Non-cyclic GFR-binding peptide
  MOD_RES (2), (34): Xaa is C or S
GXARVVMNNSLQEIVNSSDDYYVVPLPELQTPAX

SEQ ID NO: 9947 - protein, 35 aa, Artificial Sequence
  Non-cyclic GFR-binding peptide
  MOD_RES (34), (35): Xaa is C or S
  MOD_RES (12), (13), (14), (15), (16): Xaa is A or G
  MOD_RES (17), (18), (19), (20): Xaa is A or G or is absent
ARVVMNNSLQEXXXXXXXXXYYLVTLPELQTPAXX

SEQ ID NO: 9948 - protein, 37 aa, Artificial Sequence
  Non-cyclic GFR-binding peptide
  MOD_RES (2), (4), (37): Xaa is C or S
  MOD_RES (15), (16), (17), (18), (19): Xaa is A or G
  MOD_RES (20), (21), (22), (23): Xaa is A or G or is absent
SXKXSKVVMNSLQEXXXXXXXXXYYVIPLPELDQPVX

SEQ ID NO: 9949 - protein, 35 aa, Artificial Sequence
  Non-cyclic GFR-binding peptide
  MOD_RES (1), (35): Xaa is C or S
  MOD_RES (13), (14), (15), (16), (17): Xaa is A or G
  MOD_RES (18), (19), (20), (21): Xaa is A or G or is absent
XGEVVMDNSLQEXXXXXXXXXYYVMPLPELETPVX

SEQ ID NO: 9950 - protein, 35 aa, Artificial Sequence
  Non-cyclic GFR-binding peptide
  MOD_RES (33), (34): Xaa is C or S
  MOD_RES (11), (12), (13), (14), (15): Xaa is A or G
  MOD_RES (16), (17), (18), (19): Xaa is A or G or is absent
EVVMDNSLQEXXXXXXXXXYYVIPLPELRTPVXXT

SEQ ID NO: 9951 - protein, 39 aa, Artificial Sequence
  Non-cyclic GFR-binding peptide
  MOD_RES (33), (34): Xaa is C or S
  MOD_RES (11), (12), (13), (14), (15): Xaa is A or G
  MOD_RES (16), (17), (18), (19): Xaa is A or G or is absent
EVVMDNSLQEXXXXXXXXXYYVMPLPELETPVXXAKPIK

SEQ ID NO: 9952 - protein, 39 aa, Artificial Sequence
  Non-cyclic GFR-binding peptide
  MOD_RES (33), (34): Xaa is C or S
  MOD_RES (11), (12), (13), (14), (15): Xaa is A or G
  MOD_RES (16), (17), (18), (19): Xaa is A or G or is absent
EVVMDNSLQEXXXXXXXXXYYLMTLPELETPVXXAKPIK

SEQ ID NO: 9953 - protein, 35 aa, Artificial Sequence
  Non-cyclic GFR-binding peptide
  MOD_RES (34), (35): Xaa is C or S
  MOD_RES (12), (13), (14), (15), (16): Xaa is A or G
  MOD_RES (17), (18), (19), (20): Xaa is A or G or is absent
GEVVMDEYQKYXXXXXXXXXIFLMSIPSLETPVXX

SEQ ID NO: 9954 - protein, 39 aa, Artificial Sequence
  Non-cyclic GFR-binding peptide
  MOD_RES (1), (3), (37), (38): Xaa is C or S
  MOD_RES (15), (16), (17), (18), (19): Xaa is A or G
  MOD_RES (20), (21), (22), (23): Xaa is A or G or is absent
XGXSEVVMDRYKKLXXXXXXXXXFYLISIANLRTPVXXT

SEQ ID NO: 9955 - protein, 32 aa, Artificial Sequence
  Non-cyclic GFR-binding peptide
  MOD_RES (31), (32): Xaa is C or S
EVVMDNSLQEVVNNASDYYVIPLPELRTPVXX

SEQ ID NO: 9956 - protein, 38 aa, Artificial Sequence
  Non-cyclic GFR-binding peptide
  MOD_RES (2), (35), (36): Xaa is C or S
  MOD_RES (13), (14), (15), (16), (17): Xaa is A or G
  MOD_RES (18), (19), (20), (21): Xaa is A or G or is absent
KXSRVIMNSLQEXXXXXXXXXYYLITLPELAQPVXXPA

SEQ ID NO: 9957 - protein, 35 aa, Artificial Sequence
  Non-cyclic GFR-binding peptide
  MOD_RES (1), (3), (35): Xaa is C or S
XGXSEVVMDRYKKLVVNNASDFYLISIANLRTPVX

SEQ ID NO: 9958 - protein, 39 aa, Artificial Sequence
  Non-cyclic GFR-binding peptide
  MOD_RES (2), (36), (37): Xaa is C or S
  MOD_RES (14), (15), (16), (17), (18): Xaa is A or G
  MOD_RES (19), (20), (21), (22): Xaa is A or G or is absent
GXSEVVMDNSLQEXXXXXXXXXYYLITLPELRTPVXXTP

SEQ ID NO: 9959 - protein, 37 aa, Artificial Sequence
  Non-cyclic GFR-binding peptide
  MOD_RES (2), (35), (36): Xaa is C or S
  MOD_RES (13), (14), (15), (16), (17): Xaa is A or G
  MOD_RES (18), (19), (20), (21): Xaa is A or G or is absent
KXSRVIMNSLQEXXXXXXXXXYYLITLPELAQPVXXP

SEQ ID NO: 9960 - protein, 31 aa, Artificial Sequence
  Non-cyclic GFR-binding peptide
  MOD_RES (31), (31): Xaa is C or S
EVVMDNSLQEVVNNASDYYVIPLPELRTPVX

SEQ ID NO: 9961 - protein, 40 aa, Artificial Sequence
  Non-cyclic GFR-binding peptide
  MOD_RES (2), (36), (37): Xaa is C or S
  MOD_RES (14), (15), (16), (17), (18): Xaa is A or G
  MOD_RES (19), (20), (21), (22): Xaa is A or G or is absent
GXARVVMNEYQKYXXXXXXXXXIFLVSIPSLQTPAXXPKP

SEQ ID NO: 9962 - protein, 35 aa, Artificial Sequence
  Non-cyclic GFR-binding peptide
  MOD_RES (2), (34): Xaa is C or S
GXSRVVMNNSLQEIVNSSDDYYLVTLPELKTPAXT

SEQ ID NO: 9963 - protein, 36 aa, Artificial Sequence
  Non-cyclic GFR-binding peptide
  MOD_RES (2), (4): Xaa is C or S
  MOD_RES (15), (16), (17), (18), (19): Xaa is A or G
  MOD_RES (20), (21), (22), (23): Xaa is A or G or is absent
SXKXSRVIMEYQKYXXXXXXXXXIFLISIPSLAQPV

SEQ ID NO: 9964 - protein, 42 aa, Artificial Sequence
  Non-cyclic GFR-binding peptide
  MOD_RES (2), (4), (37), (38): Xaa is C or S
  MOD_RES (15), (16), (17), (18), (19): Xaa is A or G
  MOD_RES (20), (21), (22), (23): Xaa is A or G or is absent
SXKXSKVVMEYQKYXXXXXXXXXIFLISIPSLDQPVXXPSAS

SEQ ID NO: 9965 - protein, 42 aa, Artificial Sequence
  Non-cyclic GFR-binding peptide
  MOD_RES (2), (36), (37): Xaa is C or S
  MOD_RES (14), (15), (16), (17), (18): Xaa is A or G
  MOD_RES (19), (20), (21), (22): Xaa is A or G or is absent
GXSRVVMNNSLQEXXXXXXXXXYYLVTLPELKTPAXXPKPVY

SEQ ID NO: 9966 - protein, 40 aa, Artificial Sequence
  Non-cyclic GFR-binding peptide
  MOD_RES (2), (4), (37), (38): Xaa is C or S
  MOD_RES (15), (16), (17), (18), (19): Xaa is A or G
  MOD_RES (20), (21), (22), (23): Xaa is A or G or is absent
SXKXSKVIMEYQKYXXXXXXXXXIFLISIPSLDQSVXXPS

SEQ ID NO: 9967 - protein, 39 aa, Artificial Sequence
  Non-cyclic GFR-binding peptide
  MOD_RES (33), (34): Xaa is C or S
  MOD_RES (11), (12), (13), (14), (15): Xaa is A or G
  MOD_RES (16), (17), (18), (19): Xaa is A or G or is absent
EVVMEEYQKYXXXXXXXXXIFLMSIPSLETPVXXAKPIS

SEQ ID NO: 9968 - protein, 36 aa, Artificial Sequence
  Non-cyclic GFR-binding peptide
  MOD_RES (1), (3): Xaa is C or S
  MOD_RES (15), (16), (17), (18), (19): Xaa is A or G
  MOD_RES (20), (21), (22), (23): Xaa is A or G or is absent
XGXSEVVMDQYNKLXXXXXXXXXLYLISIASLRTPV

SEQ ID NO: 9969 - protein, 35 aa, Artificial Sequence
  Non-cyclic GFR-binding peptide
  MOD_RES (2), (2): Xaa is C or S
  MOD_RES (14), (15), (16), (17), (18): Xaa is A or G
  MOD_RES (19), (20), (21), (22): Xaa is A or G or is absent
GXSRVVMNNSLQEXXXXXXXXXYYVVPLPELKTPA

SEQ ID NO: 9970 - protein, 34 aa, Artificial Sequence
  Non-cyclic GFR-binding peptide
  MOD_RES (1), (32), (33): Xaa is C or S
XSKVIMEYQKYIKPTKGIIFLISIPSLDQSVXXP

SEQ ID NO: 9971 - protein, 35 aa, Artificial Sequence
  Non-cyclic GFR-binding peptide
  MOD_RES (1), (3): Xaa is C or S
  MOD_RES (14), (15), (16), (17), (18): Xaa is A or G
  MOD_RES (19), (20), (21), (22): Xaa is A or G or is absent
XKXSRVIMNSLQEXXXXXXXXXYYLITLPELAQPV

SEQ ID NO: 9972 - protein, 39 aa, Artificial Sequence
  Non-cyclic GFR-binding peptide
  MOD_RES (2), (33), (34): Xaa is C or S
KXSKVIMEYQKYIKPTKGIIFLISIPSLDQSVXXPSASA

SEQ ID NO: 9973 - protein, 36 aa, Artificial Sequence
  Non-cyclic GFR-binding peptide
  MOD_RES (31), (31): Xaa is C or S
RVVMNNSLQEIVNSSDDYYVVPLPELKTPAXTPKTV

SEQ ID NO: 9974 - protein, 41 aa, Artificial Sequence
  Non-cyclic GFR-binding peptide
  MOD_RES (2), (4), (37), (38): Xaa is C or S
  MOD_RES (15), (16), (17), (18), (19): Xaa is A or G
  MOD_RES (20), (21), (22), (23): Xaa is A or G or is absent
SXKXSKVIMEYQKYXXXXXXXXXIFLISIPSLDQSVXXPSA

SEQ ID NO: 9975 - protein, 35 aa, Artificial Sequence
  Non-cyclic GFR-binding peptide
  MOD_RES (1), (3), (35): Xaa is C or S
XGXSEVVMDNSLQEVVNNASDYYVIPLPELRTPVX

SEQ ID NO: 9976 - protein, 34 aa, Artificial Sequence
  Non-cyclic GFR-binding peptide
  MOD_RES (32), (33): Xaa is C or S
GEVVMENSLQEVVKDYEDYYVMPLPELETPVXXA

SEQ ID NO: 9977 - protein, 33 aa, Artificial Sequence
  Non-cyclic GFR-binding peptide
  MOD_RES (31), (32): Xaa is C or S
EVVMEEYQKYVVKDYEDIFLMSIPSLETPVXXA

SEQ ID NO: 9978 - protein, 34 aa, Artificial Sequence
  Non-cyclic GFR-binding peptide
  MOD_RES (1), (32), (33): Xaa is C or S
XSKVVMNSLQEVKPTRGVYYVIPLPELDQPVXXP

SEQ ID NO: 9979 - protein, 40 aa, Artificial Sequence
  Non-cyclic GFR-binding peptide
  MOD_RES (1), (35), (36): Xaa is C or S
  MOD_RES (13), (14), (15), (16), (17): Xaa is A or G
  MOD_RES (18), (19), (20), (21): Xaa is A or G or is absent
XGEVVMDNSLQEXXXXXXXXXYYVMPLPELETPVXXAKPI

SEQ ID NO: 9980 - protein, 32 aa, Artificial Sequence
  Non-cyclic GFR-binding peptide
  MOD_RES (1), (1): Xaa is C or S
XGEVVMDEYQKYVVKENEDIFLMSIPSLETPV

SEQ ID NO: 9981 - protein, 39 aa, Artificial Sequence
  Non-cyclic GFR-binding peptide
  MOD_RES (2), (4), (36), (37): Xaa is C or S
RXGXGEVVMEEYQKYVVKDYEDIFLMSIPSLETPVXXAK

SEQ ID NO: 9982 - protein, 38 aa, Artificial Sequence
  Non-cyclic GFR-binding peptide
  MOD_RES (2), (34), (35): Xaa is C or S
GXARVVMNNSLQEIVNSSDDYYVVPLPELQTPAXXPKP

SEQ ID NO: 9983 - protein, 33 aa, Artificial Sequence
  Non-cyclic GFR-binding peptide
  MOD_RES (33), (33): Xaa is C or S
  MOD_RES (11), (12), (13), (14), (15): Xaa is A or G
  MOD_RES (16), (17), (18), (19): Xaa is A or G or is absent
SKVIMEYQKYXXXXXXXXXIFLISIPSLDQSVX

SEQ ID NO: 9984 - protein, 38 aa, Artificial Sequence
  Non-cyclic GFR-binding peptide
  MOD_RES (1), (35), (36): Xaa is C or S
  MOD_RES (13), (14), (15), (16), (17): Xaa is A or G
  MOD_RES (18), (19), (20), (21): Xaa is A or G or is absent
XGEVVMDNSLQEXXXXXXXXXYYVMPLPELETPVXXAK

SEQ ID NO: 9985 - protein, 36 aa, Artificial Sequence
  Non-cyclic GFR-binding peptide
  MOD_RES (1), (3), (34), (35): Xaa is C or S
XKXSKVIMEYQKYIKPTKGIIFLISIPSLDQSVXXP

SEQ ID NO: 9986 - protein, 43 aa, Artificial Sequence
  Non-cyclic GFR-binding peptide
  MOD_RES (2), (4), (38), (39): Xaa is C or S
  MOD_RES (16), (17), (18), (19), (20): Xaa is A or G
  MOD_RES (21), (22), (23), (24): Xaa is A or G or is absent
RXGXGEVVMEEYQKYXXXXXXXXXIFLMSIPSLETPVXXAKPI

SEQ ID NO: 9987 - protein, 37 aa, Artificial Sequence
  Non-cyclic GFR-binding peptide
  MOD_RES (32), (32): Xaa is C or S
SRVVMNNSLQEIVNSSDDYYVVPLPELKTPAXTPKTV

SEQ ID NO: 9988 - protein, 36 aa, Artificial Sequence
  Non-cyclic GFR-binding peptide
  MOD_RES (1), (3), (35), (36): Xaa is C or S
XGXGEVVMEEYQKYVVKDYEDIFLMSIPSLETPVXX

SEQ ID NO: 9989 - protein, 33 aa, Artificial Sequence
  Non-cyclic GFR-binding peptide
  MOD_RES (1), (33): Xaa is C or S
XSEVVMDRYKKLVVNNASDFYLISIANLRTPVX

SEQ ID NO: 9990 - protein, 35 aa, Artificial Sequence
  Non-cyclic GFR-binding peptide
  MOD_RES (34), (35): Xaa is C or S
  MOD_RES (12), (13), (14), (15), (16): Xaa is A or G
  MOD_RES (17), (18), (19), (20): Xaa is A or G or is absent
ARVVMNEYQKYXXXXXXXXXIFLVSIPSLQTPAXX

SEQ ID NO: 9991 - protein, 35 aa, Artificial Sequence
  Non-cyclic GFR-binding peptide
  MOD_RES (1), (33), (34): Xaa is C or S
XGEVVMDNSLQEVVKENEDYYLMTLPELETPVXXA

SEQ ID NO: 9992 - protein, 39 aa, Artificial Sequence
  Non-cyclic GFR-binding peptide
  MOD_RES (2), (4), (37), (38): Xaa is C or S
  MOD_RES (15), (16), (17), (18), (19): Xaa is A or G
  MOD_RES (20), (21), (22), (23): Xaa is A or G or is absent
SXKXSKVVMEYQKYXXXXXXXXXIFLISIPSLDQPVXXP

SEQ ID NO: 9993 - protein, 37 aa, Artificial Sequence
  Non-cyclic GFR-binding peptide
  MOD_RES (2), (4), (37): Xaa is C or S
  MOD_RES (15), (16), (17), (18), (19): Xaa is A or G
  MOD_RES (20), (21), (22), (23): Xaa is A or G or is absent
SXKXSKVVMEYQKYXXXXXXXXXIFLISIPSLDQPVX

SEQ ID NO: 9994 - protein, 40 aa, Artificial Sequence
  Non-cyclic GFR-binding peptide
  MOD_RES (2), (4), (36), (37): Xaa is C or S
RXGXGEVVMENSLQEVVKDYEDYYLMTLPELETPVXXAKP

SEQ ID NO: 9995 - protein, 37 aa, Artificial Sequence
  Non-cyclic GFR-binding peptide
  MOD_RES (1), (34), (35): Xaa is C or S
  MOD_RES (12), (13), (14), (15), (16): Xaa is A or G
  MOD_RES (17), (18), (19), (20): Xaa is A or G or is absent
XSKVIMNSLQEXXXXXXXXXYYVIPLPELDQSVXXPS

SEQ ID NO: 9996 - protein, 36 aa, Artificial Sequence
  Non-cyclic GFR-binding peptide
  MOD_RES (1), (3), (35), (36): Xaa is C or S
XGXSEVVMDRYKKLVVNNASDFYLISIANLRTPVXX

SEQ ID NO: 9997 - protein, 35 aa, Artificial Sequence
  Non-cyclic GFR-binding peptide
  MOD_RES (33), (34): Xaa is C or S
  MOD_RES (11), (12), (13), (14), (15): Xaa is A or G
  MOD_RES (16), (17), (18), (19): Xaa is A or G or is absent
EVVMDRYKKLXXXXXXXXXFYLISIANLRTPVXXT

SEQ ID NO: 9998 - protein, 38 aa, Artificial Sequence
  Non-cyclic GFR-binding peptide
  MOD_RES (2), (34), (35): Xaa is C or S
GXGEVVMENSLQEVVKDYEDYYLMTLPELETPVXXAKP

SEQ ID NO: 9999 - protein, 39 aa, Artificial Sequence
  Non-cyclic GFR-binding peptide
  MOD_RES (2), (33), (34): Xaa is C or S
KXSKVVMNSLQEVKPTRGVYYVIPLPELDQPVXXPSASA

SEQ ID NO: 10000 - protein, 41 aa, Artificial Sequence
  Non-cyclic GFR-binding peptide
  MOD_RES (2), (4), (38), (39): Xaa is C or S
  MOD_RES (16), (17), (18), (19), (20): Xaa is A or G
  MOD_RES (21), (22), (23), (24): Xaa is A or G or is absent
RXGXGEVVMDNSLQEXXXXXXXXXYYLMTLPELETPVXXAK

SEQ ID NO: 10001 - protein, 36 aa, Artificial Sequence
  Non-cyclic GFR-binding peptide
  MOD_RES (2), (33), (34): Xaa is C or S
KXSKVVMNSLQEVKPTRGVYYVIPLPELDQPVXXPS

SEQ ID NO: 10002 - protein, 36 aa, Artificial Sequence
  Non-cyclic GFR-binding peptide
  MOD_RES (1), (33), (34): Xaa is C or S
XGEVVMDNSLQEVVKENEDYYVMPLPELETPVXXAK

SEQ ID NO: 10003 - protein, 31 aa, Artificial Sequence
  Non-cyclic GFR-binding peptide
  MOD_RES (31), (31): Xaa is C or S
EVVMDRYKKLVVNNASDFYLISIANLRTPVX

SEQ ID NO: 10004 - protein, 36 aa, Artificial Sequence
  Non-cyclic GFR-binding peptide
  MOD_RES (2), (33), (34): Xaa is C or S
KXSKVIMEYQKYIKPTKGIIFLISIPSLDQSVXXPS

SEQ ID NO: 10005 - protein, 40 aa, Artificial Sequence
  Non-cyclic GFR-binding peptide
  MOD_RES (2), (4), (36), (37): Xaa is C or S
HXGXARVVMNNSLQEIVNSSDDYYLVTLPELQTPAXXPKP

SEQ ID NO: 10006 - protein, 37 aa, Artificial Sequence
  Non-cyclic GFR-binding peptide
  MOD_RES (1), (35), (36): Xaa is C or S
  MOD_RES (13), (14), (15), (16), (17): Xaa is A or G
  MOD_RES (18), (19), (20), (21): Xaa is A or G or is absent
XGEVVMDNSLQEXXXXXXXXXYYLMTLPELETPVXXA

SEQ ID NO: 10007 - protein, 39 aa, Artificial Sequence
  Non-cyclic GFR-binding peptide
  MOD_RES (1), (3), (37), (38): Xaa is C or S
  MOD_RES (15), (16), (17), (18), (19): Xaa is A or G
  MOD_RES (20), (21), (22), (23): Xaa is A or G or is absent
XGXGEVVMENSLQEXXXXXXXXXYYLMTLPELETPVXXA

SEQ ID NO: 10008 - protein, 35 aa, Artificial Sequence
  Non-cyclic GFR-binding peptide
  MOD_RES (1), (3), (35): Xaa is C or S
XGXSRVVMNNSLQEIVNSSDDYYLVTLPELKTPAX

SEQ ID NO: 10009 - protein, 37 aa, Artificial Sequence
  Non-cyclic GFR-binding peptide
  MOD_RES (2), (34), (35): Xaa is C or S
GXGEVVMDNSLQEVVKENEDYYVMPLPELETPVXXAK

SEQ ID NO: 10010 - protein, 35 aa, Artificial Sequence
  Non-cyclic GFR-binding peptide
  MOD_RES (2), (34), (35): Xaa is C or S
GXARVVMNEYQKYIVNSSDDIFLVSIPSLQTPAXX

SEQ ID NO: 10011 - protein, 42 aa, Artificial Sequence
  Non-cyclic GFR-binding peptide
  MOD_RES (2), (4), (36), (37): Xaa is C or S
HXGXARVVMNNSLQEIVNSSDDYYVVPLPELQTPAXXPKPVT

SEQ ID NO: 10012 - protein, 34 aa, Artificial Sequence
  Non-cyclic GFR-binding peptide
  MOD_RES (1), (1): Xaa is C or S
  MOD_RES (13), (14), (15), (16), (17): Xaa is A or G
  MOD_RES (18), (19), (20), (21): Xaa is A or G or is absent
XGEVVMDEYQKYXXXXXXXXXIFLMSIPSLETPV

SEQ ID NO: 10013 - protein, 40 aa, Artificial Sequence
  Non-cyclic GFR-binding peptide
  MOD_RES (2), (4), (35), (36): Xaa is C or S
SXKXSKVIMNSLQEIKPTKGIYYVIPLPELDQSVXXPSAS

SEQ ID NO: 10014 - protein, 40 aa, Artificial Sequence
  Non-cyclic GFR-binding peptide
  MOD_RES (1), (3), (37), (38): Xaa is C or S
  MOD_RES (15), (16), (17), (18), (19): Xaa is A or G
  MOD_RES (20), (21), (22), (23): Xaa is A or G or is absent
XGXSRVVMNEYQKYXXXXXXXXXIFLVSIPSLKTPAXXPK

SEQ ID NO: 10015 - protein, 37 aa, Artificial Sequence
  Non-cyclic GFR-binding peptide
  MOD_RES (34), (35): Xaa is C or S
  MOD_RES (12), (13), (14), (15), (16): Xaa is A or G
  MOD_RES (17), (18), (19), (20): Xaa is A or G or is absent
SEVVMDNSLQEXXXXXXXXXYYVIPLPELRTPVXXTP

SEQ ID NO: 10016 - protein, 39 aa, Artificial Sequence
  Non-cyclic GFR-binding peptide
  MOD_RES (2), (4), (36), (37): Xaa is C or S
HXGXARVVMNEYQKYIVNSSDDIFLVSIPSLQTPAXXPK

SEQ ID NO: 10017 - protein, 35 aa, Artificial Sequence
  Non-cyclic GFR-binding peptide
  MOD_RES (34), (35): Xaa is C or S
  MOD_RES (12), (13), (14), (15), (16): Xaa is A or G
  MOD_RES (17), (18), (19), (20): Xaa is A or G or is absent
GEVVMDNSLQEXXXXXXXXXYYLMTLPELETPVXX

SEQ ID NO: 10018 - protein, 36 aa, Artificial Sequence
  Non-cyclic GFR-binding peptide
  MOD_RES (1), (3), (36): Xaa is C or S
  MOD_RES (14), (15), (16), (17), (18): Xaa is A or G
  MOD_RES (19), (20), (21), (22): Xaa is A or G or is absent
XKXSRVIMNSLQEXXXXXXXXXYYLITLPELAQPVX

SEQ ID NO: 10019 - protein, 39 aa, Artificial Sequence
  Non-cyclic GFR-binding peptide
  MOD_RES (2), (36), (37): Xaa is C or S
  MOD_RES (14), (15), (16), (17), (18): Xaa is A or G
  MOD_RES (19), (20), (21), (22): Xaa is A or G or is absent
GXSRVVMNNSLQEXXXXXXXXXYYLVTLPELKTPAXXPK

SEQ ID NO: 10020 - protein, 41 aa, Artificial Sequence
  Non-cyclic GFR-binding peptide
  MOD_RES (1), (3), (36), (37): Xaa is C or S
  MOD_RES (14), (15), (16), (17), (18): Xaa is A or G
  MOD_RES (19), (20), (21), (22): Xaa is A or G or is absent
XKXSKVIMNSLQEXXXXXXXXXYYVIPLPELDQSVXXPSAS

SEQ ID NO: 10021 - protein, 39 aa, Artificial Sequence
  Non-cyclic GFR-binding peptide
  MOD_RES (2), (34), (35): Xaa is C or S
GXSRVVMNNSLQEIVNSSDDYYLVTLPELKTPAXXPKPV

SEQ ID NO: 10022 - protein, 33 aa, Artificial Sequence
  Non-cyclic GFR-binding peptide
  MOD_RES (12), (13), (14), (15), (16): Xaa is A or G
  MOD_RES (17), (18), (19), (20): Xaa is A or G or is absent
SEVVMDNSLQEXXXXXXXXXYYLITLPELRTPV

SEQ ID NO: 10023 - protein, 36 aa, Artificial Sequence
  Non-cyclic GFR-binding peptide
  MOD_RES (1), (3), (35), (36): Xaa is C or S
XGXARVVMNNSLQEIVNSSDDYYVVPLPELQTPAXX

SEQ ID NO: 10024 - protein, 37 aa, Artificial Sequence
  Non-cyclic GFR-binding peptide
  MOD_RES (1), (3), (37): Xaa is C or S
  MOD_RES (15), (16), (17), (18), (19): Xaa is A or G
  MOD_RES (20), (21), (22), (23): Xaa is A or G or is absent
XGXGEVVMDEYQKYXXXXXXXXXIFLMSIPSLETPVX

SEQ ID NO: 10025 - protein, 37 aa, Artificial Sequence
  Non-cyclic GFR-binding peptide
  MOD_RES (33), (34): Xaa is C or S
  MOD_RES (11), (12), (13), (14), (15): Xaa is A or G
  MOD_RES (16), (17), (18), (19): Xaa is A or G or is absent
EVVMDNSLQEXXXXXXXXXYYLMTLPELETPVXXAKP

SEQ ID NO: 10026 - protein, 41 aa, Artificial Sequence
  Non-cyclic GFR-binding peptide
  MOD_RES (2), (4), (38), (39): Xaa is C or S
  MOD_RES (16), (17), (18), (19), (20): Xaa is A or G
  MOD_RES (21), (22), (23), (24): Xaa is A or G or is absent
RXGXGEVVMENSLQEXXXXXXXXXYYVMPLPELETPVXXAK

SEQ ID NO: 10027 - protein, 37 aa, Artificial Sequence
  Non-cyclic GFR-binding peptide
  MOD_RES (1), (34), (35): Xaa is C or S
  MOD_RES (12), (13), (14), (15), (16): Xaa is A or G
  MOD_RES (17), (18), (19), (20): Xaa is A or G or is absent
XSKVVMEYQKYXXXXXXXXXIFLISIPSLDQPVXXPS

SEQ ID NO: 10028 - protein, 36 aa, Artificial Sequence
  Non-cyclic GFR-binding peptide
  MOD_RES (2), (33), (34): Xaa is C or S
KXSKVVMEYQKYVKPTRGVIFLISIPSLDQPVXXPS

SEQ ID NO: 10029 - protein, 44 aa, Artificial Sequence
  Non-cyclic GFR-binding peptide
  MOD_RES (2), (4), (38), (39): Xaa is C or S
  MOD_RES (16), (17), (18), (19), (20): Xaa is A or G
  MOD_RES (21), (22), (23), (24): Xaa is A or G or is absent
RXGXGEVVMDEYQKYXXXXXXXXXIFLMSIPSLETPVXXAKPIK

SEQ ID NO: 10030 - protein, 33 aa, Artificial Sequence
  Non-cyclic GFR-binding peptide
  MOD_RES (2), (2): Xaa is C or S
GXARVVMNNSLQEIVNSSDDYYLVTLPELQTPA

SEQ ID NO: 10031 - protein, 38 aa, Artificial Sequence
  Non-cyclic GFR-binding peptide
  MOD_RES (2), (4), (38): Xaa is C or S
  MOD_RES (16), (17), (18), (19), (20): Xaa is A or G
  MOD_RES (21), (22), (23), (24): Xaa is A or G or is absent
RXGXSEVVMDNSLQEXXXXXXXXXYYLITLPELRTPVX

SEQ ID NO: 10032 - protein, 38 aa, Artificial Sequence
  Non-cyclic GFR-binding peptide
  MOD_RES (1), (35), (36): Xaa is C or S
  MOD_RES (13), (14), (15), (16), (17): Xaa is A or G
  MOD_RES (18), (19), (20), (21): Xaa is A or G or is absent
XARVVMNEYQKYXXXXXXXXXIFLVSIPSLQTPAXXPK

SEQ ID NO: 10033 - protein, 38 aa, Artificial Sequence
  Non-cyclic GFR-binding peptide
  MOD_RES (33), (34): Xaa is C or S
  MOD_RES (11), (12), (13), (14), (15): Xaa is A or G
  MOD_RES (16), (17), (18), (19): Xaa is A or G or is absent
SRVIMEYQKYXXXXXXXXXIFLISIPSLAQPVXXPAAS

SEQ ID NO: 10034 - protein, 37 aa, Artificial Sequence
  Non-cyclic GFR-binding peptide
  MOD_RES (2), (34), (35): Xaa is C or S
GXARVVMNEYQKYIVNSSDDIFLVSIPSLQTPAXXPK

SEQ ID NO: 10035 - protein, 40 aa, Artificial Sequence
  Non-cyclic GFR-binding peptide
  MOD_RES (2), (35), (36): Xaa is C or S
  MOD_RES (13), (14), (15), (16), (17): Xaa is A or G
  MOD_RES (18), (19), (20), (21): Xaa is A or G or is absent
KXSRVIMEYQKYXXXXXXXXXIFLISIPSLAQPVXXPAAS

SEQ ID NO: 10036 - protein, 37 aa, Artificial Sequence
  Non-cyclic GFR-binding peptide
  MOD_RES (1), (35), (36): Xaa is C or S
  MOD_RES (13), (14), (15), (16), (17): Xaa is A or G
  MOD_RES (18), (19), (20), (21): Xaa is A or G or is absent
XGEVVMENSLQEXXXXXXXXXYYVMPLPELETPVXXA

SEQ ID NO: 10037 - protein, 42 aa, Artificial Sequence
  Non-cyclic GFR-binding peptide
  MOD_RES (1), (3), (36), (37): Xaa is C or S
  MOD_RES (14), (15), (16), (17), (18): Xaa is A or G
  MOD_RES (19), (20), (21), (22): Xaa is A or G or is absent
XKXSRVIMNSLQEXXXXXXXXXYYLITLPELAQPVXXPAASA

SEQ ID NO: 10038 - protein, 43 aa, Artificial Sequence
  Non-cyclic GFR-binding peptide
  MOD_RES (2), (4), (37), (38): Xaa is C or S
  MOD_RES (15), (16), (17), (18), (19): Xaa is A or G
  MOD_RES (20), (21), (22), (23): Xaa is A or G or is absent
SXKXSRVIMNSLQEXXXXXXXXXYYLITLPELAQPVXXPAASA

SEQ ID NO: 10039 - protein, 38 aa, Artificial Sequence
  Non-cyclic GFR-binding peptide
  MOD_RES (2), (36), (37): Xaa is C or S
  MOD_RES (14), (15), (16), (17), (18): Xaa is A or G
  MOD_RES (19), (20), (21), (22): Xaa is A or G or is absent
GXGEVVMENSLQEXXXXXXXXXYYVMPLPELETPVXXA

SEQ ID NO: 10040 - protein, 32 aa, Artificial Sequence
  Non-cyclic GFR-binding peptide
  MOD_RES (31), (32): Xaa is C or S
RVVMNNSLQEIVNSSDDYYVVPLPELKTPAXX

SEQ ID NO: 10041 - protein, 36 aa, Artificial Sequence
  Non-cyclic GFR-binding peptide
  MOD_RES (2), (34), (35): Xaa is C or S
GXARVVMNNSLQEIVNSSDDYYLVTLPELQTPAXXP

SEQ ID NO: 10042 - protein, 37 aa, Artificial Sequence
  Non-cyclic GFR-binding peptide
  MOD_RES (1), (35), (36): Xaa is C or S
  MOD_RES (13), (14), (15), (16), (17): Xaa is A or G
  MOD_RES (18), (19), (20), (21): Xaa is A or G or is absent
XSEVVMDNSLQEXXXXXXXXXYYVIPLPELRTPVXXT

SEQ ID NO: 10043 - protein, 34 aa, Artificial Sequence
  Non-cyclic GFR-binding peptide
  MOD_RES (1), (3): Xaa is C or S
XGXGEVVMDNSLQEVVKENEDYYVMPLPELETPV

SEQ ID NO: 10044 - protein, 39 aa, Artificial Sequence
  Non-cyclic GFR-binding peptide
  MOD_RES (1), (3), (36), (37): Xaa is C or S
  MOD_RES (14), (15), (16), (17), (18): Xaa is A or G
  MOD_RES (19), (20), (21), (22): Xaa is A or G or is absent
XKXSKVVMNSLQEXXXXXXXXXYYVIPLPELDQPVXXPS

SEQ ID NO: 10045 - protein, 37 aa, Artificial Sequence
  Non-cyclic GFR-binding peptide
  MOD_RES (31), (32): Xaa is C or S
EVVMENSLQEVVKDYEDYYVMPLPELETPVXXAKPIS

SEQ ID NO: 10046 - protein, 36 aa, Artificial Sequence
  Non-cyclic GFR-binding peptide
  MOD_RES (1), (3): Xaa is C or S
  MOD_RES (15), (16), (17), (18), (19): Xaa is A or G
  MOD_RES (20), (21), (22), (23): Xaa is A or G or is absent
XGXARVVMNEYQKYXXXXXXXXXIFLVSIPSLQTPA

SEQ ID NO: 10047 - protein, 33 aa, Artificial Sequence
  Non-cyclic GFR-binding peptide
  MOD_RES (31), (32): Xaa is C or S
SKVIMNSLQEIKPTKGIYYVIPLPELDQSVXXP

SEQ ID NO: 10048 - protein, 41 aa, Artificial Sequence
  Non-cyclic GFR-binding peptide
  MOD_RES (2), (36), (37): Xaa is C or S
  MOD_RES (14), (15), (16), (17), (18): Xaa is A or G
  MOD_RES (19), (20), (21), (22): Xaa is A or G or is absent
GXGEVVMEEYQKYXXXXXXXXXIFLMSIPSLETPVXXAKPI

SEQ ID NO: 10049 - protein, 38 aa, Artificial Sequence
  Non-cyclic GFR-binding peptide
  MOD_RES (2), (4), (35), (36): Xaa is C or S
SXKXSKVIMNSLQEIKPTKGIYYVIPLPELDQSVXXPS

SEQ ID NO: 10050 - protein, 40 aa, Artificial Sequence
  Non-cyclic GFR-binding peptide
  MOD_RES (34), (35): Xaa is C or S
  MOD_RES (12), (13), (14), (15), (16): Xaa is A or G
  MOD_RES (17), (18), (19), (20): Xaa is A or G or is absent
GEVVMEEYQKYXXXXXXXXXIFLMSIPSLETPVXXAKPIS

SEQ ID NO: 10051 - protein, 38 aa, Artificial Sequence
  Non-cyclic GFR-binding peptide
  MOD_RES (34), (35): Xaa is C or S
  MOD_RES (12), (13), (14), (15), (16): Xaa is A or G
  MOD_RES (17), (18), (19), (20): Xaa is A or G or is absent
ARVVMNEYQKYXXXXXXXXXIFLVSIPSLQTPAXXPKP

SEQ ID NO: 10052 - protein, 32 aa, Artificial Sequence
  Non-cyclic GFR-binding peptide
  MOD_RES (11), (12), (13), (14), (15): Xaa is A or G
  MOD_RES (16), (17), (18), (19): Xaa is A or G or is absent
RVVMNNSLQEXXXXXXXXXYYLVTLPELQTPA

SEQ ID NO: 10053 - protein, 34 aa, Artificial Sequence
  Non-cyclic GFR-binding peptide
  MOD_RES (31), (32): Xaa is C or S
EVVMENSLQEVVKDYEDYYLMTLPELETPVXXAK

SEQ ID NO: 10054 - protein, 36 aa, Artificial Sequence
  Non-cyclic GFR-binding peptide
  MOD_RES (1), (3), (36): Xaa is C or S
  MOD_RES (14), (15), (16), (17), (18): Xaa is A or G
  MOD_RES (19), (20), (21), (22): Xaa is A or G or is absent
XKXSKVVMNSLQEXXXXXXXXXYYVIPLPELDQPVX

SEQ ID NO: 10055 - protein, 39 aa, Artificial Sequence
  Non-cyclic GFR-binding peptide
  MOD_RES (1), (35), (36): Xaa is C or S
  MOD_RES (13), (14), (15), (16), (17): Xaa is A or G
  MOD_RES (18), (19), (20), (21): Xaa is A or G or is absent
XSRVVMNEYQKYXXXXXXXXXIFLVSIPSLKTPAXXPKP

SEQ ID NO: 10056 - protein, 36 aa, Artificial Sequence
  Non-cyclic GFR-binding peptide
  MOD_RES (31), (32): Xaa is C or S
SKVVMNSLQEVKPTRGVYYVIPLPELDQPVXXPSAS

SEQ ID NO: 10057 - protein, 37 aa, Artificial Sequence
  Non-cyclic GFR-binding peptide
  MOD_RES (2), (34), (35): Xaa is C or S
GXSEVVMDNSLQEVVNNASDYYLITLPELRTPVXXTP

SEQ ID NO: 10058 - protein, 41 aa, Artificial Sequence
  Non-cyclic GFR-binding peptide
  MOD_RES (1), (3), (37), (38): Xaa is C or S
  MOD_RES (15), (16), (17), (18), (19): Xaa is A or G
  MOD_RES (20), (21), (22), (23): Xaa is A or G or is absent
XGXARVVMNNSLQEXXXXXXXXXYYLVTLPELQTPAXXPKP

SEQ ID NO: 10059 - protein, 34 aa, Artificial Sequence
  Non-cyclic GFR-binding peptide
  MOD_RES (1), (3): Xaa is C or S
XGXGEVVMDEYQKYVVKENEDIFLMSIPSLETPV

SEQ ID NO: 10060 - protein, 40 aa, Artificial Sequence
  Non-cyclic GFR-binding peptide
  MOD_RES (2), (4), (38), (39): Xaa is C or S
  MOD_RES (16), (17), (18), (19), (20): Xaa is A or G
  MOD_RES (21), (22), (23), (24): Xaa is A or G or is absent
RXGXSEVVMDQYNKLXXXXXXXXXLYLISIASLRTPVXXT

SEQ ID NO: 10061 - protein, 37 aa, Artificial Sequence
  Non-cyclic GFR-binding peptide
  MOD_RES (1), (3), (36), (37): Xaa is C or S
  MOD_RES (14), (15), (16), (17), (18): Xaa is A or G
  MOD_RES (19), (20), (21), (22): Xaa is A or G or is absent
XKXSRVIMNSLQEXXXXXXXXXYYLITLPELAQPVXX

SEQ ID NO: 10062 - protein, 40 aa, Artificial Sequence
  Non-cyclic GFR-binding peptide
  MOD_RES (2), (4), (38), (39): Xaa is C or S
  MOD_RES (16), (17), (18), (19), (20): Xaa is A or G
  MOD_RES (21), (22), (23), (24): Xaa is A or G or is absent
HXGXARVVMNNSLQEXXXXXXXXXYYVVPLPELQTPAXXP

SEQ ID NO: 10063 - protein, 35 aa, Artificial Sequence
  Non-cyclic GFR-binding peptide
  MOD_RES (31), (31): Xaa is C or S
RVVMNEYQKYIVNSSDDIFLVSIPSLKTPAXTPKT

SEQ ID NO: 10064 - protein, 35 aa, Artificial Sequence
  Non-cyclic GFR-binding peptide
  MOD_RES (2), (4): Xaa is C or S
RXGXSEVVMDRYKKLVVNNASDFYLISIANLRTPV

SEQ ID NO: 10065 - protein, 44 aa, Artificial Sequence
  Non-cyclic GFR-binding peptide
  MOD_RES (2), (4), (38), (39): Xaa is C or S
  MOD_RES (16), (17), (18), (19), (20): Xaa is A or G
  MOD_RES (21), (22), (23), (24): Xaa is A or G or is absent
RXGXGEVVMEEYQKYXXXXXXXXXIFLMSIPSLETPVXXAKPIS

SEQ ID NO: 10066 - protein, 38 aa, Artificial Sequence
  Non-cyclic GFR-binding peptide
  MOD_RES (34), (35): Xaa is C or S
  MOD_RES (12), (13), (14), (15), (16): Xaa is A or G
  MOD_RES (17), (18), (19), (20): Xaa is A or G or is absent
SEVVMDRYKKLXXXXXXXXXFYLISIANLRTPVXXTPP

SEQ ID NO: 10067 - protein, 43 aa, Artificial Sequence
  Non-cyclic GFR-binding peptide
  MOD_RES (2), (4), (38), (39): Xaa is C or S
  MOD_RES (16), (17), (18), (19), (20): Xaa is A or G
  MOD_RES (21), (22), (23), (24): Xaa is A or G or is absent
HXGXARVVMNNSLQEXXXXXXXXXYYVVPLPELQTPAXXPKPV

SEQ ID NO: 10068 - protein, 37 aa, Artificial Sequence
  Non-cyclic GFR-binding peptide
  MOD_RES (34), (35): Xaa is C or S
  MOD_RES (12), (13), (14), (15), (16): Xaa is A or G
  MOD_RES (17), (18), (19), (20): Xaa is A or G or is absent
GEVVMDEYQKYXXXXXXXXXIFLMSIPSLETPVXXAK

SEQ ID NO: 10069 - protein, 36 aa, Artificial Sequence
  Non-cyclic GFR-binding peptide
  MOD_RES (1), (35), (36): Xaa is C or S
  MOD_RES (13), (14), (15), (16), (17): Xaa is A or G
  MOD_RES (18), (19), (20), (21): Xaa is A or G or is absent
XARVVMNNSLQEXXXXXXXXXYYVVPLPELQTPAXX

SEQ ID NO: 10070 - protein, 34 aa, Artificial Sequence
  Non-cyclic GFR-binding peptide
  MOD_RES (1), (34): Xaa is C or S
  MOD_RES (12), (13), (14), (15), (16): Xaa is A or G
  MOD_RES (17), (18), (19), (20): Xaa is A or G or is absent
XSRVIMEYQKYXXXXXXXXXIFLISIPSLAQPVX

SEQ ID NO: 10071 - protein, 44 aa, Artificial Sequence
  Non-cyclic GFR-binding peptide
  MOD_RES (2), (4), (38): Xaa is C or S
  MOD_RES (16), (17), (18), (19), (20): Xaa is A or G
  MOD_RES (21), (22), (23), (24): Xaa is A or G or is absent
HXGXSRVVMNNSLQEXXXXXXXXXYYVVPLPELKTPAXTPKTVH

SEQ ID NO: 10072 - protein, 39 aa, Artificial Sequence
  Non-cyclic GFR-binding peptide
  MOD_RES (2), (33), (34): Xaa is C or S
KXSKVIMNSLQEIKPTKGIYYVIPLPELDQSVXXPSASA

SEQ ID NO: 10073 - protein, 37 aa, Artificial Sequence
  Non-cyclic GFR-binding peptide
  MOD_RES (2), (33), (34): Xaa is C or S
KXSRVIMEYQKYVKPKRGVIFLISIPSLAQPVXXPAA

SEQ ID NO: 10074 - protein, 36 aa, Artificial Sequence
  Non-cyclic GFR-binding peptide
  MOD_RES (34), (35): Xaa is C or S
  MOD_RES (12), (13), (14), (15), (16): Xaa is A or G
  MOD_RES (17), (18), (19), (20): Xaa is A or G or is absent
SEVVMDRYKKLXXXXXXXXXFYLISIANLRTPVXXT

SEQ ID NO: 10075 - protein, 37 aa, Artificial Sequence
  Non-cyclic GFR-binding peptide
  MOD_RES (33), (34): Xaa is C or S
  MOD_RES (11), (12), (13), (14), (15): Xaa is A or G
  MOD_RES (16), (17), (18), (19): Xaa is A or G or is absent
EVVMDQYNKLXXXXXXXXXLYLISIASLRTPVXXTPP

SEQ ID NO: 10076 - protein, 40 aa, Artificial Sequence
  Non-cyclic GFR-binding peptide
  MOD_RES (2), (36), (37): Xaa is C or S
  MOD_RES (14), (15), (16), (17), (18): Xaa is A or G
  MOD_RES (19), (20), (21), (22): Xaa is A or G or is absent
GXGEVVMDNSLQEXXXXXXXXXYYVMPLPELETPVXXAKP

SEQ ID NO: 10077 - protein, 35 aa, Artificial Sequence
  Non-cyclic GFR-binding peptide
  MOD_RES (34), (35): Xaa is C or S
  MOD_RES (12), (13), (14), (15), (16): Xaa is A or G
  MOD_RES (17), (18), (19), (20): Xaa is A or G or is absent
SRVVMNEYQKYXXXXXXXXXIFLVSIPSLKTPAXX

SEQ ID NO: 10078 - protein, 35 aa, Artificial Sequence
  Non-cyclic GFR-binding peptide
  MOD_RES (32), (33): Xaa is C or S
SRVVMNNSLQEIVNSSDDYYLVTLPELKTPAXXPK

SEQ ID NO: 10079 - protein, 36 aa, Artificial Sequence
  Non-cyclic GFR-binding peptide
  MOD_RES (31), (32): Xaa is C or S
SRVIMNSLQEVKPKRGVYYLITLPELAQPVXXPAAS

SEQ ID NO: 10080 - protein, 38 aa, Artificial Sequence
  Non-cyclic GFR-binding peptide
  MOD_RES (32), (33): Xaa is C or S
SEVVMDNSLQEVVNNASDYYLITLPELRTPVXXTPPTS

SEQ ID NO: 10081 - protein, 41 aa, Artificial Sequence
  Non-cyclic GFR-binding peptide
  MOD_RES (2), (4), (35), (36): Xaa is C or S
SXKXSRVIMNSLQEVKPKRGVYYLITLPELAQPVXXPAASA

SEQ ID NO: 10082 - protein, 41 aa, Artificial Sequence
  Non-cyclic GFR-binding peptide
  MOD_RES (2), (36), (37): Xaa is C or S
  MOD_RES (14), (15), (16), (17), (18): Xaa is A or G
  MOD_RES (19), (20), (21), (22): Xaa is A or G or is absent
GXGEVVMENSLQEXXXXXXXXXYYLMTLPELETPVXXAKPI

SEQ ID NO: 10083 - protein, 32 aa, Artificial Sequence
  Non-cyclic GFR-binding peptide
  MOD_RES (1), (1): Xaa is C or S
XGEVVMDNSLQEVVKENEDYYVMPLPELETPV

SEQ ID NO: 10084 - protein, 32 aa, Artificial Sequence
  Non-cyclic GFR-binding peptide
  MOD_RES (32), (32): Xaa is C or S
ARVVMNNSLQEIVNSSDDYYVVPLPELQTPAX

SEQ ID NO: 10085 - protein, 38 aa, Artificial Sequence
  Non-cyclic GFR-binding peptide
  MOD_RES (33), (34): Xaa is C or S
  MOD_RES (11), (12), (13), (14), (15): Xaa is A or G
  MOD_RES (16), (17), (18), (19): Xaa is A or G or is absent
RVVMNEYQKYXXXXXXXXXIFLVSIPSLKTPAXXPKPV

SEQ ID NO: 10086 - protein, 39 aa, Artificial Sequence
  Non-cyclic GFR-binding peptide
  MOD_RES (2), (4), (36), (37): Xaa is C or S
HXGXSRVVMNNSLQEIVNSSDDYYVVPLPELKTPAXXPK

SEQ ID NO: 10087 - protein, 38 aa, Artificial Sequence
  Non-cyclic GFR-binding peptide
  MOD_RES (2), (4), (36), (37): Xaa is C or S
HXGXSRVVMNEYQKYIVNSSDDIFLVSIPSLKTPAXXP

SEQ ID NO: 10088 - protein, 40 aa, Artificial Sequence
  Non-cyclic GFR-binding peptide
  MOD_RES (2), (4), (36), (37): Xaa is C or S
RXGXSEVVMDQYNKLVVNNASDLYLISIASLRTPVXXTPP

SEQ ID NO: 10089 - protein, 42 aa, Artificial Sequence
  Non-cyclic GFR-binding peptide
  MOD_RES (2), (36), (37): Xaa is C or S
  MOD_RES (14), (15), (16), (17), (18): Xaa is A or G
  MOD_RES (19), (20), (21), (22): Xaa is A or G or is absent
GXSRVVMNEYQKYXXXXXXXXXIFLVSIPSLKTPAXXPKPVY

SEQ ID NO: 10090 - protein, 43 aa, Artificial Sequence
  Non-cyclic GFR-binding peptide
  MOD_RES (1), (3), (37), (38): Xaa is C or S
  MOD_RES (15), (16), (17), (18), (19): Xaa is A or G
  MOD_RES (20), (21), (22), (23): Xaa is A or G or is absent
XGXGEVVMENSLQEXXXXXXXXXYYVMPLPELETPVXXAKPIS

SEQ ID NO: 10091 - protein, 34 aa, Artificial Sequence
  Non-cyclic GFR-binding peptide
  MOD_RES (1), (3): Xaa is C or S
XGXGEVVMENSLQEVVKDYEDYYLMTLPELETPV

SEQ ID NO: 10092 - protein, 34 aa, Artificial Sequence
  Non-cyclic GFR-binding peptide
  MOD_RES (1), (32), (33): Xaa is C or S
XSRVIMEYQKYVKPKRGVIFLISIPSLAQPVXXP

SEQ ID NO: 10093 - protein, 36 aa, Artificial Sequence
  Non-cyclic GFR-binding peptide
  MOD_RES (1), (3), (34), (35): Xaa is C or S
XKXSKVVMNSLQEVKPTRGVYYVIPLPELDQPVXXP

SEQ ID NO: 10094 - protein, 42 aa, Artificial Sequence
  Non-cyclic GFR-binding peptide
  MOD_RES (2), (4), (36), (37): Xaa is C or S
HXGXARVVMNNSLQEIVNSSDDYYLVTLPELQTPAXXPKPVT

SEQ ID NO: 10095 - protein, 33 aa, Artificial Sequence
  Non-cyclic GFR-binding peptide
  MOD_RES (33), (33): Xaa is C or S
  MOD_RES (11), (12), (13), (14), (15): Xaa is A or G
  MOD_RES (16), (17), (18), (19): Xaa is A or G or is absent
EVVMDEYQKYXXXXXXXXXIFLMSIPSLETPVX

SEQ ID NO: 10096 - protein, 36 aa, Artificial Sequence
  Non-cyclic GFR-binding peptide
  MOD_RES (1), (35), (36): Xaa is C or S
  MOD_RES (13), (14), (15), (16), (17): Xaa is A or G
  MOD_RES (18), (19), (20), (21): Xaa is A or G or is absent
XGEVVMEEYQKYXXXXXXXXXIFLMSIPSLETPVXX

SEQ ID NO: 10097 - protein, 37 aa, Artificial Sequence
  Non-cyclic GFR-binding peptide
  MOD_RES (31), (31): Xaa is C or S
RVVMNEYQKYIVNSSDDIFLVSIPSLKTPAXTPKTVH

SEQ ID NO: 10098 - protein, 38 aa, Artificial Sequence
  Non-cyclic GFR-binding peptide
  MOD_RES (2), (4), (36), (37): Xaa is C or S
RXGXGEVVMDNSLQEVVKENEDYYVMPLPELETPVXXA

SEQ ID NO: 10099 - protein, 38 aa, Artificial Sequence
  Non-cyclic GFR-binding peptide
  MOD_RES (32), (33): Xaa is C or S
GEVVMDEYQKYVVKENEDIFLMSIPSLETPVXXAKPIK

SEQ ID NO: 10100 - protein, 31 aa, Artificial Sequence
  Non-cyclic GFR-binding peptide
ARVVMNEYQKYIVNSSDDIFLVSIPSLQTPA

SEQ ID NO: 10101 - protein, 35 aa, Artificial Sequence
  Non-cyclic GFR-binding peptide
  MOD_RES (33), (34): Xaa is C or S
  MOD_RES (11), (12), (13), (14), (15): Xaa is A or G
  MOD_RES (16), (17), (18), (19): Xaa is A or G or is absent
EVVMENSLQEXXXXXXXXXYYVMPLPELETPVXXA

SEQ ID NO: 10102 - protein, 36 aa, Artificial Sequence
  Non-cyclic GFR-binding peptide
  MOD_RES (1), (33), (34): Xaa is C or S
XGEVVMDEYQKYVVKENEDIFLMSIPSLETPVXXAK

SEQ ID NO: 10103 - protein, 40 aa, Artificial Sequence
  Non-cyclic GFR-binding peptide
  MOD_RES (2), (4), (38), (39): Xaa is C or S
  MOD_RES (16), (17), (18), (19), (20): Xaa is A or G
  MOD_RES (21), (22), (23), (24): Xaa is A or G or is absent
RXGXSEVVMDNSLQEXXXXXXXXXYYLITLPELRTPVXXT

SEQ ID NO: 10104 - protein, 34 aa, Artificial Sequence
  Non-cyclic GFR-binding peptide
  MOD_RES (34), (34): Xaa is C or S
  MOD_RES (12), (13), (14), (15), (16): Xaa is A or G
  MOD_RES (17), (18), (19), (20): Xaa is A or G or is absent
GEVVMEEYQKYXXXXXXXXXIFLMSIPSLETPVX

SEQ ID NO: 10105 - protein, 35 aa, Artificial Sequence
  Non-cyclic GFR-binding peptide
  MOD_RES (33), (34): Xaa is C or S
  MOD_RES (11), (12), (13), (14), (15): Xaa is A or G
  MOD_RES (16), (17), (18), (19): Xaa is A or G or is absent
SRVIMNSLQEXXXXXXXXXYYLITLPELAQPVXXP

SEQ ID NO: 10106 - protein, 36 aa, Artificial Sequence
  Non-cyclic GFR-binding peptide
  MOD_RES (1), (3), (35): Xaa is C or S
XGXSRVVMNNSLQEIVNSSDDYYVVPLPELKTPAXT

SEQ ID NO: 10107 - protein, 36 aa, Artificial Sequence
  Non-cyclic GFR-binding peptide
  MOD_RES (34), (35): Xaa is C or S
  MOD_RES (12), (13), (14), (15), (16): Xaa is A or G
  MOD_RES (17), (18), (19), (20): Xaa is A or G or is absent
SRVVMNNSLQEXXXXXXXXXYYLVTLPELKTPAXXP

SEQ ID NO: 10108 - protein, 37 aa, Artificial Sequence
  Non-cyclic GFR-binding peptide
  MOD_RES (2), (4), (36), (37): Xaa is C or S
RXGXSEVVMDQYNKLVVNNASDLYLISIASLRTPVXX

SEQ ID NO: 10109 - protein, 31 aa, Artificial Sequence
  Non-cyclic GFR-binding peptide
  MOD_RES (31), (31): Xaa is C or S
SRVIMEYQKYVKPKRGVIFLISIPSLAQPVX

SEQ ID NO: 10110 - protein, 37 aa, Artificial Sequence
  Non-cyclic GFR-binding peptide
  MOD_RES (2), (4), (35), (36): Xaa is C or S
SXKXSRVIMNSLQEVKPKRGVYYLITLPELAQPVXXP

SEQ ID NO: 10111 - protein, 37 aa, Artificial Sequence
  Non-cyclic GFR-binding peptide
  MOD_RES (2), (34), (35): Xaa is C or S
GXARVVMNNSLQEIVNSSDDYYVVPLPELQTPAXXPK

SEQ ID NO: 10112 - protein, 30 aa, Artificial Sequence
  Non-cyclic GFR-binding peptide
EVVMDQYNKLVVNNASDLYLISIASLRTPV

SEQ ID NO: 10113 - protein, 36 aa, Artificial Sequence
  Non-cyclic GFR-binding peptide
  MOD_RES (1), (3), (35), (36): Xaa is C or S
XGXSEVVMDNSLQEVVNNASDYYLITLPELRTPVXX

SEQ ID NO: 10114 - protein, 36 aa, Artificial Sequence
  Non-cyclic GFR-binding peptide
  MOD_RES (34), (34): Xaa is C or S
  MOD_RES (12), (13), (14), (15), (16): Xaa is A or G
  MOD_RES (17), (18), (19), (20): Xaa is A or G or is absent
SRVVMNNSLQEXXXXXXXXXYYVVPLPELKTPAXTP

SEQ ID NO: 10115 - protein, 37 aa, Artificial Sequence
  Non-cyclic GFR-binding peptide
  MOD_RES (2), (34), (35): Xaa is C or S
GXGEVVMENSLQEVVKDYEDYYLMTLPELETPVXXAK

SEQ ID NO: 10116 - protein, 38 aa, Artificial Sequence
  Non-cyclic GFR-binding peptide
  MOD_RES (1), (3), (36), (37): Xaa is C or S
  MOD_RES (14), (15), (16), (17), (18): Xaa is A or G
  MOD_RES (19), (20), (21), (22): Xaa is A or G or is absent
XKXSKVVMEYQKYXXXXXXXXXIFLISIPSLDQPVXXP

SEQ ID NO: 10117 - protein, 37 aa, Artificial Sequence
  Non-cyclic GFR-binding peptide
  MOD_RES (2), (4): Xaa is C or S
  MOD_RES (16), (17), (18), (19), (20): Xaa is A or G
  MOD_RES (21), (22), (23), (24): Xaa is A or G or is absent
HXGXSRVVMNEYQKYXXXXXXXXXIFLVSIPSLKTPA

SEQ ID NO: 10118 - protein, 38 aa, Artificial Sequence
  Non-cyclic GFR-binding peptide
  MOD_RES (1), (32), (33): Xaa is C or S
XSKVIMNSLQEIKPTKGIYYVIPLPELDQSVXXPSASA

SEQ ID NO: 10119 - protein, 41 aa, Artificial Sequence
  Non-cyclic GFR-binding peptide
  MOD_RES (2), (4), (37), (38): Xaa is C or S
  MOD_RES (15), (16), (17), (18), (19): Xaa is A or G
  MOD_RES (20), (21), (22), (23): Xaa is A or G or is absent
SXKXSKVVMNSLQEXXXXXXXXXYYVIPLPELDQPVXXPSA

SEQ ID NO: 10120 - protein, 31 aa, Artificial Sequence
  Non-cyclic GFR-binding peptide
  MOD_RES (31), (31): Xaa is C or S
RVVMNNSLQEIVNSSDDYYVVPLPELQTPAX

SEQ ID NO: 10121 - protein, 38 aa, Artificial Sequence
  Non-cyclic GFR-binding peptide
  MOD_RES (32), (33): Xaa is C or S
SRVVMNNSLQEIVNSSDDYYVVPLPELKTPAXXPKPVY

SEQ ID NO: 10122 - protein, 43 aa, Artificial Sequence
  Non-cyclic GFR-binding peptide
  MOD_RES (1), (3), (37), (38): Xaa is C or S
  MOD_RES (15), (16), (17), (18), (19): Xaa is A or G
  MOD_RES (20), (21), (22), (23): Xaa is A or G or is absent
XGXSEVVMDNSLQEXXXXXXXXXYYVIPLPELRTPVXXTPPTS

SEQ ID NO: 10123 - protein, 36 aa, Artificial Sequence
  Non-cyclic GFR-binding peptide
  MOD_RES (1), (33), (34): Xaa is C or S
XSRVVMNNSLQEIVNSSDDYYVVPLPELKTPAXXPK

SEQ ID NO: 10124 - protein, 41 aa, Artificial Sequence
  Non-cyclic GFR-binding peptide
  MOD_RES (2), (35), (36): Xaa is C or S
  MOD_RES (13), (14), (15), (16), (17): Xaa is A or G
  MOD_RES (18), (19), (20), (21): Xaa is A or G or is absent
KXSRVIMEYQKYXXXXXXXXXIFLISIPSLAQPVXXPAASA

SEQ ID NO: 10125 - protein, 37 aa, Artificial Sequence
  Non-cyclic GFR-binding peptide
  MOD_RES (33), (34): Xaa is C or S
  MOD_RES (11), (12), (13), (14), (15): Xaa is A or G
  MOD_RES (16), (17), (18), (19): Xaa is A or G or is absent
EVVMDNSLQEXXXXXXXXXYYVMPLPELETPVXXAKP

SEQ ID NO: 10126 - protein, 39 aa, Artificial Sequence
  Non-cyclic GFR-binding peptide
  MOD_RES (34), (35): Xaa is C or S
  MOD_RES (12), (13), (14), (15), (16): Xaa is A or G
  MOD_RES (17), (18), (19), (20): Xaa is A or G or is absent
SRVVMNNSLQEXXXXXXXXXYYVVPLPELKTPAXXPKPV

SEQ ID NO: 10127 - protein, 38 aa, Artificial Sequence
  Non-cyclic GFR-binding peptide
  MOD_RES (1), (3), (35), (36): Xaa is C or S
XGXSEVVMDRYKKLVVNNASDFYLISIANLRTPVXXTP

SEQ ID NO: 10128 - protein, 35 aa, Artificial Sequence
  Non-cyclic GFR-binding peptide
  MOD_RES (2), (33), (34): Xaa is C or S
KXSKVIMEYQKYIKPTKGIIFLISIPSLDQSVXXP

SEQ ID NO: 10129 - protein, 36 aa, Artificial Sequence
  Non-cyclic GFR-binding peptide
  MOD_RES (2), (4), (36): Xaa is C or S
RXGXSEVVMDRYKKLVVNNASDFYLISIANLRTPVX

SEQ ID NO: 10130 - protein, 35 aa, Artificial Sequence
  Non-cyclic GFR-binding peptide
  MOD_RES (1), (33), (34): Xaa is C or S
XSRVVMNNSLQEIVNSSDDYYLVTLPELKTPAXXP

SEQ ID NO: 10131 - protein, 36 aa, Artificial Sequence
  Non-cyclic GFR-binding peptide
  MOD_RES (2), (4): Xaa is C or S
  MOD_RES (15), (16), (17), (18), (19): Xaa is A or G
  MOD_RES (20), (21), (22), (23): Xaa is A or G or is absent
SXKXSRVIMNSLQEXXXXXXXXXYYLITLPELAQPV

SEQ ID NO: 10132 - protein, 33 aa, Artificial Sequence
  Non-cyclic GFR-binding peptide
  MOD_RES (12), (13), (14), (15), (16): Xaa is A or G
  MOD_RES (17), (18), (19), (20): Xaa is A or G or is absent
GEVVMDEYQKYXXXXXXXXXIFLMSIPSLETPV

SEQ ID NO: 10133 - protein, 39 aa, Artificial Sequence
  Non-cyclic GFR-binding peptide
  MOD_RES (2), (4), (38): Xaa is C or S
  MOD_RES (16), (17), (18), (19), (20): Xaa is A or G
  MOD_RES (21), (22), (23), (24): Xaa is A or G or is absent
HXGXSRVVMNEYQKYXXXXXXXXXIFLVSIPSLKTPAXT

SEQ ID NO: 10134 - protein, 34 aa, Artificial Sequence
  Non-cyclic GFR-binding peptide
  MOD_RES (34), (34): Xaa is C or S
  MOD_RES (12), (13), (14), (15), (16): Xaa is A or G
  MOD_RES (17), (18), (19), (20): Xaa is A or G or is absent
SRVVMNEYQKYXXXXXXXXXIFLVSIPSLKTPAX

SEQ ID NO: 10135 - protein, 33 aa, Artificial Sequence
  Non-cyclic GFR-binding peptide
  MOD_RES (32), (33): Xaa is C or S
SRVVMNNSLQEIVNSSDDYYVVPLPELKTPAXX

SEQ ID NO: 10136 - protein, 35 aa, Artificial Sequence
  Non-cyclic GFR-binding peptide
  MOD_RES (1), (34), (35): Xaa is C or S
  MOD_RES (12), (13), (14), (15), (16): Xaa is A or G
  MOD_RES (17), (18), (19), (20): Xaa is A or G or is absent
XSKVVMNSLQEXXXXXXXXXYYVIPLPELDQPVXX

SEQ ID NO: 10137 - protein, 37 aa, Artificial Sequence
  Non-cyclic GFR-binding peptide
  MOD_RES (33), (34): Xaa is C or S
  MOD_RES (11), (12), (13), (14), (15): Xaa is A or G
  MOD_RES (16), (17), (18), (19): Xaa is A or G or is absent
RVVMNNSLQEXXXXXXXXXYYLVTLPELKTPAXXPKP

SEQ ID NO: 10138 - protein, 35 aa, Artificial Sequence
  Non-cyclic GFR-binding peptide
  MOD_RES (1), (3): Xaa is C or S
  MOD_RES (14), (15), (16), (17), (18): Xaa is A or G
  MOD_RES (19), (20), (21), (22): Xaa is A or G or is absent
XKXSKVVMNSLQEXXXXXXXXXYYVIPLPELDQPV

SEQ ID NO: 10139 - protein, 36 aa, Artificial Sequence
  Non-cyclic GFR-binding peptide
  MOD_RES (2), (33), (34): Xaa is C or S
KXSKVIMNSLQEIKPTKGIYYVIPLPELDQSVXXPS

SEQ ID NO: 10140 - protein, 36 aa, Artificial Sequence
  Non-cyclic GFR-binding peptide
  MOD_RES (32), (33): Xaa is C or S
GEVVMDNSLQEVVKENEDYYLMTLPELETPVXXAKP

SEQ ID NO: 10141 - protein, 36 aa, Artificial Sequence
  Non-cyclic GFR-binding peptide
  MOD_RES (2), (36): Xaa is C or S
  MOD_RES (14), (15), (16), (17), (18): Xaa is A or G
  MOD_RES (19), (20), (21), (22): Xaa is A or G or is absent
GXSEVVMDQYNKLXXXXXXXXXLYLISIASLRTPVX

SEQ ID NO: 10142 - protein, 38 aa, Artificial Sequence
  Non-cyclic GFR-binding peptide
  MOD_RES (2), (36), (37): Xaa is C or S
  MOD_RES (14), (15), (16), (17), (18): Xaa is A or G
  MOD_RES (19), (20), (21), (22): Xaa is A or G or is absent
GXARVVMNEYQKYXXXXXXXXXIFLVSIPSLQTPAXXP

SEQ ID NO: 10143 - protein, 41 aa, Artificial Sequence
  Non-cyclic GFR-binding peptide
  MOD_RES (2), (4), (35), (36): Xaa is C or S
SXKXSKVIMEYQKYIKPTKGIIFLISIPSLDQSVXXPSASA

SEQ ID NO: 10144 - protein, 34 aa, Artificial Sequence
  Non-cyclic GFR-binding peptide
  MOD_RES (33), (34): Xaa is C or S
  MOD_RES (11), (12), (13), (14), (15): Xaa is A or G
  MOD_RES (16), (17), (18), (19): Xaa is A or G or is absent
SKVVMEYQKYXXXXXXXXXIFLISIPSLDQPVXX

SEQ ID NO: 10145 - protein, 32 aa, Artificial Sequence
  Non-cyclic GFR-binding peptide
  MOD_RES (11), (12), (13), (14), (15): Xaa is A or G
  MOD_RES (16), (17), (18), (19): Xaa is A or G or is absent
RVVMNNSLQEXXXXXXXXXYYLVTLPELKTPA

SEQ ID NO: 10146 - protein, 34 aa, Artificial Sequence
  Non-cyclic GFR-binding peptide
  MOD_RES (1), (33), (34): Xaa is C or S
XGEVVMENSLQEVVKDYEDYYVMPLPELETPVXX

SEQ ID NO: 10147 - protein, 41 aa, Artificial Sequence
  Non-cyclic GFR-binding peptide
  MOD_RES (2), (4), (36), (37): Xaa is C or S
RXGXGEVVMEEYQKYVVKDYEDIFLMSIPSLETPVXXAKPI

SEQ ID NO: 10148 - protein, 42 aa, Artificial Sequence
  Non-cyclic GFR-binding peptide
  MOD_RES (1), (3), (36), (37): Xaa is C or S
  MOD_RES (14), (15), (16), (17), (18): Xaa is A or G
  MOD_RES (19), (20), (21), (22): Xaa is A or G or is absent
XKXSKVIMNSLQEXXXXXXXXXYYVIPLPELDQSVXXPSASA

SEQ ID NO: 10149 - protein, 37 aa, Artificial Sequence
  Non-cyclic GFR-binding peptide
  MOD_RES (2), (4), (36), (37): Xaa is C or S
RXGXSEVVMDRYKKLVVNNASDFYLISIANLRTPVXX

SEQ ID NO: 10150 - protein, 36 aa, Artificial Sequence
  Non-cyclic GFR-binding peptide
  MOD_RES (32), (33): Xaa is C or S
GEVVMDNSLQEVVKENEDYYVMPLPELETPVXXAKP

SEQ ID NO: 10151 - protein, 42 aa, Artificial Sequence
  Non-cyclic GFR-binding peptide
  MOD_RES (2), (4), (37), (38): Xaa is C or S
  MOD_RES (15), (16), (17), (18), (19): Xaa is A or G
  MOD_RES (20), (21), (22), (23): Xaa is A or G or is absent
SXKXSRVIMNSLQEXXXXXXXXXYYLITLPELAQPVXXPAAS

SEQ ID NO: 10152 - protein, 41 aa, Artificial Sequence
  Non-cyclic GFR-binding peptide
  MOD_RES (1), (3), (37), (38): Xaa is C or S
  MOD_RES (15), (16), (17), (18), (19): Xaa is A or G
  MOD_RES (20), (21), (22), (23): Xaa is A or G or is absent
XGXSRVVMNNSLQEXXXXXXXXXYYVVPLPELKTPAXXPKP

SEQ ID NO: 10153 - protein, 38 aa, Artificial Sequence
  Non-cyclic GFR-binding peptide
  MOD_RES (32), (33): Xaa is C or S
GEVVMDNSLQEVVKENEDYYLMTLPELETPVXXAKPIK

SEQ ID NO: 10154 - protein, 32 aa, Artificial Sequence
  Non-cyclic GFR-binding peptide
  MOD_RES (32), (32): Xaa is C or S
ARVVMNNSLQEIVNSSDDYYLVTLPELQTPAX

SEQ ID NO: 10155 - protein, 39 aa, Artificial Sequence
  Non-cyclic GFR-binding peptide
  MOD_RES (1), (35), (36): Xaa is C or S
  MOD_RES (13), (14), (15), (16), (17): Xaa is A or G
  MOD_RES (18), (19), (20), (21): Xaa is A or G or is absent
XARVVMNNSLQEXXXXXXXXXYYVVPLPELQTPAXXPKP

SEQ ID NO: 10156 - protein, 38 aa, Artificial Sequence
  Non-cyclic GFR-binding peptide
  MOD_RES (2), (4), (36): Xaa is C or S
HXGXSRVVMNNSLQEIVNSSDDYYVVPLPELKTPAXTP

SEQ ID NO: 10157 - protein, 41 aa, Artificial Sequence
  Non-cyclic GFR-binding peptide
  MOD_RES (1), (35), (36): Xaa is C or S
  MOD_RES (13), (14), (15), (16), (17): Xaa is A or G
  MOD_RES (18), (19), (20), (21): Xaa is A or G or is absent
XSRVVMNNSLQEXXXXXXXXXYYVVPLPELKTPAXXPKPVY

SEQ ID NO: 10158 - protein, 42 aa, Artificial Sequence
  Non-cyclic GFR-binding peptide
  MOD_RES (2), (4), (38): Xaa is C or S
  MOD_RES (16), (17), (18), (19), (20): Xaa is A or G
  MOD_RES (21), (22), (23), (24): Xaa is A or G or is absent
HXGXSRVVMNNSLQEXXXXXXXXXYYLVTLPELKTPAXTPKT

SEQ ID NO: 10159 - protein, 39 aa, Artificial Sequence
  Non-cyclic GFR-binding peptide
  MOD_RES (1), (3), (37): Xaa is C or S
  MOD_RES (15), (16), (17), (18), (19): Xaa is A or G
  MOD_RES (20), (21), (22), (23): Xaa is A or G or is absent
XGXSRVVMNEYQKYXXXXXXXXXIFLVSIPSLKTPAXTP

SEQ ID NO: 10160 - protein, 36 aa, Artificial Sequence
  Non-cyclic GFR-binding peptide
  MOD_RES (31), (32): Xaa is C or S
EVVMDQYNKLVVNNASDLYLISIASLRTPVXXTPPT

SEQ ID NO: 10161 - protein, 39 aa, Artificial Sequence
  Non-cyclic GFR-binding peptide
  MOD_RES (2), (4), (38), (39): Xaa is C or S
  MOD_RES (16), (17), (18), (19), (20): Xaa is A or G
  MOD_RES (21), (22), (23), (24): Xaa is A or G or is absent
RXGXSEVVMDQYNKLXXXXXXXXXLYLISIASLRTPVXX

SEQ ID NO: 10162 - protein, 38 aa, Artificial Sequence
  Non-cyclic GFR-binding peptide
  MOD_RES (1), (35), (36): Xaa is C or S
  MOD_RES (13), (14), (15), (16), (17): Xaa is A or G
  MOD_RES (18), (19), (20), (21): Xaa is A or G or is absent
XSEVVMDNSLQEXXXXXXXXXYYVIPLPELRTPVXXTP

SEQ ID NO: 10163 - protein, 40 aa, Artificial Sequence
  Non-cyclic GFR-binding peptide
  MOD_RES (1), (3), (34), (35): Xaa is C or S
XKXSRVIMEYQKYVKPKRGVIFLISIPSLAQPVXXPAASA

SEQ ID NO: 10164 - protein, 31 aa, Artificial Sequence
  Non-cyclic GFR-binding peptide
SEVVMDQYNKLVVNNASDLYLISIASLRTPV

SEQ ID NO: 10165 - protein, 33 aa, Artificial Sequence
  Non-cyclic GFR-binding peptide
  MOD_RES (2), (33): Xaa is C or S
KXSKVIMNSLQEIKPTKGIYYVIPLPELDQSVX

SEQ ID NO: 10166 - protein, 37 aa, Artificial Sequence
  Non-cyclic GFR-binding peptide
  MOD_RES (34), (35): Xaa is C or S
  MOD_RES (12), (13), (14), (15), (16): Xaa is A or G
  MOD_RES (17), (18), (19), (20): Xaa is A or G or is absent
ARVVMNNSLQEXXXXXXXXXYYVVPLPELQTPAXXPK

SEQ ID NO: 10167 - protein, 36 aa, Artificial Sequence
  Non-cyclic GFR-binding peptide
  MOD_RES (1), (3), (35): Xaa is C or S
XGXSRVVMNEYQKYIVNSSDDIFLVSIPSLKTPAXT

SEQ ID NO: 10168 - protein, 39 aa, Artificial Sequence
  Non-cyclic GFR-binding peptide
  MOD_RES (2), (36), (37): Xaa is C or S
  MOD_RES (14), (15), (16), (17), (18): Xaa is A or G
  MOD_RES (19), (20), (21), (22): Xaa is A or G or is absent
GXSRVVMNEYQKYXXXXXXXXXIFLVSIPSLKTPAXXPK

SEQ ID NO: 10169 - protein, 38 aa, Artificial Sequence
  Non-cyclic GFR-binding peptide
  MOD_RES (1), (3), (35), (36): Xaa is C or S
XGXGEVVMENSLQEVVKDYEDYYVMPLPELETPVXXAK

SEQ ID NO: 10170 - protein, 32 aa, Artificial Sequence
  Non-cyclic GFR-binding peptide
  MOD_RES (31), (32): Xaa is C or S
RVVMNEYQKYIVNSSDDIFLVSIPSLQTPAXX

SEQ ID NO: 10171 - protein, 38 aa, Artificial Sequence
  Non-cyclic GFR-binding peptide
  MOD_RES (2), (4), (35), (36): Xaa is C or S
SXKXSKVIMEYQKYIKPTKGIIFLISIPSLDQSVXXPS

SEQ ID NO: 10172 - protein, 38 aa, Artificial Sequence
  Non-cyclic GFR-binding peptide
  MOD_RES (32), (33): Xaa is C or S
SEVVMDNSLQEVVNNASDYYVIPLPELRTPVXXTPPTS

SEQ ID NO: 10173 - protein, 35 aa, Artificial Sequence
  Non-cyclic GFR-binding peptide
  MOD_RES (2), (33), (34): Xaa is C or S
KXSKVVMNSLQEVKPTRGVYYVIPLPELDQPVXXP

SEQ ID NO: 10174 - protein, 37 aa, Artificial Sequence
  Non-cyclic GFR-binding peptide
  MOD_RES (32), (32): Xaa is C or S
SRVVMNNSLQEIVNSSDDYYLVTLPELKTPAXTPKTV

SEQ ID NO: 10175 - protein, 35 aa, Artificial Sequence
  Non-cyclic GFR-binding peptide
  MOD_RES (31), (32): Xaa is C or S
SKVIMEYQKYIKPTKGIIFLISIPSLDQSVXXPSA

SEQ ID NO: 10176 - protein, 41 aa, Artificial Sequence
  Non-cyclic GFR-binding peptide
  MOD_RES (2), (4), (36), (37): Xaa is C or S
RXGXGEVVMENSLQEVVKDYEDYYLMTLPELETPVXXAKPI

SEQ ID NO: 10177 - protein, 37 aa, Artificial Sequence
  Non-cyclic GFR-binding peptide
  MOD_RES (34), (35): Xaa is C or S
  MOD_RES (12), (13), (14), (15), (16): Xaa is A or G
  MOD_RES (17), (18), (19), (20): Xaa is A or G or is absent
SRVVMNNSLQEXXXXXXXXXYYVVPLPELKTPAXXPK

SEQ ID NO: 10178 - protein, 40 aa, Artificial Sequence
  Non-cyclic GFR-binding peptide
  MOD_RES (2), (34), (35): Xaa is C or S
GXGEVVMENSLQEVVKDYEDYYLMTLPELETPVXXAKPIS

SEQ ID NO: 10179 - protein, 35 aa, Artificial Sequence
  Non-cyclic GFR-binding peptide
  MOD_RES (2), (2): Xaa is C or S
  MOD_RES (14), (15), (16), (17), (18): Xaa is A or G
  MOD_RES (19), (20), (21), (22): Xaa is A or G or is absent
GXGEVVMDNSLQEXXXXXXXXXYYVMPLPELETPV

SEQ ID NO: 10180 - protein, 32 aa, Artificial Sequence
  Non-cyclic GFR-binding peptide
  MOD_RES (11), (12), (13), (14), (15): Xaa is A or G
  MOD_RES (16), (17), (18), (19): Xaa is A or G or is absent
EVVMDNSLQEXXXXXXXXXYYLITLPELRTPV

SEQ ID NO: 10181 - protein, 40 aa, Artificial Sequence
  Non-cyclic GFR-binding peptide
  MOD_RES (2), (34), (35): Xaa is C or S
GXARVVMNNSLQEIVNSSDDYYLVTLPELQTPAXXPKPVT

SEQ ID NO: 10182 - protein, 33 aa, Artificial Sequence
  Non-cyclic GFR-binding peptide
  MOD_RES (32), (33): Xaa is C or S
SRVVMNNSLQEIVNSSDDYYLVTLPELKTPAXX

SEQ ID NO: 10183 - protein, 35 aa, Artificial Sequence
  Non-cyclic GFR-binding peptide
  MOD_RES (2), (2): Xaa is C or S
  MOD_RES (14), (15), (16), (17), (18): Xaa is A or G
  MOD_RES (19), (20), (21), (22): Xaa is A or G or is absent
GXSEVVMDQYNKLXXXXXXXXXLYLISIASLRTPV

SEQ ID NO: 10184 - protein, 35 aa, Artificial Sequence
  Non-cyclic GFR-binding peptide
  MOD_RES (1), (35): Xaa is C or S
  MOD_RES (13), (14), (15), (16), (17): Xaa is A or G
  MOD_RES (18), (19), (20), (21): Xaa is A or G or is absent
XARVVMNNSLQEXXXXXXXXXYYVVPLPELQTPAX

SEQ ID NO: 10185 - protein, 39 aa, Artificial Sequence
  Non-cyclic GFR-binding peptide
  MOD_RES (2), (33), (34): Xaa is C or S
KXSKVVMEYQKYVKPTRGVIFLISIPSLDQPVXXPSASA

SEQ ID NO: 10186 - protein, 41 aa, Artificial Sequence
  Non-cyclic GFR-binding peptide
  MOD_RES (2), (36), (37): Xaa is C or S
  MOD_RES (14), (15), (16), (17), (18): Xaa is A or G
  MOD_RES (19), (20), (21), (22): Xaa is A or G or is absent
GXSRVVMNNSLQEXXXXXXXXXYYLVTLPELKTPAXXPKPV

SEQ ID NO: 10187 - protein, 35 aa, Artificial Sequence
  Non-cyclic GFR-binding peptide
  MOD_RES (1), (35): Xaa is C or S
  MOD_RES (13), (14), (15), (16), (17): Xaa is A or G
  MOD_RES (18), (19), (20), (21): Xaa is A or G or is absent
XGEVVMEEYQKYXXXXXXXXXIFLMSIPSLETPVX

SEQ ID NO: 10188 - protein, 39 aa, Artificial Sequence
  Non-cyclic GFR-binding peptide
  MOD_RES (1), (3), (37), (38): Xaa is C or S
  MOD_RES (15), (16), (17), (18), (19): Xaa is A or G
  MOD_RES (20), (21), (22), (23): Xaa is A or G or is absent
XGXSRVVMNEYQKYXXXXXXXXXIFLVSIPSLKTPAXXP

SEQ ID NO: 10189 - protein, 39 aa, Artificial Sequence
  Non-cyclic GFR-binding peptide
  MOD_RES (33), (34): Xaa is C or S
  MOD_RES (11), (12), (13), (14), (15): Xaa is A or G
  MOD_RES (16), (17), (18), (19): Xaa is A or G or is absent
SKVVMNSLQEXXXXXXXXXYYVIPLPELDQPVXXPSASA

SEQ ID NO: 10190 - protein, 35 aa, Artificial Sequence
  Non-cyclic GFR-binding peptide
  MOD_RES (32), (33): Xaa is C or S
GEVVMDEYQKYVVKENEDIFLMSIPSLETPVXXAK

SEQ ID NO: 10191 - protein, 42 aa, Artificial Sequence
  Non-cyclic GFR-binding peptide
  MOD_RES (2), (36), (37): Xaa is C or S
  MOD_RES (14), (15), (16), (17), (18): Xaa is A or G
  MOD_RES (19), (20), (21), (22): Xaa is A or G or is absent
GXSEVVMDNSLQEXXXXXXXXXYYLITLPELRTPVXXTPPTS

SEQ ID NO: 10192 - protein, 36 aa, Artificial Sequence
  Non-cyclic GFR-binding peptide
  MOD_RES (2), (4), (36): Xaa is C or S
RXGXSEVVMDNSLQEVVNNASDYYLITLPELRTPVX

SEQ ID NO: 10193 - protein, 37 aa, Artificial Sequence
  Non-cyclic GFR-binding peptide
  MOD_RES (1), (3), (35), (36): Xaa is C or S
XGXSEVVMDQYNKLVVNNASDLYLISIASLRTPVXXT

SEQ ID NO: 10194 - protein, 38 aa, Artificial Sequence
  Non-cyclic GFR-binding peptide
  MOD_RES (1), (3), (37), (38): Xaa is C or S
  MOD_RES (15), (16), (17), (18), (19): Xaa is A or G
  MOD_RES (20), (21), (22), (23): Xaa is A or G or is absent
XGXSEVVMDQYNKLXXXXXXXXXLYLISIASLRTPVXX

SEQ ID NO: 10195 - protein, 35 aa, Artificial Sequence
  Non-cyclic GFR-binding peptide
  MOD_RES (32), (32): Xaa is C or S
SRVVMNNSLQEIVNSSDDYYVVPLPELKTPAXTPK

SEQ ID NO: 10196 - protein, 39 aa, Artificial Sequence
  Non-cyclic GFR-binding peptide
  MOD_RES (1), (3), (36), (37): Xaa is C or S
  MOD_RES (14), (15), (16), (17), (18): Xaa is A or G
  MOD_RES (19), (20), (21), (22): Xaa is A or G or is absent
XKXSKVIMEYQKYXXXXXXXXXIFLISIPSLDQSVXXPS

SEQ ID NO: 10197 - protein, 36 aa, Artificial Sequence
  Non-cyclic GFR-binding peptide
  MOD_RES (2), (4), (36): Xaa is C or S
RXGXSEVVMDQYNKLVVNNASDLYLISIASLRTPVX

SEQ ID NO: 10198 - protein, 41 aa, Artificial Sequence
  Non-cyclic GFR-binding peptide
  MOD_RES (2), (35), (36): Xaa is C or S
  MOD_RES (13), (14), (15), (16), (17): Xaa is A or G
  MOD_RES (18), (19), (20), (21): Xaa is A or G or is absent
KXSKVIMEYQKYXXXXXXXXXIFLISIPSLDQSVXXPSASA

SEQ ID NO: 10199 - protein, 37 aa, Artificial Sequence
  Non-cyclic GFR-binding peptide
  MOD_RES (2), (4), (37): Xaa is C or S
  MOD_RES (15), (16), (17), (18), (19): Xaa is A or G
  MOD_RES (20), (21), (22), (23): Xaa is A or G or is absent
SXKXSRVIMEYQKYXXXXXXXXXIFLISIPSLAQPVX

SEQ ID NO: 10200 - protein, 33 aa, Artificial Sequence
  Non-cyclic GFR-binding peptide
  MOD_RES (33), (33): Xaa is C or S
  MOD_RES (11), (12), (13), (14), (15): Xaa is A or G
  MOD_RES (16), (17), (18), (19): Xaa is A or G or is absent
EVVMDRYKKLXXXXXXXXXFYLISIANLRTPVX

SEQ ID NO: 10201 - protein, 36 aa, Artificial Sequence
  Non-cyclic GFR-binding peptide
  MOD_RES (2), (34): Xaa is C or S
GXSRVVMNNSLQEIVNSSDDYYVVPLPELKTPAXTP

SEQ ID NO: 10202 - protein, 39 aa, Artificial Sequence
  Non-cyclic GFR-binding peptide
  MOD_RES (1), (3), (35): Xaa is C or S
XGXSRVVMNNSLQEIVNSSDDYYLVTLPELKTPAXTPKT

SEQ ID NO: 10203 - protein, 34 aa, Artificial Sequence
  Non-cyclic GFR-binding peptide
  MOD_RES (31), (32): Xaa is C or S
EVVMDNSLQEVVKENEDYYLMTLPELETPVXXAK

SEQ ID NO: 10204 - protein, 32 aa, Artificial Sequence
  Non-cyclic GFR-binding peptide
  MOD_RES (11), (12), (13), (14), (15): Xaa is A or G
  MOD_RES (16), (17), (18), (19): Xaa is A or G or is absent
SKVVMEYQKYXXXXXXXXXIFLISIPSLDQPV

SEQ ID NO: 10205 - protein, 37 aa, Artificial Sequence
  Non-cyclic GFR-binding peptide
  MOD_RES (33), (34): Xaa is C or S
  MOD_RES (11), (12), (13), (14), (15): Xaa is A or G
  MOD_RES (16), (17), (18), (19): Xaa is A or G or is absent
RVVMNNSLQEXXXXXXXXXYYVVPLPELKTPAXXPKP

SEQ ID NO: 10206 - protein, 42 aa, Artificial Sequence
  Non-cyclic GFR-binding peptide
  MOD_RES (2), (36), (37): Xaa is C or S
  MOD_RES (14), (15), (16), (17), (18): Xaa is A or G
  MOD_RES (19), (20), (21), (22): Xaa is A or G or is absent
GXGEVVMENSLQEXXXXXXXXXYYVMPLPELETPVXXAKPIS

SEQ ID NO: 10207 - protein, 33 aa, Artificial Sequence
  Non-cyclic GFR-binding peptide
  MOD_RES (1), (32), (33): Xaa is C or S
XSRVIMNSLQEVKPKRGVYYLITLPELAQPVXX

SEQ ID NO: 10208 - protein, 33 aa, Artificial Sequence
  Non-cyclic GFR-binding peptide
  MOD_RES (31), (32): Xaa is C or S
SRVIMNSLQEVKPKRGVYYLITLPELAQPVXXP

SEQ ID NO: 10209 - protein, 40 aa, Artificial Sequence
  Non-cyclic GFR-binding peptide
  MOD_RES (1), (3), (35): Xaa is C or S
XGXSRVVMNEYQKYIVNSSDDIFLVSIPSLKTPAXTPKTV

SEQ ID NO: 10210 - protein, 38 aa, Artificial Sequence
  Non-cyclic GFR-binding peptide
  MOD_RES (1), (33), (34): Xaa is C or S
XSRVVMNNSLQEIVNSSDDYYVVPLPELKTPAXXPKPV

SEQ ID NO: 10211 - protein, 37 aa, Artificial Sequence
  Non-cyclic GFR-binding peptide
  MOD_RES (1), (3), (36), (37): Xaa is C or S
  MOD_RES (14), (15), (16), (17), (18): Xaa is A or G
  MOD_RES (19), (20), (21), (22): Xaa is A or G or is absent
XKXSKVVMNSLQEXXXXXXXXXYYVIPLPELDQPVXX

SEQ ID NO: 10212 - protein, 36 aa, Artificial Sequence
  Non-cyclic GFR-binding peptide
  MOD_RES (32), (33): Xaa is C or S
GEVVMENSLQEVVKDYEDYYLMTLPELETPVXXAKP

SEQ ID NO: 10213 - protein, 38 aa, Artificial Sequence
  Non-cyclic GFR-binding peptide
  MOD_RES (34), (35): Xaa is C or S
  MOD_RES (12), (13), (14), (15), (16): Xaa is A or G
  MOD_RES (17), (18), (19), (20): Xaa is A or G or is absent
SRVVMNEYQKYXXXXXXXXXIFLVSIPSLKTPAXXPKP

SEQ ID NO: 10214 - protein, 40 aa, Artificial Sequence
  Non-cyclic GFR-binding peptide
  MOD_RES (34), (34): Xaa is C or S
  MOD_RES (12), (13), (14), (15), (16): Xaa is A or G
  MOD_RES (17), (18), (19), (20): Xaa is A or G or is absent
SRVVMNNSLQEXXXXXXXXXYYVVPLPELKTPAXTPKTVH

SEQ ID NO: 10215 - protein, 38 aa, Artificial Sequence
  Non-cyclic GFR-binding peptide
  MOD_RES (2), (34), (35): Xaa is C or S
GXSEVVMDNSLQEVVNNASDYYLITLPELRTPVXXTPP

SEQ ID NO: 10216 - protein, 41 aa, Artificial Sequence
  Non-cyclic GFR-binding peptide
  MOD_RES (2), (4), (35), (36): Xaa is C or S
SXKXSKVIMNSLQEIKPTKGIYYVIPLPELDQSVXXPSASA

SEQ ID NO: 10217 - protein, 33 aa, Artificial Sequence
  Non-cyclic GFR-binding peptide
  MOD_RES (2), (33): Xaa is C or S
KXSRVIMNSLQEVKPKRGVYYLITLPELAQPVX

SEQ ID NO: 10218 - protein, 38 aa, Artificial Sequence
  Non-cyclic GFR-binding peptide
  MOD_RES (2), (36), (37): Xaa is C or S
  MOD_RES (14), (15), (16), (17), (18): Xaa is A or G
  MOD_RES (19), (20), (21), (22): Xaa is A or G or is absent
GXARVVMNNSLQEXXXXXXXXXYYLVTLPELQTPAXXP

SEQ ID NO: 10219 - protein, 30 aa, Artificial Sequence
  Non-cyclic GFR-binding peptide
EVVMDEYQKYVVKENEDIFLMSIPSLETPV

SEQ ID NO: 10220 - protein, 39 aa, Artificial Sequence
  Non-cyclic GFR-binding peptide
  MOD_RES (1), (3), (34), (35): Xaa is C or S
XKXSRVIMEYQKYVKPKRGVIFLISIPSLAQPVXXPAAS

SEQ ID NO: 10221 - protein, 34 aa, Artificial Sequence
  Non-cyclic GFR-binding peptide
  MOD_RES (1), (1): Xaa is C or S
  MOD_RES (13), (14), (15), (16), (17): Xaa is A or G
  MOD_RES (18), (19), (20), (21): Xaa is A or G or is absent
XSRVVMNNSLQEXXXXXXXXXYYLVTLPELKTPA

SEQ ID NO: 10222 - protein, 41 aa, Artificial Sequence
  Non-cyclic GFR-binding peptide
  MOD_RES (2), (4), (36), (37): Xaa is C or S
HXGXARVVMNNSLQEIVNSSDDYYVVPLPELQTPAXXPKPV

SEQ ID NO: 10223 - protein, 40 aa, Artificial Sequence
  Non-cyclic GFR-binding peptide
  MOD_RES (1), (3), (37), (38): Xaa is C or S
  MOD_RES (15), (16), (17), (18), (19): Xaa is A or G
  MOD_RES (20), (21), (22), (23): Xaa is A or G or is absent
XGXSEVVMDQYNKLXXXXXXXXXLYLISIASLRTPVXXTP

SEQ ID NO: 10224 - protein, 40 aa, Artificial Sequence
  Non-cyclic GFR-binding peptide
  MOD_RES (34), (35): Xaa is C or S
  MOD_RES (12), (13), (14), (15), (16): Xaa is A or G
  MOD_RES (17), (18), (19), (20): Xaa is A or G or is absent
SEVVMDNSLQEXXXXXXXXXYYLITLPELRTPVXXTPPTS

SEQ ID NO: 10225 - protein, 36 aa, Artificial Sequence
  Non-cyclic GFR-binding peptide
  MOD_RES (34), (35): Xaa is C or S
  MOD_RES (12), (13), (14), (15), (16): Xaa is A or G
  MOD_RES (17), (18), (19), (20): Xaa is A or G or is absent
ARVVMNNSLQEXXXXXXXXXYYLVTLPELQTPAXXP

SEQ ID NO: 10226 - protein, 36 aa, Artificial Sequence
  Non-cyclic GFR-binding peptide
  MOD_RES (1), (3), (35), (36): Xaa is C or S
XGXARVVMNEYQKYIVNSSDDIFLVSIPSLQTPAXX

SEQ ID NO: 10227 - protein, 36 aa, Artificial Sequence
  Non-cyclic GFR-binding peptide
  MOD_RES (31), (32): Xaa is C or S
EVVMENSLQEVVKDYEDYYVMPLPELETPVXXAKPI

SEQ ID NO: 10228 - protein, 36 aa, Artificial Sequence
  Non-cyclic GFR-binding peptide
  MOD_RES (31), (32): Xaa is C or S
EVVMENSLQEVVKDYEDYYLMTLPELETPVXXAKPI

SEQ ID NO: 10229 - protein, 37 aa, Artificial Sequence
  Non-cyclic GFR-binding peptide
  MOD_RES (2), (4): Xaa is C or S
  MOD_RES (16), (17), (18), (19), (20): Xaa is A or G
  MOD_RES (21), (22), (23), (24): Xaa is A or G or is absent
RXGXSEVVMDNSLQEXXXXXXXXXYYLITLPELRTPV

SEQ ID NO: 10230 - protein, 34 aa, Artificial Sequence
  Non-cyclic GFR-binding peptide
  MOD_RES (2), (34): Xaa is C or S
GXSEVVMDNSLQEVVNNASDYYVIPLPELRTPVX

SEQ ID NO: 10231 - protein, 34 aa, Artificial Sequence
  Non-cyclic GFR-binding peptide
  MOD_RES (2), (34): Xaa is C or S
GXGEVVMDNSLQEVVKENEDYYLMTLPELETPVX

SEQ ID NO: 10232 - protein, 36 aa, Artificial Sequence
  Non-cyclic GFR-binding peptide
  MOD_RES (1), (32), (33): Xaa is C or S
XSKVVMEYQKYVKPTRGVIFLISIPSLDQPVXXPSA

SEQ ID NO: 10233 - protein, 41 aa, Artificial Sequence
  Non-cyclic GFR-binding peptide
  MOD_RES (1), (35), (36): Xaa is C or S
  MOD_RES (13), (14), (15), (16), (17): Xaa is A or G
  MOD_RES (18), (19), (20), (21): Xaa is A or G or is absent
XSEVVMDNSLQEXXXXXXXXXYYVIPLPELRTPVXXTPPTS

SEQ ID NO: 10234 - protein, 40 aa, Artificial Sequence
  Non-cyclic GFR-binding peptide
  MOD_RES (2), (4), (38), (39): Xaa is C or S
  MOD_RES (16), (17), (18), (19), (20): Xaa is A or G
  MOD_RES (21), (22), (23), (24): Xaa is A or G or is absent
HXGXARVVMNNSLQEXXXXXXXXXYYLVTLPELQTPAXXP

SEQ ID NO: 10235 - protein, 35 aa, Artificial Sequence
  Non-cyclic GFR-binding peptide
  MOD_RES (2), (4), (35): Xaa is C or S
SXKXSRVIMEYQKYVKPKRGVIFLISIPSLAQPVX

SEQ ID NO: 10236 - protein, 39 aa, Artificial Sequence
  Non-cyclic GFR-binding peptide
  MOD_RES (1), (3), (36), (37): Xaa is C or S
  MOD_RES (14), (15), (16), (17), (18): Xaa is A or G
  MOD_RES (19), (20), (21), (22): Xaa is A or G or is absent
XKXSRVIMEYQKYXXXXXXXXXIFLISIPSLAQPVXXPA

SEQ ID NO: 10237 - protein, 34 aa, Artificial Sequence
  Non-cyclic GFR-binding peptide
  MOD_RES (31), (32): Xaa is C or S
EVVMDNSLQEVVKENEDYYVMPLPELETPVXXAK

SEQ ID NO: 10238 - protein, 37 aa, Artificial Sequence
  Non-cyclic GFR-binding peptide
  MOD_RES (33), (34): Xaa is C or S
  MOD_RES (11), (12), (13), (14), (15): Xaa is A or G
  MOD_RES (16), (17), (18), (19): Xaa is A or G or is absent
SKVIMNSLQEXXXXXXXXXYYVIPLPELDQSVXXPSA

SEQ ID NO: 10239 - protein, 38 aa, Artificial Sequence
  Non-cyclic GFR-binding peptide
  MOD_RES (2), (35), (36): Xaa is C or S
  MOD_RES (13), (14), (15), (16), (17): Xaa is A or G
  MOD_RES (18), (19), (20), (21): Xaa is A or G or is absent
KXSKVIMNSLQEXXXXXXXXXYYVIPLPELDQSVXXPS

SEQ ID NO: 10240 - protein, 36 aa, Artificial Sequence
  Non-cyclic GFR-binding peptide
  MOD_RES (1), (35), (36): Xaa is C or S
  MOD_RES (13), (14), (15), (16), (17): Xaa is A or G
  MOD_RES (18), (19), (20), (21): Xaa is A or G or is absent
XSEVVMDQYNKLXXXXXXXXXLYLISIASLRTPVXX

SEQ ID NO: 10241 - protein, 39 aa, Artificial Sequence
  Non-cyclic GFR-binding peptide
  MOD_RES (2), (34), (35): Xaa is C or S
GXARVVMNNSLQEIVNSSDDYYVVPLPELQTPAXXPKPV

SEQ ID NO: 10242 - protein, 35 aa, Artificial Sequence
  Non-cyclic GFR-binding peptide
  MOD_RES (2), (34), (35): Xaa is C or S
GXSEVVMDQYNKLVVNNASDLYLISIASLRTPVXX

SEQ ID NO: 10243 - protein, 40 aa, Artificial Sequence
  Non-cyclic GFR-binding peptide
  MOD_RES (1), (35): Xaa is C or S
  MOD_RES (13), (14), (15), (16), (17): Xaa is A or G
  MOD_RES (18), (19), (20), (21): Xaa is A or G or is absent
XSRVVMNNSLQEXXXXXXXXXYYVVPLPELKTPAXTPKTV

SEQ ID NO: 10244 - protein, 34 aa, Artificial Sequence
  Non-cyclic GFR-binding peptide
  MOD_RES (2), (33), (34): Xaa is C or S
KXSRVIMNSLQEVKPKRGVYYLITLPELAQPVXX

SEQ ID NO: 10245 - protein, 39 aa, Artificial Sequence
  Non-cyclic GFR-binding peptide
  MOD_RES (34), (35): Xaa is C or S
  MOD_RES (12), (13), (14), (15), (16): Xaa is A or G
  MOD_RES (17), (18), (19), (20): Xaa is A or G or is absent
ARVVMNNSLQEXXXXXXXXXYYVVPLPELQTPAXXPKPV

SEQ ID NO: 10246 - protein, 34 aa, Artificial Sequence
  Non-cyclic GFR-binding peptide
  MOD_RES (31), (32): Xaa is C or S
EVVMDNSLQEVVNNASDYYVIPLPELRTPVXXTP

SEQ ID NO: 10247 - protein, 33 aa, Artificial Sequence
  Non-cyclic GFR-binding peptide
  MOD_RES (32), (33): Xaa is C or S
SEVVMDNSLQEVVNNASDYYVIPLPELRTPVXX

SEQ ID NO: 10248 - protein, 37 aa, Artificial Sequence
  Non-cyclic GFR-binding peptide
  MOD_RES (1), (3), (37): Xaa is C or S
  MOD_RES (15), (16), (17), (18), (19): Xaa is A or G
  MOD_RES (20), (21), (22), (23): Xaa is A or G or is absent
XGXSRVVMNNSLQEXXXXXXXXXYYVVPLPELKTPAX

SEQ ID NO: 10249 - protein, 37 aa, Artificial Sequence
  Non-cyclic GFR-binding peptide
  MOD_RES (1), (3), (37): Xaa is C or S
  MOD_RES (15), (16), (17), (18), (19): Xaa is A or G
  MOD_RES (20), (21), (22), (23): Xaa is A or G or is absent
XGXSEVVMDRYKKLXXXXXXXXXFYLISIANLRTPVX

SEQ ID NO: 10250 - protein, 33 aa, Artificial Sequence
  Non-cyclic GFR-binding peptide
  MOD_RES (2), (33): Xaa is C or S
KXSKVVMEYQKYVKPTRGVIFLISIPSLDQPVX

SEQ ID NO: 10251 - protein, 36 aa, Artificial Sequence
  Non-cyclic GFR-binding peptide
  MOD_RES (1), (3): Xaa is C or S
  MOD_RES (15), (16), (17), (18), (19): Xaa is A or G
  MOD_RES (20), (21), (22), (23): Xaa is A or G or is absent
XGXSEVVMDNSLQEXXXXXXXXXYYVIPLPELRTPV

SEQ ID NO: 10252 - protein, 38 aa, Artificial Sequence
  Non-cyclic GFR-binding peptide
  MOD_RES (2), (4), (36): Xaa is C or S
HXGXSRVVMNNSLQEIVNSSDDYYLVTLPELKTPAXTP

SEQ ID NO: 10253 - protein, 35 aa, Artificial Sequence
  Non-cyclic GFR-binding peptide
  MOD_RES (32), (32): Xaa is C or S
SRVVMNNSLQEIVNSSDDYYLVTLPELKTPAXTPK

SEQ ID NO: 10254 - protein, 35 aa, Artificial Sequence
  Non-cyclic GFR-binding peptide
  MOD_RES (1), (3), (35): Xaa is C or S
XGXGEVVMDNSLQEVVKENEDYYVMPLPELETPVX

SEQ ID NO: 10255 - protein, 38 aa, Artificial Sequence
  Non-cyclic GFR-binding peptide
  MOD_RES (2), (33), (34): Xaa is C or S
KXSKVIMEYQKYIKPTKGIIFLISIPSLDQSVXXPSAS

SEQ ID NO: 10256 - protein, 37 aa, Artificial Sequence
  Non-cyclic GFR-binding peptide
  MOD_RES (2), (35), (36): Xaa is C or S
  MOD_RES (13), (14), (15), (16), (17): Xaa is A or G
  MOD_RES (18), (19), (20), (21): Xaa is A or G or is absent
KXSKVIMNSLQEXXXXXXXXXYYVIPLPELDQSVXXP

SEQ ID NO: 10257 - protein, 34 aa, Artificial Sequence
  Non-cyclic GFR-binding peptide
  MOD_RES (33), (34): Xaa is C or S
  MOD_RES (11), (12), (13), (14), (15): Xaa is A or G
  MOD_RES (16), (17), (18), (19): Xaa is A or G or is absent
EVVMDNSLQEXXXXXXXXXYYLITLPELRTPVXX

SEQ ID NO: 10258 - protein, 37 aa, Artificial Sequence
  Non-cyclic GFR-binding peptide
  MOD_RES (1), (3), (35), (36): Xaa is C or S
XGXSRVVMNEYQKYIVNSSDDIFLVSIPSLKTPAXXP

SEQ ID NO: 10259 - protein, 43 aa, Artificial Sequence
  Non-cyclic GFR-binding peptide
  MOD_RES (1), (3), (37): Xaa is C or S
  MOD_RES (15), (16), (17), (18), (19): Xaa is A or G
  MOD_RES (20), (21), (22), (23): Xaa is A or G or is absent
XGXSRVVMNNSLQEXXXXXXXXXYYVVPLPELKTPAXTPKTVH

SEQ ID NO: 10260 - protein, 36 aa, Artificial Sequence
  Non-cyclic GFR-binding peptide
  MOD_RES (33), (34): Xaa is C or S
  MOD_RES (11), (12), (13), (14), (15): Xaa is A or G
  MOD_RES (16), (17), (18), (19): Xaa is A or G or is absent
SKVIMNSLQEXXXXXXXXXYYVIPLPELDQSVXXPS

SEQ ID NO: 10261 - protein, 41 aa, Artificial Sequence
  Non-cyclic GFR-binding peptide
  MOD_RES (2), (36), (37): Xaa is C or S
  MOD_RES (14), (15), (16), (17), (18): Xaa is A or G
  MOD_RES (19), (20), (21), (22): Xaa is A or G or is absent
GXARVVMNNSLQEXXXXXXXXXYYVVPLPELQTPAXXPKPV

SEQ ID NO: 10262 - protein, 38 aa, Artificial Sequence
  Non-cyclic GFR-binding peptide
  MOD_RES (2), (36), (37): Xaa is C or S
  MOD_RES (14), (15), (16), (17), (18): Xaa is A or G
  MOD_RES (19), (20), (21), (22): Xaa is A or G or is absent
GXSRVVMNEYQKYXXXXXXXXXIFLVSIPSLKTPAXXP

SEQ ID NO: 10263 - protein, 35 aa, Artificial Sequence
  Non-cyclic GFR-binding peptide
  MOD_RES (1), (35): Xaa is C or S
  MOD_RES (13), (14), (15), (16), (17): Xaa is A or G
  MOD_RES (18), (19), (20), (21): Xaa is A or G or is absent
XSRVVMNNSLQEXXXXXXXXXYYLVTLPELKTPAX

SEQ ID NO: 10264 - protein, 37 aa, Artificial Sequence
  Non-cyclic GFR-binding peptide
  MOD_RES (1), (32), (33): Xaa is C or S
XSKVVMEYQKYVKPTRGVIFLISIPSLDQPVXXPSAS

SEQ ID NO: 10265 - protein, 37 aa, Artificial Sequence
  Non-cyclic GFR-binding peptide
  MOD_RES (31), (32): Xaa is C or S
EVVMENSLQEVVKDYEDYYLMTLPELETPVXXAKPIS

SEQ ID NO: 10266 - protein, 37 aa, Artificial Sequence
  Non-cyclic GFR-binding peptide
  MOD_RES (33), (34): Xaa is C or S
  MOD_RES (11), (12), (13), (14), (15): Xaa is A or G
  MOD_RES (16), (17), (18), (19): Xaa is A or G or is absent
RVVMNEYQKYXXXXXXXXXIFLVSIPSLQTPAXXPKP

SEQ ID NO: 10267 - protein, 38 aa, Artificial Sequence
  Non-cyclic GFR-binding peptide
  MOD_RES (1), (3), (35), (36): Xaa is C or S
XGXGEVVMEEYQKYVVKDYEDIFLMSIPSLETPVXXAK

SEQ ID NO: 10268 - protein, 35 aa, Artificial Sequence
  Non-cyclic GFR-binding peptide
  MOD_RES (34), (34): Xaa is C or S
  MOD_RES (12), (13), (14), (15), (16): Xaa is A or G
  MOD_RES (17), (18), (19), (20): Xaa is A or G or is absent
SRVVMNEYQKYXXXXXXXXXIFLVSIPSLKTPAXT

SEQ ID NO: 10269 - protein, 40 aa, Artificial Sequence
  Non-cyclic GFR-binding peptide
  MOD_RES (34), (35): Xaa is C or S
  MOD_RES (12), (13), (14), (15), (16): Xaa is A or G
  MOD_RES (17), (18), (19), (20): Xaa is A or G or is absent
GEVVMDEYQKYXXXXXXXXXIFLMSIPSLETPVXXAKPIK

SEQ ID NO: 10270 - protein, 41 aa, Artificial Sequence
  Non-cyclic GFR-binding peptide
  MOD_RES (1), (3), (37), (38): Xaa is C or S
  MOD_RES (15), (16), (17), (18), (19): Xaa is A or G
  MOD_RES (20), (21), (22), (23): Xaa is A or G or is absent
XGXGEVVMDNSLQEXXXXXXXXXYYLMTLPELETPVXXAKP

SEQ ID NO: 10271 - protein, 36 aa, Artificial Sequence
  Non-cyclic GFR-binding peptide
  MOD_RES (32), (33): Xaa is C or S
SRVVMNNSLQEIVNSSDDYYVVPLPELKTPAXXPKP

SEQ ID NO: 10272 - protein, 38 aa, Artificial Sequence
  Non-cyclic GFR-binding peptide
  MOD_RES (1), (35), (36): Xaa is C or S
  MOD_RES (13), (14), (15), (16), (17): Xaa is A or G
  MOD_RES (18), (19), (20), (21): Xaa is A or G or is absent
XSEVVMDRYKKLXXXXXXXXXFYLISIANLRTPVXXTP

SEQ ID NO: 10273 - protein, 36 aa, Artificial Sequence
  Non-cyclic GFR-binding peptide
  MOD_RES (1), (33), (34): Xaa is C or S
XSEVVMDNSLQEVVNNASDYYVIPLPELRTPVXXTP

SEQ ID NO: 10274 - protein, 38 aa, Artificial Sequence
  Non-cyclic GFR-binding peptide
  MOD_RES (2), (36), (37): Xaa is C or S
  MOD_RES (14), (15), (16), (17), (18): Xaa is A or G
  MOD_RES (19), (20), (21), (22): Xaa is A or G or is absent
GXGEVVMDNSLQEXXXXXXXXXYYVMPLPELETPVXXA

SEQ ID NO: 10275 - protein, 38 aa, Artificial Sequence
  Non-cyclic GFR-binding peptide
  MOD_RES (1), (33), (34): Xaa is C or S
XARVVMNEYQKYIVNSSDDIFLVSIPSLQTPAXXPKPV

SEQ ID NO: 10276 - protein, 39 aa, Artificial Sequence
  Non-cyclic GFR-binding peptide
  MOD_RES (2), (36), (37): Xaa is C or S
  MOD_RES (14), (15), (16), (17), (18): Xaa is A or G
  MOD_RES (19), (20), (21), (22): Xaa is A or G or is absent
GXGEVVMENSLQEXXXXXXXXXYYVMPLPELETPVXXAK

SEQ ID NO: 10277 - protein, 39 aa, Artificial Sequence
  Non-cyclic GFR-binding peptide
  MOD_RES (34), (35): Xaa is C or S
  MOD_RES (12), (13), (14), (15), (16): Xaa is A or G
  MOD_RES (17), (18), (19), (20): Xaa is A or G or is absent
SEVVMDNSLQEXXXXXXXXXYYVIPLPELRTPVXXTPPT

SEQ ID NO: 10278 - protein, 41 aa, Artificial Sequence
  Non-cyclic GFR-binding peptide
  MOD_RES (2), (35), (36): Xaa is C or S
  MOD_RES (13), (14), (15), (16), (17): Xaa is A or G
  MOD_RES (18), (19), (20), (21): Xaa is A or G or is absent
KXSRVIMNSLQEXXXXXXXXXYYLITLPELAQPVXXPAASA

SEQ ID NO: 10279 - protein, 35 aa, Artificial Sequence
  Non-cyclic GFR-binding peptide
  MOD_RES (1), (34), (35): Xaa is C or S
  MOD_RES (12), (13), (14), (15), (16): Xaa is A or G
  MOD_RES (17), (18), (19), (20): Xaa is A or G or is absent
XSRVIMEYQKYXXXXXXXXXIFLISIPSLAQPVXX

SEQ ID NO: 10280 - protein, 40 aa, Artificial Sequence
  Non-cyclic GFR-binding peptide
  MOD_RES (1), (35), (36): Xaa is C or S
  MOD_RES (13), (14), (15), (16), (17): Xaa is A or G
  MOD_RES (18), (19), (20), (21): Xaa is A or G or is absent
XSEVVMDQYNKLXXXXXXXXXLYLISIASLRTPVXXTPPT

SEQ ID NO: 10281 - protein, 32 aa, Artificial Sequence
  Non-cyclic GFR-binding peptide
  MOD_RES (1), (1): Xaa is C or S
XARVVMNNSLQEIVNSSDDYYVVPLPELQTPA

SEQ ID NO: 10282 - protein, 40 aa, Artificial Sequence
  Non-cyclic GFR-binding peptide
  MOD_RES (2), (4), (38), (39): Xaa is C or S
  MOD_RES (16), (17), (18), (19), (20): Xaa is A or G
  MOD_RES (21), (22), (23), (24): Xaa is A or G or is absent
RXGXSEVVMDNSLQEXXXXXXXXXYYVIPLPELRTPVXXT

SEQ ID NO: 10283 - protein, 41 aa, Artificial Sequence
  Non-cyclic GFR-binding peptide
  MOD_RES (1), (35), (36): Xaa is C or S
  MOD_RES (13), (14), (15), (16), (17): Xaa is A or G
  MOD_RES (18), (19), (20), (21): Xaa is A or G or is absent
XGEVVMENSLQEXXXXXXXXXYYVMPLPELETPVXXAKPIS

SEQ ID NO: 10284 - protein, 33 aa, Artificial Sequence
  Non-cyclic GFR-binding peptide
  MOD_RES (31), (32): Xaa is C or S
EVVMDEYQKYVVKENEDIFLMSIPSLETPVXXA

SEQ ID NO: 10285 - protein, 39 aa, Artificial Sequence
  Non-cyclic GFR-binding peptide
  MOD_RES (2), (4), (36), (37): Xaa is C or S
HXGXARVVMNNSLQEIVNSSDDYYLVTLPELQTPAXXPK

SEQ ID NO: 10286 - protein, 34 aa, Artificial Sequence
  Non-cyclic GFR-binding peptide
  MOD_RES (31), (32): Xaa is C or S
EVVMDNSLQEVVNNASDYYLITLPELRTPVXXTP

SEQ ID NO: 10287 - protein, 36 aa, Artificial Sequence
  Non-cyclic GFR-binding peptide
  MOD_RES (1), (33), (34): Xaa is C or S
XARVVMNNSLQEIVNSSDDYYVVPLPELQTPAXXPK

SEQ ID NO: 10288 - protein, 35 aa, Artificial Sequence
  Non-cyclic GFR-binding peptide
  MOD_RES (2), (4): Xaa is C or S
RXGXGEVVMEEYQKYVVKDYEDIFLMSIPSLETPV

SEQ ID NO: 10289 - protein, 32 aa, Artificial Sequence
  Non-cyclic GFR-binding peptide
  MOD_RES (31), (32): Xaa is C or S
SKVVMEYQKYVKPTRGVIFLISIPSLDQPVXX

SEQ ID NO: 10290 - protein, 34 aa, Artificial Sequence
  Non-cyclic GFR-binding peptide
  MOD_RES (1), (33), (34): Xaa is C or S
XGEVVMDEYQKYVVKENEDIFLMSIPSLETPVXX

SEQ ID NO: 10291 - protein, 31 aa, Artificial Sequence
  Non-cyclic GFR-binding peptide
  MOD_RES (31), (31): Xaa is C or S
SKVVMNSLQEVKPTRGVYYVIPLPELDQPVX

SEQ ID NO: 10292 - protein, 34 aa, Artificial Sequence
  Non-cyclic GFR-binding peptide
  MOD_RES (31), (31): Xaa is C or S
RVVMNEYQKYIVNSSDDIFLVSIPSLKTPAXTPK

SEQ ID NO: 10293 - protein, 35 aa, Artificial Sequence
  Non-cyclic GFR-binding peptide
  MOD_RES (1), (33), (34): Xaa is C or S
XARVVMNNSLQEIVNSSDDYYLVTLPELQTPAXXP

SEQ ID NO: 10294 - protein, 38 aa, Artificial Sequence
  Non-cyclic GFR-binding peptide
  MOD_RES (2), (36), (37): Xaa is C or S
  MOD_RES (14), (15), (16), (17), (18): Xaa is A or G
  MOD_RES (19), (20), (21), (22): Xaa is A or G or is absent
GXSEVVMDNSLQEXXXXXXXXXYYVIPLPELRTPVXXT

SEQ ID NO: 10295 - protein, 39 aa, Artificial Sequence
  Non-cyclic GFR-binding peptide
  MOD_RES (1), (3), (35), (36): Xaa is C or S
XGXGEVVMDNSLQEVVKENEDYYVMPLPELETPVXXAKP

SEQ ID NO: 10296 - protein, 37 aa, Artificial Sequence
  Non-cyclic GFR-binding peptide
  MOD_RES (33), (34): Xaa is C or S
  MOD_RES (11), (12), (13), (14), (15): Xaa is A or G
  MOD_RES (16), (17), (18), (19): Xaa is A or G or is absent
SKVIMEYQKYXXXXXXXXXIFLISIPSLDQSVXXPSA

SEQ ID NO: 10297 - protein, 40 aa, Artificial Sequence
  Non-cyclic GFR-binding peptide
  MOD_RES (2), (4), (38), (39): Xaa is C or S
  MOD_RES (16), (17), (18), (19), (20): Xaa is A or G
  MOD_RES (21), (22), (23), (24): Xaa is A or G or is absent
RXGXGEVVMEEYQKYXXXXXXXXXIFLMSIPSLETPVXXA

SEQ ID NO: 10298 - protein, 40 aa, Artificial Sequence
  Non-cyclic GFR-binding peptide
  MOD_RES (34), (35): Xaa is C or S
  MOD_RES (12), (13), (14), (15), (16): Xaa is A or G
  MOD_RES (17), (18), (19), (20): Xaa is A or G or is absent
ARVVMNNSLQEXXXXXXXXXYYVVPLPELQTPAXXPKPVT

SEQ ID NO: 10299 - protein, 38 aa, Artificial Sequence
  Non-cyclic GFR-binding peptide
  MOD_RES (1), (3), (37): Xaa is C or S
  MOD_RES (15), (16), (17), (18), (19): Xaa is A or G
  MOD_RES (20), (21), (22), (23): Xaa is A or G or is absent
XGXSRVVMNNSLQEXXXXXXXXXYYVVPLPELKTPAXT

SEQ ID NO: 10300 - protein, 37 aa, Artificial Sequence
  Non-cyclic GFR-binding peptide
  MOD_RES (2), (4), (36), (37): Xaa is C or S
RXGXSEVVMDNSLQEVVNNASDYYLITLPELRTPVXX

SEQ ID NO: 10301 - protein, 37 aa, Artificial Sequence
  Non-cyclic GFR-binding peptide
  MOD_RES (2), (34), (35): Xaa is C or S
GXSEVVMDRYKKLVVNNASDFYLISIANLRTPVXXTP

SEQ ID NO: 10302 - protein, 36 aa, Artificial Sequence
  Non-cyclic GFR-binding peptide
  MOD_RES (1), (32), (33): Xaa is C or S
XSRVIMNSLQEVKPKRGVYYLITLPELAQPVXXPAA

SEQ ID NO: 10303 - protein, 36 aa, Artificial Sequence
  Non-cyclic GFR-binding peptide
  MOD_RES (2), (35), (36): Xaa is C or S
  MOD_RES (13), (14), (15), (16), (17): Xaa is A or G
  MOD_RES (18), (19), (20), (21): Xaa is A or G or is absent
KXSKVIMEYQKYXXXXXXXXXIFLISIPSLDQSVXX

SEQ ID NO: 10304 - protein, 34 aa, Artificial Sequence
  Non-cyclic GFR-binding peptide
  MOD_RES (2), (2): Xaa is C or S
  MOD_RES (13), (14), (15), (16), (17): Xaa is A or G
  MOD_RES (18), (19), (20), (21): Xaa is A or G or is absent
KXSKVVMEYQKYXXXXXXXXXIFLISIPSLDQPV

SEQ ID NO: 10305 - protein, 36 aa, Artificial Sequence
  Non-cyclic GFR-binding peptide
  MOD_RES (32), (33): Xaa is C or S
GEVVMENSLQEVVKDYEDYYVMPLPELETPVXXAKP

SEQ ID NO: 10306 - protein, 34 aa, Artificial Sequence
  Non-cyclic GFR-binding peptide
  MOD_RES (31), (32): Xaa is C or S
EVVMENSLQEVVKDYEDYYVMPLPELETPVXXAK

SEQ ID NO: 10307 - protein, 35 aa, Artificial Sequence
  Non-cyclic GFR-binding peptide
  MOD_RES (2), (35): Xaa is C or S
  MOD_RES (13), (14), (15), (16), (17): Xaa is A or G
  MOD_RES (18), (19), (20), (21): Xaa is A or G or is absent
KXSKVIMEYQKYXXXXXXXXXIFLISIPSLDQSVX

SEQ ID NO: 10308 - protein, 34 aa, Artificial Sequence
  Non-cyclic GFR-binding peptide
  MOD_RES (31), (32): Xaa is C or S
EVVMDRYKKLVVNNASDFYLISIANLRTPVXXTP

SEQ ID NO: 10309 - protein, 39 aa, Artificial Sequence
  Non-cyclic GFR-binding peptide
  MOD_RES (2), (4), (38), (39): Xaa is C or S
  MOD_RES (16), (17), (18), (19), (20): Xaa is A or G
  MOD_RES (21), (22), (23), (24): Xaa is A or G or is absent
RXGXSEVVMDNSLQEXXXXXXXXXYYLITLPELRTPVXX

SEQ ID NO: 10310 - protein, 33 aa, Artificial Sequence
  Non-cyclic GFR-binding peptide
  MOD_RES (1), (33): Xaa is C or S
XGEVVMENSLQEVVKDYEDYYVMPLPELETPVX

SEQ ID NO: 10311 - protein, 36 aa, Artificial Sequence
  Non-cyclic GFR-binding peptide
  MOD_RES (1), (33), (34): Xaa is C or S
XGEVVMENSLQEVVKDYEDYYVMPLPELETPVXXAK

SEQ ID NO: 10312 - protein, 34 aa, Artificial Sequence
  Non-cyclic GFR-binding peptide
  MOD_RES (31), (32): Xaa is C or S
RVVMNNSLQEIVNSSDDYYVVPLPELKTPAXXPK

SEQ ID NO: 10313 - protein, 36 aa, Artificial Sequence
  Non-cyclic GFR-binding peptide
  MOD_RES (31), (32): Xaa is C or S
RVVMNNSLQEIVNSSDDYYVVPLPELKTPAXXPKPV

SEQ ID NO: 10314 - protein, 39 aa, Artificial Sequence
  Non-cyclic GFR-binding peptide
  MOD_RES (2), (4), (38), (39): Xaa is C or S
  MOD_RES (16), (17), (18), (19), (20): Xaa is A or G
  MOD_RES (21), (22), (23), (24): Xaa is A or G or is absent
RXGXGEVVMDEYQKYXXXXXXXXXIFLMSIPSLETPVXX

SEQ ID NO: 10315 - protein, 36 aa, Artificial Sequence
  Non-cyclic GFR-binding peptide
  MOD_RES (2), (34), (35): Xaa is C or S
GXGEVVMDNSLQEVVKENEDYYLMTLPELETPVXXA

SEQ ID NO: 10316 - protein, 40 aa, Artificial Sequence
  Non-cyclic GFR-binding peptide
  MOD_RES (1), (35), (36): Xaa is C or S
  MOD_RES (13), (14), (15), (16), (17): Xaa is A or G
  MOD_RES (18), (19), (20), (21): Xaa is A or G or is absent
XSRVVMNNSLQEXXXXXXXXXYYVVPLPELKTPAXXPKPV

SEQ ID NO: 10317 - protein, 40 aa, Artificial Sequence
  Non-cyclic GFR-binding peptide
  MOD_RES (2), (36), (37): Xaa is C or S
  MOD_RES (14), (15), (16), (17), (18): Xaa is A or G
  MOD_RES (19), (20), (21), (22): Xaa is A or G or is absent
GXGEVVMENSLQEXXXXXXXXXYYVMPLPELETPVXXAKP

SEQ ID NO: 10318 - protein, 38 aa, Artificial Sequence
  Non-cyclic GFR-binding peptide
  MOD_RES (1), (3), (36), (37): Xaa is C or S
  MOD_RES (14), (15), (16), (17), (18): Xaa is A or G
  MOD_RES (19), (20), (21), (22): Xaa is A or G or is absent
XKXSKVIMNSLQEXXXXXXXXXYYVIPLPELDQSVXXP

SEQ ID NO: 10319 - protein, 39 aa, Artificial Sequence
  Non-cyclic GFR-binding peptide
  MOD_RES (1), (33), (34): Xaa is C or S
XSEVVMDNSLQEVVNNASDYYVIPLPELRTPVXXTPPTS

SEQ ID NO: 10320 - protein, 35 aa, Artificial Sequence
  Non-cyclic GFR-binding peptide
  MOD_RES (34), (35): Xaa is C or S
  MOD_RES (12), (13), (14), (15), (16): Xaa is A or G
  MOD_RES (17), (18), (19), (20): Xaa is A or G or is absent
SEVVMDNSLQEXXXXXXXXXYYLITLPELRTPVXX

SEQ ID NO: 10321 - protein, 41 aa, Artificial Sequence
  Non-cyclic GFR-binding peptide
  MOD_RES (2), (4), (35), (36): Xaa is C or S
SXKXSKVVMNSLQEVKPTRGVYYVIPLPELDQPVXXPSASA

SEQ ID NO: 10322 - protein, 39 aa, Artificial Sequence
  Non-cyclic GFR-binding peptide
  MOD_RES (2), (4), (35), (36): Xaa is C or S
SXKXSKVVMNSLQEVKPTRGVYYVIPLPELDQPVXXPSA

SEQ ID NO: 10323 - protein, 39 aa, Artificial Sequence
  Non-cyclic GFR-binding peptide
  MOD_RES (1), (33), (34): Xaa is C or S
XSRVVMNEYQKYIVNSSDDIFLVSIPSLKTPAXXPKPVY

SEQ ID NO: 10324 - protein, 44 aa, Artificial Sequence
  Non-cyclic GFR-binding peptide
  MOD_RES (2), (4), (38), (39): Xaa is C or S
  MOD_RES (16), (17), (18), (19), (20): Xaa is A or G
  MOD_RES (21), (22), (23), (24): Xaa is A or G or is absent
RXGXSEVVMDNSLQEXXXXXXXXXYYLITLPELRTPVXXTPPTS

SEQ ID NO: 10325 - protein, 37 aa, Artificial Sequence
  Non-cyclic GFR-binding peptide
  MOD_RES (2), (34), (35): Xaa is C or S
GXSRVVMNNSLQEIVNSSDDYYVVPLPELKTPAXXPK

SEQ ID NO: 10326 - protein, 37 aa, Artificial Sequence
  Non-cyclic GFR-binding peptide
  MOD_RES (31), (32): Xaa is C or S
SKVIMNSLQEIKPTKGIYYVIPLPELDQSVXXPSASA

SEQ ID NO: 10327 - protein, 38 aa, Artificial Sequence
  Non-cyclic GFR-binding peptide
  MOD_RES (34), (35): Xaa is C or S
  MOD_RES (12), (13), (14), (15), (16): Xaa is A or G
  MOD_RES (17), (18), (19), (20): Xaa is A or G or is absent
GEVVMEEYQKYXXXXXXXXXIFLMSIPSLETPVXXAKP

SEQ ID NO: 10328 - protein, 32 aa, Artificial Sequence
  Non-cyclic GFR-binding peptide
  MOD_RES (32), (32): Xaa is C or S
SEVVMDNSLQEVVNNASDYYLITLPELRTPVX

SEQ ID NO: 10329 - protein, 39 aa, Artificial Sequence
  Non-cyclic GFR-binding peptide
  MOD_RES (1), (3), (35), (36): Xaa is C or S
XGXGEVVMENSLQEVVKDYEDYYLMTLPELETPVXXAKP

SEQ ID NO: 10330 - protein, 41 aa, Artificial Sequence
  Non-cyclic GFR-binding peptide
  MOD_RES (2), (36), (37): Xaa is C or S
  MOD_RES (14), (15), (16), (17), (18): Xaa is A or G
  MOD_RES (19), (20), (21), (22): Xaa is A or G or is absent
GXSRVVMNEYQKYXXXXXXXXXIFLVSIPSLKTPAXXPKPV

SEQ ID NO: 10331 - protein, 42 aa, Artificial Sequence
  Non-cyclic GFR-binding peptide
  MOD_RES (2), (4), (36), (37): Xaa is C or S
RXGXSEVVMDQYNKLVVNNASDLYLISIASLRTPVXXTPPTS

SEQ ID NO: 10332 - protein, 35 aa, Artificial Sequence
  Non-cyclic GFR-binding peptide
  MOD_RES (1), (35): Xaa is C or S
  MOD_RES (13), (14), (15), (16), (17): Xaa is A or G
  MOD_RES (18), (19), (20), (21): Xaa is A or G or is absent
XSEVVMDQYNKLXXXXXXXXXLYLISIASLRTPVX

SEQ ID NO: 10333 - protein, 32 aa, Artificial Sequence
  Non-cyclic GFR-binding peptide
  MOD_RES (1), (1): Xaa is C or S
XGEVVMEEYQKYVVKDYEDIFLMSIPSLETPV

SEQ ID NO: 10334 - protein, 38 aa, Artificial Sequence
  Non-cyclic GFR-binding peptide
  MOD_RES (2), (4), (36), (37): Xaa is C or S
RXGXSEVVMDQYNKLVVNNASDLYLISIASLRTPVXXT

SEQ ID NO: 10335 - protein, 39 aa, Artificial Sequence
  Non-cyclic GFR-binding peptide
  MOD_RES (2), (4), (38), (39): Xaa is C or S
  MOD_RES (16), (17), (18), (19), (20): Xaa is A or G
  MOD_RES (21), (22), (23), (24): Xaa is A or G or is absent
HXGXARVVMNNSLQEXXXXXXXXXYYVVPLPELQTPAXX

SEQ ID NO: 10336 - protein, 41 aa, Artificial Sequence
  Non-cyclic GFR-binding peptide
  MOD_RES (1), (3), (37), (38): Xaa is C or S
  MOD_RES (15), (16), (17), (18), (19): Xaa is A or G
  MOD_RES (20), (21), (22), (23): Xaa is A or G or is absent
XGXSEVVMDNSLQEXXXXXXXXXYYLITLPELRTPVXXTPP

SEQ ID NO: 10337 - protein, 43 aa, Artificial Sequence
  Non-cyclic GFR-binding peptide
  MOD_RES (1), (3), (37), (38): Xaa is C or S
  MOD_RES (15), (16), (17), (18), (19): Xaa is A or G
  MOD_RES (20), (21), (22), (23): Xaa is A or G or is absent
XGXARVVMNNSLQEXXXXXXXXXYYVVPLPELQTPAXXPKPVT

SEQ ID NO: 10338 - protein, 34 aa, Artificial Sequence
  Non-cyclic GFR-binding peptide
  MOD_RES (33), (34): Xaa is C or S
  MOD_RES (11), (12), (13), (14), (15): Xaa is A or G
  MOD_RES (16), (17), (18), (19): Xaa is A or G or is absent
SKVVMNSLQEXXXXXXXXXYYVIPLPELDQPVXX

SEQ ID NO: 10339 - protein, 35 aa, Artificial Sequence
  Non-cyclic GFR-binding peptide
  MOD_RES (2), (34), (35): Xaa is C or S
GXSRVVMNNSLQEIVNSSDDYYVVPLPELKTPAXX

SEQ ID NO: 10340 - protein, 33 aa, Artificial Sequence
  Non-cyclic GFR-binding peptide
  MOD_RES (33), (33): Xaa is C or S
  MOD_RES (11), (12), (13), (14), (15): Xaa is A or G
  MOD_RES (16), (17), (18), (19): Xaa is A or G or is absent
EVVMDQYNKLXXXXXXXXXLYLISIASLRTPVX

SEQ ID NO: 10341 - protein, 33 aa, Artificial Sequence
  Non-cyclic GFR-binding peptide
  MOD_RES (32), (32): Xaa is C or S
SRVVMNNSLQEIVNSSDDYYVVPLPELKTPAXT

SEQ ID NO: 10342 - protein, 39 aa, Artificial Sequence
  Non-cyclic GFR-binding peptide
  MOD_RES (2), (33), (34): Xaa is C or S
KXSRVIMNSLQEVKPKRGVYYLITLPELAQPVXXPAASA

SEQ ID NO: 10343 - protein, 34 aa, Artificial Sequence
  Non-cyclic GFR-binding peptide
  MOD_RES (2), (4): Xaa is C or S
SXKXSRVIMEYQKYVKPKRGVIFLISIPSLAQPV

SEQ ID NO: 10344 - protein, 39 aa, Artificial Sequence
  Non-cyclic GFR-binding peptide
  MOD_RES (2), (4), (36), (37): Xaa is C or S
RXGXSEVVMDQYNKLVVNNASDLYLISIASLRTPVXXTP

SEQ ID NO: 10345 - protein, 39 aa, Artificial Sequence
  Non-cyclic GFR-binding peptide
  MOD_RES (1), (3), (37), (38): Xaa is C or S
  MOD_RES (15), (16), (17), (18), (19): Xaa is A or G
  MOD_RES (20), (21), (22), (23): Xaa is A or G or is absent
XGXARVVMNNSLQEXXXXXXXXXYYVVPLPELQTPAXXP

SEQ ID NO: 10346 - protein, 36 aa, Artificial Sequence
  Non-cyclic GFR-binding peptide
  MOD_RES (1), (3), (34), (35): Xaa is C or S
XKXSRVIMNSLQEVKPKRGVYYLITLPELAQPVXXP

SEQ ID NO: 10347 - protein, 34 aa, Artificial Sequence
  Non-cyclic GFR-binding peptide
  MOD_RES (2), (2): Xaa is C or S
  MOD_RES (13), (14), (15), (16), (17): Xaa is A or G
  MOD_RES (18), (19), (20), (21): Xaa is A or G or is absent
KXSKVIMNSLQEXXXXXXXXXYYVIPLPELDQSV

SEQ ID NO: 10348 - protein, 38 aa, Artificial Sequence
  Non-cyclic GFR-binding peptide
  MOD_RES (1), (33), (34): Xaa is C or S
XARVVMNNSLQEIVNSSDDYYVVPLPELQTPAXXPKPV

SEQ ID NO: 10349 - protein, 38 aa, Artificial Sequence
  Non-cyclic GFR-binding peptide
  MOD_RES (2), (4), (37), (38): Xaa is C or S
  MOD_RES (15), (16), (17), (18), (19): Xaa is A or G
  MOD_RES (20), (21), (22), (23): Xaa is A or G or is absent
SXKXSRVIMNSLQEXXXXXXXXXYYLITLPELAQPVXX

SEQ ID NO: 10350 - protein, 37 aa, Artificial Sequence
  Non-cyclic GFR-binding peptide
  MOD_RES (1), (33), (34): Xaa is C or S
XSEVVMDNSLQEVVNNASDYYLITLPELRTPVXXTPP

SEQ ID NO: 10351 - protein, 35 aa, Artificial Sequence
  Non-cyclic GFR-binding peptide
  MOD_RES (1), (32), (33): Xaa is C or S
XSRVIMNSLQEVKPKRGVYYLITLPELAQPVXXPA

SEQ ID NO: 10352 - protein, 35 aa, Artificial Sequence
  Non-cyclic GFR-binding peptide
  MOD_RES (31), (32): Xaa is C or S
EVVMDEYQKYVVKENEDIFLMSIPSLETPVXXAKP

SEQ ID NO: 10353 - protein, 32 aa, Artificial Sequence
  Non-cyclic GFR-binding peptide
  MOD_RES (1), (32): Xaa is C or S
XSKVVMNSLQEVKPTRGVYYVIPLPELDQPVX

SEQ ID NO: 10354 - protein, 36 aa, Artificial Sequence
  Non-cyclic GFR-binding peptide
  MOD_RES (1), (3), (34), (35): Xaa is C or S
XKXSKVIMNSLQEIKPTKGIYYVIPLPELDQSVXXP

SEQ ID NO: 10355 - protein, 31 aa, Artificial Sequence
  Non-cyclic GFR-binding peptide
  MOD_RES (1), (1): Xaa is C or S
XSKVIMNSLQEIKPTKGIYYVIPLPELDQSV

SEQ ID NO: 10356 - protein, 37 aa, Artificial Sequence
  Non-cyclic GFR-binding peptide
  MOD_RES (1), (3), (35), (36): Xaa is C or S
XGXARVVMNEYQKYIVNSSDDIFLVSIPSLQTPAXXP

SEQ ID NO: 10357 - protein, 40 aa, Artificial Sequence
  Non-cyclic GFR-binding peptide
  MOD_RES (2), (4), (36), (37): Xaa is C or S
HXGXARVVMNNSLQEIVNSSDDYYVVPLPELQTPAXXPKP

SEQ ID NO: 10358 - protein, 41 aa, Artificial Sequence
  Non-cyclic GFR-binding peptide
  MOD_RES (2), (4), (36), (37): Xaa is C or S
HXGXARVVMNNSLQEIVNSSDDYYLVTLPELQTPAXXPKPV

SEQ ID NO: 10359 - protein, 41 aa, Artificial Sequence
  Non-cyclic GFR-binding peptide
  MOD_RES (2), (4), (38), (39): Xaa is C or S
  MOD_RES (16), (17), (18), (19), (20): Xaa is A or G
  MOD_RES (21), (22), (23), (24): Xaa is A or G or is absent
HXGXARVVMNEYQKYXXXXXXXXXIFLVSIPSLQTPAXXPK

SEQ ID NO: 10360 - protein, 41 aa, Artificial Sequence
  Non-cyclic GFR-binding peptide
  MOD_RES (1), (3), (36), (37): Xaa is C or S
  MOD_RES (14), (15), (16), (17), (18): Xaa is A or G
  MOD_RES (19), (20), (21), (22): Xaa is A or G or is absent
XKXSKVVMEYQKYXXXXXXXXXIFLISIPSLDQPVXXPSAS

SEQ ID NO: 10361 - protein, 35 aa, Artificial Sequence
  Non-cyclic GFR-binding peptide
  MOD_RES (32), (33): Xaa is C or S
SRVVMNEYQKYIVNSSDDIFLVSIPSLKTPAXXPK

SEQ ID NO: 10362 - protein, 37 aa, Artificial Sequence
  Non-cyclic GFR-binding peptide
  MOD_RES (2), (36), (37): Xaa is C or S
  MOD_RES (14), (15), (16), (17), (18): Xaa is A or G
  MOD_RES (19), (20), (21), (22): Xaa is A or G or is absent
GXGEVVMDNSLQEXXXXXXXXXYYLMTLPELETPVXX

SEQ ID NO: 10363 - protein, 40 aa, Artificial Sequence
  Non-cyclic GFR-binding peptide
  MOD_RES (2), (4), (36), (37): Xaa is C or S
HXGXSRVVMNNSLQEIVNSSDDYYVVPLPELKTPAXXPKP

SEQ ID NO: 10364 - protein, 38 aa, Artificial Sequence
  Non-cyclic GFR-binding peptide
  MOD_RES (2), (4), (36), (37): Xaa is C or S
RXGXGEVVMDEYQKYVVKENEDIFLMSIPSLETPVXXA

SEQ ID NO: 10365 - protein, 40 aa, Artificial Sequence
  Non-cyclic GFR-binding peptide
  MOD_RES (1), (34), (35): Xaa is C or S
  MOD_RES (12), (13), (14), (15), (16): Xaa is A or G
  MOD_RES (17), (18), (19), (20): Xaa is A or G or is absent
XSKVVMNSLQEXXXXXXXXXYYVIPLPELDQPVXXPSASA

SEQ ID NO: 10366 - protein, 39 aa, Artificial Sequence
  Non-cyclic GFR-binding peptide
  MOD_RES (33), (34): Xaa is C or S
  MOD_RES (11), (12), (13), (14), (15): Xaa is A or G
  MOD_RES (16), (17), (18), (19): Xaa is A or G or is absent
RVVMNEYQKYXXXXXXXXXIFLVSIPSLQTPAXXPKPVT

SEQ ID NO: 10367 - protein, 37 aa, Artificial Sequence
  Non-cyclic GFR-binding peptide
  MOD_RES (1), (35), (36): Xaa is C or S
  MOD_RES (13), (14), (15), (16), (17): Xaa is A or G
  MOD_RES (18), (19), (20), (21): Xaa is A or G or is absent
XGEVVMENSLQEXXXXXXXXXYYLMTLPELETPVXXA

SEQ ID NO: 10368 - protein, 36 aa, Artificial Sequence
  Non-cyclic GFR-binding peptide
  MOD_RES (1), (33), (34): Xaa is C or S
XGEVVMEEYQKYVVKDYEDIFLMSIPSLETPVXXAK

SEQ ID NO: 10369 - protein, 37 aa, Artificial Sequence
  Non-cyclic GFR-binding peptide
  MOD_RES (34), (34): Xaa is C or S
  MOD_RES (12), (13), (14), (15), (16): Xaa is A or G
  MOD_RES (17), (18), (19), (20): Xaa is A or G or is absent
SRVVMNNSLQEXXXXXXXXXYYVVPLPELKTPAXTPK

SEQ ID NO: 10370 - protein, 40 aa, Artificial Sequence
  Non-cyclic GFR-binding peptide
  MOD_RES (2), (4), (36), (37): Xaa is C or S
RXGXGEVVMEEYQKYVVKDYEDIFLMSIPSLETPVXXAKP

SEQ ID NO: 10371 - protein, 35 aa, Artificial Sequence
  Non-cyclic GFR-binding peptide
  MOD_RES (2), (34), (35): Xaa is C or S
GXARVVMNNSLQEIVNSSDDYYVVPLPELQTPAXX

SEQ ID NO: 10372 - protein, 39 aa, Artificial Sequence
  Non-cyclic GFR-binding peptide
  MOD_RES (1), (3), (35), (36): Xaa is C or S
XGXGEVVMDEYQKYVVKENEDIFLMSIPSLETPVXXAKP

SEQ ID NO: 10373 - protein, 35 aa, Artificial Sequence
  Non-cyclic GFR-binding peptide
  MOD_RES (33), (34): Xaa is C or S
  MOD_RES (11), (12), (13), (14), (15): Xaa is A or G
  MOD_RES (16), (17), (18), (19): Xaa is A or G or is absent
EVVMDQYNKLXXXXXXXXXLYLISIASLRTPVXXT

SEQ ID NO: 10374 - protein, 37 aa, Artificial Sequence
  Non-cyclic GFR-binding peptide
  MOD_RES (32), (33): Xaa is C or S
SEVVMDNSLQEVVNNASDYYVIPLPELRTPVXXTPPT

SEQ ID NO: 10375 - protein, 35 aa, Artificial Sequence
  Non-cyclic GFR-binding peptide
  MOD_RES (34), (35): Xaa is C or S
  MOD_RES (12), (13), (14), (15), (16): Xaa is A or G
  MOD_RES (17), (18), (19), (20): Xaa is A or G or is absent
GEVVMEEYQKYXXXXXXXXXIFLMSIPSLETPVXX

SEQ ID NO: 10376 - protein, 41 aa, Artificial Sequence
  Non-cyclic GFR-binding peptide
  MOD_RES (2), (36), (37): Xaa is C or S
  MOD_RES (14), (15), (16), (17), (18): Xaa is A or G
  MOD_RES (19), (20), (21), (22): Xaa is A or G or is absent
GXSEVVMDNSLQEXXXXXXXXXYYVIPLPELRTPVXXTPPT

SEQ ID NO: 10377 - protein, 37 aa, Artificial Sequence
  Non-cyclic GFR-binding peptide
  MOD_RES (2), (36), (37): Xaa is C or S
  MOD_RES (14), (15), (16), (17), (18): Xaa is A or G
  MOD_RES (19), (20), (21), (22): Xaa is A or G or is absent
GXSRVVMNEYQKYXXXXXXXXXIFLVSIPSLKTPAXX

SEQ ID NO: 10378 - protein, 34 aa, Artificial Sequence
  Non-cyclic GFR-binding peptide
  MOD_RES (34), (34): Xaa is C or S
  MOD_RES (12), (13), (14), (15), (16): Xaa is A or G
  MOD_RES (17), (18), (19), (20): Xaa is A or G or is absent
SRVVMNNSLQEXXXXXXXXXYYLVTLPELKTPAX

SEQ ID NO: 10379 - protein, 32 aa, Artificial Sequence
  Non-cyclic GFR-binding peptide
  MOD_RES (31), (32): Xaa is C or S
EVVMENSLQEVVKDYEDYYVMPLPELETPVXX

SEQ ID NO: 10380 - protein, 32 aa, Artificial Sequence
  Non-cyclic GFR-binding peptide
  MOD_RES (2), (2): Xaa is C or S
KXSRVIMNSLQEVKPKRGVYYLITLPELAQPV

SEQ ID NO: 10381 - protein, 36 aa, Artificial Sequence
  Non-cyclic GFR-binding peptide
  MOD_RES (1), (3), (34), (35): Xaa is C or S
XKXSKVVMEYQKYVKPTRGVIFLISIPSLDQPVXXP

SEQ ID NO: 10382 - protein, 37 aa, Artificial Sequence
  Non-cyclic GFR-binding peptide
  MOD_RES (34), (35): Xaa is C or S
  MOD_RES (12), (13), (14), (15), (16): Xaa is A or G
  MOD_RES (17), (18), (19), (20): Xaa is A or G or is absent
SEVVMDQYNKLXXXXXXXXXLYLISIASLRTPVXXTP

SEQ ID NO: 10383 - protein, 39 aa, Artificial Sequence
  Non-cyclic GFR-binding peptide
  MOD_RES (1), (33), (34): Xaa is C or S
XARVVMNNSLQEIVNSSDDYYVVPLPELQTPAXXPKPVT

SEQ ID NO: 10384 - protein, 36 aa, Artificial Sequence
  Non-cyclic GFR-binding peptide
  MOD_RES (2), (36): Xaa is C or S
  MOD_RES (14), (15), (16), (17), (18): Xaa is A or G
  MOD_RES (19), (20), (21), (22): Xaa is A or G or is absent
GXSEVVMDNSLQEXXXXXXXXXYYLITLPELRTPVX

SEQ ID NO: 10385 - protein, 40 aa, Artificial Sequence
  Non-cyclic GFR-binding peptide
  MOD_RES (2), (4), (35), (36): Xaa is C or S
SXKXSKVIMEYQKYIKPTKGIIFLISIPSLDQSVXXPSAS

SEQ ID NO: 10386 - protein, 39 aa, Artificial Sequence
  Non-cyclic GFR-binding peptide
  MOD_RES (2), (4), (35), (36): Xaa is C or S
SXKXSKVVMEYQKYVKPTRGVIFLISIPSLDQPVXXPSA

SEQ ID NO: 10387 - protein, 36 aa, Artificial Sequence
  Non-cyclic GFR-binding peptide
  MOD_RES (33), (34): Xaa is C or S
  MOD_RES (11), (12), (13), (14), (15): Xaa is A or G
  MOD_RES (16), (17), (18), (19): Xaa is A or G or is absent
SKVIMEYQKYXXXXXXXXXIFLISIPSLDQSVXXPS

SEQ ID NO: 10388 - protein, 38 aa, Artificial Sequence
  Non-cyclic GFR-binding peptide
  MOD_RES (2), (4), (38): Xaa is C or S
  MOD_RES (16), (17), (18), (19), (20): Xaa is A or G
  MOD_RES (21), (22), (23), (24): Xaa is A or G or is absent
HXGXSRVVMNEYQKYXXXXXXXXXIFLVSIPSLKTPAX

SEQ ID NO: 10389 - protein, 35 aa, Artificial Sequence
  Non-cyclic GFR-binding peptide
  MOD_RES (1), (3): Xaa is C or S
  MOD_RES (14), (15), (16), (17), (18): Xaa is A or G
  MOD_RES (19), (20), (21), (22): Xaa is A or G or is absent
XKXSKVIMEYQKYXXXXXXXXXIFLISIPSLDQSV

SEQ ID NO: 10390 - protein, 38 aa, Artificial Sequence
  Non-cyclic GFR-binding peptide
  MOD_RES (1), (35), (36): Xaa is C or S
  MOD_RES (13), (14), (15), (16), (17): Xaa is A or G
  MOD_RES (18), (19), (20), (21): Xaa is A or G or is absent
XGEVVMENSLQEXXXXXXXXXYYVMPLPELETPVXXAK

SEQ ID NO: 10391 - protein, 44 aa, Artificial Sequence
  Non-cyclic GFR-binding peptide
  MOD_RES (2), (4), (38), (39): Xaa is C or S
  MOD_RES (16), (17), (18), (19), (20): Xaa is A or G
  MOD_RES (21), (22), (23), (24): Xaa is A or G or is absent
HXGXARVVMNNSLQEXXXXXXXXXYYVVPLPELQTPAXXPKPVT

SEQ ID NO: 10392 - protein, 36 aa, Artificial Sequence
  Non-cyclic GFR-binding peptide
  MOD_RES (1), (35), (36): Xaa is C or S
  MOD_RES (13), (14), (15), (16), (17): Xaa is A or G
  MOD_RES (18), (19), (20), (21): Xaa is A or G or is absent
XSRVVMNNSLQEXXXXXXXXXYYLVTLPELKTPAXX

SEQ ID NO: 10393 - protein, 37 aa, Artificial Sequence
  Non-cyclic GFR-binding peptide
  MOD_RES (31), (32): Xaa is C or S
EVVMDNSLQEVVNNASDYYLITLPELRTPVXXTPPTS

SEQ ID NO: 10394 - protein, 37 aa, Artificial Sequence
  Non-cyclic GFR-binding peptide
  MOD_RES (2), (36), (37): Xaa is C or S
  MOD_RES (14), (15), (16), (17), (18): Xaa is A or G
  MOD_RES (19), (20), (21), (22): Xaa is A or G or is absent
GXARVVMNNSLQEXXXXXXXXXYYLVTLPELQTPAXX

SEQ ID NO: 10395 - protein, 35 aa, Artificial Sequence
  Non-cyclic GFR-binding peptide
  MOD_RES (33), (34): Xaa is C or S
  MOD_RES (11), (12), (13), (14), (15): Xaa is A or G
  MOD_RES (16), (17), (18), (19): Xaa is A or G or is absent
EVVMENSLQEXXXXXXXXXYYLMTLPELETPVXXA

SEQ ID NO: 10396 - protein, 38 aa, Artificial Sequence
  Non-cyclic GFR-binding peptide
  MOD_RES (2), (4), (36), (37): Xaa is C or S
RXGXSEVVMDNSLQEVVNNASDYYLITLPELRTPVXXT

SEQ ID NO: 10397 - protein, 38 aa, Artificial Sequence
  Non-cyclic GFR-binding peptide
  MOD_RES (1), (3), (37), (38): Xaa is C or S
  MOD_RES (15), (16), (17), (18), (19): Xaa is A or G
  MOD_RES (20), (21), (22), (23): Xaa is A or G or is absent
XGXGEVVMEEYQKYXXXXXXXXXIFLMSIPSLETPVXX

SEQ ID NO: 10398 - protein, 35 aa, Artificial Sequence
  Non-cyclic GFR-binding peptide
  MOD_RES (1), (33), (34): Xaa is C or S
XSEVVMDNSLQEVVNNASDYYLITLPELRTPVXXT

SEQ ID NO: 10399 - protein, 34 aa, Artificial Sequence
  Non-cyclic GFR-binding peptide
  MOD_RES (2), (34): Xaa is C or S
GXSEVVMDQYNKLVVNNASDLYLISIASLRTPVX

SEQ ID NO: 10400 - protein, 41 aa, Artificial Sequence
  Non-cyclic GFR-binding peptide
  MOD_RES (1), (35), (36): Xaa is C or S
  MOD_RES (13), (14), (15), (16), (17): Xaa is A or G
  MOD_RES (18), (19), (20), (21): Xaa is A or G or is absent
XSEVVMDNSLQEXXXXXXXXXYYLITLPELRTPVXXTPPTS

SEQ ID NO: 10401 - protein, 34 aa, Artificial Sequence
  Non-cyclic GFR-binding peptide
  MOD_RES (32), (33): Xaa is C or S
GEVVMDNSLQEVVKENEDYYVMPLPELETPVXXA

SEQ ID NO: 10402 - protein, 40 aa, Artificial Sequence
  Non-cyclic GFR-binding peptide
  MOD_RES (1), (3), (36), (37): Xaa is C or S
  MOD_RES (14), (15), (16), (17), (18): Xaa is A or G
  MOD_RES (19), (20), (21), (22): Xaa is A or G or is absent
XKXSKVVMNSLQEXXXXXXXXXYYVIPLPELDQPVXXPSA

SEQ ID NO: 10403 - protein, 37 aa, Artificial Sequence
  Non-cyclic GFR-binding peptide
  MOD_RES (2), (4), (36), (37): Xaa is C or S
RXGXSEVVMDNSLQEVVNNASDYYVIPLPELRTPVXX

SEQ ID NO: 10404 - protein, 36 aa, Artificial Sequence
  Non-cyclic GFR-binding peptide
  MOD_RES (1), (35), (36): Xaa is C or S
  MOD_RES (13), (14), (15), (16), (17): Xaa is A or G
  MOD_RES (18), (19), (20), (21): Xaa is A or G or is absent
XSRVVMNEYQKYXXXXXXXXXIFLVSIPSLKTPAXX

SEQ ID NO: 10405 - protein, 37 aa, Artificial Sequence
  Non-cyclic GFR-binding peptide
  MOD_RES (1), (35), (36): Xaa is C or S
  MOD_RES (13), (14), (15), (16), (17): Xaa is A or G
  MOD_RES (18), (19), (20), (21): Xaa is A or G or is absent
XGEVVMDNSLQEXXXXXXXXXYYVMPLPELETPVXXA

SEQ ID NO: 10406 - protein, 37 aa, Artificial Sequence
  Non-cyclic GFR-binding peptide
  MOD_RES (2), (4): Xaa is C or S
  MOD_RES (16), (17), (18), (19), (20): Xaa is A or G
  MOD_RES (21), (22), (23), (24): Xaa is A or G or is absent
RXGXSEVVMDQYNKLXXXXXXXXXLYLISIASLRTPV

SEQ ID NO: 10407 - protein, 40 aa, Artificial Sequence
  Non-cyclic GFR-binding peptide
  MOD_RES (2), (36), (37): Xaa is C or S
  MOD_RES (14), (15), (16), (17), (18): Xaa is A or G
  MOD_RES (19), (20), (21), (22): Xaa is A or G or is absent
GXSEVVMDRYKKLXXXXXXXXXFYLISIANLRTPVXXTPP

SEQ ID NO: 10408 - protein, 30 aa, Artificial Sequence
  Non-cyclic GFR-binding peptide
RVVMNNSLQEIVNSSDDYYVVPLPELQTPA

SEQ ID NO: 10409 - protein, 31 aa, Artificial Sequence
  Non-cyclic GFR-binding peptide
  MOD_RES (1), (1): Xaa is C or S
XSRVIMNSLQEVKPKRGVYYLITLPELAQPV

SEQ ID NO: 10410 - protein, 35 aa, Artificial Sequence
  Non-cyclic GFR-binding peptide
  MOD_RES (2), (34), (35): Xaa is C or S
GXGEVVMDNSLQEVVKENEDYYLMTLPELETPVXX

SEQ ID NO: 10411 - protein, 35 aa, Artificial Sequence
  Non-cyclic GFR-binding peptide
  MOD_RES (2), (34), (35): Xaa is C or S
GXSEVVMDRYKKLVVNNASDFYLISIANLRTPVXX

SEQ ID NO: 10412 - protein, 39 aa, Artificial Sequence
  Non-cyclic GFR-binding peptide
  MOD_RES (1), (33): Xaa is C or S
XSRVVMNNSLQEIVNSSDDYYLVTLPELKTPAXTPKTVH

SEQ ID NO: 10413 - protein, 34 aa, Artificial Sequence
  Non-cyclic GFR-binding peptide
  MOD_RES (2), (33), (34): Xaa is C or S
KXSKVIMEYQKYIKPTKGIIFLISIPSLDQSVXX

SEQ ID NO: 10414 - protein, 33 aa, Artificial Sequence
  Non-cyclic GFR-binding peptide
  MOD_RES (33), (33): Xaa is C or S
  MOD_RES (11), (12), (13), (14), (15): Xaa is A or G
  MOD_RES (16), (17), (18), (19): Xaa is A or G or is absent
RVVMNEYQKYXXXXXXXXXIFLVSIPSLKTPAX

SEQ ID NO: 10415 - protein, 32 aa, Artificial Sequence
  Non-cyclic GFR-binding peptide
  MOD_RES (1), (1): Xaa is C or S
XGEVVMENSLQEVVKDYEDYYVMPLPELETPV

SEQ ID NO: 10416 - protein, 38 aa, Artificial Sequence
  Non-cyclic GFR-binding peptide
  MOD_RES (1), (34), (35): Xaa is C or S
  MOD_RES (12), (13), (14), (15), (16): Xaa is A or G
  MOD_RES (17), (18), (19), (20): Xaa is A or G or is absent
XSKVVMNSLQEXXXXXXXXXYYVIPLPELDQPVXXPSA

SEQ ID NO: 10417 - protein, 34 aa, Artificial Sequence
  Non-cyclic GFR-binding peptide
  MOD_RES (1), (33), (34): Xaa is C or S
XARVVMNEYQKYIVNSSDDIFLVSIPSLQTPAXX

SEQ ID NO: 10418 - protein, 41 aa, Artificial Sequence
  Non-cyclic GFR-binding peptide
  MOD_RES (2), (36): Xaa is C or S
  MOD_RES (14), (15), (16), (17), (18): Xaa is A or G
  MOD_RES (19), (20), (21), (22): Xaa is A or G or is absent
GXSRVVMNNSLQEXXXXXXXXXYYLVTLPELKTPAXTPKTV

SEQ ID NO: 10419 - protein, 36 aa, Artificial Sequence
  Non-cyclic GFR-binding peptide
  MOD_RES (34), (35): Xaa is C or S
  MOD_RES (12), (13), (14), (15), (16): Xaa is A or G
  MOD_RES (17), (18), (19), (20): Xaa is A or G or is absent
GEVVMDNSLQEXXXXXXXXXYYVMPLPELETPVXXA

SEQ ID NO: 10420 - protein, 37 aa, Artificial Sequence
  Non-cyclic GFR-binding peptide
  MOD_RES (1), (3), (35), (36): Xaa is C or S
XGXSRVVMNNSLQEIVNSSDDYYVVPLPELKTPAXXP

SEQ ID NO: 10421 - protein, 34 aa, Artificial Sequence
  Non-cyclic GFR-binding peptide
  MOD_RES (1), (34): Xaa is C or S
  MOD_RES (12), (13), (14), (15), (16): Xaa is A or G
  MOD_RES (17), (18), (19), (20): Xaa is A or G or is absent
XSRVIMNSLQEXXXXXXXXXYYLITLPELAQPVX

SEQ ID NO: 10422 - protein, 34 aa, Artificial Sequence
  Non-cyclic GFR-binding peptide
  MOD_RES (33), (34): Xaa is C or S
  MOD_RES (11), (12), (13), (14), (15): Xaa is A or G
  MOD_RES (16), (17), (18), (19): Xaa is A or G or is absent
RVVMNNSLQEXXXXXXXXXYYLVTLPELQTPAXX

SEQ ID NO: 10423 - protein, 43 aa, Artificial Sequence
  Non-cyclic GFR-binding peptide
  MOD_RES (1), (3), (37), (38): Xaa is C or S
  MOD_RES (15), (16), (17), (18), (19): Xaa is A or G
  MOD_RES (20), (21), (22), (23): Xaa is A or G or is absent
XGXSEVVMDQYNKLXXXXXXXXXLYLISIASLRTPVXXTPPTS

SEQ ID NO: 10424 - protein, 34 aa, Artificial Sequence
  Non-cyclic GFR-binding peptide
  MOD_RES (1), (33): Xaa is C or S
XSRVVMNEYQKYIVNSSDDIFLVSIPSLKTPAXT

SEQ ID NO: 10425 - protein, 36 aa, Artificial Sequence
  Non-cyclic GFR-binding peptide
  MOD_RES (2), (36): Xaa is C or S
  MOD_RES (14), (15), (16), (17), (18): Xaa is A or G
  MOD_RES (19), (20), (21), (22): Xaa is A or G or is absent
GXGEVVMEEYQKYXXXXXXXXXIFLMSIPSLETPVX

SEQ ID NO: 10426 - protein, 37 aa, Artificial Sequence
  Non-cyclic GFR-binding peptide
  MOD_RES (1), (35), (36): Xaa is C or S
  MOD_RES (13), (14), (15), (16), (17): Xaa is A or G
  MOD_RES (18), (19), (20), (21): Xaa is A or G or is absent
XGEVVMDEYQKYXXXXXXXXXIFLMSIPSLETPVXXA

SEQ ID NO: 10427 - protein, 37 aa, Artificial Sequence
  Non-cyclic GFR-binding peptide
  MOD_RES (34), (35): Xaa is C or S
  MOD_RES (12), (13), (14), (15), (16): Xaa is A or G
  MOD_RES (17), (18), (19), (20): Xaa is A or G or is absent
GEVVMENSLQEXXXXXXXXXYYVMPLPELETPVXXAK

SEQ ID NO: 10428 - protein, 38 aa, Artificial Sequence
  Non-cyclic GFR-binding peptide
  MOD_RES (1), (3), (37), (38): Xaa is C or S
  MOD_RES (15), (16), (17), (18), (19): Xaa is A or G
  MOD_RES (20), (21), (22), (23): Xaa is A or G or is absent
XGXARVVMNEYQKYXXXXXXXXXIFLVSIPSLQTPAXX

SEQ ID NO: 10429 - protein, 39 aa, Artificial Sequence
  Non-cyclic GFR-binding peptide
  MOD_RES (1), (35), (36): Xaa is C or S
  MOD_RES (13), (14), (15), (16), (17): Xaa is A or G
  MOD_RES (18), (19), (20), (21): Xaa is A or G or is absent
XSEVVMDQYNKLXXXXXXXXXLYLISIASLRTPVXXTPP

SEQ ID NO: 10430 - protein, 36 aa, Artificial Sequence
  Non-cyclic GFR-binding peptide
  MOD_RES (1), (3): Xaa is C or S
  MOD_RES (15), (16), (17), (18), (19): Xaa is A or G
  MOD_RES (20), (21), (22), (23): Xaa is A or G or is absent
XGXSEVVMDNSLQEXXXXXXXXXYYLITLPELRTPV

SEQ ID NO: 10431 - protein, 32 aa, Artificial Sequence
  Non-cyclic GFR-binding peptide
  MOD_RES (31), (32): Xaa is C or S
EVVMDNSLQEVVNNASDYYLITLPELRTPVXX

SEQ ID NO: 10432 - protein, 34 aa, Artificial Sequence
  Non-cyclic GFR-binding peptide
  MOD_RES (1), (1): Xaa is C or S
  MOD_RES (13), (14), (15), (16), (17): Xaa is A or G
  MOD_RES (18), (19), (20), (21): Xaa is A or G or is absent
XSEVVMDQYNKLXXXXXXXXXLYLISIASLRTPV

SEQ ID NO: 10433 - protein, 41 aa, Artificial Sequence
  Non-cyclic GFR-binding peptide
  MOD_RES (2), (36), (37): Xaa is C or S
  MOD_RES (14), (15), (16), (17), (18): Xaa is A or G
  MOD_RES (19), (20), (21), (22): Xaa is A or G or is absent
GXGEVVMDNSLQEXXXXXXXXXYYLMTLPELETPVXXAKPI

SEQ ID NO: 10434 - protein, 39 aa, Artificial Sequence
  Non-cyclic GFR-binding peptide
  MOD_RES (2), (36), (37): Xaa is C or S
  MOD_RES (14), (15), (16), (17), (18): Xaa is A or G
  MOD_RES (19), (20), (21), (22): Xaa is A or G or is absent
GXSEVVMDRYKKLXXXXXXXXXFYLISIANLRTPVXXTP

SEQ ID NO: 10435 - protein, 38 aa, Artificial Sequence
  Non-cyclic GFR-binding peptide
  MOD_RES (2), (4), (38): Xaa is C or S
  MOD_RES (16), (17), (18), (19), (20): Xaa is A or G
  MOD_RES (21), (22), (23), (24): Xaa is A or G or is absent
RXGXSEVVMDNSLQEXXXXXXXXXYYVIPLPELRTPVX

SEQ ID NO: 10436 - protein, 38 aa, Artificial Sequence
  Non-cyclic GFR-binding peptide
  MOD_RES (1), (3), (35), (36): Xaa is C or S
XGXGEVVMDNSLQEVVKENEDYYLMTLPELETPVXXAK

SEQ ID NO: 10437 - protein, 39 aa, Artificial Sequence
  Non-cyclic GFR-binding peptide
  MOD_RES (1), (3), (35), (36): Xaa is C or S
XGXSEVVMDRYKKLVVNNASDFYLISIANLRTPVXXTPP

SEQ ID NO: 10438 - protein, 32 aa, Artificial Sequence
  Non-cyclic GFR-binding peptide
  MOD_RES (32), (32): Xaa is C or S
SRVVMNNSLQEIVNSSDDYYLVTLPELKTPAX

SEQ ID NO: 10439 - protein, 40 aa, Artificial Sequence
  Non-cyclic GFR-binding peptide
  MOD_RES (2), (34), (35): Xaa is C or S
GXSRVVMNEYQKYIVNSSDDIFLVSIPSLKTPAXXPKPVY

SEQ ID NO: 10440 - protein, 41 aa, Artificial Sequence
  Non-cyclic GFR-binding peptide
  MOD_RES (2), (4), (38), (39): Xaa is C or S
  MOD_RES (16), (17), (18), (19), (20): Xaa is A or G
  MOD_RES (21), (22), (23), (24): Xaa is A or G or is absent
RXGXGEVVMENSLQEXXXXXXXXXYYLMTLPELETPVXXAK

SEQ ID NO: 10441 - protein, 36 aa, Artificial Sequence
  Non-cyclic GFR-binding peptide
  MOD_RES (1), (34), (35): Xaa is C or S
  MOD_RES (12), (13), (14), (15), (16): Xaa is A or G
  MOD_RES (17), (18), (19), (20): Xaa is A or G or is absent
XSKVIMNSLQEXXXXXXXXXYYVIPLPELDQSVXXP

SEQ ID NO: 10442 - protein, 34 aa, Artificial Sequence
  Non-cyclic GFR-binding peptide
  MOD_RES (1), (1): Xaa is C or S
  MOD_RES (13), (14), (15), (16), (17): Xaa is A or G
  MOD_RES (18), (19), (20), (21): Xaa is A or G or is absent
XSRVVMNNSLQEXXXXXXXXXYYVVPLPELKTPA

SEQ ID NO: 10443 - protein, 34 aa, Artificial Sequence
  Non-cyclic GFR-binding peptide
  MOD_RES (33), (34): Xaa is C or S
  MOD_RES (11), (12), (13), (14), (15): Xaa is A or G
  MOD_RES (16), (17), (18), (19): Xaa is A or G or is absent
EVVMDNSLQEXXXXXXXXXYYVIPLPELRTPVXX

SEQ ID NO: 10444 - protein, 33 aa, Artificial Sequence
  Non-cyclic GFR-binding peptide
  MOD_RES (31), (32): Xaa is C or S
SKVVMNSLQEVKPTRGVYYVIPLPELDQPVXXP

SEQ ID NO: 10445 - protein, 37 aa, Artificial Sequence
  Non-cyclic GFR-binding peptide
  MOD_RES (1), (35), (36): Xaa is C or S
  MOD_RES (13), (14), (15), (16), (17): Xaa is A or G
  MOD_RES (18), (19), (20), (21): Xaa is A or G or is absent
XSRVVMNNSLQEXXXXXXXXXYYVVPLPELKTPAXXP

SEQ ID NO: 10446 - protein, 37 aa, Artificial Sequence
  Non-cyclic GFR-binding peptide
  MOD_RES (1), (3), (35), (36): Xaa is C or S
XGXARVVMNNSLQEIVNSSDDYYVVPLPELQTPAXXP

SEQ ID NO: 10447 - protein, 39 aa, Artificial Sequence
  Non-cyclic GFR-binding peptide
  MOD_RES (2), (34), (35): Xaa is C or S
GXSEVVMDNSLQEVVNNASDYYLITLPELRTPVXXTPPT

SEQ ID NO: 10448 - protein, 37 aa, Artificial Sequence
  Non-cyclic GFR-binding peptide
  MOD_RES (2), (35), (36): Xaa is C or S
  MOD_RES (13), (14), (15), (16), (17): Xaa is A or G
  MOD_RES (18), (19), (20), (21): Xaa is A or G or is absent
KXSKVVMNSLQEXXXXXXXXXYYVIPLPELDQPVXXP

SEQ ID NO: 10449 - protein, 38 aa, Artificial Sequence
  Non-cyclic GFR-binding peptide
  MOD_RES (2), (4), (36), (37): Xaa is C or S
RXGXGEVVMDNSLQEVVKENEDYYLMTLPELETPVXXA

SEQ ID NO: 10450 - protein, 35 aa, Artificial Sequence
  Non-cyclic GFR-binding peptide
  MOD_RES (2), (2): Xaa is C or S
  MOD_RES (14), (15), (16), (17), (18): Xaa is A or G
  MOD_RES (19), (20), (21), (22): Xaa is A or G or is absent
GXGEVVMENSLQEXXXXXXXXXYYLMTLPELETPV

SEQ ID NO: 10451 - protein, 34 aa, Artificial Sequence
  Non-cyclic GFR-binding peptide
  MOD_RES (1), (1): Xaa is C or S
  MOD_RES (13), (14), (15), (16), (17): Xaa is A or G
  MOD_RES (18), (19), (20), (21): Xaa is A or G or is absent
XSRVVMNEYQKYXXXXXXXXXIFLVSIPSLKTPA

SEQ ID NO: 10452 - protein, 39 aa, Artificial Sequence
  Non-cyclic GFR-binding peptide
  MOD_RES (1), (34), (35): Xaa is C or S
  MOD_RES (12), (13), (14), (15), (16): Xaa is A or G
  MOD_RES (17), (18), (19), (20): Xaa is A or G or is absent
XSKVIMEYQKYXXXXXXXXXIFLISIPSLDQSVXXPSAS

SEQ ID NO: 10453 - protein, 40 aa, Artificial Sequence
  Non-cyclic GFR-binding peptide
  MOD_RES (2), (4), (38), (39): Xaa is C or S
  MOD_RES (16), (17), (18), (19), (20): Xaa is A or G
  MOD_RES (21), (22), (23), (24): Xaa is A or G or is absent
HXGXSRVVMNNSLQEXXXXXXXXXYYVVPLPELKTPAXXP

SEQ ID NO: 10454 - protein, 37 aa, Artificial Sequence
  Non-cyclic GFR-binding peptide
  MOD_RES (1), (3), (37): Xaa is C or S
  MOD_RES (15), (16), (17), (18), (19): Xaa is A or G
  MOD_RES (20), (21), (22), (23): Xaa is A or G or is absent
XGXGEVVMEEYQKYXXXXXXXXXIFLMSIPSLETPVX

SEQ ID NO: 10455 - protein, 38 aa, Artificial Sequence
  Non-cyclic GFR-binding peptide
  MOD_RES (2), (34): Xaa is C or S
GXSRVVMNNSLQEIVNSSDDYYVVPLPELKTPAXTPKT

SEQ ID NO: 10456 - protein, 33 aa, Artificial Sequence
  Non-cyclic GFR-binding peptide
  MOD_RES (33), (33): Xaa is C or S
  MOD_RES (11), (12), (13), (14), (15): Xaa is A or G
  MOD_RES (16), (17), (18), (19): Xaa is A or G or is absent
RVVMNEYQKYXXXXXXXXXIFLVSIPSLQTPAX

SEQ ID NO: 10457 - protein, 33 aa, Artificial Sequence
  Non-cyclic GFR-binding peptide
  MOD_RES (2), (2): Xaa is C or S
GXGEVVMEEYQKYVVKDYEDIFLMSIPSLETPV

SEQ ID NO: 10458 - protein, 32 aa, Artificial Sequence
  Non-cyclic GFR-binding peptide
  MOD_RES (1), (1): Xaa is C or S
XARVVMNEYQKYIVNSSDDIFLVSIPSLQTPA

SEQ ID NO: 10459 - protein, 38 aa, Artificial Sequence
  Non-cyclic GFR-binding peptide
  MOD_RES (33), (34): Xaa is C or S
  MOD_RES (11), (12), (13), (14), (15): Xaa is A or G
  MOD_RES (16), (17), (18), (19): Xaa is A or G or is absent
RVVMNEYQKYXXXXXXXXXIFLVSIPSLQTPAXXPKPV

SEQ ID NO: 10460 - protein, 38 aa, Artificial Sequence
  Non-cyclic GFR-binding peptide
  MOD_RES (2), (34), (35): Xaa is C or S
GXGEVVMDNSLQEVVKENEDYYVMPLPELETPVXXAKP

SEQ ID NO: 10461 - protein, 38 aa, Artificial Sequence
  Non-cyclic GFR-binding peptide
  MOD_RES (2), (36): Xaa is C or S
  MOD_RES (14), (15), (16), (17), (18): Xaa is A or G
  MOD_RES (19), (20), (21), (22): Xaa is A or G or is absent
GXSRVVMNNSLQEXXXXXXXXXYYLVTLPELKTPAXTP

SEQ ID NO: 10462 - protein, 35 aa, Artificial Sequence
  Non-cyclic GFR-binding peptide
  MOD_RES (1), (33): Xaa is C or S
XSRVVMNNSLQEIVNSSDDYYVVPLPELKTPAXTP

SEQ ID NO: 10463 - protein, 33 aa, Artificial Sequence
  Non-cyclic GFR-binding peptide
  MOD_RES (31), (32): Xaa is C or S
RVVMNEYQKYIVNSSDDIFLVSIPSLKTPAXXP

SEQ ID NO: 10464 - protein, 32 aa, Artificial Sequence
  Non-cyclic GFR-binding peptide
  MOD_RES (11), (12), (13), (14), (15): Xaa is A or G
  MOD_RES (16), (17), (18), (19): Xaa is A or G or is absent
EVVMDNSLQEXXXXXXXXXYYLMTLPELETPV

SEQ ID NO: 10465 - protein, 38 aa, Artificial Sequence
  Non-cyclic GFR-binding peptide
  MOD_RES (32), (32): Xaa is C or S
SRVVMNNSLQEIVNSSDDYYVVPLPELKTPAXTPKTVH

SEQ ID NO: 10466 - protein, 40 aa, Artificial Sequence
  Non-cyclic GFR-binding peptide
  MOD_RES (1), (3), (35), (36): Xaa is C or S
XGXSEVVMDNSLQEVVNNASDYYLITLPELRTPVXXTPPT

SEQ ID NO: 10467 - protein, 35 aa, Artificial Sequence
  Non-cyclic GFR-binding peptide
  MOD_RES (32), (33): Xaa is C or S
ARVVMNNSLQEIVNSSDDYYLVTLPELQTPAXXPK

SEQ ID NO: 10468 - protein, 35 aa, Artificial Sequence
  Non-cyclic GFR-binding peptide
  MOD_RES (2), (35): Xaa is C or S
  MOD_RES (13), (14), (15), (16), (17): Xaa is A or G
  MOD_RES (18), (19), (20), (21): Xaa is A or G or is absent
KXSKVVMEYQKYXXXXXXXXXIFLISIPSLDQPVX

SEQ ID NO: 10469 - protein, 35 aa, Artificial Sequence
  Non-cyclic GFR-binding peptide
  MOD_RES (1), (35): Xaa is C or S
  MOD_RES (13), (14), (15), (16), (17): Xaa is A or G
  MOD_RES (18), (19), (20), (21): Xaa is A or G or is absent
XSRVVMNEYQKYXXXXXXXXXIFLVSIPSLKTPAX

SEQ ID NO: 10470 - protein, 35 aa, Artificial Sequence
  Non-cyclic GFR-binding peptide
  MOD_RES (31), (32): Xaa is C or S
SRVIMNSLQEVKPKRGVYYLITLPELAQPVXXPAA

SEQ ID NO: 10471 - protein, 35 aa, Artificial Sequence
  Non-cyclic GFR-binding peptide
  MOD_RES (2), (33), (34): Xaa is C or S
KXSKVIMNSLQEIKPTKGIYYVIPLPELDQSVXXP

SEQ ID NO: 10472 - protein, 44 aa, Artificial Sequence
  Non-cyclic GFR-binding peptide
  MOD_RES (2), (4), (38): Xaa is C or S
  MOD_RES (16), (17), (18), (19), (20): Xaa is A or G
  MOD_RES (21), (22), (23), (24): Xaa is A or G or is absent
HXGXSRVVMNNSLQEXXXXXXXXXYYLVTLPELKTPAXTPKTVH

SEQ ID NO: 10473 - protein, 40 aa, Artificial Sequence
  Non-cyclic GFR-binding peptide
  MOD_RES (2), (4), (36), (37): Xaa is C or S
RXGXSEVVMDRYKKLVVNNASDFYLISIANLRTPVXXTPP

SEQ ID NO: 10474 - protein, 36 aa, Artificial Sequence
  Non-cyclic GFR-binding peptide
  MOD_RES (32), (33): Xaa is C or S
SEVVMDNSLQEVVNNASDYYLITLPELRTPVXXTPP

SEQ ID NO: 10475 - protein, 42 aa, Artificial Sequence
  Non-cyclic GFR-binding peptide
  MOD_RES (2), (4), (38), (39): Xaa is C or S
  MOD_RES (16), (17), (18), (19), (20): Xaa is A or G
  MOD_RES (21), (22), (23), (24): Xaa is A or G or is absent
RXGXSEVVMDNSLQEXXXXXXXXXYYVIPLPELRTPVXXTPP

SEQ ID NO: 10476 - protein, 36 aa, Artificial Sequence
  Non-cyclic GFR-binding peptide
  MOD_RES (2), (35), (36): Xaa is C or S
  MOD_RES (13), (14), (15), (16), (17): Xaa is A or G
  MOD_RES (18), (19), (20), (21): Xaa is A or G or is absent
KXSKVVMEYQKYXXXXXXXXXIFLISIPSLDQPVXX

SEQ ID NO: 10477 - protein, 35 aa, Artificial Sequence
  Non-cyclic GFR-binding peptide
  MOD_RES (2), (33), (34): Xaa is C or S
KXSRVIMNSLQEVKPKRGVYYLITLPELAQPVXXP

SEQ ID NO: 10478 - protein, 36 aa, Artificial Sequence
  Non-cyclic GFR-binding peptide
  MOD_RES (32), (33): Xaa is C or S
GEVVMDEYQKYVVKENEDIFLMSIPSLETPVXXAKP

SEQ ID NO: 10479 - protein, 36 aa, Artificial Sequence
  Non-cyclic GFR-binding peptide
  MOD_RES (31), (31): Xaa is C or S
RVVMNNSLQEIVNSSDDYYLVTLPELKTPAXTPKTV

SEQ ID NO: 10480 - protein, 38 aa, Artificial Sequence
  Non-cyclic GFR-binding peptide
  MOD_RES (1), (3), (37), (38): Xaa is C or S
  MOD_RES (15), (16), (17), (18), (19): Xaa is A or G
  MOD_RES (20), (21), (22), (23): Xaa is A or G or is absent
XGXSEVVMDNSLQEXXXXXXXXXYYVIPLPELRTPVXX

SEQ ID NO: 10481 - protein, 31 aa, Artificial Sequence
  Non-cyclic GFR-binding peptide
  MOD_RES (31), (31): Xaa is C or S
RVVMNEYQKYIVNSSDDIFLVSIPSLKTPAX

SEQ ID NO: 10482 - protein, 37 aa, Artificial Sequence
  Non-cyclic GFR-binding peptide
  MOD_RES (31), (32): Xaa is C or S
SKVVMNSLQEVKPTRGVYYVIPLPELDQPVXXPSASA

SEQ ID NO: 10483 - protein, 42 aa, Artificial Sequence
  Non-cyclic GFR-binding peptide
  MOD_RES (2), (36), (37): Xaa is C or S
  MOD_RES (14), (15), (16), (17), (18): Xaa is A or G
  MOD_RES (19), (20), (21), (22): Xaa is A or G or is absent
GXARVVMNNSLQEXXXXXXXXXYYLVTLPELQTPAXXPKPVT

SEQ ID NO: 10484 - protein, 34 aa, Artificial Sequence
  Non-cyclic GFR-binding peptide
  MOD_RES (1), (33), (34): Xaa is C or S
XSEVVMDRYKKLVVNNASDFYLISIANLRTPVXX

SEQ ID NO: 10485 - protein, 35 aa, Artificial Sequence
  Non-cyclic GFR-binding peptide
  MOD_RES (33), (34): Xaa is C or S
  MOD_RES (11), (12), (13), (14), (15): Xaa is A or G
  MOD_RES (16), (17), (18), (19): Xaa is A or G or is absent
SKVVMNSLQEXXXXXXXXXYYVIPLPELDQPVXXP

SEQ ID NO: 10486 - protein, 33 aa, Artificial Sequence
  Non-cyclic GFR-binding peptide
  MOD_RES (1), (33): Xaa is C or S
XGEVVMDEYQKYVVKENEDIFLMSIPSLETPVX

SEQ ID NO: 10487 - protein, 39 aa, Artificial Sequence
  Non-cyclic GFR-binding peptide
  MOD_RES (2), (36), (37): Xaa is C or S
  MOD_RES (14), (15), (16), (17), (18): Xaa is A or G
  MOD_RES (19), (20), (21), (22): Xaa is A or G or is absent
GXARVVMNNSLQEXXXXXXXXXYYLVTLPELQTPAXXPK

SEQ ID NO: 10488 - protein, 32 aa, Artificial Sequence
  Non-cyclic GFR-binding peptide
  MOD_RES (1), (32): Xaa is C or S
XSKVVMEYQKYVKPTRGVIFLISIPSLDQPVX

SEQ ID NO: 10489 - protein, 41 aa, Artificial Sequence
  Non-cyclic GFR-binding peptide
  MOD_RES (1), (3), (36), (37): Xaa is C or S
  MOD_RES (14), (15), (16), (17), (18): Xaa is A or G
  MOD_RES (19), (20), (21), (22): Xaa is A or G or is absent
XKXSRVIMNSLQEXXXXXXXXXYYLITLPELAQPVXXPAAS

SEQ ID NO: 10490 - protein, 35 aa, Artificial Sequence
  Non-cyclic GFR-binding peptide
  MOD_RES (33), (33): Xaa is C or S
  MOD_RES (11), (12), (13), (14), (15): Xaa is A or G
  MOD_RES (16), (17), (18), (19): Xaa is A or G or is absent
RVVMNNSLQEXXXXXXXXXYYVVPLPELKTPAXTP

SEQ ID NO: 10491 - protein, 40 aa, Artificial Sequence
  Non-cyclic GFR-binding peptide
  MOD_RES (2), (36), (37): Xaa is C or S
  MOD_RES (14), (15), (16), (17), (18): Xaa is A or G
  MOD_RES (19), (20), (21), (22): Xaa is A or G or is absent
GXARVVMNNSLQEXXXXXXXXXYYLVTLPELQTPAXXPKP

SEQ ID NO: 10492 - protein, 37 aa, Artificial Sequence
  Non-cyclic GFR-binding peptide
  MOD_RES (1), (33), (34): Xaa is C or S
XARVVMNEYQKYIVNSSDDIFLVSIPSLQTPAXXPKP

SEQ ID NO: 10493 - protein, 39 aa, Artificial Sequence
  Non-cyclic GFR-binding peptide
  MOD_RES (2), (34), (35): Xaa is C or S
GXGEVVMEEYQKYVVKDYEDIFLMSIPSLETPVXXAKPI

SEQ ID NO: 10494 - protein, 33 aa, Artificial Sequence
  Non-cyclic GFR-binding peptide
  MOD_RES (33), (33): Xaa is C or S
  MOD_RES (11), (12), (13), (14), (15): Xaa is A or G
  MOD_RES (16), (17), (18), (19): Xaa is A or G or is absent
EVVMDNSLQEXXXXXXXXXYYVMPLPELETPVX

SEQ ID NO: 10495 - protein, 36 aa, Artificial Sequence
  Non-cyclic GFR-binding peptide
  MOD_RES (31), (32): Xaa is C or S
SKVIMNSLQEIKPTKGIYYVIPLPELDQSVXXPSAS

SEQ ID NO: 10496 - protein, 37 aa, Artificial Sequence
  Non-cyclic GFR-binding peptide
  MOD_RES (31), (32): Xaa is C or S
EVVMDEYQKYVVKENEDIFLMSIPSLETPVXXAKPIK

SEQ ID NO: 10497 - protein, 39 aa, Artificial Sequence
  Non-cyclic GFR-binding peptide
  MOD_RES (1), (3), (37), (38): Xaa is C or S
  MOD_RES (15), (16), (17), (18), (19): Xaa is A or G
  MOD_RES (20), (21), (22), (23): Xaa is A or G or is absent
XGXSEVVMDNSLQEXXXXXXXXXYYLITLPELRTPVXXT

SEQ ID NO: 10498 - protein, 34 aa, Artificial Sequence
  Non-cyclic GFR-binding peptide
  MOD_RES (2), (34): Xaa is C or S
GXSRVVMNEYQKYIVNSSDDIFLVSIPSLKTPAX

SEQ ID NO: 10499 - protein, 39 aa, Artificial Sequence
  Non-cyclic GFR-binding peptide
  MOD_RES (1), (35): Xaa is C or S
  MOD_RES (13), (14), (15), (16), (17): Xaa is A or G
  MOD_RES (18), (19), (20), (21): Xaa is A or G or is absent
XSRVVMNNSLQEXXXXXXXXXYYVVPLPELKTPAXTPKT

SEQ ID NO: 10500 - protein, 36 aa, Artificial Sequence
  Non-cyclic GFR-binding peptide
  MOD_RES (32), (33): Xaa is C or S
SEVVMDQYNKLVVNNASDLYLISIASLRTPVXXTPP

SEQ ID NO: 10501 - protein, 36 aa, Artificial Sequence
  Non-cyclic GFR-binding peptide
  MOD_RES (32), (33): Xaa is C or S
GEVVMEEYQKYVVKDYEDIFLMSIPSLETPVXXAKP

SEQ ID NO: 10502 - protein, 42 aa, Artificial Sequence
  Non-cyclic GFR-binding peptide
  MOD_RES (1), (3), (36), (37): Xaa is C or S
  MOD_RES (14), (15), (16), (17), (18): Xaa is A or G
  MOD_RES (19), (20), (21), (22): Xaa is A or G or is absent
XKXSKVVMEYQKYXXXXXXXXXIFLISIPSLDQPVXXPSASA

SEQ ID NO: 10503 - protein, 35 aa, Artificial Sequence
  Non-cyclic GFR-binding peptide
  MOD_RES (2), (2): Xaa is C or S
  MOD_RES (14), (15), (16), (17), (18): Xaa is A or G
  MOD_RES (19), (20), (21), (22): Xaa is A or G or is absent
GXGEVVMENSLQEXXXXXXXXXYYVMPLPELETPV

SEQ ID NO: 10504 - protein, 37 aa, Artificial Sequence
  Non-cyclic GFR-binding peptide
  MOD_RES (33), (34): Xaa is C or S
  MOD_RES (11), (12), (13), (14), (15): Xaa is A or G
  MOD_RES (16), (17), (18), (19): Xaa is A or G or is absent
RVVMNEYQKYXXXXXXXXXIFLVSIPSLKTPAXXPKP

SEQ ID NO: 10505 - protein, 36 aa, Artificial Sequence
  Non-cyclic GFR-binding peptide
  MOD_RES (1), (3): Xaa is C or S
  MOD_RES (15), (16), (17), (18), (19): Xaa is A or G
  MOD_RES (20), (21), (22), (23): Xaa is A or G or is absent
XGXSRVVMNNSLQEXXXXXXXXXYYLVTLPELKTPA

SEQ ID NO: 10506 - protein, 37 aa, Artificial Sequence
  Non-cyclic GFR-binding peptide
  MOD_RES (1), (3), (37): Xaa is C or S
  MOD_RES (15), (16), (17), (18), (19): Xaa is A or G
  MOD_RES (20), (21), (22), (23): Xaa is A or G or is absent
XGXSRVVMNEYQKYXXXXXXXXXIFLVSIPSLKTPAX

SEQ ID NO: 10507 - protein, 31 aa, Artificial Sequence
  Non-cyclic GFR-binding peptide
  MOD_RES (31), (31): Xaa is C or S
EVVMDNSLQEVVNNASDYYLITLPELRTPVX

SEQ ID NO: 10508 - protein, 34 aa, Artificial Sequence
  Non-cyclic GFR-binding peptide
  MOD_RES (31), (32): Xaa is C or S
RVVMNEYQKYIVNSSDDIFLVSIPSLQTPAXXPK

SEQ ID NO: 10509 - protein, 40 aa, Artificial Sequence
  Non-cyclic GFR-binding peptide
  MOD_RES (1), (3), (35), (36): Xaa is C or S
XGXSEVVMDQYNKLVVNNASDLYLISIASLRTPVXXTPPT

SEQ ID NO: 10510 - protein, 34 aa, Artificial Sequence
  Non-cyclic GFR-binding peptide
  MOD_RES (2), (34): Xaa is C or S
GXARVVMNEYQKYIVNSSDDIFLVSIPSLQTPAX

SEQ ID NO: 10511 - protein, 33 aa, Artificial Sequence
  Non-cyclic GFR-binding peptide
  MOD_RES (1), (33): Xaa is C or S
XSRVVMNNSLQEIVNSSDDYYLVTLPELKTPAX

SEQ ID NO: 10512 - protein, 43 aa, Artificial Sequence
  Non-cyclic GFR-binding peptide
  MOD_RES (2), (4), (38), (39): Xaa is C or S
  MOD_RES (16), (17), (18), (19), (20): Xaa is A or G
  MOD_RES (21), (22), (23), (24): Xaa is A or G or is absent
RXGXSEVVMDQYNKLXXXXXXXXXLYLISIASLRTPVXXTPPT

SEQ ID NO: 10513 - protein, 39 aa, Artificial Sequence
  Non-cyclic GFR-binding peptide
  MOD_RES (2), (34), (35): Xaa is C or S
GXSEVVMDRYKKLVVNNASDFYLISIANLRTPVXXTPPT

SEQ ID NO: 10514 - protein, 38 aa, Artificial Sequence
  Non-cyclic GFR-binding peptide
  MOD_RES (2), (34), (35): Xaa is C or S
GXSRVVMNNSLQEIVNSSDDYYVVPLPELKTPAXXPKP

SEQ ID NO: 10515 - protein, 43 aa, Artificial Sequence
  Non-cyclic GFR-binding peptide
  MOD_RES (2), (4), (38), (39): Xaa is C or S
  MOD_RES (16), (17), (18), (19), (20): Xaa is A or G
  MOD_RES (21), (22), (23), (24): Xaa is A or G or is absent
HXGXSRVVMNEYQKYXXXXXXXXXIFLVSIPSLKTPAXXPKPV

SEQ ID NO: 10516 - protein, 34 aa, Artificial Sequence
  Non-cyclic GFR-binding peptide
  MOD_RES (2), (2): Xaa is C or S
  MOD_RES (13), (14), (15), (16), (17): Xaa is A or G
  MOD_RES (18), (19), (20), (21): Xaa is A or G or is absent
KXSKVVMNSLQEXXXXXXXXXYYVIPLPELDQPV

SEQ ID NO: 10517 - protein, 35 aa, Artificial Sequence
  Non-cyclic GFR-binding peptide
  MOD_RES (33), (33): Xaa is C or S
  MOD_RES (11), (12), (13), (14), (15): Xaa is A or G
  MOD_RES (16), (17), (18), (19): Xaa is A or G or is absent
RVVMNNSLQEXXXXXXXXXYYLVTLPELKTPAXTP

SEQ ID NO: 10518 - protein, 44 aa, Artificial Sequence
  Non-cyclic GFR-binding peptide
  MOD_RES (2), (4), (38), (39): Xaa is C or S
  MOD_RES (16), (17), (18), (19), (20): Xaa is A or G
  MOD_RES (21), (22), (23), (24): Xaa is A or G or is absent
HXGXSRVVMNNSLQEXXXXXXXXXYYVVPLPELKTPAXXPKPVY

SEQ ID NO: 10519 - protein, 31 aa, Artificial Sequence
  Non-cyclic GFR-binding peptide
  MOD_RES (1), (1): Xaa is C or S
XSKVVMEYQKYVKPTRGVIFLISIPSLDQPV

SEQ ID NO: 10520 - protein, 39 aa, Artificial Sequence
  Non-cyclic GFR-binding peptide
  MOD_RES (1), (35), (36): Xaa is C or S
  MOD_RES (13), (14), (15), (16), (17): Xaa is A or G
  MOD_RES (18), (19), (20), (21): Xaa is A or G or is absent
XARVVMNNSLQEXXXXXXXXXYYLVTLPELQTPAXXPKP

SEQ ID NO: 10521 - protein, 35 aa, Artificial Sequence
  Non-cyclic GFR-binding peptide
  MOD_RES (1), (3), (35): Xaa is C or S
XGXARVVMNNSLQEIVNSSDDYYLVTLPELQTPAX

SEQ ID NO: 10522 - protein, 38 aa, Artificial Sequence
  Non-cyclic GFR-binding peptide
  MOD_RES (1), (3), (37), (38): Xaa is C or S
  MOD_RES (15), (16), (17), (18), (19): Xaa is A or G
  MOD_RES (20), (21), (22), (23): Xaa is A or G or is absent
XGXSEVVMDNSLQEXXXXXXXXXYYLITLPELRTPVXX

SEQ ID NO: 10523 - protein, 38 aa, Artificial Sequence
  Non-cyclic GFR-binding peptide
  MOD_RES (1), (33), (34): Xaa is C or S
XGEVVMENSLQEVVKDYEDYYLMTLPELETPVXXAKPI

SEQ ID NO: 10524 - protein, 40 aa, Artificial Sequence
  Non-cyclic GFR-binding peptide
  MOD_RES (1), (35): Xaa is C or S
  MOD_RES (13), (14), (15), (16), (17): Xaa is A or G
  MOD_RES (18), (19), (20), (21): Xaa is A or G or is absent
XSRVVMNNSLQEXXXXXXXXXYYLVTLPELKTPAXTPKTV

SEQ ID NO: 10525 - protein, 37 aa, Artificial Sequence
  Non-cyclic GFR-binding peptide
  MOD_RES (2), (4), (36), (37): Xaa is C or S
RXGXGEVVMDNSLQEVVKENEDYYVMPLPELETPVXX

SEQ ID NO: 10526 - protein, 34 aa, Artificial Sequence
  Non-cyclic GFR-binding peptide
  MOD_RES (2), (2): Xaa is C or S
  MOD_RES (13), (14), (15), (16), (17): Xaa is A or G
  MOD_RES (18), (19), (20), (21): Xaa is A or G or is absent
KXSKVIMEYQKYXXXXXXXXXIFLISIPSLDQSV

SEQ ID NO: 10527 - protein, 32 aa, Artificial Sequence
  Non-cyclic GFR-binding peptide
  MOD_RES (1), (32): Xaa is C or S
XSKVIMEYQKYIKPTKGIIFLISIPSLDQSVX

SEQ ID NO: 10528 - protein, 39 aa, Artificial Sequence
  Non-cyclic GFR-binding peptide
  MOD_RES (2), (36), (37): Xaa is C or S
  MOD_RES (14), (15), (16), (17), (18): Xaa is A or G
  MOD_RES (19), (20), (21), (22): Xaa is A or G or is absent
GXARVVMNNSLQEXXXXXXXXXYYVVPLPELQTPAXXPK

SEQ ID NO: 10529 - protein, 42 aa, Artificial Sequence
  Non-cyclic GFR-binding peptide
  MOD_RES (2), (4), (38), (39): Xaa is C or S
  MOD_RES (16), (17), (18), (19), (20): Xaa is A or G
  MOD_RES (21), (22), (23), (24): Xaa is A or G or is absent
HXGXSRVVMNEYQKYXXXXXXXXXIFLVSIPSLKTPAXXPKP

SEQ ID NO: 10530 - protein, 39 aa, Artificial Sequence
  Non-cyclic GFR-binding peptide
  MOD_RES (1), (33), (34): Xaa is C or S
XSEVVMDQYNKLVVNNASDLYLISIASLRTPVXXTPPTS

SEQ ID NO: 10531 - protein, 36 aa, Artificial Sequence
  Non-cyclic GFR-binding peptide
  MOD_RES (1), (3), (36): Xaa is C or S
  MOD_RES (14), (15), (16), (17), (18): Xaa is A or G
  MOD_RES (19), (20), (21), (22): Xaa is A or G or is absent
XKXSKVIMEYQKYXXXXXXXXXIFLISIPSLDQSVX

SEQ ID NO: 10532 - protein, 35 aa, Artificial Sequence
  Non-cyclic GFR-binding peptide
  MOD_RES (1), (33), (34): Xaa is C or S
XGEVVMENSLQEVVKDYEDYYLMTLPELETPVXXA

SEQ ID NO: 10533 - protein, 34 aa, Artificial Sequence
  Non-cyclic GFR-binding peptide
  MOD_RES (1), (33), (34): Xaa is C or S
XGEVVMEEYQKYVVKDYEDIFLMSIPSLETPVXX

SEQ ID NO: 10534 - protein, 40 aa, Artificial Sequence
  Non-cyclic GFR-binding peptide
  MOD_RES (2), (4), (38), (39): Xaa is C or S
  MOD_RES (16), (17), (18), (19), (20): Xaa is A or G
  MOD_RES (21), (22), (23), (24): Xaa is A or G or is absent
HXGXSRVVMNEYQKYXXXXXXXXXIFLVSIPSLKTPAXXP

SEQ ID NO: 10535 - protein, 41 aa, Artificial Sequence
  Non-cyclic GFR-binding peptide
  MOD_RES (2), (4), (35), (36): Xaa is C or S
SXKXSKVVMEYQKYVKPTRGVIFLISIPSLDQPVXXPSASA

SEQ ID NO: 10536 - protein, 41 aa, Artificial Sequence
  Non-cyclic GFR-binding peptide
  MOD_RES (1), (3), (37): Xaa is C or S
  MOD_RES (15), (16), (17), (18), (19): Xaa is A or G
  MOD_RES (20), (21), (22), (23): Xaa is A or G or is absent
XGXSRVVMNEYQKYXXXXXXXXXIFLVSIPSLKTPAXTPKT

SEQ ID NO: 10537 - protein, 31 aa, Artificial Sequence
  Non-cyclic GFR-binding peptide
  MOD_RES (31), (31): Xaa is C or S
EVVMEEYQKYVVKDYEDIFLMSIPSLETPVX

SEQ ID NO: 10538 - protein, 40 aa, Artificial Sequence
  Non-cyclic GFR-binding peptide
  MOD_RES (1), (3), (37), (38): Xaa is C or S
  MOD_RES (15), (16), (17), (18), (19): Xaa is A or G
  MOD_RES (20), (21), (22), (23): Xaa is A or G or is absent
XGXSEVVMDRYKKLXXXXXXXXXFYLISIANLRTPVXXTP

SEQ ID NO: 10539 - protein, 38 aa, Artificial Sequence
  Non-cyclic GFR-binding peptide
  MOD_RES (1), (33), (34): Xaa is C or S
XGEVVMDNSLQEVVKENEDYYLMTLPELETPVXXAKPI

SEQ ID NO: 10540 - protein, 38 aa, Artificial Sequence
  Non-cyclic GFR-binding peptide
  MOD_RES (34), (35): Xaa is C or S
  MOD_RES (12), (13), (14), (15), (16): Xaa is A or G
  MOD_RES (17), (18), (19), (20): Xaa is A or G or is absent
GEVVMENSLQEXXXXXXXXXYYLMTLPELETPVXXAKP

SEQ ID NO: 10541 - protein, 33 aa, Artificial Sequence
  Non-cyclic GFR-binding peptide
  MOD_RES (31), (32): Xaa is C or S
EVVMDRYKKLVVNNASDFYLISIANLRTPVXXT

SEQ ID NO: 10542 - protein, 35 aa, Artificial Sequence
  Non-cyclic GFR-binding peptide
  MOD_RES (2), (33), (34): Xaa is C or S
KXSKVVMEYQKYVKPTRGVIFLISIPSLDQPVXXP

SEQ ID NO: 10543 - protein, 38 aa, Artificial Sequence
  Non-cyclic GFR-binding peptide
  MOD_RES (1), (3), (35): Xaa is C or S
XGXSRVVMNNSLQEIVNSSDDYYLVTLPELKTPAXTPK

SEQ ID NO: 10544 - protein, 39 aa, Artificial Sequence
  Non-cyclic GFR-binding peptide
  MOD_RES (34), (35): Xaa is C or S
  MOD_RES (12), (13), (14), (15), (16): Xaa is A or G
  MOD_RES (17), (18), (19), (20): Xaa is A or G or is absent
GEVVMDNSLQEXXXXXXXXXYYVMPLPELETPVXXAKPI

SEQ ID NO: 10545 - protein, 35 aa, Artificial Sequence
  Non-cyclic GFR-binding peptide
  MOD_RES (32), (33): Xaa is C or S
GEVVMDNSLQEVVKENEDYYLMTLPELETPVXXAK

SEQ ID NO: 10546 - protein, 36 aa, Artificial Sequence
  Non-cyclic GFR-binding peptide
  MOD_RES (2), (33), (34): Xaa is C or S
KXSRVIMNSLQEVKPKRGVYYLITLPELAQPVXXPA

SEQ ID NO: 10547 - protein, 40 aa, Artificial Sequence
  Non-cyclic GFR-binding peptide
  MOD_RES (1), (35), (36): Xaa is C or S
  MOD_RES (13), (14), (15), (16), (17): Xaa is A or G
  MOD_RES (18), (19), (20), (21): Xaa is A or G or is absent
XGEVVMENSLQEXXXXXXXXXYYVMPLPELETPVXXAKPI

SEQ ID NO: 10548 - protein, 34 aa, Artificial Sequence
  Non-cyclic GFR-binding peptide
  MOD_RES (33), (34): Xaa is C or S
  MOD_RES (11), (12), (13), (14), (15): Xaa is A or G
  MOD_RES (16), (17), (18), (19): Xaa is A or G or is absent
RVVMNNSLQEXXXXXXXXXYYVVPLPELQTPAXX

SEQ ID NO: 10549 - protein, 33 aa, Artificial Sequence
  Non-cyclic GFR-binding peptide
  MOD_RES (1), (33): Xaa is C or S
XGEVVMEEYQKYVVKDYEDIFLMSIPSLETPVX

SEQ ID NO: 10550 - protein, 36 aa, Artificial Sequence
  Non-cyclic GFR-binding peptide
  MOD_RES (1), (33), (34): Xaa is C or S
XARVVMNEYQKYIVNSSDDIFLVSIPSLQTPAXXPK

SEQ ID NO: 10551 - protein, 33 aa, Artificial Sequence
  Non-cyclic GFR-binding peptide
  MOD_RES (2), (33): Xaa is C or S
KXSKVIMEYQKYIKPTKGIIFLISIPSLDQSVX

SEQ ID NO: 10552 - protein, 40 aa, Artificial Sequence
  Non-cyclic GFR-binding peptide
  MOD_RES (2), (4), (38), (39): Xaa is C or S
  MOD_RES (16), (17), (18), (19), (20): Xaa is A or G
  MOD_RES (21), (22), (23), (24): Xaa is A or G or is absent
RXGXGEVVMDEYQKYXXXXXXXXXIFLMSIPSLETPVXXA

SEQ ID NO: 10553 - protein, 34 aa, Artificial Sequence
  Non-cyclic GFR-binding peptide
  MOD_RES (32), (33): Xaa is C or S
SEVVMDNSLQEVVNNASDYYVIPLPELRTPVXXT

SEQ ID NO: 10554 - protein, 35 aa, Artificial Sequence
  Non-cyclic GFR-binding peptide
  MOD_RES (31), (32): Xaa is C or S
RVVMNEYQKYIVNSSDDIFLVSIPSLKTPAXXPKP

SEQ ID NO: 10555 - protein, 39 aa, Artificial Sequence
  Non-cyclic GFR-binding peptide
  MOD_RES (1), (3), (37), (38): Xaa is C or S
  MOD_RES (15), (16), (17), (18), (19): Xaa is A or G
  MOD_RES (20), (21), (22), (23): Xaa is A or G or is absent
XGXSRVVMNNSLQEXXXXXXXXXYYVVPLPELKTPAXXP

SEQ ID NO: 10556 - protein, 33 aa, Artificial Sequence
  Non-cyclic GFR-binding peptide
  MOD_RES (12), (13), (14), (15), (16): Xaa is A or G
  MOD_RES (17), (18), (19), (20): Xaa is A or G or is absent
GEVVMEEYQKYXXXXXXXXXIFLMSIPSLETPV

SEQ ID NO: 10557 - protein, 42 aa, Artificial Sequence
  Non-cyclic GFR-binding peptide
  MOD_RES (2), (4), (38), (39): Xaa is C or S
  MOD_RES (16), (17), (18), (19), (20): Xaa is A or G
  MOD_RES (21), (22), (23), (24): Xaa is A or G or is absent
RXGXGEVVMDEYQKYXXXXXXXXXIFLMSIPSLETPVXXAKP

SEQ ID NO: 10558 - protein, 39 aa, Artificial Sequence
  Non-cyclic GFR-binding peptide
  MOD_RES (33), (34): Xaa is C or S
  MOD_RES (11), (12), (13), (14), (15): Xaa is A or G
  MOD_RES (16), (17), (18), (19): Xaa is A or G or is absent
SRVIMNSLQEXXXXXXXXXYYLITLPELAQPVXXPAASA

SEQ ID NO: 10559 - protein, 41 aa, Artificial Sequence
  Non-cyclic GFR-binding peptide
  MOD_RES (1), (3), (35), (36): Xaa is C or S
XGXGEVVMDEYQKYVVKENEDIFLMSIPSLETPVXXAKPIK

SEQ ID NO: 10560 - protein, 39 aa, Artificial Sequence
  Non-cyclic GFR-binding peptide
  MOD_RES (2), (4), (36), (37): Xaa is C or S
HXGXSRVVMNEYQKYIVNSSDDIFLVSIPSLKTPAXXPK

SEQ ID NO: 10561 - protein, 39 aa, Artificial Sequence
  Non-cyclic GFR-binding peptide
  MOD_RES (1), (33), (34): Xaa is C or S
XGEVVMDNSLQEVVKENEDYYLMTLPELETPVXXAKPIK

SEQ ID NO: 10562 - protein, 43 aa, Artificial Sequence
  Non-cyclic GFR-binding peptide
  MOD_RES (1), (3), (37), (38): Xaa is C or S
  MOD_RES (15), (16), (17), (18), (19): Xaa is A or G
  MOD_RES (20), (21), (22), (23): Xaa is A or G or is absent
XGXSRVVMNNSLQEXXXXXXXXXYYVVPLPELKTPAXXPKPVY

SEQ ID NO: 10563 - protein, 34 aa, Artificial Sequence
  Non-cyclic GFR-binding peptide
  MOD_RES (2), (4): Xaa is C or S
SXKXSKVVMEYQKYVKPTRGVIFLISIPSLDQPV

SEQ ID NO: 10564 - protein, 43 aa, Artificial Sequence
  Non-cyclic GFR-binding peptide
  MOD_RES (2), (4), (38), (39): Xaa is C or S
  MOD_RES (16), (17), (18), (19), (20): Xaa is A or G
  MOD_RES (21), (22), (23), (24): Xaa is A or G or is absent
RXGXSEVVMDNSLQEXXXXXXXXXYYVIPLPELRTPVXXTPPT

SEQ ID NO: 10565 - protein, 33 aa, Artificial Sequence
  Non-cyclic GFR-binding peptide
  MOD_RES (1), (1): Xaa is C or S
  MOD_RES (12), (13), (14), (15), (16): Xaa is A or G
  MOD_RES (17), (18), (19), (20): Xaa is A or G or is absent
XSKVIMEYQKYXXXXXXXXXIFLISIPSLDQSV

SEQ ID NO: 10566 - protein, 40 aa, Artificial Sequence
  Non-cyclic GFR-binding peptide
  MOD_RES (2), (4), (36), (37): Xaa is C or S
HXGXSRVVMNNSLQEIVNSSDDYYLVTLPELKTPAXXPKP

SEQ ID NO: 10567 - protein, 37 aa, Artificial Sequence
  Non-cyclic GFR-binding peptide
  MOD_RES (1), (33), (34): Xaa is C or S
XGEVVMEEYQKYVVKDYEDIFLMSIPSLETPVXXAKP

SEQ ID NO: 10568 - protein, 35 aa, Artificial Sequence
  Non-cyclic GFR-binding peptide
  MOD_RES (2), (35): Xaa is C or S
  MOD_RES (13), (14), (15), (16), (17): Xaa is A or G
  MOD_RES (18), (19), (20), (21): Xaa is A or G or is absent
KXSKVIMNSLQEXXXXXXXXXYYVIPLPELDQSVX

SEQ ID NO: 10569 - protein, 34 aa, Artificial Sequence
  Non-cyclic GFR-binding peptide
  MOD_RES (1), (33), (34): Xaa is C or S
XSRVVMNEYQKYIVNSSDDIFLVSIPSLKTPAXX

SEQ ID NO: 10570 - protein, 40 aa, Artificial Sequence
  Non-cyclic GFR-binding peptide
  MOD_RES (2), (4), (38), (39): Xaa is C or S
  MOD_RES (16), (17), (18), (19), (20): Xaa is A or G
  MOD_RES (21), (22), (23), (24): Xaa is A or G or is absent
HXGXSRVVMNNSLQEXXXXXXXXXYYLVTLPELKTPAXXP

SEQ ID NO: 10571 - protein, 40 aa, Artificial Sequence
  Non-cyclic GFR-binding peptide
  MOD_RES (1), (3), (37): Xaa is C or S
  MOD_RES (15), (16), (17), (18), (19): Xaa is A or G
  MOD_RES (20), (21), (22), (23): Xaa is A or G or is absent
XGXSRVVMNNSLQEXXXXXXXXXYYLVTLPELKTPAXTPK

SEQ ID NO: 10572 - protein, 34 aa, Artificial Sequence
  Non-cyclic GFR-binding peptide
  MOD_RES (33), (34): Xaa is C or S
  MOD_RES (11), (12), (13), (14), (15): Xaa is A or G
  MOD_RES (16), (17), (18), (19): Xaa is A or G or is absent
RVVMNNSLQEXXXXXXXXXYYVVPLPELKTPAXX

SEQ ID NO: 10573 - protein, 37 aa, Artificial Sequence
  Non-cyclic GFR-binding peptide
  MOD_RES (1), (35), (36): Xaa is C or S
  MOD_RES (13), (14), (15), (16), (17): Xaa is A or G
  MOD_RES (18), (19), (20), (21): Xaa is A or G or is absent
XSRVVMNNSLQEXXXXXXXXXYYLVTLPELKTPAXXP

SEQ ID NO: 10574 - protein, 36 aa, Artificial Sequence
  Non-cyclic GFR-binding peptide
  MOD_RES (1), (32), (33): Xaa is C or S
XSKVVMNSLQEVKPTRGVYYVIPLPELDQPVXXPSA

SEQ ID NO: 10575 - protein, 37 aa, Artificial Sequence
  Non-cyclic GFR-binding peptide
  MOD_RES (2), (36): Xaa is C or S
  MOD_RES (14), (15), (16), (17), (18): Xaa is A or G
  MOD_RES (19), (20), (21), (22): Xaa is A or G or is absent
GXSRVVMNNSLQEXXXXXXXXXYYVVPLPELKTPAXT

SEQ ID NO: 10576 - protein, 32 aa, Artificial Sequence
  Non-cyclic GFR-binding peptide
  MOD_RES (31), (32): Xaa is C or S
SKVIMEYQKYIKPTKGIIFLISIPSLDQSVXX

SEQ ID NO: 10577 - protein, 37 aa, Artificial Sequence
  Non-cyclic GFR-binding peptide
  MOD_RES (2), (35), (36): Xaa is C or S
  MOD_RES (13), (14), (15), (16), (17): Xaa is A or G
  MOD_RES (18), (19), (20), (21): Xaa is A or G or is absent
KXSRVIMEYQKYXXXXXXXXXIFLISIPSLAQPVXXP

SEQ ID NO: 10578 - protein, 32 aa, Artificial Sequence
  Non-cyclic GFR-binding peptide
  MOD_RES (11), (12), (13), (14), (15): Xaa is A or G
  MOD_RES (16), (17), (18), (19): Xaa is A or G or is absent
SKVVMNSLQEXXXXXXXXXYYVIPLPELDQPV

SEQ ID NO: 10579 - protein, 36 aa, Artificial Sequence
  Non-cyclic GFR-binding peptide
  MOD_RES (34), (35): Xaa is C or S
  MOD_RES (12), (13), (14), (15), (16): Xaa is A or G
  MOD_RES (17), (18), (19), (20): Xaa is A or G or is absent
SEVVMDNSLQEXXXXXXXXXYYLITLPELRTPVXXT

SEQ ID NO: 10580 - protein, 31 aa, Artificial Sequence
  Non-cyclic GFR-binding peptide
ARVVMNNSLQEIVNSSDDYYVVPLPELQTPA

SEQ ID NO: 10581 - protein, 34 aa, Artificial Sequence
  Non-cyclic GFR-binding peptide
  MOD_RES (1), (3): Xaa is C or S
XGXSRVVMNNSLQEIVNSSDDYYVVPLPELKTPA

SEQ ID NO: 10582 - protein, 37 aa, Artificial Sequence
  Non-cyclic GFR-binding peptide
  MOD_RES (1), (3), (35), (36): Xaa is C or S
XGXSEVVMDRYKKLVVNNASDFYLISIANLRTPVXXT

SEQ ID NO: 10583 - protein, 38 aa, Artificial Sequence
  Non-cyclic GFR-binding peptide
  MOD_RES (32), (32): Xaa is C or S
SRVVMNEYQKYIVNSSDDIFLVSIPSLKTPAXTPKTVH

SEQ ID NO: 10584 - protein, 39 aa, Artificial Sequence
  Non-cyclic GFR-binding peptide
  MOD_RES (33), (34): Xaa is C or S
  MOD_RES (11), (12), (13), (14), (15): Xaa is A or G
  MOD_RES (16), (17), (18), (19): Xaa is A or G or is absent
RVVMNNSLQEXXXXXXXXXYYLVTLPELKTPAXXPKPVY

SEQ ID NO: 10585 - protein, 36 aa, Artificial Sequence
  Non-cyclic GFR-binding peptide
  MOD_RES (1), (3): Xaa is C or S
  MOD_RES (15), (16), (17), (18), (19): Xaa is A or G
  MOD_RES (20), (21), (22), (23): Xaa is A or G or is absent
XGXSEVVMDRYKKLXXXXXXXXXFYLISIANLRTPV

SEQ ID NO: 10586 - protein, 41 aa, Artificial Sequence
  Non-cyclic GFR-binding peptide
  MOD_RES (2), (4), (38), (39): Xaa is C or S
  MOD_RES (16), (17), (18), (19), (20): Xaa is A or G
  MOD_RES (21), (22), (23), (24): Xaa is A or G or is absent
RXGXSEVVMDNSLQEXXXXXXXXXYYLITLPELRTPVXXTP

SEQ ID NO: 10587 - protein, 33 aa, Artificial Sequence
  Non-cyclic GFR-binding peptide
  MOD_RES (2), (2): Xaa is C or S
GXSEVVMDRYKKLVVNNASDFYLISIANLRTPV

SEQ ID NO: 10588 - protein, 38 aa, Artificial Sequence
  Non-cyclic GFR-binding peptide
  MOD_RES (34), (35): Xaa is C or S
  MOD_RES (12), (13), (14), (15), (16): Xaa is A or G
  MOD_RES (17), (18), (19), (20): Xaa is A or G or is absent
GEVVMDNSLQEXXXXXXXXXYYLMTLPELETPVXXAKP

SEQ ID NO: 10589 - protein, 33 aa, Artificial Sequence
  Non-cyclic GFR-binding peptide
  MOD_RES (1), (33): Xaa is C or S
XGEVVMDNSLQEVVKENEDYYVMPLPELETPVX

SEQ ID NO: 10590 - protein, 33 aa, Artificial Sequence
  Non-cyclic GFR-binding peptide
  MOD_RES (1), (3): Xaa is C or S
XKXSKVVMNSLQEVKPTRGVYYVIPLPELDQPV

SEQ ID NO: 10591 - protein, 42 aa, Artificial Sequence
  Non-cyclic GFR-binding peptide
  MOD_RES (2), (36), (37): Xaa is C or S
  MOD_RES (14), (15), (16), (17), (18): Xaa is A or G
  MOD_RES (19), (20), (21), (22): Xaa is A or G or is absent
GXSEVVMDQYNKLXXXXXXXXXLYLISIASLRTPVXXTPPTS

SEQ ID NO: 10592 - protein, 33 aa, Artificial Sequence
  Non-cyclic GFR-binding peptide
  MOD_RES (31), (32): Xaa is C or S
RVVMNNSLQEIVNSSDDYYVVPLPELKTPAXXP

SEQ ID NO: 10593 - protein, 43 aa, Artificial Sequence
  Non-cyclic GFR-binding peptide
  MOD_RES (2), (4), (38), (39): Xaa is C or S
  MOD_RES (16), (17), (18), (19), (20): Xaa is A or G
  MOD_RES (21), (22), (23), (24): Xaa is A or G or is absent
RXGXGEVVMDNSLQEXXXXXXXXXYYVMPLPELETPVXXAKPI

SEQ ID NO: 10594 - protein, 33 aa, Artificial Sequence
  Non-cyclic GFR-binding peptide
  MOD_RES (2), (2): Xaa is C or S
GXGEVVMDEYQKYVVKENEDIFLMSIPSLETPV

SEQ ID NO: 10595 - protein, 39 aa, Artificial Sequence
  Non-cyclic GFR-binding peptide
  MOD_RES (1), (35), (36): Xaa is C or S
  MOD_RES (13), (14), (15), (16), (17): Xaa is A or G
  MOD_RES (18), (19), (20), (21): Xaa is A or G or is absent
XSRVVMNNSLQEXXXXXXXXXYYLVTLPELKTPAXXPKP

SEQ ID NO: 10596 - protein, 38 aa, Artificial Sequence
  Non-cyclic GFR-binding peptide
  MOD_RES (2), (4), (38): Xaa is C or S
  MOD_RES (16), (17), (18), (19), (20): Xaa is A or G
  MOD_RES (21), (22), (23), (24): Xaa is A or G or is absent
RXGXGEVVMENSLQEXXXXXXXXXYYLMTLPELETPVX

SEQ ID NO: 10597 - protein, 36 aa, Artificial Sequence
  Non-cyclic GFR-binding peptide
  MOD_RES (32), (33): Xaa is C or S
SRVVMNNSLQEIVNSSDDYYLVTLPELKTPAXXPKP

SEQ ID NO: 10598 - protein, 35 aa, Artificial Sequence
  Non-cyclic GFR-binding peptide
  MOD_RES (1), (33): Xaa is C or S
XSRVVMNNSLQEIVNSSDDYYLVTLPELKTPAXTP

SEQ ID NO: 10599 - protein, 42 aa, Artificial Sequence
  Non-cyclic GFR-binding peptide
  MOD_RES (2), (4), (36), (37): Xaa is C or S
RXGXGEVVMENSLQEVVKDYEDYYLMTLPELETPVXXAKPIS

SEQ ID NO: 10600 - protein, 38 aa, Artificial Sequence
  Non-cyclic GFR-binding peptide
  MOD_RES (32), (33): Xaa is C or S
SRVVMNEYQKYIVNSSDDIFLVSIPSLKTPAXXPKPVY

SEQ ID NO: 10601 - protein, 38 aa, Artificial Sequence
  Non-cyclic GFR-binding peptide
  MOD_RES (2), (4), (38): Xaa is C or S
  MOD_RES (16), (17), (18), (19), (20): Xaa is A or G
  MOD_RES (21), (22), (23), (24): Xaa is A or G or is absent
RXGXGEVVMDEYQKYXXXXXXXXXIFLMSIPSLETPVX

SEQ ID NO: 10602 - protein, 32 aa, Artificial Sequence
  Non-cyclic GFR-binding peptide
  MOD_RES (11), (12), (13), (14), (15): Xaa is A or G
  MOD_RES (16), (17), (18), (19): Xaa is A or G or is absent
RVVMNEYQKYXXXXXXXXXIFLVSIPSLQTPA

SEQ ID NO: 10603 - protein, 39 aa, Artificial Sequence
  Non-cyclic GFR-binding peptide
  MOD_RES (2), (4), (36), (37): Xaa is C or S
RXGXGEVVMDNSLQEVVKENEDYYVMPLPELETPVXXAK

SEQ ID NO: 10604 - protein, 34 aa, Artificial Sequence
  Non-cyclic GFR-binding peptide
  MOD_RES (1), (33), (34): Xaa is C or S
XSEVVMDNSLQEVVNNASDYYLITLPELRTPVXX

SEQ ID NO: 10605 - protein, 35 aa, Artificial Sequence
  Non-cyclic GFR-binding peptide
  MOD_RES (33), (34): Xaa is C or S
  MOD_RES (11), (12), (13), (14), (15): Xaa is A or G
  MOD_RES (16), (17), (18), (19): Xaa is A or G or is absent
SRVIMEYQKYXXXXXXXXXIFLISIPSLAQPVXXP

SEQ ID NO: 10606 - protein, 38 aa, Artificial Sequence
  Non-cyclic GFR-binding peptide
  MOD_RES (1), (32), (33): Xaa is C or S
XSKVVMNSLQEVKPTRGVYYVIPLPELDQPVXXPSASA

SEQ ID NO: 10607 - protein, 40 aa, Artificial Sequence
  Non-cyclic GFR-binding peptide
  MOD_RES (2), (4), (36): Xaa is C or S
HXGXSRVVMNNSLQEIVNSSDDYYLVTLPELKTPAXTPKT

SEQ ID NO: 10608 - protein, 30 aa, Artificial Sequence
  Non-cyclic GFR-binding peptide
RVVMNEYQKYIVNSSDDIFLVSIPSLQTPA

SEQ ID NO: 10609 - protein, 37 aa, Artificial Sequence
  Non-cyclic GFR-binding peptide
  MOD_RES (31), (32): Xaa is C or S
RVVMNEYQKYIVNSSDDIFLVSIPSLQTPAXXPKPVT

SEQ ID NO: 10610 - protein, 39 aa, Artificial Sequence
  Non-cyclic GFR-binding peptide
  MOD_RES (2), (36): Xaa is C or S
  MOD_RES (14), (15), (16), (17), (18): Xaa is A or G
  MOD_RES (19), (20), (21), (22): Xaa is A or G or is absent
GXSRVVMNEYQKYXXXXXXXXXIFLVSIPSLKTPAXTPK

SEQ ID NO: 10611 - protein, 41 aa, Artificial Sequence
  Non-cyclic GFR-binding peptide
  MOD_RES (1), (3), (35), (36): Xaa is C or S
XGXSRVVMNNSLQEIVNSSDDYYLVTLPELKTPAXXPKPVY

SEQ ID NO: 10612 - protein, 34 aa, Artificial Sequence
  Non-cyclic GFR-binding peptide
  MOD_RES (2), (34): Xaa is C or S
GXGEVVMDEYQKYVVKENEDIFLMSIPSLETPVX

SEQ ID NO: 10613 - protein, 36 aa, Artificial Sequence
  Non-cyclic GFR-binding peptide
  MOD_RES (33), (34): Xaa is C or S
  MOD_RES (11), (12), (13), (14), (15): Xaa is A or G
  MOD_RES (16), (17), (18), (19): Xaa is A or G or is absent
SRVIMEYQKYXXXXXXXXXIFLISIPSLAQPVXXPA

SEQ ID NO: 10614 - protein, 41 aa, Artificial Sequence
  Non-cyclic GFR-binding peptide
  MOD_RES (1), (3), (35), (36): Xaa is C or S
XGXSRVVMNEYQKYIVNSSDDIFLVSIPSLKTPAXXPKPVY

SEQ ID NO: 10615 - protein, 38 aa, Artificial Sequence
  Non-cyclic GFR-binding peptide
  MOD_RES (1), (3), (36), (37): Xaa is C or S
  MOD_RES (14), (15), (16), (17), (18): Xaa is A or G
  MOD_RES (19), (20), (21), (22): Xaa is A or G or is absent
XKXSRVIMNSLQEXXXXXXXXXYYLITLPELAQPVXXP

SEQ ID NO: 10616 - protein, 42 aa, Artificial Sequence
  Non-cyclic GFR-binding peptide
  MOD_RES (2), (4), (38), (39): Xaa is C or S
  MOD_RES (16), (17), (18), (19), (20): Xaa is A or G
  MOD_RES (21), (22), (23), (24): Xaa is A or G or is absent
RXGXGEVVMEEYQKYXXXXXXXXXIFLMSIPSLETPVXXAKP

SEQ ID NO: 10617 - protein, 36 aa, Artificial Sequence
  Non-cyclic GFR-binding peptide
  MOD_RES (1), (3): Xaa is C or S
  MOD_RES (15), (16), (17), (18), (19): Xaa is A or G
  MOD_RES (20), (21), (22), (23): Xaa is A or G or is absent
XGXSRVVMNEYQKYXXXXXXXXXIFLVSIPSLKTPA

SEQ ID NO: 10618 - protein, 36 aa, Artificial Sequence
  Non-cyclic GFR-binding peptide
  MOD_RES (33), (34): Xaa is C or S
  MOD_RES (11), (12), (13), (14), (15): Xaa is A or G
  MOD_RES (16), (17), (18), (19): Xaa is A or G or is absent
EVVMDRYKKLXXXXXXXXXFYLISIANLRTPVXXTP

SEQ ID NO: 10619 - protein, 33 aa, Artificial Sequence
  Non-cyclic GFR-binding peptide
  MOD_RES (31), (32): Xaa is C or S
SRVIMEYQKYVKPKRGVIFLISIPSLAQPVXXP

SEQ ID NO: 10620 - protein, 30 aa, Artificial Sequence
  Non-cyclic GFR-binding peptide
EVVMDRYKKLVVNNASDFYLISIANLRTPV

SEQ ID NO: 10621 - protein, 39 aa, Artificial Sequence
  Non-cyclic GFR-binding peptide
  MOD_RES (1), (3), (34), (35): Xaa is C or S
XKXSKVIMNSLQEIKPTKGIYYVIPLPELDQSVXXPSAS

SEQ ID NO: 10622 - protein, 38 aa, Artificial Sequence
  Non-cyclic GFR-binding peptide
  MOD_RES (1), (35), (36): Xaa is C or S
  MOD_RES (13), (14), (15), (16), (17): Xaa is A or G
  MOD_RES (18), (19), (20), (21): Xaa is A or G or is absent
XARVVMNNSLQEXXXXXXXXXYYLVTLPELQTPAXXPK

SEQ ID NO: 10623 - protein, 38 aa, Artificial Sequence
  Non-cyclic GFR-binding peptide
  MOD_RES (1), (35): Xaa is C or S
  MOD_RES (13), (14), (15), (16), (17): Xaa is A or G
  MOD_RES (18), (19), (20), (21): Xaa is A or G or is absent
XSRVVMNEYQKYXXXXXXXXXIFLVSIPSLKTPAXTPK

SEQ ID NO: 10624 - protein, 36 aa, Artificial Sequence
  Non-cyclic GFR-binding peptide
  MOD_RES (2), (36): Xaa is C or S
  MOD_RES (14), (15), (16), (17), (18): Xaa is A or G
  MOD_RES (19), (20), (21), (22): Xaa is A or G or is absent
GXGEVVMDEYQKYXXXXXXXXXIFLMSIPSLETPVX

SEQ ID NO: 10625 - protein, 41 aa, Artificial Sequence
  Non-cyclic GFR-binding peptide
  MOD_RES (1), (3), (35), (36): Xaa is C or S
XGXSEVVMDNSLQEVVNNASDYYLITLPELRTPVXXTPPTS

SEQ ID NO: 10626 - protein, 34 aa, Artificial Sequence
  Non-cyclic GFR-binding peptide
  MOD_RES (2), (2): Xaa is C or S
  MOD_RES (13), (14), (15), (16), (17): Xaa is A or G
  MOD_RES (18), (19), (20), (21): Xaa is A or G or is absent
KXSRVIMNSLQEXXXXXXXXXYYLITLPELAQPV

SEQ ID NO: 10627 - protein, 37 aa, Artificial Sequence
  Non-cyclic GFR-binding peptide
  MOD_RES (31), (32): Xaa is C or S
EVVMDNSLQEVVKENEDYYVMPLPELETPVXXAKPIK

SEQ ID NO: 10628 - protein, 33 aa, Artificial Sequence
  Non-cyclic GFR-binding peptide
  MOD_RES (32), (33): Xaa is C or S
GEVVMDNSLQEVVKENEDYYLMTLPELETPVXX

SEQ ID NO: 10629 - protein, 38 aa, Artificial Sequence
  Non-cyclic GFR-binding peptide
  MOD_RES (34), (34): Xaa is C or S
  MOD_RES (12), (13), (14), (15), (16): Xaa is A or G
  MOD_RES (17), (18), (19), (20): Xaa is A or G or is absent
SRVVMNNSLQEXXXXXXXXXYYLVTLPELKTPAXTPKT

SEQ ID NO: 10630 - protein, 35 aa, Artificial Sequence
  Non-cyclic GFR-binding peptide
  MOD_RES (1), (3), (34), (35): Xaa is C or S
XKXSKVVMEYQKYVKPTRGVIFLISIPSLDQPVXX

SEQ ID NO: 10631 - protein, 36 aa, Artificial Sequence
  Non-cyclic GFR-binding peptide
  MOD_RES (2), (36): Xaa is C or S
  MOD_RES (14), (15), (16), (17), (18): Xaa is A or G
  MOD_RES (19), (20), (21), (22): Xaa is A or G or is absent
GXSRVVMNEYQKYXXXXXXXXXIFLVSIPSLKTPAX

SEQ ID NO: 10632 - protein, 42 aa, Artificial Sequence
  Non-cyclic GFR-binding peptide
  MOD_RES (2), (4), (38), (39): Xaa is C or S
  MOD_RES (16), (17), (18), (19), (20): Xaa is A or G
  MOD_RES (21), (22), (23), (24): Xaa is A or G or is absent
RXGXSEVVMDRYKKLXXXXXXXXXFYLISIANLRTPVXXTPP

SEQ ID NO: 10633 - protein, 41 aa, Artificial Sequence
  Non-cyclic GFR-binding peptide
  MOD_RES (1), (35), (36): Xaa is C or S
  MOD_RES (13), (14), (15), (16), (17): Xaa is A or G
  MOD_RES (18), (19), (20), (21): Xaa is A or G or is absent
XSRVVMNNSLQEXXXXXXXXXYYLVTLPELKTPAXXPKPVY

SEQ ID NO: 10634 - protein, 35 aa, Artificial Sequence
  Non-cyclic GFR-binding peptide
  MOD_RES (2), (33), (34): Xaa is C or S
KXSRVIMEYQKYVKPKRGVIFLISIPSLAQPVXXP

SEQ ID NO: 10635 - protein, 31 aa, Artificial Sequence
  Non-cyclic GFR-binding peptide
SEVVMDRYKKLVVNNASDFYLISIANLRTPV

SEQ ID NO: 10636 - protein, 36 aa, Artificial Sequence
  Non-cyclic GFR-binding peptide
  MOD_RES (2), (4), (35), (36): Xaa is C or S
SXKXSKVVMNSLQEVKPTRGVYYVIPLPELDQPVXX

SEQ ID NO: 10637 - protein, 34 aa, Artificial Sequence
  Non-cyclic GFR-binding peptide
  MOD_RES (1), (34): Xaa is C or S
  MOD_RES (12), (13), (14), (15), (16): Xaa is A or G
  MOD_RES (17), (18), (19), (20): Xaa is A or G or is absent
XSKVVMEYQKYXXXXXXXXXIFLISIPSLDQPVX

SEQ ID NO: 10638 - protein, 33 aa, Artificial Sequence
  Non-cyclic GFR-binding peptide
  MOD_RES (1), (33): Xaa is C or S
XARVVMNNSLQEIVNSSDDYYLVTLPELQTPAX

SEQ ID NO: 10639 - protein, 39 aa, Artificial Sequence
  Non-cyclic GFR-binding peptide
  MOD_RES (1), (33): Xaa is C or S
XSRVVMNNSLQEIVNSSDDYYVVPLPELKTPAXTPKTVH

SEQ ID NO: 10640 - protein, 39 aa, Artificial Sequence
  Non-cyclic GFR-binding peptide
  MOD_RES (1), (35), (36): Xaa is C or S
  MOD_RES (13), (14), (15), (16), (17): Xaa is A or G
  MOD_RES (18), (19), (20), (21): Xaa is A or G or is absent
XARVVMNEYQKYXXXXXXXXXIFLVSIPSLQTPAXXPKP

SEQ ID NO: 10641 - protein, 39 aa, Artificial Sequence
  Non-cyclic GFR-binding peptide
  MOD_RES (34), (35): Xaa is C or S
  MOD_RES (12), (13), (14), (15), (16): Xaa is A or G
  MOD_RES (17), (18), (19), (20): Xaa is A or G or is absent
GEVVMDEYQKYXXXXXXXXXIFLMSIPSLETPVXXAKPI

SEQ ID NO: 10642 - protein, 36 aa, Artificial Sequence
  Non-cyclic GFR-binding peptide
  MOD_RES (31), (32): Xaa is C or S
RVVMNNSLQEIVNSSDDYYLVTLPELKTPAXXPKPV

SEQ ID NO: 10643 - protein, 37 aa, Artificial Sequence
  Non-cyclic GFR-binding peptide
  MOD_RES (32), (33): Xaa is C or S
SEVVMDNSLQEVVNNASDYYLITLPELRTPVXXTPPT

SEQ ID NO: 10644 - protein, 39 aa, Artificial Sequence
  Non-cyclic GFR-binding peptide
  MOD_RES (34), (35): Xaa is C or S
  MOD_RES (12), (13), (14), (15), (16): Xaa is A or G
  MOD_RES (17), (18), (19), (20): Xaa is A or G or is absent
SEVVMDQYNKLXXXXXXXXXLYLISIASLRTPVXXTPPT

SEQ ID NO: 10645 - protein, 38 aa, Artificial Sequence
  Non-cyclic GFR-binding peptide
  MOD_RES (32), (33): Xaa is C or S
GEVVMENSLQEVVKDYEDYYLMTLPELETPVXXAKPIS

SEQ ID NO: 10646 - protein, 37 aa, Artificial Sequence
  Non-cyclic GFR-binding peptide
  MOD_RES (2), (34), (35): Xaa is C or S
GXSEVVMDNSLQEVVNNASDYYVIPLPELRTPVXXTP

SEQ ID NO: 10647 - protein, 37 aa, Artificial Sequence
  Non-cyclic GFR-binding peptide
  MOD_RES (1), (33), (34): Xaa is C or S
XSRVVMNNSLQEIVNSSDDYYLVTLPELKTPAXXPKP

SEQ ID NO: 10648 - protein, 43 aa, Artificial Sequence
  Non-cyclic GFR-binding peptide
  MOD_RES (1), (3), (37), (38): Xaa is C or S
  MOD_RES (15), (16), (17), (18), (19): Xaa is A or G
  MOD_RES (20), (21), (22), (23): Xaa is A or G or is absent
XGXGEVVMEEYQKYXXXXXXXXXIFLMSIPSLETPVXXAKPIS

SEQ ID NO: 10649 - protein, 37 aa, Artificial Sequence
  Non-cyclic GFR-binding peptide
  MOD_RES (1), (3), (34), (35): Xaa is C or S
XKXSKVIMNSLQEIKPTKGIYYVIPLPELDQSVXXPS

SEQ ID NO: 10650 - protein, 41 aa, Artificial Sequence
  Non-cyclic GFR-binding peptide
  MOD_RES (2), (4), (38), (39): Xaa is C or S
  MOD_RES (16), (17), (18), (19), (20): Xaa is A or G
  MOD_RES (21), (22), (23), (24): Xaa is A or G or is absent
HXGXSRVVMNNSLQEXXXXXXXXXYYVVPLPELKTPAXXPK

SEQ ID NO: 10651 - protein, 33 aa, Artificial Sequence
  Non-cyclic GFR-binding peptide
  MOD_RES (12), (13), (14), (15), (16): Xaa is A or G
  MOD_RES (17), (18), (19), (20): Xaa is A or G or is absent
GEVVMENSLQEXXXXXXXXXYYVMPLPELETPV

SEQ ID NO: 10652 - protein, 44 aa, Artificial Sequence
  Non-cyclic GFR-binding peptide
  MOD_RES (2), (4), (38), (39): Xaa is C or S
  MOD_RES (16), (17), (18), (19), (20): Xaa is A or G
  MOD_RES (21), (22), (23), (24): Xaa is A or G or is absent
RXGXSEVVMDNSLQEXXXXXXXXXYYVIPLPELRTPVXXTPPTS

SEQ ID NO: 10653 - protein, 39 aa, Artificial Sequence
  Non-cyclic GFR-binding peptide
  MOD_RES (34), (35): Xaa is C or S
  MOD_RES (12), (13), (14), (15), (16): Xaa is A or G
  MOD_RES (17), (18), (19), (20): Xaa is A or G or is absent
SEVVMDRYKKLXXXXXXXXXFYLISIANLRTPVXXTPPT

SEQ ID NO: 10654 - protein, 39 aa, Artificial Sequence
  Non-cyclic GFR-binding peptide
  MOD_RES (2), (4), (36): Xaa is C or S
HXGXSRVVMNNSLQEIVNSSDDYYVVPLPELKTPAXTPK

SEQ ID NO: 10655 - protein, 41 aa, Artificial Sequence
  Non-cyclic GFR-binding peptide
  MOD_RES (2), (4), (37), (38): Xaa is C or S
  MOD_RES (15), (16), (17), (18), (19): Xaa is A or G
  MOD_RES (20), (21), (22), (23): Xaa is A or G or is absent
SXKXSKVVMEYQKYXXXXXXXXXIFLISIPSLDQPVXXPSA

SEQ ID NO: 10656 - protein, 36 aa, Artificial Sequence
  Non-cyclic GFR-binding peptide
  MOD_RES (31), (32): Xaa is C or S
RVVMNNSLQEIVNSSDDYYVVPLPELQTPAXXPKPV

SEQ ID NO: 10657 - protein, 35 aa, Artificial Sequence
  Non-cyclic GFR-binding peptide
  MOD_RES (34), (35): Xaa is C or S
  MOD_RES (12), (13), (14), (15), (16): Xaa is A or G
  MOD_RES (17), (18), (19), (20): Xaa is A or G or is absent
SRVVMNNSLQEXXXXXXXXXYYLVTLPELKTPAXX

SEQ ID NO: 10658 - protein, 39 aa, Artificial Sequence
  Non-cyclic GFR-binding peptide
  MOD_RES (2), (4), (35), (36): Xaa is C or S
SXKXSKVIMEYQKYIKPTKGIIFLISIPSLDQSVXXPSA

SEQ ID NO: 10659 - protein, 35 aa, Artificial Sequence
  Non-cyclic GFR-binding peptide
  MOD_RES (34), (35): Xaa is C or S
  MOD_RES (12), (13), (14), (15), (16): Xaa is A or G
  MOD_RES (17), (18), (19), (20): Xaa is A or G or is absent
SEVVMDQYNKLXXXXXXXXXLYLISIASLRTPVXX

SEQ ID NO: 10660 - protein, 40 aa, Artificial Sequence
  Non-cyclic GFR-binding peptide
  MOD_RES (1), (3), (37), (38): Xaa is C or S
  MOD_RES (15), (16), (17), (18), (19): Xaa is A or G
  MOD_RES (20), (21), (22), (23): Xaa is A or G or is absent
XGXSRVVMNNSLQEXXXXXXXXXYYVVPLPELKTPAXXPK

SEQ ID NO: 10661 - protein, 32 aa, Artificial Sequence
  Non-cyclic GFR-binding peptide
  MOD_RES (31), (32): Xaa is C or S
EVVMENSLQEVVKDYEDYYLMTLPELETPVXX

SEQ ID NO: 10662 - protein, 39 aa, Artificial Sequence
  Non-cyclic GFR-binding peptide
  MOD_RES (2), (4), (38), (39): Xaa is C or S
  MOD_RES (16), (17), (18), (19), (20): Xaa is A or G
  MOD_RES (21), (22), (23), (24): Xaa is A or G or is absent
RXGXGEVVMEEYQKYXXXXXXXXXIFLMSIPSLETPVXX

SEQ ID NO: 10663 - protein, 39 aa, Artificial Sequence
  Non-cyclic GFR-binding peptide
  MOD_RES (2), (4), (36), (37): Xaa is C or S
RXGXGEVVMENSLQEVVKDYEDYYVMPLPELETPVXXAK

SEQ ID NO: 10664 - protein, 35 aa, Artificial Sequence
  Non-cyclic GFR-binding peptide
  MOD_RES (2), (4): Xaa is C or S
RXGXGEVVMENSLQEVVKDYEDYYLMTLPELETPV

SEQ ID NO: 10665 - protein, 38 aa, Artificial Sequence
  Non-cyclic GFR-binding peptide
  MOD_RES (1), (34), (35): Xaa is C or S
  MOD_RES (12), (13), (14), (15), (16): Xaa is A or G
  MOD_RES (17), (18), (19), (20): Xaa is A or G or is absent
XSRVIMNSLQEXXXXXXXXXYYLITLPELAQPVXXPAA

SEQ ID NO: 10666 - protein, 36 aa, Artificial Sequence
  Non-cyclic GFR-binding peptide
  MOD_RES (2), (36): Xaa is C or S
  MOD_RES (14), (15), (16), (17), (18): Xaa is A or G
  MOD_RES (19), (20), (21), (22): Xaa is A or G or is absent
GXGEVVMDNSLQEXXXXXXXXXYYLMTLPELETPVX

SEQ ID NO: 10667 - protein, 42 aa, Artificial Sequence
  Non-cyclic GFR-binding peptide
  MOD_RES (2), (4), (36), (37): Xaa is C or S
RXGXSEVVMDRYKKLVVNNASDFYLISIANLRTPVXXTPPTS

SEQ ID NO: 10668 - protein, 36 aa, Artificial Sequence
  Non-cyclic GFR-binding peptide
  MOD_RES (2), (4), (36): Xaa is C or S
HXGXARVVMNNSLQEIVNSSDDYYVVPLPELQTPAX

SEQ ID NO: 10669 - protein, 37 aa, Artificial Sequence
  Non-cyclic GFR-binding peptide
  MOD_RES (1), (32), (33): Xaa is C or S
XSKVIMNSLQEIKPTKGIYYVIPLPELDQSVXXPSAS

SEQ ID NO: 10670 - protein, 31 aa, Artificial Sequence
  Non-cyclic GFR-binding peptide
  MOD_RES (31), (31): Xaa is C or S
SKVIMNSLQEIKPTKGIYYVIPLPELDQSVX

SEQ ID NO: 10671 - protein, 37 aa, Artificial Sequence
  Non-cyclic GFR-binding peptide
  MOD_RES (2), (36), (37): Xaa is C or S
  MOD_RES (14), (15), (16), (17), (18): Xaa is A or G
  MOD_RES (19), (20), (21), (22): Xaa is A or G or is absent
GXGEVVMENSLQEXXXXXXXXXYYVMPLPELETPVXX

SEQ ID NO: 10672 - protein, 39 aa, Artificial Sequence
  Non-cyclic GFR-binding peptide
  MOD_RES (2), (34), (35): Xaa is C or S
GXSEVVMDQYNKLVVNNASDLYLISIASLRTPVXXTPPT

SEQ ID NO: 10673 - protein, 38 aa, Artificial Sequence
  Non-cyclic GFR-binding peptide
  MOD_RES (33), (34): Xaa is C or S
  MOD_RES (11), (12), (13), (14), (15): Xaa is A or G
  MOD_RES (16), (17), (18), (19): Xaa is A or G or is absent
RVVMNNSLQEXXXXXXXXXYYVVPLPELQTPAXXPKPV

SEQ ID NO: 10674 - protein, 35 aa, Artificial Sequence
  Non-cyclic GFR-binding peptide
  MOD_RES (2), (4): Xaa is C or S
RXGXGEVVMDNSLQEVVKENEDYYLMTLPELETPV

SEQ ID NO: 10675 - protein, 36 aa, Artificial Sequence
  Non-cyclic GFR-binding peptide
  MOD_RES (1), (35): Xaa is C or S
  MOD_RES (13), (14), (15), (16), (17): Xaa is A or G
  MOD_RES (18), (19), (20), (21): Xaa is A or G or is absent
XSRVVMNEYQKYXXXXXXXXXIFLVSIPSLKTPAXT

SEQ ID NO: 10676 - protein, 32 aa, Artificial Sequence
  Non-cyclic GFR-binding peptide
  MOD_RES (31), (32): Xaa is C or S
SKVIMNSLQEIKPTKGIYYVIPLPELDQSVXX

SEQ ID NO: 10677 - protein, 32 aa, Artificial Sequence
  Non-cyclic GFR-binding peptide
  MOD_RES (1), (1): Xaa is C or S
XSEVVMDNSLQEVVNNASDYYVIPLPELRTPV

SEQ ID NO: 10678 - protein, 35 aa, Artificial Sequence
  Non-cyclic GFR-binding peptide
  MOD_RES (33), (33): Xaa is C or S
  MOD_RES (11), (12), (13), (14), (15): Xaa is A or G
  MOD_RES (16), (17), (18), (19): Xaa is A or G or is absent
RVVMNEYQKYXXXXXXXXXIFLVSIPSLKTPAXTP

SEQ ID NO: 10679 - protein, 39 aa, Artificial Sequence
  Non-cyclic GFR-binding peptide
  MOD_RES (1), (3), (35), (36): Xaa is C or S
XGXARVVMNNSLQEIVNSSDDYYLVTLPELQTPAXXPKP

SEQ ID NO: 10680 - protein, 36 aa, Artificial Sequence
  Non-cyclic GFR-binding peptide
  MOD_RES (32), (32): Xaa is C or S
SRVVMNNSLQEIVNSSDDYYLVTLPELKTPAXTPKT

SEQ ID NO: 10681 - protein, 34 aa, Artificial Sequence
  Non-cyclic GFR-binding peptide
  MOD_RES (1), (33): Xaa is C or S
XSRVVMNNSLQEIVNSSDDYYVVPLPELKTPAXT

SEQ ID NO: 10682 - protein, 35 aa, Artificial Sequence
  Non-cyclic GFR-binding peptide
  MOD_RES (31), (32): Xaa is C or S
EVVMENSLQEVVKDYEDYYVMPLPELETPVXXAKP

SEQ ID NO: 10683 - protein, 40 aa, Artificial Sequence
  Non-cyclic GFR-binding peptide
  MOD_RES (2), (4), (38): Xaa is C or S
  MOD_RES (16), (17), (18), (19), (20): Xaa is A or G
  MOD_RES (21), (22), (23), (24): Xaa is A or G or is absent
HXGXSRVVMNEYQKYXXXXXXXXXIFLVSIPSLKTPAXTP

SEQ ID NO: 10684 - protein, 33 aa, Artificial Sequence
  Non-cyclic GFR-binding peptide
  MOD_RES (12), (13), (14), (15), (16): Xaa is A or G
  MOD_RES (17), (18), (19), (20): Xaa is A or G or is absent
SRVVMNNSLQEXXXXXXXXXYYVVPLPELKTPA

SEQ ID NO: 10685 - protein, 43 aa, Artificial Sequence
  Non-cyclic GFR-binding peptide
  MOD_RES (1), (3), (37), (38): Xaa is C or S
  MOD_RES (15), (16), (17), (18), (19): Xaa is A or G
  MOD_RES (20), (21), (22), (23): Xaa is A or G or is absent
XGXARVVMNEYQKYXXXXXXXXXIFLVSIPSLQTPAXXPKPVT

SEQ ID NO: 10686 - protein, 37 aa, Artificial Sequence
  Non-cyclic GFR-binding peptide
  MOD_RES (2), (4), (35), (36): Xaa is C or S
SXKXSKVIMEYQKYIKPTKGIIFLISIPSLDQSVXXP

SEQ ID NO: 10687 - protein, 39 aa, Artificial Sequence
  Non-cyclic GFR-binding peptide
  MOD_RES (1), (3), (35), (36): Xaa is C or S
XGXARVVMNEYQKYIVNSSDDIFLVSIPSLQTPAXXPKP

SEQ ID NO: 10688 - protein, 39 aa, Artificial Sequence
  Non-cyclic GFR-binding peptide
  MOD_RES (1), (3), (37), (38): Xaa is C or S
  MOD_RES (15), (16), (17), (18), (19): Xaa is A or G
  MOD_RES (20), (21), (22), (23): Xaa is A or G or is absent
XGXGEVVMENSLQEXXXXXXXXXYYVMPLPELETPVXXA

SEQ ID NO: 10689 - protein, 37 aa, Artificial Sequence
  Non-cyclic GFR-binding peptide
  MOD_RES (1), (35), (36): Xaa is C or S
  MOD_RES (13), (14), (15), (16), (17): Xaa is A or G
  MOD_RES (18), (19), (20), (21): Xaa is A or G or is absent
XSEVVMDQYNKLXXXXXXXXXLYLISIASLRTPVXXT

SEQ ID NO: 10690 - protein, 33 aa, Artificial Sequence
  Non-cyclic GFR-binding peptide
  MOD_RES (12), (13), (14), (15), (16): Xaa is A or G
  MOD_RES (17), (18), (19), (20): Xaa is A or G or is absent
SEVVMDRYKKLXXXXXXXXXFYLISIANLRTPV

SEQ ID NO: 10691 - protein, 31 aa, Artificial Sequence
  Non-cyclic GFR-binding peptide
  MOD_RES (31), (31): Xaa is C or S
SKVVMEYQKYVKPTRGVIFLISIPSLDQPVX

SEQ ID NO: 10692 - protein, 36 aa, Artificial Sequence
  Non-cyclic GFR-binding peptide
  MOD_RES (1), (3): Xaa is C or S
  MOD_RES (15), (16), (17), (18), (19): Xaa is A or G
  MOD_RES (20), (21), (22), (23): Xaa is A or G or is absent
XGXGEVVMENSLQEXXXXXXXXXYYLMTLPELETPV

SEQ ID NO: 10693 - protein, 36 aa, Artificial Sequence
  Non-cyclic GFR-binding peptide
  MOD_RES (31), (32): Xaa is C or S
RVVMNNSLQEIVNSSDDYYLVTLPELQTPAXXPKPV

SEQ ID NO: 10694 - protein, 33 aa, Artificial Sequence
  Non-cyclic GFR-binding peptide
  MOD_RES (12), (13), (14), (15), (16): Xaa is A or G
  MOD_RES (17), (18), (19), (20): Xaa is A or G or is absent
SEVVMDQYNKLXXXXXXXXXLYLISIASLRTPV

SEQ ID NO: 10695 - protein, 33 aa, Artificial Sequence
  Non-cyclic GFR-binding peptide
  MOD_RES (32), (32): Xaa is C or S
SRVVMNNSLQEIVNSSDDYYLVTLPELKTPAXT

SEQ ID NO: 10696 - protein, 36 aa, Artificial Sequence
  Non-cyclic GFR-binding peptide
  MOD_RES (1), (33): Xaa is C or S
XSRVVMNNSLQEIVNSSDDYYVVPLPELKTPAXTPK

SEQ ID NO: 10697 - protein, 37 aa, Artificial Sequence
  Non-cyclic GFR-binding peptide
  MOD_RES (2), (36), (37): Xaa is C or S
  MOD_RES (14), (15), (16), (17), (18): Xaa is A or G
  MOD_RES (19), (20), (21), (22): Xaa is A or G or is absent
GXSEVVMDNSLQEXXXXXXXXXYYLITLPELRTPVXX

SEQ ID NO: 10698 - protein, 40 aa, Artificial Sequence
  Non-cyclic GFR-binding peptide
  MOD_RES (34), (35): Xaa is C or S
  MOD_RES (12), (13), (14), (15), (16): Xaa is A or G
  MOD_RES (17), (18), (19), (20): Xaa is A or G or is absent
SEVVMDRYKKLXXXXXXXXXFYLISIANLRTPVXXTPPTS

SEQ ID NO: 10699 - protein, 38 aa, Artificial Sequence
  Non-cyclic GFR-binding peptide
  MOD_RES (2), (34): Xaa is C or S
GXSRVVMNNSLQEIVNSSDDYYLVTLPELKTPAXTPKT

SEQ ID NO: 10700 - protein, 33 aa, Artificial Sequence
  Non-cyclic GFR-binding peptide
  MOD_RES (31), (32): Xaa is C or S
RVVMNEYQKYIVNSSDDIFLVSIPSLQTPAXXP

SEQ ID NO: 10701 - protein, 40 aa, Artificial Sequence
  Non-cyclic GFR-binding peptide
  MOD_RES (1), (3), (35), (36): Xaa is C or S
XGXGEVVMENSLQEVVKDYEDYYLMTLPELETPVXXAKPI

SEQ ID NO: 10702 - protein, 32 aa, Artificial Sequence
  Non-cyclic GFR-binding peptide
  MOD_RES (32), (32): Xaa is C or S
GEVVMDEYQKYVVKENEDIFLMSIPSLETPVX

SEQ ID NO: 10703 - protein, 33 aa, Artificial Sequence
  Non-cyclic GFR-binding peptide
  MOD_RES (12), (13), (14), (15), (16): Xaa is A or G
  MOD_RES (17), (18), (19), (20): Xaa is A or G or is absent
SRVVMNNSLQEXXXXXXXXXYYLVTLPELKTPA

SEQ ID NO: 10704 - protein, 39 aa, Artificial Sequence
  Non-cyclic GFR-binding peptide
  MOD_RES (1), (34), (35): Xaa is C or S
  MOD_RES (12), (13), (14), (15), (16): Xaa is A or G
  MOD_RES (17), (18), (19), (20): Xaa is A or G or is absent
XSKVIMNSLQEXXXXXXXXXYYVIPLPELDQSVXXPSAS

SEQ ID NO: 10705 - protein, 35 aa, Artificial Sequence
  Non-cyclic GFR-binding peptide
  MOD_RES (1), (32), (33): Xaa is C or S
XSKVIMEYQKYIKPTKGIIFLISIPSLDQSVXXPS

SEQ ID NO: 10706 - protein, 38 aa, Artificial Sequence
  Non-cyclic GFR-binding peptide
  MOD_RES (1), (3), (34), (35): Xaa is C or S
XKXSKVVMNSLQEVKPTRGVYYVIPLPELDQPVXXPSA

SEQ ID NO: 10707 - protein, 35 aa, Artificial Sequence
  Non-cyclic GFR-binding peptide
  MOD_RES (32), (33): Xaa is C or S
ARVVMNEYQKYIVNSSDDIFLVSIPSLQTPAXXPK

SEQ ID NO: 10708 - protein, 40 aa, Artificial Sequence
  Non-cyclic GFR-binding peptide
  MOD_RES (2), (35), (36): Xaa is C or S
  MOD_RES (13), (14), (15), (16), (17): Xaa is A or G
  MOD_RES (18), (19), (20), (21): Xaa is A or G or is absent
KXSKVIMEYQKYXXXXXXXXXIFLISIPSLDQSVXXPSAS

SEQ ID NO: 10709 - protein, 37 aa, Artificial Sequence
  Non-cyclic GFR-binding peptide
  MOD_RES (1), (33), (34): Xaa is C or S
XSRVVMNNSLQEIVNSSDDYYVVPLPELKTPAXXPKP

SEQ ID NO: 10710 - protein, 40 aa, Artificial Sequence
  Non-cyclic GFR-binding peptide
  MOD_RES (1), (3), (37), (38): Xaa is C or S
  MOD_RES (15), (16), (17), (18), (19): Xaa is A or G
  MOD_RES (20), (21), (22), (23): Xaa is A or G or is absent
XGXARVVMNEYQKYXXXXXXXXXIFLVSIPSLQTPAXXPK

SEQ ID NO: 10711 - protein, 36 aa, Artificial Sequence
  Non-cyclic GFR-binding peptide
  MOD_RES (34), (35): Xaa is C or S
  MOD_RES (12), (13), (14), (15), (16): Xaa is A or G
  MOD_RES (17), (18), (19), (20): Xaa is A or G or is absent
GEVVMENSLQEXXXXXXXXXYYLMTLPELETPVXXA

SEQ ID NO: 10712 - protein, 35 aa, Artificial Sequence
  Non-cyclic GFR-binding peptide
  MOD_RES (1), (33): Xaa is C or S
XSRVVMNEYQKYIVNSSDDIFLVSIPSLKTPAXTP

SEQ ID NO: 10713 - protein, 35 aa, Artificial Sequence
  Non-cyclic GFR-binding peptide
  MOD_RES (2), (2): Xaa is C or S
  MOD_RES (14), (15), (16), (17), (18): Xaa is A or G
  MOD_RES (19), (20), (21), (22): Xaa is A or G or is absent
GXARVVMNNSLQEXXXXXXXXXYYVVPLPELQTPA

SEQ ID NO: 10714 - protein, 42 aa, Artificial Sequence
  Non-cyclic GFR-binding peptide
  MOD_RES (2), (36): Xaa is C or S
  MOD_RES (14), (15), (16), (17), (18): Xaa is A or G
  MOD_RES (19), (20), (21), (22): Xaa is A or G or is absent
GXSRVVMNNSLQEXXXXXXXXXYYLVTLPELKTPAXTPKTVH

SEQ ID NO: 10715 - protein, 40 aa, Artificial Sequence
  Non-cyclic GFR-binding peptide
  MOD_RES (1), (3), (35), (36): Xaa is C or S
XGXGEVVMEEYQKYVVKDYEDIFLMSIPSLETPVXXAKPI

SEQ ID NO: 10716 - protein, 38 aa, Artificial Sequence
  Non-cyclic GFR-binding peptide
  MOD_RES (32), (33): Xaa is C or S
GEVVMENSLQEVVKDYEDYYVMPLPELETPVXXAKPIS

SEQ ID NO: 10717 - protein, 39 aa, Artificial Sequence
  Non-cyclic GFR-binding peptide
  MOD_RES (33), (34): Xaa is C or S
  MOD_RES (11), (12), (13), (14), (15): Xaa is A or G
  MOD_RES (16), (17), (18), (19): Xaa is A or G or is absent
RVVMNNSLQEXXXXXXXXXYYVVPLPELKTPAXXPKPVY

SEQ ID NO: 10718 - protein, 40 aa, Artificial Sequence
  Non-cyclic GFR-binding peptide
  MOD_RES (1), (35), (36): Xaa is C or S
  MOD_RES (13), (14), (15), (16), (17): Xaa is A or G
  MOD_RES (18), (19), (20), (21): Xaa is A or G or is absent
XGEVVMENSLQEXXXXXXXXXYYLMTLPELETPVXXAKPI

SEQ ID NO: 10719 - protein, 34 aa, Artificial Sequence
  Non-cyclic GFR-binding peptide
  MOD_RES (34), (34): Xaa is C or S
  MOD_RES (12), (13), (14), (15), (16): Xaa is A or G
  MOD_RES (17), (18), (19), (20): Xaa is A or G or is absent
SEVVMDNSLQEXXXXXXXXXYYVIPLPELRTPVX

SEQ ID NO: 10720 - protein, 40 aa, Artificial Sequence
  Non-cyclic GFR-binding peptide
  MOD_RES (34), (35): Xaa is C or S
  MOD_RES (12), (13), (14), (15), (16): Xaa is A or G
  MOD_RES (17), (18), (19), (20): Xaa is A or G or is absent
SEVVMDQYNKLXXXXXXXXXLYLISIASLRTPVXXTPPTS

SEQ ID NO: 10721 - protein, 37 aa, Artificial Sequence
  Non-cyclic GFR-binding peptide
  MOD_RES (1), (33), (34): Xaa is C or S
XGEVVMENSLQEVVKDYEDYYLMTLPELETPVXXAKP

SEQ ID NO: 10722 - protein, 31 aa, Artificial Sequence
  Non-cyclic GFR-binding peptide
SEVVMDNSLQEVVNNASDYYLITLPELRTPV

SEQ ID NO: 10723 - protein, 38 aa, Artificial Sequence
  Non-cyclic GFR-binding peptide
  MOD_RES (1), (33), (34): Xaa is C or S
XGEVVMDNSLQEVVKENEDYYVMPLPELETPVXXAKPI

SEQ ID NO: 10724 - protein, 42 aa, Artificial Sequence
  Non-cyclic GFR-binding peptide
  MOD_RES (2), (4), (36), (37): Xaa is C or S
HXGXARVVMNEYQKYIVNSSDDIFLVSIPSLQTPAXXPKPVT

SEQ ID NO: 10725 - protein, 35 aa, Artificial Sequence
  Non-cyclic GFR-binding peptide
  MOD_RES (31), (32): Xaa is C or S
SRVIMEYQKYVKPKRGVIFLISIPSLAQPVXXPAA

SEQ ID NO: 10726 - protein, 33 aa, Artificial Sequence
  Non-cyclic GFR-binding peptide
  MOD_RES (31), (32): Xaa is C or S
EVVMDNSLQEVVNNASDYYVIPLPELRTPVXXT

SEQ ID NO: 10727 - protein, 36 aa, Artificial Sequence
  Non-cyclic GFR-binding peptide
  MOD_RES (2), (34), (35): Xaa is C or S
GXSEVVMDNSLQEVVNNASDYYVIPLPELRTPVXXT

SEQ ID NO: 10728 - protein, 38 aa, Artificial Sequence
  Non-cyclic GFR-binding peptide
  MOD_RES (1), (34), (35): Xaa is C or S
  MOD_RES (12), (13), (14), (15), (16): Xaa is A or G
  MOD_RES (17), (18), (19), (20): Xaa is A or G or is absent
XSKVIMNSLQEXXXXXXXXXYYVIPLPELDQSVXXPSA

SEQ ID NO: 10729 - protein, 34 aa, Artificial Sequence
  Non-cyclic GFR-binding peptide
  MOD_RES (34), (34): Xaa is C or S
  MOD_RES (12), (13), (14), (15), (16): Xaa is A or G
  MOD_RES (17), (18), (19), (20): Xaa is A or G or is absent
SEVVMDNSLQEXXXXXXXXXYYLITLPELRTPVX

SEQ ID NO: 10730 - protein, 35 aa, Artificial Sequence
  Non-cyclic GFR-binding peptide
  MOD_RES (34), (35): Xaa is C or S
  MOD_RES (12), (13), (14), (15), (16): Xaa is A or G
  MOD_RES (17), (18), (19), (20): Xaa is A or G or is absent
SEVVMDNSLQEXXXXXXXXXYYVIPLPELRTPVXX

SEQ ID NO: 10731 - protein, 36 aa, Artificial Sequence
  Non-cyclic GFR-binding peptide
  MOD_RES (2), (34), (35): Xaa is C or S
GXGEVVMENSLQEVVKDYEDYYLMTLPELETPVXXA

SEQ ID NO: 10732 - protein, 36 aa, Artificial Sequence
  Non-cyclic GFR-binding peptide
  MOD_RES (33), (34): Xaa is C or S
  MOD_RES (11), (12), (13), (14), (15): Xaa is A or G
  MOD_RES (16), (17), (18), (19): Xaa is A or G or is absent
EVVMEEYQKYXXXXXXXXXIFLMSIPSLETPVXXAK

SEQ ID NO: 10733 - protein, 36 aa, Artificial Sequence
  Non-cyclic GFR-binding peptide
  MOD_RES (32), (32): Xaa is C or S
SRVVMNEYQKYIVNSSDDIFLVSIPSLKTPAXTPKT

SEQ ID NO: 10734 - protein, 40 aa, Artificial Sequence
  Non-cyclic GFR-binding peptide
  MOD_RES (2), (4), (35), (36): Xaa is C or S
SXKXSKVVMEYQKYVKPTRGVIFLISIPSLDQPVXXPSAS

SEQ ID NO: 10735 - protein, 40 aa, Artificial Sequence
  Non-cyclic GFR-binding peptide
  MOD_RES (2), (34), (35): Xaa is C or S
GXSEVVMDNSLQEVVNNASDYYVIPLPELRTPVXXTPPTS

SEQ ID NO: 10736 - protein, 34 aa, Artificial Sequence
  Non-cyclic GFR-binding peptide
  MOD_RES (33), (34): Xaa is C or S
  MOD_RES (11), (12), (13), (14), (15): Xaa is A or G
  MOD_RES (16), (17), (18), (19): Xaa is A or G or is absent
RVVMNNSLQEXXXXXXXXXYYLVTLPELKTPAXX

SEQ ID NO: 10737 - protein, 34 aa, Artificial Sequence
  Non-cyclic GFR-binding peptide
  MOD_RES (32), (33): Xaa is C or S
ARVVMNEYQKYIVNSSDDIFLVSIPSLQTPAXXP

SEQ ID NO: 10738 - protein, 38 aa, Artificial Sequence
  Non-cyclic GFR-binding peptide
  MOD_RES (2), (34), (35): Xaa is C or S
GXSEVVMDRYKKLVVNNASDFYLISIANLRTPVXXTPP

SEQ ID NO: 10739 - protein, 37 aa, Artificial Sequence
  Non-cyclic GFR-binding peptide
  MOD_RES (2), (4), (36), (37): Xaa is C or S
RXGXGEVVMDEYQKYVVKENEDIFLMSIPSLETPVXX

SEQ ID NO: 10740 - protein, 31 aa, Artificial Sequence
  Non-cyclic GFR-binding peptide
GEVVMENSLQEVVKDYEDYYVMPLPELETPV

SEQ ID NO: 10741 - protein, 43 aa, Artificial Sequence
  Non-cyclic GFR-binding peptide
  MOD_RES (2), (4), (37), (38): Xaa is C or S
  MOD_RES (15), (16), (17), (18), (19): Xaa is A or G
  MOD_RES (20), (21), (22), (23): Xaa is A or G or is absent
SXKXSKVVMNSLQEXXXXXXXXXYYVIPLPELDQPVXXPSASA

SEQ ID NO: 10742 - protein, 39 aa, Artificial Sequence
  Non-cyclic GFR-binding peptide
  MOD_RES (33), (34): Xaa is C or S
  MOD_RES (11), (12), (13), (14), (15): Xaa is A or G
  MOD_RES (16), (17), (18), (19): Xaa is A or G or is absent
EVVMENSLQEXXXXXXXXXYYVMPLPELETPVXXAKPIS

SEQ ID NO: 10743 - protein, 39 aa, Artificial Sequence
  Non-cyclic GFR-binding peptide
  MOD_RES (33), (34): Xaa is C or S
  MOD_RES (11), (12), (13), (14), (15): Xaa is A or G
  MOD_RES (16), (17), (18), (19): Xaa is A or G or is absent
SRVIMEYQKYXXXXXXXXXIFLISIPSLAQPVXXPAASA

SEQ ID NO: 10744 - protein, 34 aa, Artificial Sequence
  Non-cyclic GFR-binding peptide
  MOD_RES (31), (32): Xaa is C or S
EVVMDQYNKLVVNNASDLYLISIASLRTPVXXTP

SEQ ID NO: 10745 - protein, 37 aa, Artificial Sequence
  Non-cyclic GFR-binding peptide
  MOD_RES (32), (33): Xaa is C or S
GEVVMDEYQKYVVKENEDIFLMSIPSLETPVXXAKPI

SEQ ID NO: 10746 - protein, 31 aa, Artificial Sequence
  Non-cyclic GFR-binding peptide
  MOD_RES (31), (31): Xaa is C or S
EVVMDNSLQEVVKENEDYYLMTLPELETPVX

SEQ ID NO: 10747 - protein, 38 aa, Artificial Sequence
  Non-cyclic GFR-binding peptide
  MOD_RES (1), (3), (37), (38): Xaa is C or S
  MOD_RES (15), (16), (17), (18), (19): Xaa is A or G
  MOD_RES (20), (21), (22), (23): Xaa is A or G or is absent
XGXGEVVMDNSLQEXXXXXXXXXYYLMTLPELETPVXX

SEQ ID NO: 10748 - protein, 36 aa, Artificial Sequence
  Non-cyclic GFR-binding peptide
  MOD_RES (1), (3), (35), (36): Xaa is C or S
XGXSRVVMNNSLQEIVNSSDDYYLVTLPELKTPAXX

SEQ ID NO: 10749 - protein, 41 aa, Artificial Sequence
  Non-cyclic GFR-binding peptide
  MOD_RES (1), (3), (37): Xaa is C or S
  MOD_RES (15), (16), (17), (18), (19): Xaa is A or G
  MOD_RES (20), (21), (22), (23): Xaa is A or G or is absent
XGXSRVVMNNSLQEXXXXXXXXXYYLVTLPELKTPAXTPKT

SEQ ID NO: 10750 - protein, 34 aa, Artificial Sequence
  Non-cyclic GFR-binding peptide
  MOD_RES (1), (32), (33): Xaa is C or S
XSKVIMNSLQEIKPTKGIYYVIPLPELDQSVXXP

SEQ ID NO: 10751 - protein, 38 aa, Artificial Sequence
  Non-cyclic GFR-binding peptide
  MOD_RES (2), (35), (36): Xaa is C or S
  MOD_RES (13), (14), (15), (16), (17): Xaa is A or G
  MOD_RES (18), (19), (20), (21): Xaa is A or G or is absent
KXSKVIMEYQKYXXXXXXXXXIFLISIPSLDQSVXXPS

SEQ ID NO: 10752 - protein, 37 aa, Artificial Sequence
  Non-cyclic GFR-binding peptide
  MOD_RES (31), (32): Xaa is C or S
SKVIMEYQKYIKPTKGIIFLISIPSLDQSVXXPSASA

SEQ ID NO: 10753 - protein, 33 aa, Artificial Sequence
  Non-cyclic GFR-binding peptide
  MOD_RES (33), (33): Xaa is C or S
  MOD_RES (11), (12), (13), (14), (15): Xaa is A or G
  MOD_RES (16), (17), (18), (19): Xaa is A or G or is absent
EVVMDNSLQEXXXXXXXXXYYVIPLPELRTPVX

SEQ ID NO: 10754 - protein, 39 aa, Artificial Sequence
  Non-cyclic GFR-binding peptide
  MOD_RES (1), (34), (35): Xaa is C or S
  MOD_RES (12), (13), (14), (15), (16): Xaa is A or G
  MOD_RES (17), (18), (19), (20): Xaa is A or G or is absent
XSKVVMNSLQEXXXXXXXXXYYVIPLPELDQPVXXPSAS

SEQ ID NO: 10755 - protein, 36 aa, Artificial Sequence
  Non-cyclic GFR-binding peptide
  MOD_RES (2), (36): Xaa is C or S
  MOD_RES (14), (15), (16), (17), (18): Xaa is A or G
  MOD_RES (19), (20), (21), (22): Xaa is A or G or is absent
GXSRVVMNNSLQEXXXXXXXXXYYVVPLPELKTPAX

SEQ ID NO: 10756 - protein, 35 aa, Artificial Sequence
  Non-cyclic GFR-binding peptide
  MOD_RES (33), (34): Xaa is C or S
  MOD_RES (11), (12), (13), (14), (15): Xaa is A or G
  MOD_RES (16), (17), (18), (19): Xaa is A or G or is absent
RVVMNEYQKYXXXXXXXXXIFLVSIPSLKTPAXXP

SEQ ID NO: 10757 - protein, 37 aa, Artificial Sequence
  Non-cyclic GFR-binding peptide
  MOD_RES (2), (4), (36), (37): Xaa is C or S
RXGXGEVVMDNSLQEVVKENEDYYLMTLPELETPVXX

SEQ ID NO: 10758 - protein, 36 aa, Artificial Sequence
  Non-cyclic GFR-binding peptide
  MOD_RES (1), (3), (35), (36): Xaa is C or S
XGXSRVVMNEYQKYIVNSSDDIFLVSIPSLKTPAXX

SEQ ID NO: 10759 - protein, 37 aa, Artificial Sequence
  Non-cyclic GFR-binding peptide
  MOD_RES (2), (36), (37): Xaa is C or S
  MOD_RES (14), (15), (16), (17), (18): Xaa is A or G
  MOD_RES (19), (20), (21), (22): Xaa is A or G or is absent
GXARVVMNNSLQEXXXXXXXXXYYVVPLPELQTPAXX

SEQ ID NO: 10760 - protein, 38 aa, Artificial Sequence
  Non-cyclic GFR-binding peptide
  MOD_RES (2), (33), (34): Xaa is C or S
KXSRVIMEYQKYVKPKRGVIFLISIPSLAQPVXXPAAS

SEQ ID NO: 10761 - protein, 38 aa, Artificial Sequence
  Non-cyclic GFR-binding peptide
  MOD_RES (1), (33), (34): Xaa is C or S
XARVVMNNSLQEIVNSSDDYYLVTLPELQTPAXXPKPV

SEQ ID NO: 10762 - protein, 39 aa, Artificial Sequence
  Non-cyclic GFR-binding peptide
  MOD_RES (2), (4), (37), (38): Xaa is C or S
  MOD_RES (15), (16), (17), (18), (19): Xaa is A or G
  MOD_RES (20), (21), (22), (23): Xaa is A or G or is absent
SXKXSKVVMNSLQEXXXXXXXXXYYVIPLPELDQPVXXP

SEQ ID NO: 10763 - protein, 34 aa, Artificial Sequence
  Non-cyclic GFR-binding peptide
  MOD_RES (2), (34): Xaa is C or S
GXGEVVMENSLQEVVKDYEDYYVMPLPELETPVX

SEQ ID NO: 10764 - protein, 37 aa, Artificial Sequence
  Non-cyclic GFR-binding peptide
  MOD_RES (1), (32), (33): Xaa is C or S
XSRVIMEYQKYVKPKRGVIFLISIPSLAQPVXXPAAS

SEQ ID NO: 10765 - protein, 36 aa, Artificial Sequence
  Non-cyclic GFR-binding peptide
  MOD_RES (34), (35): Xaa is C or S
  MOD_RES (12), (13), (14), (15), (16): Xaa is A or G
  MOD_RES (17), (18), (19), (20): Xaa is A or G or is absent
GEVVMEEYQKYXXXXXXXXXIFLMSIPSLETPVXXA

SEQ ID NO: 10766 - protein, 34 aa, Artificial Sequence
  Non-cyclic GFR-binding peptide
  MOD_RES (33), (34): Xaa is C or S
  MOD_RES (11), (12), (13), (14), (15): Xaa is A or G
  MOD_RES (16), (17), (18), (19): Xaa is A or G or is absent
EVVMEEYQKYXXXXXXXXXIFLMSIPSLETPVXX

SEQ ID NO: 10767 - protein, 34 aa, Artificial Sequence
  Non-cyclic GFR-binding peptide
  MOD_RES (31), (32): Xaa is C or S
SKVIMEYQKYIKPTKGIIFLISIPSLDQSVXXPS

SEQ ID NO: 10768 - protein, 36 aa, Artificial Sequence
  Non-cyclic GFR-binding peptide
  MOD_RES (34), (35): Xaa is C or S
  MOD_RES (12), (13), (14), (15), (16): Xaa is A or G
  MOD_RES (17), (18), (19), (20): Xaa is A or G or is absent
GEVVMENSLQEXXXXXXXXXYYVMPLPELETPVXXA

SEQ ID NO: 10769 - protein, 36 aa, Artificial Sequence
  Non-cyclic GFR-binding peptide
  MOD_RES (1), (3): Xaa is C or S
  MOD_RES (15), (16), (17), (18), (19): Xaa is A or G
  MOD_RES (20), (21), (22), (23): Xaa is A or G or is absent
XGXGEVVMEEYQKYXXXXXXXXXIFLMSIPSLETPV

SEQ ID NO: 10770 - protein, 39 aa, Artificial Sequence
  Non-cyclic GFR-binding peptide
  MOD_RES (2), (36), (37): Xaa is C or S
  MOD_RES (14), (15), (16), (17), (18): Xaa is A or G
  MOD_RES (19), (20), (21), (22): Xaa is A or G or is absent
GXGEVVMDNSLQEXXXXXXXXXYYLMTLPELETPVXXAK

SEQ ID NO: 10771 - protein, 43 aa, Artificial Sequence
  Non-cyclic GFR-binding peptide
  MOD_RES (2), (4), (38): Xaa is C or S
  MOD_RES (16), (17), (18), (19), (20): Xaa is A or G
  MOD_RES (21), (22), (23), (24): Xaa is A or G or is absent
HXGXSRVVMNNSLQEXXXXXXXXXYYLVTLPELKTPAXTPKTV

SEQ ID NO: 10772 - protein, 40 aa, Artificial Sequence
  Non-cyclic GFR-binding peptide
  MOD_RES (1), (35), (36): Xaa is C or S
  MOD_RES (13), (14), (15), (16), (17): Xaa is A or G
  MOD_RES (18), (19), (20), (21): Xaa is A or G or is absent
XSEVVMDNSLQEXXXXXXXXXYYLITLPELRTPVXXTPPT

SEQ ID NO: 10773 - protein, 40 aa, Artificial Sequence
  Non-cyclic GFR-binding peptide
  MOD_RES (2), (36), (37): Xaa is C or S
  MOD_RES (14), (15), (16), (17), (18): Xaa is A or G
  MOD_RES (19), (20), (21), (22): Xaa is A or G or is absent
GXSRVVMNEYQKYXXXXXXXXXIFLVSIPSLKTPAXXPKP

SEQ ID NO: 10774 - protein, 39 aa, Artificial Sequence
  Non-cyclic GFR-binding peptide
  MOD_RES (2), (34), (35): Xaa is C or S
GXARVVMNNSLQEIVNSSDDYYLVTLPELQTPAXXPKPV

SEQ ID NO: 10775 - protein, 38 aa, Artificial Sequence
  Non-cyclic GFR-binding peptide
  MOD_RES (34), (35): Xaa is C or S
  MOD_RES (12), (13), (14), (15), (16): Xaa is A or G
  MOD_RES (17), (18), (19), (20): Xaa is A or G or is absent
GEVVMDNSLQEXXXXXXXXXYYVMPLPELETPVXXAKP

SEQ ID NO: 10776 - protein, 38 aa, Artificial Sequence
  Non-cyclic GFR-binding peptide
  MOD_RES (2), (34), (35): Xaa is C or S
GXSEVVMDNSLQEVVNNASDYYVIPLPELRTPVXXTPP

SEQ ID NO: 10777 - protein, 40 aa, Artificial Sequence
  Non-cyclic GFR-binding peptide
  MOD_RES (1), (35): Xaa is C or S
  MOD_RES (13), (14), (15), (16), (17): Xaa is A or G
  MOD_RES (18), (19), (20), (21): Xaa is A or G or is absent
XSRVVMNEYQKYXXXXXXXXXIFLVSIPSLKTPAXTPKTV

SEQ ID NO: 10778 - protein, 38 aa, Artificial Sequence
  Non-cyclic GFR-binding peptide
  MOD_RES (1), (3), (37), (38): Xaa is C or S
  MOD_RES (15), (16), (17), (18), (19): Xaa is A or G
  MOD_RES (20), (21), (22), (23): Xaa is A or G or is absent
XGXGEVVMENSLQEXXXXXXXXXYYLMTLPELETPVXX

SEQ ID NO: 10779 - protein, 34 aa, Artificial Sequence
  Non-cyclic GFR-binding peptide
  MOD_RES (2), (34): Xaa is C or S
GXSEVVMDRYKKLVVNNASDFYLISIANLRTPVX

SEQ ID NO: 10780 - protein, 37 aa, Artificial Sequence
  Non-cyclic GFR-binding peptide
  MOD_RES (1), (35), (36): Xaa is C or S
  MOD_RES (13), (14), (15), (16), (17): Xaa is A or G
  MOD_RES (18), (19), (20), (21): Xaa is A or G or is absent
XARVVMNEYQKYXXXXXXXXXIFLVSIPSLQTPAXXP

SEQ ID NO: 10781 - protein, 37 aa, Artificial Sequence
  Non-cyclic GFR-binding peptide
  MOD_RES (1), (3), (37): Xaa is C or S
  MOD_RES (15), (16), (17), (18), (19): Xaa is A or G
  MOD_RES (20), (21), (22), (23): Xaa is A or G or is absent
XGXSEVVMDNSLQEXXXXXXXXXYYLITLPELRTPVX

SEQ ID NO: 10782 - protein, 35 aa, Artificial Sequence
  Non-cyclic GFR-binding peptide
  MOD_RES (32), (33): Xaa is C or S
GEVVMEEYQKYVVKDYEDIFLMSIPSLETPVXXAK

SEQ ID NO: 10783 - protein, 39 aa, Artificial Sequence
  Non-cyclic GFR-binding peptide
  MOD_RES (33), (34): Xaa is C or S
  MOD_RES (11), (12), (13), (14), (15): Xaa is A or G
  MOD_RES (16), (17), (18), (19): Xaa is A or G or is absent
EVVMENSLQEXXXXXXXXXYYLMTLPELETPVXXAKPIS

SEQ ID NO: 10784 - protein, 41 aa, Artificial Sequence
  Non-cyclic GFR-binding peptide
  MOD_RES (1), (3), (37), (38): Xaa is C or S
  MOD_RES (15), (16), (17), (18), (19): Xaa is A or G
  MOD_RES (20), (21), (22), (23): Xaa is A or G or is absent
XGXGEVVMEEYQKYXXXXXXXXXIFLMSIPSLETPVXXAKP

SEQ ID NO: 10785 - protein, 35 aa, Artificial Sequence
  Non-cyclic GFR-binding peptide
  MOD_RES (1), (35): Xaa is C or S
  MOD_RES (13), (14), (15), (16), (17): Xaa is A or G
  MOD_RES (18), (19), (20), (21): Xaa is A or G or is absent
XGEVVMENSLQEXXXXXXXXXYYVMPLPELETPVX

SEQ ID NO: 10786 - protein, 42 aa, Artificial Sequence
  Non-cyclic GFR-binding peptide
  MOD_RES (2), (36): Xaa is C or S
  MOD_RES (14), (15), (16), (17), (18): Xaa is A or G
  MOD_RES (19), (20), (21), (22): Xaa is A or G or is absent
GXSRVVMNEYQKYXXXXXXXXXIFLVSIPSLKTPAXTPKTVH

SEQ ID NO: 10787 - protein, 34 aa, Artificial Sequence
  Non-cyclic GFR-binding peptide
  MOD_RES (1), (33), (34): Xaa is C or S
XARVVMNNSLQEIVNSSDDYYVVPLPELQTPAXX

SEQ ID NO: 10788 - protein, 39 aa, Artificial Sequence
  Non-cyclic GFR-binding peptide
  MOD_RES (1), (3), (37), (38): Xaa is C or S
  MOD_RES (15), (16), (17), (18), (19): Xaa is A or G
  MOD_RES (20), (21), (22), (23): Xaa is A or G or is absent
XGXSEVVMDQYNKLXXXXXXXXXLYLISIASLRTPVXXT

SEQ ID NO: 10789 - protein, 43 aa, Artificial Sequence
  Non-cyclic GFR-binding peptide
  MOD_RES (1), (3), (37), (38): Xaa is C or S
  MOD_RES (15), (16), (17), (18), (19): Xaa is A or G
  MOD_RES (20), (21), (22), (23): Xaa is A or G or is absent
XGXARVVMNNSLQEXXXXXXXXXYYLVTLPELQTPAXXPKPVT

SEQ ID NO: 10790 - protein, 41 aa, Artificial Sequence
  Non-cyclic GFR-binding peptide
  MOD_RES (1), (3), (37), (38): Xaa is C or S
  MOD_RES (15), (16), (17), (18), (19): Xaa is A or G
  MOD_RES (20), (21), (22), (23): Xaa is A or G or is absent
XGXGEVVMDEYQKYXXXXXXXXXIFLMSIPSLETPVXXAKP

SEQ ID NO: 10791 - protein, 41 aa, Artificial Sequence
  Non-cyclic GFR-binding peptide
  MOD_RES (1), (3), (35), (36): Xaa is C or S
XGXGEVVMDNSLQEVVKENEDYYLMTLPELETPVXXAKPIK

SEQ ID NO: 10792 - protein, 32 aa, Artificial Sequence
  Non-cyclic GFR-binding peptide
  MOD_RES (31), (32): Xaa is C or S
SRVIMNSLQEVKPKRGVYYLITLPELAQPVXX

SEQ ID NO: 10793 - protein, 38 aa, Artificial Sequence
  Non-cyclic GFR-binding peptide
  MOD_RES (1), (33): Xaa is C or S
XSRVVMNNSLQEIVNSSDDYYLVTLPELKTPAXTPKTV

SEQ ID NO: 10794 - protein, 35 aa, Artificial Sequence
  Non-cyclic GFR-binding peptide
  MOD_RES (1), (33), (34): Xaa is C or S
XSEVVMDQYNKLVVNNASDLYLISIASLRTPVXXT

SEQ ID NO: 10795 - protein, 36 aa, Artificial Sequence
  Non-cyclic GFR-binding peptide
  MOD_RES (31), (32): Xaa is C or S
RVVMNEYQKYIVNSSDDIFLVSIPSLQTPAXXPKPV

SEQ ID NO: 10796 - protein, 40 aa, Artificial Sequence
  Non-cyclic GFR-binding peptide
  MOD_RES (2), (36), (37): Xaa is C or S
  MOD_RES (14), (15), (16), (17), (18): Xaa is A or G
  MOD_RES (19), (20), (21), (22): Xaa is A or G or is absent
GXSRVVMNNSLQEXXXXXXXXXYYLVTLPELKTPAXXPKP

SEQ ID NO: 10797 - protein, 38 aa, Artificial Sequence
  Non-cyclic GFR-binding peptide
  MOD_RES (2), (4), (36), (37): Xaa is C or S
RXGXSEVVMDNSLQEVVNNASDYYVIPLPELRTPVXXT

SEQ ID NO: 10798 - protein, 36 aa, Artificial Sequence
  Non-cyclic GFR-binding peptide
  MOD_RES (1), (33), (34): Xaa is C or S
XGEVVMENSLQEVVKDYEDYYLMTLPELETPVXXAK

SEQ ID NO: 10799 - protein, 30 aa, Artificial Sequence
  Non-cyclic GFR-binding peptide
RVVMNNSLQEIVNSSDDYYVVPLPELKTPA

SEQ ID NO: 10800 - protein, 33 aa, Artificial Sequence
  Non-cyclic GFR-binding peptide
  MOD_RES (12), (13), (14), (15), (16): Xaa is A or G
  MOD_RES (17), (18), (19), (20): Xaa is A or G or is absent
SRVVMNEYQKYXXXXXXXXXIFLVSIPSLKTPA

SEQ ID NO: 10801 - protein, 44 aa, Artificial Sequence
  Non-cyclic GFR-binding peptide
  MOD_RES (2), (4), (38), (39): Xaa is C or S
  MOD_RES (16), (17), (18), (19), (20): Xaa is A or G
  MOD_RES (21), (22), (23), (24): Xaa is A or G or is absent
RXGXGEVVMDNSLQEXXXXXXXXXYYVMPLPELETPVXXAKPIK

SEQ ID NO: 10802 - protein, 36 aa, Artificial Sequence
  Non-cyclic GFR-binding peptide
  MOD_RES (2), (35), (36): Xaa is C or S
  MOD_RES (13), (14), (15), (16), (17): Xaa is A or G
  MOD_RES (18), (19), (20), (21): Xaa is A or G or is absent
KXSRVIMEYQKYXXXXXXXXXIFLISIPSLAQPVXX

SEQ ID NO: 10803 - protein, 40 aa, Artificial Sequence
  Non-cyclic GFR-binding peptide
  MOD_RES (2), (35), (36): Xaa is C or S
  MOD_RES (13), (14), (15), (16), (17): Xaa is A or G
  MOD_RES (18), (19), (20), (21): Xaa is A or G or is absent
KXSKVVMNSLQEXXXXXXXXXYYVIPLPELDQPVXXPSAS

SEQ ID NO: 10804 - protein, 37 aa, Artificial Sequence
  Non-cyclic GFR-binding peptide
  MOD_RES (2), (4), (36), (37): Xaa is C or S
HXGXSRVVMNEYQKYIVNSSDDIFLVSIPSLKTPAXX

SEQ ID NO: 10805 - protein, 33 aa, Artificial Sequence
  Non-cyclic GFR-binding peptide
  MOD_RES (1), (33): Xaa is C or S
XARVVMNNSLQEIVNSSDDYYVVPLPELQTPAX

SEQ ID NO: 10806 - protein, 36 aa, Artificial Sequence
  Non-cyclic GFR-binding peptide
  MOD_RES (1), (3), (35), (36): Xaa is C or S
XGXSEVVMDNSLQEVVNNASDYYVIPLPELRTPVXX

SEQ ID NO: 10807 - protein, 38 aa, Artificial Sequence
  Non-cyclic GFR-binding peptide
  MOD_RES (1), (32), (33): Xaa is C or S
XSRVIMEYQKYVKPKRGVIFLISIPSLAQPVXXPAASA

SEQ ID NO: 10808 - protein, 33 aa, Artificial Sequence
  Non-cyclic GFR-binding peptide
  MOD_RES (1), (3): Xaa is C or S
XKXSKVIMNSLQEIKPTKGIYYVIPLPELDQSV

SEQ ID NO: 10809 - protein, 31 aa, Artificial Sequence
  Non-cyclic GFR-binding peptide
GEVVMENSLQEVVKDYEDYYLMTLPELETPV

SEQ ID NO: 10810 - protein, 34 aa, Artificial Sequence
  Non-cyclic GFR-binding peptide
  MOD_RES (1), (1): Xaa is C or S
  MOD_RES (13), (14), (15), (16), (17): Xaa is A or G
  MOD_RES (18), (19), (20), (21): Xaa is A or G or is absent
XGEVVMENSLQEXXXXXXXXXYYVMPLPELETPV

SEQ ID NO: 10811 - protein, 37 aa, Artificial Sequence
  Non-cyclic GFR-binding peptide
  MOD_RES (2), (4), (35), (36): Xaa is C or S
SXKXSKVVMNSLQEVKPTRGVYYVIPLPELDQPVXXP

SEQ ID NO: 10812 - protein, 41 aa, Artificial Sequence
  Non-cyclic GFR-binding peptide
  MOD_RES (1), (3), (37): Xaa is C or S
  MOD_RES (15), (16), (17), (18), (19): Xaa is A or G
  MOD_RES (20), (21), (22), (23): Xaa is A or G or is absent
XGXSRVVMNNSLQEXXXXXXXXXYYVVPLPELKTPAXTPKT

SEQ ID NO: 10813 - protein, 36 aa, Artificial Sequence
  Non-cyclic GFR-binding peptide
  MOD_RES (1), (34), (35): Xaa is C or S
  MOD_RES (12), (13), (14), (15), (16): Xaa is A or G
  MOD_RES (17), (18), (19), (20): Xaa is A or G or is absent
XSKVVMEYQKYXXXXXXXXXIFLISIPSLDQPVXXP

SEQ ID NO: 10814 - protein, 35 aa, Artificial Sequence
  Non-cyclic GFR-binding peptide
  MOD_RES (31), (32): Xaa is C or S
EVVMEEYQKYVVKDYEDIFLMSIPSLETPVXXAKP

SEQ ID NO: 10815 - protein, 40 aa, Artificial Sequence
  Non-cyclic GFR-binding peptide
  MOD_RES (2), (4), (36), (37): Xaa is C or S
RXGXSEVVMDNSLQEVVNNASDYYVIPLPELRTPVXXTPP

SEQ ID NO: 10816 - protein, 33 aa, Artificial Sequence
  Non-cyclic GFR-binding peptide
  MOD_RES (1), (1): Xaa is C or S
  MOD_RES (12), (13), (14), (15), (16): Xaa is A or G
  MOD_RES (17), (18), (19), (20): Xaa is A or G or is absent
XSKVVMEYQKYXXXXXXXXXIFLISIPSLDQPV

SEQ ID NO: 10817 - protein, 34 aa, Artificial Sequence
  Non-cyclic GFR-binding peptide
  MOD_RES (1), (1): Xaa is C or S
  MOD_RES (13), (14), (15), (16), (17): Xaa is A or G
  MOD_RES (18), (19), (20), (21): Xaa is A or G or is absent
XSEVVMDRYKKLXXXXXXXXXFYLISIANLRTPV

SEQ ID NO: 10818 - protein, 34 aa, Artificial Sequence
  Non-cyclic GFR-binding peptide
  MOD_RES (1), (1): Xaa is C or S
  MOD_RES (13), (14), (15), (16), (17): Xaa is A or G
  MOD_RES (18), (19), (20), (21): Xaa is A or G or is absent
XARVVMNNSLQEXXXXXXXXXYYVVPLPELQTPA

SEQ ID NO: 10819 - protein, 37 aa, Artificial Sequence
  Non-cyclic GFR-binding peptide
  MOD_RES (2), (33), (34): Xaa is C or S
KXSKVIMNSLQEIKPTKGIYYVIPLPELDQSVXXPSA

SEQ ID NO: 10820 - protein, 31 aa, Artificial Sequence
  Non-cyclic GFR-binding peptide
  MOD_RES (31), (31): Xaa is C or S
SKVIMEYQKYIKPTKGIIFLISIPSLDQSVX

SEQ ID NO: 10821 - protein, 35 aa, Artificial Sequence
  Non-cyclic GFR-binding peptide
  MOD_RES (2), (4): Xaa is C or S
HXGXSRVVMNEYQKYIVNSSDDIFLVSIPSLKTPA

SEQ ID NO: 10822 - protein, 34 aa, Artificial Sequence
  Non-cyclic GFR-binding peptide
  MOD_RES (32), (33): Xaa is C or S
GEVVMEEYQKYVVKDYEDIFLMSIPSLETPVXXA

SEQ ID NO: 10823 - protein, 40 aa, Artificial Sequence
  Non-cyclic GFR-binding peptide
  MOD_RES (1), (3), (35), (36): Xaa is C or S
XGXGEVVMDEYQKYVVKENEDIFLMSIPSLETPVXXAKPI

SEQ ID NO: 10824 - protein, 38 aa, Artificial Sequence
  Non-cyclic GFR-binding peptide
  MOD_RES (1), (35), (36): Xaa is C or S
  MOD_RES (13), (14), (15), (16), (17): Xaa is A or G
  MOD_RES (18), (19), (20), (21): Xaa is A or G or is absent
XSRVVMNEYQKYXXXXXXXXXIFLVSIPSLKTPAXXPK

SEQ ID NO: 10825 - protein, 40 aa, Artificial Sequence
  Non-cyclic GFR-binding peptide
  MOD_RES (1), (3), (35), (36): Xaa is C or S
XGXGEVVMDNSLQEVVKENEDYYLMTLPELETPVXXAKPI

SEQ ID NO: 10826 - protein, 34 aa, Artificial Sequence
  Non-cyclic GFR-binding peptide
  MOD_RES (2), (33), (34): Xaa is C or S
KXSKVVMEYQKYVKPTRGVIFLISIPSLDQPVXX

SEQ ID NO: 10827 - protein, 39 aa, Artificial Sequence
  Non-cyclic GFR-binding peptide
  MOD_RES (33), (33): Xaa is C or S
  MOD_RES (11), (12), (13), (14), (15): Xaa is A or G
  MOD_RES (16), (17), (18), (19): Xaa is A or G or is absent
RVVMNEYQKYXXXXXXXXXIFLVSIPSLKTPAXTPKTVH

SEQ ID NO: 10828 - protein, 36 aa, Artificial Sequence
  Non-cyclic GFR-binding peptide
  MOD_RES (1), (35), (36): Xaa is C or S
  MOD_RES (13), (14), (15), (16), (17): Xaa is A or G
  MOD_RES (18), (19), (20), (21): Xaa is A or G or is absent
XSEVVMDNSLQEXXXXXXXXXYYVIPLPELRTPVXX

SEQ ID NO: 10829 - protein, 37 aa, Artificial Sequence
  Non-cyclic GFR-binding peptide
  MOD_RES (1), (34), (35): Xaa is C or S
  MOD_RES (12), (13), (14), (15), (16): Xaa is A or G
  MOD_RES (17), (18), (19), (20): Xaa is A or G or is absent
XSRVIMEYQKYXXXXXXXXXIFLISIPSLAQPVXXPA

SEQ ID NO: 10830 - protein, 37 aa, Artificial Sequence
  Non-cyclic GFR-binding peptide
  MOD_RES (1), (35): Xaa is C or S
  MOD_RES (13), (14), (15), (16), (17): Xaa is A or G
  MOD_RES (18), (19), (20), (21): Xaa is A or G or is absent
XSRVVMNNSLQEXXXXXXXXXYYLVTLPELKTPAXTP

SEQ ID NO: 10831 - protein, 38 aa, Artificial Sequence
  Non-cyclic GFR-binding peptide
  MOD_RES (33), (34): Xaa is C or S
  MOD_RES (11), (12), (13), (14), (15): Xaa is A or G
  MOD_RES (16), (17), (18), (19): Xaa is A or G or is absent
EVVMDNSLQEXXXXXXXXXYYLMTLPELETPVXXAKPI

SEQ ID NO: 10832 - protein, 37 aa, Artificial Sequence
  Non-cyclic GFR-binding peptide
  MOD_RES (32), (33): Xaa is C or S
SRVVMNEYQKYIVNSSDDIFLVSIPSLKTPAXXPKPV

SEQ ID NO: 10833 - protein, 34 aa, Artificial Sequence
  Non-cyclic GFR-binding peptide
  MOD_RES (1), (33), (34): Xaa is C or S
XGEVVMDNSLQEVVKENEDYYVMPLPELETPVXX

SEQ ID NO: 10834 - protein, 41 aa, Artificial Sequence
  Non-cyclic GFR-binding peptide
  MOD_RES (2), (4), (36): Xaa is C or S
HXGXSRVVMNEYQKYIVNSSDDIFLVSIPSLKTPAXTPKTV

SEQ ID NO: 10835 - protein, 39 aa, Artificial Sequence
  Non-cyclic GFR-binding peptide
  MOD_RES (2), (34), (35): Xaa is C or S
GXARVVMNEYQKYIVNSSDDIFLVSIPSLQTPAXXPKPV

SEQ ID NO: 10836 - protein, 41 aa, Artificial Sequence
  Non-cyclic GFR-binding peptide
  MOD_RES (1), (35), (36): Xaa is C or S
  MOD_RES (13), (14), (15), (16), (17): Xaa is A or G
  MOD_RES (18), (19), (20), (21): Xaa is A or G or is absent
XARVVMNEYQKYXXXXXXXXXIFLVSIPSLQTPAXXPKPVT

SEQ ID NO: 10837 - protein, 39 aa, Artificial Sequence
  Non-cyclic GFR-binding peptide
  MOD_RES (2), (34), (35): Xaa is C or S
GXSRVVMNNSLQEIVNSSDDYYVVPLPELKTPAXXPKPV

SEQ ID NO: 10838 - protein, 38 aa, Artificial Sequence
  Non-cyclic GFR-binding peptide
  MOD_RES (2), (4), (36), (37): Xaa is C or S
HXGXSRVVMNNSLQEIVNSSDDYYLVTLPELKTPAXXP

SEQ ID NO: 10839 - protein, 38 aa, Artificial Sequence
  Non-cyclic GFR-binding peptide
  MOD_RES (1), (3), (37), (38): Xaa is C or S
  MOD_RES (15), (16), (17), (18), (19): Xaa is A or G
  MOD_RES (20), (21), (22), (23): Xaa is A or G or is absent
XGXSRVVMNEYQKYXXXXXXXXXIFLVSIPSLKTPAXX

SEQ ID NO: 10840 - protein, 38 aa, Artificial Sequence
  Non-cyclic GFR-binding peptide
  MOD_RES (33), (34): Xaa is C or S
  MOD_RES (11), (12), (13), (14), (15): Xaa is A or G
  MOD_RES (16), (17), (18), (19): Xaa is A or G or is absent
EVVMDNSLQEXXXXXXXXXYYVMPLPELETPVXXAKPI

SEQ ID NO: 10841 - protein, 36 aa, Artificial Sequence
  Non-cyclic GFR-binding peptide
  MOD_RES (31), (32): Xaa is C or S
EVVMDNSLQEVVNNASDYYVIPLPELRTPVXXTPPT

SEQ ID NO: 10842 - protein, 34 aa, Artificial Sequence
  Non-cyclic GFR-binding peptide
  MOD_RES (33), (34): Xaa is C or S
  MOD_RES (11), (12), (13), (14), (15): Xaa is A or G
  MOD_RES (16), (17), (18), (19): Xaa is A or G or is absent
SRVIMEYQKYXXXXXXXXXIFLISIPSLAQPVXX

SEQ ID NO: 10843 - protein, 36 aa, Artificial Sequence
  Non-cyclic GFR-binding peptide
  MOD_RES (1), (3), (35), (36): Xaa is C or S
XGXSEVVMDQYNKLVVNNASDLYLISIASLRTPVXX

SEQ ID NO: 10844 - protein, 37 aa, Artificial Sequence
  Non-cyclic GFR-binding peptide
  MOD_RES (2), (4): Xaa is C or S
  MOD_RES (16), (17), (18), (19), (20): Xaa is A or G
  MOD_RES (21), (22), (23), (24): Xaa is A or G or is absent
RXGXGEVVMDEYQKYXXXXXXXXXIFLMSIPSLETPV

SEQ ID NO: 10845 - protein, 39 aa, Artificial Sequence
  Non-cyclic GFR-binding peptide
  MOD_RES (2), (36): Xaa is C or S
  MOD_RES (14), (15), (16), (17), (18): Xaa is A or G
  MOD_RES (19), (20), (21), (22): Xaa is A or G or is absent
GXSRVVMNNSLQEXXXXXXXXXYYVVPLPELKTPAXTPK

SEQ ID NO: 10846 - protein, 41 aa, Artificial Sequence
  Non-cyclic GFR-binding peptide
  MOD_RES (1), (3), (37), (38): Xaa is C or S
  MOD_RES (15), (16), (17), (18), (19): Xaa is A or G
  MOD_RES (20), (21), (22), (23): Xaa is A or G or is absent
XGXSRVVMNNSLQEXXXXXXXXXYYLVTLPELKTPAXXPKP

SEQ ID NO: 10847 - protein, 35 aa, Artificial Sequence
  Non-cyclic GFR-binding peptide
  MOD_RES (2), (4): Xaa is C or S
RXGXGEVVMDEYQKYVVKENEDIFLMSIPSLETPV

SEQ ID NO: 10848 - protein, 41 aa, Artificial Sequence
  Non-cyclic GFR-binding peptide
  MOD_RES (1), (35): Xaa is C or S
  MOD_RES (13), (14), (15), (16), (17): Xaa is A or G
  MOD_RES (18), (19), (20), (21): Xaa is A or G or is absent
XSRVVMNEYQKYXXXXXXXXXIFLVSIPSLKTPAXTPKTVH

SEQ ID NO: 10849 - protein, 35 aa, Artificial Sequence
  Non-cyclic GFR-binding peptide
  MOD_RES (33), (34): Xaa is C or S
  MOD_RES (11), (12), (13), (14), (15): Xaa is A or G
  MOD_RES (16), (17), (18), (19): Xaa is A or G or is absent
RVVMNNSLQEXXXXXXXXXYYVVPLPELKTPAXXP

SEQ ID NO: 10850 - protein, 32 aa, Artificial Sequence
  Non-cyclic GFR-binding peptide
  MOD_RES (1), (1): Xaa is C or S
XSEVVMDNSLQEVVNNASDYYLITLPELRTPV

SEQ ID NO: 10851 - protein, 38 aa, Artificial Sequence
  Non-cyclic GFR-binding peptide
  MOD_RES (33), (34): Xaa is C or S
  MOD_RES (11), (12), (13), (14), (15): Xaa is A or G
  MOD_RES (16), (17), (18), (19): Xaa is A or G or is absent
EVVMDNSLQEXXXXXXXXXYYVIPLPELRTPVXXTPPT

SEQ ID NO: 10852 - protein, 39 aa, Artificial Sequence
  Non-cyclic GFR-binding peptide
  MOD_RES (34), (35): Xaa is C or S
  MOD_RES (12), (13), (14), (15), (16): Xaa is A or G
  MOD_RES (17), (18), (19), (20): Xaa is A or G or is absent
SRVVMNEYQKYXXXXXXXXXIFLVSIPSLKTPAXXPKPV

SEQ ID NO: 10853 - protein, 37 aa, Artificial Sequence
  Non-cyclic GFR-binding peptide
  MOD_RES (31), (32): Xaa is C or S
EVVMDRYKKLVVNNASDFYLISIANLRTPVXXTPPTS

SEQ ID NO: 10854 - protein, 35 aa, Artificial Sequence
  Non-cyclic GFR-binding peptide
  MOD_RES (1), (35): Xaa is C or S
  MOD_RES (13), (14), (15), (16), (17): Xaa is A or G
  MOD_RES (18), (19), (20), (21): Xaa is A or G or is absent
XGEVVMDEYQKYXXXXXXXXXIFLMSIPSLETPVX

SEQ ID NO: 10855 - protein, 33 aa, Artificial Sequence
  Non-cyclic GFR-binding peptide
  MOD_RES (33), (33): Xaa is C or S
  MOD_RES (11), (12), (13), (14), (15): Xaa is A or G
  MOD_RES (16), (17), (18), (19): Xaa is A or G or is absent
RVVMNNSLQEXXXXXXXXXYYVVPLPELQTPAX

SEQ ID NO: 10856 - protein, 38 aa, Artificial Sequence
  Non-cyclic GFR-binding peptide
  MOD_RES (2), (36), (37): Xaa is C or S
  MOD_RES (14), (15), (16), (17), (18): Xaa is A or G
  MOD_RES (19), (20), (21), (22): Xaa is A or G or is absent
GXARVVMNNSLQEXXXXXXXXXYYVVPLPELQTPAXXP

SEQ ID NO: 10857 - protein, 41 aa, Artificial Sequence
  Non-cyclic GFR-binding peptide
  MOD_RES (1), (3), (35), (36): Xaa is C or S
XGXARVVMNNSLQEIVNSSDDYYVVPLPELQTPAXXPKPVT

SEQ ID NO: 10858 - protein, 40 aa, Artificial Sequence
  Non-cyclic GFR-binding peptide
  MOD_RES (1), (35), (36): Xaa is C or S
  MOD_RES (13), (14), (15), (16), (17): Xaa is A or G
  MOD_RES (18), (19), (20), (21): Xaa is A or G or is absent
XARVVMNNSLQEXXXXXXXXXYYLVTLPELQTPAXXPKPV

SEQ ID NO: 10859 - protein, 40 aa, Artificial Sequence
  Non-cyclic GFR-binding peptide
  MOD_RES (1), (3), (35), (36): Xaa is C or S
XGXSRVVMNEYQKYIVNSSDDIFLVSIPSLKTPAXXPKPV

SEQ ID NO: 10860 - protein, 39 aa, Artificial Sequence
  Non-cyclic GFR-binding peptide
  MOD_RES (2), (4), (36), (37): Xaa is C or S
HXGXSRVVMNNSLQEIVNSSDDYYLVTLPELKTPAXXPK

SEQ ID NO: 10861 - protein, 33 aa, Artificial Sequence
  Non-cyclic GFR-binding peptide
  MOD_RES (31), (32): Xaa is C or S
RVVMNNSLQEIVNSSDDYYVVPLPELQTPAXXP

SEQ ID NO: 10862 - protein, 40 aa, Artificial Sequence
  Non-cyclic GFR-binding peptide
  MOD_RES (1), (3), (35), (36): Xaa is C or S
XGXARVVMNNSLQEIVNSSDDYYLVTLPELQTPAXXPKPV

SEQ ID NO: 10863 - protein, 39 aa, Artificial Sequence
  Non-cyclic GFR-binding peptide
  MOD_RES (1), (33), (34): Xaa is C or S
XSRVVMNNSLQEIVNSSDDYYVVPLPELKTPAXXPKPVY

SEQ ID NO: 10864 - protein, 39 aa, Artificial Sequence
  Non-cyclic GFR-binding peptide
  MOD_RES (2), (34), (35): Xaa is C or S
GXSRVVMNEYQKYIVNSSDDIFLVSIPSLKTPAXXPKPV

SEQ ID NO: 10865 - protein, 36 aa, Artificial Sequence
  Non-cyclic GFR-binding peptide
  MOD_RES (2), (4), (35), (36): Xaa is C or S
SXKXSRVIMNSLQEVKPKRGVYYLITLPELAQPVXX

SEQ ID NO: 10866 - protein, 36 aa, Artificial Sequence
  Non-cyclic GFR-binding peptide
  MOD_RES (2), (4), (36): Xaa is C or S
RXGXGEVVMDNSLQEVVKENEDYYVMPLPELETPVX

SEQ ID NO: 10867 - protein, 42 aa, Artificial Sequence
  Non-cyclic GFR-binding peptide
  MOD_RES (2), (4), (38), (39): Xaa is C or S
  MOD_RES (16), (17), (18), (19), (20): Xaa is A or G
  MOD_RES (21), (22), (23), (24): Xaa is A or G or is absent
HXGXARVVMNNSLQEXXXXXXXXXYYVVPLPELQTPAXXPKP

SEQ ID NO: 10868 - protein, 36 aa, Artificial Sequence
  Non-cyclic GFR-binding peptide
  MOD_RES (2), (4), (35), (36): Xaa is C or S
SXKXSKVIMEYQKYIKPTKGIIFLISIPSLDQSVXX

SEQ ID NO: 10869 - protein, 38 aa, Artificial Sequence
  Non-cyclic GFR-binding peptide
  MOD_RES (1), (3), (35), (36): Xaa is C or S
XGXSEVVMDNSLQEVVNNASDYYLITLPELRTPVXXTP

SEQ ID NO: 10870 - protein, 38 aa, Artificial Sequence
  Non-cyclic GFR-binding peptide
  MOD_RES (33), (34): Xaa is C or S
  MOD_RES (11), (12), (13), (14), (15): Xaa is A or G
  MOD_RES (16), (17), (18), (19): Xaa is A or G or is absent
RVVMNNSLQEXXXXXXXXXYYLVTLPELQTPAXXPKPV

SEQ ID NO: 10871 - protein, 39 aa, Artificial Sequence
  Non-cyclic GFR-binding peptide
  MOD_RES (1), (3), (35), (36): Xaa is C or S
XGXSEVVMDNSLQEVVNNASDYYLITLPELRTPVXXTPP

SEQ ID NO: 10872 - protein, 40 aa, Artificial Sequence
  Non-cyclic GFR-binding peptide
  MOD_RES (2), (4), (38), (39): Xaa is C or S
  MOD_RES (16), (17), (18), (19), (20): Xaa is A or G
  MOD_RES (21), (22), (23), (24): Xaa is A or G or is absent
HXGXARVVMNEYQKYXXXXXXXXXIFLVSIPSLQTPAXXP

SEQ ID NO: 10873 - protein, 44 aa, Artificial Sequence
  Non-cyclic GFR-binding peptide
  MOD_RES (2), (4), (38): Xaa is C or S
  MOD_RES (16), (17), (18), (19), (20): Xaa is A or G
  MOD_RES (21), (22), (23), (24): Xaa is A or G or is absent
HXGXSRVVMNEYQKYXXXXXXXXXIFLVSIPSLKTPAXTPKTVH

SEQ ID NO: 10874 - protein, 33 aa, Artificial Sequence
  Non-cyclic GFR-binding peptide
  MOD_RES (2), (2): Xaa is C or S
GXGEVVMDNSLQEVVKENEDYYLMTLPELETPV

SEQ ID NO: 10875 - protein, 41 aa, Artificial Sequence
  Non-cyclic GFR-binding peptide
  MOD_RES (2), (4), (38), (39): Xaa is C or S
  MOD_RES (16), (17), (18), (19), (20): Xaa is A or G
  MOD_RES (21), (22), (23), (24): Xaa is A or G or is absent
HXGXSRVVMNEYQKYXXXXXXXXXIFLVSIPSLKTPAXXPK

SEQ ID NO: 10876 - protein, 42 aa, Artificial Sequence
  Non-cyclic GFR-binding peptide
  MOD_RES (2), (4), (38), (39): Xaa is C or S
  MOD_RES (16), (17), (18), (19), (20): Xaa is A or G
  MOD_RES (21), (22), (23), (24): Xaa is A or G or is absent
RXGXGEVVMDNSLQEXXXXXXXXXYYLMTLPELETPVXXAKP

SEQ ID NO: 10877 - protein, 40 aa, Artificial Sequence
  Non-cyclic GFR-binding peptide
  MOD_RES (1), (35), (36): Xaa is C or S
  MOD_RES (13), (14), (15), (16), (17): Xaa is A or G
  MOD_RES (18), (19), (20), (21): Xaa is A or G or is absent
XGEVVMDEYQKYXXXXXXXXXIFLMSIPSLETPVXXAKPI

SEQ ID NO: 10878 - protein, 33 aa, Artificial Sequence
  Non-cyclic GFR-binding peptide
  MOD_RES (32), (33): Xaa is C or S
GEVVMDEYQKYVVKENEDIFLMSIPSLETPVXX

SEQ ID NO: 10879 - protein, 33 aa, Artificial Sequence
  Non-cyclic GFR-binding peptide
  MOD_RES (1), (32), (33): Xaa is C or S
XSKVVMNSLQEVKPTRGVYYVIPLPELDQPVXX

SEQ ID NO: 10880 - protein, 35 aa, Artificial Sequence
  Non-cyclic GFR-binding peptide
  MOD_RES (1), (32), (33): Xaa is C or S
XSKVVMEYQKYVKPTRGVIFLISIPSLDQPVXXPS

SEQ ID NO: 10881 - protein, 41 aa, Artificial Sequence
  Non-cyclic GFR-binding peptide
  MOD_RES (2), (4), (36), (37): Xaa is C or S
RXGXGEVVMENSLQEVVKDYEDYYVMPLPELETPVXXAKPI

SEQ ID NO: 10882 - protein, 32 aa, Artificial Sequence
  Non-cyclic GFR-binding peptide
  MOD_RES (11), (12), (13), (14), (15): Xaa is A or G
  MOD_RES (16), (17), (18), (19): Xaa is A or G or is absent
EVVMDNSLQEXXXXXXXXXYYVIPLPELRTPV

SEQ ID NO: 10883 - protein, 38 aa, Artificial Sequence
  Non-cyclic GFR-binding peptide
  MOD_RES (34), (34): Xaa is C or S
  MOD_RES (12), (13), (14), (15), (16): Xaa is A or G
  MOD_RES (17), (18), (19), (20): Xaa is A or G or is absent
SRVVMNEYQKYXXXXXXXXXIFLVSIPSLKTPAXTPKT

SEQ ID NO: 10884 - protein, 32 aa, Artificial Sequence
  Non-cyclic GFR-binding peptide
  MOD_RES (31), (32): Xaa is C or S
EVVMDQYNKLVVNNASDLYLISIASLRTPVXX

SEQ ID NO: 10885 - protein, 40 aa, Artificial Sequence
  Non-cyclic GFR-binding peptide
  MOD_RES (2), (36): Xaa is C or S
  MOD_RES (14), (15), (16), (17), (18): Xaa is A or G
  MOD_RES (19), (20), (21), (22): Xaa is A or G or is absent
GXSRVVMNNSLQEXXXXXXXXXYYVVPLPELKTPAXTPKT

SEQ ID NO: 10886 - protein, 40 aa, Artificial Sequence
  Non-cyclic GFR-binding peptide
  MOD_RES (1), (3), (35), (36): Xaa is C or S
XGXARVVMNEYQKYIVNSSDDIFLVSIPSLQTPAXXPKPV

SEQ ID NO: 10887 - protein, 35 aa, Artificial Sequence
  Non-cyclic GFR-binding peptide
  MOD_RES (33), (34): Xaa is C or S
  MOD_RES (11), (12), (13), (14), (15): Xaa is A or G
  MOD_RES (16), (17), (18), (19): Xaa is A or G or is absent
SKVIMEYQKYXXXXXXXXXIFLISIPSLDQSVXXP

SEQ ID NO: 10888 - protein, 33 aa, Artificial Sequence
  Non-cyclic GFR-binding peptide
  MOD_RES (31), (32): Xaa is C or S
RVVMNNSLQEIVNSSDDYYLVTLPELKTPAXXP

SEQ ID NO: 10889 - protein, 39 aa, Artificial Sequence
  Non-cyclic GFR-binding peptide
  MOD_RES (1), (33), (34): Xaa is C or S
XARVVMNEYQKYIVNSSDDIFLVSIPSLQTPAXXPKPVT

SEQ ID NO: 10890 - protein, 39 aa, Artificial Sequence
  Non-cyclic GFR-binding peptide
  MOD_RES (33), (34): Xaa is C or S
  MOD_RES (11), (12), (13), (14), (15): Xaa is A or G
  MOD_RES (16), (17), (18), (19): Xaa is A or G or is absent
RVVMNNSLQEXXXXXXXXXYYLVTLPELQTPAXXPKPVT

SEQ ID NO: 10891 - protein, 33 aa, Artificial Sequence
  Non-cyclic GFR-binding peptide
  MOD_RES (1), (33): Xaa is C or S
XSRVVMNEYQKYIVNSSDDIFLVSIPSLKTPAX

SEQ ID NO: 10892 - protein, 37 aa, Artificial Sequence
  Non-cyclic GFR-binding peptide
  MOD_RES (1), (3), (35), (36): Xaa is C or S
XGXGEVVMDNSLQEVVKENEDYYLMTLPELETPVXXA

SEQ ID NO: 10893 - protein, 35 aa, Artificial Sequence
  Non-cyclic GFR-binding peptide
  MOD_RES (2), (2): Xaa is C or S
  MOD_RES (14), (15), (16), (17), (18): Xaa is A or G
  MOD_RES (19), (20), (21), (22): Xaa is A or G or is absent
GXARVVMNEYQKYXXXXXXXXXIFLVSIPSLQTPA

SEQ ID NO: 10894 - protein, 39 aa, Artificial Sequence
  Non-cyclic GFR-binding peptide
  MOD_RES (1), (34), (35): Xaa is C or S
  MOD_RES (12), (13), (14), (15), (16): Xaa is A or G
  MOD_RES (17), (18), (19), (20): Xaa is A or G or is absent
XSRVIMNSLQEXXXXXXXXXYYLITLPELAQPVXXPAAS

SEQ ID NO: 10895 - protein, 40 aa, Artificial Sequence
  Non-cyclic GFR-binding peptide
  MOD_RES (2), (4), (36), (37): Xaa is C or S
HXGXARVVMNEYQKYIVNSSDDIFLVSIPSLQTPAXXPKP

SEQ ID NO: 10896 - protein, 38 aa, Artificial Sequence
  Non-cyclic GFR-binding peptide
  MOD_RES (1), (35), (36): Xaa is C or S
  MOD_RES (13), (14), (15), (16), (17): Xaa is A or G
  MOD_RES (18), (19), (20), (21): Xaa is A or G or is absent
XSEVVMDQYNKLXXXXXXXXXLYLISIASLRTPVXXTP

SEQ ID NO: 10897 - protein, 35 aa, Artificial Sequence
  Non-cyclic GFR-binding peptide
  MOD_RES (32), (33): Xaa is C or S
GEVVMENSLQEVVKDYEDYYVMPLPELETPVXXAK

SEQ ID NO: 10898 - protein, 33 aa, Artificial Sequence
  Non-cyclic GFR-binding peptide
  MOD_RES (2), (2): Xaa is C or S
GXSRVVMNNSLQEIVNSSDDYYLVTLPELKTPA

SEQ ID NO: 10899 - protein, 35 aa, Artificial Sequence
  Non-cyclic GFR-binding peptide
  MOD_RES (33), (34): Xaa is C or S
  MOD_RES (11), (12), (13), (14), (15): Xaa is A or G
  MOD_RES (16), (17), (18), (19): Xaa is A or G or is absent
EVVMDEYQKYXXXXXXXXXIFLMSIPSLETPVXXA

SEQ ID NO: 10900 - protein, 42 aa, Artificial Sequence
  Non-cyclic GFR-binding peptide
  MOD_RES (2), (4), (36), (37): Xaa is C or S
RXGXGEVVMEEYQKYVVKDYEDIFLMSIPSLETPVXXAKPIS

SEQ ID NO: 10901 - protein, 41 aa, Artificial Sequence
  Non-cyclic GFR-binding peptide
  MOD_RES (2), (4), (36), (37): Xaa is C or S
RXGXSEVVMDQYNKLVVNNASDLYLISIASLRTPVXXTPPT

SEQ ID NO: 10902 - protein, 38 aa, Artificial Sequence
  Non-cyclic GFR-binding peptide
  MOD_RES (33), (34): Xaa is C or S
  MOD_RES (11), (12), (13), (14), (15): Xaa is A or G
  MOD_RES (16), (17), (18), (19): Xaa is A or G or is absent
SKVIMNSLQEXXXXXXXXXYYVIPLPELDQSVXXPSAS

SEQ ID NO: 10903 - protein, 37 aa, Artificial Sequence
  Non-cyclic GFR-binding peptide
  MOD_RES (1), (35), (36): Xaa is C or S
  MOD_RES (13), (14), (15), (16), (17): Xaa is A or G
  MOD_RES (18), (19), (20), (21): Xaa is A or G or is absent
XSEVVMDNSLQEXXXXXXXXXYYLITLPELRTPVXXT

SEQ ID NO: 10904 - protein, 40 aa, Artificial Sequence
  Non-cyclic GFR-binding peptide
  MOD_RES (2), (34), (35): Xaa is C or S
GXSEVVMDQYNKLVVNNASDLYLISIASLRTPVXXTPPTS

SEQ ID NO: 10905 - protein, 43 aa, Artificial Sequence
  Non-cyclic GFR-binding peptide
  MOD_RES (1), (3), (37), (38): Xaa is C or S
  MOD_RES (15), (16), (17), (18), (19): Xaa is A or G
  MOD_RES (20), (21), (22), (23): Xaa is A or G or is absent
XGXGEVVMDEYQKYXXXXXXXXXIFLMSIPSLETPVXXAKPIK

SEQ ID NO: 10906 - protein, 36 aa, Artificial Sequence
  Non-cyclic GFR-binding peptide
  MOD_RES (33), (34): Xaa is C or S
  MOD_RES (11), (12), (13), (14), (15): Xaa is A or G
  MOD_RES (16), (17), (18), (19): Xaa is A or G or is absent
EVVMDEYQKYXXXXXXXXXIFLMSIPSLETPVXXAK

SEQ ID NO: 10907 - protein, 33 aa, Artificial Sequence
  Non-cyclic GFR-binding peptide
  MOD_RES (33), (33): Xaa is C or S
  MOD_RES (11), (12), (13), (14), (15): Xaa is A or G
  MOD_RES (16), (17), (18), (19): Xaa is A or G or is absent
EVVMDNSLQEXXXXXXXXXYYLITLPELRTPVX

SEQ ID NO: 10908 - protein, 32 aa, Artificial Sequence
  Non-cyclic GFR-binding peptide
  MOD_RES (1), (1): Xaa is C or S
XSRVVMNEYQKYIVNSSDDIFLVSIPSLKTPA

SEQ ID NO: 10909 - protein, 43 aa, Artificial Sequence
  Non-cyclic GFR-binding peptide
  MOD_RES (2), (4), (38), (39): Xaa is C or S
  MOD_RES (16), (17), (18), (19), (20): Xaa is A or G
  MOD_RES (21), (22), (23), (24): Xaa is A or G or is absent
HXGXARVVMNNSLQEXXXXXXXXXYYLVTLPELQTPAXXPKPV

SEQ ID NO: 10910 - protein, 37 aa, Artificial Sequence
  Non-cyclic GFR-binding peptide
  MOD_RES (1), (3), (35): Xaa is C or S
XGXSRVVMNNSLQEIVNSSDDYYVVPLPELKTPAXTP

SEQ ID NO: 10911 - protein, 34 aa, Artificial Sequence
  Non-cyclic GFR-binding peptide
  MOD_RES (1), (33), (34): Xaa is C or S
XARVVMNNSLQEIVNSSDDYYLVTLPELQTPAXX

SEQ ID NO: 10912 - protein, 39 aa, Artificial Sequence
  Non-cyclic GFR-binding peptide
  MOD_RES (1), (34), (35): Xaa is C or S
  MOD_RES (12), (13), (14), (15), (16): Xaa is A or G
  MOD_RES (17), (18), (19), (20): Xaa is A or G or is absent
XSRVIMEYQKYXXXXXXXXXIFLISIPSLAQPVXXPAAS

SEQ ID NO: 10913 - protein, 41 aa, Artificial Sequence
  Non-cyclic GFR-binding peptide
  MOD_RES (1), (3), (35): Xaa is C or S
XGXSRVVMNEYQKYIVNSSDDIFLVSIPSLKTPAXTPKTVH

SEQ ID NO: 10914 - protein, 37 aa, Artificial Sequence
  Non-cyclic GFR-binding peptide
  MOD_RES (2), (36), (37): Xaa is C or S
  MOD_RES (14), (15), (16), (17), (18): Xaa is A or G
  MOD_RES (19), (20), (21), (22): Xaa is A or G or is absent
GXSRVVMNNSLQEXXXXXXXXXYYLVTLPELKTPAXX

SEQ ID NO: 10915 - protein, 40 aa, Artificial Sequence
  Non-cyclic GFR-binding peptide
  MOD_RES (1), (34), (35): Xaa is C or S
  MOD_RES (12), (13), (14), (15), (16): Xaa is A or G
  MOD_RES (17), (18), (19), (20): Xaa is A or G or is absent
XSKVIMEYQKYXXXXXXXXXIFLISIPSLDQSVXXPSASA

SEQ ID NO: 10916 - protein, 31 aa, Artificial Sequence
  Non-cyclic GFR-binding peptide
ARVVMNNSLQEIVNSSDDYYLVTLPELQTPA

SEQ ID NO: 10917 - protein, 38 aa, Artificial Sequence
  Non-cyclic GFR-binding peptide
  MOD_RES (32), (33): Xaa is C or S
SRVVMNNSLQEIVNSSDDYYLVTLPELKTPAXXPKPVY

SEQ ID NO: 10918 - protein, 39 aa, Artificial Sequence
  Non-cyclic GFR-binding peptide
  MOD_RES (1), (35), (36): Xaa is C or S
  MOD_RES (13), (14), (15), (16), (17): Xaa is A or G
  MOD_RES (18), (19), (20), (21): Xaa is A or G or is absent
XSRVVMNNSLQEXXXXXXXXXYYVVPLPELKTPAXXPKP

SEQ ID NO: 10919 - protein, 38 aa, Artificial Sequence
  Non-cyclic GFR-binding peptide
  MOD_RES (2), (35), (36): Xaa is C or S
  MOD_RES (13), (14), (15), (16), (17): Xaa is A or G
  MOD_RES (18), (19), (20), (21): Xaa is A or G or is absent
KXSKVVMNSLQEXXXXXXXXXYYVIPLPELDQPVXXPS

SEQ ID NO: 10920 - protein, 41 aa, Artificial Sequence
  Non-cyclic GFR-binding peptide
  MOD_RES (1), (3), (35), (36): Xaa is C or S
XGXSEVVMDRYKKLVVNNASDFYLISIANLRTPVXXTPPTS

SEQ ID NO: 10921 - protein, 37 aa, Artificial Sequence
  Non-cyclic GFR-binding peptide
  MOD_RES (2), (4), (36), (37): Xaa is C or S
HXGXARVVMNEYQKYIVNSSDDIFLVSIPSLQTPAXX

SEQ ID NO: 10922 - protein, 35 aa, Artificial Sequence
  Non-cyclic GFR-binding peptide
  MOD_RES (2), (2): Xaa is C or S
  MOD_RES (14), (15), (16), (17), (18): Xaa is A or G
  MOD_RES (19), (20), (21), (22): Xaa is A or G or is absent
GXSEVVMDNSLQEXXXXXXXXXYYVIPLPELRTPV

SEQ ID NO: 10923 - protein, 36 aa, Artificial Sequence
  Non-cyclic GFR-binding peptide
  MOD_RES (2), (34), (35): Xaa is C or S
GXGEVVMEEYQKYVVKDYEDIFLMSIPSLETPVXXA

SEQ ID NO: 10924 - protein, 35 aa, Artificial Sequence
  Non-cyclic GFR-binding peptide
  MOD_RES (2), (4): Xaa is C or S
RXGXSEVVMDQYNKLVVNNASDLYLISIASLRTPV

SEQ ID NO: 10925 - protein, 37 aa, Artificial Sequence
  Non-cyclic GFR-binding peptide
  MOD_RES (34), (35): Xaa is C or S
  MOD_RES (12), (13), (14), (15), (16): Xaa is A or G
  MOD_RES (17), (18), (19), (20): Xaa is A or G or is absent
ARVVMNEYQKYXXXXXXXXXIFLVSIPSLQTPAXXPK

SEQ ID NO: 10926 - protein, 31 aa, Artificial Sequence
  Non-cyclic GFR-binding peptide
  MOD_RES (31), (31): Xaa is C or S
EVVMENSLQEVVKDYEDYYLMTLPELETPVX

SEQ ID NO: 10927 - protein, 42 aa, Artificial Sequence
  Non-cyclic GFR-binding peptide
  MOD_RES (1), (3), (37), (38): Xaa is C or S
  MOD_RES (15), (16), (17), (18), (19): Xaa is A or G
  MOD_RES (20), (21), (22), (23): Xaa is A or G or is absent
XGXSRVVMNNSLQEXXXXXXXXXYYVVPLPELKTPAXXPKPV

SEQ ID NO: 10928 - protein, 33 aa, Artificial Sequence
  Non-cyclic GFR-binding peptide
  MOD_RES (2), (2): Xaa is C or S
GXARVVMNEYQKYIVNSSDDIFLVSIPSLQTPA

SEQ ID NO: 10929 - protein, 38 aa, Artificial Sequence
  Non-cyclic GFR-binding peptide
  MOD_RES (2), (4), (35), (36): Xaa is C or S
SXKXSKVVMNSLQEVKPTRGVYYVIPLPELDQPVXXPS

SEQ ID NO: 10930 - protein, 34 aa, Artificial Sequence
  Non-cyclic GFR-binding peptide
  MOD_RES (34), (34): Xaa is C or S
  MOD_RES (12), (13), (14), (15), (16): Xaa is A or G
  MOD_RES (17), (18), (19), (20): Xaa is A or G or is absent
SEVVMDQYNKLXXXXXXXXXLYLISIASLRTPVX

SEQ ID NO: 10931 - protein, 38 aa, Artificial Sequence
  Non-cyclic GFR-binding peptide
  MOD_RES (2), (33), (34): Xaa is C or S
KXSKVVMEYQKYVKPTRGVIFLISIPSLDQPVXXPSAS

SEQ ID NO: 10932 - protein, 36 aa, Artificial Sequence
  Non-cyclic GFR-binding peptide
  MOD_RES (2), (4), (36): Xaa is C or S
RXGXSEVVMDNSLQEVVNNASDYYVIPLPELRTPVX

SEQ ID NO: 10933 - protein, 41 aa, Artificial Sequence
  Non-cyclic GFR-binding peptide
  MOD_RES (2), (4), (36), (37): Xaa is C or S
HXGXSRVVMNNSLQEIVNSSDDYYLVTLPELKTPAXXPKPV

SEQ ID NO: 10934 - protein, 36 aa, Artificial Sequence
  Non-cyclic GFR-binding peptide
  MOD_RES (33), (34): Xaa is C or S
  MOD_RES (11), (12), (13), (14), (15): Xaa is A or G
  MOD_RES (16), (17), (18), (19): Xaa is A or G or is absent
RVVMNEYQKYXXXXXXXXXIFLVSIPSLKTPAXXPK

SEQ ID NO: 10935 - protein, 35 aa, Artificial Sequence
  Non-cyclic GFR-binding peptide
  MOD_RES (1), (34), (35): Xaa is C or S
  MOD_RES (12), (13), (14), (15), (16): Xaa is A or G
  MOD_RES (17), (18), (19), (20): Xaa is A or G or is absent
XSRVIMNSLQEXXXXXXXXXYYLITLPELAQPVXX

SEQ ID NO: 10936 - protein, 34 aa, Artificial Sequence
  Non-cyclic GFR-binding peptide
  MOD_RES (31), (32): Xaa is C or S
SKVIMNSLQEIKPTKGIYYVIPLPELDQSVXXPS

SEQ ID NO: 10937 - protein, 34 aa, Artificial Sequence
  Non-cyclic GFR-binding peptide
  MOD_RES (34), (34): Xaa is C or S
  MOD_RES (12), (13), (14), (15), (16): Xaa is A or G
  MOD_RES (17), (18), (19), (20): Xaa is A or G or is absent
SEVVMDRYKKLXXXXXXXXXFYLISIANLRTPVX

SEQ ID NO: 10938 - protein, 33 aa, Artificial Sequence
  Non-cyclic GFR-binding peptide
  MOD_RES (1), (33): Xaa is C or S
XSEVVMDNSLQEVVNNASDYYLITLPELRTPVX

SEQ ID NO: 10939 - protein, 39 aa, Artificial Sequence
  Non-cyclic GFR-binding peptide
  MOD_RES (1), (33), (34): Xaa is C or S
XSEVVMDRYKKLVVNNASDFYLISIANLRTPVXXTPPTS

SEQ ID NO: 10940 - protein, 35 aa, Artificial Sequence
  Non-cyclic GFR-binding peptide
  MOD_RES (33), (34): Xaa is C or S
  MOD_RES (11), (12), (13), (14), (15): Xaa is A or G
  MOD_RES (16), (17), (18), (19): Xaa is A or G or is absent
EVVMDNSLQEXXXXXXXXXYYLMTLPELETPVXXA

SEQ ID NO: 10941 - protein, 40 aa, Artificial Sequence
  Non-cyclic GFR-binding peptide
  MOD_RES (1), (3), (35): Xaa is C or S
XGXSRVVMNNSLQEIVNSSDDYYVVPLPELKTPAXTPKTV

SEQ ID NO: 10942 - protein, 39 aa, Artificial Sequence
  Non-cyclic GFR-binding peptide
  MOD_RES (1), (35), (36): Xaa is C or S
  MOD_RES (13), (14), (15), (16), (17): Xaa is A or G
  MOD_RES (18), (19), (20), (21): Xaa is A or G or is absent
XGEVVMEEYQKYXXXXXXXXXIFLMSIPSLETPVXXAKP

SEQ ID NO: 10943 - protein, 34 aa, Artificial Sequence
  Non-cyclic GFR-binding peptide
  MOD_RES (2), (34): Xaa is C or S
GXGEVVMENSLQEVVKDYEDYYLMTLPELETPVX

SEQ ID NO: 10944 - protein, 37 aa, Artificial Sequence
  Non-cyclic GFR-binding peptide
  MOD_RES (1), (34), (35): Xaa is C or S
  MOD_RES (12), (13), (14), (15), (16): Xaa is A or G
  MOD_RES (17), (18), (19), (20): Xaa is A or G or is absent
XSRVIMNSLQEXXXXXXXXXYYLITLPELAQPVXXPA

SEQ ID NO: 10945 - protein, 42 aa, Artificial Sequence
  Non-cyclic GFR-binding peptide
  MOD_RES (1), (3), (37), (38): Xaa is C or S
  MOD_RES (15), (16), (17), (18), (19): Xaa is A or G
  MOD_RES (20), (21), (22), (23): Xaa is A or G or is absent
XGXSRVVMNNSLQEXXXXXXXXXYYLVTLPELKTPAXXPKPV

SEQ ID NO: 10946 - protein, 40 aa, Artificial Sequence
  Non-cyclic GFR-binding peptide
  MOD_RES (2), (4), (36): Xaa is C or S
HXGXSRVVMNEYQKYIVNSSDDIFLVSIPSLKTPAXTPKT

SEQ ID NO: 10947 - protein, 38 aa, Artificial Sequence
  Non-cyclic GFR-binding peptide
  MOD_RES (1), (35), (36): Xaa is C or S
  MOD_RES (13), (14), (15), (16), (17): Xaa is A or G
  MOD_RES (18), (19), (20), (21): Xaa is A or G or is absent
XSEVVMDNSLQEXXXXXXXXXYYLITLPELRTPVXXTP

SEQ ID NO: 10948 - protein, 30 aa, Artificial Sequence
  Non-cyclic GFR-binding peptide
RVVMNEYQKYIVNSSDDIFLVSIPSLKTPA

SEQ ID NO: 10949 - protein, 35 aa, Artificial Sequence
  Non-cyclic GFR-binding peptide
  MOD_RES (2), (4): Xaa is C or S
RXGXSEVVMDNSLQEVVNNASDYYLITLPELRTPV

SEQ ID NO: 10950 - protein, 34 aa, Artificial Sequence
  Non-cyclic GFR-binding peptide
  MOD_RES (1), (3): Xaa is C or S
XGXSEVVMDNSLQEVVNNASDYYLITLPELRTPV

SEQ ID NO: 10951 - protein, 36 aa, Artificial Sequence
  Non-cyclic GFR-binding peptide
  MOD_RES (1), (35), (36): Xaa is C or S
  MOD_RES (13), (14), (15), (16), (17): Xaa is A or G
  MOD_RES (18), (19), (20), (21): Xaa is A or G or is absent
XGEVVMDNSLQEXXXXXXXXXYYLMTLPELETPVXX

SEQ ID NO: 10952 - protein, 39 aa, Artificial Sequence
  Non-cyclic GFR-binding peptide
  MOD_RES (1), (3), (37): Xaa is C or S
  MOD_RES (15), (16), (17), (18), (19): Xaa is A or G
  MOD_RES (20), (21), (22), (23): Xaa is A or G or is absent
XGXSRVVMNNSLQEXXXXXXXXXYYVVPLPELKTPAXTP

SEQ ID NO: 10953 - protein, 37 aa, Artificial Sequence
  Non-cyclic GFR-binding peptide
  MOD_RES (34), (35): Xaa is C or S
  MOD_RES (12), (13), (14), (15), (16): Xaa is A or G
  MOD_RES (17), (18), (19), (20): Xaa is A or G or is absent
GEVVMDNSLQEXXXXXXXXXYYLMTLPELETPVXXAK

SEQ ID NO: 10954 - protein, 38 aa, Artificial Sequence
  Non-cyclic GFR-binding peptide
  MOD_RES (2), (34): Xaa is C or S
GXSRVVMNEYQKYIVNSSDDIFLVSIPSLKTPAXTPKT

SEQ ID NO: 10955 - protein, 34 aa, Artificial Sequence
  Non-cyclic GFR-binding peptide
  MOD_RES (31), (32): Xaa is C or S
SKVVMEYQKYVKPTRGVIFLISIPSLDQPVXXPS

SEQ ID NO: 10956 - protein, 35 aa, Artificial Sequence
  Non-cyclic GFR-binding peptide
  MOD_RES (33), (34): Xaa is C or S
  MOD_RES (11), (12), (13), (14), (15): Xaa is A or G
  MOD_RES (16), (17), (18), (19): Xaa is A or G or is absent
EVVMDNSLQEXXXXXXXXXYYVMPLPELETPVXXA

SEQ ID NO: 10957 - protein, 41 aa, Artificial Sequence
  Non-cyclic GFR-binding peptide
  MOD_RES (1), (3), (35): Xaa is C or S
XGXSRVVMNNSLQEIVNSSDDYYLVTLPELKTPAXTPKTVH

SEQ ID NO: 10958 - protein, 37 aa, Artificial Sequence
  Non-cyclic GFR-binding peptide
  MOD_RES (1), (3), (37): Xaa is C or S
  MOD_RES (15), (16), (17), (18), (19): Xaa is A or G
  MOD_RES (20), (21), (22), (23): Xaa is A or G or is absent
XGXARVVMNNSLQEXXXXXXXXXYYVVPLPELQTPAX

SEQ ID NO: 10959 - protein, 38 aa, Artificial Sequence
  Non-cyclic GFR-binding peptide
  MOD_RES (1), (35), (36): Xaa is C or S
  MOD_RES (13), (14), (15), (16), (17): Xaa is A or G
  MOD_RES (18), (19), (20), (21): Xaa is A or G or is absent
XARVVMNNSLQEXXXXXXXXXYYVVPLPELQTPAXXPK

SEQ ID NO: 10960 - protein, 41 aa, Artificial Sequence
  Non-cyclic GFR-binding peptide
  MOD_RES (1), (3), (37), (38): Xaa is C or S
  MOD_RES (15), (16), (17), (18), (19): Xaa is A or G
  MOD_RES (20), (21), (22), (23): Xaa is A or G or is absent
XGXSEVVMDRYKKLXXXXXXXXXFYLISIANLRTPVXXTPP

SEQ ID NO: 10961 - protein, 32 aa, Artificial Sequence
  Non-cyclic GFR-binding peptide
  MOD_RES (32), (32): Xaa is C or S
SRVVMNEYQKYIVNSSDDIFLVSIPSLKTPAX

SEQ ID NO: 10962 - protein, 40 aa, Artificial Sequence
  Non-cyclic GFR-binding peptide
  MOD_RES (1), (3), (35), (36): Xaa is C or S
XGXSRVVMNNSLQEIVNSSDDYYLVTLPELKTPAXXPKPV

SEQ ID NO: 10963 - protein, 38 aa, Artificial Sequence
  Non-cyclic GFR-binding peptide
  MOD_RES (2), (36), (37): Xaa is C or S
  MOD_RES (14), (15), (16), (17), (18): Xaa is A or G
  MOD_RES (19), (20), (21), (22): Xaa is A or G or is absent
GXSEVVMDQYNKLXXXXXXXXXLYLISIASLRTPVXXT

SEQ ID NO: 10964 - protein, 38 aa, Artificial Sequence
  Non-cyclic GFR-binding peptide
  MOD_RES (34), (35): Xaa is C or S
  MOD_RES (12), (13), (14), (15), (16): Xaa is A or G
  MOD_RES (17), (18), (19), (20): Xaa is A or G or is absent
ARVVMNNSLQEXXXXXXXXXYYLVTLPELQTPAXXPKP

SEQ ID NO: 10965 - protein, 35 aa, Artificial Sequence
  Non-cyclic GFR-binding peptide
  MOD_RES (2), (4): Xaa is C or S
HXGXSRVVMNNSLQEIVNSSDDYYLVTLPELKTPA

SEQ ID NO: 10966 - protein, 33 aa, Artificial Sequence
  Non-cyclic GFR-binding peptide
  MOD_RES (1), (33): Xaa is C or S
XGEVVMDNSLQEVVKENEDYYLMTLPELETPVX

SEQ ID NO: 10967 - protein, 34 aa, Artificial Sequence
  Non-cyclic GFR-binding peptide
  MOD_RES (32), (33): Xaa is C or S
ARVVMNNSLQEIVNSSDDYYLVTLPELQTPAXXP

SEQ ID NO: 10968 - protein, 36 aa, Artificial Sequence
  Non-cyclic GFR-binding peptide
  MOD_RES (1), (3): Xaa is C or S
  MOD_RES (15), (16), (17), (18), (19): Xaa is A or G
  MOD_RES (20), (21), (22), (23): Xaa is A or G or is absent
XGXGEVVMDNSLQEXXXXXXXXXYYLMTLPELETPV

SEQ ID NO: 10969 - protein, 35 aa, Artificial Sequence
  Non-cyclic GFR-binding peptide
  MOD_RES (32), (33): Xaa is C or S
ARVVMNNSLQEIVNSSDDYYVVPLPELQTPAXXPK

SEQ ID NO: 10970 - protein, 39 aa, Artificial Sequence
  Non-cyclic GFR-binding peptide
  MOD_RES (33), (34): Xaa is C or S
  MOD_RES (11), (12), (13), (14), (15): Xaa is A or G
  MOD_RES (16), (17), (18), (19): Xaa is A or G or is absent
SKVIMEYQKYXXXXXXXXXIFLISIPSLDQSVXXPSASA

SEQ ID NO: 10971 - protein, 37 aa, Artificial Sequence
  Non-cyclic GFR-binding peptide
  MOD_RES (2), (4), (35), (36): Xaa is C or S
SXKXSRVIMEYQKYVKPKRGVIFLISIPSLAQPVXXP

SEQ ID NO: 10972 - protein, 38 aa, Artificial Sequence
  Non-cyclic GFR-binding peptide
  MOD_RES (33), (34): Xaa is C or S
  MOD_RES (11), (12), (13), (14), (15): Xaa is A or G
  MOD_RES (16), (17), (18), (19): Xaa is A or G or is absent
SKVIMEYQKYXXXXXXXXXIFLISIPSLDQSVXXPSAS

SEQ ID NO: 10973 - protein, 33 aa, Artificial Sequence
  Non-cyclic GFR-binding peptide
  MOD_RES (32), (33): Xaa is C or S
GEVVMDNSLQEVVKENEDYYVMPLPELETPVXX

SEQ ID NO: 10974 - protein, 38 aa, Artificial Sequence
  Non-cyclic GFR-binding peptide
  MOD_RES (32), (33): Xaa is C or S
GEVVMEEYQKYVVKDYEDIFLMSIPSLETPVXXAKPIS

SEQ ID NO: 10975 - protein, 37 aa, Artificial Sequence
  Non-cyclic GFR-binding peptide
  MOD_RES (31), (32): Xaa is C or S
RVVMNEYQKYIVNSSDDIFLVSIPSLKTPAXXPKPVY

SEQ ID NO: 10976 - protein, 41 aa, Artificial Sequence
  Non-cyclic GFR-binding peptide
  MOD_RES (2), (4), (38), (39): Xaa is C or S
  MOD_RES (16), (17), (18), (19), (20): Xaa is A or G
  MOD_RES (21), (22), (23), (24): Xaa is A or G or is absent
RXGXGEVVMDNSLQEXXXXXXXXXYYVMPLPELETPVXXAK

SEQ ID NO: 10977 - protein, 36 aa, Artificial Sequence
  Non-cyclic GFR-binding peptide
  MOD_RES (33), (33): Xaa is C or S
  MOD_RES (11), (12), (13), (14), (15): Xaa is A or G
  MOD_RES (16), (17), (18), (19): Xaa is A or G or is absent
RVVMNNSLQEXXXXXXXXXYYLVTLPELKTPAXTPK

SEQ ID NO: 10978 - protein, 37 aa, Artificial Sequence
  Non-cyclic GFR-binding peptide
  MOD_RES (1), (33): Xaa is C or S
XSRVVMNEYQKYIVNSSDDIFLVSIPSLKTPAXTPKT

SEQ ID NO: 10979 - protein, 35 aa, Artificial Sequence
  Non-cyclic GFR-binding peptide
  MOD_RES (31), (31): Xaa is C or S
RVVMNNSLQEIVNSSDDYYLVTLPELKTPAXTPKT

SEQ ID NO: 10980 - protein, 36 aa, Artificial Sequence
  Non-cyclic GFR-binding peptide
  MOD_RES (1), (33), (34): Xaa is C or S
XSEVVMDRYKKLVVNNASDFYLISIANLRTPVXXTP

SEQ ID NO: 10981 - protein, 38 aa, Artificial Sequence
  Non-cyclic GFR-binding peptide
  MOD_RES (2), (4), (38): Xaa is C or S
  MOD_RES (16), (17), (18), (19), (20): Xaa is A or G
  MOD_RES (21), (22), (23), (24): Xaa is A or G or is absent
HXGXARVVMNNSLQEXXXXXXXXXYYLVTLPELQTPAX

SEQ ID NO: 10982 - protein, 42 aa, Artificial Sequence
  Non-cyclic GFR-binding peptide
  MOD_RES (1), (3), (37): Xaa is C or S
  MOD_RES (15), (16), (17), (18), (19): Xaa is A or G
  MOD_RES (20), (21), (22), (23): Xaa is A or G or is absent
XGXSRVVMNEYQKYXXXXXXXXXIFLVSIPSLKTPAXTPKTV

SEQ ID NO: 10983 - protein, 40 aa, Artificial Sequence
  Non-cyclic GFR-binding peptide
  MOD_RES (2), (36), (37): Xaa is C or S
  MOD_RES (14), (15), (16), (17), (18): Xaa is A or G
  MOD_RES (19), (20), (21), (22): Xaa is A or G or is absent
GXSEVVMDNSLQEXXXXXXXXXYYVIPLPELRTPVXXTPP

SEQ ID NO: 10984 - protein, 39 aa, Artificial Sequence
  Non-cyclic GFR-binding peptide
  MOD_RES (2), (34), (35): Xaa is C or S
GXSEVVMDNSLQEVVNNASDYYVIPLPELRTPVXXTPPT

SEQ ID NO: 10985 - protein, 35 aa, Artificial Sequence
  Non-cyclic GFR-binding peptide
  MOD_RES (2), (34), (35): Xaa is C or S
GXSRVVMNEYQKYIVNSSDDIFLVSIPSLKTPAXX

SEQ ID NO: 10986 - protein, 34 aa, Artificial Sequence
  Non-cyclic GFR-binding peptide
  MOD_RES (1), (1): Xaa is C or S
  MOD_RES (13), (14), (15), (16), (17): Xaa is A or G
  MOD_RES (18), (19), (20), (21): Xaa is A or G or is absent
XARVVMNNSLQEXXXXXXXXXYYLVTLPELQTPA

SEQ ID NO: 10987 - protein, 36 aa, Artificial Sequence
  Non-cyclic GFR-binding peptide
  MOD_RES (1), (3): Xaa is C or S
  MOD_RES (15), (16), (17), (18), (19): Xaa is A or G
  MOD_RES (20), (21), (22), (23): Xaa is A or G or is absent
XGXGEVVMDNSLQEXXXXXXXXXYYVMPLPELETPV

SEQ ID NO: 10988 - protein, 37 aa, Artificial Sequence
  Non-cyclic GFR-binding peptide
  MOD_RES (32), (33): Xaa is C or S
SEVVMDQYNKLVVNNASDLYLISIASLRTPVXXTPPT

SEQ ID NO: 10989 - protein, 37 aa, Artificial Sequence
  Non-cyclic GFR-binding peptide
  MOD_RES (31), (32): Xaa is C or S
EVVMDNSLQEVVKENEDYYLMTLPELETPVXXAKPIK

SEQ ID NO: 10990 - protein, 33 aa, Artificial Sequence
  Non-cyclic GFR-binding peptide
  MOD_RES (1), (33): Xaa is C or S
XSEVVMDNSLQEVVNNASDYYVIPLPELRTPVX

SEQ ID NO: 10991 - protein, 33 aa, Artificial Sequence
  Non-cyclic GFR-binding peptide
  MOD_RES (1), (32), (33): Xaa is C or S
XSKVIMNSLQEIKPTKGIYYVIPLPELDQSVXX

SEQ ID NO: 10992 - protein, 43 aa, Artificial Sequence
  Non-cyclic GFR-binding peptide
  MOD_RES (2), (4), (38), (39): Xaa is C or S
  MOD_RES (16), (17), (18), (19), (20): Xaa is A or G
  MOD_RES (21), (22), (23), (24): Xaa is A or G or is absent
RXGXSEVVMDRYKKLXXXXXXXXXFYLISIANLRTPVXXTPPT

SEQ ID NO: 10993 - protein, 41 aa, Artificial Sequence
  Non-cyclic GFR-binding peptide
  MOD_RES (1), (3), (35), (36): Xaa is C or S
XGXGEVVMENSLQEVVKDYEDYYVMPLPELETPVXXAKPIS

SEQ ID NO: 10994 - protein, 40 aa, Artificial Sequence
  Non-cyclic GFR-binding peptide
  MOD_RES (2), (4), (37), (38): Xaa is C or S
  MOD_RES (15), (16), (17), (18), (19): Xaa is A or G
  MOD_RES (20), (21), (22), (23): Xaa is A or G or is absent
SXKXSKVVMNSLQEXXXXXXXXXYYVIPLPELDQPVXXPS

SEQ ID NO: 10995 - protein, 36 aa, Artificial Sequence
  Non-cyclic GFR-binding peptide
  MOD_RES (1), (3), (35), (36): Xaa is C or S
XGXGEVVMDNSLQEVVKENEDYYLMTLPELETPVXX

SEQ ID NO: 10996 - protein, 31 aa, Artificial Sequence
  Non-cyclic GFR-binding peptide
  MOD_RES (31), (31): Xaa is C or S
EVVMDQYNKLVVNNASDLYLISIASLRTPVX

SEQ ID NO: 10997 - protein, 35 aa, Artificial Sequence
  Non-cyclic GFR-binding peptide
  MOD_RES (1), (34), (35): Xaa is C or S
  MOD_RES (12), (13), (14), (15), (16): Xaa is A or G
  MOD_RES (17), (18), (19), (20): Xaa is A or G or is absent
XSKVIMEYQKYXXXXXXXXXIFLISIPSLDQSVXX

SEQ ID NO: 10998 - protein, 38 aa, Artificial Sequence
  Non-cyclic GFR-binding peptide
  MOD_RES (1), (33), (34): Xaa is C or S
XSEVVMDRYKKLVVNNASDFYLISIANLRTPVXXTPPT

SEQ ID NO: 10999 - protein, 38 aa, Artificial Sequence
  Non-cyclic GFR-binding peptide
  MOD_RES (1), (3), (35), (36): Xaa is C or S
XGXARVVMNEYQKYIVNSSDDIFLVSIPSLQTPAXXPK

SEQ ID NO: 11000 - protein, 38 aa, Artificial Sequence
  Non-cyclic GFR-binding peptide
  MOD_RES (1), (33): Xaa is C or S
XSRVVMNNSLQEIVNSSDDYYVVPLPELKTPAXTPKTV

SEQ ID NO: 11001 - protein, 34 aa, Artificial Sequence
  Non-cyclic GFR-binding peptide
  MOD_RES (1), (1): Xaa is C or S
  MOD_RES (13), (14), (15), (16), (17): Xaa is A or G
  MOD_RES (18), (19), (20), (21): Xaa is A or G or is absent
XGEVVMENSLQEXXXXXXXXXYYLMTLPELETPV

SEQ ID NO: 11002 - protein, 40 aa, Artificial Sequence
  Non-cyclic GFR-binding peptide
  MOD_RES (1), (3), (37), (38): Xaa is C or S
  MOD_RES (15), (16), (17), (18), (19): Xaa is A or G
  MOD_RES (20), (21), (22), (23): Xaa is A or G or is absent
XGXSRVVMNNSLQEXXXXXXXXXYYLVTLPELKTPAXXPK

SEQ ID NO: 11003 - protein, 37 aa, Artificial Sequence
  Non-cyclic GFR-binding peptide
  MOD_RES (32), (33): Xaa is C or S
SRVVMNNSLQEIVNSSDDYYVVPLPELKTPAXXPKPV

SEQ ID NO: 11004 - protein, 32 aa, Artificial Sequence
  Non-cyclic GFR-binding peptide
  MOD_RES (11), (12), (13), (14), (15): Xaa is A or G
  MOD_RES (16), (17), (18), (19): Xaa is A or G or is absent
RVVMNNSLQEXXXXXXXXXYYVVPLPELQTPA

SEQ ID NO: 11005 - protein, 43 aa, Artificial Sequence
  Non-cyclic GFR-binding peptide
  MOD_RES (1), (3), (37), (38): Xaa is C or S
  MOD_RES (15), (16), (17), (18), (19): Xaa is A or G
  MOD_RES (20), (21), (22), (23): Xaa is A or G or is absent
XGXSRVVMNNSLQEXXXXXXXXXYYLVTLPELKTPAXXPKPVY

SEQ ID NO: 11006 - protein, 39 aa, Artificial Sequence
  Non-cyclic GFR-binding peptide
  MOD_RES (1), (35), (36): Xaa is C or S
  MOD_RES (13), (14), (15), (16), (17): Xaa is A or G
  MOD_RES (18), (19), (20), (21): Xaa is A or G or is absent
XGEVVMDNSLQEXXXXXXXXXYYVMPLPELETPVXXAKP

SEQ ID NO: 11007 - protein, 38 aa, Artificial Sequence
  Non-cyclic GFR-binding peptide
  MOD_RES (2), (4), (35), (36): Xaa is C or S
SXKXSRVIMNSLQEVKPKRGVYYLITLPELAQPVXXPA

SEQ ID NO: 11008 - protein, 38 aa, Artificial Sequence
  Non-cyclic GFR-binding peptide
  MOD_RES (1), (3), (36), (37): Xaa is C or S
  MOD_RES (14), (15), (16), (17), (18): Xaa is A or G
  MOD_RES (19), (20), (21), (22): Xaa is A or G or is absent
XKXSRVIMEYQKYXXXXXXXXXIFLISIPSLAQPVXXP

SEQ ID NO: 11009 - protein, 33 aa, Artificial Sequence
  Non-cyclic GFR-binding peptide
  MOD_RES (33), (33): Xaa is C or S
  MOD_RES (11), (12), (13), (14), (15): Xaa is A or G
  MOD_RES (16), (17), (18), (19): Xaa is A or G or is absent
RVVMNNSLQEXXXXXXXXXYYLVTLPELQTPAX

SEQ ID NO: 11010 - protein, 37 aa, Artificial Sequence
  Non-cyclic GFR-binding peptide
  MOD_RES (1), (3), (35), (36): Xaa is C or S
XGXGEVVMEEYQKYVVKDYEDIFLMSIPSLETPVXXA

SEQ ID NO: 11011 - protein, 37 aa, Artificial Sequence
  Non-cyclic GFR-binding peptide
  MOD_RES (1), (3), (35), (36): Xaa is C or S
XGXGEVVMENSLQEVVKDYEDYYLMTLPELETPVXXA

SEQ ID NO: 11012 - protein, 33 aa, Artificial Sequence
  Non-cyclic GFR-binding peptide
  MOD_RES (2), (2): Xaa is C or S
GXGEVVMENSLQEVVKDYEDYYVMPLPELETPV

SEQ ID NO: 11013 - protein, 37 aa, Artificial Sequence
  Non-cyclic GFR-binding peptide
  MOD_RES (2), (36), (37): Xaa is C or S
  MOD_RES (14), (15), (16), (17), (18): Xaa is A or G
  MOD_RES (19), (20), (21), (22): Xaa is A or G or is absent
GXSEVVMDQYNKLXXXXXXXXXLYLISIASLRTPVXX

SEQ ID NO: 11014 - protein, 37 aa, Artificial Sequence
  Non-cyclic GFR-binding peptide
  MOD_RES (2), (34): Xaa is C or S
GXSRVVMNNSLQEIVNSSDDYYLVTLPELKTPAXTPK

SEQ ID NO: 11015 - protein, 36 aa, Artificial Sequence
  Non-cyclic GFR-binding peptide
  MOD_RES (34), (35): Xaa is C or S
  MOD_RES (12), (13), (14), (15), (16): Xaa is A or G
  MOD_RES (17), (18), (19), (20): Xaa is A or G or is absent
SRVVMNEYQKYXXXXXXXXXIFLVSIPSLKTPAXXP

SEQ ID NO: 11016 - protein, 35 aa, Artificial Sequence
  Non-cyclic GFR-binding peptide
  MOD_RES (34), (35): Xaa is C or S
  MOD_RES (12), (13), (14), (15), (16): Xaa is A or G
  MOD_RES (17), (18), (19), (20): Xaa is A or G or is absent
SEVVMDRYKKLXXXXXXXXXFYLISIANLRTPVXX

SEQ ID NO: 11017 - protein, 38 aa, Artificial Sequence
  Non-cyclic GFR-binding peptide
  MOD_RES (1), (33), (34): Xaa is C or S
XSRVVMNEYQKYIVNSSDDIFLVSIPSLKTPAXXPKPV

SEQ ID NO: 11018 - protein, 42 aa, Artificial Sequence
  Non-cyclic GFR-binding peptide
  MOD_RES (2), (4), (36): Xaa is C or S
HXGXSRVVMNNSLQEIVNSSDDYYVVPLPELKTPAXTPKTVH

SEQ ID NO: 11019 - protein, 39 aa, Artificial Sequence
  Non-cyclic GFR-binding peptide
  MOD_RES (2), (4), (38), (39): Xaa is C or S
  MOD_RES (16), (17), (18), (19), (20): Xaa is A or G
  MOD_RES (21), (22), (23), (24): Xaa is A or G or is absent
HXGXSRVVMNNSLQEXXXXXXXXXYYVVPLPELKTPAXX

SEQ ID NO: 11020 - protein, 41 aa, Artificial Sequence
  Non-cyclic GFR-binding peptide
  MOD_RES (1), (35), (36): Xaa is C or S
  MOD_RES (13), (14), (15), (16), (17): Xaa is A or G
  MOD_RES (18), (19), (20), (21): Xaa is A or G or is absent
XGEVVMENSLQEXXXXXXXXXYYLMTLPELETPVXXAKPIS

SEQ ID NO: 11021 - protein, 38 aa, Artificial Sequence
  Non-cyclic GFR-binding peptide
  MOD_RES (33), (34): Xaa is C or S
  MOD_RES (11), (12), (13), (14), (15): Xaa is A or G
  MOD_RES (16), (17), (18), (19): Xaa is A or G or is absent
EVVMDNSLQEXXXXXXXXXYYLITLPELRTPVXXTPPT

SEQ ID NO: 11022 - protein, 39 aa, Artificial Sequence
  Non-cyclic GFR-binding peptide
  MOD_RES (1), (35), (36): Xaa is C or S
  MOD_RES (13), (14), (15), (16), (17): Xaa is A or G
  MOD_RES (18), (19), (20), (21): Xaa is A or G or is absent
XSEVVMDRYKKLXXXXXXXXXFYLISIANLRTPVXXTPP

SEQ ID NO: 11023 - protein, 39 aa, Artificial Sequence
  Non-cyclic GFR-binding peptide
  MOD_RES (1), (3), (35), (36): Xaa is C or S
XGXSRVVMNEYQKYIVNSSDDIFLVSIPSLKTPAXXPKP

SEQ ID NO: 11024 - protein, 37 aa, Artificial Sequence
  Non-cyclic GFR-binding peptide
  MOD_RES (31), (32): Xaa is C or S
EVVMDQYNKLVVNNASDLYLISIASLRTPVXXTPPTS

SEQ ID NO: 11025 - protein, 38 aa, Artificial Sequence
  Non-cyclic GFR-binding peptide
  MOD_RES (1), (3), (35), (36): Xaa is C or S
XGXARVVMNNSLQEIVNSSDDYYLVTLPELQTPAXXPK

SEQ ID NO: 11026 - protein, 42 aa, Artificial Sequence
  Non-cyclic GFR-binding peptide
  MOD_RES (2), (4), (38), (39): Xaa is C or S
  MOD_RES (16), (17), (18), (19), (20): Xaa is A or G
  MOD_RES (21), (22), (23), (24): Xaa is A or G or is absent
RXGXSEVVMDQYNKLXXXXXXXXXLYLISIASLRTPVXXTPP

SEQ ID NO: 11027 - protein, 33 aa, Artificial Sequence
  Non-cyclic GFR-binding peptide
  MOD_RES (33), (33): Xaa is C or S
  MOD_RES (11), (12), (13), (14), (15): Xaa is A or G
  MOD_RES (16), (17), (18), (19): Xaa is A or G or is absent
SKVVMNSLQEXXXXXXXXXYYVIPLPELDQPVX

SEQ ID NO: 11028 - protein, 37 aa, Artificial Sequence
  Non-cyclic GFR-binding peptide
  MOD_RES (1), (3), (35), (36): Xaa is C or S
XGXGEVVMDEYQKYVVKENEDIFLMSIPSLETPVXXA

SEQ ID NO: 11029 - protein, 41 aa, Artificial Sequence
  Non-cyclic GFR-binding peptide
  MOD_RES (2), (4), (38): Xaa is C or S
  MOD_RES (16), (17), (18), (19), (20): Xaa is A or G
  MOD_RES (21), (22), (23), (24): Xaa is A or G or is absent
HXGXSRVVMNNSLQEXXXXXXXXXYYVVPLPELKTPAXTPK

SEQ ID NO: 11030 - protein, 36 aa, Artificial Sequence
  Non-cyclic GFR-binding peptide
  MOD_RES (1), (3), (35), (36): Xaa is C or S
XGXGEVVMDEYQKYVVKENEDIFLMSIPSLETPVXX

SEQ ID NO: 11031 - protein, 36 aa, Artificial Sequence
  Non-cyclic GFR-binding peptide
  MOD_RES (1), (33): Xaa is C or S
XSRVVMNNSLQEIVNSSDDYYLVTLPELKTPAXTPK

SEQ ID NO: 11032 - protein, 39 aa, Artificial Sequence
  Non-cyclic GFR-binding peptide
  MOD_RES (2), (36), (37): Xaa is C or S
  MOD_RES (14), (15), (16), (17), (18): Xaa is A or G
  MOD_RES (19), (20), (21), (22): Xaa is A or G or is absent
GXSEVVMDNSLQEXXXXXXXXXYYVIPLPELRTPVXXTP

SEQ ID NO: 11033 - protein, 36 aa, Artificial Sequence
  Non-cyclic GFR-binding peptide
  MOD_RES (2), (36): Xaa is C or S
  MOD_RES (14), (15), (16), (17), (18): Xaa is A or G
  MOD_RES (19), (20), (21), (22): Xaa is A or G or is absent
GXGEVVMENSLQEXXXXXXXXXYYLMTLPELETPVX

SEQ ID NO: 11034 - protein, 37 aa, Artificial Sequence
  Non-cyclic GFR-binding peptide
  MOD_RES (31), (32): Xaa is C or S
SRVIMNSLQEVKPKRGVYYLITLPELAQPVXXPAASA

SEQ ID NO: 11035 - protein, 37 aa, Artificial Sequence
  Non-cyclic GFR-binding peptide
  MOD_RES (1), (33), (34): Xaa is C or S
XSEVVMDRYKKLVVNNASDFYLISIANLRTPVXXTPP

SEQ ID NO: 11036 - protein, 41 aa, Artificial Sequence
  Non-cyclic GFR-binding peptide
  MOD_RES (2), (4), (37), (38): Xaa is C or S
  MOD_RES (15), (16), (17), (18), (19): Xaa is A or G
  MOD_RES (20), (21), (22), (23): Xaa is A or G or is absent
SXKXSRVIMNSLQEXXXXXXXXXYYLITLPELAQPVXXPAA

SEQ ID NO: 11037 - protein, 37 aa, Artificial Sequence
  Non-cyclic GFR-binding peptide
  MOD_RES (1), (3), (34), (35): Xaa is C or S
XKXSKVVMNSLQEVKPTRGVYYVIPLPELDQPVXXPS

SEQ ID NO: 11038 - protein, 34 aa, Artificial Sequence
  Non-cyclic GFR-binding peptide
  MOD_RES (2), (4): Xaa is C or S
SXKXSKVIMNSLQEIKPTKGIYYVIPLPELDQSV

SEQ ID NO: 11039 - protein, 42 aa, Artificial Sequence
  Non-cyclic GFR-binding peptide
  MOD_RES (1), (3), (37), (38): Xaa is C or S
  MOD_RES (15), (16), (17), (18), (19): Xaa is A or G
  MOD_RES (20), (21), (22), (23): Xaa is A or G or is absent
XGXGEVVMDEYQKYXXXXXXXXXIFLMSIPSLETPVXXAKPI

SEQ ID NO: 11040 - protein, 37 aa, Artificial Sequence
  Non-cyclic GFR-binding peptide
  MOD_RES (1), (3), (37): Xaa is C or S
  MOD_RES (15), (16), (17), (18), (19): Xaa is A or G
  MOD_RES (20), (21), (22), (23): Xaa is A or G or is absent
XGXARVVMNNSLQEXXXXXXXXXYYLVTLPELQTPAX

SEQ ID NO: 11041 - protein, 33 aa, Artificial Sequence
  Non-cyclic GFR-binding peptide
  MOD_RES (1), (1): Xaa is C or S
  MOD_RES (12), (13), (14), (15), (16): Xaa is A or G
  MOD_RES (17), (18), (19), (20): Xaa is A or G or is absent
XSRVIMNSLQEXXXXXXXXXYYLITLPELAQPV

SEQ ID NO: 11042 - protein, 40 aa, Artificial Sequence
  Non-cyclic GFR-binding peptide
  MOD_RES (1), (3), (37), (38): Xaa is C or S
  MOD_RES (15), (16), (17), (18), (19): Xaa is A or G
  MOD_RES (20), (21), (22), (23): Xaa is A or G or is absent
XGXGEVVMDEYQKYXXXXXXXXXIFLMSIPSLETPVXXAK

SEQ ID NO: 11043 - protein, 41 aa, Artificial Sequence
  Non-cyclic GFR-binding peptide
  MOD_RES (2), (4), (38), (39): Xaa is C or S
  MOD_RES (16), (17), (18), (19), (20): Xaa is A or G
  MOD_RES (21), (22), (23), (24): Xaa is A or G or is absent
RXGXGEVVMDEYQKYXXXXXXXXXIFLMSIPSLETPVXXAK

SEQ ID NO: 11044 - protein, 35 aa, Artificial Sequence
  Non-cyclic GFR-binding peptide
  MOD_RES (1), (35): Xaa is C or S
  MOD_RES (13), (14), (15), (16), (17): Xaa is A or G
  MOD_RES (18), (19), (20), (21): Xaa is A or G or is absent
XGEVVMENSLQEXXXXXXXXXYYLMTLPELETPVX

SEQ ID NO: 11045 - protein, 35 aa, Artificial Sequence
  Non-cyclic GFR-binding peptide
  MOD_RES (2), (34), (35): Xaa is C or S
GXGEVVMDNSLQEVVKENEDYYVMPLPELETPVXX

SEQ ID NO: 11046 - protein, 35 aa, Artificial Sequence
  Non-cyclic GFR-binding peptide
  MOD_RES (2), (35): Xaa is C or S
  MOD_RES (13), (14), (15), (16), (17): Xaa is A or G
  MOD_RES (18), (19), (20), (21): Xaa is A or G or is absent
KXSRVIMNSLQEXXXXXXXXXYYLITLPELAQPVX

SEQ ID NO: 11047 - protein, 35 aa, Artificial Sequence
  Non-cyclic GFR-binding peptide
  MOD_RES (1), (35): Xaa is C or S
  MOD_RES (13), (14), (15), (16), (17): Xaa is A or G
  MOD_RES (18), (19), (20), (21): Xaa is A or G or is absent
XARVVMNNSLQEXXXXXXXXXYYLVTLPELQTPAX

SEQ ID NO: 11048 - protein, 34 aa, Artificial Sequence
  Non-cyclic GFR-binding peptide
  MOD_RES (32), (33): Xaa is C or S
GEVVMENSLQEVVKDYEDYYLMTLPELETPVXXA

SEQ ID NO: 11049 - protein, 42 aa, Artificial Sequence
  Non-cyclic GFR-binding peptide
  MOD_RES (1), (3), (37), (38): Xaa is C or S
  MOD_RES (15), (16), (17), (18), (19): Xaa is A or G
  MOD_RES (20), (21), (22), (23): Xaa is A or G or is absent
XGXARVVMNEYQKYXXXXXXXXXIFLVSIPSLQTPAXXPKPV

SEQ ID NO: 11050 - protein, 31 aa, Artificial Sequence
  Non-cyclic GFR-binding peptide
GEVVMEEYQKYVVKDYEDIFLMSIPSLETPV

SEQ ID NO: 11051 - protein, 43 aa, Artificial Sequence
  Non-cyclic GFR-binding peptide
  MOD_RES (1), (3), (37): Xaa is C or S
  MOD_RES (15), (16), (17), (18), (19): Xaa is A or G
  MOD_RES (20), (21), (22), (23): Xaa is A or G or is absent
XGXSRVVMNEYQKYXXXXXXXXXIFLVSIPSLKTPAXTPKTVH

SEQ ID NO: 11052 - protein, 37 aa, Artificial Sequence
  Non-cyclic GFR-binding peptide
  MOD_RES (33), (34): Xaa is C or S
  MOD_RES (11), (12), (13), (14), (15): Xaa is A or G
  MOD_RES (16), (17), (18), (19): Xaa is A or G or is absent
EVVMDNSLQEXXXXXXXXXYYLITLPELRTPVXXTPP

SEQ ID NO: 11053 - protein, 40 aa, Artificial Sequence
  Non-cyclic GFR-binding peptide
  MOD_RES (1), (3), (37), (38): Xaa is C or S
  MOD_RES (15), (16), (17), (18), (19): Xaa is A or G
  MOD_RES (20), (21), (22), (23): Xaa is A or G or is absent
XGXSEVVMDNSLQEXXXXXXXXXYYLITLPELRTPVXXTP

SEQ ID NO: 11054 - protein, 33 aa, Artificial Sequence
  Non-cyclic GFR-binding peptide
  MOD_RES (12), (13), (14), (15), (16): Xaa is A or G
  MOD_RES (17), (18), (19), (20): Xaa is A or G or is absent
SEVVMDNSLQEXXXXXXXXXYYVIPLPELRTPV

SEQ ID NO: 11055 - protein, 38 aa, Artificial Sequence
  Non-cyclic GFR-binding peptide
  MOD_RES (32), (32): Xaa is C or S
SRVVMNNSLQEIVNSSDDYYLVTLPELKTPAXTPKTVH

SEQ ID NO: 11056 - protein, 35 aa, Artificial Sequence
  Non-cyclic GFR-binding peptide
  MOD_RES (2), (34), (35): Xaa is C or S
GXARVVMNNSLQEIVNSSDDYYLVTLPELQTPAXX

SEQ ID NO: 11057 - protein, 32 aa, Artificial Sequence
  Non-cyclic GFR-binding peptide
  MOD_RES (32), (32): Xaa is C or S
SRVVMNNSLQEIVNSSDDYYVVPLPELKTPAX

SEQ ID NO: 11058 - protein, 39 aa, Artificial Sequence
  Non-cyclic GFR-binding peptide
  MOD_RES (2), (35), (36): Xaa is C or S
  MOD_RES (13), (14), (15), (16), (17): Xaa is A or G
  MOD_RES (18), (19), (20), (21): Xaa is A or G or is absent
KXSKVVMNSLQEXXXXXXXXXYYVIPLPELDQPVXXPSA

SEQ ID NO: 11059 - protein, 39 aa, Artificial Sequence
  Non-cyclic GFR-binding peptide
  MOD_RES (33), (34): Xaa is C or S
  MOD_RES (11), (12), (13), (14), (15): Xaa is A or G
  MOD_RES (16), (17), (18), (19): Xaa is A or G or is absent
RVVMNNSLQEXXXXXXXXXYYVVPLPELQTPAXXPKPVT

SEQ ID NO: 11060 - protein, 38 aa, Artificial Sequence
  Non-cyclic GFR-binding peptide
  MOD_RES (1), (3), (37), (38): Xaa is C or S
  MOD_RES (15), (16), (17), (18), (19): Xaa is A or G
  MOD_RES (20), (21), (22), (23): Xaa is A or G or is absent
XGXSEVVMDRYKKLXXXXXXXXXFYLISIANLRTPVXX

SEQ ID NO: 11061 - protein, 39 aa, Artificial Sequence
  Non-cyclic GFR-binding peptide
  MOD_RES (1), (33), (34): Xaa is C or S
XSRVVMNNSLQEIVNSSDDYYLVTLPELKTPAXXPKPVY

SEQ ID NO: 11062 - protein, 42 aa, Artificial Sequence
  Non-cyclic GFR-binding peptide
  MOD_RES (2), (36), (37): Xaa is C or S
  MOD_RES (14), (15), (16), (17), (18): Xaa is A or G
  MOD_RES (19), (20), (21), (22): Xaa is A or G or is absent
GXGEVVMDNSLQEXXXXXXXXXYYVMPLPELETPVXXAKPIK

SEQ ID NO: 11063 - protein, 34 aa, Artificial Sequence
  Non-cyclic GFR-binding peptide
  MOD_RES (1), (33), (34): Xaa is C or S
XSEVVMDNSLQEVVNNASDYYVIPLPELRTPVXX

SEQ ID NO: 11064 - protein, 38 aa, Artificial Sequence
  Non-cyclic GFR-binding peptide
  MOD_RES (2), (4), (35), (36): Xaa is C or S
SXKXSRVIMEYQKYVKPKRGVIFLISIPSLAQPVXXPA

SEQ ID NO: 11065 - protein, 40 aa, Artificial Sequence
  Non-cyclic GFR-binding peptide
  MOD_RES (1), (35), (36): Xaa is C or S
  MOD_RES (13), (14), (15), (16), (17): Xaa is A or G
  MOD_RES (18), (19), (20), (21): Xaa is A or G or is absent
XSEVVMDNSLQEXXXXXXXXXYYVIPLPELRTPVXXTPPT

SEQ ID NO: 11066 - protein, 37 aa, Artificial Sequence
  Non-cyclic GFR-binding peptide
  MOD_RES (1), (3), (36), (37): Xaa is C or S
  MOD_RES (14), (15), (16), (17), (18): Xaa is A or G
  MOD_RES (19), (20), (21), (22): Xaa is A or G or is absent
XKXSKVIMNSLQEXXXXXXXXXYYVIPLPELDQSVXX

SEQ ID NO: 11067 - protein, 39 aa, Artificial Sequence
  Non-cyclic GFR-binding peptide
  MOD_RES (1), (33), (34): Xaa is C or S
XGEVVMEEYQKYVVKDYEDIFLMSIPSLETPVXXAKPIS

SEQ ID NO: 11068 - protein, 36 aa, Artificial Sequence
  Non-cyclic GFR-binding peptide
  MOD_RES (1), (3), (35), (36): Xaa is C or S
XGXGEVVMENSLQEVVKDYEDYYLMTLPELETPVXX

SEQ ID NO: 11069 - protein, 36 aa, Artificial Sequence
  Non-cyclic GFR-binding peptide
  MOD_RES (33), (34): Xaa is C or S
  MOD_RES (11), (12), (13), (14), (15): Xaa is A or G
  MOD_RES (16), (17), (18), (19): Xaa is A or G or is absent
EVVMENSLQEXXXXXXXXXYYVMPLPELETPVXXAK

SEQ ID NO: 11070 - protein, 42 aa, Artificial Sequence
  Non-cyclic GFR-binding peptide
  MOD_RES (2), (4), (37), (38): Xaa is C or S
  MOD_RES (15), (16), (17), (18), (19): Xaa is A or G
  MOD_RES (20), (21), (22), (23): Xaa is A or G or is absent
SXKXSRVIMEYQKYXXXXXXXXXIFLISIPSLAQPVXXPAAS

SEQ ID NO: 11071 - protein, 39 aa, Artificial Sequence
  Non-cyclic GFR-binding peptide
  MOD_RES (2), (35), (36): Xaa is C or S
  MOD_RES (13), (14), (15), (16), (17): Xaa is A or G
  MOD_RES (18), (19), (20), (21): Xaa is A or G or is absent
KXSKVIMEYQKYXXXXXXXXXIFLISIPSLDQSVXXPSA

SEQ ID NO: 11072 - protein, 37 aa, Artificial Sequence
  Non-cyclic GFR-binding peptide
  MOD_RES (32), (33): Xaa is C or S
SEVVMDRYKKLVVNNASDFYLISIANLRTPVXXTPPT

SEQ ID NO: 11073 - protein, 34 aa, Artificial Sequence
  Non-cyclic GFR-binding peptide
  MOD_RES (1), (3): Xaa is C or S
XGXARVVMNNSLQEIVNSSDDYYVVPLPELQTPA

SEQ ID NO: 11074 - protein, 42 aa, Artificial Sequence
  Non-cyclic GFR-binding peptide
  MOD_RES (2), (4), (38), (39): Xaa is C or S
  MOD_RES (16), (17), (18), (19), (20): Xaa is A or G
  MOD_RES (21), (22), (23), (24): Xaa is A or G or is absent
HXGXARVVMNEYQKYXXXXXXXXXIFLVSIPSLQTPAXXPKP

SEQ ID NO: 11075 - protein, 37 aa, Artificial Sequence
  Non-cyclic GFR-binding peptide
  MOD_RES (2), (4), (36): Xaa is C or S
HXGXSRVVMNNSLQEIVNSSDDYYVVPLPELKTPAXT

SEQ ID NO: 11076 - protein, 40 aa, Artificial Sequence
  Non-cyclic GFR-binding peptide
  MOD_RES (1), (3), (37), (38): Xaa is C or S
  MOD_RES (15), (16), (17), (18), (19): Xaa is A or G
  MOD_RES (20), (21), (22), (23): Xaa is A or G or is absent
XGXSEVVMDNSLQEXXXXXXXXXYYVIPLPELRTPVXXTP

SEQ ID NO: 11077 - protein, 37 aa, Artificial Sequence
  Non-cyclic GFR-binding peptide
  MOD_RES (2), (34): Xaa is C or S
GXSRVVMNEYQKYIVNSSDDIFLVSIPSLKTPAXTPK

SEQ ID NO: 11078 - protein, 39 aa, Artificial Sequence
  Non-cyclic GFR-binding peptide
  MOD_RES (2), (33), (34): Xaa is C or S
KXSRVIMEYQKYVKPKRGVIFLISIPSLAQPVXXPAASA

SEQ ID NO: 11079 - protein, 43 aa, Artificial Sequence
  Non-cyclic GFR-binding peptide
  MOD_RES (2), (4), (37), (38): Xaa is C or S
  MOD_RES (15), (16), (17), (18), (19): Xaa is A or G
  MOD_RES (20), (21), (22), (23): Xaa is A or G or is absent
SXKXSKVIMEYQKYXXXXXXXXXIFLISIPSLDQSVXXPSASA

SEQ ID NO: 11080 - protein, 35 aa, Artificial Sequence
  Non-cyclic GFR-binding peptide
  MOD_RES (2), (2): Xaa is C or S
  MOD_RES (14), (15), (16), (17), (18): Xaa is A or G
  MOD_RES (19), (20), (21), (22): Xaa is A or G or is absent
GXGEVVMEEYQKYXXXXXXXXXIFLMSIPSLETPV

SEQ ID NO: 11081 - protein, 37 aa, Artificial Sequence
  Non-cyclic GFR-binding peptide
  MOD_RES (1), (3), (37): Xaa is C or S
  MOD_RES (15), (16), (17), (18), (19): Xaa is A or G
  MOD_RES (20), (21), (22), (23): Xaa is A or G or is absent
XGXSEVVMDQYNKLXXXXXXXXXLYLISIASLRTPVX

SEQ ID NO: 11082 - protein, 37 aa, Artificial Sequence
  Non-cyclic GFR-binding peptide
  MOD_RES (2), (4), (36), (37): Xaa is C or S
HXGXARVVMNNSLQEIVNSSDDYYLVTLPELQTPAXX

SEQ ID NO: 11083 - protein, 34 aa, Artificial Sequence
  Non-cyclic GFR-binding peptide
  MOD_RES (33), (34): Xaa is C or S
  MOD_RES (11), (12), (13), (14), (15): Xaa is A or G
  MOD_RES (16), (17), (18), (19): Xaa is A or G or is absent
RVVMNEYQKYXXXXXXXXXIFLVSIPSLKTPAXX

SEQ ID NO: 11084 - protein, 35 aa, Artificial Sequence
  Non-cyclic GFR-binding peptide
  MOD_RES (2), (34), (35): Xaa is C or S
GXSRVVMNNSLQEIVNSSDDYYLVTLPELKTPAXX

SEQ ID NO: 11085 - protein, 38 aa, Artificial Sequence
  Non-cyclic GFR-binding peptide
  MOD_RES (1), (3), (35), (36): Xaa is C or S
XGXSRVVMNEYQKYIVNSSDDIFLVSIPSLKTPAXXPK

SEQ ID NO: 11086 - protein, 36 aa, Artificial Sequence
  Non-cyclic GFR-binding peptide
  MOD_RES (33), (33): Xaa is C or S
  MOD_RES (11), (12), (13), (14), (15): Xaa is A or G
  MOD_RES (16), (17), (18), (19): Xaa is A or G or is absent
RVVMNNSLQEXXXXXXXXXYYVVPLPELKTPAXTPK

SEQ ID NO: 11087 - protein, 42 aa, Artificial Sequence
  Non-cyclic GFR-binding peptide
  MOD_RES (2), (36), (37): Xaa is C or S
  MOD_RES (14), (15), (16), (17), (18): Xaa is A or G
  MOD_RES (19), (20), (21), (22): Xaa is A or G or is absent
GXARVVMNEYQKYXXXXXXXXXIFLVSIPSLQTPAXXPKPVT

SEQ ID NO: 11088 - protein, 36 aa, Artificial Sequence
  Non-cyclic GFR-binding peptide
  MOD_RES (34), (35): Xaa is C or S
  MOD_RES (12), (13), (14), (15), (16): Xaa is A or G
  MOD_RES (17), (18), (19), (20): Xaa is A or G or is absent
SRVVMNNSLQEXXXXXXXXXYYVVPLPELKTPAXXP

SEQ ID NO: 11089 - protein, 43 aa, Artificial Sequence
  Non-cyclic GFR-binding peptide
  MOD_RES (2), (4), (38), (39): Xaa is C or S
  MOD_RES (16), (17), (18), (19), (20): Xaa is A or G
  MOD_RES (21), (22), (23), (24): Xaa is A or G or is absent
RXGXGEVVMDEYQKYXXXXXXXXXIFLMSIPSLETPVXXAKPI

SEQ ID NO: 11090 - protein, 37 aa, Artificial Sequence
  Non-cyclic GFR-binding peptide
  MOD_RES (1), (35): Xaa is C or S
  MOD_RES (13), (14), (15), (16), (17): Xaa is A or G
  MOD_RES (18), (19), (20), (21): Xaa is A or G or is absent
XSRVVMNNSLQEXXXXXXXXXYYVVPLPELKTPAXTP

SEQ ID NO: 11091 - protein, 36 aa, Artificial Sequence
  Non-cyclic GFR-binding peptide
  MOD_RES (1), (35), (36): Xaa is C or S
  MOD_RES (13), (14), (15), (16), (17): Xaa is A or G
  MOD_RES (18), (19), (20), (21): Xaa is A or G or is absent
XSEVVMDNSLQEXXXXXXXXXYYLITLPELRTPVXX

SEQ ID NO: 11092 - protein, 37 aa, Artificial Sequence
  Non-cyclic GFR-binding peptide
  MOD_RES (33), (34): Xaa is C or S
  MOD_RES (11), (12), (13), (14), (15): Xaa is A or G
  MOD_RES (16), (17), (18), (19): Xaa is A or G or is absent
EVVMDNSLQEXXXXXXXXXYYVIPLPELRTPVXXTPP

SEQ ID NO: 11093 - protein, 36 aa, Artificial Sequence
  Non-cyclic GFR-binding peptide
  MOD_RES (33), (34): Xaa is C or S
  MOD_RES (11), (12), (13), (14), (15): Xaa is A or G
  MOD_RES (16), (17), (18), (19): Xaa is A or G or is absent
EVVMENSLQEXXXXXXXXXYYLMTLPELETPVXXAK

SEQ ID NO: 11094 - protein, 39 aa, Artificial Sequence
  Non-cyclic GFR-binding peptide
  MOD_RES (2), (35), (36): Xaa is C or S
  MOD_RES (13), (14), (15), (16), (17): Xaa is A or G
  MOD_RES (18), (19), (20), (21): Xaa is A or G or is absent
KXSRVIMEYQKYXXXXXXXXXIFLISIPSLAQPVXXPAA

SEQ ID NO: 11095 - protein, 39 aa, Artificial Sequence
  Non-cyclic GFR-binding peptide
  MOD_RES (1), (33), (34): Xaa is C or S
XGEVVMDNSLQEVVKENEDYYVMPLPELETPVXXAKPIK

SEQ ID NO: 11096 - protein, 36 aa, Artificial Sequence
  Non-cyclic GFR-binding peptide
  MOD_RES (2), (4), (35), (36): Xaa is C or S
SXKXSRVIMEYQKYVKPKRGVIFLISIPSLAQPVXX

SEQ ID NO: 11097 - protein, 38 aa, Artificial Sequence
  Non-cyclic GFR-binding peptide
  MOD_RES (2), (36), (37): Xaa is C or S
  MOD_RES (14), (15), (16), (17), (18): Xaa is A or G
  MOD_RES (19), (20), (21), (22): Xaa is A or G or is absent
GXSRVVMNNSLQEXXXXXXXXXYYLVTLPELKTPAXXP

SEQ ID NO: 11098 - protein, 32 aa, Artificial Sequence
  Non-cyclic GFR-binding peptide
  MOD_RES (32), (32): Xaa is C or S
GEVVMDNSLQEVVKENEDYYVMPLPELETPVX

SEQ ID NO: 11099 - protein, 41 aa, Artificial Sequence
  Non-cyclic GFR-binding peptide
  MOD_RES (2), (4), (38): Xaa is C or S
  MOD_RES (16), (17), (18), (19), (20): Xaa is A or G
  MOD_RES (21), (22), (23), (24): Xaa is A or G or is absent
HXGXSRVVMNEYQKYXXXXXXXXXIFLVSIPSLKTPAXTPK

SEQ ID NO: 11100 - protein, 41 aa, Artificial Sequence
  Non-cyclic GFR-binding peptide
  MOD_RES (2), (36), (37): Xaa is C or S
  MOD_RES (14), (15), (16), (17), (18): Xaa is A or G
  MOD_RES (19), (20), (21), (22): Xaa is A or G or is absent
GXSEVVMDRYKKLXXXXXXXXXFYLISIANLRTPVXXTPPT

SEQ ID NO: 11101 - protein, 33 aa, Artificial Sequence
  Non-cyclic GFR-binding peptide
  MOD_RES (32), (33): Xaa is C or S
SRVVMNEYQKYIVNSSDDIFLVSIPSLKTPAXX

SEQ ID NO: 11102 - protein, 34 aa, Artificial Sequence
  Non-cyclic GFR-binding peptide
  MOD_RES (31), (32): Xaa is C or S
SKVVMNSLQEVKPTRGVYYVIPLPELDQPVXXPS

SEQ ID NO: 11103 - protein, 37 aa, Artificial Sequence
  Non-cyclic GFR-binding peptide
  MOD_RES (2), (4), (36), (37): Xaa is C or S
RXGXGEVVMENSLQEVVKDYEDYYVMPLPELETPVXX

SEQ ID NO: 11104 - protein, 39 aa, Artificial Sequence
  Non-cyclic GFR-binding peptide
  MOD_RES (2), (4), (38), (39): Xaa is C or S
  MOD_RES (16), (17), (18), (19), (20): Xaa is A or G
  MOD_RES (21), (22), (23), (24): Xaa is A or G or is absent
HXGXSRVVMNEYQKYXXXXXXXXXIFLVSIPSLKTPAXX

SEQ ID NO: 11105 - protein, 38 aa, Artificial Sequence
  Non-cyclic GFR-binding peptide
  MOD_RES (34), (34): Xaa is C or S
  MOD_RES (12), (13), (14), (15), (16): Xaa is A or G
  MOD_RES (17), (18), (19), (20): Xaa is A or G or is absent
SRVVMNNSLQEXXXXXXXXXYYVVPLPELKTPAXTPKT

SEQ ID NO: 11106 - protein, 38 aa, Artificial Sequence
  Non-cyclic GFR-binding peptide
  MOD_RES (1), (3), (35), (36): Xaa is C or S
XGXSRVVMNNSLQEIVNSSDDYYLVTLPELKTPAXXPK

SEQ ID NO: 11107 - protein, 36 aa, Artificial Sequence
  Non-cyclic GFR-binding peptide
  MOD_RES (1), (33), (35): Xaa is C or S
XAPTKLEPLPVVYYDDSSNVIEQLSNNMVVRSXGXH

SEQ ID NO: 11108 - protein, 35 aa, Artificial Sequence
  Non-cyclic GFR-binding peptide
  MOD_RES (2), (3), (35): Xaa is C or S
AXXVPTELEPLPMVYYDEYDKVVEQLSNEMVVEGX

SEQ ID NO: 11109 - protein, 34 aa, Artificial Sequence
  Non-cyclic GFR-binding peptide
  MOD_RES (1), (33): Xaa is C or S
XAPTQLEPLTVLYYDDSSNVIEQLSNNMVVRAXG

SEQ ID NO: 11110 - protein, 40 aa, Artificial Sequence
  Non-cyclic GFR-binding peptide
  MOD_RES (6), (7), (39): Xaa is C or S
KIPKAXXVPTELEPLPMVYYDENEKVVEQLSNDMVVEGXG

SEQ ID NO: 11111 - protein, 35 aa, Artificial Sequence
  Non-cyclic GFR-binding peptide
  MOD_RES (2), (3), (35): Xaa is C or S
PXXAPTKLSPISVLFIDDSSNVIYKQYENMVVRSX

SEQ ID NO: 11112 - protein, 36 aa, Artificial Sequence
  Non-cyclic GFR-binding peptide
  MOD_RES (1), (2), (36): Xaa is C or S
  MOD_RES (16), (17), (18), (19), (20): Xaa is A or G
  MOD_RES (21), (22), (23), (24): Xaa is A or G or is absent
XXVPTELEPLPMVYYXXXXXXXXXEQLSNDMVVEGX

SEQ ID NO: 11113 - protein, 41 aa, Artificial Sequence
  Non-cyclic GFR-binding peptide
  MOD_RES (4), (5), (39), (41): Xaa is C or S
  MOD_RES (19), (20), (21), (22), (23): Xaa is A or G
  MOD_RES (24), (25), (26), (27): Xaa is A or G or is absent
PKAXXVPTELEPLPMVYYXXXXXXXXXEQLSNEMVVEGXGX

SEQ ID NO: 11114 - protein, 35 aa, Artificial Sequence
  Non-cyclic GFR-binding peptide
  MOD_RES (2), (3), (35): Xaa is C or S
TXXVPTRLEPLPIVYYDSANNVVEQLSNDMVVESX

SEQ ID NO: 11115 - protein, 35 aa, Artificial Sequence
  Non-cyclic GFR-binding peptide
  MOD_RES (1), (2), (34): Xaa is C or S
XXVPTELEPLPMVYYDEYDKVVEQLSNEMVVEGXG

SEQ ID NO: 11116 - protein, 33 aa, Artificial Sequence
  Non-cyclic GFR-binding peptide
  MOD_RES (14), (15), (16), (17), (18): Xaa is A or G
  MOD_RES (19), (20), (21), (22): Xaa is A or G or is absent
VPTELEPLPMVYYXXXXXXXXXEQLSNDMVVEG

SEQ ID NO: 11117 - protein, 39 aa, Artificial Sequence
  Non-cyclic GFR-binding peptide
  MOD_RES (3), (37), (39): Xaa is C or S
  MOD_RES (17), (18), (19), (20), (21): Xaa is A or G
  MOD_RES (22), (23), (24), (25): Xaa is A or G or is absent
PTXAPTKLEPLTVLYYXXXXXXXXXEQLSNNMVVRSXGX

SEQ ID NO: 11118 - protein, 37 aa, Artificial Sequence
  Non-cyclic GFR-binding peptide
  MOD_RES (3), (4), (37): Xaa is C or S
  MOD_RES (18), (19), (20), (21), (22): Xaa is A or G
  MOD_RES (23), (24), (25), (26): Xaa is A or G or is absent
SPXXVSQDLSPISILFIXXXXXXXXXYKQYEMIVKSX

SEQ ID NO: 11119 - protein, 36 aa, Artificial Sequence
  Non-cyclic GFR-binding peptide
  MOD_RES (1), (35): Xaa is C or S
  MOD_RES (15), (16), (17), (18), (19): Xaa is A or G
  MOD_RES (20), (21), (22), (23): Xaa is A or G or is absent
XVPTRLNAISILYFXXXXXXXXXLKKYRDMVVESXG

SEQ ID NO: 11120 - protein, 37 aa, Artificial Sequence
  Non-cyclic GFR-binding peptide
  MOD_RES (5), (6): Xaa is C or S
IPKAXXVPTELEPLTMLYYDEYDKVVEQLSNEMVVEG

SEQ ID NO: 11121 - protein, 36 aa, Artificial Sequence
  Non-cyclic GFR-binding peptide
  MOD_RES (3), (4): Xaa is C or S
  MOD_RES (18), (19), (20), (21), (22): Xaa is A or G
  MOD_RES (23), (24), (25), (26): Xaa is A or G or is absent
APXXVPQALEPLTILYYXXXXXXXXXEQLSNMIVRS

SEQ ID NO: 11122 - protein, 35 aa, Artificial Sequence
  Non-cyclic GFR-binding peptide
  MOD_RES (4), (5): Xaa is C or S
PPTXXVPTRLEPLTILYYDSANNVVEQLSNDMVVE

SEQ ID NO: 11123 - protein, 41 aa, Artificial Sequence
  Non-cyclic GFR-binding peptide
  MOD_RES (5), (6), (39), (41): Xaa is C or S
  MOD_RES (20), (21), (22), (23), (24): Xaa is A or G
  MOD_RES (25), (26), (27), (28): Xaa is A or G or is absent
SASPXXVPQDLEPLPIVYYXXXXXXXXXEQLSNMVVKSXKX

SEQ ID NO: 11124 - protein, 39 aa, Artificial Sequence
  Non-cyclic GFR-binding peptide
  MOD_RES (3), (4), (37), (39): Xaa is C or S
  MOD_RES (18), (19), (20), (21), (22): Xaa is A or G
  MOD_RES (23), (24), (25), (26): Xaa is A or G or is absent
SPXXVSQDLEPLPIVYYXXXXXXXXXEQLSNMIVKSXKX

SEQ ID NO: 11125 - protein, 33 aa, Artificial Sequence
  Non-cyclic GFR-binding peptide
  MOD_RES (32), (32): Xaa is C or S
APTKLSPISVLFIDDSSNVIYKQYENMVVRSXG

SEQ ID NO: 11126 - protein, 37 aa, Artificial Sequence
  Non-cyclic GFR-binding peptide
  MOD_RES (4), (5), (37): Xaa is C or S
PPTXXVPTRLEPLPIVYYDSANNVVEQLSNDMVVESX

SEQ ID NO: 11127 - protein, 41 aa, Artificial Sequence
  Non-cyclic GFR-binding peptide
  MOD_RES (6), (7), (39), (41): Xaa is C or S
STPPTXXVPTRLSAISILYLDSANNVVLKNYQDMVVESXGX

SEQ ID NO: 11128 - protein, 36 aa, Artificial Sequence
  Non-cyclic GFR-binding peptide
  MOD_RES (34), (36): Xaa is C or S
  MOD_RES (14), (15), (16), (17), (18): Xaa is A or G
  MOD_RES (19), (20), (21), (22): Xaa is A or G or is absent
VPTELEPLPMVYYXXXXXXXXXEQLSNEMVVEGXGX

SEQ ID NO: 11129 - protein, 38 aa, Artificial Sequence
  Non-cyclic GFR-binding peptide
  MOD_RES (1), (35), (37): Xaa is C or S
  MOD_RES (15), (16), (17), (18), (19): Xaa is A or G
  MOD_RES (20), (21), (22), (23): Xaa is A or G or is absent
XAPTKLEPLTVLYYXXXXXXXXXEQLSNNMVVRSXGXH

SEQ ID NO: 11130 - protein, 40 aa, Artificial Sequence
  Non-cyclic GFR-binding peptide
  MOD_RES (6), (7), (38), (40): Xaa is C or S
ASASPXXVPQDLSPISILFIVGRTPKVYKQYEMVVKSXKX

SEQ ID NO: 11131 - protein, 35 aa, Artificial Sequence
  Non-cyclic GFR-binding peptide
  MOD_RES (32), (34): Xaa is C or S
APTKLEPLPVVYYDDSSNVIEQLSNNMVVRSXGXH

SEQ ID NO: 11132 - protein, 34 aa, Artificial Sequence
  Non-cyclic GFR-binding peptide
  MOD_RES (34), (34): Xaa is C or S
  MOD_RES (14), (15), (16), (17), (18): Xaa is A or G
  MOD_RES (19), (20), (21), (22): Xaa is A or G or is absent
APTQLSPISVLFIXXXXXXXXXYKQYENMVVRAX

SEQ ID NO: 11133 - protein, 38 aa, Artificial Sequence
  Non-cyclic GFR-binding peptide
  MOD_RES (5), (6): Xaa is C or S
  MOD_RES (20), (21), (22), (23), (24): Xaa is A or G
  MOD_RES (25), (26), (27), (28): Xaa is A or G or is absent
IPKAXXVPTELEPLTMLYYXXXXXXXXXEQLSNEMVVE

SEQ ID NO: 11134 - protein, 31 aa, Artificial Sequence
  Non-cyclic GFR-binding peptide
APTKLEPLPVVYYDDSSNVIEQLSNNMVVRS

SEQ ID NO: 11135 - protein, 40 aa, Artificial Sequence
  Non-cyclic GFR-binding peptide
  MOD_RES (4), (5), (39): Xaa is C or S
  MOD_RES (19), (20), (21), (22), (23): Xaa is A or G
  MOD_RES (24), (25), (26), (27): Xaa is A or G or is absent
PKAXXVPTELSPISMLFIXXXXXXXXXYKQYEDMVVEGXG

SEQ ID NO: 11136 - protein, 32 aa, Artificial Sequence
  Non-cyclic GFR-binding peptide
  MOD_RES (32), (32): Xaa is C or S
APTQLEPLTVLYYDDSSNVIEQLSNNMVVRAX

SEQ ID NO: 11137 - protein, 41 aa, Artificial Sequence
  Non-cyclic GFR-binding peptide
  MOD_RES (3), (4), (38), (40): Xaa is C or S
  MOD_RES (18), (19), (20), (21), (22): Xaa is A or G
  MOD_RES (23), (24), (25), (26): Xaa is A or G or is absent
KPXXAPTQLEPLPVVYYXXXXXXXXXEQLSNNMVVRAXGXH

SEQ ID NO: 11138 - protein, 35 aa, Artificial Sequence
  Non-cyclic GFR-binding peptide
  MOD_RES (4), (5): Xaa is C or S
PKAXXVPTELEPLTMLYYDENEKVVEQLSNDMVVE

SEQ ID NO: 11139 - protein, 42 aa, Artificial Sequence
  Non-cyclic GFR-binding peptide
  MOD_RES (5), (6), (39), (41): Xaa is C or S
  MOD_RES (20), (21), (22), (23), (24): Xaa is A or G
  MOD_RES (25), (26), (27), (28): Xaa is A or G or is absent
SASPXXVSQDLEPLPIVYYXXXXXXXXXEQLSNMIVKSXKXS

SEQ ID NO: 11140 - protein, 36 aa, Artificial Sequence
  Non-cyclic GFR-binding peptide
  MOD_RES (1), (34), (36): Xaa is C or S
  MOD_RES (15), (16), (17), (18), (19): Xaa is A or G
  MOD_RES (20), (21), (22), (23): Xaa is A or G or is absent
XVPQALSPISILFIXXXXXXXXXYKQYEMIVRSXKX

SEQ ID NO: 11141 - protein, 37 aa, Artificial Sequence
  Non-cyclic GFR-binding peptide
  MOD_RES (1), (35), (37): Xaa is C or S
  MOD_RES (15), (16), (17), (18), (19): Xaa is A or G
  MOD_RES (20), (21), (22), (23): Xaa is A or G or is absent
XVPTRLEPLPIVYYXXXXXXXXXEQLSNDMVVESXGX

SEQ ID NO: 11142 - protein, 36 aa, Artificial Sequence
  Non-cyclic GFR-binding peptide
  MOD_RES (3), (4), (36): Xaa is C or S
PTXXVPTRLEPLTILYYDSANNVVEQLSNDMVVESX

SEQ ID NO: 11143 - protein, 37 aa, Artificial Sequence
  Non-cyclic GFR-binding peptide
  MOD_RES (1), (2), (36): Xaa is C or S
  MOD_RES (16), (17), (18), (19), (20): Xaa is A or G
  MOD_RES (21), (22), (23), (24): Xaa is A or G or is absent
XXAPTKLEPLPVVYYXXXXXXXXXEQLSNNMVVRSXG

SEQ ID NO: 11144 - protein, 39 aa, Artificial Sequence
  Non-cyclic GFR-binding peptide
  MOD_RES (2), (36), (38): Xaa is C or S
  MOD_RES (16), (17), (18), (19), (20): Xaa is A or G
  MOD_RES (21), (22), (23), (24): Xaa is A or G or is absent
TXAPTKLEPLTVLYYXXXXXXXXXEQLSNNMVVRSXGXH

SEQ ID NO: 11145 - protein, 37 aa, Artificial Sequence
  Non-cyclic GFR-binding peptide
  MOD_RES (34), (36): Xaa is C or S
  MOD_RES (14), (15), (16), (17), (18): Xaa is A or G
  MOD_RES (19), (20), (21), (22): Xaa is A or G or is absent
APTKLEPLTVLYYXXXXXXXXXEQLSNNMVVRSXGXH

SEQ ID NO: 11146 - protein, 41 aa, Artificial Sequence
  Non-cyclic GFR-binding peptide
  MOD_RES (5), (6), (38), (40): Xaa is C or S
IPKAXXVPTELSPISMLFIDENEKVVYKQYEDMVVEGXGXR

SEQ ID NO: 11147 - protein, 40 aa, Artificial Sequence
  Non-cyclic GFR-binding peptide
  MOD_RES (5), (6), (40): Xaa is C or S
  MOD_RES (20), (21), (22), (23), (24): Xaa is A or G
  MOD_RES (25), (26), (27), (28): Xaa is A or G or is absent
IPKAXXVPTELSPISMLFIXXXXXXXXXYKQYEEMVVEGX

SEQ ID NO: 11148 - protein, 32 aa, Artificial Sequence
  Non-cyclic GFR-binding peptide
  MOD_RES (1), (2): Xaa is C or S
XXAPTKLSPISVLFIDDSSNVIYKQYENMVVR

SEQ ID NO: 11149 - protein, 40 aa, Artificial Sequence
  Non-cyclic GFR-binding peptide
  MOD_RES (5), (6), (37), (39): Xaa is C or S
SAAPXXVPQALSPISILFIVGRKPKVYKQYEMIVRSXKXS

SEQ ID NO: 11150 - protein, 42 aa, Artificial Sequence
  Non-cyclic GFR-binding peptide
  MOD_RES (5), (39), (41): Xaa is C or S
  MOD_RES (19), (20), (21), (22), (23): Xaa is A or G
  MOD_RES (24), (25), (26), (27): Xaa is A or G or is absent
TKPTXAPTKLSPISVLFIXXXXXXXXXYKQYENMVVRSXGXH

SEQ ID NO: 11151 - protein, 36 aa, Artificial Sequence
  Non-cyclic GFR-binding peptide
  MOD_RES (2), (3), (36): Xaa is C or S
  MOD_RES (17), (18), (19), (20), (21): Xaa is A or G
  MOD_RES (22), (23), (24), (25): Xaa is A or G or is absent
PXXVPQALSPISILFIXXXXXXXXXYKQYEMIVRSX

SEQ ID NO: 11152 - protein, 32 aa, Artificial Sequence
  Non-cyclic GFR-binding peptide
  MOD_RES (1), (1): Xaa is C or S
XVPTELEPLTMLYYDEYDKVVEQLSNEMVVEG

SEQ ID NO: 11153 - protein, 39 aa, Artificial Sequence
  Non-cyclic GFR-binding peptide
  MOD_RES (4), (5), (37), (39): Xaa is C or S
PKPXXAPTKLEPLTVLYYDDSSNVIEQLSNNMVVRSXGX

SEQ ID NO: 11154 - protein, 38 aa, Artificial Sequence
  Non-cyclic GFR-binding peptide
  MOD_RES (4), (38): Xaa is C or S
  MOD_RES (18), (19), (20), (21), (22): Xaa is A or G
  MOD_RES (23), (24), (25), (26): Xaa is A or G or is absent
KPTXAPTKLEPLTVLYYXXXXXXXXXEQLSNNMVVRSX

SEQ ID NO: 11155 - protein, 43 aa, Artificial Sequence
  Non-cyclic GFR-binding peptide
  MOD_RES (6), (7), (40), (42): Xaa is C or S
  MOD_RES (21), (22), (23), (24), (25): Xaa is A or G
  MOD_RES (26), (27), (28), (29): Xaa is A or G or is absent
ASAAPXXVPQALSPISILFIXXXXXXXXXYKQYEMIVRSXKXS

SEQ ID NO: 11156 - protein, 31 aa, Artificial Sequence
  Non-cyclic GFR-binding peptide
  MOD_RES (1), (1): Xaa is C or S
XAPTQLSPISVLFIDDSSNVIYKQYENMVVR

SEQ ID NO: 11157 - protein, 41 aa, Artificial Sequence
  Non-cyclic GFR-binding peptide
  MOD_RES (4), (5), (39), (41): Xaa is C or S
  MOD_RES (19), (20), (21), (22), (23): Xaa is A or G
  MOD_RES (24), (25), (26), (27): Xaa is A or G or is absent
PPTXXVPTRLEPLPIVYYXXXXXXXXXEQLSNDMVVESXGX

SEQ ID NO: 11158 - protein, 32 aa, Artificial Sequence
  Non-cyclic GFR-binding peptide
  MOD_RES (1), (2): Xaa is C or S
XXVPQALSPISILFIVGRKPKVYKQYEMIVRS

SEQ ID NO: 11159 - protein, 38 aa, Artificial Sequence
  Non-cyclic GFR-binding peptide
  MOD_RES (1), (2), (35), (37): Xaa is C or S
  MOD_RES (16), (17), (18), (19), (20): Xaa is A or G
  MOD_RES (21), (22), (23), (24): Xaa is A or G or is absent
XXVPQDLEPLPIVYYXXXXXXXXXEQLSNMVVKSXKXS

SEQ ID NO: 11160 - protein, 39 aa, Artificial Sequence
  Non-cyclic GFR-binding peptide
  MOD_RES (7), (7): Xaa is C or S
  MOD_RES (21), (22), (23), (24), (25): Xaa is A or G
  MOD_RES (26), (27), (28), (29): Xaa is A or G or is absent
HVTKPTXAPTKLEPLPVVYYXXXXXXXXXEQLSNNMVVR

SEQ ID NO: 11161 - protein, 35 aa, Artificial Sequence
  Non-cyclic GFR-binding peptide
  MOD_RES (2), (3): Xaa is C or S
  MOD_RES (17), (18), (19), (20), (21): Xaa is A or G
  MOD_RES (22), (23), (24), (25): Xaa is A or G or is absent
PXXAPTQLEPLPVVYYXXXXXXXXXEQLSNNMVVR

SEQ ID NO: 11162 - protein, 37 aa, Artificial Sequence
  Non-cyclic GFR-binding peptide
  MOD_RES (3), (4): Xaa is C or S
  MOD_RES (18), (19), (20), (21), (22): Xaa is A or G
  MOD_RES (23), (24), (25), (26): Xaa is A or G or is absent
KPXXAPTQLEPLTVLYYXXXXXXXXXEQLSNNMVVRA

SEQ ID NO: 11163 - protein, 34 aa, Artificial Sequence
  Non-cyclic GFR-binding peptide
  MOD_RES (4), (4): Xaa is C or S
KPTXAPTKLEPLTVLYYDDSSNVIEQLSNNMVVR

SEQ ID NO: 11164 - protein, 44 aa, Artificial Sequence
  Non-cyclic GFR-binding peptide
  MOD_RES (6), (7), (41), (43): Xaa is C or S
  MOD_RES (21), (22), (23), (24), (25): Xaa is A or G
  MOD_RES (26), (27), (28), (29): Xaa is A or G or is absent
TVPKPXXAPTQLSPISVLFIXXXXXXXXXYKQYENMVVRAXGXH

SEQ ID NO: 11165 - protein, 39 aa, Artificial Sequence
  Non-cyclic GFR-binding peptide
  MOD_RES (5), (6): Xaa is C or S
  MOD_RES (20), (21), (22), (23), (24): Xaa is A or G
  MOD_RES (25), (26), (27), (28): Xaa is A or G or is absent
TPPTXXVPTRLEPLTILYYXXXXXXXXXEQLSNDMVVES

SEQ ID NO: 11166 - protein, 42 aa, Artificial Sequence
  Non-cyclic GFR-binding peptide
  MOD_RES (6), (40), (42): Xaa is C or S
  MOD_RES (20), (21), (22), (23), (24): Xaa is A or G
  MOD_RES (25), (26), (27), (28): Xaa is A or G or is absent
VTKPTXAPTKLEPLPVVYYXXXXXXXXXEQLSNNMVVRSXGX

SEQ ID NO: 11167 - protein, 39 aa, Artificial Sequence
  Non-cyclic GFR-binding peptide
  MOD_RES (2), (3), (36), (38): Xaa is C or S
  MOD_RES (17), (18), (19), (20), (21): Xaa is A or G
  MOD_RES (22), (23), (24), (25): Xaa is A or G or is absent
PXXVSQDLEPLPIVYYXXXXXXXXXEQLSNMIVKSXKXS

SEQ ID NO: 11168 - protein, 41 aa, Artificial Sequence
  Non-cyclic GFR-binding peptide
  MOD_RES (4), (5), (39), (41): Xaa is C or S
  MOD_RES (19), (20), (21), (22), (23): Xaa is A or G
  MOD_RES (24), (25), (26), (27): Xaa is A or G or is absent
PKPXXAPTQLSPISVLFIXXXXXXXXXYKQYENMVVRAXGX

SEQ ID NO: 11169 - protein, 37 aa, Artificial Sequence
  Non-cyclic GFR-binding peptide
  MOD_RES (1), (34), (36): Xaa is C or S
  MOD_RES (15), (16), (17), (18), (19): Xaa is A or G
  MOD_RES (20), (21), (22), (23): Xaa is A or G or is absent
XVSQDLEPLPIVYYXXXXXXXXXEQLSNMIVKSXKXS

SEQ ID NO: 11170 - protein, 38 aa, Artificial Sequence
  Non-cyclic GFR-binding peptide
  MOD_RES (5), (6), (38): Xaa is C or S
TPPTXXVPTRLSAISILYLDSANNVVLKNYQDMVVESX

SEQ ID NO: 11171 - protein, 39 aa, Artificial Sequence
  Non-cyclic GFR-binding peptide
  MOD_RES (4), (5), (39): Xaa is C or S
  MOD_RES (19), (20), (21), (22), (23): Xaa is A or G
  MOD_RES (24), (25), (26), (27): Xaa is A or G or is absent
PKAXXVPTELEPLTMLYYXXXXXXXXXEQLSNDMVVEGX

SEQ ID NO: 11172 - protein, 36 aa, Artificial Sequence
  Non-cyclic GFR-binding peptide
  MOD_RES (3), (4): Xaa is C or S
  MOD_RES (18), (19), (20), (21), (22): Xaa is A or G
  MOD_RES (23), (24), (25), (26): Xaa is A or G or is absent
KPXXAPTQLEPLTVLYYXXXXXXXXXEQLSNNMVVR

SEQ ID NO: 11173 - protein, 38 aa, Artificial Sequence
  Non-cyclic GFR-binding peptide
  MOD_RES (1), (2), (36), (38): Xaa is C or S
  MOD_RES (16), (17), (18), (19), (20): Xaa is A or G
  MOD_RES (21), (22), (23), (24): Xaa is A or G or is absent
XXVPTELEPLPMVYYXXXXXXXXXEQLSNDMVVEGXGX

SEQ ID NO: 11174 - protein, 39 aa, Artificial Sequence
  Non-cyclic GFR-binding peptide
  MOD_RES (6), (38): Xaa is C or S
VTKPTXAPTKLSPISVLFIDDSSNVIYKQYENMVVRSXG

SEQ ID NO: 11175 - protein, 37 aa, Artificial Sequence
  Non-cyclic GFR-binding peptide
  MOD_RES (4), (5): Xaa is C or S
  MOD_RES (19), (20), (21), (22), (23): Xaa is A or G
  MOD_RES (24), (25), (26), (27): Xaa is A or G or is absent
ASPXXVPQDLEPLPIVYYXXXXXXXXXEQLSNMVVKS

SEQ ID NO: 11176 - protein, 41 aa, Artificial Sequence
  Non-cyclic GFR-binding peptide
  MOD_RES (6), (7), (40): Xaa is C or S
  MOD_RES (21), (22), (23), (24), (25): Xaa is A or G
  MOD_RES (26), (27), (28), (29): Xaa is A or G or is absent
ASASPXXVSQDLEPLPIVYYXXXXXXXXXEQLSNMIVKSXK

SEQ ID NO: 11177 - protein, 35 aa, Artificial Sequence
  Non-cyclic GFR-binding peptide
  MOD_RES (1), (2), (33), (35): Xaa is C or S
XXVSQDLEPLPIVYYIGKTPKIEQLSNMIVKSXKX

SEQ ID NO: 11178 - protein, 38 aa, Artificial Sequence
  Non-cyclic GFR-binding peptide
  MOD_RES (2), (3), (35), (37): Xaa is C or S
AXXVPTELEPLPMVYYDEYDKVVEQLSNEMVVEGXGXR

SEQ ID NO: 11179 - protein, 35 aa, Artificial Sequence
  Non-cyclic GFR-binding peptide
  MOD_RES (33), (35): Xaa is C or S
  MOD_RES (14), (15), (16), (17), (18): Xaa is A or G
  MOD_RES (19), (20), (21), (22): Xaa is A or G or is absent
VPQALSPISILFIXXXXXXXXXYKQYEMIVRSXKX

SEQ ID NO: 11180 - protein, 34 aa, Artificial Sequence
  Non-cyclic GFR-binding peptide
  MOD_RES (2), (3): Xaa is C or S
PXXAPTQLEPLPVVYYDDSSNVIEQLSNNMVVRA

SEQ ID NO: 11181 - protein, 40 aa, Artificial Sequence
  Non-cyclic GFR-binding peptide
  MOD_RES (6), (7), (39): Xaa is C or S
STPPTXXVPTRLNAISILYFDSANNVVLKKYRDMVVESXG

SEQ ID NO: 11182 - protein, 38 aa, Artificial Sequence
  Non-cyclic GFR-binding peptide
  MOD_RES (1), (2), (35), (37): Xaa is C or S
  MOD_RES (16), (17), (18), (19), (20): Xaa is A or G
  MOD_RES (21), (22), (23), (24): Xaa is A or G or is absent
XXVSQDLSPISILFIXXXXXXXXXYKQYEMIVKSXKXS

SEQ ID NO: 11183 - protein, 34 aa, Artificial Sequence
  Non-cyclic GFR-binding peptide
  MOD_RES (32), (34): Xaa is C or S
APTQLSPISVLFIDDSSNVIYKQYENMVVRAXGX

SEQ ID NO: 11184 - protein, 41 aa, Artificial Sequence
  Non-cyclic GFR-binding peptide
  MOD_RES (7), (41): Xaa is C or S
  MOD_RES (21), (22), (23), (24), (25): Xaa is A or G
  MOD_RES (26), (27), (28), (29): Xaa is A or G or is absent
HVTKPTXAPTKLEPLTVLYYXXXXXXXXXEQLSNNMVVRSX

SEQ ID NO: 11185 - protein, 30 aa, Artificial Sequence
  Non-cyclic GFR-binding peptide
VPTELEPLTMLYYDENEKVVEQLSNDMVVE

SEQ ID NO: 11186 - protein, 40 aa, Artificial Sequence
  Non-cyclic GFR-binding peptide
  MOD_RES (6), (7): Xaa is C or S
  MOD_RES (21), (22), (23), (24), (25): Xaa is A or G
  MOD_RES (26), (27), (28), (29): Xaa is A or G or is absent
SIPKAXXVPTELEPLPMVYYXXXXXXXXXEQLSNEMVVEG

SEQ ID NO: 11187 - protein, 37 aa, Artificial Sequence
  Non-cyclic GFR-binding peptide
  MOD_RES (3), (4), (35), (37): Xaa is C or S
APXXVPQALSPISILFIVGRKPKVYKQYEMIVRSXKX

SEQ ID NO: 11188 - protein, 32 aa, Artificial Sequence
  Non-cyclic GFR-binding peptide
  MOD_RES (14), (15), (16), (17), (18): Xaa is A or G
  MOD_RES (19), (20), (21), (22): Xaa is A or G or is absent
VPTELEPLTMLYYXXXXXXXXXEQLSNEMVVE

SEQ ID NO: 11189 - protein, 38 aa, Artificial Sequence
  Non-cyclic GFR-binding peptide
  MOD_RES (3), (4), (38): Xaa is C or S
  MOD_RES (18), (19), (20), (21), (22): Xaa is A or G
  MOD_RES (23), (24), (25), (26): Xaa is A or G or is absent
KAXXVPTELSPISMLFIXXXXXXXXXYKQYEEMVVEGX

SEQ ID NO: 11190 - protein, 38 aa, Artificial Sequence
  Non-cyclic GFR-binding peptide
  MOD_RES (2), (3), (35), (37): Xaa is C or S
PXXAPTQLEPLPVVYYDDSSNVIEQLSNNMVVRAXGXH

SEQ ID NO: 11191 - protein, 37 aa, Artificial Sequence
  Non-cyclic GFR-binding peptide
  MOD_RES (1), (35), (37): Xaa is C or S
  MOD_RES (15), (16), (17), (18), (19): Xaa is A or G
  MOD_RES (20), (21), (22), (23): Xaa is A or G or is absent
XVPTELEPLTMLYYXXXXXXXXXEQLSNDMVVEGXGX

SEQ ID NO: 11192 - protein, 38 aa, Artificial Sequence
  Non-cyclic GFR-binding peptide
  MOD_RES (5), (6): Xaa is C or S
  MOD_RES (20), (21), (22), (23), (24): Xaa is A or G
  MOD_RES (25), (26), (27), (28): Xaa is A or G or is absent
IPKAXXVPTELSPISMLFIXXXXXXXXXYKQYEDMVVE

SEQ ID NO: 11193 - protein, 31 aa, Artificial Sequence
  Non-cyclic GFR-binding peptide
  MOD_RES (1), (1): Xaa is C or S
XAPTKLEPLPVVYYDDSSNVIEQLSNNMVVR

SEQ ID NO: 11194 - protein, 36 aa, Artificial Sequence
  Non-cyclic GFR-binding peptide
  MOD_RES (1), (35): Xaa is C or S
  MOD_RES (15), (16), (17), (18), (19): Xaa is A or G
  MOD_RES (20), (21), (22), (23): Xaa is A or G or is absent
XAPTQLSPISVLFIXXXXXXXXXYKQYENMVVRAXG

SEQ ID NO: 11195 - protein, 39 aa, Artificial Sequence
  Non-cyclic GFR-binding peptide
  MOD_RES (6), (7): Xaa is C or S
  MOD_RES (21), (22), (23), (24), (25): Xaa is A or G
  MOD_RES (26), (27), (28), (29): Xaa is A or G or is absent
YVPKPXXAPTKLSPISVLFIXXXXXXXXXYKQYENMVVR

SEQ ID NO: 11196 - protein, 36 aa, Artificial Sequence
  Non-cyclic GFR-binding peptide
  MOD_RES (1), (35): Xaa is C or S
  MOD_RES (15), (16), (17), (18), (19): Xaa is A or G
  MOD_RES (20), (21), (22), (23): Xaa is A or G or is absent
XAPTQLEPLTVLYYXXXXXXXXXEQLSNNMVVRAXG

SEQ ID NO: 11197 - protein, 41 aa, Artificial Sequence
  Non-cyclic GFR-binding peptide
  MOD_RES (6), (7), (38), (40): Xaa is C or S
ASAAPXXVPQALSPISILFIVGRKPKVYKQYEMIVRSXKXS

SEQ ID NO: 11198 - protein, 37 aa, Artificial Sequence
  Non-cyclic GFR-binding peptide
  MOD_RES (6), (7): Xaa is C or S
ASASPXXVPQDLSPISILFIVGRTPKVYKQYEMVVKS

SEQ ID NO: 11199 - protein, 36 aa, Artificial Sequence
  Non-cyclic GFR-binding peptide
  MOD_RES (4), (5): Xaa is C or S
PKPXXAPTQLEPLTVLYYDDSSNVIEQLSNNMVVRA

SEQ ID NO: 11200 - protein, 37 aa, Artificial Sequence
  Non-cyclic GFR-binding peptide
  MOD_RES (1), (35), (37): Xaa is C or S
  MOD_RES (15), (16), (17), (18), (19): Xaa is A or G
  MOD_RES (20), (21), (22), (23): Xaa is A or G or is absent
XVPTELEPLTMLYYXXXXXXXXXEQLSNEMVVEGXGX

SEQ ID NO: 11201 - protein, 38 aa, Artificial Sequence
  Non-cyclic GFR-binding peptide
  MOD_RES (5), (6): Xaa is C or S
  MOD_RES (20), (21), (22), (23), (24): Xaa is A or G
  MOD_RES (25), (26), (27), (28): Xaa is A or G or is absent
TPPTXXVPTRLNAISILYFXXXXXXXXXLKKYRDMVVE

SEQ ID NO: 11202 - protein, 31 aa, Artificial Sequence
  Non-cyclic GFR-binding peptide
  MOD_RES (31), (31): Xaa is C or S
VPQDLEPLPIVYYVGRTPKVEQLSNMVVKSX

SEQ ID NO: 11203 - protein, 32 aa, Artificial Sequence
  Non-cyclic GFR-binding peptide
  MOD_RES (14), (15), (16), (17), (18): Xaa is A or G
  MOD_RES (19), (20), (21), (22): Xaa is A or G or is absent
VPTELEPLPMVYYXXXXXXXXXEQLSNEMVVE

SEQ ID NO: 11204 - protein, 34 aa, Artificial Sequence
  Non-cyclic GFR-binding peptide
  MOD_RES (32), (34): Xaa is C or S
VPTELEPLTMLYYDENEKVVEQLSNDMVVEGXGX

SEQ ID NO: 11205 - protein, 41 aa, Artificial Sequence
  Non-cyclic GFR-binding peptide
  MOD_RES (5), (6), (40): Xaa is C or S
  MOD_RES (20), (21), (22), (23), (24): Xaa is A or G
  MOD_RES (25), (26), (27), (28): Xaa is A or G or is absent
TPPTXXVPTRLEPLTILYYXXXXXXXXXEQLSNDMVVESXG

SEQ ID NO: 11206 - protein, 40 aa, Artificial Sequence
  Non-cyclic GFR-binding peptide
  MOD_RES (6), (7): Xaa is C or S
  MOD_RES (21), (22), (23), (24), (25): Xaa is A or G
  MOD_RES (26), (27), (28), (29): Xaa is A or G or is absent
TVPKPXXAPTQLEPLTVLYYXXXXXXXXXEQLSNNMVVRA

SEQ ID NO: 11207 - protein, 34 aa, Artificial Sequence
  Non-cyclic GFR-binding peptide
  MOD_RES (33), (33): Xaa is C or S
  MOD_RES (14), (15), (16), (17), (18): Xaa is A or G
  MOD_RES (19), (20), (21), (22): Xaa is A or G or is absent
VPQALSPISILFIXXXXXXXXXYKQYEMIVRSXK

SEQ ID NO: 11208 - protein, 34 aa, Artificial Sequence
  Non-cyclic GFR-binding peptide
  MOD_RES (1), (1): Xaa is C or S
  MOD_RES (15), (16), (17), (18), (19): Xaa is A or G
  MOD_RES (20), (21), (22), (23): Xaa is A or G or is absent
XAPTQLEPLPVVYYXXXXXXXXXEQLSNNMVVRA

SEQ ID NO: 11209 - protein, 39 aa, Artificial Sequence
  Non-cyclic GFR-binding peptide
  MOD_RES (2), (3), (37), (39): Xaa is C or S
  MOD_RES (17), (18), (19), (20), (21): Xaa is A or G
  MOD_RES (22), (23), (24), (25): Xaa is A or G or is absent
AXXVPTELSPISMLFIXXXXXXXXXYKQYEEMVVEGXGX

SEQ ID NO: 11210 - protein, 34 aa, Artificial Sequence
  Non-cyclic GFR-binding peptide
  MOD_RES (34), (34): Xaa is C or S
  MOD_RES (14), (15), (16), (17), (18): Xaa is A or G
  MOD_RES (19), (20), (21), (22): Xaa is A or G or is absent
VPTRLEPLPIVYYXXXXXXXXXEQLSNDMVVESX

SEQ ID NO: 11211 - protein, 34 aa, Artificial Sequence
  Non-cyclic GFR-binding peptide
  MOD_RES (2), (3): Xaa is C or S
TXXVPTRLNAISILYFDSANNVVLKKYRDMVVES

SEQ ID NO: 11212 - protein, 39 aa, Artificial Sequence
  Non-cyclic GFR-binding peptide
  MOD_RES (5), (6): Xaa is C or S
  MOD_RES (20), (21), (22), (23), (24): Xaa is A or G
  MOD_RES (25), (26), (27), (28): Xaa is A or G or is absent
IPKAXXVPTELEPLTMLYYXXXXXXXXXEQLSNDMVVEG

SEQ ID NO: 11213 - protein, 41 aa, Artificial Sequence
  Non-cyclic GFR-binding peptide
  MOD_RES (5), (6), (38), (40): Xaa is C or S
TPPTXXVPTRLEPLTILYYDSANNVVEQLSNDMVVESXGXR

SEQ ID NO: 11214 - protein, 33 aa, Artificial Sequence
  Non-cyclic GFR-binding peptide
  MOD_RES (1), (33): Xaa is C or S
XVPTELEPLTMLYYDEYDKVVEQLSNEMVVEGX

SEQ ID NO: 11215 - protein, 35 aa, Artificial Sequence
  Non-cyclic GFR-binding peptide
  MOD_RES (2), (3), (35): Xaa is C or S
AXXVPTELSPISMLFIDEYDKVVYKQYEEMVVEGX

SEQ ID NO: 11216 - protein, 37 aa, Artificial Sequence
  Non-cyclic GFR-binding peptide
  MOD_RES (5), (6): Xaa is C or S
IPKAXXVPTELEPLPMVYYDENEKVVEQLSNDMVVEG

SEQ ID NO: 11217 - protein, 38 aa, Artificial Sequence
  Non-cyclic GFR-binding peptide
  MOD_RES (5), (6), (38): Xaa is C or S
IPKAXXVPTELSPISMLFIDEYDKVVYKQYEEMVVEGX

SEQ ID NO: 11218 - protein, 37 aa, Artificial Sequence
  Non-cyclic GFR-binding peptide
  MOD_RES (3), (4), (35), (37): Xaa is C or S
APXXVPQALEPLTILYYVGRKPKVEQLSNMIVRSXKX

SEQ ID NO: 11219 - protein, 35 aa, Artificial Sequence
  Non-cyclic GFR-binding peptide
  MOD_RES (3), (4), (35): Xaa is C or S
SPXXVSQDLEPLPIVYYIGKTPKIEQLSNMIVKSX

SEQ ID NO: 11220 - protein, 40 aa, Artificial Sequence
  Non-cyclic GFR-binding peptide
  MOD_RES (2), (3), (37), (39): Xaa is C or S
  MOD_RES (17), (18), (19), (20), (21): Xaa is A or G
  MOD_RES (22), (23), (24), (25): Xaa is A or G or is absent
AXXVPTELEPLPMVYYXXXXXXXXXEQLSNEMVVEGXGXR

SEQ ID NO: 11221 - protein, 34 aa, Artificial Sequence
  Non-cyclic GFR-binding peptide
  MOD_RES (3), (4): Xaa is C or S
KAXXVPTELSPISMLFIDENEKVVYKQYEDMVVE

SEQ ID NO: 11222 - protein, 40 aa, Artificial Sequence
  Non-cyclic GFR-binding peptide
  MOD_RES (5), (6), (40): Xaa is C or S
  MOD_RES (20), (21), (22), (23), (24): Xaa is A or G
  MOD_RES (25), (26), (27), (28): Xaa is A or G or is absent
VPKPXXAPTKLSPISVLFIXXXXXXXXXYKQYENMVVRSX

SEQ ID NO: 11223 - protein, 35 aa, Artificial Sequence
  Non-cyclic GFR-binding peptide
  MOD_RES (2), (3): Xaa is C or S
  MOD_RES (17), (18), (19), (20), (21): Xaa is A or G
  MOD_RES (22), (23), (24), (25): Xaa is A or G or is absent
PXXAPTKLEPLTVLYYXXXXXXXXXEQLSNNMVVR

SEQ ID NO: 11224 - protein, 34 aa, Artificial Sequence
  Non-cyclic GFR-binding peptide
  MOD_RES (1), (2), (34): Xaa is C or S
XXVPTELEPLTMLYYDENEKVVEQLSNDMVVEGX

SEQ ID NO: 11225 - protein, 34 aa, Artificial Sequence
  Non-cyclic GFR-binding peptide
  MOD_RES (32), (34): Xaa is C or S
VPTELSPISMLFIDEYDKVVYKQYEEMVVEGXGX

SEQ ID NO: 11226 - protein, 34 aa, Artificial Sequence
  Non-cyclic GFR-binding peptide
  MOD_RES (3), (3): Xaa is C or S
PTXAPTKLEPLTVLYYDDSSNVIEQLSNNMVVRS

SEQ ID NO: 11227 - protein, 37 aa, Artificial Sequence
  Non-cyclic GFR-binding peptide
  MOD_RES (3), (4), (37): Xaa is C or S
  MOD_RES (18), (19), (20), (21), (22): Xaa is A or G
  MOD_RES (23), (24), (25), (26): Xaa is A or G or is absent
SPXXVPQDLEPLPIVYYXXXXXXXXXEQLSNMVVKSX

SEQ ID NO: 11228 - protein, 34 aa, Artificial Sequence
  Non-cyclic GFR-binding peptide
  MOD_RES (1), (2), (33): Xaa is C or S
XXVPQALSPISILFIVGRKPKVYKQYEMIVRSXK

SEQ ID NO: 11229 - protein, 40 aa, Artificial Sequence
  Non-cyclic GFR-binding peptide
  MOD_RES (7), (7): Xaa is C or S
  MOD_RES (21), (22), (23), (24), (25): Xaa is A or G
  MOD_RES (26), (27), (28), (29): Xaa is A or G or is absent
HVTKPTXAPTKLSPISVLFIXXXXXXXXXYKQYENMVVRS

SEQ ID NO: 11230 - protein, 39 aa, Artificial Sequence
  Non-cyclic GFR-binding peptide
  MOD_RES (5), (6): Xaa is C or S
  MOD_RES (20), (21), (22), (23), (24): Xaa is A or G
  MOD_RES (25), (26), (27), (28): Xaa is A or G or is absent
VPKPXXAPTQLEPLTVLYYXXXXXXXXXEQLSNNMVVRA

SEQ ID NO: 11231 - protein, 35 aa, Artificial Sequence
  Non-cyclic GFR-binding peptide
  MOD_RES (1), (35): Xaa is C or S
  MOD_RES (15), (16), (17), (18), (19): Xaa is A or G
  MOD_RES (20), (21), (22), (23): Xaa is A or G or is absent
XVPTRLEPLTILYYXXXXXXXXXEQLSNDMVVESX

SEQ ID NO: 11232 - protein, 36 aa, Artificial Sequence
  Non-cyclic GFR-binding peptide
  MOD_RES (6), (6): Xaa is C or S
VTKPTXAPTKLSPISVLFIDDSSNVIYKQYENMVVR

SEQ ID NO: 11233 - protein, 39 aa, Artificial Sequence
  Non-cyclic GFR-binding peptide
  MOD_RES (6), (7): Xaa is C or S
  MOD_RES (21), (22), (23), (24), (25): Xaa is A or G
  MOD_RES (26), (27), (28), (29): Xaa is A or G or is absent
STPPTXXVPTRLSAISILYLXXXXXXXXXLKNYQDMVVE

SEQ ID NO: 11234 - protein, 41 aa, Artificial Sequence
  Non-cyclic GFR-binding peptide
  MOD_RES (5), (6), (38), (40): Xaa is C or S
TPPTXXVPTRLNAISILYFDSANNVVLKKYRDMVVESXGXR

SEQ ID NO: 11235 - protein, 39 aa, Artificial Sequence
  Non-cyclic GFR-binding peptide
  MOD_RES (1), (2), (36), (38): Xaa is C or S
  MOD_RES (16), (17), (18), (19), (20): Xaa is A or G
  MOD_RES (21), (22), (23), (24): Xaa is A or G or is absent
XXVPTELEPLPMVYYXXXXXXXXXEQLSNDMVVEGXGXR

SEQ ID NO: 11236 - protein, 37 aa, Artificial Sequence
  Non-cyclic GFR-binding peptide
  MOD_RES (2), (3), (36): Xaa is C or S
  MOD_RES (17), (18), (19), (20), (21): Xaa is A or G
  MOD_RES (22), (23), (24), (25): Xaa is A or G or is absent
PXXVSQDLSPISILFIXXXXXXXXXYKQYEMIVKSXK

SEQ ID NO: 11237 - protein, 34 aa, Artificial Sequence
  Non-cyclic GFR-binding peptide
  MOD_RES (1), (2), (34): Xaa is C or S
XXVPTELEPLTMLYYDEYDKVVEQLSNEMVVEGX

SEQ ID NO: 11238 - protein, 33 aa, Artificial Sequence
  Non-cyclic GFR-binding peptide
  MOD_RES (2), (3): Xaa is C or S
TXXVPTRLSAISILYLDSANNVVLKNYQDMVVE

SEQ ID NO: 11239 - protein, 30 aa, Artificial Sequence
  Non-cyclic GFR-binding peptide
VPTELEPLPMVYYDENEKVVEQLSNDMVVE

SEQ ID NO: 11240 - protein, 37 aa, Artificial Sequence
  Non-cyclic GFR-binding peptide
  MOD_RES (1), (2), (35), (37): Xaa is C or S
  MOD_RES (16), (17), (18), (19), (20): Xaa is A or G
  MOD_RES (21), (22), (23), (24): Xaa is A or G or is absent
XXVPQALSPISILFIXXXXXXXXXYKQYEMIVRSXKX

SEQ ID NO: 11241 - protein, 42 aa, Artificial Sequence
  Non-cyclic GFR-binding peptide
  MOD_RES (5), (6), (40), (42): Xaa is C or S
  MOD_RES (20), (21), (22), (23), (24): Xaa is A or G
  MOD_RES (25), (26), (27), (28): Xaa is A or G or is absent
TPPTXXVPTRLSAISILYLXXXXXXXXXLKNYQDMVVESXGX

SEQ ID NO: 11242 - protein, 36 aa, Artificial Sequence
  Non-cyclic GFR-binding peptide
  MOD_RES (3), (3): Xaa is C or S
  MOD_RES (17), (18), (19), (20), (21): Xaa is A or G
  MOD_RES (22), (23), (24), (25): Xaa is A or G or is absent
PTXAPTKLSPISVLFIXXXXXXXXXYKQYENMVVRS

SEQ ID NO: 11243 - protein, 39 aa, Artificial Sequence
  Non-cyclic GFR-binding peptide
  MOD_RES (5), (6), (38): Xaa is C or S
IPKAXXVPTELEPLTMLYYDENEKVVEQLSNDMVVEGXG

SEQ ID NO: 11244 - protein, 35 aa, Artificial Sequence
  Non-cyclic GFR-binding peptide
  MOD_RES (1), (2): Xaa is C or S
  MOD_RES (16), (17), (18), (19), (20): Xaa is A or G
  MOD_RES (21), (22), (23), (24): Xaa is A or G or is absent
XXAPTQLEPLPVVYYXXXXXXXXXEQLSNNMVVRA

SEQ ID NO: 11245 - protein, 35 aa, Artificial Sequence
  Non-cyclic GFR-binding peptide
  MOD_RES (4), (5): Xaa is C or S
PKPXXAPTKLEPLPVVYYDDSSNVIEQLSNNMVVR

SEQ ID NO: 11246 - protein, 35 aa, Artificial Sequence
  Non-cyclic GFR-binding peptide
  MOD_RES (2), (3), (35): Xaa is C or S
PXXAPTKLEPLPVVYYDDSSNVIEQLSNNMVVRSX

SEQ ID NO: 11247 - protein, 36 aa, Artificial Sequence
  Non-cyclic GFR-binding peptide
  MOD_RES (2), (3), (35): Xaa is C or S
AXXVPTELEPLPMVYYDEYDKVVEQLSNEMVVEGXG

SEQ ID NO: 11248 - protein, 36 aa, Artificial Sequence
  Non-cyclic GFR-binding peptide
  MOD_RES (2), (3), (35): Xaa is C or S
PXXAPTKLEPLPVVYYDDSSNVIEQLSNNMVVRSXG

SEQ ID NO: 11249 - protein, 34 aa, Artificial Sequence
  Non-cyclic GFR-binding peptide
  MOD_RES (32), (34): Xaa is C or S
VPTRLNAISILYFDSANNVVLKKYRDMVVESXGX

SEQ ID NO: 11250 - protein, 32 aa, Artificial Sequence
  Non-cyclic GFR-binding peptide
  MOD_RES (14), (15), (16), (17), (18): Xaa is A or G
  MOD_RES (19), (20), (21), (22): Xaa is A or G or is absent
VPTELSPISMLFIXXXXXXXXXYKQYEDMVVE

SEQ ID NO: 11251 - protein, 39 aa, Artificial Sequence
  Non-cyclic GFR-binding peptide
  MOD_RES (4), (5), (37), (39): Xaa is C or S
PKAXXVPTELEPLTMLYYDENEKVVEQLSNDMVVEGXGX

SEQ ID NO: 11252 - protein, 35 aa, Artificial Sequence
  Non-cyclic GFR-binding peptide
  MOD_RES (2), (3), (35): Xaa is C or S
TXXVPTRLNAISILYFDSANNVVLKKYRDMVVESX

SEQ ID NO: 11253 - protein, 35 aa, Artificial Sequence
  Non-cyclic GFR-binding peptide
  MOD_RES (2), (3), (35): Xaa is C or S
PXXAPTQLSPISVLFIDDSSNVIYKQYENMVVRAX

SEQ ID NO: 11254 - protein, 34 aa, Artificial Sequence
  Non-cyclic GFR-binding peptide
  MOD_RES (1), (33): Xaa is C or S
XVPTELSPISMLFIDEYDKVVYKQYEEMVVEGXG

SEQ ID NO: 11255 - protein, 32 aa, Artificial Sequence
  Non-cyclic GFR-binding peptide
  MOD_RES (32), (32): Xaa is C or S
VPTELEPLTMLYYDENEKVVEQLSNDMVVEGX

SEQ ID NO: 11256 - protein, 33 aa, Artificial Sequence
  Non-cyclic GFR-binding peptide
  MOD_RES (33), (33): Xaa is C or S
  MOD_RES (14), (15), (16), (17), (18): Xaa is A or G
  MOD_RES (19), (20), (21), (22): Xaa is A or G or is absent
VPQALSPISILFIXXXXXXXXXYKQYEMIVRSX

SEQ ID NO: 11257 - protein, 32 aa, Artificial Sequence
  Non-cyclic GFR-binding peptide
  MOD_RES (31), (31): Xaa is C or S
VPQALSPISILFIVGRKPKVYKQYEMIVRSXK

SEQ ID NO: 11258 - protein, 36 aa, Artificial Sequence
  Non-cyclic GFR-binding peptide
  MOD_RES (1), (33), (35): Xaa is C or S
XAPTQLSPISVLFIDDSSNVIYKQYENMVVRAXGXH

SEQ ID NO: 11259 - protein, 42 aa, Artificial Sequence
  Non-cyclic GFR-binding peptide
  MOD_RES (6), (7), (41): Xaa is C or S
  MOD_RES (21), (22), (23), (24), (25): Xaa is A or G
  MOD_RES (26), (27), (28), (29): Xaa is A or G or is absent
SIPKAXXVPTELEPLTMLYYXXXXXXXXXEQLSNEMVVEGXG

SEQ ID NO: 11260 - protein, 40 aa, Artificial Sequence
  Non-cyclic GFR-binding peptide
  MOD_RES (4), (38), (40): Xaa is C or S
  MOD_RES (18), (19), (20), (21), (22): Xaa is A or G
  MOD_RES (23), (24), (25), (26): Xaa is A or G or is absent
KPTXAPTKLEPLPVVYYXXXXXXXXXEQLSNNMVVRSXGX

SEQ ID NO: 11261 - protein, 43 aa, Artificial Sequence
  Non-cyclic GFR-binding peptide
  MOD_RES (6), (7), (40), (42): Xaa is C or S
  MOD_RES (21), (22), (23), (24), (25): Xaa is A or G
  MOD_RES (26), (27), (28), (29): Xaa is A or G or is absent
ASASPXXVSQDLEPLPIVYYXXXXXXXXXEQLSNMIVKSXKXS

SEQ ID NO: 11262 - protein, 32 aa, Artificial Sequence
  Non-cyclic GFR-binding peptide
  MOD_RES (1), (2): Xaa is C or S
XXVPTRLNAISILYFDSANNVVLKKYRDMVVE

SEQ ID NO: 11263 - protein, 36 aa, Artificial Sequence
  Non-cyclic GFR-binding peptide
  MOD_RES (33), (35): Xaa is C or S
  MOD_RES (14), (15), (16), (17), (18): Xaa is A or G
  MOD_RES (19), (20), (21), (22): Xaa is A or G or is absent
VPQDLEPLPIVYYXXXXXXXXXEQLSNMVVKSXKXS

SEQ ID NO: 11264 - protein, 31 aa, Artificial Sequence
  Non-cyclic GFR-binding peptide
  MOD_RES (1), (1): Xaa is C or S
XVPTELEPLPMVYYDEYDKVVEQLSNEMVVE

SEQ ID NO: 11265 - protein, 35 aa, Artificial Sequence
  Non-cyclic GFR-binding peptide
  MOD_RES (2), (3), (35): Xaa is C or S
AXXVPTELSPISMLFIDENEKVVYKQYEDMVVEGX

SEQ ID NO: 11266 - protein, 39 aa, Artificial Sequence
  Non-cyclic GFR-binding peptide
  MOD_RES (5), (37), (39): Xaa is C or S
TKPTXAPTKLSPISVLFIDDSSNVIYKQYENMVVRSXGX

SEQ ID NO: 11267 - protein, 41 aa, Artificial Sequence
  Non-cyclic GFR-binding peptide
  MOD_RES (6), (38), (40): Xaa is C or S
VTKPTXAPTKLEPLTVLYYDDSSNVIEQLSNNMVVRSXGXH

SEQ ID NO: 11268 - protein, 36 aa, Artificial Sequence
  Non-cyclic GFR-binding peptide
  MOD_RES (2), (3), (35): Xaa is C or S
PXXAPTKLSPISVLFIDDSSNVIYKQYENMVVRSXG

SEQ ID NO: 11269 - protein, 36 aa, Artificial Sequence
  Non-cyclic GFR-binding peptide
  MOD_RES (5), (6): Xaa is C or S
IPKAXXVPTELSPISMLFIDEYDKVVYKQYEEMVVE

SEQ ID NO: 11270 - protein, 37 aa, Artificial Sequence
  Non-cyclic GFR-binding peptide
  MOD_RES (1), (35), (37): Xaa is C or S
  MOD_RES (15), (16), (17), (18), (19): Xaa is A or G
  MOD_RES (20), (21), (22), (23): Xaa is A or G or is absent
XAPTKLEPLTVLYYXXXXXXXXXEQLSNNMVVRSXGX

SEQ ID NO: 11271 - protein, 37 aa, Artificial Sequence
  Non-cyclic GFR-binding peptide
  MOD_RES (3), (4): Xaa is C or S
  MOD_RES (18), (19), (20), (21), (22): Xaa is A or G
  MOD_RES (23), (24), (25), (26): Xaa is A or G or is absent
KPXXAPTKLEPLTVLYYXXXXXXXXXEQLSNNMVVRS

SEQ ID NO: 11272 - protein, 36 aa, Artificial Sequence
  Non-cyclic GFR-binding peptide
  MOD_RES (34), (36): Xaa is C or S
  MOD_RES (14), (15), (16), (17), (18): Xaa is A or G
  MOD_RES (19), (20), (21), (22): Xaa is A or G or is absent
APTQLEPLTVLYYXXXXXXXXXEQLSNNMVVRAXGX

SEQ ID NO: 11273 - protein, 40 aa, Artificial Sequence
  Non-cyclic GFR-binding peptide
  MOD_RES (6), (38), (40): Xaa is C or S
VTKPTXAPTKLEPLTVLYYDDSSNVIEQLSNNMVVRSXGX

SEQ ID NO: 11274 - protein, 31 aa, Artificial Sequence
  Non-cyclic GFR-binding peptide
  MOD_RES (31), (31): Xaa is C or S
VPQALSPISILFIVGRKPKVYKQYEMIVRSX

SEQ ID NO: 11275 - protein, 42 aa, Artificial Sequence
  Non-cyclic GFR-binding peptide
  MOD_RES (6), (7), (39), (41): Xaa is C or S
KIPKAXXVPTELEPLPMVYYDENEKVVEQLSNDMVVEGXGXR

SEQ ID NO: 11276 - protein, 37 aa, Artificial Sequence
  Non-cyclic GFR-binding peptide
  MOD_RES (1), (2), (36): Xaa is C or S
  MOD_RES (16), (17), (18), (19), (20): Xaa is A or G
  MOD_RES (21), (22), (23), (24): Xaa is A or G or is absent
XXVPTELEPLPMVYYXXXXXXXXXEQLSNDMVVEGXG

SEQ ID NO: 11277 - protein, 42 aa, Artificial Sequence
  Non-cyclic GFR-binding peptide
  MOD_RES (6), (7), (40), (42): Xaa is C or S
  MOD_RES (21), (22), (23), (24), (25): Xaa is A or G
  MOD_RES (26), (27), (28), (29): Xaa is A or G or is absent
ASASPXXVSQDLSPISILFIXXXXXXXXXYKQYEMIVKSXKX

SEQ ID NO: 11278 - protein, 36 aa, Artificial Sequence
  Non-cyclic GFR-binding peptide
  MOD_RES (1), (2), (33), (35): Xaa is C or S
XXVSQDLEPLPIVYYIGKTPKIEQLSNMIVKSXKXS

SEQ ID NO: 11279 - protein, 33 aa, Artificial Sequence
  Non-cyclic GFR-binding peptide
  MOD_RES (31), (33): Xaa is C or S
VPQALEPLTILYYVGRKPKVEQLSNMIVRSXKX

SEQ ID NO: 11280 - protein, 38 aa, Artificial Sequence
  Non-cyclic GFR-binding peptide
  MOD_RES (4), (5): Xaa is C or S
  MOD_RES (19), (20), (21), (22), (23): Xaa is A or G
  MOD_RES (24), (25), (26), (27): Xaa is A or G or is absent
PKAXXVPTELEPLPMVYYXXXXXXXXXEQLSNEMVVEG

SEQ ID NO: 11281 - protein, 39 aa, Artificial Sequence
  Non-cyclic GFR-binding peptide
  MOD_RES (1), (2), (36), (38): Xaa is C or S
  MOD_RES (16), (17), (18), (19), (20): Xaa is A or G
  MOD_RES (21), (22), (23), (24): Xaa is A or G or is absent
XXVPTELEPLTMLYYXXXXXXXXXEQLSNDMVVEGXGXR

SEQ ID NO: 11282 - protein, 36 aa, Artificial Sequence
  Non-cyclic GFR-binding peptide
  MOD_RES (5), (6): Xaa is C or S
IPKAXXVPTELSPISMLFIDENEKVVYKQYEDMVVE

SEQ ID NO: 11283 - protein, 35 aa, Artificial Sequence
  Non-cyclic GFR-binding peptide
  MOD_RES (3), (4): Xaa is C or S
PTXXVPTRLEPLTILYYDSANNVVEQLSNDMVVES

SEQ ID NO: 11284 - protein, 33 aa, Artificial Sequence
  Non-cyclic GFR-binding peptide
  MOD_RES (2), (3): Xaa is C or S
TXXVPTRLEPLTILYYDSANNVVEQLSNDMVVE

SEQ ID NO: 11285 - protein, 36 aa, Artificial Sequence
  Non-cyclic GFR-binding peptide
  MOD_RES (3), (4): Xaa is C or S
  MOD_RES (18), (19), (20), (21), (22): Xaa is A or G
  MOD_RES (23), (24), (25), (26): Xaa is A or G or is absent
PTXXVPTRLSAISILYLXXXXXXXXXLKNYQDMVVE

SEQ ID NO: 11286 - protein, 34 aa, Artificial Sequence
  Non-cyclic GFR-binding peptide
  MOD_RES (3), (4): Xaa is C or S
KPXXAPTKLSPISVLFIDDSSNVIYKQYENMVVR

SEQ ID NO: 11287 - protein, 38 aa, Artificial Sequence
  Non-cyclic GFR-binding peptide
  MOD_RES (6), (7), (38): Xaa is C or S
ASASPXXVPQDLSPISILFIVGRTPKVYKQYEMVVKSX

SEQ ID NO: 11288 - protein, 37 aa, Artificial Sequence
  Non-cyclic GFR-binding peptide
  MOD_RES (6), (7): Xaa is C or S
YVPKPXXAPTKLEPLTVLYYDDSSNVIEQLSNNMVVR

SEQ ID NO: 11289 - protein, 37 aa, Artificial Sequence
  Non-cyclic GFR-binding peptide
  MOD_RES (1), (2), (34), (36): Xaa is C or S
XXAPTKLEPLTVLYYDDSSNVIEQLSNNMVVRSXGXH

SEQ ID NO: 11290 - protein, 38 aa, Artificial Sequence
  Non-cyclic GFR-binding peptide
  MOD_RES (3), (4), (37): Xaa is C or S
  MOD_RES (18), (19), (20), (21), (22): Xaa is A or G
  MOD_RES (23), (24), (25), (26): Xaa is A or G or is absent
APXXVPQALSPISILFIXXXXXXXXXYKQYEMIVRSXK

SEQ ID NO: 11291 - protein, 38 aa, Artificial Sequence
  Non-cyclic GFR-binding peptide
  MOD_RES (5), (6), (38): Xaa is C or S
IPKAXXVPTELEPLPMVYYDEYDKVVEQLSNEMVVEGX

SEQ ID NO: 11292 - protein, 33 aa, Artificial Sequence
  Non-cyclic GFR-binding peptide
  MOD_RES (2), (3): Xaa is C or S
AXXVPTELEPLPMVYYDEYDKVVEQLSNEMVVE

SEQ ID NO: 11293 - protein, 38 aa, Artificial Sequence
  Non-cyclic GFR-binding peptide
  MOD_RES (4), (5), (36), (38): Xaa is C or S
AAPXXVPQALEPLTILYYVGRKPKVEQLSNMIVRSXKX

SEQ ID NO: 11294 - protein, 36 aa, Artificial Sequence
  Non-cyclic GFR-binding peptide
  MOD_RES (3), (4): Xaa is C or S
  MOD_RES (18), (19), (20), (21), (22): Xaa is A or G
  MOD_RES (23), (24), (25), (26): Xaa is A or G or is absent
KPXXAPTQLEPLPVVYYXXXXXXXXXEQLSNNMVVR

SEQ ID NO: 11295 - protein, 34 aa, Artificial Sequence
  Non-cyclic GFR-binding peptide
  MOD_RES (32), (34): Xaa is C or S
VPTELEPLPMVYYDEYDKVVEQLSNEMVVEGXGX

SEQ ID NO: 11296 - protein, 35 aa, Artificial Sequence
  Non-cyclic GFR-binding peptide
  MOD_RES (1), (32), (34): Xaa is C or S
XVPQDLSPISILFIVGRTPKVYKQYEMVVKSXKXS

SEQ ID NO: 11297 - protein, 40 aa, Artificial Sequence
  Non-cyclic GFR-binding peptide
  MOD_RES (4), (5), (38), (40): Xaa is C or S
  MOD_RES (19), (20), (21), (22), (23): Xaa is A or G
  MOD_RES (24), (25), (26), (27): Xaa is A or G or is absent
ASPXXVSQDLEPLPIVYYXXXXXXXXXEQLSNMIVKSXKX

SEQ ID NO: 11298 - protein, 36 aa, Artificial Sequence
  Non-cyclic GFR-binding peptide
  MOD_RES (4), (5), (36): Xaa is C or S
ASPXXVSQDLEPLPIVYYIGKTPKIEQLSNMIVKSX

SEQ ID NO: 11299 - protein, 40 aa, Artificial Sequence
  Non-cyclic GFR-binding peptide
  MOD_RES (5), (6), (38), (40): Xaa is C or S
VPKPXXAPTKLEPLPVVYYDDSSNVIEQLSNNMVVRSXGX

SEQ ID NO: 11300 - protein, 40 aa, Artificial Sequence
  Non-cyclic GFR-binding peptide
  MOD_RES (4), (5), (37), (39): Xaa is C or S
PKAXXVPTELEPLTMLYYDENEKVVEQLSNDMVVEGXGXR

SEQ ID NO: 11301 - protein, 36 aa, Artificial Sequence
  Non-cyclic GFR-binding peptide
  MOD_RES (2), (3): Xaa is C or S
  MOD_RES (17), (18), (19), (20), (21): Xaa is A or G
  MOD_RES (22), (23), (24), (25): Xaa is A or G or is absent
AXXVPTELEPLTMLYYXXXXXXXXXEQLSNDMVVEG

SEQ ID NO: 11302 - protein, 35 aa, Artificial Sequence
  Non-cyclic GFR-binding peptide
  MOD_RES (2), (3): Xaa is C or S
  MOD_RES (17), (18), (19), (20), (21): Xaa is A or G
  MOD_RES (22), (23), (24), (25): Xaa is A or G or is absent
PXXAPTQLEPLTVLYYXXXXXXXXXEQLSNNMVVR

SEQ ID NO: 11303 - protein, 35 aa, Artificial Sequence
  Non-cyclic GFR-binding peptide
  MOD_RES (1), (33), (35): Xaa is C or S
XVPTELEPLPMVYYDEYDKVVEQLSNEMVVEGXGX

SEQ ID NO: 11304 - protein, 38 aa, Artificial Sequence
  Non-cyclic GFR-binding peptide
  MOD_RES (1), (35), (37): Xaa is C or S
  MOD_RES (15), (16), (17), (18), (19): Xaa is A or G
  MOD_RES (20), (21), (22), (23): Xaa is A or G or is absent
XAPTKLEPLPVVYYXXXXXXXXXEQLSNNMVVRSXGXH

SEQ ID NO: 11305 - protein, 37 aa, Artificial Sequence
  Non-cyclic GFR-binding peptide
  MOD_RES (34), (36): Xaa is C or S
  MOD_RES (14), (15), (16), (17), (18): Xaa is A or G
  MOD_RES (19), (20), (21), (22): Xaa is A or G or is absent
VPTELEPLPMVYYXXXXXXXXXEQLSNDMVVEGXGXR

SEQ ID NO: 11306 - protein, 36 aa, Artificial Sequence
  Non-cyclic GFR-binding peptide
  MOD_RES (2), (34), (36): Xaa is C or S
TXAPTKLEPLTVLYYDDSSNVIEQLSNNMVVRSXGX

SEQ ID NO: 11307 - protein, 39 aa, Artificial Sequence
  Non-cyclic GFR-binding peptide
  MOD_RES (6), (7): Xaa is C or S
  MOD_RES (21), (22), (23), (24), (25): Xaa is A or G
  MOD_RES (26), (27), (28), (29): Xaa is A or G or is absent
ASASPXXVSQDLEPLPIVYYXXXXXXXXXEQLSNMIVKS

SEQ ID NO: 11308 - protein, 33 aa, Artificial Sequence
  Non-cyclic GFR-binding peptide
  MOD_RES (1), (1): Xaa is C or S
  MOD_RES (15), (16), (17), (18), (19): Xaa is A or G
  MOD_RES (20), (21), (22), (23): Xaa is A or G or is absent
XVPQDLSPISILFIXXXXXXXXXYKQYEMVVKS

SEQ ID NO: 11309 - protein, 36 aa, Artificial Sequence
  Non-cyclic GFR-binding peptide
  MOD_RES (2), (3), (35): Xaa is C or S
TXXVPTRLNAISILYFDSANNVVLKKYRDMVVESXG

SEQ ID NO: 11310 - protein, 37 aa, Artificial Sequence
  Non-cyclic GFR-binding peptide
  MOD_RES (34), (36): Xaa is C or S
  MOD_RES (14), (15), (16), (17), (18): Xaa is A or G
  MOD_RES (19), (20), (21), (22): Xaa is A or G or is absent
APTKLEPLPVVYYXXXXXXXXXEQLSNNMVVRSXGXH

SEQ ID NO: 11311 - protein, 38 aa, Artificial Sequence
  Non-cyclic GFR-binding peptide
  MOD_RES (2), (3), (37): Xaa is C or S
  MOD_RES (17), (18), (19), (20), (21): Xaa is A or G
  MOD_RES (22), (23), (24), (25): Xaa is A or G or is absent
AXXVPTELSPISMLFIXXXXXXXXXYKQYEEMVVEGXG

SEQ ID NO: 11312 - protein, 37 aa, Artificial Sequence
  Non-cyclic GFR-binding peptide
  MOD_RES (6), (7): Xaa is C or S
SIPKAXXVPTELSPISMLFIDEYDKVVYKQYEEMVVE

SEQ ID NO: 11313 - protein, 35 aa, Artificial Sequence
  Non-cyclic GFR-binding peptide
  MOD_RES (1), (32), (34): Xaa is C or S
XVPQALEPLTILYYVGRKPKVEQLSNMIVRSXKXS

SEQ ID NO: 11314 - protein, 35 aa, Artificial Sequence
  Non-cyclic GFR-binding peptide
  MOD_RES (4), (5): Xaa is C or S
PKPXXAPTQLSPISVLFIDDSSNVIYKQYENMVVR

SEQ ID NO: 11315 - protein, 40 aa, Artificial Sequence
  Non-cyclic GFR-binding peptide
  MOD_RES (4), (5), (39): Xaa is C or S
  MOD_RES (19), (20), (21), (22), (23): Xaa is A or G
  MOD_RES (24), (25), (26), (27): Xaa is A or G or is absent
PKAXXVPTELEPLTMLYYXXXXXXXXXEQLSNDMVVEGXG

SEQ ID NO: 11316 - protein, 35 aa, Artificial Sequence
  Non-cyclic GFR-binding peptide
  MOD_RES (1), (35): Xaa is C or S
  MOD_RES (15), (16), (17), (18), (19): Xaa is A or G
  MOD_RES (20), (21), (22), (23): Xaa is A or G or is absent
XVPTRLNAISILYFXXXXXXXXXLKKYRDMVVESX

SEQ ID NO: 11317 - protein, 42 aa, Artificial Sequence
  Non-cyclic GFR-binding peptide
  MOD_RES (4), (5), (39), (41): Xaa is C or S
  MOD_RES (19), (20), (21), (22), (23): Xaa is A or G
  MOD_RES (24), (25), (26), (27): Xaa is A or G or is absent
PKPXXAPTKLEPLTVLYYXXXXXXXXXEQLSNNMVVRSXGXH

SEQ ID NO: 11318 - protein, 41 aa, Artificial Sequence
  Non-cyclic GFR-binding peptide
  MOD_RES (6), (7), (41): Xaa is C or S
  MOD_RES (21), (22), (23), (24), (25): Xaa is A or G
  MOD_RES (26), (27), (28), (29): Xaa is A or G or is absent
KIPKAXXVPTELSPISMLFIXXXXXXXXXYKQYEDMVVEGX

SEQ ID NO: 11319 - protein, 35 aa, Artificial Sequence
  Non-cyclic GFR-binding peptide
  MOD_RES (1), (35): Xaa is C or S
  MOD_RES (15), (16), (17), (18), (19): Xaa is A or G
  MOD_RES (20), (21), (22), (23): Xaa is A or G or is absent
XAPTQLSPISVLFIXXXXXXXXXYKQYENMVVRAX

SEQ ID NO: 11320 - protein, 36 aa, Artificial Sequence
  Non-cyclic GFR-binding peptide
  MOD_RES (4), (4): Xaa is C or S
  MOD_RES (18), (19), (20), (21), (22): Xaa is A or G
  MOD_RES (23), (24), (25), (26): Xaa is A or G or is absent
KPTXAPTKLSPISVLFIXXXXXXXXXYKQYENMVVR

SEQ ID NO: 11321 - protein, 38 aa, Artificial Sequence
  Non-cyclic GFR-binding peptide
  MOD_RES (4), (5), (36), (38): Xaa is C or S
ASPXXVSQDLEPLPIVYYIGKTPKIEQLSNMIVKSXKX

SEQ ID NO: 11322 - protein, 38 aa, Artificial Sequence
  Non-cyclic GFR-binding peptide
  MOD_RES (4), (5): Xaa is C or S
  MOD_RES (19), (20), (21), (22), (23): Xaa is A or G
  MOD_RES (24), (25), (26), (27): Xaa is A or G or is absent
PPTXXVPTRLSAISILYLXXXXXXXXXLKNYQDMVVES

SEQ ID NO: 11323 - protein, 33 aa, Artificial Sequence
  Non-cyclic GFR-binding peptide
  MOD_RES (2), (3): Xaa is C or S
PXXAPTQLEPLTVLYYDDSSNVIEQLSNNMVVR

SEQ ID NO: 11324 - protein, 38 aa, Artificial Sequence
  Non-cyclic GFR-binding peptide
  MOD_RES (4), (5): Xaa is C or S
  MOD_RES (19), (20), (21), (22), (23): Xaa is A or G
  MOD_RES (24), (25), (26), (27): Xaa is A or G or is absent
PKPXXAPTQLEPLPVVYYXXXXXXXXXEQLSNNMVVRA

SEQ ID NO: 11325 - protein, 34 aa, Artificial Sequence
  Non-cyclic GFR-binding peptide
  MOD_RES (1), (32), (34): Xaa is C or S
XVPQALEPLTILYYVGRKPKVEQLSNMIVRSXKX

SEQ ID NO: 11326 - protein, 39 aa, Artificial Sequence
  Non-cyclic GFR-binding peptide
  MOD_RES (3), (4), (36), (38): Xaa is C or S
PTXXVPTRLEPLPIVYYDSANNVVEQLSNDMVVESXGXR

SEQ ID NO: 11327 - protein, 39 aa, Artificial Sequence
  Non-cyclic GFR-binding peptide
  MOD_RES (3), (4), (38): Xaa is C or S
  MOD_RES (18), (19), (20), (21), (22): Xaa is A or G
  MOD_RES (23), (24), (25), (26): Xaa is A or G or is absent
KPXXAPTKLEPLPVVYYXXXXXXXXXEQLSNNMVVRSXG

SEQ ID NO: 11328 - protein, 38 aa, Artificial Sequence
  Non-cyclic GFR-binding peptide
  MOD_RES (6), (7): Xaa is C or S
TVPKPXXAPTQLSPISVLFIDDSSNVIYKQYENMVVRA

SEQ ID NO: 11329 - protein, 31 aa, Artificial Sequence
  Non-cyclic GFR-binding peptide
VPTRLEPLPIVYYDSANNVVEQLSNDMVVES

SEQ ID NO: 11330 - protein, 41 aa, Artificial Sequence
  Non-cyclic GFR-binding peptide
  MOD_RES (5), (6), (38), (40): Xaa is C or S
IPKAXXVPTELEPLTMLYYDENEKVVEQLSNDMVVEGXGXR

SEQ ID NO: 11331 - protein, 35 aa, Artificial Sequence
  Non-cyclic GFR-binding peptide
  MOD_RES (3), (4): Xaa is C or S
PTXXVPTRLEPLPIVYYDSANNVVEQLSNDMVVES

SEQ ID NO: 11332 - protein, 31 aa, Artificial Sequence
  Non-cyclic GFR-binding peptide
  MOD_RES (1), (1): Xaa is C or S
XVPQALEPLTILYYVGRKPKVEQLSNMIVRS

SEQ ID NO: 11333 - protein, 38 aa, Artificial Sequence
  Non-cyclic GFR-binding peptide
  MOD_RES (5), (6): Xaa is C or S
  MOD_RES (20), (21), (22), (23), (24): Xaa is A or G
  MOD_RES (25), (26), (27), (28): Xaa is A or G or is absent
IPKAXXVPTELEPLPMVYYXXXXXXXXXEQLSNEMVVE

SEQ ID NO: 11334 - protein, 42 aa, Artificial Sequence
  Non-cyclic GFR-binding peptide
  MOD_RES (5), (6), (40), (42): Xaa is C or S
  MOD_RES (20), (21), (22), (23), (24): Xaa is A or G
  MOD_RES (25), (26), (27), (28): Xaa is A or G or is absent
IPKAXXVPTELEPLPMVYYXXXXXXXXXEQLSNDMVVEGXGX

SEQ ID NO: 11335 - protein, 34 aa, Artificial Sequence
  Non-cyclic GFR-binding peptide
  MOD_RES (1), (32), (34): Xaa is C or S
XVSQDLEPLPIVYYIGKTPKIEQLSNMIVKSXKX

SEQ ID NO: 11336 - protein, 36 aa, Artificial Sequence
  Non-cyclic GFR-binding peptide
  MOD_RES (3), (4): Xaa is C or S
  MOD_RES (18), (19), (20), (21), (22): Xaa is A or G
  MOD_RES (23), (24), (25), (26): Xaa is A or G or is absent
SPXXVPQDLEPLPIVYYXXXXXXXXXEQLSNMVVKS

SEQ ID NO: 11337 - protein, 38 aa, Artificial Sequence
  Non-cyclic GFR-binding peptide
  MOD_RES (4), (5): Xaa is C or S
  MOD_RES (19), (20), (21), (22), (23): Xaa is A or G
  MOD_RES (24), (25), (26), (27): Xaa is A or G or is absent
PKAXXVPTELSPISMLFIXXXXXXXXXYKQYEDMVVEG

SEQ ID NO: 11338 - protein, 40 aa, Artificial Sequence
  Non-cyclic GFR-binding peptide
  MOD_RES (2), (3), (37), (39): Xaa is C or S
  MOD_RES (17), (18), (19), (20), (21): Xaa is A or G
  MOD_RES (22), (23), (24), (25): Xaa is A or G or is absent
AXXVPTELEPLTMLYYXXXXXXXXXEQLSNDMVVEGXGXR

SEQ ID NO: 11339 - protein, 39 aa, Artificial Sequence
  Non-cyclic GFR-binding peptide
  MOD_RES (4), (5), (39): Xaa is C or S
  MOD_RES (19), (20), (21), (22), (23): Xaa is A or G
  MOD_RES (24), (25), (26), (27): Xaa is A or G or is absent
PKAXXVPTELEPLPMVYYXXXXXXXXXEQLSNEMVVEGX

SEQ ID NO: 11340 - protein, 41 aa, Artificial Sequence
  Non-cyclic GFR-binding peptide
  MOD_RES (5), (6), (38), (40): Xaa is C or S
VPKPXXAPTKLSPISVLFIDDSSNVIYKQYENMVVRSXGXH

SEQ ID NO: 11341 - protein, 35 aa, Artificial Sequence
  Non-cyclic GFR-binding peptide
  MOD_RES (3), (4), (35): Xaa is C or S
APXXVPQALSPISILFIVGRKPKVYKQYEMIVRSX

SEQ ID NO: 11342 - protein, 39 aa, Artificial Sequence
  Non-cyclic GFR-binding peptide
  MOD_RES (5), (6): Xaa is C or S
  MOD_RES (20), (21), (22), (23), (24): Xaa is A or G
  MOD_RES (25), (26), (27), (28): Xaa is A or G or is absent
VPKPXXAPTKLEPLTVLYYXXXXXXXXXEQLSNNMVVRS

SEQ ID NO: 11343 - protein, 41 aa, Artificial Sequence
  Non-cyclic GFR-binding peptide
  MOD_RES (6), (7), (41): Xaa is C or S
  MOD_RES (21), (22), (23), (24), (25): Xaa is A or G
  MOD_RES (26), (27), (28), (29): Xaa is A or G or is absent
YVPKPXXAPTKLSPISVLFIXXXXXXXXXYKQYENMVVRSX

SEQ ID NO: 11344 - protein, 33 aa, Artificial Sequence
  Non-cyclic GFR-binding peptide
  MOD_RES (1), (2): Xaa is C or S
XXVPTRLSAISILYLDSANNVVLKNYQDMVVES

SEQ ID NO: 11345 - protein, 37 aa, Artificial Sequence
  Non-cyclic GFR-binding peptide
  MOD_RES (3), (4): Xaa is C or S
  MOD_RES (18), (19), (20), (21), (22): Xaa is A or G
  MOD_RES (23), (24), (25), (26): Xaa is A or G or is absent
KPXXAPTKLSPISVLFIXXXXXXXXXYKQYENMVVRS

SEQ ID NO: 11346 - protein, 34 aa, Artificial Sequence
  Non-cyclic GFR-binding peptide
  MOD_RES (4), (4): Xaa is C or S
KPTXAPTKLEPLPVVYYDDSSNVIEQLSNNMVVR

SEQ ID NO: 11347 - protein, 35 aa, Artificial Sequence
  Non-cyclic GFR-binding peptide
  MOD_RES (1), (2): Xaa is C or S
  MOD_RES (16), (17), (18), (19), (20): Xaa is A or G
  MOD_RES (21), (22), (23), (24): Xaa is A or G or is absent
XXAPTKLEPLPVVYYXXXXXXXXXEQLSNNMVVRS

SEQ ID NO: 11348 - protein, 37 aa, Artificial Sequence
  Non-cyclic GFR-binding peptide
  MOD_RES (4), (4): Xaa is C or S
  MOD_RES (18), (19), (20), (21), (22): Xaa is A or G
  MOD_RES (23), (24), (25), (26): Xaa is A or G or is absent
KPTXAPTKLSPISVLFIXXXXXXXXXYKQYENMVVRS

SEQ ID NO: 11349 - protein, 37 aa, Artificial Sequence
  Non-cyclic GFR-binding peptide
  MOD_RES (7), (7): Xaa is C or S
HVTKPTXAPTKLEPLPVVYYDDSSNVIEQLSNNMVVR

SEQ ID NO: 11350 - protein, 32 aa, Artificial Sequence
  Non-cyclic GFR-binding peptide
  MOD_RES (1), (1): Xaa is C or S
XVPTRLNAISILYFDSANNVVLKKYRDMVVES

SEQ ID NO: 11351 - protein, 41 aa, Artificial Sequence
  Non-cyclic GFR-binding peptide
  MOD_RES (6), (7), (40): Xaa is C or S
  MOD_RES (21), (22), (23), (24), (25): Xaa is A or G
  MOD_RES (26), (27), (28), (29): Xaa is A or G or is absent
ASASPXXVPQDLEPLPIVYYXXXXXXXXXEQLSNMVVKSXK

SEQ ID NO: 11352 - protein, 34 aa, Artificial Sequence
  Non-cyclic GFR-binding peptide
  MOD_RES (1), (2): Xaa is C or S
  MOD_RES (16), (17), (18), (19), (20): Xaa is A or G
  MOD_RES (21), (22), (23), (24): Xaa is A or G or is absent
XXVPTELSPISMLFIXXXXXXXXXYKQYEDMVVE

SEQ ID NO: 11353 - protein, 34 aa, Artificial Sequence
  Non-cyclic GFR-binding peptide
  MOD_RES (2), (34): Xaa is C or S
TXAPTKLEPLTVLYYDDSSNVIEQLSNNMVVRSX

SEQ ID NO: 11354 - protein, 42 aa, Artificial Sequence
  Non-cyclic GFR-binding peptide
  MOD_RES (6), (7), (41): Xaa is C or S
  MOD_RES (21), (22), (23), (24), (25): Xaa is A or G
  MOD_RES (26), (27), (28), (29): Xaa is A or G or is absent
STPPTXXVPTRLEPLPIVYYXXXXXXXXXEQLSNDMVVESXG

SEQ ID NO: 11355 - protein, 42 aa, Artificial Sequence
  Non-cyclic GFR-binding peptide
  MOD_RES (6), (7), (41): Xaa is C or S
  MOD_RES (21), (22), (23), (24), (25): Xaa is A or G
  MOD_RES (26), (27), (28), (29): Xaa is A or G or is absent
SIPKAXXVPTELSPISMLFIXXXXXXXXXYKQYEEMVVEGXG

SEQ ID NO: 11356 - protein, 36 aa, Artificial Sequence
  Non-cyclic GFR-binding peptide
  MOD_RES (3), (4), (36): Xaa is C or S
KAXXVPTELEPLTMLYYDENEKVVEQLSNDMVVEGX

SEQ ID NO: 11357 - protein, 33 aa, Artificial Sequence
  Non-cyclic GFR-binding peptide
  MOD_RES (2), (3): Xaa is C or S
PXXVSQDLSPISILFIIGKTPKIYKQYEMIVKS

SEQ ID NO: 11358 - protein, 37 aa, Artificial Sequence
  Non-cyclic GFR-binding peptide
  MOD_RES (5), (6), (37): Xaa is C or S
SASPXXVSQDLSPISILFIIGKTPKIYKQYEMIVKSX

SEQ ID NO: 11359 - protein, 41 aa, Artificial Sequence
  Non-cyclic GFR-binding peptide
  MOD_RES (6), (7), (41): Xaa is C or S
  MOD_RES (21), (22), (23), (24), (25): Xaa is A or G
  MOD_RES (26), (27), (28), (29): Xaa is A or G or is absent
STPPTXXVPTRLSAISILYLXXXXXXXXXLKNYQDMVVESX

SEQ ID NO: 11360 - protein, 38 aa, Artificial Sequence
  Non-cyclic GFR-binding peptide
  MOD_RES (1), (2), (36), (38): Xaa is C or S
  MOD_RES (16), (17), (18), (19), (20): Xaa is A or G
  MOD_RES (21), (22), (23), (24): Xaa is A or G or is absent
XXAPTQLEPLTVLYYXXXXXXXXXEQLSNNMVVRAXGX

SEQ ID NO: 11361 - protein, 32 aa, Artificial Sequence
  Non-cyclic GFR-binding peptide
  MOD_RES (14), (15), (16), (17), (18): Xaa is A or G
  MOD_RES (19), (20), (21), (22): Xaa is A or G or is absent
VPTRLNAISILYFXXXXXXXXXLKKYRDMVVE

SEQ ID NO: 11362 - protein, 34 aa, Artificial Sequence
  Non-cyclic GFR-binding peptide
  MOD_RES (1), (1): Xaa is C or S
  MOD_RES (15), (16), (17), (18), (19): Xaa is A or G
  MOD_RES (20), (21), (22), (23): Xaa is A or G or is absent
XAPTKLEPLPVVYYXXXXXXXXXEQLSNNMVVRS

SEQ ID NO: 11363 - protein, 40 aa, Artificial Sequence
  Non-cyclic GFR-binding peptide
  MOD_RES (7), (39): Xaa is C or S
HVTKPTXAPTKLEPLPVVYYDDSSNVIEQLSNNMVVRSXG

SEQ ID NO: 11364 - protein, 40 aa, Artificial Sequence
  Non-cyclic GFR-binding peptide
  MOD_RES (5), (6), (40): Xaa is C or S
  MOD_RES (20), (21), (22), (23), (24): Xaa is A or G
  MOD_RES (25), (26), (27), (28): Xaa is A or G or is absent
VPKPXXAPTQLEPLPVVYYXXXXXXXXXEQLSNNMVVRAX

SEQ ID NO: 11365 - protein, 31 aa, Artificial Sequence
  Non-cyclic GFR-binding peptide
APTKLEPLTVLYYDDSSNVIEQLSNNMVVRS

SEQ ID NO: 11366 - protein, 35 aa, Artificial Sequence
  Non-cyclic GFR-binding peptide
  MOD_RES (34), (34): Xaa is C or S
  MOD_RES (14), (15), (16), (17), (18): Xaa is A or G
  MOD_RES (19), (20), (21), (22): Xaa is A or G or is absent
VPTELSPISMLFIXXXXXXXXXYKQYEDMVVEGXG

SEQ ID NO: 11367 - protein, 37 aa, Artificial Sequence
  Non-cyclic GFR-binding peptide
  MOD_RES (3), (4): Xaa is C or S
  MOD_RES (18), (19), (20), (21), (22): Xaa is A or G
  MOD_RES (23), (24), (25), (26): Xaa is A or G or is absent
KAXXVPTELEPLPMVYYXXXXXXXXXEQLSNDMVVEG

SEQ ID NO: 11368 - protein, 38 aa, Artificial Sequence
  Non-cyclic GFR-binding peptide
  MOD_RES (1), (35), (37): Xaa is C or S
  MOD_RES (15), (16), (17), (18), (19): Xaa is A or G
  MOD_RES (20), (21), (22), (23): Xaa is A or G or is absent
XVPTELEPLPMVYYXXXXXXXXXEQLSNDMVVEGXGXR

SEQ ID NO: 11369 - protein, 36 aa, Artificial Sequence
  Non-cyclic GFR-binding peptide
  MOD_RES (1), (2), (34), (36): Xaa is C or S
XXAPTQLEPLTVLYYDDSSNVIEQLSNNMVVRAXGX

SEQ ID NO: 11370 - protein, 39 aa, Artificial Sequence
  Non-cyclic GFR-binding peptide
  MOD_RES (5), (6): Xaa is C or S
  MOD_RES (20), (21), (22), (23), (24): Xaa is A or G
  MOD_RES (25), (26), (27), (28): Xaa is A or G or is absent
IPKAXXVPTELSPISMLFIXXXXXXXXXYKQYEEMVVEG

SEQ ID NO: 11371 - protein, 34 aa, Artificial Sequence
  Non-cyclic GFR-binding peptide
  MOD_RES (1), (2): Xaa is C or S
  MOD_RES (16), (17), (18), (19), (20): Xaa is A or G
  MOD_RES (21), (22), (23), (24): Xaa is A or G or is absent
XXVSQDLSPISILFIXXXXXXXXXYKQYEMIVKS

SEQ ID NO: 11372 - protein, 38 aa, Artificial Sequence
  Non-cyclic GFR-binding peptide
  MOD_RES (4), (5), (38): Xaa is C or S
  MOD_RES (19), (20), (21), (22), (23): Xaa is A or G
  MOD_RES (24), (25), (26), (27): Xaa is A or G or is absent
AAPXXVPQALSPISILFIXXXXXXXXXYKQYEMIVRSX

SEQ ID NO: 11373 - protein, 42 aa, Artificial Sequence
  Non-cyclic GFR-binding peptide
  MOD_RES (5), (6), (40), (42): Xaa is C or S
  MOD_RES (20), (21), (22), (23), (24): Xaa is A or G
  MOD_RES (25), (26), (27), (28): Xaa is A or G or is absent
IPKAXXVPTELEPLPMVYYXXXXXXXXXEQLSNEMVVEGXGX

SEQ ID NO: 11374 - protein, 30 aa, Artificial Sequence
  Non-cyclic GFR-binding peptide
VPTELEPLTMLYYDEYDKVVEQLSNEMVVE

SEQ ID NO: 11375 - protein, 37 aa, Artificial Sequence
  Non-cyclic GFR-binding peptide
  MOD_RES (6), (7): Xaa is C or S
YVPKPXXAPTKLEPLPVVYYDDSSNVIEQLSNNMVVR

SEQ ID NO: 11376 - protein, 36 aa, Artificial Sequence
  Non-cyclic GFR-binding peptide
  MOD_RES (1), (33), (35): Xaa is C or S
XAPTKLEPLTVLYYDDSSNVIEQLSNNMVVRSXGXH

SEQ ID NO: 11377 - protein, 40 aa, Artificial Sequence
  Non-cyclic GFR-binding peptide
  MOD_RES (6), (7), (39): Xaa is C or S
STPPTXXVPTRLEPLTILYYDSANNVVEQLSNDMVVESXG

SEQ ID NO: 11378 - protein, 40 aa, Artificial Sequence
  Non-cyclic GFR-binding peptide
  MOD_RES (4), (5), (39): Xaa is C or S
  MOD_RES (19), (20), (21), (22), (23): Xaa is A or G
  MOD_RES (24), (25), (26), (27): Xaa is A or G or is absent
PPTXXVPTRLSAISILYLXXXXXXXXXLKNYQDMVVESXG

SEQ ID NO: 11379 - protein, 35 aa, Artificial Sequence
  Non-cyclic GFR-binding peptide
  MOD_RES (1), (2), (33), (35): Xaa is C or S
XXVPQALSPISILFIVGRKPKVYKQYEMIVRSXKX

SEQ ID NO: 11380 - protein, 41 aa, Artificial Sequence
  Non-cyclic GFR-binding peptide
  MOD_RES (5), (6), (39), (41): Xaa is C or S
  MOD_RES (20), (21), (22), (23), (24): Xaa is A or G
  MOD_RES (25), (26), (27), (28): Xaa is A or G or is absent
SAAPXXVPQALSPISILFIXXXXXXXXXYKQYEMIVRSXKX

SEQ ID NO: 11381 - protein, 36 aa, Artificial Sequence
  Non-cyclic GFR-binding peptide
  MOD_RES (5), (5): Xaa is C or S
TKPTXAPTKLEPLPVVYYDDSSNVIEQLSNNMVVRS

SEQ ID NO: 11382 - protein, 35 aa, Artificial Sequence
  Non-cyclic GFR-binding peptide
  MOD_RES (1), (2), (33), (35): Xaa is C or S
XXVSQDLSPISILFIIGKTPKIYKQYEMIVKSXKX

SEQ ID NO: 11383 - protein, 36 aa, Artificial Sequence
  Non-cyclic GFR-binding peptide
  MOD_RES (3), (4): Xaa is C or S
  MOD_RES (18), (19), (20), (21), (22): Xaa is A or G
  MOD_RES (23), (24), (25), (26): Xaa is A or G or is absent
SPXXVPQDLSPISILFIXXXXXXXXXYKQYEMVVKS

SEQ ID NO: 11384 - protein, 39 aa, Artificial Sequence
  Non-cyclic GFR-binding peptide
  MOD_RES (1), (2), (36), (38): Xaa is C or S
  MOD_RES (16), (17), (18), (19), (20): Xaa is A or G
  MOD_RES (21), (22), (23), (24): Xaa is A or G or is absent
XXAPTKLEPLTVLYYXXXXXXXXXEQLSNNMVVRSXGXH

SEQ ID NO: 11385 - protein, 41 aa, Artificial Sequence
  Non-cyclic GFR-binding peptide
  MOD_RES (5), (6), (39), (41): Xaa is C or S
  MOD_RES (20), (21), (22), (23), (24): Xaa is A or G
  MOD_RES (25), (26), (27), (28): Xaa is A or G or is absent
SASPXXVSQDLSPISILFIXXXXXXXXXYKQYEMIVKSXKX

SEQ ID NO: 11386 - protein, 41 aa, Artificial Sequence
  Non-cyclic GFR-binding peptide
  MOD_RES (4), (38), (40): Xaa is C or S
  MOD_RES (18), (19), (20), (21), (22): Xaa is A or G
  MOD_RES (23), (24), (25), (26): Xaa is A or G or is absent
KPTXAPTKLEPLTVLYYXXXXXXXXXEQLSNNMVVRSXGXH

SEQ ID NO: 11387 - protein, 35 aa, Artificial Sequence
  Non-cyclic GFR-binding peptide
  MOD_RES (1), (2), (33), (35): Xaa is C or S
XXVPQDLEPLPIVYYVGRTPKVEQLSNMVVKSXKX

SEQ ID NO: 11388 - protein, 37 aa, Artificial Sequence
  Non-cyclic GFR-binding peptide
  MOD_RES (2), (3), (35), (37): Xaa is C or S
TXXVPTRLEPLPIVYYDSANNVVEQLSNDMVVESXGX

SEQ ID NO: 11389 - protein, 36 aa, Artificial Sequence
  Non-cyclic GFR-binding peptide
  MOD_RES (2), (3): Xaa is C or S
  MOD_RES (17), (18), (19), (20), (21): Xaa is A or G
  MOD_RES (22), (23), (24), (25): Xaa is A or G or is absent
AXXVPTELSPISMLFIXXXXXXXXXYKQYEDMVVEG

SEQ ID NO: 11390 - protein, 38 aa, Artificial Sequence
  Non-cyclic GFR-binding peptide
  MOD_RES (1), (2), (36), (38): Xaa is C or S
  MOD_RES (16), (17), (18), (19), (20): Xaa is A or G
  MOD_RES (21), (22), (23), (24): Xaa is A or G or is absent
XXAPTKLEPLPVVYYXXXXXXXXXEQLSNNMVVRSXGX

SEQ ID NO: 11391 - protein, 38 aa, Artificial Sequence
  Non-cyclic GFR-binding peptide
  MOD_RES (4), (5): Xaa is C or S
  MOD_RES (19), (20), (21), (22), (23): Xaa is A or G
  MOD_RES (24), (25), (26), (27): Xaa is A or G or is absent
PPTXXVPTRLEPLPIVYYXXXXXXXXXEQLSNDMVVES

SEQ ID NO: 11392 - protein, 38 aa, Artificial Sequence
  Non-cyclic GFR-binding peptide
  MOD_RES (3), (37): Xaa is C or S
  MOD_RES (17), (18), (19), (20), (21): Xaa is A or G
  MOD_RES (22), (23), (24), (25): Xaa is A or G or is absent
PTXAPTKLEPLPVVYYXXXXXXXXXEQLSNNMVVRSXG

SEQ ID NO: 11393 - protein, 31 aa, Artificial Sequence
  Non-cyclic GFR-binding peptide
VPTELEPLTMLYYDENEKVVEQLSNDMVVEG

SEQ ID NO: 11394 - protein, 39 aa, Artificial Sequence
  Non-cyclic GFR-binding peptide
  MOD_RES (5), (37), (39): Xaa is C or S
TKPTXAPTKLEPLPVVYYDDSSNVIEQLSNNMVVRSXGX

SEQ ID NO: 11395 - protein, 37 aa, Artificial Sequence
  Non-cyclic GFR-binding peptide
  MOD_RES (5), (37): Xaa is C or S
TKPTXAPTKLEPLTVLYYDDSSNVIEQLSNNMVVRSX

SEQ ID NO: 11396 - protein, 33 aa, Artificial Sequence
  Non-cyclic GFR-binding peptide
  MOD_RES (2), (3): Xaa is C or S
PXXVPQDLSPISILFIVGRTPKVYKQYEMVVKS

SEQ ID NO: 11397 - protein, 38 aa, Artificial Sequence
  Non-cyclic GFR-binding peptide
  MOD_RES (6), (7): Xaa is C or S
STPPTXXVPTRLSAISILYLDSANNVVLKNYQDMVVES

SEQ ID NO: 11398 - protein, 32 aa, Artificial Sequence
  Non-cyclic GFR-binding peptide
  MOD_RES (1), (32): Xaa is C or S
XVPQALEPLTILYYVGRKPKVEQLSNMIVRSX

SEQ ID NO: 11399 - protein, 34 aa, Artificial Sequence
  Non-cyclic GFR-binding peptide
  MOD_RES (1), (32), (34): Xaa is C or S
XVSQDLSPISILFIIGKTPKIYKQYEMIVKSXKX

SEQ ID NO: 11400 - protein, 32 aa, Artificial Sequence
  Non-cyclic GFR-binding peptide
  MOD_RES (2), (2): Xaa is C or S
TXAPTKLEPLTVLYYDDSSNVIEQLSNNMVVR

SEQ ID NO: 11401 - protein, 37 aa, Artificial Sequence
  Non-cyclic GFR-binding peptide
  MOD_RES (1), (2), (36): Xaa is C or S
  MOD_RES (16), (17), (18), (19), (20): Xaa is A or G
  MOD_RES (21), (22), (23), (24): Xaa is A or G or is absent
XXVPTRLEPLPIVYYXXXXXXXXXEQLSNDMVVESXG

SEQ ID NO: 11402 - protein, 34 aa, Artificial Sequence
  Non-cyclic GFR-binding peptide
  MOD_RES (1), (32), (34): Xaa is C or S
XVPQALSPISILFIVGRKPKVYKQYEMIVRSXKX

SEQ ID NO: 11403 - protein, 38 aa, Artificial Sequence
  Non-cyclic GFR-binding peptide
  MOD_RES (3), (4), (38): Xaa is C or S
  MOD_RES (18), (19), (20), (21), (22): Xaa is A or G
  MOD_RES (23), (24), (25), (26): Xaa is A or G or is absent
KAXXVPTELSPISMLFIXXXXXXXXXYKQYEDMVVEGX

SEQ ID NO: 11404 - protein, 35 aa, Artificial Sequence
  Non-cyclic GFR-binding peptide
  MOD_RES (34), (34): Xaa is C or S
  MOD_RES (14), (15), (16), (17), (18): Xaa is A or G
  MOD_RES (19), (20), (21), (22): Xaa is A or G or is absent
APTQLEPLTVLYYXXXXXXXXXEQLSNNMVVRAXG

SEQ ID NO: 11405 - protein, 34 aa, Artificial Sequence
  Non-cyclic GFR-binding peptide
  MOD_RES (1), (2): Xaa is C or S
  MOD_RES (16), (17), (18), (19), (20): Xaa is A or G
  MOD_RES (21), (22), (23), (24): Xaa is A or G or is absent
XXVPTELEPLPMVYYXXXXXXXXXEQLSNEMVVE

SEQ ID NO: 11406 - protein, 44 aa, Artificial Sequence
  Non-cyclic GFR-binding peptide
  MOD_RES (6), (7), (41), (43): Xaa is C or S
  MOD_RES (21), (22), (23), (24), (25): Xaa is A or G
  MOD_RES (26), (27), (28), (29): Xaa is A or G or is absent
SIPKAXXVPTELEPLPMVYYXXXXXXXXXEQLSNEMVVEGXGXR

SEQ ID NO: 11407 - protein, 38 aa, Artificial Sequence
  Non-cyclic GFR-binding peptide
  MOD_RES (6), (7): Xaa is C or S
TVPKPXXAPTQLEPLTVLYYDDSSNVIEQLSNNMVVRA

SEQ ID NO: 11408 - protein, 37 aa, Artificial Sequence
  Non-cyclic GFR-binding peptide
  MOD_RES (4), (5), (37): Xaa is C or S
PKAXXVPTELEPLPMVYYDENEKVVEQLSNDMVVEGX

SEQ ID NO: 11409 - protein, 37 aa, Artificial Sequence
  Non-cyclic GFR-binding peptide
  MOD_RES (2), (3), (35), (37): Xaa is C or S
PXXAPTQLEPLTVLYYDDSSNVIEQLSNNMVVRAXGX

SEQ ID NO: 11410 - protein, 35 aa, Artificial Sequence
  Non-cyclic GFR-binding peptide
  MOD_RES (1), (33), (35): Xaa is C or S
XAPTQLEPLPVVYYDDSSNVIEQLSNNMVVRAXGX

SEQ ID NO: 11411 - protein, 36 aa, Artificial Sequence
  Non-cyclic GFR-binding peptide
  MOD_RES (2), (3), (35): Xaa is C or S
TXXVPTRLSAISILYLDSANNVVLKNYQDMVVESXG

SEQ ID NO: 11412 - protein, 37 aa, Artificial Sequence
  Non-cyclic GFR-binding peptide
  MOD_RES (2), (3), (35), (37): Xaa is C or S
PXXAPTKLEPLTVLYYDDSSNVIEQLSNNMVVRSXGX

SEQ ID NO: 11413 - protein, 34 aa, Artificial Sequence
  Non-cyclic GFR-binding peptide
  MOD_RES (3), (3): Xaa is C or S
PTXAPTKLEPLPVVYYDDSSNVIEQLSNNMVVRS

SEQ ID NO: 11414 - protein, 33 aa, Artificial Sequence
  Non-cyclic GFR-binding peptide
  MOD_RES (2), (3): Xaa is C or S
AXXVPTELEPLTMLYYDEYDKVVEQLSNEMVVE

SEQ ID NO: 11415 - protein, 33 aa, Artificial Sequence
  Non-cyclic GFR-binding peptide
  MOD_RES (32), (32): Xaa is C or S
VPTELEPLPMVYYDENEKVVEQLSNDMVVEGXG

SEQ ID NO: 11416 - protein, 38 aa, Artificial Sequence
  Non-cyclic GFR-binding peptide
  MOD_RES (6), (6): Xaa is C or S
  MOD_RES (20), (21), (22), (23), (24): Xaa is A or G
  MOD_RES (25), (26), (27), (28): Xaa is A or G or is absent
VTKPTXAPTKLSPISVLFIXXXXXXXXXYKQYENMVVR

SEQ ID NO: 11417 - protein, 35 aa, Artificial Sequence
  Non-cyclic GFR-binding peptide
  MOD_RES (4), (5): Xaa is C or S
PKAXXVPTELEPLPMVYYDENEKVVEQLSNDMVVE

SEQ ID NO: 11418 - protein, 36 aa, Artificial Sequence
  Non-cyclic GFR-binding peptide
  MOD_RES (2), (36): Xaa is C or S
  MOD_RES (16), (17), (18), (19), (20): Xaa is A or G
  MOD_RES (21), (22), (23), (24): Xaa is A or G or is absent
TXAPTKLEPLPVVYYXXXXXXXXXEQLSNNMVVRSX

SEQ ID NO: 11419 - protein, 38 aa, Artificial Sequence
  Non-cyclic GFR-binding peptide
  MOD_RES (1), (35), (37): Xaa is C or S
  MOD_RES (15), (16), (17), (18), (19): Xaa is A or G
  MOD_RES (20), (21), (22), (23): Xaa is A or G or is absent
XVPTRLNAISILYFXXXXXXXXXLKKYRDMVVESXGXR

SEQ ID NO: 11420 - protein, 38 aa, Artificial Sequence
  Non-cyclic GFR-binding peptide
  MOD_RES (5), (6), (38): Xaa is C or S
VPKPXXAPTKLEPLTVLYYDDSSNVIEQLSNNMVVRSX

SEQ ID NO: 11421 - protein, 35 aa, Artificial Sequence
  Non-cyclic GFR-binding peptide
  MOD_RES (4), (5): Xaa is C or S
PPTXXVPTRLEPLPIVYYDSANNVVEQLSNDMVVE

SEQ ID NO: 11422 - protein, 39 aa, Artificial Sequence
  Non-cyclic GFR-binding peptide
  MOD_RES (3), (4), (38): Xaa is C or S
  MOD_RES (18), (19), (20), (21), (22): Xaa is A or G
  MOD_RES (23), (24), (25), (26): Xaa is A or G or is absent
PTXXVPTRLSAISILYLXXXXXXXXXLKNYQDMVVESXG

SEQ ID NO: 11423 - protein, 36 aa, Artificial Sequence
  Non-cyclic GFR-binding peptide
  MOD_RES (33), (35): Xaa is C or S
  MOD_RES (14), (15), (16), (17), (18): Xaa is A or G
  MOD_RES (19), (20), (21), (22): Xaa is A or G or is absent
VPQDLSPISILFIXXXXXXXXXYKQYEMVVKSXKXS

SEQ ID NO: 11424 - protein, 34 aa, Artificial Sequence
  Non-cyclic GFR-binding peptide
  MOD_RES (1), (32), (34): Xaa is C or S
XVPQDLEPLPIVYYVGRTPKVEQLSNMVVKSXKX

SEQ ID NO: 11425 - protein, 38 aa, Artificial Sequence
  Non-cyclic GFR-binding peptide
  MOD_RES (2), (3), (35), (37): Xaa is C or S
PXXAPTQLEPLTVLYYDDSSNVIEQLSNNMVVRAXGXH

SEQ ID NO: 11426 - protein, 40 aa, Artificial Sequence
  Non-cyclic GFR-binding peptide
  MOD_RES (2), (3), (37), (39): Xaa is C or S
  MOD_RES (17), (18), (19), (20), (21): Xaa is A or G
  MOD_RES (22), (23), (24), (25): Xaa is A or G or is absent
AXXVPTELEPLPMVYYXXXXXXXXXEQLSNDMVVEGXGXR

SEQ ID NO: 11427 - protein, 38 aa, Artificial Sequence
  Non-cyclic GFR-binding peptide
  MOD_RES (4), (38): Xaa is C or S
  MOD_RES (18), (19), (20), (21), (22): Xaa is A or G
  MOD_RES (23), (24), (25), (26): Xaa is A or G or is absent
KPTXAPTKLEPLPVVYYXXXXXXXXXEQLSNNMVVRSX

SEQ ID NO: 11428 - protein, 33 aa, Artificial Sequence
  Non-cyclic GFR-binding peptide
  MOD_RES (14), (15), (16), (17), (18): Xaa is A or G
  MOD_RES (19), (20), (21), (22): Xaa is A or G or is absent
VPTELEPLTMLYYXXXXXXXXXEQLSNEMVVEG

SEQ ID NO: 11429 - protein, 41 aa, Artificial Sequence
  Non-cyclic GFR-binding peptide
  MOD_RES (5), (6), (38), (40): Xaa is C or S
TPPTXXVPTRLEPLPIVYYDSANNVVEQLSNDMVVESXGXR

SEQ ID NO: 11430 - protein, 36 aa, Artificial Sequence
  Non-cyclic GFR-binding peptide
  MOD_RES (3), (4), (36): Xaa is C or S
PTXXVPTRLSAISILYLDSANNVVLKNYQDMVVESX

SEQ ID NO: 11431 - protein, 37 aa, Artificial Sequence
  Non-cyclic GFR-binding peptide
  MOD_RES (2), (3), (34), (36): Xaa is C or S
PXXVSQDLEPLPIVYYIGKTPKIEQLSNMIVKSXKXS

SEQ ID NO: 11432 - protein, 38 aa, Artificial Sequence
  Non-cyclic GFR-binding peptide
  MOD_RES (5), (6): Xaa is C or S
  MOD_RES (20), (21), (22), (23), (24): Xaa is A or G
  MOD_RES (25), (26), (27), (28): Xaa is A or G or is absent
TPPTXXVPTRLSAISILYLXXXXXXXXXLKNYQDMVVE

SEQ ID NO: 11433 - protein, 37 aa, Artificial Sequence
  Non-cyclic GFR-binding peptide
  MOD_RES (5), (6): Xaa is C or S
IPKAXXVPTELSPISMLFIDEYDKVVYKQYEEMVVEG

SEQ ID NO: 11434 - protein, 41 aa, Artificial Sequence
  Non-cyclic GFR-binding peptide
  MOD_RES (3), (4), (38), (40): Xaa is C or S
  MOD_RES (18), (19), (20), (21), (22): Xaa is A or G
  MOD_RES (23), (24), (25), (26): Xaa is A or G or is absent
KPXXAPTQLEPLTVLYYXXXXXXXXXEQLSNNMVVRAXGXH

SEQ ID NO: 11435 - protein, 39 aa, Artificial Sequence
  Non-cyclic GFR-binding peptide
  MOD_RES (4), (5), (37), (39): Xaa is C or S
PKAXXVPTELSPISMLFIDEYDKVVYKQYEEMVVEGXGX

SEQ ID NO: 11436 - protein, 32 aa, Artificial Sequence
  Non-cyclic GFR-binding peptide
  MOD_RES (1), (2): Xaa is C or S
XXVPTELEPLTMLYYDENEKVVEQLSNDMVVE

SEQ ID NO: 11437 - protein, 35 aa, Artificial Sequence
  Non-cyclic GFR-binding peptide
  MOD_RES (33), (35): Xaa is C or S
  MOD_RES (14), (15), (16), (17), (18): Xaa is A or G
  MOD_RES (19), (20), (21), (22): Xaa is A or G or is absent
VPQDLSPISILFIXXXXXXXXXYKQYEMVVKSXKX

SEQ ID NO: 11438 - protein, 39 aa, Artificial Sequence
  Non-cyclic GFR-binding peptide
  MOD_RES (4), (5), (39): Xaa is C or S
  MOD_RES (19), (20), (21), (22), (23): Xaa is A or G
  MOD_RES (24), (25), (26), (27): Xaa is A or G or is absent
PPTXXVPTRLEPLTILYYXXXXXXXXXEQLSNDMVVESX

SEQ ID NO: 11439 - protein, 37 aa, Artificial Sequence
  Non-cyclic GFR-binding peptide
  MOD_RES (2), (3), (37): Xaa is C or S
  MOD_RES (17), (18), (19), (20), (21): Xaa is A or G
  MOD_RES (22), (23), (24), (25): Xaa is A or G or is absent
PXXAPTQLEPLPVVYYXXXXXXXXXEQLSNNMVVRAX

SEQ ID NO: 11440 - protein, 34 aa, Artificial Sequence
  Non-cyclic GFR-binding peptide
  MOD_RES (2), (2): Xaa is C or S
  MOD_RES (16), (17), (18), (19), (20): Xaa is A or G
  MOD_RES (21), (22), (23), (24): Xaa is A or G or is absent
TXAPTKLEPLPVVYYXXXXXXXXXEQLSNNMVVR

SEQ ID NO: 11441 - protein, 38 aa, Artificial Sequence
  Non-cyclic GFR-binding peptide
  MOD_RES (6), (7): Xaa is C or S
STPPTXXVPTRLNAISILYFDSANNVVLKKYRDMVVES

SEQ ID NO: 11442 - protein, 36 aa, Artificial Sequence
  Non-cyclic GFR-binding peptide
  MOD_RES (2), (3), (35): Xaa is C or S
TXXVPTRLEPLTILYYDSANNVVEQLSNDMVVESXG

SEQ ID NO: 11443 - protein, 34 aa, Artificial Sequence
  Non-cyclic GFR-binding peptide
  MOD_RES (1), (33): Xaa is C or S
XVPTRLEPLTILYYDSANNVVEQLSNDMVVESXG

SEQ ID NO: 11444 - protein, 36 aa, Artificial Sequence
  Non-cyclic GFR-binding peptide
  MOD_RES (1), (2), (36): Xaa is C or S
  MOD_RES (16), (17), (18), (19), (20): Xaa is A or G
  MOD_RES (21), (22), (23), (24): Xaa is A or G or is absent
XXVPTELEPLPMVYYXXXXXXXXXEQLSNEMVVEGX

SEQ ID NO: 11445 - protein, 44 aa, Artificial Sequence
  Non-cyclic GFR-binding peptide
  MOD_RES (6), (7), (41), (43): Xaa is C or S
  MOD_RES (21), (22), (23), (24), (25): Xaa is A or G
  MOD_RES (26), (27), (28), (29): Xaa is A or G or is absent
KIPKAXXVPTELEPLTMLYYXXXXXXXXXEQLSNDMVVEGXGXR

SEQ ID NO: 11446 - protein, 41 aa, Artificial Sequence
  Non-cyclic GFR-binding peptide
  MOD_RES (5), (6), (40): Xaa is C or S
  MOD_RES (20), (21), (22), (23), (24): Xaa is A or G
  MOD_RES (25), (26), (27), (28): Xaa is A or G or is absent
IPKAXXVPTELEPLPMVYYXXXXXXXXXEQLSNEMVVEGXG

SEQ ID NO: 11447 - protein, 33 aa, Artificial Sequence
  Non-cyclic GFR-binding peptide
  MOD_RES (1), (2), (33): Xaa is C or S
XXVPQALSPISILFIVGRKPKVYKQYEMIVRSX

SEQ ID NO: 11448 - protein, 38 aa, Artificial Sequence
  Non-cyclic GFR-binding peptide
  MOD_RES (4), (5), (36), (38): Xaa is C or S
AAPXXVPQALSPISILFIVGRKPKVYKQYEMIVRSXKX

SEQ ID NO: 11449 - protein, 37 aa, Artificial Sequence
  Non-cyclic GFR-binding peptide
  MOD_RES (4), (5), (37): Xaa is C or S
PKAXXVPTELSPISMLFIDENEKVVYKQYEDMVVEGX

SEQ ID NO: 11450 - protein, 36 aa, Artificial Sequence
  Non-cyclic GFR-binding peptide
  MOD_RES (5), (6): Xaa is C or S
TPPTXXVPTRLNAISILYFDSANNVVLKKYRDMVVE

SEQ ID NO: 11451 - protein, 38 aa, Artificial Sequence
  Non-cyclic GFR-binding peptide
  MOD_RES (4), (36), (38): Xaa is C or S
KPTXAPTKLEPLPVVYYDDSSNVIEQLSNNMVVRSXGX

SEQ ID NO: 11452 - protein, 39 aa, Artificial Sequence
  Non-cyclic GFR-binding peptide
  MOD_RES (3), (4), (36), (38): Xaa is C or S
PTXXVPTRLEPLTILYYDSANNVVEQLSNDMVVESXGXR

SEQ ID NO: 11453 - protein, 42 aa, Artificial Sequence
  Non-cyclic GFR-binding peptide
  MOD_RES (6), (7), (39), (41): Xaa is C or S
YVPKPXXAPTKLSPISVLFIDDSSNVIYKQYENMVVRSXGXH

SEQ ID NO: 11454 - protein, 38 aa, Artificial Sequence
  Non-cyclic GFR-binding peptide
  MOD_RES (3), (4), (36), (38): Xaa is C or S
KAXXVPTELEPLTMLYYDEYDKVVEQLSNEMVVEGXGX

SEQ ID NO: 11455 - protein, 35 aa, Artificial Sequence
  Non-cyclic GFR-binding peptide
  MOD_RES (34), (34): Xaa is C or S
  MOD_RES (14), (15), (16), (17), (18): Xaa is A or G
  MOD_RES (19), (20), (21), (22): Xaa is A or G or is absent
VPTRLNAISILYFXXXXXXXXXLKKYRDMVVESXG

SEQ ID NO: 11456 - protein, 42 aa, Artificial Sequence
  Non-cyclic GFR-binding peptide
  MOD_RES (7), (39), (41): Xaa is C or S
HVTKPTXAPTKLSPISVLFIDDSSNVIYKQYENMVVRSXGXH

SEQ ID NO: 11457 - protein, 40 aa, Artificial Sequence
  Non-cyclic GFR-binding peptide
  MOD_RES (6), (7), (39): Xaa is C or S
SIPKAXXVPTELSPISMLFIDEYDKVVYKQYEEMVVEGXG

SEQ ID NO: 11458 - protein, 41 aa, Artificial Sequence
  Non-cyclic GFR-binding peptide
  MOD_RES (4), (5), (39), (41): Xaa is C or S
  MOD_RES (19), (20), (21), (22), (23): Xaa is A or G
  MOD_RES (24), (25), (26), (27): Xaa is A or G or is absent
PPTXXVPTRLSAISILYLXXXXXXXXXLKNYQDMVVESXGX

SEQ ID NO: 11459 - protein, 33 aa, Artificial Sequence
  Non-cyclic GFR-binding peptide
  MOD_RES (32), (32): Xaa is C or S
APTKLEPLPVVYYDDSSNVIEQLSNNMVVRSXG

SEQ ID NO: 11460 - protein, 39 aa, Artificial Sequence
  Non-cyclic GFR-binding peptide
  MOD_RES (2), (36), (38): Xaa is C or S
  MOD_RES (16), (17), (18), (19), (20): Xaa is A or G
  MOD_RES (21), (22), (23), (24): Xaa is A or G or is absent
TXAPTKLEPLPVVYYXXXXXXXXXEQLSNNMVVRSXGXH

SEQ ID NO: 11461 - protein, 38 aa, Artificial Sequence
  Non-cyclic GFR-binding peptide
  MOD_RES (1), (2), (36), (38): Xaa is C or S
  MOD_RES (16), (17), (18), (19), (20): Xaa is A or G
  MOD_RES (21), (22), (23), (24): Xaa is A or G or is absent
XXVPTELEPLPMVYYXXXXXXXXXEQLSNEMVVEGXGX

SEQ ID NO: 11462 - protein, 39 aa, Artificial Sequence
  Non-cyclic GFR-binding peptide
  MOD_RES (5), (6), (37), (39): Xaa is C or S
SASPXXVPQDLSPISILFIVGRTPKVYKQYEMVVKSXKX

SEQ ID NO: 11463 - protein, 38 aa, Artificial Sequence
  Non-cyclic GFR-binding peptide
  MOD_RES (3), (4), (36), (38): Xaa is C or S
KAXXVPTELEPLPMVYYDENEKVVEQLSNDMVVEGXGX

SEQ ID NO: 11464 - protein, 35 aa, Artificial Sequence
  Non-cyclic GFR-binding peptide
  MOD_RES (4), (5): Xaa is C or S
PKAXXVPTELEPLTMLYYDEYDKVVEQLSNEMVVE

SEQ ID NO: 11465 - protein, 34 aa, Artificial Sequence
  Non-cyclic GFR-binding peptide
  MOD_RES (1), (33): Xaa is C or S
XAPTKLEPLTVLYYDDSSNVIEQLSNNMVVRSXG

SEQ ID NO: 11466 - protein, 38 aa, Artificial Sequence
  Non-cyclic GFR-binding peptide
  MOD_RES (2), (36), (38): Xaa is C or S
  MOD_RES (16), (17), (18), (19), (20): Xaa is A or G
  MOD_RES (21), (22), (23), (24): Xaa is A or G or is absent
TXAPTKLSPISVLFIXXXXXXXXXYKQYENMVVRSXGX

SEQ ID NO: 11467 - protein, 38 aa, Artificial Sequence
  Non-cyclic GFR-binding peptide
  MOD_RES (5), (6), (38): Xaa is C or S
TPPTXXVPTRLEPLTILYYDSANNVVEQLSNDMVVESX

SEQ ID NO: 11468 - protein, 38 aa, Artificial Sequence
  Non-cyclic GFR-binding peptide
  MOD_RES (3), (4), (38): Xaa is C or S
  MOD_RES (18), (19), (20), (21), (22): Xaa is A or G
  MOD_RES (23), (24), (25), (26): Xaa is A or G or is absent
KAXXVPTELEPLTMLYYXXXXXXXXXEQLSNEMVVEGX

SEQ ID NO: 11469 - protein, 32 aa, Artificial Sequence
  Non-cyclic GFR-binding peptide
  MOD_RES (14), (15), (16), (17), (18): Xaa is A or G
  MOD_RES (19), (20), (21), (22): Xaa is A or G or is absent
VPTRLSAISILYLXXXXXXXXXLKNYQDMVVE

SEQ ID NO: 11470 - protein, 38 aa, Artificial Sequence
  Non-cyclic GFR-binding peptide
  MOD_RES (3), (4), (36), (38): Xaa is C or S
KAXXVPTELSPISMLFIDENEKVVYKQYEDMVVEGXGX

SEQ ID NO: 11471 - protein, 33 aa, Artificial Sequence
  Non-cyclic GFR-binding peptide
  MOD_RES (1), (1): Xaa is C or S
  MOD_RES (15), (16), (17), (18), (19): Xaa is A or G
  MOD_RES (20), (21), (22), (23): Xaa is A or G or is absent
XVPQALSPISILFIXXXXXXXXXYKQYEMIVRS

SEQ ID NO: 11472 - protein, 36 aa, Artificial Sequence
  Non-cyclic GFR-binding peptide
  MOD_RES (1), (2), (36): Xaa is C or S
  MOD_RES (16), (17), (18), (19), (20): Xaa is A or G
  MOD_RES (21), (22), (23), (24): Xaa is A or G or is absent
XXAPTQLSPISVLFIXXXXXXXXXYKQYENMVVRAX

SEQ ID NO: 11473 - protein, 32 aa, Artificial Sequence
  Non-cyclic GFR-binding peptide
  MOD_RES (14), (15), (16), (17), (18): Xaa is A or G
  MOD_RES (19), (20), (21), (22): Xaa is A or G or is absent
APTKLSPISVLFIXXXXXXXXXYKQYENMVVR

SEQ ID NO: 11474 - protein, 33 aa, Artificial Sequence
  Non-cyclic GFR-binding peptide
  MOD_RES (1), (33): Xaa is C or S
XAPTKLEPLPVVYYDDSSNVIEQLSNNMVVRSX

SEQ ID NO: 11475 - protein, 38 aa, Artificial Sequence
  Non-cyclic GFR-binding peptide
  MOD_RES (6), (6): Xaa is C or S
  MOD_RES (20), (21), (22), (23), (24): Xaa is A or G
  MOD_RES (25), (26), (27), (28): Xaa is A or G or is absent
VTKPTXAPTKLEPLTVLYYXXXXXXXXXEQLSNNMVVR

SEQ ID NO: 11476 - protein, 39 aa, Artificial Sequence
  Non-cyclic GFR-binding peptide
  MOD_RES (6), (7), (39): Xaa is C or S
SIPKAXXVPTELEPLTMLYYDEYDKVVEQLSNEMVVEGX

SEQ ID NO: 11477 - protein, 36 aa, Artificial Sequence
  Non-cyclic GFR-binding peptide
  MOD_RES (4), (5): Xaa is C or S
PKPXXAPTQLEPLPVVYYDDSSNVIEQLSNNMVVRA

SEQ ID NO: 11478 - protein, 42 aa, Artificial Sequence
  Non-cyclic GFR-binding peptide
  MOD_RES (4), (5), (39), (41): Xaa is C or S
  MOD_RES (19), (20), (21), (22), (23): Xaa is A or G
  MOD_RES (24), (25), (26), (27): Xaa is A or G or is absent
PKAXXVPTELEPLPMVYYXXXXXXXXXEQLSNEMVVEGXGXR

SEQ ID NO: 11479 - protein, 32 aa, Artificial Sequence
  Non-cyclic GFR-binding peptide
  MOD_RES (14), (15), (16), (17), (18): Xaa is A or G
  MOD_RES (19), (20), (21), (22): Xaa is A or G or is absent
VSQDLSPISILFIXXXXXXXXXYKQYEMIVKS

SEQ ID NO: 11480 - protein, 40 aa, Artificial Sequence
  Non-cyclic GFR-binding peptide
  MOD_RES (4), (5), (37), (39): Xaa is C or S
PKAXXVPTELEPLPMVYYDENEKVVEQLSNDMVVEGXGXR

SEQ ID NO: 11481 - protein, 39 aa, Artificial Sequence
  Non-cyclic GFR-binding peptide
  MOD_RES (2), (3), (36), (38): Xaa is C or S
  MOD_RES (17), (18), (19), (20), (21): Xaa is A or G
  MOD_RES (22), (23), (24), (25): Xaa is A or G or is absent
PXXVPQALEPLTILYYXXXXXXXXXEQLSNMIVRSXKXS

SEQ ID NO: 11482 - protein, 35 aa, Artificial Sequence
  Non-cyclic GFR-binding peptide
  MOD_RES (1), (32), (34): Xaa is C or S
XVPQDLEPLPIVYYVGRTPKVEQLSNMVVKSXKXS

SEQ ID NO: 11483 - protein, 36 aa, Artificial Sequence
  Non-cyclic GFR-binding peptide
  MOD_RES (4), (5): Xaa is C or S
PPTXXVPTRLNAISILYFDSANNVVLKKYRDMVVES

SEQ ID NO: 11484 - protein, 34 aa, Artificial Sequence
  Non-cyclic GFR-binding peptide
  MOD_RES (31), (33): Xaa is C or S
VPQALEPLTILYYVGRKPKVEQLSNMIVRSXKXS

SEQ ID NO: 11485 - protein, 37 aa, Artificial Sequence
  Non-cyclic GFR-binding peptide
  MOD_RES (1), (34), (36): Xaa is C or S
  MOD_RES (15), (16), (17), (18), (19): Xaa is A or G
  MOD_RES (20), (21), (22), (23): Xaa is A or G or is absent
XVPQALEPLTILYYXXXXXXXXXEQLSNMIVRSXKXS

SEQ ID NO: 11486 - protein, 37 aa, Artificial Sequence
  Non-cyclic GFR-binding peptide
  MOD_RES (34), (36): Xaa is C or S
  MOD_RES (14), (15), (16), (17), (18): Xaa is A or G
  MOD_RES (19), (20), (21), (22): Xaa is A or G or is absent
VPTELEPLPMVYYXXXXXXXXXEQLSNEMVVEGXGXR

SEQ ID NO: 11487 - protein, 33 aa, Artificial Sequence
  Non-cyclic GFR-binding peptide
  MOD_RES (32), (32): Xaa is C or S
VPTRLEPLPIVYYDSANNVVEQLSNDMVVESXG

SEQ ID NO: 11488 - protein, 35 aa, Artificial Sequence
  Non-cyclic GFR-binding peptide
  MOD_RES (2), (3), (35): Xaa is C or S
AXXVPTELEPLPMVYYDENEKVVEQLSNDMVVEGX

SEQ ID NO: 11489 - protein, 40 aa, Artificial Sequence
  Non-cyclic GFR-binding peptide
  MOD_RES (4), (5), (37), (39): Xaa is C or S
PKPXXAPTKLSPISVLFIDDSSNVIYKQYENMVVRSXGXH

SEQ ID NO: 11490 - protein, 32 aa, Artificial Sequence
  Non-cyclic GFR-binding peptide
  MOD_RES (31), (31): Xaa is C or S
VPQDLSPISILFIVGRTPKVYKQYEMVVKSXK

SEQ ID NO: 11491 - protein, 36 aa, Artificial Sequence
  Non-cyclic GFR-binding peptide
  MOD_RES (1), (2), (35): Xaa is C or S
  MOD_RES (16), (17), (18), (19), (20): Xaa is A or G
  MOD_RES (21), (22), (23), (24): Xaa is A or G or is absent
XXVPQDLEPLPIVYYXXXXXXXXXEQLSNMVVKSXK

SEQ ID NO: 11492 - protein, 36 aa, Artificial Sequence
  Non-cyclic GFR-binding peptide
  MOD_RES (1), (2), (36): Xaa is C or S
  MOD_RES (16), (17), (18), (19), (20): Xaa is A or G
  MOD_RES (21), (22), (23), (24): Xaa is A or G or is absent
XXVPTRLNAISILYFXXXXXXXXXLKKYRDMVVESX

SEQ ID NO: 11493 - protein, 34 aa, Artificial Sequence
  Non-cyclic GFR-binding peptide
  MOD_RES (1), (2): Xaa is C or S
  MOD_RES (16), (17), (18), (19), (20): Xaa is A or G
  MOD_RES (21), (22), (23), (24): Xaa is A or G or is absent
XXVPTRLNAISILYFXXXXXXXXXLKKYRDMVVE

SEQ ID NO: 11494 - protein, 36 aa, Artificial Sequence
  Non-cyclic GFR-binding peptide
  MOD_RES (2), (3): Xaa is C or S
  MOD_RES (17), (18), (19), (20), (21): Xaa is A or G
  MOD_RES (22), (23), (24), (25): Xaa is A or G or is absent
TXXVPTRLEPLPIVYYXXXXXXXXXEQLSNDMVVES

SEQ ID NO: 11495 - protein, 33 aa, Artificial Sequence
  Non-cyclic GFR-binding peptide
  MOD_RES (1), (32): Xaa is C or S
XVPQALSPISILFIVGRKPKVYKQYEMIVRSXK

SEQ ID NO: 11496 - protein, 36 aa, Artificial Sequence
  Non-cyclic GFR-binding peptide
  MOD_RES (4), (5): Xaa is C or S
PKPXXAPTKLSPISVLFIDDSSNVIYKQYENMVVRS

SEQ ID NO: 11497 - protein, 36 aa, Artificial Sequence
  Non-cyclic GFR-binding peptide
  MOD_RES (2), (3), (35): Xaa is C or S
PXXAPTQLSPISVLFIDDSSNVIYKQYENMVVRAXG

SEQ ID NO: 11498 - protein, 35 aa, Artificial Sequence
  Non-cyclic GFR-binding peptide
  MOD_RES (2), (3): Xaa is C or S
  MOD_RES (17), (18), (19), (20), (21): Xaa is A or G
  MOD_RES (22), (23), (24), (25): Xaa is A or G or is absent
PXXVSQDLEPLPIVYYXXXXXXXXXEQLSNMIVKS

SEQ ID NO: 11499 - protein, 42 aa, Artificial Sequence
  Non-cyclic GFR-binding peptide
  MOD_RES (6), (7), (39), (41): Xaa is C or S
YVPKPXXAPTKLEPLPVVYYDDSSNVIEQLSNNMVVRSXGXH

SEQ ID NO: 11500 - protein, 34 aa, Artificial Sequence
  Non-cyclic GFR-binding peptide
  MOD_RES (3), (3): Xaa is C or S
PTXAPTKLSPISVLFIDDSSNVIYKQYENMVVRS

SEQ ID NO: 11501 - protein, 39 aa, Artificial Sequence
  Non-cyclic GFR-binding peptide
  MOD_RES (6), (38): Xaa is C or S
VTKPTXAPTKLEPLPVVYYDDSSNVIEQLSNNMVVRSXG

SEQ ID NO: 11502 - protein, 34 aa, Artificial Sequence
  Non-cyclic GFR-binding peptide
  MOD_RES (1), (2): Xaa is C or S
  MOD_RES (16), (17), (18), (19), (20): Xaa is A or G
  MOD_RES (21), (22), (23), (24): Xaa is A or G or is absent
XXVPQALEPLTILYYXXXXXXXXXEQLSNMIVRS

SEQ ID NO: 11503 - protein, 35 aa, Artificial Sequence
  Non-cyclic GFR-binding peptide
  MOD_RES (32), (34): Xaa is C or S
VPTELEPLPMVYYDEYDKVVEQLSNEMVVEGXGXR

SEQ ID NO: 11504 - protein, 36 aa, Artificial Sequence
  Non-cyclic GFR-binding peptide
  MOD_RES (1), (33), (35): Xaa is C or S
XAPTQLEPLTVLYYDDSSNVIEQLSNNMVVRAXGXH

SEQ ID NO: 11505 - protein, 36 aa, Artificial Sequence
  Non-cyclic GFR-binding peptide
  MOD_RES (2), (3): Xaa is C or S
  MOD_RES (17), (18), (19), (20), (21): Xaa is A or G
  MOD_RES (22), (23), (24), (25): Xaa is A or G or is absent
PXXAPTQLEPLPVVYYXXXXXXXXXEQLSNNMVVRA

SEQ ID NO: 11506 - protein, 37 aa, Artificial Sequence
  Non-cyclic GFR-binding peptide
  MOD_RES (6), (7): Xaa is C or S
TVPKPXXAPTQLEPLPVVYYDDSSNVIEQLSNNMVVR

SEQ ID NO: 11507 - protein, 36 aa, Artificial Sequence
  Non-cyclic GFR-binding peptide
  MOD_RES (4), (5): Xaa is C or S
PKPXXAPTQLSPISVLFIDDSSNVIYKQYENMVVRA

SEQ ID NO: 11508 - protein, 36 aa, Artificial Sequence
  Non-cyclic GFR-binding peptide
  MOD_RES (5), (6): Xaa is C or S
VPKPXXAPTKLSPISVLFIDDSSNVIYKQYENMVVR

SEQ ID NO: 11509 - protein, 33 aa, Artificial Sequence
  Non-cyclic GFR-binding peptide
  MOD_RES (32), (32): Xaa is C or S
VPTELEPLTMLYYDEYDKVVEQLSNEMVVEGXG

SEQ ID NO: 11510 - protein, 34 aa, Artificial Sequence
  Non-cyclic GFR-binding peptide
  MOD_RES (1), (2), (34): Xaa is C or S
XXAPTKLEPLTVLYYDDSSNVIEQLSNNMVVRSX

SEQ ID NO: 11511 - protein, 37 aa, Artificial Sequence
  Non-cyclic GFR-binding peptide
  MOD_RES (4), (36): Xaa is C or S
KPTXAPTKLEPLPVVYYDDSSNVIEQLSNNMVVRSXG

SEQ ID NO: 11512 - protein, 37 aa, Artificial Sequence
  Non-cyclic GFR-binding peptide
  MOD_RES (1), (35), (37): Xaa is C or S
  MOD_RES (15), (16), (17), (18), (19): Xaa is A or G
  MOD_RES (20), (21), (22), (23): Xaa is A or G or is absent
XAPTQLSPISVLFIXXXXXXXXXYKQYENMVVRAXGX

SEQ ID NO: 11513 - protein, 37 aa, Artificial Sequence
  Non-cyclic GFR-binding peptide
  MOD_RES (5), (6): Xaa is C or S
IPKAXXVPTELEPLTMLYYDENEKVVEQLSNDMVVEG

SEQ ID NO: 11514 - protein, 36 aa, Artificial Sequence
  Non-cyclic GFR-binding peptide
  MOD_RES (1), (34), (36): Xaa is C or S
  MOD_RES (15), (16), (17), (18), (19): Xaa is A or G
  MOD_RES (20), (21), (22), (23): Xaa is A or G or is absent
XVSQDLEPLPIVYYXXXXXXXXXEQLSNMIVKSXKX

SEQ ID NO: 11515 - protein, 38 aa, Artificial Sequence
  Non-cyclic GFR-binding peptide
  MOD_RES (6), (6): Xaa is C or S
  MOD_RES (20), (21), (22), (23), (24): Xaa is A or G
  MOD_RES (25), (26), (27), (28): Xaa is A or G or is absent
VTKPTXAPTKLEPLPVVYYXXXXXXXXXEQLSNNMVVR

SEQ ID NO: 11516 - protein, 36 aa, Artificial Sequence
  Non-cyclic GFR-binding peptide
  MOD_RES (1), (2), (36): Xaa is C or S
  MOD_RES (16), (17), (18), (19), (20): Xaa is A or G
  MOD_RES (21), (22), (23), (24): Xaa is A or G or is absent
XXAPTKLEPLPVVYYXXXXXXXXXEQLSNNMVVRSX

SEQ ID NO: 11517 - protein, 35 aa, Artificial Sequence
  Non-cyclic GFR-binding peptide
  MOD_RES (1), (33), (35): Xaa is C or S
XAPTQLSPISVLFIDDSSNVIYKQYENMVVRAXGX

SEQ ID NO: 11518 - protein, 39 aa, Artificial Sequence
  Non-cyclic GFR-binding peptide
  MOD_RES (3), (4), (37), (39): Xaa is C or S
  MOD_RES (18), (19), (20), (21), (22): Xaa is A or G
  MOD_RES (23), (24), (25), (26): Xaa is A or G or is absent
APXXVPQALEPLTILYYXXXXXXXXXEQLSNMIVRSXKX

SEQ ID NO: 11519 - protein, 35 aa, Artificial Sequence
  Non-cyclic GFR-binding peptide
  MOD_RES (32), (34): Xaa is C or S
APTQLSPISVLFIDDSSNVIYKQYENMVVRAXGXH

SEQ ID NO: 11520 - protein, 37 aa, Artificial Sequence
  Non-cyclic GFR-binding peptide
  MOD_RES (4), (5): Xaa is C or S
  MOD_RES (19), (20), (21), (22), (23): Xaa is A or G
  MOD_RES (24), (25), (26), (27): Xaa is A or G or is absent
ASPXXVPQDLSPISILFIXXXXXXXXXYKQYEMVVKS

SEQ ID NO: 11521 - protein, 39 aa, Artificial Sequence
  Non-cyclic GFR-binding peptide
  MOD_RES (3), (4), (37), (39): Xaa is C or S
  MOD_RES (18), (19), (20), (21), (22): Xaa is A or G
  MOD_RES (23), (24), (25), (26): Xaa is A or G or is absent
SPXXVPQDLSPISILFIXXXXXXXXXYKQYEMVVKSXKX

SEQ ID NO: 11522 - protein, 39 aa, Artificial Sequence
  Non-cyclic GFR-binding peptide
  MOD_RES (2), (3), (37), (39): Xaa is C or S
  MOD_RES (17), (18), (19), (20), (21): Xaa is A or G
  MOD_RES (22), (23), (24), (25): Xaa is A or G or is absent
PXXAPTKLEPLTVLYYXXXXXXXXXEQLSNNMVVRSXGX

SEQ ID NO: 11523 - protein, 33 aa, Artificial Sequence
  Non-cyclic GFR-binding peptide
  MOD_RES (1), (1): Xaa is C or S
  MOD_RES (15), (16), (17), (18), (19): Xaa is A or G
  MOD_RES (20), (21), (22), (23): Xaa is A or G or is absent
XVPTELSPISMLFIXXXXXXXXXYKQYEEMVVE

SEQ ID NO: 11524 - protein, 38 aa, Artificial Sequence
  Non-cyclic GFR-binding peptide
  MOD_RES (2), (3), (37): Xaa is C or S
  MOD_RES (17), (18), (19), (20), (21): Xaa is A or G
  MOD_RES (22), (23), (24), (25): Xaa is A or G or is absent
AXXVPTELEPLTMLYYXXXXXXXXXEQLSNDMVVEGXG

SEQ ID NO: 11525 - protein, 39 aa, Artificial Sequence
  Non-cyclic GFR-binding peptide
  MOD_RES (3), (4), (38): Xaa is C or S
  MOD_RES (18), (19), (20), (21), (22): Xaa is A or G
  MOD_RES (23), (24), (25), (26): Xaa is A or G or is absent
KAXXVPTELEPLTMLYYXXXXXXXXXEQLSNEMVVEGXG

SEQ ID NO: 11526 - protein, 39 aa, Artificial Sequence
  Non-cyclic GFR-binding peptide
  MOD_RES (5), (6), (37), (39): Xaa is C or S
SASPXXVPQDLEPLPIVYYVGRTPKVEQLSNMVVKSXKX

SEQ ID NO: 11527 - protein, 34 aa, Artificial Sequence
  Non-cyclic GFR-binding peptide
  MOD_RES (1), (2): Xaa is C or S
  MOD_RES (16), (17), (18), (19), (20): Xaa is A or G
  MOD_RES (21), (22), (23), (24): Xaa is A or G or is absent
XXVPTELEPLTMLYYXXXXXXXXXEQLSNEMVVE

SEQ ID NO: 11528 - protein, 33 aa, Artificial Sequence
  Non-cyclic GFR-binding peptide
  MOD_RES (2), (3): Xaa is C or S
AXXVPTELEPLPMVYYDENEKVVEQLSNDMVVE

SEQ ID NO: 11529 - protein, 40 aa, Artificial Sequence
  Non-cyclic GFR-binding peptide
  MOD_RES (6), (7), (40): Xaa is C or S
  MOD_RES (21), (22), (23), (24), (25): Xaa is A or G
  MOD_RES (26), (27), (28), (29): Xaa is A or G or is absent
ASASPXXVPQDLSPISILFIXXXXXXXXXYKQYEMVVKSX

SEQ ID NO: 11530 - protein, 44 aa, Artificial Sequence
  Non-cyclic GFR-binding peptide
  MOD_RES (6), (7), (41), (43): Xaa is C or S
  MOD_RES (21), (22), (23), (24), (25): Xaa is A or G
  MOD_RES (26), (27), (28), (29): Xaa is A or G or is absent
YVPKPXXAPTKLSPISVLFIXXXXXXXXXYKQYENMVVRSXGXH

SEQ ID NO: 11531 - protein, 40 aa, Artificial Sequence
  Non-cyclic GFR-binding peptide
  MOD_RES (5), (39): Xaa is C or S
  MOD_RES (19), (20), (21), (22), (23): Xaa is A or G
  MOD_RES (24), (25), (26), (27): Xaa is A or G or is absent
TKPTXAPTKLSPISVLFIXXXXXXXXXYKQYENMVVRSXG

SEQ ID NO: 11532 - protein, 34 aa, Artificial Sequence
  Non-cyclic GFR-binding peptide
  MOD_RES (1), (1): Xaa is C or S
  MOD_RES (15), (16), (17), (18), (19): Xaa is A or G
  MOD_RES (20), (21), (22), (23): Xaa is A or G or is absent
XVPTELEPLPMVYYXXXXXXXXXEQLSNEMVVEG

SEQ ID NO: 11533 - protein, 38 aa, Artificial Sequence
  Non-cyclic GFR-binding peptide
  MOD_RES (2), (3), (37): Xaa is C or S
  MOD_RES (17), (18), (19), (20), (21): Xaa is A or G
  MOD_RES (22), (23), (24), (25): Xaa is A or G or is absent
TXXVPTRLEPLTILYYXXXXXXXXXEQLSNDMVVESXG

SEQ ID NO: 11534 - protein, 38 aa, Artificial Sequence
  Non-cyclic GFR-binding peptide
  MOD_RES (1), (2), (36), (38): Xaa is C or S
  MOD_RES (16), (17), (18), (19), (20): Xaa is A or G
  MOD_RES (21), (22), (23), (24): Xaa is A or G or is absent
XXAPTKLEPLTVLYYXXXXXXXXXEQLSNNMVVRSXGX

SEQ ID NO: 11535 - protein, 40 aa, Artificial Sequence
  Non-cyclic GFR-binding peptide
  MOD_RES (3), (4), (37), (39): Xaa is C or S
  MOD_RES (18), (19), (20), (21), (22): Xaa is A or G
  MOD_RES (23), (24), (25), (26): Xaa is A or G or is absent
APXXVPQALEPLTILYYXXXXXXXXXEQLSNMIVRSXKXS

SEQ ID NO: 11536 - protein, 32 aa, Artificial Sequence
  Non-cyclic GFR-binding peptide
  MOD_RES (1), (2): Xaa is C or S
XXVPQDLEPLPIVYYVGRTPKVEQLSNMVVKS

SEQ ID NO: 11537 - protein, 35 aa, Artificial Sequence
  Non-cyclic GFR-binding peptide
  MOD_RES (1), (2), (35): Xaa is C or S
  MOD_RES (16), (17), (18), (19), (20): Xaa is A or G
  MOD_RES (21), (22), (23), (24): Xaa is A or G or is absent
XXVPQDLSPISILFIXXXXXXXXXYKQYEMVVKSX

SEQ ID NO: 11538 - protein, 39 aa, Artificial Sequence
  Non-cyclic GFR-binding peptide
  MOD_RES (2), (3), (37), (39): Xaa is C or S
  MOD_RES (17), (18), (19), (20), (21): Xaa is A or G
  MOD_RES (22), (23), (24), (25): Xaa is A or G or is absent
AXXVPTELSPISMLFIXXXXXXXXXYKQYEDMVVEGXGX

SEQ ID NO: 11539 - protein, 37 aa, Artificial Sequence
  Non-cyclic GFR-binding peptide
  MOD_RES (3), (4): Xaa is C or S
  MOD_RES (18), (19), (20), (21), (22): Xaa is A or G
  MOD_RES (23), (24), (25), (26): Xaa is A or G or is absent
PTXXVPTRLNAISILYFXXXXXXXXXLKKYRDMVVES

SEQ ID NO: 11540 - protein, 34 aa, Artificial Sequence
  Non-cyclic GFR-binding peptide
  MOD_RES (3), (4): Xaa is C or S
KAXXVPTELSPISMLFIDEYDKVVYKQYEEMVVE

SEQ ID NO: 11541 - protein, 41 aa, Artificial Sequence
  Non-cyclic GFR-binding peptide
  MOD_RES (6), (7), (41): Xaa is C or S
  MOD_RES (21), (22), (23), (24), (25): Xaa is A or G
  MOD_RES (26), (27), (28), (29): Xaa is A or G or is absent
TVPKPXXAPTQLEPLTVLYYXXXXXXXXXEQLSNNMVVRAX

SEQ ID NO: 11542 - protein, 36 aa, Artificial Sequence
  Non-cyclic GFR-binding peptide
  MOD_RES (5), (6): Xaa is C or S
SASPXXVPQDLSPISILFIVGRTPKVYKQYEMVVKS

SEQ ID NO: 11543 - protein, 32 aa, Artificial Sequence
  Non-cyclic GFR-binding peptide
  MOD_RES (1), (32): Xaa is C or S
XVSQDLEPLPIVYYIGKTPKIEQLSNMIVKSX

SEQ ID NO: 11544 - protein, 42 aa, Artificial Sequence
  Non-cyclic GFR-binding peptide
  MOD_RES (4), (5), (39), (41): Xaa is C or S
  MOD_RES (19), (20), (21), (22), (23): Xaa is A or G
  MOD_RES (24), (25), (26), (27): Xaa is A or G or is absent
PKPXXAPTKLEPLPVVYYXXXXXXXXXEQLSNNMVVRSXGXH

SEQ ID NO: 11545 - protein, 37 aa, Artificial Sequence
  Non-cyclic GFR-binding peptide
  MOD_RES (6), (7): Xaa is C or S
ASAAPXXVPQALSPISILFIVGRKPKVYKQYEMIVRS

SEQ ID NO: 11546 - protein, 33 aa, Artificial Sequence
  Non-cyclic GFR-binding peptide
  MOD_RES (2), (2): Xaa is C or S
TXAPTKLSPISVLFIDDSSNVIYKQYENMVVRS

SEQ ID NO: 11547 - protein, 32 aa, Artificial Sequence
  Non-cyclic GFR-binding peptide
  MOD_RES (32), (32): Xaa is C or S
APTKLEPLTVLYYDDSSNVIEQLSNNMVVRSX

SEQ ID NO: 11548 - protein, 35 aa, Artificial Sequence
  Non-cyclic GFR-binding peptide
  MOD_RES (2), (34): Xaa is C or S
TXAPTKLEPLPVVYYDDSSNVIEQLSNNMVVRSXG

SEQ ID NO: 11549 - protein, 40 aa, Artificial Sequence
  Non-cyclic GFR-binding peptide
  MOD_RES (6), (7): Xaa is C or S
  MOD_RES (21), (22), (23), (24), (25): Xaa is A or G
  MOD_RES (26), (27), (28), (29): Xaa is A or G or is absent
TVPKPXXAPTQLSPISVLFIXXXXXXXXXYKQYENMVVRA

SEQ ID NO: 11550 - protein, 35 aa, Artificial Sequence
  Non-cyclic GFR-binding peptide
  MOD_RES (32), (34): Xaa is C or S
APTQLEPLTVLYYDDSSNVIEQLSNNMVVRAXGXH

SEQ ID NO: 11551 - protein, 37 aa, Artificial Sequence
  Non-cyclic GFR-binding peptide
  MOD_RES (3), (4): Xaa is C or S
  MOD_RES (18), (19), (20), (21), (22): Xaa is A or G
  MOD_RES (23), (24), (25), (26): Xaa is A or G or is absent
KAXXVPTELEPLTMLYYXXXXXXXXXEQLSNEMVVEG

SEQ ID NO: 11552 - protein, 41 aa, Artificial Sequence
  Non-cyclic GFR-binding peptide
  MOD_RES (5), (6), (40): Xaa is C or S
  MOD_RES (20), (21), (22), (23), (24): Xaa is A or G
  MOD_RES (25), (26), (27), (28): Xaa is A or G or is absent
VPKPXXAPTQLEPLTVLYYXXXXXXXXXEQLSNNMVVRAXG

SEQ ID NO: 11553 - protein, 40 aa, Artificial Sequence
  Non-cyclic GFR-binding peptide
  MOD_RES (4), (5), (39): Xaa is C or S
  MOD_RES (19), (20), (21), (22), (23): Xaa is A or G
  MOD_RES (24), (25), (26), (27): Xaa is A or G or is absent
PKPXXAPTQLEPLPVVYYXXXXXXXXXEQLSNNMVVRAXG

SEQ ID NO: 11554 - protein, 40 aa, Artificial Sequence
  Non-cyclic GFR-binding peptide
  MOD_RES (4), (5), (38), (40): Xaa is C or S
  MOD_RES (19), (20), (21), (22), (23): Xaa is A or G
  MOD_RES (24), (25), (26), (27): Xaa is A or G or is absent
AAPXXVPQALEPLTILYYXXXXXXXXXEQLSNMIVRSXKX

SEQ ID NO: 11555 - protein, 35 aa, Artificial Sequence
  Non-cyclic GFR-binding peptide
  MOD_RES (33), (35): Xaa is C or S
  MOD_RES (14), (15), (16), (17), (18): Xaa is A or G
  MOD_RES (19), (20), (21), (22): Xaa is A or G or is absent
VSQDLEPLPIVYYXXXXXXXXXEQLSNMIVKSXKX

SEQ ID NO: 11556 - protein, 37 aa, Artificial Sequence
  Non-cyclic GFR-binding peptide
  MOD_RES (5), (6), (37): Xaa is C or S
SASPXXVPQDLEPLPIVYYVGRTPKVEQLSNMVVKSX

SEQ ID NO: 11557 - protein, 35 aa, Artificial Sequence
  Non-cyclic GFR-binding peptide
  MOD_RES (1), (2), (33), (35): Xaa is C or S
XXVPQALEPLTILYYVGRKPKVEQLSNMIVRSXKX

SEQ ID NO: 11558 - protein, 35 aa, Artificial Sequence
  Non-cyclic GFR-binding peptide
  MOD_RES (1), (2): Xaa is C or S
  MOD_RES (16), (17), (18), (19), (20): Xaa is A or G
  MOD_RES (21), (22), (23), (24): Xaa is A or G or is absent
XXVPTELEPLPMVYYXXXXXXXXXEQLSNEMVVEG

SEQ ID NO: 11559 - protein, 36 aa, Artificial Sequence
  Non-cyclic GFR-binding peptide
  MOD_RES (1), (33), (35): Xaa is C or S
XVPTELEPLPMVYYDEYDKVVEQLSNEMVVEGXGXR

SEQ ID NO: 11560 - protein, 42 aa, Artificial Sequence
  Non-cyclic GFR-binding peptide
  MOD_RES (6), (7), (41): Xaa is C or S
  MOD_RES (21), (22), (23), (24), (25): Xaa is A or G
  MOD_RES (26), (27), (28), (29): Xaa is A or G or is absent
TVPKPXXAPTQLEPLPVVYYXXXXXXXXXEQLSNNMVVRAXG

SEQ ID NO: 11561 - protein, 34 aa, Artificial Sequence
  Non-cyclic GFR-binding peptide
  MOD_RES (1), (2): Xaa is C or S
  MOD_RES (16), (17), (18), (19), (20): Xaa is A or G
  MOD_RES (21), (22), (23), (24): Xaa is A or G or is absent
XXVSQDLEPLPIVYYXXXXXXXXXEQLSNMIVKS

SEQ ID NO: 11562 - protein, 35 aa, Artificial Sequence
  Non-cyclic GFR-binding peptide
  MOD_RES (1), (2), (34): Xaa is C or S
XXVPTELSPISMLFIDENEKVVYKQYEDMVVEGXG

SEQ ID NO: 11563 - protein, 39 aa, Artificial Sequence
  Non-cyclic GFR-binding peptide
  MOD_RES (5), (39): Xaa is C or S
  MOD_RES (19), (20), (21), (22), (23): Xaa is A or G
  MOD_RES (24), (25), (26), (27): Xaa is A or G or is absent
TKPTXAPTKLSPISVLFIXXXXXXXXXYKQYENMVVRSX

SEQ ID NO: 11564 - protein, 39 aa, Artificial Sequence
  Non-cyclic GFR-binding peptide
  MOD_RES (5), (6), (37), (39): Xaa is C or S
SASPXXVSQDLSPISILFIIGKTPKIYKQYEMIVKSXKX

SEQ ID NO: 11565 - protein, 36 aa, Artificial Sequence
  Non-cyclic GFR-binding peptide
  MOD_RES (3), (3): Xaa is C or S
  MOD_RES (17), (18), (19), (20), (21): Xaa is A or G
  MOD_RES (22), (23), (24), (25): Xaa is A or G or is absent
PTXAPTKLEPLTVLYYXXXXXXXXXEQLSNNMVVRS

SEQ ID NO: 11566 - protein, 39 aa, Artificial Sequence
  Non-cyclic GFR-binding peptide
  MOD_RES (7), (7): Xaa is C or S
  MOD_RES (21), (22), (23), (24), (25): Xaa is A or G
  MOD_RES (26), (27), (28), (29): Xaa is A or G or is absent
HVTKPTXAPTKLEPLTVLYYXXXXXXXXXEQLSNNMVVR

SEQ ID NO: 11567 - protein, 32 aa, Artificial Sequence
  Non-cyclic GFR-binding peptide
  MOD_RES (1), (1): Xaa is C or S
XVPTELEPLTMLYYDENEKVVEQLSNDMVVEG

SEQ ID NO: 11568 - protein, 43 aa, Artificial Sequence
  Non-cyclic GFR-binding peptide
  MOD_RES (6), (7), (41), (43): Xaa is C or S
  MOD_RES (21), (22), (23), (24), (25): Xaa is A or G
  MOD_RES (26), (27), (28), (29): Xaa is A or G or is absent
YVPKPXXAPTKLSPISVLFIXXXXXXXXXYKQYENMVVRSXGX

SEQ ID NO: 11569 - protein, 41 aa, Artificial Sequence
  Non-cyclic GFR-binding peptide
  MOD_RES (5), (6), (38), (40): Xaa is C or S
IPKAXXVPTELEPLPMVYYDENEKVVEQLSNDMVVEGXGXR

SEQ ID NO: 11570 - protein, 39 aa, Artificial Sequence
  Non-cyclic GFR-binding peptide
  MOD_RES (1), (2), (36), (38): Xaa is C or S
  MOD_RES (16), (17), (18), (19), (20): Xaa is A or G
  MOD_RES (21), (22), (23), (24): Xaa is A or G or is absent
XXVPTELEPLPMVYYXXXXXXXXXEQLSNEMVVEGXGXR

SEQ ID NO: 11571 - protein, 42 aa, Artificial Sequence
  Non-cyclic GFR-binding peptide
  MOD_RES (4), (5), (39), (41): Xaa is C or S
  MOD_RES (19), (20), (21), (22), (23): Xaa is A or G
  MOD_RES (24), (25), (26), (27): Xaa is A or G or is absent
PKAXXVPTELEPLPMVYYXXXXXXXXXEQLSNDMVVEGXGXR

SEQ ID NO: 11572 - protein, 33 aa, Artificial Sequence
  Non-cyclic GFR-binding peptide
  MOD_RES (1), (33): Xaa is C or S
XAPTQLSPISVLFIDDSSNVIYKQYENMVVRAX

SEQ ID NO: 11573 - protein, 43 aa, Artificial Sequence
  Non-cyclic GFR-binding peptide
  MOD_RES (5), (6), (40), (42): Xaa is C or S
  MOD_RES (20), (21), (22), (23), (24): Xaa is A or G
  MOD_RES (25), (26), (27), (28): Xaa is A or G or is absent
IPKAXXVPTELEPLTMLYYXXXXXXXXXEQLSNEMVVEGXGXR

SEQ ID NO: 11574 - protein, 39 aa, Artificial Sequence
  Non-cyclic GFR-binding peptide
  MOD_RES (2), (3), (37), (39): Xaa is C or S
  MOD_RES (17), (18), (19), (20), (21): Xaa is A or G
  MOD_RES (22), (23), (24), (25): Xaa is A or G or is absent
TXXVPTRLEPLPIVYYXXXXXXXXXEQLSNDMVVESXGX

SEQ ID NO: 11575 - protein, 39 aa, Artificial Sequence
  Non-cyclic GFR-binding peptide
  MOD_RES (3), (4), (36), (38): Xaa is C or S
KAXXVPTELSPISMLFIDENEKVVYKQYEDMVVEGXGXR

SEQ ID NO: 11576 - protein, 41 aa, Artificial Sequence
  Non-cyclic GFR-binding peptide
  MOD_RES (4), (5), (39), (41): Xaa is C or S
  MOD_RES (19), (20), (21), (22), (23): Xaa is A or G
  MOD_RES (24), (25), (26), (27): Xaa is A or G or is absent
PKAXXVPTELEPLPMVYYXXXXXXXXXEQLSNDMVVEGXGX

SEQ ID NO: 11577 - protein, 37 aa, Artificial Sequence
  Non-cyclic GFR-binding peptide
  MOD_RES (34), (36): Xaa is C or S
  MOD_RES (14), (15), (16), (17), (18): Xaa is A or G
  MOD_RES (19), (20), (21), (22): Xaa is A or G or is absent
VPTELSPISMLFIXXXXXXXXXYKQYEEMVVEGXGXR

SEQ ID NO: 11578 - protein, 35 aa, Artificial Sequence
  Non-cyclic GFR-binding peptide
  MOD_RES (5), (5): Xaa is C or S
TKPTXAPTKLEPLPVVYYDDSSNVIEQLSNNMVVR

SEQ ID NO: 11579 - protein, 42 aa, Artificial Sequence
  Non-cyclic GFR-binding peptide
  MOD_RES (6), (7), (39), (41): Xaa is C or S
STPPTXXVPTRLEPLPIVYYDSANNVVEQLSNDMVVESXGXR

SEQ ID NO: 11580 - protein, 42 aa, Artificial Sequence
  Non-cyclic GFR-binding peptide
  MOD_RES (6), (7), (39), (41): Xaa is C or S
YVPKPXXAPTKLEPLTVLYYDDSSNVIEQLSNNMVVRSXGXH

SEQ ID NO: 11581 - protein, 36 aa, Artificial Sequence
  Non-cyclic GFR-binding peptide
  MOD_RES (34), (36): Xaa is C or S
  MOD_RES (14), (15), (16), (17), (18): Xaa is A or G
  MOD_RES (19), (20), (21), (22): Xaa is A or G or is absent
APTKLEPLPVVYYXXXXXXXXXEQLSNNMVVRSXGX

SEQ ID NO: 11582 - protein, 40 aa, Artificial Sequence
  Non-cyclic GFR-binding peptide
  MOD_RES (3), (37), (39): Xaa is C or S
  MOD_RES (17), (18), (19), (20), (21): Xaa is A or G
  MOD_RES (22), (23), (24), (25): Xaa is A or G or is absent
PTXAPTKLEPLPVVYYXXXXXXXXXEQLSNNMVVRSXGXH

SEQ ID NO: 11583 - protein, 38 aa, Artificial Sequence
  Non-cyclic GFR-binding peptide
  MOD_RES (4), (5), (37): Xaa is C or S
PKAXXVPTELSPISMLFIDEYDKVVYKQYEEMVVEGXG

SEQ ID NO: 11584 - protein, 35 aa, Artificial Sequence
  Non-cyclic GFR-binding peptide
  MOD_RES (1), (33), (35): Xaa is C or S
XAPTKLEPLPVVYYDDSSNVIEQLSNNMVVRSXGX

SEQ ID NO: 11585 - protein, 35 aa, Artificial Sequence
  Non-cyclic GFR-binding peptide
  MOD_RES (2), (3), (35): Xaa is C or S
PXXAPTQLEPLPVVYYDDSSNVIEQLSNNMVVRAX

SEQ ID NO: 11586 - protein, 38 aa, Artificial Sequence
  Non-cyclic GFR-binding peptide
  MOD_RES (4), (36), (38): Xaa is C or S
KPTXAPTKLSPISVLFIDDSSNVIYKQYENMVVRSXGX

SEQ ID NO: 11587 - protein, 40 aa, Artificial Sequence
  Non-cyclic GFR-binding peptide
  MOD_RES (6), (7), (39): Xaa is C or S
YVPKPXXAPTKLEPLTVLYYDDSSNVIEQLSNNMVVRSXG

SEQ ID NO: 11588 - protein, 40 aa, Artificial Sequence
  Non-cyclic GFR-binding peptide
  MOD_RES (3), (4), (38), (40): Xaa is C or S
  MOD_RES (18), (19), (20), (21), (22): Xaa is A or G
  MOD_RES (23), (24), (25), (26): Xaa is A or G or is absent
KAXXVPTELSPISMLFIXXXXXXXXXYKQYEEMVVEGXGX

SEQ ID NO: 11589 - protein, 36 aa, Artificial Sequence
  Non-cyclic GFR-binding peptide
  MOD_RES (2), (3), (36): Xaa is C or S
  MOD_RES (17), (18), (19), (20), (21): Xaa is A or G
  MOD_RES (22), (23), (24), (25): Xaa is A or G or is absent
PXXVPQALEPLTILYYXXXXXXXXXEQLSNMIVRSX

SEQ ID NO: 11590 - protein, 37 aa, Artificial Sequence
  Non-cyclic GFR-binding peptide
  MOD_RES (4), (5), (37): Xaa is C or S
PKAXXVPTELEPLPMVYYDEYDKVVEQLSNEMVVEGX

SEQ ID NO: 11591 - protein, 40 aa, Artificial Sequence
  Non-cyclic GFR-binding peptide
  MOD_RES (6), (7), (38), (40): Xaa is C or S
ASASPXXVPQDLEPLPIVYYVGRTPKVEQLSNMVVKSXKX

SEQ ID NO: 11592 - protein, 35 aa, Artificial Sequence
  Non-cyclic GFR-binding peptide
  MOD_RES (1), (33), (35): Xaa is C or S
XAPTKLSPISVLFIDDSSNVIYKQYENMVVRSXGX

SEQ ID NO: 11593 - protein, 32 aa, Artificial Sequence
  Non-cyclic GFR-binding peptide
  MOD_RES (1), (2): Xaa is C or S
XXVPTELSPISMLFIDEYDKVVYKQYEEMVVE

SEQ ID NO: 11594 - protein, 39 aa, Artificial Sequence
  Non-cyclic GFR-binding peptide
  MOD_RES (2), (3), (36), (38): Xaa is C or S
  MOD_RES (17), (18), (19), (20), (21): Xaa is A or G
  MOD_RES (22), (23), (24), (25): Xaa is A or G or is absent
PXXVSQDLSPISILFIXXXXXXXXXYKQYEMIVKSXKXS

SEQ ID NO: 11595 - protein, 38 aa, Artificial Sequence
  Non-cyclic GFR-binding peptide
  MOD_RES (5), (6), (37): Xaa is C or S
SAAPXXVPQALEPLTILYYVGRKPKVEQLSNMIVRSXK

SEQ ID NO: 11596 - protein, 37 aa, Artificial Sequence
  Non-cyclic GFR-binding peptide
  MOD_RES (34), (36): Xaa is C or S
  MOD_RES (14), (15), (16), (17), (18): Xaa is A or G
  MOD_RES (19), (20), (21), (22): Xaa is A or G or is absent
APTQLEPLTVLYYXXXXXXXXXEQLSNNMVVRAXGXH

SEQ ID NO: 11597 - protein, 35 aa, Artificial Sequence
  Non-cyclic GFR-binding peptide
  MOD_RES (1), (33), (35): Xaa is C or S
XVPTRLSAISILYLDSANNVVLKNYQDMVVESXGX

SEQ ID NO: 11598 - protein, 37 aa, Artificial Sequence
  Non-cyclic GFR-binding peptide
  MOD_RES (4), (5): Xaa is C or S
  MOD_RES (19), (20), (21), (22), (23): Xaa is A or G
  MOD_RES (24), (25), (26), (27): Xaa is A or G or is absent
PKAXXVPTELSPISMLFIXXXXXXXXXYKQYEDMVVE

SEQ ID NO: 11599 - protein, 39 aa, Artificial Sequence
  Non-cyclic GFR-binding peptide
  MOD_RES (6), (7): Xaa is C or S
  MOD_RES (21), (22), (23), (24), (25): Xaa is A or G
  MOD_RES (26), (27), (28), (29): Xaa is A or G or is absent
STPPTXXVPTRLEPLPIVYYXXXXXXXXXEQLSNDMVVE

SEQ ID NO: 11600 - protein, 40 aa, Artificial Sequence
  Non-cyclic GFR-binding peptide
  MOD_RES (4), (5), (38), (40): Xaa is C or S
  MOD_RES (19), (20), (21), (22), (23): Xaa is A or G
  MOD_RES (24), (25), (26), (27): Xaa is A or G or is absent
ASPXXVPQDLSPISILFIXXXXXXXXXYKQYEMVVKSXKX

SEQ ID NO: 11601 - protein, 42 aa, Artificial Sequence
  Non-cyclic GFR-binding peptide
  MOD_RES (6), (7), (41): Xaa is C or S
  MOD_RES (21), (22), (23), (24), (25): Xaa is A or G
  MOD_RES (26), (27), (28), (29): Xaa is A or G or is absent
KIPKAXXVPTELSPISMLFIXXXXXXXXXYKQYEDMVVEGXG

SEQ ID NO: 11602 - protein, 31 aa, Artificial Sequence
  Non-cyclic GFR-binding peptide
  MOD_RES (31), (31): Xaa is C or S
VSQDLSPISILFIIGKTPKIYKQYEMIVKSX

SEQ ID NO: 11603 - protein, 36 aa, Artificial Sequence
  Non-cyclic GFR-binding peptide
  MOD_RES (2), (36): Xaa is C or S
  MOD_RES (16), (17), (18), (19), (20): Xaa is A or G
  MOD_RES (21), (22), (23), (24): Xaa is A or G or is absent
TXAPTKLEPLTVLYYXXXXXXXXXEQLSNNMVVRSX

SEQ ID NO: 11604 - protein, 37 aa, Artificial Sequence
  Non-cyclic GFR-binding peptide
  MOD_RES (5), (6): Xaa is C or S
VPKPXXAPTKLEPLTVLYYDDSSNVIEQLSNNMVVRS

SEQ ID NO: 11605 - protein, 37 aa, Artificial Sequence
  Non-cyclic GFR-binding peptide
  MOD_RES (34), (36): Xaa is C or S
  MOD_RES (14), (15), (16), (17), (18): Xaa is A or G
  MOD_RES (19), (20), (21), (22): Xaa is A or G or is absent
VPTELEPLTMLYYXXXXXXXXXEQLSNDMVVEGXGXR

SEQ ID NO: 11606 - protein, 36 aa, Artificial Sequence
  Non-cyclic GFR-binding peptide
  MOD_RES (2), (3), (35): Xaa is C or S
AXXVPTELSPISMLFIDENEKVVYKQYEDMVVEGXG

SEQ ID NO: 11607 - protein, 37 aa, Artificial Sequence
  Non-cyclic GFR-binding peptide
  MOD_RES (4), (5), (36): Xaa is C or S
ASPXXVPQDLEPLPIVYYVGRTPKVEQLSNMVVKSXK

SEQ ID NO: 11608 - protein, 35 aa, Artificial Sequence
  Non-cyclic GFR-binding peptide
  MOD_RES (1), (35): Xaa is C or S
  MOD_RES (15), (16), (17), (18), (19): Xaa is A or G
  MOD_RES (20), (21), (22), (23): Xaa is A or G or is absent
XAPTKLEPLPVVYYXXXXXXXXXEQLSNNMVVRSX

SEQ ID NO: 11609 - protein, 34 aa, Artificial Sequence
  Non-cyclic GFR-binding peptide
  MOD_RES (1), (34): Xaa is C or S
  MOD_RES (15), (16), (17), (18), (19): Xaa is A or G
  MOD_RES (20), (21), (22), (23): Xaa is A or G or is absent
XVSQDLEPLPIVYYXXXXXXXXXEQLSNMIVKSX

SEQ ID NO: 11610 - protein, 34 aa, Artificial Sequence
  Non-cyclic GFR-binding peptide
  MOD_RES (3), (4): Xaa is C or S
APXXVPQALEPLTILYYVGRKPKVEQLSNMIVRS

SEQ ID NO: 11611 - protein, 41 aa, Artificial Sequence
  Non-cyclic GFR-binding peptide
  MOD_RES (6), (40): Xaa is C or S
  MOD_RES (20), (21), (22), (23), (24): Xaa is A or G
  MOD_RES (25), (26), (27), (28): Xaa is A or G or is absent
VTKPTXAPTKLEPLPVVYYXXXXXXXXXEQLSNNMVVRSXG

SEQ ID NO: 11612 - protein, 37 aa, Artificial Sequence
  Non-cyclic GFR-binding peptide
  MOD_RES (4), (5), (37): Xaa is C or S
PPTXXVPTRLSAISILYLDSANNVVLKNYQDMVVESX

SEQ ID NO: 11613 - protein, 39 aa, Artificial Sequence
  Non-cyclic GFR-binding peptide
  MOD_RES (6), (7): Xaa is C or S
  MOD_RES (21), (22), (23), (24), (25): Xaa is A or G
  MOD_RES (26), (27), (28), (29): Xaa is A or G or is absent
STPPTXXVPTRLNAISILYFXXXXXXXXXLKKYRDMVVE

SEQ ID NO: 11614 - protein, 40 aa, Artificial Sequence
  Non-cyclic GFR-binding peptide
  MOD_RES (6), (7), (40): Xaa is C or S
  MOD_RES (21), (22), (23), (24), (25): Xaa is A or G
  MOD_RES (26), (27), (28), (29): Xaa is A or G or is absent
ASAAPXXVPQALSPISILFIXXXXXXXXXYKQYEMIVRSX

SEQ ID NO: 11615 - protein, 36 aa, Artificial Sequence
  Non-cyclic GFR-binding peptide
  MOD_RES (3), (4), (36): Xaa is C or S
KPXXAPTKLEPLTVLYYDDSSNVIEQLSNNMVVRSX

SEQ ID NO: 11616 - protein, 39 aa, Artificial Sequence
  Non-cyclic GFR-binding peptide
  MOD_RES (6), (7), (39): Xaa is C or S
TVPKPXXAPTQLEPLTVLYYDDSSNVIEQLSNNMVVRAX

SEQ ID NO: 11617 - protein, 35 aa, Artificial Sequence
  Non-cyclic GFR-binding peptide
  MOD_RES (1), (34): Xaa is C or S
  MOD_RES (15), (16), (17), (18), (19): Xaa is A or G
  MOD_RES (20), (21), (22), (23): Xaa is A or G or is absent
XVPQDLEPLPIVYYXXXXXXXXXEQLSNMVVKSXK

SEQ ID NO: 11618 - protein, 36 aa, Artificial Sequence
  Non-cyclic GFR-binding peptide
  MOD_RES (3), (4): Xaa is C or S
  MOD_RES (18), (19), (20), (21), (22): Xaa is A or G
  MOD_RES (23), (24), (25), (26): Xaa is A or G or is absent
KPXXAPTKLEPLPVVYYXXXXXXXXXEQLSNNMVVR

SEQ ID NO: 11619 - protein, 39 aa, Artificial Sequence
  Non-cyclic GFR-binding peptide
  MOD_RES (5), (6), (38): Xaa is C or S
IPKAXXVPTELEPLTMLYYDEYDKVVEQLSNEMVVEGXG

SEQ ID NO: 11620 - protein, 35 aa, Artificial Sequence
  Non-cyclic GFR-binding peptide
  MOD_RES (34), (34): Xaa is C or S
  MOD_RES (14), (15), (16), (17), (18): Xaa is A or G
  MOD_RES (19), (20), (21), (22): Xaa is A or G or is absent
APTKLEPLTVLYYXXXXXXXXXEQLSNNMVVRSXG

SEQ ID NO: 11621 - protein, 37 aa, Artificial Sequence
  Non-cyclic GFR-binding peptide
  MOD_RES (2), (36): Xaa is C or S
  MOD_RES (16), (17), (18), (19), (20): Xaa is A or G
  MOD_RES (21), (22), (23), (24): Xaa is A or G or is absent
TXAPTKLEPLTVLYYXXXXXXXXXEQLSNNMVVRSXG

SEQ ID NO: 11622 - protein, 37 aa, Artificial Sequence
  Non-cyclic GFR-binding peptide
  MOD_RES (1), (2), (34), (36): Xaa is C or S
XXAPTKLEPLPVVYYDDSSNVIEQLSNNMVVRSXGXH

SEQ ID NO: 11623 - protein, 40 aa, Artificial Sequence
  Non-cyclic GFR-binding peptide
  MOD_RES (5), (6), (38), (40): Xaa is C or S
TPPTXXVPTRLEPLPIVYYDSANNVVEQLSNDMVVESXGX

SEQ ID NO: 11624 - protein, 36 aa, Artificial Sequence
  Non-cyclic GFR-binding peptide
  MOD_RES (3), (4): Xaa is C or S
  MOD_RES (18), (19), (20), (21), (22): Xaa is A or G
  MOD_RES (23), (24), (25), (26): Xaa is A or G or is absent
KAXXVPTELEPLTMLYYXXXXXXXXXEQLSNDMVVE

SEQ ID NO: 11625 - protein, 35 aa, Artificial Sequence
  Non-cyclic GFR-binding peptide
  MOD_RES (1), (33), (35): Xaa is C or S
XVPTRLEPLTILYYDSANNVVEQLSNDMVVESXGX

SEQ ID NO: 11626 - protein, 35 aa, Artificial Sequence
  Non-cyclic GFR-binding peptide
  MOD_RES (2), (2): Xaa is C or S
  MOD_RES (16), (17), (18), (19), (20): Xaa is A or G
  MOD_RES (21), (22), (23), (24): Xaa is A or G or is absent
TXAPTKLEPLPVVYYXXXXXXXXXEQLSNNMVVRS

SEQ ID NO: 11627 - protein, 40 aa, Artificial Sequence
  Non-cyclic GFR-binding peptide
  MOD_RES (4), (5), (39): Xaa is C or S
  MOD_RES (19), (20), (21), (22), (23): Xaa is A or G
  MOD_RES (24), (25), (26), (27): Xaa is A or G or is absent
PKAXXVPTELEPLTMLYYXXXXXXXXXEQLSNEMVVEGXG

SEQ ID NO: 11628 - protein, 36 aa, Artificial Sequence
  Non-cyclic GFR-binding peptide
  MOD_RES (5), (6): Xaa is C or S
SAAPXXVPQALSPISILFIVGRKPKVYKQYEMIVRS

SEQ ID NO: 11629 - protein, 41 aa, Artificial Sequence
  Non-cyclic GFR-binding peptide
  MOD_RES (5), (6), (38), (40): Xaa is C or S
VPKPXXAPTQLSPISVLFIDDSSNVIYKQYENMVVRAXGXH

SEQ ID NO: 11630 - protein, 40 aa, Artificial Sequence
  Non-cyclic GFR-binding peptide
  MOD_RES (6), (7), (38), (40): Xaa is C or S
ASASPXXVSQDLSPISILFIIGKTPKIYKQYEMIVKSXKX

SEQ ID NO: 11631 - protein, 42 aa, Artificial Sequence
  Non-cyclic GFR-binding peptide
  MOD_RES (6), (7), (40), (42): Xaa is C or S
  MOD_RES (21), (22), (23), (24), (25): Xaa is A or G
  MOD_RES (26), (27), (28), (29): Xaa is A or G or is absent
ASASPXXVPQDLEPLPIVYYXXXXXXXXXEQLSNMVVKSXKX

SEQ ID NO: 11632 - protein, 41 aa, Artificial Sequence
  Non-cyclic GFR-binding peptide
  MOD_RES (3), (4), (38), (40): Xaa is C or S
  MOD_RES (18), (19), (20), (21), (22): Xaa is A or G
  MOD_RES (23), (24), (25), (26): Xaa is A or G or is absent
PTXXVPTRLSAISILYLXXXXXXXXXLKNYQDMVVESXGXR

SEQ ID NO: 11633 - protein, 37 aa, Artificial Sequence
  Non-cyclic GFR-binding peptide
  MOD_RES (3), (4): Xaa is C or S
  MOD_RES (18), (19), (20), (21), (22): Xaa is A or G
  MOD_RES (23), (24), (25), (26): Xaa is A or G or is absent
KAXXVPTELSPISMLFIXXXXXXXXXYKQYEEMVVEG

SEQ ID NO: 11634 - protein, 40 aa, Artificial Sequence
  Non-cyclic GFR-binding peptide
  MOD_RES (6), (7), (38), (40): Xaa is C or S
ASASPXXVSQDLEPLPIVYYIGKTPKIEQLSNMIVKSXKX

SEQ ID NO: 11635 - protein, 36 aa, Artificial Sequence
  Non-cyclic GFR-binding peptide
  MOD_RES (3), (4): Xaa is C or S
  MOD_RES (18), (19), (20), (21), (22): Xaa is A or G
  MOD_RES (23), (24), (25), (26): Xaa is A or G or is absent
KAXXVPTELEPLPMVYYXXXXXXXXXEQLSNDMVVE

SEQ ID NO: 11636 - protein, 38 aa, Artificial Sequence
  Non-cyclic GFR-binding peptide
  MOD_RES (5), (6): Xaa is C or S
  MOD_RES (20), (21), (22), (23), (24): Xaa is A or G
  MOD_RES (25), (26), (27), (28): Xaa is A or G or is absent
SAAPXXVPQALEPLTILYYXXXXXXXXXEQLSNMIVRS

SEQ ID NO: 11637 - protein, 35 aa, Artificial Sequence
  Non-cyclic GFR-binding peptide
  MOD_RES (3), (4): Xaa is C or S
KAXXVPTELEPLTMLYYDEYDKVVEQLSNEMVVEG

SEQ ID NO: 11638 - protein, 36 aa, Artificial Sequence
  Non-cyclic GFR-binding peptide
  MOD_RES (3), (4): Xaa is C or S
  MOD_RES (18), (19), (20), (21), (22): Xaa is A or G
  MOD_RES (23), (24), (25), (26): Xaa is A or G or is absent
KPXXAPTKLEPLTVLYYXXXXXXXXXEQLSNNMVVR

SEQ ID NO: 11639 - protein, 35 aa, Artificial Sequence
  Non-cyclic GFR-binding peptide
  MOD_RES (1), (32), (34): Xaa is C or S
XVSQDLSPISILFIIGKTPKIYKQYEMIVKSXKXS

SEQ ID NO: 11640 - protein, 37 aa, Artificial Sequence
  Non-cyclic GFR-binding peptide
  MOD_RES (2), (3), (36): Xaa is C or S
  MOD_RES (17), (18), (19), (20), (21): Xaa is A or G
  MOD_RES (22), (23), (24), (25): Xaa is A or G or is absent
PXXVPQDLSPISILFIXXXXXXXXXYKQYEMVVKSXK

SEQ ID NO: 11641 - protein, 33 aa, Artificial Sequence
  Non-cyclic GFR-binding peptide
  MOD_RES (31), (33): Xaa is C or S
VPQALSPISILFIVGRKPKVYKQYEMIVRSXKX

SEQ ID NO: 11642 - protein, 35 aa, Artificial Sequence
  Non-cyclic GFR-binding peptide
  MOD_RES (4), (5): Xaa is C or S
PPTXXVPTRLSAISILYLDSANNVVLKNYQDMVVE

SEQ ID NO: 11643 - protein, 38 aa, Artificial Sequence
  Non-cyclic GFR-binding peptide
  MOD_RES (2), (3), (36), (38): Xaa is C or S
  MOD_RES (17), (18), (19), (20), (21): Xaa is A or G
  MOD_RES (22), (23), (24), (25): Xaa is A or G or is absent
PXXVSQDLSPISILFIXXXXXXXXXYKQYEMIVKSXKX

SEQ ID NO: 11644 - protein, 36 aa, Artificial Sequence
  Non-cyclic GFR-binding peptide
  MOD_RES (33), (35): Xaa is C or S
  MOD_RES (14), (15), (16), (17), (18): Xaa is A or G
  MOD_RES (19), (20), (21), (22): Xaa is A or G or is absent
VSQDLSPISILFIXXXXXXXXXYKQYEMIVKSXKXS

SEQ ID NO: 11645 - protein, 37 aa, Artificial Sequence
  Non-cyclic GFR-binding peptide
  MOD_RES (2), (3), (37): Xaa is C or S
  MOD_RES (17), (18), (19), (20), (21): Xaa is A or G
  MOD_RES (22), (23), (24), (25): Xaa is A or G or is absent
PXXAPTKLSPISVLFIXXXXXXXXXYKQYENMVVRSX

SEQ ID NO: 11646 - protein, 35 aa, Artificial Sequence
  Non-cyclic GFR-binding peptide
  MOD_RES (32), (34): Xaa is C or S
APTQLEPLPVVYYDDSSNVIEQLSNNMVVRAXGXH

SEQ ID NO: 11647 - protein, 32 aa, Artificial Sequence
  Non-cyclic GFR-binding peptide
  MOD_RES (14), (15), (16), (17), (18): Xaa is A or G
  MOD_RES (19), (20), (21), (22): Xaa is A or G or is absent
VPTELSPISMLFIXXXXXXXXXYKQYEEMVVE

SEQ ID NO: 11648 - protein, 36 aa, Artificial Sequence
  Non-cyclic GFR-binding peptide
  MOD_RES (4), (5), (36): Xaa is C or S
ASPXXVSQDLSPISILFIIGKTPKIYKQYEMIVKSX

SEQ ID NO: 11649 - protein, 36 aa, Artificial Sequence
  Non-cyclic GFR-binding peptide
  MOD_RES (34), (36): Xaa is C or S
  MOD_RES (14), (15), (16), (17), (18): Xaa is A or G
  MOD_RES (19), (20), (21), (22): Xaa is A or G or is absent
APTQLEPLPVVYYXXXXXXXXXEQLSNNMVVRAXGX

SEQ ID NO: 11650 - protein, 36 aa, Artificial Sequence
  Non-cyclic GFR-binding peptide
  MOD_RES (3), (4): Xaa is C or S
  MOD_RES (18), (19), (20), (21), (22): Xaa is A or G
  MOD_RES (23), (24), (25), (26): Xaa is A or G or is absent
KPXXAPTQLSPISVLFIXXXXXXXXXYKQYENMVVR

SEQ ID NO: 11651 - protein, 36 aa, Artificial Sequence
  Non-cyclic GFR-binding peptide
  MOD_RES (2), (3): Xaa is C or S
  MOD_RES (17), (18), (19), (20), (21): Xaa is A or G
  MOD_RES (22), (23), (24), (25): Xaa is A or G or is absent
PXXAPTQLSPISVLFIXXXXXXXXXYKQYENMVVRA

SEQ ID NO: 11652 - protein, 38 aa, Artificial Sequence
  Non-cyclic GFR-binding peptide
  MOD_RES (4), (5), (37): Xaa is C or S
PKPXXAPTKLSPISVLFIDDSSNVIYKQYENMVVRSXG

SEQ ID NO: 11653 - protein, 32 aa, Artificial Sequence
  Non-cyclic GFR-binding peptide
  MOD_RES (14), (15), (16), (17), (18): Xaa is A or G
  MOD_RES (19), (20), (21), (22): Xaa is A or G or is absent
VPQALSPISILFIXXXXXXXXXYKQYEMIVRS

SEQ ID NO: 11654 - protein, 41 aa, Artificial Sequence
  Non-cyclic GFR-binding peptide
  MOD_RES (5), (6), (40): Xaa is C or S
  MOD_RES (20), (21), (22), (23), (24): Xaa is A or G
  MOD_RES (25), (26), (27), (28): Xaa is A or G or is absent
IPKAXXVPTELEPLPMVYYXXXXXXXXXEQLSNDMVVEGXG

SEQ ID NO: 11655 - protein, 38 aa, Artificial Sequence
  Non-cyclic GFR-binding peptide
  MOD_RES (1), (2), (36), (38): Xaa is C or S
  MOD_RES (16), (17), (18), (19), (20): Xaa is A or G
  MOD_RES (21), (22), (23), (24): Xaa is A or G or is absent
XXVPTELSPISMLFIXXXXXXXXXYKQYEDMVVEGXGX

SEQ ID NO: 11656 - protein, 39 aa, Artificial Sequence
  Non-cyclic GFR-binding peptide
  MOD_RES (7), (39): Xaa is C or S
HVTKPTXAPTKLSPISVLFIDDSSNVIYKQYENMVVRSX

SEQ ID NO: 11657 - protein, 42 aa, Artificial Sequence
  Non-cyclic GFR-binding peptide
  MOD_RES (5), (6), (40), (42): Xaa is C or S
  MOD_RES (20), (21), (22), (23), (24): Xaa is A or G
  MOD_RES (25), (26), (27), (28): Xaa is A or G or is absent
TPPTXXVPTRLEPLTILYYXXXXXXXXXEQLSNDMVVESXGX

SEQ ID NO: 11658 - protein, 36 aa, Artificial Sequence
  Non-cyclic GFR-binding peptide
  MOD_RES (1), (33), (35): Xaa is C or S
XVPTELEPLTMLYYDEYDKVVEQLSNEMVVEGXGXR

SEQ ID NO: 11659 - protein, 42 aa, Artificial Sequence
  Non-cyclic GFR-binding peptide
  MOD_RES (6), (7), (39), (41): Xaa is C or S
KIPKAXXVPTELSPISMLFIDENEKVVYKQYEDMVVEGXGXR

SEQ ID NO: 11660 - protein, 39 aa, Artificial Sequence
  Non-cyclic GFR-binding peptide
  MOD_RES (4), (5), (36), (38): Xaa is C or S
AAPXXVPQALSPISILFIVGRKPKVYKQYEMIVRSXKXS

SEQ ID NO: 11661 - protein, 38 aa, Artificial Sequence
  Non-cyclic GFR-binding peptide
  MOD_RES (1), (2), (35), (37): Xaa is C or S
  MOD_RES (16), (17), (18), (19), (20): Xaa is A or G
  MOD_RES (21), (22), (23), (24): Xaa is A or G or is absent
XXVSQDLEPLPIVYYXXXXXXXXXEQLSNMIVKSXKXS

SEQ ID NO: 11662 - protein, 33 aa, Artificial Sequence
  Non-cyclic GFR-binding peptide
  MOD_RES (33), (33): Xaa is C or S
  MOD_RES (14), (15), (16), (17), (18): Xaa is A or G
  MOD_RES (19), (20), (21), (22): Xaa is A or G or is absent
VSQDLEPLPIVYYXXXXXXXXXEQLSNMIVKSX

SEQ ID NO: 11663 - protein, 38 aa, Artificial Sequence
  Non-cyclic GFR-binding peptide
  MOD_RES (5), (6), (38): Xaa is C or S
TPPTXXVPTRLEPLPIVYYDSANNVVEQLSNDMVVESX

SEQ ID NO: 11664 - protein, 38 aa, Artificial Sequence
  Non-cyclic GFR-binding peptide
  MOD_RES (1), (2), (35), (37): Xaa is C or S
  MOD_RES (16), (17), (18), (19), (20): Xaa is A or G
  MOD_RES (21), (22), (23), (24): Xaa is A or G or is absent
XXVPQDLSPISILFIXXXXXXXXXYKQYEMVVKSXKXS

SEQ ID NO: 11665 - protein, 33 aa, Artificial Sequence
  Non-cyclic GFR-binding peptide
  MOD_RES (1), (2): Xaa is C or S
XXAPTQLEPLTVLYYDDSSNVIEQLSNNMVVRA

SEQ ID NO: 11666 - protein, 37 aa, Artificial Sequence
  Non-cyclic GFR-binding peptide
  MOD_RES (2), (3), (35), (37): Xaa is C or S
AXXVPTELEPLPMVYYDEYDKVVEQLSNEMVVEGXGX

SEQ ID NO: 11667 - protein, 32 aa, Artificial Sequence
  Non-cyclic GFR-binding peptide
  MOD_RES (1), (1): Xaa is C or S
XVPTRLSAISILYLDSANNVVLKNYQDMVVES

SEQ ID NO: 11668 - protein, 37 aa, Artificial Sequence
  Non-cyclic GFR-binding peptide
  MOD_RES (5), (6): Xaa is C or S
VPKPXXAPTQLEPLTVLYYDDSSNVIEQLSNNMVVRA

SEQ ID NO: 11669 - protein, 37 aa, Artificial Sequence
  Non-cyclic GFR-binding peptide
  MOD_RES (34), (36): Xaa is C or S
  MOD_RES (14), (15), (16), (17), (18): Xaa is A or G
  MOD_RES (19), (20), (21), (22): Xaa is A or G or is absent
VPTELEPLTMLYYXXXXXXXXXEQLSNEMVVEGXGXR

SEQ ID NO: 11670 - protein, 42 aa, Artificial Sequence
  Non-cyclic GFR-binding peptide
  MOD_RES (5), (6), (40), (42): Xaa is C or S
  MOD_RES (20), (21), (22), (23), (24): Xaa is A or G
  MOD_RES (25), (26), (27), (28): Xaa is A or G or is absent
IPKAXXVPTELSPISMLFIXXXXXXXXXYKQYEEMVVEGXGX

SEQ ID NO: 11671 - protein, 35 aa, Artificial Sequence
  Non-cyclic GFR-binding peptide
  MOD_RES (1), (2), (34): Xaa is C or S
XXVPTELEPLTMLYYDEYDKVVEQLSNEMVVEGXG

SEQ ID NO: 11672 - protein, 37 aa, Artificial Sequence
  Non-cyclic GFR-binding peptide
  MOD_RES (4), (5), (37): Xaa is C or S
PKPXXAPTQLEPLPVVYYDDSSNVIEQLSNNMVVRAX

SEQ ID NO: 11673 - protein, 39 aa, Artificial Sequence
  Non-cyclic GFR-binding peptide
  MOD_RES (6), (7), (39): Xaa is C or S
STPPTXXVPTRLEPLTILYYDSANNVVEQLSNDMVVESX

SEQ ID NO: 11674 - protein, 36 aa, Artificial Sequence
  Non-cyclic GFR-binding peptide
  MOD_RES (2), (3), (34), (36): Xaa is C or S
PXXVPQALSPISILFIVGRKPKVYKQYEMIVRSXKX

SEQ ID NO: 11675 - protein, 39 aa, Artificial Sequence
  Non-cyclic GFR-binding peptide
  MOD_RES (6), (7): Xaa is C or S
  MOD_RES (21), (22), (23), (24), (25): Xaa is A or G
  MOD_RES (26), (27), (28), (29): Xaa is A or G or is absent
STPPTXXVPTRLEPLTILYYXXXXXXXXXEQLSNDMVVE

SEQ ID NO: 11676 - protein, 37 aa, Artificial Sequence
  Non-cyclic GFR-binding peptide
  MOD_RES (4), (5): Xaa is C or S
  MOD_RES (19), (20), (21), (22), (23): Xaa is A or G
  MOD_RES (24), (25), (26), (27): Xaa is A or G or is absent
PKAXXVPTELEPLTMLYYXXXXXXXXXEQLSNEMVVE

SEQ ID NO: 11677 - protein, 30 aa, Artificial Sequence
  Non-cyclic GFR-binding peptide
VPTELSPISMLFIDEYDKVVYKQYEEMVVE

SEQ ID NO: 11678 - protein, 38 aa, Artificial Sequence
  Non-cyclic GFR-binding peptide
  MOD_RES (4), (5), (37): Xaa is C or S
PKAXXVPTELEPLPMVYYDEYDKVVEQLSNEMVVEGXG

SEQ ID NO: 11679 - protein, 36 aa, Artificial Sequence
  Non-cyclic GFR-binding peptide
  MOD_RES (1), (2), (35): Xaa is C or S
  MOD_RES (16), (17), (18), (19), (20): Xaa is A or G
  MOD_RES (21), (22), (23), (24): Xaa is A or G or is absent
XXVSQDLEPLPIVYYXXXXXXXXXEQLSNMIVKSXK

SEQ ID NO: 11680 - protein, 37 aa, Artificial Sequence
  Non-cyclic GFR-binding peptide
  MOD_RES (3), (4), (36): Xaa is C or S
PTXXVPTRLSAISILYLDSANNVVLKNYQDMVVESXG

SEQ ID NO: 11681 - protein, 33 aa, Artificial Sequence
  Non-cyclic GFR-binding peptide
  MOD_RES (3), (3): Xaa is C or S
PTXAPTKLSPISVLFIDDSSNVIYKQYENMVVR

SEQ ID NO: 11682 - protein, 41 aa, Artificial Sequence
  Non-cyclic GFR-binding peptide
  MOD_RES (6), (7), (39), (41): Xaa is C or S
SIPKAXXVPTELSPISMLFIDEYDKVVYKQYEEMVVEGXGX

SEQ ID NO: 11683 - protein, 43 aa, Artificial Sequence
  Non-cyclic GFR-binding peptide
  MOD_RES (5), (6), (40), (42): Xaa is C or S
  MOD_RES (20), (21), (22), (23), (24): Xaa is A or G
  MOD_RES (25), (26), (27), (28): Xaa is A or G or is absent
VPKPXXAPTKLEPLPVVYYXXXXXXXXXEQLSNNMVVRSXGXH

SEQ ID NO: 11684 - protein, 43 aa, Artificial Sequence
  Non-cyclic GFR-binding peptide
  MOD_RES (6), (7), (41), (43): Xaa is C or S
  MOD_RES (21), (22), (23), (24), (25): Xaa is A or G
  MOD_RES (26), (27), (28), (29): Xaa is A or G or is absent
STPPTXXVPTRLEPLTILYYXXXXXXXXXEQLSNDMVVESXGX

SEQ ID NO: 11685 - protein, 33 aa, Artificial Sequence
  Non-cyclic GFR-binding peptide
  MOD_RES (33), (33): Xaa is C or S
  MOD_RES (14), (15), (16), (17), (18): Xaa is A or G
  MOD_RES (19), (20), (21), (22): Xaa is A or G or is absent
VPQDLEPLPIVYYXXXXXXXXXEQLSNMVVKSX

SEQ ID NO: 11686 - protein, 40 aa, Artificial Sequence
  Non-cyclic GFR-binding peptide
  MOD_RES (6), (7), (39): Xaa is C or S
TVPKPXXAPTQLSPISVLFIDDSSNVIYKQYENMVVRAXG

SEQ ID NO: 11687 - protein, 32 aa, Artificial Sequence
  Non-cyclic GFR-binding peptide
  MOD_RES (31), (31): Xaa is C or S
VSQDLEPLPIVYYIGKTPKIEQLSNMIVKSXK

SEQ ID NO: 11688 - protein, 38 aa, Artificial Sequence
  Non-cyclic GFR-binding peptide
  MOD_RES (6), (7): Xaa is C or S
TVPKPXXAPTQLEPLPVVYYDDSSNVIEQLSNNMVVRA

SEQ ID NO: 11689 - protein, 34 aa, Artificial Sequence
  Non-cyclic GFR-binding peptide
  MOD_RES (1), (32), (34): Xaa is C or S
XVPQDLSPISILFIVGRTPKVYKQYEMVVKSXKX

SEQ ID NO: 11690 - protein, 35 aa, Artificial Sequence
  Non-cyclic GFR-binding peptide
  MOD_RES (4), (4): Xaa is C or S
KPTXAPTKLSPISVLFIDDSSNVIYKQYENMVVRS

SEQ ID NO: 11691 - protein, 35 aa, Artificial Sequence
  Non-cyclic GFR-binding peptide
  MOD_RES (4), (5): Xaa is C or S
ASPXXVPQDLSPISILFIVGRTPKVYKQYEMVVKS

SEQ ID NO: 11692 - protein, 39 aa, Artificial Sequence
  Non-cyclic GFR-binding peptide
  MOD_RES (3), (4), (38): Xaa is C or S
  MOD_RES (18), (19), (20), (21), (22): Xaa is A or G
  MOD_RES (23), (24), (25), (26): Xaa is A or G or is absent
KPXXAPTQLSPISVLFIXXXXXXXXXYKQYENMVVRAXG

SEQ ID NO: 11693 - protein, 33 aa, Artificial Sequence
  Non-cyclic GFR-binding peptide
  MOD_RES (1), (1): Xaa is C or S
  MOD_RES (15), (16), (17), (18), (19): Xaa is A or G
  MOD_RES (20), (21), (22), (23): Xaa is A or G or is absent
XVPTELEPLTMLYYXXXXXXXXXEQLSNDMVVE

SEQ ID NO: 11694 - protein, 31 aa, Artificial Sequence
  Non-cyclic GFR-binding peptide
VPTELEPLPMVYYDENEKVVEQLSNDMVVEG

SEQ ID NO: 11695 - protein, 39 aa, Artificial Sequence
  Non-cyclic GFR-binding peptide
  MOD_RES (5), (6): Xaa is C or S
  MOD_RES (20), (21), (22), (23), (24): Xaa is A or G
  MOD_RES (25), (26), (27), (28): Xaa is A or G or is absent
IPKAXXVPTELEPLTMLYYXXXXXXXXXEQLSNEMVVEG

SEQ ID NO: 11696 - protein, 40 aa, Artificial Sequence
  Non-cyclic GFR-binding peptide
  MOD_RES (6), (7), (39): Xaa is C or S
KIPKAXXVPTELEPLTMLYYDENEKVVEQLSNDMVVEGXG

SEQ ID NO: 11697 - protein, 36 aa, Artificial Sequence
  Non-cyclic GFR-binding peptide
  MOD_RES (1), (35): Xaa is C or S
  MOD_RES (15), (16), (17), (18), (19): Xaa is A or G
  MOD_RES (20), (21), (22), (23): Xaa is A or G or is absent
XVPTRLEPLPIVYYXXXXXXXXXEQLSNDMVVESXG

SEQ ID NO: 11698 - protein, 40 aa, Artificial Sequence
  Non-cyclic GFR-binding peptide
  MOD_RES (3), (4), (37), (39): Xaa is C or S
  MOD_RES (18), (19), (20), (21), (22): Xaa is A or G
  MOD_RES (23), (24), (25), (26): Xaa is A or G or is absent
SPXXVPQDLSPISILFIXXXXXXXXXYKQYEMVVKSXKXS

SEQ ID NO: 11699 - protein, 32 aa, Artificial Sequence
  Non-cyclic GFR-binding peptide
  MOD_RES (14), (15), (16), (17), (18): Xaa is A or G
  MOD_RES (19), (20), (21), (22): Xaa is A or G or is absent
VPTELEPLPMVYYXXXXXXXXXEQLSNDMVVE

SEQ ID NO: 11700 - protein, 39 aa, Artificial Sequence
  Non-cyclic GFR-binding peptide
  MOD_RES (5), (6), (38): Xaa is C or S
IPKAXXVPTELEPLPMVYYDENEKVVEQLSNDMVVEGXG

SEQ ID NO: 11701 - protein, 35 aa, Artificial Sequence
  Non-cyclic GFR-binding peptide
  MOD_RES (1), (2): Xaa is C or S
  MOD_RES (16), (17), (18), (19), (20): Xaa is A or G
  MOD_RES (21), (22), (23), (24): Xaa is A or G or is absent
XXVPTELEPLTMLYYXXXXXXXXXEQLSNEMVVEG

SEQ ID NO: 11702 - protein, 38 aa, Artificial Sequence
  Non-cyclic GFR-binding peptide
  MOD_RES (4), (5), (37): Xaa is C or S
PKPXXAPTQLEPLTVLYYDDSSNVIEQLSNNMVVRAXG

SEQ ID NO: 11703 - protein, 40 aa, Artificial Sequence
  Non-cyclic GFR-binding peptide
  MOD_RES (5), (6), (38), (40): Xaa is C or S
TPPTXXVPTRLNAISILYFDSANNVVLKKYRDMVVESXGX

SEQ ID NO: 11704 - protein, 39 aa, Artificial Sequence
  Non-cyclic GFR-binding peptide
  MOD_RES (1), (2), (36), (38): Xaa is C or S
  MOD_RES (16), (17), (18), (19), (20): Xaa is A or G
  MOD_RES (21), (22), (23), (24): Xaa is A or G or is absent
XXVPTRLNAISILYFXXXXXXXXXLKKYRDMVVESXGXR

SEQ ID NO: 11705 - protein, 38 aa, Artificial Sequence
  Non-cyclic GFR-binding peptide
  MOD_RES (3), (4), (38): Xaa is C or S
  MOD_RES (18), (19), (20), (21), (22): Xaa is A or G
  MOD_RES (23), (24), (25), (26): Xaa is A or G or is absent
KPXXAPTKLEPLPVVYYXXXXXXXXXEQLSNNMVVRSX

SEQ ID NO: 11706 - protein, 34 aa, Artificial Sequence
  Non-cyclic GFR-binding peptide
  MOD_RES (1), (34): Xaa is C or S
  MOD_RES (15), (16), (17), (18), (19): Xaa is A or G
  MOD_RES (20), (21), (22), (23): Xaa is A or G or is absent
XVSQDLSPISILFIXXXXXXXXXYKQYEMIVKSX

SEQ ID NO: 11707 - protein, 35 aa, Artificial Sequence
  Non-cyclic GFR-binding peptide
  MOD_RES (1), (32), (34): Xaa is C or S
XVSQDLEPLPIVYYIGKTPKIEQLSNMIVKSXKXS

SEQ ID NO: 11708 - protein, 39 aa, Artificial Sequence
  Non-cyclic GFR-binding peptide
  MOD_RES (2), (3), (37), (39): Xaa is C or S
  MOD_RES (17), (18), (19), (20), (21): Xaa is A or G
  MOD_RES (22), (23), (24), (25): Xaa is A or G or is absent
PXXAPTQLEPLTVLYYXXXXXXXXXEQLSNNMVVRAXGX

SEQ ID NO: 11709 - protein, 39 aa, Artificial Sequence
  Non-cyclic GFR-binding peptide
  MOD_RES (1), (2), (36), (38): Xaa is C or S
  MOD_RES (16), (17), (18), (19), (20): Xaa is A or G
  MOD_RES (21), (22), (23), (24): Xaa is A or G or is absent
XXAPTQLSPISVLFIXXXXXXXXXYKQYENMVVRAXGXH

SEQ ID NO: 11710 - protein, 38 aa, Artificial Sequence
  Non-cyclic GFR-binding peptide
  MOD_RES (3), (35), (37): Xaa is C or S
PTXAPTKLSPISVLFIDDSSNVIYKQYENMVVRSXGXH

SEQ ID NO: 11711 - protein, 39 aa, Artificial Sequence
  Non-cyclic GFR-binding peptide
  MOD_RES (4), (38): Xaa is C or S
  MOD_RES (18), (19), (20), (21), (22): Xaa is A or G
  MOD_RES (23), (24), (25), (26): Xaa is A or G or is absent
KPTXAPTKLEPLTVLYYXXXXXXXXXEQLSNNMVVRSXG

SEQ ID NO: 11712 - protein, 39 aa, Artificial Sequence
  Non-cyclic GFR-binding peptide
  MOD_RES (5), (6), (39): Xaa is C or S
  MOD_RES (20), (21), (22), (23), (24): Xaa is A or G
  MOD_RES (25), (26), (27), (28): Xaa is A or G or is absent
SASPXXVPQDLSPISILFIXXXXXXXXXYKQYEMVVKSX

SEQ ID NO: 11713 - protein, 40 aa, Artificial Sequence
  Non-cyclic GFR-binding peptide
  MOD_RES (4), (5), (37), (39): Xaa is C or S
PPTXXVPTRLEPLTILYYDSANNVVEQLSNDMVVESXGXR

SEQ ID NO: 11714 - protein, 36 aa, Artificial Sequence
  Non-cyclic GFR-binding peptide
  MOD_RES (4), (36): Xaa is C or S
KPTXAPTKLSPISVLFIDDSSNVIYKQYENMVVRSX

SEQ ID NO: 11715 - protein, 37 aa, Artificial Sequence
  Non-cyclic GFR-binding peptide
  MOD_RES (4), (5), (37): Xaa is C or S
PKAXXVPTELEPLTMLYYDENEKVVEQLSNDMVVEGX

SEQ ID NO: 11716 - protein, 36 aa, Artificial Sequence
  Non-cyclic GFR-binding peptide
  MOD_RES (1), (35): Xaa is C or S
  MOD_RES (15), (16), (17), (18), (19): Xaa is A or G
  MOD_RES (20), (21), (22), (23): Xaa is A or G or is absent
XVPTELEPLPMVYYXXXXXXXXXEQLSNDMVVEGXG

SEQ ID NO: 11717 - protein, 33 aa, Artificial Sequence
  Non-cyclic GFR-binding peptide
  MOD_RES (1), (2): Xaa is C or S
XXVPTELEPLTMLYYDEYDKVVEQLSNEMVVEG

SEQ ID NO: 11718 - protein, 40 aa, Artificial Sequence
  Non-cyclic GFR-binding peptide
  MOD_RES (5), (39): Xaa is C or S
  MOD_RES (19), (20), (21), (22), (23): Xaa is A or G
  MOD_RES (24), (25), (26), (27): Xaa is A or G or is absent
TKPTXAPTKLEPLTVLYYXXXXXXXXXEQLSNNMVVRSXG

SEQ ID NO: 11719 - protein, 34 aa, Artificial Sequence
  Non-cyclic GFR-binding peptide
  MOD_RES (1), (1): Xaa is C or S
  MOD_RES (15), (16), (17), (18), (19): Xaa is A or G
  MOD_RES (20), (21), (22), (23): Xaa is A or G or is absent
XVPTELEPLPMVYYXXXXXXXXXEQLSNDMVVEG

SEQ ID NO: 11720 - protein, 37 aa, Artificial Sequence
  Non-cyclic GFR-binding peptide
  MOD_RES (5), (37): Xaa is C or S
TKPTXAPTKLEPLPVVYYDDSSNVIEQLSNNMVVRSX

SEQ ID NO: 11721 - protein, 36 aa, Artificial Sequence
  Non-cyclic GFR-binding peptide
  MOD_RES (5), (6): Xaa is C or S
SASPXXVSQDLSPISILFIIGKTPKIYKQYEMIVKS

SEQ ID NO: 11722 - protein, 42 aa, Artificial Sequence
  Non-cyclic GFR-binding peptide
  MOD_RES (5), (6), (39), (41): Xaa is C or S
  MOD_RES (20), (21), (22), (23), (24): Xaa is A or G
  MOD_RES (25), (26), (27), (28): Xaa is A or G or is absent
SASPXXVPQDLEPLPIVYYXXXXXXXXXEQLSNMVVKSXKXS

SEQ ID NO: 11723 - protein, 35 aa, Artificial Sequence
  Non-cyclic GFR-binding peptide
  MOD_RES (4), (5): Xaa is C or S
ASPXXVPQDLEPLPIVYYVGRTPKVEQLSNMVVKS

SEQ ID NO: 11724 - protein, 41 aa, Artificial Sequence
  Non-cyclic GFR-binding peptide
  MOD_RES (6), (7), (41): Xaa is C or S
  MOD_RES (21), (22), (23), (24), (25): Xaa is A or G
  MOD_RES (26), (27), (28), (29): Xaa is A or G or is absent
KIPKAXXVPTELEPLTMLYYXXXXXXXXXEQLSNDMVVEGX

SEQ ID NO: 11725 - protein, 38 aa, Artificial Sequence
  Non-cyclic GFR-binding peptide
  MOD_RES (3), (4), (37): Xaa is C or S
  MOD_RES (18), (19), (20), (21), (22): Xaa is A or G
  MOD_RES (23), (24), (25), (26): Xaa is A or G or is absent
SPXXVPQDLSPISILFIXXXXXXXXXYKQYEMVVKSXK

SEQ ID NO: 11726 - protein, 40 aa, Artificial Sequence
  Non-cyclic GFR-binding peptide
  MOD_RES (7), (7): Xaa is C or S
  MOD_RES (21), (22), (23), (24), (25): Xaa is A or G
  MOD_RES (26), (27), (28), (29): Xaa is A or G or is absent
HVTKPTXAPTKLEPLTVLYYXXXXXXXXXEQLSNNMVVRS

SEQ ID NO: 11727 - protein, 37 aa, Artificial Sequence
  Non-cyclic GFR-binding peptide
  MOD_RES (1), (2), (34), (36): Xaa is C or S
XXVPTELEPLTMLYYDEYDKVVEQLSNEMVVEGXGXR

SEQ ID NO: 11728 - protein, 39 aa, Artificial Sequence
  Non-cyclic GFR-binding peptide
  MOD_RES (1), (2), (36), (38): Xaa is C or S
  MOD_RES (16), (17), (18), (19), (20): Xaa is A or G
  MOD_RES (21), (22), (23), (24): Xaa is A or G or is absent
XXVPTRLEPLPIVYYXXXXXXXXXEQLSNDMVVESXGXR

SEQ ID NO: 11729 - protein, 44 aa, Artificial Sequence
  Non-cyclic GFR-binding peptide
  MOD_RES (6), (7), (41), (43): Xaa is C or S
  MOD_RES (21), (22), (23), (24), (25): Xaa is A or G
  MOD_RES (26), (27), (28), (29): Xaa is A or G or is absent
STPPTXXVPTRLNAISILYFXXXXXXXXXLKKYRDMVVESXGXR

SEQ ID NO: 11730 - protein, 41 aa, Artificial Sequence
  Non-cyclic GFR-binding peptide
  MOD_RES (6), (7), (39), (41): Xaa is C or S
TVPKPXXAPTQLEPLTVLYYDDSSNVIEQLSNNMVVRAXGX

SEQ ID NO: 11731 - protein, 38 aa, Artificial Sequence
  Non-cyclic GFR-binding peptide
  MOD_RES (3), (4), (35), (37): Xaa is C or S
SPXXVPQDLSPISILFIVGRTPKVYKQYEMVVKSXKXS

SEQ ID NO: 11732 - protein, 32 aa, Artificial Sequence
  Non-cyclic GFR-binding peptide
  MOD_RES (1), (2): Xaa is C or S
XXVPTELSPISMLFIDENEKVVYKQYEDMVVE

SEQ ID NO: 11733 - protein, 37 aa, Artificial Sequence
  Non-cyclic GFR-binding peptide
  MOD_RES (6), (7): Xaa is C or S
STPPTXXVPTRLEPLPIVYYDSANNVVEQLSNDMVVE

SEQ ID NO: 11734 - protein, 37 aa, Artificial Sequence
  Non-cyclic GFR-binding peptide
  MOD_RES (1), (35), (37): Xaa is C or S
  MOD_RES (15), (16), (17), (18), (19): Xaa is A or G
  MOD_RES (20), (21), (22), (23): Xaa is A or G or is absent
XVPTELEPLPMVYYXXXXXXXXXEQLSNDMVVEGXGX

SEQ ID NO: 11735 - protein, 34 aa, Artificial Sequence
  Non-cyclic GFR-binding peptide
  MOD_RES (1), (2), (34): Xaa is C or S
XXAPTKLEPLPVVYYDDSSNVIEQLSNNMVVRSX

SEQ ID NO: 11736 - protein, 38 aa, Artificial Sequence
  Non-cyclic GFR-binding peptide
  MOD_RES (2), (3), (35), (37): Xaa is C or S
PXXAPTKLEPLPVVYYDDSSNVIEQLSNNMVVRSXGXH

SEQ ID NO: 11737 - protein, 33 aa, Artificial Sequence
  Non-cyclic GFR-binding peptide
  MOD_RES (3), (3): Xaa is C or S
PTXAPTKLEPLPVVYYDDSSNVIEQLSNNMVVR

SEQ ID NO: 11738 - protein, 38 aa, Artificial Sequence
  Non-cyclic GFR-binding peptide
  MOD_RES (2), (3), (35), (37): Xaa is C or S
PXXAPTQLSPISVLFIDDSSNVIYKQYENMVVRAXGXH

SEQ ID NO: 11739 - protein, 40 aa, Artificial Sequence
  Non-cyclic GFR-binding peptide
  MOD_RES (6), (7): Xaa is C or S
  MOD_RES (21), (22), (23), (24), (25): Xaa is A or G
  MOD_RES (26), (27), (28), (29): Xaa is A or G or is absent
STPPTXXVPTRLEPLPIVYYXXXXXXXXXEQLSNDMVVES

SEQ ID NO: 11740 - protein, 36 aa, Artificial Sequence
  Non-cyclic GFR-binding peptide
  MOD_RES (3), (4), (35): Xaa is C or S
APXXVPQALSPISILFIVGRKPKVYKQYEMIVRSXK

SEQ ID NO: 11741 - protein, 39 aa, Artificial Sequence
  Non-cyclic GFR-binding peptide
  MOD_RES (4), (5), (39): Xaa is C or S
  MOD_RES (19), (20), (21), (22), (23): Xaa is A or G
  MOD_RES (24), (25), (26), (27): Xaa is A or G or is absent
PPTXXVPTRLEPLPIVYYXXXXXXXXXEQLSNDMVVESX

SEQ ID NO: 11742 - protein, 41 aa, Artificial Sequence
  Non-cyclic GFR-binding peptide
  MOD_RES (6), (7), (39), (41): Xaa is C or S
SIPKAXXVPTELEPLTMLYYDEYDKVVEQLSNEMVVEGXGX

SEQ ID NO: 11743 - protein, 41 aa, Artificial Sequence
  Non-cyclic GFR-binding peptide
  MOD_RES (4), (5), (39), (41): Xaa is C or S
  MOD_RES (19), (20), (21), (22), (23): Xaa is A or G
  MOD_RES (24), (25), (26), (27): Xaa is A or G or is absent
PKPXXAPTQLEPLPVVYYXXXXXXXXXEQLSNNMVVRAXGX

SEQ ID NO: 11744 - protein, 39 aa, Artificial Sequence
  Non-cyclic GFR-binding peptide
  MOD_RES (4), (5), (36), (38): Xaa is C or S
ASPXXVSQDLEPLPIVYYIGKTPKIEQLSNMIVKSXKXS

SEQ ID NO: 11745 - protein, 34 aa, Artificial Sequence
  Non-cyclic GFR-binding peptide
  MOD_RES (3), (4): Xaa is C or S
KPXXAPTQLEPLTVLYYDDSSNVIEQLSNNMVVR

SEQ ID NO: 11746 - protein, 34 aa, Artificial Sequence
  Non-cyclic GFR-binding peptide
  MOD_RES (3), (4): Xaa is C or S
KPXXAPTQLEPLPVVYYDDSSNVIEQLSNNMVVR

SEQ ID NO: 11747 - protein, 43 aa, Artificial Sequence
  Non-cyclic GFR-binding peptide
  MOD_RES (6), (40), (42): Xaa is C or S
  MOD_RES (20), (21), (22), (23), (24): Xaa is A or G
  MOD_RES (25), (26), (27), (28): Xaa is A or G or is absent
VTKPTXAPTKLEPLPVVYYXXXXXXXXXEQLSNNMVVRSXGXH

SEQ ID NO: 11748 - protein, 40 aa, Artificial Sequence
  Non-cyclic GFR-binding peptide
  MOD_RES (3), (37), (39): Xaa is C or S
  MOD_RES (17), (18), (19), (20), (21): Xaa is A or G
  MOD_RES (22), (23), (24), (25): Xaa is A or G or is absent
PTXAPTKLEPLTVLYYXXXXXXXXXEQLSNNMVVRSXGXH

SEQ ID NO: 11749 - protein, 42 aa, Artificial Sequence
  Non-cyclic GFR-binding peptide
  MOD_RES (5), (6), (40), (42): Xaa is C or S
  MOD_RES (20), (21), (22), (23), (24): Xaa is A or G
  MOD_RES (25), (26), (27), (28): Xaa is A or G or is absent
TPPTXXVPTRLNAISILYFXXXXXXXXXLKKYRDMVVESXGX

SEQ ID NO: 11750 - protein, 39 aa, Artificial Sequence
  Non-cyclic GFR-binding peptide
  MOD_RES (2), (3), (37), (39): Xaa is C or S
  MOD_RES (17), (18), (19), (20), (21): Xaa is A or G
  MOD_RES (22), (23), (24), (25): Xaa is A or G or is absent
AXXVPTELEPLPMVYYXXXXXXXXXEQLSNDMVVEGXGX

SEQ ID NO: 11751 - protein, 38 aa, Artificial Sequence
  Non-cyclic GFR-binding peptide
  MOD_RES (2), (3), (35), (37): Xaa is C or S
AXXVPTELSPISMLFIDEYDKVVYKQYEEMVVEGXGXR

SEQ ID NO: 11752 - protein, 38 aa, Artificial Sequence
  Non-cyclic GFR-binding peptide
  MOD_RES (4), (5), (38): Xaa is C or S
  MOD_RES (19), (20), (21), (22), (23): Xaa is A or G
  MOD_RES (24), (25), (26), (27): Xaa is A or G or is absent
ASPXXVSQDLSPISILFIXXXXXXXXXYKQYEMIVKSX

SEQ ID NO: 11753 - protein, 40 aa, Artificial Sequence
  Non-cyclic GFR-binding peptide
  MOD_RES (6), (7): Xaa is C or S
  MOD_RES (21), (22), (23), (24), (25): Xaa is A or G
  MOD_RES (26), (27), (28), (29): Xaa is A or G or is absent
YVPKPXXAPTKLSPISVLFIXXXXXXXXXYKQYENMVVRS

SEQ ID NO: 11754 - protein, 42 aa, Artificial Sequence
  Non-cyclic GFR-binding peptide
  MOD_RES (6), (7), (41): Xaa is C or S
  MOD_RES (21), (22), (23), (24), (25): Xaa is A or G
  MOD_RES (26), (27), (28), (29): Xaa is A or G or is absent
STPPTXXVPTRLNAISILYFXXXXXXXXXLKKYRDMVVESXG

SEQ ID NO: 11755 - protein, 36 aa, Artificial Sequence
  Non-cyclic GFR-binding peptide
  MOD_RES (3), (4), (36): Xaa is C or S
KPXXAPTQLEPLTVLYYDDSSNVIEQLSNNMVVRAX

SEQ ID NO: 11756 - protein, 38 aa, Artificial Sequence
  Non-cyclic GFR-binding peptide
  MOD_RES (5), (6): Xaa is C or S
  MOD_RES (20), (21), (22), (23), (24): Xaa is A or G
  MOD_RES (25), (26), (27), (28): Xaa is A or G or is absent
IPKAXXVPTELSPISMLFIXXXXXXXXXYKQYEEMVVE

SEQ ID NO: 11757 - protein, 36 aa, Artificial Sequence
  Non-cyclic GFR-binding peptide
  MOD_RES (2), (3), (35): Xaa is C or S
PXXAPTQLEPLPVVYYDDSSNVIEQLSNNMVVRAXG

SEQ ID NO: 11758 - protein, 42 aa, Artificial Sequence
  Non-cyclic GFR-binding peptide
  MOD_RES (6), (7), (39), (41): Xaa is C or S
STPPTXXVPTRLEPLTILYYDSANNVVEQLSNDMVVESXGXR

SEQ ID NO: 11759 - protein, 32 aa, Artificial Sequence
  Non-cyclic GFR-binding peptide
  MOD_RES (32), (32): Xaa is C or S
VPTRLNAISILYFDSANNVVLKKYRDMVVESX

SEQ ID NO: 11760 - protein, 33 aa, Artificial Sequence
  Non-cyclic GFR-binding peptide
  MOD_RES (32), (32): Xaa is C or S
APTQLEPLPVVYYDDSSNVIEQLSNNMVVRAXG

SEQ ID NO: 11761 - protein, 32 aa, Artificial Sequence
  Non-cyclic GFR-binding peptide
  MOD_RES (1), (1): Xaa is C or S
XVPTRLEPLPIVYYDSANNVVEQLSNDMVVES

SEQ ID NO: 11762 - protein, 40 aa, Artificial Sequence
  Non-cyclic GFR-binding peptide
  MOD_RES (5), (6), (39): Xaa is C or S
  MOD_RES (20), (21), (22), (23), (24): Xaa is A or G
  MOD_RES (25), (26), (27), (28): Xaa is A or G or is absent
SAAPXXVPQALEPLTILYYXXXXXXXXXEQLSNMIVRSXK

SEQ ID NO: 11763 - protein, 40 aa, Artificial Sequence
  Non-cyclic GFR-binding peptide
  MOD_RES (6), (7), (39): Xaa is C or S
SIPKAXXVPTELEPLPMVYYDEYDKVVEQLSNEMVVEGXG

SEQ ID NO: 11764 - protein, 37 aa, Artificial Sequence
  Non-cyclic GFR-binding peptide
  MOD_RES (6), (6): Xaa is C or S
VTKPTXAPTKLSPISVLFIDDSSNVIYKQYENMVVRS

SEQ ID NO: 11765 - protein, 39 aa, Artificial Sequence
  Non-cyclic GFR-binding peptide
  MOD_RES (4), (5), (39): Xaa is C or S
  MOD_RES (19), (20), (21), (22), (23): Xaa is A or G
  MOD_RES (24), (25), (26), (27): Xaa is A or G or is absent
PKAXXVPTELSPISMLFIXXXXXXXXXYKQYEDMVVEGX

SEQ ID NO: 11766 - protein, 32 aa, Artificial Sequence
  Non-cyclic GFR-binding peptide
  MOD_RES (2), (2): Xaa is C or S
TXAPTKLEPLPVVYYDDSSNVIEQLSNNMVVR

SEQ ID NO: 11767 - protein, 35 aa, Artificial Sequence
  Non-cyclic GFR-binding peptide
  MOD_RES (2), (2): Xaa is C or S
  MOD_RES (16), (17), (18), (19), (20): Xaa is A or G
  MOD_RES (21), (22), (23), (24): Xaa is A or G or is absent
TXAPTKLEPLTVLYYXXXXXXXXXEQLSNNMVVRS

SEQ ID NO: 11768 - protein, 35 aa, Artificial Sequence
  Non-cyclic GFR-binding peptide
  MOD_RES (4), (5): Xaa is C or S
PPTXXVPTRLNAISILYFDSANNVVLKKYRDMVVE

SEQ ID NO: 11769 - protein, 33 aa, Artificial Sequence
  Non-cyclic GFR-binding peptide
  MOD_RES (2), (3): Xaa is C or S
AXXVPTELEPLTMLYYDENEKVVEQLSNDMVVE

SEQ ID NO: 11770 - protein, 36 aa, Artificial Sequence
  Non-cyclic GFR-binding peptide
  MOD_RES (1), (35): Xaa is C or S
  MOD_RES (15), (16), (17), (18), (19): Xaa is A or G
  MOD_RES (20), (21), (22), (23): Xaa is A or G or is absent
XAPTKLEPLTVLYYXXXXXXXXXEQLSNNMVVRSXG

SEQ ID NO: 11771 - protein, 33 aa, Artificial Sequence
  Non-cyclic GFR-binding peptide
  MOD_RES (14), (15), (16), (17), (18): Xaa is A or G
  MOD_RES (19), (20), (21), (22): Xaa is A or G or is absent
APTQLEPLTVLYYXXXXXXXXXEQLSNNMVVRA

SEQ ID NO: 11772 - protein, 34 aa, Artificial Sequence
  Non-cyclic GFR-binding peptide
  MOD_RES (2), (2): Xaa is C or S
  MOD_RES (16), (17), (18), (19), (20): Xaa is A or G
  MOD_RES (21), (22), (23), (24): Xaa is A or G or is absent
TXAPTKLEPLTVLYYXXXXXXXXXEQLSNNMVVR

SEQ ID NO: 11773 - protein, 32 aa, Artificial Sequence
  Non-cyclic GFR-binding peptide
  MOD_RES (31), (31): Xaa is C or S
VSQDLSPISILFIIGKTPKIYKQYEMIVKSXK

SEQ ID NO: 11774 - protein, 42 aa, Artificial Sequence
  Non-cyclic GFR-binding peptide
  MOD_RES (5), (6), (39), (41): Xaa is C or S
  MOD_RES (20), (21), (22), (23), (24): Xaa is A or G
  MOD_RES (25), (26), (27), (28): Xaa is A or G or is absent
SASPXXVSQDLSPISILFIXXXXXXXXXYKQYEMIVKSXKXS

SEQ ID NO: 11775 - protein, 41 aa, Artificial Sequence
  Non-cyclic GFR-binding peptide
  MOD_RES (6), (7), (39), (41): Xaa is C or S
STPPTXXVPTRLEPLPIVYYDSANNVVEQLSNDMVVESXGX

SEQ ID NO: 11776 - protein, 37 aa, Artificial Sequence
  Non-cyclic GFR-binding peptide
  MOD_RES (3), (4), (36): Xaa is C or S
KAXXVPTELEPLTMLYYDENEKVVEQLSNDMVVEGXG

SEQ ID NO: 11777 - protein, 39 aa, Artificial Sequence
  Non-cyclic GFR-binding peptide
  MOD_RES (3), (4), (36), (38): Xaa is C or S
KAXXVPTELEPLTMLYYDENEKVVEQLSNDMVVEGXGXR

SEQ ID NO: 11778 - protein, 41 aa, Artificial Sequence
  Non-cyclic GFR-binding peptide
  MOD_RES (6), (7), (39), (41): Xaa is C or S
TVPKPXXAPTQLSPISVLFIDDSSNVIYKQYENMVVRAXGX

SEQ ID NO: 11779 - protein, 39 aa, Artificial Sequence
  Non-cyclic GFR-binding peptide
  MOD_RES (2), (3), (37), (39): Xaa is C or S
  MOD_RES (17), (18), (19), (20), (21): Xaa is A or G
  MOD_RES (22), (23), (24), (25): Xaa is A or G or is absent
PXXAPTQLSPISVLFIXXXXXXXXXYKQYENMVVRAXGX

SEQ ID NO: 11780 - protein, 36 aa, Artificial Sequence
  Non-cyclic GFR-binding peptide
  MOD_RES (1), (33), (35): Xaa is C or S
XVPTELSPISMLFIDENEKVVYKQYEDMVVEGXGXR

SEQ ID NO: 11781 - protein, 35 aa, Artificial Sequence
  Non-cyclic GFR-binding peptide
  MOD_RES (1), (33), (35): Xaa is C or S
XVPTELSPISMLFIDENEKVVYKQYEDMVVEGXGX

SEQ ID NO: 11782 - protein, 40 aa, Artificial Sequence
  Non-cyclic GFR-binding peptide
  MOD_RES (5), (6), (40): Xaa is C or S
  MOD_RES (20), (21), (22), (23), (24): Xaa is A or G
  MOD_RES (25), (26), (27), (28): Xaa is A or G or is absent
VPKPXXAPTQLSPISVLFIXXXXXXXXXYKQYENMVVRAX

SEQ ID NO: 11783 - protein, 38 aa, Artificial Sequence
  Non-cyclic GFR-binding peptide
  MOD_RES (4), (5), (36), (38): Xaa is C or S
ASPXXVSQDLSPISILFIIGKTPKIYKQYEMIVKSXKX

SEQ ID NO: 11784 - protein, 37 aa, Artificial Sequence
  Non-cyclic GFR-binding peptide
  MOD_RES (4), (4): Xaa is C or S
  MOD_RES (18), (19), (20), (21), (22): Xaa is A or G
  MOD_RES (23), (24), (25), (26): Xaa is A or G or is absent
KPTXAPTKLEPLTVLYYXXXXXXXXXEQLSNNMVVRS

SEQ ID NO: 11785 - protein, 43 aa, Artificial Sequence
  Non-cyclic GFR-binding peptide
  MOD_RES (6), (7), (41), (43): Xaa is C or S
  MOD_RES (21), (22), (23), (24), (25): Xaa is A or G
  MOD_RES (26), (27), (28), (29): Xaa is A or G or is absent
STPPTXXVPTRLNAISILYFXXXXXXXXXLKKYRDMVVESXGX

SEQ ID NO: 11786 - protein, 35 aa, Artificial Sequence
  Non-cyclic GFR-binding peptide
  MOD_RES (1), (35): Xaa is C or S
  MOD_RES (15), (16), (17), (18), (19): Xaa is A or G
  MOD_RES (20), (21), (22), (23): Xaa is A or G or is absent
XVPTELEPLTMLYYXXXXXXXXXEQLSNDMVVEGX

SEQ ID NO: 11787 - protein, 36 aa, Artificial Sequence
  Non-cyclic GFR-binding peptide
  MOD_RES (1), (33), (35): Xaa is C or S
XVPTELEPLTMLYYDENEKVVEQLSNDMVVEGXGXR

SEQ ID NO: 11788 - protein, 41 aa, Artificial Sequence
  Non-cyclic GFR-binding peptide
  MOD_RES (5), (6), (40): Xaa is C or S
  MOD_RES (20), (21), (22), (23), (24): Xaa is A or G
  MOD_RES (25), (26), (27), (28): Xaa is A or G or is absent
TPPTXXVPTRLSAISILYLXXXXXXXXXLKNYQDMVVESXG

SEQ ID NO: 11789 - protein, 35 aa, Artificial Sequence
  Non-cyclic GFR-binding peptide
  MOD_RES (1), (2), (34): Xaa is C or S
XXVPTRLEPLTILYYDSANNVVEQLSNDMVVESXG

SEQ ID NO: 11790 - protein, 42 aa, Artificial Sequence
  Non-cyclic GFR-binding peptide
  MOD_RES (5), (6), (40), (42): Xaa is C or S
  MOD_RES (20), (21), (22), (23), (24): Xaa is A or G
  MOD_RES (25), (26), (27), (28): Xaa is A or G or is absent
VPKPXXAPTQLEPLTVLYYXXXXXXXXXEQLSNNMVVRAXGX

SEQ ID NO: 11791 - protein, 40 aa, Artificial Sequence
  Non-cyclic GFR-binding peptide
  MOD_RES (3), (4), (38), (40): Xaa is C or S
  MOD_RES (18), (19), (20), (21), (22): Xaa is A or G
  MOD_RES (23), (24), (25), (26): Xaa is A or G or is absent
KAXXVPTELEPLTMLYYXXXXXXXXXEQLSNDMVVEGXGX

SEQ ID NO: 11792 - protein, 37 aa, Artificial Sequence
  Non-cyclic GFR-binding peptide
  MOD_RES (1), (2), (36): Xaa is C or S
  MOD_RES (16), (17), (18), (19), (20): Xaa is A or G
  MOD_RES (21), (22), (23), (24): Xaa is A or G or is absent
XXVPTELEPLTMLYYXXXXXXXXXEQLSNEMVVEGXG

SEQ ID NO: 11793 - protein, 38 aa, Artificial Sequence
  Non-cyclic GFR-binding peptide
  MOD_RES (5), (6): Xaa is C or S
  MOD_RES (20), (21), (22), (23), (24): Xaa is A or G
  MOD_RES (25), (26), (27), (28): Xaa is A or G or is absent
VPKPXXAPTKLEPLPVVYYXXXXXXXXXEQLSNNMVVR

SEQ ID NO: 11794 - protein, 34 aa, Artificial Sequence
  Non-cyclic GFR-binding peptide
  MOD_RES (32), (34): Xaa is C or S
APTKLEPLTVLYYDDSSNVIEQLSNNMVVRSXGX

SEQ ID NO: 11795 - protein, 43 aa, Artificial Sequence
  Non-cyclic GFR-binding peptide
  MOD_RES (6), (7), (41), (43): Xaa is C or S
  MOD_RES (21), (22), (23), (24), (25): Xaa is A or G
  MOD_RES (26), (27), (28), (29): Xaa is A or G or is absent
KIPKAXXVPTELEPLTMLYYXXXXXXXXXEQLSNDMVVEGXGX

SEQ ID NO: 11796 - protein, 32 aa, Artificial Sequence
  Non-cyclic GFR-binding peptide
  MOD_RES (32), (32): Xaa is C or S
APTKLEPLPVVYYDDSSNVIEQLSNNMVVRSX

SEQ ID NO: 11797 - protein, 37 aa, Artificial Sequence
  Non-cyclic GFR-binding peptide
  MOD_RES (2), (3), (35), (37): Xaa is C or S
TXXVPTRLEPLTILYYDSANNVVEQLSNDMVVESXGX

SEQ ID NO: 11798 - protein, 36 aa, Artificial Sequence
  Non-cyclic GFR-binding peptide
  MOD_RES (1), (33), (35): Xaa is C or S
XAPTKLSPISVLFIDDSSNVIYKQYENMVVRSXGXH

SEQ ID NO: 11799 - protein, 38 aa, Artificial Sequence
  Non-cyclic GFR-binding peptide
  MOD_RES (6), (7): Xaa is C or S
KIPKAXXVPTELEPLPMVYYDENEKVVEQLSNDMVVEG

SEQ ID NO: 11800 - protein, 36 aa, Artificial Sequence
  Non-cyclic GFR-binding peptide
  MOD_RES (2), (3), (36): Xaa is C or S
  MOD_RES (17), (18), (19), (20), (21): Xaa is A or G
  MOD_RES (22), (23), (24), (25): Xaa is A or G or is absent
PXXVSQDLSPISILFIXXXXXXXXXYKQYEMIVKSX

SEQ ID NO: 11801 - protein, 37 aa, Artificial Sequence
  Non-cyclic GFR-binding peptide
  MOD_RES (2), (34), (36): Xaa is C or S
TXAPTKLSPISVLFIDDSSNVIYKQYENMVVRSXGXH

SEQ ID NO: 11802 - protein, 39 aa, Artificial Sequence
  Non-cyclic GFR-binding peptide
  MOD_RES (5), (6): Xaa is C or S
  MOD_RES (20), (21), (22), (23), (24): Xaa is A or G
  MOD_RES (25), (26), (27), (28): Xaa is A or G or is absent
VPKPXXAPTQLSPISVLFIXXXXXXXXXYKQYENMVVRA

SEQ ID NO: 11803 - protein, 43 aa, Artificial Sequence
  Non-cyclic GFR-binding peptide
  MOD_RES (7), (41), (43): Xaa is C or S
  MOD_RES (21), (22), (23), (24), (25): Xaa is A or G
  MOD_RES (26), (27), (28), (29): Xaa is A or G or is absent
HVTKPTXAPTKLEPLTVLYYXXXXXXXXXEQLSNNMVVRSXGX

SEQ ID NO: 11804 - protein, 31 aa, Artificial Sequence
  Non-cyclic GFR-binding peptide
  MOD_RES (1), (1): Xaa is C or S
XVPTELEPLPMVYYDENEKVVEQLSNDMVVE

SEQ ID NO: 11805 - protein, 38 aa, Artificial Sequence
  Non-cyclic GFR-binding peptide
  MOD_RES (4), (5): Xaa is C or S
  MOD_RES (19), (20), (21), (22), (23): Xaa is A or G
  MOD_RES (24), (25), (26), (27): Xaa is A or G or is absent
PKPXXAPTKLEPLTVLYYXXXXXXXXXEQLSNNMVVRS

SEQ ID NO: 11806 - protein, 34 aa, Artificial Sequence
  Non-cyclic GFR-binding peptide
  MOD_RES (32), (34): Xaa is C or S
APTKLSPISVLFIDDSSNVIYKQYENMVVRSXGX

SEQ ID NO: 11807 - protein, 41 aa, Artificial Sequence
  Non-cyclic GFR-binding peptide
  MOD_RES (6), (7), (39), (41): Xaa is C or S
KIPKAXXVPTELEPLPMVYYDENEKVVEQLSNDMVVEGXGX

SEQ ID NO: 11808 - protein, 30 aa, Artificial Sequence
  Non-cyclic GFR-binding peptide
VPTELEPLPMVYYDEYDKVVEQLSNEMVVE

SEQ ID NO: 11809 - protein, 33 aa, Artificial Sequence
  Non-cyclic GFR-binding peptide
  MOD_RES (1), (2): Xaa is C or S
XXVPTRLNAISILYFDSANNVVLKKYRDMVVES

SEQ ID NO: 11810 - protein, 36 aa, Artificial Sequence
  Non-cyclic GFR-binding peptide
  MOD_RES (3), (35): Xaa is C or S
PTXAPTKLEPLTVLYYDDSSNVIEQLSNNMVVRSXG

SEQ ID NO: 11811 - protein, 36 aa, Artificial Sequence
  Non-cyclic GFR-binding peptide
  MOD_RES (1), (2), (36): Xaa is C or S
  MOD_RES (16), (17), (18), (19), (20): Xaa is A or G
  MOD_RES (21), (22), (23), (24): Xaa is A or G or is absent
XXVPTELEPLTMLYYXXXXXXXXXEQLSNEMVVEGX

SEQ ID NO: 11812 - protein, 35 aa, Artificial Sequence
  Non-cyclic GFR-binding peptide
  MOD_RES (1), (33), (35): Xaa is C or S
XVPTELEPLTMLYYDENEKVVEQLSNDMVVEGXGX

SEQ ID NO: 11813 - protein, 43 aa, Artificial Sequence
  Non-cyclic GFR-binding peptide
  MOD_RES (5), (6), (40), (42): Xaa is C or S
  MOD_RES (20), (21), (22), (23), (24): Xaa is A or G
  MOD_RES (25), (26), (27), (28): Xaa is A or G or is absent
TPPTXXVPTRLEPLTILYYXXXXXXXXXEQLSNDMVVESXGXR

SEQ ID NO: 11814 - protein, 36 aa, Artificial Sequence
  Non-cyclic GFR-binding peptide
  MOD_RES (2), (3), (35): Xaa is C or S
PXXAPTKLEPLTVLYYDDSSNVIEQLSNNMVVRSXG

SEQ ID NO: 11815 - protein, 40 aa, Artificial Sequence
  Non-cyclic GFR-binding peptide
  MOD_RES (6), (7), (39): Xaa is C or S
TVPKPXXAPTQLEPLPVVYYDDSSNVIEQLSNNMVVRAXG

SEQ ID NO: 11816 - protein, 39 aa, Artificial Sequence
  Non-cyclic GFR-binding peptide
  MOD_RES (1), (2), (36), (38): Xaa is C or S
  MOD_RES (16), (17), (18), (19), (20): Xaa is A or G
  MOD_RES (21), (22), (23), (24): Xaa is A or G or is absent
XXAPTQLEPLTVLYYXXXXXXXXXEQLSNNMVVRAXGXH

SEQ ID NO: 11817 - protein, 32 aa, Artificial Sequence
  Non-cyclic GFR-binding peptide
  MOD_RES (31), (31): Xaa is C or S
VPQDLEPLPIVYYVGRTPKVEQLSNMVVKSXK

SEQ ID NO: 11818 - protein, 37 aa, Artificial Sequence
  Non-cyclic GFR-binding peptide
  MOD_RES (7), (7): Xaa is C or S
HVTKPTXAPTKLEPLTVLYYDDSSNVIEQLSNNMVVR

SEQ ID NO: 11819 - protein, 37 aa, Artificial Sequence
  Non-cyclic GFR-binding peptide
  MOD_RES (3), (4), (36): Xaa is C or S
KAXXVPTELSPISMLFIDEYDKVVYKQYEEMVVEGXG

SEQ ID NO: 11820 - protein, 41 aa, Artificial Sequence
  Non-cyclic GFR-binding peptide
  MOD_RES (6), (7), (40): Xaa is C or S
  MOD_RES (21), (22), (23), (24), (25): Xaa is A or G
  MOD_RES (26), (27), (28), (29): Xaa is A or G or is absent
ASASPXXVPQDLSPISILFIXXXXXXXXXYKQYEMVVKSXK

SEQ ID NO: 11821 - protein, 37 aa, Artificial Sequence
  Non-cyclic GFR-binding peptide
  MOD_RES (3), (4), (36): Xaa is C or S
KPXXAPTKLSPISVLFIDDSSNVIYKQYENMVVRSXG

SEQ ID NO: 11822 - protein, 40 aa, Artificial Sequence
  Non-cyclic GFR-binding peptide
  MOD_RES (4), (5), (38), (40): Xaa is C or S
  MOD_RES (19), (20), (21), (22), (23): Xaa is A or G
  MOD_RES (24), (25), (26), (27): Xaa is A or G or is absent
AAPXXVPQALSPISILFIXXXXXXXXXYKQYEMIVRSXKX

SEQ ID NO: 11823 - protein, 37 aa, Artificial Sequence
  Non-cyclic GFR-binding peptide
  MOD_RES (2), (3), (34), (36): Xaa is C or S
PXXVPQDLSPISILFIVGRTPKVYKQYEMVVKSXKXS

SEQ ID NO: 11824 - protein, 34 aa, Artificial Sequence
  Non-cyclic GFR-binding peptide
  MOD_RES (1), (1): Xaa is C or S
  MOD_RES (15), (16), (17), (18), (19): Xaa is A or G
  MOD_RES (20), (21), (22), (23): Xaa is A or G or is absent
XVPTELEPLTMLYYXXXXXXXXXEQLSNEMVVEG

SEQ ID NO: 11825 - protein, 35 aa, Artificial Sequence
  Non-cyclic GFR-binding peptide
  MOD_RES (4), (5): Xaa is C or S
PKPXXAPTQLEPLTVLYYDDSSNVIEQLSNNMVVR

SEQ ID NO: 11826 - protein, 37 aa, Artificial Sequence
  Non-cyclic GFR-binding peptide
  MOD_RES (2), (34), (36): Xaa is C or S
TXAPTKLEPLTVLYYDDSSNVIEQLSNNMVVRSXGXH

SEQ ID NO: 11827 - protein, 41 aa, Artificial Sequence
  Non-cyclic GFR-binding peptide
  MOD_RES (4), (5), (38), (40): Xaa is C or S
  MOD_RES (19), (20), (21), (22), (23): Xaa is A or G
  MOD_RES (24), (25), (26), (27): Xaa is A or G or is absent
ASPXXVSQDLEPLPIVYYXXXXXXXXXEQLSNMIVKSXKXS

SEQ ID NO: 11828 - protein, 38 aa, Artificial Sequence
  Non-cyclic GFR-binding peptide
  MOD_RES (4), (5), (38): Xaa is C or S
  MOD_RES (19), (20), (21), (22), (23): Xaa is A or G
  MOD_RES (24), (25), (26), (27): Xaa is A or G or is absent
ASPXXVPQDLSPISILFIXXXXXXXXXYKQYEMVVKSX

SEQ ID NO: 11829 - protein, 37 aa, Artificial Sequence
  Non-cyclic GFR-binding peptide
  MOD_RES (2), (3), (37): Xaa is C or S
  MOD_RES (17), (18), (19), (20), (21): Xaa is A or G
  MOD_RES (22), (23), (24), (25): Xaa is A or G or is absent
AXXVPTELSPISMLFIXXXXXXXXXYKQYEEMVVEGX

SEQ ID NO: 11830 - protein, 40 aa, Artificial Sequence
  Non-cyclic GFR-binding peptide
  MOD_RES (6), (7): Xaa is C or S
  MOD_RES (21), (22), (23), (24), (25): Xaa is A or G
  MOD_RES (26), (27), (28), (29): Xaa is A or G or is absent
KIPKAXXVPTELEPLPMVYYXXXXXXXXXEQLSNDMVVEG

SEQ ID NO: 11831 - protein, 34 aa, Artificial Sequence
  Non-cyclic GFR-binding peptide
  MOD_RES (1), (33): Xaa is C or S
XVPTELEPLPMVYYDENEKVVEQLSNDMVVEGXG

SEQ ID NO: 11832 - protein, 36 aa, Artificial Sequence
  Non-cyclic GFR-binding peptide
  MOD_RES (1), (2), (36): Xaa is C or S
  MOD_RES (16), (17), (18), (19), (20): Xaa is A or G
  MOD_RES (21), (22), (23), (24): Xaa is A or G or is absent
XXAPTQLEPLTVLYYXXXXXXXXXEQLSNNMVVRAX

SEQ ID NO: 11833 - protein, 40 aa, Artificial Sequence
  Non-cyclic GFR-binding peptide
  MOD_RES (6), (7): Xaa is C or S
  MOD_RES (21), (22), (23), (24), (25): Xaa is A or G
  MOD_RES (26), (27), (28), (29): Xaa is A or G or is absent
KIPKAXXVPTELEPLTMLYYXXXXXXXXXEQLSNDMVVEG

SEQ ID NO: 11834 - protein, 40 aa, Artificial Sequence
  Non-cyclic GFR-binding peptide
  MOD_RES (7), (39): Xaa is C or S
HVTKPTXAPTKLEPLTVLYYDDSSNVIEQLSNNMVVRSXG

SEQ ID NO: 11835 - protein, 37 aa, Artificial Sequence
  Non-cyclic GFR-binding peptide
  MOD_RES (34), (36): Xaa is C or S
  MOD_RES (14), (15), (16), (17), (18): Xaa is A or G
  MOD_RES (19), (20), (21), (22): Xaa is A or G or is absent
APTQLEPLPVVYYXXXXXXXXXEQLSNNMVVRAXGXH

SEQ ID NO: 11836 - protein, 39 aa, Artificial Sequence
  Non-cyclic GFR-binding peptide
  MOD_RES (6), (7), (39): Xaa is C or S
KIPKAXXVPTELSPISMLFIDENEKVVYKQYEDMVVEGX

SEQ ID NO: 11837 - protein, 37 aa, Artificial Sequence
  Non-cyclic GFR-binding peptide
  MOD_RES (1), (2), (36): Xaa is C or S
  MOD_RES (16), (17), (18), (19), (20): Xaa is A or G
  MOD_RES (21), (22), (23), (24): Xaa is A or G or is absent
XXVPTELSPISMLFIXXXXXXXXXYKQYEEMVVEGXG

SEQ ID NO: 11838 - protein, 38 aa, Artificial Sequence
  Non-cyclic GFR-binding peptide
  MOD_RES (4), (5), (37): Xaa is C or S
PPTXXVPTRLSAISILYLDSANNVVLKNYQDMVVESXG

SEQ ID NO: 11839 - protein, 37 aa, Artificial Sequence
  Non-cyclic GFR-binding peptide
  MOD_RES (3), (4), (36): Xaa is C or S
KAXXVPTELEPLPMVYYDEYDKVVEQLSNEMVVEGXG

SEQ ID NO: 11840 - protein, 39 aa, Artificial Sequence
  Non-cyclic GFR-binding peptide
  MOD_RES (3), (4), (38): Xaa is C or S
  MOD_RES (18), (19), (20), (21), (22): Xaa is A or G
  MOD_RES (23), (24), (25), (26): Xaa is A or G or is absent
KAXXVPTELEPLPMVYYXXXXXXXXXEQLSNDMVVEGXG

SEQ ID NO: 11841 - protein, 36 aa, Artificial Sequence
  Non-cyclic GFR-binding peptide
  MOD_RES (5), (6): Xaa is C or S
IPKAXXVPTELEPLTMLYYDENEKVVEQLSNDMVVE

SEQ ID NO: 11842 - protein, 37 aa, Artificial Sequence
  Non-cyclic GFR-binding peptide
  MOD_RES (1), (2), (34), (36): Xaa is C or S
XXAPTQLEPLPVVYYDDSSNVIEQLSNNMVVRAXGXH

SEQ ID NO: 11843 - protein, 37 aa, Artificial Sequence
  Non-cyclic GFR-binding peptide
  MOD_RES (2), (3), (37): Xaa is C or S
  MOD_RES (17), (18), (19), (20), (21): Xaa is A or G
  MOD_RES (22), (23), (24), (25): Xaa is A or G or is absent
TXXVPTRLNAISILYFXXXXXXXXXLKKYRDMVVESX

SEQ ID NO: 11844 - protein, 30 aa, Artificial Sequence
  Non-cyclic GFR-binding peptide
APTKLEPLTVLYYDDSSNVIEQLSNNMVVR

SEQ ID NO: 11845 - protein, 38 aa, Artificial Sequence
  Non-cyclic GFR-binding peptide
  MOD_RES (1), (2), (36), (38): Xaa is C or S
  MOD_RES (16), (17), (18), (19), (20): Xaa is A or G
  MOD_RES (21), (22), (23), (24): Xaa is A or G or is absent
XXAPTQLEPLPVVYYXXXXXXXXXEQLSNNMVVRAXGX

SEQ ID NO: 11846 - protein, 39 aa, Artificial Sequence
  Non-cyclic GFR-binding peptide
  MOD_RES (3), (4), (36), (38): Xaa is C or S
KPXXAPTQLEPLPVVYYDDSSNVIEQLSNNMVVRAXGXH

SEQ ID NO: 11847 - protein, 39 aa, Artificial Sequence
  Non-cyclic GFR-binding peptide
  MOD_RES (6), (7): Xaa is C or S
  MOD_RES (21), (22), (23), (24), (25): Xaa is A or G
  MOD_RES (26), (27), (28), (29): Xaa is A or G or is absent
KIPKAXXVPTELSPISMLFIXXXXXXXXXYKQYEDMVVE

SEQ ID NO: 11848 - protein, 43 aa, Artificial Sequence
  Non-cyclic GFR-binding peptide
  MOD_RES (5), (6), (40), (42): Xaa is C or S
  MOD_RES (20), (21), (22), (23), (24): Xaa is A or G
  MOD_RES (25), (26), (27), (28): Xaa is A or G or is absent
IPKAXXVPTELEPLTMLYYXXXXXXXXXEQLSNDMVVEGXGXR

SEQ ID NO: 11849 - protein, 42 aa, Artificial Sequence
  Non-cyclic GFR-binding peptide
  MOD_RES (6), (7), (39), (41): Xaa is C or S
SIPKAXXVPTELEPLPMVYYDEYDKVVEQLSNEMVVEGXGXR

SEQ ID NO: 11850 - protein, 37 aa, Artificial Sequence
  Non-cyclic GFR-binding peptide
  MOD_RES (3), (4), (36): Xaa is C or S
KPXXAPTKLEPLTVLYYDDSSNVIEQLSNNMVVRSXG

SEQ ID NO: 11851 - protein, 34 aa, Artificial Sequence
  Non-cyclic GFR-binding peptide
  MOD_RES (1), (2), (33): Xaa is C or S
XXVSQDLEPLPIVYYIGKTPKIEQLSNMIVKSXK

SEQ ID NO: 11852 - protein, 38 aa, Artificial Sequence
  Non-cyclic GFR-binding peptide
  MOD_RES (5), (6), (37): Xaa is C or S
SASPXXVSQDLEPLPIVYYIGKTPKIEQLSNMIVKSXK

SEQ ID NO: 11853 - protein, 37 aa, Artificial Sequence
  Non-cyclic GFR-binding peptide
  MOD_RES (5), (5): Xaa is C or S
  MOD_RES (19), (20), (21), (22), (23): Xaa is A or G
  MOD_RES (24), (25), (26), (27): Xaa is A or G or is absent
TKPTXAPTKLEPLTVLYYXXXXXXXXXEQLSNNMVVR

SEQ ID NO: 11854 - protein, 34 aa, Artificial Sequence
  Non-cyclic GFR-binding peptide
  MOD_RES (2), (3): Xaa is C or S
PXXAPTKLEPLTVLYYDDSSNVIEQLSNNMVVRS

SEQ ID NO: 11855 - protein, 37 aa, Artificial Sequence
  Non-cyclic GFR-binding peptide
  MOD_RES (4), (5), (37): Xaa is C or S
PKPXXAPTQLEPLTVLYYDDSSNVIEQLSNNMVVRAX

SEQ ID NO: 11856 - protein, 42 aa, Artificial Sequence
  Non-cyclic GFR-binding peptide
  MOD_RES (7), (39), (41): Xaa is C or S
HVTKPTXAPTKLEPLTVLYYDDSSNVIEQLSNNMVVRSXGXH

SEQ ID NO: 11857 - protein, 33 aa, Artificial Sequence
  Non-cyclic GFR-binding peptide
  MOD_RES (1), (2): Xaa is C or S
XXAPTQLEPLPVVYYDDSSNVIEQLSNNMVVRA

SEQ ID NO: 11858 - protein, 40 aa, Artificial Sequence
  Non-cyclic GFR-binding peptide
  MOD_RES (5), (6), (38), (40): Xaa is C or S
IPKAXXVPTELEPLPMVYYDENEKVVEQLSNDMVVEGXGX

SEQ ID NO: 11859 - protein, 31 aa, Artificial Sequence
  Non-cyclic GFR-binding peptide
  MOD_RES (1), (1): Xaa is C or S
XAPTQLEPLTVLYYDDSSNVIEQLSNNMVVR

SEQ ID NO: 11860 - protein, 35 aa, Artificial Sequence
  Non-cyclic GFR-binding peptide
  MOD_RES (2), (3): Xaa is C or S
  MOD_RES (17), (18), (19), (20), (21): Xaa is A or G
  MOD_RES (22), (23), (24), (25): Xaa is A or G or is absent
AXXVPTELSPISMLFIXXXXXXXXXYKQYEEMVVE

SEQ ID NO: 11861 - protein, 42 aa, Artificial Sequence
  Non-cyclic GFR-binding peptide
  MOD_RES (6), (40), (42): Xaa is C or S
  MOD_RES (20), (21), (22), (23), (24): Xaa is A or G
  MOD_RES (25), (26), (27), (28): Xaa is A or G or is absent
VTKPTXAPTKLEPLTVLYYXXXXXXXXXEQLSNNMVVRSXGX

SEQ ID NO: 11862 - protein, 36 aa, Artificial Sequence
  Non-cyclic GFR-binding peptide
  MOD_RES (3), (4): Xaa is C or S
  MOD_RES (18), (19), (20), (21), (22): Xaa is A or G
  MOD_RES (23), (24), (25), (26): Xaa is A or G or is absent
PTXXVPTRLEPLTILYYXXXXXXXXXEQLSNDMVVE

SEQ ID NO: 11863 - protein, 37 aa, Artificial Sequence
  Non-cyclic GFR-binding peptide
  MOD_RES (1), (2), (34), (36): Xaa is C or S
XXVPTELSPISMLFIDEYDKVVYKQYEEMVVEGXGXR

SEQ ID NO: 11864 - protein, 33 aa, Artificial Sequence
  Non-cyclic GFR-binding peptide
  MOD_RES (1), (1): Xaa is C or S
  MOD_RES (15), (16), (17), (18), (19): Xaa is A or G
  MOD_RES (20), (21), (22), (23): Xaa is A or G or is absent
XAPTKLEPLPVVYYXXXXXXXXXEQLSNNMVVR

SEQ ID NO: 11865 - protein, 40 aa, Artificial Sequence
  Non-cyclic GFR-binding peptide
  MOD_RES (5), (6), (39): Xaa is C or S
  MOD_RES (20), (21), (22), (23), (24): Xaa is A or G
  MOD_RES (25), (26), (27), (28): Xaa is A or G or is absent
SASPXXVPQDLSPISILFIXXXXXXXXXYKQYEMVVKSXK

SEQ ID NO: 11866 - protein, 37 aa, Artificial Sequence
  Non-cyclic GFR-binding peptide
  MOD_RES (4), (5): Xaa is C or S
  MOD_RES (19), (20), (21), (22), (23): Xaa is A or G
  MOD_RES (24), (25), (26), (27): Xaa is A or G or is absent
PKAXXVPTELEPLPMVYYXXXXXXXXXEQLSNEMVVE

SEQ ID NO: 11867 - protein, 33 aa, Artificial Sequence
  Non-cyclic GFR-binding peptide
  MOD_RES (1), (1): Xaa is C or S
  MOD_RES (15), (16), (17), (18), (19): Xaa is A or G
  MOD_RES (20), (21), (22), (23): Xaa is A or G or is absent
XAPTKLEPLTVLYYXXXXXXXXXEQLSNNMVVR

SEQ ID NO: 11868 - protein, 40 aa, Artificial Sequence
  Non-cyclic GFR-binding peptide
  MOD_RES (5), (6), (37), (39): Xaa is C or S
SASPXXVPQDLEPLPIVYYVGRTPKVEQLSNMVVKSXKXS

SEQ ID NO: 11869 - protein, 36 aa, Artificial Sequence
  Non-cyclic GFR-binding peptide
  MOD_RES (33), (35): Xaa is C or S
  MOD_RES (14), (15), (16), (17), (18): Xaa is A or G
  MOD_RES (19), (20), (21), (22): Xaa is A or G or is absent
VSQDLEPLPIVYYXXXXXXXXXEQLSNMIVKSXKXS

SEQ ID NO: 11870 - protein, 42 aa, Artificial Sequence
  Non-cyclic GFR-binding peptide
  MOD_RES (5), (6), (40), (42): Xaa is C or S
  MOD_RES (20), (21), (22), (23), (24): Xaa is A or G
  MOD_RES (25), (26), (27), (28): Xaa is A or G or is absent
IPKAXXVPTELEPLTMLYYXXXXXXXXXEQLSNEMVVEGXGX

SEQ ID NO: 11871 - protein, 32 aa, Artificial Sequence
  Non-cyclic GFR-binding peptide
  MOD_RES (32), (32): Xaa is C or S
VPTELEPLTMLYYDEYDKVVEQLSNEMVVEGX

SEQ ID NO: 11872 - protein, 32 aa, Artificial Sequence
  Non-cyclic GFR-binding peptide
  MOD_RES (14), (15), (16), (17), (18): Xaa is A or G
  MOD_RES (19), (20), (21), (22): Xaa is A or G or is absent
APTKLEPLPVVYYXXXXXXXXXEQLSNNMVVR

SEQ ID NO: 11873 - protein, 36 aa, Artificial Sequence
  Non-cyclic GFR-binding peptide
  MOD_RES (1), (34), (36): Xaa is C or S
  MOD_RES (15), (16), (17), (18), (19): Xaa is A or G
  MOD_RES (20), (21), (22), (23): Xaa is A or G or is absent
XVPQDLSPISILFIXXXXXXXXXYKQYEMVVKSXKX

SEQ ID NO: 11874 - protein, 36 aa, Artificial Sequence
  Non-cyclic GFR-binding peptide
  MOD_RES (5), (6): Xaa is C or S
TPPTXXVPTRLEPLTILYYDSANNVVEQLSNDMVVE

SEQ ID NO: 11875 - protein, 32 aa, Artificial Sequence
  Non-cyclic GFR-binding peptide
  MOD_RES (1), (2): Xaa is C or S
XXVPTELEPLPMVYYDENEKVVEQLSNDMVVE

SEQ ID NO: 11876 - protein, 38 aa, Artificial Sequence
  Non-cyclic GFR-binding peptide
  MOD_RES (4), (5), (36), (38): Xaa is C or S
ASPXXVPQDLSPISILFIVGRTPKVYKQYEMVVKSXKX

SEQ ID NO: 11877 - protein, 40 aa, Artificial Sequence
  Non-cyclic GFR-binding peptide
  MOD_RES (4), (5), (39): Xaa is C or S
  MOD_RES (19), (20), (21), (22), (23): Xaa is A or G
  MOD_RES (24), (25), (26), (27): Xaa is A or G or is absent
PKPXXAPTKLEPLPVVYYXXXXXXXXXEQLSNNMVVRSXG

SEQ ID NO: 11878 - protein, 33 aa, Artificial Sequence
  Non-cyclic GFR-binding peptide
  MOD_RES (31), (33): Xaa is C or S
VPQDLSPISILFIVGRTPKVYKQYEMVVKSXKX

SEQ ID NO: 11879 - protein, 36 aa, Artificial Sequence
  Non-cyclic GFR-binding peptide
  MOD_RES (34), (36): Xaa is C or S
  MOD_RES (14), (15), (16), (17), (18): Xaa is A or G
  MOD_RES (19), (20), (21), (22): Xaa is A or G or is absent
VPTELSPISMLFIXXXXXXXXXYKQYEDMVVEGXGX

SEQ ID NO: 11880 - protein, 38 aa, Artificial Sequence
  Non-cyclic GFR-binding peptide
  MOD_RES (5), (6): Xaa is C or S
  MOD_RES (20), (21), (22), (23), (24): Xaa is A or G
  MOD_RES (25), (26), (27), (28): Xaa is A or G or is absent
VPKPXXAPTKLEPLTVLYYXXXXXXXXXEQLSNNMVVR

SEQ ID NO: 11881 - protein, 40 aa, Artificial Sequence
  Non-cyclic GFR-binding peptide
  MOD_RES (5), (6), (40): Xaa is C or S
  MOD_RES (20), (21), (22), (23), (24): Xaa is A or G
  MOD_RES (25), (26), (27), (28): Xaa is A or G or is absent
VPKPXXAPTKLEPLTVLYYXXXXXXXXXEQLSNNMVVRSX

SEQ ID NO: 11882 - protein, 34 aa, Artificial Sequence
  Non-cyclic GFR-binding peptide
  MOD_RES (2), (3): Xaa is C or S
AXXVPTELSPISMLFIDENEKVVYKQYEDMVVEG

SEQ ID NO: 11883 - protein, 32 aa, Artificial Sequence
  Non-cyclic GFR-binding peptide
  MOD_RES (1), (32): Xaa is C or S
XVPQALSPISILFIVGRKPKVYKQYEMIVRSX

SEQ ID NO: 11884 - protein, 42 aa, Artificial Sequence
  Non-cyclic GFR-binding peptide
  MOD_RES (5), (6), (40), (42): Xaa is C or S
  MOD_RES (20), (21), (22), (23), (24): Xaa is A or G
  MOD_RES (25), (26), (27), (28): Xaa is A or G or is absent
IPKAXXVPTELEPLTMLYYXXXXXXXXXEQLSNDMVVEGXGX

SEQ ID NO: 11885 - protein, 37 aa, Artificial Sequence
  Non-cyclic GFR-binding peptide
  MOD_RES (3), (4), (36): Xaa is C or S
KPXXAPTQLEPLTVLYYDDSSNVIEQLSNNMVVRAXG

SEQ ID NO: 11886 - protein, 41 aa, Artificial Sequence
  Non-cyclic GFR-binding peptide
  MOD_RES (4), (5), (38), (40): Xaa is C or S
  MOD_RES (19), (20), (21), (22), (23): Xaa is A or G
  MOD_RES (24), (25), (26), (27): Xaa is A or G or is absent
AAPXXVPQALSPISILFIXXXXXXXXXYKQYEMIVRSXKXS

SEQ ID NO: 11887 - protein, 39 aa, Artificial Sequence
  Non-cyclic GFR-binding peptide
  MOD_RES (5), (39): Xaa is C or S
  MOD_RES (19), (20), (21), (22), (23): Xaa is A or G
  MOD_RES (24), (25), (26), (27): Xaa is A or G or is absent
TKPTXAPTKLEPLTVLYYXXXXXXXXXEQLSNNMVVRSX

SEQ ID NO: 11888 - protein, 38 aa, Artificial Sequence
  Non-cyclic GFR-binding peptide
  MOD_RES (1), (35), (37): Xaa is C or S
  MOD_RES (15), (16), (17), (18), (19): Xaa is A or G
  MOD_RES (20), (21), (22), (23): Xaa is A or G or is absent
XAPTQLEPLPVVYYXXXXXXXXXEQLSNNMVVRAXGXH

SEQ ID NO: 11889 - protein, 38 aa, Artificial Sequence
  Non-cyclic GFR-binding peptide
  MOD_RES (5), (6): Xaa is C or S
  MOD_RES (20), (21), (22), (23), (24): Xaa is A or G
  MOD_RES (25), (26), (27), (28): Xaa is A or G or is absent
SASPXXVPQDLEPLPIVYYXXXXXXXXXEQLSNMVVKS

SEQ ID NO: 11890 - protein, 40 aa, Artificial Sequence
  Non-cyclic GFR-binding peptide
  MOD_RES (6), (7): Xaa is C or S
  MOD_RES (21), (22), (23), (24), (25): Xaa is A or G
  MOD_RES (26), (27), (28), (29): Xaa is A or G or is absent
SIPKAXXVPTELEPLTMLYYXXXXXXXXXEQLSNEMVVEG

SEQ ID NO: 11891 - protein, 41 aa, Artificial Sequence
  Non-cyclic GFR-binding peptide
  MOD_RES (3), (4), (38), (40): Xaa is C or S
  MOD_RES (18), (19), (20), (21), (22): Xaa is A or G
  MOD_RES (23), (24), (25), (26): Xaa is A or G or is absent
KPXXAPTKLEPLTVLYYXXXXXXXXXEQLSNNMVVRSXGXH

SEQ ID NO: 11892 - protein, 32 aa, Artificial Sequence
  Non-cyclic GFR-binding peptide
  MOD_RES (2), (2): Xaa is C or S
TXAPTKLSPISVLFIDDSSNVIYKQYENMVVR

SEQ ID NO: 11893 - protein, 37 aa, Artificial Sequence
  Non-cyclic GFR-binding peptide
  MOD_RES (1), (34), (36): Xaa is C or S
  MOD_RES (15), (16), (17), (18), (19): Xaa is A or G
  MOD_RES (20), (21), (22), (23): Xaa is A or G or is absent
XVSQDLSPISILFIXXXXXXXXXYKQYEMIVKSXKXS

SEQ ID NO: 11894 - protein, 37 aa, Artificial Sequence
  Non-cyclic GFR-binding peptide
  MOD_RES (3), (35), (37): Xaa is C or S
PTXAPTKLSPISVLFIDDSSNVIYKQYENMVVRSXGX

SEQ ID NO: 11895 - protein, 37 aa, Artificial Sequence
  Non-cyclic GFR-binding peptide
  MOD_RES (4), (5): Xaa is C or S
  MOD_RES (19), (20), (21), (22), (23): Xaa is A or G
  MOD_RES (24), (25), (26), (27): Xaa is A or G or is absent
AAPXXVPQALSPISILFIXXXXXXXXXYKQYEMIVRS

SEQ ID NO: 11896 - protein, 37 aa, Artificial Sequence
  Non-cyclic GFR-binding peptide
  MOD_RES (5), (5): Xaa is C or S
  MOD_RES (19), (20), (21), (22), (23): Xaa is A or G
  MOD_RES (24), (25), (26), (27): Xaa is A or G or is absent
TKPTXAPTKLEPLPVVYYXXXXXXXXXEQLSNNMVVR

SEQ ID NO: 11897 - protein, 40 aa, Artificial Sequence
  Non-cyclic GFR-binding peptide
  MOD_RES (2), (3), (37), (39): Xaa is C or S
  MOD_RES (17), (18), (19), (20), (21): Xaa is A or G
  MOD_RES (22), (23), (24), (25): Xaa is A or G or is absent
TXXVPTRLNAISILYFXXXXXXXXXLKKYRDMVVESXGXR

SEQ ID NO: 11898 - protein, 37 aa, Artificial Sequence
  Non-cyclic GFR-binding peptide
  MOD_RES (4), (5), (36): Xaa is C or S
ASPXXVPQDLSPISILFIVGRTPKVYKQYEMVVKSXK

SEQ ID NO: 11899 - protein, 36 aa, Artificial Sequence
  Non-cyclic GFR-binding peptide
  MOD_RES (3), (4): Xaa is C or S
  MOD_RES (18), (19), (20), (21), (22): Xaa is A or G
  MOD_RES (23), (24), (25), (26): Xaa is A or G or is absent
PTXXVPTRLEPLPIVYYXXXXXXXXXEQLSNDMVVE

SEQ ID NO: 11900 - protein, 40 aa, Artificial Sequence
  Non-cyclic GFR-binding peptide
  MOD_RES (6), (7): Xaa is C or S
  MOD_RES (21), (22), (23), (24), (25): Xaa is A or G
  MOD_RES (26), (27), (28), (29): Xaa is A or G or is absent
YVPKPXXAPTKLEPLPVVYYXXXXXXXXXEQLSNNMVVRS

SEQ ID NO: 11901 - protein, 37 aa, Artificial Sequence
  Non-cyclic GFR-binding peptide
  MOD_RES (1), (2), (36): Xaa is C or S
  MOD_RES (16), (17), (18), (19), (20): Xaa is A or G
  MOD_RES (21), (22), (23), (24): Xaa is A or G or is absent
XXVPTRLNAISILYFXXXXXXXXXLKKYRDMVVESXG

SEQ ID NO: 11902 - protein, 41 aa, Artificial Sequence
  Non-cyclic GFR-binding peptide
  MOD_RES (6), (7), (41): Xaa is C or S
  MOD_RES (21), (22), (23), (24), (25): Xaa is A or G
  MOD_RES (26), (27), (28), (29): Xaa is A or G or is absent
SIPKAXXVPTELSPISMLFIXXXXXXXXXYKQYEEMVVEGX

SEQ ID NO: 11903 - protein, 39 aa, Artificial Sequence
  Non-cyclic GFR-binding peptide
  MOD_RES (3), (4), (38): Xaa is C or S
  MOD_RES (18), (19), (20), (21), (22): Xaa is A or G
  MOD_RES (23), (24), (25), (26): Xaa is A or G or is absent
KAXXVPTELSPISMLFIXXXXXXXXXYKQYEDMVVEGXG

SEQ ID NO: 11904 - protein, 39 aa, Artificial Sequence
  Non-cyclic GFR-binding peptide
  MOD_RES (4), (5), (36), (38): Xaa is C or S
AAPXXVPQALEPLTILYYVGRKPKVEQLSNMIVRSXKXS

SEQ ID NO: 11905 - protein, 40 aa, Artificial Sequence
  Non-cyclic GFR-binding peptide
  MOD_RES (5), (6), (38), (40): Xaa is C or S
VPKPXXAPTQLEPLPVVYYDDSSNVIEQLSNNMVVRAXGX

SEQ ID NO: 11906 - protein, 43 aa, Artificial Sequence
  Non-cyclic GFR-binding peptide
  MOD_RES (6), (7), (41), (43): Xaa is C or S
  MOD_RES (21), (22), (23), (24), (25): Xaa is A or G
  MOD_RES (26), (27), (28), (29): Xaa is A or G or is absent
KIPKAXXVPTELEPLPMVYYXXXXXXXXXEQLSNDMVVEGXGX

SEQ ID NO: 11907 - protein, 33 aa, Artificial Sequence
  Non-cyclic GFR-binding peptide
  MOD_RES (14), (15), (16), (17), (18): Xaa is A or G
  MOD_RES (19), (20), (21), (22): Xaa is A or G or is absent
APTQLEPLPVVYYXXXXXXXXXEQLSNNMVVRA

SEQ ID NO: 11908 - protein, 32 aa, Artificial Sequence
  Non-cyclic GFR-binding peptide
  MOD_RES (1), (2): Xaa is C or S
XXAPTQLEPLTVLYYDDSSNVIEQLSNNMVVR

SEQ ID NO: 11909 - protein, 42 aa, Artificial Sequence
  Non-cyclic GFR-binding peptide
  MOD_RES (4), (5), (39), (41): Xaa is C or S
  MOD_RES (19), (20), (21), (22), (23): Xaa is A or G
  MOD_RES (24), (25), (26), (27): Xaa is A or G or is absent
PKPXXAPTQLEPLTVLYYXXXXXXXXXEQLSNNMVVRAXGXH

SEQ ID NO: 11910 - protein, 34 aa, Artificial Sequence
  Non-cyclic GFR-binding peptide
  MOD_RES (2), (3): Xaa is C or S
PXXAPTKLEPLPVVYYDDSSNVIEQLSNNMVVRS

SEQ ID NO: 11911 - protein, 40 aa, Artificial Sequence
  Non-cyclic GFR-binding peptide
  MOD_RES (7), (39): Xaa is C or S
HVTKPTXAPTKLSPISVLFIDDSSNVIYKQYENMVVRSXG

SEQ ID NO: 11912 - protein, 38 aa, Artificial Sequence
  Non-cyclic GFR-binding peptide
  MOD_RES (6), (7), (38): Xaa is C or S
ASASPXXVSQDLSPISILFIIGKTPKIYKQYEMIVKSX

SEQ ID NO: 11913 - protein, 41 aa, Artificial Sequence
  Non-cyclic GFR-binding peptide
  MOD_RES (6), (7), (39), (41): Xaa is C or S
YVPKPXXAPTKLEPLPVVYYDDSSNVIEQLSNNMVVRSXGX

SEQ ID NO: 11914 - protein, 35 aa, Artificial Sequence
  Non-cyclic GFR-binding peptide
  MOD_RES (1), (33), (35): Xaa is C or S
XVPTELSPISMLFIDEYDKVVYKQYEEMVVEGXGX

SEQ ID NO: 11915 - protein, 34 aa, Artificial Sequence
  Non-cyclic GFR-binding peptide
  MOD_RES (31), (33): Xaa is C or S
VPQDLEPLPIVYYVGRTPKVEQLSNMVVKSXKXS

SEQ ID NO: 11916 - protein, 40 aa, Artificial Sequence
  Non-cyclic GFR-binding peptide
  MOD_RES (4), (5), (38), (40): Xaa is C or S
  MOD_RES (19), (20), (21), (22), (23): Xaa is A or G
  MOD_RES (24), (25), (26), (27): Xaa is A or G or is absent
ASPXXVSQDLSPISILFIXXXXXXXXXYKQYEMIVKSXKX

SEQ ID NO: 11917 - protein, 38 aa, Artificial Sequence
  Non-cyclic GFR-binding peptide
  MOD_RES (2), (36), (38): Xaa is C or S
  MOD_RES (16), (17), (18), (19), (20): Xaa is A or G
  MOD_RES (21), (22), (23), (24): Xaa is A or G or is absent
TXAPTKLEPLTVLYYXXXXXXXXXEQLSNNMVVRSXGX

SEQ ID NO: 11918 - protein, 40 aa, Artificial Sequence
  Non-cyclic GFR-binding peptide
  MOD_RES (3), (4), (38), (40): Xaa is C or S
  MOD_RES (18), (19), (20), (21), (22): Xaa is A or G
  MOD_RES (23), (24), (25), (26): Xaa is A or G or is absent
KAXXVPTELEPLPMVYYXXXXXXXXXEQLSNEMVVEGXGX

SEQ ID NO: 11919 - protein, 36 aa, Artificial Sequence
  Non-cyclic GFR-binding peptide
  MOD_RES (1), (2), (34), (36): Xaa is C or S
XXAPTKLEPLPVVYYDDSSNVIEQLSNNMVVRSXGX

SEQ ID NO: 11920 - protein, 36 aa, Artificial Sequence
  Non-cyclic GFR-binding peptide
  MOD_RES (3), (35): Xaa is C or S
PTXAPTKLSPISVLFIDDSSNVIYKQYENMVVRSXG

SEQ ID NO: 11921 - protein, 39 aa, Artificial Sequence
  Non-cyclic GFR-binding peptide
  MOD_RES (6), (7), (39): Xaa is C or S
SIPKAXXVPTELEPLPMVYYDEYDKVVEQLSNEMVVEGX

SEQ ID NO: 11922 - protein, 35 aa, Artificial Sequence
  Non-cyclic GFR-binding peptide
  MOD_RES (34), (34): Xaa is C or S
  MOD_RES (14), (15), (16), (17), (18): Xaa is A or G
  MOD_RES (19), (20), (21), (22): Xaa is A or G or is absent
VPTELEPLTMLYYXXXXXXXXXEQLSNDMVVEGXG

SEQ ID NO: 11923 - protein, 39 aa, Artificial Sequence
  Non-cyclic GFR-binding peptide
  MOD_RES (4), (5), (37), (39): Xaa is C or S
PKAXXVPTELEPLPMVYYDEYDKVVEQLSNEMVVEGXGX

SEQ ID NO: 11924 - protein, 37 aa, Artificial Sequence
  Non-cyclic GFR-binding peptide
  MOD_RES (34), (36): Xaa is C or S
  MOD_RES (14), (15), (16), (17), (18): Xaa is A or G
  MOD_RES (19), (20), (21), (22): Xaa is A or G or is absent
APTQLSPISVLFIXXXXXXXXXYKQYENMVVRAXGXH

SEQ ID NO: 11925 - protein, 38 aa, Artificial Sequence
  Non-cyclic GFR-binding peptide
  MOD_RES (4), (5): Xaa is C or S
  MOD_RES (19), (20), (21), (22), (23): Xaa is A or G
  MOD_RES (24), (25), (26), (27): Xaa is A or G or is absent
PPTXXVPTRLEPLTILYYXXXXXXXXXEQLSNDMVVES

SEQ ID NO: 11926 - protein, 42 aa, Artificial Sequence
  Non-cyclic GFR-binding peptide
  MOD_RES (5), (6), (40), (42): Xaa is C or S
  MOD_RES (20), (21), (22), (23), (24): Xaa is A or G
  MOD_RES (25), (26), (27), (28): Xaa is A or G or is absent
VPKPXXAPTQLEPLPVVYYXXXXXXXXXEQLSNNMVVRAXGX

SEQ ID NO: 11927 - protein, 33 aa, Artificial Sequence
  Non-cyclic GFR-binding peptide
  MOD_RES (31), (33): Xaa is C or S
VSQDLSPISILFIIGKTPKIYKQYEMIVKSXKX

SEQ ID NO: 11928 - protein, 35 aa, Artificial Sequence
  Non-cyclic GFR-binding peptide
  MOD_RES (1), (33), (35): Xaa is C or S
XVPTELEPLTMLYYDEYDKVVEQLSNEMVVEGXGX

SEQ ID NO: 11929 - protein, 37 aa, Artificial Sequence
  Non-cyclic GFR-binding peptide
  MOD_RES (3), (35), (37): Xaa is C or S
PTXAPTKLEPLTVLYYDDSSNVIEQLSNNMVVRSXGX

SEQ ID NO: 11930 - protein, 34 aa, Artificial Sequence
  Non-cyclic GFR-binding peptide
  MOD_RES (34), (34): Xaa is C or S
  MOD_RES (14), (15), (16), (17), (18): Xaa is A or G
  MOD_RES (19), (20), (21), (22): Xaa is A or G or is absent
VPTELEPLTMLYYXXXXXXXXXEQLSNDMVVEGX

SEQ ID NO: 11931 - protein, 43 aa, Artificial Sequence
  Non-cyclic GFR-binding peptide
  MOD_RES (5), (6), (40), (42): Xaa is C or S
  MOD_RES (20), (21), (22), (23), (24): Xaa is A or G
  MOD_RES (25), (26), (27), (28): Xaa is A or G or is absent
VPKPXXAPTKLEPLTVLYYXXXXXXXXXEQLSNNMVVRSXGXH

SEQ ID NO: 11932 - protein, 42 aa, Artificial Sequence
  Non-cyclic GFR-binding peptide
  MOD_RES (5), (6), (40), (42): Xaa is C or S
  MOD_RES (20), (21), (22), (23), (24): Xaa is A or G
  MOD_RES (25), (26), (27), (28): Xaa is A or G or is absent
VPKPXXAPTKLSPISVLFIXXXXXXXXXYKQYENMVVRSXGX

SEQ ID NO: 11933 - protein, 40 aa, Artificial Sequence
  Non-cyclic GFR-binding peptide
  MOD_RES (3), (4), (38), (40): Xaa is C or S
  MOD_RES (18), (19), (20), (21), (22): Xaa is A or G
  MOD_RES (23), (24), (25), (26): Xaa is A or G or is absent
KAXXVPTELEPLPMVYYXXXXXXXXXEQLSNDMVVEGXGX

SEQ ID NO: 11934 - protein, 36 aa, Artificial Sequence
  Non-cyclic GFR-binding peptide
  MOD_RES (1), (33), (35): Xaa is C or S
XVPTELSPISMLFIDEYDKVVYKQYEEMVVEGXGXR

SEQ ID NO: 11935 - protein, 40 aa, Artificial Sequence
  Non-cyclic GFR-binding peptide
  MOD_RES (3), (4), (38), (40): Xaa is C or S
  MOD_RES (18), (19), (20), (21), (22): Xaa is A or G
  MOD_RES (23), (24), (25), (26): Xaa is A or G or is absent
KAXXVPTELEPLTMLYYXXXXXXXXXEQLSNEMVVEGXGX

SEQ ID NO: 11936 - protein, 38 aa, Artificial Sequence
  Non-cyclic GFR-binding peptide
  MOD_RES (3), (4), (36), (38): Xaa is C or S
KPXXAPTQLEPLPVVYYDDSSNVIEQLSNNMVVRAXGX

SEQ ID NO: 11937 - protein, 37 aa, Artificial Sequence
  Non-cyclic GFR-binding peptide
  MOD_RES (1), (2), (35), (37): Xaa is C or S
  MOD_RES (16), (17), (18), (19), (20): Xaa is A or G
  MOD_RES (21), (22), (23), (24): Xaa is A or G or is absent
XXVPQDLSPISILFIXXXXXXXXXYKQYEMVVKSXKX

SEQ ID NO: 11938 - protein, 41 aa, Artificial Sequence
  Non-cyclic GFR-binding peptide
  MOD_RES (6), (7), (41): Xaa is C or S
  MOD_RES (21), (22), (23), (24), (25): Xaa is A or G
  MOD_RES (26), (27), (28), (29): Xaa is A or G or is absent
TVPKPXXAPTQLEPLPVVYYXXXXXXXXXEQLSNNMVVRAX

SEQ ID NO: 11939 - protein, 38 aa, Artificial Sequence
  Non-cyclic GFR-binding peptide
  MOD_RES (5), (6): Xaa is C or S
  MOD_RES (20), (21), (22), (23), (24): Xaa is A or G
  MOD_RES (25), (26), (27), (28): Xaa is A or G or is absent
SASPXXVPQDLSPISILFIXXXXXXXXXYKQYEMVVKS

SEQ ID NO: 11940 - protein, 32 aa, Artificial Sequence
  Non-cyclic GFR-binding peptide
  MOD_RES (1), (2): Xaa is C or S
XXAPTKLEPLTVLYYDDSSNVIEQLSNNMVVR

SEQ ID NO: 11941 - protein, 42 aa, Artificial Sequence
  Non-cyclic GFR-binding peptide
  MOD_RES (5), (39), (41): Xaa is C or S
  MOD_RES (19), (20), (21), (22), (23): Xaa is A or G
  MOD_RES (24), (25), (26), (27): Xaa is A or G or is absent
TKPTXAPTKLEPLPVVYYXXXXXXXXXEQLSNNMVVRSXGXH

SEQ ID NO: 11942 - protein, 35 aa, Artificial Sequence
  Non-cyclic GFR-binding peptide
  MOD_RES (1), (34): Xaa is C or S
  MOD_RES (15), (16), (17), (18), (19): Xaa is A or G
  MOD_RES (20), (21), (22), (23): Xaa is A or G or is absent
XVPQALSPISILFIXXXXXXXXXYKQYEMIVRSXK

SEQ ID NO: 11943 - protein, 37 aa, Artificial Sequence
  Non-cyclic GFR-binding peptide
  MOD_RES (1), (2), (36): Xaa is C or S
  MOD_RES (16), (17), (18), (19), (20): Xaa is A or G
  MOD_RES (21), (22), (23), (24): Xaa is A or G or is absent
XXAPTQLSPISVLFIXXXXXXXXXYKQYENMVVRAXG

SEQ ID NO: 11944 - protein, 36 aa, Artificial Sequence
  Non-cyclic GFR-binding peptide
  MOD_RES (2), (3), (35): Xaa is C or S
AXXVPTELEPLPMVYYDENEKVVEQLSNDMVVEGXG

SEQ ID NO: 11945 - protein, 38 aa, Artificial Sequence
  Non-cyclic GFR-binding peptide
  MOD_RES (6), (7), (38): Xaa is C or S
ASAAPXXVPQALEPLTILYYVGRKPKVEQLSNMIVRSX

SEQ ID NO: 11946 - protein, 35 aa, Artificial Sequence
  Non-cyclic GFR-binding peptide
  MOD_RES (32), (34): Xaa is C or S
VPTELEPLPMVYYDENEKVVEQLSNDMVVEGXGXR

SEQ ID NO: 11947 - protein, 40 aa, Artificial Sequence
  Non-cyclic GFR-binding peptide
  MOD_RES (5), (6), (38), (40): Xaa is C or S
IPKAXXVPTELEPLPMVYYDEYDKVVEQLSNEMVVEGXGX

SEQ ID NO: 11948 - protein, 40 aa, Artificial Sequence
  Non-cyclic GFR-binding peptide
  MOD_RES (5), (6), (40): Xaa is C or S
  MOD_RES (20), (21), (22), (23), (24): Xaa is A or G
  MOD_RES (25), (26), (27), (28): Xaa is A or G or is absent
TPPTXXVPTRLNAISILYFXXXXXXXXXLKKYRDMVVESX

SEQ ID NO: 11949 - protein, 33 aa, Artificial Sequence
  Non-cyclic GFR-binding peptide
  MOD_RES (1), (2), (33): Xaa is C or S
XXVSQDLSPISILFIIGKTPKIYKQYEMIVKSX

SEQ ID NO: 11950 - protein, 37 aa, Artificial Sequence
  Non-cyclic GFR-binding peptide
  MOD_RES (4), (5): Xaa is C or S
  MOD_RES (19), (20), (21), (22), (23): Xaa is A or G
  MOD_RES (24), (25), (26), (27): Xaa is A or G or is absent
PPTXXVPTRLNAISILYFXXXXXXXXXLKKYRDMVVE

SEQ ID NO: 11951 - protein, 37 aa, Artificial Sequence
  Non-cyclic GFR-binding peptide
  MOD_RES (1), (2), (36): Xaa is C or S
  MOD_RES (16), (17), (18), (19), (20): Xaa is A or G
  MOD_RES (21), (22), (23), (24): Xaa is A or G or is absent
XXVPTELSPISMLFIXXXXXXXXXYKQYEDMVVEGXG

SEQ ID NO: 11952 - protein, 39 aa, Artificial Sequence
  Non-cyclic GFR-binding peptide
  MOD_RES (4), (5), (38): Xaa is C or S
  MOD_RES (19), (20), (21), (22), (23): Xaa is A or G
  MOD_RES (24), (25), (26), (27): Xaa is A or G or is absent
AAPXXVPQALEPLTILYYXXXXXXXXXEQLSNMIVRSXK

SEQ ID NO: 11953 - protein, 39 aa, Artificial Sequence
  Non-cyclic GFR-binding peptide
  MOD_RES (1), (2), (36), (38): Xaa is C or S
  MOD_RES (16), (17), (18), (19), (20): Xaa is A or G
  MOD_RES (21), (22), (23), (24): Xaa is A or G or is absent
XXVPTELEPLTMLYYXXXXXXXXXEQLSNEMVVEGXGXR

SEQ ID NO: 11954 - protein, 34 aa, Artificial Sequence
  Non-cyclic GFR-binding peptide
  MOD_RES (34), (34): Xaa is C or S
  MOD_RES (14), (15), (16), (17), (18): Xaa is A or G
  MOD_RES (19), (20), (21), (22): Xaa is A or G or is absent
VPTELSPISMLFIXXXXXXXXXYKQYEEMVVEGX

SEQ ID NO: 11955 - protein, 35 aa, Artificial Sequence
  Non-cyclic GFR-binding peptide
  MOD_RES (1), (2): Xaa is C or S
  MOD_RES (16), (17), (18), (19), (20): Xaa is A or G
  MOD_RES (21), (22), (23), (24): Xaa is A or G or is absent
XXVPTELEPLPMVYYXXXXXXXXXEQLSNDMVVEG

SEQ ID NO: 11956 - protein, 39 aa, Artificial Sequence
  Non-cyclic GFR-binding peptide
  MOD_RES (5), (6): Xaa is C or S
  MOD_RES (20), (21), (22), (23), (24): Xaa is A or G
  MOD_RES (25), (26), (27), (28): Xaa is A or G or is absent
IPKAXXVPTELEPLPMVYYXXXXXXXXXEQLSNEMVVEG

SEQ ID NO: 11957 - protein, 36 aa, Artificial Sequence
  Non-cyclic GFR-binding peptide
  MOD_RES (5), (6): Xaa is C or S
IPKAXXVPTELEPLPMVYYDENEKVVEQLSNDMVVE

SEQ ID NO: 11958 - protein, 34 aa, Artificial Sequence
  Non-cyclic GFR-binding peptide
  MOD_RES (32), (34): Xaa is C or S
VPTRLSAISILYLDSANNVVLKNYQDMVVESXGX

SEQ ID NO: 11959 - protein, 42 aa, Artificial Sequence
  Non-cyclic GFR-binding peptide
  MOD_RES (4), (5), (39), (41): Xaa is C or S
  MOD_RES (19), (20), (21), (22), (23): Xaa is A or G
  MOD_RES (24), (25), (26), (27): Xaa is A or G or is absent
PPTXXVPTRLEPLTILYYXXXXXXXXXEQLSNDMVVESXGXR

SEQ ID NO: 11960 - protein, 40 aa, Artificial Sequence
  Non-cyclic GFR-binding peptide
  MOD_RES (6), (7): Xaa is C or S
  MOD_RES (21), (22), (23), (24), (25): Xaa is A or G
  MOD_RES (26), (27), (28), (29): Xaa is A or G or is absent
YVPKPXXAPTKLEPLTVLYYXXXXXXXXXEQLSNNMVVRS

SEQ ID NO: 11961 - protein, 43 aa, Artificial Sequence
  Non-cyclic GFR-binding peptide
  MOD_RES (6), (40), (42): Xaa is C or S
  MOD_RES (20), (21), (22), (23), (24): Xaa is A or G
  MOD_RES (25), (26), (27), (28): Xaa is A or G or is absent
VTKPTXAPTKLSPISVLFIXXXXXXXXXYKQYENMVVRSXGXH

SEQ ID NO: 11962 - protein, 32 aa, Artificial Sequence
  Non-cyclic GFR-binding peptide
  MOD_RES (1), (2): Xaa is C or S
XXAPTQLEPLPVVYYDDSSNVIEQLSNNMVVR

SEQ ID NO: 11963 - protein, 40 aa, Artificial Sequence
  Non-cyclic GFR-binding peptide
  MOD_RES (4), (5), (39): Xaa is C or S
  MOD_RES (19), (20), (21), (22), (23): Xaa is A or G
  MOD_RES (24), (25), (26), (27): Xaa is A or G or is absent
PPTXXVPTRLEPLTILYYXXXXXXXXXEQLSNDMVVESXG

SEQ ID NO: 11964 - protein, 37 aa, Artificial Sequence
  Non-cyclic GFR-binding peptide
  MOD_RES (3), (4), (36): Xaa is C or S
KAXXVPTELSPISMLFIDENEKVVYKQYEDMVVEGXG

SEQ ID NO: 11965 - protein, 40 aa, Artificial Sequence
  Non-cyclic GFR-binding peptide
  MOD_RES (6), (7), (39): Xaa is C or S
YVPKPXXAPTKLEPLPVVYYDDSSNVIEQLSNNMVVRSXG

SEQ ID NO: 11966 - protein, 36 aa, Artificial Sequence
  Non-cyclic GFR-binding peptide
  MOD_RES (4), (5), (36): Xaa is C or S
AAPXXVPQALSPISILFIVGRKPKVYKQYEMIVRSX

SEQ ID NO: 11967 - protein, 42 aa, Artificial Sequence
  Non-cyclic GFR-binding peptide
  MOD_RES (6), (7), (41): Xaa is C or S
  MOD_RES (21), (22), (23), (24), (25): Xaa is A or G
  MOD_RES (26), (27), (28), (29): Xaa is A or G or is absent
KIPKAXXVPTELEPLTMLYYXXXXXXXXXEQLSNDMVVEGXG

SEQ ID NO: 11968 - protein, 38 aa, Artificial Sequence
  Non-cyclic GFR-binding peptide
  MOD_RES (2), (3), (37): Xaa is C or S
  MOD_RES (17), (18), (19), (20), (21): Xaa is A or G
  MOD_RES (22), (23), (24), (25): Xaa is A or G or is absent
AXXVPTELEPLTMLYYXXXXXXXXXEQLSNEMVVEGXG

SEQ ID NO: 11969 - protein, 33 aa, Artificial Sequence
  Non-cyclic GFR-binding peptide
  MOD_RES (1), (2): Xaa is C or S
XXAPTQLSPISVLFIDDSSNVIYKQYENMVVRA

SEQ ID NO: 11970 - protein, 33 aa, Artificial Sequence
  Non-cyclic GFR-binding peptide
  MOD_RES (1), (2): Xaa is C or S
XXVPTRLEPLTILYYDSANNVVEQLSNDMVVES

SEQ ID NO: 11971 - protein, 33 aa, Artificial Sequence
  Non-cyclic GFR-binding peptide
  MOD_RES (1), (1): Xaa is C or S
  MOD_RES (15), (16), (17), (18), (19): Xaa is A or G
  MOD_RES (20), (21), (22), (23): Xaa is A or G or is absent
XVPTELEPLPMVYYXXXXXXXXXEQLSNEMVVE

SEQ ID NO: 11972 - protein, 40 aa, Artificial Sequence
  Non-cyclic GFR-binding peptide
  MOD_RES (3), (4), (37), (39): Xaa is C or S
  MOD_RES (18), (19), (20), (21), (22): Xaa is A or G
  MOD_RES (23), (24), (25), (26): Xaa is A or G or is absent
APXXVPQALSPISILFIXXXXXXXXXYKQYEMIVRSXKXS

SEQ ID NO: 11973 - protein, 37 aa, Artificial Sequence
  Non-cyclic GFR-binding peptide
  MOD_RES (5), (6): Xaa is C or S
VPKPXXAPTQLSPISVLFIDDSSNVIYKQYENMVVRA

SEQ ID NO: 11974 - protein, 33 aa, Artificial Sequence
  Non-cyclic GFR-binding peptide
  MOD_RES (14), (15), (16), (17), (18): Xaa is A or G
  MOD_RES (19), (20), (21), (22): Xaa is A or G or is absent
APTQLSPISVLFIXXXXXXXXXYKQYENMVVRA

SEQ ID NO: 11975 - protein, 39 aa, Artificial Sequence
  Non-cyclic GFR-binding peptide
  MOD_RES (4), (5), (37), (39): Xaa is C or S
PKPXXAPTQLEPLPVVYYDDSSNVIEQLSNNMVVRAXGX

SEQ ID NO: 11976 - protein, 34 aa, Artificial Sequence
  Non-cyclic GFR-binding peptide
  MOD_RES (1), (2): Xaa is C or S
  MOD_RES (16), (17), (18), (19), (20): Xaa is A or G
  MOD_RES (21), (22), (23), (24): Xaa is A or G or is absent
XXVPTELEPLPMVYYXXXXXXXXXEQLSNDMVVE

SEQ ID NO: 11977 - protein, 33 aa, Artificial Sequence
  Non-cyclic GFR-binding peptide
  MOD_RES (32), (32): Xaa is C or S
VPTRLEPLTILYYDSANNVVEQLSNDMVVESXG

SEQ ID NO: 11978 - protein, 36 aa, Artificial Sequence
  Non-cyclic GFR-binding peptide
  MOD_RES (1), (2), (36): Xaa is C or S
  MOD_RES (16), (17), (18), (19), (20): Xaa is A or G
  MOD_RES (21), (22), (23), (24): Xaa is A or G or is absent
XXVPTELSPISMLFIXXXXXXXXXYKQYEDMVVEGX

SEQ ID NO: 11979 - protein, 41 aa, Artificial Sequence
  Non-cyclic GFR-binding peptide
  MOD_RES (7), (41): Xaa is C or S
  MOD_RES (21), (22), (23), (24), (25): Xaa is A or G
  MOD_RES (26), (27), (28), (29): Xaa is A or G or is absent
HVTKPTXAPTKLEPLPVVYYXXXXXXXXXEQLSNNMVVRSX

SEQ ID NO: 11980 - protein, 34 aa, Artificial Sequence
  Non-cyclic GFR-binding peptide
  MOD_RES (3), (4): Xaa is C or S
APXXVPQALSPISILFIVGRKPKVYKQYEMIVRS

SEQ ID NO: 11981 - protein, 42 aa, Artificial Sequence
  Non-cyclic GFR-binding peptide
  MOD_RES (6), (7), (39), (41): Xaa is C or S
KIPKAXXVPTELEPLTMLYYDENEKVVEQLSNDMVVEGXGXR

SEQ ID NO: 11982 - protein, 38 aa, Artificial Sequence
  Non-cyclic GFR-binding peptide
  MOD_RES (1), (35), (37): Xaa is C or S
  MOD_RES (15), (16), (17), (18), (19): Xaa is A or G
  MOD_RES (20), (21), (22), (23): Xaa is A or G or is absent
XAPTQLSPISVLFIXXXXXXXXXYKQYENMVVRAXGXH

SEQ ID NO: 11983 - protein, 39 aa, Artificial Sequence
  Non-cyclic GFR-binding peptide
  MOD_RES (3), (4), (36), (38): Xaa is C or S
KAXXVPTELEPLTMLYYDEYDKVVEQLSNEMVVEGXGXR

SEQ ID NO: 11984 - protein, 38 aa, Artificial Sequence
  Non-cyclic GFR-binding peptide
  MOD_RES (5), (6), (37): Xaa is C or S
SASPXXVPQDLEPLPIVYYVGRTPKVEQLSNMVVKSXK

SEQ ID NO: 11985 - protein, 38 aa, Artificial Sequence
  Non-cyclic GFR-binding peptide
  MOD_RES (3), (4), (36), (38): Xaa is C or S
KPXXAPTKLEPLPVVYYDDSSNVIEQLSNNMVVRSXGX

SEQ ID NO: 11986 - protein, 37 aa, Artificial Sequence
  Non-cyclic GFR-binding peptide
  MOD_RES (3), (37): Xaa is C or S
  MOD_RES (17), (18), (19), (20), (21): Xaa is A or G
  MOD_RES (22), (23), (24), (25): Xaa is A or G or is absent
PTXAPTKLSPISVLFIXXXXXXXXXYKQYENMVVRSX

SEQ ID NO: 11987 - protein, 35 aa, Artificial Sequence
  Non-cyclic GFR-binding peptide
  MOD_RES (3), (4): Xaa is C or S
KPXXAPTKLEPLPVVYYDDSSNVIEQLSNNMVVRS

SEQ ID NO: 11988 - protein, 34 aa, Artificial Sequence
  Non-cyclic GFR-binding peptide
  MOD_RES (1), (2): Xaa is C or S
  MOD_RES (16), (17), (18), (19), (20): Xaa is A or G
  MOD_RES (21), (22), (23), (24): Xaa is A or G or is absent
XXAPTQLSPISVLFIXXXXXXXXXYKQYENMVVR

SEQ ID NO: 11989 - protein, 38 aa, Artificial Sequence
  Non-cyclic GFR-binding peptide
  MOD_RES (2), (3), (37): Xaa is C or S
  MOD_RES (17), (18), (19), (20), (21): Xaa is A or G
  MOD_RES (22), (23), (24), (25): Xaa is A or G or is absent
TXXVPTRLNAISILYFXXXXXXXXXLKKYRDMVVESXG

SEQ ID NO: 11990 - protein, 40 aa, Artificial Sequence
  Non-cyclic GFR-binding peptide
  MOD_RES (6), (7), (40): Xaa is C or S
  MOD_RES (21), (22), (23), (24), (25): Xaa is A or G
  MOD_RES (26), (27), (28), (29): Xaa is A or G or is absent
ASASPXXVSQDLEPLPIVYYXXXXXXXXXEQLSNMIVKSX

SEQ ID NO: 11991 - protein, 34 aa, Artificial Sequence
  Non-cyclic GFR-binding peptide
  MOD_RES (1), (1): Xaa is C or S
  MOD_RES (15), (16), (17), (18), (19): Xaa is A or G
  MOD_RES (20), (21), (22), (23): Xaa is A or G or is absent
XAPTQLSPISVLFIXXXXXXXXXYKQYENMVVRA

SEQ ID NO: 11992 - protein, 35 aa, Artificial Sequence
  Non-cyclic GFR-binding peptide
  MOD_RES (1), (2), (34): Xaa is C or S
XXVPTELSPISMLFIDEYDKVVYKQYEEMVVEGXG

SEQ ID NO: 11993 - protein, 35 aa, Artificial Sequence
  Non-cyclic GFR-binding peptide
  MOD_RES (4), (5): Xaa is C or S
ASPXXVSQDLEPLPIVYYIGKTPKIEQLSNMIVKS

SEQ ID NO: 11994 - protein, 37 aa, Artificial Sequence
  Non-cyclic GFR-binding peptide
  MOD_RES (3), (4): Xaa is C or S
  MOD_RES (18), (19), (20), (21), (22): Xaa is A or G
  MOD_RES (23), (24), (25), (26): Xaa is A or G or is absent
PTXXVPTRLEPLTILYYXXXXXXXXXEQLSNDMVVES

SEQ ID NO: 11995 - protein, 37 aa, Artificial Sequence
  Non-cyclic GFR-binding peptide
  MOD_RES (3), (4), (35), (37): Xaa is C or S
SPXXVPQDLSPISILFIVGRTPKVYKQYEMVVKSXKX

SEQ ID NO: 11996 - protein, 34 aa, Artificial Sequence
  Non-cyclic GFR-binding peptide
  MOD_RES (32), (34): Xaa is C or S
VPTRLEPLPIVYYDSANNVVEQLSNDMVVESXGX

SEQ ID NO: 11997 - protein, 34 aa, Artificial Sequence
  Non-cyclic GFR-binding peptide
  MOD_RES (34), (34): Xaa is C or S
  MOD_RES (14), (15), (16), (17), (18): Xaa is A or G
  MOD_RES (19), (20), (21), (22): Xaa is A or G or is absent
VPTRLEPLTILYYXXXXXXXXXEQLSNDMVVESX

SEQ ID NO: 11998 - protein, 39 aa, Artificial Sequence
  Non-cyclic GFR-binding peptide
  MOD_RES (4), (5), (38): Xaa is C or S
  MOD_RES (19), (20), (21), (22), (23): Xaa is A or G
  MOD_RES (24), (25), (26), (27): Xaa is A or G or is absent
ASPXXVPQDLSPISILFIXXXXXXXXXYKQYEMVVKSXK

SEQ ID NO: 11999 - protein, 39 aa, Artificial Sequence
  Non-cyclic GFR-binding peptide
  MOD_RES (4), (5), (37), (39): Xaa is C or S
PPTXXVPTRLSAISILYLDSANNVVLKNYQDMVVESXGX

SEQ ID NO: 12000 - protein, 37 aa, Artificial Sequence
  Non-cyclic GFR-binding peptide
  MOD_RES (34), (36): Xaa is C or S
  MOD_RES (14), (15), (16), (17), (18): Xaa is A or G
  MOD_RES (19), (20), (21), (22): Xaa is A or G or is absent
VPTRLEPLPIVYYXXXXXXXXXEQLSNDMVVESXGXR

SEQ ID NO: 12001 - protein, 40 aa, Artificial Sequence
  Non-cyclic GFR-binding peptide
  MOD_RES (5), (37), (39): Xaa is C or S
TKPTXAPTKLEPLPVVYYDDSSNVIEQLSNNMVVRSXGXH

SEQ ID NO: 12002 - protein, 38 aa, Artificial Sequence
  Non-cyclic GFR-binding peptide
  MOD_RES (1), (35), (37): Xaa is C or S
  MOD_RES (15), (16), (17), (18), (19): Xaa is A or G
  MOD_RES (20), (21), (22), (23): Xaa is A or G or is absent
XVPTRLSAISILYLXXXXXXXXXLKNYQDMVVESXGXR

SEQ ID NO: 12003 - protein, 35 aa, Artificial Sequence
  Non-cyclic GFR-binding peptide
  MOD_RES (3), (4): Xaa is C or S
PTXXVPTRLSAISILYLDSANNVVLKNYQDMVVES

SEQ ID NO: 12004 - protein, 39 aa, Artificial Sequence
  Non-cyclic GFR-binding peptide
  MOD_RES (4), (5), (37), (39): Xaa is C or S
PKPXXAPTKLEPLPVVYYDDSSNVIEQLSNNMVVRSXGX

SEQ ID NO: 12005 - protein, 39 aa, Artificial Sequence
  Non-cyclic GFR-binding peptide
  MOD_RES (5), (6), (38): Xaa is C or S
IPKAXXVPTELSPISMLFIDENEKVVYKQYEDMVVEGXG

SEQ ID NO: 12006 - protein, 41 aa, Artificial Sequence
  Non-cyclic GFR-binding peptide
  MOD_RES (6), (7), (41): Xaa is C or S
  MOD_RES (21), (22), (23), (24), (25): Xaa is A or G
  MOD_RES (26), (27), (28), (29): Xaa is A or G or is absent
KIPKAXXVPTELEPLPMVYYXXXXXXXXXEQLSNDMVVEGX

SEQ ID NO: 12007 - protein, 37 aa, Artificial Sequence
  Non-cyclic GFR-binding peptide
  MOD_RES (1), (2), (35), (37): Xaa is C or S
  MOD_RES (16), (17), (18), (19), (20): Xaa is A or G
  MOD_RES (21), (22), (23), (24): Xaa is A or G or is absent
XXVSQDLSPISILFIXXXXXXXXXYKQYEMIVKSXKX

SEQ ID NO: 12008 - protein, 37 aa, Artificial Sequence
  Non-cyclic GFR-binding peptide
  MOD_RES (5), (6), (37): Xaa is C or S
SAAPXXVPQALEPLTILYYVGRKPKVEQLSNMIVRSX

SEQ ID NO: 12009 - protein, 42 aa, Artificial Sequence
  Non-cyclic GFR-binding peptide
  MOD_RES (7), (41): Xaa is C or S
  MOD_RES (21), (22), (23), (24), (25): Xaa is A or G
  MOD_RES (26), (27), (28), (29): Xaa is A or G or is absent
HVTKPTXAPTKLEPLPVVYYXXXXXXXXXEQLSNNMVVRSXG

SEQ ID NO: 12010 - protein, 41 aa, Artificial Sequence
  Non-cyclic GFR-binding peptide
  MOD_RES (7), (39), (41): Xaa is C or S
HVTKPTXAPTKLEPLPVVYYDDSSNVIEQLSNNMVVRSXGX

SEQ ID NO: 12011 - protein, 35 aa, Artificial Sequence
  Non-cyclic GFR-binding peptide
  MOD_RES (4), (5): Xaa is C or S
PKPXXAPTQLEPLPVVYYDDSSNVIEQLSNNMVVR

SEQ ID NO: 12012 - protein, 33 aa, Artificial Sequence
  Non-cyclic GFR-binding peptide
  MOD_RES (14), (15), (16), (17), (18): Xaa is A or G
  MOD_RES (19), (20), (21), (22): Xaa is A or G or is absent
VPTELEPLTMLYYXXXXXXXXXEQLSNDMVVEG

SEQ ID NO: 12013 - protein, 38 aa, Artificial Sequence
  Non-cyclic GFR-binding peptide
  MOD_RES (4), (5), (37): Xaa is C or S
PKPXXAPTKLEPLTVLYYDDSSNVIEQLSNNMVVRSXG

SEQ ID NO: 12014 - protein, 30 aa, Artificial Sequence
  Non-cyclic GFR-binding peptide
APTQLEPLTVLYYDDSSNVIEQLSNNMVVR

SEQ ID NO: 12015 - protein, 38 aa, Artificial Sequence
  Non-cyclic GFR-binding peptide
  MOD_RES (2), (3), (36), (38): Xaa is C or S
  MOD_RES (17), (18), (19), (20), (21): Xaa is A or G
  MOD_RES (22), (23), (24), (25): Xaa is A or G or is absent
PXXVPQDLEPLPIVYYXXXXXXXXXEQLSNMVVKSXKX

SEQ ID NO: 12016 - protein, 43 aa, Artificial Sequence
  Non-cyclic GFR-binding peptide
  MOD_RES (5), (6), (40), (42): Xaa is C or S
  MOD_RES (20), (21), (22), (23), (24): Xaa is A or G
  MOD_RES (25), (26), (27), (28): Xaa is A or G or is absent
IPKAXXVPTELEPLPMVYYXXXXXXXXXEQLSNEMVVEGXGXR

SEQ ID NO: 12017 - protein, 35 aa, Artificial Sequence
  Non-cyclic GFR-binding peptide
  MOD_RES (1), (2), (34): Xaa is C or S
XXVPTRLEPLPIVYYDSANNVVEQLSNDMVVESXG

SEQ ID NO: 12018 - protein, 41 aa, Artificial Sequence
  Non-cyclic GFR-binding peptide
  MOD_RES (3), (4), (38), (40): Xaa is C or S
  MOD_RES (18), (19), (20), (21), (22): Xaa is A or G
  MOD_RES (23), (24), (25), (26): Xaa is A or G or is absent
PTXXVPTRLNAISILYFXXXXXXXXXLKKYRDMVVESXGXR

SEQ ID NO: 12019 - protein, 41 aa, Artificial Sequence
  Non-cyclic GFR-binding peptide
  MOD_RES (3), (4), (38), (40): Xaa is C or S
  MOD_RES (18), (19), (20), (21), (22): Xaa is A or G
  MOD_RES (23), (24), (25), (26): Xaa is A or G or is absent
PTXXVPTRLEPLPIVYYXXXXXXXXXEQLSNDMVVESXGXR

SEQ ID NO: 12020 - protein, 37 aa, Artificial Sequence
  Non-cyclic GFR-binding peptide
  MOD_RES (5), (6): Xaa is C or S
IPKAXXVPTELEPLPMVYYDEYDKVVEQLSNEMVVEG

SEQ ID NO: 12021 - protein, 37 aa, Artificial Sequence
  Non-cyclic GFR-binding peptide
  MOD_RES (1), (35), (37): Xaa is C or S
  MOD_RES (15), (16), (17), (18), (19): Xaa is A or G
  MOD_RES (20), (21), (22), (23): Xaa is A or G or is absent
XVPTELEPLPMVYYXXXXXXXXXEQLSNEMVVEGXGX

SEQ ID NO: 12022 - protein, 31 aa, Artificial Sequence
  Non-cyclic GFR-binding peptide
  MOD_RES (1), (1): Xaa is C or S
XVPTELSPISMLFIDENEKVVYKQYEDMVVE

SEQ ID NO: 12023 - protein, 38 aa, Artificial Sequence
  Non-cyclic GFR-binding peptide
  MOD_RES (4), (5): Xaa is C or S
  MOD_RES (19), (20), (21), (22), (23): Xaa is A or G
  MOD_RES (24), (25), (26), (27): Xaa is A or G or is absent
PKPXXAPTKLEPLPVVYYXXXXXXXXXEQLSNNMVVRS

SEQ ID NO: 12024 - protein, 39 aa, Artificial Sequence
  Non-cyclic GFR-binding peptide
  MOD_RES (2), (3), (37), (39): Xaa is C or S
  MOD_RES (17), (18), (19), (20), (21): Xaa is A or G
  MOD_RES (22), (23), (24), (25): Xaa is A or G or is absent
AXXVPTELEPLTMLYYXXXXXXXXXEQLSNDMVVEGXGX

SEQ ID NO: 12025 - protein, 34 aa, Artificial Sequence
  Non-cyclic GFR-binding peptide
  MOD_RES (2), (3), (34): Xaa is C or S
PXXVPQDLSPISILFIVGRTPKVYKQYEMVVKSX

SEQ ID NO: 12026 - protein, 41 aa, Artificial Sequence
  Non-cyclic GFR-binding peptide
  MOD_RES (5), (6), (40): Xaa is C or S
  MOD_RES (20), (21), (22), (23), (24): Xaa is A or G
  MOD_RES (25), (26), (27), (28): Xaa is A or G or is absent
VPKPXXAPTKLEPLPVVYYXXXXXXXXXEQLSNNMVVRSXG

SEQ ID NO: 12027 - protein, 32 aa, Artificial Sequence
  Non-cyclic GFR-binding peptide
  MOD_RES (1), (1): Xaa is C or S
XVPTELSPISMLFIDEYDKVVYKQYEEMVVEG

SEQ ID NO: 12028 - protein, 35 aa, Artificial Sequence
  Non-cyclic GFR-binding peptide
  MOD_RES (3), (4): Xaa is C or S
PTXXVPTRLNAISILYFDSANNVVLKKYRDMVVES

SEQ ID NO: 12029 - protein, 39 aa, Artificial Sequence
  Non-cyclic GFR-binding peptide
  MOD_RES (4), (36), (38): Xaa is C or S
KPTXAPTKLSPISVLFIDDSSNVIYKQYENMVVRSXGXH

SEQ ID NO: 12030 - protein, 35 aa, Artificial Sequence
  Non-cyclic GFR-binding peptide
  MOD_RES (2), (3): Xaa is C or S
  MOD_RES (17), (18), (19), (20), (21): Xaa is A or G
  MOD_RES (22), (23), (24), (25): Xaa is A or G or is absent
PXXVPQDLSPISILFIXXXXXXXXXYKQYEMVVKS

SEQ ID NO: 12031 - protein, 34 aa, Artificial Sequence
  Non-cyclic GFR-binding peptide
  MOD_RES (31), (33): Xaa is C or S
VSQDLSPISILFIIGKTPKIYKQYEMIVKSXKXS

SEQ ID NO: 12032 - protein, 35 aa, Artificial Sequence
  Non-cyclic GFR-binding peptide
  MOD_RES (1), (2), (35): Xaa is C or S
  MOD_RES (16), (17), (18), (19), (20): Xaa is A or G
  MOD_RES (21), (22), (23), (24): Xaa is A or G or is absent
XXVSQDLEPLPIVYYXXXXXXXXXEQLSNMIVKSX

SEQ ID NO: 12033 - protein, 38 aa, Artificial Sequence
  Non-cyclic GFR-binding peptide
  MOD_RES (5), (6), (38): Xaa is C or S
IPKAXXVPTELSPISMLFIDENEKVVYKQYEDMVVEGX

SEQ ID NO: 12034 - protein, 40 aa, Artificial Sequence
  Non-cyclic GFR-binding peptide
  MOD_RES (4), (5), (37), (39): Xaa is C or S
PKAXXVPTELEPLPMVYYDEYDKVVEQLSNEMVVEGXGXR

SEQ ID NO: 12035 - protein, 33 aa, Artificial Sequence
  Non-cyclic GFR-binding peptide
  MOD_RES (1), (2): Xaa is C or S
XXVPTELEPLPMVYYDEYDKVVEQLSNEMVVEG

SEQ ID NO: 12036 - protein, 38 aa, Artificial Sequence
  Non-cyclic GFR-binding peptide
  MOD_RES (6), (38): Xaa is C or S
VTKPTXAPTKLSPISVLFIDDSSNVIYKQYENMVVRSX

SEQ ID NO: 12037 - protein, 38 aa, Artificial Sequence
  Non-cyclic GFR-binding peptide
  MOD_RES (3), (4), (36), (38): Xaa is C or S
PTXXVPTRLSAISILYLDSANNVVLKNYQDMVVESXGX

SEQ ID NO: 12038 - protein, 36 aa, Artificial Sequence
  Non-cyclic GFR-binding peptide
  MOD_RES (1), (35): Xaa is C or S
  MOD_RES (15), (16), (17), (18), (19): Xaa is A or G
  MOD_RES (20), (21), (22), (23): Xaa is A or G or is absent
XVPTELEPLPMVYYXXXXXXXXXEQLSNEMVVEGXG

SEQ ID NO: 12039 - protein, 37 aa, Artificial Sequence
  Non-cyclic GFR-binding peptide
  MOD_RES (2), (3), (37): Xaa is C or S
  MOD_RES (17), (18), (19), (20), (21): Xaa is A or G
  MOD_RES (22), (23), (24), (25): Xaa is A or G or is absent
PXXAPTQLEPLTVLYYXXXXXXXXXEQLSNNMVVRAX

SEQ ID NO: 12040 - protein, 41 aa, Artificial Sequence
  Non-cyclic GFR-binding peptide
  MOD_RES (4), (5), (39), (41): Xaa is C or S
  MOD_RES (19), (20), (21), (22), (23): Xaa is A or G
  MOD_RES (24), (25), (26), (27): Xaa is A or G or is absent
PKAXXVPTELEPLTMLYYXXXXXXXXXEQLSNEMVVEGXGX

SEQ ID NO: 12041 - protein, 37 aa, Artificial Sequence
  Non-cyclic GFR-binding peptide
  MOD_RES (34), (36): Xaa is C or S
  MOD_RES (14), (15), (16), (17), (18): Xaa is A or G
  MOD_RES (19), (20), (21), (22): Xaa is A or G or is absent
VPTRLNAISILYFXXXXXXXXXLKKYRDMVVESXGXR

SEQ ID NO: 12042 - protein, 35 aa, Artificial Sequence
  Non-cyclic GFR-binding peptide
  MOD_RES (1), (35): Xaa is C or S
  MOD_RES (15), (16), (17), (18), (19): Xaa is A or G
  MOD_RES (20), (21), (22), (23): Xaa is A or G or is absent
XVPTRLEPLPIVYYXXXXXXXXXEQLSNDMVVESX

SEQ ID NO: 12043 - protein, 39 aa, Artificial Sequence
  Non-cyclic GFR-binding peptide
  MOD_RES (6), (38): Xaa is C or S
VTKPTXAPTKLEPLTVLYYDDSSNVIEQLSNNMVVRSXG

SEQ ID NO: 12044 - protein, 33 aa, Artificial Sequence
  Non-cyclic GFR-binding peptide
  MOD_RES (3), (3): Xaa is C or S
PTXAPTKLEPLTVLYYDDSSNVIEQLSNNMVVR

SEQ ID NO: 12045 - protein, 36 aa, Artificial Sequence
  Non-cyclic GFR-binding peptide
  MOD_RES (3), (4), (36): Xaa is C or S
KPXXAPTKLSPISVLFIDDSSNVIYKQYENMVVRSX

SEQ ID NO: 12046 - protein, 44 aa, Artificial Sequence
  Non-cyclic GFR-binding peptide
  MOD_RES (6), (7), (41), (43): Xaa is C or S
  MOD_RES (21), (22), (23), (24), (25): Xaa is A or G
  MOD_RES (26), (27), (28), (29): Xaa is A or G or is absent
YVPKPXXAPTKLEPLTVLYYXXXXXXXXXEQLSNNMVVRSXGXH

SEQ ID NO: 12047 - protein, 41 aa, Artificial Sequence
  Non-cyclic GFR-binding peptide
  MOD_RES (6), (7), (41): Xaa is C or S
  MOD_RES (21), (22), (23), (24), (25): Xaa is A or G
  MOD_RES (26), (27), (28), (29): Xaa is A or G or is absent
STPPTXXVPTRLNAISILYFXXXXXXXXXLKKYRDMVVESX

SEQ ID NO: 12048 - protein, 41 aa, Artificial Sequence
  Non-cyclic GFR-binding peptide
  MOD_RES (3), (4), (38), (40): Xaa is C or S
  MOD_RES (18), (19), (20), (21), (22): Xaa is A or G
  MOD_RES (23), (24), (25), (26): Xaa is A or G or is absent
KAXXVPTELSPISMLFIXXXXXXXXXYKQYEEMVVEGXGXR

SEQ ID NO: 12049 - protein, 39 aa, Artificial Sequence
  Non-cyclic GFR-binding peptide
  MOD_RES (5), (6), (37), (39): Xaa is C or S
SAAPXXVPQALEPLTILYYVGRKPKVEQLSNMIVRSXKX

SEQ ID NO: 12050 - protein, 34 aa, Artificial Sequence
  Non-cyclic GFR-binding peptide
  MOD_RES (1), (2), (34): Xaa is C or S
XXVPTRLSAISILYLDSANNVVLKNYQDMVVESX

SEQ ID NO: 12051 - protein, 34 aa, Artificial Sequence
  Non-cyclic GFR-binding peptide
  MOD_RES (1), (1): Xaa is C or S
  MOD_RES (15), (16), (17), (18), (19): Xaa is A or G
  MOD_RES (20), (21), (22), (23): Xaa is A or G or is absent
XAPTQLEPLTVLYYXXXXXXXXXEQLSNNMVVRA

SEQ ID NO: 12052 - protein, 42 aa, Artificial Sequence
  Non-cyclic GFR-binding peptide
  MOD_RES (6), (7), (40), (42): Xaa is C or S
  MOD_RES (21), (22), (23), (24), (25): Xaa is A or G
  MOD_RES (26), (27), (28), (29): Xaa is A or G or is absent
ASAAPXXVPQALSPISILFIXXXXXXXXXYKQYEMIVRSXKX

SEQ ID NO: 12053 - protein, 40 aa, Artificial Sequence
  Non-cyclic GFR-binding peptide
  MOD_RES (6), (7), (40): Xaa is C or S
  MOD_RES (21), (22), (23), (24), (25): Xaa is A or G
  MOD_RES (26), (27), (28), (29): Xaa is A or G or is absent
ASAAPXXVPQALEPLTILYYXXXXXXXXXEQLSNMIVRSX

SEQ ID NO: 12054 - protein, 38 aa, Artificial Sequence
  Non-cyclic GFR-binding peptide
  MOD_RES (1), (35), (37): Xaa is C or S
  MOD_RES (15), (16), (17), (18), (19): Xaa is A or G
  MOD_RES (20), (21), (22), (23): Xaa is A or G or is absent
XVPTELEPLPMVYYXXXXXXXXXEQLSNEMVVEGXGXR

SEQ ID NO: 12055 - protein, 42 aa, Artificial Sequence
  Non-cyclic GFR-binding peptide
  MOD_RES (4), (5), (39), (41): Xaa is C or S
  MOD_RES (19), (20), (21), (22), (23): Xaa is A or G
  MOD_RES (24), (25), (26), (27): Xaa is A or G or is absent
PKAXXVPTELEPLTMLYYXXXXXXXXXEQLSNEMVVEGXGXR

SEQ ID NO: 12056 - protein, 37 aa, Artificial Sequence
  Non-cyclic GFR-binding peptide
  MOD_RES (2), (36): Xaa is C or S
  MOD_RES (16), (17), (18), (19), (20): Xaa is A or G
  MOD_RES (21), (22), (23), (24): Xaa is A or G or is absent
TXAPTKLSPISVLFIXXXXXXXXXYKQYENMVVRSXG

SEQ ID NO: 12057 - protein, 35 aa, Artificial Sequence
  Non-cyclic GFR-binding peptide
  MOD_RES (34), (34): Xaa is C or S
  MOD_RES (14), (15), (16), (17), (18): Xaa is A or G
  MOD_RES (19), (20), (21), (22): Xaa is A or G or is absent
APTKLSPISVLFIXXXXXXXXXYKQYENMVVRSXG

SEQ ID NO: 12058 - protein, 41 aa, Artificial Sequence
  Non-cyclic GFR-binding peptide
  MOD_RES (5), (6), (40): Xaa is C or S
  MOD_RES (20), (21), (22), (23), (24): Xaa is A or G
  MOD_RES (25), (26), (27), (28): Xaa is A or G or is absent
VPKPXXAPTQLSPISVLFIXXXXXXXXXYKQYENMVVRAXG

SEQ ID NO: 12059 - protein, 39 aa, Artificial Sequence
  Non-cyclic GFR-binding peptide
  MOD_RES (4), (5), (37), (39): Xaa is C or S
PPTXXVPTRLEPLPIVYYDSANNVVEQLSNDMVVESXGX

SEQ ID NO: 12060 - protein, 40 aa, Artificial Sequence
  Non-cyclic GFR-binding peptide
  MOD_RES (5), (6), (39): Xaa is C or S
  MOD_RES (20), (21), (22), (23), (24): Xaa is A or G
  MOD_RES (25), (26), (27), (28): Xaa is A or G or is absent
SASPXXVSQDLEPLPIVYYXXXXXXXXXEQLSNMIVKSXK

SEQ ID NO: 12061 - protein, 38 aa, Artificial Sequence
  Non-cyclic GFR-binding peptide
  MOD_RES (3), (4), (38): Xaa is C or S
  MOD_RES (18), (19), (20), (21), (22): Xaa is A or G
  MOD_RES (23), (24), (25), (26): Xaa is A or G or is absent
KAXXVPTELEPLTMLYYXXXXXXXXXEQLSNDMVVEGX

SEQ ID NO: 12062 - protein, 34 aa, Artificial Sequence
  Non-cyclic GFR-binding peptide
  MOD_RES (2), (3): Xaa is C or S
TXXVPTRLEPLTILYYDSANNVVEQLSNDMVVES

SEQ ID NO: 12063 - protein, 39 aa, Artificial Sequence
  Non-cyclic GFR-binding peptide
  MOD_RES (6), (6): Xaa is C or S
  MOD_RES (20), (21), (22), (23), (24): Xaa is A or G
  MOD_RES (25), (26), (27), (28): Xaa is A or G or is absent
VTKPTXAPTKLEPLTVLYYXXXXXXXXXEQLSNNMVVRS

SEQ ID NO: 12064 - protein, 34 aa, Artificial Sequence
  Non-cyclic GFR-binding peptide
  MOD_RES (3), (4): Xaa is C or S
KPXXAPTKLEPLTVLYYDDSSNVIEQLSNNMVVR

SEQ ID NO: 12065 - protein, 31 aa, Artificial Sequence
  Non-cyclic GFR-binding peptide
  MOD_RES (1), (1): Xaa is C or S
XAPTKLEPLTVLYYDDSSNVIEQLSNNMVVR

SEQ ID NO: 12066 - protein, 33 aa, Artificial Sequence
  Non-cyclic GFR-binding peptide
  MOD_RES (1), (2): Xaa is C or S
XXVPTELSPISMLFIDEYDKVVYKQYEEMVVEG

SEQ ID NO: 12067 - protein, 34 aa, Artificial Sequence
  Non-cyclic GFR-binding peptide
  MOD_RES (32), (34): Xaa is C or S
APTQLEPLTVLYYDDSSNVIEQLSNNMVVRAXGX

SEQ ID NO: 12068 - protein, 38 aa, Artificial Sequence
  Non-cyclic GFR-binding peptide
  MOD_RES (3), (4), (36), (38): Xaa is C or S
PTXXVPTRLEPLPIVYYDSANNVVEQLSNDMVVESXGX

SEQ ID NO: 12069 - protein, 38 aa, Artificial Sequence
  Non-cyclic GFR-binding peptide
  MOD_RES (2), (3), (37): Xaa is C or S
  MOD_RES (17), (18), (19), (20), (21): Xaa is A or G
  MOD_RES (22), (23), (24), (25): Xaa is A or G or is absent
AXXVPTELSPISMLFIXXXXXXXXXYKQYEDMVVEGXG

SEQ ID NO: 12070 - protein, 38 aa, Artificial Sequence
  Non-cyclic GFR-binding peptide
  MOD_RES (1), (35), (37): Xaa is C or S
  MOD_RES (15), (16), (17), (18), (19): Xaa is A or G
  MOD_RES (20), (21), (22), (23): Xaa is A or G or is absent
XVPTELEPLTMLYYXXXXXXXXXEQLSNDMVVEGXGXR

SEQ ID NO: 12071 - protein, 34 aa, Artificial Sequence
  Non-cyclic GFR-binding peptide
  MOD_RES (2), (3): Xaa is C or S
PXXAPTKLSPISVLFIDDSSNVIYKQYENMVVRS

SEQ ID NO: 12072 - protein, 40 aa, Artificial Sequence
  Non-cyclic GFR-binding peptide
  MOD_RES (4), (5), (37), (39): Xaa is C or S
PKAXXVPTELSPISMLFIDENEKVVYKQYEDMVVEGXGXR

SEQ ID NO: 12073 - protein, 40 aa, Artificial Sequence
  Non-cyclic GFR-binding peptide
  MOD_RES (4), (5), (39): Xaa is C or S
  MOD_RES (19), (20), (21), (22), (23): Xaa is A or G
  MOD_RES (24), (25), (26), (27): Xaa is A or G or is absent
PKAXXVPTELSPISMLFIXXXXXXXXXYKQYEEMVVEGXG

SEQ ID NO: 12074 - protein, 43 aa, Artificial Sequence
  Non-cyclic GFR-binding peptide
  MOD_RES (5), (6), (40), (42): Xaa is C or S
  MOD_RES (20), (21), (22), (23), (24): Xaa is A or G
  MOD_RES (25), (26), (27), (28): Xaa is A or G or is absent
VPKPXXAPTQLSPISVLFIXXXXXXXXXYKQYENMVVRAXGXH

SEQ ID NO: 12075 - protein, 38 aa, Artificial Sequence
  Non-cyclic GFR-binding peptide
  MOD_RES (4), (5), (37): Xaa is C or S
PKAXXVPTELEPLTMLYYDENEKVVEQLSNDMVVEGXG

SEQ ID NO: 12076 - protein, 37 aa, Artificial Sequence
  Non-cyclic GFR-binding peptide
  MOD_RES (3), (4), (35), (37): Xaa is C or S
SPXXVSQDLSPISILFIIGKTPKIYKQYEMIVKSXKX

SEQ ID NO: 12077 - protein, 34 aa, Artificial Sequence
  Non-cyclic GFR-binding peptide
  MOD_RES (1), (2), (33): Xaa is C or S
XXVPQDLEPLPIVYYVGRTPKVEQLSNMVVKSXK

SEQ ID NO: 12078 - protein, 39 aa, Artificial Sequence
  Non-cyclic GFR-binding peptide
  MOD_RES (3), (4), (36), (38): Xaa is C or S
PTXXVPTRLNAISILYFDSANNVVLKKYRDMVVESXGXR

SEQ ID NO: 12079 - protein, 39 aa, Artificial Sequence
  Non-cyclic GFR-binding peptide
  MOD_RES (3), (4), (38): Xaa is C or S
  MOD_RES (18), (19), (20), (21), (22): Xaa is A or G
  MOD_RES (23), (24), (25), (26): Xaa is A or G or is absent
KAXXVPTELSPISMLFIXXXXXXXXXYKQYEEMVVEGXG

SEQ ID NO: 12080 - protein, 34 aa, Artificial Sequence
  Non-cyclic GFR-binding peptide
  MOD_RES (1), (2): Xaa is C or S
  MOD_RES (16), (17), (18), (19), (20): Xaa is A or G
  MOD_RES (21), (22), (23), (24): Xaa is A or G or is absent
XXVPTRLSAISILYLXXXXXXXXXLKNYQDMVVE

SEQ ID NO: 12081 - protein, 35 aa, Artificial Sequence
  Non-cyclic GFR-binding peptide
  MOD_RES (3), (4), (35): Xaa is C or S
SPXXVPQDLEPLPIVYYVGRTPKVEQLSNMVVKSX

SEQ ID NO: 12082 - protein, 37 aa, Artificial Sequence
  Non-cyclic GFR-binding peptide
  MOD_RES (5), (5): Xaa is C or S
  MOD_RES (19), (20), (21), (22), (23): Xaa is A or G
  MOD_RES (24), (25), (26), (27): Xaa is A or G or is absent
TKPTXAPTKLSPISVLFIXXXXXXXXXYKQYENMVVR

SEQ ID NO: 12083 - protein, 41 aa, Artificial Sequence
  Non-cyclic GFR-binding peptide
  MOD_RES (5), (6), (40): Xaa is C or S
  MOD_RES (20), (21), (22), (23), (24): Xaa is A or G
  MOD_RES (25), (26), (27), (28): Xaa is A or G or is absent
IPKAXXVPTELSPISMLFIXXXXXXXXXYKQYEDMVVEGXG

SEQ ID NO: 12084 - protein, 42 aa, Artificial Sequence
  Non-cyclic GFR-binding peptide
  MOD_RES (5), (6), (40), (42): Xaa is C or S
  MOD_RES (20), (21), (22), (23), (24): Xaa is A or G
  MOD_RES (25), (26), (27), (28): Xaa is A or G or is absent
TPPTXXVPTRLEPLPIVYYXXXXXXXXXEQLSNDMVVESXGX

SEQ ID NO: 12085 - protein, 34 aa, Artificial Sequence
  Non-cyclic GFR-binding peptide
  MOD_RES (1), (33): Xaa is C or S
XAPTKLEPLPVVYYDDSSNVIEQLSNNMVVRSXG

SEQ ID NO: 12086 - protein, 35 aa, Artificial Sequence
  Non-cyclic GFR-binding peptide
  MOD_RES (4), (5): Xaa is C or S
PKPXXAPTKLEPLTVLYYDDSSNVIEQLSNNMVVR

SEQ ID NO: 12087 - protein, 36 aa, Artificial Sequence
  Non-cyclic GFR-binding peptide
  MOD_RES (1), (2), (34), (36): Xaa is C or S
XXVPTELEPLPMVYYDEYDKVVEQLSNEMVVEGXGX

SEQ ID NO: 12088 - protein, 39 aa, Artificial Sequence
  Non-cyclic GFR-binding peptide
  MOD_RES (4), (5), (38): Xaa is C or S
  MOD_RES (19), (20), (21), (22), (23): Xaa is A or G
  MOD_RES (24), (25), (26), (27): Xaa is A or G or is absent
ASPXXVSQDLEPLPIVYYXXXXXXXXXEQLSNMIVKSXK

SEQ ID NO: 12089 - protein, 41 aa, Artificial Sequence
  Non-cyclic GFR-binding peptide
  MOD_RES (6), (40): Xaa is C or S
  MOD_RES (20), (21), (22), (23), (24): Xaa is A or G
  MOD_RES (25), (26), (27), (28): Xaa is A or G or is absent
VTKPTXAPTKLSPISVLFIXXXXXXXXXYKQYENMVVRSXG

SEQ ID NO: 12090 - protein, 38 aa, Artificial Sequence
  Non-cyclic GFR-binding peptide
  MOD_RES (2), (3), (35), (37): Xaa is C or S
TXXVPTRLNAISILYFDSANNVVLKKYRDMVVESXGXR

SEQ ID NO: 12091 - protein, 42 aa, Artificial Sequence
  Non-cyclic GFR-binding peptide
  MOD_RES (6), (7), (41): Xaa is C or S
  MOD_RES (21), (22), (23), (24), (25): Xaa is A or G
  MOD_RES (26), (27), (28), (29): Xaa is A or G or is absent
YVPKPXXAPTKLEPLPVVYYXXXXXXXXXEQLSNNMVVRSXG

SEQ ID NO: 12092 - protein, 33 aa, Artificial Sequence
  Non-cyclic GFR-binding peptide
  MOD_RES (1), (2), (33): Xaa is C or S
XXVPQDLSPISILFIVGRTPKVYKQYEMVVKSX

SEQ ID NO: 12093 - protein, 37 aa, Artificial Sequence
  Non-cyclic GFR-binding peptide
  MOD_RES (4), (5): Xaa is C or S
  MOD_RES (19), (20), (21), (22), (23): Xaa is A or G
  MOD_RES (24), (25), (26), (27): Xaa is A or G or is absent
AAPXXVPQALEPLTILYYXXXXXXXXXEQLSNMIVRS

SEQ ID NO: 12094 - protein, 43 aa, Artificial Sequence
  Non-cyclic GFR-binding peptide
  MOD_RES (6), (7), (40), (42): Xaa is C or S
  MOD_RES (21), (22), (23), (24), (25): Xaa is A or G
  MOD_RES (26), (27), (28), (29): Xaa is A or G or is absent
ASASPXXVPQDLSPISILFIXXXXXXXXXYKQYEMVVKSXKXS

SEQ ID NO: 12095 - protein, 36 aa, Artificial Sequence
  Non-cyclic GFR-binding peptide
  MOD_RES (2), (3): Xaa is C or S
  MOD_RES (17), (18), (19), (20), (21): Xaa is A or G
  MOD_RES (22), (23), (24), (25): Xaa is A or G or is absent
TXXVPTRLSAISILYLXXXXXXXXXLKNYQDMVVES

SEQ ID NO: 12096 - protein, 44 aa, Artificial Sequence
  Non-cyclic GFR-binding peptide
  MOD_RES (6), (7), (41), (43): Xaa is C or S
  MOD_RES (21), (22), (23), (24), (25): Xaa is A or G
  MOD_RES (26), (27), (28), (29): Xaa is A or G or is absent
STPPTXXVPTRLSAISILYLXXXXXXXXXLKNYQDMVVESXGXR

SEQ ID NO: 12097 - protein, 37 aa, Artificial Sequence
  Non-cyclic GFR-binding peptide
  MOD_RES (4), (5): Xaa is C or S
  MOD_RES (19), (20), (21), (22), (23): Xaa is A or G
  MOD_RES (24), (25), (26), (27): Xaa is A or G or is absent
PKPXXAPTQLEPLPVVYYXXXXXXXXXEQLSNNMVVR

SEQ ID NO: 12098 - protein, 38 aa, Artificial Sequence
  Non-cyclic GFR-binding peptide
  MOD_RES (3), (4), (38): Xaa is C or S
  MOD_RES (18), (19), (20), (21), (22): Xaa is A or G
  MOD_RES (23), (24), (25), (26): Xaa is A or G or is absent
KPXXAPTKLEPLTVLYYXXXXXXXXXEQLSNNMVVRSX

SEQ ID NO: 12099 - protein, 35 aa, Artificial Sequence
  Non-cyclic GFR-binding peptide
  MOD_RES (2), (34): Xaa is C or S
TXAPTKLSPISVLFIDDSSNVIYKQYENMVVRSXG

SEQ ID NO: 12100 - protein, 38 aa, Artificial Sequence
  Non-cyclic GFR-binding peptide
  MOD_RES (1), (2), (35), (37): Xaa is C or S
  MOD_RES (16), (17), (18), (19), (20): Xaa is A or G
  MOD_RES (21), (22), (23), (24): Xaa is A or G or is absent
XXVPQALSPISILFIXXXXXXXXXYKQYEMIVRSXKXS

SEQ ID NO: 12101 - protein, 37 aa, Artificial Sequence
  Non-cyclic GFR-binding peptide
  MOD_RES (4), (5): Xaa is C or S
  MOD_RES (19), (20), (21), (22), (23): Xaa is A or G
  MOD_RES (24), (25), (26), (27): Xaa is A or G or is absent
PKAXXVPTELSPISMLFIXXXXXXXXXYKQYEEMVVE

SEQ ID NO: 12102 - protein, 35 aa, Artificial Sequence
  Non-cyclic GFR-binding peptide
  MOD_RES (3), (4): Xaa is C or S
KAXXVPTELEPLPMVYYDENEKVVEQLSNDMVVEG

SEQ ID NO: 12103 - protein, 34 aa, Artificial Sequence
  Non-cyclic GFR-binding peptide
  MOD_RES (2), (2): Xaa is C or S
  MOD_RES (16), (17), (18), (19), (20): Xaa is A or G
  MOD_RES (21), (22), (23), (24): Xaa is A or G or is absent
TXAPTKLSPISVLFIXXXXXXXXXYKQYENMVVR

SEQ ID NO: 12104 - protein, 40 aa, Artificial Sequence
  Non-cyclic GFR-binding peptide
  MOD_RES (5), (6), (37), (39): Xaa is C or S
SAAPXXVPQALEPLTILYYVGRKPKVEQLSNMIVRSXKXS

SEQ ID NO: 12105 - protein, 41 aa, Artificial Sequence
  Non-cyclic GFR-binding peptide
  MOD_RES (4), (5), (39), (41): Xaa is C or S
  MOD_RES (19), (20), (21), (22), (23): Xaa is A or G
  MOD_RES (24), (25), (26), (27): Xaa is A or G or is absent
PKPXXAPTKLSPISVLFIXXXXXXXXXYKQYENMVVRSXGX

SEQ ID NO: 12106 - protein, 36 aa, Artificial Sequence
  Non-cyclic GFR-binding peptide
  MOD_RES (2), (3), (36): Xaa is C or S
  MOD_RES (17), (18), (19), (20), (21): Xaa is A or G
  MOD_RES (22), (23), (24), (25): Xaa is A or G or is absent
PXXVPQDLEPLPIVYYXXXXXXXXXEQLSNMVVKSX

SEQ ID NO: 12107 - protein, 39 aa, Artificial Sequence
  Non-cyclic GFR-binding peptide
  MOD_RES (6), (7): Xaa is C or S
  MOD_RES (21), (22), (23), (24), (25): Xaa is A or G
  MOD_RES (26), (27), (28), (29): Xaa is A or G or is absent
ASASPXXVPQDLSPISILFIXXXXXXXXXYKQYEMVVKS

SEQ ID NO: 12108 - protein, 38 aa, Artificial Sequence
  Non-cyclic GFR-binding peptide
  MOD_RES (4), (5), (37): Xaa is C or S
PKAXXVPTELSPISMLFIDENEKVVYKQYEDMVVEGXG

SEQ ID NO: 12109 - protein, 33 aa, Artificial Sequence
  Non-cyclic GFR-binding peptide
  MOD_RES (1), (1): Xaa is C or S
  MOD_RES (15), (16), (17), (18), (19): Xaa is A or G
  MOD_RES (20), (21), (22), (23): Xaa is A or G or is absent
XVPTELEPLTMLYYXXXXXXXXXEQLSNEMVVE

SEQ ID NO: 12110 - protein, 33 aa, Artificial Sequence
  Non-cyclic GFR-binding peptide
  MOD_RES (1), (33): Xaa is C or S
XVPTRLSAISILYLDSANNVVLKNYQDMVVESX

SEQ ID NO: 12111 - protein, 38 aa, Artificial Sequence
  Non-cyclic GFR-binding peptide
  MOD_RES (3), (37): Xaa is C or S
  MOD_RES (17), (18), (19), (20), (21): Xaa is A or G
  MOD_RES (22), (23), (24), (25): Xaa is A or G or is absent
PTXAPTKLSPISVLFIXXXXXXXXXYKQYENMVVRSXG

SEQ ID NO: 12112 - protein, 34 aa, Artificial Sequence
  Non-cyclic GFR-binding peptide
  MOD_RES (1), (2): Xaa is C or S
  MOD_RES (16), (17), (18), (19), (20): Xaa is A or G
  MOD_RES (21), (22), (23), (24): Xaa is A or G or is absent
XXVPTELEPLTMLYYXXXXXXXXXEQLSNDMVVE

SEQ ID NO: 12113 - protein, 41 aa, Artificial Sequence
  Non-cyclic GFR-binding peptide
  MOD_RES (5), (6), (38), (40): Xaa is C or S
VPKPXXAPTKLEPLPVVYYDDSSNVIEQLSNNMVVRSXGXH

SEQ ID NO: 12114 - protein, 36 aa, Artificial Sequence
  Non-cyclic GFR-binding peptide
  MOD_RES (1), (2), (35): Xaa is C or S
  MOD_RES (16), (17), (18), (19), (20): Xaa is A or G
  MOD_RES (21), (22), (23), (24): Xaa is A or G or is absent
XXVPQALEPLTILYYXXXXXXXXXEQLSNMIVRSXK

SEQ ID NO: 12115 - protein, 40 aa, Artificial Sequence
  Non-cyclic GFR-binding peptide
  MOD_RES (3), (4), (38), (40): Xaa is C or S
  MOD_RES (18), (19), (20), (21), (22): Xaa is A or G
  MOD_RES (23), (24), (25), (26): Xaa is A or G or is absent
KPXXAPTQLEPLTVLYYXXXXXXXXXEQLSNNMVVRAXGX

SEQ ID NO: 12116 - protein, 39 aa, Artificial Sequence
  Non-cyclic GFR-binding peptide
  MOD_RES (5), (6), (38): Xaa is C or S
IPKAXXVPTELEPLPMVYYDEYDKVVEQLSNEMVVEGXG

SEQ ID NO: 12117 - protein, 32 aa, Artificial Sequence
  Non-cyclic GFR-binding peptide
  MOD_RES (32), (32): Xaa is C or S
VPTRLSAISILYLDSANNVVLKNYQDMVVESX

SEQ ID NO: 12118 - protein, 43 aa, Artificial Sequence
  Non-cyclic GFR-binding peptide
  MOD_RES (6), (7), (41), (43): Xaa is C or S
  MOD_RES (21), (22), (23), (24), (25): Xaa is A or G
  MOD_RES (26), (27), (28), (29): Xaa is A or G or is absent
SIPKAXXVPTELEPLTMLYYXXXXXXXXXEQLSNEMVVEGXGX

SEQ ID NO: 12119 - protein, 39 aa, Artificial Sequence
  Non-cyclic GFR-binding peptide
  MOD_RES (6), (6): Xaa is C or S
  MOD_RES (20), (21), (22), (23), (24): Xaa is A or G
  MOD_RES (25), (26), (27), (28): Xaa is A or G or is absent
VTKPTXAPTKLEPLPVVYYXXXXXXXXXEQLSNNMVVRS

SEQ ID NO: 12120 - protein, 38 aa, Artificial Sequence
  Non-cyclic GFR-binding peptide
  MOD_RES (2), (3), (37): Xaa is C or S
  MOD_RES (17), (18), (19), (20), (21): Xaa is A or G
  MOD_RES (22), (23), (24), (25): Xaa is A or G or is absent
PXXAPTKLEPLPVVYYXXXXXXXXXEQLSNNMVVRSXG

SEQ ID NO: 12121 - protein, 44 aa, Artificial Sequence
  Non-cyclic GFR-binding peptide
  MOD_RES (6), (7), (41), (43): Xaa is C or S
  MOD_RES (21), (22), (23), (24), (25): Xaa is A or G
  MOD_RES (26), (27), (28), (29): Xaa is A or G or is absent
SIPKAXXVPTELEPLTMLYYXXXXXXXXXEQLSNEMVVEGXGXR

SEQ ID NO: 12122 - protein, 34 aa, Artificial Sequence
  Non-cyclic GFR-binding peptide
  MOD_RES (2), (3): Xaa is C or S
AXXVPTELEPLTMLYYDENEKVVEQLSNDMVVEG

SEQ ID NO: 12123 - protein, 37 aa, Artificial Sequence
  Non-cyclic GFR-binding peptide
  MOD_RES (4), (5), (37): Xaa is C or S
PKPXXAPTKLSPISVLFIDDSSNVIYKQYENMVVRSX

SEQ ID NO: 12124 - protein, 32 aa, Artificial Sequence
  Non-cyclic GFR-binding peptide
  MOD_RES (14), (15), (16), (17), (18): Xaa is A or G
  MOD_RES (19), (20), (21), (22): Xaa is A or G or is absent
VPQALEPLTILYYXXXXXXXXXEQLSNMIVRS

SEQ ID NO: 12125 - protein, 40 aa, Artificial Sequence
  Non-cyclic GFR-binding peptide
  MOD_RES (4), (38), (40): Xaa is C or S
  MOD_RES (18), (19), (20), (21), (22): Xaa is A or G
  MOD_RES (23), (24), (25), (26): Xaa is A or G or is absent
KPTXAPTKLSPISVLFIXXXXXXXXXYKQYENMVVRSXGX

SEQ ID NO: 12126 - protein, 37 aa, Artificial Sequence
  Non-cyclic GFR-binding peptide
  MOD_RES (4), (5): Xaa is C or S
  MOD_RES (19), (20), (21), (22), (23): Xaa is A or G
  MOD_RES (24), (25), (26), (27): Xaa is A or G or is absent
PKPXXAPTQLEPLTVLYYXXXXXXXXXEQLSNNMVVR

SEQ ID NO: 12127 - protein, 34 aa, Artificial Sequence
  Non-cyclic GFR-binding peptide
  MOD_RES (1), (1): Xaa is C or S
  MOD_RES (15), (16), (17), (18), (19): Xaa is A or G
  MOD_RES (20), (21), (22), (23): Xaa is A or G or is absent
XVPTELSPISMLFIXXXXXXXXXYKQYEDMVVEG

SEQ ID NO: 12128 - protein, 38 aa, Artificial Sequence
  Non-cyclic GFR-binding peptide
  MOD_RES (1), (35), (37): Xaa is C or S
  MOD_RES (15), (16), (17), (18), (19): Xaa is A or G
  MOD_RES (20), (21), (22), (23): Xaa is A or G or is absent
XVPTELSPISMLFIXXXXXXXXXYKQYEEMVVEGXGXR

SEQ ID NO: 12129 - protein, 40 aa, Artificial Sequence
  Non-cyclic GFR-binding peptide
  MOD_RES (2), (3), (37), (39): Xaa is C or S
  MOD_RES (17), (18), (19), (20), (21): Xaa is A or G
  MOD_RES (22), (23), (24), (25): Xaa is A or G or is absent
AXXVPTELEPLTMLYYXXXXXXXXXEQLSNEMVVEGXGXR

SEQ ID NO: 12130 - protein, 31 aa, Artificial Sequence
  Non-cyclic GFR-binding peptide
APTKLSPISVLFIDDSSNVIYKQYENMVVRS

SEQ ID NO: 12131 - protein, 40 aa, Artificial Sequence
  Non-cyclic GFR-binding peptide
  MOD_RES (6), (7), (39): Xaa is C or S
KIPKAXXVPTELSPISMLFIDENEKVVYKQYEDMVVEGXG

SEQ ID NO: 12132 - protein, 34 aa, Artificial Sequence
  Non-cyclic GFR-binding peptide
  MOD_RES (1), (34): Xaa is C or S
  MOD_RES (15), (16), (17), (18), (19): Xaa is A or G
  MOD_RES (20), (21), (22), (23): Xaa is A or G or is absent
XVPQDLEPLPIVYYXXXXXXXXXEQLSNMVVKSX

SEQ ID NO: 12133 - protein, 35 aa, Artificial Sequence
  Non-cyclic GFR-binding peptide
  MOD_RES (32), (34): Xaa is C or S
VPTRLEPLPIVYYDSANNVVEQLSNDMVVESXGXR

SEQ ID NO: 12134 - protein, 40 aa, Artificial Sequence
  Non-cyclic GFR-binding peptide
  MOD_RES (6), (7), (38), (40): Xaa is C or S
ASAAPXXVPQALEPLTILYYVGRKPKVEQLSNMIVRSXKX

SEQ ID NO: 12135 - protein, 33 aa, Artificial Sequence
  Non-cyclic GFR-binding peptide
  MOD_RES (1), (32): Xaa is C or S
XVPQDLEPLPIVYYVGRTPKVEQLSNMVVKSXK

SEQ ID NO: 12136 - protein, 32 aa, Artificial Sequence
  Non-cyclic GFR-binding peptide
  MOD_RES (1), (1): Xaa is C or S
XAPTQLSPISVLFIDDSSNVIYKQYENMVVRA

SEQ ID NO: 12137 - protein, 34 aa, Artificial Sequence
  Non-cyclic GFR-binding peptide
  MOD_RES (2), (3), (34): Xaa is C or S
PXXVPQALEPLTILYYVGRKPKVEQLSNMIVRSX

SEQ ID NO: 12138 - protein, 37 aa, Artificial Sequence
  Non-cyclic GFR-binding peptide
  MOD_RES (6), (7): Xaa is C or S
TVPKPXXAPTQLEPLTVLYYDDSSNVIEQLSNNMVVR

SEQ ID NO: 12139 - protein, 37 aa, Artificial Sequence
  Non-cyclic GFR-binding peptide
  MOD_RES (5), (6): Xaa is C or S
VPKPXXAPTQLEPLPVVYYDDSSNVIEQLSNNMVVRA

SEQ ID NO: 12140 - protein, 35 aa, Artificial Sequence
  Non-cyclic GFR-binding peptide
  MOD_RES (2), (3): Xaa is C or S
  MOD_RES (17), (18), (19), (20), (21): Xaa is A or G
  MOD_RES (22), (23), (24), (25): Xaa is A or G or is absent
TXXVPTRLEPLTILYYXXXXXXXXXEQLSNDMVVE

SEQ ID NO: 12141 - protein, 39 aa, Artificial Sequence
  Non-cyclic GFR-binding peptide
  MOD_RES (4), (5), (39): Xaa is C or S
  MOD_RES (19), (20), (21), (22), (23): Xaa is A or G
  MOD_RES (24), (25), (26), (27): Xaa is A or G or is absent
PKAXXVPTELEPLTMLYYXXXXXXXXXEQLSNEMVVEGX

SEQ ID NO: 12142 - protein, 32 aa, Artificial Sequence
  Non-cyclic GFR-binding peptide
  MOD_RES (1), (1): Xaa is C or S
XVPTELEPLPMVYYDEYDKVVEQLSNEMVVEG

SEQ ID NO: 12143 - protein, 31 aa, Artificial Sequence
  Non-cyclic GFR-binding peptide
VPTELSPISMLFIDENEKVVYKQYEDMVVEG

SEQ ID NO: 12144 - protein, 44 aa, Artificial Sequence
  Non-cyclic GFR-binding peptide
  MOD_RES (6), (7), (41), (43): Xaa is C or S
  MOD_RES (21), (22), (23), (24), (25): Xaa is A or G
  MOD_RES (26), (27), (28), (29): Xaa is A or G or is absent
TVPKPXXAPTQLEPLTVLYYXXXXXXXXXEQLSNNMVVRAXGXH

SEQ ID NO: 12145 - protein, 36 aa, Artificial Sequence
  Non-cyclic GFR-binding peptide
  MOD_RES (1), (35): Xaa is C or S
  MOD_RES (15), (16), (17), (18), (19): Xaa is A or G
  MOD_RES (20), (21), (22), (23): Xaa is A or G or is absent
XAPTQLEPLPVVYYXXXXXXXXXEQLSNNMVVRAXG

SEQ ID NO: 12146 - protein, 38 aa, Artificial Sequence
  Non-cyclic GFR-binding peptide
  MOD_RES (4), (5), (37): Xaa is C or S
PKPXXAPTQLSPISVLFIDDSSNVIYKQYENMVVRAXG

SEQ ID NO: 12147 - protein, 37 aa, Artificial Sequence
  Non-cyclic GFR-binding peptide
  MOD_RES (2), (3), (35), (37): Xaa is C or S
AXXVPTELEPLPMVYYDENEKVVEQLSNDMVVEGXGX

SEQ ID NO: 12148 - protein, 32 aa, Artificial Sequence
  Non-cyclic GFR-binding peptide
  MOD_RES (14), (15), (16), (17), (18): Xaa is A or G
  MOD_RES (19), (20), (21), (22): Xaa is A or G or is absent
VSQDLEPLPIVYYXXXXXXXXXEQLSNMIVKS

SEQ ID NO: 12149 - protein, 37 aa, Artificial Sequence
  Non-cyclic GFR-binding peptide
  MOD_RES (4), (5), (36): Xaa is C or S
AAPXXVPQALEPLTILYYVGRKPKVEQLSNMIVRSXK

SEQ ID NO: 12150 - protein, 33 aa, Artificial Sequence
  Non-cyclic GFR-binding peptide
  MOD_RES (1), (1): Xaa is C or S
  MOD_RES (15), (16), (17), (18), (19): Xaa is A or G
  MOD_RES (20), (21), (22), (23): Xaa is A or G or is absent
XVPQALEPLTILYYXXXXXXXXXEQLSNMIVRS

SEQ ID NO: 12151 - protein, 33 aa, Artificial Sequence
  Non-cyclic GFR-binding peptide
  MOD_RES (1), (1): Xaa is C or S
  MOD_RES (15), (16), (17), (18), (19): Xaa is A or G
  MOD_RES (20), (21), (22), (23): Xaa is A or G or is absent
XVSQDLEPLPIVYYXXXXXXXXXEQLSNMIVKS

SEQ ID NO: 12152 - protein, 39 aa, Artificial Sequence
  Non-cyclic GFR-binding peptide
  MOD_RES (6), (6): Xaa is C or S
  MOD_RES (20), (21), (22), (23), (24): Xaa is A or G
  MOD_RES (25), (26), (27), (28): Xaa is A or G or is absent
VTKPTXAPTKLSPISVLFIXXXXXXXXXYKQYENMVVRS

SEQ ID NO: 12153 - protein, 40 aa, Artificial Sequence
  Non-cyclic GFR-binding peptide
  MOD_RES (3), (4), (37), (39): Xaa is C or S
  MOD_RES (18), (19), (20), (21), (22): Xaa is A or G
  MOD_RES (23), (24), (25), (26): Xaa is A or G or is absent
SPXXVSQDLEPLPIVYYXXXXXXXXXEQLSNMIVKSXKXS

SEQ ID NO: 12154 - protein, 34 aa, Artificial Sequence
  Non-cyclic GFR-binding peptide
  MOD_RES (2), (3): Xaa is C or S
TXXVPTRLSAISILYLDSANNVVLKNYQDMVVES

SEQ ID NO: 12155 - protein, 39 aa, Artificial Sequence
  Non-cyclic GFR-binding peptide
  MOD_RES (2), (3), (36), (38): Xaa is C or S
  MOD_RES (17), (18), (19), (20), (21): Xaa is A or G
  MOD_RES (22), (23), (24), (25): Xaa is A or G or is absent
PXXVPQALSPISILFIXXXXXXXXXYKQYEMIVRSXKXS

SEQ ID NO: 12156 - protein, 35 aa, Artificial Sequence
  Non-cyclic GFR-binding peptide
  MOD_RES (2), (3): Xaa is C or S
  MOD_RES (17), (18), (19), (20), (21): Xaa is A or G
  MOD_RES (22), (23), (24), (25): Xaa is A or G or is absent
PXXAPTQLSPISVLFIXXXXXXXXXYKQYENMVVR

SEQ ID NO: 12157 - protein, 38 aa, Artificial Sequence
  Non-cyclic GFR-binding peptide
  MOD_RES (2), (3), (35), (37): Xaa is C or S
AXXVPTELEPLTMLYYDEYDKVVEQLSNEMVVEGXGXR

SEQ ID NO: 12158 - protein, 37 aa, Artificial Sequence
  Non-cyclic GFR-binding peptide
  MOD_RES (4), (5), (36): Xaa is C or S
ASPXXVSQDLSPISILFIIGKTPKIYKQYEMIVKSXK

SEQ ID NO: 12159 - protein, 39 aa, Artificial Sequence
  Non-cyclic GFR-binding peptide
  MOD_RES (4), (36), (38): Xaa is C or S
KPTXAPTKLEPLTVLYYDDSSNVIEQLSNNMVVRSXGXH

SEQ ID NO: 12160 - protein, 40 aa, Artificial Sequence
  Non-cyclic GFR-binding peptide
  MOD_RES (3), (4), (38), (40): Xaa is C or S
  MOD_RES (18), (19), (20), (21), (22): Xaa is A or G
  MOD_RES (23), (24), (25), (26): Xaa is A or G or is absent
KPXXAPTQLEPLPVVYYXXXXXXXXXEQLSNNMVVRAXGX

SEQ ID NO: 12161 - protein, 34 aa, Artificial Sequence
  Non-cyclic GFR-binding peptide
  MOD_RES (1), (1): Xaa is C or S
  MOD_RES (15), (16), (17), (18), (19): Xaa is A or G
  MOD_RES (20), (21), (22), (23): Xaa is A or G or is absent
XVPTELEPLTMLYYXXXXXXXXXEQLSNDMVVEG

SEQ ID NO: 12162 - protein, 36 aa, Artificial Sequence
  Non-cyclic GFR-binding peptide
  MOD_RES (1), (2), (33), (35): Xaa is C or S
XXVPQDLSPISILFIVGRTPKVYKQYEMVVKSXKXS

SEQ ID NO: 12163 - protein, 41 aa, Artificial Sequence
  Non-cyclic GFR-binding peptide
  MOD_RES (6), (38), (40): Xaa is C or S
VTKPTXAPTKLEPLPVVYYDDSSNVIEQLSNNMVVRSXGXH

SEQ ID NO: 12164 - protein, 34 aa, Artificial Sequence
  Non-cyclic GFR-binding peptide
  MOD_RES (34), (34): Xaa is C or S
  MOD_RES (14), (15), (16), (17), (18): Xaa is A or G
  MOD_RES (19), (20), (21), (22): Xaa is A or G or is absent
VPTELEPLPMVYYXXXXXXXXXEQLSNDMVVEGX

SEQ ID NO: 12165 - protein, 36 aa, Artificial Sequence
  Non-cyclic GFR-binding peptide
  MOD_RES (4), (5): Xaa is C or S
PPTXXVPTRLEPLPIVYYDSANNVVEQLSNDMVVES

SEQ ID NO: 12166 - protein, 40 aa, Artificial Sequence
  Non-cyclic GFR-binding peptide
  MOD_RES (5), (6), (40): Xaa is C or S
  MOD_RES (20), (21), (22), (23), (24): Xaa is A or G
  MOD_RES (25), (26), (27), (28): Xaa is A or G or is absent
IPKAXXVPTELEPLTMLYYXXXXXXXXXEQLSNDMVVEGX

SEQ ID NO: 12167 - protein, 33 aa, Artificial Sequence
  Non-cyclic GFR-binding peptide
  MOD_RES (32), (32): Xaa is C or S
VPTRLSAISILYLDSANNVVLKNYQDMVVESXG

SEQ ID NO: 12168 - protein, 35 aa, Artificial Sequence
  Non-cyclic GFR-binding peptide
  MOD_RES (34), (34): Xaa is C or S
  MOD_RES (14), (15), (16), (17), (18): Xaa is A or G
  MOD_RES (19), (20), (21), (22): Xaa is A or G or is absent
VPTRLEPLTILYYXXXXXXXXXEQLSNDMVVESXG

SEQ ID NO: 12169 - protein, 36 aa, Artificial Sequence
  Non-cyclic GFR-binding peptide
  MOD_RES (1), (2), (34), (36): Xaa is C or S
XXVPTELEPLPMVYYDENEKVVEQLSNDMVVEGXGX

SEQ ID NO: 12170 - protein, 34 aa, Artificial Sequence
  Non-cyclic GFR-binding peptide
  MOD_RES (1), (33): Xaa is C or S
XAPTQLEPLPVVYYDDSSNVIEQLSNNMVVRAXG

SEQ ID NO: 12171 - protein, 35 aa, Artificial Sequence
  Non-cyclic GFR-binding peptide
  MOD_RES (1), (2): Xaa is C or S
  MOD_RES (16), (17), (18), (19), (20): Xaa is A or G
  MOD_RES (21), (22), (23), (24): Xaa is A or G or is absent
XXAPTQLEPLTVLYYXXXXXXXXXEQLSNNMVVRA

SEQ ID NO: 12172 - protein, 37 aa, Artificial Sequence
  Non-cyclic GFR-binding peptide
  MOD_RES (1), (34), (36): Xaa is C or S
  MOD_RES (15), (16), (17), (18), (19): Xaa is A or G
  MOD_RES (20), (21), (22), (23): Xaa is A or G or is absent
XVPQDLEPLPIVYYXXXXXXXXXEQLSNMVVKSXKXS

SEQ ID NO: 12173 - protein, 35 aa, Artificial Sequence
  Non-cyclic GFR-binding peptide
  MOD_RES (1), (35): Xaa is C or S
  MOD_RES (15), (16), (17), (18), (19): Xaa is A or G
  MOD_RES (20), (21), (22), (23): Xaa is A or G or is absent
XVPTELEPLPMVYYXXXXXXXXXEQLSNDMVVEGX

SEQ ID NO: 12174 - protein, 35 aa, Artificial Sequence
  Non-cyclic GFR-binding peptide
  MOD_RES (2), (3): Xaa is C or S
  MOD_RES (17), (18), (19), (20), (21): Xaa is A or G
  MOD_RES (22), (23), (24), (25): Xaa is A or G or is absent
TXXVPTRLEPLPIVYYXXXXXXXXXEQLSNDMVVE

SEQ ID NO: 12175 - protein, 39 aa, Artificial Sequence
  Non-cyclic GFR-binding peptide
  MOD_RES (6), (7): Xaa is C or S
  MOD_RES (21), (22), (23), (24), (25): Xaa is A or G
  MOD_RES (26), (27), (28), (29): Xaa is A or G or is absent
KIPKAXXVPTELEPLPMVYYXXXXXXXXXEQLSNDMVVE

SEQ ID NO: 12176 - protein, 39 aa, Artificial Sequence
  Non-cyclic GFR-binding peptide
  MOD_RES (6), (7): Xaa is C or S
  MOD_RES (21), (22), (23), (24), (25): Xaa is A or G
  MOD_RES (26), (27), (28), (29): Xaa is A or G or is absent
KIPKAXXVPTELEPLTMLYYXXXXXXXXXEQLSNDMVVE

SEQ ID NO: 12177 - protein, 35 aa, Artificial Sequence
  Non-cyclic GFR-binding peptide
  MOD_RES (1), (2): Xaa is C or S
  MOD_RES (16), (17), (18), (19), (20): Xaa is A or G
  MOD_RES (21), (22), (23), (24): Xaa is A or G or is absent
XXVPTELSPISMLFIXXXXXXXXXYKQYEDMVVEG

SEQ ID NO: 12178 - protein, 39 aa, Artificial Sequence
  Non-cyclic GFR-binding peptide
  MOD_RES (2), (3), (37), (39): Xaa is C or S
  MOD_RES (17), (18), (19), (20), (21): Xaa is A or G
  MOD_RES (22), (23), (24), (25): Xaa is A or G or is absent
TXXVPTRLNAISILYFXXXXXXXXXLKKYRDMVVESXGX

SEQ ID NO: 12179 - protein, 32 aa, Artificial Sequence
  Non-cyclic GFR-binding peptide
  MOD_RES (1), (2): Xaa is C or S
XXVPTRLEPLPIVYYDSANNVVEQLSNDMVVE

SEQ ID NO: 12180 - protein, 38 aa, Artificial Sequence
  Non-cyclic GFR-binding peptide
  MOD_RES (3), (4), (37): Xaa is C or S
  MOD_RES (18), (19), (20), (21), (22): Xaa is A or G
  MOD_RES (23), (24), (25), (26): Xaa is A or G or is absent
APXXVPQALEPLTILYYXXXXXXXXXEQLSNMIVRSXK

SEQ ID NO: 12181 - protein, 35 aa, Artificial Sequence
  Non-cyclic GFR-binding peptide
  MOD_RES (1), (33), (35): Xaa is C or S
XVPTRLNAISILYFDSANNVVLKKYRDMVVESXGX

SEQ ID NO: 12182 - protein, 39 aa, Artificial Sequence
  Non-cyclic GFR-binding peptide
  MOD_RES (3), (4), (38): Xaa is C or S
  MOD_RES (18), (19), (20), (21), (22): Xaa is A or G
  MOD_RES (23), (24), (25), (26): Xaa is A or G or is absent
PTXXVPTRLEPLTILYYXXXXXXXXXEQLSNDMVVESXG

SEQ ID NO: 12183 - protein, 37 aa, Artificial Sequence
  Non-cyclic GFR-binding peptide
  MOD_RES (2), (3), (36): Xaa is C or S
  MOD_RES (17), (18), (19), (20), (21): Xaa is A or G
  MOD_RES (22), (23), (24), (25): Xaa is A or G or is absent
PXXVPQALEPLTILYYXXXXXXXXXEQLSNMIVRSXK

SEQ ID NO: 12184 - protein, 31 aa, Artificial Sequence
  Non-cyclic GFR-binding peptide
  MOD_RES (1), (1): Xaa is C or S
XVPTRLEPLPIVYYDSANNVVEQLSNDMVVE

SEQ ID NO: 12185 - protein, 40 aa, Artificial Sequence
  Non-cyclic GFR-binding peptide
  MOD_RES (4), (5), (39): Xaa is C or S
  MOD_RES (19), (20), (21), (22), (23): Xaa is A or G
  MOD_RES (24), (25), (26), (27): Xaa is A or G or is absent
PKPXXAPTQLSPISVLFIXXXXXXXXXYKQYENMVVRAXG

SEQ ID NO: 12186 - protein, 35 aa, Artificial Sequence
  Non-cyclic GFR-binding peptide
  MOD_RES (2), (34): Xaa is C or S
TXAPTKLEPLTVLYYDDSSNVIEQLSNNMVVRSXG

SEQ ID NO: 12187 - protein, 36 aa, Artificial Sequence
  Non-cyclic GFR-binding peptide
  MOD_RES (33), (35): Xaa is C or S
  MOD_RES (14), (15), (16), (17), (18): Xaa is A or G
  MOD_RES (19), (20), (21), (22): Xaa is A or G or is absent
VPQALSPISILFIXXXXXXXXXYKQYEMIVRSXKXS

SEQ ID NO: 12188 - protein, 42 aa, Artificial Sequence
  Non-cyclic GFR-binding peptide
  MOD_RES (5), (6), (39), (41): Xaa is C or S
  MOD_RES (20), (21), (22), (23), (24): Xaa is A or G
  MOD_RES (25), (26), (27), (28): Xaa is A or G or is absent
SASPXXVPQDLSPISILFIXXXXXXXXXYKQYEMVVKSXKXS

SEQ ID NO: 12189 - protein, 42 aa, Artificial Sequence
  Non-cyclic GFR-binding peptide
  MOD_RES (6), (7), (41): Xaa is C or S
  MOD_RES (21), (22), (23), (24), (25): Xaa is A or G
  MOD_RES (26), (27), (28), (29): Xaa is A or G or is absent
YVPKPXXAPTKLEPLTVLYYXXXXXXXXXEQLSNNMVVRSXG

SEQ ID NO: 12190 - protein, 40 aa, Artificial Sequence
  Non-cyclic GFR-binding peptide
  MOD_RES (3), (4), (37), (39): Xaa is C or S
  MOD_RES (18), (19), (20), (21), (22): Xaa is A or G
  MOD_RES (23), (24), (25), (26): Xaa is A or G or is absent
SPXXVSQDLSPISILFIXXXXXXXXXYKQYEMIVKSXKXS

SEQ ID NO: 12191 - protein, 39 aa, Artificial Sequence
  Non-cyclic GFR-binding peptide
  MOD_RES (6), (7): Xaa is C or S
  MOD_RES (21), (22), (23), (24), (25): Xaa is A or G
  MOD_RES (26), (27), (28), (29): Xaa is A or G or is absent
SIPKAXXVPTELSPISMLFIXXXXXXXXXYKQYEEMVVE

SEQ ID NO: 12192 - protein, 36 aa, Artificial Sequence
  Non-cyclic GFR-binding peptide
  MOD_RES (34), (36): Xaa is C or S
  MOD_RES (14), (15), (16), (17), (18): Xaa is A or G
  MOD_RES (19), (20), (21), (22): Xaa is A or G or is absent
VPTRLSAISILYLXXXXXXXXXLKNYQDMVVESXGX

SEQ ID NO: 12193 - protein, 35 aa, Artificial Sequence
  Non-cyclic GFR-binding peptide
  MOD_RES (34), (34): Xaa is C or S
  MOD_RES (14), (15), (16), (17), (18): Xaa is A or G
  MOD_RES (19), (20), (21), (22): Xaa is A or G or is absent
APTKLEPLPVVYYXXXXXXXXXEQLSNNMVVRSXG

SEQ ID NO: 12194 - protein, 34 aa, Artificial Sequence
  Non-cyclic GFR-binding peptide
  MOD_RES (2), (3), (34): Xaa is C or S
PXXVSQDLSPISILFIIGKTPKIYKQYEMIVKSX

SEQ ID NO: 12195 - protein, 35 aa, Artificial Sequence
  Non-cyclic GFR-binding peptide
  MOD_RES (33), (35): Xaa is C or S
  MOD_RES (14), (15), (16), (17), (18): Xaa is A or G
  MOD_RES (19), (20), (21), (22): Xaa is A or G or is absent
VPQALEPLTILYYXXXXXXXXXEQLSNMIVRSXKX

SEQ ID NO: 12196 - protein, 39 aa, Artificial Sequence
  Non-cyclic GFR-binding peptide
  MOD_RES (6), (7), (38): Xaa is C or S
ASASPXXVSQDLSPISILFIIGKTPKIYKQYEMIVKSXK

SEQ ID NO: 12197 - protein, 36 aa, Artificial Sequence
  Non-cyclic GFR-binding peptide
  MOD_RES (6), (6): Xaa is C or S
VTKPTXAPTKLEPLPVVYYDDSSNVIEQLSNNMVVR

SEQ ID NO: 12198 - protein, 41 aa, Artificial Sequence
  Non-cyclic GFR-binding peptide
  MOD_RES (4), (5), (38), (40): Xaa is C or S
  MOD_RES (19), (20), (21), (22), (23): Xaa is A or G
  MOD_RES (24), (25), (26), (27): Xaa is A or G or is absent
ASPXXVSQDLSPISILFIXXXXXXXXXYKQYEMIVKSXKXS

SEQ ID NO: 12199 - protein, 35 aa, Artificial Sequence
  Non-cyclic GFR-binding peptide
  MOD_RES (1), (33), (35): Xaa is C or S
XVPTRLEPLPIVYYDSANNVVEQLSNDMVVESXGX

SEQ ID NO: 12200 - protein, 34 aa, Artificial Sequence
  Non-cyclic GFR-binding peptide
  MOD_RES (2), (3): Xaa is C or S
AXXVPTELEPLPMVYYDEYDKVVEQLSNEMVVEG

SEQ ID NO: 12201 - protein, 33 aa, Artificial Sequence
  Non-cyclic GFR-binding peptide
  MOD_RES (2), (3): Xaa is C or S
AXXVPTELSPISMLFIDEYDKVVYKQYEEMVVE

SEQ ID NO: 12202 - protein, 34 aa, Artificial Sequence
  Non-cyclic GFR-binding peptide
  MOD_RES (2), (3), (34): Xaa is C or S
PXXVPQDLEPLPIVYYVGRTPKVEQLSNMVVKSX

SEQ ID NO: 12203 - protein, 40 aa, Artificial Sequence
  Non-cyclic GFR-binding peptide
  MOD_RES (5), (6), (40): Xaa is C or S
  MOD_RES (20), (21), (22), (23), (24): Xaa is A or G
  MOD_RES (25), (26), (27), (28): Xaa is A or G or is absent
IPKAXXVPTELEPLPMVYYXXXXXXXXXEQLSNDMVVEGX

SEQ ID NO: 12204 - protein, 32 aa, Artificial Sequence
  Non-cyclic GFR-binding peptide
  MOD_RES (32), (32): Xaa is C or S
VPTELSPISMLFIDENEKVVYKQYEDMVVEGX

SEQ ID NO: 12205 - protein, 39 aa, Artificial Sequence
  Non-cyclic GFR-binding peptide
  MOD_RES (3), (4), (36), (38): Xaa is C or S
KAXXVPTELSPISMLFIDEYDKVVYKQYEEMVVEGXGXR

SEQ ID NO: 12206 - protein, 38 aa, Artificial Sequence
  Non-cyclic GFR-binding peptide
  MOD_RES (4), (5), (37): Xaa is C or S
PKPXXAPTQLEPLPVVYYDDSSNVIEQLSNNMVVRAXG

SEQ ID NO: 12207 - protein, 33 aa, Artificial Sequence
  Non-cyclic GFR-binding peptide
  MOD_RES (1), (1): Xaa is C or S
  MOD_RES (15), (16), (17), (18), (19): Xaa is A or G
  MOD_RES (20), (21), (22), (23): Xaa is A or G or is absent
XVSQDLSPISILFIXXXXXXXXXYKQYEMIVKS

SEQ ID NO: 12208 - protein, 38 aa, Artificial Sequence
  Non-cyclic GFR-binding peptide
  MOD_RES (3), (4), (38): Xaa is C or S
  MOD_RES (18), (19), (20), (21), (22): Xaa is A or G
  MOD_RES (23), (24), (25), (26): Xaa is A or G or is absent
KAXXVPTELEPLPMVYYXXXXXXXXXEQLSNDMVVEGX

SEQ ID NO: 12209 - protein, 36 aa, Artificial Sequence
  Non-cyclic GFR-binding peptide
  MOD_RES (2), (3), (34), (36): Xaa is C or S
PXXVSQDLSPISILFIIGKTPKIYKQYEMIVKSXKX

SEQ ID NO: 12210 - protein, 43 aa, Artificial Sequence
  Non-cyclic GFR-binding peptide
  MOD_RES (5), (6), (40), (42): Xaa is C or S
  MOD_RES (20), (21), (22), (23), (24): Xaa is A or G
  MOD_RES (25), (26), (27), (28): Xaa is A or G or is absent
IPKAXXVPTELSPISMLFIXXXXXXXXXYKQYEEMVVEGXGXR

SEQ ID NO: 12211 - protein, 37 aa, Artificial Sequence
  Non-cyclic GFR-binding peptide
  MOD_RES (6), (6): Xaa is C or S
VTKPTXAPTKLEPLPVVYYDDSSNVIEQLSNNMVVRS

SEQ ID NO: 12212 - protein, 36 aa, Artificial Sequence
  Non-cyclic GFR-binding peptide
  MOD_RES (1), (2), (34), (36): Xaa is C or S
XXVPTELSPISMLFIDEYDKVVYKQYEEMVVEGXGX

SEQ ID NO: 12213 - protein, 33 aa, Artificial Sequence
  Non-cyclic GFR-binding peptide
  MOD_RES (1), (33): Xaa is C or S
XVPTRLNAISILYFDSANNVVLKKYRDMVVESX

SEQ ID NO: 12214 - protein, 35 aa, Artificial Sequence
  Non-cyclic GFR-binding peptide
  MOD_RES (1), (2): Xaa is C or S
  MOD_RES (16), (17), (18), (19), (20): Xaa is A or G
  MOD_RES (21), (22), (23), (24): Xaa is A or G or is absent
XXAPTQLSPISVLFIXXXXXXXXXYKQYENMVVRA

SEQ ID NO: 12215 - protein, 35 aa, Artificial Sequence
  Non-cyclic GFR-binding peptide
  MOD_RES (2), (3), (35): Xaa is C or S
AXXVPTELEPLTMLYYDENEKVVEQLSNDMVVEGX

SEQ ID NO: 12216 - protein, 39 aa, Artificial Sequence
  Non-cyclic GFR-binding peptide
  MOD_RES (2), (3), (36), (38): Xaa is C or S
  MOD_RES (17), (18), (19), (20), (21): Xaa is A or G
  MOD_RES (22), (23), (24), (25): Xaa is A or G or is absent
PXXVPQDLSPISILFIXXXXXXXXXYKQYEMVVKSXKXS

SEQ ID NO: 12217 - protein, 37 aa, Artificial Sequence
  Non-cyclic GFR-binding peptide
  MOD_RES (1), (34), (36): Xaa is C or S
  MOD_RES (15), (16), (17), (18), (19): Xaa is A or G
  MOD_RES (20), (21), (22), (23): Xaa is A or G or is absent
XVPQDLSPISILFIXXXXXXXXXYKQYEMVVKSXKXS

SEQ ID NO: 12218 - protein, 40 aa, Artificial Sequence
  Non-cyclic GFR-binding peptide
  MOD_RES (4), (5), (37), (39): Xaa is C or S
PKAXXVPTELEPLTMLYYDEYDKVVEQLSNEMVVEGXGXR

SEQ ID NO: 12219 - protein, 37 aa, Artificial Sequence
  Non-cyclic GFR-binding peptide
  MOD_RES (3), (4), (37): Xaa is C or S
  MOD_RES (18), (19), (20), (21), (22): Xaa is A or G
  MOD_RES (23), (24), (25), (26): Xaa is A or G or is absent
SPXXVSQDLEPLPIVYYXXXXXXXXXEQLSNMIVKSX

SEQ ID NO: 12220 - protein, 36 aa, Artificial Sequence
  Non-cyclic GFR-binding peptide
  MOD_RES (1), (2), (34), (36): Xaa is C or S
XXVPTRLNAISILYFDSANNVVLKKYRDMVVESXGX

SEQ ID NO: 12221 - protein, 35 aa, Artificial Sequence
  Non-cyclic GFR-binding peptide
  MOD_RES (2), (3): Xaa is C or S
  MOD_RES (17), (18), (19), (20), (21): Xaa is A or G
  MOD_RES (22), (23), (24), (25): Xaa is A or G or is absent
TXXVPTRLNAISILYFXXXXXXXXXLKKYRDMVVE

SEQ ID NO: 12222 - protein, 38 aa, Artificial Sequence
  Non-cyclic GFR-binding peptide
  MOD_RES (4), (5), (37): Xaa is C or S
PKAXXVPTELEPLTMLYYDEYDKVVEQLSNEMVVEGXG

SEQ ID NO: 12223 - protein, 39 aa, Artificial Sequence
  Non-cyclic GFR-binding peptide
  MOD_RES (6), (7), (38): Xaa is C or S
ASASPXXVPQDLEPLPIVYYVGRTPKVEQLSNMVVKSXK

SEQ ID NO: 12224 - protein, 41 aa, Artificial Sequence
  Non-cyclic GFR-binding peptide
  MOD_RES (3), (4), (38), (40): Xaa is C or S
  MOD_RES (18), (19), (20), (21), (22): Xaa is A or G
  MOD_RES (23), (24), (25), (26): Xaa is A or G or is absent
KAXXVPTELEPLTMLYYXXXXXXXXXEQLSNDMVVEGXGXR

SEQ ID NO: 12225 - protein, 36 aa, Artificial Sequence
  Non-cyclic GFR-binding peptide
  MOD_RES (3), (4), (35): Xaa is C or S
SPXXVPQDLEPLPIVYYVGRTPKVEQLSNMVVKSXK

SEQ ID NO: 12226 - protein, 36 aa, Artificial Sequence
  Non-cyclic GFR-binding peptide
  MOD_RES (3), (4), (36): Xaa is C or S
KAXXVPTELEPLPMVYYDENEKVVEQLSNDMVVEGX

SEQ ID NO: 12227 - protein, 31 aa, Artificial Sequence
  Non-cyclic GFR-binding peptide
  MOD_RES (1), (1): Xaa is C or S
XVPTRLNAISILYFDSANNVVLKKYRDMVVE

SEQ ID NO: 12228 - protein, 36 aa, Artificial Sequence
  Non-cyclic GFR-binding peptide
  MOD_RES (3), (4), (35): Xaa is C or S
SPXXVSQDLSPISILFIIGKTPKIYKQYEMIVKSXK

SEQ ID NO: 12229 - protein, 40 aa, Artificial Sequence
  Non-cyclic GFR-binding peptide
  MOD_RES (4), (5), (37), (39): Xaa is C or S
PKPXXAPTQLEPLTVLYYDDSSNVIEQLSNNMVVRAXGXH

SEQ ID NO: 12230 - protein, 37 aa, Artificial Sequence
  Non-cyclic GFR-binding peptide
  MOD_RES (2), (3), (37): Xaa is C or S
  MOD_RES (17), (18), (19), (20), (21): Xaa is A or G
  MOD_RES (22), (23), (24), (25): Xaa is A or G or is absent
AXXVPTELEPLTMLYYXXXXXXXXXEQLSNDMVVEGX

SEQ ID NO: 12231 - protein, 39 aa, Artificial Sequence
  Non-cyclic GFR-binding peptide
  MOD_RES (2), (3), (37), (39): Xaa is C or S
  MOD_RES (17), (18), (19), (20), (21): Xaa is A or G
  MOD_RES (22), (23), (24), (25): Xaa is A or G or is absent
AXXVPTELEPLTMLYYXXXXXXXXXEQLSNEMVVEGXGX

SEQ ID NO: 12232 - protein, 35 aa, Artificial Sequence
  Non-cyclic GFR-binding peptide
  MOD_RES (1), (33), (35): Xaa is C or S
XAPTKLEPLTVLYYDDSSNVIEQLSNNMVVRSXGX

SEQ ID NO: 12233 - protein, 37 aa, Artificial Sequence
  Non-cyclic GFR-binding peptide
  MOD_RES (3), (4), (36): Xaa is C or S
KAXXVPTELEPLPMVYYDENEKVVEQLSNDMVVEGXG

SEQ ID NO: 12234 - protein, 35 aa, Artificial Sequence
  Non-cyclic GFR-binding peptide
  MOD_RES (1), (2), (34): Xaa is C or S
XXAPTQLSPISVLFIDDSSNVIYKQYENMVVRAXG

SEQ ID NO: 12235 - protein, 42 aa, Artificial Sequence
  Non-cyclic GFR-binding peptide
  MOD_RES (6), (7), (39), (41): Xaa is C or S
TVPKPXXAPTQLEPLPVVYYDDSSNVIEQLSNNMVVRAXGXH

SEQ ID NO: 12236 - protein, 34 aa, Artificial Sequence
  Non-cyclic GFR-binding peptide
  MOD_RES (34), (34): Xaa is C or S
  MOD_RES (14), (15), (16), (17), (18): Xaa is A or G
  MOD_RES (19), (20), (21), (22): Xaa is A or G or is absent
VPTELSPISMLFIXXXXXXXXXYKQYEDMVVEGX

SEQ ID NO: 12237 - protein, 40 aa, Artificial Sequence
  Non-cyclic GFR-binding peptide
  MOD_RES (5), (6), (37), (39): Xaa is C or S
SASPXXVSQDLEPLPIVYYIGKTPKIEQLSNMIVKSXKXS

SEQ ID NO: 12238 - protein, 40 aa, Artificial Sequence
  Non-cyclic GFR-binding peptide
  MOD_RES (3), (4), (38), (40): Xaa is C or S
  MOD_RES (18), (19), (20), (21), (22): Xaa is A or G
  MOD_RES (23), (24), (25), (26): Xaa is A or G or is absent
KPXXAPTKLSPISVLFIXXXXXXXXXYKQYENMVVRSXGX

SEQ ID NO: 12239 - protein, 37 aa, Artificial Sequence
  Non-cyclic GFR-binding peptide
  MOD_RES (3), (4): Xaa is C or S
  MOD_RES (18), (19), (20), (21), (22): Xaa is A or G
  MOD_RES (23), (24), (25), (26): Xaa is A or G or is absent
PTXXVPTRLEPLPIVYYXXXXXXXXXEQLSNDMVVES

SEQ ID NO: 12240 - protein, 39 aa, Artificial Sequence
  Non-cyclic GFR-binding peptide
  MOD_RES (3), (4), (36), (38): Xaa is C or S
KPXXAPTQLSPISVLFIDDSSNVIYKQYENMVVRAXGXH

SEQ ID NO: 12241 - protein, 35 aa, Artificial Sequence
  Non-cyclic GFR-binding peptide
  MOD_RES (1), (2): Xaa is C or S
  MOD_RES (16), (17), (18), (19), (20): Xaa is A or G
  MOD_RES (21), (22), (23), (24): Xaa is A or G or is absent
XXVPTELEPLTMLYYXXXXXXXXXEQLSNDMVVEG

SEQ ID NO: 12242 - protein, 36 aa, Artificial Sequence
  Non-cyclic GFR-binding peptide
  MOD_RES (1), (34), (36): Xaa is C or S
  MOD_RES (15), (16), (17), (18), (19): Xaa is A or G
  MOD_RES (20), (21), (22), (23): Xaa is A or G or is absent
XVPQALEPLTILYYXXXXXXXXXEQLSNMIVRSXKX

SEQ ID NO: 12243 - protein, 39 aa, Artificial Sequence
  Non-cyclic GFR-binding peptide
  MOD_RES (3), (4), (38): Xaa is C or S
  MOD_RES (18), (19), (20), (21), (22): Xaa is A or G
  MOD_RES (23), (24), (25), (26): Xaa is A or G or is absent
KPXXAPTKLEPLTVLYYXXXXXXXXXEQLSNNMVVRSXG

SEQ ID NO: 12244 - protein, 41 aa, Artificial Sequence
  Non-cyclic GFR-binding peptide
  MOD_RES (5), (6), (39), (41): Xaa is C or S
  MOD_RES (20), (21), (22), (23), (24): Xaa is A or G
  MOD_RES (25), (26), (27), (28): Xaa is A or G or is absent
SASPXXVSQDLEPLPIVYYXXXXXXXXXEQLSNMIVKSXKX

SEQ ID NO: 12245 - protein, 39 aa, Artificial Sequence
  Non-cyclic GFR-binding peptide
  MOD_RES (5), (6), (38): Xaa is C or S
VPKPXXAPTKLEPLTVLYYDDSSNVIEQLSNNMVVRSXG

SEQ ID NO: 12246 - protein, 33 aa, Artificial Sequence
  Non-cyclic GFR-binding peptide
  MOD_RES (14), (15), (16), (17), (18): Xaa is A or G
  MOD_RES (19), (20), (21), (22): Xaa is A or G or is absent
VPTRLEPLTILYYXXXXXXXXXEQLSNDMVVES

SEQ ID NO: 12247 - protein, 36 aa, Artificial Sequence
  Non-cyclic GFR-binding peptide
  MOD_RES (1), (2), (34), (36): Xaa is C or S
XXAPTQLEPLPVVYYDDSSNVIEQLSNNMVVRAXGX

SEQ ID NO: 12248 - protein, 37 aa, Artificial Sequence
  Non-cyclic GFR-binding peptide
  MOD_RES (1), (35), (37): Xaa is C or S
  MOD_RES (15), (16), (17), (18), (19): Xaa is A or G
  MOD_RES (20), (21), (22), (23): Xaa is A or G or is absent
XVPTELSPISMLFIXXXXXXXXXYKQYEDMVVEGXGX

SEQ ID NO: 12249 - protein, 37 aa, Artificial Sequence
  Non-cyclic GFR-binding peptide
  MOD_RES (4), (5): Xaa is C or S
  MOD_RES (19), (20), (21), (22), (23): Xaa is A or G
  MOD_RES (24), (25), (26), (27): Xaa is A or G or is absent
PKAXXVPTELEPLTMLYYXXXXXXXXXEQLSNDMVVE

SEQ ID NO: 12250 - protein, 41 aa, Artificial Sequence
  Non-cyclic GFR-binding peptide
  MOD_RES (3), (4), (38), (40): Xaa is C or S
  MOD_RES (18), (19), (20), (21), (22): Xaa is A or G
  MOD_RES (23), (24), (25), (26): Xaa is A or G or is absent
KAXXVPTELEPLPMVYYXXXXXXXXXEQLSNEMVVEGXGXR

SEQ ID NO: 12251 - protein, 37 aa, Artificial Sequence
  Non-cyclic GFR-binding peptide
  MOD_RES (3), (4), (37): Xaa is C or S
  MOD_RES (18), (19), (20), (21), (22): Xaa is A or G
  MOD_RES (23), (24), (25), (26): Xaa is A or G or is absent
SPXXVPQDLSPISILFIXXXXXXXXXYKQYEMVVKSX

SEQ ID NO: 12252 - protein, 36 aa, Artificial Sequence
  Non-cyclic GFR-binding peptide
  MOD_RES (3), (4), (35): Xaa is C or S
SPXXVPQDLSPISILFIVGRTPKVYKQYEMVVKSXK

SEQ ID NO: 12253 - protein, 44 aa, Artificial Sequence
  Non-cyclic GFR-binding peptide
  MOD_RES (6), (7), (41), (43): Xaa is C or S
  MOD_RES (21), (22), (23), (24), (25): Xaa is A or G
  MOD_RES (26), (27), (28), (29): Xaa is A or G or is absent
KIPKAXXVPTELSPISMLFIXXXXXXXXXYKQYEDMVVEGXGXR

SEQ ID NO: 12254 - protein, 33 aa, Artificial Sequence
  Non-cyclic GFR-binding peptide
  MOD_RES (32), (32): Xaa is C or S
APTQLEPLTVLYYDDSSNVIEQLSNNMVVRAXG

SEQ ID NO: 12255 - protein, 38 aa, Artificial Sequence
  Non-cyclic GFR-binding peptide
  MOD_RES (1), (35), (37): Xaa is C or S
  MOD_RES (15), (16), (17), (18), (19): Xaa is A or G
  MOD_RES (20), (21), (22), (23): Xaa is A or G or is absent
XVPTRLEPLTILYYXXXXXXXXXEQLSNDMVVESXGXR

SEQ ID NO: 12256 - protein, 38 aa, Artificial Sequence
  Non-cyclic GFR-binding peptide
  MOD_RES (3), (4), (38): Xaa is C or S
  MOD_RES (18), (19), (20), (21), (22): Xaa is A or G
  MOD_RES (23), (24), (25), (26): Xaa is A or G or is absent
KPXXAPTQLSPISVLFIXXXXXXXXXYKQYENMVVRAX

SEQ ID NO: 12257 - protein, 38 aa, Artificial Sequence
  Non-cyclic GFR-binding peptide
  MOD_RES (5), (6): Xaa is C or S
  MOD_RES (20), (21), (22), (23), (24): Xaa is A or G
  MOD_RES (25), (26), (27), (28): Xaa is A or G or is absent
SAAPXXVPQALSPISILFIXXXXXXXXXYKQYEMIVRS

SEQ ID NO: 12258 - protein, 37 aa, Artificial Sequence
  Non-cyclic GFR-binding peptide
  MOD_RES (3), (4), (36): Xaa is C or S
KPXXAPTQLSPISVLFIDDSSNVIYKQYENMVVRAXG

SEQ ID NO: 12259 - protein, 40 aa, Artificial Sequence
  Non-cyclic GFR-binding peptide
  MOD_RES (5), (6), (39): Xaa is C or S
  MOD_RES (20), (21), (22), (23), (24): Xaa is A or G
  MOD_RES (25), (26), (27), (28): Xaa is A or G or is absent
SAAPXXVPQALSPISILFIXXXXXXXXXYKQYEMIVRSXK

SEQ ID NO: 12260 - protein, 37 aa, Artificial Sequence
  Non-cyclic GFR-binding peptide
  MOD_RES (2), (3), (37): Xaa is C or S
  MOD_RES (17), (18), (19), (20), (21): Xaa is A or G
  MOD_RES (22), (23), (24), (25): Xaa is A or G or is absent
AXXVPTELEPLPMVYYXXXXXXXXXEQLSNEMVVEGX

SEQ ID NO: 12261 - protein, 42 aa, Artificial Sequence
  Non-cyclic GFR-binding peptide
  MOD_RES (6), (7), (40), (42): Xaa is C or S
  MOD_RES (21), (22), (23), (24), (25): Xaa is A or G
  MOD_RES (26), (27), (28), (29): Xaa is A or G or is absent
ASAAPXXVPQALEPLTILYYXXXXXXXXXEQLSNMIVRSXKX

SEQ ID NO: 12262 - protein, 43 aa, Artificial Sequence
  Non-cyclic GFR-binding peptide
  MOD_RES (6), (7), (40), (42): Xaa is C or S
  MOD_RES (21), (22), (23), (24), (25): Xaa is A or G
  MOD_RES (26), (27), (28), (29): Xaa is A or G or is absent
ASAAPXXVPQALEPLTILYYXXXXXXXXXEQLSNMIVRSXKXS

SEQ ID NO: 12263 - protein, 38 aa, Artificial Sequence
  Non-cyclic GFR-binding peptide
  MOD_RES (2), (3), (37): Xaa is C or S
  MOD_RES (17), (18), (19), (20), (21): Xaa is A or G
  MOD_RES (22), (23), (24), (25): Xaa is A or G or is absent
AXXVPTELEPLPMVYYXXXXXXXXXEQLSNEMVVEGXG

SEQ ID NO: 12264 - protein, 32 aa, Artificial Sequence
  Non-cyclic GFR-binding peptide
  MOD_RES (1), (2): Xaa is C or S
XXAPTKLEPLPVVYYDDSSNVIEQLSNNMVVR

SEQ ID NO: 12265 - protein, 36 aa, Artificial Sequence
  Non-cyclic GFR-binding peptide
  MOD_RES (2), (3), (35): Xaa is C or S
PXXAPTQLEPLTVLYYDDSSNVIEQLSNNMVVRAXG

SEQ ID NO: 12266 - protein, 37 aa, Artificial Sequence
  Non-cyclic GFR-binding peptide
  MOD_RES (2), (3), (37): Xaa is C or S
  MOD_RES (17), (18), (19), (20), (21): Xaa is A or G
  MOD_RES (22), (23), (24), (25): Xaa is A or G or is absent
TXXVPTRLEPLPIVYYXXXXXXXXXEQLSNDMVVESX

SEQ ID NO: 12267 - protein, 34 aa, Artificial Sequence
  Non-cyclic GFR-binding peptide
  MOD_RES (32), (34): Xaa is C or S
VPTELEPLPMVYYDENEKVVEQLSNDMVVEGXGX

SEQ ID NO: 12268 - protein, 39 aa, Artificial Sequence
  Non-cyclic GFR-binding peptide
  MOD_RES (3), (4), (37), (39): Xaa is C or S
  MOD_RES (18), (19), (20), (21), (22): Xaa is A or G
  MOD_RES (23), (24), (25), (26): Xaa is A or G or is absent
SPXXVPQDLEPLPIVYYXXXXXXXXXEQLSNMVVKSXKX

SEQ ID NO: 12269 - protein, 37 aa, Artificial Sequence
  Non-cyclic GFR-binding peptide
  MOD_RES (6), (7): Xaa is C or S
SIPKAXXVPTELEPLPMVYYDEYDKVVEQLSNEMVVE

SEQ ID NO: 12270 - protein, 36 aa, Artificial Sequence
  Non-cyclic GFR-binding peptide
  MOD_RES (34), (36): Xaa is C or S
  MOD_RES (14), (15), (16), (17), (18): Xaa is A or G
  MOD_RES (19), (20), (21), (22): Xaa is A or G or is absent
APTQLSPISVLFIXXXXXXXXXYKQYENMVVRAXGX

SEQ ID NO: 12271 - protein, 33 aa, Artificial Sequence
  Non-cyclic GFR-binding peptide
  MOD_RES (2), (3): Xaa is C or S
PXXVSQDLEPLPIVYYIGKTPKIEQLSNMIVKS

SEQ ID NO: 12272 - protein, 41 aa, Artificial Sequence
  Non-cyclic GFR-binding peptide
  MOD_RES (5), (6), (40): Xaa is C or S
  MOD_RES (20), (21), (22), (23), (24): Xaa is A or G
  MOD_RES (25), (26), (27), (28): Xaa is A or G or is absent
IPKAXXVPTELSPISMLFIXXXXXXXXXYKQYEEMVVEGXG

SEQ ID NO: 12273 - protein, 38 aa, Artificial Sequence
  Non-cyclic GFR-binding peptide
  MOD_RES (3), (4), (35), (37): Xaa is C or S
SPXXVSQDLEPLPIVYYIGKTPKIEQLSNMIVKSXKXS

SEQ ID NO: 12274 - protein, 40 aa, Artificial Sequence
  Non-cyclic GFR-binding peptide
  MOD_RES (6), (7): Xaa is C or S
  MOD_RES (21), (22), (23), (24), (25): Xaa is A or G
  MOD_RES (26), (27), (28), (29): Xaa is A or G or is absent
SIPKAXXVPTELSPISMLFIXXXXXXXXXYKQYEEMVVEG

SEQ ID NO: 12275 - protein, 38 aa, Artificial Sequence
  Non-cyclic GFR-binding peptide
  MOD_RES (4), (5): Xaa is C or S
  MOD_RES (19), (20), (21), (22), (23): Xaa is A or G
  MOD_RES (24), (25), (26), (27): Xaa is A or G or is absent
PKPXXAPTQLSPISVLFIXXXXXXXXXYKQYENMVVRA

SEQ ID NO: 12276 - protein, 32 aa, Artificial Sequence
  Non-cyclic GFR-binding peptide
  MOD_RES (14), (15), (16), (17), (18): Xaa is A or G
  MOD_RES (19), (20), (21), (22): Xaa is A or G or is absent
APTQLEPLTVLYYXXXXXXXXXEQLSNNMVVR

SEQ ID NO: 12277 - protein, 34 aa, Artificial Sequence
  Non-cyclic GFR-binding peptide
  MOD_RES (3), (4): Xaa is C or S
KAXXVPTELEPLTMLYYDEYDKVVEQLSNEMVVE

SEQ ID NO: 12278 - protein, 36 aa, Artificial Sequence
  Non-cyclic GFR-binding peptide
  MOD_RES (1), (34), (36): Xaa is C or S
  MOD_RES (15), (16), (17), (18), (19): Xaa is A or G
  MOD_RES (20), (21), (22), (23): Xaa is A or G or is absent
XVPQDLEPLPIVYYXXXXXXXXXEQLSNMVVKSXKX

SEQ ID NO: 12279 - protein, 39 aa, Artificial Sequence
  Non-cyclic GFR-binding peptide
  MOD_RES (4), (5), (39): Xaa is C or S
  MOD_RES (19), (20), (21), (22), (23): Xaa is A or G
  MOD_RES (24), (25), (26), (27): Xaa is A or G or is absent
PKPXXAPTKLSPISVLFIXXXXXXXXXYKQYENMVVRSX

SEQ ID NO: 12280 - protein, 36 aa, Artificial Sequence
  Non-cyclic GFR-binding peptide
  MOD_RES (5), (6): Xaa is C or S
SASPXXVPQDLEPLPIVYYVGRTPKVEQLSNMVVKS

SEQ ID NO: 12281 - protein, 37 aa, Artificial Sequence
  Non-cyclic GFR-binding peptide
  MOD_RES (3), (4), (36): Xaa is C or S
PTXXVPTRLEPLTILYYDSANNVVEQLSNDMVVESXG

SEQ ID NO: 12282 - protein, 41 aa, Artificial Sequence
  Non-cyclic GFR-binding peptide
  MOD_RES (4), (5), (39), (41): Xaa is C or S
  MOD_RES (19), (20), (21), (22), (23): Xaa is A or G
  MOD_RES (24), (25), (26), (27): Xaa is A or G or is absent
PKPXXAPTQLEPLTVLYYXXXXXXXXXEQLSNNMVVRAXGX

SEQ ID NO: 12283 - protein, 34 aa, Artificial Sequence
  Non-cyclic GFR-binding peptide
  MOD_RES (32), (34): Xaa is C or S
VPTELSPISMLFIDENEKVVYKQYEDMVVEGXGX

SEQ ID NO: 12284 - protein, 40 aa, Artificial Sequence
  Non-cyclic GFR-binding peptide
  MOD_RES (2), (3), (37), (39): Xaa is C or S
  MOD_RES (17), (18), (19), (20), (21): Xaa is A or G
  MOD_RES (22), (23), (24), (25): Xaa is A or G or is absent
TXXVPTRLSAISILYLXXXXXXXXXLKNYQDMVVESXGXR

SEQ ID NO: 12285 - protein, 37 aa, Artificial Sequence
  Non-cyclic GFR-binding peptide
  MOD_RES (1), (2), (35), (37): Xaa is C or S
  MOD_RES (16), (17), (18), (19), (20): Xaa is A or G
  MOD_RES (21), (22), (23), (24): Xaa is A or G or is absent
XXVPQALEPLTILYYXXXXXXXXXEQLSNMIVRSXKX

SEQ ID NO: 12286 - protein, 40 aa, Artificial Sequence
  Non-cyclic GFR-binding peptide
  MOD_RES (2), (3), (37), (39): Xaa is C or S
  MOD_RES (17), (18), (19), (20), (21): Xaa is A or G
  MOD_RES (22), (23), (24), (25): Xaa is A or G or is absent
PXXAPTQLEPLPVVYYXXXXXXXXXEQLSNNMVVRAXGXH

SEQ ID NO: 12287 - protein, 35 aa, Artificial Sequence
  Non-cyclic GFR-binding peptide
  MOD_RES (5), (5): Xaa is C or S
TKPTXAPTKLSPISVLFIDDSSNVIYKQYENMVVR

SEQ ID NO: 12288 - protein, 35 aa, Artificial Sequence
  Non-cyclic GFR-binding peptide
  MOD_RES (32), (34): Xaa is C or S
VPTRLNAISILYFDSANNVVLKKYRDMVVESXGXR

SEQ ID NO: 12289 - protein, 44 aa, Artificial Sequence
  Non-cyclic GFR-binding peptide
  MOD_RES (6), (7), (41), (43): Xaa is C or S
  MOD_RES (21), (22), (23), (24), (25): Xaa is A or G
  MOD_RES (26), (27), (28), (29): Xaa is A or G or is absent
SIPKAXXVPTELSPISMLFIXXXXXXXXXYKQYEEMVVEGXGXR

SEQ ID NO: 12290 - protein, 38 aa, Artificial Sequence
  Non-cyclic GFR-binding peptide
  MOD_RES (4), (5): Xaa is C or S
  MOD_RES (19), (20), (21), (22), (23): Xaa is A or G
  MOD_RES (24), (25), (26), (27): Xaa is A or G or is absent
PPTXXVPTRLNAISILYFXXXXXXXXXLKKYRDMVVES

SEQ ID NO: 12291 - protein, 43 aa, Artificial Sequence
  Non-cyclic GFR-binding peptide
  MOD_RES (5), (6), (40), (42): Xaa is C or S
  MOD_RES (20), (21), (22), (23), (24): Xaa is A or G
  MOD_RES (25), (26), (27), (28): Xaa is A or G or is absent
VPKPXXAPTQLEPLPVVYYXXXXXXXXXEQLSNNMVVRAXGXH

SEQ ID NO: 12292 - protein, 37 aa, Artificial Sequence
  Non-cyclic GFR-binding peptide
  MOD_RES (3), (4): Xaa is C or S
  MOD_RES (18), (19), (20), (21), (22): Xaa is A or G
  MOD_RES (23), (24), (25), (26): Xaa is A or G or is absent
KAXXVPTELSPISMLFIXXXXXXXXXYKQYEDMVVEG

SEQ ID NO: 12293 - protein, 36 aa, Artificial Sequence
  Non-cyclic GFR-binding peptide
  MOD_RES (1), (2), (36): Xaa is C or S
  MOD_RES (16), (17), (18), (19), (20): Xaa is A or G
  MOD_RES (21), (22), (23), (24): Xaa is A or G or is absent
XXAPTQLEPLPVVYYXXXXXXXXXEQLSNNMVVRAX

SEQ ID NO: 12294 - protein, 34 aa, Artificial Sequence
  Non-cyclic GFR-binding peptide
  MOD_RES (1), (34): Xaa is C or S
  MOD_RES (15), (16), (17), (18), (19): Xaa is A or G
  MOD_RES (20), (21), (22), (23): Xaa is A or G or is absent
XVPQALSPISILFIXXXXXXXXXYKQYEMIVRSX

SEQ ID NO: 12295 - protein, 44 aa, Artificial Sequence
  Non-cyclic GFR-binding peptide
  MOD_RES (7), (41), (43): Xaa is C or S
  MOD_RES (21), (22), (23), (24), (25): Xaa is A or G
  MOD_RES (26), (27), (28), (29): Xaa is A or G or is absent
HVTKPTXAPTKLEPLPVVYYXXXXXXXXXEQLSNNMVVRSXGXH

SEQ ID NO: 12296 - protein, 39 aa, Artificial Sequence
  Non-cyclic GFR-binding peptide
  MOD_RES (6), (7), (38): Xaa is C or S
ASASPXXVSQDLEPLPIVYYIGKTPKIEQLSNMIVKSXK

SEQ ID NO: 12297 - protein, 37 aa, Artificial Sequence
  Non-cyclic GFR-binding peptide
  MOD_RES (4), (5), (36): Xaa is C or S
AAPXXVPQALSPISILFIVGRKPKVYKQYEMIVRSXK

SEQ ID NO: 12298 - protein, 36 aa, Artificial Sequence
  Non-cyclic GFR-binding peptide
  MOD_RES (2), (3): Xaa is C or S
  MOD_RES (17), (18), (19), (20), (21): Xaa is A or G
  MOD_RES (22), (23), (24), (25): Xaa is A or G or is absent
TXXVPTRLNAISILYFXXXXXXXXXLKKYRDMVVES

SEQ ID NO: 12299 - protein, 37 aa, Artificial Sequence
  Non-cyclic GFR-binding peptide
  MOD_RES (4), (5): Xaa is C or S
  MOD_RES (19), (20), (21), (22), (23): Xaa is A or G
  MOD_RES (24), (25), (26), (27): Xaa is A or G or is absent
PPTXXVPTRLSAISILYLXXXXXXXXXLKNYQDMVVE

SEQ ID NO: 12300 - protein, 40 aa, Artificial Sequence
  Non-cyclic GFR-binding peptide
  MOD_RES (4), (5), (39): Xaa is C or S
  MOD_RES (19), (20), (21), (22), (23): Xaa is A or G
  MOD_RES (24), (25), (26), (27): Xaa is A or G or is absent
PKAXXVPTELEPLPMVYYXXXXXXXXXEQLSNDMVVEGXG

SEQ ID NO: 12301 - protein, 35 aa, Artificial Sequence
  Non-cyclic GFR-binding peptide
  MOD_RES (1), (2): Xaa is C or S
  MOD_RES (16), (17), (18), (19), (20): Xaa is A or G
  MOD_RES (21), (22), (23), (24): Xaa is A or G or is absent
XXAPTKLSPISVLFIXXXXXXXXXYKQYENMVVRS

SEQ ID NO: 12302 - protein, 35 aa, Artificial Sequence
  Non-cyclic GFR-binding peptide
  MOD_RES (3), (4): Xaa is C or S
KPXXAPTKLEPLTVLYYDDSSNVIEQLSNNMVVRS

SEQ ID NO: 12303 - protein, 36 aa, Artificial Sequence
  Non-cyclic GFR-binding peptide
  MOD_RES (5), (6): Xaa is C or S
SAAPXXVPQALEPLTILYYVGRKPKVEQLSNMIVRS

SEQ ID NO: 12304 - protein, 38 aa, Artificial Sequence
  Non-cyclic GFR-binding peptide
  MOD_RES (6), (7): Xaa is C or S
STPPTXXVPTRLEPLTILYYDSANNVVEQLSNDMVVES

SEQ ID NO: 12305 - protein, 41 aa, Artificial Sequence
  Non-cyclic GFR-binding peptide
  MOD_RES (6), (7), (38), (40): Xaa is C or S
ASAAPXXVPQALEPLTILYYVGRKPKVEQLSNMIVRSXKXS

SEQ ID NO: 12306 - protein, 41 aa, Artificial Sequence
  Non-cyclic GFR-binding peptide
  MOD_RES (5), (6), (40): Xaa is C or S
  MOD_RES (20), (21), (22), (23), (24): Xaa is A or G
  MOD_RES (25), (26), (27), (28): Xaa is A or G or is absent
IPKAXXVPTELEPLTMLYYXXXXXXXXXEQLSNEMVVEGXG

SEQ ID NO: 12307 - protein, 32 aa, Artificial Sequence
  Non-cyclic GFR-binding peptide
  MOD_RES (32), (32): Xaa is C or S
VPTELEPLPMVYYDENEKVVEQLSNDMVVEGX

SEQ ID NO: 12308 - protein, 32 aa, Artificial Sequence
  Non-cyclic GFR-binding peptide
  MOD_RES (1), (1): Xaa is C or S
XAPTQLEPLPVVYYDDSSNVIEQLSNNMVVRA

SEQ ID NO: 12309 - protein, 38 aa, Artificial Sequence
  Non-cyclic GFR-binding peptide
  MOD_RES (5), (6): Xaa is C or S
  MOD_RES (20), (21), (22), (23), (24): Xaa is A or G
  MOD_RES (25), (26), (27), (28): Xaa is A or G or is absent
VPKPXXAPTKLSPISVLFIXXXXXXXXXYKQYENMVVR

SEQ ID NO: 12310 - protein, 39 aa, Artificial Sequence
  Non-cyclic GFR-binding peptide
  MOD_RES (3), (4), (36), (38): Xaa is C or S
KPXXAPTKLEPLPVVYYDDSSNVIEQLSNNMVVRSXGXH

SEQ ID NO: 12311 - protein, 38 aa, Artificial Sequence
  Non-cyclic GFR-binding peptide
  MOD_RES (2), (3), (35), (37): Xaa is C or S
PXXAPTKLSPISVLFIDDSSNVIYKQYENMVVRSXGXH

SEQ ID NO: 12312 - protein, 40 aa, Artificial Sequence
  Non-cyclic GFR-binding peptide
  MOD_RES (4), (5), (37), (39): Xaa is C or S
PPTXXVPTRLSAISILYLDSANNVVLKNYQDMVVESXGXR

SEQ ID NO: 12313 - protein, 42 aa, Artificial Sequence
  Non-cyclic GFR-binding peptide
  MOD_RES (6), (7), (41): Xaa is C or S
  MOD_RES (21), (22), (23), (24), (25): Xaa is A or G
  MOD_RES (26), (27), (28), (29): Xaa is A or G or is absent
YVPKPXXAPTKLSPISVLFIXXXXXXXXXYKQYENMVVRSXG

SEQ ID NO: 12314 - protein, 43 aa, Artificial Sequence
  Non-cyclic GFR-binding peptide
  MOD_RES (6), (7), (41), (43): Xaa is C or S
  MOD_RES (21), (22), (23), (24), (25): Xaa is A or G
  MOD_RES (26), (27), (28), (29): Xaa is A or G or is absent
SIPKAXXVPTELEPLPMVYYXXXXXXXXXEQLSNEMVVEGXGX

SEQ ID NO: 12315 - protein, 34 aa, Artificial Sequence
  Non-cyclic GFR-binding peptide
  MOD_RES (32), (34): Xaa is C or S
VPTELEPLTMLYYDEYDKVVEQLSNEMVVEGXGX

SEQ ID NO: 12316 - protein, 34 aa, Artificial Sequence
  Non-cyclic GFR-binding peptide
  MOD_RES (2), (3), (34): Xaa is C or S
PXXVPQALSPISILFIVGRKPKVYKQYEMIVRSX

SEQ ID NO: 12317 - protein, 36 aa, Artificial Sequence
  Non-cyclic GFR-binding peptide
  MOD_RES (2), (3), (34), (36): Xaa is C or S
PXXVPQDLEPLPIVYYVGRTPKVEQLSNMVVKSXKX

SEQ ID NO: 12318 - protein, 42 aa, Artificial Sequence
  Non-cyclic GFR-binding peptide
  MOD_RES (6), (7), (39), (41): Xaa is C or S
TVPKPXXAPTQLEPLTVLYYDDSSNVIEQLSNNMVVRAXGXH

SEQ ID NO: 12319 - protein, 33 aa, Artificial Sequence
  Non-cyclic GFR-binding peptide
  MOD_RES (1), (1): Xaa is C or S
  MOD_RES (15), (16), (17), (18), (19): Xaa is A or G
  MOD_RES (20), (21), (22), (23): Xaa is A or G or is absent
XVPTELSPISMLFIXXXXXXXXXYKQYEDMVVE

SEQ ID NO: 12320 - protein, 36 aa, Artificial Sequence
  Non-cyclic GFR-binding peptide
  MOD_RES (1), (2), (36): Xaa is C or S
  MOD_RES (16), (17), (18), (19), (20): Xaa is A or G
  MOD_RES (21), (22), (23), (24): Xaa is A or G or is absent
XXVPTELSPISMLFIXXXXXXXXXYKQYEEMVVEGX

SEQ ID NO: 12321 - protein, 37 aa, Artificial Sequence
  Non-cyclic GFR-binding peptide
  MOD_RES (7), (7): Xaa is C or S
HVTKPTXAPTKLSPISVLFIDDSSNVIYKQYENMVVR

SEQ ID NO: 12322 - protein, 38 aa, Artificial Sequence
  Non-cyclic GFR-binding peptide
  MOD_RES (2), (3), (35), (37): Xaa is C or S
AXXVPTELEPLPMVYYDENEKVVEQLSNDMVVEGXGXR

SEQ ID NO: 12323 - protein, 38 aa, Artificial Sequence
  Non-cyclic GFR-binding peptide
  MOD_RES (6), (7): Xaa is C or S
KIPKAXXVPTELSPISMLFIDENEKVVYKQYEDMVVEG

SEQ ID NO: 12324 - protein, 31 aa, Artificial Sequence
  Non-cyclic GFR-binding peptide
APTQLSPISVLFIDDSSNVIYKQYENMVVRA

SEQ ID NO: 12325 - protein, 35 aa, Artificial Sequence
  Non-cyclic GFR-binding peptide
  MOD_RES (2), (3): Xaa is C or S
  MOD_RES (17), (18), (19), (20), (21): Xaa is A or G
  MOD_RES (22), (23), (24), (25): Xaa is A or G or is absent
AXXVPTELEPLPMVYYXXXXXXXXXEQLSNEMVVE

SEQ ID NO: 12326 - protein, 36 aa, Artificial Sequence
  Non-cyclic GFR-binding peptide
  MOD_RES (3), (4), (36): Xaa is C or S
KAXXVPTELSPISMLFIDENEKVVYKQYEDMVVEGX

SEQ ID NO: 12327 - protein, 40 aa, Artificial Sequence
  Non-cyclic GFR-binding peptide
  MOD_RES (2), (3), (37), (39): Xaa is C or S
  MOD_RES (17), (18), (19), (20), (21): Xaa is A or G
  MOD_RES (22), (23), (24), (25): Xaa is A or G or is absent
TXXVPTRLEPLTILYYXXXXXXXXXEQLSNDMVVESXGXR

SEQ ID NO: 12328 - protein, 34 aa, Artificial Sequence
  Non-cyclic GFR-binding peptide
  MOD_RES (1), (1): Xaa is C or S
  MOD_RES (15), (16), (17), (18), (19): Xaa is A or G
  MOD_RES (20), (21), (22), (23): Xaa is A or G or is absent
XVPTELSPISMLFIXXXXXXXXXYKQYEEMVVEG

SEQ ID NO: 12329 - protein, 35 aa, Artificial Sequence
  Non-cyclic GFR-binding peptide
  MOD_RES (2), (3): Xaa is C or S
  MOD_RES (17), (18), (19), (20), (21): Xaa is A or G
  MOD_RES (22), (23), (24), (25): Xaa is A or G or is absent
PXXVPQALEPLTILYYXXXXXXXXXEQLSNMIVRS

SEQ ID NO: 12330 - protein, 36 aa, Artificial Sequence
  Non-cyclic GFR-binding peptide
  MOD_RES (2), (34), (36): Xaa is C or S
TXAPTKLEPLPVVYYDDSSNVIEQLSNNMVVRSXGX

SEQ ID NO: 12331 - protein, 36 aa, Artificial Sequence
  Non-cyclic GFR-binding peptide
  MOD_RES (2), (3): Xaa is C or S
  MOD_RES (17), (18), (19), (20), (21): Xaa is A or G
  MOD_RES (22), (23), (24), (25): Xaa is A or G or is absent
PXXAPTKLEPLTVLYYXXXXXXXXXEQLSNNMVVRS

SEQ ID NO: 12332 - protein, 37 aa, Artificial Sequence
  Non-cyclic GFR-binding peptide
  MOD_RES (1), (2), (34), (36): Xaa is C or S
XXVPTRLSAISILYLDSANNVVLKNYQDMVVESXGXR

SEQ ID NO: 12333 - protein, 31 aa, Artificial Sequence
  Non-cyclic GFR-binding peptide
  MOD_RES (1), (1): Xaa is C or S
XVPQALSPISILFIVGRKPKVYKQYEMIVRS

SEQ ID NO: 12334 - protein, 37 aa, Artificial Sequence
  Non-cyclic GFR-binding peptide
  MOD_RES (2), (3), (34), (36): Xaa is C or S
PXXVPQALEPLTILYYVGRKPKVEQLSNMIVRSXKXS

SEQ ID NO: 12335 - protein, 37 aa, Artificial Sequence
  Non-cyclic GFR-binding peptide
  MOD_RES (3), (4), (36): Xaa is C or S
KPXXAPTQLEPLPVVYYDDSSNVIEQLSNNMVVRAXG

SEQ ID NO: 12336 - protein, 30 aa, Artificial Sequence
  Non-cyclic GFR-binding peptide
VPTRLSAISILYLDSANNVVLKNYQDMVVE

SEQ ID NO: 12337 - protein, 36 aa, Artificial Sequence
  Non-cyclic GFR-binding peptide
  MOD_RES (1), (2), (34), (36): Xaa is C or S
XXVPTRLEPLTILYYDSANNVVEQLSNDMVVESXGX

SEQ ID NO: 12338 - protein, 36 aa, Artificial Sequence
  Non-cyclic GFR-binding peptide
  MOD_RES (3), (3): Xaa is C or S
  MOD_RES (17), (18), (19), (20), (21): Xaa is A or G
  MOD_RES (22), (23), (24), (25): Xaa is A or G or is absent
PTXAPTKLEPLPVVYYXXXXXXXXXEQLSNNMVVRS

SEQ ID NO: 12339 - protein, 37 aa, Artificial Sequence
  Non-cyclic GFR-binding peptide
  MOD_RES (3), (4), (36): Xaa is C or S
KAXXVPTELEPLTMLYYDEYDKVVEQLSNEMVVEGXG

SEQ ID NO: 12340 - protein, 38 aa, Artificial Sequence
  Non-cyclic GFR-binding peptide
  MOD_RES (2), (3), (36), (38): Xaa is C or S
  MOD_RES (17), (18), (19), (20), (21): Xaa is A or G
  MOD_RES (22), (23), (24), (25): Xaa is A or G or is absent
PXXVPQDLSPISILFIXXXXXXXXXYKQYEMVVKSXKX

SEQ ID NO: 12341 - protein, 37 aa, Artificial Sequence
  Non-cyclic GFR-binding peptide
  MOD_RES (34), (36): Xaa is C or S
  MOD_RES (14), (15), (16), (17), (18): Xaa is A or G
  MOD_RES (19), (20), (21), (22): Xaa is A or G or is absent
APTKLSPISVLFIXXXXXXXXXYKQYENMVVRSXGXH

SEQ ID NO: 12342 - protein, 38 aa, Artificial Sequence
  Non-cyclic GFR-binding peptide
  MOD_RES (6), (7), (38): Xaa is C or S
ASASPXXVSQDLEPLPIVYYIGKTPKIEQLSNMIVKSX

SEQ ID NO: 12343 - protein, 41 aa, Artificial Sequence
  Non-cyclic GFR-binding peptide
  MOD_RES (4), (5), (38), (40): Xaa is C or S
  MOD_RES (19), (20), (21), (22), (23): Xaa is A or G
  MOD_RES (24), (25), (26), (27): Xaa is A or G or is absent
ASPXXVPQDLEPLPIVYYXXXXXXXXXEQLSNMVVKSXKXS

SEQ ID NO: 12344 - protein, 31 aa, Artificial Sequence
  Non-cyclic GFR-binding peptide
  MOD_RES (1), (1): Xaa is C or S
XAPTQLEPLPVVYYDDSSNVIEQLSNNMVVR

SEQ ID NO: 12345 - protein, 38 aa, Artificial Sequence
  Non-cyclic GFR-binding peptide
  MOD_RES (6), (7): Xaa is C or S
YVPKPXXAPTKLEPLPVVYYDDSSNVIEQLSNNMVVRS

SEQ ID NO: 12346 - protein, 43 aa, Artificial Sequence
  Non-cyclic GFR-binding peptide
  MOD_RES (6), (7), (41), (43): Xaa is C or S
  MOD_RES (21), (22), (23), (24), (25): Xaa is A or G
  MOD_RES (26), (27), (28), (29): Xaa is A or G or is absent
STPPTXXVPTRLEPLPIVYYXXXXXXXXXEQLSNDMVVESXGX

SEQ ID NO: 12347 - protein, 36 aa, Artificial Sequence
  Non-cyclic GFR-binding peptide
  MOD_RES (3), (4), (36): Xaa is C or S
KPXXAPTKLEPLPVVYYDDSSNVIEQLSNNMVVRSX

SEQ ID NO: 12348 - protein, 41 aa, Artificial Sequence
  Non-cyclic GFR-binding peptide
  MOD_RES (6), (7), (40): Xaa is C or S
  MOD_RES (21), (22), (23), (24), (25): Xaa is A or G
  MOD_RES (26), (27), (28), (29): Xaa is A or G or is absent
ASAAPXXVPQALSPISILFIXXXXXXXXXYKQYEMIVRSXK

SEQ ID NO: 12349 - protein, 37 aa, Artificial Sequence
  Non-cyclic GFR-binding peptide
  MOD_RES (4), (5): Xaa is C or S
  MOD_RES (19), (20), (21), (22), (23): Xaa is A or G
  MOD_RES (24), (25), (26), (27): Xaa is A or G or is absent
PKAXXVPTELEPLPMVYYXXXXXXXXXEQLSNDMVVE

SEQ ID NO: 12350 - protein, 39 aa, Artificial Sequence
  Non-cyclic GFR-binding peptide
  MOD_RES (5), (6): Xaa is C or S
  MOD_RES (20), (21), (22), (23), (24): Xaa is A or G
  MOD_RES (25), (26), (27), (28): Xaa is A or G or is absent
VPKPXXAPTKLEPLPVVYYXXXXXXXXXEQLSNNMVVRS

SEQ ID NO: 12351 - protein, 38 aa, Artificial Sequence
  Non-cyclic GFR-binding peptide
  MOD_RES (3), (4), (36), (38): Xaa is C or S
PTXXVPTRLNAISILYFDSANNVVLKKYRDMVVESXGX

SEQ ID NO: 12352 - protein, 35 aa, Artificial Sequence
  Non-cyclic GFR-binding peptide
  MOD_RES (2), (3), (34): Xaa is C or S
PXXVSQDLSPISILFIIGKTPKIYKQYEMIVKSXK

SEQ ID NO: 12353 - protein, 36 aa, Artificial Sequence
  Non-cyclic GFR-binding peptide
  MOD_RES (1), (33), (35): Xaa is C or S
XVPTRLNAISILYFDSANNVVLKKYRDMVVESXGXR

SEQ ID NO: 12354 - protein, 35 aa, Artificial Sequence
  Non-cyclic GFR-binding peptide
  MOD_RES (2), (3), (35): Xaa is C or S
PXXAPTKLEPLTVLYYDDSSNVIEQLSNNMVVRSX

SEQ ID NO: 12355 - protein, 36 aa, Artificial Sequence
  Non-cyclic GFR-binding peptide
  MOD_RES (33), (35): Xaa is C or S
  MOD_RES (14), (15), (16), (17), (18): Xaa is A or G
  MOD_RES (19), (20), (21), (22): Xaa is A or G or is absent
VPQALEPLTILYYXXXXXXXXXEQLSNMIVRSXKXS

SEQ ID NO: 12356 - protein, 33 aa, Artificial Sequence
  Non-cyclic GFR-binding peptide
  MOD_RES (14), (15), (16), (17), (18): Xaa is A or G
  MOD_RES (19), (20), (21), (22): Xaa is A or G or is absent
VPTELSPISMLFIXXXXXXXXXYKQYEDMVVEG

SEQ ID NO: 12357 - protein, 39 aa, Artificial Sequence
  Non-cyclic GFR-binding peptide
  MOD_RES (2), (36), (38): Xaa is C or S
  MOD_RES (16), (17), (18), (19), (20): Xaa is A or G
  MOD_RES (21), (22), (23), (24): Xaa is A or G or is absent
TXAPTKLSPISVLFIXXXXXXXXXYKQYENMVVRSXGXH

SEQ ID NO: 12358 - protein, 34 aa, Artificial Sequence
  Non-cyclic GFR-binding peptide
  MOD_RES (1), (1): Xaa is C or S
  MOD_RES (15), (16), (17), (18), (19): Xaa is A or G
  MOD_RES (20), (21), (22), (23): Xaa is A or G or is absent
XAPTKLSPISVLFIXXXXXXXXXYKQYENMVVRS

SEQ ID NO: 12359 - protein, 33 aa, Artificial Sequence
  Non-cyclic GFR-binding peptide
  MOD_RES (1), (2): Xaa is C or S
XXAPTKLEPLPVVYYDDSSNVIEQLSNNMVVRS

SEQ ID NO: 12360 - protein, 35 aa, Artificial Sequence
  Non-cyclic GFR-binding peptide
  MOD_RES (1), (2), (35): Xaa is C or S
  MOD_RES (16), (17), (18), (19), (20): Xaa is A or G
  MOD_RES (21), (22), (23), (24): Xaa is A or G or is absent
XXVPQDLEPLPIVYYXXXXXXXXXEQLSNMVVKSX

SEQ ID NO: 12361 - protein, 37 aa, Artificial Sequence
  Non-cyclic GFR-binding peptide
  MOD_RES (4), (5): Xaa is C or S
  MOD_RES (19), (20), (21), (22), (23): Xaa is A or G
  MOD_RES (24), (25), (26), (27): Xaa is A or G or is absent
PKPXXAPTKLEPLTVLYYXXXXXXXXXEQLSNNMVVR

SEQ ID NO: 12362 - protein, 35 aa, Artificial Sequence
  Non-cyclic GFR-binding peptide
  MOD_RES (33), (35): Xaa is C or S
  MOD_RES (14), (15), (16), (17), (18): Xaa is A or G
  MOD_RES (19), (20), (21), (22): Xaa is A or G or is absent
VPQDLEPLPIVYYXXXXXXXXXEQLSNMVVKSXKX

SEQ ID NO: 12363 - protein, 36 aa, Artificial Sequence
  Non-cyclic GFR-binding peptide
  MOD_RES (3), (4), (35): Xaa is C or S
SPXXVSQDLEPLPIVYYIGKTPKIEQLSNMIVKSXK

SEQ ID NO: 12364 - protein, 36 aa, Artificial Sequence
  Non-cyclic GFR-binding peptide
  MOD_RES (4), (5): Xaa is C or S
PKAXXVPTELEPLTMLYYDENEKVVEQLSNDMVVEG

SEQ ID NO: 12365 - protein, 36 aa, Artificial Sequence
  Non-cyclic GFR-binding peptide
  MOD_RES (1), (35): Xaa is C or S
  MOD_RES (15), (16), (17), (18), (19): Xaa is A or G
  MOD_RES (20), (21), (22), (23): Xaa is A or G or is absent
XVPTRLSAISILYLXXXXXXXXXLKNYQDMVVESXG

SEQ ID NO: 12366 - protein, 38 aa, Artificial Sequence
  Non-cyclic GFR-binding peptide
  MOD_RES (2), (3), (37): Xaa is C or S
  MOD_RES (17), (18), (19), (20), (21): Xaa is A or G
  MOD_RES (22), (23), (24), (25): Xaa is A or G or is absent
PXXAPTQLSPISVLFIXXXXXXXXXYKQYENMVVRAXG

SEQ ID NO: 12367 - protein, 41 aa, Artificial Sequence
  Non-cyclic GFR-binding peptide
  MOD_RES (6), (7), (38), (40): Xaa is C or S
ASASPXXVSQDLSPISILFIIGKTPKIYKQYEMIVKSXKXS

SEQ ID NO: 12368 - protein, 34 aa, Artificial Sequence
  Non-cyclic GFR-binding peptide
  MOD_RES (1), (2): Xaa is C or S
  MOD_RES (16), (17), (18), (19), (20): Xaa is A or G
  MOD_RES (21), (22), (23), (24): Xaa is A or G or is absent
XXVPQDLSPISILFIXXXXXXXXXYKQYEMVVKS

SEQ ID NO: 12369 - protein, 32 aa, Artificial Sequence
  Non-cyclic GFR-binding peptide
  MOD_RES (14), (15), (16), (17), (18): Xaa is A or G
  MOD_RES (19), (20), (21), (22): Xaa is A or G or is absent
APTKLEPLTVLYYXXXXXXXXXEQLSNNMVVR

SEQ ID NO: 12370 - protein, 34 aa, Artificial Sequence
  Non-cyclic GFR-binding peptide
  MOD_RES (1), (2), (34): Xaa is C or S
XXVPTELEPLPMVYYDEYDKVVEQLSNEMVVEGX

SEQ ID NO: 12371 - protein, 41 aa, Artificial Sequence
  Non-cyclic GFR-binding peptide
  MOD_RES (5), (6), (38), (40): Xaa is C or S
IPKAXXVPTELSPISMLFIDEYDKVVYKQYEEMVVEGXGXR

SEQ ID NO: 12372 - protein, 42 aa, Artificial Sequence
  Non-cyclic GFR-binding peptide
  MOD_RES (6), (7), (40), (42): Xaa is C or S
  MOD_RES (21), (22), (23), (24), (25): Xaa is A or G
  MOD_RES (26), (27), (28), (29): Xaa is A or G or is absent
ASASPXXVSQDLEPLPIVYYXXXXXXXXXEQLSNMIVKSXKX

SEQ ID NO: 12373 - protein, 37 aa, Artificial Sequence
  Non-cyclic GFR-binding peptide
  MOD_RES (1), (2), (34), (36): Xaa is C or S
XXVPTRLNAISILYFDSANNVVLKKYRDMVVESXGXR

SEQ ID NO: 12374 - protein, 36 aa, Artificial Sequence
  Non-cyclic GFR-binding peptide
  MOD_RES (4), (5): Xaa is C or S
PKAXXVPTELEPLPMVYYDENEKVVEQLSNDMVVEG

SEQ ID NO: 12375 - protein, 42 aa, Artificial Sequence
  Non-cyclic GFR-binding peptide
  MOD_RES (5), (6), (39), (41): Xaa is C or S
  MOD_RES (20), (21), (22), (23), (24): Xaa is A or G
  MOD_RES (25), (26), (27), (28): Xaa is A or G or is absent
SAAPXXVPQALEPLTILYYXXXXXXXXXEQLSNMIVRSXKXS

SEQ ID NO: 12376 - protein, 41 aa, Artificial Sequence
  Non-cyclic GFR-binding peptide
  MOD_RES (4), (5), (39), (41): Xaa is C or S
  MOD_RES (19), (20), (21), (22), (23): Xaa is A or G
  MOD_RES (24), (25), (26), (27): Xaa is A or G or is absent
PKPXXAPTKLEPLPVVYYXXXXXXXXXEQLSNNMVVRSXGX

SEQ ID NO: 12377 - protein, 38 aa, Artificial Sequence
  Non-cyclic GFR-binding peptide
  MOD_RES (6), (7): Xaa is C or S
KIPKAXXVPTELEPLTMLYYDENEKVVEQLSNDMVVEG

SEQ ID NO: 12378 - protein, 32 aa, Artificial Sequence
  Non-cyclic GFR-binding peptide
  MOD_RES (1), (1): Xaa is C or S
XAPTQLEPLTVLYYDDSSNVIEQLSNNMVVRA

SEQ ID NO: 12379 - protein, 39 aa, Artificial Sequence
  Non-cyclic GFR-binding peptide
  MOD_RES (4), (5), (39): Xaa is C or S
  MOD_RES (19), (20), (21), (22), (23): Xaa is A or G
  MOD_RES (24), (25), (26), (27): Xaa is A or G or is absent
PKPXXAPTQLEPLPVVYYXXXXXXXXXEQLSNNMVVRAX

SEQ ID NO: 12380 - protein, 38 aa, Artificial Sequence
  Non-cyclic GFR-binding peptide
  MOD_RES (3), (35), (37): Xaa is C or S
PTXAPTKLEPLPVVYYDDSSNVIEQLSNNMVVRSXGXH

SEQ ID NO: 12381 - protein, 41 aa, Artificial Sequence
  Non-cyclic GFR-binding peptide
  MOD_RES (6), (7), (41): Xaa is C or S
  MOD_RES (21), (22), (23), (24), (25): Xaa is A or G
  MOD_RES (26), (27), (28), (29): Xaa is A or G or is absent
YVPKPXXAPTKLEPLPVVYYXXXXXXXXXEQLSNNMVVRSX

SEQ ID NO: 12382 - protein, 42 aa, Artificial Sequence
  Non-cyclic GFR-binding peptide
  MOD_RES (5), (39), (41): Xaa is C or S
  MOD_RES (19), (20), (21), (22), (23): Xaa is A or G
  MOD_RES (24), (25), (26), (27): Xaa is A or G or is absent
TKPTXAPTKLEPLTVLYYXXXXXXXXXEQLSNNMVVRSXGXH

SEQ ID NO: 12383 - protein, 39 aa, Artificial Sequence
  Non-cyclic GFR-binding peptide
  MOD_RES (3), (37), (39): Xaa is C or S
  MOD_RES (17), (18), (19), (20), (21): Xaa is A or G
  MOD_RES (22), (23), (24), (25): Xaa is A or G or is absent
PTXAPTKLSPISVLFIXXXXXXXXXYKQYENMVVRSXGX

SEQ ID NO: 12384 - protein, 36 aa, Artificial Sequence
  Non-cyclic GFR-binding peptide
  MOD_RES (5), (6): Xaa is C or S
TPPTXXVPTRLSAISILYLDSANNVVLKNYQDMVVE

SEQ ID NO: 12385 - protein, 39 aa, Artificial Sequence
  Non-cyclic GFR-binding peptide
  MOD_RES (1), (2), (36), (38): Xaa is C or S
  MOD_RES (16), (17), (18), (19), (20): Xaa is A or G
  MOD_RES (21), (22), (23), (24): Xaa is A or G or is absent
XXVPTRLSAISILYLXXXXXXXXXLKNYQDMVVESXGXR

SEQ ID NO: 12386 - protein, 38 aa, Artificial Sequence
  Non-cyclic GFR-binding peptide
  MOD_RES (3), (4), (38): Xaa is C or S
  MOD_RES (18), (19), (20), (21), (22): Xaa is A or G
  MOD_RES (23), (24), (25), (26): Xaa is A or G or is absent
PTXXVPTRLEPLPIVYYXXXXXXXXXEQLSNDMVVESX

SEQ ID NO: 12387 - protein, 40 aa, Artificial Sequence
  Non-cyclic GFR-binding peptide
  MOD_RES (6), (7), (38), (40): Xaa is C or S
ASAAPXXVPQALSPISILFIVGRKPKVYKQYEMIVRSXKX

SEQ ID NO: 12388 - protein, 31 aa, Artificial Sequence
  Non-cyclic GFR-binding peptide
VPTRLSAISILYLDSANNVVLKNYQDMVVES

SEQ ID NO: 12389 - protein, 33 aa, Artificial Sequence
  Non-cyclic GFR-binding peptide
  MOD_RES (1), (32): Xaa is C or S
XVSQDLEPLPIVYYIGKTPKIEQLSNMIVKSXK

SEQ ID NO: 12390 - protein, 37 aa, Artificial Sequence
  Non-cyclic GFR-binding peptide
  MOD_RES (3), (4): Xaa is C or S
  MOD_RES (18), (19), (20), (21), (22): Xaa is A or G
  MOD_RES (23), (24), (25), (26): Xaa is A or G or is absent
KPXXAPTQLEPLPVVYYXXXXXXXXXEQLSNNMVVRA

SEQ ID NO: 12391 - protein, 36 aa, Artificial Sequence
  Non-cyclic GFR-binding peptide
  MOD_RES (2), (34), (36): Xaa is C or S
TXAPTKLSPISVLFIDDSSNVIYKQYENMVVRSXGX

SEQ ID NO: 12392 - protein, 39 aa, Artificial Sequence
  Non-cyclic GFR-binding peptide
  MOD_RES (3), (4), (38): Xaa is C or S
  MOD_RES (18), (19), (20), (21), (22): Xaa is A or G
  MOD_RES (23), (24), (25), (26): Xaa is A or G or is absent
KPXXAPTKLSPISVLFIXXXXXXXXXYKQYENMVVRSXG

SEQ ID NO: 12393 - protein, 38 aa, Artificial Sequence
  Non-cyclic GFR-binding peptide
  MOD_RES (3), (4), (36), (38): Xaa is C or S
KAXXVPTELEPLPMVYYDEYDKVVEQLSNEMVVEGXGX

SEQ ID NO: 12394 - protein, 32 aa, Artificial Sequence
  Non-cyclic GFR-binding peptide
  MOD_RES (1), (2): Xaa is C or S
XXAPTQLSPISVLFIDDSSNVIYKQYENMVVR

SEQ ID NO: 12395 - protein, 38 aa, Artificial Sequence
  Non-cyclic GFR-binding peptide
  MOD_RES (3), (4), (35), (37): Xaa is C or S
SPXXVSQDLSPISILFIIGKTPKIYKQYEMIVKSXKXS

SEQ ID NO: 12396 - protein, 38 aa, Artificial Sequence
  Non-cyclic GFR-binding peptide
  MOD_RES (6), (7): Xaa is C or S
STPPTXXVPTRLEPLPIVYYDSANNVVEQLSNDMVVES

SEQ ID NO: 12397 - protein, 35 aa, Artificial Sequence
  Non-cyclic GFR-binding peptide
  MOD_RES (2), (3), (34): Xaa is C or S
PXXVPQDLEPLPIVYYVGRTPKVEQLSNMVVKSXK

SEQ ID NO: 12398 - protein, 37 aa, Artificial Sequence
  Non-cyclic GFR-binding peptide
  MOD_RES (6), (6): Xaa is C or S
VTKPTXAPTKLEPLTVLYYDDSSNVIEQLSNNMVVRS

SEQ ID NO: 12399 - protein, 35 aa, Artificial Sequence
  Non-cyclic GFR-binding peptide
  MOD_RES (4), (5): Xaa is C or S
ASPXXVSQDLSPISILFIIGKTPKIYKQYEMIVKS

SEQ ID NO: 12400 - protein, 41 aa, Artificial Sequence
  Non-cyclic GFR-binding peptide
  MOD_RES (5), (6), (38), (40): Xaa is C or S
IPKAXXVPTELEPLTMLYYDEYDKVVEQLSNEMVVEGXGXR

SEQ ID NO: 12401 - protein, 37 aa, Artificial Sequence
  Non-cyclic GFR-binding peptide
  MOD_RES (3), (4): Xaa is C or S
  MOD_RES (18), (19), (20), (21), (22): Xaa is A or G
  MOD_RES (23), (24), (25), (26): Xaa is A or G or is absent
KPXXAPTKLEPLPVVYYXXXXXXXXXEQLSNNMVVRS

SEQ ID NO: 12402 - protein, 40 aa, Artificial Sequence
  Non-cyclic GFR-binding peptide
  MOD_RES (6), (7), (39): Xaa is C or S
SIPKAXXVPTELEPLTMLYYDEYDKVVEQLSNEMVVEGXG

SEQ ID NO: 12403 - protein, 35 aa, Artificial Sequence
  Non-cyclic GFR-binding peptide
  MOD_RES (34), (34): Xaa is C or S
  MOD_RES (14), (15), (16), (17), (18): Xaa is A or G
  MOD_RES (19), (20), (21), (22): Xaa is A or G or is absent
VPTELEPLPMVYYXXXXXXXXXEQLSNDMVVEGXG

SEQ ID NO: 12404 - protein, 32 aa, Artificial Sequence
  Non-cyclic GFR-binding peptide
  MOD_RES (14), (15), (16), (17), (18): Xaa is A or G
  MOD_RES (19), (20), (21), (22): Xaa is A or G or is absent
VPTRLEPLTILYYXXXXXXXXXEQLSNDMVVE

SEQ ID NO: 12405 - protein, 40 aa, Artificial Sequence
  Non-cyclic GFR-binding peptide
  MOD_RES (6), (7), (39): Xaa is C or S
TVPKPXXAPTQLEPLTVLYYDDSSNVIEQLSNNMVVRAXG

SEQ ID NO: 12406 - protein, 33 aa, Artificial Sequence
  Non-cyclic GFR-binding peptide
  MOD_RES (1), (2): Xaa is C or S
XXAPTKLEPLTVLYYDDSSNVIEQLSNNMVVRS

SEQ ID NO: 12407 - protein, 35 aa, Artificial Sequence
  Non-cyclic GFR-binding peptide
  MOD_RES (34), (34): Xaa is C or S
  MOD_RES (14), (15), (16), (17), (18): Xaa is A or G
  MOD_RES (19), (20), (21), (22): Xaa is A or G or is absent
VPTRLSAISILYLXXXXXXXXXLKNYQDMVVESXG

SEQ ID NO: 12408 - protein, 35 aa, Artificial Sequence
  Non-cyclic GFR-binding peptide
  MOD_RES (1), (35): Xaa is C or S
  MOD_RES (15), (16), (17), (18), (19): Xaa is A or G
  MOD_RES (20), (21), (22), (23): Xaa is A or G or is absent
XAPTQLEPLPVVYYXXXXXXXXXEQLSNNMVVRAX

SEQ ID NO: 12409 - protein, 39 aa, Artificial Sequence
  Non-cyclic GFR-binding peptide
  MOD_RES (6), (7), (38): Xaa is C or S
ASASPXXVPQDLSPISILFIVGRTPKVYKQYEMVVKSXK

SEQ ID NO: 12410 - protein, 41 aa, Artificial Sequence
  Non-cyclic GFR-binding peptide
  MOD_RES (5), (6), (40): Xaa is C or S
  MOD_RES (20), (21), (22), (23), (24): Xaa is A or G
  MOD_RES (25), (26), (27), (28): Xaa is A or G or is absent
VPKPXXAPTKLEPLTVLYYXXXXXXXXXEQLSNNMVVRSXG

SEQ ID NO: 12411 - protein, 35 aa, Artificial Sequence
  Non-cyclic GFR-binding peptide
  MOD_RES (1), (35): Xaa is C or S
  MOD_RES (15), (16), (17), (18), (19): Xaa is A or G
  MOD_RES (20), (21), (22), (23): Xaa is A or G or is absent
XVPTELSPISMLFIXXXXXXXXXYKQYEEMVVEGX

SEQ ID NO: 12412 - protein, 39 aa, Artificial Sequence
  Non-cyclic GFR-binding peptide
  MOD_RES (2), (3), (37), (39): Xaa is C or S
  MOD_RES (17), (18), (19), (20), (21): Xaa is A or G
  MOD_RES (22), (23), (24), (25): Xaa is A or G or is absent
PXXAPTKLSPISVLFIXXXXXXXXXYKQYENMVVRSXGX

SEQ ID NO: 12413 - protein, 39 aa, Artificial Sequence
  Non-cyclic GFR-binding peptide
  MOD_RES (6), (7): Xaa is C or S
  MOD_RES (21), (22), (23), (24), (25): Xaa is A or G
  MOD_RES (26), (27), (28), (29): Xaa is A or G or is absent
ASASPXXVPQDLEPLPIVYYXXXXXXXXXEQLSNMVVKS

SEQ ID NO: 12414 - protein, 35 aa, Artificial Sequence
  Non-cyclic GFR-binding peptide
  MOD_RES (3), (4): Xaa is C or S
KAXXVPTELSPISMLFIDENEKVVYKQYEDMVVEG

SEQ ID NO: 12415 - protein, 42 aa, Artificial Sequence
  Non-cyclic GFR-binding peptide
  MOD_RES (6), (7), (41): Xaa is C or S
  MOD_RES (21), (22), (23), (24), (25): Xaa is A or G
  MOD_RES (26), (27), (28), (29): Xaa is A or G or is absent
STPPTXXVPTRLEPLTILYYXXXXXXXXXEQLSNDMVVESXG

SEQ ID NO: 12416 - protein, 36 aa, Artificial Sequence
  Non-cyclic GFR-binding peptide
  MOD_RES (1), (33), (35): Xaa is C or S
XVPTRLEPLTILYYDSANNVVEQLSNDMVVESXGXR

SEQ ID NO: 12417 - protein, 37 aa, Artificial Sequence
  Non-cyclic GFR-binding peptide
  MOD_RES (2), (3), (35), (37): Xaa is C or S
TXXVPTRLSAISILYLDSANNVVLKNYQDMVVESXGX

SEQ ID NO: 12418 - protein, 38 aa, Artificial Sequence
  Non-cyclic GFR-binding peptide
  MOD_RES (1), (2), (36), (38): Xaa is C or S
  MOD_RES (16), (17), (18), (19), (20): Xaa is A or G
  MOD_RES (21), (22), (23), (24): Xaa is A or G or is absent
XXVPTRLSAISILYLXXXXXXXXXLKNYQDMVVESXGX

SEQ ID NO: 12419 - protein, 35 aa, Artificial Sequence
  Non-cyclic GFR-binding peptide
  MOD_RES (4), (4): Xaa is C or S
KPTXAPTKLEPLPVVYYDDSSNVIEQLSNNMVVRS

SEQ ID NO: 12420 - protein, 39 aa, Artificial Sequence
  Non-cyclic GFR-binding peptide
  MOD_RES (3), (4), (37), (39): Xaa is C or S
  MOD_RES (18), (19), (20), (21), (22): Xaa is A or G
  MOD_RES (23), (24), (25), (26): Xaa is A or G or is absent
SPXXVSQDLSPISILFIXXXXXXXXXYKQYEMIVKSXKX

SEQ ID NO: 12421 - protein, 36 aa, Artificial Sequence
  Non-cyclic GFR-binding peptide
  MOD_RES (1), (33), (35): Xaa is C or S
XVPTRLSAISILYLDSANNVVLKNYQDMVVESXGXR

SEQ ID NO: 12422 - protein, 41 aa, Artificial Sequence
  Non-cyclic GFR-binding peptide
  MOD_RES (6), (7), (40): Xaa is C or S
  MOD_RES (21), (22), (23), (24), (25): Xaa is A or G
  MOD_RES (26), (27), (28), (29): Xaa is A or G or is absent
ASASPXXVSQDLSPISILFIXXXXXXXXXYKQYEMIVKSXK

SEQ ID NO: 12423 - protein, 37 aa, Artificial Sequence
  Non-cyclic GFR-binding peptide
  MOD_RES (1), (34), (36): Xaa is C or S
  MOD_RES (15), (16), (17), (18), (19): Xaa is A or G
  MOD_RES (20), (21), (22), (23): Xaa is A or G or is absent
XVPQALSPISILFIXXXXXXXXXYKQYEMIVRSXKXS

SEQ ID NO: 12424 - protein, 33 aa, Artificial Sequence
  Non-cyclic GFR-binding peptide
  MOD_RES (1), (1): Xaa is C or S
  MOD_RES (15), (16), (17), (18), (19): Xaa is A or G
  MOD_RES (20), (21), (22), (23): Xaa is A or G or is absent
XVPTRLNAISILYFXXXXXXXXXLKKYRDMVVE

SEQ ID NO: 12425 - protein, 36 aa, Artificial Sequence
  Non-cyclic GFR-binding peptide
  MOD_RES (3), (35): Xaa is C or S
PTXAPTKLEPLPVVYYDDSSNVIEQLSNNMVVRSXG

SEQ ID NO: 12426 - protein, 39 aa, Artificial Sequence
  Non-cyclic GFR-binding peptide
  MOD_RES (5), (37), (39): Xaa is C or S
TKPTXAPTKLEPLTVLYYDDSSNVIEQLSNNMVVRSXGX

SEQ ID NO: 12427 - protein, 34 aa, Artificial Sequence
  Non-cyclic GFR-binding peptide
  MOD_RES (3), (4): Xaa is C or S
KAXXVPTELEPLTMLYYDENEKVVEQLSNDMVVE

SEQ ID NO: 12428 - protein, 32 aa, Artificial Sequence
  Non-cyclic GFR-binding peptide
  MOD_RES (14), (15), (16), (17), (18): Xaa is A or G
  MOD_RES (19), (20), (21), (22): Xaa is A or G or is absent
VPQDLSPISILFIXXXXXXXXXYKQYEMVVKS

SEQ ID NO: 12429 - protein, 37 aa, Artificial Sequence
  Non-cyclic GFR-binding peptide
  MOD_RES (4), (5): Xaa is C or S
  MOD_RES (19), (20), (21), (22), (23): Xaa is A or G
  MOD_RES (24), (25), (26), (27): Xaa is A or G or is absent
PKPXXAPTKLEPLPVVYYXXXXXXXXXEQLSNNMVVR

SEQ ID NO: 12430 - protein, 42 aa, Artificial Sequence
  Non-cyclic GFR-binding peptide
  MOD_RES (6), (7), (41): Xaa is C or S
  MOD_RES (21), (22), (23), (24), (25): Xaa is A or G
  MOD_RES (26), (27), (28), (29): Xaa is A or G or is absent
SIPKAXXVPTELEPLPMVYYXXXXXXXXXEQLSNEMVVEGXG

SEQ ID NO: 12431 - protein, 33 aa, Artificial Sequence
  Non-cyclic GFR-binding peptide
  MOD_RES (1), (2), (33): Xaa is C or S
XXVPQALEPLTILYYVGRKPKVEQLSNMIVRSX

SEQ ID NO: 12432 - protein, 33 aa, Artificial Sequence
  Non-cyclic GFR-binding peptide
  MOD_RES (2), (3): Xaa is C or S
PXXVPQALEPLTILYYVGRKPKVEQLSNMIVRS

SEQ ID NO: 12433 - protein, 40 aa, Artificial Sequence
  Non-cyclic GFR-binding peptide
  MOD_RES (6), (38), (40): Xaa is C or S
VTKPTXAPTKLSPISVLFIDDSSNVIYKQYENMVVRSXGX

SEQ ID NO: 12434 - protein, 38 aa, Artificial Sequence
  Non-cyclic GFR-binding peptide
  MOD_RES (5), (6), (38): Xaa is C or S
VPKPXXAPTKLEPLPVVYYDDSSNVIEQLSNNMVVRSX

SEQ ID NO: 12435 - protein, 37 aa, Artificial Sequence
  Non-cyclic GFR-binding peptide
  MOD_RES (1), (2), (35), (37): Xaa is C or S
  MOD_RES (16), (17), (18), (19), (20): Xaa is A or G
  MOD_RES (21), (22), (23), (24): Xaa is A or G or is absent
XXVPQDLEPLPIVYYXXXXXXXXXEQLSNMVVKSXKX

SEQ ID NO: 12436 - protein, 36 aa, Artificial Sequence
  Non-cyclic GFR-binding peptide
  MOD_RES (4), (5): Xaa is C or S
PKAXXVPTELEPLTMLYYDEYDKVVEQLSNEMVVEG

SEQ ID NO: 12437 - protein, 38 aa, Artificial Sequence
  Non-cyclic GFR-binding peptide
  MOD_RES (4), (5): Xaa is C or S
  MOD_RES (19), (20), (21), (22), (23): Xaa is A or G
  MOD_RES (24), (25), (26), (27): Xaa is A or G or is absent
PKPXXAPTKLSPISVLFIXXXXXXXXXYKQYENMVVRS

SEQ ID NO: 12438 - protein, 40 aa, Artificial Sequence
  Non-cyclic GFR-binding peptide
  MOD_RES (7), (7): Xaa is C or S
  MOD_RES (21), (22), (23), (24), (25): Xaa is A or G
  MOD_RES (26), (27), (28), (29): Xaa is A or G or is absent
HVTKPTXAPTKLEPLPVVYYXXXXXXXXXEQLSNNMVVRS

SEQ ID NO: 12439 - protein, 38 aa, Artificial Sequence
  Non-cyclic GFR-binding peptide
  MOD_RES (4), (5), (37): Xaa is C or S
PPTXXVPTRLEPLTILYYDSANNVVEQLSNDMVVESXG

SEQ ID NO: 12440 - protein, 41 aa, Artificial Sequence
  Non-cyclic GFR-binding peptide
  MOD_RES (6), (7), (38), (40): Xaa is C or S
ASASPXXVSQDLEPLPIVYYIGKTPKIEQLSNMIVKSXKXS

SEQ ID NO: 12441 - protein, 33 aa, Artificial Sequence
  Non-cyclic GFR-binding peptide
  MOD_RES (1), (32): Xaa is C or S
XVPQALEPLTILYYVGRKPKVEQLSNMIVRSXK

SEQ ID NO: 12442 - protein, 38 aa, Artificial Sequence
  Non-cyclic GFR-binding peptide
  MOD_RES (2), (3), (37): Xaa is C or S
  MOD_RES (17), (18), (19), (20), (21): Xaa is A or G
  MOD_RES (22), (23), (24), (25): Xaa is A or G or is absent
PXXAPTQLEPLTVLYYXXXXXXXXXEQLSNNMVVRAXG

SEQ ID NO: 12443 - protein, 30 aa, Artificial Sequence
  Non-cyclic GFR-binding peptide
VPTELSPISMLFIDENEKVVYKQYEDMVVE

SEQ ID NO: 12444 - protein, 39 aa, Artificial Sequence
  Non-cyclic GFR-binding peptide
  MOD_RES (5), (6), (37), (39): Xaa is C or S
SAAPXXVPQALSPISILFIVGRKPKVYKQYEMIVRSXKX

SEQ ID NO: 12445 - protein, 34 aa, Artificial Sequence
  Non-cyclic GFR-binding peptide
  MOD_RES (34), (34): Xaa is C or S
  MOD_RES (14), (15), (16), (17), (18): Xaa is A or G
  MOD_RES (19), (20), (21), (22): Xaa is A or G or is absent
APTKLEPLTVLYYXXXXXXXXXEQLSNNMVVRSX

SEQ ID NO: 12446 - protein, 41 aa, Artificial Sequence
  Non-cyclic GFR-binding peptide
  MOD_RES (5), (6), (38), (40): Xaa is C or S
VPKPXXAPTQLEPLPVVYYDDSSNVIEQLSNNMVVRAXGXH

SEQ ID NO: 12447 - protein, 40 aa, Artificial Sequence
  Non-cyclic GFR-binding peptide
  MOD_RES (3), (4), (38), (40): Xaa is C or S
  MOD_RES (18), (19), (20), (21), (22): Xaa is A or G
  MOD_RES (23), (24), (25), (26): Xaa is A or G or is absent
PTXXVPTRLSAISILYLXXXXXXXXXLKNYQDMVVESXGX

SEQ ID NO: 12448 - protein, 40 aa, Artificial Sequence
  Non-cyclic GFR-binding peptide
  MOD_RES (6), (7): Xaa is C or S
  MOD_RES (21), (22), (23), (24), (25): Xaa is A or G
  MOD_RES (26), (27), (28), (29): Xaa is A or G or is absent
STPPTXXVPTRLEPLTILYYXXXXXXXXXEQLSNDMVVES

SEQ ID NO: 12449 - protein, 36 aa, Artificial Sequence
  Non-cyclic GFR-binding peptide
  MOD_RES (2), (3): Xaa is C or S
  MOD_RES (17), (18), (19), (20), (21): Xaa is A or G
  MOD_RES (22), (23), (24), (25): Xaa is A or G or is absent
PXXAPTQLEPLTVLYYXXXXXXXXXEQLSNNMVVRA

SEQ ID NO: 12450 - protein, 36 aa, Artificial Sequence
  Non-cyclic GFR-binding peptide
  MOD_RES (1), (2), (34), (36): Xaa is C or S
XXAPTQLSPISVLFIDDSSNVIYKQYENMVVRAXGX

SEQ ID NO: 12451 - protein, 36 aa, Artificial Sequence
  Non-cyclic GFR-binding peptide
  MOD_RES (5), (6): Xaa is C or S
IPKAXXVPTELEPLPMVYYDEYDKVVEQLSNEMVVE

SEQ ID NO: 12452 - protein, 36 aa, Artificial Sequence
  Non-cyclic GFR-binding peptide
  MOD_RES (5), (6): Xaa is C or S
IPKAXXVPTELEPLTMLYYDEYDKVVEQLSNEMVVE

SEQ ID NO: 12453 - protein, 37 aa, Artificial Sequence
  Non-cyclic GFR-binding peptide
  MOD_RES (34), (36): Xaa is C or S
  MOD_RES (14), (15), (16), (17), (18): Xaa is A or G
  MOD_RES (19), (20), (21), (22): Xaa is A or G or is absent
VPTRLEPLTILYYXXXXXXXXXEQLSNDMVVESXGXR

SEQ ID NO: 12454 - protein, 34 aa, Artificial Sequence
  Non-cyclic GFR-binding peptide
  MOD_RES (1), (33): Xaa is C or S
XVPTRLEPLPIVYYDSANNVVEQLSNDMVVESXG

SEQ ID NO: 12455 - protein, 34 aa, Artificial Sequence
  Non-cyclic GFR-binding peptide
  MOD_RES (1), (33): Xaa is C or S
XVPTELEPLTMLYYDENEKVVEQLSNDMVVEGXG

SEQ ID NO: 12456 - protein, 36 aa, Artificial Sequence
  Non-cyclic GFR-binding peptide
  MOD_RES (4), (5), (36): Xaa is C or S
ASPXXVPQDLSPISILFIVGRTPKVYKQYEMVVKSX

SEQ ID NO: 12457 - protein, 41 aa, Artificial Sequence
  Non-cyclic GFR-binding peptide
  MOD_RES (6), (7), (41): Xaa is C or S
  MOD_RES (21), (22), (23), (24), (25): Xaa is A or G
  MOD_RES (26), (27), (28), (29): Xaa is A or G or is absent
STPPTXXVPTRLEPLPIVYYXXXXXXXXXEQLSNDMVVESX

SEQ ID NO: 12458 - protein, 40 aa, Artificial Sequence
  Non-cyclic GFR-binding peptide
  MOD_RES (2), (3), (37), (39): Xaa is C or S
  MOD_RES (17), (18), (19), (20), (21): Xaa is A or G
  MOD_RES (22), (23), (24), (25): Xaa is A or G or is absent
PXXAPTQLEPLTVLYYXXXXXXXXXEQLSNNMVVRAXGXH

SEQ ID NO: 12459 - protein, 35 aa, Artificial Sequence
  Non-cyclic GFR-binding peptide
  MOD_RES (1), (32), (34): Xaa is C or S
XVPQALSPISILFIVGRKPKVYKQYEMIVRSXKXS

SEQ ID NO: 12460 - protein, 39 aa, Artificial Sequence
  Non-cyclic GFR-binding peptide
  MOD_RES (3), (4), (37), (39): Xaa is C or S
  MOD_RES (18), (19), (20), (21), (22): Xaa is A or G
  MOD_RES (23), (24), (25), (26): Xaa is A or G or is absent
APXXVPQALSPISILFIXXXXXXXXXYKQYEMIVRSXKX

SEQ ID NO: 12461 - protein, 34 aa, Artificial Sequence
  Non-cyclic GFR-binding peptide
  MOD_RES (3), (4): Xaa is C or S
KAXXVPTELEPLPMVYYDENEKVVEQLSNDMVVE

SEQ ID NO: 12462 - protein, 37 aa, Artificial Sequence
  Non-cyclic GFR-binding peptide
  MOD_RES (4), (5): Xaa is C or S
  MOD_RES (19), (20), (21), (22), (23): Xaa is A or G
  MOD_RES (24), (25), (26), (27): Xaa is A or G or is absent
ASPXXVSQDLEPLPIVYYXXXXXXXXXEQLSNMIVKS

SEQ ID NO: 12463 - protein, 38 aa, Artificial Sequence
  Non-cyclic GFR-binding peptide
  MOD_RES (3), (4), (37): Xaa is C or S
  MOD_RES (18), (19), (20), (21), (22): Xaa is A or G
  MOD_RES (23), (24), (25), (26): Xaa is A or G or is absent
SPXXVSQDLEPLPIVYYXXXXXXXXXEQLSNMIVKSXK

SEQ ID NO: 12464 - protein, 36 aa, Artificial Sequence
  Non-cyclic GFR-binding peptide
  MOD_RES (1), (2), (36): Xaa is C or S
  MOD_RES (16), (17), (18), (19), (20): Xaa is A or G
  MOD_RES (21), (22), (23), (24): Xaa is A or G or is absent
XXVPTRLSAISILYLXXXXXXXXXLKNYQDMVVESX

SEQ ID NO: 12465 - protein, 39 aa, Artificial Sequence
  Non-cyclic GFR-binding peptide
  MOD_RES (5), (6), (38): Xaa is C or S
VPKPXXAPTQLEPLPVVYYDDSSNVIEQLSNNMVVRAXG

SEQ ID NO: 12466 - protein, 35 aa, Artificial Sequence
  Non-cyclic GFR-binding peptide
  MOD_RES (1), (2), (34): Xaa is C or S
XXVPTRLSAISILYLDSANNVVLKNYQDMVVESXG

SEQ ID NO: 12467 - protein, 40 aa, Artificial Sequence
  Non-cyclic GFR-binding peptide
  MOD_RES (6), (40): Xaa is C or S
  MOD_RES (20), (21), (22), (23), (24): Xaa is A or G
  MOD_RES (25), (26), (27), (28): Xaa is A or G or is absent
VTKPTXAPTKLEPLPVVYYXXXXXXXXXEQLSNNMVVRSX

SEQ ID NO: 12468 - protein, 34 aa, Artificial Sequence
  Non-cyclic GFR-binding peptide
  MOD_RES (1), (2), (33): Xaa is C or S
XXVPQALEPLTILYYVGRKPKVEQLSNMIVRSXK

SEQ ID NO: 12469 - protein, 39 aa, Artificial Sequence
  Non-cyclic GFR-binding peptide
  MOD_RES (5), (6): Xaa is C or S
  MOD_RES (20), (21), (22), (23), (24): Xaa is A or G
  MOD_RES (25), (26), (27), (28): Xaa is A or G or is absent
VPKPXXAPTQLEPLPVVYYXXXXXXXXXEQLSNNMVVRA

SEQ ID NO: 12470 - protein, 34 aa, Artificial Sequence
  Non-cyclic GFR-binding peptide
  MOD_RES (3), (4): Xaa is C or S
PTXXVPTRLEPLPIVYYDSANNVVEQLSNDMVVE

SEQ ID NO: 12471 - protein, 33 aa, Artificial Sequence
  Non-cyclic GFR-binding peptide
  MOD_RES (1), (2): Xaa is C or S
XXVPTRLEPLPIVYYDSANNVVEQLSNDMVVES

SEQ ID NO: 12472 - protein, 37 aa, Artificial Sequence
  Non-cyclic GFR-binding peptide
  MOD_RES (1), (35), (37): Xaa is C or S
  MOD_RES (15), (16), (17), (18), (19): Xaa is A or G
  MOD_RES (20), (21), (22), (23): Xaa is A or G or is absent
XAPTKLEPLPVVYYXXXXXXXXXEQLSNNMVVRSXGX

SEQ ID NO: 12473 - protein, 37 aa, Artificial Sequence
  Non-cyclic GFR-binding peptide
  MOD_RES (1), (35), (37): Xaa is C or S
  MOD_RES (15), (16), (17), (18), (19): Xaa is A or G
  MOD_RES (20), (21), (22), (23): Xaa is A or G or is absent
XVPTRLNAISILYFXXXXXXXXXLKKYRDMVVESXGX

SEQ ID NO: 12474 - protein, 33 aa, Artificial Sequence
  Non-cyclic GFR-binding peptide
  MOD_RES (1), (32): Xaa is C or S
XVPQDLSPISILFIVGRTPKVYKQYEMVVKSXK

SEQ ID NO: 12475 - protein, 36 aa, Artificial Sequence
  Non-cyclic GFR-binding peptide
  MOD_RES (34), (36): Xaa is C or S
  MOD_RES (14), (15), (16), (17), (18): Xaa is A or G
  MOD_RES (19), (20), (21), (22): Xaa is A or G or is absent
VPTRLEPLPIVYYXXXXXXXXXEQLSNDMVVESXGX

SEQ ID NO: 12476 - protein, 38 aa, Artificial Sequence
  Non-cyclic GFR-binding peptide
  MOD_RES (3), (35), (37): Xaa is C or S
PTXAPTKLEPLTVLYYDDSSNVIEQLSNNMVVRSXGXH

SEQ ID NO: 12477 - protein, 35 aa, Artificial Sequence
  Non-cyclic GFR-binding peptide
  MOD_RES (4), (4): Xaa is C or S
KPTXAPTKLEPLTVLYYDDSSNVIEQLSNNMVVRS

SEQ ID NO: 12478 - protein, 35 aa, Artificial Sequence
  Non-cyclic GFR-binding peptide
  MOD_RES (1), (33), (35): Xaa is C or S
XVPTELEPLPMVYYDENEKVVEQLSNDMVVEGXGX

SEQ ID NO: 12479 - protein, 38 aa, Artificial Sequence
  Non-cyclic GFR-binding peptide
  MOD_RES (5), (6), (37): Xaa is C or S
SASPXXVSQDLSPISILFIIGKTPKIYKQYEMIVKSXK

SEQ ID NO: 12480 - protein, 37 aa, Artificial Sequence
  Non-cyclic GFR-binding peptide
  MOD_RES (2), (3), (36): Xaa is C or S
  MOD_RES (17), (18), (19), (20), (21): Xaa is A or G
  MOD_RES (22), (23), (24), (25): Xaa is A or G or is absent
PXXVSQDLEPLPIVYYXXXXXXXXXEQLSNMIVKSXK

SEQ ID NO: 12481 - protein, 34 aa, Artificial Sequence
  Non-cyclic GFR-binding peptide
  MOD_RES (1), (2): Xaa is C or S
  MOD_RES (16), (17), (18), (19), (20): Xaa is A or G
  MOD_RES (21), (22), (23), (24): Xaa is A or G or is absent
XXVPTRLEPLTILYYXXXXXXXXXEQLSNDMVVE

SEQ ID NO: 12482 - protein, 37 aa, Artificial Sequence
  Non-cyclic GFR-binding peptide
  MOD_RES (2), (3), (35), (37): Xaa is C or S
PXXAPTKLSPISVLFIDDSSNVIYKQYENMVVRSXGX

SEQ ID NO: 12483 - protein, 43 aa, Artificial Sequence
  Non-cyclic GFR-binding peptide
  MOD_RES (7), (41), (43): Xaa is C or S
  MOD_RES (21), (22), (23), (24), (25): Xaa is A or G
  MOD_RES (26), (27), (28), (29): Xaa is A or G or is absent
HVTKPTXAPTKLEPLPVVYYXXXXXXXXXEQLSNNMVVRSXGX

SEQ ID NO: 12484 - protein, 36 aa, Artificial Sequence
  Non-cyclic GFR-binding peptide
  MOD_RES (3), (4): Xaa is C or S
  MOD_RES (18), (19), (20), (21), (22): Xaa is A or G
  MOD_RES (23), (24), (25), (26): Xaa is A or G or is absent
SPXXVSQDLEPLPIVYYXXXXXXXXXEQLSNMIVKS

SEQ ID NO: 12485 - protein, 41 aa, Artificial Sequence
  Non-cyclic GFR-binding peptide
  MOD_RES (5), (6), (40): Xaa is C or S
  MOD_RES (20), (21), (22), (23), (24): Xaa is A or G
  MOD_RES (25), (26), (27), (28): Xaa is A or G or is absent
VPKPXXAPTQLEPLPVVYYXXXXXXXXXEQLSNNMVVRAXG

SEQ ID NO: 12486 - protein, 38 aa, Artificial Sequence
  Non-cyclic GFR-binding peptide
  MOD_RES (2), (3), (37): Xaa is C or S
  MOD_RES (17), (18), (19), (20), (21): Xaa is A or G
  MOD_RES (22), (23), (24), (25): Xaa is A or G or is absent
PXXAPTKLSPISVLFIXXXXXXXXXYKQYENMVVRSXG

SEQ ID NO: 12487 - protein, 35 aa, Artificial Sequence
  Non-cyclic GFR-binding peptide
  MOD_RES (1), (35): Xaa is C or S
  MOD_RES (15), (16), (17), (18), (19): Xaa is A or G
  MOD_RES (20), (21), (22), (23): Xaa is A or G or is absent
XAPTKLEPLTVLYYXXXXXXXXXEQLSNNMVVRSX

SEQ ID NO: 12488 - protein, 37 aa, Artificial Sequence
  Non-cyclic GFR-binding peptide
  MOD_RES (5), (6), (37): Xaa is C or S
SASPXXVPQDLSPISILFIVGRTPKVYKQYEMVVKSX

SEQ ID NO: 12489 - protein, 37 aa, Artificial Sequence
  Non-cyclic GFR-binding peptide
  MOD_RES (6), (7): Xaa is C or S
SIPKAXXVPTELEPLTMLYYDEYDKVVEQLSNEMVVE

SEQ ID NO: 12490 - protein, 37 aa, Artificial Sequence
  Non-cyclic GFR-binding peptide
  MOD_RES (4), (5): Xaa is C or S
  MOD_RES (19), (20), (21), (22), (23): Xaa is A or G
  MOD_RES (24), (25), (26), (27): Xaa is A or G or is absent
PKPXXAPTQLSPISVLFIXXXXXXXXXYKQYENMVVR

SEQ ID NO: 12491 - protein, 38 aa, Artificial Sequence
  Non-cyclic GFR-binding peptide
  MOD_RES (3), (4), (36), (38): Xaa is C or S
KAXXVPTELSPISMLFIDEYDKVVYKQYEEMVVEGXGX

SEQ ID NO: 12492 - protein, 35 aa, Artificial Sequence
  Non-cyclic GFR-binding peptide
  MOD_RES (2), (2): Xaa is C or S
  MOD_RES (16), (17), (18), (19), (20): Xaa is A or G
  MOD_RES (21), (22), (23), (24): Xaa is A or G or is absent
TXAPTKLSPISVLFIXXXXXXXXXYKQYENMVVRS

SEQ ID NO: 12493 - protein, 40 aa, Artificial Sequence
  Non-cyclic GFR-binding peptide
  MOD_RES (6), (7): Xaa is C or S
  MOD_RES (21), (22), (23), (24), (25): Xaa is A or G
  MOD_RES (26), (27), (28), (29): Xaa is A or G or is absent
KIPKAXXVPTELSPISMLFIXXXXXXXXXYKQYEDMVVEG

SEQ ID NO: 12494 - protein, 41 aa, Artificial Sequence
  Non-cyclic GFR-binding peptide
  MOD_RES (4), (5), (39), (41): Xaa is C or S
  MOD_RES (19), (20), (21), (22), (23): Xaa is A or G
  MOD_RES (24), (25), (26), (27): Xaa is A or G or is absent
PKAXXVPTELEPLTMLYYXXXXXXXXXEQLSNDMVVEGXGX

SEQ ID NO: 12495 - protein, 36 aa, Artificial Sequence
  Non-cyclic GFR-binding peptide
  MOD_RES (4), (5): Xaa is C or S
PKPXXAPTKLEPLPVVYYDDSSNVIEQLSNNMVVRS

SEQ ID NO: 12496 - protein, 38 aa, Artificial Sequence
  Non-cyclic GFR-binding peptide
  MOD_RES (3), (4), (38): Xaa is C or S
  MOD_RES (18), (19), (20), (21), (22): Xaa is A or G
  MOD_RES (23), (24), (25), (26): Xaa is A or G or is absent
PTXXVPTRLNAISILYFXXXXXXXXXLKKYRDMVVESX

SEQ ID NO: 12497 - protein, 36 aa, Artificial Sequence
  Non-cyclic GFR-binding peptide
  MOD_RES (3), (4), (36): Xaa is C or S
PTXXVPTRLEPLPIVYYDSANNVVEQLSNDMVVESX

SEQ ID NO: 12498 - protein, 38 aa, Artificial Sequence
  Non-cyclic GFR-binding peptide
  MOD_RES (2), (3), (37): Xaa is C or S
  MOD_RES (17), (18), (19), (20), (21): Xaa is A or G
  MOD_RES (22), (23), (24), (25): Xaa is A or G or is absent
AXXVPTELEPLPMVYYXXXXXXXXXEQLSNDMVVEGXG

SEQ ID NO: 12499 - protein, 38 aa, Artificial Sequence
  Non-cyclic GFR-binding peptide
  MOD_RES (5), (6), (38): Xaa is C or S
VPKPXXAPTQLSPISVLFIDDSSNVIYKQYENMVVRAX

SEQ ID NO: 12500 - protein, 39 aa, Artificial Sequence
  Non-cyclic GFR-binding peptide
  MOD_RES (3), (4), (38): Xaa is C or S
  MOD_RES (18), (19), (20), (21), (22): Xaa is A or G
  MOD_RES (23), (24), (25), (26): Xaa is A or G or is absent
KAXXVPTELEPLPMVYYXXXXXXXXXEQLSNEMVVEGXG

SEQ ID NO: 12501 - protein, 39 aa, Artificial Sequence
  Non-cyclic GFR-binding peptide
  MOD_RES (5), (6): Xaa is C or S
  MOD_RES (20), (21), (22), (23), (24): Xaa is A or G
  MOD_RES (25), (26), (27), (28): Xaa is A or G or is absent
TPPTXXVPTRLEPLPIVYYXXXXXXXXXEQLSNDMVVES

SEQ ID NO: 12502 - protein, 41 aa, Artificial Sequence
  Non-cyclic GFR-binding peptide
  MOD_RES (6), (7), (40): Xaa is C or S
  MOD_RES (21), (22), (23), (24), (25): Xaa is A or G
  MOD_RES (26), (27), (28), (29): Xaa is A or G or is absent
ASAAPXXVPQALEPLTILYYXXXXXXXXXEQLSNMIVRSXK

SEQ ID NO: 12503 - protein, 35 aa, Artificial Sequence
  Non-cyclic GFR-binding peptide
  MOD_RES (1), (2), (35): Xaa is C or S
  MOD_RES (16), (17), (18), (19), (20): Xaa is A or G
  MOD_RES (21), (22), (23), (24): Xaa is A or G or is absent
XXVPQALSPISILFIXXXXXXXXXYKQYEMIVRSX

SEQ ID NO: 12504 - protein, 40 aa, Artificial Sequence
  Non-cyclic GFR-binding peptide
  MOD_RES (5), (6), (40): Xaa is C or S
  MOD_RES (20), (21), (22), (23), (24): Xaa is A or G
  MOD_RES (25), (26), (27), (28): Xaa is A or G or is absent
TPPTXXVPTRLSAISILYLXXXXXXXXXLKNYQDMVVESX

SEQ ID NO: 12505 - protein, 32 aa, Artificial Sequence
  Non-cyclic GFR-binding peptide
  MOD_RES (32), (32): Xaa is C or S
APTQLEPLPVVYYDDSSNVIEQLSNNMVVRAX

SEQ ID NO: 12506 - protein, 40 aa, Artificial Sequence
  Non-cyclic GFR-binding peptide
  MOD_RES (2), (3), (37), (39): Xaa is C or S
  MOD_RES (17), (18), (19), (20), (21): Xaa is A or G
  MOD_RES (22), (23), (24), (25): Xaa is A or G or is absent
TXXVPTRLEPLPIVYYXXXXXXXXXEQLSNDMVVESXGXR

SEQ ID NO: 12507 - protein, 41 aa, Artificial Sequence
  Non-cyclic GFR-binding peptide
  MOD_RES (6), (7), (41): Xaa is C or S
  MOD_RES (21), (22), (23), (24), (25): Xaa is A or G
  MOD_RES (26), (27), (28), (29): Xaa is A or G or is absent
SIPKAXXVPTELEPLPMVYYXXXXXXXXXEQLSNEMVVEGX

SEQ ID NO: 12508 - protein, 33 aa, Artificial Sequence
  Non-cyclic GFR-binding peptide
  MOD_RES (2), (3): Xaa is C or S
AXXVPTELSPISMLFIDENEKVVYKQYEDMVVE

SEQ ID NO: 12509 - protein, 39 aa, Artificial Sequence
  Non-cyclic GFR-binding peptide
  MOD_RES (3), (4), (36), (38): Xaa is C or S
KPXXAPTQLEPLTVLYYDDSSNVIEQLSNNMVVRAXGXH

SEQ ID NO: 12510 - protein, 34 aa, Artificial Sequence
  Non-cyclic GFR-binding peptide
  MOD_RES (3), (4): Xaa is C or S
PTXXVPTRLEPLTILYYDSANNVVEQLSNDMVVE

SEQ ID NO: 12511 - protein, 36 aa, Artificial Sequence
  Non-cyclic GFR-binding peptide
  MOD_RES (3), (4), (36): Xaa is C or S
KPXXAPTQLEPLPVVYYDDSSNVIEQLSNNMVVRAX

SEQ ID NO: 12512 - protein, 35 aa, Artificial Sequence
  Non-cyclic GFR-binding peptide
  MOD_RES (32), (34): Xaa is C or S
VPTELSPISMLFIDEYDKVVYKQYEEMVVEGXGXR

SEQ ID NO: 12513 - protein, 32 aa, Artificial Sequence
  Non-cyclic GFR-binding peptide
  MOD_RES (1), (2): Xaa is C or S
XXVPQDLSPISILFIVGRTPKVYKQYEMVVKS

SEQ ID NO: 12514 - protein, 34 aa, Artificial Sequence
  Non-cyclic GFR-binding peptide
  MOD_RES (1), (2), (34): Xaa is C or S
XXVPTELSPISMLFIDENEKVVYKQYEDMVVEGX

SEQ ID NO: 12515 - protein, 31 aa, Artificial Sequence
  Non-cyclic GFR-binding peptide
  MOD_RES (1), (1): Xaa is C or S
XVPQDLEPLPIVYYVGRTPKVEQLSNMVVKS

SEQ ID NO: 12516 - protein, 34 aa, Artificial Sequence
  Non-cyclic GFR-binding peptide
  MOD_RES (4), (4): Xaa is C or S
KPTXAPTKLSPISVLFIDDSSNVIYKQYENMVVR

SEQ ID NO: 12517 - protein, 35 aa, Artificial Sequence
  Non-cyclic GFR-binding peptide
  MOD_RES (2), (3), (35): Xaa is C or S
PXXAPTQLEPLTVLYYDDSSNVIEQLSNNMVVRAX

SEQ ID NO: 12518 - protein, 38 aa, Artificial Sequence
  Non-cyclic GFR-binding peptide
  MOD_RES (2), (3), (37): Xaa is C or S
  MOD_RES (17), (18), (19), (20), (21): Xaa is A or G
  MOD_RES (22), (23), (24), (25): Xaa is A or G or is absent
TXXVPTRLEPLPIVYYXXXXXXXXXEQLSNDMVVESXG

SEQ ID NO: 12519 - protein, 39 aa, Artificial Sequence
  Non-cyclic GFR-binding peptide
  MOD_RES (4), (5), (37), (39): Xaa is C or S
PKAXXVPTELEPLPMVYYDENEKVVEQLSNDMVVEGXGX

SEQ ID NO: 12520 - protein, 37 aa, Artificial Sequence
  Non-cyclic GFR-binding peptide
  MOD_RES (4), (5): Xaa is C or S
  MOD_RES (19), (20), (21), (22), (23): Xaa is A or G
  MOD_RES (24), (25), (26), (27): Xaa is A or G or is absent
ASPXXVSQDLSPISILFIXXXXXXXXXYKQYEMIVKS

SEQ ID NO: 12521 - protein, 40 aa, Artificial Sequence
  Non-cyclic GFR-binding peptide
  MOD_RES (2), (3), (37), (39): Xaa is C or S
  MOD_RES (17), (18), (19), (20), (21): Xaa is A or G
  MOD_RES (22), (23), (24), (25): Xaa is A or G or is absent
AXXVPTELSPISMLFIXXXXXXXXXYKQYEEMVVEGXGXR

SEQ ID NO: 12522 - protein, 40 aa, Artificial Sequence
  Non-cyclic GFR-binding peptide
  MOD_RES (6), (7): Xaa is C or S
  MOD_RES (21), (22), (23), (24), (25): Xaa is A or G
  MOD_RES (26), (27), (28), (29): Xaa is A or G or is absent
TVPKPXXAPTQLEPLPVVYYXXXXXXXXXEQLSNNMVVRA

SEQ ID NO: 12523 - protein, 38 aa, Artificial Sequence
  Non-cyclic GFR-binding peptide
  MOD_RES (2), (36), (38): Xaa is C or S
  MOD_RES (16), (17), (18), (19), (20): Xaa is A or G
  MOD_RES (21), (22), (23), (24): Xaa is A or G or is absent
TXAPTKLEPLPVVYYXXXXXXXXXEQLSNNMVVRSXGX

SEQ ID NO: 12524 - protein, 37 aa, Artificial Sequence
  Non-cyclic GFR-binding peptide
  MOD_RES (1), (2), (34), (36): Xaa is C or S
XXVPTRLEPLTILYYDSANNVVEQLSNDMVVESXGXR

SEQ ID NO: 12525 - protein, 37 aa, Artificial Sequence
  Non-cyclic GFR-binding peptide
  MOD_RES (3), (4), (36): Xaa is C or S
PTXXVPTRLNAISILYFDSANNVVLKKYRDMVVESXG

SEQ ID NO: 12526 - protein, 36 aa, Artificial Sequence
  Non-cyclic GFR-binding peptide
  MOD_RES (4), (5), (36): Xaa is C or S
AAPXXVPQALEPLTILYYVGRKPKVEQLSNMIVRSX

SEQ ID NO: 12527 - protein, 36 aa, Artificial Sequence
  Non-cyclic GFR-binding peptide
  MOD_RES (1), (2), (35): Xaa is C or S
  MOD_RES (16), (17), (18), (19), (20): Xaa is A or G
  MOD_RES (21), (22), (23), (24): Xaa is A or G or is absent
XXVSQDLSPISILFIXXXXXXXXXYKQYEMIVKSXK

SEQ ID NO: 12528 - protein, 34 aa, Artificial Sequence
  Non-cyclic GFR-binding peptide
  MOD_RES (33), (33): Xaa is C or S
  MOD_RES (14), (15), (16), (17), (18): Xaa is A or G
  MOD_RES (19), (20), (21), (22): Xaa is A or G or is absent
VPQDLSPISILFIXXXXXXXXXYKQYEMVVKSXK

SEQ ID NO: 12529 - protein, 36 aa, Artificial Sequence
  Non-cyclic GFR-binding peptide
  MOD_RES (4), (5): Xaa is C or S
PKAXXVPTELEPLPMVYYDEYDKVVEQLSNEMVVEG

SEQ ID NO: 12530 - protein, 34 aa, Artificial Sequence
  Non-cyclic GFR-binding peptide
  MOD_RES (3), (4): Xaa is C or S
KAXXVPTELEPLPMVYYDEYDKVVEQLSNEMVVE

SEQ ID NO: 12531 - protein, 35 aa, Artificial Sequence
  Non-cyclic GFR-binding peptide
  MOD_RES (1), (34): Xaa is C or S
  MOD_RES (15), (16), (17), (18), (19): Xaa is A or G
  MOD_RES (20), (21), (22), (23): Xaa is A or G or is absent
XVSQDLSPISILFIXXXXXXXXXYKQYEMIVKSXK

SEQ ID NO: 12532 - protein, 34 aa, Artificial Sequence
  Non-cyclic GFR-binding peptide
  MOD_RES (3), (4): Xaa is C or S
PTXXVPTRLNAISILYFDSANNVVLKKYRDMVVE

SEQ ID NO: 12533 - protein, 39 aa, Artificial Sequence
  Non-cyclic GFR-binding peptide
  MOD_RES (1), (2), (36), (38): Xaa is C or S
  MOD_RES (16), (17), (18), (19), (20): Xaa is A or G
  MOD_RES (21), (22), (23), (24): Xaa is A or G or is absent
XXVPTRLEPLTILYYXXXXXXXXXEQLSNDMVVESXGXR

SEQ ID NO: 12534 - protein, 33 aa, Artificial Sequence
  Non-cyclic GFR-binding peptide
  MOD_RES (1), (33): Xaa is C or S
XVPTELEPLPMVYYDEYDKVVEQLSNEMVVEGX

SEQ ID NO: 12535 - protein, 36 aa, Artificial Sequence
  Non-cyclic GFR-binding peptide
  MOD_RES (3), (4), (36): Xaa is C or S
KAXXVPTELEPLPMVYYDEYDKVVEQLSNEMVVEGX

SEQ ID NO: 12536 - protein, 34 aa, Artificial Sequence
  Non-cyclic GFR-binding peptide
  MOD_RES (3), (4): Xaa is C or S
KPXXAPTKLEPLPVVYYDDSSNVIEQLSNNMVVR

SEQ ID NO: 12537 - protein, 36 aa, Artificial Sequence
  Non-cyclic GFR-binding peptide
  MOD_RES (5), (6): Xaa is C or S
VPKPXXAPTKLEPLPVVYYDDSSNVIEQLSNNMVVR

SEQ ID NO: 12538 - protein, 39 aa, Artificial Sequence
  Non-cyclic GFR-binding peptide
  MOD_RES (1), (2), (36), (38): Xaa is C or S
  MOD_RES (16), (17), (18), (19), (20): Xaa is A or G
  MOD_RES (21), (22), (23), (24): Xaa is A or G or is absent
XXVPTELSPISMLFIXXXXXXXXXYKQYEDMVVEGXGXR

SEQ ID NO: 12539 - protein, 36 aa, Artificial Sequence
  Non-cyclic GFR-binding peptide
  MOD_RES (2), (3), (35): Xaa is C or S
AXXVPTELEPLTMLYYDENEKVVEQLSNDMVVEGXG

SEQ ID NO: 12540 - protein, 40 aa, Artificial Sequence
  Non-cyclic GFR-binding peptide
  MOD_RES (5), (6), (40): Xaa is C or S
  MOD_RES (20), (21), (22), (23), (24): Xaa is A or G
  MOD_RES (25), (26), (27), (28): Xaa is A or G or is absent
VPKPXXAPTKLEPLPVVYYXXXXXXXXXEQLSNNMVVRSX

SEQ ID NO: 12541 - protein, 40 aa, Artificial Sequence
  Non-cyclic GFR-binding peptide
  MOD_RES (4), (5), (39): Xaa is C or S
  MOD_RES (19), (20), (21), (22), (23): Xaa is A or G
  MOD_RES (24), (25), (26), (27): Xaa is A or G or is absent
PKAXXVPTELEPLPMVYYXXXXXXXXXEQLSNEMVVEGXG

SEQ ID NO: 12542 - protein, 38 aa, Artificial Sequence
  Non-cyclic GFR-binding peptide
  MOD_RES (2), (3), (36), (38): Xaa is C or S
  MOD_RES (17), (18), (19), (20), (21): Xaa is A or G
  MOD_RES (22), (23), (24), (25): Xaa is A or G or is absent
PXXVSQDLEPLPIVYYXXXXXXXXXEQLSNMIVKSXKX

SEQ ID NO: 12543 - protein, 39 aa, Artificial Sequence
  Non-cyclic GFR-binding peptide
  MOD_RES (6), (7), (39): Xaa is C or S
STPPTXXVPTRLEPLPIVYYDSANNVVEQLSNDMVVESX

SEQ ID NO: 12544 - protein, 35 aa, Artificial Sequence
  Non-cyclic GFR-binding peptide
  MOD_RES (1), (2): Xaa is C or S
  MOD_RES (16), (17), (18), (19), (20): Xaa is A or G
  MOD_RES (21), (22), (23), (24): Xaa is A or G or is absent
XXVPTRLEPLTILYYXXXXXXXXXEQLSNDMVVES

SEQ ID NO: 12545 - protein, 41 aa, Artificial Sequence
  Non-cyclic GFR-binding peptide
  MOD_RES (6), (7), (38), (40): Xaa is C or S
ASASPXXVPQDLEPLPIVYYVGRTPKVEQLSNMVVKSXKXS

SEQ ID NO: 12546 - protein, 39 aa, Artificial Sequence
  Non-cyclic GFR-binding peptide
  MOD_RES (4), (5), (36), (38): Xaa is C or S
ASPXXVPQDLEPLPIVYYVGRTPKVEQLSNMVVKSXKXS

SEQ ID NO: 12547 - protein, 39 aa, Artificial Sequence
  Non-cyclic GFR-binding peptide
  MOD_RES (6), (7), (39): Xaa is C or S
YVPKPXXAPTKLSPISVLFIDDSSNVIYKQYENMVVRSX

SEQ ID NO: 12548 - protein, 44 aa, Artificial Sequence
  Non-cyclic GFR-binding peptide
  MOD_RES (6), (7), (41), (43): Xaa is C or S
  MOD_RES (21), (22), (23), (24), (25): Xaa is A or G
  MOD_RES (26), (27), (28), (29): Xaa is A or G or is absent
STPPTXXVPTRLEPLTILYYXXXXXXXXXEQLSNDMVVESXGXR

SEQ ID NO: 12549 - protein, 37 aa, Artificial Sequence
  Non-cyclic GFR-binding peptide
  MOD_RES (3), (4), (36): Xaa is C or S
KPXXAPTKLEPLPVVYYDDSSNVIEQLSNNMVVRSXG

SEQ ID NO: 12550 - protein, 37 aa, Artificial Sequence
  Non-cyclic GFR-binding peptide
  MOD_RES (6), (7): Xaa is C or S
ASASPXXVSQDLEPLPIVYYIGKTPKIEQLSNMIVKS

SEQ ID NO: 12551 - protein, 38 aa, Artificial Sequence
  Non-cyclic GFR-binding peptide
  MOD_RES (4), (5): Xaa is C or S
  MOD_RES (19), (20), (21), (22), (23): Xaa is A or G
  MOD_RES (24), (25), (26), (27): Xaa is A or G or is absent
PKAXXVPTELSPISMLFIXXXXXXXXXYKQYEEMVVEG

SEQ ID NO: 12552 - protein, 32 aa, Artificial Sequence
  Non-cyclic GFR-binding peptide
  MOD_RES (1), (1): Xaa is C or S
XVPTRLEPLTILYYDSANNVVEQLSNDMVVES

SEQ ID NO: 12553 - protein, 39 aa, Artificial Sequence
  Non-cyclic GFR-binding peptide
  MOD_RES (4), (5), (37), (39): Xaa is C or S
PKAXXVPTELEPLTMLYYDEYDKVVEQLSNEMVVEGXGX

SEQ ID NO: 12554 - protein, 41 aa, Artificial Sequence
  Non-cyclic GFR-binding peptide
  MOD_RES (5), (6), (40): Xaa is C or S
  MOD_RES (20), (21), (22), (23), (24): Xaa is A or G
  MOD_RES (25), (26), (27), (28): Xaa is A or G or is absent
VPKPXXAPTKLSPISVLFIXXXXXXXXXYKQYENMVVRSXG

SEQ ID NO: 12555 - protein, 42 aa, Artificial Sequence
  Non-cyclic GFR-binding peptide
  MOD_RES (6), (7), (39), (41): Xaa is C or S
STPPTXXVPTRLSAISILYLDSANNVVLKNYQDMVVESXGXR

SEQ ID NO: 12556 - protein, 35 aa, Artificial Sequence
  Non-cyclic GFR-binding peptide
  MOD_RES (1), (35): Xaa is C or S
  MOD_RES (15), (16), (17), (18), (19): Xaa is A or G
  MOD_RES (20), (21), (22), (23): Xaa is A or G or is absent
XVPTRLSAISILYLXXXXXXXXXLKNYQDMVVESX

SEQ ID NO: 12557 - protein, 32 aa, Artificial Sequence
  Non-cyclic GFR-binding peptide
  MOD_RES (32), (32): Xaa is C or S
VPTELSPISMLFIDEYDKVVYKQYEEMVVEGX

SEQ ID NO: 12558 - protein, 38 aa, Artificial Sequence
  Non-cyclic GFR-binding peptide
  MOD_RES (2), (3), (35), (37): Xaa is C or S
TXXVPTRLSAISILYLDSANNVVLKNYQDMVVESXGXR

SEQ ID NO: 12559 - protein, 39 aa, Artificial Sequence
  Non-cyclic GFR-binding peptide
  MOD_RES (1), (2), (36), (38): Xaa is C or S
  MOD_RES (16), (17), (18), (19), (20): Xaa is A or G
  MOD_RES (21), (22), (23), (24): Xaa is A or G or is absent
XXAPTQLEPLPVVYYXXXXXXXXXEQLSNNMVVRAXGXH

SEQ ID NO: 12560 - protein, 41 aa, Artificial Sequence
  Non-cyclic GFR-binding peptide
  MOD_RES (4), (5), (39), (41): Xaa is C or S
  MOD_RES (19), (20), (21), (22), (23): Xaa is A or G
  MOD_RES (24), (25), (26), (27): Xaa is A or G or is absent
PPTXXVPTRLEPLTILYYXXXXXXXXXEQLSNDMVVESXGX

SEQ ID NO: 12561 - protein, 43 aa, Artificial Sequence
  Non-cyclic GFR-binding peptide
  MOD_RES (6), (7), (41), (43): Xaa is C or S
  MOD_RES (21), (22), (23), (24), (25): Xaa is A or G
  MOD_RES (26), (27), (28), (29): Xaa is A or G or is absent
TVPKPXXAPTQLEPLPVVYYXXXXXXXXXEQLSNNMVVRAXGX

SEQ ID NO: 12562 - protein, 34 aa, Artificial Sequence
  Non-cyclic GFR-binding peptide
  MOD_RES (1), (2): Xaa is C or S
  MOD_RES (16), (17), (18), (19), (20): Xaa is A or G
  MOD_RES (21), (22), (23), (24): Xaa is A or G or is absent
XXVPQDLEPLPIVYYXXXXXXXXXEQLSNMVVKS

SEQ ID NO: 12563 - protein, 35 aa, Artificial Sequence
  Non-cyclic GFR-binding peptide
  MOD_RES (1), (2), (34): Xaa is C or S
XXAPTKLEPLPVVYYDDSSNVIEQLSNNMVVRSXG

SEQ ID NO: 12564 - protein, 33 aa, Artificial Sequence
  Non-cyclic GFR-binding peptide
  MOD_RES (1), (1): Xaa is C or S
  MOD_RES (15), (16), (17), (18), (19): Xaa is A or G
  MOD_RES (20), (21), (22), (23): Xaa is A or G or is absent
XVPTRLSAISILYLXXXXXXXXXLKNYQDMVVE

SEQ ID NO: 12565 - protein, 33 aa, Artificial Sequence
  Non-cyclic GFR-binding peptide
  MOD_RES (2), (2): Xaa is C or S
TXAPTKLEPLPVVYYDDSSNVIEQLSNNMVVRS

SEQ ID NO: 12566 - protein, 39 aa, Artificial Sequence
  Non-cyclic GFR-binding peptide
  MOD_RES (6), (7), (38): Xaa is C or S
ASAAPXXVPQALEPLTILYYVGRKPKVEQLSNMIVRSXK

SEQ ID NO: 12567 - protein, 34 aa, Artificial Sequence
  Non-cyclic GFR-binding peptide
  MOD_RES (31), (33): Xaa is C or S
VPQALSPISILFIVGRKPKVYKQYEMIVRSXKXS

SEQ ID NO: 12568 - protein, 39 aa, Artificial Sequence
  Non-cyclic GFR-binding peptide
  MOD_RES (3), (4), (36), (38): Xaa is C or S
PTXXVPTRLSAISILYLDSANNVVLKNYQDMVVESXGXR

SEQ ID NO: 12569 - protein, 39 aa, Artificial Sequence
  Non-cyclic GFR-binding peptide
  MOD_RES (2), (3), (37), (39): Xaa is C or S
  MOD_RES (17), (18), (19), (20), (21): Xaa is A or G
  MOD_RES (22), (23), (24), (25): Xaa is A or G or is absent
PXXAPTQLEPLPVVYYXXXXXXXXXEQLSNNMVVRAXGX

SEQ ID NO: 12570 - protein, 36 aa, Artificial Sequence
  Non-cyclic GFR-binding peptide
  MOD_RES (2), (3), (34), (36): Xaa is C or S
PXXVPQALEPLTILYYVGRKPKVEQLSNMIVRSXKX

SEQ ID NO: 12571 - protein, 34 aa, Artificial Sequence
  Non-cyclic GFR-binding peptide
  MOD_RES (33), (33): Xaa is C or S
  MOD_RES (14), (15), (16), (17), (18): Xaa is A or G
  MOD_RES (19), (20), (21), (22): Xaa is A or G or is absent
VSQDLEPLPIVYYXXXXXXXXXEQLSNMIVKSXK

SEQ ID NO: 12572 - protein, 38 aa, Artificial Sequence
  Non-cyclic GFR-binding peptide
  MOD_RES (5), (6), (38): Xaa is C or S
VPKPXXAPTQLEPLPVVYYDDSSNVIEQLSNNMVVRAX

SEQ ID NO: 12573 - protein, 38 aa, Artificial Sequence
  Non-cyclic GFR-binding peptide
  MOD_RES (1), (2), (35), (37): Xaa is C or S
  MOD_RES (16), (17), (18), (19), (20): Xaa is A or G
  MOD_RES (21), (22), (23), (24): Xaa is A or G or is absent
XXVPQALEPLTILYYXXXXXXXXXEQLSNMIVRSXKXS

SEQ ID NO: 12574 - protein, 37 aa, Artificial Sequence
  Non-cyclic GFR-binding peptide
  MOD_RES (4), (5), (37): Xaa is C or S
PPTXXVPTRLEPLTILYYDSANNVVEQLSNDMVVESX

SEQ ID NO: 12575 - protein, 35 aa, Artificial Sequence
  Non-cyclic GFR-binding peptide
  MOD_RES (3), (4), (35): Xaa is C or S
APXXVPQALEPLTILYYVGRKPKVEQLSNMIVRSX

SEQ ID NO: 12576 - protein, 35 aa, Artificial Sequence
  Non-cyclic GFR-binding peptide
  MOD_RES (4), (5): Xaa is C or S
PKAXXVPTELSPISMLFIDENEKVVYKQYEDMVVE

SEQ ID NO: 12577 - protein, 32 aa, Artificial Sequence
  Non-cyclic GFR-binding peptide
  MOD_RES (1), (32): Xaa is C or S
XVPQDLEPLPIVYYVGRTPKVEQLSNMVVKSX

SEQ ID NO: 12578 - protein, 36 aa, Artificial Sequence
  Non-cyclic GFR-binding peptide
  MOD_RES (2), (3), (34), (36): Xaa is C or S
PXXVSQDLEPLPIVYYIGKTPKIEQLSNMIVKSXKX

SEQ ID NO: 12579 - protein, 31 aa, Artificial Sequence
  Non-cyclic GFR-binding peptide
  MOD_RES (31), (31): Xaa is C or S
VSQDLEPLPIVYYIGKTPKIEQLSNMIVKSX

SEQ ID NO: 12580 - protein, 37 aa, Artificial Sequence
  Non-cyclic GFR-binding peptide
  MOD_RES (2), (3), (35), (37): Xaa is C or S
PXXAPTQLSPISVLFIDDSSNVIYKQYENMVVRAXGX

SEQ ID NO: 12581 - protein, 40 aa, Artificial Sequence
  Non-cyclic GFR-binding peptide
  MOD_RES (4), (5), (37), (39): Xaa is C or S
PKPXXAPTQLEPLPVVYYDDSSNVIEQLSNNMVVRAXGXH

SEQ ID NO: 12582 - protein, 41 aa, Artificial Sequence
  Non-cyclic GFR-binding peptide
  MOD_RES (5), (6), (38), (40): Xaa is C or S
VPKPXXAPTQLEPLTVLYYDDSSNVIEQLSNNMVVRAXGXH

SEQ ID NO: 12583 - protein, 41 aa, Artificial Sequence
  Non-cyclic GFR-binding peptide
  MOD_RES (3), (4), (38), (40): Xaa is C or S
  MOD_RES (18), (19), (20), (21), (22): Xaa is A or G
  MOD_RES (23), (24), (25), (26): Xaa is A or G or is absent
KPXXAPTQLSPISVLFIXXXXXXXXXYKQYENMVVRAXGXH

SEQ ID NO: 12584 - protein, 41 aa, Artificial Sequence
  Non-cyclic GFR-binding peptide
  MOD_RES (5), (6), (39), (41): Xaa is C or S
  MOD_RES (20), (21), (22), (23), (24): Xaa is A or G
  MOD_RES (25), (26), (27), (28): Xaa is A or G or is absent
SASPXXVPQDLSPISILFIXXXXXXXXXYKQYEMVVKSXKX

SEQ ID NO: 12585 - protein, 35 aa, Artificial Sequence
  Non-cyclic GFR-binding peptide
  MOD_RES (3), (4): Xaa is C or S
KPXXAPTKLSPISVLFIDDSSNVIYKQYENMVVRS

SEQ ID NO: 12586 - protein, 37 aa, Artificial Sequence
  Non-cyclic GFR-binding peptide
  MOD_RES (1), (2), (36): Xaa is C or S
  MOD_RES (16), (17), (18), (19), (20): Xaa is A or G
  MOD_RES (21), (22), (23), (24): Xaa is A or G or is absent
XXVPTELEPLTMLYYXXXXXXXXXEQLSNDMVVEGXG

SEQ ID NO: 12587 - protein, 40 aa, Artificial Sequence
  Non-cyclic GFR-binding peptide
  MOD_RES (4), (5), (37), (39): Xaa is C or S
PKPXXAPTKLEPLPVVYYDDSSNVIEQLSNNMVVRSXGXH

SEQ ID NO: 12588 - protein, 38 aa, Artificial Sequence
  Non-cyclic GFR-binding peptide
  MOD_RES (2), (3), (35), (37): Xaa is C or S
AXXVPTELSPISMLFIDENEKVVYKQYEDMVVEGXGXR

SEQ ID NO: 12589 - protein, 40 aa, Artificial Sequence
  Non-cyclic GFR-binding peptide
  MOD_RES (6), (7), (40): Xaa is C or S
  MOD_RES (21), (22), (23), (24), (25): Xaa is A or G
  MOD_RES (26), (27), (28), (29): Xaa is A or G or is absent
ASASPXXVPQDLEPLPIVYYXXXXXXXXXEQLSNMVVKSX

SEQ ID NO: 12590 - protein, 39 aa, Artificial Sequence
  Non-cyclic GFR-binding peptide
  MOD_RES (6), (7): Xaa is C or S
  MOD_RES (21), (22), (23), (24), (25): Xaa is A or G
  MOD_RES (26), (27), (28), (29): Xaa is A or G or is absent
TVPKPXXAPTQLSPISVLFIXXXXXXXXXYKQYENMVVR

SEQ ID NO: 12591 - protein, 37 aa, Artificial Sequence
  Non-cyclic GFR-binding peptide
  MOD_RES (2), (3), (37): Xaa is C or S
  MOD_RES (17), (18), (19), (20), (21): Xaa is A or G
  MOD_RES (22), (23), (24), (25): Xaa is A or G or is absent
AXXVPTELEPLTMLYYXXXXXXXXXEQLSNEMVVEGX

SEQ ID NO: 12592 - protein, 36 aa, Artificial Sequence
  Non-cyclic GFR-binding peptide
  MOD_RES (3), (4), (36): Xaa is C or S
KAXXVPTELSPISMLFIDEYDKVVYKQYEEMVVEGX

SEQ ID NO: 12593 - protein, 37 aa, Artificial Sequence
  Non-cyclic GFR-binding peptide
  MOD_RES (4), (4): Xaa is C or S
  MOD_RES (18), (19), (20), (21), (22): Xaa is A or G
  MOD_RES (23), (24), (25), (26): Xaa is A or G or is absent
KPTXAPTKLEPLPVVYYXXXXXXXXXEQLSNNMVVRS

SEQ ID NO: 12594 - protein, 40 aa, Artificial Sequence
  Non-cyclic GFR-binding peptide
  MOD_RES (4), (5), (37), (39): Xaa is C or S
PKAXXVPTELSPISMLFIDEYDKVVYKQYEEMVVEGXGXR

SEQ ID NO: 12595 - protein, 35 aa, Artificial Sequence
  Non-cyclic GFR-binding peptide
  MOD_RES (1), (2), (34): Xaa is C or S
XXAPTQLEPLPVVYYDDSSNVIEQLSNNMVVRAXG

SEQ ID NO: 12596 - protein, 39 aa, Artificial Sequence
  Non-cyclic GFR-binding peptide
  MOD_RES (4), (5), (37), (39): Xaa is C or S
PKAXXVPTELSPISMLFIDENEKVVYKQYEDMVVEGXGX

SEQ ID NO: 12597 - protein, 35 aa, Artificial Sequence
  Non-cyclic GFR-binding peptide
  MOD_RES (2), (3): Xaa is C or S
  MOD_RES (17), (18), (19), (20), (21): Xaa is A or G
  MOD_RES (22), (23), (24), (25): Xaa is A or G or is absent
TXXVPTRLSAISILYLXXXXXXXXXLKNYQDMVVE

SEQ ID NO: 12598 - protein, 37 aa, Artificial Sequence
  Non-cyclic GFR-binding peptide
  MOD_RES (5), (6): Xaa is C or S
TPPTXXVPTRLEPLPIVYYDSANNVVEQLSNDMVVES

SEQ ID NO: 12599 - protein, 35 aa, Artificial Sequence
  Non-cyclic GFR-binding peptide
  MOD_RES (1), (2): Xaa is C or S
  MOD_RES (16), (17), (18), (19), (20): Xaa is A or G
  MOD_RES (21), (22), (23), (24): Xaa is A or G or is absent
XXVPTELSPISMLFIXXXXXXXXXYKQYEEMVVEG

SEQ ID NO: 12600 - protein, 41 aa, Artificial Sequence
  Non-cyclic GFR-binding peptide
  MOD_RES (5), (6), (40): Xaa is C or S
  MOD_RES (20), (21), (22), (23), (24): Xaa is A or G
  MOD_RES (25), (26), (27), (28): Xaa is A or G or is absent
TPPTXXVPTRLEPLPIVYYXXXXXXXXXEQLSNDMVVESXG

SEQ ID NO: 12601 - protein, 37 aa, Artificial Sequence
  Non-cyclic GFR-binding peptide
  MOD_RES (1), (2), (36): Xaa is C or S
  MOD_RES (16), (17), (18), (19), (20): Xaa is A or G
  MOD_RES (21), (22), (23), (24): Xaa is A or G or is absent
XXAPTKLSPISVLFIXXXXXXXXXYKQYENMVVRSXG

SEQ ID NO: 12602 - protein, 34 aa, Artificial Sequence
  Non-cyclic GFR-binding peptide
  MOD_RES (1), (1): Xaa is C or S
  MOD_RES (15), (16), (17), (18), (19): Xaa is A or G
  MOD_RES (20), (21), (22), (23): Xaa is A or G or is absent
XAPTKLEPLTVLYYXXXXXXXXXEQLSNNMVVRS

SEQ ID NO: 12603 - protein, 32 aa, Artificial Sequence
  Non-cyclic GFR-binding peptide
  MOD_RES (1), (2): Xaa is C or S
XXVPTELEPLPMVYYDEYDKVVEQLSNEMVVE

SEQ ID NO: 12604 - protein, 32 aa, Artificial Sequence
  Non-cyclic GFR-binding peptide
  MOD_RES (31), (31): Xaa is C or S
VPQALEPLTILYYVGRKPKVEQLSNMIVRSXK

SEQ ID NO: 12605 - protein, 36 aa, Artificial Sequence
  Non-cyclic GFR-binding peptide
  MOD_RES (2), (3), (34), (36): Xaa is C or S
PXXVPQDLSPISILFIVGRTPKVYKQYEMVVKSXKX

SEQ ID NO: 12606 - protein, 37 aa, Artificial Sequence
  Non-cyclic GFR-binding peptide
  MOD_RES (3), (4): Xaa is C or S
  MOD_RES (18), (19), (20), (21), (22): Xaa is A or G
  MOD_RES (23), (24), (25), (26): Xaa is A or G or is absent
PTXXVPTRLSAISILYLXXXXXXXXXLKNYQDMVVES

SEQ ID NO: 12607 - protein, 39 aa, Artificial Sequence
  Non-cyclic GFR-binding peptide
  MOD_RES (6), (7), (39): Xaa is C or S
TVPKPXXAPTQLEPLPVVYYDDSSNVIEQLSNNMVVRAX

SEQ ID NO: 12608 - protein, 36 aa, Artificial Sequence
  Non-cyclic GFR-binding peptide
  MOD_RES (1), (35): Xaa is C or S
  MOD_RES (15), (16), (17), (18), (19): Xaa is A or G
  MOD_RES (20), (21), (22), (23): Xaa is A or G or is absent
XVPTRLEPLTILYYXXXXXXXXXEQLSNDMVVESXG

SEQ ID NO: 12609 - protein, 40 aa, Artificial Sequence
  Non-cyclic GFR-binding peptide
  MOD_RES (5), (6), (37), (39): Xaa is C or S
SASPXXVSQDLSPISILFIIGKTPKIYKQYEMIVKSXKXS

SEQ ID NO: 12610 - protein, 39 aa, Artificial Sequence
  Non-cyclic GFR-binding peptide
  MOD_RES (4), (5), (36), (38): Xaa is C or S
ASPXXVPQDLSPISILFIVGRTPKVYKQYEMVVKSXKXS

SEQ ID NO: 12611 - protein, 36 aa, Artificial Sequence
  Non-cyclic GFR-binding peptide
  MOD_RES (3), (4): Xaa is C or S
  MOD_RES (18), (19), (20), (21), (22): Xaa is A or G
  MOD_RES (23), (24), (25), (26): Xaa is A or G or is absent
SPXXVSQDLSPISILFIXXXXXXXXXYKQYEMIVKS

SEQ ID NO: 12612 - protein, 38 aa, Artificial Sequence
  Non-cyclic GFR-binding peptide
  MOD_RES (1), (35), (37): Xaa is C or S
  MOD_RES (15), (16), (17), (18), (19): Xaa is A or G
  MOD_RES (20), (21), (22), (23): Xaa is A or G or is absent
XAPTKLSPISVLFIXXXXXXXXXYKQYENMVVRSXGXH

SEQ ID NO: 12613 - protein, 35 aa, Artificial Sequence
  Non-cyclic GFR-binding peptide
  MOD_RES (33), (35): Xaa is C or S
  MOD_RES (14), (15), (16), (17), (18): Xaa is A or G
  MOD_RES (19), (20), (21), (22): Xaa is A or G or is absent
VSQDLSPISILFIXXXXXXXXXYKQYEMIVKSXKX

SEQ ID NO: 12614 - protein, 38 aa, Artificial Sequence
  Non-cyclic GFR-binding peptide
  MOD_RES (3), (4), (38): Xaa is C or S
  MOD_RES (18), (19), (20), (21), (22): Xaa is A or G
  MOD_RES (23), (24), (25), (26): Xaa is A or G or is absent
KAXXVPTELEPLPMVYYXXXXXXXXXEQLSNEMVVEGX

SEQ ID NO: 12615 - protein, 44 aa, Artificial Sequence
  Non-cyclic GFR-binding peptide
  MOD_RES (6), (7), (41), (43): Xaa is C or S
  MOD_RES (21), (22), (23), (24), (25): Xaa is A or G
  MOD_RES (26), (27), (28), (29): Xaa is A or G or is absent
TVPKPXXAPTQLEPLPVVYYXXXXXXXXXEQLSNNMVVRAXGXH

SEQ ID NO: 12616 - protein, 36 aa, Artificial Sequence
  Non-cyclic GFR-binding peptide
  MOD_RES (1), (2), (36): Xaa is C or S
  MOD_RES (16), (17), (18), (19), (20): Xaa is A or G
  MOD_RES (21), (22), (23), (24): Xaa is A or G or is absent
XXAPTKLEPLTVLYYXXXXXXXXXEQLSNNMVVRSX

SEQ ID NO: 12617 - protein, 37 aa, Artificial Sequence
  Non-cyclic GFR-binding peptide
  MOD_RES (6), (7): Xaa is C or S
STPPTXXVPTRLEPLTILYYDSANNVVEQLSNDMVVE

SEQ ID NO: 12618 - protein, 37 aa, Artificial Sequence
  Non-cyclic GFR-binding peptide
  MOD_RES (1), (2), (36): Xaa is C or S
  MOD_RES (16), (17), (18), (19), (20): Xaa is A or G
  MOD_RES (21), (22), (23), (24): Xaa is A or G or is absent
XXAPTQLEPLTVLYYXXXXXXXXXEQLSNNMVVRAXG

SEQ ID NO: 12619 - protein, 35 aa, Artificial Sequence
  Non-cyclic GFR-binding peptide
  MOD_RES (2), (3): Xaa is C or S
  MOD_RES (17), (18), (19), (20), (21): Xaa is A or G
  MOD_RES (22), (23), (24), (25): Xaa is A or G or is absent
AXXVPTELEPLTMLYYXXXXXXXXXEQLSNEMVVE

SEQ ID NO: 12620 - protein, 38 aa, Artificial Sequence
  Non-cyclic GFR-binding peptide
  MOD_RES (2), (3), (35), (37): Xaa is C or S
TXXVPTRLEPLTILYYDSANNVVEQLSNDMVVESXGXR

SEQ ID NO: 12621 - protein, 38 aa, Artificial Sequence
  Non-cyclic GFR-binding peptide
  MOD_RES (1), (2), (36), (38): Xaa is C or S
  MOD_RES (16), (17), (18), (19), (20): Xaa is A or G
  MOD_RES (21), (22), (23), (24): Xaa is A or G or is absent
XXVPTELSPISMLFIXXXXXXXXXYKQYEEMVVEGXGX

SEQ ID NO: 12622 - protein, 35 aa, Artificial Sequence
  Non-cyclic GFR-binding peptide
  MOD_RES (2), (3), (35): Xaa is C or S
TXXVPTRLEPLTILYYDSANNVVEQLSNDMVVESX

SEQ ID NO: 12623 - protein, 34 aa, Artificial Sequence
  Non-cyclic GFR-binding peptide
  MOD_RES (1), (33): Xaa is C or S
XVPTRLSAISILYLDSANNVVLKNYQDMVVESXG

SEQ ID NO: 12624 - protein, 41 aa, Artificial Sequence
  Non-cyclic GFR-binding peptide
  MOD_RES (6), (7), (41): Xaa is C or S
  MOD_RES (21), (22), (23), (24), (25): Xaa is A or G
  MOD_RES (26), (27), (28), (29): Xaa is A or G or is absent
STPPTXXVPTRLEPLTILYYXXXXXXXXXEQLSNDMVVESX

SEQ ID NO: 12625 - protein, 34 aa, Artificial Sequence
  Non-cyclic GFR-binding peptide
  MOD_RES (2), (3): Xaa is C or S
AXXVPTELEPLPMVYYDENEKVVEQLSNDMVVEG

SEQ ID NO: 12626 - protein, 40 aa, Artificial Sequence
  Non-cyclic GFR-binding peptide
  MOD_RES (4), (5), (38), (40): Xaa is C or S
  MOD_RES (19), (20), (21), (22), (23): Xaa is A or G
  MOD_RES (24), (25), (26), (27): Xaa is A or G or is absent
ASPXXVPQDLEPLPIVYYXXXXXXXXXEQLSNMVVKSXKX

SEQ ID NO: 12627 - protein, 37 aa, Artificial Sequence
  Non-cyclic GFR-binding peptide
  MOD_RES (1), (2), (34), (36): Xaa is C or S
XXVPTRLEPLPIVYYDSANNVVEQLSNDMVVESXGXR

SEQ ID NO: 12628 - protein, 36 aa, Artificial Sequence
  Non-cyclic GFR-binding peptide
  MOD_RES (1), (2), (36): Xaa is C or S
  MOD_RES (16), (17), (18), (19), (20): Xaa is A or G
  MOD_RES (21), (22), (23), (24): Xaa is A or G or is absent
XXAPTKLSPISVLFIXXXXXXXXXYKQYENMVVRSX

SEQ ID NO: 12629 - protein, 37 aa, Artificial Sequence
  Non-cyclic GFR-binding peptide
  MOD_RES (2), (3), (37): Xaa is C or S
  MOD_RES (17), (18), (19), (20), (21): Xaa is A or G
  MOD_RES (22), (23), (24), (25): Xaa is A or G or is absent
AXXVPTELEPLPMVYYXXXXXXXXXEQLSNDMVVEGX

SEQ ID NO: 12630 - protein, 37 aa, Artificial Sequence
  Non-cyclic GFR-binding peptide
  MOD_RES (34), (36): Xaa is C or S
  MOD_RES (14), (15), (16), (17), (18): Xaa is A or G
  MOD_RES (19), (20), (21), (22): Xaa is A or G or is absent
VPTRLSAISILYLXXXXXXXXXLKNYQDMVVESXGXR

SEQ ID NO: 12631 - protein, 40 aa, Artificial Sequence
  Non-cyclic GFR-binding peptide
  MOD_RES (4), (5), (39): Xaa is C or S
  MOD_RES (19), (20), (21), (22), (23): Xaa is A or G
  MOD_RES (24), (25), (26), (27): Xaa is A or G or is absent
PPTXXVPTRLNAISILYFXXXXXXXXXLKKYRDMVVESXG

SEQ ID NO: 12632 - protein, 30 aa, Artificial Sequence
  Non-cyclic GFR-binding peptide
APTQLEPLPVVYYDDSSNVIEQLSNNMVVR

SEQ ID NO: 12633 - protein, 31 aa, Artificial Sequence
  Non-cyclic GFR-binding peptide
  MOD_RES (31), (31): Xaa is C or S
VPQALEPLTILYYVGRKPKVEQLSNMIVRSX

SEQ ID NO: 12634 - protein, 35 aa, Artificial Sequence
  Non-cyclic GFR-binding peptide
  MOD_RES (1), (2), (34): Xaa is C or S
XXVPTELEPLTMLYYDENEKVVEQLSNDMVVEGXG

SEQ ID NO: 12635 - protein, 35 aa, Artificial Sequence
  Non-cyclic GFR-binding peptide
  MOD_RES (1), (2), (34): Xaa is C or S
XXVPTRLNAISILYFDSANNVVLKKYRDMVVESXG

SEQ ID NO: 12636 - protein, 39 aa, Artificial Sequence
  Non-cyclic GFR-binding peptide
  MOD_RES (7), (39): Xaa is C or S
HVTKPTXAPTKLEPLTVLYYDDSSNVIEQLSNNMVVRSX

SEQ ID NO: 12637 - protein, 34 aa, Artificial Sequence
  Non-cyclic GFR-binding peptide
  MOD_RES (1), (2), (33): Xaa is C or S
XXVSQDLSPISILFIIGKTPKIYKQYEMIVKSXK

SEQ ID NO: 12638 - protein, 33 aa, Artificial Sequence
  Non-cyclic GFR-binding peptide
  MOD_RES (1), (1): Xaa is C or S
  MOD_RES (15), (16), (17), (18), (19): Xaa is A or G
  MOD_RES (20), (21), (22), (23): Xaa is A or G or is absent
XAPTKLSPISVLFIXXXXXXXXXYKQYENMVVR

SEQ ID NO: 12639 - protein, 32 aa, Artificial Sequence
  Non-cyclic GFR-binding peptide
  MOD_RES (32), (32): Xaa is C or S
VPTELEPLPMVYYDEYDKVVEQLSNEMVVEGX

SEQ ID NO: 12640 - protein, 38 aa, Artificial Sequence
  Non-cyclic GFR-binding peptide
  MOD_RES (4), (5), (38): Xaa is C or S
  MOD_RES (19), (20), (21), (22), (23): Xaa is A or G
  MOD_RES (24), (25), (26), (27): Xaa is A or G or is absent
ASPXXVPQDLEPLPIVYYXXXXXXXXXEQLSNMVVKSX

SEQ ID NO: 12641 - protein, 34 aa, Artificial Sequence
  Non-cyclic GFR-binding peptide
  MOD_RES (1), (2), (34): Xaa is C or S
XXAPTQLSPISVLFIDDSSNVIYKQYENMVVRAX

SEQ ID NO: 12642 - protein, 41 aa, Artificial Sequence
  Non-cyclic GFR-binding peptide
  MOD_RES (6), (40): Xaa is C or S
  MOD_RES (20), (21), (22), (23), (24): Xaa is A or G
  MOD_RES (25), (26), (27), (28): Xaa is A or G or is absent
VTKPTXAPTKLEPLTVLYYXXXXXXXXXEQLSNNMVVRSXG

SEQ ID NO: 12643 - protein, 36 aa, Artificial Sequence
  Non-cyclic GFR-binding peptide
  MOD_RES (2), (3): Xaa is C or S
  MOD_RES (17), (18), (19), (20), (21): Xaa is A or G
  MOD_RES (22), (23), (24), (25): Xaa is A or G or is absent
AXXVPTELEPLPMVYYXXXXXXXXXEQLSNDMVVEG

SEQ ID NO: 12644 - protein, 37 aa, Artificial Sequence
  Non-cyclic GFR-binding peptide
  MOD_RES (2), (3), (35), (37): Xaa is C or S
PXXAPTKLEPLPVVYYDDSSNVIEQLSNNMVVRSXGX

SEQ ID NO: 12645 - protein, 34 aa, Artificial Sequence
  Non-cyclic GFR-binding peptide
  MOD_RES (1), (34): Xaa is C or S
  MOD_RES (15), (16), (17), (18), (19): Xaa is A or G
  MOD_RES (20), (21), (22), (23): Xaa is A or G or is absent
XVPQALEPLTILYYXXXXXXXXXEQLSNMIVRSX

SEQ ID NO: 12646 - protein, 34 aa, Artificial Sequence
  Non-cyclic GFR-binding peptide
  MOD_RES (1), (2): Xaa is C or S
  MOD_RES (16), (17), (18), (19), (20): Xaa is A or G
  MOD_RES (21), (22), (23), (24): Xaa is A or G or is absent
XXAPTQLEPLTVLYYXXXXXXXXXEQLSNNMVVR

SEQ ID NO: 12647 - protein, 43 aa, Artificial Sequence
  Non-cyclic GFR-binding peptide
  MOD_RES (6), (7), (41), (43): Xaa is C or S
  MOD_RES (21), (22), (23), (24), (25): Xaa is A or G
  MOD_RES (26), (27), (28), (29): Xaa is A or G or is absent
STPPTXXVPTRLSAISILYLXXXXXXXXXLKNYQDMVVESXGX

SEQ ID NO: 12648 - protein, 34 aa, Artificial Sequence
  Non-cyclic GFR-binding peptide
  MOD_RES (2), (34): Xaa is C or S
TXAPTKLSPISVLFIDDSSNVIYKQYENMVVRSX

SEQ ID NO: 12649 - protein, 36 aa, Artificial Sequence
  Non-cyclic GFR-binding peptide
  MOD_RES (1), (35): Xaa is C or S
  MOD_RES (15), (16), (17), (18), (19): Xaa is A or G
  MOD_RES (20), (21), (22), (23): Xaa is A or G or is absent
XVPTELSPISMLFIXXXXXXXXXYKQYEEMVVEGXG

SEQ ID NO: 12650 - protein, 37 aa, Artificial Sequence
  Non-cyclic GFR-binding peptide
  MOD_RES (2), (3), (37): Xaa is C or S
  MOD_RES (17), (18), (19), (20), (21): Xaa is A or G
  MOD_RES (22), (23), (24), (25): Xaa is A or G or is absent
AXXVPTELSPISMLFIXXXXXXXXXYKQYEDMVVEGX

SEQ ID NO: 12651 - protein, 37 aa, Artificial Sequence
  Non-cyclic GFR-binding peptide
  MOD_RES (3), (4): Xaa is C or S
  MOD_RES (18), (19), (20), (21), (22): Xaa is A or G
  MOD_RES (23), (24), (25), (26): Xaa is A or G or is absent
KAXXVPTELEPLPMVYYXXXXXXXXXEQLSNEMVVEG

SEQ ID NO: 12652 - protein, 38 aa, Artificial Sequence
  Non-cyclic GFR-binding peptide
  MOD_RES (1), (2), (36), (38): Xaa is C or S
  MOD_RES (16), (17), (18), (19), (20): Xaa is A or G
  MOD_RES (21), (22), (23), (24): Xaa is A or G or is absent
XXAPTQLSPISVLFIXXXXXXXXXYKQYENMVVRAXGX

SEQ ID NO: 12653 - protein, 39 aa, Artificial Sequence
  Non-cyclic GFR-binding peptide
  MOD_RES (4), (5), (39): Xaa is C or S
  MOD_RES (19), (20), (21), (22), (23): Xaa is A or G
  MOD_RES (24), (25), (26), (27): Xaa is A or G or is absent
PPTXXVPTRLSAISILYLXXXXXXXXXLKNYQDMVVESX

SEQ ID NO: 12654 - protein, 36 aa, Artificial Sequence
  Non-cyclic GFR-binding peptide
  MOD_RES (34), (36): Xaa is C or S
  MOD_RES (14), (15), (16), (17), (18): Xaa is A or G
  MOD_RES (19), (20), (21), (22): Xaa is A or G or is absent
VPTRLEPLTILYYXXXXXXXXXEQLSNDMVVESXGX

SEQ ID NO: 12655 - protein, 32 aa, Artificial Sequence
  Non-cyclic GFR-binding peptide
  MOD_RES (1), (2): Xaa is C or S
XXVPTRLEPLTILYYDSANNVVEQLSNDMVVE

SEQ ID NO: 12656 - protein, 34 aa, Artificial Sequence
  Non-cyclic GFR-binding peptide
  MOD_RES (34), (34): Xaa is C or S
  MOD_RES (14), (15), (16), (17), (18): Xaa is A or G
  MOD_RES (19), (20), (21), (22): Xaa is A or G or is absent
VPTRLSAISILYLXXXXXXXXXLKNYQDMVVESX

SEQ ID NO: 12657 - protein, 41 aa, Artificial Sequence
  Non-cyclic GFR-binding peptide
  MOD_RES (5), (6), (40): Xaa is C or S
  MOD_RES (20), (21), (22), (23), (24): Xaa is A or G
  MOD_RES (25), (26), (27), (28): Xaa is A or G or is absent
IPKAXXVPTELEPLTMLYYXXXXXXXXXEQLSNDMVVEGXG

SEQ ID NO: 12658 - protein, 39 aa, Artificial Sequence
  Non-cyclic GFR-binding peptide
  MOD_RES (3), (4), (38): Xaa is C or S
  MOD_RES (18), (19), (20), (21), (22): Xaa is A or G
  MOD_RES (23), (24), (25), (26): Xaa is A or G or is absent
PTXXVPTRLNAISILYFXXXXXXXXXLKKYRDMVVESXG

SEQ ID NO: 12659 - protein, 38 aa, Artificial Sequence
  Non-cyclic GFR-binding peptide
  MOD_RES (1), (35), (37): Xaa is C or S
  MOD_RES (15), (16), (17), (18), (19): Xaa is A or G
  MOD_RES (20), (21), (22), (23): Xaa is A or G or is absent
XVPTRLEPLPIVYYXXXXXXXXXEQLSNDMVVESXGXR

SEQ ID NO: 12660 - protein, 38 aa, Artificial Sequence
  Non-cyclic GFR-binding peptide
  MOD_RES (3), (4), (36), (38): Xaa is C or S
KAXXVPTELEPLTMLYYDENEKVVEQLSNDMVVEGXGX

SEQ ID NO: 12661 - protein, 39 aa, Artificial Sequence
  Non-cyclic GFR-binding peptide
  MOD_RES (4), (5), (37), (39): Xaa is C or S
PPTXXVPTRLNAISILYFDSANNVVLKKYRDMVVESXGX

SEQ ID NO: 12662 - protein, 32 aa, Artificial Sequence
  Non-cyclic GFR-binding peptide
  MOD_RES (1), (1): Xaa is C or S
XAPTKLEPLTVLYYDDSSNVIEQLSNNMVVRS

SEQ ID NO: 12663 - protein, 40 aa, Artificial Sequence
  Non-cyclic GFR-binding peptide
  MOD_RES (6), (7), (39): Xaa is C or S
YVPKPXXAPTKLSPISVLFIDDSSNVIYKQYENMVVRSXG

SEQ ID NO: 12664 - protein, 41 aa, Artificial Sequence
  Non-cyclic GFR-binding peptide
  MOD_RES (3), (4), (38), (40): Xaa is C or S
  MOD_RES (18), (19), (20), (21), (22): Xaa is A or G
  MOD_RES (23), (24), (25), (26): Xaa is A or G or is absent
KAXXVPTELEPLTMLYYXXXXXXXXXEQLSNEMVVEGXGXR

SEQ ID NO: 12665 - protein, 36 aa, Artificial Sequence
  Non-cyclic GFR-binding peptide
  MOD_RES (2), (3), (36): Xaa is C or S
  MOD_RES (17), (18), (19), (20), (21): Xaa is A or G
  MOD_RES (22), (23), (24), (25): Xaa is A or G or is absent
PXXVSQDLEPLPIVYYXXXXXXXXXEQLSNMIVKSX

SEQ ID NO: 12666 - protein, 34 aa, Artificial Sequence
  Non-cyclic GFR-binding peptide
  MOD_RES (34), (34): Xaa is C or S
  MOD_RES (14), (15), (16), (17), (18): Xaa is A or G
  MOD_RES (19), (20), (21), (22): Xaa is A or G or is absent
APTKLEPLPVVYYXXXXXXXXXEQLSNNMVVRSX

SEQ ID NO: 12667 - protein, 34 aa, Artificial Sequence
  Non-cyclic GFR-binding peptide
  MOD_RES (1), (2): Xaa is C or S
  MOD_RES (16), (17), (18), (19), (20): Xaa is A or G
  MOD_RES (21), (22), (23), (24): Xaa is A or G or is absent
XXVPTRLEPLPIVYYXXXXXXXXXEQLSNDMVVE

SEQ ID NO: 12668 - protein, 33 aa, Artificial Sequence
  Non-cyclic GFR-binding peptide
  MOD_RES (2), (3): Xaa is C or S
PXXVPQDLEPLPIVYYVGRTPKVEQLSNMVVKS

SEQ ID NO: 12669 - protein, 37 aa, Artificial Sequence
  Non-cyclic GFR-binding peptide
  MOD_RES (2), (3), (37): Xaa is C or S
  MOD_RES (17), (18), (19), (20), (21): Xaa is A or G
  MOD_RES (22), (23), (24), (25): Xaa is A or G or is absent
PXXAPTKLEPLPVVYYXXXXXXXXXEQLSNNMVVRSX

SEQ ID NO: 12670 - protein, 37 aa, Artificial Sequence
  Non-cyclic GFR-binding peptide
  MOD_RES (2), (3), (35), (37): Xaa is C or S
PXXAPTQLEPLPVVYYDDSSNVIEQLSNNMVVRAXGX

SEQ ID NO: 12671 - protein, 39 aa, Artificial Sequence
  Non-cyclic GFR-binding peptide
  MOD_RES (5), (6), (38): Xaa is C or S
TPPTXXVPTRLEPLTILYYDSANNVVEQLSNDMVVESXG

SEQ ID NO: 12672 - protein, 37 aa, Artificial Sequence
  Non-cyclic GFR-binding peptide
  MOD_RES (2), (3), (36): Xaa is C or S
  MOD_RES (17), (18), (19), (20), (21): Xaa is A or G
  MOD_RES (22), (23), (24), (25): Xaa is A or G or is absent
PXXVPQDLEPLPIVYYXXXXXXXXXEQLSNMVVKSXK

SEQ ID NO: 12673 - protein, 38 aa, Artificial Sequence
  Non-cyclic GFR-binding peptide
  MOD_RES (2), (3), (35), (37): Xaa is C or S
AXXVPTELEPLTMLYYDENEKVVEQLSNDMVVEGXGXR

SEQ ID NO: 12674 - protein, 35 aa, Artificial Sequence
  Non-cyclic GFR-binding peptide
  MOD_RES (34), (34): Xaa is C or S
  MOD_RES (14), (15), (16), (17), (18): Xaa is A or G
  MOD_RES (19), (20), (21), (22): Xaa is A or G or is absent
VPTELEPLTMLYYXXXXXXXXXEQLSNEMVVEGXG

SEQ ID NO: 12675 - protein, 34 aa, Artificial Sequence
  Non-cyclic GFR-binding peptide
  MOD_RES (34), (34): Xaa is C or S
  MOD_RES (14), (15), (16), (17), (18): Xaa is A or G
  MOD_RES (19), (20), (21), (22): Xaa is A or G or is absent
APTKLSPISVLFIXXXXXXXXXYKQYENMVVRSX

SEQ ID NO: 12676 - protein, 39 aa, Artificial Sequence
  Non-cyclic GFR-binding peptide
  MOD_RES (5), (6), (39): Xaa is C or S
  MOD_RES (20), (21), (22), (23), (24): Xaa is A or G
  MOD_RES (25), (26), (27), (28): Xaa is A or G or is absent
SASPXXVSQDLSPISILFIXXXXXXXXXYKQYEMIVKSX

SEQ ID NO: 12677 - protein, 40 aa, Artificial Sequence
  Non-cyclic GFR-binding peptide
  MOD_RES (2), (3), (37), (39): Xaa is C or S
  MOD_RES (17), (18), (19), (20), (21): Xaa is A or G
  MOD_RES (22), (23), (24), (25): Xaa is A or G or is absent
PXXAPTKLEPLPVVYYXXXXXXXXXEQLSNNMVVRSXGXH

SEQ ID NO: 12678 - protein, 37 aa, Artificial Sequence
  Non-cyclic GFR-binding peptide
  MOD_RES (1), (35), (37): Xaa is C or S
  MOD_RES (15), (16), (17), (18), (19): Xaa is A or G
  MOD_RES (20), (21), (22), (23): Xaa is A or G or is absent
XVPTELSPISMLFIXXXXXXXXXYKQYEEMVVEGXGX

SEQ ID NO: 12679 - protein, 38 aa, Artificial Sequence
  Non-cyclic GFR-binding peptide
  MOD_RES (5), (37): Xaa is C or S
TKPTXAPTKLEPLPVVYYDDSSNVIEQLSNNMVVRSXG

SEQ ID NO: 12680 - protein, 33 aa, Artificial Sequence
  Non-cyclic GFR-binding peptide
  MOD_RES (1), (1): Xaa is C or S
  MOD_RES (15), (16), (17), (18), (19): Xaa is A or G
  MOD_RES (20), (21), (22), (23): Xaa is A or G or is absent
XAPTQLSPISVLFIXXXXXXXXXYKQYENMVVR

SEQ ID NO: 12681 - protein, 33 aa, Artificial Sequence
  Non-cyclic GFR-binding peptide
  MOD_RES (32), (32): Xaa is C or S
VPTELSPISMLFIDEYDKVVYKQYEEMVVEGXG

SEQ ID NO: 12682 - protein, 32 aa, Artificial Sequence
  Non-cyclic GFR-binding peptide
  MOD_RES (32), (32): Xaa is C or S
APTQLSPISVLFIDDSSNVIYKQYENMVVRAX

SEQ ID NO: 12683 - protein, 38 aa, Artificial Sequence
  Non-cyclic GFR-binding peptide
  MOD_RES (5), (6): Xaa is C or S
  MOD_RES (20), (21), (22), (23), (24): Xaa is A or G
  MOD_RES (25), (26), (27), (28): Xaa is A or G or is absent
VPKPXXAPTQLSPISVLFIXXXXXXXXXYKQYENMVVR

SEQ ID NO: 12684 - protein, 38 aa, Artificial Sequence
  Non-cyclic GFR-binding peptide
  MOD_RES (4), (5), (37): Xaa is C or S
PKAXXVPTELEPLPMVYYDENEKVVEQLSNDMVVEGXG

SEQ ID NO: 12685 - protein, 38 aa, Artificial Sequence
  Non-cyclic GFR-binding peptide
  MOD_RES (3), (37): Xaa is C or S
  MOD_RES (17), (18), (19), (20), (21): Xaa is A or G
  MOD_RES (22), (23), (24), (25): Xaa is A or G or is absent
PTXAPTKLEPLTVLYYXXXXXXXXXEQLSNNMVVRSXG

SEQ ID NO: 12686 - protein, 35 aa, Artificial Sequence
  Non-cyclic GFR-binding peptide
  MOD_RES (3), (35): Xaa is C or S
PTXAPTKLEPLPVVYYDDSSNVIEQLSNNMVVRSX

SEQ ID NO: 12687 - protein, 33 aa, Artificial Sequence
  Non-cyclic GFR-binding peptide
  MOD_RES (2), (3): Xaa is C or S
PXXAPTKLSPISVLFIDDSSNVIYKQYENMVVR

SEQ ID NO: 12688 - protein, 32 aa, Artificial Sequence
  Non-cyclic GFR-binding peptide
  MOD_RES (14), (15), (16), (17), (18): Xaa is A or G
  MOD_RES (19), (20), (21), (22): Xaa is A or G or is absent
VPTELEPLTMLYYXXXXXXXXXEQLSNDMVVE

SEQ ID NO: 12689 - protein, 38 aa, Artificial Sequence
  Non-cyclic GFR-binding peptide
  MOD_RES (7), (7): Xaa is C or S
HVTKPTXAPTKLEPLPVVYYDDSSNVIEQLSNNMVVRS

SEQ ID NO: 12690 - protein, 40 aa, Artificial Sequence
  Non-cyclic GFR-binding peptide
  MOD_RES (5), (6), (38), (40): Xaa is C or S
TPPTXXVPTRLEPLTILYYDSANNVVEQLSNDMVVESXGX

SEQ ID NO: 12691 - protein, 35 aa, Artificial Sequence
  Non-cyclic GFR-binding peptide
  MOD_RES (3), (4): Xaa is C or S
KPXXAPTQLEPLTVLYYDDSSNVIEQLSNNMVVRA

SEQ ID NO: 12692 - protein, 35 aa, Artificial Sequence
  Non-cyclic GFR-binding peptide
  MOD_RES (1), (34): Xaa is C or S
  MOD_RES (15), (16), (17), (18), (19): Xaa is A or G
  MOD_RES (20), (21), (22), (23): Xaa is A or G or is absent
XVPQDLSPISILFIXXXXXXXXXYKQYEMVVKSXK

SEQ ID NO: 12693 - protein, 35 aa, Artificial Sequence
  Non-cyclic GFR-binding peptide
  MOD_RES (1), (35): Xaa is C or S
  MOD_RES (15), (16), (17), (18), (19): Xaa is A or G
  MOD_RES (20), (21), (22), (23): Xaa is A or G or is absent
XAPTKLSPISVLFIXXXXXXXXXYKQYENMVVRSX

SEQ ID NO: 12694 - protein, 35 aa, Artificial Sequence
  Non-cyclic GFR-binding peptide
  MOD_RES (4), (5): Xaa is C or S
AAPXXVPQALEPLTILYYVGRKPKVEQLSNMIVRS

SEQ ID NO: 12695 - protein, 35 aa, Artificial Sequence
  Non-cyclic GFR-binding peptide
  MOD_RES (2), (3), (34): Xaa is C or S
PXXVSQDLEPLPIVYYIGKTPKIEQLSNMIVKSXK

SEQ ID NO: 12696 - protein, 44 aa, Artificial Sequence
  Non-cyclic GFR-binding peptide
  MOD_RES (7), (41), (43): Xaa is C or S
  MOD_RES (21), (22), (23), (24), (25): Xaa is A or G
  MOD_RES (26), (27), (28), (29): Xaa is A or G or is absent
HVTKPTXAPTKLEPLTVLYYXXXXXXXXXEQLSNNMVVRSXGXH

SEQ ID NO: 12697 - protein, 40 aa, Artificial Sequence
  Non-cyclic GFR-binding peptide
  MOD_RES (4), (5), (37), (39): Xaa is C or S
PPTXXVPTRLNAISILYFDSANNVVLKKYRDMVVESXGXR

SEQ ID NO: 12698 - protein, 36 aa, Artificial Sequence
  Non-cyclic GFR-binding peptide
  MOD_RES (4), (5): Xaa is C or S
PPTXXVPTRLEPLTILYYDSANNVVEQLSNDMVVES

SEQ ID NO: 12699 - protein, 42 aa, Artificial Sequence
  Non-cyclic GFR-binding peptide
  MOD_RES (4), (5), (39), (41): Xaa is C or S
  MOD_RES (19), (20), (21), (22), (23): Xaa is A or G
  MOD_RES (24), (25), (26), (27): Xaa is A or G or is absent
PPTXXVPTRLEPLPIVYYXXXXXXXXXEQLSNDMVVESXGXR

SEQ ID NO: 12700 - protein, 36 aa, Artificial Sequence
  Non-cyclic GFR-binding peptide
  MOD_RES (1), (2), (35): Xaa is C or S
  MOD_RES (16), (17), (18), (19), (20): Xaa is A or G
  MOD_RES (21), (22), (23), (24): Xaa is A or G or is absent
XXVPQDLSPISILFIXXXXXXXXXYKQYEMVVKSXK

SEQ ID NO: 12701 - protein, 35 aa, Artificial Sequence
  Non-cyclic GFR-binding peptide
  MOD_RES (2), (3), (34): Xaa is C or S
PXXVPQALEPLTILYYVGRKPKVEQLSNMIVRSXK

SEQ ID NO: 12702 - protein, 36 aa, Artificial Sequence
  Non-cyclic GFR-binding peptide
  MOD_RES (4), (5): Xaa is C or S
PKAXXVPTELSPISMLFIDENEKVVYKQYEDMVVEG

SEQ ID NO: 12703 - protein, 36 aa, Artificial Sequence
  Non-cyclic GFR-binding peptide
  MOD_RES (6), (6): Xaa is C or S
VTKPTXAPTKLEPLTVLYYDDSSNVIEQLSNNMVVR

SEQ ID NO: 12704 - protein, 38 aa, Artificial Sequence
  Non-cyclic GFR-binding peptide
  MOD_RES (1), (2), (36), (38): Xaa is C or S
  MOD_RES (16), (17), (18), (19), (20): Xaa is A or G
  MOD_RES (21), (22), (23), (24): Xaa is A or G or is absent
XXVPTRLEPLPIVYYXXXXXXXXXEQLSNDMVVESXGX

SEQ ID NO: 12705 - protein, 31 aa, Artificial Sequence
  Non-cyclic GFR-binding peptide
  MOD_RES (1), (1): Xaa is C or S
XAPTKLSPISVLFIDDSSNVIYKQYENMVVR

SEQ ID NO: 12706 - protein, 37 aa, Artificial Sequence
  Non-cyclic GFR-binding peptide
  MOD_RES (6), (7): Xaa is C or S
ASASPXXVPQDLEPLPIVYYVGRTPKVEQLSNMVVKS

SEQ ID NO: 12707 - protein, 42 aa, Artificial Sequence
  Non-cyclic GFR-binding peptide
  MOD_RES (6), (7), (41): Xaa is C or S
  MOD_RES (21), (22), (23), (24), (25): Xaa is A or G
  MOD_RES (26), (27), (28), (29): Xaa is A or G or is absent
TVPKPXXAPTQLEPLTVLYYXXXXXXXXXEQLSNNMVVRAXG

SEQ ID NO: 12708 - protein, 34 aa, Artificial Sequence
  Non-cyclic GFR-binding peptide
  MOD_RES (1), (2), (34): Xaa is C or S
XXVPTRLNAISILYFDSANNVVLKKYRDMVVESX

SEQ ID NO: 12709 - protein, 35 aa, Artificial Sequence
  Non-cyclic GFR-binding peptide
  MOD_RES (2), (3): Xaa is C or S
  MOD_RES (17), (18), (19), (20), (21): Xaa is A or G
  MOD_RES (22), (23), (24), (25): Xaa is A or G or is absent
PXXVPQDLEPLPIVYYXXXXXXXXXEQLSNMVVKS

SEQ ID NO: 12710 - protein, 33 aa, Artificial Sequence
  Non-cyclic GFR-binding peptide
  MOD_RES (1), (33): Xaa is C or S
XVPTELSPISMLFIDENEKVVYKQYEDMVVEGX

SEQ ID NO: 12711 - protein, 39 aa, Artificial Sequence
  Non-cyclic GFR-binding peptide
  MOD_RES (3), (4), (38): Xaa is C or S
  MOD_RES (18), (19), (20), (21), (22): Xaa is A or G
  MOD_RES (23), (24), (25), (26): Xaa is A or G or is absent
KPXXAPTQLEPLTVLYYXXXXXXXXXEQLSNNMVVRAXG

SEQ ID NO: 12712 - protein, 32 aa, Artificial Sequence
  Non-cyclic GFR-binding peptide
  MOD_RES (1), (32): Xaa is C or S
XVPQDLSPISILFIVGRTPKVYKQYEMVVKSX

SEQ ID NO: 12713 - protein, 41 aa, Artificial Sequence
  Non-cyclic GFR-binding peptide
  MOD_RES (5), (6), (39), (41): Xaa is C or S
  MOD_RES (20), (21), (22), (23), (24): Xaa is A or G
  MOD_RES (25), (26), (27), (28): Xaa is A or G or is absent
SAAPXXVPQALEPLTILYYXXXXXXXXXEQLSNMIVRSXKX

SEQ ID NO: 12714 - protein, 35 aa, Artificial Sequence
  Non-cyclic GFR-binding peptide
  MOD_RES (3), (3): Xaa is C or S
  MOD_RES (17), (18), (19), (20), (21): Xaa is A or G
  MOD_RES (22), (23), (24), (25): Xaa is A or G or is absent
PTXAPTKLEPLPVVYYXXXXXXXXXEQLSNNMVVR

SEQ ID NO: 12715 - protein, 40 aa, Artificial Sequence
  Non-cyclic GFR-binding peptide
  MOD_RES (4), (5), (39): Xaa is C or S
  MOD_RES (19), (20), (21), (22), (23): Xaa is A or G
  MOD_RES (24), (25), (26), (27): Xaa is A or G or is absent
PKPXXAPTQLEPLTVLYYXXXXXXXXXEQLSNNMVVRAXG

SEQ ID NO: 12716 - protein, 37 aa, Artificial Sequence
  Non-cyclic GFR-binding peptide
  MOD_RES (4), (5), (37): Xaa is C or S
PKPXXAPTQLSPISVLFIDDSSNVIYKQYENMVVRAX

SEQ ID NO: 12717 - protein, 39 aa, Artificial Sequence
  Non-cyclic GFR-binding peptide
  MOD_RES (5), (6), (38): Xaa is C or S
IPKAXXVPTELSPISMLFIDEYDKVVYKQYEEMVVEGXG

SEQ ID NO: 12718 - protein, 33 aa, Artificial Sequence
  Non-cyclic GFR-binding peptide
  MOD_RES (1), (1): Xaa is C or S
  MOD_RES (15), (16), (17), (18), (19): Xaa is A or G
  MOD_RES (20), (21), (22), (23): Xaa is A or G or is absent
XVPTELEPLPMVYYXXXXXXXXXEQLSNDMVVE

SEQ ID NO: 12719 - protein, 36 aa, Artificial Sequence
  Non-cyclic GFR-binding peptide
  MOD_RES (5), (6): Xaa is C or S
SASPXXVSQDLEPLPIVYYIGKTPKIEQLSNMIVKS

SEQ ID NO: 12720 - protein, 37 aa, Artificial Sequence
  Non-cyclic GFR-binding peptide
  MOD_RES (6), (7): Xaa is C or S
KIPKAXXVPTELSPISMLFIDENEKVVYKQYEDMVVE

SEQ ID NO: 12721 - protein, 39 aa, Artificial Sequence
  Non-cyclic GFR-binding peptide
  MOD_RES (2), (3), (37), (39): Xaa is C or S
  MOD_RES (17), (18), (19), (20), (21): Xaa is A or G
  MOD_RES (22), (23), (24), (25): Xaa is A or G or is absent
TXXVPTRLEPLTILYYXXXXXXXXXEQLSNDMVVESXGX

SEQ ID NO: 12722 - protein, 34 aa, Artificial Sequence
  Non-cyclic GFR-binding peptide
  MOD_RES (1), (33): Xaa is C or S
XAPTKLSPISVLFIDDSSNVIYKQYENMVVRSXG

SEQ ID NO: 12723 - protein, 39 aa, Artificial Sequence
  Non-cyclic GFR-binding peptide
  MOD_RES (5), (39): Xaa is C or S
  MOD_RES (19), (20), (21), (22), (23): Xaa is A or G
  MOD_RES (24), (25), (26), (27): Xaa is A or G or is absent
TKPTXAPTKLEPLPVVYYXXXXXXXXXEQLSNNMVVRSX

SEQ ID NO: 12724 - protein, 36 aa, Artificial Sequence
  Non-cyclic GFR-binding peptide
  MOD_RES (4), (5): Xaa is C or S
PPTXXVPTRLSAISILYLDSANNVVLKNYQDMVVES

SEQ ID NO: 12725 - protein, 36 aa, Artificial Sequence
  Non-cyclic GFR-binding peptide
  MOD_RES (4), (5): Xaa is C or S
PKAXXVPTELSPISMLFIDEYDKVVYKQYEEMVVEG

SEQ ID NO: 12726 - protein, 42 aa, Artificial Sequence
  Non-cyclic GFR-binding peptide
  MOD_RES (6), (7), (40), (42): Xaa is C or S
  MOD_RES (21), (22), (23), (24), (25): Xaa is A or G
  MOD_RES (26), (27), (28), (29): Xaa is A or G or is absent
ASASPXXVPQDLSPISILFIXXXXXXXXXYKQYEMVVKSXKX

SEQ ID NO: 12727 - protein, 35 aa, Artificial Sequence
  Non-cyclic GFR-binding peptide
  MOD_RES (34), (34): Xaa is C or S
  MOD_RES (14), (15), (16), (17), (18): Xaa is A or G
  MOD_RES (19), (20), (21), (22): Xaa is A or G or is absent
VPTELEPLPMVYYXXXXXXXXXEQLSNEMVVEGXG

SEQ ID NO: 12728 - protein, 37 aa, Artificial Sequence
  Non-cyclic GFR-binding peptide
  MOD_RES (4), (5): Xaa is C or S
  MOD_RES (19), (20), (21), (22), (23): Xaa is A or G
  MOD_RES (24), (25), (26), (27): Xaa is A or G or is absent
PKPXXAPTKLSPISVLFIXXXXXXXXXYKQYENMVVR

SEQ ID NO: 12729 - protein, 36 aa, Artificial Sequence
  Non-cyclic GFR-binding peptide
  MOD_RES (34), (36): Xaa is C or S
  MOD_RES (14), (15), (16), (17), (18): Xaa is A or G
  MOD_RES (19), (20), (21), (22): Xaa is A or G or is absent
APTKLEPLTVLYYXXXXXXXXXEQLSNNMVVRSXGX

SEQ ID NO: 12730 - protein, 37 aa, Artificial Sequence
  Non-cyclic GFR-binding peptide
  MOD_RES (1), (35), (37): Xaa is C or S
  MOD_RES (15), (16), (17), (18), (19): Xaa is A or G
  MOD_RES (20), (21), (22), (23): Xaa is A or G or is absent
XAPTKLSPISVLFIXXXXXXXXXYKQYENMVVRSXGX

SEQ ID NO: 12731 - protein, 31 aa, Artificial Sequence
  Non-cyclic GFR-binding peptide
  MOD_RES (1), (1): Xaa is C or S
XVPTRLEPLTILYYDSANNVVEQLSNDMVVE

SEQ ID NO: 12732 - protein, 34 aa, Artificial Sequence
  Non-cyclic GFR-binding peptide
  MOD_RES (3), (4): Xaa is C or S
KPXXAPTQLSPISVLFIDDSSNVIYKQYENMVVR

SEQ ID NO: 12733 - protein, 40 aa, Artificial Sequence
  Non-cyclic GFR-binding peptide
  MOD_RES (5), (6), (38), (40): Xaa is C or S
TPPTXXVPTRLSAISILYLDSANNVVLKNYQDMVVESXGX

SEQ ID NO: 12734 - protein, 34 aa, Artificial Sequence
  Non-cyclic GFR-binding peptide
  MOD_RES (1), (33): Xaa is C or S
XAPTQLSPISVLFIDDSSNVIYKQYENMVVRAXG

SEQ ID NO: 12735 - protein, 33 aa, Artificial Sequence
  Non-cyclic GFR-binding peptide
  MOD_RES (1), (33): Xaa is C or S
XAPTKLEPLTVLYYDDSSNVIEQLSNNMVVRSX

SEQ ID NO: 12736 - protein, 43 aa, Artificial Sequence
  Non-cyclic GFR-binding peptide
  MOD_RES (5), (6), (40), (42): Xaa is C or S
  MOD_RES (20), (21), (22), (23), (24): Xaa is A or G
  MOD_RES (25), (26), (27), (28): Xaa is A or G or is absent
TPPTXXVPTRLSAISILYLXXXXXXXXXLKNYQDMVVESXGXR

SEQ ID NO: 12737 - protein, 39 aa, Artificial Sequence
  Non-cyclic GFR-binding peptide
  MOD_RES (5), (6), (38): Xaa is C or S
TPPTXXVPTRLNAISILYFDSANNVVLKKYRDMVVESXG

SEQ ID NO: 12738 - protein, 38 aa, Artificial Sequence
  Non-cyclic GFR-binding peptide
  MOD_RES (4), (5), (37): Xaa is C or S
PKPXXAPTKLEPLPVVYYDDSSNVIEQLSNNMVVRSXG

SEQ ID NO: 12739 - protein, 43 aa, Artificial Sequence
  Non-cyclic GFR-binding peptide
  MOD_RES (5), (6), (40), (42): Xaa is C or S
  MOD_RES (20), (21), (22), (23), (24): Xaa is A or G
  MOD_RES (25), (26), (27), (28): Xaa is A or G or is absent
VPKPXXAPTKLSPISVLFIXXXXXXXXXYKQYENMVVRSXGXH

SEQ ID NO: 12740 - protein, 34 aa, Artificial Sequence
  Non-cyclic GFR-binding peptide
  MOD_RES (33), (33): Xaa is C or S
  MOD_RES (14), (15), (16), (17), (18): Xaa is A or G
  MOD_RES (19), (20), (21), (22): Xaa is A or G or is absent
VPQDLEPLPIVYYXXXXXXXXXEQLSNMVVKSXK

SEQ ID NO: 12741 - protein, 35 aa, Artificial Sequence
  Non-cyclic GFR-binding peptide
  MOD_RES (3), (3): Xaa is C or S
  MOD_RES (17), (18), (19), (20), (21): Xaa is A or G
  MOD_RES (22), (23), (24), (25): Xaa is A or G or is absent
PTXAPTKLEPLTVLYYXXXXXXXXXEQLSNNMVVR

SEQ ID NO: 12742 - protein, 44 aa, Artificial Sequence
  Non-cyclic GFR-binding peptide
  MOD_RES (6), (7), (41), (43): Xaa is C or S
  MOD_RES (21), (22), (23), (24), (25): Xaa is A or G
  MOD_RES (26), (27), (28), (29): Xaa is A or G or is absent
YVPKPXXAPTKLEPLPVVYYXXXXXXXXXEQLSNNMVVRSXGXH

SEQ ID NO: 12743 - protein, 31 aa, Artificial Sequence
  Non-cyclic GFR-binding peptide
  MOD_RES (31), (31): Xaa is C or S
VPQDLSPISILFIVGRTPKVYKQYEMVVKSX

SEQ ID NO: 12744 - protein, 39 aa, Artificial Sequence
  Non-cyclic GFR-binding peptide
  MOD_RES (4), (5), (39): Xaa is C or S
  MOD_RES (19), (20), (21), (22), (23): Xaa is A or G
  MOD_RES (24), (25), (26), (27): Xaa is A or G or is absent
PKPXXAPTQLEPLTVLYYXXXXXXXXXEQLSNNMVVRAX

SEQ ID NO: 12745 - protein, 35 aa, Artificial Sequence
  Non-cyclic GFR-binding peptide
  MOD_RES (1), (33), (35): Xaa is C or S
XAPTQLEPLTVLYYDDSSNVIEQLSNNMVVRAXGX

SEQ ID NO: 12746 - protein, 38 aa, Artificial Sequence
  Non-cyclic GFR-binding peptide
  MOD_RES (1), (2), (36), (38): Xaa is C or S
  MOD_RES (16), (17), (18), (19), (20): Xaa is A or G
  MOD_RES (21), (22), (23), (24): Xaa is A or G or is absent
XXVPTRLEPLTILYYXXXXXXXXXEQLSNDMVVESXGX

SEQ ID NO: 12747 - protein, 38 aa, Artificial Sequence
  Non-cyclic GFR-binding peptide
  MOD_RES (5), (6), (38): Xaa is C or S
IPKAXXVPTELEPLTMLYYDEYDKVVEQLSNEMVVEGX

SEQ ID NO: 12748 - protein, 40 aa, Artificial Sequence
  Non-cyclic GFR-binding peptide
  MOD_RES (6), (40): Xaa is C or S
  MOD_RES (20), (21), (22), (23), (24): Xaa is A or G
  MOD_RES (25), (26), (27), (28): Xaa is A or G or is absent
VTKPTXAPTKLEPLTVLYYXXXXXXXXXEQLSNNMVVRSX

SEQ ID NO: 12749 - protein, 37 aa, Artificial Sequence
  Non-cyclic GFR-binding peptide
  MOD_RES (1), (2), (34), (36): Xaa is C or S
XXVPTELEPLPMVYYDENEKVVEQLSNDMVVEGXGXR

SEQ ID NO: 12750 - protein, 34 aa, Artificial Sequence
  Non-cyclic GFR-binding peptide
  MOD_RES (33), (33): Xaa is C or S
  MOD_RES (14), (15), (16), (17), (18): Xaa is A or G
  MOD_RES (19), (20), (21), (22): Xaa is A or G or is absent
VSQDLSPISILFIXXXXXXXXXYKQYEMIVKSXK

SEQ ID NO: 12751 - protein, 32 aa, Artificial Sequence
  Non-cyclic GFR-binding peptide
  MOD_RES (1), (32): Xaa is C or S
XVSQDLSPISILFIIGKTPKIYKQYEMIVKSX

SEQ ID NO: 12752 - protein, 39 aa, Artificial Sequence
  Non-cyclic GFR-binding peptide
  MOD_RES (3), (4), (38): Xaa is C or S
  MOD_RES (18), (19), (20), (21), (22): Xaa is A or G
  MOD_RES (23), (24), (25), (26): Xaa is A or G or is absent
KPXXAPTQLEPLPVVYYXXXXXXXXXEQLSNNMVVRAXG

SEQ ID NO: 12753 - protein, 42 aa, Artificial Sequence
  Non-cyclic GFR-binding peptide
  MOD_RES (4), (5), (39), (41): Xaa is C or S
  MOD_RES (19), (20), (21), (22), (23): Xaa is A or G
  MOD_RES (24), (25), (26), (27): Xaa is A or G or is absent
PKPXXAPTKLSPISVLFIXXXXXXXXXYKQYENMVVRSXGXH

SEQ ID NO: 12754 - protein, 39 aa, Artificial Sequence
  Non-cyclic GFR-binding peptide
  MOD_RES (6), (7), (39): Xaa is C or S
STPPTXXVPTRLSAISILYLDSANNVVLKNYQDMVVESX

SEQ ID NO: 12755 - protein, 36 aa, Artificial Sequence
  Non-cyclic GFR-binding peptide
  MOD_RES (1), (34), (36): Xaa is C or S
  MOD_RES (15), (16), (17), (18), (19): Xaa is A or G
  MOD_RES (20), (21), (22), (23): Xaa is A or G or is absent
XVSQDLSPISILFIXXXXXXXXXYKQYEMIVKSXKX

SEQ ID NO: 12756 - protein, 35 aa, Artificial Sequence
  Non-cyclic GFR-binding peptide
  MOD_RES (2), (3), (35): Xaa is C or S
AXXVPTELEPLTMLYYDEYDKVVEQLSNEMVVEGX

SEQ ID NO: 12757 - protein, 34 aa, Artificial Sequence
  Non-cyclic GFR-binding peptide
  MOD_RES (1), (2), (34): Xaa is C or S
XXVPTELSPISMLFIDEYDKVVYKQYEEMVVEGX

SEQ ID NO: 12758 - protein, 40 aa, Artificial Sequence
  Non-cyclic GFR-binding peptide
  MOD_RES (2), (3), (37), (39): Xaa is C or S
  MOD_RES (17), (18), (19), (20), (21): Xaa is A or G
  MOD_RES (22), (23), (24), (25): Xaa is A or G or is absent
PXXAPTKLSPISVLFIXXXXXXXXXYKQYENMVVRSXGXH

SEQ ID NO: 12759 - protein, 41 aa, Artificial Sequence
  Non-cyclic GFR-binding peptide
  MOD_RES (6), (7), (38), (40): Xaa is C or S
ASASPXXVPQDLSPISILFIVGRTPKVYKQYEMVVKSXKXS

SEQ ID NO: 12760 - protein, 41 aa, Artificial Sequence
  Non-cyclic GFR-binding peptide
  MOD_RES (5), (39), (41): Xaa is C or S
  MOD_RES (19), (20), (21), (22), (23): Xaa is A or G
  MOD_RES (24), (25), (26), (27): Xaa is A or G or is absent
TKPTXAPTKLSPISVLFIXXXXXXXXXYKQYENMVVRSXGX

SEQ ID NO: 12761 - protein, 31 aa, Artificial Sequence
  Non-cyclic GFR-binding peptide
  MOD_RES (1), (1): Xaa is C or S
XVPTELSPISMLFIDEYDKVVYKQYEEMVVE

SEQ ID NO: 12762 - protein, 40 aa, Artificial Sequence
  Non-cyclic GFR-binding peptide
  MOD_RES (3), (4), (38), (40): Xaa is C or S
  MOD_RES (18), (19), (20), (21), (22): Xaa is A or G
  MOD_RES (23), (24), (25), (26): Xaa is A or G or is absent
PTXXVPTRLNAISILYFXXXXXXXXXLKKYRDMVVESXGX

SEQ ID NO: 12763 - protein, 38 aa, Artificial Sequence
  Non-cyclic GFR-binding peptide
  MOD_RES (5), (6), (38): Xaa is C or S
IPKAXXVPTELEPLTMLYYDENEKVVEQLSNDMVVEGX

SEQ ID NO: 12764 - protein, 38 aa, Artificial Sequence
  Non-cyclic GFR-binding peptide
  MOD_RES (4), (5): Xaa is C or S
  MOD_RES (19), (20), (21), (22), (23): Xaa is A or G
  MOD_RES (24), (25), (26), (27): Xaa is A or G or is absent
PKAXXVPTELEPLTMLYYXXXXXXXXXEQLSNEMVVEG

SEQ ID NO: 12765 - protein, 33 aa, Artificial Sequence
  Non-cyclic GFR-binding peptide
  MOD_RES (2), (3): Xaa is C or S
TXXVPTRLNAISILYFDSANNVVLKKYRDMVVE

SEQ ID NO: 12766 - protein, 35 aa, Artificial Sequence
  Non-cyclic GFR-binding peptide
  MOD_RES (2), (3), (34): Xaa is C or S
PXXVPQDLSPISILFIVGRTPKVYKQYEMVVKSXK

SEQ ID NO: 12767 - protein, 38 aa, Artificial Sequence
  Non-cyclic GFR-binding peptide
  MOD_RES (4), (36), (38): Xaa is C or S
KPTXAPTKLEPLTVLYYDDSSNVIEQLSNNMVVRSXGX

SEQ ID NO: 12768 - protein, 39 aa, Artificial Sequence
  Non-cyclic GFR-binding peptide
  MOD_RES (5), (6): Xaa is C or S
  MOD_RES (20), (21), (22), (23), (24): Xaa is A or G
  MOD_RES (25), (26), (27), (28): Xaa is A or G or is absent
IPKAXXVPTELEPLPMVYYXXXXXXXXXEQLSNDMVVEG

SEQ ID NO: 12769 - protein, 35 aa, Artificial Sequence
  Non-cyclic GFR-binding peptide
  MOD_RES (3), (4): Xaa is C or S
KAXXVPTELEPLTMLYYDENEKVVEQLSNDMVVEG

SEQ ID NO: 12770 - protein, 36 aa, Artificial Sequence
  Non-cyclic GFR-binding peptide
  MOD_RES (3), (4), (35): Xaa is C or S
APXXVPQALEPLTILYYVGRKPKVEQLSNMIVRSXK

SEQ ID NO: 12771 - protein, 40 aa, Artificial Sequence
  Non-cyclic GFR-binding peptide
  MOD_RES (5), (6), (40): Xaa is C or S
  MOD_RES (20), (21), (22), (23), (24): Xaa is A or G
  MOD_RES (25), (26), (27), (28): Xaa is A or G or is absent
IPKAXXVPTELEPLPMVYYXXXXXXXXXEQLSNEMVVEGX

SEQ ID NO: 12772 - protein, 34 aa, Artificial Sequence
  Non-cyclic GFR-binding peptide
  MOD_RES (1), (2): Xaa is C or S
  MOD_RES (16), (17), (18), (19), (20): Xaa is A or G
  MOD_RES (21), (22), (23), (24): Xaa is A or G or is absent
XXAPTQLEPLPVVYYXXXXXXXXXEQLSNNMVVR

SEQ ID NO: 12773 - protein, 33 aa, Artificial Sequence
  Non-cyclic GFR-binding peptide
  MOD_RES (1), (33): Xaa is C or S
XVPTELSPISMLFIDEYDKVVYKQYEEMVVEGX

SEQ ID NO: 12774 - protein, 36 aa, Artificial Sequence
  Non-cyclic GFR-binding peptide
  MOD_RES (3), (4), (36): Xaa is C or S
KPXXAPTQLSPISVLFIDDSSNVIYKQYENMVVRAX

SEQ ID NO: 12775 - protein, 33 aa, Artificial Sequence
  Non-cyclic GFR-binding peptide
  MOD_RES (1), (32): Xaa is C or S
XVSQDLSPISILFIIGKTPKIYKQYEMIVKSXK

SEQ ID NO: 12776 - protein, 40 aa, Artificial Sequence
  Non-cyclic GFR-binding peptide
  MOD_RES (2), (3), (37), (39): Xaa is C or S
  MOD_RES (17), (18), (19), (20), (21): Xaa is A or G
  MOD_RES (22), (23), (24), (25): Xaa is A or G or is absent
AXXVPTELSPISMLFIXXXXXXXXXYKQYEDMVVEGXGXR

SEQ ID NO: 12777 - protein, 34 aa, Artificial Sequence
  Non-cyclic GFR-binding peptide
  MOD_RES (2), (3): Xaa is C or S
TXXVPTRLEPLPIVYYDSANNVVEQLSNDMVVES

SEQ ID NO: 12778 - protein, 35 aa, Artificial Sequence
  Non-cyclic GFR-binding peptide
  MOD_RES (4), (5): Xaa is C or S
PKPXXAPTKLSPISVLFIDDSSNVIYKQYENMVVR

SEQ ID NO: 12779 - protein, 39 aa, Artificial Sequence
  Non-cyclic GFR-binding peptide
  MOD_RES (2), (3), (37), (39): Xaa is C or S
  MOD_RES (17), (18), (19), (20), (21): Xaa is A or G
  MOD_RES (22), (23), (24), (25): Xaa is A or G or is absent
PXXAPTKLEPLPVVYYXXXXXXXXXEQLSNNMVVRSXGX

SEQ ID NO: 12780 - protein, 33 aa, Artificial Sequence
  Non-cyclic GFR-binding peptide
  MOD_RES (14), (15), (16), (17), (18): Xaa is A or G
  MOD_RES (19), (20), (21), (22): Xaa is A or G or is absent
VPTELSPISMLFIXXXXXXXXXYKQYEEMVVEG

SEQ ID NO: 12781 - protein, 42 aa, Artificial Sequence
  Non-cyclic GFR-binding peptide
  MOD_RES (4), (5), (39), (41): Xaa is C or S
  MOD_RES (19), (20), (21), (22), (23): Xaa is A or G
  MOD_RES (24), (25), (26), (27): Xaa is A or G or is absent
PKAXXVPTELSPISMLFIXXXXXXXXXYKQYEDMVVEGXGXR

SEQ ID NO: 12782 - protein, 39 aa, Artificial Sequence
  Non-cyclic GFR-binding peptide
  MOD_RES (6), (7): Xaa is C or S
  MOD_RES (21), (22), (23), (24), (25): Xaa is A or G
  MOD_RES (26), (27), (28), (29): Xaa is A or G or is absent
ASAAPXXVPQALEPLTILYYXXXXXXXXXEQLSNMIVRS

SEQ ID NO: 12783 - protein, 41 aa, Artificial Sequence
  Non-cyclic GFR-binding peptide
  MOD_RES (6), (7), (39), (41): Xaa is C or S
KIPKAXXVPTELSPISMLFIDENEKVVYKQYEDMVVEGXGX

SEQ ID NO: 12784 - protein, 39 aa, Artificial Sequence
  Non-cyclic GFR-binding peptide
  MOD_RES (3), (4), (36), (38): Xaa is C or S
KPXXAPTKLSPISVLFIDDSSNVIYKQYENMVVRSXGXH

SEQ ID NO: 12785 - protein, 39 aa, Artificial Sequence
  Non-cyclic GFR-binding peptide
  MOD_RES (6), (7), (39): Xaa is C or S
KIPKAXXVPTELEPLTMLYYDENEKVVEQLSNDMVVEGX

SEQ ID NO: 12786 - protein, 43 aa, Artificial Sequence
  Non-cyclic GFR-binding peptide
  MOD_RES (6), (7), (41), (43): Xaa is C or S
  MOD_RES (21), (22), (23), (24), (25): Xaa is A or G
  MOD_RES (26), (27), (28), (29): Xaa is A or G or is absent
YVPKPXXAPTKLEPLPVVYYXXXXXXXXXEQLSNNMVVRSXGX

SEQ ID NO: 12787 - protein, 34 aa, Artificial Sequence
  Non-cyclic GFR-binding peptide
  MOD_RES (31), (33): Xaa is C or S
VPQDLSPISILFIVGRTPKVYKQYEMVVKSXKXS

SEQ ID NO: 12788 - protein, 43 aa, Artificial Sequence
  Non-cyclic GFR-binding peptide
  MOD_RES (5), (6), (40), (42): Xaa is C or S
  MOD_RES (20), (21), (22), (23), (24): Xaa is A or G
  MOD_RES (25), (26), (27), (28): Xaa is A or G or is absent
TPPTXXVPTRLEPLPIVYYXXXXXXXXXEQLSNDMVVESXGXR

SEQ ID NO: 12789 - protein, 33 aa, Artificial Sequence
  Non-cyclic GFR-binding peptide
  MOD_RES (33), (33): Xaa is C or S
  MOD_RES (14), (15), (16), (17), (18): Xaa is A or G
  MOD_RES (19), (20), (21), (22): Xaa is A or G or is absent
VSQDLSPISILFIXXXXXXXXXYKQYEMIVKSX

SEQ ID NO: 12790 - protein, 40 aa, Artificial Sequence
  Non-cyclic GFR-binding peptide
  MOD_RES (4), (5), (37), (39): Xaa is C or S
PKPXXAPTKLEPLTVLYYDDSSNVIEQLSNNMVVRSXGXH

SEQ ID NO: 12791 - protein, 37 aa, Artificial Sequence
  Non-cyclic GFR-binding peptide
  MOD_RES (4), (5), (37): Xaa is C or S
PKAXXVPTELSPISMLFIDEYDKVVYKQYEEMVVEGX

SEQ ID NO: 12792 - protein, 35 aa, Artificial Sequence
  Non-cyclic GFR-binding peptide
  MOD_RES (1), (34): Xaa is C or S
  MOD_RES (15), (16), (17), (18), (19): Xaa is A or G
  MOD_RES (20), (21), (22), (23): Xaa is A or G or is absent
XVSQDLEPLPIVYYXXXXXXXXXEQLSNMIVKSXK

SEQ ID NO: 12793 - protein, 34 aa, Artificial Sequence
  Non-cyclic GFR-binding peptide
  MOD_RES (1), (2), (34): Xaa is C or S
XXAPTKLSPISVLFIDDSSNVIYKQYENMVVRSX

SEQ ID NO: 12794 - protein, 40 aa, Artificial Sequence
  Non-cyclic GFR-binding peptide
  MOD_RES (2), (3), (37), (39): Xaa is C or S
  MOD_RES (17), (18), (19), (20), (21): Xaa is A or G
  MOD_RES (22), (23), (24), (25): Xaa is A or G or is absent
PXXAPTKLEPLTVLYYXXXXXXXXXEQLSNNMVVRSXGXH

SEQ ID NO: 12795 - protein, 40 aa, Artificial Sequence
  Non-cyclic GFR-binding peptide
  MOD_RES (4), (38), (40): Xaa is C or S
  MOD_RES (18), (19), (20), (21), (22): Xaa is A or G
  MOD_RES (23), (24), (25), (26): Xaa is A or G or is absent
KPTXAPTKLEPLTVLYYXXXXXXXXXEQLSNNMVVRSXGX

SEQ ID NO: 12796 - protein, 34 aa, Artificial Sequence
  Non-cyclic GFR-binding peptide
  MOD_RES (1), (2): Xaa is C or S
  MOD_RES (16), (17), (18), (19), (20): Xaa is A or G
  MOD_RES (21), (22), (23), (24): Xaa is A or G or is absent
XXAPTKLEPLPVVYYXXXXXXXXXEQLSNNMVVR

SEQ ID NO: 12797 - protein, 37 aa, Artificial Sequence
  Non-cyclic GFR-binding peptide
  MOD_RES (2), (3), (37): Xaa is C or S
  MOD_RES (17), (18), (19), (20), (21): Xaa is A or G
  MOD_RES (22), (23), (24), (25): Xaa is A or G or is absent
PXXAPTKLEPLTVLYYXXXXXXXXXEQLSNNMVVRSX

SEQ ID NO: 12798 - protein, 36 aa, Artificial Sequence
  Non-cyclic GFR-binding peptide
  MOD_RES (4), (5), (36): Xaa is C or S
ASPXXVPQDLEPLPIVYYVGRTPKVEQLSNMVVKSX

SEQ ID NO: 12799 - protein, 37 aa, Artificial Sequence
  Non-cyclic GFR-binding peptide
  MOD_RES (2), (36): Xaa is C or S
  MOD_RES (16), (17), (18), (19), (20): Xaa is A or G
  MOD_RES (21), (22), (23), (24): Xaa is A or G or is absent
TXAPTKLEPLPVVYYXXXXXXXXXEQLSNNMVVRSXG

SEQ ID NO: 12800 - protein, 32 aa, Artificial Sequence
  Non-cyclic GFR-binding peptide
  MOD_RES (1), (2): Xaa is C or S
XXVSQDLSPISILFIIGKTPKIYKQYEMIVKS

SEQ ID NO: 12801 - protein, 37 aa, Artificial Sequence
  Non-cyclic GFR-binding peptide
  MOD_RES (2), (3), (36): Xaa is C or S
  MOD_RES (17), (18), (19), (20), (21): Xaa is A or G
  MOD_RES (22), (23), (24), (25): Xaa is A or G or is absent
PXXVPQALSPISILFIXXXXXXXXXYKQYEMIVRSXK

SEQ ID NO: 12802 - protein, 32 aa, Artificial Sequence
  Non-cyclic GFR-binding peptide
  MOD_RES (14), (15), (16), (17), (18): Xaa is A or G
  MOD_RES (19), (20), (21), (22): Xaa is A or G or is absent
VPQDLEPLPIVYYXXXXXXXXXEQLSNMVVKS

SEQ ID NO: 12803 - protein, 36 aa, Artificial Sequence
  Non-cyclic GFR-binding peptide
  MOD_RES (2), (3): Xaa is C or S
  MOD_RES (17), (18), (19), (20), (21): Xaa is A or G
  MOD_RES (22), (23), (24), (25): Xaa is A or G or is absent
TXXVPTRLEPLTILYYXXXXXXXXXEQLSNDMVVES

SEQ ID NO: 12804 - protein, 31 aa, Artificial Sequence
  Non-cyclic GFR-binding peptide
APTQLEPLPVVYYDDSSNVIEQLSNNMVVRA

SEQ ID NO: 12805 - protein, 34 aa, Artificial Sequence
  Non-cyclic GFR-binding peptide
  MOD_RES (32), (34): Xaa is C or S
APTKLEPLPVVYYDDSSNVIEQLSNNMVVRSXGX

SEQ ID NO: 12806 - protein, 37 aa, Artificial Sequence
  Non-cyclic GFR-binding peptide
  MOD_RES (2), (3), (35), (37): Xaa is C or S
TXXVPTRLNAISILYFDSANNVVLKKYRDMVVESXGX

SEQ ID NO: 12807 - protein, 38 aa, Artificial Sequence
  Non-cyclic GFR-binding peptide
  MOD_RES (7), (7): Xaa is C or S
HVTKPTXAPTKLSPISVLFIDDSSNVIYKQYENMVVRS

SEQ ID NO: 12808 - protein, 39 aa, Artificial Sequence
  Non-cyclic GFR-binding peptide
  MOD_RES (6), (7): Xaa is C or S
  MOD_RES (21), (22), (23), (24), (25): Xaa is A or G
  MOD_RES (26), (27), (28), (29): Xaa is A or G or is absent
YVPKPXXAPTKLEPLTVLYYXXXXXXXXXEQLSNNMVVR

SEQ ID NO: 12809 - protein, 36 aa, Artificial Sequence
  Non-cyclic GFR-binding peptide
  MOD_RES (34), (36): Xaa is C or S
  MOD_RES (14), (15), (16), (17), (18): Xaa is A or G
  MOD_RES (19), (20), (21), (22): Xaa is A or G or is absent
VPTRLNAISILYFXXXXXXXXXLKKYRDMVVESXGX

SEQ ID NO: 12810 - protein, 41 aa, Artificial Sequence
  Non-cyclic GFR-binding peptide
  MOD_RES (3), (4), (38), (40): Xaa is C or S
  MOD_RES (18), (19), (20), (21), (22): Xaa is A or G
  MOD_RES (23), (24), (25), (26): Xaa is A or G or is absent
PTXXVPTRLEPLTILYYXXXXXXXXXEQLSNDMVVESXGXR

SEQ ID NO: 12811 - protein, 33 aa, Artificial Sequence
  Non-cyclic GFR-binding peptide
  MOD_RES (32), (32): Xaa is C or S
VPTRLNAISILYFDSANNVVLKKYRDMVVESXG

SEQ ID NO: 12812 - protein, 38 aa, Artificial Sequence
  Non-cyclic GFR-binding peptide
  MOD_RES (4), (5): Xaa is C or S
  MOD_RES (19), (20), (21), (22), (23): Xaa is A or G
  MOD_RES (24), (25), (26), (27): Xaa is A or G or is absent
PKAXXVPTELEPLTMLYYXXXXXXXXXEQLSNDMVVEG

SEQ ID NO: 12813 - protein, 33 aa, Artificial Sequence
  Non-cyclic GFR-binding peptide
  MOD_RES (1), (33): Xaa is C or S
XVPTELEPLPMVYYDENEKVVEQLSNDMVVEGX

SEQ ID NO: 12814 - protein, 33 aa, Artificial Sequence
  Non-cyclic GFR-binding peptide
  MOD_RES (31), (33): Xaa is C or S
VPQDLEPLPIVYYVGRTPKVEQLSNMVVKSXKX

SEQ ID NO: 12815 - protein, 42 aa, Artificial Sequence
  Non-cyclic GFR-binding peptide
  MOD_RES (6), (7), (41): Xaa is C or S
  MOD_RES (21), (22), (23), (24), (25): Xaa is A or G
  MOD_RES (26), (27), (28), (29): Xaa is A or G or is absent
STPPTXXVPTRLSAISILYLXXXXXXXXXLKNYQDMVVESXG

SEQ ID NO: 12816 - protein, 33 aa, Artificial Sequence
  Non-cyclic GFR-binding peptide
  MOD_RES (2), (3): Xaa is C or S
PXXAPTKLEPLPVVYYDDSSNVIEQLSNNMVVR

SEQ ID NO: 12817 - protein, 43 aa, Artificial Sequence
  Non-cyclic GFR-binding peptide
  MOD_RES (5), (6), (40), (42): Xaa is C or S
  MOD_RES (20), (21), (22), (23), (24): Xaa is A or G
  MOD_RES (25), (26), (27), (28): Xaa is A or G or is absent
IPKAXXVPTELEPLPMVYYXXXXXXXXXEQLSNDMVVEGXGXR

SEQ ID NO: 12818 - protein, 33 aa, Artificial Sequence
  Non-cyclic GFR-binding peptide
  MOD_RES (32), (32): Xaa is C or S
VPTELSPISMLFIDENEKVVYKQYEDMVVEGXG

SEQ ID NO: 12819 - protein, 39 aa, Artificial Sequence
  Non-cyclic GFR-binding peptide
  MOD_RES (4), (5), (39): Xaa is C or S
  MOD_RES (19), (20), (21), (22), (23): Xaa is A or G
  MOD_RES (24), (25), (26), (27): Xaa is A or G or is absent
PKPXXAPTKLEPLTVLYYXXXXXXXXXEQLSNNMVVRSX

SEQ ID NO: 12820 - protein, 38 aa, Artificial Sequence
  Non-cyclic GFR-binding peptide
  MOD_RES (1), (35), (37): Xaa is C or S
  MOD_RES (15), (16), (17), (18), (19): Xaa is A or G
  MOD_RES (20), (21), (22), (23): Xaa is A or G or is absent
XVPTELEPLTMLYYXXXXXXXXXEQLSNEMVVEGXGXR

SEQ ID NO: 12821 - protein, 36 aa, Artificial Sequence
  Non-cyclic GFR-binding peptide
  MOD_RES (4), (5): Xaa is C or S
PKPXXAPTKLEPLTVLYYDDSSNVIEQLSNNMVVRS

SEQ ID NO: 12822 - protein, 35 aa, Artificial Sequence
  Non-cyclic GFR-binding peptide
  MOD_RES (3), (35): Xaa is C or S
PTXAPTKLEPLTVLYYDDSSNVIEQLSNNMVVRSX

SEQ ID NO: 12823 - protein, 42 aa, Artificial Sequence
  Non-cyclic GFR-binding peptide
  MOD_RES (6), (7), (39), (41): Xaa is C or S
SIPKAXXVPTELEPLTMLYYDEYDKVVEQLSNEMVVEGXGXR

SEQ ID NO: 12824 - protein, 38 aa, Artificial Sequence
  Non-cyclic GFR-binding peptide
  MOD_RES (6), (7): Xaa is C or S
YVPKPXXAPTKLSPISVLFIDDSSNVIYKQYENMVVRS

SEQ ID NO: 12825 - protein, 38 aa, Artificial Sequence
  Non-cyclic GFR-binding peptide
  MOD_RES (1), (35), (37): Xaa is C or S
  MOD_RES (15), (16), (17), (18), (19): Xaa is A or G
  MOD_RES (20), (21), (22), (23): Xaa is A or G or is absent
XVPTELSPISMLFIXXXXXXXXXYKQYEDMVVEGXGXR

SEQ ID NO: 12826 - protein, 32 aa, Artificial Sequence
  Non-cyclic GFR-binding peptide
  MOD_RES (14), (15), (16), (17), (18): Xaa is A or G
  MOD_RES (19), (20), (21), (22): Xaa is A or G or is absent
APTQLSPISVLFIXXXXXXXXXYKQYENMVVR

SEQ ID NO: 12827 - protein, 39 aa, Artificial Sequence
  Non-cyclic GFR-binding peptide
  MOD_RES (3), (4), (36), (38): Xaa is C or S
KAXXVPTELEPLPMVYYDENEKVVEQLSNDMVVEGXGXR

SEQ ID NO: 12828 - protein, 34 aa, Artificial Sequence
  Non-cyclic GFR-binding peptide
  MOD_RES (1), (2), (34): Xaa is C or S
XXVPTRLEPLTILYYDSANNVVEQLSNDMVVESX

SEQ ID NO: 12829 - protein, 35 aa, Artificial Sequence
  Non-cyclic GFR-binding peptide
  MOD_RES (2), (3): Xaa is C or S
  MOD_RES (17), (18), (19), (20), (21): Xaa is A or G
  MOD_RES (22), (23), (24), (25): Xaa is A or G or is absent
PXXVPQALSPISILFIXXXXXXXXXYKQYEMIVRS

SEQ ID NO: 12830 - protein, 38 aa, Artificial Sequence
  Non-cyclic GFR-binding peptide
  MOD_RES (6), (7), (38): Xaa is C or S
ASASPXXVPQDLEPLPIVYYVGRTPKVEQLSNMVVKSX

SEQ ID NO: 12831 - protein, 40 aa, Artificial Sequence
  Non-cyclic GFR-binding peptide
  MOD_RES (5), (37), (39): Xaa is C or S
TKPTXAPTKLEPLTVLYYDDSSNVIEQLSNNMVVRSXGXH

SEQ ID NO: 12832 - protein, 30 aa, Artificial Sequence
  Non-cyclic GFR-binding peptide
APTQLSPISVLFIDDSSNVIYKQYENMVVR

SEQ ID NO: 12833 - protein, 37 aa, Artificial Sequence
  Non-cyclic GFR-binding peptide
  MOD_RES (6), (7): Xaa is C or S
TVPKPXXAPTQLSPISVLFIDDSSNVIYKQYENMVVR

SEQ ID NO: 12834 - protein, 39 aa, Artificial Sequence
  Non-cyclic GFR-binding peptide
  MOD_RES (4), (38): Xaa is C or S
  MOD_RES (18), (19), (20), (21), (22): Xaa is A or G
  MOD_RES (23), (24), (25), (26): Xaa is A or G or is absent
KPTXAPTKLSPISVLFIXXXXXXXXXYKQYENMVVRSXG

SEQ ID NO: 12835 - protein, 41 aa, Artificial Sequence
  Non-cyclic GFR-binding peptide
  MOD_RES (6), (7), (39), (41): Xaa is C or S
YVPKPXXAPTKLEPLTVLYYDDSSNVIEQLSNNMVVRSXGX

SEQ ID NO: 12836 - protein, 34 aa, Artificial Sequence
  Non-cyclic GFR-binding peptide
  MOD_RES (1), (33): Xaa is C or S
XVPTELSPISMLFIDENEKVVYKQYEDMVVEGXG

SEQ ID NO: 12837 - protein, 36 aa, Artificial Sequence
  Non-cyclic GFR-binding peptide
  MOD_RES (3), (4): Xaa is C or S
  MOD_RES (18), (19), (20), (21), (22): Xaa is A or G
  MOD_RES (23), (24), (25), (26): Xaa is A or G or is absent
APXXVPQALSPISILFIXXXXXXXXXYKQYEMIVRS

SEQ ID NO: 12838 - protein, 41 aa, Artificial Sequence
  Non-cyclic GFR-binding peptide
  MOD_RES (6), (7), (39), (41): Xaa is C or S
YVPKPXXAPTKLSPISVLFIDDSSNVIYKQYENMVVRSXGX

SEQ ID NO: 12839 - protein, 38 aa, Artificial Sequence
  Non-cyclic GFR-binding peptide
  MOD_RES (2), (3), (36), (38): Xaa is C or S
  MOD_RES (17), (18), (19), (20), (21): Xaa is A or G
  MOD_RES (22), (23), (24), (25): Xaa is A or G or is absent
PXXVPQALEPLTILYYXXXXXXXXXEQLSNMIVRSXKX

SEQ ID NO: 12840 - protein, 42 aa, Artificial Sequence
  Non-cyclic GFR-binding peptide
  MOD_RES (4), (5), (39), (41): Xaa is C or S
  MOD_RES (19), (20), (21), (22), (23): Xaa is A or G
  MOD_RES (24), (25), (26), (27): Xaa is A or G or is absent
PKAXXVPTELSPISMLFIXXXXXXXXXYKQYEEMVVEGXGXR

SEQ ID NO: 12841 - protein, 36 aa, Artificial Sequence
  Non-cyclic GFR-binding peptide
  MOD_RES (34), (36): Xaa is C or S
  MOD_RES (14), (15), (16), (17), (18): Xaa is A or G
  MOD_RES (19), (20), (21), (22): Xaa is A or G or is absent
APTKLSPISVLFIXXXXXXXXXYKQYENMVVRSXGX

SEQ ID NO: 12842 - protein, 36 aa, Artificial Sequence
  Non-cyclic GFR-binding peptide
  MOD_RES (3), (4): Xaa is C or S
  MOD_RES (18), (19), (20), (21), (22): Xaa is A or G
  MOD_RES (23), (24), (25), (26): Xaa is A or G or is absent
PTXXVPTRLNAISILYFXXXXXXXXXLKKYRDMVVE

SEQ ID NO: 12843 - protein, 33 aa, Artificial Sequence
  Non-cyclic GFR-binding peptide
  MOD_RES (2), (3): Xaa is C or S
PXXVPQALSPISILFIVGRKPKVYKQYEMIVRS

SEQ ID NO: 12844 - protein, 30 aa, Artificial Sequence
  Non-cyclic GFR-binding peptide
VPTRLNAISILYFDSANNVVLKKYRDMVVE

SEQ ID NO: 12845 - protein, 39 aa, Artificial Sequence
  Non-cyclic GFR-binding peptide
  MOD_RES (5), (6), (37), (39): Xaa is C or S
SASPXXVSQDLEPLPIVYYIGKTPKIEQLSNMIVKSXKX

SEQ ID NO: 12846 - protein, 38 aa, Artificial Sequence
  Non-cyclic GFR-binding peptide
  MOD_RES (3), (4), (38): Xaa is C or S
  MOD_RES (18), (19), (20), (21), (22): Xaa is A or G
  MOD_RES (23), (24), (25), (26): Xaa is A or G or is absent
KPXXAPTQLEPLTVLYYXXXXXXXXXEQLSNNMVVRAX

SEQ ID NO: 12847 - protein, 38 aa, Artificial Sequence
  Non-cyclic GFR-binding peptide
  MOD_RES (4), (38): Xaa is C or S
  MOD_RES (18), (19), (20), (21), (22): Xaa is A or G
  MOD_RES (23), (24), (25), (26): Xaa is A or G or is absent
KPTXAPTKLSPISVLFIXXXXXXXXXYKQYENMVVRSX

SEQ ID NO: 12848 - protein, 36 aa, Artificial Sequence
  Non-cyclic GFR-binding peptide
  MOD_RES (1), (35): Xaa is C or S
  MOD_RES (15), (16), (17), (18), (19): Xaa is A or G
  MOD_RES (20), (21), (22), (23): Xaa is A or G or is absent
XVPTELSPISMLFIXXXXXXXXXYKQYEDMVVEGXG

SEQ ID NO: 12849 - protein, 41 aa, Artificial Sequence
  Non-cyclic GFR-binding peptide
  MOD_RES (6), (7), (39), (41): Xaa is C or S
STPPTXXVPTRLEPLTILYYDSANNVVEQLSNDMVVESXGX

SEQ ID NO: 12850 - protein, 34 aa, Artificial Sequence
  Non-cyclic GFR-binding peptide
  MOD_RES (33), (33): Xaa is C or S
  MOD_RES (14), (15), (16), (17), (18): Xaa is A or G
  MOD_RES (19), (20), (21), (22): Xaa is A or G or is absent
VPQALEPLTILYYXXXXXXXXXEQLSNMIVRSXK

SEQ ID NO: 12851 - protein, 37 aa, Artificial Sequence
  Non-cyclic GFR-binding peptide
  MOD_RES (6), (7): Xaa is C or S
KIPKAXXVPTELEPLPMVYYDENEKVVEQLSNDMVVE

SEQ ID NO: 12852 - protein, 33 aa, Artificial Sequence
  Non-cyclic GFR-binding peptide
  MOD_RES (1), (2): Xaa is C or S
XXVPTELEPLTMLYYDENEKVVEQLSNDMVVEG

SEQ ID NO: 12853 - protein, 38 aa, Artificial Sequence
  Non-cyclic GFR-binding peptide
  MOD_RES (5), (5): Xaa is C or S
  MOD_RES (19), (20), (21), (22), (23): Xaa is A or G
  MOD_RES (24), (25), (26), (27): Xaa is A or G or is absent
TKPTXAPTKLEPLTVLYYXXXXXXXXXEQLSNNMVVRS

SEQ ID NO: 12854 - protein, 35 aa, Artificial Sequence
  Non-cyclic GFR-binding peptide
  MOD_RES (1), (2), (33), (35): Xaa is C or S
XXVPQDLSPISILFIVGRTPKVYKQYEMVVKSXKX

SEQ ID NO: 12855 - protein, 36 aa, Artificial Sequence
  Non-cyclic GFR-binding peptide
  MOD_RES (1), (35): Xaa is C or S
  MOD_RES (15), (16), (17), (18), (19): Xaa is A or G
  MOD_RES (20), (21), (22), (23): Xaa is A or G or is absent
XAPTKLSPISVLFIXXXXXXXXXYKQYENMVVRSXG

SEQ ID NO: 12856 - protein, 42 aa, Artificial Sequence
  Non-cyclic GFR-binding peptide
  MOD_RES (4), (5), (39), (41): Xaa is C or S
  MOD_RES (19), (20), (21), (22), (23): Xaa is A or G
  MOD_RES (24), (25), (26), (27): Xaa is A or G or is absent
PPTXXVPTRLNAISILYFXXXXXXXXXLKKYRDMVVESXGXR

SEQ ID NO: 12857 - protein, 41 aa, Artificial Sequence
  Non-cyclic GFR-binding peptide
  MOD_RES (6), (7), (41): Xaa is C or S
  MOD_RES (21), (22), (23), (24), (25): Xaa is A or G
  MOD_RES (26), (27), (28), (29): Xaa is A or G or is absent
YVPKPXXAPTKLEPLTVLYYXXXXXXXXXEQLSNNMVVRSX

SEQ ID NO: 12858 - protein, 35 aa, Artificial Sequence
  Non-cyclic GFR-binding peptide
  MOD_RES (2), (3), (34): Xaa is C or S
PXXVPQALSPISILFIVGRKPKVYKQYEMIVRSXK

SEQ ID NO: 12859 - protein, 31 aa, Artificial Sequence
  Non-cyclic GFR-binding peptide
VPTRLNAISILYFDSANNVVLKKYRDMVVES

SEQ ID NO: 12860 - protein, 36 aa, Artificial Sequence
  Non-cyclic GFR-binding peptide
  MOD_RES (1), (2), (33), (35): Xaa is C or S
XXVPQDLEPLPIVYYVGRTPKVEQLSNMVVKSXKXS

SEQ ID NO: 12861 - protein, 34 aa, Artificial Sequence
  Non-cyclic GFR-binding peptide
  MOD_RES (1), (34): Xaa is C or S
  MOD_RES (15), (16), (17), (18), (19): Xaa is A or G
  MOD_RES (20), (21), (22), (23): Xaa is A or G or is absent
XVPQDLSPISILFIXXXXXXXXXYKQYEMVVKSX

SEQ ID NO: 12862 - protein, 33 aa, Artificial Sequence
  Non-cyclic GFR-binding peptide
  MOD_RES (1), (33): Xaa is C or S
XAPTQLEPLTVLYYDDSSNVIEQLSNNMVVRAX

SEQ ID NO: 12863 - protein, 39 aa, Artificial Sequence
  Non-cyclic GFR-binding peptide
  MOD_RES (7), (39): Xaa is C or S
HVTKPTXAPTKLEPLPVVYYDDSSNVIEQLSNNMVVRSX

SEQ ID NO: 12864 - protein, 39 aa, Artificial Sequence
  Non-cyclic GFR-binding peptide
  MOD_RES (4), (5), (39): Xaa is C or S
  MOD_RES (19), (20), (21), (22), (23): Xaa is A or G
  MOD_RES (24), (25), (26), (27): Xaa is A or G or is absent
PKPXXAPTQLSPISVLFIXXXXXXXXXYKQYENMVVRAX

SEQ ID NO: 12865 - protein, 39 aa, Artificial Sequence
  Non-cyclic GFR-binding peptide
  MOD_RES (5), (6): Xaa is C or S
  MOD_RES (20), (21), (22), (23), (24): Xaa is A or G
  MOD_RES (25), (26), (27), (28): Xaa is A or G or is absent
IPKAXXVPTELSPISMLFIXXXXXXXXXYKQYEDMVVEG

SEQ ID NO: 12866 - protein, 36 aa, Artificial Sequence
  Non-cyclic GFR-binding peptide
  MOD_RES (5), (6): Xaa is C or S
VPKPXXAPTKLEPLTVLYYDDSSNVIEQLSNNMVVR

SEQ ID NO: 12867 - protein, 37 aa, Artificial Sequence
  Non-cyclic GFR-binding peptide
  MOD_RES (5), (6): Xaa is C or S
TPPTXXVPTRLEPLTILYYDSANNVVEQLSNDMVVES

SEQ ID NO: 12868 - protein, 39 aa, Artificial Sequence
  Non-cyclic GFR-binding peptide
  MOD_RES (5), (6): Xaa is C or S
  MOD_RES (20), (21), (22), (23), (24): Xaa is A or G
  MOD_RES (25), (26), (27), (28): Xaa is A or G or is absent
TPPTXXVPTRLSAISILYLXXXXXXXXXLKNYQDMVVES

SEQ ID NO: 12869 - protein, 38 aa, Artificial Sequence
  Non-cyclic GFR-binding peptide
  MOD_RES (6), (7): Xaa is C or S
SIPKAXXVPTELEPLTMLYYDEYDKVVEQLSNEMVVEG

SEQ ID NO: 12870 - protein, 37 aa, Artificial Sequence
  Non-cyclic GFR-binding peptide
  MOD_RES (3), (4), (36): Xaa is C or S
PTXXVPTRLEPLPIVYYDSANNVVEQLSNDMVVESXG

SEQ ID NO: 12871 - protein, 37 aa, Artificial Sequence
  Non-cyclic GFR-binding peptide
  MOD_RES (4), (5), (37): Xaa is C or S
PKPXXAPTKLEPLTVLYYDDSSNVIEQLSNNMVVRSX

SEQ ID NO: 12872 - protein, 43 aa, Artificial Sequence
  Non-cyclic GFR-binding peptide
  MOD_RES (6), (7), (41), (43): Xaa is C or S
  MOD_RES (21), (22), (23), (24), (25): Xaa is A or G
  MOD_RES (26), (27), (28), (29): Xaa is A or G or is absent
SIPKAXXVPTELSPISMLFIXXXXXXXXXYKQYEEMVVEGXGX

SEQ ID NO: 12873 - protein, 37 aa, Artificial Sequence
  Non-cyclic GFR-binding peptide
  MOD_RES (3), (4), (35), (37): Xaa is C or S
SPXXVSQDLEPLPIVYYIGKTPKIEQLSNMIVKSXKX

SEQ ID NO: 12874 - protein, 41 aa, Artificial Sequence
  Non-cyclic GFR-binding peptide
  MOD_RES (3), (4), (38), (40): Xaa is C or S
  MOD_RES (18), (19), (20), (21), (22): Xaa is A or G
  MOD_RES (23), (24), (25), (26): Xaa is A or G or is absent
KPXXAPTKLEPLPVVYYXXXXXXXXXEQLSNNMVVRSXGXH

SEQ ID NO: 12875 - protein, 33 aa, Artificial Sequence
  Non-cyclic GFR-binding peptide
  MOD_RES (14), (15), (16), (17), (18): Xaa is A or G
  MOD_RES (19), (20), (21), (22): Xaa is A or G or is absent
VPTELEPLPMVYYXXXXXXXXXEQLSNEMVVEG

SEQ ID NO: 12876 - protein, 44 aa, Artificial Sequence
  Non-cyclic GFR-binding peptide
  MOD_RES (6), (7), (41), (43): Xaa is C or S
  MOD_RES (21), (22), (23), (24), (25): Xaa is A or G
  MOD_RES (26), (27), (28), (29): Xaa is A or G or is absent
STPPTXXVPTRLEPLPIVYYXXXXXXXXXEQLSNDMVVESXGXR

SEQ ID NO: 12877 - protein, 39 aa, Artificial Sequence
  Non-cyclic GFR-binding peptide
  MOD_RES (5), (6): Xaa is C or S
  MOD_RES (20), (21), (22), (23), (24): Xaa is A or G
  MOD_RES (25), (26), (27), (28): Xaa is A or G or is absent
TPPTXXVPTRLNAISILYFXXXXXXXXXLKKYRDMVVES

SEQ ID NO: 12878 - protein, 39 aa, Artificial Sequence
  Non-cyclic GFR-binding peptide
  MOD_RES (4), (36), (38): Xaa is C or S
KPTXAPTKLEPLPVVYYDDSSNVIEQLSNNMVVRSXGXH

SEQ ID NO: 12879 - protein, 41 aa, Artificial Sequence
  Non-cyclic GFR-binding peptide
  MOD_RES (4), (5), (38), (40): Xaa is C or S
  MOD_RES (19), (20), (21), (22), (23): Xaa is A or G
  MOD_RES (24), (25), (26), (27): Xaa is A or G or is absent
ASPXXVPQDLSPISILFIXXXXXXXXXYKQYEMVVKSXKXS

SEQ ID NO: 12880 - protein, 36 aa, Artificial Sequence
  Non-cyclic GFR-binding peptide
  MOD_RES (5), (6): Xaa is C or S
VPKPXXAPTQLEPLPVVYYDDSSNVIEQLSNNMVVR

SEQ ID NO: 12881 - protein, 35 aa, Artificial Sequence
  Non-cyclic GFR-binding peptide
  MOD_RES (1), (2): Xaa is C or S
  MOD_RES (16), (17), (18), (19), (20): Xaa is A or G
  MOD_RES (21), (22), (23), (24): Xaa is A or G or is absent
XXAPTKLEPLTVLYYXXXXXXXXXEQLSNNMVVRS

SEQ ID NO: 12882 - protein, 39 aa, Artificial Sequence
  Non-cyclic GFR-binding peptide
  MOD_RES (4), (5), (36), (38): Xaa is C or S
ASPXXVSQDLSPISILFIIGKTPKIYKQYEMIVKSXKXS

SEQ ID NO: 12883 - protein, 35 aa, Artificial Sequence
  Non-cyclic GFR-binding peptide
  MOD_RES (1), (2): Xaa is C or S
  MOD_RES (16), (17), (18), (19), (20): Xaa is A or G
  MOD_RES (21), (22), (23), (24): Xaa is A or G or is absent
XXVPTRLSAISILYLXXXXXXXXXLKNYQDMVVES

SEQ ID NO: 12884 - protein, 40 aa, Artificial Sequence
  Non-cyclic GFR-binding peptide
  MOD_RES (3), (4), (38), (40): Xaa is C or S
  MOD_RES (18), (19), (20), (21), (22): Xaa is A or G
  MOD_RES (23), (24), (25), (26): Xaa is A or G or is absent
KPXXAPTKLEPLPVVYYXXXXXXXXXEQLSNNMVVRSXGX

SEQ ID NO: 12885 - protein, 32 aa, Artificial Sequence
  Non-cyclic GFR-binding peptide
  MOD_RES (1), (2): Xaa is C or S
XXVPTELEPLTMLYYDEYDKVVEQLSNEMVVE

SEQ ID NO: 12886 - protein, 39 aa, Artificial Sequence
  Non-cyclic GFR-binding peptide
  MOD_RES (1), (2), (36), (38): Xaa is C or S
  MOD_RES (16), (17), (18), (19), (20): Xaa is A or G
  MOD_RES (21), (22), (23), (24): Xaa is A or G or is absent
XXVPTELSPISMLFIXXXXXXXXXYKQYEEMVVEGXGXR

SEQ ID NO: 12887 - protein, 39 aa, Artificial Sequence
  Non-cyclic GFR-binding peptide
  MOD_RES (3), (4), (36), (38): Xaa is C or S
KAXXVPTELEPLPMVYYDEYDKVVEQLSNEMVVEGXGXR

SEQ ID NO: 12888 - protein, 35 aa, Artificial Sequence
  Non-cyclic GFR-binding peptide
  MOD_RES (32), (34): Xaa is C or S
VPTELEPLTMLYYDEYDKVVEQLSNEMVVEGXGXR

SEQ ID NO: 12889 - protein, 38 aa, Artificial Sequence
  Non-cyclic GFR-binding peptide
  MOD_RES (4), (5), (38): Xaa is C or S
  MOD_RES (19), (20), (21), (22), (23): Xaa is A or G
  MOD_RES (24), (25), (26), (27): Xaa is A or G or is absent
AAPXXVPQALEPLTILYYXXXXXXXXXEQLSNMIVRSX

SEQ ID NO: 12890 - protein, 36 aa, Artificial Sequence
  Non-cyclic GFR-binding peptide
  MOD_RES (1), (35): Xaa is C or S
  MOD_RES (15), (16), (17), (18), (19): Xaa is A or G
  MOD_RES (20), (21), (22), (23): Xaa is A or G or is absent
XVPTELEPLTMLYYXXXXXXXXXEQLSNDMVVEGXG

SEQ ID NO: 12891 - protein, 42 aa, Artificial Sequence
  Non-cyclic GFR-binding peptide
  MOD_RES (6), (7), (39), (41): Xaa is C or S
STPPTXXVPTRLNAISILYFDSANNVVLKKYRDMVVESXGXR

SEQ ID NO: 12892 - protein, 36 aa, Artificial Sequence
  Non-cyclic GFR-binding peptide
  MOD_RES (1), (33), (35): Xaa is C or S
XAPTQLEPLPVVYYDDSSNVIEQLSNNMVVRAXGXH

SEQ ID NO: 12893 - protein, 37 aa, Artificial Sequence
  Non-cyclic GFR-binding peptide
  MOD_RES (5), (6), (37): Xaa is C or S
SASPXXVSQDLEPLPIVYYIGKTPKIEQLSNMIVKSX

SEQ ID NO: 12894 - protein, 31 aa, Artificial Sequence
  Non-cyclic GFR-binding peptide
  MOD_RES (1), (1): Xaa is C or S
XVSQDLEPLPIVYYIGKTPKIEQLSNMIVKS

SEQ ID NO: 12895 - protein, 37 aa, Artificial Sequence
  Non-cyclic GFR-binding peptide
  MOD_RES (1), (2), (36): Xaa is C or S
  MOD_RES (16), (17), (18), (19), (20): Xaa is A or G
  MOD_RES (21), (22), (23), (24): Xaa is A or G or is absent
XXVPTELEPLPMVYYXXXXXXXXXEQLSNEMVVEGXG

SEQ ID NO: 12896 - protein, 39 aa, Artificial Sequence
  Non-cyclic GFR-binding peptide
  MOD_RES (5), (6), (38): Xaa is C or S
TPPTXXVPTRLSAISILYLDSANNVVLKNYQDMVVESXG

SEQ ID NO: 12897 - protein, 38 aa, Artificial Sequence
  Non-cyclic GFR-binding peptide
  MOD_RES (5), (6): Xaa is C or S
  MOD_RES (20), (21), (22), (23), (24): Xaa is A or G
  MOD_RES (25), (26), (27), (28): Xaa is A or G or is absent
VPKPXXAPTQLEPLPVVYYXXXXXXXXXEQLSNNMVVR

SEQ ID NO: 12898 - protein, 35 aa, Artificial Sequence
  Non-cyclic GFR-binding peptide
  MOD_RES (32), (34): Xaa is C or S
VPTELEPLTMLYYDENEKVVEQLSNDMVVEGXGXR

SEQ ID NO: 12899 - protein, 36 aa, Artificial Sequence
  Non-cyclic GFR-binding peptide
  MOD_RES (2), (36): Xaa is C or S
  MOD_RES (16), (17), (18), (19), (20): Xaa is A or G
  MOD_RES (21), (22), (23), (24): Xaa is A or G or is absent
TXAPTKLSPISVLFIXXXXXXXXXYKQYENMVVRSX

SEQ ID NO: 12900 - protein, 32 aa, Artificial Sequence
  Non-cyclic GFR-binding peptide
  MOD_RES (1), (2): Xaa is C or S
XXVSQDLEPLPIVYYIGKTPKIEQLSNMIVKS

SEQ ID NO: 12901 - protein, 32 aa, Artificial Sequence
  Non-cyclic GFR-binding peptide
  MOD_RES (32), (32): Xaa is C or S
VPTRLEPLPIVYYDSANNVVEQLSNDMVVESX

SEQ ID NO: 12902 - protein, 35 aa, Artificial Sequence
  Non-cyclic GFR-binding peptide
  MOD_RES (3), (3): Xaa is C or S
  MOD_RES (17), (18), (19), (20), (21): Xaa is A or G
  MOD_RES (22), (23), (24), (25): Xaa is A or G or is absent
PTXAPTKLSPISVLFIXXXXXXXXXYKQYENMVVR

SEQ ID NO: 12903 - protein, 39 aa, Artificial Sequence
  Non-cyclic GFR-binding peptide
  MOD_RES (4), (5), (37), (39): Xaa is C or S
PKPXXAPTQLEPLTVLYYDDSSNVIEQLSNNMVVRAXGX

SEQ ID NO: 12904 - protein, 36 aa, Artificial Sequence
  Non-cyclic GFR-binding peptide
  MOD_RES (5), (5): Xaa is C or S
TKPTXAPTKLEPLTVLYYDDSSNVIEQLSNNMVVRS

SEQ ID NO: 12905 - protein, 34 aa, Artificial Sequence
  Non-cyclic GFR-binding peptide
  MOD_RES (2), (34): Xaa is C or S
TXAPTKLEPLPVVYYDDSSNVIEQLSNNMVVRSX

SEQ ID NO: 12906 - protein, 35 aa, Artificial Sequence
  Non-cyclic GFR-binding peptide
  MOD_RES (4), (5): Xaa is C or S
PKAXXVPTELEPLPMVYYDEYDKVVEQLSNEMVVE

SEQ ID NO: 12907 - protein, 40 aa, Artificial Sequence
  Non-cyclic GFR-binding peptide
  MOD_RES (3), (37), (39): Xaa is C or S
  MOD_RES (17), (18), (19), (20), (21): Xaa is A or G
  MOD_RES (22), (23), (24), (25): Xaa is A or G or is absent
PTXAPTKLSPISVLFIXXXXXXXXXYKQYENMVVRSXGXH

SEQ ID NO: 12908 - protein, 33 aa, Artificial Sequence
  Non-cyclic GFR-binding peptide
  MOD_RES (14), (15), (16), (17), (18): Xaa is A or G
  MOD_RES (19), (20), (21), (22): Xaa is A or G or is absent
APTKLEPLPVVYYXXXXXXXXXEQLSNNMVVRS

SEQ ID NO: 12909 - protein, 43 aa, Artificial Sequence
  Non-cyclic GFR-binding peptide
  MOD_RES (6), (7), (41), (43): Xaa is C or S
  MOD_RES (21), (22), (23), (24), (25): Xaa is A or G
  MOD_RES (26), (27), (28), (29): Xaa is A or G or is absent
TVPKPXXAPTQLSPISVLFIXXXXXXXXXYKQYENMVVRAXGX

SEQ ID NO: 12910 - protein, 37 aa, Artificial Sequence
  Non-cyclic GFR-binding peptide
  MOD_RES (2), (3), (34), (36): Xaa is C or S
PXXVSQDLSPISILFIIGKTPKIYKQYEMIVKSXKXS

SEQ ID NO: 12911 - protein, 39 aa, Artificial Sequence
  Non-cyclic GFR-binding peptide
  MOD_RES (4), (5), (37), (39): Xaa is C or S
PKPXXAPTQLSPISVLFIDDSSNVIYKQYENMVVRAXGX

SEQ ID NO: 12912 - protein, 39 aa, Artificial Sequence
  Non-cyclic GFR-binding peptide
  MOD_RES (2), (3), (37), (39): Xaa is C or S
  MOD_RES (17), (18), (19), (20), (21): Xaa is A or G
  MOD_RES (22), (23), (24), (25): Xaa is A or G or is absent
AXXVPTELEPLPMVYYXXXXXXXXXEQLSNEMVVEGXGX

SEQ ID NO: 12913 - protein, 37 aa, Artificial Sequence
  Non-cyclic GFR-binding peptide
  MOD_RES (2), (3), (37): Xaa is C or S
  MOD_RES (17), (18), (19), (20), (21): Xaa is A or G
  MOD_RES (22), (23), (24), (25): Xaa is A or G or is absent
TXXVPTRLSAISILYLXXXXXXXXXLKNYQDMVVESX

SEQ ID NO: 12914 - protein, 33 aa, Artificial Sequence
  Non-cyclic GFR-binding peptide
  MOD_RES (14), (15), (16), (17), (18): Xaa is A or G
  MOD_RES (19), (20), (21), (22): Xaa is A or G or is absent
VPTRLNAISILYFXXXXXXXXXLKKYRDMVVES

SEQ ID NO: 12915 - protein, 31 aa, Artificial Sequence
  Non-cyclic GFR-binding peptide
  MOD_RES (1), (1): Xaa is C or S
XVPQDLSPISILFIVGRTPKVYKQYEMVVKS

SEQ ID NO: 12916 - protein, 36 aa, Artificial Sequence
  Non-cyclic GFR-binding peptide
  MOD_RES (34), (36): Xaa is C or S
  MOD_RES (14), (15), (16), (17), (18): Xaa is A or G
  MOD_RES (19), (20), (21), (22): Xaa is A or G or is absent
VPTELEPLTMLYYXXXXXXXXXEQLSNEMVVEGXGX

SEQ ID NO: 12917 - protein, 36 aa, Artificial Sequence
  Non-cyclic GFR-binding peptide
  MOD_RES (5), (6): Xaa is C or S
VPKPXXAPTQLEPLTVLYYDDSSNVIEQLSNNMVVR

SEQ ID NO: 12918 - protein, 33 aa, Artificial Sequence
  Non-cyclic GFR-binding peptide
  MOD_RES (14), (15), (16), (17), (18): Xaa is A or G
  MOD_RES (19), (20), (21), (22): Xaa is A or G or is absent
VPTRLSAISILYLXXXXXXXXXLKNYQDMVVES

SEQ ID NO: 12919 - protein, 33 aa, Artificial Sequence
  Non-cyclic GFR-binding peptide
  MOD_RES (2), (2): Xaa is C or S
TXAPTKLEPLTVLYYDDSSNVIEQLSNNMVVRS

SEQ ID NO: 12920 - protein, 36 aa, Artificial Sequence
  Non-cyclic GFR-binding peptide
  MOD_RES (4), (36): Xaa is C or S
KPTXAPTKLEPLPVVYYDDSSNVIEQLSNNMVVRSX

SEQ ID NO: 12921 - protein, 37 aa, Artificial Sequence
  Non-cyclic GFR-binding peptide
  MOD_RES (1), (2), (36): Xaa is C or S
  MOD_RES (16), (17), (18), (19), (20): Xaa is A or G
  MOD_RES (21), (22), (23), (24): Xaa is A or G or is absent
XXVPTRLEPLTILYYXXXXXXXXXEQLSNDMVVESXG

SEQ ID NO: 12922 - protein, 40 aa, Artificial Sequence
  Non-cyclic GFR-binding peptide
  MOD_RES (6), (7): Xaa is C or S
  MOD_RES (21), (22), (23), (24), (25): Xaa is A or G
  MOD_RES (26), (27), (28), (29): Xaa is A or G or is absent
STPPTXXVPTRLNAISILYFXXXXXXXXXLKKYRDMVVES

SEQ ID NO: 12923 - protein, 38 aa, Artificial Sequence
  Non-cyclic GFR-binding peptide
  MOD_RES (5), (37): Xaa is C or S
TKPTXAPTKLEPLTVLYYDDSSNVIEQLSNNMVVRSXG

SEQ ID NO: 12924 - protein, 33 aa, Artificial Sequence
  Non-cyclic GFR-binding peptide
  MOD_RES (2), (3): Xaa is C or S
PXXAPTQLSPISVLFIDDSSNVIYKQYENMVVR

SEQ ID NO: 12925 - protein, 40 aa, Artificial Sequence
  Non-cyclic GFR-binding peptide
  MOD_RES (5), (6), (38), (40): Xaa is C or S
IPKAXXVPTELEPLTMLYYDEYDKVVEQLSNEMVVEGXGX

SEQ ID NO: 12926 - protein, 32 aa, Artificial Sequence
  Non-cyclic GFR-binding peptide
  MOD_RES (1), (1): Xaa is C or S
XVPTELSPISMLFIDENEKVVYKQYEDMVVEG

SEQ ID NO: 12927 - protein, 33 aa, Artificial Sequence
  Non-cyclic GFR-binding peptide
  MOD_RES (14), (15), (16), (17), (18): Xaa is A or G
  MOD_RES (19), (20), (21), (22): Xaa is A or G or is absent
APTKLEPLTVLYYXXXXXXXXXEQLSNNMVVRS

SEQ ID NO: 12928 - protein, 39 aa, Artificial Sequence
  Non-cyclic GFR-binding peptide
  MOD_RES (5), (6), (39): Xaa is C or S
  MOD_RES (20), (21), (22), (23), (24): Xaa is A or G
  MOD_RES (25), (26), (27), (28): Xaa is A or G or is absent
SASPXXVSQDLEPLPIVYYXXXXXXXXXEQLSNMIVKSX

SEQ ID NO: 12929 - protein, 35 aa, Artificial Sequence
  Non-cyclic GFR-binding peptide
  MOD_RES (3), (4), (35): Xaa is C or S
SPXXVSQDLSPISILFIIGKTPKIYKQYEMIVKSX

SEQ ID NO: 12930 - protein, 38 aa, Artificial Sequence
  Non-cyclic GFR-binding peptide
  MOD_RES (4), (5), (36), (38): Xaa is C or S
ASPXXVPQDLEPLPIVYYVGRTPKVEQLSNMVVKSXKX

SEQ ID NO: 12931 - protein, 35 aa, Artificial Sequence
  Non-cyclic GFR-binding peptide
  MOD_RES (3), (4): Xaa is C or S
KPXXAPTQLSPISVLFIDDSSNVIYKQYENMVVRA

SEQ ID NO: 12932 - protein, 40 aa, Artificial Sequence
  Non-cyclic GFR-binding peptide
  MOD_RES (5), (6), (39): Xaa is C or S
  MOD_RES (20), (21), (22), (23), (24): Xaa is A or G
  MOD_RES (25), (26), (27), (28): Xaa is A or G or is absent
SASPXXVSQDLSPISILFIXXXXXXXXXYKQYEMIVKSXK

SEQ ID NO: 12933 - protein, 37 aa, Artificial Sequence
  Non-cyclic GFR-binding peptide
  MOD_RES (4), (5), (37): Xaa is C or S
PKPXXAPTKLEPLPVVYYDDSSNVIEQLSNNMVVRSX

SEQ ID NO: 12934 - protein, 40 aa, Artificial Sequence
  Non-cyclic GFR-binding peptide
  MOD_RES (3), (4), (38), (40): Xaa is C or S
  MOD_RES (18), (19), (20), (21), (22): Xaa is A or G
  MOD_RES (23), (24), (25), (26): Xaa is A or G or is absent
KPXXAPTQLSPISVLFIXXXXXXXXXYKQYENMVVRAXGX

SEQ ID NO: 12935 - protein, 36 aa, Artificial Sequence
  Non-cyclic GFR-binding peptide
  MOD_RES (2), (3): Xaa is C or S
  MOD_RES (17), (18), (19), (20), (21): Xaa is A or G
  MOD_RES (22), (23), (24), (25): Xaa is A or G or is absent
AXXVPTELEPLTMLYYXXXXXXXXXEQLSNEMVVEG

SEQ ID NO: 12936 - protein, 35 aa, Artificial Sequence
  Non-cyclic GFR-binding peptide
  MOD_RES (3), (35): Xaa is C or S
PTXAPTKLSPISVLFIDDSSNVIYKQYENMVVRSX

SEQ ID NO: 12937 - protein, 35 aa, Artificial Sequence
  Non-cyclic GFR-binding peptide
  MOD_RES (34), (34): Xaa is C or S
  MOD_RES (14), (15), (16), (17), (18): Xaa is A or G
  MOD_RES (19), (20), (21), (22): Xaa is A or G or is absent
APTQLEPLPVVYYXXXXXXXXXEQLSNNMVVRAXG

SEQ ID NO: 12938 - protein, 42 aa, Artificial Sequence
  Non-cyclic GFR-binding peptide
  MOD_RES (7), (41): Xaa is C or S
  MOD_RES (21), (22), (23), (24), (25): Xaa is A or G
  MOD_RES (26), (27), (28), (29): Xaa is A or G or is absent
HVTKPTXAPTKLEPLTVLYYXXXXXXXXXEQLSNNMVVRSXG

SEQ ID NO: 12939 - protein, 40 aa, Artificial Sequence
  Non-cyclic GFR-binding peptide
  MOD_RES (5), (6), (38), (40): Xaa is C or S
IPKAXXVPTELSPISMLFIDEYDKVVYKQYEEMVVEGXGX

SEQ ID NO: 12940 - protein, 38 aa, Artificial Sequence
  Non-cyclic GFR-binding peptide
  MOD_RES (6), (7): Xaa is C or S
SIPKAXXVPTELEPLPMVYYDEYDKVVEQLSNEMVVEG

SEQ ID NO: 12941 - protein, 39 aa, Artificial Sequence
  Non-cyclic GFR-binding peptide
  MOD_RES (6), (7): Xaa is C or S
  MOD_RES (21), (22), (23), (24), (25): Xaa is A or G
  MOD_RES (26), (27), (28), (29): Xaa is A or G or is absent
YVPKPXXAPTKLEPLPVVYYXXXXXXXXXEQLSNNMVVR

SEQ ID NO: 12942 - protein, 40 aa, Artificial Sequence
  Non-cyclic GFR-binding peptide
  MOD_RES (5), (6), (40): Xaa is C or S
  MOD_RES (20), (21), (22), (23), (24): Xaa is A or G
  MOD_RES (25), (26), (27), (28): Xaa is A or G or is absent
IPKAXXVPTELEPLTMLYYXXXXXXXXXEQLSNEMVVEGX

SEQ ID NO: 12943 - protein, 34 aa, Artificial Sequence
  Non-cyclic GFR-binding peptide
  MOD_RES (1), (1): Xaa is C or S
  MOD_RES (15), (16), (17), (18), (19): Xaa is A or G
  MOD_RES (20), (21), (22), (23): Xaa is A or G or is absent
XVPTRLEPLPIVYYXXXXXXXXXEQLSNDMVVES

SEQ ID NO: 12944 - protein, 40 aa, Artificial Sequence
  Non-cyclic GFR-binding peptide
  MOD_RES (6), (7): Xaa is C or S
  MOD_RES (21), (22), (23), (24), (25): Xaa is A or G
  MOD_RES (26), (27), (28), (29): Xaa is A or G or is absent
STPPTXXVPTRLSAISILYLXXXXXXXXXLKNYQDMVVES

SEQ ID NO: 12945 - protein, 37 aa, Artificial Sequence
  Non-cyclic GFR-binding peptide
  MOD_RES (4), (5), (37): Xaa is C or S
PKAXXVPTELEPLTMLYYDEYDKVVEQLSNEMVVEGX

SEQ ID NO: 12946 - protein, 31 aa, Artificial Sequence
  Non-cyclic GFR-binding peptide
VPTRLEPLTILYYDSANNVVEQLSNDMVVES

SEQ ID NO: 12947 - protein, 38 aa, Artificial Sequence
  Non-cyclic GFR-binding peptide
  MOD_RES (5), (6), (38): Xaa is C or S
IPKAXXVPTELEPLPMVYYDENEKVVEQLSNDMVVEGX

SEQ ID NO: 12948 - protein, 42 aa, Artificial Sequence
  Non-cyclic GFR-binding peptide
  MOD_RES (6), (7), (39), (41): Xaa is C or S
TVPKPXXAPTQLSPISVLFIDDSSNVIYKQYENMVVRAXGXH

SEQ ID NO: 12949 - protein, 35 aa, Artificial Sequence
  Non-cyclic GFR-binding peptide
  MOD_RES (4), (5): Xaa is C or S
AAPXXVPQALSPISILFIVGRKPKVYKQYEMIVRS

SEQ ID NO: 12950 - protein, 33 aa, Artificial Sequence
  Non-cyclic GFR-binding peptide
  MOD_RES (2), (3): Xaa is C or S
TXXVPTRLEPLPIVYYDSANNVVEQLSNDMVVE

SEQ ID NO: 12951 - protein, 36 aa, Artificial Sequence
  Non-cyclic GFR-binding peptide
  MOD_RES (2), (3), (35): Xaa is C or S
TXXVPTRLEPLPIVYYDSANNVVEQLSNDMVVESXG

SEQ ID NO: 12952 - protein, 38 aa, Artificial Sequence
  Non-cyclic GFR-binding peptide
  MOD_RES (4), (5), (38): Xaa is C or S
  MOD_RES (19), (20), (21), (22), (23): Xaa is A or G
  MOD_RES (24), (25), (26), (27): Xaa is A or G or is absent
ASPXXVSQDLEPLPIVYYXXXXXXXXXEQLSNMIVKSX

SEQ ID NO: 12953 - protein, 34 aa, Artificial Sequence
  Non-cyclic GFR-binding peptide
  MOD_RES (1), (1): Xaa is C or S
  MOD_RES (15), (16), (17), (18), (19): Xaa is A or G
  MOD_RES (20), (21), (22), (23): Xaa is A or G or is absent
XVPTRLEPLTILYYXXXXXXXXXEQLSNDMVVES

SEQ ID NO: 12954 - protein, 35 aa, Artificial Sequence
  Non-cyclic GFR-binding peptide
  MOD_RES (1), (2): Xaa is C or S
  MOD_RES (16), (17), (18), (19), (20): Xaa is A or G
  MOD_RES (21), (22), (23), (24): Xaa is A or G or is absent
XXVPTRLEPLPIVYYXXXXXXXXXEQLSNDMVVES

SEQ ID NO: 12955 - protein, 36 aa, Artificial Sequence
  Non-cyclic GFR-binding peptide
  MOD_RES (2), (3), (35): Xaa is C or S
AXXVPTELEPLTMLYYDEYDKVVEQLSNEMVVEGXG

SEQ ID NO: 12956 - protein, 36 aa, Artificial Sequence
  Non-cyclic GFR-binding peptide
  MOD_RES (3), (4): Xaa is C or S
  MOD_RES (18), (19), (20), (21), (22): Xaa is A or G
  MOD_RES (23), (24), (25), (26): Xaa is A or G or is absent
KAXXVPTELSPISMLFIXXXXXXXXXYKQYEEMVVE

SEQ ID NO: 12957 - protein, 36 aa, Artificial Sequence
  Non-cyclic GFR-binding peptide
  MOD_RES (5), (5): Xaa is C or S
TKPTXAPTKLSPISVLFIDDSSNVIYKQYENMVVRS

SEQ ID NO: 12958 - protein, 40 aa, Artificial Sequence
  Non-cyclic GFR-binding peptide
  MOD_RES (5), (6), (37), (39): Xaa is C or S
SASPXXVPQDLSPISILFIVGRTPKVYKQYEMVVKSXKXS

SEQ ID NO: 12959 - protein, 40 aa, Artificial Sequence
  Non-cyclic GFR-binding peptide
  MOD_RES (6), (7), (39): Xaa is C or S
STPPTXXVPTRLEPLPIVYYDSANNVVEQLSNDMVVESXG

SEQ ID NO: 12960 - protein, 34 aa, Artificial Sequence
  Non-cyclic GFR-binding peptide
  MOD_RES (1), (2): Xaa is C or S
  MOD_RES (16), (17), (18), (19), (20): Xaa is A or G
  MOD_RES (21), (22), (23), (24): Xaa is A or G or is absent
XXAPTKLEPLTVLYYXXXXXXXXXEQLSNNMVVR

SEQ ID NO: 12961 - protein, 34 aa, Artificial Sequence
  Non-cyclic GFR-binding peptide
  MOD_RES (2), (3): Xaa is C or S
PXXAPTQLSPISVLFIDDSSNVIYKQYENMVVRA

SEQ ID NO: 12962 - protein, 38 aa, Artificial Sequence
  Non-cyclic GFR-binding peptide
  MOD_RES (4), (5), (37): Xaa is C or S
PPTXXVPTRLNAISILYFDSANNVVLKKYRDMVVESXG

SEQ ID NO: 12963 - protein, 37 aa, Artificial Sequence
  Non-cyclic GFR-binding peptide
  MOD_RES (1), (2), (34), (36): Xaa is C or S
XXVPTELSPISMLFIDENEKVVYKQYEDMVVEGXGXR

SEQ ID NO: 12964 - protein, 31 aa, Artificial Sequence
  Non-cyclic GFR-binding peptide
VPTELEPLPMVYYDEYDKVVEQLSNEMVVEG

SEQ ID NO: 12965 - protein, 43 aa, Artificial Sequence
  Non-cyclic GFR-binding peptide
  MOD_RES (6), (7), (40), (42): Xaa is C or S
  MOD_RES (21), (22), (23), (24), (25): Xaa is A or G
  MOD_RES (26), (27), (28), (29): Xaa is A or G or is absent
ASASPXXVPQDLEPLPIVYYXXXXXXXXXEQLSNMVVKSXKXS

SEQ ID NO: 12966 - protein, 39 aa, Artificial Sequence
  Non-cyclic GFR-binding peptide
  MOD_RES (6), (7): Xaa is C or S
  MOD_RES (21), (22), (23), (24), (25): Xaa is A or G
  MOD_RES (26), (27), (28), (29): Xaa is A or G or is absent
SIPKAXXVPTELEPLPMVYYXXXXXXXXXEQLSNEMVVE

SEQ ID NO: 12967 - protein, 39 aa, Artificial Sequence
  Non-cyclic GFR-binding peptide
  MOD_RES (6), (7): Xaa is C or S
  MOD_RES (21), (22), (23), (24), (25): Xaa is A or G
  MOD_RES (26), (27), (28), (29): Xaa is A or G or is absent
ASAAPXXVPQALSPISILFIXXXXXXXXXYKQYEMIVRS

SEQ ID NO: 12968 - protein, 34 aa, Artificial Sequence
  Non-cyclic GFR-binding peptide
  MOD_RES (3), (4): Xaa is C or S
PTXXVPTRLSAISILYLDSANNVVLKNYQDMVVE

SEQ ID NO: 12969 - protein, 37 aa, Artificial Sequence
  Non-cyclic GFR-binding peptide
  MOD_RES (5), (6): Xaa is C or S
IPKAXXVPTELSPISMLFIDENEKVVYKQYEDMVVEG

SEQ ID NO: 12970 - protein, 31 aa, Artificial Sequence
  Non-cyclic GFR-binding peptide
  MOD_RES (1), (1): Xaa is C or S
XVPTELEPLTMLYYDENEKVVEQLSNDMVVE

SEQ ID NO: 12971 - protein, 38 aa, Artificial Sequence
  Non-cyclic GFR-binding peptide
  MOD_RES (1), (2), (36), (38): Xaa is C or S
  MOD_RES (16), (17), (18), (19), (20): Xaa is A or G
  MOD_RES (21), (22), (23), (24): Xaa is A or G or is absent
XXVPTELEPLTMLYYXXXXXXXXXEQLSNDMVVEGXGX

SEQ ID NO: 12972 - protein, 36 aa, Artificial Sequence
  Non-cyclic GFR-binding peptide
  MOD_RES (1), (2), (34), (36): Xaa is C or S
XXAPTKLEPLTVLYYDDSSNVIEQLSNNMVVRSXGX

SEQ ID NO: 12973 - protein, 41 aa, Artificial Sequence
  Non-cyclic GFR-binding peptide
  MOD_RES (5), (39), (41): Xaa is C or S
  MOD_RES (19), (20), (21), (22), (23): Xaa is A or G
  MOD_RES (24), (25), (26), (27): Xaa is A or G or is absent
TKPTXAPTKLEPLTVLYYXXXXXXXXXEQLSNNMVVRSXGX

SEQ ID NO: 12974 - protein, 34 aa, Artificial Sequence
  Non-cyclic GFR-binding peptide
  MOD_RES (2), (3), (34): Xaa is C or S
PXXVSQDLEPLPIVYYIGKTPKIEQLSNMIVKSX

SEQ ID NO: 12975 - protein, 38 aa, Artificial Sequence
  Non-cyclic GFR-binding peptide
  MOD_RES (3), (4), (37): Xaa is C or S
  MOD_RES (18), (19), (20), (21), (22): Xaa is A or G
  MOD_RES (23), (24), (25), (26): Xaa is A or G or is absent
SPXXVSQDLSPISILFIXXXXXXXXXYKQYEMIVKSXK

SEQ ID NO: 12976 - protein, 37 aa, Artificial Sequence
  Non-cyclic GFR-binding peptide
  MOD_RES (6), (7): Xaa is C or S
ASASPXXVSQDLSPISILFIIGKTPKIYKQYEMIVKS

SEQ ID NO: 12977 - protein, 33 aa, Artificial Sequence
  Non-cyclic GFR-binding peptide
  MOD_RES (1), (1): Xaa is C or S
  MOD_RES (15), (16), (17), (18), (19): Xaa is A or G
  MOD_RES (20), (21), (22), (23): Xaa is A or G or is absent
XVPTRLEPLPIVYYXXXXXXXXXEQLSNDMVVE

SEQ ID NO: 12978 - protein, 39 aa, Artificial Sequence
  Non-cyclic GFR-binding peptide
  MOD_RES (5), (6), (39): Xaa is C or S
  MOD_RES (20), (21), (22), (23), (24): Xaa is A or G
  MOD_RES (25), (26), (27), (28): Xaa is A or G or is absent
SASPXXVPQDLEPLPIVYYXXXXXXXXXEQLSNMVVKSX

SEQ ID NO: 12979 - protein, 36 aa, Artificial Sequence
  Non-cyclic GFR-binding peptide
  MOD_RES (1), (35): Xaa is C or S
  MOD_RES (15), (16), (17), (18), (19): Xaa is A or G
  MOD_RES (20), (21), (22), (23): Xaa is A or G or is absent
XAPTKLEPLPVVYYXXXXXXXXXEQLSNNMVVRSXG

SEQ ID NO: 12980 - protein, 35 aa, Artificial Sequence
  Non-cyclic GFR-binding peptide
  MOD_RES (2), (3): Xaa is C or S
  MOD_RES (17), (18), (19), (20), (21): Xaa is A or G
  MOD_RES (22), (23), (24), (25): Xaa is A or G or is absent
PXXAPTKLSPISVLFIXXXXXXXXXYKQYENMVVR

SEQ ID NO: 12981 - protein, 37 aa, Artificial Sequence
  Non-cyclic GFR-binding peptide
  MOD_RES (1), (2), (34), (36): Xaa is C or S
XXVPTELEPLTMLYYDENEKVVEQLSNDMVVEGXGXR

SEQ ID NO: 12982 - protein, 36 aa, Artificial Sequence
  Non-cyclic GFR-binding peptide
  MOD_RES (1), (2), (34), (36): Xaa is C or S
XXAPTKLSPISVLFIDDSSNVIYKQYENMVVRSXGX

SEQ ID NO: 12983 - protein, 37 aa, Artificial Sequence
  Non-cyclic GFR-binding peptide
  MOD_RES (1), (2), (36): Xaa is C or S
  MOD_RES (16), (17), (18), (19), (20): Xaa is A or G
  MOD_RES (21), (22), (23), (24): Xaa is A or G or is absent
XXAPTQLEPLPVVYYXXXXXXXXXEQLSNNMVVRAXG

SEQ ID NO: 12984 - protein, 38 aa, Artificial Sequence
  Non-cyclic GFR-binding peptide
  MOD_RES (5), (6), (37): Xaa is C or S
SAAPXXVPQALSPISILFIVGRKPKVYKQYEMIVRSXK

SEQ ID NO: 12985 - protein, 38 aa, Artificial Sequence
  Non-cyclic GFR-binding peptide
  MOD_RES (5), (6), (38): Xaa is C or S
VPKPXXAPTQLEPLTVLYYDDSSNVIEQLSNNMVVRAX

SEQ ID NO: 12986 - protein, 39 aa, Artificial Sequence
  Non-cyclic GFR-binding peptide
  MOD_RES (2), (3), (36), (38): Xaa is C or S
  MOD_RES (17), (18), (19), (20), (21): Xaa is A or G
  MOD_RES (22), (23), (24), (25): Xaa is A or G or is absent
PXXVPQDLEPLPIVYYXXXXXXXXXEQLSNMVVKSXKXS

SEQ ID NO: 12987 - protein, 34 aa, Artificial Sequence
  Non-cyclic GFR-binding peptide
  MOD_RES (1), (33): Xaa is C or S
XVPTELEPLPMVYYDEYDKVVEQLSNEMVVEGXG

SEQ ID NO: 12988 - protein, 37 aa, Artificial Sequence
  Non-cyclic GFR-binding peptide
  MOD_RES (5), (6), (37): Xaa is C or S
SAAPXXVPQALSPISILFIVGRKPKVYKQYEMIVRSX

SEQ ID NO: 12989 - protein, 36 aa, Artificial Sequence
  Non-cyclic GFR-binding peptide
  MOD_RES (2), (3): Xaa is C or S
  MOD_RES (17), (18), (19), (20), (21): Xaa is A or G
  MOD_RES (22), (23), (24), (25): Xaa is A or G or is absent
AXXVPTELSPISMLFIXXXXXXXXXYKQYEEMVVEG

SEQ ID NO: 12990 - protein, 34 aa, Artificial Sequence
  Non-cyclic GFR-binding peptide
  MOD_RES (1), (2): Xaa is C or S
  MOD_RES (16), (17), (18), (19), (20): Xaa is A or G
  MOD_RES (21), (22), (23), (24): Xaa is A or G or is absent
XXVPTELSPISMLFIXXXXXXXXXYKQYEEMVVE

SEQ ID NO: 12991 - protein, 34 aa, Artificial Sequence
  Non-cyclic GFR-binding peptide
  MOD_RES (3), (4): Xaa is C or S
SPXXVSQDLSPISILFIIGKTPKIYKQYEMIVKS

SEQ ID NO: 12992 - protein, 36 aa, Artificial Sequence
  Non-cyclic GFR-binding peptide
  MOD_RES (2), (3): Xaa is C or S
  MOD_RES (17), (18), (19), (20), (21): Xaa is A or G
  MOD_RES (22), (23), (24), (25): Xaa is A or G or is absent
AXXVPTELEPLPMVYYXXXXXXXXXEQLSNEMVVEG

SEQ ID NO: 12993 - protein, 36 aa, Artificial Sequence
  Non-cyclic GFR-binding peptide
  MOD_RES (34), (36): Xaa is C or S
  MOD_RES (14), (15), (16), (17), (18): Xaa is A or G
  MOD_RES (19), (20), (21), (22): Xaa is A or G or is absent
VPTELSPISMLFIXXXXXXXXXYKQYEEMVVEGXGX

SEQ ID NO: 12994 - protein, 39 aa, Artificial Sequence
  Non-cyclic GFR-binding peptide
  MOD_RES (3), (4), (38): Xaa is C or S
  MOD_RES (18), (19), (20), (21), (22): Xaa is A or G
  MOD_RES (23), (24), (25), (26): Xaa is A or G or is absent
KAXXVPTELEPLTMLYYXXXXXXXXXEQLSNDMVVEGXG

SEQ ID NO: 12995 - protein, 43 aa, Artificial Sequence
  Non-cyclic GFR-binding peptide
  MOD_RES (6), (40), (42): Xaa is C or S
  MOD_RES (20), (21), (22), (23), (24): Xaa is A or G
  MOD_RES (25), (26), (27), (28): Xaa is A or G or is absent
VTKPTXAPTKLEPLTVLYYXXXXXXXXXEQLSNNMVVRSXGXH

SEQ ID NO: 12996 - protein, 40 aa, Artificial Sequence
  Non-cyclic GFR-binding peptide
  MOD_RES (5), (6), (40): Xaa is C or S
  MOD_RES (20), (21), (22), (23), (24): Xaa is A or G
  MOD_RES (25), (26), (27), (28): Xaa is A or G or is absent
TPPTXXVPTRLEPLTILYYXXXXXXXXXEQLSNDMVVESX

SEQ ID NO: 12997 - protein, 40 aa, Artificial Sequence
  Non-cyclic GFR-binding peptide
  MOD_RES (4), (5), (39): Xaa is C or S
  MOD_RES (19), (20), (21), (22), (23): Xaa is A or G
  MOD_RES (24), (25), (26), (27): Xaa is A or G or is absent
PKPXXAPTKLSPISVLFIXXXXXXXXXYKQYENMVVRSXG

SEQ ID NO: 12998 - protein, 39 aa, Artificial Sequence
  Non-cyclic GFR-binding peptide
  MOD_RES (5), (6), (38): Xaa is C or S
VPKPXXAPTQLEPLTVLYYDDSSNVIEQLSNNMVVRAXG

SEQ ID NO: 12999 - protein, 38 aa, Artificial Sequence
  Non-cyclic GFR-binding peptide
  MOD_RES (4), (5): Xaa is C or S
  MOD_RES (19), (20), (21), (22), (23): Xaa is A or G
  MOD_RES (24), (25), (26), (27): Xaa is A or G or is absent
PKAXXVPTELEPLPMVYYXXXXXXXXXEQLSNDMVVEG

SEQ ID NO: 13000 - protein, 38 aa, Artificial Sequence
  Non-cyclic GFR-binding peptide
  MOD_RES (4), (5), (37): Xaa is C or S
PPTXXVPTRLEPLPIVYYDSANNVVEQLSNDMVVESXG

SEQ ID NO: 13001 - protein, 40 aa, Artificial Sequence
  Non-cyclic GFR-binding peptide
  MOD_RES (6), (40): Xaa is C or S
  MOD_RES (20), (21), (22), (23), (24): Xaa is A or G
  MOD_RES (25), (26), (27), (28): Xaa is A or G or is absent
VTKPTXAPTKLSPISVLFIXXXXXXXXXYKQYENMVVRSX

SEQ ID NO: 13002 - protein, 38 aa, Artificial Sequence
  Non-cyclic GFR-binding peptide
  MOD_RES (1), (2), (36), (38): Xaa is C or S
  MOD_RES (16), (17), (18), (19), (20): Xaa is A or G
  MOD_RES (21), (22), (23), (24): Xaa is A or G or is absent
XXVPTELEPLTMLYYXXXXXXXXXEQLSNEMVVEGXGX

SEQ ID NO: 13003 - protein, 34 aa, Artificial Sequence
  Non-cyclic GFR-binding peptide
  MOD_RES (1), (33): Xaa is C or S
XVPTRLNAISILYFDSANNVVLKKYRDMVVESXG

SEQ ID NO: 13004 - protein, 37 aa, Artificial Sequence
  Non-cyclic GFR-binding peptide
  MOD_RES (2), (3), (37): Xaa is C or S
  MOD_RES (17), (18), (19), (20), (21): Xaa is A or G
  MOD_RES (22), (23), (24), (25): Xaa is A or G or is absent
PXXAPTQLSPISVLFIXXXXXXXXXYKQYENMVVRAX

SEQ ID NO: 13005 - protein, 37 aa, Artificial Sequence
  Non-cyclic GFR-binding peptide
  MOD_RES (1), (35), (37): Xaa is C or S
  MOD_RES (15), (16), (17), (18), (19): Xaa is A or G
  MOD_RES (20), (21), (22), (23): Xaa is A or G or is absent
XVPTRLEPLTILYYXXXXXXXXXEQLSNDMVVESXGX

SEQ ID NO: 13006 - protein, 35 aa, Artificial Sequence
  Non-cyclic GFR-binding peptide
  MOD_RES (3), (4): Xaa is C or S
KAXXVPTELSPISMLFIDEYDKVVYKQYEEMVVEG

SEQ ID NO: 13007 - protein, 39 aa, Artificial Sequence
  Non-cyclic GFR-binding peptide
  MOD_RES (6), (7): Xaa is C or S
  MOD_RES (21), (22), (23), (24), (25): Xaa is A or G
  MOD_RES (26), (27), (28), (29): Xaa is A or G or is absent
SIPKAXXVPTELEPLTMLYYXXXXXXXXXEQLSNEMVVE

SEQ ID NO: 13008 - protein, 41 aa, Artificial Sequence
  Non-cyclic GFR-binding peptide
  MOD_RES (4), (5), (39), (41): Xaa is C or S
  MOD_RES (19), (20), (21), (22), (23): Xaa is A or G
  MOD_RES (24), (25), (26), (27): Xaa is A or G or is absent
PKAXXVPTELSPISMLFIXXXXXXXXXYKQYEEMVVEGXGX

SEQ ID NO: 13009 - protein, 35 aa, Artificial Sequence
  Non-cyclic GFR-binding peptide
  MOD_RES (1), (35): Xaa is C or S
  MOD_RES (15), (16), (17), (18), (19): Xaa is A or G
  MOD_RES (20), (21), (22), (23): Xaa is A or G or is absent
XVPTELEPLPMVYYXXXXXXXXXEQLSNEMVVEGX

SEQ ID NO: 13010 - protein, 42 aa, Artificial Sequence
  Non-cyclic GFR-binding peptide
  MOD_RES (7), (41): Xaa is C or S
  MOD_RES (21), (22), (23), (24), (25): Xaa is A or G
  MOD_RES (26), (27), (28), (29): Xaa is A or G or is absent
HVTKPTXAPTKLSPISVLFIXXXXXXXXXYKQYENMVVRSXG

SEQ ID NO: 13011 - protein, 34 aa, Artificial Sequence
  Non-cyclic GFR-binding peptide
  MOD_RES (1), (2), (34): Xaa is C or S
XXAPTQLEPLPVVYYDDSSNVIEQLSNNMVVRAX

SEQ ID NO: 13012 - protein, 39 aa, Artificial Sequence
  Non-cyclic GFR-binding peptide
  MOD_RES (2), (3), (37), (39): Xaa is C or S
  MOD_RES (17), (18), (19), (20), (21): Xaa is A or G
  MOD_RES (22), (23), (24), (25): Xaa is A or G or is absent
TXXVPTRLSAISILYLXXXXXXXXXLKNYQDMVVESXGX

SEQ ID NO: 13013 - protein, 43 aa, Artificial Sequence
  Non-cyclic GFR-binding peptide
  MOD_RES (6), (7), (41), (43): Xaa is C or S
  MOD_RES (21), (22), (23), (24), (25): Xaa is A or G
  MOD_RES (26), (27), (28), (29): Xaa is A or G or is absent
TVPKPXXAPTQLEPLTVLYYXXXXXXXXXEQLSNNMVVRAXGX

SEQ ID NO: 13014 - protein, 41 aa, Artificial Sequence
  Non-cyclic GFR-binding peptide
  MOD_RES (4), (5), (39), (41): Xaa is C or S
  MOD_RES (19), (20), (21), (22), (23): Xaa is A or G
  MOD_RES (24), (25), (26), (27): Xaa is A or G or is absent
PKAXXVPTELSPISMLFIXXXXXXXXXYKQYEDMVVEGXGX

SEQ ID NO: 13015 - protein, 41 aa, Artificial Sequence
  Non-cyclic GFR-binding peptide
  MOD_RES (6), (7), (39), (41): Xaa is C or S
KIPKAXXVPTELEPLTMLYYDENEKVVEQLSNDMVVEGXGX

SEQ ID NO: 13016 - protein, 32 aa, Artificial Sequence
  Non-cyclic GFR-binding peptide
  MOD_RES (1), (2): Xaa is C or S
XXVPQALEPLTILYYVGRKPKVEQLSNMIVRS

SEQ ID NO: 13017 - protein, 38 aa, Artificial Sequence
  Non-cyclic GFR-binding peptide
  MOD_RES (6), (38): Xaa is C or S
VTKPTXAPTKLEPLTVLYYDDSSNVIEQLSNNMVVRSX

SEQ ID NO: 13018 - protein, 35 aa, Artificial Sequence
  Non-cyclic GFR-binding peptide
  MOD_RES (2), (3), (35): Xaa is C or S
TXXVPTRLSAISILYLDSANNVVLKNYQDMVVESX

SEQ ID NO: 13019 - protein, 36 aa, Artificial Sequence
  Non-cyclic GFR-binding peptide
  MOD_RES (5), (6): Xaa is C or S
VPKPXXAPTQLSPISVLFIDDSSNVIYKQYENMVVR

SEQ ID NO: 13020 - protein, 40 aa, Artificial Sequence
  Non-cyclic GFR-binding peptide
  MOD_RES (4), (5), (39): Xaa is C or S
  MOD_RES (19), (20), (21), (22), (23): Xaa is A or G
  MOD_RES (24), (25), (26), (27): Xaa is A or G or is absent
PKPXXAPTKLEPLTVLYYXXXXXXXXXEQLSNNMVVRSXG

SEQ ID NO: 13021 - protein, 38 aa, Artificial Sequence
  Non-cyclic GFR-binding peptide
  MOD_RES (2), (3), (35), (37): Xaa is C or S
TXXVPTRLEPLPIVYYDSANNVVEQLSNDMVVESXGXR

SEQ ID NO: 13022 - protein, 36 aa, Artificial Sequence
  Non-cyclic GFR-binding peptide
  MOD_RES (3), (4), (36): Xaa is C or S
KAXXVPTELEPLTMLYYDEYDKVVEQLSNEMVVEGX

SEQ ID NO: 13023 - protein, 30 aa, Artificial Sequence
  Non-cyclic GFR-binding peptide
APTKLEPLPVVYYDDSSNVIEQLSNNMVVR

SEQ ID NO: 13024 - protein, 33 aa, Artificial Sequence
  Non-cyclic GFR-binding peptide
  MOD_RES (14), (15), (16), (17), (18): Xaa is A or G
  MOD_RES (19), (20), (21), (22): Xaa is A or G or is absent
APTKLSPISVLFIXXXXXXXXXYKQYENMVVRS

SEQ ID NO: 13025 - protein, 44 aa, Artificial Sequence
  Non-cyclic GFR-binding peptide
  MOD_RES (6), (7), (41), (43): Xaa is C or S
  MOD_RES (21), (22), (23), (24), (25): Xaa is A or G
  MOD_RES (26), (27), (28), (29): Xaa is A or G or is absent
KIPKAXXVPTELEPLPMVYYXXXXXXXXXEQLSNDMVVEGXGXR

SEQ ID NO: 13026 - protein, 36 aa, Artificial Sequence
  Non-cyclic GFR-binding peptide
  MOD_RES (1), (2), (35): Xaa is C or S
  MOD_RES (16), (17), (18), (19), (20): Xaa is A or G
  MOD_RES (21), (22), (23), (24): Xaa is A or G or is absent
XXVPQALSPISILFIXXXXXXXXXYKQYEMIVRSXK

SEQ ID NO: 13027 - protein, 40 aa, Artificial Sequence
  Non-cyclic GFR-binding peptide
  MOD_RES (5), (6), (39): Xaa is C or S
  MOD_RES (20), (21), (22), (23), (24): Xaa is A or G
  MOD_RES (25), (26), (27), (28): Xaa is A or G or is absent
SASPXXVPQDLEPLPIVYYXXXXXXXXXEQLSNMVVKSXK

SEQ ID NO: 13028 - protein, 37 aa, Artificial Sequence
  Non-cyclic GFR-binding peptide
  MOD_RES (1), (2), (34), (36): Xaa is C or S
XXAPTKLSPISVLFIDDSSNVIYKQYENMVVRSXGXH

SEQ ID NO: 13029 - protein, 33 aa, Artificial Sequence
  Non-cyclic GFR-binding peptide
  MOD_RES (1), (33): Xaa is C or S
XAPTQLEPLPVVYYDDSSNVIEQLSNNMVVRAX

SEQ ID NO: 13030 - protein, 36 aa, Artificial Sequence
  Non-cyclic GFR-binding peptide
  MOD_RES (1), (2), (34), (36): Xaa is C or S
XXVPTRLEPLPIVYYDSANNVVEQLSNDMVVESXGX

SEQ ID NO: 13031 - protein, 38 aa, Artificial Sequence
  Non-cyclic GFR-binding peptide
  MOD_RES (6), (7), (38): Xaa is C or S
ASAAPXXVPQALSPISILFIVGRKPKVYKQYEMIVRSX

SEQ ID NO: 13032 - protein, 33 aa, Artificial Sequence
  Non-cyclic GFR-binding peptide
  MOD_RES (31), (33): Xaa is C or S
VSQDLEPLPIVYYIGKTPKIEQLSNMIVKSXKX

SEQ ID NO: 13033 - protein, 31 aa, Artificial Sequence
  Non-cyclic GFR-binding peptide
VPTELEPLTMLYYDEYDKVVEQLSNEMVVEG

SEQ ID NO: 13034 - protein, 34 aa, Artificial Sequence
  Non-cyclic GFR-binding peptide
  MOD_RES (34), (34): Xaa is C or S
  MOD_RES (14), (15), (16), (17), (18): Xaa is A or G
  MOD_RES (19), (20), (21), (22): Xaa is A or G or is absent
VPTELEPLPMVYYXXXXXXXXXEQLSNEMVVEGX

SEQ ID NO: 13035 - protein, 37 aa, Artificial Sequence
  Non-cyclic GFR-binding peptide
  MOD_RES (2), (3), (34), (36): Xaa is C or S
PXXVPQDLEPLPIVYYVGRTPKVEQLSNMVVKSXKXS

SEQ ID NO: 13036 - protein, 41 aa, Artificial Sequence
  Non-cyclic GFR-binding peptide
  MOD_RES (5), (39), (41): Xaa is C or S
  MOD_RES (19), (20), (21), (22), (23): Xaa is A or G
  MOD_RES (24), (25), (26), (27): Xaa is A or G or is absent
TKPTXAPTKLEPLPVVYYXXXXXXXXXEQLSNNMVVRSXGX

SEQ ID NO: 13037 - protein, 36 aa, Artificial Sequence
  Non-cyclic GFR-binding peptide
  MOD_RES (2), (3), (36): Xaa is C or S
  MOD_RES (17), (18), (19), (20), (21): Xaa is A or G
  MOD_RES (22), (23), (24), (25): Xaa is A or G or is absent
PXXVPQDLSPISILFIXXXXXXXXXYKQYEMVVKSX

SEQ ID NO: 13038 - protein, 35 aa, Artificial Sequence
  Non-cyclic GFR-binding peptide
  MOD_RES (4), (5): Xaa is C or S
PKAXXVPTELSPISMLFIDEYDKVVYKQYEEMVVE

SEQ ID NO: 13039 - protein, 40 aa, Artificial Sequence
  Non-cyclic GFR-binding peptide
  MOD_RES (4), (5), (37), (39): Xaa is C or S
PPTXXVPTRLEPLPIVYYDSANNVVEQLSNDMVVESXGXR

SEQ ID NO: 13040 - protein, 33 aa, Artificial Sequence
  Non-cyclic GFR-binding peptide
  MOD_RES (33), (33): Xaa is C or S
  MOD_RES (14), (15), (16), (17), (18): Xaa is A or G
  MOD_RES (19), (20), (21), (22): Xaa is A or G or is absent
VPQDLSPISILFIXXXXXXXXXYKQYEMVVKSX

SEQ ID NO: 13041 - protein, 34 aa, Artificial Sequence
  Non-cyclic GFR-binding peptide
  MOD_RES (34), (34): Xaa is C or S
  MOD_RES (14), (15), (16), (17), (18): Xaa is A or G
  MOD_RES (19), (20), (21), (22): Xaa is A or G or is absent
VPTRLNAISILYFXXXXXXXXXLKKYRDMVVESX

SEQ ID NO: 13042 - protein, 34 aa, Artificial Sequence
  Non-cyclic GFR-binding peptide
  MOD_RES (34), (34): Xaa is C or S
  MOD_RES (14), (15), (16), (17), (18): Xaa is A or G
  MOD_RES (19), (20), (21), (22): Xaa is A or G or is absent
APTQLEPLPVVYYXXXXXXXXXEQLSNNMVVRAX

SEQ ID NO: 13043 - protein, 37 aa, Artificial Sequence
  Non-cyclic GFR-binding peptide
  MOD_RES (4), (5), (36): Xaa is C or S
ASPXXVSQDLEPLPIVYYIGKTPKIEQLSNMIVKSXK

SEQ ID NO: 13044 - protein, 31 aa, Artificial Sequence
  Non-cyclic GFR-binding peptide
  MOD_RES (1), (1): Xaa is C or S
XVSQDLSPISILFIIGKTPKIYKQYEMIVKS

SEQ ID NO: 13045 - protein, 35 aa, Artificial Sequence
  Non-cyclic GFR-binding peptide
  MOD_RES (32), (34): Xaa is C or S
APTKLSPISVLFIDDSSNVIYKQYENMVVRSXGXH

SEQ ID NO: 13046 - protein, 34 aa, Artificial Sequence
  Non-cyclic GFR-binding peptide
  MOD_RES (2), (3): Xaa is C or S
AXXVPTELSPISMLFIDEYDKVVYKQYEEMVVEG

SEQ ID NO: 13047 - protein, 40 aa, Artificial Sequence
  Non-cyclic GFR-binding peptide
  MOD_RES (5), (6), (38), (40): Xaa is C or S
IPKAXXVPTELSPISMLFIDENEKVVYKQYEDMVVEGXGX

SEQ ID NO: 13048 - protein, 38 aa, Artificial Sequence
  Non-cyclic GFR-binding peptide
  MOD_RES (3), (4), (38): Xaa is C or S
  MOD_RES (18), (19), (20), (21), (22): Xaa is A or G
  MOD_RES (23), (24), (25), (26): Xaa is A or G or is absent
KPXXAPTKLSPISVLFIXXXXXXXXXYKQYENMVVRSX

SEQ ID NO: 13049 - protein, 40 aa, Artificial Sequence
  Non-cyclic GFR-binding peptide
  MOD_RES (5), (6), (38), (40): Xaa is C or S
IPKAXXVPTELEPLTMLYYDENEKVVEQLSNDMVVEGXGX

SEQ ID NO: 13050 - protein, 34 aa, Artificial Sequence
  Non-cyclic GFR-binding peptide
  MOD_RES (1), (2), (33): Xaa is C or S
XXVPQDLSPISILFIVGRTPKVYKQYEMVVKSXK

SEQ ID NO: 13051 - protein, 39 aa, Artificial Sequence
  Non-cyclic GFR-binding peptide
  MOD_RES (7), (7): Xaa is C or S
  MOD_RES (21), (22), (23), (24), (25): Xaa is A or G
  MOD_RES (26), (27), (28), (29): Xaa is A or G or is absent
HVTKPTXAPTKLSPISVLFIXXXXXXXXXYKQYENMVVR

SEQ ID NO: 13052 - protein, 36 aa, Artificial Sequence
  Non-cyclic GFR-binding peptide
  MOD_RES (1), (2), (36): Xaa is C or S
  MOD_RES (16), (17), (18), (19), (20): Xaa is A or G
  MOD_RES (21), (22), (23), (24): Xaa is A or G or is absent
XXVPTRLEPLPIVYYXXXXXXXXXEQLSNDMVVESX

SEQ ID NO: 13053 - protein, 37 aa, Artificial Sequence
  Non-cyclic GFR-binding peptide
  MOD_RES (3), (4), (37): Xaa is C or S
  MOD_RES (18), (19), (20), (21), (22): Xaa is A or G
  MOD_RES (23), (24), (25), (26): Xaa is A or G or is absent
APXXVPQALSPISILFIXXXXXXXXXYKQYEMIVRSX

SEQ ID NO: 13054 - protein, 37 aa, Artificial Sequence
  Non-cyclic GFR-binding peptide
  MOD_RES (3), (37): Xaa is C or S
  MOD_RES (17), (18), (19), (20), (21): Xaa is A or G
  MOD_RES (22), (23), (24), (25): Xaa is A or G or is absent
PTXAPTKLEPLTVLYYXXXXXXXXXEQLSNNMVVRSX

SEQ ID NO: 13055 - protein, 38 aa, Artificial Sequence
  Non-cyclic GFR-binding peptide
  MOD_RES (5), (6): Xaa is C or S
  MOD_RES (20), (21), (22), (23), (24): Xaa is A or G
  MOD_RES (25), (26), (27), (28): Xaa is A or G or is absent
IPKAXXVPTELEPLTMLYYXXXXXXXXXEQLSNDMVVE

SEQ ID NO: 13056 - protein, 37 aa, Artificial Sequence
  Non-cyclic GFR-binding peptide
  MOD_RES (5), (6): Xaa is C or S
VPKPXXAPTKLSPISVLFIDDSSNVIYKQYENMVVRS

SEQ ID NO: 13057 - protein, 34 aa, Artificial Sequence
  Non-cyclic GFR-binding peptide
  MOD_RES (1), (2), (34): Xaa is C or S
XXVPTELEPLPMVYYDENEKVVEQLSNDMVVEGX

SEQ ID NO: 13058 - protein, 41 aa, Artificial Sequence
  Non-cyclic GFR-binding peptide
  MOD_RES (6), (38), (40): Xaa is C or S
VTKPTXAPTKLSPISVLFIDDSSNVIYKQYENMVVRSXGXH

SEQ ID NO: 13059 - protein, 39 aa, Artificial Sequence
  Non-cyclic GFR-binding peptide
  MOD_RES (5), (6), (38): Xaa is C or S
VPKPXXAPTQLSPISVLFIDDSSNVIYKQYENMVVRAXG

SEQ ID NO: 13060 - protein, 41 aa, Artificial Sequence
  Non-cyclic GFR-binding peptide
  MOD_RES (6), (7), (41): Xaa is C or S
  MOD_RES (21), (22), (23), (24), (25): Xaa is A or G
  MOD_RES (26), (27), (28), (29): Xaa is A or G or is absent
TVPKPXXAPTQLSPISVLFIXXXXXXXXXYKQYENMVVRAX

SEQ ID NO: 13061 - protein, 39 aa, Artificial Sequence
  Non-cyclic GFR-binding peptide
  MOD_RES (5), (6), (38): Xaa is C or S
VPKPXXAPTKLEPLPVVYYDDSSNVIEQLSNNMVVRSXG

SEQ ID NO: 13062 - protein, 38 aa, Artificial Sequence
  Non-cyclic GFR-binding peptide
  MOD_RES (2), (3), (35), (37): Xaa is C or S
PXXAPTKLEPLTVLYYDDSSNVIEQLSNNMVVRSXGXH

SEQ ID NO: 13063 - protein, 38 aa, Artificial Sequence
  Non-cyclic GFR-binding peptide
  MOD_RES (1), (2), (36), (38): Xaa is C or S
  MOD_RES (16), (17), (18), (19), (20): Xaa is A or G
  MOD_RES (21), (22), (23), (24): Xaa is A or G or is absent
XXAPTKLSPISVLFIXXXXXXXXXYKQYENMVVRSXGX

SEQ ID NO: 13064 - protein, 38 aa, Artificial Sequence
  Non-cyclic GFR-binding peptide
  MOD_RES (5), (6): Xaa is C or S
  MOD_RES (20), (21), (22), (23), (24): Xaa is A or G
  MOD_RES (25), (26), (27), (28): Xaa is A or G or is absent
IPKAXXVPTELEPLPMVYYXXXXXXXXXEQLSNDMVVE

SEQ ID NO: 13065 - protein, 36 aa, Artificial Sequence
  Non-cyclic GFR-binding peptide
  MOD_RES (5), (6): Xaa is C or S
TPPTXXVPTRLEPLPIVYYDSANNVVEQLSNDMVVE

SEQ ID NO: 13066 - protein, 34 aa, Artificial Sequence
  Non-cyclic GFR-binding peptide
  MOD_RES (1), (2): Xaa is C or S
  MOD_RES (16), (17), (18), (19), (20): Xaa is A or G
  MOD_RES (21), (22), (23), (24): Xaa is A or G or is absent
XXVPQALSPISILFIXXXXXXXXXYKQYEMIVRS

SEQ ID NO: 13067 - protein, 36 aa, Artificial Sequence
  Non-cyclic GFR-binding peptide
  MOD_RES (1), (2), (34), (36): Xaa is C or S
XXVPTRLSAISILYLDSANNVVLKNYQDMVVESXGX

SEQ ID NO: 13068 - protein, 37 aa, Artificial Sequence
  Non-cyclic GFR-binding peptide
  MOD_RES (34), (36): Xaa is C or S
  MOD_RES (14), (15), (16), (17), (18): Xaa is A or G
  MOD_RES (19), (20), (21), (22): Xaa is A or G or is absent
VPTELSPISMLFIXXXXXXXXXYKQYEDMVVEGXGXR

SEQ ID NO: 13069 - protein, 39 aa, Artificial Sequence
  Non-cyclic GFR-binding peptide
  MOD_RES (4), (38): Xaa is C or S
  MOD_RES (18), (19), (20), (21), (22): Xaa is A or G
  MOD_RES (23), (24), (25), (26): Xaa is A or G or is absent
KPTXAPTKLEPLPVVYYXXXXXXXXXEQLSNNMVVRSXG

SEQ ID NO: 13070 - protein, 41 aa, Artificial Sequence
  Non-cyclic GFR-binding peptide
  MOD_RES (4), (5), (39), (41): Xaa is C or S
  MOD_RES (19), (20), (21), (22), (23): Xaa is A or G
  MOD_RES (24), (25), (26), (27): Xaa is A or G or is absent
PKPXXAPTKLEPLTVLYYXXXXXXXXXEQLSNNMVVRSXGX

SEQ ID NO: 13071 - protein, 35 aa, Artificial Sequence
  Non-cyclic GFR-binding peptide
  MOD_RES (32), (34): Xaa is C or S
VPTELSPISMLFIDENEKVVYKQYEDMVVEGXGXR

SEQ ID NO: 13072 - protein, 41 aa, Artificial Sequence
  Non-cyclic GFR-binding peptide
  MOD_RES (7), (41): Xaa is C or S
  MOD_RES (21), (22), (23), (24), (25): Xaa is A or G
  MOD_RES (26), (27), (28), (29): Xaa is A or G or is absent
HVTKPTXAPTKLSPISVLFIXXXXXXXXXYKQYENMVVRSX

SEQ ID NO: 13073 - protein, 35 aa, Artificial Sequence
  Non-cyclic GFR-binding peptide
  MOD_RES (2), (3): Xaa is C or S
  MOD_RES (17), (18), (19), (20), (21): Xaa is A or G
  MOD_RES (22), (23), (24), (25): Xaa is A or G or is absent
PXXAPTKLEPLPVVYYXXXXXXXXXEQLSNNMVVR

SEQ ID NO: 13074 - protein, 32 aa, Artificial Sequence
  Non-cyclic GFR-binding peptide
  MOD_RES (32), (32): Xaa is C or S
VPTRLEPLTILYYDSANNVVEQLSNDMVVESX

SEQ ID NO: 13075 - protein, 38 aa, Artificial Sequence
  Non-cyclic GFR-binding peptide
  MOD_RES (5), (6): Xaa is C or S
  MOD_RES (20), (21), (22), (23), (24): Xaa is A or G
  MOD_RES (25), (26), (27), (28): Xaa is A or G or is absent
TPPTXXVPTRLEPLPIVYYXXXXXXXXXEQLSNDMVVE

SEQ ID NO: 13076 - protein, 39 aa, Artificial Sequence
  Non-cyclic GFR-binding peptide
  MOD_RES (5), (6): Xaa is C or S
  MOD_RES (20), (21), (22), (23), (24): Xaa is A or G
  MOD_RES (25), (26), (27), (28): Xaa is A or G or is absent
VPKPXXAPTKLSPISVLFIXXXXXXXXXYKQYENMVVRS

SEQ ID NO: 13077 - protein, 37 aa, Artificial Sequence
  Non-cyclic GFR-binding peptide
  MOD_RES (6), (7): Xaa is C or S
STPPTXXVPTRLNAISILYFDSANNVVLKKYRDMVVE

SEQ ID NO: 13078 - protein, 35 aa, Artificial Sequence
  Non-cyclic GFR-binding peptide
  MOD_RES (1), (35): Xaa is C or S
  MOD_RES (15), (16), (17), (18), (19): Xaa is A or G
  MOD_RES (20), (21), (22), (23): Xaa is A or G or is absent
XVPTELSPISMLFIXXXXXXXXXYKQYEDMVVEGX

SEQ ID NO: 13079 - protein, 33 aa, Artificial Sequence
  Non-cyclic GFR-binding peptide
  MOD_RES (1), (1): Xaa is C or S
  MOD_RES (15), (16), (17), (18), (19): Xaa is A or G
  MOD_RES (20), (21), (22), (23): Xaa is A or G or is absent
XAPTQLEPLPVVYYXXXXXXXXXEQLSNNMVVR

SEQ ID NO: 13080 - protein, 38 aa, Artificial Sequence
  Non-cyclic GFR-binding peptide
  MOD_RES (2), (3), (37): Xaa is C or S
  MOD_RES (17), (18), (19), (20), (21): Xaa is A or G
  MOD_RES (22), (23), (24), (25): Xaa is A or G or is absent
PXXAPTQLEPLPVVYYXXXXXXXXXEQLSNNMVVRAXG

SEQ ID NO: 13081 - protein, 41 aa, Artificial Sequence
  Non-cyclic GFR-binding peptide
  MOD_RES (6), (7), (39), (41): Xaa is C or S
TVPKPXXAPTQLEPLPVVYYDDSSNVIEQLSNNMVVRAXGX

SEQ ID NO: 13082 - protein, 40 aa, Artificial Sequence
  Non-cyclic GFR-binding peptide
  MOD_RES (5), (6), (40): Xaa is C or S
  MOD_RES (20), (21), (22), (23), (24): Xaa is A or G
  MOD_RES (25), (26), (27), (28): Xaa is A or G or is absent
VPKPXXAPTQLEPLTVLYYXXXXXXXXXEQLSNNMVVRAX

SEQ ID NO: 13083 - protein, 40 aa, Artificial Sequence
  Non-cyclic GFR-binding peptide
  MOD_RES (5), (6), (38), (40): Xaa is C or S
VPKPXXAPTKLSPISVLFIDDSSNVIYKQYENMVVRSXGX

SEQ ID NO: 13084 - protein, 39 aa, Artificial Sequence
  Non-cyclic GFR-binding peptide
  MOD_RES (3), (4), (36), (38): Xaa is C or S
KPXXAPTKLEPLTVLYYDDSSNVIEQLSNNMVVRSXGXH

SEQ ID NO: 13085 - protein, 33 aa, Artificial Sequence
  Non-cyclic GFR-binding peptide
  MOD_RES (2), (3): Xaa is C or S
PXXAPTQLEPLPVVYYDDSSNVIEQLSNNMVVR

SEQ ID NO: 13086 - protein, 40 aa, Artificial Sequence
  Non-cyclic GFR-binding peptide
  MOD_RES (5), (6), (38), (40): Xaa is C or S
VPKPXXAPTQLEPLTVLYYDDSSNVIEQLSNNMVVRAXGX

SEQ ID NO: 13087 - protein, 39 aa, Artificial Sequence
  Non-cyclic GFR-binding peptide
  MOD_RES (6), (7), (39): Xaa is C or S
YVPKPXXAPTKLEPLPVVYYDDSSNVIEQLSNNMVVRSX

SEQ ID NO: 13088 - protein, 39 aa, Artificial Sequence
  Non-cyclic GFR-binding peptide
  MOD_RES (5), (6), (38): Xaa is C or S
VPKPXXAPTKLSPISVLFIDDSSNVIYKQYENMVVRSXG

SEQ ID NO: 13089 - protein, 36 aa, Artificial Sequence
  Non-cyclic GFR-binding peptide
  MOD_RES (1), (2), (33), (35): Xaa is C or S
XXVPQALEPLTILYYVGRKPKVEQLSNMIVRSXKXS

SEQ ID NO: 13090 - protein, 36 aa, Artificial Sequence
  Non-cyclic GFR-binding peptide
  MOD_RES (1), (33), (35): Xaa is C or S
XVPTELEPLPMVYYDENEKVVEQLSNDMVVEGXGXR

SEQ ID NO: 13091 - protein, 42 aa, Artificial Sequence
  Non-cyclic GFR-binding peptide
  MOD_RES (4), (5), (39), (41): Xaa is C or S
  MOD_RES (19), (20), (21), (22), (23): Xaa is A or G
  MOD_RES (24), (25), (26), (27): Xaa is A or G or is absent
PKPXXAPTQLEPLPVVYYXXXXXXXXXEQLSNNMVVRAXGXH

SEQ ID NO: 13092 - protein, 36 aa, Artificial Sequence
  Non-cyclic GFR-binding peptide
  MOD_RES (1), (2), (33), (35): Xaa is C or S
XXVSQDLSPISILFIIGKTPKIYKQYEMIVKSXKXS

SEQ ID NO: 13093 - protein, 38 aa, Artificial Sequence
  Non-cyclic GFR-binding peptide
  MOD_RES (3), (4), (36), (38): Xaa is C or S
PTXXVPTRLEPLTILYYDSANNVVEQLSNDMVVESXGX

SEQ ID NO: 13094 - protein, 38 aa, Artificial Sequence
  Non-cyclic GFR-binding peptide
  MOD_RES (5), (6): Xaa is C or S
  MOD_RES (20), (21), (22), (23), (24): Xaa is A or G
  MOD_RES (25), (26), (27), (28): Xaa is A or G or is absent
VPKPXXAPTQLEPLTVLYYXXXXXXXXXEQLSNNMVVR

SEQ ID NO: 13095 - protein, 39 aa, Artificial Sequence
  Non-cyclic GFR-binding peptide
  MOD_RES (4), (5), (37), (39): Xaa is C or S
PPTXXVPTRLEPLTILYYDSANNVVEQLSNDMVVESXGX

SEQ ID NO: 13096 - protein, 40 aa, Artificial Sequence
  Non-cyclic GFR-binding peptide
  MOD_RES (2), (3), (37), (39): Xaa is C or S
  MOD_RES (17), (18), (19), (20), (21): Xaa is A or G
  MOD_RES (22), (23), (24), (25): Xaa is A or G or is absent
PXXAPTQLSPISVLFIXXXXXXXXXYKQYENMVVRAXGXH

SEQ ID NO: 13097 - protein, 44 aa, Artificial Sequence
  Non-cyclic GFR-binding peptide
  MOD_RES (7), (41), (43): Xaa is C or S
  MOD_RES (21), (22), (23), (24), (25): Xaa is A or G
  MOD_RES (26), (27), (28), (29): Xaa is A or G or is absent
HVTKPTXAPTKLSPISVLFIXXXXXXXXXYKQYENMVVRSXGXH

SEQ ID NO: 13098 - protein, 33 aa, Artificial Sequence
  Non-cyclic GFR-binding peptide
  MOD_RES (32), (32): Xaa is C or S
VPTELEPLTMLYYDENEKVVEQLSNDMVVEGXG

SEQ ID NO: 13099 - protein, 41 aa, Artificial Sequence
  Non-cyclic GFR-binding peptide
  MOD_RES (3), (4), (38), (40): Xaa is C or S
  MOD_RES (18), (19), (20), (21), (22): Xaa is A or G
  MOD_RES (23), (24), (25), (26): Xaa is A or G or is absent
KPXXAPTKLSPISVLFIXXXXXXXXXYKQYENMVVRSXGXH

SEQ ID NO: 13100 - protein, 42 aa, Artificial Sequence
  Non-cyclic GFR-binding peptide
  MOD_RES (4), (5), (39), (41): Xaa is C or S
  MOD_RES (19), (20), (21), (22), (23): Xaa is A or G
  MOD_RES (24), (25), (26), (27): Xaa is A or G or is absent
PKAXXVPTELEPLTMLYYXXXXXXXXXEQLSNDMVVEGXGXR

SEQ ID NO: 13101 - protein, 40 aa, Artificial Sequence
  Non-cyclic GFR-binding peptide
  MOD_RES (5), (6), (40): Xaa is C or S
  MOD_RES (20), (21), (22), (23), (24): Xaa is A or G
  MOD_RES (25), (26), (27), (28): Xaa is A or G or is absent
IPKAXXVPTELSPISMLFIXXXXXXXXXYKQYEDMVVEGX

SEQ ID NO: 13102 - protein, 33 aa, Artificial Sequence
  Non-cyclic GFR-binding peptide
  MOD_RES (1), (2): Xaa is C or S
XXVPTELSPISMLFIDENEKVVYKQYEDMVVEG

SEQ ID NO: 13103 - protein, 33 aa, Artificial Sequence
  Non-cyclic GFR-binding peptide
  MOD_RES (1), (2), (33): Xaa is C or S
XXVPQDLEPLPIVYYVGRTPKVEQLSNMVVKSX

SEQ ID NO: 13104 - protein, 35 aa, Artificial Sequence
  Non-cyclic GFR-binding peptide
  MOD_RES (3), (4), (35): Xaa is C or S
SPXXVPQDLSPISILFIVGRTPKVYKQYEMVVKSX

SEQ ID NO: 13105 - protein, 41 aa, Artificial Sequence
  Non-cyclic GFR-binding peptide
  MOD_RES (5), (6), (38), (40): Xaa is C or S
IPKAXXVPTELEPLPMVYYDEYDKVVEQLSNEMVVEGXGXR

SEQ ID NO: 13106 - protein, 32 aa, Artificial Sequence
  Non-cyclic GFR-binding peptide
  MOD_RES (14), (15), (16), (17), (18): Xaa is A or G
  MOD_RES (19), (20), (21), (22): Xaa is A or G or is absent
VPTRLEPLPIVYYXXXXXXXXXEQLSNDMVVE

SEQ ID NO: 13107 - protein, 38 aa, Artificial Sequence
  Non-cyclic GFR-binding peptide
  MOD_RES (5), (5): Xaa is C or S
  MOD_RES (19), (20), (21), (22), (23): Xaa is A or G
  MOD_RES (24), (25), (26), (27): Xaa is A or G or is absent
TKPTXAPTKLSPISVLFIXXXXXXXXXYKQYENMVVRS

SEQ ID NO: 13108 - protein, 32 aa, Artificial Sequence
  Non-cyclic GFR-binding peptide
  MOD_RES (1), (2): Xaa is C or S
XXVPTRLSAISILYLDSANNVVLKNYQDMVVE

SEQ ID NO: 13109 - protein, 40 aa, Artificial Sequence
  Non-cyclic GFR-binding peptide
  MOD_RES (5), (39): Xaa is C or S
  MOD_RES (19), (20), (21), (22), (23): Xaa is A or G
  MOD_RES (24), (25), (26), (27): Xaa is A or G or is absent
TKPTXAPTKLEPLPVVYYXXXXXXXXXEQLSNNMVVRSXG

SEQ ID NO: 13110 - protein, 40 aa, Artificial Sequence
  Non-cyclic GFR-binding peptide
  MOD_RES (5), (6), (38), (40): Xaa is C or S
VPKPXXAPTQLSPISVLFIDDSSNVIYKQYENMVVRAXGX

SEQ ID NO: 13111 - protein, 35 aa, Artificial Sequence
  Non-cyclic GFR-binding peptide
  MOD_RES (2), (3): Xaa is C or S
  MOD_RES (17), (18), (19), (20), (21): Xaa is A or G
  MOD_RES (22), (23), (24), (25): Xaa is A or G or is absent
PXXVSQDLSPISILFIXXXXXXXXXYKQYEMIVKS

SEQ ID NO: 13112 - protein, 33 aa, Artificial Sequence
  Non-cyclic GFR-binding peptide
  MOD_RES (2), (3): Xaa is C or S
PXXAPTKLEPLTVLYYDDSSNVIEQLSNNMVVR

SEQ ID NO: 13113 - protein, 39 aa, Artificial Sequence
  Non-cyclic GFR-binding peptide
  MOD_RES (6), (7), (39): Xaa is C or S
TVPKPXXAPTQLSPISVLFIDDSSNVIYKQYENMVVRAX

SEQ ID NO: 13114 - protein, 39 aa, Artificial Sequence
  Non-cyclic GFR-binding peptide
  MOD_RES (6), (7): Xaa is C or S
  MOD_RES (21), (22), (23), (24), (25): Xaa is A or G
  MOD_RES (26), (27), (28), (29): Xaa is A or G or is absent
TVPKPXXAPTQLEPLTVLYYXXXXXXXXXEQLSNNMVVR

SEQ ID NO: 13115 - protein, 33 aa, Artificial Sequence
  Non-cyclic GFR-binding peptide
  MOD_RES (1), (33): Xaa is C or S
XAPTKLSPISVLFIDDSSNVIYKQYENMVVRSX

SEQ ID NO: 13116 - protein, 37 aa, Artificial Sequence
  Non-cyclic GFR-binding peptide
  MOD_RES (2), (3), (35), (37): Xaa is C or S
AXXVPTELEPLTMLYYDENEKVVEQLSNDMVVEGXGX

SEQ ID NO: 13117 - protein, 35 aa, Artificial Sequence
  Non-cyclic GFR-binding peptide
  MOD_RES (34), (34): Xaa is C or S
  MOD_RES (14), (15), (16), (17), (18): Xaa is A or G
  MOD_RES (19), (20), (21), (22): Xaa is A or G or is absent
APTQLSPISVLFIXXXXXXXXXYKQYENMVVRAXG

SEQ ID NO: 13118 - protein, 39 aa, Artificial Sequence
  Non-cyclic GFR-binding peptide
  MOD_RES (5), (6), (39): Xaa is C or S
  MOD_RES (20), (21), (22), (23), (24): Xaa is A or G
  MOD_RES (25), (26), (27), (28): Xaa is A or G or is absent
SAAPXXVPQALEPLTILYYXXXXXXXXXEQLSNMIVRSX

SEQ ID NO: 13119 - protein, 40 aa, Artificial Sequence
  Non-cyclic GFR-binding peptide
  MOD_RES (4), (5), (37), (39): Xaa is C or S
PKPXXAPTQLSPISVLFIDDSSNVIYKQYENMVVRAXGXH

SEQ ID NO: 13120 - protein, 38 aa, Artificial Sequence
  Non-cyclic GFR-binding peptide
  MOD_RES (3), (4), (38): Xaa is C or S
  MOD_RES (18), (19), (20), (21), (22): Xaa is A or G
  MOD_RES (23), (24), (25), (26): Xaa is A or G or is absent
PTXXVPTRLSAISILYLXXXXXXXXXLKNYQDMVVESX

SEQ ID NO: 13121 - protein, 35 aa, Artificial Sequence
  Non-cyclic GFR-binding peptide
  MOD_RES (3), (4): Xaa is C or S
KAXXVPTELEPLPMVYYDEYDKVVEQLSNEMVVEG

SEQ ID NO: 13122 - protein, 33 aa, Artificial Sequence
  Non-cyclic GFR-binding peptide
  MOD_RES (32), (32): Xaa is C or S
APTKLEPLTVLYYDDSSNVIEQLSNNMVVRSXG

SEQ ID NO: 13123 - protein, 35 aa, Artificial Sequence
  Non-cyclic GFR-binding peptide
  MOD_RES (2), (3): Xaa is C or S
  MOD_RES (17), (18), (19), (20), (21): Xaa is A or G
  MOD_RES (22), (23), (24), (25): Xaa is A or G or is absent
AXXVPTELSPISMLFIXXXXXXXXXYKQYEDMVVE

SEQ ID NO: 13124 - protein, 42 aa, Artificial Sequence
  Non-cyclic GFR-binding peptide
  MOD_RES (6), (7), (39), (41): Xaa is C or S
SIPKAXXVPTELSPISMLFIDEYDKVVYKQYEEMVVEGXGXR

SEQ ID NO: 13125 - protein, 41 aa, Artificial Sequence
  Non-cyclic GFR-binding peptide
  MOD_RES (5), (6), (38), (40): Xaa is C or S
TPPTXXVPTRLSAISILYLDSANNVVLKNYQDMVVESXGXR

SEQ ID NO: 13126 - protein, 38 aa, Artificial Sequence
  Non-cyclic GFR-binding peptide
  MOD_RES (5), (6): Xaa is C or S
  MOD_RES (20), (21), (22), (23), (24): Xaa is A or G
  MOD_RES (25), (26), (27), (28): Xaa is A or G or is absent
SASPXXVSQDLEPLPIVYYXXXXXXXXXEQLSNMIVKS

SEQ ID NO: 13127 - protein, 37 aa, Artificial Sequence
  Non-cyclic GFR-binding peptide
  MOD_RES (2), (3), (37): Xaa is C or S
  MOD_RES (17), (18), (19), (20), (21): Xaa is A or G
  MOD_RES (22), (23), (24), (25): Xaa is A or G or is absent
TXXVPTRLEPLTILYYXXXXXXXXXEQLSNDMVVESX

SEQ ID NO: 13128 - protein, 40 aa, Artificial Sequence
  Non-cyclic GFR-binding peptide
  MOD_RES (6), (7), (39): Xaa is C or S
STPPTXXVPTRLSAISILYLDSANNVVLKNYQDMVVESXG

SEQ ID NO: 13129 - protein, 43 aa, Artificial Sequence
  Non-cyclic GFR-binding peptide
  MOD_RES (6), (7), (41), (43): Xaa is C or S
  MOD_RES (21), (22), (23), (24), (25): Xaa is A or G
  MOD_RES (26), (27), (28), (29): Xaa is A or G or is absent
KIPKAXXVPTELSPISMLFIXXXXXXXXXYKQYEDMVVEGXGX

SEQ ID NO: 13130 - protein, 36 aa, Artificial Sequence
  Non-cyclic GFR-binding peptide
  MOD_RES (3), (4): Xaa is C or S
  MOD_RES (18), (19), (20), (21), (22): Xaa is A or G
  MOD_RES (23), (24), (25), (26): Xaa is A or G or is absent
KAXXVPTELSPISMLFIXXXXXXXXXYKQYEDMVVE

SEQ ID NO: 13131 - protein, 33 aa, Artificial Sequence
  Non-cyclic GFR-binding peptide
  MOD_RES (1), (1): Xaa is C or S
  MOD_RES (15), (16), (17), (18), (19): Xaa is A or G
  MOD_RES (20), (21), (22), (23): Xaa is A or G or is absent
XVPTRLEPLTILYYXXXXXXXXXEQLSNDMVVE

SEQ ID NO: 13132 - protein, 32 aa, Artificial Sequence
  Non-cyclic GFR-binding peptide
  MOD_RES (32), (32): Xaa is C or S
APTKLSPISVLFIDDSSNVIYKQYENMVVRSX

SEQ ID NO: 13133 - protein, 43 aa, Artificial Sequence
  Non-cyclic GFR-binding peptide
  MOD_RES (5), (6), (40), (42): Xaa is C or S
  MOD_RES (20), (21), (22), (23), (24): Xaa is A or G
  MOD_RES (25), (26), (27), (28): Xaa is A or G or is absent
VPKPXXAPTQLEPLTVLYYXXXXXXXXXEQLSNNMVVRAXGXH

SEQ ID NO: 13134 - protein, 37 aa, Artificial Sequence
  Non-cyclic GFR-binding peptide
  MOD_RES (3), (35), (37): Xaa is C or S
PTXAPTKLEPLPVVYYDDSSNVIEQLSNNMVVRSXGX

SEQ ID NO: 13135 - protein, 34 aa, Artificial Sequence
  Non-cyclic GFR-binding peptide
  MOD_RES (1), (2), (34): Xaa is C or S
XXAPTQLEPLTVLYYDDSSNVIEQLSNNMVVRAX

SEQ ID NO: 13136 - protein, 39 aa, Artificial Sequence
  Non-cyclic GFR-binding peptide
  MOD_RES (5), (6), (39): Xaa is C or S
  MOD_RES (20), (21), (22), (23), (24): Xaa is A or G
  MOD_RES (25), (26), (27), (28): Xaa is A or G or is absent
SAAPXXVPQALSPISILFIXXXXXXXXXYKQYEMIVRSX

SEQ ID NO: 13137 - protein, 41 aa, Artificial Sequence
  Non-cyclic GFR-binding peptide
  MOD_RES (7), (39), (41): Xaa is C or S
HVTKPTXAPTKLSPISVLFIDDSSNVIYKQYENMVVRSXGX

SEQ ID NO: 13138 - protein, 37 aa, Artificial Sequence
  Non-cyclic GFR-binding peptide
  MOD_RES (1), (2), (36): Xaa is C or S
  MOD_RES (16), (17), (18), (19), (20): Xaa is A or G
  MOD_RES (21), (22), (23), (24): Xaa is A or G or is absent
XXAPTKLEPLTVLYYXXXXXXXXXEQLSNNMVVRSXG

SEQ ID NO: 13139 - protein, 40 aa, Artificial Sequence
  Non-cyclic GFR-binding peptide
  MOD_RES (6), (7), (40): Xaa is C or S
  MOD_RES (21), (22), (23), (24), (25): Xaa is A or G
  MOD_RES (26), (27), (28), (29): Xaa is A or G or is absent
ASASPXXVSQDLSPISILFIXXXXXXXXXYKQYEMIVKSX

SEQ ID NO: 13140 - protein, 31 aa, Artificial Sequence
  Non-cyclic GFR-binding peptide
APTQLEPLTVLYYDDSSNVIEQLSNNMVVRA

SEQ ID NO: 13141 - protein, 38 aa, Artificial Sequence
  Non-cyclic GFR-binding peptide
  MOD_RES (6), (7): Xaa is C or S
YVPKPXXAPTKLEPLTVLYYDDSSNVIEQLSNNMVVRS

SEQ ID NO: 13142 - protein, 39 aa, Artificial Sequence
  Non-cyclic GFR-binding peptide
  MOD_RES (4), (5), (39): Xaa is C or S
  MOD_RES (19), (20), (21), (22), (23): Xaa is A or G
  MOD_RES (24), (25), (26), (27): Xaa is A or G or is absent
PKPXXAPTKLEPLPVVYYXXXXXXXXXEQLSNNMVVRSX

SEQ ID NO: 13143 - protein, 38 aa, Artificial Sequence
  Non-cyclic GFR-binding peptide
  MOD_RES (3), (4), (37): Xaa is C or S
  MOD_RES (18), (19), (20), (21), (22): Xaa is A or G
  MOD_RES (23), (24), (25), (26): Xaa is A or G or is absent
SPXXVPQDLEPLPIVYYXXXXXXXXXEQLSNMVVKSXK

SEQ ID NO: 13144 - protein, 41 aa, Artificial Sequence
  Non-cyclic GFR-binding peptide
  MOD_RES (6), (7), (39), (41): Xaa is C or S
STPPTXXVPTRLNAISILYFDSANNVVLKKYRDMVVESXGX

SEQ ID NO: 13145 - protein, 37 aa, Artificial Sequence
  Non-cyclic GFR-binding peptide
  MOD_RES (1), (2), (34), (36): Xaa is C or S
XXAPTQLSPISVLFIDDSSNVIYKQYENMVVRAXGXH

SEQ ID NO: 13146 - protein, 35 aa, Artificial Sequence
  Non-cyclic GFR-binding peptide
  MOD_RES (34), (34): Xaa is C or S
  MOD_RES (14), (15), (16), (17), (18): Xaa is A or G
  MOD_RES (19), (20), (21), (22): Xaa is A or G or is absent
VPTRLEPLPIVYYXXXXXXXXXEQLSNDMVVESXG

SEQ ID NO: 13147 - protein, 36 aa, Artificial Sequence
  Non-cyclic GFR-binding peptide
  MOD_RES (2), (3), (35): Xaa is C or S
AXXVPTELSPISMLFIDEYDKVVYKQYEEMVVEGXG

SEQ ID NO: 13148 - protein, 35 aa, Artificial Sequence
  Non-cyclic GFR-binding peptide
  MOD_RES (32), (34): Xaa is C or S
VPTRLSAISILYLDSANNVVLKNYQDMVVESXGXR

SEQ ID NO: 13149 - protein, 37 aa, Artificial Sequence
  Non-cyclic GFR-binding peptide
  MOD_RES (3), (4): Xaa is C or S
  MOD_RES (18), (19), (20), (21), (22): Xaa is A or G
  MOD_RES (23), (24), (25), (26): Xaa is A or G or is absent
KPXXAPTQLSPISVLFIXXXXXXXXXYKQYENMVVRA

SEQ ID NO: 13150 - protein, 31 aa, Artificial Sequence
  Non-cyclic GFR-binding peptide
  MOD_RES (1), (1): Xaa is C or S
XVPTELEPLTMLYYDEYDKVVEQLSNEMVVE

SEQ ID NO: 13151 - protein, 42 aa, Artificial Sequence
  Non-cyclic GFR-binding peptide
  MOD_RES (5), (6), (40), (42): Xaa is C or S
  MOD_RES (20), (21), (22), (23), (24): Xaa is A or G
  MOD_RES (25), (26), (27), (28): Xaa is A or G or is absent
VPKPXXAPTKLEPLPVVYYXXXXXXXXXEQLSNNMVVRSXGX

SEQ ID NO: 13152 - protein, 33 aa, Artificial Sequence
  Non-cyclic GFR-binding peptide
  MOD_RES (32), (32): Xaa is C or S
APTQLSPISVLFIDDSSNVIYKQYENMVVRAXG

SEQ ID NO: 13153 - protein, 38 aa, Artificial Sequence
  Non-cyclic GFR-binding peptide
  MOD_RES (3), (4), (35), (37): Xaa is C or S
SPXXVPQDLEPLPIVYYVGRTPKVEQLSNMVVKSXKXS

SEQ ID NO: 13154 - protein, 34 aa, Artificial Sequence
  Non-cyclic GFR-binding peptide
  MOD_RES (1), (1): Xaa is C or S
  MOD_RES (15), (16), (17), (18), (19): Xaa is A or G
  MOD_RES (20), (21), (22), (23): Xaa is A or G or is absent
XVPTRLSAISILYLXXXXXXXXXLKNYQDMVVES

SEQ ID NO: 13155 - protein, 38 aa, Artificial Sequence
  Non-cyclic GFR-binding peptide
  MOD_RES (5), (6), (37): Xaa is C or S
SASPXXVPQDLSPISILFIVGRTPKVYKQYEMVVKSXK

SEQ ID NO: 13156 - protein, 36 aa, Artificial Sequence
  Non-cyclic GFR-binding peptide
  MOD_RES (1), (33), (35): Xaa is C or S
XVPTRLEPLPIVYYDSANNVVEQLSNDMVVESXGXR

SEQ ID NO: 13157 - protein, 41 aa, Artificial Sequence
  Non-cyclic GFR-binding peptide
  MOD_RES (5), (6), (38), (40): Xaa is C or S
VPKPXXAPTKLEPLTVLYYDDSSNVIEQLSNNMVVRSXGXH

SEQ ID NO: 13158 - protein, 36 aa, Artificial Sequence
  Non-cyclic GFR-binding peptide
  MOD_RES (3), (4): Xaa is C or S
  MOD_RES (18), (19), (20), (21), (22): Xaa is A or G
  MOD_RES (23), (24), (25), (26): Xaa is A or G or is absent
KPXXAPTKLSPISVLFIXXXXXXXXXYKQYENMVVR

SEQ ID NO: 13159 - protein, 35 aa, Artificial Sequence
  Non-cyclic GFR-binding peptide
  MOD_RES (1), (2), (35): Xaa is C or S
  MOD_RES (16), (17), (18), (19), (20): Xaa is A or G
  MOD_RES (21), (22), (23), (24): Xaa is A or G or is absent
XXVPQALEPLTILYYXXXXXXXXXEQLSNMIVRSX

SEQ ID NO: 13160 - protein, 34 aa, Artificial Sequence
  Non-cyclic GFR-binding peptide
  MOD_RES (3), (4): Xaa is C or S
SPXXVSQDLEPLPIVYYIGKTPKIEQLSNMIVKS

SEQ ID NO: 13161 - protein, 34 aa, Artificial Sequence
  Non-cyclic GFR-binding peptide
  MOD_RES (1), (1): Xaa is C or S
  MOD_RES (15), (16), (17), (18), (19): Xaa is A or G
  MOD_RES (20), (21), (22), (23): Xaa is A or G or is absent
XVPTRLNAISILYFXXXXXXXXXLKKYRDMVVES

SEQ ID NO: 13162 - protein, 33 aa, Artificial Sequence
  Non-cyclic GFR-binding peptide
  MOD_RES (1), (33): Xaa is C or S
XVPTRLEPLTILYYDSANNVVEQLSNDMVVESX

SEQ ID NO: 13163 - protein, 39 aa, Artificial Sequence
  Non-cyclic GFR-binding peptide
  MOD_RES (6), (7), (39): Xaa is C or S
STPPTXXVPTRLNAISILYFDSANNVVLKKYRDMVVESX

SEQ ID NO: 13164 - protein, 35 aa, Artificial Sequence
  Non-cyclic GFR-binding peptide
  MOD_RES (2), (3): Xaa is C or S
  MOD_RES (17), (18), (19), (20), (21): Xaa is A or G
  MOD_RES (22), (23), (24), (25): Xaa is A or G or is absent
AXXVPTELEPLTMLYYXXXXXXXXXEQLSNDMVVE

SEQ ID NO: 13165 - protein, 40 aa, Artificial Sequence
  Non-cyclic GFR-binding peptide
  MOD_RES (6), (38), (40): Xaa is C or S
VTKPTXAPTKLEPLPVVYYDDSSNVIEQLSNNMVVRSXGX

SEQ ID NO: 13166 - protein, 39 aa, Artificial Sequence
  Non-cyclic GFR-binding peptide
  MOD_RES (4), (5), (39): Xaa is C or S
  MOD_RES (19), (20), (21), (22), (23): Xaa is A or G
  MOD_RES (24), (25), (26), (27): Xaa is A or G or is absent
PKAXXVPTELSPISMLFIXXXXXXXXXYKQYEEMVVEGX

SEQ ID NO: 13167 - protein, 34 aa, Artificial Sequence
  Non-cyclic GFR-binding peptide
  MOD_RES (1), (33): Xaa is C or S
XVPTELEPLTMLYYDEYDKVVEQLSNEMVVEGXG

SEQ ID NO: 13168 - protein, 37 aa, Artificial Sequence
  Non-cyclic GFR-binding peptide
  MOD_RES (3), (4), (37): Xaa is C or S
  MOD_RES (18), (19), (20), (21), (22): Xaa is A or G
  MOD_RES (23), (24), (25), (26): Xaa is A or G or is absent
APXXVPQALEPLTILYYXXXXXXXXXEQLSNMIVRSX

SEQ ID NO: 13169 - protein, 42 aa, Artificial Sequence
  Non-cyclic GFR-binding peptide
  MOD_RES (5), (6), (40), (42): Xaa is C or S
  MOD_RES (20), (21), (22), (23), (24): Xaa is A or G
  MOD_RES (25), (26), (27), (28): Xaa is A or G or is absent
VPKPXXAPTKLEPLTVLYYXXXXXXXXXEQLSNNMVVRSXGX

SEQ ID NO: 13170 - protein, 40 aa, Artificial Sequence
  Non-cyclic GFR-binding peptide
  MOD_RES (5), (37), (39): Xaa is C or S
TKPTXAPTKLSPISVLFIDDSSNVIYKQYENMVVRSXGXH

SEQ ID NO: 13171 - protein, 38 aa, Artificial Sequence
  Non-cyclic GFR-binding peptide
  MOD_RES (3), (4), (38): Xaa is C or S
  MOD_RES (18), (19), (20), (21), (22): Xaa is A or G
  MOD_RES (23), (24), (25), (26): Xaa is A or G or is absent
PTXXVPTRLEPLTILYYXXXXXXXXXEQLSNDMVVESX

SEQ ID NO: 13172 - protein, 30 aa, Artificial Sequence
  Non-cyclic GFR-binding peptide
APTKLSPISVLFIDDSSNVIYKQYENMVVR

SEQ ID NO: 13173 - protein, 35 aa, Artificial Sequence
  Non-cyclic GFR-binding peptide
  MOD_RES (32), (34): Xaa is C or S
VPTRLEPLTILYYDSANNVVEQLSNDMVVESXGXR

SEQ ID NO: 13174 - protein, 34 aa, Artificial Sequence
  Non-cyclic GFR-binding peptide
  MOD_RES (32), (34): Xaa is C or S
VPTRLEPLTILYYDSANNVVEQLSNDMVVESXGX

SEQ ID NO: 13175 - protein, 36 aa, Artificial Sequence
  Non-cyclic GFR-binding peptide
  MOD_RES (1), (2), (36): Xaa is C or S
  MOD_RES (16), (17), (18), (19), (20): Xaa is A or G
  MOD_RES (21), (22), (23), (24): Xaa is A or G or is absent
XXVPTELEPLTMLYYXXXXXXXXXEQLSNDMVVEGX

SEQ ID NO: 13176 - protein, 39 aa, Artificial Sequence
  Non-cyclic GFR-binding peptide
  MOD_RES (3), (37), (39): Xaa is C or S
  MOD_RES (17), (18), (19), (20), (21): Xaa is A or G
  MOD_RES (22), (23), (24), (25): Xaa is A or G or is absent
PTXAPTKLEPLPVVYYXXXXXXXXXEQLSNNMVVRSXGX

SEQ ID NO: 13177 - protein, 37 aa, Artificial Sequence
  Non-cyclic GFR-binding peptide
  MOD_RES (3), (4): Xaa is C or S
  MOD_RES (18), (19), (20), (21), (22): Xaa is A or G
  MOD_RES (23), (24), (25), (26): Xaa is A or G or is absent
KAXXVPTELEPLTMLYYXXXXXXXXXEQLSNDMVVEG

SEQ ID NO: 13178 - protein, 38 aa, Artificial Sequence
  Non-cyclic GFR-binding peptide
  MOD_RES (5), (37): Xaa is C or S
TKPTXAPTKLSPISVLFIDDSSNVIYKQYENMVVRSXG

SEQ ID NO: 13179 - protein, 34 aa, Artificial Sequence
  Non-cyclic GFR-binding peptide
  MOD_RES (3), (4): Xaa is C or S
SPXXVPQDLSPISILFIVGRTPKVYKQYEMVVKS

SEQ ID NO: 13180 - protein, 35 aa, Artificial Sequence
  Non-cyclic GFR-binding peptide
  MOD_RES (2), (3): Xaa is C or S
  MOD_RES (17), (18), (19), (20), (21): Xaa is A or G
  MOD_RES (22), (23), (24), (25): Xaa is A or G or is absent
AXXVPTELEPLPMVYYXXXXXXXXXEQLSNDMVVE

SEQ ID NO: 13181 - protein, 41 aa, Artificial Sequence
  Non-cyclic GFR-binding peptide
  MOD_RES (7), (39), (41): Xaa is C or S
HVTKPTXAPTKLEPLTVLYYDDSSNVIEQLSNNMVVRSXGX

SEQ ID NO: 13182 - protein, 37 aa, Artificial Sequence
  Non-cyclic GFR-binding peptide
  MOD_RES (1), (35), (37): Xaa is C or S
  MOD_RES (15), (16), (17), (18), (19): Xaa is A or G
  MOD_RES (20), (21), (22), (23): Xaa is A or G or is absent
XAPTQLEPLPVVYYXXXXXXXXXEQLSNNMVVRAXGX

SEQ ID NO: 13183 - protein, 38 aa, Artificial Sequence
  Non-cyclic GFR-binding peptide
  MOD_RES (3), (4), (38): Xaa is C or S
  MOD_RES (18), (19), (20), (21), (22): Xaa is A or G
  MOD_RES (23), (24), (25), (26): Xaa is A or G or is absent
KPXXAPTQLEPLPVVYYXXXXXXXXXEQLSNNMVVRAX

SEQ ID NO: 13184 - protein, 41 aa, Artificial Sequence
  Non-cyclic GFR-binding peptide
  MOD_RES (4), (5), (39), (41): Xaa is C or S
  MOD_RES (19), (20), (21), (22), (23): Xaa is A or G
  MOD_RES (24), (25), (26), (27): Xaa is A or G or is absent
PPTXXVPTRLNAISILYFXXXXXXXXXLKKYRDMVVESXGX

SEQ ID NO: 13185 - protein, 32 aa, Artificial Sequence
  Non-cyclic GFR-binding peptide
  MOD_RES (1), (1): Xaa is C or S
XAPTKLSPISVLFIDDSSNVIYKQYENMVVRS

SEQ ID NO: 13186 - protein, 40 aa, Artificial Sequence
  Non-cyclic GFR-binding peptide
  MOD_RES (5), (6), (38), (40): Xaa is C or S
VPKPXXAPTKLEPLTVLYYDDSSNVIEQLSNNMVVRSXGX

SEQ ID NO: 13187 - protein, 38 aa, Artificial Sequence
  Non-cyclic GFR-binding peptide
  MOD_RES (2), (3), (37): Xaa is C or S
  MOD_RES (17), (18), (19), (20), (21): Xaa is A or G
  MOD_RES (22), (23), (24), (25): Xaa is A or G or is absent
TXXVPTRLSAISILYLXXXXXXXXXLKNYQDMVVESXG

SEQ ID NO: 13188 - protein, 38 aa, Artificial Sequence
  Non-cyclic GFR-binding peptide
  MOD_RES (4), (5): Xaa is C or S
  MOD_RES (19), (20), (21), (22), (23): Xaa is A or G
  MOD_RES (24), (25), (26), (27): Xaa is A or G or is absent
PKPXXAPTQLEPLTVLYYXXXXXXXXXEQLSNNMVVRA

SEQ ID NO: 13189 - protein, 35 aa, Artificial Sequence
  Non-cyclic GFR-binding peptide
  MOD_RES (32), (34): Xaa is C or S
APTKLEPLTVLYYDDSSNVIEQLSNNMVVRSXGXH

SEQ ID NO: 13190 - protein, 33 aa, Artificial Sequence
  Non-cyclic GFR-binding peptide
  MOD_RES (1), (33): Xaa is C or S
XVPTELEPLTMLYYDENEKVVEQLSNDMVVEGX

SEQ ID NO: 13191 - protein, 34 aa, Artificial Sequence
  Non-cyclic GFR-binding peptide
  MOD_RES (2), (3): Xaa is C or S
PXXAPTQLEPLTVLYYDDSSNVIEQLSNNMVVRA

SEQ ID NO: 13192 - protein, 36 aa, Artificial Sequence
  Non-cyclic GFR-binding peptide
  MOD_RES (34), (36): Xaa is C or S
  MOD_RES (14), (15), (16), (17), (18): Xaa is A or G
  MOD_RES (19), (20), (21), (22): Xaa is A or G or is absent
VPTELEPLTMLYYXXXXXXXXXEQLSNDMVVEGXGX

SEQ ID NO: 13193 - protein, 35 aa, Artificial Sequence
  Non-cyclic GFR-binding peptide
  MOD_RES (3), (4): Xaa is C or S
KPXXAPTQLEPLPVVYYDDSSNVIEQLSNNMVVRA

SEQ ID NO: 13194 - protein, 39 aa, Artificial Sequence
  Non-cyclic GFR-binding peptide
  MOD_RES (6), (7): Xaa is C or S
  MOD_RES (21), (22), (23), (24), (25): Xaa is A or G
  MOD_RES (26), (27), (28), (29): Xaa is A or G or is absent
ASASPXXVSQDLSPISILFIXXXXXXXXXYKQYEMIVKS

SEQ ID NO: 13195 - protein, 37 aa, Artificial Sequence
  Non-cyclic GFR-binding peptide
  MOD_RES (2), (3), (34), (36): Xaa is C or S
PXXVPQALSPISILFIVGRKPKVYKQYEMIVRSXKXS

SEQ ID NO: 13196 - protein, 38 aa, Artificial Sequence
  Non-cyclic GFR-binding peptide
  MOD_RES (5), (6): Xaa is C or S
  MOD_RES (20), (21), (22), (23), (24): Xaa is A or G
  MOD_RES (25), (26), (27), (28): Xaa is A or G or is absent
SASPXXVSQDLSPISILFIXXXXXXXXXYKQYEMIVKS

SEQ ID NO: 13197 - protein, 33 aa, Artificial Sequence
  Non-cyclic GFR-binding peptide
  MOD_RES (1), (2): Xaa is C or S
XXVPTELEPLPMVYYDENEKVVEQLSNDMVVEG

SEQ ID NO: 13198 - protein, 38 aa, Artificial Sequence
  Non-cyclic GFR-binding peptide
  MOD_RES (6), (7): Xaa is C or S
SIPKAXXVPTELSPISMLFIDEYDKVVYKQYEEMVVEG

SEQ ID NO: 13199 - protein, 37 aa, Artificial Sequence
  Non-cyclic GFR-binding peptide
  MOD_RES (6), (7): Xaa is C or S
YVPKPXXAPTKLSPISVLFIDDSSNVIYKQYENMVVR

SEQ ID NO: 13200 - protein, 41 aa, Artificial Sequence
  Non-cyclic GFR-binding peptide
  MOD_RES (3), (4), (38), (40): Xaa is C or S
  MOD_RES (18), (19), (20), (21), (22): Xaa is A or G
  MOD_RES (23), (24), (25), (26): Xaa is A or G or is absent
KAXXVPTELEPLPMVYYXXXXXXXXXEQLSNDMVVEGXGXR

SEQ ID NO: 13201 - protein, 36 aa, Artificial Sequence
  Non-cyclic GFR-binding peptide
  MOD_RES (4), (4): Xaa is C or S
  MOD_RES (18), (19), (20), (21), (22): Xaa is A or G
  MOD_RES (23), (24), (25), (26): Xaa is A or G or is absent
KPTXAPTKLEPLTVLYYXXXXXXXXXEQLSNNMVVR

SEQ ID NO: 13202 - protein, 37 aa, Artificial Sequence
  Non-cyclic GFR-binding peptide
  MOD_RES (5), (37): Xaa is C or S
TKPTXAPTKLSPISVLFIDDSSNVIYKQYENMVVRSX

SEQ ID NO: 13203 - protein, 35 aa, Artificial Sequence
  Non-cyclic GFR-binding peptide
  MOD_RES (5), (5): Xaa is C or S
TKPTXAPTKLEPLTVLYYDDSSNVIEQLSNNMVVR

SEQ ID NO: 13204 - protein, 36 aa, Artificial Sequence
  Non-cyclic GFR-binding peptide
  MOD_RES (3), (4), (36): Xaa is C or S
PTXXVPTRLNAISILYFDSANNVVLKKYRDMVVESX

SEQ ID NO: 13205 - protein, 38 aa, Artificial Sequence
  Non-cyclic GFR-binding peptide
  MOD_RES (1), (35), (37): Xaa is C or S
  MOD_RES (15), (16), (17), (18), (19): Xaa is A or G
  MOD_RES (20), (21), (22), (23): Xaa is A or G or is absent
XAPTQLEPLTVLYYXXXXXXXXXEQLSNNMVVRAXGXH

SEQ ID NO: 13206 - protein, 42 aa, Artificial Sequence
  Non-cyclic GFR-binding peptide
  MOD_RES (6), (40), (42): Xaa is C or S
  MOD_RES (20), (21), (22), (23), (24): Xaa is A or G
  MOD_RES (25), (26), (27), (28): Xaa is A or G or is absent
VTKPTXAPTKLSPISVLFIXXXXXXXXXYKQYENMVVRSXGX

SEQ ID NO: 13207 - protein, 40 aa, Artificial Sequence
  Non-cyclic GFR-binding peptide
  MOD_RES (4), (5), (39): Xaa is C or S
  MOD_RES (19), (20), (21), (22), (23): Xaa is A or G
  MOD_RES (24), (25), (26), (27): Xaa is A or G or is absent
PPTXXVPTRLEPLPIVYYXXXXXXXXXEQLSNDMVVESXG

SEQ ID NO: 13208 - protein, 39 aa, Artificial Sequence
  Non-cyclic GFR-binding peptide
  MOD_RES (5), (6), (38): Xaa is C or S
TPPTXXVPTRLEPLPIVYYDSANNVVEQLSNDMVVESXG

SEQ ID NO: 13209 - protein, 35 aa, Artificial Sequence
  Non-cyclic GFR-binding peptide
  MOD_RES (1), (2), (34): Xaa is C or S
XXAPTKLSPISVLFIDDSSNVIYKQYENMVVRSXG

SEQ ID NO: 13210 - protein, 34 aa, Artificial Sequence
  Non-cyclic GFR-binding peptide
  MOD_RES (34), (34): Xaa is C or S
  MOD_RES (14), (15), (16), (17), (18): Xaa is A or G
  MOD_RES (19), (20), (21), (22): Xaa is A or G or is absent
APTQLEPLTVLYYXXXXXXXXXEQLSNNMVVRAX

SEQ ID NO: 13211 - protein, 36 aa, Artificial Sequence
  Non-cyclic GFR-binding peptide
  MOD_RES (34), (36): Xaa is C or S
  MOD_RES (14), (15), (16), (17), (18): Xaa is A or G
  MOD_RES (19), (20), (21), (22): Xaa is A or G or is absent
VPTELEPLPMVYYXXXXXXXXXEQLSNDMVVEGXGX

SEQ ID NO: 13212 - protein, 37 aa, Artificial Sequence
  Non-cyclic GFR-binding peptide
  MOD_RES (5), (6): Xaa is C or S
TPPTXXVPTRLSAISILYLDSANNVVLKNYQDMVVES

SEQ ID NO: 13213 - protein, 37 aa, Artificial Sequence
  Non-cyclic GFR-binding peptide
  MOD_RES (6), (7): Xaa is C or S
KIPKAXXVPTELEPLTMLYYDENEKVVEQLSNDMVVE

SEQ ID NO: 13214 - protein, 33 aa, Artificial Sequence
  Non-cyclic GFR-binding peptide
  MOD_RES (1), (33): Xaa is C or S
XVPTRLEPLPIVYYDSANNVVEQLSNDMVVESX

SEQ ID NO: 13215 - protein, 33 aa, Artificial Sequence
  Non-cyclic GFR-binding peptide
  MOD_RES (1), (2), (33): Xaa is C or S
XXVSQDLEPLPIVYYIGKTPKIEQLSNMIVKSX

SEQ ID NO: 13216 - protein, 43 aa, Artificial Sequence
  Non-cyclic GFR-binding peptide
  MOD_RES (5), (6), (40), (42): Xaa is C or S
  MOD_RES (20), (21), (22), (23), (24): Xaa is A or G
  MOD_RES (25), (26), (27), (28): Xaa is A or G or is absent
TPPTXXVPTRLNAISILYFXXXXXXXXXLKKYRDMVVESXGXR

SEQ ID NO: 13217 - protein, 41 aa, Artificial Sequence
  Non-cyclic GFR-binding peptide
  MOD_RES (6), (7), (39), (41): Xaa is C or S
SIPKAXXVPTELEPLPMVYYDEYDKVVEQLSNEMVVEGXGX

SEQ ID NO: 13218 - protein, 40 aa, Artificial Sequence
  Non-cyclic GFR-binding peptide
  MOD_RES (3), (4), (37), (39): Xaa is C or S
  MOD_RES (18), (19), (20), (21), (22): Xaa is A or G
  MOD_RES (23), (24), (25), (26): Xaa is A or G or is absent
SPXXVPQDLEPLPIVYYXXXXXXXXXEQLSNMVVKSXKXS

SEQ ID NO: 13219 - protein, 36 aa, Artificial Sequence
  Non-cyclic GFR-binding peptide
  MOD_RES (1), (2), (34), (36): Xaa is C or S
XXVPTELEPLTMLYYDENEKVVEQLSNDMVVEGXGX

SEQ ID NO: 13220 - protein, 31 aa, Artificial Sequence
  Non-cyclic GFR-binding peptide
  MOD_RES (1), (1): Xaa is C or S
XVPTRLSAISILYLDSANNVVLKNYQDMVVE

SEQ ID NO: 13221 - protein, 35 aa, Artificial Sequence
  Non-cyclic GFR-binding peptide
  MOD_RES (1), (2), (35): Xaa is C or S
  MOD_RES (16), (17), (18), (19), (20): Xaa is A or G
  MOD_RES (21), (22), (23), (24): Xaa is A or G or is absent
XXVSQDLSPISILFIXXXXXXXXXYKQYEMIVKSX

SEQ ID NO: 13222 - protein, 38 aa, Artificial Sequence
  Non-cyclic GFR-binding peptide
  MOD_RES (5), (6), (38): Xaa is C or S
TPPTXXVPTRLNAISILYFDSANNVVLKKYRDMVVESX

SEQ ID NO: 13223 - protein, 38 aa, Artificial Sequence
  Non-cyclic GFR-binding peptide
  MOD_RES (3), (4), (36), (38): Xaa is C or S
KPXXAPTQLSPISVLFIDDSSNVIYKQYENMVVRAXGX

SEQ ID NO: 13224 - protein, 38 aa, Artificial Sequence
  Non-cyclic GFR-binding peptide
  MOD_RES (6), (38): Xaa is C or S
VTKPTXAPTKLEPLPVVYYDDSSNVIEQLSNNMVVRSX

SEQ ID NO: 13225 - protein, 34 aa, Artificial Sequence
  Non-cyclic GFR-binding peptide
  MOD_RES (34), (34): Xaa is C or S
  MOD_RES (14), (15), (16), (17), (18): Xaa is A or G
  MOD_RES (19), (20), (21), (22): Xaa is A or G or is absent
VPTELEPLTMLYYXXXXXXXXXEQLSNEMVVEGX

SEQ ID NO: 13226 - protein, 40 aa, Artificial Sequence
  Non-cyclic GFR-binding peptide
  MOD_RES (3), (4), (38), (40): Xaa is C or S
  MOD_RES (18), (19), (20), (21), (22): Xaa is A or G
  MOD_RES (23), (24), (25), (26): Xaa is A or G or is absent
KPXXAPTKLEPLTVLYYXXXXXXXXXEQLSNNMVVRSXGX

SEQ ID NO: 13227 - protein, 37 aa, Artificial Sequence
  Non-cyclic GFR-binding peptide
  MOD_RES (5), (6): Xaa is C or S
VPKPXXAPTKLEPLPVVYYDDSSNVIEQLSNNMVVRS

SEQ ID NO: 13228 - protein, 32 aa, Artificial Sequence
  Non-cyclic GFR-binding peptide
  MOD_RES (14), (15), (16), (17), (18): Xaa is A or G
  MOD_RES (19), (20), (21), (22): Xaa is A or G or is absent
APTQLEPLPVVYYXXXXXXXXXEQLSNNMVVR

SEQ ID NO: 13229 - protein, 43 aa, Artificial Sequence
  Non-cyclic GFR-binding peptide
  MOD_RES (6), (7), (41), (43): Xaa is C or S
  MOD_RES (21), (22), (23), (24), (25): Xaa is A or G
  MOD_RES (26), (27), (28), (29): Xaa is A or G or is absent
YVPKPXXAPTKLEPLTVLYYXXXXXXXXXEQLSNNMVVRSXGX

SEQ ID NO: 13230 - protein, 39 aa, Artificial Sequence
  Non-cyclic GFR-binding peptide
  MOD_RES (4), (5), (39): Xaa is C or S
  MOD_RES (19), (20), (21), (22), (23): Xaa is A or G
  MOD_RES (24), (25), (26), (27): Xaa is A or G or is absent
PKAXXVPTELEPLPMVYYXXXXXXXXXEQLSNDMVVEGX

SEQ ID NO: 13231 - protein, 38 aa, Artificial Sequence
  Non-cyclic GFR-binding peptide
  MOD_RES (3), (4), (35), (37): Xaa is C or S
APXXVPQALEPLTILYYVGRKPKVEQLSNMIVRSXKXS

SEQ ID NO: 13232 - protein, 38 aa, Artificial Sequence
  Non-cyclic GFR-binding peptide
  MOD_RES (2), (3), (36), (38): Xaa is C or S
  MOD_RES (17), (18), (19), (20), (21): Xaa is A or G
  MOD_RES (22), (23), (24), (25): Xaa is A or G or is absent
PXXVPQALSPISILFIXXXXXXXXXYKQYEMIVRSXKX

SEQ ID NO: 13233 - protein, 33 aa, Artificial Sequence
  Non-cyclic GFR-binding peptide
  MOD_RES (1), (1): Xaa is C or S
  MOD_RES (15), (16), (17), (18), (19): Xaa is A or G
  MOD_RES (20), (21), (22), (23): Xaa is A or G or is absent
XAPTQLEPLTVLYYXXXXXXXXXEQLSNNMVVR

SEQ ID NO: 13234 - protein, 37 aa, Artificial Sequence
  Non-cyclic GFR-binding peptide
  MOD_RES (2), (3), (35), (37): Xaa is C or S
AXXVPTELSPISMLFIDEYDKVVYKQYEEMVVEGXGX

SEQ ID NO: 13235 - protein, 37 aa, Artificial Sequence
  Non-cyclic GFR-binding peptide
  MOD_RES (2), (3), (35), (37): Xaa is C or S
AXXVPTELEPLTMLYYDEYDKVVEQLSNEMVVEGXGX

SEQ ID NO: 13236 - protein, 33 aa, Artificial Sequence
  Non-cyclic GFR-binding peptide
  MOD_RES (32), (32): Xaa is C or S
VPTELEPLPMVYYDEYDKVVEQLSNEMVVEGXG

SEQ ID NO: 13237 - protein, 37 aa, Artificial Sequence
  Non-cyclic GFR-binding peptide
  MOD_RES (1), (2), (36): Xaa is C or S
  MOD_RES (16), (17), (18), (19), (20): Xaa is A or G
  MOD_RES (21), (22), (23), (24): Xaa is A or G or is absent
XXVPTRLSAISILYLXXXXXXXXXLKNYQDMVVESXG

SEQ ID NO: 13238 - protein, 37 aa, Artificial Sequence
  Non-cyclic GFR-binding peptide
  MOD_RES (4), (36): Xaa is C or S
KPTXAPTKLEPLTVLYYDDSSNVIEQLSNNMVVRSXG

SEQ ID NO: 13239 - protein, 36 aa, Artificial Sequence
  Non-cyclic GFR-binding peptide
  MOD_RES (2), (3): Xaa is C or S
  MOD_RES (17), (18), (19), (20), (21): Xaa is A or G
  MOD_RES (22), (23), (24), (25): Xaa is A or G or is absent
PXXAPTKLSPISVLFIXXXXXXXXXYKQYENMVVRS

SEQ ID NO: 13240 - protein, 35 aa, Artificial Sequence
  Non-cyclic GFR-binding peptide
  MOD_RES (1), (2): Xaa is C or S
  MOD_RES (16), (17), (18), (19), (20): Xaa is A or G
  MOD_RES (21), (22), (23), (24): Xaa is A or G or is absent
XXVPTRLNAISILYFXXXXXXXXXLKKYRDMVVES

SEQ ID NO: 13241 - protein, 38 aa, Artificial Sequence
  Non-cyclic GFR-binding peptide
  MOD_RES (5), (6), (38): Xaa is C or S
VPKPXXAPTKLSPISVLFIDDSSNVIYKQYENMVVRSX

SEQ ID NO: 13242 - protein, 42 aa, Artificial Sequence
  Non-cyclic GFR-binding peptide
  MOD_RES (7), (39), (41): Xaa is C or S
HVTKPTXAPTKLEPLPVVYYDDSSNVIEQLSNNMVVRSXGXH

SEQ ID NO: 13243 - protein, 39 aa, Artificial Sequence
  Non-cyclic GFR-binding peptide
  MOD_RES (1), (2), (36), (38): Xaa is C or S
  MOD_RES (16), (17), (18), (19), (20): Xaa is A or G
  MOD_RES (21), (22), (23), (24): Xaa is A or G or is absent
XXAPTKLEPLPVVYYXXXXXXXXXEQLSNNMVVRSXGXH

SEQ ID NO: 13244 - protein, 41 aa, Artificial Sequence
  Non-cyclic GFR-binding peptide
  MOD_RES (6), (7), (41): Xaa is C or S
  MOD_RES (21), (22), (23), (24), (25): Xaa is A or G
  MOD_RES (26), (27), (28), (29): Xaa is A or G or is absent
SIPKAXXVPTELEPLTMLYYXXXXXXXXXEQLSNEMVVEGX

SEQ ID NO: 13245 - protein, 38 aa, Artificial Sequence
  Non-cyclic GFR-binding peptide
  MOD_RES (5), (6): Xaa is C or S
  MOD_RES (20), (21), (22), (23), (24): Xaa is A or G
  MOD_RES (25), (26), (27), (28): Xaa is A or G or is absent
TPPTXXVPTRLEPLTILYYXXXXXXXXXEQLSNDMVVE

SEQ ID NO: 13246 - protein, 39 aa, Artificial Sequence
  Non-cyclic GFR-binding peptide
  MOD_RES (4), (5), (39): Xaa is C or S
  MOD_RES (19), (20), (21), (22), (23): Xaa is A or G
  MOD_RES (24), (25), (26), (27): Xaa is A or G or is absent
PPTXXVPTRLNAISILYFXXXXXXXXXLKKYRDMVVESX

SEQ ID NO: 13247 - protein, 39 aa, Artificial Sequence
  Non-cyclic GFR-binding peptide
  MOD_RES (4), (5), (37), (39): Xaa is C or S
PKPXXAPTKLSPISVLFIDDSSNVIYKQYENMVVRSXGX

SEQ ID NO: 13248 - protein, 37 aa, Artificial Sequence
  Non-cyclic GFR-binding peptide
  MOD_RES (6), (7): Xaa is C or S
STPPTXXVPTRLSAISILYLDSANNVVLKNYQDMVVE

SEQ ID NO: 13249 - protein, 38 aa, Artificial Sequence
  Non-cyclic GFR-binding peptide
  MOD_RES (3), (4), (36), (38): Xaa is C or S
KPXXAPTQLEPLTVLYYDDSSNVIEQLSNNMVVRAXGX

SEQ ID NO: 13250 - protein, 42 aa, Artificial Sequence
  Non-cyclic GFR-binding peptide
  MOD_RES (4), (5), (39), (41): Xaa is C or S
  MOD_RES (19), (20), (21), (22), (23): Xaa is A or G
  MOD_RES (24), (25), (26), (27): Xaa is A or G or is absent
PPTXXVPTRLSAISILYLXXXXXXXXXLKNYQDMVVESXGXR

SEQ ID NO: 13251 - protein, 33 aa, Artificial Sequence
  Non-cyclic GFR-binding peptide
  MOD_RES (1), (1): Xaa is C or S
  MOD_RES (15), (16), (17), (18), (19): Xaa is A or G
  MOD_RES (20), (21), (22), (23): Xaa is A or G or is absent
XVPQDLEPLPIVYYXXXXXXXXXEQLSNMVVKS

SEQ ID NO: 13252 - protein, 37 aa, Artificial Sequence
  Non-cyclic GFR-binding peptide
  MOD_RES (2), (3), (35), (37): Xaa is C or S
AXXVPTELSPISMLFIDENEKVVYKQYEDMVVEGXGX

SEQ ID NO: 13253 - protein, 41 aa, Artificial Sequence
  Non-cyclic GFR-binding peptide
  MOD_RES (4), (38), (40): Xaa is C or S
  MOD_RES (18), (19), (20), (21), (22): Xaa is A or G
  MOD_RES (23), (24), (25), (26): Xaa is A or G or is absent
KPTXAPTKLEPLPVVYYXXXXXXXXXEQLSNNMVVRSXGXH

SEQ ID NO: 13254 - protein, 36 aa, Artificial Sequence
  Non-cyclic GFR-binding peptide
  MOD_RES (1), (2), (34), (36): Xaa is C or S
XXVPTELSPISMLFIDENEKVVYKQYEDMVVEGXGX

SEQ ID NO: 13255 - protein, 36 aa, Artificial Sequence
  Non-cyclic GFR-binding peptide
  MOD_RES (4), (36): Xaa is C or S
KPTXAPTKLEPLTVLYYDDSSNVIEQLSNNMVVRSX

SEQ ID NO: 13256 - protein, 39 aa, Artificial Sequence
  Non-cyclic GFR-binding peptide
  MOD_RES (3), (4), (38): Xaa is C or S
  MOD_RES (18), (19), (20), (21), (22): Xaa is A or G
  MOD_RES (23), (24), (25), (26): Xaa is A or G or is absent
PTXXVPTRLEPLPIVYYXXXXXXXXXEQLSNDMVVESXG

SEQ ID NO: 13257 - protein, 36 aa, Artificial Sequence
  Non-cyclic GFR-binding peptide
  MOD_RES (1), (35): Xaa is C or S
  MOD_RES (15), (16), (17), (18), (19): Xaa is A or G
  MOD_RES (20), (21), (22), (23): Xaa is A or G or is absent
XVPTELEPLTMLYYXXXXXXXXXEQLSNEMVVEGXG

SEQ ID NO: 13258 - protein, 37 aa, Artificial Sequence
  Non-cyclic GFR-binding peptide
  MOD_RES (6), (7): Xaa is C or S
ASAAPXXVPQALEPLTILYYVGRKPKVEQLSNMIVRS

SEQ ID NO: 13259 - protein, 37 aa, Artificial Sequence
  Non-cyclic GFR-binding peptide
  MOD_RES (4), (5), (37): Xaa is C or S
PPTXXVPTRLNAISILYFDSANNVVLKKYRDMVVESX

SEQ ID NO: 13260 - protein, 41 aa, Artificial Sequence
  Non-cyclic GFR-binding peptide
  MOD_RES (4), (5), (38), (40): Xaa is C or S
  MOD_RES (19), (20), (21), (22), (23): Xaa is A or G
  MOD_RES (24), (25), (26), (27): Xaa is A or G or is absent
AAPXXVPQALEPLTILYYXXXXXXXXXEQLSNMIVRSXKXS

SEQ ID NO: 13261 - protein, 37 aa, Artificial Sequence
  Non-cyclic GFR-binding peptide
  MOD_RES (3), (4), (35), (37): Xaa is C or S
SPXXVPQDLEPLPIVYYVGRTPKVEQLSNMVVKSXKX

SEQ ID NO: 13262 - protein, 34 aa, Artificial Sequence
  Non-cyclic GFR-binding peptide
  MOD_RES (31), (33): Xaa is C or S
VSQDLEPLPIVYYIGKTPKIEQLSNMIVKSXKXS

SEQ ID NO: 13263 - protein, 42 aa, Artificial Sequence
  Non-cyclic GFR-binding peptide
  MOD_RES (5), (6), (40), (42): Xaa is C or S
  MOD_RES (20), (21), (22), (23), (24): Xaa is A or G
  MOD_RES (25), (26), (27), (28): Xaa is A or G or is absent
IPKAXXVPTELSPISMLFIXXXXXXXXXYKQYEDMVVEGXGX

SEQ ID NO: 13264 - protein, 37 aa, Artificial Sequence
  Non-cyclic GFR-binding peptide
  MOD_RES (1), (35), (37): Xaa is C or S
  MOD_RES (15), (16), (17), (18), (19): Xaa is A or G
  MOD_RES (20), (21), (22), (23): Xaa is A or G or is absent
XAPTQLEPLTVLYYXXXXXXXXXEQLSNNMVVRAXGX

SEQ ID NO: 13265 - protein, 33 aa, Artificial Sequence
  Non-cyclic GFR-binding peptide
  MOD_RES (33), (33): Xaa is C or S
  MOD_RES (14), (15), (16), (17), (18): Xaa is A or G
  MOD_RES (19), (20), (21), (22): Xaa is A or G or is absent
VPQALEPLTILYYXXXXXXXXXEQLSNMIVRSX

SEQ ID NO: 13266 - protein, 40 aa, Artificial Sequence
  Non-cyclic GFR-binding peptide
  MOD_RES (3), (4), (38), (40): Xaa is C or S
  MOD_RES (18), (19), (20), (21), (22): Xaa is A or G
  MOD_RES (23), (24), (25), (26): Xaa is A or G or is absent
KAXXVPTELSPISMLFIXXXXXXXXXYKQYEDMVVEGXGX

SEQ ID NO: 13267 - protein, 41 aa, Artificial Sequence
  Non-cyclic GFR-binding peptide
  MOD_RES (3), (4), (38), (40): Xaa is C or S
  MOD_RES (18), (19), (20), (21), (22): Xaa is A or G
  MOD_RES (23), (24), (25), (26): Xaa is A or G or is absent
KAXXVPTELSPISMLFIXXXXXXXXXYKQYEDMVVEGXGXR

SEQ ID NO: 13268 - protein, 35 aa, Artificial Sequence
  Non-cyclic GFR-binding peptide
  MOD_RES (1), (35): Xaa is C or S
  MOD_RES (15), (16), (17), (18), (19): Xaa is A or G
  MOD_RES (20), (21), (22), (23): Xaa is A or G or is absent
XVPTELEPLTMLYYXXXXXXXXXEQLSNEMVVEGX

SEQ ID NO: 13269 - protein, 35 aa, Artificial Sequence
  Non-cyclic GFR-binding peptide
  MOD_RES (1), (2), (34): Xaa is C or S
XXVPTELEPLPMVYYDENEKVVEQLSNDMVVEGXG

SEQ ID NO: 13270 - protein, 35 aa, Artificial Sequence
  Non-cyclic GFR-binding peptide
  MOD_RES (1), (34): Xaa is C or S
  MOD_RES (15), (16), (17), (18), (19): Xaa is A or G
  MOD_RES (20), (21), (22), (23): Xaa is A or G or is absent
XVPQALEPLTILYYXXXXXXXXXEQLSNMIVRSXK

SEQ ID NO: 13271 - protein, 35 aa, Artificial Sequence
  Non-cyclic GFR-binding peptide
  MOD_RES (1), (35): Xaa is C or S
  MOD_RES (15), (16), (17), (18), (19): Xaa is A or G
  MOD_RES (20), (21), (22), (23): Xaa is A or G or is absent
XAPTQLEPLTVLYYXXXXXXXXXEQLSNNMVVRAX

SEQ ID NO: 13272 - protein, 34 aa, Artificial Sequence
  Non-cyclic GFR-binding peptide
  MOD_RES (2), (3): Xaa is C or S
AXXVPTELEPLTMLYYDEYDKVVEQLSNEMVVEG

SEQ ID NO: 13273 - protein, 42 aa, Artificial Sequence
  Non-cyclic GFR-binding peptide
  MOD_RES (5), (6), (40), (42): Xaa is C or S
  MOD_RES (20), (21), (22), (23), (24): Xaa is A or G
  MOD_RES (25), (26), (27), (28): Xaa is A or G or is absent
VPKPXXAPTQLSPISVLFIXXXXXXXXXYKQYENMVVRAXGX

SEQ ID NO: 13274 - protein, 31 aa, Artificial Sequence
  Non-cyclic GFR-binding peptide
VPTELSPISMLFIDEYDKVVYKQYEEMVVEG

SEQ ID NO: 13275 - protein, 43 aa, Artificial Sequence
  Non-cyclic GFR-binding peptide
  MOD_RES (7), (41), (43): Xaa is C or S
  MOD_RES (21), (22), (23), (24), (25): Xaa is A or G
  MOD_RES (26), (27), (28), (29): Xaa is A or G or is absent
HVTKPTXAPTKLSPISVLFIXXXXXXXXXYKQYENMVVRSXGX

SEQ ID NO: 13276 - protein, 37 aa, Artificial Sequence
  Non-cyclic GFR-binding peptide
  MOD_RES (4), (5): Xaa is C or S
  MOD_RES (19), (20), (21), (22), (23): Xaa is A or G
  MOD_RES (24), (25), (26), (27): Xaa is A or G or is absent
PPTXXVPTRLEPLTILYYXXXXXXXXXEQLSNDMVVE

SEQ ID NO: 13277 - protein, 40 aa, Artificial Sequence
  Non-cyclic GFR-binding peptide
  MOD_RES (3), (4), (38), (40): Xaa is C or S
  MOD_RES (18), (19), (20), (21), (22): Xaa is A or G
  MOD_RES (23), (24), (25), (26): Xaa is A or G or is absent
PTXXVPTRLEPLTILYYXXXXXXXXXEQLSNDMVVESXGX

SEQ ID NO: 13278 - protein, 33 aa, Artificial Sequence
  Non-cyclic GFR-binding peptide
  MOD_RES (14), (15), (16), (17), (18): Xaa is A or G
  MOD_RES (19), (20), (21), (22): Xaa is A or G or is absent
VPTRLEPLPIVYYXXXXXXXXXEQLSNDMVVES

SEQ ID NO: 13279 - protein, 38 aa, Artificial Sequence
  Non-cyclic GFR-binding peptide
  MOD_RES (7), (7): Xaa is C or S
HVTKPTXAPTKLEPLTVLYYDDSSNVIEQLSNNMVVRS

SEQ ID NO: 13280 - protein, 35 aa, Artificial Sequence
  Non-cyclic GFR-binding peptide
  MOD_RES (1), (2), (34): Xaa is C or S
XXAPTQLEPLTVLYYDDSSNVIEQLSNNMVVRAXG

SEQ ID NO: 13281 - protein, 32 aa, Artificial Sequence
  Non-cyclic GFR-binding peptide
  MOD_RES (1), (1): Xaa is C or S
XAPTKLEPLPVVYYDDSSNVIEQLSNNMVVRS

SEQ ID NO: 13282 - protein, 39 aa, Artificial Sequence
  Non-cyclic GFR-binding peptide
  MOD_RES (4), (5), (38): Xaa is C or S
  MOD_RES (19), (20), (21), (22), (23): Xaa is A or G
  MOD_RES (24), (25), (26), (27): Xaa is A or G or is absent
ASPXXVPQDLEPLPIVYYXXXXXXXXXEQLSNMVVKSXK

SEQ ID NO: 13283 - protein, 39 aa, Artificial Sequence
  Non-cyclic GFR-binding peptide
  MOD_RES (6), (7): Xaa is C or S
  MOD_RES (21), (22), (23), (24), (25): Xaa is A or G
  MOD_RES (26), (27), (28), (29): Xaa is A or G or is absent
TVPKPXXAPTQLEPLPVVYYXXXXXXXXXEQLSNNMVVR

SEQ ID NO: 13284 - protein, 38 aa, Artificial Sequence
  Non-cyclic GFR-binding peptide
  MOD_RES (1), (2), (36), (38): Xaa is C or S
  MOD_RES (16), (17), (18), (19), (20): Xaa is A or G
  MOD_RES (21), (22), (23), (24): Xaa is A or G or is absent
XXVPTRLNAISILYFXXXXXXXXXLKKYRDMVVESXGX

SEQ ID NO: 13285 - protein, 39 aa, Artificial Sequence
  Non-cyclic GFR-binding peptide
  MOD_RES (6), (7), (39): Xaa is C or S
YVPKPXXAPTKLEPLTVLYYDDSSNVIEQLSNNMVVRSX

SEQ ID NO: 13286 - protein, 42 aa, Artificial Sequence
  Non-cyclic GFR-binding peptide
  MOD_RES (6), (7), (41): Xaa is C or S
  MOD_RES (21), (22), (23), (24), (25): Xaa is A or G
  MOD_RES (26), (27), (28), (29): Xaa is A or G or is absent
KIPKAXXVPTELEPLPMVYYXXXXXXXXXEQLSNDMVVEGXG

SEQ ID NO: 13287 - protein, 34 aa, Artificial Sequence
  Non-cyclic GFR-binding peptide
  MOD_RES (1), (2), (34): Xaa is C or S
XXVPTRLEPLPIVYYDSANNVVEQLSNDMVVESX

SEQ ID NO: 13288 - protein, 38 aa, Artificial Sequence
  Non-cyclic GFR-binding peptide
  MOD_RES (3), (4), (35), (37): Xaa is C or S
APXXVPQALSPISILFIVGRKPKVYKQYEMIVRSXKXS

SEQ ID NO: 13289 - protein, 40 aa, Artificial Sequence
  Non-cyclic GFR-binding peptide
  MOD_RES (5), (6), (40): Xaa is C or S
  MOD_RES (20), (21), (22), (23), (24): Xaa is A or G
  MOD_RES (25), (26), (27), (28): Xaa is A or G or is absent
TPPTXXVPTRLEPLPIVYYXXXXXXXXXEQLSNDMVVESX

SEQ ID NO: 13290 - protein, 37 aa, Artificial Sequence
  Non-cyclic GFR-binding peptide
  MOD_RES (1), (2), (35), (37): Xaa is C or S
  MOD_RES (16), (17), (18), (19), (20): Xaa is A or G
  MOD_RES (21), (22), (23), (24): Xaa is A or G or is absent
XXVSQDLEPLPIVYYXXXXXXXXXEQLSNMIVKSXKX

SEQ ID NO: 13291 - protein, 39 aa, Artificial Sequence
  Non-cyclic GFR-binding peptide
  MOD_RES (6), (7), (39): Xaa is C or S
SIPKAXXVPTELSPISMLFIDEYDKVVYKQYEEMVVEGX

SEQ ID NO: 13292 - protein, 36 aa, Artificial Sequence
  Non-cyclic GFR-binding peptide
  MOD_RES (1), (2), (34), (36): Xaa is C or S
XXVPTELEPLTMLYYDEYDKVVEQLSNEMVVEGXGX

SEQ ID NO: 13293 - protein, 36 aa, Artificial Sequence
  Non-cyclic GFR-binding peptide
  MOD_RES (3), (4): Xaa is C or S
  MOD_RES (18), (19), (20), (21), (22): Xaa is A or G
  MOD_RES (23), (24), (25), (26): Xaa is A or G or is absent
KAXXVPTELEPLPMVYYXXXXXXXXXEQLSNEMVVE

SEQ ID NO: 13294 - protein, 42 aa, Artificial Sequence
  Non-cyclic GFR-binding peptide
  MOD_RES (5), (6), (39), (41): Xaa is C or S
  MOD_RES (20), (21), (22), (23), (24): Xaa is A or G
  MOD_RES (25), (26), (27), (28): Xaa is A or G or is absent
SAAPXXVPQALSPISILFIXXXXXXXXXYKQYEMIVRSXKXS

SEQ ID NO: 13295 - protein, 39 aa, Artificial Sequence
  Non-cyclic GFR-binding peptide
  MOD_RES (4), (5), (38): Xaa is C or S
  MOD_RES (19), (20), (21), (22), (23): Xaa is A or G
  MOD_RES (24), (25), (26), (27): Xaa is A or G or is absent
ASPXXVSQDLSPISILFIXXXXXXXXXYKQYEMIVKSXK

SEQ ID NO: 13296 - protein, 37 aa, Artificial Sequence
  Non-cyclic GFR-binding peptide
  MOD_RES (5), (6): Xaa is C or S
TPPTXXVPTRLNAISILYFDSANNVVLKKYRDMVVES

SEQ ID NO: 13297 - protein, 34 aa, Artificial Sequence
  Non-cyclic GFR-binding peptide
  MOD_RES (32), (34): Xaa is C or S
APTQLEPLPVVYYDDSSNVIEQLSNNMVVRAXGX

SEQ ID NO: 13298 - protein, 42 aa, Artificial Sequence
  Non-cyclic GFR-binding peptide
  MOD_RES (4), (5), (39), (41): Xaa is C or S
  MOD_RES (19), (20), (21), (22), (23): Xaa is A or G
  MOD_RES (24), (25), (26), (27): Xaa is A or G or is absent
PKPXXAPTQLSPISVLFIXXXXXXXXXYKQYENMVVRAXGXH

SEQ ID NO: 13299 - protein, 37 aa, Artificial Sequence
  Non-cyclic GFR-binding peptide
  MOD_RES (2), (34), (36): Xaa is C or S
TXAPTKLEPLPVVYYDDSSNVIEQLSNNMVVRSXGXH

SEQ ID NO: 13300 - protein, 40 aa, Artificial Sequence
  Non-cyclic GFR-binding peptide
  MOD_RES (3), (4), (38), (40): Xaa is C or S
  MOD_RES (18), (19), (20), (21), (22): Xaa is A or G
  MOD_RES (23), (24), (25), (26): Xaa is A or G or is absent
PTXXVPTRLEPLPIVYYXXXXXXXXXEQLSNDMVVESXGX

SEQ ID NO: 13301 - protein, 37 aa, Artificial Sequence
  Non-cyclic GFR-binding peptide
  MOD_RES (4), (36): Xaa is C or S
KPTXAPTKLSPISVLFIDDSSNVIYKQYENMVVRSXG

SEQ ID NO: 13302 - protein, 39 aa, Artificial Sequence
  Non-cyclic GFR-binding peptide
  MOD_RES (6), (7), (38): Xaa is C or S
ASAAPXXVPQALSPISILFIVGRKPKVYKQYEMIVRSXK

SEQ ID NO: 13303 - protein, 43 aa, Artificial Sequence
  Non-cyclic GFR-binding peptide
  MOD_RES (6), (7), (40), (42): Xaa is C or S
  MOD_RES (21), (22), (23), (24), (25): Xaa is A or G
  MOD_RES (26), (27), (28), (29): Xaa is A or G or is absent
ASASPXXVSQDLSPISILFIXXXXXXXXXYKQYEMIVKSXKXS

SEQ ID NO: 13304 - protein, 35 aa, Artificial Sequence
  Non-cyclic GFR-binding peptide
  MOD_RES (34), (34): Xaa is C or S
  MOD_RES (14), (15), (16), (17), (18): Xaa is A or G
  MOD_RES (19), (20), (21), (22): Xaa is A or G or is absent
VPTELSPISMLFIXXXXXXXXXYKQYEEMVVEGXG

SEQ ID NO: 13305 - protein, 37 aa, Artificial Sequence
  Non-cyclic GFR-binding peptide
  MOD_RES (1), (35), (37): Xaa is C or S
  MOD_RES (15), (16), (17), (18), (19): Xaa is A or G
  MOD_RES (20), (21), (22), (23): Xaa is A or G or is absent
XVPTRLSAISILYLXXXXXXXXXLKNYQDMVVESXGX

SEQ ID NO: 13306 - protein, 37 aa, Artificial Sequence
  Non-cyclic GFR-binding peptide
  MOD_RES (1), (2), (34), (36): Xaa is C or S
XXAPTQLEPLTVLYYDDSSNVIEQLSNNMVVRAXGXH

SEQ ID NO: 13307 - protein, 34 aa, Artificial Sequence
  Non-cyclic GFR-binding peptide
  MOD_RES (1), (2): Xaa is C or S
  MOD_RES (16), (17), (18), (19), (20): Xaa is A or G
  MOD_RES (21), (22), (23), (24): Xaa is A or G or is absent
XXAPTKLSPISVLFIXXXXXXXXXYKQYENMVVR

SEQ ID NO: 13308 - protein, 35 aa, Artificial Sequence
  Non-cyclic GFR-binding peptide
  MOD_RES (1), (2), (34): Xaa is C or S
XXAPTKLEPLTVLYYDDSSNVIEQLSNNMVVRSXG

SEQ ID NO: 13309 - protein, 38 aa, Artificial Sequence
  Non-cyclic GFR-binding peptide
  MOD_RES (3), (4), (36), (38): Xaa is C or S
KPXXAPTKLSPISVLFIDDSSNVIYKQYENMVVRSXGX

SEQ ID NO: 13310 - protein, 36 aa, Artificial Sequence
  Non-cyclic GFR-binding peptide
  MOD_RES (4), (4): Xaa is C or S
  MOD_RES (18), (19), (20), (21), (22): Xaa is A or G
  MOD_RES (23), (24), (25), (26): Xaa is A or G or is absent
KPTXAPTKLEPLPVVYYXXXXXXXXXEQLSNNMVVR

SEQ ID NO: 13311 - protein, 42 aa, Artificial Sequence
  Non-cyclic GFR-binding peptide
  MOD_RES (6), (7), (41): Xaa is C or S
  MOD_RES (21), (22), (23), (24), (25): Xaa is A or G
  MOD_RES (26), (27), (28), (29): Xaa is A or G or is absent
TVPKPXXAPTQLSPISVLFIXXXXXXXXXYKQYENMVVRAXG

SEQ ID NO: 13312 - protein, 36 aa, Artificial Sequence
  Non-cyclic GFR-binding peptide
  MOD_RES (2), (3): Xaa is C or S
  MOD_RES (17), (18), (19), (20), (21): Xaa is A or G
  MOD_RES (22), (23), (24), (25): Xaa is A or G or is absent
PXXAPTKLEPLPVVYYXXXXXXXXXEQLSNNMVVRS

SEQ ID NO: 13313 - protein, 43 aa, Artificial Sequence
  Non-cyclic GFR-binding peptide
  MOD_RES (5), (6), (40), (42): Xaa is C or S
  MOD_RES (20), (21), (22), (23), (24): Xaa is A or G
  MOD_RES (25), (26), (27), (28): Xaa is A or G or is absent
IPKAXXVPTELSPISMLFIXXXXXXXXXYKQYEDMVVEGXGXR

SEQ ID NO: 13314 - protein, 37 aa, Artificial Sequence
  Non-cyclic GFR-binding peptide
  MOD_RES (3), (37): Xaa is C or S
  MOD_RES (17), (18), (19), (20), (21): Xaa is A or G
  MOD_RES (22), (23), (24), (25): Xaa is A or G or is absent
PTXAPTKLEPLPVVYYXXXXXXXXXEQLSNNMVVRSX

SEQ ID NO: 13315 - protein, 36 aa, Artificial Sequence
  Non-cyclic GFR-binding peptide
  MOD_RES (1), (2), (36): Xaa is C or S
  MOD_RES (16), (17), (18), (19), (20): Xaa is A or G
  MOD_RES (21), (22), (23), (24): Xaa is A or G or is absent
XXVPTRLEPLTILYYXXXXXXXXXEQLSNDMVVESX

SEQ ID NO: 13316 - protein, 37 aa, Artificial Sequence
  Non-cyclic GFR-binding peptide
  MOD_RES (4), (5): Xaa is C or S
  MOD_RES (19), (20), (21), (22), (23): Xaa is A or G
  MOD_RES (24), (25), (26), (27): Xaa is A or G or is absent
PPTXXVPTRLEPLPIVYYXXXXXXXXXEQLSNDMVVE

SEQ ID NO: 13317 - protein, 36 aa, Artificial Sequence
  Non-cyclic GFR-binding peptide
  MOD_RES (3), (4): Xaa is C or S
  MOD_RES (18), (19), (20), (21), (22): Xaa is A or G
  MOD_RES (23), (24), (25), (26): Xaa is A or G or is absent
KAXXVPTELEPLTMLYYXXXXXXXXXEQLSNEMVVE

SEQ ID NO: 13318 - protein, 39 aa, Artificial Sequence
  Non-cyclic GFR-binding peptide
  MOD_RES (4), (5), (38): Xaa is C or S
  MOD_RES (19), (20), (21), (22), (23): Xaa is A or G
  MOD_RES (24), (25), (26), (27): Xaa is A or G or is absent
AAPXXVPQALSPISILFIXXXXXXXXXYKQYEMIVRSXK

SEQ ID NO: 13319 - protein, 39 aa, Artificial Sequence
  Non-cyclic GFR-binding peptide
  MOD_RES (6), (7), (39): Xaa is C or S
KIPKAXXVPTELEPLPMVYYDENEKVVEQLSNDMVVEGX

SEQ ID NO: 13320 - protein, 36 aa, Artificial Sequence
  Non-cyclic GFR-binding peptide
  MOD_RES (1), (2), (33), (35): Xaa is C or S
XXVPQALSPISILFIVGRKPKVYKQYEMIVRSXKXS

SEQ ID NO: 13321 - protein, 38 aa, Artificial Sequence
  Non-cyclic GFR-binding peptide
  MOD_RES (2), (3), (37): Xaa is C or S
  MOD_RES (17), (18), (19), (20), (21): Xaa is A or G
  MOD_RES (22), (23), (24), (25): Xaa is A or G or is absent
PXXAPTKLEPLTVLYYXXXXXXXXXEQLSNNMVVRSXG

SEQ ID NO: 13322 - protein, 32 aa, Artificial Sequence
  Non-cyclic GFR-binding peptide
  MOD_RES (1), (1): Xaa is C or S
XVPTELEPLPMVYYDENEKVVEQLSNDMVVEG

SEQ ID NO: 13323 - protein, 41 aa, Artificial Sequence
  Non-cyclic GFR-binding peptide
  MOD_RES (4), (38), (40): Xaa is C or S
  MOD_RES (18), (19), (20), (21), (22): Xaa is A or G
  MOD_RES (23), (24), (25), (26): Xaa is A or G or is absent
KPTXAPTKLSPISVLFIXXXXXXXXXYKQYENMVVRSXGXH

SEQ ID NO: 13324 - protein, 41 aa, Artificial Sequence
  Non-cyclic GFR-binding peptide
  MOD_RES (5), (6), (40): Xaa is C or S
  MOD_RES (20), (21), (22), (23), (24): Xaa is A or G
  MOD_RES (25), (26), (27), (28): Xaa is A or G or is absent
TPPTXXVPTRLNAISILYFXXXXXXXXXLKKYRDMVVESXG

SEQ ID NO: 13325 - protein, 33 aa, Artificial Sequence
  Non-cyclic GFR-binding peptide
  MOD_RES (1), (2): Xaa is C or S
XXAPTKLSPISVLFIDDSSNVIYKQYENMVVRS

SEQ ID NO: 13326 - protein, 34 aa, Artificial Sequence
  Non-cyclic GFR-binding peptide
  MOD_RES (3), (4): Xaa is C or S
SPXXVPQDLEPLPIVYYVGRTPKVEQLSNMVVKS

SEQ ID NO: 13327 - protein, 37 aa, Artificial Sequence
  Non-cyclic GFR-binding peptide
  MOD_RES (1), (2), (34), (36): Xaa is C or S
XXVPTELEPLPMVYYDEYDKVVEQLSNEMVVEGXGXR

SEQ ID NO: 13328 - protein, 39 aa, Artificial Sequence
  Non-cyclic GFR-binding peptide
  MOD_RES (1), (2), (36), (38): Xaa is C or S
  MOD_RES (16), (17), (18), (19), (20): Xaa is A or G
  MOD_RES (21), (22), (23), (24): Xaa is A or G or is absent
XXAPTKLSPISVLFIXXXXXXXXXYKQYENMVVRSXGXH

SEQ ID NO: 13329 - protein, 38 aa, Artificial Sequence
  Non-cyclic GFR-binding peptide
  MOD_RES (5), (5): Xaa is C or S
  MOD_RES (19), (20), (21), (22), (23): Xaa is A or G
  MOD_RES (24), (25), (26), (27): Xaa is A or G or is absent
TKPTXAPTKLEPLPVVYYXXXXXXXXXEQLSNNMVVRS

SEQ ID NO: 13330 - protein, 38 aa, Artificial Sequence
  Non-cyclic GFR-binding peptide
  MOD_RES (3), (4), (36), (38): Xaa is C or S
KPXXAPTKLEPLTVLYYDDSSNVIEQLSNNMVVRSXGX

SEQ ID NO: 13331 - protein, 42 aa, Artificial Sequence
  Non-cyclic GFR-binding peptide
  MOD_RES (2), (36): Xaa is C or S
  MOD_RES (14), (15), (16), (17), (18): Xaa is A or G
  MOD_RES (19), (20), (21), (22): Xaa is A or G or is absent
EXKNHQLFVQVEKXXXXXXXXXVKAMKVSREETPVXELGEDN

SEQ ID NO: 13332 - protein, 37 aa, Artificial Sequence
  Non-cyclic GFR-binding peptide
  MOD_RES (1), (1): Xaa is C or S
  MOD_RES (14), (15), (16), (17), (18): Xaa is A or G
  MOD_RES (19), (20), (21), (22): Xaa is A or G or is absent
XELHEELRSMEGLXXXXXXXXXMIQVTINSHHVRSPQ

SEQ ID NO: 13333 - protein, 36 aa, Artificial Sequence
  Non-cyclic GFR-binding peptide
  MOD_RES (1), (3): Xaa is C or S
XEXQSHEELSMEGIHQGQHPKIRMIQMTINSQGTPV

SEQ ID NO: 13334 - protein, 43 aa, Artificial Sequence
  Non-cyclic GFR-binding peptide
  MOD_RES (1), (3), (37): Xaa is C or S
XEXKNHQLFSMEGLHQGQHPKIRMIQMTINSEETPVXELGEDN

SEQ ID NO: 13335 - protein, 35 aa, Artificial Sequence
  Non-cyclic GFR-binding peptide
  MOD_RES (1), (35): Xaa is C or S
XQSHEELSMEGIHQGQHPKIRMIQMTINSQGTPVX

SEQ ID NO: 13336 - protein, 42 aa, Artificial Sequence
  Non-cyclic GFR-binding peptide
  MOD_RES (2), (4), (41): Xaa is C or S
  MOD_RES (17), (18), (19), (20), (21): Xaa is A or G
  MOD_RES (22), (23), (24), (25): Xaa is A or G or is absent
AXAXELHEELRSMEGIXXXXXXXXXMIQVTINSHHVRSPQXK

SEQ ID NO: 13337 - protein, 38 aa, Artificial Sequence
  Non-cyclic GFR-binding peptide
  MOD_RES (1), (3): Xaa is C or S
  MOD_RES (16), (17), (18), (19), (20): Xaa is A or G
  MOD_RES (21), (22), (23), (24): Xaa is A or G or is absent
XAXELHEELRSMEGIXXXXXXXXXMIQVTINSHHVRSP

SEQ ID NO: 13338 - protein, 41 aa, Artificial Sequence
  Non-cyclic GFR-binding peptide
  MOD_RES (1), (3), (40): Xaa is C or S
  MOD_RES (16), (17), (18), (19), (20): Xaa is A or G
  MOD_RES (21), (22), (23), (24): Xaa is A or G or is absent
XKXALHDELTSMEGIXXXXXXXXXMIQVTINSLQVQTPRXQ

SEQ ID NO: 13339 - protein, 39 aa, Artificial Sequence
  Non-cyclic GFR-binding peptide
  MOD_RES (2), (36): Xaa is C or S
  MOD_RES (14), (15), (16), (17), (18): Xaa is A or G
  MOD_RES (19), (20), (21), (22): Xaa is A or G or is absent
EXKNHQLFVQVEKXXXXXXXXXVKAMKVSREETPVXELG

SEQ ID NO: 13340 - protein, 32 aa, Artificial Sequence
  Non-cyclic GFR-binding peptide
NHQLFVTAKKHQGQHPKIRIKRMQVPREETPV

SEQ ID NO: 13341 - protein, 42 aa, Artificial Sequence
  Non-cyclic GFR-binding peptide
  MOD_RES (1), (38): Xaa is C or S
XELHEELRVTAKKLKPKKRVYEIKRVQVPRHHVRSPQXKVSS

SEQ ID NO: 13342 - protein, 34 aa, Artificial Sequence
  Non-cyclic GFR-binding peptide
  MOD_RES (33), (33): Xaa is C or S
  MOD_RES (11), (12), (13), (14), (15): Xaa is A or G
  MOD_RES (16), (17), (18), (19): Xaa is A or G or is absent
SHEELVTAKKXXXXXXXXXIKRMQVPRQGTPVXE

SEQ ID NO: 13343 - protein, 36 aa, Artificial Sequence
  Non-cyclic GFR-binding peptide
  MOD_RES (35), (35): Xaa is C or S
  MOD_RES (11), (12), (13), (14), (15): Xaa is A or G
  MOD_RES (16), (17), (18), (19): Xaa is A or G or is absent
HEELRSMEGLXXXXXXXXXMIQVTINSHHVRSPQXK

SEQ ID NO: 13344 - protein, 43 aa, Artificial Sequence
  Non-cyclic GFR-binding peptide
  MOD_RES (1), (3), (37): Xaa is C or S
  MOD_RES (15), (16), (17), (18), (19): Xaa is A or G
  MOD_RES (20), (21), (22), (23): Xaa is A or G or is absent
XEXQSHEELVQVEKXXXXXXXXXVKAMKVSRQGTPVXELGEDN

SEQ ID NO: 13345 - protein, 40 aa, Artificial Sequence
  Non-cyclic GFR-binding peptide
  MOD_RES (34), (34): Xaa is C or S
  MOD_RES (12), (13), (14), (15), (16): Xaa is A or G
  MOD_RES (17), (18), (19), (20): Xaa is A or G or is absent
QSHEELVQVEKXXXXXXXXXVKAMKVSRQGTPVXELGEDN

SEQ ID NO: 13346 - protein, 38 aa, Artificial Sequence
  Non-cyclic GFR-binding peptide
  MOD_RES (37), (37): Xaa is C or S
  MOD_RES (13), (14), (15), (16), (17): Xaa is A or G
  MOD_RES (18), (19), (20), (21): Xaa is A or G or is absent
ALHDELTVQVEKXXXXXXXXXVKAVKVSRLQVQTPRXQ

SEQ ID NO: 13347 - protein, 41 aa, Artificial Sequence
  Non-cyclic GFR-binding peptide
  MOD_RES (2), (4), (38): Xaa is C or S
  MOD_RES (16), (17), (18), (19), (20): Xaa is A or G
  MOD_RES (21), (22), (23), (24): Xaa is A or G or is absent
RXEXQSHEELVQVEKXXXXXXXXXVKAMKVSRQGTPVXELG

SEQ ID NO: 13348 - protein, 36 aa, Artificial Sequence
  Non-cyclic GFR-binding peptide
  MOD_RES (2), (36): Xaa is C or S
  MOD_RES (14), (15), (16), (17), (18): Xaa is A or G
  MOD_RES (19), (20), (21), (22): Xaa is A or G or is absent
EXQSHEELVQVEKXXXXXXXXXVKAMKVSRQGTPVX

SEQ ID NO: 13349 - protein, 35 aa, Artificial Sequence
  Non-cyclic GFR-binding peptide
  MOD_RES (2), (2): Xaa is C or S
EXKNHQLFSMEGLHQGQHPKIRMIQMTINSEETPV

SEQ ID NO: 13350 - protein, 39 aa, Artificial Sequence
  Non-cyclic GFR-binding peptide
  MOD_RES (1), (38): Xaa is C or S
XELHEELRSMEGILKPKKRVYEMIQVTINSHHVRSPQXK

SEQ ID NO: 13351 - protein, 36 aa, Artificial Sequence
  Non-cyclic GFR-binding peptide
  MOD_RES (1), (3): Xaa is C or S
XEXKNHQLFVQVEKHQGQHPKIRVKAMKVSREETPV

SEQ ID NO: 13352 - protein, 40 aa, Artificial Sequence
  Non-cyclic GFR-binding peptide
  MOD_RES (2), (39): Xaa is C or S
  MOD_RES (15), (16), (17), (18), (19): Xaa is A or G
  MOD_RES (20), (21), (22), (23): Xaa is A or G or is absent
KXALHDELTVQVEKXXXXXXXXXVKAVKVSRLQVQTPRXQ

SEQ ID NO: 13353 - protein, 37 aa, Artificial Sequence
  Non-cyclic GFR-binding peptide
  MOD_RES (34), (34): Xaa is C or S
  MOD_RES (12), (13), (14), (15), (16): Xaa is A or G
  MOD_RES (17), (18), (19), (20): Xaa is A or G or is absent
QSHEELVQVEKXXXXXXXXXVKAMKVSRQGTPVXELG

SEQ ID NO: 13354 - protein, 40 aa, Artificial Sequence
  Non-cyclic GFR-binding peptide
  MOD_RES (2), (4): Xaa is C or S
  MOD_RES (17), (18), (19), (20), (21): Xaa is A or G
  MOD_RES (22), (23), (24), (25): Xaa is A or G or is absent
EXKXALHDELTVQVEKXXXXXXXXXVKAVKVSRLQVQTPR

SEQ ID NO: 13355 - protein, 37 aa, Artificial Sequence
  Non-cyclic GFR-binding peptide
  MOD_RES (37), (37): Xaa is C or S
ALHDELTVQVEKFIPKKRVIEVKAVKVSRLQVQTPRX

SEQ ID NO: 13356 - protein, 42 aa, Artificial Sequence
  Non-cyclic GFR-binding peptide
  MOD_RES (1), (38): Xaa is C or S
  MOD_RES (14), (15), (16), (17), (18): Xaa is A or G
  MOD_RES (19), (20), (21), (22): Xaa is A or G or is absent
XALHDELTSMEGIXXXXXXXXXMIQVTINSLQVQTPRXQVNR

SEQ ID NO: 13357 - protein, 36 aa, Artificial Sequence
  Non-cyclic GFR-binding peptide
  MOD_RES (2), (2): Xaa is C or S
  MOD_RES (15), (16), (17), (18), (19): Xaa is A or G
  MOD_RES (20), (21), (22), (23): Xaa is A or G or is absent
AXELHEELRVTAKKXXXXXXXXXIKRVQVPRHHVRS

SEQ ID NO: 13358 - protein, 36 aa, Artificial Sequence
  Non-cyclic GFR-binding peptide
  MOD_RES (36), (36): Xaa is C or S
LHEELRSMEGILKPKKRVYEMIQVTINSHHVRSPQX

SEQ ID NO: 13359 - protein, 45 aa, Artificial Sequence
  Non-cyclic GFR-binding peptide
  MOD_RES (2), (4), (41): Xaa is C or S
AXAXELHEELRSMEGILKPKKRVYEMIQVTINSHHVRSPQXKVSS

SEQ ID NO: 13360 - protein, 34 aa, Artificial Sequence
  Non-cyclic GFR-binding peptide
ELHEELRVTAKKLKPKKRVYEIKRVQVPRHHVRS

SEQ ID NO: 13361 - protein, 37 aa, Artificial Sequence
  Non-cyclic GFR-binding peptide
  MOD_RES (2), (4): Xaa is C or S
RXEXQSHEELVTAKKHQGQHPKIRIKRMQVPRQGTPV

SEQ ID NO: 13362 - protein, 35 aa, Artificial Sequence
  Non-cyclic GFR-binding peptide
  MOD_RES (35), (35): Xaa is C or S
HDELTSMEGIFIPKKRVIEMIQVTINSLQVQTPRX

SEQ ID NO: 13363 - protein, 34 aa, Artificial Sequence
  Non-cyclic GFR-binding peptide
  MOD_RES (1), (1): Xaa is C or S
  MOD_RES (13), (14), (15), (16), (17): Xaa is A or G
  MOD_RES (18), (19), (20), (21): Xaa is A or G or is absent
XKNHQLFSMEGLXXXXXXXXXMIQMTINSEETPV

SEQ ID NO: 13364 - protein, 33 aa, Artificial Sequence
  Non-cyclic GFR-binding peptide
KNHQLFSMEGLHQGQHPKIRMIQMTINSEETPV

SEQ ID NO: 13365 - protein, 44 aa, Artificial Sequence
  Non-cyclic GFR-binding peptide
  MOD_RES (2), (4), (41): Xaa is C or S
EXKXALHDELTSMEGIFIPKKRVIEMIQVTINSLQVQTPRXQVN

SEQ ID NO: 13366 - protein, 40 aa, Artificial Sequence
  Non-cyclic GFR-binding peptide
  MOD_RES (1), (3), (37): Xaa is C or S
  MOD_RES (15), (16), (17), (18), (19): Xaa is A or G
  MOD_RES (20), (21), (22), (23): Xaa is A or G or is absent
XEXKNHQLFVQVEKXXXXXXXXXVKAMKVSREETPVXELG

SEQ ID NO: 13367 - protein, 39 aa, Artificial Sequence
  Non-cyclic GFR-binding peptide
  MOD_RES (2), (36): Xaa is C or S
  MOD_RES (14), (15), (16), (17), (18): Xaa is A or G
  MOD_RES (19), (20), (21), (22): Xaa is A or G or is absent
EXKNHQLFSMEGLXXXXXXXXXMIQMTINSEETPVXELG

SEQ ID NO: 13368 - protein, 41 aa, Artificial Sequence
  Non-cyclic GFR-binding peptide
  MOD_RES (1), (35): Xaa is C or S
  MOD_RES (13), (14), (15), (16), (17): Xaa is A or G
  MOD_RES (18), (19), (20), (21): Xaa is A or G or is absent
XQSHEELVQVEKXXXXXXXXXVKAMKVSRQGTPVXELGEDN

SEQ ID NO: 13369 - protein, 42 aa, Artificial Sequence
  Non-cyclic GFR-binding peptide
  MOD_RES (2), (39): Xaa is C or S
  MOD_RES (15), (16), (17), (18), (19): Xaa is A or G
  MOD_RES (20), (21), (22), (23): Xaa is A or G or is absent
KXALHDELTSMEGIXXXXXXXXXMIQVTINSLQVQTPRXQVN

SEQ ID NO: 13370 - protein, 36 aa, Artificial Sequence
  Non-cyclic GFR-binding peptide
  MOD_RES (33), (33): Xaa is C or S
  MOD_RES (11), (12), (13), (14), (15): Xaa is A or G
  MOD_RES (16), (17), (18), (19): Xaa is A or G or is absent
SHEELVQVEKXXXXXXXXXVKAMKVSRQGTPVXELG

SEQ ID NO: 13371 - protein, 38 aa, Artificial Sequence
  Non-cyclic GFR-binding peptide
  MOD_RES (2), (36): Xaa is C or S
EXQSHEELVQVEKHQGQHPKIRVKAMKVSRQGTPVXEL

SEQ ID NO: 13372 - protein, 38 aa, Artificial Sequence
  Non-cyclic GFR-binding peptide
  MOD_RES (2), (2): Xaa is C or S
AXELHEELRVTAKKLKPKKRVYEIKRVQVPRHHVRSPQ

SEQ ID NO: 13373 - protein, 40 aa, Artificial Sequence
  Non-cyclic GFR-binding peptide
  MOD_RES (1), (35): Xaa is C or S
XQSHEELSMEGIHQGQHPKIRMIQMTINSQGTPVXELGED

SEQ ID NO: 13374 - protein, 37 aa, Artificial Sequence
  Non-cyclic GFR-binding peptide
  MOD_RES (2), (4): Xaa is C or S
  MOD_RES (16), (17), (18), (19), (20): Xaa is A or G
  MOD_RES (21), (22), (23), (24): Xaa is A or G or is absent
RXEXQSHEELSMEGIXXXXXXXXXMIQMTINSQGTPV

SEQ ID NO: 13375 - protein, 39 aa, Artificial Sequence
  Non-cyclic GFR-binding peptide
  MOD_RES (35), (35): Xaa is C or S
  MOD_RES (11), (12), (13), (14), (15): Xaa is A or G
  MOD_RES (16), (17), (18), (19): Xaa is A or G or is absent
HEELRVTAKKXXXXXXXXXIKRVQVPRHHVRSPQXKVSS

SEQ ID NO: 13376 - protein, 37 aa, Artificial Sequence
  Non-cyclic GFR-binding peptide
  MOD_RES (35), (35): Xaa is C or S
HDELTSMEGIFIPKKRVIEMIQVTINSLQVQTPRXQV

SEQ ID NO: 13377 - protein, 42 aa, Artificial Sequence
  Non-cyclic GFR-binding peptide
  MOD_RES (1), (3), (37): Xaa is C or S
XEXKNHQLFVTAKKHQGQHPKIRIKRMQVPREETPVXELGED

SEQ ID NO: 13378 - protein, 41 aa, Artificial Sequence
  Non-cyclic GFR-binding peptide
  MOD_RES (1), (38): Xaa is C or S
XELHEELRSMEGILKPKKRVYEMIQVTINSHHVRSPQXKVS

SEQ ID NO: 13379 - protein, 35 aa, Artificial Sequence
  Non-cyclic GFR-binding peptide
  MOD_RES (13), (14), (15), (16), (17): Xaa is A or G
  MOD_RES (18), (19), (20), (21): Xaa is A or G or is absent
ALHDELTVQVEKXXXXXXXXXVKAVKVSRLQVQTP

SEQ ID NO: 13380 - protein, 38 aa, Artificial Sequence
  Non-cyclic GFR-binding peptide
  MOD_RES (35), (35): Xaa is C or S
HEELRVTAKKLKPKKRVYEIKRVQVPRHHVRSPQXKVS

SEQ ID NO: 13381 - protein, 37 aa, Artificial Sequence
  Non-cyclic GFR-binding peptide
  MOD_RES (33), (33): Xaa is C or S
NHQLFVQVEKHQGQHPKIRVKAMKVSREETPVXELGE

SEQ ID NO: 13382 - protein, 38 aa, Artificial Sequence
  Non-cyclic GFR-binding peptide
  MOD_RES (2), (4), (38): Xaa is C or S
RXEXQSHEELVTAKKHQGQHPKIRIKRMQVPRQGTPVX

SEQ ID NO: 13383 - protein, 40 aa, Artificial Sequence
  Non-cyclic GFR-binding peptide
  MOD_RES (1), (3), (37): Xaa is C or S
  MOD_RES (15), (16), (17), (18), (19): Xaa is A or G
  MOD_RES (20), (21), (22), (23): Xaa is A or G or is absent
XEXQSHEELSMEGIXXXXXXXXXMIQMTINSQGTPVXELG

SEQ ID NO: 13384 - protein, 35 aa, Artificial Sequence
  Non-cyclic GFR-binding peptide
  MOD_RES (35), (35): Xaa is C or S
HEELRVTAKKLKPKKRVYEIKRVQVPRHHVRSPQX

SEQ ID NO: 13385 - protein, 39 aa, Artificial Sequence
  Non-cyclic GFR-binding peptide
  MOD_RES (2), (4), (38): Xaa is C or S
RXEXQSHEELSMEGIHQGQHPKIRMIQMTINSQGTPVXE

SEQ ID NO: 13386 - protein, 35 aa, Artificial Sequence
  Non-cyclic GFR-binding peptide
  MOD_RES (33), (33): Xaa is C or S
NHQLFVQVEKHQGQHPKIRVKAMKVSREETPVXEL

SEQ ID NO: 13387 - protein, 40 aa, Artificial Sequence
  Non-cyclic GFR-binding peptide
  MOD_RES (37), (37): Xaa is C or S
  MOD_RES (13), (14), (15), (16), (17): Xaa is A or G
  MOD_RES (18), (19), (20), (21): Xaa is A or G or is absent
ELHEELRVTAKKXXXXXXXXXIKRVQVPRHHVRSPQXKVS

SEQ ID NO: 13388 - protein, 40 aa, Artificial Sequence
  Non-cyclic GFR-binding peptide
  MOD_RES (37), (37): Xaa is C or S
ALHDELTSMEGLFIPKKRVIEMIQVTINSLQVQTPRXQVN

SEQ ID NO: 13389 - protein, 38 aa, Artificial Sequence
  Non-cyclic GFR-binding peptide
  MOD_RES (2), (4), (38): Xaa is C or S
RXEXQSHEELVQVEKHQGQHPKIRVKAMKVSRQGTPVX

SEQ ID NO: 13390 - protein, 42 aa, Artificial Sequence
  Non-cyclic GFR-binding peptide
  MOD_RES (2), (36): Xaa is C or S
  MOD_RES (14), (15), (16), (17), (18): Xaa is A or G
  MOD_RES (19), (20), (21), (22): Xaa is A or G or is absent
EXKNHQLFSMEGLXXXXXXXXXMIQMTINSEETPVXELGEDN

SEQ ID NO: 13391 - protein, 45 aa, Artificial Sequence
  Non-cyclic GFR-binding peptide
  MOD_RES (2), (4), (41): Xaa is C or S
EXKXALHDELTSMEGLFIPKKRVIEMIQVTINSLQVQTPRXQVNR

SEQ ID NO: 13392 - protein, 42 aa, Artificial Sequence
  Non-cyclic GFR-binding peptide
  MOD_RES (2), (4), (38): Xaa is C or S
  MOD_RES (16), (17), (18), (19), (20): Xaa is A or G
  MOD_RES (21), (22), (23), (24): Xaa is A or G or is absent
RXEXQSHEELVQVEKXXXXXXXXXVKAMKVSRQGTPVXELGE

SEQ ID NO: 13393 - protein, 39 aa, Artificial Sequence
  Non-cyclic GFR-binding peptide
  MOD_RES (1), (35): Xaa is C or S
XKNHQLFSMEGLHQGQHPKIRMIQMTINSEETPVXELGE

SEQ ID NO: 13394 - protein, 42 aa, Artificial Sequence
  Non-cyclic GFR-binding peptide
  MOD_RES (1), (38): Xaa is C or S
XALHDELTSMEGIFIPKKRVIEMIQVTINSLQVQTPRXQVNR

SEQ ID NO: 13395 - protein, 37 aa, Artificial Sequence
  Non-cyclic GFR-binding peptide
  MOD_RES (2), (36): Xaa is C or S
  MOD_RES (14), (15), (16), (17), (18): Xaa is A or G
  MOD_RES (19), (20), (21), (22): Xaa is A or G or is absent
EXQSHEELSMEGIXXXXXXXXXMIQMTINSQGTPVXE

SEQ ID NO: 13396 - protein, 41 aa, Artificial Sequence
  Non-cyclic GFR-binding peptide
  MOD_RES (2), (4), (38): Xaa is C or S
  MOD_RES (16), (17), (18), (19), (20): Xaa is A or G
  MOD_RES (21), (22), (23), (24): Xaa is A or G or is absent
RXEXQSHEELVTAKKXXXXXXXXXIKRMQVPRQGTPVXELG

SEQ ID NO: 13397 - protein, 35 aa, Artificial Sequence
  Non-cyclic GFR-binding peptide
  MOD_RES (34), (34): Xaa is C or S
  MOD_RES (12), (13), (14), (15), (16): Xaa is A or G
  MOD_RES (17), (18), (19), (20): Xaa is A or G or is absent
KNHQLFVTAKKXXXXXXXXXIKRMQVPREETPVXE

SEQ ID NO: 13398 - protein, 38 aa, Artificial Sequence
  Non-cyclic GFR-binding peptide
  MOD_RES (34), (34): Xaa is C or S
  MOD_RES (12), (13), (14), (15), (16): Xaa is A or G
  MOD_RES (17), (18), (19), (20): Xaa is A or G or is absent
QSHEELSMEGIXXXXXXXXXMIQMTINSQGTPVXELGE

SEQ ID NO: 13399 - protein, 39 aa, Artificial Sequence
  Non-cyclic GFR-binding peptide
  MOD_RES (2), (4): Xaa is C or S
  MOD_RES (17), (18), (19), (20), (21): Xaa is A or G
  MOD_RES (22), (23), (24), (25): Xaa is A or G or is absent
EXKXALHDELTSMEGIXXXXXXXXXMIQVTINSLQVQTP

SEQ ID NO: 13400 - protein, 33 aa, Artificial Sequence
  Non-cyclic GFR-binding peptide
QSHEELVTAKKHQGQHPKIRIKRMQVPRQGTPV

SEQ ID NO: 13401 - protein, 36 aa, Artificial Sequence
  Non-cyclic GFR-binding peptide
  MOD_RES (34), (34): Xaa is C or S
  MOD_RES (12), (13), (14), (15), (16): Xaa is A or G
  MOD_RES (17), (18), (19), (20): Xaa is A or G or is absent
KNHQLFVQVEKXXXXXXXXXVKAMKVSREETPVXEL

SEQ ID NO: 13402 - protein, 40 aa, Artificial Sequence
  Non-cyclic GFR-binding peptide
  MOD_RES (36), (36): Xaa is C or S
LHDELTSMEGLFIPKKRVIEMIQVTINSLQVQTPRXQVNR

SEQ ID NO: 13403 - protein, 35 aa, Artificial Sequence
  Non-cyclic GFR-binding peptide
LHDELTVQVEKFIPKKRVIEVKAVKVSRLQVQTPR

SEQ ID NO: 13404 - protein, 39 aa, Artificial Sequence
  Non-cyclic GFR-binding peptide
  MOD_RES (1), (3), (37): Xaa is C or S
XEXQSHEELVTAKKHQGQHPKIRIKRMQVPRQGTPVXEL

SEQ ID NO: 13405 - protein, 41 aa, Artificial Sequence
  Non-cyclic GFR-binding peptide
  MOD_RES (37), (37): Xaa is C or S
ALHDELTVQVEKFIPKKRVIEVKAVKVSRLQVQTPRXQVNR

SEQ ID NO: 13406 - protein, 35 aa, Artificial Sequence
  Non-cyclic GFR-binding peptide
  MOD_RES (2), (2): Xaa is C or S
EXKNHQLFVQVEKHQGQHPKIRVKAMKVSREETPV

SEQ ID NO: 13407 - protein, 37 aa, Artificial Sequence
  Non-cyclic GFR-binding peptide
  MOD_RES (2), (36): Xaa is C or S
  MOD_RES (14), (15), (16), (17), (18): Xaa is A or G
  MOD_RES (19), (20), (21), (22): Xaa is A or G or is absent
EXKNHQLFVTAKKXXXXXXXXXIKRMQVPREETPVXE

SEQ ID NO: 13408 - protein, 38 aa, Artificial Sequence
  Non-cyclic GFR-binding peptide
  MOD_RES (37), (37): Xaa is C or S
  MOD_RES (13), (14), (15), (16), (17): Xaa is A or G
  MOD_RES (18), (19), (20), (21): Xaa is A or G or is absent
ELHEELRVTAKKXXXXXXXXXIKRVQVPRHHVRSPQXK

SEQ ID NO: 13409 - protein, 39 aa, Artificial Sequence
  Non-cyclic GFR-binding peptide
  MOD_RES (2), (39): Xaa is C or S
  MOD_RES (15), (16), (17), (18), (19): Xaa is A or G
  MOD_RES (20), (21), (22), (23): Xaa is A or G or is absent
KXALHDELTSMEGIXXXXXXXXXMIQVTINSLQVQTPRX

SEQ ID NO: 13410 - protein, 44 aa, Artificial Sequence
  Non-cyclic GFR-binding peptide
  MOD_RES (1), (3), (40): Xaa is C or S
  MOD_RES (16), (17), (18), (19), (20): Xaa is A or G
  MOD_RES (21), (22), (23), (24): Xaa is A or G or is absent
XKXALHDELTSMEGLXXXXXXXXXMIQVTINSLQVQTPRXQVNR

SEQ ID NO: 13411 - protein, 42 aa, Artificial Sequence
  Non-cyclic GFR-binding peptide
  MOD_RES (2), (4), (38): Xaa is C or S
  MOD_RES (16), (17), (18), (19), (20): Xaa is A or G
  MOD_RES (21), (22), (23), (24): Xaa is A or G or is absent
RXEXQSHEELVTAKKXXXXXXXXXIKRMQVPRQGTPVXELGE

SEQ ID NO: 13412 - protein, 41 aa, Artificial Sequence
  Non-cyclic GFR-binding peptide
  MOD_RES (1), (38): Xaa is C or S
XALHDELTSMEGIFIPKKRVIEMIQVTINSLQVQTPRXQVN

SEQ ID NO: 13413 - protein, 38 aa, Artificial Sequence
  Non-cyclic GFR-binding peptide
  MOD_RES (33), (33): Xaa is C or S
  MOD_RES (11), (12), (13), (14), (15): Xaa is A or G
  MOD_RES (16), (17), (18), (19): Xaa is A or G or is absent
NHQLFVQVEKXXXXXXXXXVKAMKVSREETPVXELGED

SEQ ID NO: 13414 - protein, 40 aa, Artificial Sequence
  Non-cyclic GFR-binding peptide
  MOD_RES (2), (4): Xaa is C or S
  MOD_RES (17), (18), (19), (20), (21): Xaa is A or G
  MOD_RES (22), (23), (24), (25): Xaa is A or G or is absent
AXAXELHEELRSMEGLXXXXXXXXXMIQVTINSHHVRSPQ

SEQ ID NO: 13415 - protein, 36 aa, Artificial Sequence
  Non-cyclic GFR-binding peptide
  MOD_RES (13), (14), (15), (16), (17): Xaa is A or G
  MOD_RES (18), (19), (20), (21): Xaa is A or G or is absent
ALHDELTSMEGIXXXXXXXXXMIQVTINSLQVQTPR

SEQ ID NO: 13416 - protein, 36 aa, Artificial Sequence
  Non-cyclic GFR-binding peptide
  MOD_RES (1), (35): Xaa is C or S
XKNHQLFVTAKKHQGQHPKIRIKRMQVPREETPVXE

SEQ ID NO: 13417 - protein, 37 aa, Artificial Sequence
  Non-cyclic GFR-binding peptide
  MOD_RES (37), (37): Xaa is C or S
ELHEELRVTAKKLKPKKRVYEIKRVQVPRHHVRSPQX

SEQ ID NO: 13418 - protein, 40 aa, Artificial Sequence
  Non-cyclic GFR-binding peptide
  MOD_RES (1), (38): Xaa is C or S
XALHDELTVQVEKFIPKKRVIEVKAVKVSRLQVQTPRXQV

SEQ ID NO: 13419 - protein, 45 aa, Artificial Sequence
  Non-cyclic GFR-binding peptide
  MOD_RES (2), (4), (41): Xaa is C or S
  MOD_RES (17), (18), (19), (20), (21): Xaa is A or G
  MOD_RES (22), (23), (24), (25): Xaa is A or G or is absent
EXKXALHDELTVQVEKXXXXXXXXXVKAVKVSRLQVQTPRXQVNR

SEQ ID NO: 13420 - protein, 43 aa, Artificial Sequence
  Non-cyclic GFR-binding peptide
  MOD_RES (2), (4), (38): Xaa is C or S
RXEXKNHQLFVTAKKHQGQHPKIRIKRMQVPREETPVXELGED

SEQ ID NO: 13421 - protein, 39 aa, Artificial Sequence
  Non-cyclic GFR-binding peptide
  MOD_RES (1), (3): Xaa is C or S
  MOD_RES (16), (17), (18), (19), (20): Xaa is A or G
  MOD_RES (21), (22), (23), (24): Xaa is A or G or is absent
XAXELHEELRVTAKKXXXXXXXXXIKRVQVPRHHVRSPQ

SEQ ID NO: 13422 - protein, 33 aa, Artificial Sequence
  Non-cyclic GFR-binding peptide
  MOD_RES (11), (12), (13), (14), (15): Xaa is A or G
  MOD_RES (16), (17), (18), (19): Xaa is A or G or is absent
HDELTSMEGIXXXXXXXXXMIQVTINSLQVQTP

SEQ ID NO: 13423 - protein, 40 aa, Artificial Sequence
  Non-cyclic GFR-binding peptide
  MOD_RES (2), (39): Xaa is C or S
KXALHDELTVQVEKFIPKKRVIEVKAVKVSRLQVQTPRXQ

SEQ ID NO: 13424 - protein, 35 aa, Artificial Sequence
  Non-cyclic GFR-binding peptide
  MOD_RES (34), (34): Xaa is C or S
KNHQLFVQVEKHQGQHPKIRVKAMKVSREETPVXE

SEQ ID NO: 13425 - protein, 37 aa, Artificial Sequence
  Non-cyclic GFR-binding peptide
  MOD_RES (37), (37): Xaa is C or S
ELHEELRSMEGLLKPKKRVYEMIQVTINSHHVRSPQX

SEQ ID NO: 13426 - protein, 40 aa, Artificial Sequence
  Non-cyclic GFR-binding peptide
  MOD_RES (2), (4): Xaa is C or S
  MOD_RES (17), (18), (19), (20), (21): Xaa is A or G
  MOD_RES (22), (23), (24), (25): Xaa is A or G or is absent
EXKXALHDELTSMEGLXXXXXXXXXMIQVTINSLQVQTPR

SEQ ID NO: 13427 - protein, 35 aa, Artificial Sequence
  Non-cyclic GFR-binding peptide
LHEELRVTAKKLKPKKRVYEIKRVQVPRHHVRSPQ

SEQ ID NO: 13428 - protein, 36 aa, Artificial Sequence
  Non-cyclic GFR-binding peptide
  MOD_RES (1), (35): Xaa is C or S
XKNHQLFSMEGLHQGQHPKIRMIQMTINSEETPVXE

SEQ ID NO: 13429 - protein, 38 aa, Artificial Sequence
  Non-cyclic GFR-binding peptide
  MOD_RES (36), (36): Xaa is C or S
  MOD_RES (12), (13), (14), (15), (16): Xaa is A or G
  MOD_RES (17), (18), (19), (20): Xaa is A or G or is absent
LHDELTSMEGIXXXXXXXXXMIQVTINSLQVQTPRXQV

SEQ ID NO: 13430 - protein, 40 aa, Artificial Sequence
  Non-cyclic GFR-binding peptide
  MOD_RES (2), (4): Xaa is C or S
  MOD_RES (17), (18), (19), (20), (21): Xaa is A or G
  MOD_RES (22), (23), (24), (25): Xaa is A or G or is absent
AXAXELHEELRVTAKKXXXXXXXXXIKRVQVPRHHVRSPQ

SEQ ID NO: 13431 - protein, 36 aa, Artificial Sequence
  Non-cyclic GFR-binding peptide
  MOD_RES (2), (36): Xaa is C or S
  MOD_RES (14), (15), (16), (17), (18): Xaa is A or G
  MOD_RES (19), (20), (21), (22): Xaa is A or G or is absent
EXQSHEELVTAKKXXXXXXXXXIKRMQVPRQGTPVX

SEQ ID NO: 13432 - protein, 44 aa, Artificial Sequence
  Non-cyclic GFR-binding peptide
  MOD_RES (2), (4), (41): Xaa is C or S
AXAXELHEELRSMEGILKPKKRVYEMIQVTINSHHVRSPQXKVS

SEQ ID NO: 13433 - protein, 43 aa, Artificial Sequence
  Non-cyclic GFR-binding peptide
  MOD_RES (2), (39): Xaa is C or S
AXELHEELRSMEGILKPKKRVYEMIQVTINSHHVRSPQXKVSS

SEQ ID NO: 13434 - protein, 34 aa, Artificial Sequence
  Non-cyclic GFR-binding peptide
  MOD_RES (1), (1): Xaa is C or S
  MOD_RES (13), (14), (15), (16), (17): Xaa is A or G
  MOD_RES (18), (19), (20), (21): Xaa is A or G or is absent
XQSHEELVTAKKXXXXXXXXXIKRMQVPRQGTPV

SEQ ID NO: 13435 - protein, 38 aa, Artificial Sequence
  Non-cyclic GFR-binding peptide
  MOD_RES (34), (34): Xaa is C or S
KNHQLFVQVEKHQGQHPKIRVKAMKVSREETPVXELGE

SEQ ID NO: 13436 - protein, 35 aa, Artificial Sequence
  Non-cyclic GFR-binding peptide
ELHEELRSMEGILKPKKRVYEMIQVTINSHHVRSP

SEQ ID NO: 13437 - protein, 38 aa, Artificial Sequence
  Non-cyclic GFR-binding peptide
  MOD_RES (1), (35): Xaa is C or S
XKNHQLFVTAKKHQGQHPKIRIKRMQVPREETPVXELG

SEQ ID NO: 13438 - protein, 37 aa, Artificial Sequence
  Non-cyclic GFR-binding peptide
  MOD_RES (35), (35): Xaa is C or S
HEELRVTAKKLKPKKRVYEIKRVQVPRHHVRSPQXKV

SEQ ID NO: 13439 - protein, 37 aa, Artificial Sequence
  Non-cyclic GFR-binding peptide
  MOD_RES (1), (1): Xaa is C or S
  MOD_RES (14), (15), (16), (17), (18): Xaa is A or G
  MOD_RES (19), (20), (21), (22): Xaa is A or G or is absent
XELHEELRVTAKKXXXXXXXXXIKRVQVPRHHVRSPQ

SEQ ID NO: 13440 - protein, 39 aa, Artificial Sequence
  Non-cyclic GFR-binding peptide
  MOD_RES (2), (4), (38): Xaa is C or S
  MOD_RES (16), (17), (18), (19), (20): Xaa is A or G
  MOD_RES (21), (22), (23), (24): Xaa is A or G or is absent
RXEXKNHQLFSMEGLXXXXXXXXXMIQMTINSEETPVXE

SEQ ID NO: 13441 - protein, 34 aa, Artificial Sequence
  Non-cyclic GFR-binding peptide
HEELRSMEGILKPKKRVYEMIQVTINSHHVRSPQ

SEQ ID NO: 13442 - protein, 38 aa, Artificial Sequence
  Non-cyclic GFR-binding peptide
  MOD_RES (2), (4), (38): Xaa is C or S
  MOD_RES (16), (17), (18), (19), (20): Xaa is A or G
  MOD_RES (21), (22), (23), (24): Xaa is A or G or is absent
RXEXQSHEELVQVEKXXXXXXXXXVKAMKVSRQGTPVX

SEQ ID NO: 13443 - protein, 39 aa, Artificial Sequence
  Non-cyclic GFR-binding peptide
  MOD_RES (2), (36): Xaa is C or S
EXQSHEELVTAKKHQGQHPKIRIKRMQVPRQGTPVXELG

SEQ ID NO: 13444 - protein, 40 aa, Artificial Sequence
  Non-cyclic GFR-binding peptide
  MOD_RES (37), (37): Xaa is C or S
  MOD_RES (13), (14), (15), (16), (17): Xaa is A or G
  MOD_RES (18), (19), (20), (21): Xaa is A or G or is absent
ELHEELRSMEGLXXXXXXXXXMIQVTINSHHVRSPQXKVS

SEQ ID NO: 13445 - protein, 36 aa, Artificial Sequence
  Non-cyclic GFR-binding peptide
  MOD_RES (33), (33): Xaa is C or S
  MOD_RES (11), (12), (13), (14), (15): Xaa is A or G
  MOD_RES (16), (17), (18), (19): Xaa is A or G or is absent
SHEELVTAKKXXXXXXXXXIKRMQVPRQGTPVXELG

SEQ ID NO: 13446 - protein, 36 aa, Artificial Sequence
  Non-cyclic GFR-binding peptide
  MOD_RES (1), (3): Xaa is C or S
  MOD_RES (15), (16), (17), (18), (19): Xaa is A or G
  MOD_RES (20), (21), (22), (23): Xaa is A or G or is absent
XEXQSHEELVTAKKXXXXXXXXXIKRMQVPRQGTPV

SEQ ID NO: 13447 - protein, 40 aa, Artificial Sequence
  Non-cyclic GFR-binding peptide
  MOD_RES (34), (34): Xaa is C or S
QSHEELSMEGIHQGQHPKIRMIQMTINSQGTPVXELGEDN

SEQ ID NO: 13448 - protein, 36 aa, Artificial Sequence
  Non-cyclic GFR-binding peptide
  MOD_RES (1), (1): Xaa is C or S
  MOD_RES (14), (15), (16), (17), (18): Xaa is A or G
  MOD_RES (19), (20), (21), (22): Xaa is A or G or is absent
XALHDELTSMEGIXXXXXXXXXMIQVTINSLQVQTP

SEQ ID NO: 13449 - protein, 41 aa, Artificial Sequence
  Non-cyclic GFR-binding peptide
  MOD_RES (2), (39): Xaa is C or S
  MOD_RES (15), (16), (17), (18), (19): Xaa is A or G
  MOD_RES (20), (21), (22), (23): Xaa is A or G or is absent
KXALHDELTVQVEKXXXXXXXXXVKAVKVSRLQVQTPRXQV

SEQ ID NO: 13450 - protein, 40 aa, Artificial Sequence
  Non-cyclic GFR-binding peptide
  MOD_RES (2), (39): Xaa is C or S
  MOD_RES (15), (16), (17), (18), (19): Xaa is A or G
  MOD_RES (20), (21), (22), (23): Xaa is A or G or is absent
AXELHEELRVTAKKXXXXXXXXXIKRVQVPRHHVRSPQXK

SEQ ID NO: 13451 - protein, 43 aa, Artificial Sequence
  Non-cyclic GFR-binding peptide
  MOD_RES (2), (39): Xaa is C or S
KXALHDELTVQVEKFIPKKRVIEVKAVKVSRLQVQTPRXQVNR

SEQ ID NO: 13452 - protein, 39 aa, Artificial Sequence
  Non-cyclic GFR-binding peptide
  MOD_RES (1), (35): Xaa is C or S
XQSHEELVQVEKHQGQHPKIRVKAMKVSRQGTPVXELGE

SEQ ID NO: 13453 - protein, 35 aa, Artificial Sequence
  Non-cyclic GFR-binding peptide
  MOD_RES (1), (1): Xaa is C or S
  MOD_RES (14), (15), (16), (17), (18): Xaa is A or G
  MOD_RES (19), (20), (21), (22): Xaa is A or G or is absent
XALHDELTVQVEKXXXXXXXXXVKAVKVSRLQVQT

SEQ ID NO: 13454 - protein, 38 aa, Artificial Sequence
  Non-cyclic GFR-binding peptide
  MOD_RES (1), (38): Xaa is C or S
XELHEELRVTAKKLKPKKRVYEIKRVQVPRHHVRSPQX

SEQ ID NO: 13455 - protein, 37 aa, Artificial Sequence
  Non-cyclic GFR-binding peptide
  MOD_RES (34), (34): Xaa is C or S
QSHEELSMEGIHQGQHPKIRMIQMTINSQGTPVXELG

SEQ ID NO: 13456 - protein, 34 aa, Artificial Sequence
  Non-cyclic GFR-binding peptide
  MOD_RES (34), (34): Xaa is C or S
  MOD_RES (12), (13), (14), (15), (16): Xaa is A or G
  MOD_RES (17), (18), (19), (20): Xaa is A or G or is absent
KNHQLFSMEGLXXXXXXXXXMIQMTINSEETPVX

SEQ ID NO: 13457 - protein, 41 aa, Artificial Sequence
  Non-cyclic GFR-binding peptide
  MOD_RES (2), (39): Xaa is C or S
  MOD_RES (15), (16), (17), (18), (19): Xaa is A or G
  MOD_RES (20), (21), (22), (23): Xaa is A or G or is absent
AXELHEELRVTAKKXXXXXXXXXIKRVQVPRHHVRSPQXKV

SEQ ID NO: 13458 - protein, 35 aa, Artificial Sequence
  Non-cyclic GFR-binding peptide
  MOD_RES (1), (1): Xaa is C or S
XALHDELTSMEGLFIPKKRVIEMIQVTINSLQVQT

SEQ ID NO: 13459 - protein, 33 aa, Artificial Sequence
  Non-cyclic GFR-binding peptide
  MOD_RES (33), (33): Xaa is C or S
NHQLFVQVEKHQGQHPKIRVKAMKVSREETPVX

SEQ ID NO: 13460 - protein, 34 aa, Artificial Sequence
  Non-cyclic GFR-binding peptide
  MOD_RES (33), (33): Xaa is C or S
  MOD_RES (11), (12), (13), (14), (15): Xaa is A or G
  MOD_RES (16), (17), (18), (19): Xaa is A or G or is absent
NHQLFSMEGLXXXXXXXXXMIQMTINSEETPVXE

SEQ ID NO: 13461 - protein, 41 aa, Artificial Sequence
  Non-cyclic GFR-binding peptide
  MOD_RES (2), (36): Xaa is C or S
EXKNHQLFVTAKKHQGQHPKIRIKRMQVPREETPVXELGED

SEQ ID NO: 13462 - protein, 34 aa, Artificial Sequence
  Non-cyclic GFR-binding peptide
ELHEELRSMEGLLKPKKRVYEMIQVTINSHHVRS

SEQ ID NO: 13463 - protein, 43 aa, Artificial Sequence
  Non-cyclic GFR-binding peptide
  MOD_RES (2), (39): Xaa is C or S
AXELHEELRSMEGLLKPKKRVYEMIQVTINSHHVRSPQXKVSS

SEQ ID NO: 13464 - protein, 42 aa, Artificial Sequence
  Non-cyclic GFR-binding peptide
  MOD_RES (2), (36): Xaa is C or S
EXQSHEELVTAKKHQGQHPKIRIKRMQVPRQGTPVXELGEDN

SEQ ID NO: 13465 - protein, 38 aa, Artificial Sequence
  Non-cyclic GFR-binding peptide
  MOD_RES (37), (37): Xaa is C or S
  MOD_RES (13), (14), (15), (16), (17): Xaa is A or G
  MOD_RES (18), (19), (20), (21): Xaa is A or G or is absent
ELHEELRSMEGLXXXXXXXXXMIQVTINSHHVRSPQXK

SEQ ID NO: 13466 - protein, 43 aa, Artificial Sequence
  Non-cyclic GFR-binding peptide
  MOD_RES (2), (4), (38): Xaa is C or S
  MOD_RES (16), (17), (18), (19), (20): Xaa is A or G
  MOD_RES (21), (22), (23), (24): Xaa is A or G or is absent
RXEXKNHQLFVQVEKXXXXXXXXXVKAMKVSREETPVXELGED

SEQ ID NO: 13467 - protein, 45 aa, Artificial Sequence
  Non-cyclic GFR-binding peptide
  MOD_RES (2), (4), (41): Xaa is C or S
EXKXALHDELTVQVEKFIPKKRVIEVKAVKVSRLQVQTPRXQVNR

SEQ ID NO: 13468 - protein, 36 aa, Artificial Sequence
  Non-cyclic GFR-binding peptide
  MOD_RES (1), (3): Xaa is C or S
XEXKNHQLFVTAKKHQGQHPKIRIKRMQVPREETPV

SEQ ID NO: 13469 - protein, 38 aa, Artificial Sequence
  Non-cyclic GFR-binding peptide
  MOD_RES (37), (37): Xaa is C or S
ALHDELTSMEGIFIPKKRVIEMIQVTINSLQVQTPRXQ

SEQ ID NO: 13470 - protein, 37 aa, Artificial Sequence
  Non-cyclic GFR-binding peptide
  MOD_RES (36), (36): Xaa is C or S
LHDELTSMEGLFIPKKRVIEMIQVTINSLQVQTPRXQ

SEQ ID NO: 13471 - protein, 43 aa, Artificial Sequence
  Non-cyclic GFR-binding peptide
  MOD_RES (1), (3), (37): Xaa is C or S
  MOD_RES (15), (16), (17), (18), (19): Xaa is A or G
  MOD_RES (20), (21), (22), (23): Xaa is A or G or is absent
XEXQSHEELVTAKKXXXXXXXXXIKRMQVPRQGTPVXELGEDN

SEQ ID NO: 13472 - protein, 35 aa, Artificial Sequence
  Non-cyclic GFR-binding peptide
  MOD_RES (12), (13), (14), (15), (16): Xaa is A or G
  MOD_RES (17), (18), (19), (20): Xaa is A or G or is absent
LHDELTSMEGLXXXXXXXXXMIQVTINSLQVQTPR

SEQ ID NO: 13473 - protein, 38 aa, Artificial Sequence
  Non-cyclic GFR-binding peptide
  MOD_RES (2), (2): Xaa is C or S
  MOD_RES (15), (16), (17), (18), (19): Xaa is A or G
  MOD_RES (20), (21), (22), (23): Xaa is A or G or is absent
KXALHDELTSMEGIXXXXXXXXXMIQVTINSLQVQTPR

SEQ ID NO: 13474 - protein, 37 aa, Artificial Sequence
  Non-cyclic GFR-binding peptide
  MOD_RES (35), (35): Xaa is C or S
  MOD_RES (11), (12), (13), (14), (15): Xaa is A or G
  MOD_RES (16), (17), (18), (19): Xaa is A or G or is absent
HDELTVQVEKXXXXXXXXXVKAVKVSRLQVQTPRXQV

SEQ ID NO: 13475 - protein, 38 aa, Artificial Sequence
  Non-cyclic GFR-binding peptide
  MOD_RES (1), (38): Xaa is C or S
XELHEELRSMEGLLKPKKRVYEMIQVTINSHHVRSPQX

SEQ ID NO: 13476 - protein, 33 aa, Artificial Sequence
  Non-cyclic GFR-binding peptide
HEELRSMEGLLKPKKRVYEMIQVTINSHHVRSP

SEQ ID NO: 13477 - protein, 41 aa, Artificial Sequence
  Non-cyclic GFR-binding peptide
  MOD_RES (2), (39): Xaa is C or S
KXALHDELTVQVEKFIPKKRVIEVKAVKVSRLQVQTPRXQV

SEQ ID NO: 13478 - protein, 34 aa, Artificial Sequence
  Non-cyclic GFR-binding peptide
  MOD_RES (33), (33): Xaa is C or S
  MOD_RES (11), (12), (13), (14), (15): Xaa is A or G
  MOD_RES (16), (17), (18), (19): Xaa is A or G or is absent
SHEELVQVEKXXXXXXXXXVKAMKVSRQGTPVXE

SEQ ID NO: 13479 - protein, 36 aa, Artificial Sequence
  Non-cyclic GFR-binding peptide
  MOD_RES (13), (14), (15), (16), (17): Xaa is A or G
  MOD_RES (18), (19), (20), (21): Xaa is A or G or is absent
ELHEELRSMEGIXXXXXXXXXMIQVTINSHHVRSPQ

SEQ ID NO: 13480 - protein, 40 aa, Artificial Sequence
  Non-cyclic GFR-binding peptide
  MOD_RES (2), (36): Xaa is C or S
EXQSHEELVTAKKHQGQHPKIRIKRMQVPRQGTPVXELGE

SEQ ID NO: 13481 - protein, 42 aa, Artificial Sequence
  Non-cyclic GFR-binding peptide
  MOD_RES (1), (3), (40): Xaa is C or S
XKXALHDELTSMEGIFIPKKRVIEMIQVTINSLQVQTPRXQV

SEQ ID NO: 13482 - protein, 40 aa, Artificial Sequence
  Non-cyclic GFR-binding peptide
  MOD_RES (2), (4): Xaa is C or S
EXKXALHDELTSMEGLFIPKKRVIEMIQVTINSLQVQTPR

SEQ ID NO: 13483 - protein, 39 aa, Artificial Sequence
  Non-cyclic GFR-binding peptide
  MOD_RES (34), (34): Xaa is C or S
  MOD_RES (12), (13), (14), (15), (16): Xaa is A or G
  MOD_RES (17), (18), (19), (20): Xaa is A or G or is absent
KNHQLFVQVEKXXXXXXXXXVKAMKVSREETPVXELGED

SEQ ID NO: 13484 - protein, 37 aa, Artificial Sequence
  Non-cyclic GFR-binding peptide
  MOD_RES (1), (35): Xaa is C or S
  MOD_RES (13), (14), (15), (16), (17): Xaa is A or G
  MOD_RES (18), (19), (20), (21): Xaa is A or G or is absent
XKNHQLFVQVEKXXXXXXXXXVKAMKVSREETPVXEL

SEQ ID NO: 13485 - protein, 39 aa, Artificial Sequence
  Non-cyclic GFR-binding peptide
  MOD_RES (37), (37): Xaa is C or S
  MOD_RES (13), (14), (15), (16), (17): Xaa is A or G
  MOD_RES (18), (19), (20), (21): Xaa is A or G or is absent
ELHEELRSMEGIXXXXXXXXXMIQVTINSHHVRSPQXKV

SEQ ID NO: 13486 - protein, 34 aa, Artificial Sequence
  Non-cyclic GFR-binding peptide
  MOD_RES (1), (1): Xaa is C or S
  MOD_RES (13), (14), (15), (16), (17): Xaa is A or G
  MOD_RES (18), (19), (20), (21): Xaa is A or G or is absent
XQSHEELVQVEKXXXXXXXXXVKAMKVSRQGTPV

SEQ ID NO: 13487 - protein, 39 aa, Artificial Sequence
  Non-cyclic GFR-binding peptide
  MOD_RES (1), (35): Xaa is C or S
XQSHEELVTAKKHQGQHPKIRIKRMQVPRQGTPVXELGE

SEQ ID NO: 13488 - protein, 39 aa, Artificial Sequence
  Non-cyclic GFR-binding peptide
  MOD_RES (36), (36): Xaa is C or S
LHDELTVQVEKFIPKKRVIEVKAVKVSRLQVQTPRXQVN

SEQ ID NO: 13489 - protein, 34 aa, Artificial Sequence
  Non-cyclic GFR-binding peptide
  MOD_RES (33), (33): Xaa is C or S
  MOD_RES (11), (12), (13), (14), (15): Xaa is A or G
  MOD_RES (16), (17), (18), (19): Xaa is A or G or is absent
SHEELSMEGIXXXXXXXXXMIQMTINSQGTPVXE

SEQ ID NO: 13490 - protein, 37 aa, Artificial Sequence
  Non-cyclic GFR-binding peptide
  MOD_RES (2), (36): Xaa is C or S
EXKNHQLFVQVEKHQGQHPKIRVKAMKVSREETPVXE

SEQ ID NO: 13491 - protein, 42 aa, Artificial Sequence
  Non-cyclic GFR-binding peptide
  MOD_RES (1), (3), (40): Xaa is C or S
  MOD_RES (16), (17), (18), (19), (20): Xaa is A or G
  MOD_RES (21), (22), (23), (24): Xaa is A or G or is absent
XAXELHEELRSMEGLXXXXXXXXXMIQVTINSHHVRSPQXKV

SEQ ID NO: 13492 - protein, 39 aa, Artificial Sequence
  Non-cyclic GFR-binding peptide
  MOD_RES (1), (3), (37): Xaa is C or S
  MOD_RES (15), (16), (17), (18), (19): Xaa is A or G
  MOD_RES (20), (21), (22), (23): Xaa is A or G or is absent
XEXQSHEELSMEGIXXXXXXXXXMIQMTINSQGTPVXEL

SEQ ID NO: 13493 - protein, 37 aa, Artificial Sequence
  Non-cyclic GFR-binding peptide
  MOD_RES (2), (36): Xaa is C or S
  MOD_RES (14), (15), (16), (17), (18): Xaa is A or G
  MOD_RES (19), (20), (21), (22): Xaa is A or G or is absent
EXKNHQLFVQVEKXXXXXXXXXVKAMKVSREETPVXE

SEQ ID NO: 13494 - protein, 35 aa, Artificial Sequence
  Non-cyclic GFR-binding peptide
  MOD_RES (33), (33): Xaa is C or S
SHEELSMEGIHQGQHPKIRMIQMTINSQGTPVXEL

SEQ ID NO: 13495 - protein, 37 aa, Artificial Sequence
  Non-cyclic GFR-binding peptide
  MOD_RES (1), (3), (37): Xaa is C or S
XEXKNHQLFSMEGLHQGQHPKIRMIQMTINSEETPVX

SEQ ID NO: 13496 - protein, 39 aa, Artificial Sequence
  Non-cyclic GFR-binding peptide
  MOD_RES (33), (33): Xaa is C or S
  MOD_RES (11), (12), (13), (14), (15): Xaa is A or G
  MOD_RES (16), (17), (18), (19): Xaa is A or G or is absent
SHEELVQVEKXXXXXXXXXVKAMKVSRQGTPVXELGEDN

SEQ ID NO: 13497 - protein, 40 aa, Artificial Sequence
  Non-cyclic GFR-binding peptide
  MOD_RES (34), (34): Xaa is C or S
  MOD_RES (12), (13), (14), (15), (16): Xaa is A or G
  MOD_RES (17), (18), (19), (20): Xaa is A or G or is absent
KNHQLFVQVEKXXXXXXXXXVKAMKVSREETPVXELGEDN

SEQ ID NO: 13498 - protein, 34 aa, Artificial Sequence
  Non-cyclic GFR-binding peptide
LHDELTSMEGIFIPKKRVIEMIQVTINSLQVQTP

SEQ ID NO: 13499 - protein, 37 aa, Artificial Sequence
  Non-cyclic GFR-binding peptide
  MOD_RES (1), (35): Xaa is C or S
  MOD_RES (13), (14), (15), (16), (17): Xaa is A or G
  MOD_RES (18), (19), (20), (21): Xaa is A or G or is absent
XQSHEELSMEGIXXXXXXXXXMIQMTINSQGTPVXEL

SEQ ID NO: 13500 - protein, 40 aa, Artificial Sequence
  Non-cyclic GFR-binding peptide
  MOD_RES (37), (37): Xaa is C or S
ELHEELRVTAKKLKPKKRVYEIKRVQVPRHHVRSPQXKVS

SEQ ID NO: 13501 - protein, 34 aa, Artificial Sequence
  Non-cyclic GFR-binding peptide
  MOD_RES (34), (34): Xaa is C or S
  MOD_RES (12), (13), (14), (15), (16): Xaa is A or G
  MOD_RES (17), (18), (19), (20): Xaa is A or G or is absent
QSHEELVTAKKXXXXXXXXXIKRMQVPRQGTPVX

SEQ ID NO: 13502 - protein, 39 aa, Artificial Sequence
  Non-cyclic GFR-binding peptide
  MOD_RES (2), (39): Xaa is C or S
  MOD_RES (15), (16), (17), (18), (19): Xaa is A or G
  MOD_RES (20), (21), (22), (23): Xaa is A or G or is absent
KXALHDELTSMEGLXXXXXXXXXMIQVTINSLQVQTPRX

SEQ ID NO: 13503 - protein, 40 aa, Artificial Sequence
  Non-cyclic GFR-binding peptide
  MOD_RES (37), (37): Xaa is C or S
ELHEELRSMEGLLKPKKRVYEMIQVTINSHHVRSPQXKVS

SEQ ID NO: 13504 - protein, 37 aa, Artificial Sequence
  Non-cyclic GFR-binding peptide
  MOD_RES (1), (3): Xaa is C or S
  MOD_RES (16), (17), (18), (19), (20): Xaa is A or G
  MOD_RES (21), (22), (23), (24): Xaa is A or G or is absent
XKXALHDELTSMEGLXXXXXXXXXMIQVTINSLQVQT

SEQ ID NO: 13505 - protein, 35 aa, Artificial Sequence
  Non-cyclic GFR-binding peptide
  MOD_RES (2), (2): Xaa is C or S
EXQSHEELSMEGIHQGQHPKIRMIQMTINSQGTPV

SEQ ID NO: 13506 - protein, 40 aa, Artificial Sequence
  Non-cyclic GFR-binding peptide
  MOD_RES (1), (38): Xaa is C or S
  MOD_RES (14), (15), (16), (17), (18): Xaa is A or G
  MOD_RES (19), (20), (21), (22): Xaa is A or G or is absent
XALHDELTSMEGLXXXXXXXXXMIQVTINSLQVQTPRXQV

SEQ ID NO: 13507 - protein, 34 aa, Artificial Sequence
  Non-cyclic GFR-binding peptide
  MOD_RES (13), (14), (15), (16), (17): Xaa is A or G
  MOD_RES (18), (19), (20), (21): Xaa is A or G or is absent
ELHEELRVTAKKXXXXXXXXXIKRVQVPRHHVRS

SEQ ID NO: 13508 - protein, 39 aa, Artificial Sequence
  Non-cyclic GFR-binding peptide
  MOD_RES (1), (3), (37): Xaa is C or S
  MOD_RES (15), (16), (17), (18), (19): Xaa is A or G
  MOD_RES (20), (21), (22), (23): Xaa is A or G or is absent
XEXKNHQLFVQVEKXXXXXXXXXVKAMKVSREETPVXEL

SEQ ID NO: 13509 - protein, 43 aa, Artificial Sequence
  Non-cyclic GFR-binding peptide
  MOD_RES (2), (4), (41): Xaa is C or S
  MOD_RES (17), (18), (19), (20), (21): Xaa is A or G
  MOD_RES (22), (23), (24), (25): Xaa is A or G or is absent
AXAXELHEELRSMEGLXXXXXXXXXMIQVTINSHHVRSPQXKV

SEQ ID NO: 13510 - protein, 35 aa, Artificial Sequence
  Non-cyclic GFR-binding peptide
  MOD_RES (35), (35): Xaa is C or S
  MOD_RES (11), (12), (13), (14), (15): Xaa is A or G
  MOD_RES (16), (17), (18), (19): Xaa is A or G or is absent
HDELTVQVEKXXXXXXXXXVKAVKVSRLQVQTPRX

SEQ ID NO: 13511 - protein, 38 aa, Artificial Sequence
  Non-cyclic GFR-binding peptide
  MOD_RES (2), (4): Xaa is C or S
AXAXELHEELRSMEGILKPKKRVYEMIQVTINSHHVRS

SEQ ID NO: 13512 - protein, 35 aa, Artificial Sequence
  Non-cyclic GFR-binding peptide
  MOD_RES (34), (34): Xaa is C or S
  MOD_RES (12), (13), (14), (15), (16): Xaa is A or G
  MOD_RES (17), (18), (19), (20): Xaa is A or G or is absent
KNHQLFSMEGLXXXXXXXXXMIQMTINSEETPVXE

SEQ ID NO: 13513 - protein, 37 aa, Artificial Sequence
  Non-cyclic GFR-binding peptide
  MOD_RES (1), (3), (37): Xaa is C or S
  MOD_RES (15), (16), (17), (18), (19): Xaa is A or G
  MOD_RES (20), (21), (22), (23): Xaa is A or G or is absent
XEXQSHEELVQVEKXXXXXXXXXVKAMKVSRQGTPVX

SEQ ID NO: 13514 - protein, 42 aa, Artificial Sequence
  Non-cyclic GFR-binding peptide
  MOD_RES (2), (4), (38): Xaa is C or S
RXEXQSHEELVTAKKHQGQHPKIRIKRMQVPRQGTPVXELGE

SEQ ID NO: 13515 - protein, 41 aa, Artificial Sequence
  Non-cyclic GFR-binding peptide
  MOD_RES (1), (3), (40): Xaa is C or S
  MOD_RES (16), (17), (18), (19), (20): Xaa is A or G
  MOD_RES (21), (22), (23), (24): Xaa is A or G or is absent
XKXALHDELTVQVEKXXXXXXXXXVKAVKVSRLQVQTPRXQ

SEQ ID NO: 13516 - protein, 38 aa, Artificial Sequence
  Non-cyclic GFR-binding peptide
  MOD_RES (2), (2): Xaa is C or S
  MOD_RES (15), (16), (17), (18), (19): Xaa is A or G
  MOD_RES (20), (21), (22), (23): Xaa is A or G or is absent
AXELHEELRSMEGIXXXXXXXXXMIQVTINSHHVRSPQ

SEQ ID NO: 13517 - protein, 36 aa, Artificial Sequence
  Non-cyclic GFR-binding peptide
  MOD_RES (35), (35): Xaa is C or S
  MOD_RES (11), (12), (13), (14), (15): Xaa is A or G
  MOD_RES (16), (17), (18), (19): Xaa is A or G or is absent
HDELTSMEGIXXXXXXXXXMIQVTINSLQVQTPRXQ

SEQ ID NO: 13518 - protein, 33 aa, Artificial Sequence
  Non-cyclic GFR-binding peptide
  MOD_RES (33), (33): Xaa is C or S
NHQLFSMEGLHQGQHPKIRMIQMTINSEETPVX

SEQ ID NO: 13519 - protein, 39 aa, Artificial Sequence
  Non-cyclic GFR-binding peptide
  MOD_RES (36), (36): Xaa is C or S
LHEELRSMEGILKPKKRVYEMIQVTINSHHVRSPQXKVS

SEQ ID NO: 13520 - protein, 39 aa, Artificial Sequence
  Non-cyclic GFR-binding peptide
  MOD_RES (1), (38): Xaa is C or S
  MOD_RES (14), (15), (16), (17), (18): Xaa is A or G
  MOD_RES (19), (20), (21), (22): Xaa is A or G or is absent
XALHDELTSMEGIXXXXXXXXXMIQVTINSLQVQTPRXQ

SEQ ID NO: 13521 - protein, 41 aa, Artificial Sequence
  Non-cyclic GFR-binding peptide
  MOD_RES (2), (4), (38): Xaa is C or S
RXEXQSHEELVTAKKHQGQHPKIRIKRMQVPRQGTPVXELG

SEQ ID NO: 13522 - protein, 33 aa, Artificial Sequence
  Non-cyclic GFR-binding peptide
  MOD_RES (12), (13), (14), (15), (16): Xaa is A or G
  MOD_RES (17), (18), (19), (20): Xaa is A or G or is absent
LHDELTVQVEKXXXXXXXXXVKAVKVSRLQVQT

SEQ ID NO: 13523 - protein, 38 aa, Artificial Sequence
  Non-cyclic GFR-binding peptide
  MOD_RES (33), (33): Xaa is C or S
SHEELVTAKKHQGQHPKIRIKRMQVPRQGTPVXELGED

SEQ ID NO: 13524 - protein, 39 aa, Artificial Sequence
  Non-cyclic GFR-binding peptide
  MOD_RES (1), (38): Xaa is C or S
XALHDELTSMEGIFIPKKRVIEMIQVTINSLQVQTPRXQ

SEQ ID NO: 13525 - protein, 39 aa, Artificial Sequence
  Non-cyclic GFR-binding peptide
  MOD_RES (34), (34): Xaa is C or S
  MOD_RES (12), (13), (14), (15), (16): Xaa is A or G
  MOD_RES (17), (18), (19), (20): Xaa is A or G or is absent
QSHEELVQVEKXXXXXXXXXVKAMKVSRQGTPVXELGED

SEQ ID NO: 13526 - protein, 39 aa, Artificial Sequence
  Non-cyclic GFR-binding peptide
  MOD_RES (36), (36): Xaa is C or S
LHEELRVTAKKLKPKKRVYEIKRVQVPRHHVRSPQXKVS

SEQ ID NO: 13527 - protein, 35 aa, Artificial Sequence
  Non-cyclic GFR-binding peptide
  MOD_RES (2), (2): Xaa is C or S
  MOD_RES (14), (15), (16), (17), (18): Xaa is A or G
  MOD_RES (19), (20), (21), (22): Xaa is A or G or is absent
EXQSHEELSMEGIXXXXXXXXXMIQMTINSQGTPV

SEQ ID NO: 13528 - protein, 40 aa, Artificial Sequence
  Non-cyclic GFR-binding peptide
  MOD_RES (2), (36): Xaa is C or S
  MOD_RES (14), (15), (16), (17), (18): Xaa is A or G
  MOD_RES (19), (20), (21), (22): Xaa is A or G or is absent
EXQSHEELVTAKKXXXXXXXXXIKRMQVPRQGTPVXELGE

SEQ ID NO: 13529 - protein, 42 aa, Artificial Sequence
  Non-cyclic GFR-binding peptide
  MOD_RES (2), (4), (38): Xaa is C or S
RXEXQSHEELVQVEKHQGQHPKIRVKAMKVSRQGTPVXELGE

SEQ ID NO: 13530 - protein, 41 aa, Artificial Sequence
  Non-cyclic GFR-binding peptide
  MOD_RES (1), (3), (37): Xaa is C or S
  MOD_RES (15), (16), (17), (18), (19): Xaa is A or G
  MOD_RES (20), (21), (22), (23): Xaa is A or G or is absent
XEXKNHQLFVTAKKXXXXXXXXXIKRMQVPREETPVXELGE

SEQ ID NO: 13531 - protein, 42 aa, Artificial Sequence
  Non-cyclic GFR-binding peptide
  MOD_RES (2), (39): Xaa is C or S
AXELHEELRSMEGILKPKKRVYEMIQVTINSHHVRSPQXKVS

SEQ ID NO: 13532 - protein, 43 aa, Artificial Sequence
  Non-cyclic GFR-binding peptide
  MOD_RES (1), (3), (37): Xaa is C or S
XEXKNHQLFVQVEKHQGQHPKIRVKAMKVSREETPVXELGEDN

SEQ ID NO: 13533 - protein, 35 aa, Artificial Sequence
  Non-cyclic GFR-binding peptide
  MOD_RES (1), (1): Xaa is C or S
  MOD_RES (14), (15), (16), (17), (18): Xaa is A or G
  MOD_RES (19), (20), (21), (22): Xaa is A or G or is absent
XELHEELRSMEGIXXXXXXXXXMIQVTINSHHVRS

SEQ ID NO: 13534 - protein, 34 aa, Artificial Sequence
  Non-cyclic GFR-binding peptide
LHEELRVTAKKLKPKKRVYEIKRVQVPRHHVRSP

SEQ ID NO: 13535 - protein, 39 aa, Artificial Sequence
  Non-cyclic GFR-binding peptide
  MOD_RES (2), (4), (38): Xaa is C or S
  MOD_RES (16), (17), (18), (19), (20): Xaa is A or G
  MOD_RES (21), (22), (23), (24): Xaa is A or G or is absent
RXEXQSHEELSMEGIXXXXXXXXXMIQMTINSQGTPVXE

SEQ ID NO: 13536 - protein, 38 aa, Artificial Sequence
  Non-cyclic GFR-binding peptide
  MOD_RES (36), (36): Xaa is C or S
LHEELRSMEGLLKPKKRVYEMIQVTINSHHVRSPQXKV

SEQ ID NO: 13537 - protein, 40 aa, Artificial Sequence
  Non-cyclic GFR-binding peptide
  MOD_RES (37), (37): Xaa is C or S
  MOD_RES (13), (14), (15), (16), (17): Xaa is A or G
  MOD_RES (18), (19), (20), (21): Xaa is A or G or is absent
ALHDELTSMEGLXXXXXXXXXMIQVTINSLQVQTPRXQVN

SEQ ID NO: 13538 - protein, 34 aa, Artificial Sequence
  Non-cyclic GFR-binding peptide
LHEELRSMEGILKPKKRVYEMIQVTINSHHVRSP

SEQ ID NO: 13539 - protein, 33 aa, Artificial Sequence
  Non-cyclic GFR-binding peptide
  MOD_RES (12), (13), (14), (15), (16): Xaa is A or G
  MOD_RES (17), (18), (19), (20): Xaa is A or G or is absent
KNHQLFVTAKKXXXXXXXXXIKRMQVPREETPV

SEQ ID NO: 13540 - protein, 39 aa, Artificial Sequence
  Non-cyclic GFR-binding peptide
  MOD_RES (36), (36): Xaa is C or S
  MOD_RES (12), (13), (14), (15), (16): Xaa is A or G
  MOD_RES (17), (18), (19), (20): Xaa is A or G or is absent
LHDELTSMEGLXXXXXXXXXMIQVTINSLQVQTPRXQVN

SEQ ID NO: 13541 - protein, 41 aa, Artificial Sequence
  Non-cyclic GFR-binding peptide
  MOD_RES (2), (4), (38): Xaa is C or S
  MOD_RES (16), (17), (18), (19), (20): Xaa is A or G
  MOD_RES (21), (22), (23), (24): Xaa is A or G or is absent
RXEXQSHEELSMEGIXXXXXXXXXMIQMTINSQGTPVXELG

SEQ ID NO: 13542 - protein, 38 aa, Artificial Sequence
  Non-cyclic GFR-binding peptide
  MOD_RES (35), (35): Xaa is C or S
HDELTSMEGLFIPKKRVIEMIQVTINSLQVQTPRXQVN

SEQ ID NO: 13543 - protein, 35 aa, Artificial Sequence
  Non-cyclic GFR-binding peptide
  MOD_RES (34), (34): Xaa is C or S
QSHEELVQVEKHQGQHPKIRVKAMKVSRQGTPVXE

SEQ ID NO: 13544 - protein, 37 aa, Artificial Sequence
  Non-cyclic GFR-binding peptide
  MOD_RES (35), (35): Xaa is C or S
  MOD_RES (11), (12), (13), (14), (15): Xaa is A or G
  MOD_RES (16), (17), (18), (19): Xaa is A or G or is absent
HDELTSMEGIXXXXXXXXXMIQVTINSLQVQTPRXQV

SEQ ID NO: 13545 - protein, 37 aa, Artificial Sequence
  Non-cyclic GFR-binding peptide
  MOD_RES (36), (36): Xaa is C or S
  MOD_RES (12), (13), (14), (15), (16): Xaa is A or G
  MOD_RES (17), (18), (19), (20): Xaa is A or G or is absent
LHEELRSMEGLXXXXXXXXXMIQVTINSHHVRSPQXK

SEQ ID NO: 13546 - protein, 36 aa, Artificial Sequence
  Non-cyclic GFR-binding peptide
  MOD_RES (1), (35): Xaa is C or S
XQSHEELVTAKKHQGQHPKIRIKRMQVPRQGTPVXE

SEQ ID NO: 13547 - protein, 42 aa, Artificial Sequence
  Non-cyclic GFR-binding peptide
  MOD_RES (1), (3), (37): Xaa is C or S
XEXKNHQLFVQVEKHQGQHPKIRVKAMKVSREETPVXELGED

SEQ ID NO: 13548 - protein, 38 aa, Artificial Sequence
  Non-cyclic GFR-binding peptide
  MOD_RES (2), (36): Xaa is C or S
EXQSHEELVTAKKHQGQHPKIRIKRMQVPRQGTPVXEL

SEQ ID NO: 13549 - protein, 37 aa, Artificial Sequence
  Non-cyclic GFR-binding peptide
  MOD_RES (33), (33): Xaa is C or S
NHQLFVTAKKHQGQHPKIRIKRMQVPREETPVXELGE

SEQ ID NO: 13550 - protein, 35 aa, Artificial Sequence
  Non-cyclic GFR-binding peptide
  MOD_RES (1), (35): Xaa is C or S
  MOD_RES (13), (14), (15), (16), (17): Xaa is A or G
  MOD_RES (18), (19), (20), (21): Xaa is A or G or is absent
XQSHEELVTAKKXXXXXXXXXIKRMQVPRQGTPVX

SEQ ID NO: 13551 - protein, 38 aa, Artificial Sequence
  Non-cyclic GFR-binding peptide
  MOD_RES (33), (33): Xaa is C or S
  MOD_RES (11), (12), (13), (14), (15): Xaa is A or G
  MOD_RES (16), (17), (18), (19): Xaa is A or G or is absent
NHQLFSMEGLXXXXXXXXXMIQMTINSEETPVXELGED

SEQ ID NO: 13552 - protein, 35 aa, Artificial Sequence
  Non-cyclic GFR-binding peptide
  MOD_RES (33), (33): Xaa is C or S
NHQLFVTAKKHQGQHPKIRIKRMQVPREETPVXEL

SEQ ID NO: 13553 - protein, 42 aa, Artificial Sequence
  Non-cyclic GFR-binding peptide
  MOD_RES (2), (36): Xaa is C or S
  MOD_RES (14), (15), (16), (17), (18): Xaa is A or G
  MOD_RES (19), (20), (21), (22): Xaa is A or G or is absent
EXQSHEELSMEGIXXXXXXXXXMIQMTINSQGTPVXELGEDN

SEQ ID NO: 13554 - protein, 42 aa, Artificial Sequence
  Non-cyclic GFR-binding peptide
  MOD_RES (1), (3), (37): Xaa is C or S
  MOD_RES (15), (16), (17), (18), (19): Xaa is A or G
  MOD_RES (20), (21), (22), (23): Xaa is A or G or is absent
XEXQSHEELVTAKKXXXXXXXXXIKRMQVPRQGTPVXELGED

SEQ ID NO: 13555 - protein, 37 aa, Artificial Sequence
  Non-cyclic GFR-binding peptide
  MOD_RES (2), (2): Xaa is C or S
  MOD_RES (15), (16), (17), (18), (19): Xaa is A or G
  MOD_RES (20), (21), (22), (23): Xaa is A or G or is absent
KXALHDELTSMEGIXXXXXXXXXMIQVTINSLQVQTP

SEQ ID NO: 13556 - protein, 33 aa, Artificial Sequence
  Non-cyclic GFR-binding peptide
  MOD_RES (11), (12), (13), (14), (15): Xaa is A or G
  MOD_RES (16), (17), (18), (19): Xaa is A or G or is absent
HEELRSMEGIXXXXXXXXXMIQVTINSHHVRSP

SEQ ID NO: 13557 - protein, 43 aa, Artificial Sequence
  Non-cyclic GFR-binding peptide
  MOD_RES (2), (4), (41): Xaa is C or S
  MOD_RES (17), (18), (19), (20), (21): Xaa is A or G
  MOD_RES (22), (23), (24), (25): Xaa is A or G or is absent
EXKXALHDELTSMEGIXXXXXXXXXMIQVTINSLQVQTPRXQV

SEQ ID NO: 13558 - protein, 40 aa, Artificial Sequence
  Non-cyclic GFR-binding peptide
  MOD_RES (2), (4): Xaa is C or S
EXKXALHDELTVQVEKFIPKKRVIEVKAVKVSRLQVQTPR

SEQ ID NO: 13559 - protein, 37 aa, Artificial Sequence
  Non-cyclic GFR-binding peptide
  MOD_RES (2), (2): Xaa is C or S
KXALHDELTSMEGIFIPKKRVIEMIQVTINSLQVQTP

SEQ ID NO: 13560 - protein, 38 aa, Artificial Sequence
  Non-cyclic GFR-binding peptide
  MOD_RES (37), (37): Xaa is C or S
ELHEELRSMEGLLKPKKRVYEMIQVTINSHHVRSPQXK

SEQ ID NO: 13561 - protein, 38 aa, Artificial Sequence
  Non-cyclic GFR-binding peptide
  MOD_RES (34), (34): Xaa is C or S
  MOD_RES (12), (13), (14), (15), (16): Xaa is A or G
  MOD_RES (17), (18), (19), (20): Xaa is A or G or is absent
KNHQLFVTAKKXXXXXXXXXIKRMQVPREETPVXELGE

SEQ ID NO: 13562 - protein, 33 aa, Artificial Sequence
  Non-cyclic GFR-binding peptide
  MOD_RES (33), (33): Xaa is C or S
SHEELSMEGIHQGQHPKIRMIQMTINSQGTPVX

SEQ ID NO: 13563 - protein, 35 aa, Artificial Sequence
  Non-cyclic GFR-binding peptide
  MOD_RES (2), (2): Xaa is C or S
EXKNHQLFVTAKKHQGQHPKIRIKRMQVPREETPV

SEQ ID NO: 13564 - protein, 41 aa, Artificial Sequence
  Non-cyclic GFR-binding peptide
  MOD_RES (1), (35): Xaa is C or S
  MOD_RES (13), (14), (15), (16), (17): Xaa is A or G
  MOD_RES (18), (19), (20), (21): Xaa is A or G or is absent
XKNHQLFSMEGLXXXXXXXXXMIQMTINSEETPVXELGEDN

SEQ ID NO: 13565 - protein, 39 aa, Artificial Sequence
  Non-cyclic GFR-binding peptide
  MOD_RES (35), (35): Xaa is C or S
HEELRSMEGLLKPKKRVYEMIQVTINSHHVRSPQXKVSS

SEQ ID NO: 13566 - protein, 37 aa, Artificial Sequence
  Non-cyclic GFR-binding peptide
  MOD_RES (2), (2): Xaa is C or S
  MOD_RES (15), (16), (17), (18), (19): Xaa is A or G
  MOD_RES (20), (21), (22), (23): Xaa is A or G or is absent
AXELHEELRSMEGLXXXXXXXXXMIQVTINSHHVRSP

SEQ ID NO: 13567 - protein, 42 aa, Artificial Sequence
  Non-cyclic GFR-binding peptide
  MOD_RES (2), (39): Xaa is C or S
KXALHDELTSMEGLFIPKKRVIEMIQVTINSLQVQTPRXQVN

SEQ ID NO: 13568 - protein, 38 aa, Artificial Sequence
  Non-cyclic GFR-binding peptide
  MOD_RES (34), (34): Xaa is C or S
KNHQLFSMEGLHQGQHPKIRMIQMTINSEETPVXELGE

SEQ ID NO: 13569 - protein, 42 aa, Artificial Sequence
  Non-cyclic GFR-binding peptide
  MOD_RES (2), (39): Xaa is C or S
  MOD_RES (15), (16), (17), (18), (19): Xaa is A or G
  MOD_RES (20), (21), (22), (23): Xaa is A or G or is absent
KXALHDELTSMEGLXXXXXXXXXMIQVTINSLQVQTPRXQVN

SEQ ID NO: 13570 - protein, 41 aa, Artificial Sequence
  Non-cyclic GFR-binding peptide
  MOD_RES (2), (4), (41): Xaa is C or S
  MOD_RES (17), (18), (19), (20), (21): Xaa is A or G
  MOD_RES (22), (23), (24), (25): Xaa is A or G or is absent
EXKXALHDELTSMEGIXXXXXXXXXMIQVTINSLQVQTPRX

SEQ ID NO: 13571 - protein, 39 aa, Artificial Sequence
  Non-cyclic GFR-binding peptide
  MOD_RES (1), (3): Xaa is C or S
XKXALHDELTVQVEKFIPKKRVIEVKAVKVSRLQVQTPR

SEQ ID NO: 13572 - protein, 39 aa, Artificial Sequence
  Non-cyclic GFR-binding peptide
  MOD_RES (37), (37): Xaa is C or S
  MOD_RES (13), (14), (15), (16), (17): Xaa is A or G
  MOD_RES (18), (19), (20), (21): Xaa is A or G or is absent
ALHDELTSMEGIXXXXXXXXXMIQVTINSLQVQTPRXQV

SEQ ID NO: 13573 - protein, 42 aa, Artificial Sequence
  Non-cyclic GFR-binding peptide
  MOD_RES (2), (4), (41): Xaa is C or S
  MOD_RES (17), (18), (19), (20), (21): Xaa is A or G
  MOD_RES (22), (23), (24), (25): Xaa is A or G or is absent
EXKXALHDELTSMEGIXXXXXXXXXMIQVTINSLQVQTPRXQ

SEQ ID NO: 13574 - protein, 38 aa, Artificial Sequence
  Non-cyclic GFR-binding peptide
  MOD_RES (1), (38): Xaa is C or S
XALHDELTSMEGIFIPKKRVIEMIQVTINSLQVQTPRX

SEQ ID NO: 13575 - protein, 40 aa, Artificial Sequence
  Non-cyclic GFR-binding peptide
  MOD_RES (36), (36): Xaa is C or S
  MOD_RES (12), (13), (14), (15), (16): Xaa is A or G
  MOD_RES (17), (18), (19), (20): Xaa is A or G or is absent
LHEELRSMEGLXXXXXXXXXMIQVTINSHHVRSPQXKVSS

SEQ ID NO: 13576 - protein, 42 aa, Artificial Sequence
  Non-cyclic GFR-binding peptide
  MOD_RES (1), (38): Xaa is C or S
  MOD_RES (14), (15), (16), (17), (18): Xaa is A or G
  MOD_RES (19), (20), (21), (22): Xaa is A or G or is absent
XELHEELRSMEGLXXXXXXXXXMIQVTINSHHVRSPQXKVSS

SEQ ID NO: 13577 - protein, 39 aa, Artificial Sequence
  Non-cyclic GFR-binding peptide
  MOD_RES (1), (3), (37): Xaa is C or S
XEXQSHEELVQVEKHQGQHPKIRVKAMKVSRQGTPVXEL

SEQ ID NO: 13578 - protein, 35 aa, Artificial Sequence
  Non-cyclic GFR-binding peptide
  MOD_RES (1), (35): Xaa is C or S
  MOD_RES (13), (14), (15), (16), (17): Xaa is A or G
  MOD_RES (18), (19), (20), (21): Xaa is A or G or is absent
XKNHQLFSMEGLXXXXXXXXXMIQMTINSEETPVX

SEQ ID NO: 13579 - protein, 34 aa, Artificial Sequence
  Non-cyclic GFR-binding peptide
  MOD_RES (34), (34): Xaa is C or S
  MOD_RES (12), (13), (14), (15), (16): Xaa is A or G
  MOD_RES (17), (18), (19), (20): Xaa is A or G or is absent
KNHQLFVQVEKXXXXXXXXXVKAMKVSREETPVX

SEQ ID NO: 13580 - protein, 36 aa, Artificial Sequence
  Non-cyclic GFR-binding peptide
ALHDELTSMEGIFIPKKRVIEMIQVTINSLQVQTPR

SEQ ID NO: 13581 - protein, 41 aa, Artificial Sequence
  Non-cyclic GFR-binding peptide
  MOD_RES (2), (4), (41): Xaa is C or S
  MOD_RES (17), (18), (19), (20), (21): Xaa is A or G
  MOD_RES (22), (23), (24), (25): Xaa is A or G or is absent
AXAXELHEELRSMEGIXXXXXXXXXMIQVTINSHHVRSPQX

SEQ ID NO: 13582 - protein, 35 aa, Artificial Sequence
  Non-cyclic GFR-binding peptide
  MOD_RES (1), (1): Xaa is C or S
XALHDELTVQVEKFIPKKRVIEVKAVKVSRLQVQT

SEQ ID NO: 13583 - protein, 36 aa, Artificial Sequence
  Non-cyclic GFR-binding peptide
  MOD_RES (1), (1): Xaa is C or S
  MOD_RES (14), (15), (16), (17), (18): Xaa is A or G
  MOD_RES (19), (20), (21), (22): Xaa is A or G or is absent
XELHEELRSMEGLXXXXXXXXXMIQVTINSHHVRSP

SEQ ID NO: 13584 - protein, 44 aa, Artificial Sequence
  Non-cyclic GFR-binding peptide
  MOD_RES (1), (3), (40): Xaa is C or S
XAXELHEELRSMEGLLKPKKRVYEMIQVTINSHHVRSPQXKVSS

SEQ ID NO: 13585 - protein, 44 aa, Artificial Sequence
  Non-cyclic GFR-binding peptide
  MOD_RES (2), (4), (38): Xaa is C or S
  MOD_RES (16), (17), (18), (19), (20): Xaa is A or G
  MOD_RES (21), (22), (23), (24): Xaa is A or G or is absent
RXEXKNHQLFVQVEKXXXXXXXXXVKAMKVSREETPVXELGEDN

SEQ ID NO: 13586 - protein, 40 aa, Artificial Sequence
  Non-cyclic GFR-binding peptide
  MOD_RES (2), (4), (38): Xaa is C or S
  MOD_RES (16), (17), (18), (19), (20): Xaa is A or G
  MOD_RES (21), (22), (23), (24): Xaa is A or G or is absent
RXEXKNHQLFVQVEKXXXXXXXXXVKAMKVSREETPVXEL

SEQ ID NO: 13587 - protein, 42 aa, Artificial Sequence
  Non-cyclic GFR-binding peptide
  MOD_RES (2), (36): Xaa is C or S
EXQSHEELVQVEKHQGQHPKIRVKAMKVSRQGTPVXELGEDN

SEQ ID NO: 13588 - protein, 34 aa, Artificial Sequence
  Non-cyclic GFR-binding peptide
HDELTSMEGIFIPKKRVIEMIQVTINSLQVQTPR

SEQ ID NO: 13589 - protein, 36 aa, Artificial Sequence
  Non-cyclic GFR-binding peptide
  MOD_RES (1), (35): Xaa is C or S
XQSHEELVQVEKHQGQHPKIRVKAMKVSRQGTPVXE

SEQ ID NO: 13590 - protein, 39 aa, Artificial Sequence
  Non-cyclic GFR-binding peptide
  MOD_RES (2), (36): Xaa is C or S
EXQSHEELVQVEKHQGQHPKIRVKAMKVSRQGTPVXELG

SEQ ID NO: 13591 - protein, 38 aa, Artificial Sequence
  Non-cyclic GFR-binding peptide
  MOD_RES (1), (35): Xaa is C or S
  MOD_RES (13), (14), (15), (16), (17): Xaa is A or G
  MOD_RES (18), (19), (20), (21): Xaa is A or G or is absent
XQSHEELSMEGIXXXXXXXXXMIQMTINSQGTPVXELG

SEQ ID NO: 13592 - protein, 41 aa, Artificial Sequence
  Non-cyclic GFR-binding peptide
  MOD_RES (1), (38): Xaa is C or S
  MOD_RES (14), (15), (16), (17), (18): Xaa is A or G
  MOD_RES (19), (20), (21), (22): Xaa is A or G or is absent
XELHEELRVTAKKXXXXXXXXXIKRVQVPRHHVRSPQXKVS

SEQ ID NO: 13593 - protein, 43 aa, Artificial Sequence
  Non-cyclic GFR-binding peptide
  MOD_RES (2), (4), (38): Xaa is C or S
RXEXKNHQLFVQVEKHQGQHPKIRVKAMKVSREETPVXELGED

SEQ ID NO: 13594 - protein, 40 aa, Artificial Sequence
  Non-cyclic GFR-binding peptide
  MOD_RES (1), (38): Xaa is C or S
XALHDELTSMEGLFIPKKRVIEMIQVTINSLQVQTPRXQV

SEQ ID NO: 13595 - protein, 33 aa, Artificial Sequence
  Non-cyclic GFR-binding peptide
KNHQLFVTAKKHQGQHPKIRIKRMQVPREETPV

SEQ ID NO: 13596 - protein, 39 aa, Artificial Sequence
  Non-cyclic GFR-binding peptide
  MOD_RES (36), (36): Xaa is C or S
  MOD_RES (12), (13), (14), (15), (16): Xaa is A or G
  MOD_RES (17), (18), (19), (20): Xaa is A or G or is absent
LHDELTVQVEKXXXXXXXXXVKAVKVSRLQVQTPRXQVN

SEQ ID NO: 13597 - protein, 36 aa, Artificial Sequence
  Non-cyclic GFR-binding peptide
  MOD_RES (2), (2): Xaa is C or S
KXALHDELTVQVEKFIPKKRVIEVKAVKVSRLQVQT

SEQ ID NO: 13598 - protein, 38 aa, Artificial Sequence
  Non-cyclic GFR-binding peptide
  MOD_RES (36), (36): Xaa is C or S
  MOD_RES (12), (13), (14), (15), (16): Xaa is A or G
  MOD_RES (17), (18), (19), (20): Xaa is A or G or is absent
LHEELRSMEGIXXXXXXXXXMIQVTINSHHVRSPQXKV

SEQ ID NO: 13599 - protein, 40 aa, Artificial Sequence
  Non-cyclic GFR-binding peptide
  MOD_RES (1), (3), (37): Xaa is C or S
XEXQSHEELVTAKKHQGQHPKIRIKRMQVPRQGTPVXELG

SEQ ID NO: 13600 - protein, 40 aa, Artificial Sequence
  Non-cyclic GFR-binding peptide
  MOD_RES (2), (36): Xaa is C or S
EXQSHEELVQVEKHQGQHPKIRVKAMKVSRQGTPVXELGE

SEQ ID NO: 13601 - protein, 36 aa, Artificial Sequence
  Non-cyclic GFR-binding peptide
  MOD_RES (1), (3): Xaa is C or S
  MOD_RES (15), (16), (17), (18), (19): Xaa is A or G
  MOD_RES (20), (21), (22), (23): Xaa is A or G or is absent
XEXKNHQLFSMEGLXXXXXXXXXMIQMTINSEETPV

SEQ ID NO: 13602 - protein, 36 aa, Artificial Sequence
  Non-cyclic GFR-binding peptide
  MOD_RES (34), (34): Xaa is C or S
  MOD_RES (12), (13), (14), (15), (16): Xaa is A or G
  MOD_RES (17), (18), (19), (20): Xaa is A or G or is absent
KNHQLFSMEGLXXXXXXXXXMIQMTINSEETPVXEL

SEQ ID NO: 13603 - protein, 39 aa, Artificial Sequence
  Non-cyclic GFR-binding peptide
  MOD_RES (33), (33): Xaa is C or S
NHQLFVTAKKHQGQHPKIRIKRMQVPREETPVXELGEDN

SEQ ID NO: 13604 - protein, 41 aa, Artificial Sequence
  Non-cyclic GFR-binding peptide
  MOD_RES (37), (37): Xaa is C or S
ELHEELRSMEGLLKPKKRVYEMIQVTINSHHVRSPQXKVSS

SEQ ID NO: 13605 - protein, 37 aa, Artificial Sequence
  Non-cyclic GFR-binding peptide
  MOD_RES (2), (36): Xaa is C or S
EXKNHQLFSMEGLHQGQHPKIRMIQMTINSEETPVXE

SEQ ID NO: 13606 - protein, 38 aa, Artificial Sequence
  Non-cyclic GFR-binding peptide
  MOD_RES (36), (36): Xaa is C or S
  MOD_RES (12), (13), (14), (15), (16): Xaa is A or G
  MOD_RES (17), (18), (19), (20): Xaa is A or G or is absent
LHEELRVTAKKXXXXXXXXXIKRVQVPRHHVRSPQXKV

SEQ ID NO: 13607 - protein, 39 aa, Artificial Sequence
  Non-cyclic GFR-binding peptide
  MOD_RES (33), (33): Xaa is C or S
NHQLFVQVEKHQGQHPKIRVKAMKVSREETPVXELGEDN

SEQ ID NO: 13608 - protein, 39 aa, Artificial Sequence
  Non-cyclic GFR-binding peptide
  MOD_RES (1), (3): Xaa is C or S
XAXELHEELRSMEGILKPKKRVYEMIQVTINSHHVRSPQ

SEQ ID NO: 13609 - protein, 37 aa, Artificial Sequence
  Non-cyclic GFR-binding peptide
  MOD_RES (37), (37): Xaa is C or S
  MOD_RES (13), (14), (15), (16), (17): Xaa is A or G
  MOD_RES (18), (19), (20), (21): Xaa is A or G or is absent
ELHEELRVTAKKXXXXXXXXXIKRVQVPRHHVRSPQX

SEQ ID NO: 13610 - protein, 38 aa, Artificial Sequence
  Non-cyclic GFR-binding peptide
  MOD_RES (33), (33): Xaa is C or S
SHEELVQVEKHQGQHPKIRVKAMKVSRQGTPVXELGED

SEQ ID NO: 13611 - protein, 40 aa, Artificial Sequence
  Non-cyclic GFR-binding peptide
  MOD_RES (2), (4), (38): Xaa is C or S
  MOD_RES (16), (17), (18), (19), (20): Xaa is A or G
  MOD_RES (21), (22), (23), (24): Xaa is A or G or is absent
RXEXQSHEELSMEGIXXXXXXXXXMIQMTINSQGTPVXEL

SEQ ID NO: 13612 - protein, 33 aa, Artificial Sequence
  Non-cyclic GFR-binding peptide
  MOD_RES (11), (12), (13), (14), (15): Xaa is A or G
  MOD_RES (16), (17), (18), (19): Xaa is A or G or is absent
HEELRVTAKKXXXXXXXXXIKRVQVPRHHVRSP

SEQ ID NO: 13613 - protein, 43 aa, Artificial Sequence
  Non-cyclic GFR-binding peptide
  MOD_RES (1), (3), (40): Xaa is C or S
  MOD_RES (16), (17), (18), (19), (20): Xaa is A or G
  MOD_RES (21), (22), (23), (24): Xaa is A or G or is absent
XAXELHEELRSMEGIXXXXXXXXXMIQVTINSHHVRSPQXKVS

SEQ ID NO: 13614 - protein, 37 aa, Artificial Sequence
  Non-cyclic GFR-binding peptide
  MOD_RES (2), (2): Xaa is C or S
AXELHEELRVTAKKLKPKKRVYEIKRVQVPRHHVRSP

SEQ ID NO: 13615 - protein, 38 aa, Artificial Sequence
  Non-cyclic GFR-binding peptide
  MOD_RES (2), (36): Xaa is C or S
  MOD_RES (14), (15), (16), (17), (18): Xaa is A or G
  MOD_RES (19), (20), (21), (22): Xaa is A or G or is absent
EXKNHQLFVQVEKXXXXXXXXXVKAMKVSREETPVXEL

SEQ ID NO: 13616 - protein, 36 aa, Artificial Sequence
  Non-cyclic GFR-binding peptide
  MOD_RES (13), (14), (15), (16), (17): Xaa is A or G
  MOD_RES (18), (19), (20), (21): Xaa is A or G or is absent
ALHDELTVQVEKXXXXXXXXXVKAVKVSRLQVQTPR

SEQ ID NO: 13617 - protein, 38 aa, Artificial Sequence
  Non-cyclic GFR-binding peptide
  MOD_RES (1), (3), (37): Xaa is C or S
  MOD_RES (15), (16), (17), (18), (19): Xaa is A or G
  MOD_RES (20), (21), (22), (23): Xaa is A or G or is absent
XEXQSHEELVTAKKXXXXXXXXXIKRMQVPRQGTPVXE

SEQ ID NO: 13618 - protein, 36 aa, Artificial Sequence
  Non-cyclic GFR-binding peptide
  MOD_RES (2), (2): Xaa is C or S
  MOD_RES (15), (16), (17), (18), (19): Xaa is A or G
  MOD_RES (20), (21), (22), (23): Xaa is A or G or is absent
KXALHDELTVQVEKXXXXXXXXXVKAVKVSRLQVQT

SEQ ID NO: 13619 - protein, 43 aa, Artificial Sequence
  Non-cyclic GFR-binding peptide
  MOD_RES (2), (4), (41): Xaa is C or S
AXAXELHEELRSMEGILKPKKRVYEMIQVTINSHHVRSPQXKV

SEQ ID NO: 13620 - protein, 37 aa, Artificial Sequence
  Non-cyclic GFR-binding peptide
  MOD_RES (2), (2): Xaa is C or S
AXELHEELRSMEGLLKPKKRVYEMIQVTINSHHVRSP

SEQ ID NO: 13621 - protein, 40 aa, Artificial Sequence
  Non-cyclic GFR-binding peptide
  MOD_RES (1), (38): Xaa is C or S
XELHEELRSMEGILKPKKRVYEMIQVTINSHHVRSPQXKV

SEQ ID NO: 13622 - protein, 38 aa, Artificial Sequence
  Non-cyclic GFR-binding peptide
  MOD_RES (2), (4), (38): Xaa is C or S
  MOD_RES (16), (17), (18), (19), (20): Xaa is A or G
  MOD_RES (21), (22), (23), (24): Xaa is A or G or is absent
RXEXQSHEELSMEGIXXXXXXXXXMIQMTINSQGTPVX

SEQ ID NO: 13623 - protein, 38 aa, Artificial Sequence
  Non-cyclic GFR-binding peptide
  MOD_RES (33), (33): Xaa is C or S
  MOD_RES (11), (12), (13), (14), (15): Xaa is A or G
  MOD_RES (16), (17), (18), (19): Xaa is A or G or is absent
SHEELSMEGIXXXXXXXXXMIQMTINSQGTPVXELGED

SEQ ID NO: 13624 - protein, 40 aa, Artificial Sequence
  Non-cyclic GFR-binding peptide
  MOD_RES (1), (3), (37): Xaa is C or S
  MOD_RES (15), (16), (17), (18), (19): Xaa is A or G
  MOD_RES (20), (21), (22), (23): Xaa is A or G or is absent
XEXKNHQLFVTAKKXXXXXXXXXIKRMQVPREETPVXELG

SEQ ID NO: 13625 - protein, 43 aa, Artificial Sequence
  Non-cyclic GFR-binding peptide
  MOD_RES (2), (4), (38): Xaa is C or S
  MOD_RES (16), (17), (18), (19), (20): Xaa is A or G
  MOD_RES (21), (22), (23), (24): Xaa is A or G or is absent
RXEXKNHQLFVTAKKXXXXXXXXXIKRMQVPREETPVXELGED

SEQ ID NO: 13626 - protein, 35 aa, Artificial Sequence
  Non-cyclic GFR-binding peptide
  MOD_RES (1), (1): Xaa is C or S
  MOD_RES (14), (15), (16), (17), (18): Xaa is A or G
  MOD_RES (19), (20), (21), (22): Xaa is A or G or is absent
XALHDELTSMEGLXXXXXXXXXMIQVTINSLQVQT

SEQ ID NO: 13627 - protein, 39 aa, Artificial Sequence
  Non-cyclic GFR-binding peptide
  MOD_RES (35), (35): Xaa is C or S
HDELTSMEGLFIPKKRVIEMIQVTINSLQVQTPRXQVNR

SEQ ID NO: 13628 - protein, 41 aa, Artificial Sequence
  Non-cyclic GFR-binding peptide
  MOD_RES (2), (36): Xaa is C or S
EXQSHEELSMEGIHQGQHPKIRMIQMTINSQGTPVXELGED

SEQ ID NO: 13629 - protein, 38 aa, Artificial Sequence
  Non-cyclic GFR-binding peptide
  MOD_RES (33), (33): Xaa is C or S
NHQLFSMEGLHQGQHPKIRMIQMTINSEETPVXELGED

SEQ ID NO: 13630 - protein, 40 aa, Artificial Sequence
  Non-cyclic GFR-binding peptide
  MOD_RES (36), (36): Xaa is C or S
  MOD_RES (12), (13), (14), (15), (16): Xaa is A or G
  MOD_RES (17), (18), (19), (20): Xaa is A or G or is absent
LHEELRVTAKKXXXXXXXXXIKRVQVPRHHVRSPQXKVSS

SEQ ID NO: 13631 - protein, 40 aa, Artificial Sequence
  Non-cyclic GFR-binding peptide
  MOD_RES (1), (3), (40): Xaa is C or S
  MOD_RES (16), (17), (18), (19), (20): Xaa is A or G
  MOD_RES (21), (22), (23), (24): Xaa is A or G or is absent
XAXELHEELRSMEGIXXXXXXXXXMIQVTINSHHVRSPQX

SEQ ID NO: 13632 - protein, 35 aa, Artificial Sequence
  Non-cyclic GFR-binding peptide
  MOD_RES (33), (33): Xaa is C or S
NHQLFSMEGLHQGQHPKIRMIQMTINSEETPVXEL

SEQ ID NO: 13633 - protein, 39 aa, Artificial Sequence
  Non-cyclic GFR-binding peptide
  MOD_RES (1), (35): Xaa is C or S
XKNHQLFVTAKKHQGQHPKIRIKRMQVPREETPVXELGE

SEQ ID NO: 13634 - protein, 41 aa, Artificial Sequence
  Non-cyclic GFR-binding peptide
  MOD_RES (1), (3), (37): Xaa is C or S
XEXQSHEELVTAKKHQGQHPKIRIKRMQVPRQGTPVXELGE

SEQ ID NO: 13635 - protein, 37 aa, Artificial Sequence
  Non-cyclic GFR-binding peptide
  MOD_RES (37), (37): Xaa is C or S
ALHDELTSMEGIFIPKKRVIEMIQVTINSLQVQTPRX

SEQ ID NO: 13636 - protein, 42 aa, Artificial Sequence
  Non-cyclic GFR-binding peptide
  MOD_RES (1), (3), (37): Xaa is C or S
XEXKNHQLFSMEGLHQGQHPKIRMIQMTINSEETPVXELGED

SEQ ID NO: 13637 - protein, 38 aa, Artificial Sequence
  Non-cyclic GFR-binding peptide
  MOD_RES (35), (35): Xaa is C or S
HEELRSMEGLLKPKKRVYEMIQVTINSHHVRSPQXKVS

SEQ ID NO: 13638 - protein, 38 aa, Artificial Sequence
  Non-cyclic GFR-binding peptide
  MOD_RES (1), (3): Xaa is C or S
XKXALHDELTVQVEKFIPKKRVIEVKAVKVSRLQVQTP

SEQ ID NO: 13639 - protein, 41 aa, Artificial Sequence
  Non-cyclic GFR-binding peptide
  MOD_RES (2), (39): Xaa is C or S
KXALHDELTSMEGLFIPKKRVIEMIQVTINSLQVQTPRXQV

SEQ ID NO: 13640 - protein, 40 aa, Artificial Sequence
  Non-cyclic GFR-binding peptide
  MOD_RES (2), (4): Xaa is C or S
AXAXELHEELRSMEGILKPKKRVYEMIQVTINSHHVRSPQ

SEQ ID NO: 13641 - protein, 37 aa, Artificial Sequence
  Non-cyclic GFR-binding peptide
  MOD_RES (1), (1): Xaa is C or S
XELHEELRSMEGLLKPKKRVYEMIQVTINSHHVRSPQ

SEQ ID NO: 13642 - protein, 40 aa, Artificial Sequence
  Non-cyclic GFR-binding peptide
  MOD_RES (1), (35): Xaa is C or S
XKNHQLFVTAKKHQGQHPKIRIKRMQVPREETPVXELGED

SEQ ID NO: 13643 - protein, 36 aa, Artificial Sequence
  Non-cyclic GFR-binding peptide
  MOD_RES (36), (36): Xaa is C or S
  MOD_RES (12), (13), (14), (15), (16): Xaa is A or G
  MOD_RES (17), (18), (19), (20): Xaa is A or G or is absent
LHDELTSMEGLXXXXXXXXXMIQVTINSLQVQTPRX

SEQ ID NO: 13644 - protein, 38 aa, Artificial Sequence
  Non-cyclic GFR-binding peptide
  MOD_RES (1), (3), (37): Xaa is C or S
XEXQSHEELVQVEKHQGQHPKIRVKAMKVSRQGTPVXE

SEQ ID NO: 13645 - protein, 32 aa, Artificial Sequence
  Non-cyclic GFR-binding peptide
  MOD_RES (11), (12), (13), (14), (15): Xaa is A or G
  MOD_RES (16), (17), (18), (19): Xaa is A or G or is absent
HDELTSMEGIXXXXXXXXXMIQVTINSLQVQT

SEQ ID NO: 13646 - protein, 41 aa, Artificial Sequence
  Non-cyclic GFR-binding peptide
  MOD_RES (2), (4), (38): Xaa is C or S
RXEXQSHEELSMEGIHQGQHPKIRMIQMTINSQGTPVXELG

SEQ ID NO: 13647 - protein, 42 aa, Artificial Sequence
  Non-cyclic GFR-binding peptide
  MOD_RES (1), (3), (40): Xaa is C or S
XAXELHEELRSMEGILKPKKRVYEMIQVTINSHHVRSPQXKV

SEQ ID NO: 13648 - protein, 39 aa, Artificial Sequence
  Non-cyclic GFR-binding peptide
  MOD_RES (35), (35): Xaa is C or S
  MOD_RES (11), (12), (13), (14), (15): Xaa is A or G
  MOD_RES (16), (17), (18), (19): Xaa is A or G or is absent
HEELRSMEGLXXXXXXXXXMIQVTINSHHVRSPQXKVSS

SEQ ID NO: 13649 - protein, 41 aa, Artificial Sequence
  Non-cyclic GFR-binding peptide
  MOD_RES (37), (37): Xaa is C or S
  MOD_RES (13), (14), (15), (16), (17): Xaa is A or G
  MOD_RES (18), (19), (20), (21): Xaa is A or G or is absent
ELHEELRVTAKKXXXXXXXXXIKRVQVPRHHVRSPQXKVSS

SEQ ID NO: 13650 - protein, 37 aa, Artificial Sequence
  Non-cyclic GFR-binding peptide
  MOD_RES (1), (3), (37): Xaa is C or S
XEXQSHEELVQVEKHQGQHPKIRVKAMKVSRQGTPVX

SEQ ID NO: 13651 - protein, 39 aa, Artificial Sequence
  Non-cyclic GFR-binding peptide
  MOD_RES (36), (36): Xaa is C or S
LHDELTSMEGLFIPKKRVIEMIQVTINSLQVQTPRXQVN

SEQ ID NO: 13652 - protein, 38 aa, Artificial Sequence
  Non-cyclic GFR-binding peptide
  MOD_RES (2), (4): Xaa is C or S
  MOD_RES (17), (18), (19), (20), (21): Xaa is A or G
  MOD_RES (22), (23), (24), (25): Xaa is A or G or is absent
EXKXALHDELTVQVEKXXXXXXXXXVKAVKVSRLQVQT

SEQ ID NO: 13653 - protein, 42 aa, Artificial Sequence
  Non-cyclic GFR-binding peptide
  MOD_RES (2), (4), (41): Xaa is C or S
AXAXELHEELRSMEGLLKPKKRVYEMIQVTINSHHVRSPQXK

SEQ ID NO: 13654 - protein, 44 aa, Artificial Sequence
  Non-cyclic GFR-binding peptide
  MOD_RES (2), (4), (38): Xaa is C or S
  MOD_RES (16), (17), (18), (19), (20): Xaa is A or G
  MOD_RES (21), (22), (23), (24): Xaa is A or G or is absent
RXEXQSHEELSMEGIXXXXXXXXXMIQMTINSQGTPVXELGEDN

SEQ ID NO: 13655 - protein, 42 aa, Artificial Sequence
  Non-cyclic GFR-binding peptide
  MOD_RES (2), (39): Xaa is C or S
  MOD_RES (15), (16), (17), (18), (19): Xaa is A or G
  MOD_RES (20), (21), (22), (23): Xaa is A or G or is absent
AXELHEELRSMEGLXXXXXXXXXMIQVTINSHHVRSPQXKVS

SEQ ID NO: 13656 - protein, 42 aa, Artificial Sequence
  Non-cyclic GFR-binding peptide
  MOD_RES (2), (36): Xaa is C or S
EXKNHQLFVQVEKHQGQHPKIRVKAMKVSREETPVXELGEDN

SEQ ID NO: 13657 - protein, 37 aa, Artificial Sequence
  Non-cyclic GFR-binding peptide
  MOD_RES (1), (1): Xaa is C or S
XALHDELTSMEGLFIPKKRVIEMIQVTINSLQVQTPR

SEQ ID NO: 13658 - protein, 37 aa, Artificial Sequence
  Non-cyclic GFR-binding peptide
  MOD_RES (1), (35): Xaa is C or S
  MOD_RES (13), (14), (15), (16), (17): Xaa is A or G
  MOD_RES (18), (19), (20), (21): Xaa is A or G or is absent
XKNHQLFSMEGLXXXXXXXXXMIQMTINSEETPVXEL

SEQ ID NO: 13659 - protein, 38 aa, Artificial Sequence
  Non-cyclic GFR-binding peptide
  MOD_RES (1), (3): Xaa is C or S
XAXELHEELRVTAKKLKPKKRVYEIKRVQVPRHHVRSP

SEQ ID NO: 13660 - protein, 38 aa, Artificial Sequence
  Non-cyclic GFR-binding peptide
  MOD_RES (33), (33): Xaa is C or S
SHEELSMEGIHQGQHPKIRMIQMTINSQGTPVXELGED

SEQ ID NO: 13661 - protein, 39 aa, Artificial Sequence
  Non-cyclic GFR-binding peptide
  MOD_RES (1), (38): Xaa is C or S
  MOD_RES (14), (15), (16), (17), (18): Xaa is A or G
  MOD_RES (19), (20), (21), (22): Xaa is A or G or is absent
XELHEELRVTAKKXXXXXXXXXIKRVQVPRHHVRSPQXK

SEQ ID NO: 13662 - protein, 40 aa, Artificial Sequence
  Non-cyclic GFR-binding peptide
  MOD_RES (1), (35): Xaa is C or S
XQSHEELVQVEKHQGQHPKIRVKAMKVSRQGTPVXELGED

SEQ ID NO: 13663 - protein, 39 aa, Artificial Sequence
  Non-cyclic GFR-binding peptide
  MOD_RES (1), (35): Xaa is C or S
  MOD_RES (13), (14), (15), (16), (17): Xaa is A or G
  MOD_RES (18), (19), (20), (21): Xaa is A or G or is absent
XKNHQLFVQVEKXXXXXXXXXVKAMKVSREETPVXELGE

SEQ ID NO: 13664 - protein, 42 aa, Artificial Sequence
  Non-cyclic GFR-binding peptide
  MOD_RES (1), (3), (37): Xaa is C or S
  MOD_RES (15), (16), (17), (18), (19): Xaa is A or G
  MOD_RES (20), (21), (22), (23): Xaa is A or G or is absent
XEXQSHEELVQVEKXXXXXXXXXVKAMKVSRQGTPVXELGED

SEQ ID NO: 13665 - protein, 39 aa, Artificial Sequence
  Non-cyclic GFR-binding peptide
  MOD_RES (2), (4): Xaa is C or S
EXKXALHDELTVQVEKFIPKKRVIEVKAVKVSRLQVQTP

SEQ ID NO: 13666 - protein, 39 aa, Artificial Sequence
  Non-cyclic GFR-binding peptide
  MOD_RES (2), (39): Xaa is C or S
AXELHEELRSMEGILKPKKRVYEMIQVTINSHHVRSPQX

SEQ ID NO: 13667 - protein, 37 aa, Artificial Sequence
  Non-cyclic GFR-binding peptide
  MOD_RES (1), (35): Xaa is C or S
XKNHQLFSMEGLHQGQHPKIRMIQMTINSEETPVXEL

SEQ ID NO: 13668 - protein, 43 aa, Artificial Sequence
  Non-cyclic GFR-binding peptide
  MOD_RES (2), (4), (41): Xaa is C or S
EXKXALHDELTSMEGLFIPKKRVIEMIQVTINSLQVQTPRXQV

SEQ ID NO: 13669 - protein, 37 aa, Artificial Sequence
  Non-cyclic GFR-binding peptide
  MOD_RES (1), (1): Xaa is C or S
  MOD_RES (14), (15), (16), (17), (18): Xaa is A or G
  MOD_RES (19), (20), (21), (22): Xaa is A or G or is absent
XALHDELTVQVEKXXXXXXXXXVKAVKVSRLQVQTPR

SEQ ID NO: 13670 - protein, 33 aa, Artificial Sequence
  Non-cyclic GFR-binding peptide
  MOD_RES (12), (13), (14), (15), (16): Xaa is A or G
  MOD_RES (17), (18), (19), (20): Xaa is A or G or is absent
LHEELRSMEGIXXXXXXXXXMIQVTINSHHVRS

SEQ ID NO: 13671 - protein, 37 aa, Artificial Sequence
  Non-cyclic GFR-binding peptide
  MOD_RES (33), (33): Xaa is C or S
  MOD_RES (11), (12), (13), (14), (15): Xaa is A or G
  MOD_RES (16), (17), (18), (19): Xaa is A or G or is absent
SHEELVQVEKXXXXXXXXXVKAMKVSRQGTPVXELGE

SEQ ID NO: 13672 - protein, 39 aa, Artificial Sequence
  Non-cyclic GFR-binding peptide
  MOD_RES (1), (35): Xaa is C or S
XKNHQLFVQVEKHQGQHPKIRVKAMKVSREETPVXELGE

SEQ ID NO: 13673 - protein, 39 aa, Artificial Sequence
  Non-cyclic GFR-binding peptide
  MOD_RES (36), (36): Xaa is C or S
LHEELRSMEGLLKPKKRVYEMIQVTINSHHVRSPQXKVS

SEQ ID NO: 13674 - protein, 39 aa, Artificial Sequence
  Non-cyclic GFR-binding peptide
  MOD_RES (1), (38): Xaa is C or S
  MOD_RES (14), (15), (16), (17), (18): Xaa is A or G
  MOD_RES (19), (20), (21), (22): Xaa is A or G or is absent
XELHEELRSMEGIXXXXXXXXXMIQVTINSHHVRSPQXK

SEQ ID NO: 13675 - protein, 37 aa, Artificial Sequence
  Non-cyclic GFR-binding peptide
  MOD_RES (1), (35): Xaa is C or S
  MOD_RES (13), (14), (15), (16), (17): Xaa is A or G
  MOD_RES (18), (19), (20), (21): Xaa is A or G or is absent
XQSHEELVTAKKXXXXXXXXXIKRMQVPRQGTPVXEL

SEQ ID NO: 13676 - protein, 38 aa, Artificial Sequence
  Non-cyclic GFR-binding peptide
  MOD_RES (1), (3), (37): Xaa is C or S
XEXKNHQLFVQVEKHQGQHPKIRVKAMKVSREETPVXE

SEQ ID NO: 13677 - protein, 38 aa, Artificial Sequence
  Non-cyclic GFR-binding peptide
  MOD_RES (2), (2): Xaa is C or S
KXALHDELTSMEGLFIPKKRVIEMIQVTINSLQVQTPR

SEQ ID NO: 13678 - protein, 39 aa, Artificial Sequence
  Non-cyclic GFR-binding peptide
  MOD_RES (2), (36): Xaa is C or S
EXKNHQLFVQVEKHQGQHPKIRVKAMKVSREETPVXELG

SEQ ID NO: 13679 - protein, 38 aa, Artificial Sequence
  Non-cyclic GFR-binding peptide
  MOD_RES (2), (4): Xaa is C or S
AXAXELHEELRVTAKKLKPKKRVYEIKRVQVPRHHVRS

SEQ ID NO: 13680 - protein, 40 aa, Artificial Sequence
  Non-cyclic GFR-binding peptide
  MOD_RES (1), (38): Xaa is C or S
XELHEELRSMEGLLKPKKRVYEMIQVTINSHHVRSPQXKV

SEQ ID NO: 13681 - protein, 37 aa, Artificial Sequence
  Non-cyclic GFR-binding peptide
  MOD_RES (1), (3), (37): Xaa is C or S
XEXQSHEELSMEGIHQGQHPKIRMIQMTINSQGTPVX

SEQ ID NO: 13682 - protein, 39 aa, Artificial Sequence
  Non-cyclic GFR-binding peptide
  MOD_RES (34), (34): Xaa is C or S
KNHQLFVTAKKHQGQHPKIRIKRMQVPREETPVXELGED

SEQ ID NO: 13683 - protein, 41 aa, Artificial Sequence
  Non-cyclic GFR-binding peptide
  MOD_RES (2), (36): Xaa is C or S
  MOD_RES (14), (15), (16), (17), (18): Xaa is A or G
  MOD_RES (19), (20), (21), (22): Xaa is A or G or is absent
EXQSHEELVTAKKXXXXXXXXXIKRMQVPRQGTPVXELGED

SEQ ID NO: 13684 - protein, 41 aa, Artificial Sequence
  Non-cyclic GFR-binding peptide
  MOD_RES (2), (39): Xaa is C or S
AXELHEELRSMEGLLKPKKRVYEMIQVTINSHHVRSPQXKV

SEQ ID NO: 13685 - protein, 39 aa, Artificial Sequence
  Non-cyclic GFR-binding peptide
  MOD_RES (1), (3), (37): Xaa is C or S
  MOD_RES (15), (16), (17), (18), (19): Xaa is A or G
  MOD_RES (20), (21), (22), (23): Xaa is A or G or is absent
XEXKNHQLFSMEGLXXXXXXXXXMIQMTINSEETPVXEL

SEQ ID NO: 13686 - protein, 42 aa, Artificial Sequence
  Non-cyclic GFR-binding peptide
  MOD_RES (1), (38): Xaa is C or S
  MOD_RES (14), (15), (16), (17), (18): Xaa is A or G
  MOD_RES (19), (20), (21), (22): Xaa is A or G or is absent
XELHEELRSMEGIXXXXXXXXXMIQVTINSHHVRSPQXKVSS

SEQ ID NO: 13687 - protein, 39 aa, Artificial Sequence
  Non-cyclic GFR-binding peptide
  MOD_RES (1), (3): Xaa is C or S
XKXALHDELTSMEGIFIPKKRVIEMIQVTINSLQVQTPR

SEQ ID NO: 13688 - protein, 43 aa, Artificial Sequence
  Non-cyclic GFR-binding peptide
  MOD_RES (1), (3), (40): Xaa is C or S
XKXALHDELTSMEGIFIPKKRVIEMIQVTINSLQVQTPRXQVN

SEQ ID NO: 13689 - protein, 33 aa, Artificial Sequence
  Non-cyclic GFR-binding peptide
QSHEELVQVEKHQGQHPKIRVKAMKVSRQGTPV

SEQ ID NO: 13690 - protein, 39 aa, Artificial Sequence
  Non-cyclic GFR-binding peptide
  MOD_RES (34), (34): Xaa is C or S
  MOD_RES (12), (13), (14), (15), (16): Xaa is A or G
  MOD_RES (17), (18), (19), (20): Xaa is A or G or is absent
KNHQLFSMEGLXXXXXXXXXMIQMTINSEETPVXELGED

SEQ ID NO: 13691 - protein, 44 aa, Artificial Sequence
  Non-cyclic GFR-binding peptide
  MOD_RES (1), (3), (40): Xaa is C or S
XKXALHDELTSMEGIFIPKKRVIEMIQVTINSLQVQTPRXQVNR

SEQ ID NO: 13692 - protein, 44 aa, Artificial Sequence
  Non-cyclic GFR-binding peptide
  MOD_RES (1), (3), (40): Xaa is C or S
XKXALHDELTSMEGLFIPKKRVIEMIQVTINSLQVQTPRXQVNR

SEQ ID NO: 13693 - protein, 38 aa, Artificial Sequence
  Non-cyclic GFR-binding peptide
  MOD_RES (2), (4): Xaa is C or S
EXKXALHDELTSMEGLFIPKKRVIEMIQVTINSLQVQT

SEQ ID NO: 13694 - protein, 38 aa, Artificial Sequence
  Non-cyclic GFR-binding peptide
  MOD_RES (34), (34): Xaa is C or S
  MOD_RES (12), (13), (14), (15), (16): Xaa is A or G
  MOD_RES (17), (18), (19), (20): Xaa is A or G or is absent
QSHEELVTAKKXXXXXXXXXIKRMQVPRQGTPVXELGE

SEQ ID NO: 13695 - protein, 32 aa, Artificial Sequence
  Non-cyclic GFR-binding peptide
  MOD_RES (11), (12), (13), (14), (15): Xaa is A or G
  MOD_RES (16), (17), (18), (19): Xaa is A or G or is absent
SHEELVTAKKXXXXXXXXXIKRMQVPRQGTPV

SEQ ID NO: 13696 - protein, 40 aa, Artificial Sequence
  Non-cyclic GFR-binding peptide
  MOD_RES (1), (35): Xaa is C or S
  MOD_RES (13), (14), (15), (16), (17): Xaa is A or G
  MOD_RES (18), (19), (20), (21): Xaa is A or G or is absent
XKNHQLFVTAKKXXXXXXXXXIKRMQVPREETPVXELGED

SEQ ID NO: 13697 - protein, 33 aa, Artificial Sequence
  Non-cyclic GFR-binding peptide
QSHEELSMEGIHQGQHPKIRMIQMTINSQGTPV

SEQ ID NO: 13698 - protein, 35 aa, Artificial Sequence
  Non-cyclic GFR-binding peptide
  MOD_RES (1), (35): Xaa is C or S
XKNHQLFVTAKKHQGQHPKIRIKRMQVPREETPVX

SEQ ID NO: 13699 - protein, 40 aa, Artificial Sequence
  Non-cyclic GFR-binding peptide
  MOD_RES (1), (35): Xaa is C or S
  MOD_RES (13), (14), (15), (16), (17): Xaa is A or G
  MOD_RES (18), (19), (20), (21): Xaa is A or G or is absent
XQSHEELVQVEKXXXXXXXXXVKAMKVSRQGTPVXELGED

SEQ ID NO: 13700 - protein, 39 aa, Artificial Sequence
  Non-cyclic GFR-binding peptide
  MOD_RES (2), (4): Xaa is C or S
AXAXELHEELRSMEGILKPKKRVYEMIQVTINSHHVRSP

SEQ ID NO: 13701 - protein, 43 aa, Artificial Sequence
  Non-cyclic GFR-binding peptide
  MOD_RES (2), (39): Xaa is C or S
  MOD_RES (15), (16), (17), (18), (19): Xaa is A or G
  MOD_RES (20), (21), (22), (23): Xaa is A or G or is absent
AXELHEELRVTAKKXXXXXXXXXIKRVQVPRHHVRSPQXKVSS

SEQ ID NO: 13702 - protein, 37 aa, Artificial Sequence
  Non-cyclic GFR-binding peptide
  MOD_RES (2), (36): Xaa is C or S
EXQSHEELSMEGIHQGQHPKIRMIQMTINSQGTPVXE

SEQ ID NO: 13703 - protein, 36 aa, Artificial Sequence
  Non-cyclic GFR-binding peptide
  MOD_RES (36), (36): Xaa is C or S
  MOD_RES (12), (13), (14), (15), (16): Xaa is A or G
  MOD_RES (17), (18), (19), (20): Xaa is A or G or is absent
LHEELRSMEGLXXXXXXXXXMIQVTINSHHVRSPQX

SEQ ID NO: 13704 - protein, 33 aa, Artificial Sequence
  Non-cyclic GFR-binding peptide
  MOD_RES (33), (33): Xaa is C or S
  MOD_RES (11), (12), (13), (14), (15): Xaa is A or G
  MOD_RES (16), (17), (18), (19): Xaa is A or G or is absent
NHQLFVTAKKXXXXXXXXXIKRMQVPREETPVX

SEQ ID NO: 13705 - protein, 34 aa, Artificial Sequence
  Non-cyclic GFR-binding peptide
  MOD_RES (34), (34): Xaa is C or S
QSHEELSMEGIHQGQHPKIRMIQMTINSQGTPVX

SEQ ID NO: 13706 - protein, 33 aa, Artificial Sequence
  Non-cyclic GFR-binding peptide
  MOD_RES (11), (12), (13), (14), (15): Xaa is A or G
  MOD_RES (16), (17), (18), (19): Xaa is A or G or is absent
HDELTVQVEKXXXXXXXXXVKAVKVSRLQVQTP

SEQ ID NO: 13707 - protein, 37 aa, Artificial Sequence
  Non-cyclic GFR-binding peptide
  MOD_RES (37), (37): Xaa is C or S
  MOD_RES (13), (14), (15), (16), (17): Xaa is A or G
  MOD_RES (18), (19), (20), (21): Xaa is A or G or is absent
ELHEELRSMEGLXXXXXXXXXMIQVTINSHHVRSPQX

SEQ ID NO: 13708 - protein, 37 aa, Artificial Sequence
  Non-cyclic GFR-binding peptide
  MOD_RES (33), (33): Xaa is C or S
SHEELVTAKKHQGQHPKIRIKRMQVPRQGTPVXELGE

SEQ ID NO: 13709 - protein, 40 aa, Artificial Sequence
  Non-cyclic GFR-binding peptide
  MOD_RES (2), (4), (38): Xaa is C or S
  MOD_RES (16), (17), (18), (19), (20): Xaa is A or G
  MOD_RES (21), (22), (23), (24): Xaa is A or G or is absent
RXEXKNHQLFVTAKKXXXXXXXXXIKRMQVPREETPVXEL

SEQ ID NO: 13710 - protein, 38 aa, Artificial Sequence
  Non-cyclic GFR-binding peptide
  MOD_RES (2), (4): Xaa is C or S
EXKXALHDELTSMEGIFIPKKRVIEMIQVTINSLQVQT

SEQ ID NO: 13711 - protein, 37 aa, Artificial Sequence
  Non-cyclic GFR-binding peptide
  MOD_RES (1), (3): Xaa is C or S
  MOD_RES (16), (17), (18), (19), (20): Xaa is A or G
  MOD_RES (21), (22), (23), (24): Xaa is A or G or is absent
XAXELHEELRSMEGLXXXXXXXXXMIQVTINSHHVRS

SEQ ID NO: 13712 - protein, 45 aa, Artificial Sequence
  Non-cyclic GFR-binding peptide
  MOD_RES (2), (4), (41): Xaa is C or S
  MOD_RES (17), (18), (19), (20), (21): Xaa is A or G
  MOD_RES (22), (23), (24), (25): Xaa is A or G or is absent
AXAXELHEELRSMEGIXXXXXXXXXMIQVTINSHHVRSPQXKVSS

SEQ ID NO: 13713 - protein, 38 aa, Artificial Sequence
  Non-cyclic GFR-binding peptide
  MOD_RES (1), (3), (37): Xaa is C or S
XEXQSHEELSMEGIHQGQHPKIRMIQMTINSQGTPVXE

SEQ ID NO: 13714 - protein, 39 aa, Artificial Sequence
  Non-cyclic GFR-binding peptide
  MOD_RES (37), (37): Xaa is C or S
ELHEELRSMEGILKPKKRVYEMIQVTINSHHVRSPQXKV

SEQ ID NO: 13715 - protein, 45 aa, Artificial Sequence
  Non-cyclic GFR-binding peptide
  MOD_RES (2), (4), (41): Xaa is C or S
  MOD_RES (17), (18), (19), (20), (21): Xaa is A or G
  MOD_RES (22), (23), (24), (25): Xaa is A or G or is absent
AXAXELHEELRSMEGLXXXXXXXXXMIQVTINSHHVRSPQXKVSS

SEQ ID NO: 13716 - protein, 36 aa, Artificial Sequence
  Non-cyclic GFR-binding peptide
  MOD_RES (33), (33): Xaa is C or S
NHQLFVQVEKHQGQHPKIRVKAMKVSREETPVXELG

SEQ ID NO: 13717 - protein, 35 aa, Artificial Sequence
  Non-cyclic GFR-binding peptide
  MOD_RES (2), (2): Xaa is C or S
  MOD_RES (14), (15), (16), (17), (18): Xaa is A or G
  MOD_RES (19), (20), (21), (22): Xaa is A or G or is absent
EXKNHQLFSMEGLXXXXXXXXXMIQMTINSEETPV

SEQ ID NO: 13718 - protein, 37 aa, Artificial Sequence
  Non-cyclic GFR-binding peptide
  MOD_RES (1), (3), (37): Xaa is C or S
XEXKNHQLFVQVEKHQGQHPKIRVKAMKVSREETPVX

SEQ ID NO: 13719 - protein, 34 aa, Artificial Sequence
  Non-cyclic GFR-binding peptide
  MOD_RES (12), (13), (14), (15), (16): Xaa is A or G
  MOD_RES (17), (18), (19), (20): Xaa is A or G or is absent
LHEELRSMEGIXXXXXXXXXMIQVTINSHHVRSP

SEQ ID NO: 13720 - protein, 39 aa, Artificial Sequence
  Non-cyclic GFR-binding peptide
  MOD_RES (33), (33): Xaa is C or S
NHQLFSMEGLHQGQHPKIRMIQMTINSEETPVXELGEDN

SEQ ID NO: 13721 - protein, 36 aa, Artificial Sequence
  Non-cyclic GFR-binding peptide
  MOD_RES (2), (36): Xaa is C or S
EXQSHEELSMEGIHQGQHPKIRMIQMTINSQGTPVX

SEQ ID NO: 13722 - protein, 41 aa, Artificial Sequence
  Non-cyclic GFR-binding peptide
  MOD_RES (1), (35): Xaa is C or S
XKNHQLFSMEGLHQGQHPKIRMIQMTINSEETPVXELGEDN

SEQ ID NO: 13723 - protein, 36 aa, Artificial Sequence
  Non-cyclic GFR-binding peptide
  MOD_RES (33), (33): Xaa is C or S
NHQLFVTAKKHQGQHPKIRIKRMQVPREETPVXELG

SEQ ID NO: 13724 - protein, 41 aa, Artificial Sequence
  Non-cyclic GFR-binding peptide
  MOD_RES (1), (35): Xaa is C or S
  MOD_RES (13), (14), (15), (16), (17): Xaa is A or G
  MOD_RES (18), (19), (20), (21): Xaa is A or G or is absent
XQSHEELSMEGIXXXXXXXXXMIQMTINSQGTPVXELGEDN

SEQ ID NO: 13725 - protein, 35 aa, Artificial Sequence
  Non-cyclic GFR-binding peptide
  MOD_RES (2), (2): Xaa is C or S
  MOD_RES (14), (15), (16), (17), (18): Xaa is A or G
  MOD_RES (19), (20), (21), (22): Xaa is A or G or is absent
EXQSHEELVQVEKXXXXXXXXXVKAMKVSRQGTPV

SEQ ID NO: 13726 - protein, 36 aa, Artificial Sequence
  Non-cyclic GFR-binding peptide
  MOD_RES (33), (33): Xaa is C or S
  MOD_RES (11), (12), (13), (14), (15): Xaa is A or G
  MOD_RES (16), (17), (18), (19): Xaa is A or G or is absent
NHQLFSMEGLXXXXXXXXXMIQMTINSEETPVXELG

SEQ ID NO: 13727 - protein, 42 aa, Artificial Sequence
  Non-cyclic GFR-binding peptide
  MOD_RES (2), (39): Xaa is C or S
  MOD_RES (15), (16), (17), (18), (19): Xaa is A or G
  MOD_RES (20), (21), (22), (23): Xaa is A or G or is absent
AXELHEELRSMEGIXXXXXXXXXMIQVTINSHHVRSPQXKVS

SEQ ID NO: 13728 - protein, 41 aa, Artificial Sequence
  Non-cyclic GFR-binding peptide
  MOD_RES (37), (37): Xaa is C or S
  MOD_RES (13), (14), (15), (16), (17): Xaa is A or G
  MOD_RES (18), (19), (20), (21): Xaa is A or G or is absent
ELHEELRSMEGIXXXXXXXXXMIQVTINSHHVRSPQXKVSS

SEQ ID NO: 13729 - protein, 40 aa, Artificial Sequence
  Non-cyclic GFR-binding peptide
  MOD_RES (2), (39): Xaa is C or S
  MOD_RES (15), (16), (17), (18), (19): Xaa is A or G
  MOD_RES (20), (21), (22), (23): Xaa is A or G or is absent
AXELHEELRSMEGIXXXXXXXXXMIQVTINSHHVRSPQXK

SEQ ID NO: 13730 - protein, 43 aa, Artificial Sequence
  Non-cyclic GFR-binding peptide
  MOD_RES (2), (39): Xaa is C or S
AXELHEELRVTAKKLKPKKRVYEIKRVQVPRHHVRSPQXKVSS

SEQ ID NO: 13731 - protein, 37 aa, Artificial Sequence
  Non-cyclic GFR-binding peptide
  MOD_RES (34), (34): Xaa is C or S
KNHQLFVTAKKHQGQHPKIRIKRMQVPREETPVXELG

SEQ ID NO: 13732 - protein, 37 aa, Artificial Sequence
  Non-cyclic GFR-binding peptide
  MOD_RES (1), (3), (37): Xaa is C or S
XEXQSHEELVTAKKHQGQHPKIRIKRMQVPRQGTPVX

SEQ ID NO: 13733 - protein, 38 aa, Artificial Sequence
  Non-cyclic GFR-binding peptide
  MOD_RES (2), (2): Xaa is C or S
KXALHDELTSMEGIFIPKKRVIEMIQVTINSLQVQTPR

SEQ ID NO: 13734 - protein, 41 aa, Artificial Sequence
  Non-cyclic GFR-binding peptide
  MOD_RES (2), (4), (41): Xaa is C or S
AXAXELHEELRSMEGILKPKKRVYEMIQVTINSHHVRSPQX

SEQ ID NO: 13735 - protein, 39 aa, Artificial Sequence
  Non-cyclic GFR-binding peptide
  MOD_RES (2), (4): Xaa is C or S
AXAXELHEELRSMEGLLKPKKRVYEMIQVTINSHHVRSP

SEQ ID NO: 13736 - protein, 37 aa, Artificial Sequence
  Non-cyclic GFR-binding peptide
  MOD_RES (2), (4): Xaa is C or S
RXEXKNHQLFSMEGLHQGQHPKIRMIQMTINSEETPV

SEQ ID NO: 13737 - protein, 35 aa, Artificial Sequence
  Non-cyclic GFR-binding peptide
  MOD_RES (1), (35): Xaa is C or S
  MOD_RES (13), (14), (15), (16), (17): Xaa is A or G
  MOD_RES (18), (19), (20), (21): Xaa is A or G or is absent
XQSHEELVQVEKXXXXXXXXXVKAMKVSRQGTPVX

SEQ ID NO: 13738 - protein, 44 aa, Artificial Sequence
  Non-cyclic GFR-binding peptide
  MOD_RES (2), (4), (38): Xaa is C or S
RXEXQSHEELVTAKKHQGQHPKIRIKRMQVPRQGTPVXELGEDN

SEQ ID NO: 13739 - protein, 41 aa, Artificial Sequence
  Non-cyclic GFR-binding peptide
  MOD_RES (2), (4), (38): Xaa is C or S
RXEXKNHQLFSMEGLHQGQHPKIRMIQMTINSEETPVXELG

SEQ ID NO: 13740 - protein, 39 aa, Artificial Sequence
  Non-cyclic GFR-binding peptide
  MOD_RES (2), (4), (38): Xaa is C or S
  MOD_RES (16), (17), (18), (19), (20): Xaa is A or G
  MOD_RES (21), (22), (23), (24): Xaa is A or G or is absent
RXEXKNHQLFVTAKKXXXXXXXXXIKRMQVPREETPVXE

SEQ ID NO: 13741 - protein, 41 aa, Artificial Sequence
  Non-cyclic GFR-binding peptide
  MOD_RES (2), (39): Xaa is C or S
  MOD_RES (15), (16), (17), (18), (19): Xaa is A or G
  MOD_RES (20), (21), (22), (23): Xaa is A or G or is absent
AXELHEELRSMEGLXXXXXXXXXMIQVTINSHHVRSPQXKV

SEQ ID NO: 13742 - protein, 35 aa, Artificial Sequence
  Non-cyclic GFR-binding peptide
  MOD_RES (1), (35): Xaa is C or S
XQSHEELVQVEKHQGQHPKIRVKAMKVSRQGTPVX

SEQ ID NO: 13743 - protein, 37 aa, Artificial Sequence
  Non-cyclic GFR-binding peptide
  MOD_RES (1), (1): Xaa is C or S
XELHEELRVTAKKLKPKKRVYEIKRVQVPRHHVRSPQ

SEQ ID NO: 13744 - protein, 44 aa, Artificial Sequence
  Non-cyclic GFR-binding peptide
  MOD_RES (1), (3), (40): Xaa is C or S
  MOD_RES (16), (17), (18), (19), (20): Xaa is A or G
  MOD_RES (21), (22), (23), (24): Xaa is A or G or is absent
XAXELHEELRSMEGLXXXXXXXXXMIQVTINSHHVRSPQXKVSS

SEQ ID NO: 13745 - protein, 40 aa, Artificial Sequence
  Non-cyclic GFR-binding peptide
  MOD_RES (1), (3), (40): Xaa is C or S
XAXELHEELRVTAKKLKPKKRVYEIKRVQVPRHHVRSPQX

SEQ ID NO: 13746 - protein, 37 aa, Artificial Sequence
  Non-cyclic GFR-binding peptide
  MOD_RES (35), (35): Xaa is C or S
  MOD_RES (11), (12), (13), (14), (15): Xaa is A or G
  MOD_RES (16), (17), (18), (19): Xaa is A or G or is absent
HEELRSMEGIXXXXXXXXXMIQVTINSHHVRSPQXKV

SEQ ID NO: 13747 - protein, 36 aa, Artificial Sequence
  Non-cyclic GFR-binding peptide
  MOD_RES (34), (34): Xaa is C or S
  MOD_RES (12), (13), (14), (15), (16): Xaa is A or G
  MOD_RES (17), (18), (19), (20): Xaa is A or G or is absent
KNHQLFVTAKKXXXXXXXXXIKRMQVPREETPVXEL

SEQ ID NO: 13748 - protein, 33 aa, Artificial Sequence
  Non-cyclic GFR-binding peptide
  MOD_RES (33), (33): Xaa is C or S
  MOD_RES (11), (12), (13), (14), (15): Xaa is A or G
  MOD_RES (16), (17), (18), (19): Xaa is A or G or is absent
SHEELVQVEKXXXXXXXXXVKAMKVSRQGTPVX

SEQ ID NO: 13749 - protein, 45 aa, Artificial Sequence
  Non-cyclic GFR-binding peptide
  MOD_RES (2), (4), (41): Xaa is C or S
  MOD_RES (17), (18), (19), (20), (21): Xaa is A or G
  MOD_RES (22), (23), (24), (25): Xaa is A or G or is absent
AXAXELHEELRVTAKKXXXXXXXXXIKRVQVPRHHVRSPQXKVSS

SEQ ID NO: 13750 - protein, 44 aa, Artificial Sequence
  Non-cyclic GFR-binding peptide
  MOD_RES (1), (3), (40): Xaa is C or S
  MOD_RES (16), (17), (18), (19), (20): Xaa is A or G
  MOD_RES (21), (22), (23), (24): Xaa is A or G or is absent
XAXELHEELRSMEGIXXXXXXXXXMIQVTINSHHVRSPQXKVSS

SEQ ID NO: 13751 - protein, 37 aa, Artificial Sequence
  Non-cyclic GFR-binding peptide
  MOD_RES (34), (34): Xaa is C or S
  MOD_RES (12), (13), (14), (15), (16): Xaa is A or G
  MOD_RES (17), (18), (19), (20): Xaa is A or G or is absent
KNHQLFSMEGLXXXXXXXXXMIQMTINSEETPVXELG

SEQ ID NO: 13752 - protein, 37 aa, Artificial Sequence
  Non-cyclic GFR-binding peptide
  MOD_RES (36), (36): Xaa is C or S
  MOD_RES (12), (13), (14), (15), (16): Xaa is A or G
  MOD_RES (17), (18), (19), (20): Xaa is A or G or is absent
LHEELRVTAKKXXXXXXXXXIKRVQVPRHHVRSPQXK

SEQ ID NO: 13753 - protein, 39 aa, Artificial Sequence
  Non-cyclic GFR-binding peptide
  MOD_RES (1), (3): Xaa is C or S
XKXALHDELTSMEGLFIPKKRVIEMIQVTINSLQVQTPR

SEQ ID NO: 13754 - protein, 38 aa, Artificial Sequence
  Non-cyclic GFR-binding peptide
  MOD_RES (35), (35): Xaa is C or S
HDELTVQVEKFIPKKRVIEVKAVKVSRLQVQTPRXQVN

SEQ ID NO: 13755 - protein, 37 aa, Artificial Sequence
  Non-cyclic GFR-binding peptide
  MOD_RES (33), (33): Xaa is C or S
NHQLFSMEGLHQGQHPKIRMIQMTINSEETPVXELGE

SEQ ID NO: 13756 - protein, 40 aa, Artificial Sequence
  Non-cyclic GFR-binding peptide
  MOD_RES (2), (4), (38): Xaa is C or S
RXEXKNHQLFVQVEKHQGQHPKIRVKAMKVSREETPVXEL

SEQ ID NO: 13757 - protein, 38 aa, Artificial Sequence
  Non-cyclic GFR-binding peptide
  MOD_RES (2), (2): Xaa is C or S
  MOD_RES (15), (16), (17), (18), (19): Xaa is A or G
  MOD_RES (20), (21), (22), (23): Xaa is A or G or is absent
KXALHDELTSMEGLXXXXXXXXXMIQVTINSLQVQTPR

SEQ ID NO: 13758 - protein, 35 aa, Artificial Sequence
  Non-cyclic GFR-binding peptide
  MOD_RES (1), (1): Xaa is C or S
  MOD_RES (14), (15), (16), (17), (18): Xaa is A or G
  MOD_RES (19), (20), (21), (22): Xaa is A or G or is absent
XALHDELTSMEGIXXXXXXXXXMIQVTINSLQVQT

SEQ ID NO: 13759 - protein, 36 aa, Artificial Sequence
  Non-cyclic GFR-binding peptide
  MOD_RES (1), (1): Xaa is C or S
XALHDELTVQVEKFIPKKRVIEVKAVKVSRLQVQTP

SEQ ID NO: 13760 - protein, 40 aa, Artificial Sequence
  Non-cyclic GFR-binding peptide
  MOD_RES (2), (36): Xaa is C or S
  MOD_RES (14), (15), (16), (17), (18): Xaa is A or G
  MOD_RES (19), (20), (21), (22): Xaa is A or G or is absent
EXKNHQLFVQVEKXXXXXXXXXVKAMKVSREETPVXELGE

SEQ ID NO: 13761 - protein, 39 aa, Artificial Sequence
  Non-cyclic GFR-binding peptide
  MOD_RES (2), (4): Xaa is C or S
AXAXELHEELRVTAKKLKPKKRVYEIKRVQVPRHHVRSP

SEQ ID NO: 13762 - protein, 41 aa, Artificial Sequence
  Non-cyclic GFR-binding peptide
  MOD_RES (37), (37): Xaa is C or S
ALHDELTSMEGLFIPKKRVIEMIQVTINSLQVQTPRXQVNR

SEQ ID NO: 13763 - protein, 42 aa, Artificial Sequence
  Non-cyclic GFR-binding peptide
  MOD_RES (2), (4), (38): Xaa is C or S
RXEXKNHQLFVQVEKHQGQHPKIRVKAMKVSREETPVXELGE

SEQ ID NO: 13764 - protein, 39 aa, Artificial Sequence
  Non-cyclic GFR-binding peptide
  MOD_RES (1), (38): Xaa is C or S
XALHDELTVQVEKFIPKKRVIEVKAVKVSRLQVQTPRXQ

SEQ ID NO: 13765 - protein, 36 aa, Artificial Sequence
  Non-cyclic GFR-binding peptide
  MOD_RES (2), (2): Xaa is C or S
  MOD_RES (15), (16), (17), (18), (19): Xaa is A or G
  MOD_RES (20), (21), (22), (23): Xaa is A or G or is absent
KXALHDELTSMEGLXXXXXXXXXMIQVTINSLQVQT

SEQ ID NO: 13766 - protein, 36 aa, Artificial Sequence
  Non-cyclic GFR-binding peptide
  MOD_RES (2), (2): Xaa is C or S
KXALHDELTSMEGIFIPKKRVIEMIQVTINSLQVQT

SEQ ID NO: 13767 - protein, 32 aa, Artificial Sequence
  Non-cyclic GFR-binding peptide
  MOD_RES (11), (12), (13), (14), (15): Xaa is A or G
  MOD_RES (16), (17), (18), (19): Xaa is A or G or is absent
HDELTSMEGLXXXXXXXXXMIQVTINSLQVQT

SEQ ID NO: 13768 - protein, 39 aa, Artificial Sequence
  Non-cyclic GFR-binding peptide
  MOD_RES (2), (39): Xaa is C or S
  MOD_RES (15), (16), (17), (18), (19): Xaa is A or G
  MOD_RES (20), (21), (22), (23): Xaa is A or G or is absent
AXELHEELRSMEGIXXXXXXXXXMIQVTINSHHVRSPQX

SEQ ID NO: 13769 - protein, 43 aa, Artificial Sequence
  Non-cyclic GFR-binding peptide
  MOD_RES (1), (3), (37): Xaa is C or S
XEXKNHQLFVTAKKHQGQHPKIRIKRMQVPREETPVXELGEDN

SEQ ID NO: 13770 - protein, 38 aa, Artificial Sequence
  Non-cyclic GFR-binding peptide
  MOD_RES (35), (35): Xaa is C or S
HEELRSMEGILKPKKRVYEMIQVTINSHHVRSPQXKVS

SEQ ID NO: 13771 - protein, 40 aa, Artificial Sequence
  Non-cyclic GFR-binding peptide
  MOD_RES (36), (36): Xaa is C or S
  MOD_RES (12), (13), (14), (15), (16): Xaa is A or G
  MOD_RES (17), (18), (19), (20): Xaa is A or G or is absent
LHDELTSMEGLXXXXXXXXXMIQVTINSLQVQTPRXQVNR

SEQ ID NO: 13772 - protein, 32 aa, Artificial Sequence
  Non-cyclic GFR-binding peptide
HEELRSMEGILKPKKRVYEMIQVTINSHHVRS

SEQ ID NO: 13773 - protein, 40 aa, Artificial Sequence
  Non-cyclic GFR-binding peptide
  MOD_RES (2), (36): Xaa is C or S
  MOD_RES (14), (15), (16), (17), (18): Xaa is A or G
  MOD_RES (19), (20), (21), (22): Xaa is A or G or is absent
EXQSHEELSMEGIXXXXXXXXXMIQMTINSQGTPVXELGE

SEQ ID NO: 13774 - protein, 39 aa, Artificial Sequence
  Non-cyclic GFR-binding peptide
  MOD_RES (33), (33): Xaa is C or S
SHEELSMEGIHQGQHPKIRMIQMTINSQGTPVXELGEDN

SEQ ID NO: 13775 - protein, 37 aa, Artificial Sequence
  Non-cyclic GFR-binding peptide
  MOD_RES (2), (36): Xaa is C or S
EXQSHEELVTAKKHQGQHPKIRIKRMQVPRQGTPVXE

SEQ ID NO: 13776 - protein, 37 aa, Artificial Sequence
  Non-cyclic GFR-binding peptide
  MOD_RES (36), (36): Xaa is C or S
  MOD_RES (12), (13), (14), (15), (16): Xaa is A or G
  MOD_RES (17), (18), (19), (20): Xaa is A or G or is absent
LHDELTVQVEKXXXXXXXXXVKAVKVSRLQVQTPRXQ

SEQ ID NO: 13777 - protein, 36 aa, Artificial Sequence
  Non-cyclic GFR-binding peptide
  MOD_RES (33), (33): Xaa is C or S
  MOD_RES (11), (12), (13), (14), (15): Xaa is A or G
  MOD_RES (16), (17), (18), (19): Xaa is A or G or is absent
NHQLFVQVEKXXXXXXXXXVKAMKVSREETPVXELG

SEQ ID NO: 13778 - protein, 36 aa, Artificial Sequence
  Non-cyclic GFR-binding peptide
  MOD_RES (1), (1): Xaa is C or S
  MOD_RES (14), (15), (16), (17), (18): Xaa is A or G
  MOD_RES (19), (20), (21), (22): Xaa is A or G or is absent
XELHEELRSMEGIXXXXXXXXXMIQVTINSHHVRSP

SEQ ID NO: 13779 - protein, 41 aa, Artificial Sequence
  Non-cyclic GFR-binding peptide
  MOD_RES (1), (3), (40): Xaa is C or S
XKXALHDELTVQVEKFIPKKRVIEVKAVKVSRLQVQTPRXQ

SEQ ID NO: 13780 - protein, 39 aa, Artificial Sequence
  Non-cyclic GFR-binding peptide
  MOD_RES (1), (38): Xaa is C or S
  MOD_RES (14), (15), (16), (17), (18): Xaa is A or G
  MOD_RES (19), (20), (21), (22): Xaa is A or G or is absent
XALHDELTSMEGLXXXXXXXXXMIQVTINSLQVQTPRXQ

SEQ ID NO: 13781 - protein, 38 aa, Artificial Sequence
  Non-cyclic GFR-binding peptide
  MOD_RES (2), (36): Xaa is C or S
  MOD_RES (14), (15), (16), (17), (18): Xaa is A or G
  MOD_RES (19), (20), (21), (22): Xaa is A or G or is absent
EXKNHQLFSMEGLXXXXXXXXXMIQMTINSEETPVXEL

SEQ ID NO: 13782 - protein, 41 aa, Artificial Sequence
  Non-cyclic GFR-binding peptide
  MOD_RES (1), (35): Xaa is C or S
XQSHEELSMEGIHQGQHPKIRMIQMTINSQGTPVXELGEDN

SEQ ID NO: 13783 - protein, 38 aa, Artificial Sequence
  Non-cyclic GFR-binding peptide
  MOD_RES (2), (4): Xaa is C or S
EXKXALHDELTVQVEKFIPKKRVIEVKAVKVSRLQVQT

SEQ ID NO: 13784 - protein, 41 aa, Artificial Sequence
  Non-cyclic GFR-binding peptide
  MOD_RES (2), (36): Xaa is C or S
  MOD_RES (14), (15), (16), (17), (18): Xaa is A or G
  MOD_RES (19), (20), (21), (22): Xaa is A or G or is absent
EXQSHEELSMEGIXXXXXXXXXMIQMTINSQGTPVXELGED

SEQ ID NO: 13785 - protein, 39 aa, Artificial Sequence
  Non-cyclic GFR-binding peptide
  MOD_RES (1), (35): Xaa is C or S
  MOD_RES (13), (14), (15), (16), (17): Xaa is A or G
  MOD_RES (18), (19), (20), (21): Xaa is A or G or is absent
XQSHEELSMEGIXXXXXXXXXMIQMTINSQGTPVXELGE

SEQ ID NO: 13786 - protein, 37 aa, Artificial Sequence
  Non-cyclic GFR-binding peptide
  MOD_RES (35), (35): Xaa is C or S
  MOD_RES (11), (12), (13), (14), (15): Xaa is A or G
  MOD_RES (16), (17), (18), (19): Xaa is A or G or is absent
HEELRSMEGLXXXXXXXXXMIQVTINSHHVRSPQXKV

SEQ ID NO: 13787 - protein, 43 aa, Artificial Sequence
  Non-cyclic GFR-binding peptide
  MOD_RES (2), (39): Xaa is C or S
  MOD_RES (15), (16), (17), (18), (19): Xaa is A or G
  MOD_RES (20), (21), (22), (23): Xaa is A or G or is absent
KXALHDELTVQVEKXXXXXXXXXVKAVKVSRLQVQTPRXQVNR

SEQ ID NO: 13788 - protein, 37 aa, Artificial Sequence
  Non-cyclic GFR-binding peptide
  MOD_RES (1), (3): Xaa is C or S
XKXALHDELTSMEGIFIPKKRVIEMIQVTINSLQVQT

SEQ ID NO: 13789 - protein, 37 aa, Artificial Sequence
  Non-cyclic GFR-binding peptide
  MOD_RES (33), (33): Xaa is C or S
SHEELSMEGIHQGQHPKIRMIQMTINSQGTPVXELGE

SEQ ID NO: 13790 - protein, 34 aa, Artificial Sequence
  Non-cyclic GFR-binding peptide
  MOD_RES (13), (14), (15), (16), (17): Xaa is A or G
  MOD_RES (18), (19), (20), (21): Xaa is A or G or is absent
ALHDELTSMEGLXXXXXXXXXMIQVTINSLQVQT

SEQ ID NO: 13791 - protein, 41 aa, Artificial Sequence
  Non-cyclic GFR-binding peptide
  MOD_RES (1), (35): Xaa is C or S
XQSHEELVTAKKHQGQHPKIRIKRMQVPRQGTPVXELGEDN

SEQ ID NO: 13792 - protein, 43 aa, Artificial Sequence
  Non-cyclic GFR-binding peptide
  MOD_RES (2), (4), (38): Xaa is C or S
RXEXKNHQLFSMEGLHQGQHPKIRMIQMTINSEETPVXELGED

SEQ ID NO: 13793 - protein, 36 aa, Artificial Sequence
  Non-cyclic GFR-binding peptide
  MOD_RES (2), (2): Xaa is C or S
KXALHDELTSMEGLFIPKKRVIEMIQVTINSLQVQT

SEQ ID NO: 13794 - protein, 36 aa, Artificial Sequence
  Non-cyclic GFR-binding peptide
  MOD_RES (34), (34): Xaa is C or S
KNHQLFVQVEKHQGQHPKIRVKAMKVSREETPVXEL

SEQ ID NO: 13795 - protein, 33 aa, Artificial Sequence
  Non-cyclic GFR-binding peptide
  MOD_RES (33), (33): Xaa is C or S
SHEELVQVEKHQGQHPKIRVKAMKVSRQGTPVX

SEQ ID NO: 13796 - protein, 39 aa, Artificial Sequence
  Non-cyclic GFR-binding peptide
  MOD_RES (36), (36): Xaa is C or S
  MOD_RES (12), (13), (14), (15), (16): Xaa is A or G
  MOD_RES (17), (18), (19), (20): Xaa is A or G or is absent
LHEELRSMEGLXXXXXXXXXMIQVTINSHHVRSPQXKVS

SEQ ID NO: 13797 - protein, 39 aa, Artificial Sequence
  Non-cyclic GFR-binding peptide
  MOD_RES (1), (3): Xaa is C or S
  MOD_RES (16), (17), (18), (19), (20): Xaa is A or G
  MOD_RES (21), (22), (23), (24): Xaa is A or G or is absent
XAXELHEELRSMEGIXXXXXXXXXMIQVTINSHHVRSPQ

SEQ ID NO: 13798 - protein, 32 aa, Artificial Sequence
  Non-cyclic GFR-binding peptide
HDELTSMEGLFIPKKRVIEMIQVTINSLQVQT

SEQ ID NO: 13799 - protein, 41 aa, Artificial Sequence
  Non-cyclic GFR-binding peptide
  MOD_RES (1), (3), (40): Xaa is C or S
  MOD_RES (16), (17), (18), (19), (20): Xaa is A or G
  MOD_RES (21), (22), (23), (24): Xaa is A or G or is absent
XAXELHEELRSMEGIXXXXXXXXXMIQVTINSHHVRSPQXK

SEQ ID NO: 13800 - protein, 35 aa, Artificial Sequence
  Non-cyclic GFR-binding peptide
  MOD_RES (13), (14), (15), (16), (17): Xaa is A or G
  MOD_RES (18), (19), (20), (21): Xaa is A or G or is absent
ALHDELTSMEGLXXXXXXXXXMIQVTINSLQVQTP

SEQ ID NO: 13801 - protein, 38 aa, Artificial Sequence
  Non-cyclic GFR-binding peptide
  MOD_RES (37), (37): Xaa is C or S
ELHEELRSMEGILKPKKRVYEMIQVTINSHHVRSPQXK

SEQ ID NO: 13802 - protein, 39 aa, Artificial Sequence
  Non-cyclic GFR-binding peptide
  MOD_RES (2), (36): Xaa is C or S
  MOD_RES (14), (15), (16), (17), (18): Xaa is A or G
  MOD_RES (19), (20), (21), (22): Xaa is A or G or is absent
EXQSHEELSMEGIXXXXXXXXXMIQMTINSQGTPVXELG

SEQ ID NO: 13803 - protein, 39 aa, Artificial Sequence
  Non-cyclic GFR-binding peptide
  MOD_RES (1), (35): Xaa is C or S
XQSHEELSMEGIHQGQHPKIRMIQMTINSQGTPVXELGE

SEQ ID NO: 13804 - protein, 33 aa, Artificial Sequence
  Non-cyclic GFR-binding peptide
  MOD_RES (33), (33): Xaa is C or S
SHEELVTAKKHQGQHPKIRIKRMQVPRQGTPVX

SEQ ID NO: 13805 - protein, 41 aa, Artificial Sequence
  Non-cyclic GFR-binding peptide
  MOD_RES (1), (35): Xaa is C or S
  MOD_RES (13), (14), (15), (16), (17): Xaa is A or G
  MOD_RES (18), (19), (20), (21): Xaa is A or G or is absent
XQSHEELVTAKKXXXXXXXXXIKRMQVPRQGTPVXELGEDN

SEQ ID NO: 13806 - protein, 43 aa, Artificial Sequence
  Non-cyclic GFR-binding peptide
  MOD_RES (2), (4), (41): Xaa is C or S
  MOD_RES (17), (18), (19), (20), (21): Xaa is A or G
  MOD_RES (22), (23), (24), (25): Xaa is A or G or is absent
EXKXALHDELTVQVEKXXXXXXXXXVKAVKVSRLQVQTPRXQV

SEQ ID NO: 13807 - protein, 42 aa, Artificial Sequence
  Non-cyclic GFR-binding peptide
  MOD_RES (2), (4), (38): Xaa is C or S
  MOD_RES (16), (17), (18), (19), (20): Xaa is A or G
  MOD_RES (21), (22), (23), (24): Xaa is A or G or is absent
RXEXKNHQLFVTAKKXXXXXXXXXIKRMQVPREETPVXELGE

SEQ ID NO: 13808 - protein, 39 aa, Artificial Sequence
  Non-cyclic GFR-binding peptide
  MOD_RES (35), (35): Xaa is C or S
  MOD_RES (11), (12), (13), (14), (15): Xaa is A or G
  MOD_RES (16), (17), (18), (19): Xaa is A or G or is absent
HEELRSMEGIXXXXXXXXXMIQVTINSHHVRSPQXKVSS

SEQ ID NO: 13809 - protein, 37 aa, Artificial Sequence
  Non-cyclic GFR-binding peptide
  MOD_RES (1), (3): Xaa is C or S
XKXALHDELTSMEGLFIPKKRVIEMIQVTINSLQVQT

SEQ ID NO: 13810 - protein, 35 aa, Artificial Sequence
  Non-cyclic GFR-binding peptide
  MOD_RES (2), (2): Xaa is C or S
EXQSHEELVTAKKHQGQHPKIRIKRMQVPRQGTPV

SEQ ID NO: 13811 - protein, 44 aa, Artificial Sequence
  Non-cyclic GFR-binding peptide
  MOD_RES (2), (4), (38): Xaa is C or S
RXEXQSHEELSMEGIHQGQHPKIRMIQMTINSQGTPVXELGEDN

SEQ ID NO: 13812 - protein, 35 aa, Artificial Sequence
  Non-cyclic GFR-binding peptide
  MOD_RES (35), (35): Xaa is C or S
  MOD_RES (11), (12), (13), (14), (15): Xaa is A or G
  MOD_RES (16), (17), (18), (19): Xaa is A or G or is absent
HDELTSMEGLXXXXXXXXXMIQVTINSLQVQTPRX

SEQ ID NO: 13813 - protein, 42 aa, Artificial Sequence
  Non-cyclic GFR-binding peptide
  MOD_RES (2), (4), (38): Xaa is C or S
  MOD_RES (16), (17), (18), (19), (20): Xaa is A or G
  MOD_RES (21), (22), (23), (24): Xaa is A or G or is absent
RXEXKNHQLFVQVEKXXXXXXXXXVKAMKVSREETPVXELGE

SEQ ID NO: 13814 - protein, 35 aa, Artificial Sequence
  Non-cyclic GFR-binding peptide
  MOD_RES (35), (35): Xaa is C or S
  MOD_RES (11), (12), (13), (14), (15): Xaa is A or G
  MOD_RES (16), (17), (18), (19): Xaa is A or G or is absent
HDELTSMEGIXXXXXXXXXMIQVTINSLQVQTPRX

SEQ ID NO: 13815 - protein, 32 aa, Artificial Sequence
  Non-cyclic GFR-binding peptide
NHQLFVQVEKHQGQHPKIRVKAMKVSREETPV

SEQ ID NO: 13816 - protein, 38 aa, Artificial Sequence
  Non-cyclic GFR-binding peptide
  MOD_RES (1), (35): Xaa is C or S
  MOD_RES (13), (14), (15), (16), (17): Xaa is A or G
  MOD_RES (18), (19), (20), (21): Xaa is A or G or is absent
XQSHEELVQVEKXXXXXXXXXVKAMKVSRQGTPVXELG

SEQ ID NO: 13817 - protein, 38 aa, Artificial Sequence
  Non-cyclic GFR-binding peptide
  MOD_RES (1), (3), (37): Xaa is C or S
XEXKNHQLFSMEGLHQGQHPKIRMIQMTINSEETPVXE

SEQ ID NO: 13818 - protein, 41 aa, Artificial Sequence
  Non-cyclic GFR-binding peptide
  MOD_RES (2), (4), (41): Xaa is C or S
EXKXALHDELTVQVEKFIPKKRVIEVKAVKVSRLQVQTPRX

SEQ ID NO: 13819 - protein, 42 aa, Artificial Sequence
  Non-cyclic GFR-binding peptide
  MOD_RES (1), (3), (37): Xaa is C or S
XEXQSHEELVQVEKHQGQHPKIRVKAMKVSRQGTPVXELGED

SEQ ID NO: 13820 - protein, 33 aa, Artificial Sequence
  Non-cyclic GFR-binding peptide
LHEELRVTAKKLKPKKRVYEIKRVQVPRHHVRS

SEQ ID NO: 13821 - protein, 42 aa, Artificial Sequence
  Non-cyclic GFR-binding peptide
  MOD_RES (2), (4), (41): Xaa is C or S
AXAXELHEELRVTAKKLKPKKRVYEIKRVQVPRHHVRSPQXK

SEQ ID NO: 13822 - protein, 45 aa, Artificial Sequence
  Non-cyclic GFR-binding peptide
  MOD_RES (2), (4), (41): Xaa is C or S
  MOD_RES (17), (18), (19), (20), (21): Xaa is A or G
  MOD_RES (22), (23), (24), (25): Xaa is A or G or is absent
EXKXALHDELTSMEGLXXXXXXXXXMIQVTINSLQVQTPRXQVNR

SEQ ID NO: 13823 - protein, 32 aa, Artificial Sequence
  Non-cyclic GFR-binding peptide
HEELRSMEGLLKPKKRVYEMIQVTINSHHVRS

SEQ ID NO: 13824 - protein, 39 aa, Artificial Sequence
  Non-cyclic GFR-binding peptide
  MOD_RES (34), (34): Xaa is C or S
KNHQLFVQVEKHQGQHPKIRVKAMKVSREETPVXELGED

SEQ ID NO: 13825 - protein, 32 aa, Artificial Sequence
  Non-cyclic GFR-binding peptide
HDELTSMEGIFIPKKRVIEMIQVTINSLQVQT

SEQ ID NO: 13826 - protein, 37 aa, Artificial Sequence
  Non-cyclic GFR-binding peptide
  MOD_RES (37), (37): Xaa is C or S
  MOD_RES (13), (14), (15), (16), (17): Xaa is A or G
  MOD_RES (18), (19), (20), (21): Xaa is A or G or is absent
ALHDELTSMEGIXXXXXXXXXMIQVTINSLQVQTPRX

SEQ ID NO: 13827 - protein, 35 aa, Artificial Sequence
  Non-cyclic GFR-binding peptide
LHDELTSMEGLFIPKKRVIEMIQVTINSLQVQTPR

SEQ ID NO: 13828 - protein, 37 aa, Artificial Sequence
  Non-cyclic GFR-binding peptide
  MOD_RES (2), (4): Xaa is C or S
  MOD_RES (16), (17), (18), (19), (20): Xaa is A or G
  MOD_RES (21), (22), (23), (24): Xaa is A or G or is absent
RXEXQSHEELVQVEKXXXXXXXXXVKAMKVSRQGTPV

SEQ ID NO: 13829 - protein, 41 aa, Artificial Sequence
  Non-cyclic GFR-binding peptide
  MOD_RES (2), (4), (41): Xaa is C or S
  MOD_RES (17), (18), (19), (20), (21): Xaa is A or G
  MOD_RES (22), (23), (24), (25): Xaa is A or G or is absent
AXAXELHEELRSMEGLXXXXXXXXXMIQVTINSHHVRSPQX

SEQ ID NO: 13830 - protein, 40 aa, Artificial Sequence
  Non-cyclic GFR-binding peptide
  MOD_RES (2), (39): Xaa is C or S
KXALHDELTSMEGIFIPKKRVIEMIQVTINSLQVQTPRXQ

SEQ ID NO: 13831 - protein, 32 aa, Artificial Sequence
  Non-cyclic GFR-binding peptide
  MOD_RES (11), (12), (13), (14), (15): Xaa is A or G
  MOD_RES (16), (17), (18), (19): Xaa is A or G or is absent
NHQLFSMEGLXXXXXXXXXMIQMTINSEETPV

SEQ ID NO: 13832 - protein, 35 aa, Artificial Sequence
  Non-cyclic GFR-binding peptide
  MOD_RES (13), (14), (15), (16), (17): Xaa is A or G
  MOD_RES (18), (19), (20), (21): Xaa is A or G or is absent
ELHEELRSMEGIXXXXXXXXXMIQVTINSHHVRSP

SEQ ID NO: 13833 - protein, 37 aa, Artificial Sequence
  Non-cyclic GFR-binding peptide
  MOD_RES (2), (4): Xaa is C or S
RXEXQSHEELSMEGIHQGQHPKIRMIQMTINSQGTPV

SEQ ID NO: 13834 - protein, 34 aa, Artificial Sequence
  Non-cyclic GFR-binding peptide
  MOD_RES (34), (34): Xaa is C or S
QSHEELVQVEKHQGQHPKIRVKAMKVSRQGTPVX

SEQ ID NO: 13835 - protein, 38 aa, Artificial Sequence
  Non-cyclic GFR-binding peptide
  MOD_RES (1), (3): Xaa is C or S
  MOD_RES (16), (17), (18), (19), (20): Xaa is A or G
  MOD_RES (21), (22), (23), (24): Xaa is A or G or is absent
XKXALHDELTSMEGLXXXXXXXXXMIQVTINSLQVQTP

SEQ ID NO: 13836 - protein, 37 aa, Artificial Sequence
  Non-cyclic GFR-binding peptide
  MOD_RES (2), (36): Xaa is C or S
  MOD_RES (14), (15), (16), (17), (18): Xaa is A or G
  MOD_RES (19), (20), (21), (22): Xaa is A or G or is absent
EXKNHQLFSMEGLXXXXXXXXXMIQMTINSEETPVXE

SEQ ID NO: 13837 - protein, 43 aa, Artificial Sequence
  Non-cyclic GFR-binding peptide
  MOD_RES (2), (39): Xaa is C or S
  MOD_RES (15), (16), (17), (18), (19): Xaa is A or G
  MOD_RES (20), (21), (22), (23): Xaa is A or G or is absent
AXELHEELRSMEGLXXXXXXXXXMIQVTINSHHVRSPQXKVSS

SEQ ID NO: 13838 - protein, 33 aa, Artificial Sequence
  Non-cyclic GFR-binding peptide
  MOD_RES (33), (33): Xaa is C or S
NHQLFVTAKKHQGQHPKIRIKRMQVPREETPVX

SEQ ID NO: 13839 - protein, 42 aa, Artificial Sequence
  Non-cyclic GFR-binding peptide
  MOD_RES (2), (4), (41): Xaa is C or S
  MOD_RES (17), (18), (19), (20), (21): Xaa is A or G
  MOD_RES (22), (23), (24), (25): Xaa is A or G or is absent
EXKXALHDELTSMEGLXXXXXXXXXMIQVTINSLQVQTPRXQ

SEQ ID NO: 13840 - protein, 41 aa, Artificial Sequence
  Non-cyclic GFR-binding peptide
  MOD_RES (2), (4), (38): Xaa is C or S
RXEXQSHEELVQVEKHQGQHPKIRVKAMKVSRQGTPVXELG

SEQ ID NO: 13841 - protein, 38 aa, Artificial Sequence
  Non-cyclic GFR-binding peptide
  MOD_RES (2), (4): Xaa is C or S
  MOD_RES (17), (18), (19), (20), (21): Xaa is A or G
  MOD_RES (22), (23), (24), (25): Xaa is A or G or is absent
EXKXALHDELTSMEGIXXXXXXXXXMIQVTINSLQVQT

SEQ ID NO: 13842 - protein, 41 aa, Artificial Sequence
  Non-cyclic GFR-binding peptide
  MOD_RES (1), (35): Xaa is C or S
XKNHQLFVQVEKHQGQHPKIRVKAMKVSREETPVXELGEDN

SEQ ID NO: 13843 - protein, 41 aa, Artificial Sequence
  Non-cyclic GFR-binding peptide
  MOD_RES (1), (35): Xaa is C or S
  MOD_RES (13), (14), (15), (16), (17): Xaa is A or G
  MOD_RES (18), (19), (20), (21): Xaa is A or G or is absent
XKNHQLFVQVEKXXXXXXXXXVKAMKVSREETPVXELGEDN

SEQ ID NO: 13844 - protein, 39 aa, Artificial Sequence
  Non-cyclic GFR-binding peptide
  MOD_RES (2), (4): Xaa is C or S
EXKXALHDELTSMEGIFIPKKRVIEMIQVTINSLQVQTP

SEQ ID NO: 13845 - protein, 34 aa, Artificial Sequence
  Non-cyclic GFR-binding peptide
  MOD_RES (1), (1): Xaa is C or S
  MOD_RES (13), (14), (15), (16), (17): Xaa is A or G
  MOD_RES (18), (19), (20), (21): Xaa is A or G or is absent
XKNHQLFVTAKKXXXXXXXXXIKRMQVPREETPV

SEQ ID NO: 13846 - protein, 40 aa, Artificial Sequence
  Non-cyclic GFR-binding peptide
  MOD_RES (1), (3), (37): Xaa is C or S
XEXQSHEELVQVEKHQGQHPKIRVKAMKVSRQGTPVXELG

SEQ ID NO: 13847 - protein, 42 aa, Artificial Sequence
  Non-cyclic GFR-binding peptide
  MOD_RES (2), (39): Xaa is C or S
  MOD_RES (15), (16), (17), (18), (19): Xaa is A or G
  MOD_RES (20), (21), (22), (23): Xaa is A or G or is absent
AXELHEELRVTAKKXXXXXXXXXIKRVQVPRHHVRSPQXKVS

SEQ ID NO: 13848 - protein, 37 aa, Artificial Sequence
  Non-cyclic GFR-binding peptide
  MOD_RES (36), (36): Xaa is C or S
  MOD_RES (12), (13), (14), (15), (16): Xaa is A or G
  MOD_RES (17), (18), (19), (20): Xaa is A or G or is absent
LHDELTSMEGIXXXXXXXXXMIQVTINSLQVQTPRXQ

SEQ ID NO: 13849 - protein, 32 aa, Artificial Sequence
  Non-cyclic GFR-binding peptide
  MOD_RES (11), (12), (13), (14), (15): Xaa is A or G
  MOD_RES (16), (17), (18), (19): Xaa is A or G or is absent
SHEELVQVEKXXXXXXXXXVKAMKVSRQGTPV

SEQ ID NO: 13850 - protein, 32 aa, Artificial Sequence
  Non-cyclic GFR-binding peptide
  MOD_RES (11), (12), (13), (14), (15): Xaa is A or G
  MOD_RES (16), (17), (18), (19): Xaa is A or G or is absent
NHQLFVTAKKXXXXXXXXXIKRMQVPREETPV

SEQ ID NO: 13851 - protein, 35 aa, Artificial Sequence
  Non-cyclic GFR-binding peptide
  MOD_RES (12), (13), (14), (15), (16): Xaa is A or G
  MOD_RES (17), (18), (19), (20): Xaa is A or G or is absent
LHEELRSMEGLXXXXXXXXXMIQVTINSHHVRSPQ

SEQ ID NO: 13852 - protein, 41 aa, Artificial Sequence
  Non-cyclic GFR-binding peptide
  MOD_RES (1), (3), (37): Xaa is C or S
XEXQSHEELVQVEKHQGQHPKIRVKAMKVSRQGTPVXELGE

SEQ ID NO: 13853 - protein, 36 aa, Artificial Sequence
  Non-cyclic GFR-binding peptide
  MOD_RES (34), (34): Xaa is C or S
  MOD_RES (12), (13), (14), (15), (16): Xaa is A or G
  MOD_RES (17), (18), (19), (20): Xaa is A or G or is absent
QSHEELVQVEKXXXXXXXXXVKAMKVSRQGTPVXEL

SEQ ID NO: 13854 - protein, 36 aa, Artificial Sequence
  Non-cyclic GFR-binding peptide
  MOD_RES (36), (36): Xaa is C or S
LHDELTSMEGLFIPKKRVIEMIQVTINSLQVQTPRX

SEQ ID NO: 13855 - protein, 38 aa, Artificial Sequence
  Non-cyclic GFR-binding peptide
  MOD_RES (2), (4): Xaa is C or S
AXAXELHEELRSMEGLLKPKKRVYEMIQVTINSHHVRS

SEQ ID NO: 13856 - protein, 41 aa, Artificial Sequence
  Non-cyclic GFR-binding peptide
  MOD_RES (1), (38): Xaa is C or S
  MOD_RES (14), (15), (16), (17), (18): Xaa is A or G
  MOD_RES (19), (20), (21), (22): Xaa is A or G or is absent
XALHDELTVQVEKXXXXXXXXXVKAVKVSRLQVQTPRXQVN

SEQ ID NO: 13857 - protein, 38 aa, Artificial Sequence
  Non-cyclic GFR-binding peptide
  MOD_RES (1), (38): Xaa is C or S
  MOD_RES (14), (15), (16), (17), (18): Xaa is A or G
  MOD_RES (19), (20), (21), (22): Xaa is A or G or is absent
XALHDELTSMEGIXXXXXXXXXMIQVTINSLQVQTPRX

SEQ ID NO: 13858 - protein, 35 aa, Artificial Sequence
  Non-cyclic GFR-binding peptide
  MOD_RES (34), (34): Xaa is C or S
  MOD_RES (12), (13), (14), (15), (16): Xaa is A or G
  MOD_RES (17), (18), (19), (20): Xaa is A or G or is absent
QSHEELVTAKKXXXXXXXXXIKRMQVPRQGTPVXE

SEQ ID NO: 13859 - protein, 33 aa, Artificial Sequence
  Non-cyclic GFR-binding peptide
  MOD_RES (33), (33): Xaa is C or S
  MOD_RES (11), (12), (13), (14), (15): Xaa is A or G
  MOD_RES (16), (17), (18), (19): Xaa is A or G or is absent
SHEELVTAKKXXXXXXXXXIKRMQVPRQGTPVX

SEQ ID NO: 13860 - protein, 39 aa, Artificial Sequence
  Non-cyclic GFR-binding peptide
  MOD_RES (2), (39): Xaa is C or S
  MOD_RES (15), (16), (17), (18), (19): Xaa is A or G
  MOD_RES (20), (21), (22), (23): Xaa is A or G or is absent
AXELHEELRSMEGLXXXXXXXXXMIQVTINSHHVRSPQX

SEQ ID NO: 13861 - protein, 37 aa, Artificial Sequence
  Non-cyclic GFR-binding peptide
  MOD_RES (2), (4): Xaa is C or S
  MOD_RES (16), (17), (18), (19), (20): Xaa is A or G
  MOD_RES (21), (22), (23), (24): Xaa is A or G or is absent
RXEXQSHEELVTAKKXXXXXXXXXIKRMQVPRQGTPV

SEQ ID NO: 13862 - protein, 33 aa, Artificial Sequence
  Non-cyclic GFR-binding peptide
LHEELRSMEGILKPKKRVYEMIQVTINSHHVRS

SEQ ID NO: 13863 - protein, 43 aa, Artificial Sequence
  Non-cyclic GFR-binding peptide
  MOD_RES (1), (3), (40): Xaa is C or S
  MOD_RES (16), (17), (18), (19), (20): Xaa is A or G
  MOD_RES (21), (22), (23), (24): Xaa is A or G or is absent
XKXALHDELTSMEGLXXXXXXXXXMIQVTINSLQVQTPRXQVN

SEQ ID NO: 13864 - protein, 41 aa, Artificial Sequence
  Non-cyclic GFR-binding peptide
  MOD_RES (37), (37): Xaa is C or S
  MOD_RES (13), (14), (15), (16), (17): Xaa is A or G
  MOD_RES (18), (19), (20), (21): Xaa is A or G or is absent
ALHDELTVQVEKXXXXXXXXXVKAVKVSRLQVQTPRXQVNR

SEQ ID NO: 13865 - protein, 44 aa, Artificial Sequence
  Non-cyclic GFR-binding peptide
  MOD_RES (2), (4), (38): Xaa is C or S
  MOD_RES (16), (17), (18), (19), (20): Xaa is A or G
  MOD_RES (21), (22), (23), (24): Xaa is A or G or is absent
RXEXKNHQLFSMEGLXXXXXXXXXMIQMTINSEETPVXELGEDN

SEQ ID NO: 13866 - protein, 36 aa, Artificial Sequence
  Non-cyclic GFR-binding peptide
  MOD_RES (2), (36): Xaa is C or S
EXKNHQLFVQVEKHQGQHPKIRVKAMKVSREETPVX

SEQ ID NO: 13867 - protein, 35 aa, Artificial Sequence
  Non-cyclic GFR-binding peptide
ALHDELTVQVEKFIPKKRVIEVKAVKVSRLQVQTP

SEQ ID NO: 13868 - protein, 38 aa, Artificial Sequence
  Non-cyclic GFR-binding peptide
  MOD_RES (1), (3), (37): Xaa is C or S
  MOD_RES (15), (16), (17), (18), (19): Xaa is A or G
  MOD_RES (20), (21), (22), (23): Xaa is A or G or is absent
XEXQSHEELVQVEKXXXXXXXXXVKAMKVSRQGTPVXE

SEQ ID NO: 13869 - protein, 36 aa, Artificial Sequence
  Non-cyclic GFR-binding peptide
  MOD_RES (1), (1): Xaa is C or S
  MOD_RES (14), (15), (16), (17), (18): Xaa is A or G
  MOD_RES (19), (20), (21), (22): Xaa is A or G or is absent
XALHDELTSMEGLXXXXXXXXXMIQVTINSLQVQTP

SEQ ID NO: 13870 - protein, 44 aa, Artificial Sequence
  Non-cyclic GFR-binding peptide
  MOD_RES (2), (4), (38): Xaa is C or S
RXEXKNHQLFSMEGLHQGQHPKIRMIQMTINSEETPVXELGEDN

SEQ ID NO: 13871 - protein, 35 aa, Artificial Sequence
  Non-cyclic GFR-binding peptide
  MOD_RES (34), (34): Xaa is C or S
  MOD_RES (12), (13), (14), (15), (16): Xaa is A or G
  MOD_RES (17), (18), (19), (20): Xaa is A or G or is absent
QSHEELSMEGIXXXXXXXXXMIQMTINSQGTPVXE

SEQ ID NO: 13872 - protein, 38 aa, Artificial Sequence
  Non-cyclic GFR-binding peptide
  MOD_RES (2), (36): Xaa is C or S
  MOD_RES (14), (15), (16), (17), (18): Xaa is A or G
  MOD_RES (19), (20), (21), (22): Xaa is A or G or is absent
EXQSHEELVTAKKXXXXXXXXXIKRMQVPRQGTPVXEL

SEQ ID NO: 13873 - protein, 36 aa, Artificial Sequence
  Non-cyclic GFR-binding peptide
  MOD_RES (1), (1): Xaa is C or S
  MOD_RES (14), (15), (16), (17), (18): Xaa is A or G
  MOD_RES (19), (20), (21), (22): Xaa is A or G or is absent
XELHEELRVTAKKXXXXXXXXXIKRVQVPRHHVRSP

SEQ ID NO: 13874 - protein, 37 aa, Artificial Sequence
  Non-cyclic GFR-binding peptide
  MOD_RES (34), (34): Xaa is C or S
  MOD_RES (12), (13), (14), (15), (16): Xaa is A or G
  MOD_RES (17), (18), (19), (20): Xaa is A or G or is absent
QSHEELVTAKKXXXXXXXXXIKRMQVPRQGTPVXELG

SEQ ID NO: 13875 - protein, 34 aa, Artificial Sequence
  Non-cyclic GFR-binding peptide
ALHDELTVQVEKFIPKKRVIEVKAVKVSRLQVQT

SEQ ID NO: 13876 - protein, 38 aa, Artificial Sequence
  Non-cyclic GFR-binding peptide
  MOD_RES (1), (35): Xaa is C or S
XQSHEELVQVEKHQGQHPKIRVKAMKVSRQGTPVXELG

SEQ ID NO: 13877 - protein, 33 aa, Artificial Sequence
  Non-cyclic GFR-binding peptide
  MOD_RES (33), (33): Xaa is C or S
  MOD_RES (11), (12), (13), (14), (15): Xaa is A or G
  MOD_RES (16), (17), (18), (19): Xaa is A or G or is absent
NHQLFVQVEKXXXXXXXXXVKAMKVSREETPVX

SEQ ID NO: 13878 - protein, 42 aa, Artificial Sequence
  Non-cyclic GFR-binding peptide
  MOD_RES (1), (3), (40): Xaa is C or S
XAXELHEELRVTAKKLKPKKRVYEIKRVQVPRHHVRSPQXKV

SEQ ID NO: 13879 - protein, 36 aa, Artificial Sequence
  Non-cyclic GFR-binding peptide
  MOD_RES (34), (34): Xaa is C or S
  MOD_RES (12), (13), (14), (15), (16): Xaa is A or G
  MOD_RES (17), (18), (19), (20): Xaa is A or G or is absent
QSHEELSMEGIXXXXXXXXXMIQMTINSQGTPVXEL

SEQ ID NO: 13880 - protein, 43 aa, Artificial Sequence
  Non-cyclic GFR-binding peptide
  MOD_RES (2), (4), (41): Xaa is C or S
  MOD_RES (17), (18), (19), (20), (21): Xaa is A or G
  MOD_RES (22), (23), (24), (25): Xaa is A or G or is absent
EXKXALHDELTSMEGLXXXXXXXXXMIQVTINSLQVQTPRXQV

SEQ ID NO: 13881 - protein, 42 aa, Artificial Sequence
  Non-cyclic GFR-binding peptide
  MOD_RES (1), (3), (37): Xaa is C or S
XEXQSHEELVTAKKHQGQHPKIRIKRMQVPRQGTPVXELGED

SEQ ID NO: 13882 - protein, 41 aa, Artificial Sequence
  Non-cyclic GFR-binding peptide
  MOD_RES (37), (37): Xaa is C or S
ELHEELRVTAKKLKPKKRVYEIKRVQVPRHHVRSPQXKVSS

SEQ ID NO: 13883 - protein, 38 aa, Artificial Sequence
  Non-cyclic GFR-binding peptide
  MOD_RES (1), (3): Xaa is C or S
XKXALHDELTSMEGIFIPKKRVIEMIQVTINSLQVQTP

SEQ ID NO: 13884 - protein, 36 aa, Artificial Sequence
  Non-cyclic GFR-binding peptide
  MOD_RES (33), (33): Xaa is C or S
SHEELVQVEKHQGQHPKIRVKAMKVSRQGTPVXELG

SEQ ID NO: 13885 - protein, 37 aa, Artificial Sequence
  Non-cyclic GFR-binding peptide
  MOD_RES (36), (36): Xaa is C or S
LHDELTVQVEKFIPKKRVIEVKAVKVSRLQVQTPRXQ

SEQ ID NO: 13886 - protein, 41 aa, Artificial Sequence
  Non-cyclic GFR-binding peptide
  MOD_RES (37), (37): Xaa is C or S
  MOD_RES (13), (14), (15), (16), (17): Xaa is A or G
  MOD_RES (18), (19), (20), (21): Xaa is A or G or is absent
ALHDELTSMEGLXXXXXXXXXMIQVTINSLQVQTPRXQVNR

SEQ ID NO: 13887 - protein, 43 aa, Artificial Sequence
  Non-cyclic GFR-binding peptide
  MOD_RES (1), (3), (40): Xaa is C or S
XKXALHDELTVQVEKFIPKKRVIEVKAVKVSRLQVQTPRXQVN

SEQ ID NO: 13888 - protein, 36 aa, Artificial Sequence
  Non-cyclic GFR-binding peptide
  MOD_RES (34), (34): Xaa is C or S
  MOD_RES (12), (13), (14), (15), (16): Xaa is A or G
  MOD_RES (17), (18), (19), (20): Xaa is A or G or is absent
QSHEELVTAKKXXXXXXXXXIKRMQVPRQGTPVXEL

SEQ ID NO: 13889 - protein, 35 aa, Artificial Sequence
  Non-cyclic GFR-binding peptide
  MOD_RES (2), (2): Xaa is C or S
  MOD_RES (14), (15), (16), (17), (18): Xaa is A or G
  MOD_RES (19), (20), (21), (22): Xaa is A or G or is absent
EXKNHQLFVTAKKXXXXXXXXXIKRMQVPREETPV

SEQ ID NO: 13890 - protein, 36 aa, Artificial Sequence
  Non-cyclic GFR-binding peptide
  MOD_RES (2), (36): Xaa is C or S
  MOD_RES (14), (15), (16), (17), (18): Xaa is A or G
  MOD_RES (19), (20), (21), (22): Xaa is A or G or is absent
EXQSHEELSMEGIXXXXXXXXXMIQMTINSQGTPVX

SEQ ID NO: 13891 - protein, 39 aa, Artificial Sequence
  Non-cyclic GFR-binding peptide
  MOD_RES (37), (37): Xaa is C or S
ALHDELTSMEGIFIPKKRVIEMIQVTINSLQVQTPRXQV

SEQ ID NO: 13892 - protein, 41 aa, Artificial Sequence
  Non-cyclic GFR-binding peptide
  MOD_RES (2), (36): Xaa is C or S
EXKNHQLFVQVEKHQGQHPKIRVKAMKVSREETPVXELGED

SEQ ID NO: 13893 - protein, 36 aa, Artificial Sequence
  Non-cyclic GFR-binding peptide
  MOD_RES (33), (33): Xaa is C or S
SHEELVTAKKHQGQHPKIRIKRMQVPRQGTPVXELG

SEQ ID NO: 13894 - protein, 35 aa, Artificial Sequence
  Non-cyclic GFR-binding peptide
  MOD_RES (1), (35): Xaa is C or S
  MOD_RES (13), (14), (15), (16), (17): Xaa is A or G
  MOD_RES (18), (19), (20), (21): Xaa is A or G or is absent
XKNHQLFVTAKKXXXXXXXXXIKRMQVPREETPVX

SEQ ID NO: 13895 - protein, 43 aa, Artificial Sequence
  Non-cyclic GFR-binding peptide
  MOD_RES (1), (3), (40): Xaa is C or S
  MOD_RES (16), (17), (18), (19), (20): Xaa is A or G
  MOD_RES (21), (22), (23), (24): Xaa is A or G or is absent
XAXELHEELRSMEGLXXXXXXXXXMIQVTINSHHVRSPQXKVS

SEQ ID NO: 13896 - protein, 38 aa, Artificial Sequence
  Non-cyclic GFR-binding peptide
  MOD_RES (1), (3), (37): Xaa is C or S
XEXQSHEELVTAKKHQGQHPKIRIKRMQVPRQGTPVXE

SEQ ID NO: 13897 - protein, 34 aa, Artificial Sequence
  Non-cyclic GFR-binding peptide
  MOD_RES (13), (14), (15), (16), (17): Xaa is A or G
  MOD_RES (18), (19), (20), (21): Xaa is A or G or is absent
ELHEELRSMEGIXXXXXXXXXMIQVTINSHHVRS

SEQ ID NO: 13898 - protein, 34 aa, Artificial Sequence
  Non-cyclic GFR-binding peptide
  MOD_RES (1), (1): Xaa is C or S
XKNHQLFVTAKKHQGQHPKIRIKRMQVPREETPV

SEQ ID NO: 13899 - protein, 37 aa, Artificial Sequence
  Non-cyclic GFR-binding peptide
  MOD_RES (36), (36): Xaa is C or S
LHEELRVTAKKLKPKKRVYEIKRVQVPRHHVRSPQXK

SEQ ID NO: 13900 - protein, 36 aa, Artificial Sequence
  Non-cyclic GFR-binding peptide
ELHEELRSMEGILKPKKRVYEMIQVTINSHHVRSPQ

SEQ ID NO: 13901 - protein, 44 aa, Artificial Sequence
  Non-cyclic GFR-binding peptide
  MOD_RES (2), (4), (41): Xaa is C or S
EXKXALHDELTSMEGLFIPKKRVIEMIQVTINSLQVQTPRXQVN

SEQ ID NO: 13902 - protein, 36 aa, Artificial Sequence
  Non-cyclic GFR-binding peptide
  MOD_RES (33), (33): Xaa is C or S
SHEELSMEGIHQGQHPKIRMIQMTINSQGTPVXELG

SEQ ID NO: 13903 - protein, 40 aa, Artificial Sequence
  Non-cyclic GFR-binding peptide
  MOD_RES (2), (4), (38): Xaa is C or S
RXEXKNHQLFVTAKKHQGQHPKIRIKRMQVPREETPVXEL

SEQ ID NO: 13904 - protein, 43 aa, Artificial Sequence
  Non-cyclic GFR-binding peptide
  MOD_RES (1), (3), (37): Xaa is C or S
  MOD_RES (15), (16), (17), (18), (19): Xaa is A or G
  MOD_RES (20), (21), (22), (23): Xaa is A or G or is absent
XEXKNHQLFVQVEKXXXXXXXXXVKAMKVSREETPVXELGEDN

SEQ ID NO: 13905 - protein, 37 aa, Artificial Sequence
  Non-cyclic GFR-binding peptide
  MOD_RES (36), (36): Xaa is C or S
LHEELRSMEGILKPKKRVYEMIQVTINSHHVRSPQXK

SEQ ID NO: 13906 - protein, 37 aa, Artificial Sequence
  Non-cyclic GFR-binding peptide
  MOD_RES (2), (2): Xaa is C or S
KXALHDELTVQVEKFIPKKRVIEVKAVKVSRLQVQTP

SEQ ID NO: 13907 - protein, 34 aa, Artificial Sequence
  Non-cyclic GFR-binding peptide
  MOD_RES (12), (13), (14), (15), (16): Xaa is A or G
  MOD_RES (17), (18), (19), (20): Xaa is A or G or is absent
LHDELTSMEGLXXXXXXXXXMIQVTINSLQVQTP

SEQ ID NO: 13908 - protein, 44 aa, Artificial Sequence
  Non-cyclic GFR-binding peptide
  MOD_RES (2), (4), (38): Xaa is C or S
RXEXQSHEELVQVEKHQGQHPKIRVKAMKVSRQGTPVXELGEDN

SEQ ID NO: 13909 - protein, 39 aa, Artificial Sequence
  Non-cyclic GFR-binding peptide
  MOD_RES (1), (3), (37): Xaa is C or S
  MOD_RES (15), (16), (17), (18), (19): Xaa is A or G
  MOD_RES (20), (21), (22), (23): Xaa is A or G or is absent
XEXKNHQLFVTAKKXXXXXXXXXIKRMQVPREETPVXEL

SEQ ID NO: 13910 - protein, 36 aa, Artificial Sequence
  Non-cyclic GFR-binding peptide
  MOD_RES (36), (36): Xaa is C or S
LHEELRSMEGLLKPKKRVYEMIQVTINSHHVRSPQX

SEQ ID NO: 13911 - protein, 35 aa, Artificial Sequence
  Non-cyclic GFR-binding peptide
  MOD_RES (35), (35): Xaa is C or S
HEELRSMEGLLKPKKRVYEMIQVTINSHHVRSPQX

SEQ ID NO: 13912 - protein, 36 aa, Artificial Sequence
  Non-cyclic GFR-binding peptide
  MOD_RES (33), (33): Xaa is C or S
  MOD_RES (11), (12), (13), (14), (15): Xaa is A or G
  MOD_RES (16), (17), (18), (19): Xaa is A or G or is absent
SHEELSMEGIXXXXXXXXXMIQMTINSQGTPVXELG

SEQ ID NO: 13913 - protein, 37 aa, Artificial Sequence
  Non-cyclic GFR-binding peptide
  MOD_RES (1), (1): Xaa is C or S
XALHDELTSMEGIFIPKKRVIEMIQVTINSLQVQTPR

SEQ ID NO: 13914 - protein, 43 aa, Artificial Sequence
  Non-cyclic GFR-binding peptide
  MOD_RES (2), (4), (41): Xaa is C or S
AXAXELHEELRSMEGLLKPKKRVYEMIQVTINSHHVRSPQXKV

SEQ ID NO: 13915 - protein, 34 aa, Artificial Sequence
  Non-cyclic GFR-binding peptide
ALHDELTSMEGLFIPKKRVIEMIQVTINSLQVQT

SEQ ID NO: 13916 - protein, 37 aa, Artificial Sequence
  Non-cyclic GFR-binding peptide
  MOD_RES (34), (34): Xaa is C or S
KNHQLFVQVEKHQGQHPKIRVKAMKVSREETPVXELG

SEQ ID NO: 13917 - protein, 37 aa, Artificial Sequence
  Non-cyclic GFR-binding peptide
  MOD_RES (1), (35): Xaa is C or S
XQSHEELVTAKKHQGQHPKIRIKRMQVPRQGTPVXEL

SEQ ID NO: 13918 - protein, 37 aa, Artificial Sequence
  Non-cyclic GFR-binding peptide
  MOD_RES (2), (4): Xaa is C or S
RXEXQSHEELVQVEKHQGQHPKIRVKAMKVSRQGTPV

SEQ ID NO: 13919 - protein, 40 aa, Artificial Sequence
  Non-cyclic GFR-binding peptide
  MOD_RES (1), (38): Xaa is C or S
  MOD_RES (14), (15), (16), (17), (18): Xaa is A or G
  MOD_RES (19), (20), (21), (22): Xaa is A or G or is absent
XALHDELTSMEGIXXXXXXXXXMIQVTINSLQVQTPRXQV

SEQ ID NO: 13920 - protein, 42 aa, Artificial Sequence
  Non-cyclic GFR-binding peptide
  MOD_RES (1), (3), (37): Xaa is C or S
XEXQSHEELSMEGIHQGQHPKIRMIQMTINSQGTPVXELGED

SEQ ID NO: 13921 - protein, 39 aa, Artificial Sequence
  Non-cyclic GFR-binding peptide
  MOD_RES (1), (3): Xaa is C or S
XAXELHEELRSMEGLLKPKKRVYEMIQVTINSHHVRSPQ

SEQ ID NO: 13922 - protein, 35 aa, Artificial Sequence
  Non-cyclic GFR-binding peptide
  MOD_RES (35), (35): Xaa is C or S
HEELRSMEGILKPKKRVYEMIQVTINSHHVRSPQX

SEQ ID NO: 13923 - protein, 36 aa, Artificial Sequence
  Non-cyclic GFR-binding peptide
  MOD_RES (33), (33): Xaa is C or S
NHQLFSMEGLHQGQHPKIRMIQMTINSEETPVXELG

SEQ ID NO: 13924 - protein, 34 aa, Artificial Sequence
  Non-cyclic GFR-binding peptide
  MOD_RES (11), (12), (13), (14), (15): Xaa is A or G
  MOD_RES (16), (17), (18), (19): Xaa is A or G or is absent
HEELRSMEGIXXXXXXXXXMIQVTINSHHVRSPQ

SEQ ID NO: 13925 - protein, 38 aa, Artificial Sequence
  Non-cyclic GFR-binding peptide
  MOD_RES (2), (4), (38): Xaa is C or S
RXEXKNHQLFVTAKKHQGQHPKIRIKRMQVPREETPVX

SEQ ID NO: 13926 - protein, 38 aa, Artificial Sequence
  Non-cyclic GFR-binding peptide
  MOD_RES (2), (36): Xaa is C or S
  MOD_RES (14), (15), (16), (17), (18): Xaa is A or G
  MOD_RES (19), (20), (21), (22): Xaa is A or G or is absent
EXQSHEELSMEGIXXXXXXXXXMIQMTINSQGTPVXEL

SEQ ID NO: 13927 - protein, 43 aa, Artificial Sequence
  Non-cyclic GFR-binding peptide
  MOD_RES (2), (4), (41): Xaa is C or S
AXAXELHEELRVTAKKLKPKKRVYEIKRVQVPRHHVRSPQXKV

SEQ ID NO: 13928 - protein, 38 aa, Artificial Sequence
  Non-cyclic GFR-binding peptide
  MOD_RES (36), (36): Xaa is C or S
LHDELTSMEGLFIPKKRVIEMIQVTINSLQVQTPRXQV

SEQ ID NO: 13929 - protein, 35 aa, Artificial Sequence
  Non-cyclic GFR-binding peptide
LHEELRSMEGLLKPKKRVYEMIQVTINSHHVRSPQ

SEQ ID NO: 13930 - protein, 42 aa, Artificial Sequence
  Non-cyclic GFR-binding peptide
  MOD_RES (2), (39): Xaa is C or S
AXELHEELRSMEGLLKPKKRVYEMIQVTINSHHVRSPQXKVS

SEQ ID NO: 13931 - protein, 42 aa, Artificial Sequence
  Non-cyclic GFR-binding peptide
  MOD_RES (1), (38): Xaa is C or S
  MOD_RES (14), (15), (16), (17), (18): Xaa is A or G
  MOD_RES (19), (20), (21), (22): Xaa is A or G or is absent
XELHEELRVTAKKXXXXXXXXXIKRVQVPRHHVRSPQXKVSS

SEQ ID NO: 13932 - protein, 39 aa, Artificial Sequence
  Non-cyclic GFR-binding peptide
  MOD_RES (2), (39): Xaa is C or S
AXELHEELRVTAKKLKPKKRVYEIKRVQVPRHHVRSPQX

SEQ ID NO: 13933 - protein, 43 aa, Artificial Sequence
  Non-cyclic GFR-binding peptide
  MOD_RES (1), (3), (37): Xaa is C or S
  MOD_RES (15), (16), (17), (18), (19): Xaa is A or G
  MOD_RES (20), (21), (22), (23): Xaa is A or G or is absent
XEXKNHQLFSMEGLXXXXXXXXXMIQMTINSEETPVXELGEDN

SEQ ID NO: 13934 - protein, 41 aa, Artificial Sequence
  Non-cyclic GFR-binding peptide
  MOD_RES (2), (4), (41): Xaa is C or S
EXKXALHDELTSMEGIFIPKKRVIEMIQVTINSLQVQTPRX

SEQ ID NO: 13935 - protein, 44 aa, Artificial Sequence
  Non-cyclic GFR-binding peptide
  MOD_RES (2), (4), (41): Xaa is C or S
  MOD_RES (17), (18), (19), (20), (21): Xaa is A or G
  MOD_RES (22), (23), (24), (25): Xaa is A or G or is absent
EXKXALHDELTSMEGIXXXXXXXXXMIQVTINSLQVQTPRXQVN

SEQ ID NO: 13936 - protein, 39 aa, Artificial Sequence
  Non-cyclic GFR-binding peptide
  MOD_RES (2), (39): Xaa is C or S
AXELHEELRSMEGLLKPKKRVYEMIQVTINSHHVRSPQX

SEQ ID NO: 13937 - protein, 42 aa, Artificial Sequence
  Non-cyclic GFR-binding peptide
  MOD_RES (2), (39): Xaa is C or S
AXELHEELRVTAKKLKPKKRVYEIKRVQVPRHHVRSPQXKVS

SEQ ID NO: 13938 - protein, 41 aa, Artificial Sequence
  Non-cyclic GFR-binding peptide
  MOD_RES (2), (4), (38): Xaa is C or S
  MOD_RES (16), (17), (18), (19), (20): Xaa is A or G
  MOD_RES (21), (22), (23), (24): Xaa is A or G or is absent
RXEXKNHQLFSMEGLXXXXXXXXXMIQMTINSEETPVXELG

SEQ ID NO: 13939 - protein, 37 aa, Artificial Sequence
  Non-cyclic GFR-binding peptide
  MOD_RES (1), (1): Xaa is C or S
XELHEELRSMEGILKPKKRVYEMIQVTINSHHVRSPQ

SEQ ID NO: 13940 - protein, 39 aa, Artificial Sequence
  Non-cyclic GFR-binding peptide
  MOD_RES (34), (34): Xaa is C or S
  MOD_RES (12), (13), (14), (15), (16): Xaa is A or G
  MOD_RES (17), (18), (19), (20): Xaa is A or G or is absent
QSHEELVTAKKXXXXXXXXXIKRMQVPRQGTPVXELGED

SEQ ID NO: 13941 - protein, 39 aa, Artificial Sequence
  Non-cyclic GFR-binding peptide
  MOD_RES (2), (4), (38): Xaa is C or S
RXEXKNHQLFVTAKKHQGQHPKIRIKRMQVPREETPVXE

SEQ ID NO: 13942 - protein, 41 aa, Artificial Sequence
  Non-cyclic GFR-binding peptide
  MOD_RES (1), (3), (40): Xaa is C or S
XAXELHEELRSMEGLLKPKKRVYEMIQVTINSHHVRSPQXK

SEQ ID NO: 13943 - protein, 34 aa, Artificial Sequence
  Non-cyclic GFR-binding peptide
  MOD_RES (11), (12), (13), (14), (15): Xaa is A or G
  MOD_RES (16), (17), (18), (19): Xaa is A or G or is absent
HEELRSMEGLXXXXXXXXXMIQVTINSHHVRSPQ

SEQ ID NO: 13944 - protein, 37 aa, Artificial Sequence
  Non-cyclic GFR-binding peptide
  MOD_RES (2), (36): Xaa is C or S
  MOD_RES (14), (15), (16), (17), (18): Xaa is A or G
  MOD_RES (19), (20), (21), (22): Xaa is A or G or is absent
EXQSHEELVTAKKXXXXXXXXXIKRMQVPRQGTPVXE

SEQ ID NO: 13945 - protein, 44 aa, Artificial Sequence
  Non-cyclic GFR-binding peptide
  MOD_RES (2), (4), (38): Xaa is C or S
  MOD_RES (16), (17), (18), (19), (20): Xaa is A or G
  MOD_RES (21), (22), (23), (24): Xaa is A or G or is absent
RXEXQSHEELVTAKKXXXXXXXXXIKRMQVPRQGTPVXELGEDN

SEQ ID NO: 13946 - protein, 40 aa, Artificial Sequence
  Non-cyclic GFR-binding peptide
  MOD_RES (1), (3), (40): Xaa is C or S
  MOD_RES (16), (17), (18), (19), (20): Xaa is A or G
  MOD_RES (21), (22), (23), (24): Xaa is A or G or is absent
XAXELHEELRSMEGLXXXXXXXXXMIQVTINSHHVRSPQX

SEQ ID NO: 13947 - protein, 39 aa, Artificial Sequence
  Non-cyclic GFR-binding peptide
  MOD_RES (34), (34): Xaa is C or S
  MOD_RES (12), (13), (14), (15), (16): Xaa is A or G
  MOD_RES (17), (18), (19), (20): Xaa is A or G or is absent
QSHEELSMEGIXXXXXXXXXMIQMTINSQGTPVXELGED

SEQ ID NO: 13948 - protein, 37 aa, Artificial Sequence
  Non-cyclic GFR-binding peptide
  MOD_RES (2), (4): Xaa is C or S
  MOD_RES (16), (17), (18), (19), (20): Xaa is A or G
  MOD_RES (21), (22), (23), (24): Xaa is A or G or is absent
RXEXKNHQLFSMEGLXXXXXXXXXMIQMTINSEETPV

SEQ ID NO: 13949 - protein, 34 aa, Artificial Sequence
  Non-cyclic GFR-binding peptide
  MOD_RES (13), (14), (15), (16), (17): Xaa is A or G
  MOD_RES (18), (19), (20), (21): Xaa is A or G or is absent
ALHDELTVQVEKXXXXXXXXXVKAVKVSRLQVQT

SEQ ID NO: 13950 - protein, 40 aa, Artificial Sequence
  Non-cyclic GFR-binding peptide
  MOD_RES (1), (3), (40): Xaa is C or S
  MOD_RES (16), (17), (18), (19), (20): Xaa is A or G
  MOD_RES (21), (22), (23), (24): Xaa is A or G or is absent
XKXALHDELTVQVEKXXXXXXXXXVKAVKVSRLQVQTPRX

SEQ ID NO: 13951 - protein, 35 aa, Artificial Sequence
  Non-cyclic GFR-binding peptide
ALHDELTSMEGLFIPKKRVIEMIQVTINSLQVQTP

SEQ ID NO: 13952 - protein, 36 aa, Artificial Sequence
  Non-cyclic GFR-binding peptide
  MOD_RES (13), (14), (15), (16), (17): Xaa is A or G
  MOD_RES (18), (19), (20), (21): Xaa is A or G or is absent
ALHDELTSMEGLXXXXXXXXXMIQVTINSLQVQTPR

SEQ ID NO: 13953 - protein, 38 aa, Artificial Sequence
  Non-cyclic GFR-binding peptide
  MOD_RES (1), (3): Xaa is C or S
  MOD_RES (16), (17), (18), (19), (20): Xaa is A or G
  MOD_RES (21), (22), (23), (24): Xaa is A or G or is absent
XAXELHEELRSMEGLXXXXXXXXXMIQVTINSHHVRSP

SEQ ID NO: 13954 - protein, 41 aa, Artificial Sequence
  Non-cyclic GFR-binding peptide
  MOD_RES (1), (3), (40): Xaa is C or S
  MOD_RES (16), (17), (18), (19), (20): Xaa is A or G
  MOD_RES (21), (22), (23), (24): Xaa is A or G or is absent
XKXALHDELTSMEGLXXXXXXXXXMIQVTINSLQVQTPRXQ

SEQ ID NO: 13955 - protein, 39 aa, Artificial Sequence
  Non-cyclic GFR-binding peptide
  MOD_RES (36), (36): Xaa is C or S
  MOD_RES (12), (13), (14), (15), (16): Xaa is A or G
  MOD_RES (17), (18), (19), (20): Xaa is A or G or is absent
LHDELTSMEGIXXXXXXXXXMIQVTINSLQVQTPRXQVN

SEQ ID NO: 13956 - protein, 41 aa, Artificial Sequence
  Non-cyclic GFR-binding peptide
  MOD_RES (1), (3), (37): Xaa is C or S
XEXKNHQLFVTAKKHQGQHPKIRIKRMQVPREETPVXELGE

SEQ ID NO: 13957 - protein, 36 aa, Artificial Sequence
  Non-cyclic GFR-binding peptide
  MOD_RES (2), (36): Xaa is C or S
  MOD_RES (14), (15), (16), (17), (18): Xaa is A or G
  MOD_RES (19), (20), (21), (22): Xaa is A or G or is absent
EXKNHQLFVTAKKXXXXXXXXXIKRMQVPREETPVX

SEQ ID NO: 13958 - protein, 32 aa, Artificial Sequence
  Non-cyclic GFR-binding peptide
SHEELVQVEKHQGQHPKIRVKAMKVSRQGTPV

SEQ ID NO: 13959 - protein, 36 aa, Artificial Sequence
  Non-cyclic GFR-binding peptide
  MOD_RES (34), (34): Xaa is C or S
KNHQLFSMEGLHQGQHPKIRMIQMTINSEETPVXEL

SEQ ID NO: 13960 - protein, 35 aa, Artificial Sequence
  Non-cyclic GFR-binding peptide
  MOD_RES (34), (34): Xaa is C or S
QSHEELSMEGIHQGQHPKIRMIQMTINSQGTPVXE

SEQ ID NO: 13961 - protein, 33 aa, Artificial Sequence
  Non-cyclic GFR-binding peptide
  MOD_RES (12), (13), (14), (15), (16): Xaa is A or G
  MOD_RES (17), (18), (19), (20): Xaa is A or G or is absent
LHEELRVTAKKXXXXXXXXXIKRVQVPRHHVRS

SEQ ID NO: 13962 - protein, 35 aa, Artificial Sequence
  Non-cyclic GFR-binding peptide
  MOD_RES (33), (33): Xaa is C or S
  MOD_RES (11), (12), (13), (14), (15): Xaa is A or G
  MOD_RES (16), (17), (18), (19): Xaa is A or G or is absent
NHQLFSMEGLXXXXXXXXXMIQMTINSEETPVXEL

SEQ ID NO: 13963 - protein, 37 aa, Artificial Sequence
  Non-cyclic GFR-binding peptide
  MOD_RES (33), (33): Xaa is C or S
  MOD_RES (11), (12), (13), (14), (15): Xaa is A or G
  MOD_RES (16), (17), (18), (19): Xaa is A or G or is absent
SHEELSMEGIXXXXXXXXXMIQMTINSQGTPVXELGE

SEQ ID NO: 13964 - protein, 43 aa, Artificial Sequence
  Non-cyclic GFR-binding peptide
  MOD_RES (2), (4), (38): Xaa is C or S
RXEXQSHEELVTAKKHQGQHPKIRIKRMQVPRQGTPVXELGED

SEQ ID NO: 13965 - protein, 33 aa, Artificial Sequence
  Non-cyclic GFR-binding peptide
LHDELTSMEGLFIPKKRVIEMIQVTINSLQVQT

SEQ ID NO: 13966 - protein, 42 aa, Artificial Sequence
  Non-cyclic GFR-binding peptide
  MOD_RES (1), (38): Xaa is C or S
XELHEELRSMEGILKPKKRVYEMIQVTINSHHVRSPQXKVSS

SEQ ID NO: 13967 - protein, 40 aa, Artificial Sequence
  Non-cyclic GFR-binding peptide
  MOD_RES (36), (36): Xaa is C or S
LHEELRVTAKKLKPKKRVYEIKRVQVPRHHVRSPQXKVSS

SEQ ID NO: 13968 - protein, 38 aa, Artificial Sequence
  Non-cyclic GFR-binding peptide
  MOD_RES (2), (4), (38): Xaa is C or S
  MOD_RES (16), (17), (18), (19), (20): Xaa is A or G
  MOD_RES (21), (22), (23), (24): Xaa is A or G or is absent
RXEXKNHQLFVTAKKXXXXXXXXXIKRMQVPREETPVX

SEQ ID NO: 13969 - protein, 35 aa, Artificial Sequence
  Non-cyclic GFR-binding peptide
ELHEELRVTAKKLKPKKRVYEIKRVQVPRHHVRSP

SEQ ID NO: 13970 - protein, 36 aa, Artificial Sequence
  Non-cyclic GFR-binding peptide
  MOD_RES (35), (35): Xaa is C or S
HDELTVQVEKFIPKKRVIEVKAVKVSRLQVQTPRXQ

SEQ ID NO: 13971 - protein, 38 aa, Artificial Sequence
  Non-cyclic GFR-binding peptide
  MOD_RES (2), (4), (38): Xaa is C or S
  MOD_RES (16), (17), (18), (19), (20): Xaa is A or G
  MOD_RES (21), (22), (23), (24): Xaa is A or G or is absent
RXEXKNHQLFVQVEKXXXXXXXXXVKAMKVSREETPVX

SEQ ID NO: 13972 - protein, 41 aa, Artificial Sequence
  Non-cyclic GFR-binding peptide
  MOD_RES (1), (38): Xaa is C or S
XELHEELRSMEGLLKPKKRVYEMIQVTINSHHVRSPQXKVS

SEQ ID NO: 13973 - protein, 33 aa, Artificial Sequence
  Non-cyclic GFR-binding peptide
  MOD_RES (33), (33): Xaa is C or S
  MOD_RES (11), (12), (13), (14), (15): Xaa is A or G
  MOD_RES (16), (17), (18), (19): Xaa is A or G or is absent
NHQLFSMEGLXXXXXXXXXMIQMTINSEETPVX

SEQ ID NO: 13974 - protein, 35 aa, Artificial Sequence
  Non-cyclic GFR-binding peptide
LHDELTSMEGIFIPKKRVIEMIQVTINSLQVQTPR

SEQ ID NO: 13975 - protein, 38 aa, Artificial Sequence
  Non-cyclic GFR-binding peptide
  MOD_RES (1), (35): Xaa is C or S
  MOD_RES (13), (14), (15), (16), (17): Xaa is A or G
  MOD_RES (18), (19), (20), (21): Xaa is A or G or is absent
XKNHQLFSMEGLXXXXXXXXXMIQMTINSEETPVXELG

SEQ ID NO: 13976 - protein, 39 aa, Artificial Sequence
  Non-cyclic GFR-binding peptide
  MOD_RES (1), (3), (37): Xaa is C or S
XEXQSHEELSMEGIHQGQHPKIRMIQMTINSQGTPVXEL

SEQ ID NO: 13977 - protein, 33 aa, Artificial Sequence
  Non-cyclic GFR-binding peptide
HEELRSMEGILKPKKRVYEMIQVTINSHHVRSP

SEQ ID NO: 13978 - protein, 37 aa, Artificial Sequence
  Non-cyclic GFR-binding peptide
  MOD_RES (1), (3): Xaa is C or S
XAXELHEELRVTAKKLKPKKRVYEIKRVQVPRHHVRS

SEQ ID NO: 13979 - protein, 39 aa, Artificial Sequence
  Non-cyclic GFR-binding peptide
  MOD_RES (2), (39): Xaa is C or S
  MOD_RES (15), (16), (17), (18), (19): Xaa is A or G
  MOD_RES (20), (21), (22), (23): Xaa is A or G or is absent
KXALHDELTVQVEKXXXXXXXXXVKAVKVSRLQVQTPRX

SEQ ID NO: 13980 - protein, 37 aa, Artificial Sequence
  Non-cyclic GFR-binding peptide
  MOD_RES (2), (2): Xaa is C or S
  MOD_RES (15), (16), (17), (18), (19): Xaa is A or G
  MOD_RES (20), (21), (22), (23): Xaa is A or G or is absent
KXALHDELTVQVEKXXXXXXXXXVKAVKVSRLQVQTP

SEQ ID NO: 13981 - protein, 39 aa, Artificial Sequence
  Non-cyclic GFR-binding peptide
  MOD_RES (1), (38): Xaa is C or S
XELHEELRVTAKKLKPKKRVYEIKRVQVPRHHVRSPQXK

SEQ ID NO: 13982 - protein, 38 aa, Artificial Sequence
  Non-cyclic GFR-binding peptide
  MOD_RES (2), (36): Xaa is C or S
EXKNHQLFSMEGLHQGQHPKIRMIQMTINSEETPVXEL

SEQ ID NO: 13983 - protein, 37 aa, Artificial Sequence
  Non-cyclic GFR-binding peptide
  MOD_RES (1), (3): Xaa is C or S
XKXALHDELTVQVEKFIPKKRVIEVKAVKVSRLQVQT

SEQ ID NO: 13984 - protein, 43 aa, Artificial Sequence
  Non-cyclic GFR-binding peptide
  MOD_RES (2), (4), (38): Xaa is C or S
RXEXQSHEELVQVEKHQGQHPKIRVKAMKVSRQGTPVXELGED

SEQ ID NO: 13985 - protein, 37 aa, Artificial Sequence
  Non-cyclic GFR-binding peptide
  MOD_RES (37), (37): Xaa is C or S
ELHEELRSMEGILKPKKRVYEMIQVTINSHHVRSPQX

SEQ ID NO: 13986 - protein, 33 aa, Artificial Sequence
  Non-cyclic GFR-binding peptide
  MOD_RES (12), (13), (14), (15), (16): Xaa is A or G
  MOD_RES (17), (18), (19), (20): Xaa is A or G or is absent
KNHQLFVQVEKXXXXXXXXXVKAMKVSREETPV

SEQ ID NO: 13987 - protein, 37 aa, Artificial Sequence
  Non-cyclic GFR-binding peptide
  MOD_RES (1), (3), (37): Xaa is C or S
  MOD_RES (15), (16), (17), (18), (19): Xaa is A or G
  MOD_RES (20), (21), (22), (23): Xaa is A or G or is absent
XEXKNHQLFSMEGLXXXXXXXXXMIQMTINSEETPVX

SEQ ID NO: 13988 - protein, 39 aa, Artificial Sequence
  Non-cyclic GFR-binding peptide
  MOD_RES (33), (33): Xaa is C or S
  MOD_RES (11), (12), (13), (14), (15): Xaa is A or G
  MOD_RES (16), (17), (18), (19): Xaa is A or G or is absent
NHQLFVQVEKXXXXXXXXXVKAMKVSREETPVXELGEDN

SEQ ID NO: 13989 - protein, 38 aa, Artificial Sequence
  Non-cyclic GFR-binding peptide
  MOD_RES (1), (38): Xaa is C or S
XALHDELTVQVEKFIPKKRVIEVKAVKVSRLQVQTPRX

SEQ ID NO: 13990 - protein, 32 aa, Artificial Sequence
  Non-cyclic GFR-binding peptide
  MOD_RES (11), (12), (13), (14), (15): Xaa is A or G
  MOD_RES (16), (17), (18), (19): Xaa is A or G or is absent
NHQLFVQVEKXXXXXXXXXVKAMKVSREETPV

SEQ ID NO: 13991 - protein, 43 aa, Artificial Sequence
  Non-cyclic GFR-binding peptide
  MOD_RES (2), (39): Xaa is C or S
KXALHDELTSMEGIFIPKKRVIEMIQVTINSLQVQTPRXQVNR

SEQ ID NO: 13992 - protein, 38 aa, Artificial Sequence
  Non-cyclic GFR-binding peptide
  MOD_RES (36), (36): Xaa is C or S
LHDELTVQVEKFIPKKRVIEVKAVKVSRLQVQTPRXQV

SEQ ID NO: 13993 - protein, 42 aa, Artificial Sequence
  Non-cyclic GFR-binding peptide
  MOD_RES (1), (38): Xaa is C or S
  MOD_RES (14), (15), (16), (17), (18): Xaa is A or G
  MOD_RES (19), (20), (21), (22): Xaa is A or G or is absent
XALHDELTSMEGLXXXXXXXXXMIQVTINSLQVQTPRXQVNR

SEQ ID NO: 13994 - protein, 34 aa, Artificial Sequence
  Non-cyclic GFR-binding peptide
LHDELTSMEGLFIPKKRVIEMIQVTINSLQVQTP

SEQ ID NO: 13995 - protein, 38 aa, Artificial Sequence
  Non-cyclic GFR-binding peptide
  MOD_RES (37), (37): Xaa is C or S
  MOD_RES (13), (14), (15), (16), (17): Xaa is A or G
  MOD_RES (18), (19), (20), (21): Xaa is A or G or is absent
ELHEELRSMEGIXXXXXXXXXMIQVTINSHHVRSPQXK

SEQ ID NO: 13996 - protein, 35 aa, Artificial Sequence
  Non-cyclic GFR-binding peptide
  MOD_RES (1), (35): Xaa is C or S
  MOD_RES (13), (14), (15), (16), (17): Xaa is A or G
  MOD_RES (18), (19), (20), (21): Xaa is A or G or is absent
XQSHEELSMEGIXXXXXXXXXMIQMTINSQGTPVX

SEQ ID NO: 13997 - protein, 44 aa, Artificial Sequence
  Non-cyclic GFR-binding peptide
  MOD_RES (2), (4), (41): Xaa is C or S
  MOD_RES (17), (18), (19), (20), (21): Xaa is A or G
  MOD_RES (22), (23), (24), (25): Xaa is A or G or is absent
EXKXALHDELTVQVEKXXXXXXXXXVKAVKVSRLQVQTPRXQVN

SEQ ID NO: 13998 - protein, 39 aa, Artificial Sequence
  Non-cyclic GFR-binding peptide
  MOD_RES (35), (35): Xaa is C or S
  MOD_RES (11), (12), (13), (14), (15): Xaa is A or G
  MOD_RES (16), (17), (18), (19): Xaa is A or G or is absent
HDELTVQVEKXXXXXXXXXVKAVKVSRLQVQTPRXQVNR

SEQ ID NO: 13999 - protein, 40 aa, Artificial Sequence
  Non-cyclic GFR-binding peptide
  MOD_RES (34), (34): Xaa is C or S
  MOD_RES (12), (13), (14), (15), (16): Xaa is A or G
  MOD_RES (17), (18), (19), (20): Xaa is A or G or is absent
KNHQLFVTAKKXXXXXXXXXIKRMQVPREETPVXELGEDN

SEQ ID NO: 14000 - protein, 34 aa, Artificial Sequence
  Non-cyclic GFR-binding peptide
  MOD_RES (12), (13), (14), (15), (16): Xaa is A or G
  MOD_RES (17), (18), (19), (20): Xaa is A or G or is absent
LHEELRVTAKKXXXXXXXXXIKRVQVPRHHVRSP

SEQ ID NO: 14001 - protein, 39 aa, Artificial Sequence
  Non-cyclic GFR-binding peptide
  MOD_RES (33), (33): Xaa is C or S
SHEELVQVEKHQGQHPKIRVKAMKVSRQGTPVXELGEDN

SEQ ID NO: 14002 - protein, 42 aa, Artificial Sequence
  Non-cyclic GFR-binding peptide
  MOD_RES (2), (39): Xaa is C or S
  MOD_RES (15), (16), (17), (18), (19): Xaa is A or G
  MOD_RES (20), (21), (22), (23): Xaa is A or G or is absent
KXALHDELTVQVEKXXXXXXXXXVKAVKVSRLQVQTPRXQVN

SEQ ID NO: 14003 - protein, 32 aa, Artificial Sequence
  Non-cyclic GFR-binding peptide
  MOD_RES (11), (12), (13), (14), (15): Xaa is A or G
  MOD_RES (16), (17), (18), (19): Xaa is A or G or is absent
HEELRSMEGLXXXXXXXXXMIQVTINSHHVRS

SEQ ID NO: 14004 - protein, 40 aa, Artificial Sequence
  Non-cyclic GFR-binding peptide
  MOD_RES (2), (36): Xaa is C or S
EXKNHQLFVTAKKHQGQHPKIRIKRMQVPREETPVXELGE

SEQ ID NO: 14005 - protein, 39 aa, Artificial Sequence
  Non-cyclic GFR-binding peptide
  MOD_RES (1), (3), (37): Xaa is C or S
XEXKNHQLFVTAKKHQGQHPKIRIKRMQVPREETPVXEL

SEQ ID NO: 14006 - protein, 37 aa, Artificial Sequence
  Non-cyclic GFR-binding peptide
  MOD_RES (2), (2): Xaa is C or S
  MOD_RES (15), (16), (17), (18), (19): Xaa is A or G
  MOD_RES (20), (21), (22), (23): Xaa is A or G or is absent
AXELHEELRVTAKKXXXXXXXXXIKRVQVPRHHVRSP

SEQ ID NO: 14007 - protein, 37 aa, Artificial Sequence
  Non-cyclic GFR-binding peptide
  MOD_RES (33), (33): Xaa is C or S
  MOD_RES (11), (12), (13), (14), (15): Xaa is A or G
  MOD_RES (16), (17), (18), (19): Xaa is A or G or is absent
NHQLFSMEGLXXXXXXXXXMIQMTINSEETPVXELGE

SEQ ID NO: 14008 - protein, 41 aa, Artificial Sequence
  Non-cyclic GFR-binding peptide
  MOD_RES (2), (4), (41): Xaa is C or S
  MOD_RES (17), (18), (19), (20), (21): Xaa is A or G
  MOD_RES (22), (23), (24), (25): Xaa is A or G or is absent
EXKXALHDELTVQVEKXXXXXXXXXVKAVKVSRLQVQTPRX

SEQ ID NO: 14009 - protein, 38 aa, Artificial Sequence
  Non-cyclic GFR-binding peptide
  MOD_RES (2), (2): Xaa is C or S
  MOD_RES (15), (16), (17), (18), (19): Xaa is A or G
  MOD_RES (20), (21), (22), (23): Xaa is A or G or is absent
KXALHDELTVQVEKXXXXXXXXXVKAVKVSRLQVQTPR

SEQ ID NO: 14010 - protein, 38 aa, Artificial Sequence
  Non-cyclic GFR-binding peptide
  MOD_RES (1), (3): Xaa is C or S
  MOD_RES (16), (17), (18), (19), (20): Xaa is A or G
  MOD_RES (21), (22), (23), (24): Xaa is A or G or is absent
XKXALHDELTVQVEKXXXXXXXXXVKAVKVSRLQVQTP

SEQ ID NO: 14011 - protein, 37 aa, Artificial Sequence
  Non-cyclic GFR-binding peptide
  MOD_RES (34), (34): Xaa is C or S
  MOD_RES (12), (13), (14), (15), (16): Xaa is A or G
  MOD_RES (17), (18), (19), (20): Xaa is A or G or is absent
KNHQLFVTAKKXXXXXXXXXIKRMQVPREETPVXELG

SEQ ID NO: 14012 - protein, 40 aa, Artificial Sequence
  Non-cyclic GFR-binding peptide
  MOD_RES (2), (36): Xaa is C or S
EXKNHQLFSMEGLHQGQHPKIRMIQMTINSEETPVXELGE

SEQ ID NO: 14013 - protein, 40 aa, Artificial Sequence
  Non-cyclic GFR-binding peptide
  MOD_RES (37), (37): Xaa is C or S
  MOD_RES (13), (14), (15), (16), (17): Xaa is A or G
  MOD_RES (18), (19), (20), (21): Xaa is A or G or is absent
ELHEELRSMEGIXXXXXXXXXMIQVTINSHHVRSPQXKVS

SEQ ID NO: 14014 - protein, 39 aa, Artificial Sequence
  Non-cyclic GFR-binding peptide
  MOD_RES (1), (3), (37): Xaa is C or S
XEXKNHQLFVQVEKHQGQHPKIRVKAMKVSREETPVXEL

SEQ ID NO: 14015 - protein, 38 aa, Artificial Sequence
  Non-cyclic GFR-binding peptide
  MOD_RES (33), (33): Xaa is C or S
NHQLFVTAKKHQGQHPKIRIKRMQVPREETPVXELGED

SEQ ID NO: 14016 - protein, 39 aa, Artificial Sequence
  Non-cyclic GFR-binding peptide
  MOD_RES (37), (37): Xaa is C or S
  MOD_RES (13), (14), (15), (16), (17): Xaa is A or G
  MOD_RES (18), (19), (20), (21): Xaa is A or G or is absent
ELHEELRSMEGLXXXXXXXXXMIQVTINSHHVRSPQXKV

SEQ ID NO: 14017 - protein, 43 aa, Artificial Sequence
  Non-cyclic GFR-binding peptide
  MOD_RES (2), (4), (38): Xaa is C or S
  MOD_RES (16), (17), (18), (19), (20): Xaa is A or G
  MOD_RES (21), (22), (23), (24): Xaa is A or G or is absent
RXEXQSHEELSMEGIXXXXXXXXXMIQMTINSQGTPVXELGED

SEQ ID NO: 14018 - protein, 41 aa, Artificial Sequence
  Non-cyclic GFR-binding peptide
  MOD_RES (2), (36): Xaa is C or S
EXQSHEELVTAKKHQGQHPKIRIKRMQVPRQGTPVXELGED

SEQ ID NO: 14019 - protein, 34 aa, Artificial Sequence
  Non-cyclic GFR-binding peptide
  MOD_RES (11), (12), (13), (14), (15): Xaa is A or G
  MOD_RES (16), (17), (18), (19): Xaa is A or G or is absent
HEELRVTAKKXXXXXXXXXIKRVQVPRHHVRSPQ

SEQ ID NO: 14020 - protein, 41 aa, Artificial Sequence
  Non-cyclic GFR-binding peptide
  MOD_RES (2), (4), (41): Xaa is C or S
  MOD_RES (17), (18), (19), (20), (21): Xaa is A or G
  MOD_RES (22), (23), (24), (25): Xaa is A or G or is absent
AXAXELHEELRVTAKKXXXXXXXXXIKRVQVPRHHVRSPQX

SEQ ID NO: 14021 - protein, 36 aa, Artificial Sequence
  Non-cyclic GFR-binding peptide
  MOD_RES (1), (3): Xaa is C or S
XEXQSHEELVQVEKHQGQHPKIRVKAMKVSRQGTPV

SEQ ID NO: 14022 - protein, 40 aa, Artificial Sequence
  Non-cyclic GFR-binding peptide
  MOD_RES (2), (39): Xaa is C or S
  MOD_RES (15), (16), (17), (18), (19): Xaa is A or G
  MOD_RES (20), (21), (22), (23): Xaa is A or G or is absent
KXALHDELTSMEGIXXXXXXXXXMIQVTINSLQVQTPRXQ

SEQ ID NO: 14023 - protein, 40 aa, Artificial Sequence
  Non-cyclic GFR-binding peptide
  MOD_RES (1), (38): Xaa is C or S
  MOD_RES (14), (15), (16), (17), (18): Xaa is A or G
  MOD_RES (19), (20), (21), (22): Xaa is A or G or is absent
XELHEELRVTAKKXXXXXXXXXIKRVQVPRHHVRSPQXKV

SEQ ID NO: 14024 - protein, 39 aa, Artificial Sequence
  Non-cyclic GFR-binding peptide
  MOD_RES (36), (36): Xaa is C or S
  MOD_RES (12), (13), (14), (15), (16): Xaa is A or G
  MOD_RES (17), (18), (19), (20): Xaa is A or G or is absent
LHEELRVTAKKXXXXXXXXXIKRVQVPRHHVRSPQXKVS

SEQ ID NO: 14025 - protein, 32 aa, Artificial Sequence
  Non-cyclic GFR-binding peptide
  MOD_RES (11), (12), (13), (14), (15): Xaa is A or G
  MOD_RES (16), (17), (18), (19): Xaa is A or G or is absent
HDELTVQVEKXXXXXXXXXVKAVKVSRLQVQT

SEQ ID NO: 14026 - protein, 37 aa, Artificial Sequence
  Non-cyclic GFR-binding peptide
  MOD_RES (36), (36): Xaa is C or S
LHDELTSMEGIFIPKKRVIEMIQVTINSLQVQTPRXQ

SEQ ID NO: 14027 - protein, 40 aa, Artificial Sequence
  Non-cyclic GFR-binding peptide
  MOD_RES (37), (37): Xaa is C or S
  MOD_RES (13), (14), (15), (16), (17): Xaa is A or G
  MOD_RES (18), (19), (20), (21): Xaa is A or G or is absent
ALHDELTVQVEKXXXXXXXXXVKAVKVSRLQVQTPRXQVN

SEQ ID NO: 14028 - protein, 40 aa, Artificial Sequence
  Non-cyclic GFR-binding peptide
  MOD_RES (1), (3), (37): Xaa is C or S
  MOD_RES (15), (16), (17), (18), (19): Xaa is A or G
  MOD_RES (20), (21), (22), (23): Xaa is A or G or is absent
XEXQSHEELVQVEKXXXXXXXXXVKAMKVSRQGTPVXELG

SEQ ID NO: 14029 - protein, 38 aa, Artificial Sequence
  Non-cyclic GFR-binding peptide
  MOD_RES (37), (37): Xaa is C or S
ALHDELTSMEGLFIPKKRVIEMIQVTINSLQVQTPRXQ

SEQ ID NO: 14030 - protein, 42 aa, Artificial Sequence
  Non-cyclic GFR-binding peptide
  MOD_RES (2), (39): Xaa is C or S
KXALHDELTVQVEKFIPKKRVIEVKAVKVSRLQVQTPRXQVN

SEQ ID NO: 14031 - protein, 40 aa, Artificial Sequence
  Non-cyclic GFR-binding peptide
  MOD_RES (2), (36): Xaa is C or S
EXKNHQLFVQVEKHQGQHPKIRVKAMKVSREETPVXELGE

SEQ ID NO: 14032 - protein, 36 aa, Artificial Sequence
  Non-cyclic GFR-binding peptide
  MOD_RES (1), (1): Xaa is C or S
XELHEELRSMEGLLKPKKRVYEMIQVTINSHHVRSP

SEQ ID NO: 14033 - protein, 42 aa, Artificial Sequence
  Non-cyclic GFR-binding peptide
  MOD_RES (2), (4), (41): Xaa is C or S
EXKXALHDELTVQVEKFIPKKRVIEVKAVKVSRLQVQTPRXQ

SEQ ID NO: 14034 - protein, 40 aa, Artificial Sequence
  Non-cyclic GFR-binding peptide
  MOD_RES (1), (35): Xaa is C or S
  MOD_RES (13), (14), (15), (16), (17): Xaa is A or G
  MOD_RES (18), (19), (20), (21): Xaa is A or G or is absent
XQSHEELSMEGIXXXXXXXXXMIQMTINSQGTPVXELGED

SEQ ID NO: 14035 - protein, 34 aa, Artificial Sequence
  Non-cyclic GFR-binding peptide
  MOD_RES (34), (34): Xaa is C or S
QSHEELVTAKKHQGQHPKIRIKRMQVPRQGTPVX

SEQ ID NO: 14036 - protein, 39 aa, Artificial Sequence
  Non-cyclic GFR-binding peptide
  MOD_RES (2), (4): Xaa is C or S
  MOD_RES (17), (18), (19), (20), (21): Xaa is A or G
  MOD_RES (22), (23), (24), (25): Xaa is A or G or is absent
AXAXELHEELRVTAKKXXXXXXXXXIKRVQVPRHHVRSP

SEQ ID NO: 14037 - protein, 36 aa, Artificial Sequence
  Non-cyclic GFR-binding peptide
  MOD_RES (13), (14), (15), (16), (17): Xaa is A or G
  MOD_RES (18), (19), (20), (21): Xaa is A or G or is absent
ELHEELRSMEGLXXXXXXXXXMIQVTINSHHVRSPQ

SEQ ID NO: 14038 - protein, 39 aa, Artificial Sequence
  Non-cyclic GFR-binding peptide
  MOD_RES (1), (35): Xaa is C or S
  MOD_RES (13), (14), (15), (16), (17): Xaa is A or G
  MOD_RES (18), (19), (20), (21): Xaa is A or G or is absent
XKNHQLFSMEGLXXXXXXXXXMIQMTINSEETPVXELGE

SEQ ID NO: 14039 - protein, 44 aa, Artificial Sequence
  Non-cyclic GFR-binding peptide
  MOD_RES (1), (3), (40): Xaa is C or S
  MOD_RES (16), (17), (18), (19), (20): Xaa is A or G
  MOD_RES (21), (22), (23), (24): Xaa is A or G or is absent
XKXALHDELTSMEGIXXXXXXXXXMIQVTINSLQVQTPRXQVNR

SEQ ID NO: 14040 - protein, 44 aa, Artificial Sequence
  Non-cyclic GFR-binding peptide
  MOD_RES (1), (3), (40): Xaa is C or S
XAXELHEELRVTAKKLKPKKRVYEIKRVQVPRHHVRSPQXKVSS

SEQ ID NO: 14041 - protein, 37 aa, Artificial Sequence
  Non-cyclic GFR-binding peptide
  MOD_RES (34), (34): Xaa is C or S
  MOD_RES (12), (13), (14), (15), (16): Xaa is A or G
  MOD_RES (17), (18), (19), (20): Xaa is A or G or is absent
QSHEELSMEGIXXXXXXXXXMIQMTINSQGTPVXELG

SEQ ID NO: 14042 - protein, 41 aa, Artificial Sequence
  Non-cyclic GFR-binding peptide
  MOD_RES (37), (37): Xaa is C or S
ELHEELRSMEGILKPKKRVYEMIQVTINSHHVRSPQXKVSS

SEQ ID NO: 14043 - protein, 34 aa, Artificial Sequence
  Non-cyclic GFR-binding peptide
  MOD_RES (33), (33): Xaa is C or S
NHQLFSMEGLHQGQHPKIRMIQMTINSEETPVXE

SEQ ID NO: 14044 - protein, 37 aa, Artificial Sequence
  Non-cyclic GFR-binding peptide
  MOD_RES (36), (36): Xaa is C or S
  MOD_RES (12), (13), (14), (15), (16): Xaa is A or G
  MOD_RES (17), (18), (19), (20): Xaa is A or G or is absent
LHEELRSMEGIXXXXXXXXXMIQVTINSHHVRSPQXK

SEQ ID NO: 14045 - protein, 39 aa, Artificial Sequence
  Non-cyclic GFR-binding peptide
  MOD_RES (35), (35): Xaa is C or S
HEELRVTAKKLKPKKRVYEIKRVQVPRHHVRSPQXKVSS

SEQ ID NO: 14046 - protein, 42 aa, Artificial Sequence
  Non-cyclic GFR-binding peptide
  MOD_RES (1), (38): Xaa is C or S
XALHDELTSMEGLFIPKKRVIEMIQVTINSLQVQTPRXQVNR

SEQ ID NO: 14047 - protein, 36 aa, Artificial Sequence
  Non-cyclic GFR-binding peptide
  MOD_RES (1), (3): Xaa is C or S
  MOD_RES (15), (16), (17), (18), (19): Xaa is A or G
  MOD_RES (20), (21), (22), (23): Xaa is A or G or is absent
XEXKNHQLFVTAKKXXXXXXXXXIKRMQVPREETPV

SEQ ID NO: 14048 - protein, 38 aa, Artificial Sequence
  Non-cyclic GFR-binding peptide
  MOD_RES (34), (34): Xaa is C or S
  MOD_RES (12), (13), (14), (15), (16): Xaa is A or G
  MOD_RES (17), (18), (19), (20): Xaa is A or G or is absent
QSHEELVQVEKXXXXXXXXXVKAMKVSRQGTPVXELGE

SEQ ID NO: 14049 - protein, 39 aa, Artificial Sequence
  Non-cyclic GFR-binding peptide
  MOD_RES (1), (38): Xaa is C or S
XELHEELRSMEGLLKPKKRVYEMIQVTINSHHVRSPQXK

SEQ ID NO: 14050 - protein, 43 aa, Artificial Sequence
  Non-cyclic GFR-binding peptide
  MOD_RES (1), (3), (40): Xaa is C or S
XAXELHEELRVTAKKLKPKKRVYEIKRVQVPRHHVRSPQXKVS

SEQ ID NO: 14051 - protein, 41 aa, Artificial Sequence
  Non-cyclic GFR-binding peptide
  MOD_RES (1), (3), (40): Xaa is C or S
  MOD_RES (16), (17), (18), (19), (20): Xaa is A or G
  MOD_RES (21), (22), (23), (24): Xaa is A or G or is absent
XAXELHEELRVTAKKXXXXXXXXXIKRVQVPRHHVRSPQXK

SEQ ID NO: 14052 - protein, 34 aa, Artificial Sequence
  Non-cyclic GFR-binding peptide
  MOD_RES (1), (1): Xaa is C or S
XQSHEELVTAKKHQGQHPKIRIKRMQVPRQGTPV

SEQ ID NO: 14053 - protein, 41 aa, Artificial Sequence
  Non-cyclic GFR-binding peptide
  MOD_RES (2), (36): Xaa is C or S
  MOD_RES (14), (15), (16), (17), (18): Xaa is A or G
  MOD_RES (19), (20), (21), (22): Xaa is A or G or is absent
EXKNHQLFVQVEKXXXXXXXXXVKAMKVSREETPVXELGED

SEQ ID NO: 14054 - protein, 43 aa, Artificial Sequence
  Non-cyclic GFR-binding peptide
  MOD_RES (1), (3), (37): Xaa is C or S
  MOD_RES (15), (16), (17), (18), (19): Xaa is A or G
  MOD_RES (20), (21), (22), (23): Xaa is A or G or is absent
XEXQSHEELSMEGIXXXXXXXXXMIQMTINSQGTPVXELGEDN

SEQ ID NO: 14055 - protein, 41 aa, Artificial Sequence
  Non-cyclic GFR-binding peptide
  MOD_RES (1), (3), (37): Xaa is C or S
XEXKNHQLFVQVEKHQGQHPKIRVKAMKVSREETPVXELGE

SEQ ID NO: 14056 - protein, 39 aa, Artificial Sequence
  Non-cyclic GFR-binding peptide
  MOD_RES (34), (34): Xaa is C or S
QSHEELVTAKKHQGQHPKIRIKRMQVPRQGTPVXELGED

SEQ ID NO: 14057 - protein, 39 aa, Artificial Sequence
  Non-cyclic GFR-binding peptide
  MOD_RES (34), (34): Xaa is C or S
KNHQLFSMEGLHQGQHPKIRMIQMTINSEETPVXELGED

SEQ ID NO: 14058 - protein, 37 aa, Artificial Sequence
  Non-cyclic GFR-binding peptide
  MOD_RES (35), (35): Xaa is C or S
  MOD_RES (11), (12), (13), (14), (15): Xaa is A or G
  MOD_RES (16), (17), (18), (19): Xaa is A or G or is absent
HEELRVTAKKXXXXXXXXXIKRVQVPRHHVRSPQXKV

SEQ ID NO: 14059 - protein, 39 aa, Artificial Sequence
  Non-cyclic GFR-binding peptide
  MOD_RES (2), (39): Xaa is C or S
  MOD_RES (15), (16), (17), (18), (19): Xaa is A or G
  MOD_RES (20), (21), (22), (23): Xaa is A or G or is absent
AXELHEELRVTAKKXXXXXXXXXIKRVQVPRHHVRSPQX

SEQ ID NO: 14060 - protein, 40 aa, Artificial Sequence
  Non-cyclic GFR-binding peptide
  MOD_RES (1), (35): Xaa is C or S
  MOD_RES (13), (14), (15), (16), (17): Xaa is A or G
  MOD_RES (18), (19), (20), (21): Xaa is A or G or is absent
XKNHQLFVQVEKXXXXXXXXXVKAMKVSREETPVXELGED

SEQ ID NO: 14061 - protein, 37 aa, Artificial Sequence
  Non-cyclic GFR-binding peptide
  MOD_RES (36), (36): Xaa is C or S
LHEELRSMEGLLKPKKRVYEMIQVTINSHHVRSPQXK

SEQ ID NO: 14062 - protein, 41 aa, Artificial Sequence
  Non-cyclic GFR-binding peptide
  MOD_RES (1), (35): Xaa is C or S
XQSHEELVQVEKHQGQHPKIRVKAMKVSRQGTPVXELGEDN

SEQ ID NO: 14063 - protein, 44 aa, Artificial Sequence
  Non-cyclic GFR-binding peptide
  MOD_RES (1), (3), (40): Xaa is C or S
XKXALHDELTVQVEKFIPKKRVIEVKAVKVSRLQVQTPRXQVNR

SEQ ID NO: 14064 - protein, 42 aa, Artificial Sequence
  Non-cyclic GFR-binding peptide
  MOD_RES (1), (38): Xaa is C or S
  MOD_RES (14), (15), (16), (17), (18): Xaa is A or G
  MOD_RES (19), (20), (21), (22): Xaa is A or G or is absent
XALHDELTVQVEKXXXXXXXXXVKAVKVSRLQVQTPRXQVNR

SEQ ID NO: 14065 - protein, 38 aa, Artificial Sequence
  Non-cyclic GFR-binding peptide
  MOD_RES (36), (36): Xaa is C or S
LHEELRSMEGILKPKKRVYEMIQVTINSHHVRSPQXKV

SEQ ID NO: 14066 - protein, 38 aa, Artificial Sequence
  Non-cyclic GFR-binding peptide
  MOD_RES (2), (4): Xaa is C or S
  MOD_RES (17), (18), (19), (20), (21): Xaa is A or G
  MOD_RES (22), (23), (24), (25): Xaa is A or G or is absent
AXAXELHEELRVTAKKXXXXXXXXXIKRVQVPRHHVRS

SEQ ID NO: 14067 - protein, 40 aa, Artificial Sequence
  Non-cyclic GFR-binding peptide
  MOD_RES (1), (38): Xaa is C or S
  MOD_RES (14), (15), (16), (17), (18): Xaa is A or G
  MOD_RES (19), (20), (21), (22): Xaa is A or G or is absent
XELHEELRSMEGLXXXXXXXXXMIQVTINSHHVRSPQXKV

SEQ ID NO: 14068 - protein, 34 aa, Artificial Sequence
  Non-cyclic GFR-binding peptide
ELHEELRSMEGILKPKKRVYEMIQVTINSHHVRS

SEQ ID NO: 14069 - protein, 35 aa, Artificial Sequence
  Non-cyclic GFR-binding peptide
  MOD_RES (34), (34): Xaa is C or S
  MOD_RES (12), (13), (14), (15), (16): Xaa is A or G
  MOD_RES (17), (18), (19), (20): Xaa is A or G or is absent
QSHEELVQVEKXXXXXXXXXVKAMKVSRQGTPVXE

SEQ ID NO: 14070 - protein, 37 aa, Artificial Sequence
  Non-cyclic GFR-binding peptide
  MOD_RES (2), (4): Xaa is C or S
RXEXKNHQLFVTAKKHQGQHPKIRIKRMQVPREETPV

SEQ ID NO: 14071 - protein, 37 aa, Artificial Sequence
  Non-cyclic GFR-binding peptide
  MOD_RES (2), (4): Xaa is C or S
  MOD_RES (16), (17), (18), (19), (20): Xaa is A or G
  MOD_RES (21), (22), (23), (24): Xaa is A or G or is absent
RXEXKNHQLFVQVEKXXXXXXXXXVKAMKVSREETPV

SEQ ID NO: 14072 - protein, 35 aa, Artificial Sequence
  Non-cyclic GFR-binding peptide
  MOD_RES (35), (35): Xaa is C or S
  MOD_RES (11), (12), (13), (14), (15): Xaa is A or G
  MOD_RES (16), (17), (18), (19): Xaa is A or G or is absent
HEELRVTAKKXXXXXXXXXIKRVQVPRHHVRSPQX

SEQ ID NO: 14073 - protein, 36 aa, Artificial Sequence
  Non-cyclic GFR-binding peptide
  MOD_RES (2), (2): Xaa is C or S
  MOD_RES (15), (16), (17), (18), (19): Xaa is A or G
  MOD_RES (20), (21), (22), (23): Xaa is A or G or is absent
KXALHDELTSMEGIXXXXXXXXXMIQVTINSLQVQT

SEQ ID NO: 14074 - protein, 33 aa, Artificial Sequence
  Non-cyclic GFR-binding peptide
HDELTVQVEKFIPKKRVIEVKAVKVSRLQVQTP

SEQ ID NO: 14075 - protein, 38 aa, Artificial Sequence
  Non-cyclic GFR-binding peptide
  MOD_RES (1), (38): Xaa is C or S
  MOD_RES (14), (15), (16), (17), (18): Xaa is A or G
  MOD_RES (19), (20), (21), (22): Xaa is A or G or is absent
XALHDELTVQVEKXXXXXXXXXVKAVKVSRLQVQTPRX

SEQ ID NO: 14076 - protein, 36 aa, Artificial Sequence
  Non-cyclic GFR-binding peptide
  MOD_RES (33), (33): Xaa is C or S
  MOD_RES (11), (12), (13), (14), (15): Xaa is A or G
  MOD_RES (16), (17), (18), (19): Xaa is A or G or is absent
NHQLFVTAKKXXXXXXXXXIKRMQVPREETPVXELG

SEQ ID NO: 14077 - protein, 40 aa, Artificial Sequence
  Non-cyclic GFR-binding peptide
  MOD_RES (2), (4): Xaa is C or S
EXKXALHDELTSMEGIFIPKKRVIEMIQVTINSLQVQTPR

SEQ ID NO: 14078 - protein, 42 aa, Artificial Sequence
  Non-cyclic GFR-binding peptide
  MOD_RES (2), (4), (41): Xaa is C or S
  MOD_RES (17), (18), (19), (20), (21): Xaa is A or G
  MOD_RES (22), (23), (24), (25): Xaa is A or G or is absent
AXAXELHEELRSMEGLXXXXXXXXXMIQVTINSHHVRSPQXK

SEQ ID NO: 14079 - protein, 45 aa, Artificial Sequence
  Non-cyclic GFR-binding peptide
  MOD_RES (2), (4), (41): Xaa is C or S
AXAXELHEELRSMEGLLKPKKRVYEMIQVTINSHHVRSPQXKVSS

SEQ ID NO: 14080 - protein, 34 aa, Artificial Sequence
  Non-cyclic GFR-binding peptide
  MOD_RES (1), (1): Xaa is C or S
XQSHEELVQVEKHQGQHPKIRVKAMKVSRQGTPV

SEQ ID NO: 14081 - protein, 41 aa, Artificial Sequence
  Non-cyclic GFR-binding peptide
  MOD_RES (2), (4), (38): Xaa is C or S
  MOD_RES (16), (17), (18), (19), (20): Xaa is A or G
  MOD_RES (21), (22), (23), (24): Xaa is A or G or is absent
RXEXKNHQLFVQVEKXXXXXXXXXVKAMKVSREETPVXELG

SEQ ID NO: 14082 - protein, 38 aa, Artificial Sequence
  Non-cyclic GFR-binding peptide
  MOD_RES (2), (36): Xaa is C or S
EXQSHEELSMEGIHQGQHPKIRMIQMTINSQGTPVXEL

SEQ ID NO: 14083 - protein, 38 aa, Artificial Sequence
  Non-cyclic GFR-binding peptide
  MOD_RES (2), (4), (38): Xaa is C or S
RXEXKNHQLFVQVEKHQGQHPKIRVKAMKVSREETPVX

SEQ ID NO: 14084 - protein, 45 aa, Artificial Sequence
  Non-cyclic GFR-binding peptide
  MOD_RES (2), (4), (41): Xaa is C or S
AXAXELHEELRVTAKKLKPKKRVYEIKRVQVPRHHVRSPQXKVSS

SEQ ID NO: 14085 - protein, 40 aa, Artificial Sequence
  Non-cyclic GFR-binding peptide
  MOD_RES (2), (4): Xaa is C or S
  MOD_RES (17), (18), (19), (20), (21): Xaa is A or G
  MOD_RES (22), (23), (24), (25): Xaa is A or G or is absent
AXAXELHEELRSMEGIXXXXXXXXXMIQVTINSHHVRSPQ

SEQ ID NO: 14086 - protein, 35 aa, Artificial Sequence
  Non-cyclic GFR-binding peptide
  MOD_RES (35), (35): Xaa is C or S
HDELTSMEGLFIPKKRVIEMIQVTINSLQVQTPRX

SEQ ID NO: 14087 - protein, 40 aa, Artificial Sequence
  Non-cyclic GFR-binding peptide
  MOD_RES (1), (3), (37): Xaa is C or S
XEXKNHQLFSMEGLHQGQHPKIRMIQMTINSEETPVXELG

SEQ ID NO: 14088 - protein, 38 aa, Artificial Sequence
  Non-cyclic GFR-binding peptide
  MOD_RES (2), (36): Xaa is C or S
EXKNHQLFVQVEKHQGQHPKIRVKAMKVSREETPVXEL

SEQ ID NO: 14089 - protein, 43 aa, Artificial Sequence
  Non-cyclic GFR-binding peptide
  MOD_RES (1), (3), (37): Xaa is C or S
  MOD_RES (15), (16), (17), (18), (19): Xaa is A or G
  MOD_RES (20), (21), (22), (23): Xaa is A or G or is absent
XEXKNHQLFVTAKKXXXXXXXXXIKRMQVPREETPVXELGEDN

SEQ ID NO: 14090 - protein, 33 aa, Artificial Sequence
  Non-cyclic GFR-binding peptide
  MOD_RES (33), (33): Xaa is C or S
  MOD_RES (11), (12), (13), (14), (15): Xaa is A or G
  MOD_RES (16), (17), (18), (19): Xaa is A or G or is absent
SHEELSMEGIXXXXXXXXXMIQMTINSQGTPVX

SEQ ID NO: 14091 - protein, 33 aa, Artificial Sequence
  Non-cyclic GFR-binding peptide
HDELTSMEGLFIPKKRVIEMIQVTINSLQVQTP

SEQ ID NO: 14092 - protein, 39 aa, Artificial Sequence
  Non-cyclic GFR-binding peptide
  MOD_RES (37), (37): Xaa is C or S
  MOD_RES (13), (14), (15), (16), (17): Xaa is A or G
  MOD_RES (18), (19), (20), (21): Xaa is A or G or is absent
ALHDELTVQVEKXXXXXXXXXVKAVKVSRLQVQTPRXQV

SEQ ID NO: 14093 - protein, 38 aa, Artificial Sequence
  Non-cyclic GFR-binding peptide
  MOD_RES (36), (36): Xaa is C or S
  MOD_RES (12), (13), (14), (15), (16): Xaa is A or G
  MOD_RES (17), (18), (19), (20): Xaa is A or G or is absent
LHDELTSMEGLXXXXXXXXXMIQVTINSLQVQTPRXQV

SEQ ID NO: 14094 - protein, 39 aa, Artificial Sequence
  Non-cyclic GFR-binding peptide
  MOD_RES (2), (4), (38): Xaa is C or S
RXEXKNHQLFVQVEKHQGQHPKIRVKAMKVSREETPVXE

SEQ ID NO: 14095 - protein, 40 aa, Artificial Sequence
  Non-cyclic GFR-binding peptide
  MOD_RES (2), (39): Xaa is C or S
AXELHEELRSMEGILKPKKRVYEMIQVTINSHHVRSPQXK

SEQ ID NO: 14096 - protein, 36 aa, Artificial Sequence
  Non-cyclic GFR-binding peptide
  MOD_RES (1), (3): Xaa is C or S
XEXQSHEELVTAKKHQGQHPKIRIKRMQVPRQGTPV

SEQ ID NO: 14097 - protein, 35 aa, Artificial Sequence
  Non-cyclic GFR-binding peptide
ELHEELRSMEGLLKPKKRVYEMIQVTINSHHVRSP

SEQ ID NO: 14098 - protein, 38 aa, Artificial Sequence
  Non-cyclic GFR-binding peptide
  MOD_RES (35), (35): Xaa is C or S
  MOD_RES (11), (12), (13), (14), (15): Xaa is A or G
  MOD_RES (16), (17), (18), (19): Xaa is A or G or is absent
HDELTVQVEKXXXXXXXXXVKAVKVSRLQVQTPRXQVN

SEQ ID NO: 14099 - protein, 36 aa, Artificial Sequence
  Non-cyclic GFR-binding peptide
  MOD_RES (35), (35): Xaa is C or S
  MOD_RES (11), (12), (13), (14), (15): Xaa is A or G
  MOD_RES (16), (17), (18), (19): Xaa is A or G or is absent
HDELTSMEGLXXXXXXXXXMIQVTINSLQVQTPRXQ

SEQ ID NO: 14100 - protein, 39 aa, Artificial Sequence
  Non-cyclic GFR-binding peptide
  MOD_RES (37), (37): Xaa is C or S
  MOD_RES (13), (14), (15), (16), (17): Xaa is A or G
  MOD_RES (18), (19), (20), (21): Xaa is A or G or is absent
ELHEELRVTAKKXXXXXXXXXIKRVQVPRHHVRSPQXKV

SEQ ID NO: 14101 - protein, 39 aa, Artificial Sequence
  Non-cyclic GFR-binding peptide
  MOD_RES (1), (35): Xaa is C or S
  MOD_RES (13), (14), (15), (16), (17): Xaa is A or G
  MOD_RES (18), (19), (20), (21): Xaa is A or G or is absent
XQSHEELVTAKKXXXXXXXXXIKRMQVPRQGTPVXELGE

SEQ ID NO: 14102 - protein, 44 aa, Artificial Sequence
  Non-cyclic GFR-binding peptide
  MOD_RES (2), (4), (38): Xaa is C or S
  MOD_RES (16), (17), (18), (19), (20): Xaa is A or G
  MOD_RES (21), (22), (23), (24): Xaa is A or G or is absent
RXEXQSHEELVQVEKXXXXXXXXXVKAMKVSRQGTPVXELGEDN

SEQ ID NO: 14103 - protein, 42 aa, Artificial Sequence
  Non-cyclic GFR-binding peptide
  MOD_RES (2), (36): Xaa is C or S
  MOD_RES (14), (15), (16), (17), (18): Xaa is A or G
  MOD_RES (19), (20), (21), (22): Xaa is A or G or is absent
EXQSHEELVQVEKXXXXXXXXXVKAMKVSRQGTPVXELGEDN

SEQ ID NO: 14104 - protein, 32 aa, Artificial Sequence
  Non-cyclic GFR-binding peptide
SHEELVTAKKHQGQHPKIRIKRMQVPRQGTPV

SEQ ID NO: 14105 - protein, 44 aa, Artificial Sequence
  Non-cyclic GFR-binding peptide
  MOD_RES (2), (4), (41): Xaa is C or S
AXAXELHEELRVTAKKLKPKKRVYEIKRVQVPRHHVRSPQXKVS

SEQ ID NO: 14106 - protein, 36 aa, Artificial Sequence
  Non-cyclic GFR-binding peptide
  MOD_RES (1), (35): Xaa is C or S
  MOD_RES (13), (14), (15), (16), (17): Xaa is A or G
  MOD_RES (18), (19), (20), (21): Xaa is A or G or is absent
XKNHQLFSMEGLXXXXXXXXXMIQMTINSEETPVXE

SEQ ID NO: 14107 - protein, 38 aa, Artificial Sequence
  Non-cyclic GFR-binding peptide
  MOD_RES (1), (3), (37): Xaa is C or S
  MOD_RES (15), (16), (17), (18), (19): Xaa is A or G
  MOD_RES (20), (21), (22), (23): Xaa is A or G or is absent
XEXKNHQLFSMEGLXXXXXXXXXMIQMTINSEETPVXE

SEQ ID NO: 14108 - protein, 36 aa, Artificial Sequence
  Non-cyclic GFR-binding peptide
  MOD_RES (13), (14), (15), (16), (17): Xaa is A or G
  MOD_RES (18), (19), (20), (21): Xaa is A or G or is absent
ELHEELRVTAKKXXXXXXXXXIKRVQVPRHHVRSPQ

SEQ ID NO: 14109 - protein, 33 aa, Artificial Sequence
  Non-cyclic GFR-binding peptide
  MOD_RES (11), (12), (13), (14), (15): Xaa is A or G
  MOD_RES (16), (17), (18), (19): Xaa is A or G or is absent
HDELTSMEGLXXXXXXXXXMIQVTINSLQVQTP

SEQ ID NO: 14110 - protein, 38 aa, Artificial Sequence
  Non-cyclic GFR-binding peptide
  MOD_RES (1), (38): Xaa is C or S
XALHDELTSMEGLFIPKKRVIEMIQVTINSLQVQTPRX

SEQ ID NO: 14111 - protein, 42 aa, Artificial Sequence
  Non-cyclic GFR-binding peptide
  MOD_RES (1), (3), (40): Xaa is C or S
XKXALHDELTSMEGLFIPKKRVIEMIQVTINSLQVQTPRXQV

SEQ ID NO: 14112 - protein, 40 aa, Artificial Sequence
  Non-cyclic GFR-binding peptide
  MOD_RES (1), (35): Xaa is C or S
XKNHQLFSMEGLHQGQHPKIRMIQMTINSEETPVXELGED

SEQ ID NO: 14113 - protein, 37 aa, Artificial Sequence
  Non-cyclic GFR-binding peptide
  MOD_RES (2), (36): Xaa is C or S
  MOD_RES (14), (15), (16), (17), (18): Xaa is A or G
  MOD_RES (19), (20), (21), (22): Xaa is A or G or is absent
EXQSHEELVQVEKXXXXXXXXXVKAMKVSRQGTPVXE

SEQ ID NO: 14114 - protein, 42 aa, Artificial Sequence
  Non-cyclic GFR-binding peptide
  MOD_RES (2), (4), (41): Xaa is C or S
  MOD_RES (17), (18), (19), (20), (21): Xaa is A or G
  MOD_RES (22), (23), (24), (25): Xaa is A or G or is absent
AXAXELHEELRVTAKKXXXXXXXXXIKRVQVPRHHVRSPQXK

SEQ ID NO: 14115 - protein, 37 aa, Artificial Sequence
  Non-cyclic GFR-binding peptide
  MOD_RES (1), (35): Xaa is C or S
XKNHQLFVQVEKHQGQHPKIRVKAMKVSREETPVXEL

SEQ ID NO: 14116 - protein, 40 aa, Artificial Sequence
  Non-cyclic GFR-binding peptide
  MOD_RES (2), (4), (38): Xaa is C or S
  MOD_RES (16), (17), (18), (19), (20): Xaa is A or G
  MOD_RES (21), (22), (23), (24): Xaa is A or G or is absent
RXEXQSHEELVQVEKXXXXXXXXXVKAMKVSRQGTPVXEL

SEQ ID NO: 14117 - protein, 37 aa, Artificial Sequence
  Non-cyclic GFR-binding peptide
  MOD_RES (33), (33): Xaa is C or S
  MOD_RES (11), (12), (13), (14), (15): Xaa is A or G
  MOD_RES (16), (17), (18), (19): Xaa is A or G or is absent
NHQLFVQVEKXXXXXXXXXVKAMKVSREETPVXELGE

SEQ ID NO: 14118 - protein, 41 aa, Artificial Sequence
  Non-cyclic GFR-binding peptide
  MOD_RES (1), (38): Xaa is C or S
XALHDELTVQVEKFIPKKRVIEVKAVKVSRLQVQTPRXQVN

SEQ ID NO: 14119 - protein, 39 aa, Artificial Sequence
  Non-cyclic GFR-binding peptide
  MOD_RES (33), (33): Xaa is C or S
  MOD_RES (11), (12), (13), (14), (15): Xaa is A or G
  MOD_RES (16), (17), (18), (19): Xaa is A or G or is absent
NHQLFVTAKKXXXXXXXXXIKRMQVPREETPVXELGEDN

SEQ ID NO: 14120 - protein, 40 aa, Artificial Sequence
  Non-cyclic GFR-binding peptide
  MOD_RES (1), (3), (37): Xaa is C or S
XEXKNHQLFVQVEKHQGQHPKIRVKAMKVSREETPVXELG

SEQ ID NO: 14121 - protein, 39 aa, Artificial Sequence
  Non-cyclic GFR-binding peptide
  MOD_RES (1), (35): Xaa is C or S
  MOD_RES (13), (14), (15), (16), (17): Xaa is A or G
  MOD_RES (18), (19), (20), (21): Xaa is A or G or is absent
XQSHEELVQVEKXXXXXXXXXVKAMKVSRQGTPVXELGE

SEQ ID NO: 14122 - protein, 43 aa, Artificial Sequence
  Non-cyclic GFR-binding peptide
  MOD_RES (2), (4), (38): Xaa is C or S
  MOD_RES (16), (17), (18), (19), (20): Xaa is A or G
  MOD_RES (21), (22), (23), (24): Xaa is A or G or is absent
RXEXKNHQLFSMEGLXXXXXXXXXMIQMTINSEETPVXELGED

SEQ ID NO: 14123 - protein, 35 aa, Artificial Sequence
  Non-cyclic GFR-binding peptide
  MOD_RES (1), (35): Xaa is C or S
XQSHEELVTAKKHQGQHPKIRIKRMQVPRQGTPVX

SEQ ID NO: 14124 - protein, 38 aa, Artificial Sequence
  Non-cyclic GFR-binding peptide
  MOD_RES (2), (2): Xaa is C or S
KXALHDELTVQVEKFIPKKRVIEVKAVKVSRLQVQTPR

SEQ ID NO: 14125 - protein, 40 aa, Artificial Sequence
  Non-cyclic GFR-binding peptide
  MOD_RES (2), (39): Xaa is C or S
  MOD_RES (15), (16), (17), (18), (19): Xaa is A or G
  MOD_RES (20), (21), (22), (23): Xaa is A or G or is absent
KXALHDELTSMEGLXXXXXXXXXMIQVTINSLQVQTPRXQ

SEQ ID NO: 14126 - protein, 39 aa, Artificial Sequence
  Non-cyclic GFR-binding peptide
  MOD_RES (33), (33): Xaa is C or S
  MOD_RES (11), (12), (13), (14), (15): Xaa is A or G
  MOD_RES (16), (17), (18), (19): Xaa is A or G or is absent
SHEELSMEGIXXXXXXXXXMIQMTINSQGTPVXELGEDN

SEQ ID NO: 14127 - protein, 40 aa, Artificial Sequence
  Non-cyclic GFR-binding peptide
  MOD_RES (2), (4): Xaa is C or S
  MOD_RES (17), (18), (19), (20), (21): Xaa is A or G
  MOD_RES (22), (23), (24), (25): Xaa is A or G or is absent
EXKXALHDELTSMEGIXXXXXXXXXMIQVTINSLQVQTPR

SEQ ID NO: 14128 - protein, 38 aa, Artificial Sequence
  Non-cyclic GFR-binding peptide
  MOD_RES (1), (3): Xaa is C or S
XAXELHEELRSMEGLLKPKKRVYEMIQVTINSHHVRSP

SEQ ID NO: 14129 - protein, 39 aa, Artificial Sequence
  Non-cyclic GFR-binding peptide
  MOD_RES (34), (34): Xaa is C or S
  MOD_RES (12), (13), (14), (15), (16): Xaa is A or G
  MOD_RES (17), (18), (19), (20): Xaa is A or G or is absent
KNHQLFVTAKKXXXXXXXXXIKRMQVPREETPVXELGED

SEQ ID NO: 14130 - protein, 34 aa, Artificial Sequence
  Non-cyclic GFR-binding peptide
  MOD_RES (33), (33): Xaa is C or S
NHQLFVQVEKHQGQHPKIRVKAMKVSREETPVXE

SEQ ID NO: 14131 - protein, 38 aa, Artificial Sequence
  Non-cyclic GFR-binding peptide
  MOD_RES (1), (3): Xaa is C or S
  MOD_RES (16), (17), (18), (19), (20): Xaa is A or G
  MOD_RES (21), (22), (23), (24): Xaa is A or G or is absent
XKXALHDELTSMEGIXXXXXXXXXMIQVTINSLQVQTP

SEQ ID NO: 14132 - protein, 35 aa, Artificial Sequence
  Non-cyclic GFR-binding peptide
  MOD_RES (2), (2): Xaa is C or S
  MOD_RES (14), (15), (16), (17), (18): Xaa is A or G
  MOD_RES (19), (20), (21), (22): Xaa is A or G or is absent
EXQSHEELVTAKKXXXXXXXXXIKRMQVPRQGTPV

SEQ ID NO: 14133 - protein, 36 aa, Artificial Sequence
  Non-cyclic GFR-binding peptide
ELHEELRVTAKKLKPKKRVYEIKRVQVPRHHVRSPQ

SEQ ID NO: 14134 - protein, 36 aa, Artificial Sequence
  Non-cyclic GFR-binding peptide
  MOD_RES (1), (1): Xaa is C or S
XELHEELRVTAKKLKPKKRVYEIKRVQVPRHHVRSP

SEQ ID NO: 14135 - protein, 38 aa, Artificial Sequence
  Non-cyclic GFR-binding peptide
  MOD_RES (1), (35): Xaa is C or S
  MOD_RES (13), (14), (15), (16), (17): Xaa is A or G
  MOD_RES (18), (19), (20), (21): Xaa is A or G or is absent
XKNHQLFVTAKKXXXXXXXXXIKRMQVPREETPVXELG

SEQ ID NO: 14136 - protein, 33 aa, Artificial Sequence
  Non-cyclic GFR-binding peptide
HEELRVTAKKLKPKKRVYEIKRVQVPRHHVRSP

SEQ ID NO: 14137 - protein, 35 aa, Artificial Sequence
  Non-cyclic GFR-binding peptide
  MOD_RES (33), (33): Xaa is C or S
SHEELVQVEKHQGQHPKIRVKAMKVSRQGTPVXEL

SEQ ID NO: 14138 - protein, 32 aa, Artificial Sequence
  Non-cyclic GFR-binding peptide
  MOD_RES (11), (12), (13), (14), (15): Xaa is A or G
  MOD_RES (16), (17), (18), (19): Xaa is A or G or is absent
SHEELSMEGIXXXXXXXXXMIQMTINSQGTPV

SEQ ID NO: 14139 - protein, 34 aa, Artificial Sequence
  Non-cyclic GFR-binding peptide
  MOD_RES (34), (34): Xaa is C or S
KNHQLFVTAKKHQGQHPKIRIKRMQVPREETPVX

SEQ ID NO: 14140 - protein, 35 aa, Artificial Sequence
  Non-cyclic GFR-binding peptide
  MOD_RES (1), (1): Xaa is C or S
  MOD_RES (14), (15), (16), (17), (18): Xaa is A or G
  MOD_RES (19), (20), (21), (22): Xaa is A or G or is absent
XELHEELRVTAKKXXXXXXXXXIKRVQVPRHHVRS

SEQ ID NO: 14141 - protein, 36 aa, Artificial Sequence
  Non-cyclic GFR-binding peptide
ALHDELTSMEGLFIPKKRVIEMIQVTINSLQVQTPR

SEQ ID NO: 14142 - protein, 44 aa, Artificial Sequence
  Non-cyclic GFR-binding peptide
  MOD_RES (2), (4), (41): Xaa is C or S
EXKXALHDELTVQVEKFIPKKRVIEVKAVKVSRLQVQTPRXQVN

SEQ ID NO: 14143 - protein, 37 aa, Artificial Sequence
  Non-cyclic GFR-binding peptide
  MOD_RES (33), (33): Xaa is C or S
  MOD_RES (11), (12), (13), (14), (15): Xaa is A or G
  MOD_RES (16), (17), (18), (19): Xaa is A or G or is absent
SHEELVTAKKXXXXXXXXXIKRMQVPRQGTPVXELGE

SEQ ID NO: 14144 - protein, 43 aa, Artificial Sequence
  Non-cyclic GFR-binding peptide
  MOD_RES (2), (39): Xaa is C or S
  MOD_RES (15), (16), (17), (18), (19): Xaa is A or G
  MOD_RES (20), (21), (22), (23): Xaa is A or G or is absent
KXALHDELTSMEGIXXXXXXXXXMIQVTINSLQVQTPRXQVNR

SEQ ID NO: 14145 - protein, 36 aa, Artificial Sequence
  Non-cyclic GFR-binding peptide
  MOD_RES (1), (35): Xaa is C or S
  MOD_RES (13), (14), (15), (16), (17): Xaa is A or G
  MOD_RES (18), (19), (20), (21): Xaa is A or G or is absent
XQSHEELVQVEKXXXXXXXXXVKAMKVSRQGTPVXE

SEQ ID NO: 14146 - protein, 44 aa, Artificial Sequence
  Non-cyclic GFR-binding peptide
  MOD_RES (2), (4), (41): Xaa is C or S
AXAXELHEELRSMEGLLKPKKRVYEMIQVTINSHHVRSPQXKVS

SEQ ID NO: 14147 - protein, 40 aa, Artificial Sequence
  Non-cyclic GFR-binding peptide
  MOD_RES (37), (37): Xaa is C or S
ALHDELTVQVEKFIPKKRVIEVKAVKVSRLQVQTPRXQVN

SEQ ID NO: 14148 - protein, 38 aa, Artificial Sequence
  Non-cyclic GFR-binding peptide
  MOD_RES (36), (36): Xaa is C or S
  MOD_RES (12), (13), (14), (15), (16): Xaa is A or G
  MOD_RES (17), (18), (19), (20): Xaa is A or G or is absent
LHDELTVQVEKXXXXXXXXXVKAVKVSRLQVQTPRXQV

SEQ ID NO: 14149 - protein, 36 aa, Artificial Sequence
  Non-cyclic GFR-binding peptide
  MOD_RES (1), (3): Xaa is C or S
  MOD_RES (15), (16), (17), (18), (19): Xaa is A or G
  MOD_RES (20), (21), (22), (23): Xaa is A or G or is absent
XEXKNHQLFVQVEKXXXXXXXXXVKAMKVSREETPV

SEQ ID NO: 14150 - protein, 41 aa, Artificial Sequence
  Non-cyclic GFR-binding peptide
  MOD_RES (2), (39): Xaa is C or S
AXELHEELRVTAKKLKPKKRVYEIKRVQVPRHHVRSPQXKV

SEQ ID NO: 14151 - protein, 36 aa, Artificial Sequence
  Non-cyclic GFR-binding peptide
  MOD_RES (35), (35): Xaa is C or S
  MOD_RES (11), (12), (13), (14), (15): Xaa is A or G
  MOD_RES (16), (17), (18), (19): Xaa is A or G or is absent
HEELRSMEGIXXXXXXXXXMIQVTINSHHVRSPQXK

SEQ ID NO: 14152 - protein, 41 aa, Artificial Sequence
  Non-cyclic GFR-binding peptide
  MOD_RES (2), (4), (41): Xaa is C or S
AXAXELHEELRSMEGLLKPKKRVYEMIQVTINSHHVRSPQX

SEQ ID NO: 14153 - protein, 44 aa, Artificial Sequence
  Non-cyclic GFR-binding peptide
  MOD_RES (1), (3), (40): Xaa is C or S
  MOD_RES (16), (17), (18), (19), (20): Xaa is A or G
  MOD_RES (21), (22), (23), (24): Xaa is A or G or is absent
XAXELHEELRVTAKKXXXXXXXXXIKRVQVPRHHVRSPQXKVSS

SEQ ID NO: 14154 - protein, 39 aa, Artificial Sequence
  Non-cyclic GFR-binding peptide
  MOD_RES (2), (36): Xaa is C or S
  MOD_RES (14), (15), (16), (17), (18): Xaa is A or G
  MOD_RES (19), (20), (21), (22): Xaa is A or G or is absent
EXQSHEELVTAKKXXXXXXXXXIKRMQVPRQGTPVXELG

SEQ ID NO: 14155 - protein, 38 aa, Artificial Sequence
  Non-cyclic GFR-binding peptide
  MOD_RES (33), (33): Xaa is C or S
NHQLFVQVEKHQGQHPKIRVKAMKVSREETPVXELGED

SEQ ID NO: 14156 - protein, 39 aa, Artificial Sequence
  Non-cyclic GFR-binding peptide
  MOD_RES (33), (33): Xaa is C or S
SHEELVTAKKHQGQHPKIRIKRMQVPRQGTPVXELGEDN

SEQ ID NO: 14157 - protein, 34 aa, Artificial Sequence
  Non-cyclic GFR-binding peptide
  MOD_RES (33), (33): Xaa is C or S
SHEELVTAKKHQGQHPKIRIKRMQVPRQGTPVXE

SEQ ID NO: 14158 - protein, 44 aa, Artificial Sequence
  Non-cyclic GFR-binding peptide
  MOD_RES (2), (4), (41): Xaa is C or S
  MOD_RES (17), (18), (19), (20), (21): Xaa is A or G
  MOD_RES (22), (23), (24), (25): Xaa is A or G or is absent
AXAXELHEELRSMEGIXXXXXXXXXMIQVTINSHHVRSPQXKVS

SEQ ID NO: 14159 - protein, 35 aa, Artificial Sequence
  Non-cyclic GFR-binding peptide
  MOD_RES (33), (33): Xaa is C or S
  MOD_RES (11), (12), (13), (14), (15): Xaa is A or G
  MOD_RES (16), (17), (18), (19): Xaa is A or G or is absent
SHEELVTAKKXXXXXXXXXIKRMQVPRQGTPVXEL

SEQ ID NO: 14160 - protein, 37 aa, Artificial Sequence
  Non-cyclic GFR-binding peptide
  MOD_RES (1), (3): Xaa is C or S
XAXELHEELRSMEGILKPKKRVYEMIQVTINSHHVRS

SEQ ID NO: 14161 - protein, 36 aa, Artificial Sequence
  Non-cyclic GFR-binding peptide
  MOD_RES (2), (36): Xaa is C or S
  MOD_RES (14), (15), (16), (17), (18): Xaa is A or G
  MOD_RES (19), (20), (21), (22): Xaa is A or G or is absent
EXKNHQLFVQVEKXXXXXXXXXVKAMKVSREETPVX

SEQ ID NO: 14162 - protein, 40 aa, Artificial Sequence
  Non-cyclic GFR-binding peptide
  MOD_RES (34), (34): Xaa is C or S
KNHQLFSMEGLHQGQHPKIRMIQMTINSEETPVXELGEDN

SEQ ID NO: 14163 - protein, 37 aa, Artificial Sequence
  Non-cyclic GFR-binding peptide
  MOD_RES (33), (33): Xaa is C or S
SHEELVQVEKHQGQHPKIRVKAMKVSRQGTPVXELGE

SEQ ID NO: 14164 - protein, 40 aa, Artificial Sequence
  Non-cyclic GFR-binding peptide
  MOD_RES (2), (36): Xaa is C or S
EXQSHEELSMEGIHQGQHPKIRMIQMTINSQGTPVXELGE

SEQ ID NO: 14165 - protein, 41 aa, Artificial Sequence
  Non-cyclic GFR-binding peptide
  MOD_RES (2), (36): Xaa is C or S
EXQSHEELVQVEKHQGQHPKIRVKAMKVSRQGTPVXELGED

SEQ ID NO: 14166 - protein, 41 aa, Artificial Sequence
  Non-cyclic GFR-binding peptide
  MOD_RES (1), (38): Xaa is C or S
XALHDELTSMEGLFIPKKRVIEMIQVTINSLQVQTPRXQVN

SEQ ID NO: 14167 - protein, 43 aa, Artificial Sequence
  Non-cyclic GFR-binding peptide
  MOD_RES (1), (3), (40): Xaa is C or S
  MOD_RES (16), (17), (18), (19), (20): Xaa is A or G
  MOD_RES (21), (22), (23), (24): Xaa is A or G or is absent
XKXALHDELTSMEGIXXXXXXXXXMIQVTINSLQVQTPRXQVN

SEQ ID NO: 14168 - protein, 41 aa, Artificial Sequence
  Non-cyclic GFR-binding peptide
  MOD_RES (1), (38): Xaa is C or S
  MOD_RES (14), (15), (16), (17), (18): Xaa is A or G
  MOD_RES (19), (20), (21), (22): Xaa is A or G or is absent
XALHDELTSMEGLXXXXXXXXXMIQVTINSLQVQTPRXQVN

SEQ ID NO: 14169 - protein, 43 aa, Artificial Sequence
  Non-cyclic GFR-binding peptide
  MOD_RES (2), (4), (38): Xaa is C or S
  MOD_RES (16), (17), (18), (19), (20): Xaa is A or G
  MOD_RES (21), (22), (23), (24): Xaa is A or G or is absent
RXEXQSHEELVQVEKXXXXXXXXXVKAMKVSRQGTPVXELGED

SEQ ID NO: 14170 - protein, 36 aa, Artificial Sequence
  Non-cyclic GFR-binding peptide
  MOD_RES (36), (36): Xaa is C or S
  MOD_RES (12), (13), (14), (15), (16): Xaa is A or G
  MOD_RES (17), (18), (19), (20): Xaa is A or G or is absent
LHDELTVQVEKXXXXXXXXXVKAVKVSRLQVQTPRX

SEQ ID NO: 14171 - protein, 33 aa, Artificial Sequence
  Non-cyclic GFR-binding peptide
  MOD_RES (11), (12), (13), (14), (15): Xaa is A or G
  MOD_RES (16), (17), (18), (19): Xaa is A or G or is absent
HEELRSMEGLXXXXXXXXXMIQVTINSHHVRSP

SEQ ID NO: 14172 - protein, 38 aa, Artificial Sequence
  Non-cyclic GFR-binding peptide
  MOD_RES (34), (34): Xaa is C or S
  MOD_RES (12), (13), (14), (15), (16): Xaa is A or G
  MOD_RES (17), (18), (19), (20): Xaa is A or G or is absent
KNHQLFVQVEKXXXXXXXXXVKAMKVSREETPVXELGE

SEQ ID NO: 14173 - protein, 36 aa, Artificial Sequence
  Non-cyclic GFR-binding peptide
  MOD_RES (1), (1): Xaa is C or S
XALHDELTSMEGLFIPKKRVIEMIQVTINSLQVQTP

SEQ ID NO: 14174 - protein, 42 aa, Artificial Sequence
  Non-cyclic GFR-binding peptide
  MOD_RES (2), (36): Xaa is C or S
EXQSHEELSMEGIHQGQHPKIRMIQMTINSQGTPVXELGEDN

SEQ ID NO: 14175 - protein, 40 aa, Artificial Sequence
  Non-cyclic GFR-binding peptide
  MOD_RES (36), (36): Xaa is C or S
  MOD_RES (12), (13), (14), (15), (16): Xaa is A or G
  MOD_RES (17), (18), (19), (20): Xaa is A or G or is absent
LHDELTVQVEKXXXXXXXXXVKAVKVSRLQVQTPRXQVNR

SEQ ID NO: 14176 - protein, 39 aa, Artificial Sequence
  Non-cyclic GFR-binding peptide
  MOD_RES (1), (3): Xaa is C or S
  MOD_RES (16), (17), (18), (19), (20): Xaa is A or G
  MOD_RES (21), (22), (23), (24): Xaa is A or G or is absent
XKXALHDELTSMEGLXXXXXXXXXMIQVTINSLQVQTPR

SEQ ID NO: 14177 - protein, 38 aa, Artificial Sequence
  Non-cyclic GFR-binding peptide
  MOD_RES (1), (3): Xaa is C or S
XKXALHDELTSMEGLFIPKKRVIEMIQVTINSLQVQTP

SEQ ID NO: 14178 - protein, 39 aa, Artificial Sequence
  Non-cyclic GFR-binding peptide
  MOD_RES (1), (3), (37): Xaa is C or S
  MOD_RES (15), (16), (17), (18), (19): Xaa is A or G
  MOD_RES (20), (21), (22), (23): Xaa is A or G or is absent
XEXQSHEELVTAKKXXXXXXXXXIKRMQVPRQGTPVXEL

SEQ ID NO: 14179 - protein, 43 aa, Artificial Sequence
  Non-cyclic GFR-binding peptide
  MOD_RES (2), (4), (38): Xaa is C or S
  MOD_RES (16), (17), (18), (19), (20): Xaa is A or G
  MOD_RES (21), (22), (23), (24): Xaa is A or G or is absent
RXEXQSHEELVTAKKXXXXXXXXXIKRMQVPRQGTPVXELGED

SEQ ID NO: 14180 - protein, 40 aa, Artificial Sequence
  Non-cyclic GFR-binding peptide
  MOD_RES (1), (3), (40): Xaa is C or S
  MOD_RES (16), (17), (18), (19), (20): Xaa is A or G
  MOD_RES (21), (22), (23), (24): Xaa is A or G or is absent
XKXALHDELTSMEGIXXXXXXXXXMIQVTINSLQVQTPRX

SEQ ID NO: 14181 - protein, 38 aa, Artificial Sequence
  Non-cyclic GFR-binding peptide
  MOD_RES (33), (33): Xaa is C or S
  MOD_RES (11), (12), (13), (14), (15): Xaa is A or G
  MOD_RES (16), (17), (18), (19): Xaa is A or G or is absent
SHEELVQVEKXXXXXXXXXVKAMKVSRQGTPVXELGED

SEQ ID NO: 14182 - protein, 36 aa, Artificial Sequence
  Non-cyclic GFR-binding peptide
  MOD_RES (1), (35): Xaa is C or S
  MOD_RES (13), (14), (15), (16), (17): Xaa is A or G
  MOD_RES (18), (19), (20), (21): Xaa is A or G or is absent
XKNHQLFVTAKKXXXXXXXXXIKRMQVPREETPVXE

SEQ ID NO: 14183 - protein, 40 aa, Artificial Sequence
  Non-cyclic GFR-binding peptide
  MOD_RES (1), (3), (37): Xaa is C or S
XEXQSHEELSMEGIHQGQHPKIRMIQMTINSQGTPVXELG

SEQ ID NO: 14184 - protein, 33 aa, Artificial Sequence
  Non-cyclic GFR-binding peptide
  MOD_RES (12), (13), (14), (15), (16): Xaa is A or G
  MOD_RES (17), (18), (19), (20): Xaa is A or G or is absent
LHDELTSMEGLXXXXXXXXXMIQVTINSLQVQT

SEQ ID NO: 14185 - protein, 43 aa, Artificial Sequence
  Non-cyclic GFR-binding peptide
  MOD_RES (2), (4), (38): Xaa is C or S
RXEXQSHEELSMEGIHQGQHPKIRMIQMTINSQGTPVXELGED

SEQ ID NO: 14186 - protein, 40 aa, Artificial Sequence
  Non-cyclic GFR-binding peptide
  MOD_RES (34), (34): Xaa is C or S
  MOD_RES (12), (13), (14), (15), (16): Xaa is A or G
  MOD_RES (17), (18), (19), (20): Xaa is A or G or is absent
QSHEELVTAKKXXXXXXXXXIKRMQVPRQGTPVXELGEDN

SEQ ID NO: 14187 - protein, 40 aa, Artificial Sequence
  Non-cyclic GFR-binding peptide
  MOD_RES (34), (34): Xaa is C or S
  MOD_RES (12), (13), (14), (15), (16): Xaa is A or G
  MOD_RES (17), (18), (19), (20): Xaa is A or G or is absent
QSHEELSMEGIXXXXXXXXXMIQMTINSQGTPVXELGEDN

SEQ ID NO: 14188 - protein, 38 aa, Artificial Sequence
  Non-cyclic GFR-binding peptide
  MOD_RES (35), (35): Xaa is C or S
HDELTSMEGIFIPKKRVIEMIQVTINSLQVQTPRXQVN

SEQ ID NO: 14189 - protein, 36 aa, Artificial Sequence
  Non-cyclic GFR-binding peptide
  MOD_RES (1), (35): Xaa is C or S
  MOD_RES (13), (14), (15), (16), (17): Xaa is A or G
  MOD_RES (18), (19), (20), (21): Xaa is A or G or is absent
XQSHEELVTAKKXXXXXXXXXIKRMQVPRQGTPVXE

SEQ ID NO: 14190 - protein, 36 aa, Artificial Sequence
  Non-cyclic GFR-binding peptide
  MOD_RES (2), (36): Xaa is C or S
  MOD_RES (14), (15), (16), (17), (18): Xaa is A or G
  MOD_RES (19), (20), (21), (22): Xaa is A or G or is absent
EXKNHQLFSMEGLXXXXXXXXXMIQMTINSEETPVX

SEQ ID NO: 14191 - protein, 35 aa, Artificial Sequence
  Non-cyclic GFR-binding peptide
  MOD_RES (1), (1): Xaa is C or S
XELHEELRSMEGLLKPKKRVYEMIQVTINSHHVRS

SEQ ID NO: 14192 - protein, 41 aa, Artificial Sequence
  Non-cyclic GFR-binding peptide
  MOD_RES (1), (3), (37): Xaa is C or S
XEXQSHEELSMEGIHQGQHPKIRMIQMTINSQGTPVXELGE

SEQ ID NO: 14193 - protein, 38 aa, Artificial Sequence
  Non-cyclic GFR-binding peptide
  MOD_RES (2), (4): Xaa is C or S
  MOD_RES (17), (18), (19), (20), (21): Xaa is A or G
  MOD_RES (22), (23), (24), (25): Xaa is A or G or is absent
EXKXALHDELTSMEGLXXXXXXXXXMIQVTINSLQVQT

SEQ ID NO: 14194 - protein, 39 aa, Artificial Sequence
  Non-cyclic GFR-binding peptide
  MOD_RES (35), (35): Xaa is C or S
HDELTSMEGIFIPKKRVIEMIQVTINSLQVQTPRXQVNR

SEQ ID NO: 14195 - protein, 40 aa, Artificial Sequence
  Non-cyclic GFR-binding peptide
  MOD_RES (2), (39): Xaa is C or S
KXALHDELTSMEGLFIPKKRVIEMIQVTINSLQVQTPRXQ

SEQ ID NO: 14196 - protein, 38 aa, Artificial Sequence
  Non-cyclic GFR-binding peptide
  MOD_RES (2), (2): Xaa is C or S
AXELHEELRSMEGILKPKKRVYEMIQVTINSHHVRSPQ

SEQ ID NO: 14197 - protein, 38 aa, Artificial Sequence
  Non-cyclic GFR-binding peptide
  MOD_RES (1), (3), (37): Xaa is C or S
  MOD_RES (15), (16), (17), (18), (19): Xaa is A or G
  MOD_RES (20), (21), (22), (23): Xaa is A or G or is absent
XEXQSHEELSMEGIXXXXXXXXXMIQMTINSQGTPVXE

SEQ ID NO: 14198 - protein, 39 aa, Artificial Sequence
  Non-cyclic GFR-binding peptide
  MOD_RES (1), (38): Xaa is C or S
  MOD_RES (14), (15), (16), (17), (18): Xaa is A or G
  MOD_RES (19), (20), (21), (22): Xaa is A or G or is absent
XALHDELTVQVEKXXXXXXXXXVKAVKVSRLQVQTPRXQ

SEQ ID NO: 14199 - protein, 39 aa, Artificial Sequence
  Non-cyclic GFR-binding peptide
  MOD_RES (35), (35): Xaa is C or S
HEELRSMEGILKPKKRVYEMIQVTINSHHVRSPQXKVSS

SEQ ID NO: 14200 - protein, 40 aa, Artificial Sequence
  Non-cyclic GFR-binding peptide
  MOD_RES (36), (36): Xaa is C or S
LHEELRSMEGLLKPKKRVYEMIQVTINSHHVRSPQXKVSS

SEQ ID NO: 14201 - protein, 40 aa, Artificial Sequence
  Non-cyclic GFR-binding peptide
  MOD_RES (1), (3), (40): Xaa is C or S
XKXALHDELTSMEGLFIPKKRVIEMIQVTINSLQVQTPRX

SEQ ID NO: 14202 - protein, 38 aa, Artificial Sequence
  Non-cyclic GFR-binding peptide
  MOD_RES (1), (38): Xaa is C or S
  MOD_RES (14), (15), (16), (17), (18): Xaa is A or G
  MOD_RES (19), (20), (21), (22): Xaa is A or G or is absent
XALHDELTSMEGLXXXXXXXXXMIQVTINSLQVQTPRX

SEQ ID NO: 14203 - protein, 41 aa, Artificial Sequence
  Non-cyclic GFR-binding peptide
  MOD_RES (2), (4), (41): Xaa is C or S
EXKXALHDELTSMEGLFIPKKRVIEMIQVTINSLQVQTPRX

SEQ ID NO: 14204 - protein, 37 aa, Artificial Sequence
  Non-cyclic GFR-binding peptide
  MOD_RES (1), (3), (37): Xaa is C or S
  MOD_RES (15), (16), (17), (18), (19): Xaa is A or G
  MOD_RES (20), (21), (22), (23): Xaa is A or G or is absent
XEXQSHEELSMEGIXXXXXXXXXMIQMTINSQGTPVX

SEQ ID NO: 14205 - protein, 37 aa, Artificial Sequence
  Non-cyclic GFR-binding peptide
  MOD_RES (37), (37): Xaa is C or S
ALHDELTSMEGLFIPKKRVIEMIQVTINSLQVQTPRX

SEQ ID NO: 14206 - protein, 33 aa, Artificial Sequence
  Non-cyclic GFR-binding peptide
  MOD_RES (12), (13), (14), (15), (16): Xaa is A or G
  MOD_RES (17), (18), (19), (20): Xaa is A or G or is absent
KNHQLFSMEGLXXXXXXXXXMIQMTINSEETPV

SEQ ID NO: 14207 - protein, 42 aa, Artificial Sequence
  Non-cyclic GFR-binding peptide
  MOD_RES (2), (36): Xaa is C or S
EXKNHQLFVTAKKHQGQHPKIRIKRMQVPREETPVXELGEDN

SEQ ID NO: 14208 - protein, 39 aa, Artificial Sequence
  Non-cyclic GFR-binding peptide
  MOD_RES (2), (4): Xaa is C or S
  MOD_RES (17), (18), (19), (20), (21): Xaa is A or G
  MOD_RES (22), (23), (24), (25): Xaa is A or G or is absent
AXAXELHEELRSMEGLXXXXXXXXXMIQVTINSHHVRSP

SEQ ID NO: 14209 - protein, 36 aa, Artificial Sequence
  Non-cyclic GFR-binding peptide
  MOD_RES (2), (2): Xaa is C or S
AXELHEELRSMEGILKPKKRVYEMIQVTINSHHVRS

SEQ ID NO: 14210 - protein, 33 aa, Artificial Sequence
  Non-cyclic GFR-binding peptide
  MOD_RES (12), (13), (14), (15), (16): Xaa is A or G
  MOD_RES (17), (18), (19), (20): Xaa is A or G or is absent
LHEELRSMEGLXXXXXXXXXMIQVTINSHHVRS

SEQ ID NO: 14211 - protein, 38 aa, Artificial Sequence
  Non-cyclic GFR-binding peptide
  MOD_RES (37), (37): Xaa is C or S
  MOD_RES (13), (14), (15), (16), (17): Xaa is A or G
  MOD_RES (18), (19), (20), (21): Xaa is A or G or is absent
ALHDELTSMEGLXXXXXXXXXMIQVTINSLQVQTPRXQ

SEQ ID NO: 14212 - protein, 41 aa, Artificial Sequence
  Non-cyclic GFR-binding peptide
  MOD_RES (1), (3), (40): Xaa is C or S
XKXALHDELTSMEGIFIPKKRVIEMIQVTINSLQVQTPRXQ

SEQ ID NO: 14213 - protein, 34 aa, Artificial Sequence
  Non-cyclic GFR-binding peptide
  MOD_RES (1), (1): Xaa is C or S
XKNHQLFSMEGLHQGQHPKIRMIQMTINSEETPV

SEQ ID NO: 14214 - protein, 39 aa, Artificial Sequence
  Non-cyclic GFR-binding peptide
  MOD_RES (35), (35): Xaa is C or S
HDELTVQVEKFIPKKRVIEVKAVKVSRLQVQTPRXQVNR

SEQ ID NO: 14215 - protein, 42 aa, Artificial Sequence
  Non-cyclic GFR-binding peptide
  MOD_RES (1), (3), (37): Xaa is C or S
  MOD_RES (15), (16), (17), (18), (19): Xaa is A or G
  MOD_RES (20), (21), (22), (23): Xaa is A or G or is absent
XEXQSHEELSMEGIXXXXXXXXXMIQMTINSQGTPVXELGED

SEQ ID NO: 14216 - protein, 39 aa, Artificial Sequence
  Non-cyclic GFR-binding peptide
  MOD_RES (2), (4): Xaa is C or S
EXKXALHDELTSMEGLFIPKKRVIEMIQVTINSLQVQTP

SEQ ID NO: 14217 - protein, 34 aa, Artificial Sequence
  Non-cyclic GFR-binding peptide
HDELTVQVEKFIPKKRVIEVKAVKVSRLQVQTPR

SEQ ID NO: 14218 - protein, 42 aa, Artificial Sequence
  Non-cyclic GFR-binding peptide
  MOD_RES (2), (4), (41): Xaa is C or S
  MOD_RES (17), (18), (19), (20), (21): Xaa is A or G
  MOD_RES (22), (23), (24), (25): Xaa is A or G or is absent
EXKXALHDELTVQVEKXXXXXXXXXVKAVKVSRLQVQTPRXQ

SEQ ID NO: 14219 - protein, 34 aa, Artificial Sequence
  Non-cyclic GFR-binding peptide
  MOD_RES (34), (34): Xaa is C or S
KNHQLFSMEGLHQGQHPKIRMIQMTINSEETPVX

SEQ ID NO: 14220 - protein, 38 aa, Artificial Sequence
  Non-cyclic GFR-binding peptide
  MOD_RES (1), (38): Xaa is C or S
XELHEELRSMEGILKPKKRVYEMIQVTINSHHVRSPQX

SEQ ID NO: 14221 - protein, 38 aa, Artificial Sequence
  Non-cyclic GFR-binding peptide
  MOD_RES (1), (35): Xaa is C or S
XQSHEELSMEGIHQGQHPKIRMIQMTINSQGTPVXELG

SEQ ID NO: 14222 - protein, 39 aa, Artificial Sequence
  Non-cyclic GFR-binding peptide
  MOD_RES (2), (39): Xaa is C or S
KXALHDELTVQVEKFIPKKRVIEVKAVKVSRLQVQTPRX

SEQ ID NO: 14223 - protein, 37 aa, Artificial Sequence
  Non-cyclic GFR-binding peptide
  MOD_RES (34), (34): Xaa is C or S
QSHEELVQVEKHQGQHPKIRVKAMKVSRQGTPVXELG

SEQ ID NO: 14224 - protein, 34 aa, Artificial Sequence
  Non-cyclic GFR-binding peptide
  MOD_RES (33), (33): Xaa is C or S
SHEELSMEGIHQGQHPKIRMIQMTINSQGTPVXE

SEQ ID NO: 14225 - protein, 42 aa, Artificial Sequence
  Non-cyclic GFR-binding peptide
  MOD_RES (2), (4), (38): Xaa is C or S
RXEXKNHQLFVTAKKHQGQHPKIRIKRMQVPREETPVXELGE

SEQ ID NO: 14226 - protein, 36 aa, Artificial Sequence
  Non-cyclic GFR-binding peptide
  MOD_RES (35), (35): Xaa is C or S
  MOD_RES (11), (12), (13), (14), (15): Xaa is A or G
  MOD_RES (16), (17), (18), (19): Xaa is A or G or is absent
HEELRVTAKKXXXXXXXXXIKRVQVPRHHVRSPQXK

SEQ ID NO: 14227 - protein, 40 aa, Artificial Sequence
  Non-cyclic GFR-binding peptide
  MOD_RES (36), (36): Xaa is C or S
  MOD_RES (12), (13), (14), (15), (16): Xaa is A or G
  MOD_RES (17), (18), (19), (20): Xaa is A or G or is absent
LHEELRSMEGIXXXXXXXXXMIQVTINSHHVRSPQXKVSS

SEQ ID NO: 14228 - protein, 39 aa, Artificial Sequence
  Non-cyclic GFR-binding peptide
  MOD_RES (33), (33): Xaa is C or S
  MOD_RES (11), (12), (13), (14), (15): Xaa is A or G
  MOD_RES (16), (17), (18), (19): Xaa is A or G or is absent
NHQLFSMEGLXXXXXXXXXMIQMTINSEETPVXELGEDN

SEQ ID NO: 14229 - protein, 41 aa, Artificial Sequence
  Non-cyclic GFR-binding peptide
  MOD_RES (1), (3), (40): Xaa is C or S
XAXELHEELRSMEGILKPKKRVYEMIQVTINSHHVRSPQXK

SEQ ID NO: 14230 - protein, 37 aa, Artificial Sequence
  Non-cyclic GFR-binding peptide
  MOD_RES (1), (35): Xaa is C or S
XQSHEELSMEGIHQGQHPKIRMIQMTINSQGTPVXEL

SEQ ID NO: 14231 - protein, 35 aa, Artificial Sequence
  Non-cyclic GFR-binding peptide
  MOD_RES (1), (35): Xaa is C or S
XKNHQLFSMEGLHQGQHPKIRMIQMTINSEETPVX

SEQ ID NO: 14232 - protein, 35 aa, Artificial Sequence
  Non-cyclic GFR-binding peptide
  MOD_RES (33), (33): Xaa is C or S
  MOD_RES (11), (12), (13), (14), (15): Xaa is A or G
  MOD_RES (16), (17), (18), (19): Xaa is A or G or is absent
SHEELSMEGIXXXXXXXXXMIQMTINSQGTPVXEL

SEQ ID NO: 14233 - protein, 39 aa, Artificial Sequence
  Non-cyclic GFR-binding peptide
  MOD_RES (2), (36): Xaa is C or S
EXQSHEELSMEGIHQGQHPKIRMIQMTINSQGTPVXELG

SEQ ID NO: 14234 - protein, 38 aa, Artificial Sequence
  Non-cyclic GFR-binding peptide
  MOD_RES (1), (3), (37): Xaa is C or S
XEXKNHQLFVTAKKHQGQHPKIRIKRMQVPREETPVXE

SEQ ID NO: 14235 - protein, 43 aa, Artificial Sequence
  Non-cyclic GFR-binding peptide
  MOD_RES (2), (39): Xaa is C or S
  MOD_RES (15), (16), (17), (18), (19): Xaa is A or G
  MOD_RES (20), (21), (22), (23): Xaa is A or G or is absent
AXELHEELRSMEGIXXXXXXXXXMIQVTINSHHVRSPQXKVSS

SEQ ID NO: 14236 - protein, 42 aa, Artificial Sequence
  Non-cyclic GFR-binding peptide
  MOD_RES (1), (3), (40): Xaa is C or S
  MOD_RES (16), (17), (18), (19), (20): Xaa is A or G
  MOD_RES (21), (22), (23), (24): Xaa is A or G or is absent
XKXALHDELTVQVEKXXXXXXXXXVKAVKVSRLQVQTPRXQV

SEQ ID NO: 14237 - protein, 42 aa, Artificial Sequence
  Non-cyclic GFR-binding peptide
  MOD_RES (1), (38): Xaa is C or S
XALHDELTVQVEKFIPKKRVIEVKAVKVSRLQVQTPRXQVNR

SEQ ID NO: 14238 - protein, 45 aa, Artificial Sequence
  Non-cyclic GFR-binding peptide
  MOD_RES (2), (4), (41): Xaa is C or S
  MOD_RES (17), (18), (19), (20), (21): Xaa is A or G
  MOD_RES (22), (23), (24), (25): Xaa is A or G or is absent
EXKXALHDELTSMEGIXXXXXXXXXMIQVTINSLQVQTPRXQVNR

SEQ ID NO: 14239 - protein, 37 aa, Artificial Sequence
  Non-cyclic GFR-binding peptide
  MOD_RES (1), (1): Xaa is C or S
  MOD_RES (14), (15), (16), (17), (18): Xaa is A or G
  MOD_RES (19), (20), (21), (22): Xaa is A or G or is absent
XELHEELRSMEGIXXXXXXXXXMIQVTINSHHVRSPQ

SEQ ID NO: 14240 - protein, 41 aa, Artificial Sequence
  Non-cyclic GFR-binding peptide
  MOD_RES (2), (36): Xaa is C or S
  MOD_RES (14), (15), (16), (17), (18): Xaa is A or G
  MOD_RES (19), (20), (21), (22): Xaa is A or G or is absent
EXKNHQLFSMEGLXXXXXXXXXMIQMTINSEETPVXELGED

SEQ ID NO: 14241 - protein, 42 aa, Artificial Sequence
  Non-cyclic GFR-binding peptide
  MOD_RES (2), (4), (38): Xaa is C or S
RXEXKNHQLFSMEGLHQGQHPKIRMIQMTINSEETPVXELGE

SEQ ID NO: 14242 - protein, 39 aa, Artificial Sequence
  Non-cyclic GFR-binding peptide
  MOD_RES (37), (37): Xaa is C or S
ELHEELRSMEGLLKPKKRVYEMIQVTINSHHVRSPQXKV

SEQ ID NO: 14243 - protein, 35 aa, Artificial Sequence
  Non-cyclic GFR-binding peptide
  MOD_RES (13), (14), (15), (16), (17): Xaa is A or G
  MOD_RES (18), (19), (20), (21): Xaa is A or G or is absent
ELHEELRVTAKKXXXXXXXXXIKRVQVPRHHVRSP

SEQ ID NO: 14244 - protein, 39 aa, Artificial Sequence
  Non-cyclic GFR-binding peptide
  MOD_RES (1), (35): Xaa is C or S
  MOD_RES (13), (14), (15), (16), (17): Xaa is A or G
  MOD_RES (18), (19), (20), (21): Xaa is A or G or is absent
XKNHQLFVTAKKXXXXXXXXXIKRMQVPREETPVXELGE

SEQ ID NO: 14245 - protein, 36 aa, Artificial Sequence
  Non-cyclic GFR-binding peptide
  MOD_RES (34), (34): Xaa is C or S
KNHQLFVTAKKHQGQHPKIRIKRMQVPREETPVXEL

SEQ ID NO: 14246 - protein, 34 aa, Artificial Sequence
  Non-cyclic GFR-binding peptide
HDELTSMEGLFIPKKRVIEMIQVTINSLQVQTPR

SEQ ID NO: 14247 - protein, 42 aa, Artificial Sequence
  Non-cyclic GFR-binding peptide
  MOD_RES (2), (36): Xaa is C or S
  MOD_RES (14), (15), (16), (17), (18): Xaa is A or G
  MOD_RES (19), (20), (21), (22): Xaa is A or G or is absent
EXQSHEELVTAKKXXXXXXXXXIKRMQVPRQGTPVXELGEDN

SEQ ID NO: 14248 - protein, 36 aa, Artificial Sequence
  Non-cyclic GFR-binding peptide
  MOD_RES (2), (36): Xaa is C or S
EXQSHEELVTAKKHQGQHPKIRIKRMQVPRQGTPVX

SEQ ID NO: 14249 - protein, 40 aa, Artificial Sequence
  Non-cyclic GFR-binding peptide
  MOD_RES (37), (37): Xaa is C or S
ALHDELTSMEGIFIPKKRVIEMIQVTINSLQVQTPRXQVN

SEQ ID NO: 14250 - protein, 42 aa, Artificial Sequence
  Non-cyclic GFR-binding peptide
  MOD_RES (2), (4), (41): Xaa is C or S
EXKXALHDELTSMEGLFIPKKRVIEMIQVTINSLQVQTPRXQ

SEQ ID NO: 14251 - protein, 35 aa, Artificial Sequence
  Non-cyclic GFR-binding peptide
  MOD_RES (1), (1): Xaa is C or S
XALHDELTSMEGIFIPKKRVIEMIQVTINSLQVQT

SEQ ID NO: 14252 - protein, 38 aa, Artificial Sequence
  Non-cyclic GFR-binding peptide
  MOD_RES (34), (34): Xaa is C or S
KNHQLFVTAKKHQGQHPKIRIKRMQVPREETPVXELGE

SEQ ID NO: 14253 - protein, 35 aa, Artificial Sequence
  Non-cyclic GFR-binding peptide
  MOD_RES (2), (2): Xaa is C or S
EXQSHEELVQVEKHQGQHPKIRVKAMKVSRQGTPV

SEQ ID NO: 14254 - protein, 39 aa, Artificial Sequence
  Non-cyclic GFR-binding peptide
  MOD_RES (2), (4): Xaa is C or S
  MOD_RES (17), (18), (19), (20), (21): Xaa is A or G
  MOD_RES (22), (23), (24), (25): Xaa is A or G or is absent
EXKXALHDELTVQVEKXXXXXXXXXVKAVKVSRLQVQTP

SEQ ID NO: 14255 - protein, 44 aa, Artificial Sequence
  Non-cyclic GFR-binding peptide
  MOD_RES (2), (4), (41): Xaa is C or S
  MOD_RES (17), (18), (19), (20), (21): Xaa is A or G
  MOD_RES (22), (23), (24), (25): Xaa is A or G or is absent
EXKXALHDELTSMEGLXXXXXXXXXMIQVTINSLQVQTPRXQVN

SEQ ID NO: 14256 - protein, 37 aa, Artificial Sequence
  Non-cyclic GFR-binding peptide
  MOD_RES (33), (33): Xaa is C or S
  MOD_RES (11), (12), (13), (14), (15): Xaa is A or G
  MOD_RES (16), (17), (18), (19): Xaa is A or G or is absent
NHQLFVTAKKXXXXXXXXXIKRMQVPREETPVXELGE

SEQ ID NO: 14257 - protein, 39 aa, Artificial Sequence
  Non-cyclic GFR-binding peptide
  MOD_RES (2), (4), (38): Xaa is C or S
  MOD_RES (16), (17), (18), (19), (20): Xaa is A or G
  MOD_RES (21), (22), (23), (24): Xaa is A or G or is absent
RXEXKNHQLFVQVEKXXXXXXXXXVKAMKVSREETPVXE

SEQ ID NO: 14258 - protein, 40 aa, Artificial Sequence
  Non-cyclic GFR-binding peptide
  MOD_RES (34), (34): Xaa is C or S
KNHQLFVQVEKHQGQHPKIRVKAMKVSREETPVXELGEDN

SEQ ID NO: 14259 - protein, 35 aa, Artificial Sequence
  Non-cyclic GFR-binding peptide
  MOD_RES (34), (34): Xaa is C or S
KNHQLFVTAKKHQGQHPKIRIKRMQVPREETPVXE

SEQ ID NO: 14260 - protein, 41 aa, Artificial Sequence
  Non-cyclic GFR-binding peptide
  MOD_RES (2), (39): Xaa is C or S
  MOD_RES (15), (16), (17), (18), (19): Xaa is A or G
  MOD_RES (20), (21), (22), (23): Xaa is A or G or is absent
KXALHDELTSMEGLXXXXXXXXXMIQVTINSLQVQTPRXQV

SEQ ID NO: 14261 - protein, 38 aa, Artificial Sequence
  Non-cyclic GFR-binding peptide
  MOD_RES (1), (35): Xaa is C or S
XKNHQLFVQVEKHQGQHPKIRVKAMKVSREETPVXELG

SEQ ID NO: 14262 - protein, 38 aa, Artificial Sequence
  Non-cyclic GFR-binding peptide
  MOD_RES (35), (35): Xaa is C or S
  MOD_RES (11), (12), (13), (14), (15): Xaa is A or G
  MOD_RES (16), (17), (18), (19): Xaa is A or G or is absent
HEELRSMEGIXXXXXXXXXMIQVTINSHHVRSPQXKVS

SEQ ID NO: 14263 - protein, 35 aa, Artificial Sequence
  Non-cyclic GFR-binding peptide
  MOD_RES (35), (35): Xaa is C or S
HDELTVQVEKFIPKKRVIEVKAVKVSRLQVQTPRX

SEQ ID NO: 14264 - protein, 37 aa, Artificial Sequence
  Non-cyclic GFR-binding peptide
  MOD_RES (2), (2): Xaa is C or S
  MOD_RES (15), (16), (17), (18), (19): Xaa is A or G
  MOD_RES (20), (21), (22), (23): Xaa is A or G or is absent
AXELHEELRSMEGIXXXXXXXXXMIQVTINSHHVRSP

SEQ ID NO: 14265 - protein, 39 aa, Artificial Sequence
  Non-cyclic GFR-binding peptide
  MOD_RES (33), (33): Xaa is C or S
  MOD_RES (11), (12), (13), (14), (15): Xaa is A or G
  MOD_RES (16), (17), (18), (19): Xaa is A or G or is absent
SHEELVTAKKXXXXXXXXXIKRMQVPRQGTPVXELGEDN

SEQ ID NO: 14266 - protein, 36 aa, Artificial Sequence
  Non-cyclic GFR-binding peptide
  MOD_RES (2), (36): Xaa is C or S
EXQSHEELVQVEKHQGQHPKIRVKAMKVSRQGTPVX

SEQ ID NO: 14267 - protein, 35 aa, Artificial Sequence
  Non-cyclic GFR-binding peptide
  MOD_RES (34), (34): Xaa is C or S
QSHEELVTAKKHQGQHPKIRIKRMQVPRQGTPVXE

SEQ ID NO: 14268 - protein, 38 aa, Artificial Sequence
  Non-cyclic GFR-binding peptide
  MOD_RES (34), (34): Xaa is C or S
  MOD_RES (12), (13), (14), (15), (16): Xaa is A or G
  MOD_RES (17), (18), (19), (20): Xaa is A or G or is absent
KNHQLFSMEGLXXXXXXXXXMIQMTINSEETPVXELGE

SEQ ID NO: 14269 - protein, 36 aa, Artificial Sequence
  Non-cyclic GFR-binding peptide
  MOD_RES (2), (2): Xaa is C or S
AXELHEELRSMEGLLKPKKRVYEMIQVTINSHHVRS

SEQ ID NO: 14270 - protein, 41 aa, Artificial Sequence
  Non-cyclic GFR-binding peptide
  MOD_RES (37), (37): Xaa is C or S
  MOD_RES (13), (14), (15), (16), (17): Xaa is A or G
  MOD_RES (18), (19), (20), (21): Xaa is A or G or is absent
ELHEELRSMEGLXXXXXXXXXMIQVTINSHHVRSPQXKVSS

SEQ ID NO: 14271 - protein, 39 aa, Artificial Sequence
  Non-cyclic GFR-binding peptide
  MOD_RES (37), (37): Xaa is C or S
  MOD_RES (13), (14), (15), (16), (17): Xaa is A or G
  MOD_RES (18), (19), (20), (21): Xaa is A or G or is absent
ALHDELTSMEGLXXXXXXXXXMIQVTINSLQVQTPRXQV

SEQ ID NO: 14272 - protein, 38 aa, Artificial Sequence
  Non-cyclic GFR-binding peptide
  MOD_RES (36), (36): Xaa is C or S
  MOD_RES (12), (13), (14), (15), (16): Xaa is A or G
  MOD_RES (17), (18), (19), (20): Xaa is A or G or is absent
LHEELRSMEGLXXXXXXXXXMIQVTINSHHVRSPQXKV

SEQ ID NO: 14273 - protein, 38 aa, Artificial Sequence
  Non-cyclic GFR-binding peptide
  MOD_RES (37), (37): Xaa is C or S
  MOD_RES (13), (14), (15), (16), (17): Xaa is A or G
  MOD_RES (18), (19), (20), (21): Xaa is A or G or is absent
ALHDELTSMEGIXXXXXXXXXMIQVTINSLQVQTPRXQ

SEQ ID NO: 14274 - protein, 35 aa, Artificial Sequence
  Non-cyclic GFR-binding peptide
  MOD_RES (33), (33): Xaa is C or S
SHEELVTAKKHQGQHPKIRIKRMQVPRQGTPVXEL

SEQ ID NO: 14275 - protein, 41 aa, Artificial Sequence
  Non-cyclic GFR-binding peptide
  MOD_RES (37), (37): Xaa is C or S
ALHDELTSMEGIFIPKKRVIEMIQVTINSLQVQTPRXQVNR

SEQ ID NO: 14276 - protein, 32 aa, Artificial Sequence
  Non-cyclic GFR-binding peptide
  MOD_RES (11), (12), (13), (14), (15): Xaa is A or G
  MOD_RES (16), (17), (18), (19): Xaa is A or G or is absent
HEELRVTAKKXXXXXXXXXIKRVQVPRHHVRS

SEQ ID NO: 14277 - protein, 36 aa, Artificial Sequence
  Non-cyclic GFR-binding peptide
  MOD_RES (36), (36): Xaa is C or S
LHDELTVQVEKFIPKKRVIEVKAVKVSRLQVQTPRX

SEQ ID NO: 14278 - protein, 36 aa, Artificial Sequence
  Non-cyclic GFR-binding peptide
  MOD_RES (2), (2): Xaa is C or S
  MOD_RES (15), (16), (17), (18), (19): Xaa is A or G
  MOD_RES (20), (21), (22), (23): Xaa is A or G or is absent
AXELHEELRSMEGIXXXXXXXXXMIQVTINSHHVRS

SEQ ID NO: 14279 - protein, 44 aa, Artificial Sequence
  Non-cyclic GFR-binding peptide
  MOD_RES (2), (4), (41): Xaa is C or S
  MOD_RES (17), (18), (19), (20), (21): Xaa is A or G
  MOD_RES (22), (23), (24), (25): Xaa is A or G or is absent
AXAXELHEELRVTAKKXXXXXXXXXIKRVQVPRHHVRSPQXKVS

SEQ ID NO: 14280 - protein, 39 aa, Artificial Sequence
  Non-cyclic GFR-binding peptide
  MOD_RES (2), (4), (38): Xaa is C or S
  MOD_RES (16), (17), (18), (19), (20): Xaa is A or G
  MOD_RES (21), (22), (23), (24): Xaa is A or G or is absent
RXEXQSHEELVTAKKXXXXXXXXXIKRMQVPRQGTPVXE

SEQ ID NO: 14281 - protein, 42 aa, Artificial Sequence
  Non-cyclic GFR-binding peptide
  MOD_RES (1), (3), (40): Xaa is C or S
XAXELHEELRSMEGLLKPKKRVYEMIQVTINSHHVRSPQXKV

SEQ ID NO: 14282 - protein, 34 aa, Artificial Sequence
  Non-cyclic GFR-binding peptide
  MOD_RES (33), (33): Xaa is C or S
  MOD_RES (11), (12), (13), (14), (15): Xaa is A or G
  MOD_RES (16), (17), (18), (19): Xaa is A or G or is absent
NHQLFVQVEKXXXXXXXXXVKAMKVSREETPVXE

SEQ ID NO: 14283 - protein, 43 aa, Artificial Sequence
  Non-cyclic GFR-binding peptide
  MOD_RES (2), (4), (41): Xaa is C or S
  MOD_RES (17), (18), (19), (20), (21): Xaa is A or G
  MOD_RES (22), (23), (24), (25): Xaa is A or G or is absent
AXAXELHEELRVTAKKXXXXXXXXXIKRVQVPRHHVRSPQXKV

SEQ ID NO: 14284 - protein, 36 aa, Artificial Sequence
  Non-cyclic GFR-binding peptide
  MOD_RES (35), (35): Xaa is C or S
HDELTSMEGIFIPKKRVIEMIQVTINSLQVQTPRXQ

SEQ ID NO: 14285 - protein, 40 aa, Artificial Sequence
  Non-cyclic GFR-binding peptide
  MOD_RES (2), (36): Xaa is C or S
  MOD_RES (14), (15), (16), (17), (18): Xaa is A or G
  MOD_RES (19), (20), (21), (22): Xaa is A or G or is absent
EXKNHQLFVTAKKXXXXXXXXXIKRMQVPREETPVXELGE

SEQ ID NO: 14286 - protein, 35 aa, Artificial Sequence
  Non-cyclic GFR-binding peptide
  MOD_RES (2), (2): Xaa is C or S
  MOD_RES (14), (15), (16), (17), (18): Xaa is A or G
  MOD_RES (19), (20), (21), (22): Xaa is A or G or is absent
EXKNHQLFVQVEKXXXXXXXXXVKAMKVSREETPV

SEQ ID NO: 14287 - protein, 40 aa, Artificial Sequence
  Non-cyclic GFR-binding peptide
  MOD_RES (2), (36): Xaa is C or S
  MOD_RES (14), (15), (16), (17), (18): Xaa is A or G
  MOD_RES (19), (20), (21), (22): Xaa is A or G or is absent
EXQSHEELVQVEKXXXXXXXXXVKAMKVSRQGTPVXELGE

SEQ ID NO: 14288 - protein, 39 aa, Artificial Sequence
  Non-cyclic GFR-binding peptide
  MOD_RES (1), (3): Xaa is C or S
  MOD_RES (16), (17), (18), (19), (20): Xaa is A or G
  MOD_RES (21), (22), (23), (24): Xaa is A or G or is absent
XKXALHDELTVQVEKXXXXXXXXXVKAVKVSRLQVQTPR

SEQ ID NO: 14289 - protein, 36 aa, Artificial Sequence
  Non-cyclic GFR-binding peptide
  MOD_RES (1), (35): Xaa is C or S
  MOD_RES (13), (14), (15), (16), (17): Xaa is A or G
  MOD_RES (18), (19), (20), (21): Xaa is A or G or is absent
XKNHQLFVQVEKXXXXXXXXXVKAMKVSREETPVXE

SEQ ID NO: 14290 - protein, 39 aa, Artificial Sequence
  Non-cyclic GFR-binding peptide
  MOD_RES (34), (34): Xaa is C or S
QSHEELVQVEKHQGQHPKIRVKAMKVSRQGTPVXELGED

SEQ ID NO: 14291 - protein, 38 aa, Artificial Sequence
  Non-cyclic GFR-binding peptide
  MOD_RES (2), (4), (38): Xaa is C or S
RXEXKNHQLFSMEGLHQGQHPKIRMIQMTINSEETPVX

SEQ ID NO: 14292 - protein, 34 aa, Artificial Sequence
  Non-cyclic GFR-binding peptide
  MOD_RES (34), (34): Xaa is C or S
  MOD_RES (12), (13), (14), (15), (16): Xaa is A or G
  MOD_RES (17), (18), (19), (20): Xaa is A or G or is absent
KNHQLFVTAKKXXXXXXXXXIKRMQVPREETPVX

SEQ ID NO: 14293 - protein, 35 aa, Artificial Sequence
  Non-cyclic GFR-binding peptide
  MOD_RES (12), (13), (14), (15), (16): Xaa is A or G
  MOD_RES (17), (18), (19), (20): Xaa is A or G or is absent
LHDELTVQVEKXXXXXXXXXVKAVKVSRLQVQTPR

SEQ ID NO: 14294 - protein, 40 aa, Artificial Sequence
  Non-cyclic GFR-binding peptide
  MOD_RES (2), (39): Xaa is C or S
  MOD_RES (15), (16), (17), (18), (19): Xaa is A or G
  MOD_RES (20), (21), (22), (23): Xaa is A or G or is absent
AXELHEELRSMEGLXXXXXXXXXMIQVTINSHHVRSPQXK

SEQ ID NO: 14295 - protein, 44 aa, Artificial Sequence
  Non-cyclic GFR-binding peptide
  MOD_RES (2), (4), (38): Xaa is C or S
RXEXKNHQLFVQVEKHQGQHPKIRVKAMKVSREETPVXELGEDN

SEQ ID NO: 14296 - protein, 36 aa, Artificial Sequence
  Non-cyclic GFR-binding peptide
  MOD_RES (36), (36): Xaa is C or S
LHEELRVTAKKLKPKKRVYEIKRVQVPRHHVRSPQX

SEQ ID NO: 14297 - protein, 39 aa, Artificial Sequence
  Non-cyclic GFR-binding peptide
  MOD_RES (2), (36): Xaa is C or S
EXKNHQLFSMEGLHQGQHPKIRMIQMTINSEETPVXELG

SEQ ID NO: 14298 - protein, 43 aa, Artificial Sequence
  Non-cyclic GFR-binding peptide
  MOD_RES (2), (4), (41): Xaa is C or S
EXKXALHDELTSMEGIFIPKKRVIEMIQVTINSLQVQTPRXQV

SEQ ID NO: 14299 - protein, 36 aa, Artificial Sequence
  Non-cyclic GFR-binding peptide
  MOD_RES (1), (35): Xaa is C or S
XQSHEELSMEGIHQGQHPKIRMIQMTINSQGTPVXE

SEQ ID NO: 14300 - protein, 42 aa, Artificial Sequence
  Non-cyclic GFR-binding peptide
  MOD_RES (2), (4), (38): Xaa is C or S
RXEXQSHEELSMEGIHQGQHPKIRMIQMTINSQGTPVXELGE

SEQ ID NO: 14301 - protein, 41 aa, Artificial Sequence
  Non-cyclic GFR-binding peptide
  MOD_RES (1), (38): Xaa is C or S
  MOD_RES (14), (15), (16), (17), (18): Xaa is A or G
  MOD_RES (19), (20), (21), (22): Xaa is A or G or is absent
XELHEELRSMEGIXXXXXXXXXMIQVTINSHHVRSPQXKVS

SEQ ID NO: 14302 - protein, 40 aa, Artificial Sequence
  Non-cyclic GFR-binding peptide
  MOD_RES (2), (36): Xaa is C or S
  MOD_RES (14), (15), (16), (17), (18): Xaa is A or G
  MOD_RES (19), (20), (21), (22): Xaa is A or G or is absent
EXKNHQLFSMEGLXXXXXXXXXMIQMTINSEETPVXELGE

SEQ ID NO: 14303 - protein, 44 aa, Artificial Sequence
  Non-cyclic GFR-binding peptide
  MOD_RES (2), (4), (38): Xaa is C or S
RXEXKNHQLFVTAKKHQGQHPKIRIKRMQVPREETPVXELGEDN

SEQ ID NO: 14304 - protein, 37 aa, Artificial Sequence
  Non-cyclic GFR-binding peptide
  MOD_RES (2), (2): Xaa is C or S
KXALHDELTSMEGLFIPKKRVIEMIQVTINSLQVQTP

SEQ ID NO: 14305 - protein, 38 aa, Artificial Sequence
  Non-cyclic GFR-binding peptide
  MOD_RES (2), (36): Xaa is C or S
  MOD_RES (14), (15), (16), (17), (18): Xaa is A or G
  MOD_RES (19), (20), (21), (22): Xaa is A or G or is absent
EXQSHEELVQVEKXXXXXXXXXVKAMKVSRQGTPVXEL

SEQ ID NO: 14306 - protein, 43 aa, Artificial Sequence
  Non-cyclic GFR-binding peptide
  MOD_RES (1), (3), (40): Xaa is C or S
  MOD_RES (16), (17), (18), (19), (20): Xaa is A or G
  MOD_RES (21), (22), (23), (24): Xaa is A or G or is absent
XKXALHDELTVQVEKXXXXXXXXXVKAVKVSRLQVQTPRXQVN

SEQ ID NO: 14307 - protein, 38 aa, Artificial Sequence
  Non-cyclic GFR-binding peptide
  MOD_RES (1), (35): Xaa is C or S
  MOD_RES (13), (14), (15), (16), (17): Xaa is A or G
  MOD_RES (18), (19), (20), (21): Xaa is A or G or is absent
XKNHQLFVQVEKXXXXXXXXXVKAMKVSREETPVXELG

SEQ ID NO: 14308 - protein, 34 aa, Artificial Sequence
  Non-cyclic GFR-binding peptide
  MOD_RES (33), (33): Xaa is C or S
SHEELVQVEKHQGQHPKIRVKAMKVSRQGTPVXE

SEQ ID NO: 14309 - protein, 39 aa, Artificial Sequence
  Non-cyclic GFR-binding peptide
  MOD_RES (2), (39): Xaa is C or S
KXALHDELTSMEGLFIPKKRVIEMIQVTINSLQVQTPRX

SEQ ID NO: 14310 - protein, 38 aa, Artificial Sequence
  Non-cyclic GFR-binding peptide
  MOD_RES (35), (35): Xaa is C or S
  MOD_RES (11), (12), (13), (14), (15): Xaa is A or G
  MOD_RES (16), (17), (18), (19): Xaa is A or G or is absent
HDELTSMEGLXXXXXXXXXMIQVTINSLQVQTPRXQVN

SEQ ID NO: 14311 - protein, 34 aa, Artificial Sequence
  Non-cyclic GFR-binding peptide
  MOD_RES (13), (14), (15), (16), (17): Xaa is A or G
  MOD_RES (18), (19), (20), (21): Xaa is A or G or is absent
ALHDELTSMEGIXXXXXXXXXMIQVTINSLQVQT

SEQ ID NO: 14312 - protein, 42 aa, Artificial Sequence
  Non-cyclic GFR-binding peptide
  MOD_RES (1), (3), (37): Xaa is C or S
  MOD_RES (15), (16), (17), (18), (19): Xaa is A or G
  MOD_RES (20), (21), (22), (23): Xaa is A or G or is absent
XEXKNHQLFVQVEKXXXXXXXXXVKAMKVSREETPVXELGED

SEQ ID NO: 14313 - protein, 38 aa, Artificial Sequence
  Non-cyclic GFR-binding peptide
  MOD_RES (34), (34): Xaa is C or S
QSHEELVQVEKHQGQHPKIRVKAMKVSRQGTPVXELGE

SEQ ID NO: 14314 - protein, 42 aa, Artificial Sequence
  Non-cyclic GFR-binding peptide
  MOD_RES (1), (3), (40): Xaa is C or S
  MOD_RES (16), (17), (18), (19), (20): Xaa is A or G
  MOD_RES (21), (22), (23), (24): Xaa is A or G or is absent
XAXELHEELRVTAKKXXXXXXXXXIKRVQVPRHHVRSPQXKV

SEQ ID NO: 14315 - protein, 41 aa, Artificial Sequence
  Non-cyclic GFR-binding peptide
  MOD_RES (1), (38): Xaa is C or S
  MOD_RES (14), (15), (16), (17), (18): Xaa is A or G
  MOD_RES (19), (20), (21), (22): Xaa is A or G or is absent
XELHEELRSMEGLXXXXXXXXXMIQVTINSHHVRSPQXKVS

SEQ ID NO: 14316 - protein, 37 aa, Artificial Sequence
  Non-cyclic GFR-binding peptide
  MOD_RES (1), (3): Xaa is C or S
  MOD_RES (16), (17), (18), (19), (20): Xaa is A or G
  MOD_RES (21), (22), (23), (24): Xaa is A or G or is absent
XAXELHEELRSMEGIXXXXXXXXXMIQVTINSHHVRS

SEQ ID NO: 14317 - protein, 38 aa, Artificial Sequence
  Non-cyclic GFR-binding peptide
  MOD_RES (33), (33): Xaa is C or S
  MOD_RES (11), (12), (13), (14), (15): Xaa is A or G
  MOD_RES (16), (17), (18), (19): Xaa is A or G or is absent
SHEELVTAKKXXXXXXXXXIKRMQVPRQGTPVXELGED

SEQ ID NO: 14318 - protein, 43 aa, Artificial Sequence
  Non-cyclic GFR-binding peptide
  MOD_RES (1), (3), (40): Xaa is C or S
XKXALHDELTSMEGLFIPKKRVIEMIQVTINSLQVQTPRXQVN

SEQ ID NO: 14319 - protein, 39 aa, Artificial Sequence
  Non-cyclic GFR-binding peptide
  MOD_RES (2), (4), (38): Xaa is C or S
  MOD_RES (16), (17), (18), (19), (20): Xaa is A or G
  MOD_RES (21), (22), (23), (24): Xaa is A or G or is absent
RXEXQSHEELVQVEKXXXXXXXXXVKAMKVSRQGTPVXE

SEQ ID NO: 14320 - protein, 35 aa, Artificial Sequence
  Non-cyclic GFR-binding peptide
  MOD_RES (33), (33): Xaa is C or S
  MOD_RES (11), (12), (13), (14), (15): Xaa is A or G
  MOD_RES (16), (17), (18), (19): Xaa is A or G or is absent
SHEELVQVEKXXXXXXXXXVKAMKVSRQGTPVXEL

SEQ ID NO: 14321 - protein, 34 aa, Artificial Sequence
  Non-cyclic GFR-binding peptide
  MOD_RES (34), (34): Xaa is C or S
KNHQLFVQVEKHQGQHPKIRVKAMKVSREETPVX

SEQ ID NO: 14322 - protein, 39 aa, Artificial Sequence
  Non-cyclic GFR-binding peptide
  MOD_RES (37), (37): Xaa is C or S
ELHEELRVTAKKLKPKKRVYEIKRVQVPRHHVRSPQXKV

SEQ ID NO: 14323 - protein, 37 aa, Artificial Sequence
  Non-cyclic GFR-binding peptide
  MOD_RES (35), (35): Xaa is C or S
  MOD_RES (11), (12), (13), (14), (15): Xaa is A or G
  MOD_RES (16), (17), (18), (19): Xaa is A or G or is absent
HDELTSMEGLXXXXXXXXXMIQVTINSLQVQTPRXQV

SEQ ID NO: 14324 - protein, 35 aa, Artificial Sequence
  Non-cyclic GFR-binding peptide
  MOD_RES (34), (34): Xaa is C or S
KNHQLFSMEGLHQGQHPKIRMIQMTINSEETPVXE

SEQ ID NO: 14325 - protein, 38 aa, Artificial Sequence
  Non-cyclic GFR-binding peptide
  MOD_RES (35), (35): Xaa is C or S
  MOD_RES (11), (12), (13), (14), (15): Xaa is A or G
  MOD_RES (16), (17), (18), (19): Xaa is A or G or is absent
HDELTSMEGIXXXXXXXXXMIQVTINSLQVQTPRXQVN

SEQ ID NO: 14326 - protein, 37 aa, Artificial Sequence
  Non-cyclic GFR-binding peptide
  MOD_RES (1), (1): Xaa is C or S
XALHDELTVQVEKFIPKKRVIEVKAVKVSRLQVQTPR

SEQ ID NO: 14327 - protein, 36 aa, Artificial Sequence
  Non-cyclic GFR-binding peptide
  MOD_RES (2), (36): Xaa is C or S
EXKNHQLFVTAKKHQGQHPKIRIKRMQVPREETPVX

SEQ ID NO: 14328 - protein, 35 aa, Artificial Sequence
  Non-cyclic GFR-binding peptide
  MOD_RES (34), (34): Xaa is C or S
  MOD_RES (12), (13), (14), (15), (16): Xaa is A or G
  MOD_RES (17), (18), (19), (20): Xaa is A or G or is absent
KNHQLFVQVEKXXXXXXXXXVKAMKVSREETPVXE

SEQ ID NO: 14329 - protein, 39 aa, Artificial Sequence
  Non-cyclic GFR-binding peptide
  MOD_RES (36), (36): Xaa is C or S
  MOD_RES (12), (13), (14), (15), (16): Xaa is A or G
  MOD_RES (17), (18), (19), (20): Xaa is A or G or is absent
LHEELRSMEGIXXXXXXXXXMIQVTINSHHVRSPQXKVS

SEQ ID NO: 14330 - protein, 40 aa, Artificial Sequence
  Non-cyclic GFR-binding peptide
  MOD_RES (2), (4): Xaa is C or S
AXAXELHEELRSMEGLLKPKKRVYEMIQVTINSHHVRSPQ

SEQ ID NO: 14331 - protein, 40 aa, Artificial Sequence
  Non-cyclic GFR-binding peptide
  MOD_RES (1), (38): Xaa is C or S
XELHEELRVTAKKLKPKKRVYEIKRVQVPRHHVRSPQXKV

SEQ ID NO: 14332 - protein, 36 aa, Artificial Sequence
  Non-cyclic GFR-binding peptide
  MOD_RES (35), (35): Xaa is C or S
HEELRVTAKKLKPKKRVYEIKRVQVPRHHVRSPQXK

SEQ ID NO: 14333 - protein, 35 aa, Artificial Sequence
  Non-cyclic GFR-binding peptide
LHEELRSMEGILKPKKRVYEMIQVTINSHHVRSPQ

SEQ ID NO: 14334 - protein, 39 aa, Artificial Sequence
  Non-cyclic GFR-binding peptide
  MOD_RES (34), (34): Xaa is C or S
QSHEELSMEGIHQGQHPKIRMIQMTINSQGTPVXELGED

SEQ ID NO: 14335 - protein, 38 aa, Artificial Sequence
  Non-cyclic GFR-binding peptide
  MOD_RES (2), (4): Xaa is C or S
  MOD_RES (17), (18), (19), (20), (21): Xaa is A or G
  MOD_RES (22), (23), (24), (25): Xaa is A or G or is absent
AXAXELHEELRSMEGLXXXXXXXXXMIQVTINSHHVRS

SEQ ID NO: 14336 - protein, 43 aa, Artificial Sequence
  Non-cyclic GFR-binding peptide
  MOD_RES (1), (3), (37): Xaa is C or S
XEXQSHEELVTAKKHQGQHPKIRIKRMQVPRQGTPVXELGEDN

SEQ ID NO: 14337 - protein, 40 aa, Artificial Sequence
  Non-cyclic GFR-binding peptide
  MOD_RES (1), (3), (40): Xaa is C or S
XAXELHEELRSMEGLLKPKKRVYEMIQVTINSHHVRSPQX

SEQ ID NO: 14338 - protein, 40 aa, Artificial Sequence
  Non-cyclic GFR-binding peptide
  MOD_RES (1), (3), (40): Xaa is C or S
XAXELHEELRSMEGILKPKKRVYEMIQVTINSHHVRSPQX

SEQ ID NO: 14339 - protein, 44 aa, Artificial Sequence
  Non-cyclic GFR-binding peptide
  MOD_RES (2), (4), (38): Xaa is C or S
  MOD_RES (16), (17), (18), (19), (20): Xaa is A or G
  MOD_RES (21), (22), (23), (24): Xaa is A or G or is absent
RXEXKNHQLFVTAKKXXXXXXXXXIKRMQVPREETPVXELGEDN

SEQ ID NO: 14340 - protein, 33 aa, Artificial Sequence
  Non-cyclic GFR-binding peptide
HDELTSMEGIFIPKKRVIEMIQVTINSLQVQTP

SEQ ID NO: 14341 - protein, 36 aa, Artificial Sequence
  Non-cyclic GFR-binding peptide
  MOD_RES (36), (36): Xaa is C or S
LHDELTSMEGIFIPKKRVIEMIQVTINSLQVQTPRX

SEQ ID NO: 14342 - protein, 33 aa, Artificial Sequence
  Non-cyclic GFR-binding peptide
LHDELTVQVEKFIPKKRVIEVKAVKVSRLQVQT

SEQ ID NO: 14343 - protein, 34 aa, Artificial Sequence
  Non-cyclic GFR-binding peptide
LHEELRSMEGLLKPKKRVYEMIQVTINSHHVRSP

SEQ ID NO: 14344 - protein, 40 aa, Artificial Sequence
  Non-cyclic GFR-binding peptide
  MOD_RES (37), (37): Xaa is C or S
ELHEELRSMEGILKPKKRVYEMIQVTINSHHVRSPQXKVS

SEQ ID NO: 14345 - protein, 35 aa, Artificial Sequence
  Non-cyclic GFR-binding peptide
  MOD_RES (13), (14), (15), (16), (17): Xaa is A or G
  MOD_RES (18), (19), (20), (21): Xaa is A or G or is absent
ALHDELTSMEGIXXXXXXXXXMIQVTINSLQVQTP

SEQ ID NO: 14346 - protein, 41 aa, Artificial Sequence
  Non-cyclic GFR-binding peptide
  MOD_RES (1), (3), (37): Xaa is C or S
  MOD_RES (15), (16), (17), (18), (19): Xaa is A or G
  MOD_RES (20), (21), (22), (23): Xaa is A or G or is absent
XEXKNHQLFVQVEKXXXXXXXXXVKAMKVSREETPVXELGE

SEQ ID NO: 14347 - protein, 34 aa, Artificial Sequence
  Non-cyclic GFR-binding peptide
  MOD_RES (1), (1): Xaa is C or S
XQSHEELSMEGIHQGQHPKIRMIQMTINSQGTPV

SEQ ID NO: 14348 - protein, 36 aa, Artificial Sequence
  Non-cyclic GFR-binding peptide
  MOD_RES (35), (35): Xaa is C or S
HEELRSMEGILKPKKRVYEMIQVTINSHHVRSPQXK

SEQ ID NO: 14349 - protein, 40 aa, Artificial Sequence
  Non-cyclic GFR-binding peptide
  MOD_RES (34), (34): Xaa is C or S
KNHQLFVTAKKHQGQHPKIRIKRMQVPREETPVXELGEDN

SEQ ID NO: 14350 - protein, 36 aa, Artificial Sequence
  Non-cyclic GFR-binding peptide
ALHDELTVQVEKFIPKKRVIEVKAVKVSRLQVQTPR

SEQ ID NO: 14351 - protein, 37 aa, Artificial Sequence
  Non-cyclic GFR-binding peptide
  MOD_RES (1), (1): Xaa is C or S
  MOD_RES (14), (15), (16), (17), (18): Xaa is A or G
  MOD_RES (19), (20), (21), (22): Xaa is A or G or is absent
XALHDELTSMEGIXXXXXXXXXMIQVTINSLQVQTPR

SEQ ID NO: 14352 - protein, 34 aa, Artificial Sequence
  Non-cyclic GFR-binding peptide
  MOD_RES (12), (13), (14), (15), (16): Xaa is A or G
  MOD_RES (17), (18), (19), (20): Xaa is A or G or is absent
LHDELTSMEGIXXXXXXXXXMIQVTINSLQVQTP

SEQ ID NO: 14353 - protein, 35 aa, Artificial Sequence
  Non-cyclic GFR-binding peptide
  MOD_RES (33), (33): Xaa is C or S
  MOD_RES (11), (12), (13), (14), (15): Xaa is A or G
  MOD_RES (16), (17), (18), (19): Xaa is A or G or is absent
NHQLFVTAKKXXXXXXXXXIKRMQVPREETPVXEL

SEQ ID NO: 14354 - protein, 40 aa, Artificial Sequence
  Non-cyclic GFR-binding peptide
  MOD_RES (2), (39): Xaa is C or S
AXELHEELRSMEGLLKPKKRVYEMIQVTINSHHVRSPQXK

SEQ ID NO: 14355 - protein, 38 aa, Artificial Sequence
  Non-cyclic GFR-binding peptide
  MOD_RES (36), (36): Xaa is C or S
LHEELRVTAKKLKPKKRVYEIKRVQVPRHHVRSPQXKV

SEQ ID NO: 14356 - protein, 44 aa, Artificial Sequence
  Non-cyclic GFR-binding peptide
  MOD_RES (1), (3), (40): Xaa is C or S
  MOD_RES (16), (17), (18), (19), (20): Xaa is A or G
  MOD_RES (21), (22), (23), (24): Xaa is A or G or is absent
XKXALHDELTVQVEKXXXXXXXXXVKAVKVSRLQVQTPRXQVNR

SEQ ID NO: 14357 - protein, 38 aa, Artificial Sequence
  Non-cyclic GFR-binding peptide
  MOD_RES (2), (4), (38): Xaa is C or S
RXEXQSHEELSMEGIHQGQHPKIRMIQMTINSQGTPVX

SEQ ID NO: 14358 - protein, 43 aa, Artificial Sequence
  Non-cyclic GFR-binding peptide
  MOD_RES (1), (3), (40): Xaa is C or S
XAXELHEELRSMEGILKPKKRVYEMIQVTINSHHVRSPQXKVS

SEQ ID NO: 14359 - protein, 40 aa, Artificial Sequence
  Non-cyclic GFR-binding peptide
  MOD_RES (2), (39): Xaa is C or S
AXELHEELRVTAKKLKPKKRVYEIKRVQVPRHHVRSPQXK

SEQ ID NO: 14360 - protein, 43 aa, Artificial Sequence
  Non-cyclic GFR-binding peptide
  MOD_RES (1), (3), (40): Xaa is C or S
XAXELHEELRSMEGLLKPKKRVYEMIQVTINSHHVRSPQXKVS

SEQ ID NO: 14361 - protein, 34 aa, Artificial Sequence
  Non-cyclic GFR-binding peptide
  MOD_RES (1), (1): Xaa is C or S
  MOD_RES (13), (14), (15), (16), (17): Xaa is A or G
  MOD_RES (18), (19), (20), (21): Xaa is A or G or is absent
XQSHEELSMEGIXXXXXXXXXMIQMTINSQGTPV

SEQ ID NO: 14362 - protein, 37 aa, Artificial Sequence
  Non-cyclic GFR-binding peptide
  MOD_RES (1), (3), (37): Xaa is C or S
  MOD_RES (15), (16), (17), (18), (19): Xaa is A or G
  MOD_RES (20), (21), (22), (23): Xaa is A or G or is absent
XEXQSHEELVTAKKXXXXXXXXXIKRMQVPRQGTPVX

SEQ ID NO: 14363 - protein, 43 aa, Artificial Sequence
  Non-cyclic GFR-binding peptide
  MOD_RES (2), (4), (41): Xaa is C or S
EXKXALHDELTVQVEKFIPKKRVIEVKAVKVSRLQVQTPRXQV

SEQ ID NO: 14364 - protein, 38 aa, Artificial Sequence
  Non-cyclic GFR-binding peptide
  MOD_RES (33), (33): Xaa is C or S
  MOD_RES (11), (12), (13), (14), (15): Xaa is A or G
  MOD_RES (16), (17), (18), (19): Xaa is A or G or is absent
NHQLFVTAKKXXXXXXXXXIKRMQVPREETPVXELGED

SEQ ID NO: 14365 - protein, 40 aa, Artificial Sequence
  Non-cyclic GFR-binding peptide
  MOD_RES (34), (34): Xaa is C or S
  MOD_RES (12), (13), (14), (15), (16): Xaa is A or G
  MOD_RES (17), (18), (19), (20): Xaa is A or G or is absent
KNHQLFSMEGLXXXXXXXXXMIQMTINSEETPVXELGEDN

SEQ ID NO: 14366 - protein, 41 aa, Artificial Sequence
  Non-cyclic GFR-binding peptide
  MOD_RES (1), (3), (37): Xaa is C or S
  MOD_RES (15), (16), (17), (18), (19): Xaa is A or G
  MOD_RES (20), (21), (22), (23): Xaa is A or G or is absent
XEXQSHEELVQVEKXXXXXXXXXVKAMKVSRQGTPVXELGE

SEQ ID NO: 14367 - protein, 41 aa, Artificial Sequence
  Non-cyclic GFR-binding peptide
  MOD_RES (2), (4), (38): Xaa is C or S
RXEXKNHQLFVTAKKHQGQHPKIRIKRMQVPREETPVXELG

SEQ ID NO: 14368 - protein, 38 aa, Artificial Sequence
  Non-cyclic GFR-binding peptide
  MOD_RES (1), (3), (37): Xaa is C or S
  MOD_RES (15), (16), (17), (18), (19): Xaa is A or G
  MOD_RES (20), (21), (22), (23): Xaa is A or G or is absent
XEXKNHQLFVQVEKXXXXXXXXXVKAMKVSREETPVXE

SEQ ID NO: 14369 - protein, 35 aa, Artificial Sequence
  Non-cyclic GFR-binding peptide
  MOD_RES (35), (35): Xaa is C or S
  MOD_RES (11), (12), (13), (14), (15): Xaa is A or G
  MOD_RES (16), (17), (18), (19): Xaa is A or G or is absent
HEELRSMEGIXXXXXXXXXMIQVTINSHHVRSPQX

SEQ ID NO: 14370 - protein, 36 aa, Artificial Sequence
  Non-cyclic GFR-binding peptide
  MOD_RES (2), (36): Xaa is C or S
EXKNHQLFSMEGLHQGQHPKIRMIQMTINSEETPVX

SEQ ID NO: 14371 - protein, 36 aa, Artificial Sequence
  Non-cyclic GFR-binding peptide
  MOD_RES (34), (34): Xaa is C or S
QSHEELVQVEKHQGQHPKIRVKAMKVSRQGTPVXEL

SEQ ID NO: 14372 - protein, 39 aa, Artificial Sequence
  Non-cyclic GFR-binding peptide
  MOD_RES (2), (36): Xaa is C or S
EXKNHQLFVTAKKHQGQHPKIRIKRMQVPREETPVXELG

SEQ ID NO: 14373 - protein, 37 aa, Artificial Sequence
  Non-cyclic GFR-binding peptide
  MOD_RES (37), (37): Xaa is C or S
  MOD_RES (13), (14), (15), (16), (17): Xaa is A or G
  MOD_RES (18), (19), (20), (21): Xaa is A or G or is absent
ALHDELTSMEGLXXXXXXXXXMIQVTINSLQVQTPRX

SEQ ID NO: 14374 - protein, 35 aa, Artificial Sequence
  Non-cyclic GFR-binding peptide
  MOD_RES (33), (33): Xaa is C or S
  MOD_RES (11), (12), (13), (14), (15): Xaa is A or G
  MOD_RES (16), (17), (18), (19): Xaa is A or G or is absent
NHQLFVQVEKXXXXXXXXXVKAMKVSREETPVXEL

SEQ ID NO: 14375 - protein, 37 aa, Artificial Sequence
  Non-cyclic GFR-binding peptide
  MOD_RES (35), (35): Xaa is C or S
HDELTVQVEKFIPKKRVIEVKAVKVSRLQVQTPRXQV

SEQ ID NO: 14376 - protein, 33 aa, Artificial Sequence
  Non-cyclic GFR-binding peptide
  MOD_RES (12), (13), (14), (15), (16): Xaa is A or G
  MOD_RES (17), (18), (19), (20): Xaa is A or G or is absent
LHDELTSMEGIXXXXXXXXXMIQVTINSLQVQT

SEQ ID NO: 14377 - protein, 40 aa, Artificial Sequence
  Non-cyclic GFR-binding peptide
  MOD_RES (37), (37): Xaa is C or S
  MOD_RES (13), (14), (15), (16), (17): Xaa is A or G
  MOD_RES (18), (19), (20), (21): Xaa is A or G or is absent
ALHDELTSMEGIXXXXXXXXXMIQVTINSLQVQTPRXQVN

SEQ ID NO: 14378 - protein, 40 aa, Artificial Sequence
  Non-cyclic GFR-binding peptide
  MOD_RES (2), (4), (38): Xaa is C or S
RXEXQSHEELVTAKKHQGQHPKIRIKRMQVPRQGTPVXEL

SEQ ID NO: 14379 - protein, 41 aa, Artificial Sequence
  Non-cyclic GFR-binding peptide
  MOD_RES (1), (3), (37): Xaa is C or S
XEXKNHQLFSMEGLHQGQHPKIRMIQMTINSEETPVXELGE

SEQ ID NO: 14380 - protein, 38 aa, Artificial Sequence
  Non-cyclic GFR-binding peptide
  MOD_RES (2), (36): Xaa is C or S
  MOD_RES (14), (15), (16), (17), (18): Xaa is A or G
  MOD_RES (19), (20), (21), (22): Xaa is A or G or is absent
EXKNHQLFVTAKKXXXXXXXXXIKRMQVPREETPVXEL

SEQ ID NO: 14381 - protein, 38 aa, Artificial Sequence
  Non-cyclic GFR-binding peptide
  MOD_RES (1), (38): Xaa is C or S
  MOD_RES (14), (15), (16), (17), (18): Xaa is A or G
  MOD_RES (19), (20), (21), (22): Xaa is A or G or is absent
XELHEELRVTAKKXXXXXXXXXIKRVQVPRHHVRSPQX

SEQ ID NO: 14382 - protein, 36 aa, Artificial Sequence
  Non-cyclic GFR-binding peptide
  MOD_RES (1), (35): Xaa is C or S
XKNHQLFVQVEKHQGQHPKIRVKAMKVSREETPVXE

SEQ ID NO: 14383 - protein, 37 aa, Artificial Sequence
  Non-cyclic GFR-binding peptide
  MOD_RES (37), (37): Xaa is C or S
  MOD_RES (13), (14), (15), (16), (17): Xaa is A or G
  MOD_RES (18), (19), (20), (21): Xaa is A or G or is absent
ALHDELTVQVEKXXXXXXXXXVKAVKVSRLQVQTPRX

SEQ ID NO: 14384 - protein, 40 aa, Artificial Sequence
  Non-cyclic GFR-binding peptide
  MOD_RES (1), (3), (40): Xaa is C or S
XKXALHDELTVQVEKFIPKKRVIEVKAVKVSRLQVQTPRX

SEQ ID NO: 14385 - protein, 40 aa, Artificial Sequence
  Non-cyclic GFR-binding peptide
  MOD_RES (36), (36): Xaa is C or S
LHEELRSMEGILKPKKRVYEMIQVTINSHHVRSPQXKVSS

SEQ ID NO: 14386 - protein, 37 aa, Artificial Sequence
  Non-cyclic GFR-binding peptide
  MOD_RES (34), (34): Xaa is C or S
QSHEELVTAKKHQGQHPKIRIKRMQVPRQGTPVXELG

SEQ ID NO: 14387 - protein, 40 aa, Artificial Sequence
  Non-cyclic GFR-binding peptide
  MOD_RES (34), (34): Xaa is C or S
QSHEELVTAKKHQGQHPKIRIKRMQVPRQGTPVXELGEDN

SEQ ID NO: 14388 - protein, 37 aa, Artificial Sequence
  Non-cyclic GFR-binding peptide
  MOD_RES (1), (3), (37): Xaa is C or S
XEXKNHQLFVTAKKHQGQHPKIRIKRMQVPREETPVX

SEQ ID NO: 14389 - protein, 42 aa, Artificial Sequence
  Non-cyclic GFR-binding peptide
  MOD_RES (2), (4), (38): Xaa is C or S
  MOD_RES (16), (17), (18), (19), (20): Xaa is A or G
  MOD_RES (21), (22), (23), (24): Xaa is A or G or is absent
RXEXKNHQLFSMEGLXXXXXXXXXMIQMTINSEETPVXELGE

SEQ ID NO: 14390 - protein, 34 aa, Artificial Sequence
  Non-cyclic GFR-binding peptide
  MOD_RES (33), (33): Xaa is C or S
NHQLFVTAKKHQGQHPKIRIKRMQVPREETPVXE

SEQ ID NO: 14391 - protein, 35 aa, Artificial Sequence
  Non-cyclic GFR-binding peptide
  MOD_RES (35), (35): Xaa is C or S
  MOD_RES (11), (12), (13), (14), (15): Xaa is A or G
  MOD_RES (16), (17), (18), (19): Xaa is A or G or is absent
HEELRSMEGLXXXXXXXXXMIQVTINSHHVRSPQX

SEQ ID NO: 14392 - protein, 38 aa, Artificial Sequence
  Non-cyclic GFR-binding peptide
  MOD_RES (1), (38): Xaa is C or S
  MOD_RES (14), (15), (16), (17), (18): Xaa is A or G
  MOD_RES (19), (20), (21), (22): Xaa is A or G or is absent
XELHEELRSMEGLXXXXXXXXXMIQVTINSHHVRSPQX

SEQ ID NO: 14393 - protein, 42 aa, Artificial Sequence
  Non-cyclic GFR-binding peptide
  MOD_RES (2), (4), (41): Xaa is C or S
AXAXELHEELRSMEGILKPKKRVYEMIQVTINSHHVRSPQXK

SEQ ID NO: 14394 - protein, 34 aa, Artificial Sequence
  Non-cyclic GFR-binding peptide
LHDELTVQVEKFIPKKRVIEVKAVKVSRLQVQTP

SEQ ID NO: 14395 - protein, 41 aa, Artificial Sequence
  Non-cyclic GFR-binding peptide
  MOD_RES (2), (4), (41): Xaa is C or S
AXAXELHEELRVTAKKLKPKKRVYEIKRVQVPRHHVRSPQX

SEQ ID NO: 14396 - protein, 34 aa, Artificial Sequence
  Non-cyclic GFR-binding peptide
  MOD_RES (34), (34): Xaa is C or S
  MOD_RES (12), (13), (14), (15), (16): Xaa is A or G
  MOD_RES (17), (18), (19), (20): Xaa is A or G or is absent
QSHEELSMEGIXXXXXXXXXMIQMTINSQGTPVX

SEQ ID NO: 14397 - protein, 37 aa, Artificial Sequence
  Non-cyclic GFR-binding peptide
  MOD_RES (1), (3), (37): Xaa is C or S
  MOD_RES (15), (16), (17), (18), (19): Xaa is A or G
  MOD_RES (20), (21), (22), (23): Xaa is A or G or is absent
XEXKNHQLFVTAKKXXXXXXXXXIKRMQVPREETPVX

SEQ ID NO: 14398 - protein, 40 aa, Artificial Sequence
  Non-cyclic GFR-binding peptide
  MOD_RES (2), (4), (38): Xaa is C or S
RXEXQSHEELSMEGIHQGQHPKIRMIQMTINSQGTPVXEL

SEQ ID NO: 14399 - protein, 41 aa, Artificial Sequence
  Non-cyclic GFR-binding peptide
  MOD_RES (2), (39): Xaa is C or S
  MOD_RES (15), (16), (17), (18), (19): Xaa is A or G
  MOD_RES (20), (21), (22), (23): Xaa is A or G or is absent
AXELHEELRSMEGIXXXXXXXXXMIQVTINSHHVRSPQXKV

SEQ ID NO: 14400 - protein, 42 aa, Artificial Sequence
  Non-cyclic GFR-binding peptide
  MOD_RES (1), (3), (40): Xaa is C or S
  MOD_RES (16), (17), (18), (19), (20): Xaa is A or G
  MOD_RES (21), (22), (23), (24): Xaa is A or G or is absent
XKXALHDELTSMEGIXXXXXXXXXMIQVTINSLQVQTPRXQV

SEQ ID NO: 14401 - protein, 42 aa, Artificial Sequence
  Non-cyclic GFR-binding peptide
  MOD_RES (1), (3), (40): Xaa is C or S
  MOD_RES (16), (17), (18), (19), (20): Xaa is A or G
  MOD_RES (21), (22), (23), (24): Xaa is A or G or is absent
XKXALHDELTSMEGLXXXXXXXXXMIQVTINSLQVQTPRXQV

SEQ ID NO: 14402 - protein, 40 aa, Artificial Sequence
  Non-cyclic GFR-binding peptide
  MOD_RES (1), (35): Xaa is C or S
  MOD_RES (13), (14), (15), (16), (17): Xaa is A or G
  MOD_RES (18), (19), (20), (21): Xaa is A or G or is absent
XKNHQLFSMEGLXXXXXXXXXMIQMTINSEETPVXELGED

SEQ ID NO: 14403 - protein, 38 aa, Artificial Sequence
  Non-cyclic GFR-binding peptide
  MOD_RES (2), (4): Xaa is C or S
  MOD_RES (17), (18), (19), (20), (21): Xaa is A or G
  MOD_RES (22), (23), (24), (25): Xaa is A or G or is absent
AXAXELHEELRSMEGIXXXXXXXXXMIQVTINSHHVRS

SEQ ID NO: 14404 - protein, 38 aa, Artificial Sequence
  Non-cyclic GFR-binding peptide
  MOD_RES (37), (37): Xaa is C or S
ELHEELRVTAKKLKPKKRVYEIKRVQVPRHHVRSPQXK

SEQ ID NO: 14405 - protein, 41 aa, Artificial Sequence
  Non-cyclic GFR-binding peptide
  MOD_RES (1), (3), (40): Xaa is C or S
  MOD_RES (16), (17), (18), (19), (20): Xaa is A or G
  MOD_RES (21), (22), (23), (24): Xaa is A or G or is absent
XAXELHEELRSMEGLXXXXXXXXXMIQVTINSHHVRSPQXK

SEQ ID NO: 14406 - protein, 39 aa, Artificial Sequence
  Non-cyclic GFR-binding peptide
  MOD_RES (1), (3): Xaa is C or S
  MOD_RES (16), (17), (18), (19), (20): Xaa is A or G
  MOD_RES (21), (22), (23), (24): Xaa is A or G or is absent
XAXELHEELRSMEGLXXXXXXXXXMIQVTINSHHVRSPQ

SEQ ID NO: 14407 - protein, 41 aa, Artificial Sequence
  Non-cyclic GFR-binding peptide
  MOD_RES (1), (3), (37): Xaa is C or S
  MOD_RES (15), (16), (17), (18), (19): Xaa is A or G
  MOD_RES (20), (21), (22), (23): Xaa is A or G or is absent
XEXKNHQLFSMEGLXXXXXXXXXMIQMTINSEETPVXELGE

SEQ ID NO: 14408 - protein, 33 aa, Artificial Sequence
  Non-cyclic GFR-binding peptide
  MOD_RES (12), (13), (14), (15), (16): Xaa is A or G
  MOD_RES (17), (18), (19), (20): Xaa is A or G or is absent
QSHEELVQVEKXXXXXXXXXVKAMKVSRQGTPV

SEQ ID NO: 14409 - protein, 40 aa, Artificial Sequence
  Non-cyclic GFR-binding peptide
  MOD_RES (1), (38): Xaa is C or S
XALHDELTSMEGIFIPKKRVIEMIQVTINSLQVQTPRXQV

SEQ ID NO: 14410 - protein, 39 aa, Artificial Sequence
  Non-cyclic GFR-binding peptide
  MOD_RES (1), (38): Xaa is C or S
  MOD_RES (14), (15), (16), (17), (18): Xaa is A or G
  MOD_RES (19), (20), (21), (22): Xaa is A or G or is absent
XELHEELRSMEGLXXXXXXXXXMIQVTINSHHVRSPQXK

SEQ ID NO: 14411 - protein, 33 aa, Artificial Sequence
  Non-cyclic GFR-binding peptide
LHEELRSMEGLLKPKKRVYEMIQVTINSHHVRS

SEQ ID NO: 14412 - protein, 40 aa, Artificial Sequence
  Non-cyclic GFR-binding peptide
  MOD_RES (36), (36): Xaa is C or S
LHDELTSMEGIFIPKKRVIEMIQVTINSLQVQTPRXQVNR

SEQ ID NO: 14413 - protein, 36 aa, Artificial Sequence
  Non-cyclic GFR-binding peptide
  MOD_RES (1), (1): Xaa is C or S
XALHDELTSMEGIFIPKKRVIEMIQVTINSLQVQTP

SEQ ID NO: 14414 - protein, 43 aa, Artificial Sequence
  Non-cyclic GFR-binding peptide
  MOD_RES (1), (3), (37): Xaa is C or S
XEXQSHEELVQVEKHQGQHPKIRVKAMKVSRQGTPVXELGEDN

SEQ ID NO: 14415 - protein, 42 aa, Artificial Sequence
  Non-cyclic GFR-binding peptide
  MOD_RES (1), (3), (40): Xaa is C or S
  MOD_RES (16), (17), (18), (19), (20): Xaa is A or G
  MOD_RES (21), (22), (23), (24): Xaa is A or G or is absent
XAXELHEELRSMEGIXXXXXXXXXMIQVTINSHHVRSPQXKV

SEQ ID NO: 14416 - protein, 40 aa, Artificial Sequence
  Non-cyclic GFR-binding peptide
  MOD_RES (1), (35): Xaa is C or S
  MOD_RES (13), (14), (15), (16), (17): Xaa is A or G
  MOD_RES (18), (19), (20), (21): Xaa is A or G or is absent
XQSHEELVTAKKXXXXXXXXXIKRMQVPRQGTPVXELGED

SEQ ID NO: 14417 - protein, 38 aa, Artificial Sequence
  Non-cyclic GFR-binding peptide
  MOD_RES (35), (35): Xaa is C or S
  MOD_RES (11), (12), (13), (14), (15): Xaa is A or G
  MOD_RES (16), (17), (18), (19): Xaa is A or G or is absent
HEELRVTAKKXXXXXXXXXIKRVQVPRHHVRSPQXKVS

SEQ ID NO: 14418 - protein, 37 aa, Artificial Sequence
  Non-cyclic GFR-binding peptide
  MOD_RES (34), (34): Xaa is C or S
  MOD_RES (12), (13), (14), (15), (16): Xaa is A or G
  MOD_RES (17), (18), (19), (20): Xaa is A or G or is absent
KNHQLFVQVEKXXXXXXXXXVKAMKVSREETPVXELG

SEQ ID NO: 14419 - protein, 37 aa, Artificial Sequence
  Non-cyclic GFR-binding peptide
  MOD_RES (1), (3): Xaa is C or S
  MOD_RES (16), (17), (18), (19), (20): Xaa is A or G
  MOD_RES (21), (22), (23), (24): Xaa is A or G or is absent
XAXELHEELRVTAKKXXXXXXXXXIKRVQVPRHHVRS

SEQ ID NO: 14420 - protein, 32 aa, Artificial Sequence
  Non-cyclic GFR-binding peptide
  MOD_RES (11), (12), (13), (14), (15): Xaa is A or G
  MOD_RES (16), (17), (18), (19): Xaa is A or G or is absent
HEELRSMEGIXXXXXXXXXMIQVTINSHHVRS

SEQ ID NO: 14421 - protein, 41 aa, Artificial Sequence
  Non-cyclic GFR-binding peptide
  MOD_RES (37), (37): Xaa is C or S
  MOD_RES (13), (14), (15), (16), (17): Xaa is A or G
  MOD_RES (18), (19), (20), (21): Xaa is A or G or is absent
ALHDELTSMEGIXXXXXXXXXMIQVTINSLQVQTPRXQVNR

SEQ ID NO: 14422 - protein, 37 aa, Artificial Sequence
  Non-cyclic GFR-binding peptide
  MOD_RES (1), (3): Xaa is C or S
  MOD_RES (16), (17), (18), (19), (20): Xaa is A or G
  MOD_RES (21), (22), (23), (24): Xaa is A or G or is absent
XKXALHDELTSMEGIXXXXXXXXXMIQVTINSLQVQT

SEQ ID NO: 14423 - protein, 36 aa, Artificial Sequence
  Non-cyclic GFR-binding peptide
  MOD_RES (1), (3): Xaa is C or S
  MOD_RES (15), (16), (17), (18), (19): Xaa is A or G
  MOD_RES (20), (21), (22), (23): Xaa is A or G or is absent
XEXQSHEELSMEGIXXXXXXXXXMIQMTINSQGTPV

SEQ ID NO: 14424 - protein, 38 aa, Artificial Sequence
  Non-cyclic GFR-binding peptide
  MOD_RES (1), (3): Xaa is C or S
XAXELHEELRSMEGILKPKKRVYEMIQVTINSHHVRSP

SEQ ID NO: 14425 - protein, 40 aa, Artificial Sequence
  Non-cyclic GFR-binding peptide
  MOD_RES (1), (3), (37): Xaa is C or S
  MOD_RES (15), (16), (17), (18), (19): Xaa is A or G
  MOD_RES (20), (21), (22), (23): Xaa is A or G or is absent
XEXKNHQLFSMEGLXXXXXXXXXMIQMTINSEETPVXELG

SEQ ID NO: 14426 - protein, 37 aa, Artificial Sequence
  Non-cyclic GFR-binding peptide
  MOD_RES (35), (35): Xaa is C or S
HDELTSMEGLFIPKKRVIEMIQVTINSLQVQTPRXQV

SEQ ID NO: 14427 - protein, 34 aa, Artificial Sequence
  Non-cyclic GFR-binding peptide
  MOD_RES (12), (13), (14), (15), (16): Xaa is A or G
  MOD_RES (17), (18), (19), (20): Xaa is A or G or is absent
LHDELTVQVEKXXXXXXXXXVKAVKVSRLQVQTP

SEQ ID NO: 14428 - protein, 35 aa, Artificial Sequence
  Non-cyclic GFR-binding peptide
  MOD_RES (1), (1): Xaa is C or S
XELHEELRSMEGILKPKKRVYEMIQVTINSHHVRS

SEQ ID NO: 14429 - protein, 38 aa, Artificial Sequence
  Non-cyclic GFR-binding peptide
  MOD_RES (36), (36): Xaa is C or S
LHDELTSMEGIFIPKKRVIEMIQVTINSLQVQTPRXQV

SEQ ID NO: 14430 - protein, 34 aa, Artificial Sequence
  Non-cyclic GFR-binding peptide
  MOD_RES (33), (33): Xaa is C or S
  MOD_RES (11), (12), (13), (14), (15): Xaa is A or G
  MOD_RES (16), (17), (18), (19): Xaa is A or G or is absent
NHQLFVTAKKXXXXXXXXXIKRMQVPREETPVXE

SEQ ID NO: 14431 - protein, 42 aa, Artificial Sequence
  Non-cyclic GFR-binding peptide
  MOD_RES (1), (3), (37): Xaa is C or S
  MOD_RES (15), (16), (17), (18), (19): Xaa is A or G
  MOD_RES (20), (21), (22), (23): Xaa is A or G or is absent
XEXKNHQLFVTAKKXXXXXXXXXIKRMQVPREETPVXELGED

SEQ ID NO: 14432 - protein, 42 aa, Artificial Sequence
  Non-cyclic GFR-binding peptide
  MOD_RES (2), (39): Xaa is C or S
KXALHDELTSMEGIFIPKKRVIEMIQVTINSLQVQTPRXQVN

SEQ ID NO: 14433 - protein, 38 aa, Artificial Sequence
  Non-cyclic GFR-binding peptide
  MOD_RES (34), (34): Xaa is C or S
QSHEELSMEGIHQGQHPKIRMIQMTINSQGTPVXELGE

SEQ ID NO: 14434 - protein, 38 aa, Artificial Sequence
  Non-cyclic GFR-binding peptide
  MOD_RES (1), (3): Xaa is C or S
  MOD_RES (16), (17), (18), (19), (20): Xaa is A or G
  MOD_RES (21), (22), (23), (24): Xaa is A or G or is absent
XAXELHEELRVTAKKXXXXXXXXXIKRVQVPRHHVRSP

SEQ ID NO: 14435 - protein, 36 aa, Artificial Sequence
  Non-cyclic GFR-binding peptide
  MOD_RES (1), (1): Xaa is C or S
XELHEELRSMEGILKPKKRVYEMIQVTINSHHVRSP

SEQ ID NO: 14436 - protein, 35 aa, Artificial Sequence
  Non-cyclic GFR-binding peptide
  MOD_RES (1), (1): Xaa is C or S
XELHEELRVTAKKLKPKKRVYEIKRVQVPRHHVRS

SEQ ID NO: 14437 - protein, 38 aa, Artificial Sequence
  Non-cyclic GFR-binding peptide
  MOD_RES (34), (34): Xaa is C or S
QSHEELVTAKKHQGQHPKIRIKRMQVPRQGTPVXELGE

SEQ ID NO: 14438 - protein, 36 aa, Artificial Sequence
  Non-cyclic GFR-binding peptide
  MOD_RES (35), (35): Xaa is C or S
HDELTSMEGLFIPKKRVIEMIQVTINSLQVQTPRXQ

SEQ ID NO: 14439 - protein, 37 aa, Artificial Sequence
  Non-cyclic GFR-binding peptide
  MOD_RES (2), (2): Xaa is C or S
  MOD_RES (15), (16), (17), (18), (19): Xaa is A or G
  MOD_RES (20), (21), (22), (23): Xaa is A or G or is absent
KXALHDELTSMEGLXXXXXXXXXMIQVTINSLQVQTP

SEQ ID NO: 14440 - protein, 33 aa, Artificial Sequence
  Non-cyclic GFR-binding peptide
LHDELTSMEGIFIPKKRVIEMIQVTINSLQVQT

SEQ ID NO: 14441 - protein, 34 aa, Artificial Sequence
  Non-cyclic GFR-binding peptide
ALHDELTSMEGIFIPKKRVIEMIQVTINSLQVQT

SEQ ID NO: 14442 - protein, 37 aa, Artificial Sequence
  Non-cyclic GFR-binding peptide
  MOD_RES (1), (35): Xaa is C or S
XKNHQLFVTAKKHQGQHPKIRIKRMQVPREETPVXEL

SEQ ID NO: 14443 - protein, 36 aa, Artificial Sequence
  Non-cyclic GFR-binding peptide
  MOD_RES (35), (35): Xaa is C or S
HEELRSMEGLLKPKKRVYEMIQVTINSHHVRSPQXK

SEQ ID NO: 14444 - protein, 37 aa, Artificial Sequence
  Non-cyclic GFR-binding peptide
  MOD_RES (1), (35): Xaa is C or S
  MOD_RES (13), (14), (15), (16), (17): Xaa is A or G
  MOD_RES (18), (19), (20), (21): Xaa is A or G or is absent
XKNHQLFVTAKKXXXXXXXXXIKRMQVPREETPVXEL

SEQ ID NO: 14445 - protein, 38 aa, Artificial Sequence
  Non-cyclic GFR-binding peptide
  MOD_RES (37), (37): Xaa is C or S
ALHDELTVQVEKFIPKKRVIEVKAVKVSRLQVQTPRXQ

SEQ ID NO: 14446 - protein, 38 aa, Artificial Sequence
  Non-cyclic GFR-binding peptide
  MOD_RES (35), (35): Xaa is C or S
  MOD_RES (11), (12), (13), (14), (15): Xaa is A or G
  MOD_RES (16), (17), (18), (19): Xaa is A or G or is absent
HEELRSMEGLXXXXXXXXXMIQVTINSHHVRSPQXKVS

SEQ ID NO: 14447 - protein, 36 aa, Artificial Sequence
  Non-cyclic GFR-binding peptide
  MOD_RES (1), (3): Xaa is C or S
  MOD_RES (15), (16), (17), (18), (19): Xaa is A or G
  MOD_RES (20), (21), (22), (23): Xaa is A or G or is absent
XEXQSHEELVQVEKXXXXXXXXXVKAMKVSRQGTPV

SEQ ID NO: 14448 - protein, 40 aa, Artificial Sequence
  Non-cyclic GFR-binding peptide
  MOD_RES (1), (35): Xaa is C or S
XKNHQLFVQVEKHQGQHPKIRVKAMKVSREETPVXELGED

SEQ ID NO: 14449 - protein, 38 aa, Artificial Sequence
  Non-cyclic GFR-binding peptide
  MOD_RES (2), (4), (38): Xaa is C or S
  MOD_RES (16), (17), (18), (19), (20): Xaa is A or G
  MOD_RES (21), (22), (23), (24): Xaa is A or G or is absent
RXEXKNHQLFSMEGLXXXXXXXXXMIQMTINSEETPVX

SEQ ID NO: 14450 - protein, 37 aa, Artificial Sequence
  Non-cyclic GFR-binding peptide
  MOD_RES (1), (3), (37): Xaa is C or S
  MOD_RES (15), (16), (17), (18), (19): Xaa is A or G
  MOD_RES (20), (21), (22), (23): Xaa is A or G or is absent
XEXKNHQLFVQVEKXXXXXXXXXVKAMKVSREETPVX

SEQ ID NO: 14451 - protein, 40 aa, Artificial Sequence
  Non-cyclic GFR-binding peptide
  MOD_RES (1), (35): Xaa is C or S
XQSHEELVTAKKHQGQHPKIRIKRMQVPRQGTPVXELGED

SEQ ID NO: 14452 - protein, 36 aa, Artificial Sequence
  Non-cyclic GFR-binding peptide
  MOD_RES (35), (35): Xaa is C or S
  MOD_RES (11), (12), (13), (14), (15): Xaa is A or G
  MOD_RES (16), (17), (18), (19): Xaa is A or G or is absent
HDELTVQVEKXXXXXXXXXVKAVKVSRLQVQTPRXQ

SEQ ID NO: 14453 - protein, 40 aa, Artificial Sequence
  Non-cyclic GFR-binding peptide
  MOD_RES (2), (4), (38): Xaa is C or S
  MOD_RES (16), (17), (18), (19), (20): Xaa is A or G
  MOD_RES (21), (22), (23), (24): Xaa is A or G or is absent
RXEXKNHQLFSMEGLXXXXXXXXXMIQMTINSEETPVXEL

SEQ ID NO: 14454 - protein, 40 aa, Artificial Sequence
  Non-cyclic GFR-binding peptide
  MOD_RES (1), (38): Xaa is C or S
  MOD_RES (14), (15), (16), (17), (18): Xaa is A or G
  MOD_RES (19), (20), (21), (22): Xaa is A or G or is absent
XALHDELTVQVEKXXXXXXXXXVKAVKVSRLQVQTPRXQV

SEQ ID NO: 14455 - protein, 34 aa, Artificial Sequence
  Non-cyclic GFR-binding peptide
  MOD_RES (11), (12), (13), (14), (15): Xaa is A or G
  MOD_RES (16), (17), (18), (19): Xaa is A or G or is absent
HDELTVQVEKXXXXXXXXXVKAVKVSRLQVQTPR

SEQ ID NO: 14456 - protein, 41 aa, Artificial Sequence
  Non-cyclic GFR-binding peptide
  MOD_RES (2), (36): Xaa is C or S
EXKNHQLFSMEGLHQGQHPKIRMIQMTINSEETPVXELGED

SEQ ID NO: 14457 - protein, 40 aa, Artificial Sequence
  Non-cyclic GFR-binding peptide
  MOD_RES (2), (4): Xaa is C or S
AXAXELHEELRVTAKKLKPKKRVYEIKRVQVPRHHVRSPQ

SEQ ID NO: 14458 - protein, 36 aa, Artificial Sequence
  Non-cyclic GFR-binding peptide
  MOD_RES (2), (2): Xaa is C or S
AXELHEELRVTAKKLKPKKRVYEIKRVQVPRHHVRS

SEQ ID NO: 14459 - protein, 36 aa, Artificial Sequence
  Non-cyclic GFR-binding peptide
  MOD_RES (36), (36): Xaa is C or S
  MOD_RES (12), (13), (14), (15), (16): Xaa is A or G
  MOD_RES (17), (18), (19), (20): Xaa is A or G or is absent
LHDELTSMEGIXXXXXXXXXMIQVTINSLQVQTPRX

SEQ ID NO: 14460 - protein, 37 aa, Artificial Sequence
  Non-cyclic GFR-binding peptide
  MOD_RES (1), (3): Xaa is C or S
XAXELHEELRSMEGLLKPKKRVYEMIQVTINSHHVRS

SEQ ID NO: 14461 - protein, 33 aa, Artificial Sequence
  Non-cyclic GFR-binding peptide
KNHQLFVQVEKHQGQHPKIRVKAMKVSREETPV

SEQ ID NO: 14462 - protein, 43 aa, Artificial Sequence
  Non-cyclic GFR-binding peptide
  MOD_RES (1), (3), (37): Xaa is C or S
XEXQSHEELSMEGIHQGQHPKIRMIQMTINSQGTPVXELGEDN

SEQ ID NO: 14463 - protein, 45 aa, Artificial Sequence
  Non-cyclic GFR-binding peptide
  MOD_RES (2), (4), (41): Xaa is C or S
EXKXALHDELTSMEGIFIPKKRVIEMIQVTINSLQVQTPRXQVNR

SEQ ID NO: 14464 - protein, 38 aa, Artificial Sequence
  Non-cyclic GFR-binding peptide
  MOD_RES (1), (38): Xaa is C or S
  MOD_RES (14), (15), (16), (17), (18): Xaa is A or G
  MOD_RES (19), (20), (21), (22): Xaa is A or G or is absent
XELHEELRSMEGIXXXXXXXXXMIQVTINSHHVRSPQX

SEQ ID NO: 14465 - protein, 36 aa, Artificial Sequence
  Non-cyclic GFR-binding peptide
  MOD_RES (1), (1): Xaa is C or S
  MOD_RES (14), (15), (16), (17), (18): Xaa is A or G
  MOD_RES (19), (20), (21), (22): Xaa is A or G or is absent
XALHDELTVQVEKXXXXXXXXXVKAVKVSRLQVQTP

SEQ ID NO: 14466 - protein, 39 aa, Artificial Sequence
  Non-cyclic GFR-binding peptide
  MOD_RES (2), (36): Xaa is C or S
  MOD_RES (14), (15), (16), (17), (18): Xaa is A or G
  MOD_RES (19), (20), (21), (22): Xaa is A or G or is absent
EXQSHEELVQVEKXXXXXXXXXVKAMKVSRQGTPVXELG

SEQ ID NO: 14467 - protein, 34 aa, Artificial Sequence
  Non-cyclic GFR-binding peptide
HEELRSMEGLLKPKKRVYEMIQVTINSHHVRSPQ

SEQ ID NO: 14468 - protein, 37 aa, Artificial Sequence
  Non-cyclic GFR-binding peptide
  MOD_RES (34), (34): Xaa is C or S
KNHQLFSMEGLHQGQHPKIRMIQMTINSEETPVXELG

SEQ ID NO: 14469 - protein, 39 aa, Artificial Sequence
  Non-cyclic GFR-binding peptide
  MOD_RES (2), (4), (38): Xaa is C or S
RXEXQSHEELVQVEKHQGQHPKIRVKAMKVSRQGTPVXE

SEQ ID NO: 14470 - protein, 34 aa, Artificial Sequence
  Non-cyclic GFR-binding peptide
  MOD_RES (13), (14), (15), (16), (17): Xaa is A or G
  MOD_RES (18), (19), (20), (21): Xaa is A or G or is absent
ELHEELRSMEGLXXXXXXXXXMIQVTINSHHVRS

SEQ ID NO: 14471 - protein, 44 aa, Artificial Sequence
  Non-cyclic GFR-binding peptide
  MOD_RES (2), (4), (41): Xaa is C or S
  MOD_RES (17), (18), (19), (20), (21): Xaa is A or G
  MOD_RES (22), (23), (24), (25): Xaa is A or G or is absent
AXAXELHEELRSMEGLXXXXXXXXXMIQVTINSHHVRSPQXKVS

SEQ ID NO: 14472 - protein, 42 aa, Artificial Sequence
  Non-cyclic GFR-binding peptide
  MOD_RES (1), (3), (37): Xaa is C or S
  MOD_RES (15), (16), (17), (18), (19): Xaa is A or G
  MOD_RES (20), (21), (22), (23): Xaa is A or G or is absent
XEXKNHQLFSMEGLXXXXXXXXXMIQMTINSEETPVXELGED

SEQ ID NO: 14473 - protein, 42 aa, Artificial Sequence
  Non-cyclic GFR-binding peptide
  MOD_RES (2), (36): Xaa is C or S
  MOD_RES (14), (15), (16), (17), (18): Xaa is A or G
  MOD_RES (19), (20), (21), (22): Xaa is A or G or is absent
EXKNHQLFVTAKKXXXXXXXXXIKRMQVPREETPVXELGEDN

SEQ ID NO: 14474 - protein, 41 aa, Artificial Sequence
  Non-cyclic GFR-binding peptide
  MOD_RES (2), (36): Xaa is C or S
  MOD_RES (14), (15), (16), (17), (18): Xaa is A or G
  MOD_RES (19), (20), (21), (22): Xaa is A or G or is absent
EXQSHEELVQVEKXXXXXXXXXVKAMKVSRQGTPVXELGED

SEQ ID NO: 14475 - protein, 35 aa, Artificial Sequence
  Non-cyclic GFR-binding peptide
  MOD_RES (12), (13), (14), (15), (16): Xaa is A or G
  MOD_RES (17), (18), (19), (20): Xaa is A or G or is absent
LHDELTSMEGIXXXXXXXXXMIQVTINSLQVQTPR

SEQ ID NO: 14476 - protein, 39 aa, Artificial Sequence
  Non-cyclic GFR-binding peptide
  MOD_RES (1), (3): Xaa is C or S
  MOD_RES (16), (17), (18), (19), (20): Xaa is A or G
  MOD_RES (21), (22), (23), (24): Xaa is A or G or is absent
XKXALHDELTSMEGIXXXXXXXXXMIQVTINSLQVQTPR

SEQ ID NO: 14477 - protein, 39 aa, Artificial Sequence
  Non-cyclic GFR-binding peptide
  MOD_RES (2), (39): Xaa is C or S
KXALHDELTSMEGIFIPKKRVIEMIQVTINSLQVQTPRX

SEQ ID NO: 14478 - protein, 41 aa, Artificial Sequence
  Non-cyclic GFR-binding peptide
  MOD_RES (2), (39): Xaa is C or S
AXELHEELRSMEGILKPKKRVYEMIQVTINSHHVRSPQXKV

SEQ ID NO: 14479 - protein, 39 aa, Artificial Sequence
  Non-cyclic GFR-binding peptide
  MOD_RES (1), (3), (37): Xaa is C or S
XEXKNHQLFSMEGLHQGQHPKIRMIQMTINSEETPVXEL

SEQ ID NO: 14480 - protein, 38 aa, Artificial Sequence
  Non-cyclic GFR-binding peptide
  MOD_RES (2), (2): Xaa is C or S
AXELHEELRSMEGLLKPKKRVYEMIQVTINSHHVRSPQ

SEQ ID NO: 14481 - protein, 35 aa, Artificial Sequence
  Non-cyclic GFR-binding peptide
  MOD_RES (13), (14), (15), (16), (17): Xaa is A or G
  MOD_RES (18), (19), (20), (21): Xaa is A or G or is absent
ELHEELRSMEGLXXXXXXXXXMIQVTINSHHVRSP

SEQ ID NO: 14482 - protein, 39 aa, Artificial Sequence
  Non-cyclic GFR-binding peptide
  MOD_RES (2), (4), (38): Xaa is C or S
RXEXQSHEELVTAKKHQGQHPKIRIKRMQVPRQGTPVXE

SEQ ID NO: 14483 - protein, 40 aa, Artificial Sequence
  Non-cyclic GFR-binding peptide
  MOD_RES (1), (3), (40): Xaa is C or S
  MOD_RES (16), (17), (18), (19), (20): Xaa is A or G
  MOD_RES (21), (22), (23), (24): Xaa is A or G or is absent
XKXALHDELTSMEGLXXXXXXXXXMIQVTINSLQVQTPRX

SEQ ID NO: 14484 - protein, 39 aa, Artificial Sequence
  Non-cyclic GFR-binding peptide
  MOD_RES (2), (4): Xaa is C or S
  MOD_RES (17), (18), (19), (20), (21): Xaa is A or G
  MOD_RES (22), (23), (24), (25): Xaa is A or G or is absent
EXKXALHDELTSMEGLXXXXXXXXXMIQVTINSLQVQTP

SEQ ID NO: 14485 - protein, 40 aa, Artificial Sequence
  Non-cyclic GFR-binding peptide
  MOD_RES (1), (3), (37): Xaa is C or S
XEXKNHQLFVTAKKHQGQHPKIRIKRMQVPREETPVXELG

SEQ ID NO: 14486 - protein, 34 aa, Artificial Sequence
  Non-cyclic GFR-binding peptide
HEELRVTAKKLKPKKRVYEIKRVQVPRHHVRSPQ

SEQ ID NO: 14487 - protein, 38 aa, Artificial Sequence
  Non-cyclic GFR-binding peptide
  MOD_RES (2), (4), (38): Xaa is C or S
  MOD_RES (16), (17), (18), (19), (20): Xaa is A or G
  MOD_RES (21), (22), (23), (24): Xaa is A or G or is absent
RXEXQSHEELVTAKKXXXXXXXXXIKRMQVPRQGTPVX

SEQ ID NO: 14488 - protein, 34 aa, Artificial Sequence
  Non-cyclic GFR-binding peptide
  MOD_RES (12), (13), (14), (15), (16): Xaa is A or G
  MOD_RES (17), (18), (19), (20): Xaa is A or G or is absent
LHEELRSMEGLXXXXXXXXXMIQVTINSHHVRSP

SEQ ID NO: 14489 - protein, 39 aa, Artificial Sequence
  Non-cyclic GFR-binding peptide
  MOD_RES (1), (38): Xaa is C or S
XALHDELTSMEGLFIPKKRVIEMIQVTINSLQVQTPRXQ

SEQ ID NO: 14490 - protein, 42 aa, Artificial Sequence
  Non-cyclic GFR-binding peptide
  MOD_RES (1), (38): Xaa is C or S
XELHEELRSMEGLLKPKKRVYEMIQVTINSHHVRSPQXKVSS

SEQ ID NO: 14491 - protein, 38 aa, Artificial Sequence
  Non-cyclic GFR-binding peptide
  MOD_RES (1), (35): Xaa is C or S
XQSHEELVTAKKHQGQHPKIRIKRMQVPRQGTPVXELG

SEQ ID NO: 14492 - protein, 42 aa, Artificial Sequence
  Non-cyclic GFR-binding peptide
  MOD_RES (1), (3), (40): Xaa is C or S
XKXALHDELTVQVEKFIPKKRVIEVKAVKVSRLQVQTPRXQV

SEQ ID NO: 14493 - protein, 41 aa, Artificial Sequence
  Non-cyclic GFR-binding peptide
  MOD_RES (1), (35): Xaa is C or S
XKNHQLFVTAKKHQGQHPKIRIKRMQVPREETPVXELGEDN

SEQ ID NO: 14494 - protein, 33 aa, Artificial Sequence
  Non-cyclic GFR-binding peptide
  MOD_RES (12), (13), (14), (15), (16): Xaa is A or G
  MOD_RES (17), (18), (19), (20): Xaa is A or G or is absent
QSHEELSMEGIXXXXXXXXXMIQMTINSQGTPV

SEQ ID NO: 14495 - protein, 40 aa, Artificial Sequence
  Non-cyclic GFR-binding peptide
  MOD_RES (2), (4), (38): Xaa is C or S
RXEXKNHQLFSMEGLHQGQHPKIRMIQMTINSEETPVXEL

SEQ ID NO: 14496 - protein, 42 aa, Artificial Sequence
  Non-cyclic GFR-binding peptide
  MOD_RES (2), (4), (38): Xaa is C or S
  MOD_RES (16), (17), (18), (19), (20): Xaa is A or G
  MOD_RES (21), (22), (23), (24): Xaa is A or G or is absent
RXEXQSHEELSMEGIXXXXXXXXXMIQMTINSQGTPVXELGE

SEQ ID NO: 14497 - protein, 34 aa, Artificial Sequence
  Non-cyclic GFR-binding peptide
  MOD_RES (11), (12), (13), (14), (15): Xaa is A or G
  MOD_RES (16), (17), (18), (19): Xaa is A or G or is absent
HDELTSMEGLXXXXXXXXXMIQVTINSLQVQTPR

SEQ ID NO: 14498 - protein, 35 aa, Artificial Sequence
  Non-cyclic GFR-binding peptide
  MOD_RES (12), (13), (14), (15), (16): Xaa is A or G
  MOD_RES (17), (18), (19), (20): Xaa is A or G or is absent
LHEELRSMEGIXXXXXXXXXMIQVTINSHHVRSPQ

SEQ ID NO: 14499 - protein, 43 aa, Artificial Sequence
  Non-cyclic GFR-binding peptide
  MOD_RES (2), (4), (41): Xaa is C or S
  MOD_RES (17), (18), (19), (20), (21): Xaa is A or G
  MOD_RES (22), (23), (24), (25): Xaa is A or G or is absent
AXAXELHEELRSMEGIXXXXXXXXXMIQVTINSHHVRSPQXKV

SEQ ID NO: 14500 - protein, 35 aa, Artificial Sequence
  Non-cyclic GFR-binding peptide
  MOD_RES (1), (35): Xaa is C or S
XKNHQLFVQVEKHQGQHPKIRVKAMKVSREETPVX

SEQ ID NO: 14501 - protein, 39 aa, Artificial Sequence
  Non-cyclic GFR-binding peptide
  MOD_RES (2), (4), (38): Xaa is C or S
RXEXKNHQLFSMEGLHQGQHPKIRMIQMTINSEETPVXE

SEQ ID NO: 14502 - protein, 36 aa, Artificial Sequence
  Non-cyclic GFR-binding peptide
  MOD_RES (1), (35): Xaa is C or S
  MOD_RES (13), (14), (15), (16), (17): Xaa is A or G
  MOD_RES (18), (19), (20), (21): Xaa is A or G or is absent
XQSHEELSMEGIXXXXXXXXXMIQMTINSQGTPVXE

SEQ ID NO: 14503 - protein, 41 aa, Artificial Sequence
  Non-cyclic GFR-binding peptide
  MOD_RES (1), (3), (40): Xaa is C or S
XAXELHEELRVTAKKLKPKKRVYEIKRVQVPRHHVRSPQXK

SEQ ID NO: 14504 - protein, 37 aa, Artificial Sequence
  Non-cyclic GFR-binding peptide
  MOD_RES (2), (4): Xaa is C or S
RXEXKNHQLFVQVEKHQGQHPKIRVKAMKVSREETPV

SEQ ID NO: 14505 - protein, 37 aa, Artificial Sequence
  Non-cyclic GFR-binding peptide
  MOD_RES (2), (36): Xaa is C or S
EXKNHQLFVTAKKHQGQHPKIRIKRMQVPREETPVXE

SEQ ID NO: 14506 - protein, 40 aa, Artificial Sequence
  Non-cyclic GFR-binding peptide
  MOD_RES (1), (3), (40): Xaa is C or S
XKXALHDELTSMEGIFIPKKRVIEMIQVTINSLQVQTPRX

SEQ ID NO: 14507 - protein, 33 aa, Artificial Sequence
  Non-cyclic GFR-binding peptide
  MOD_RES (12), (13), (14), (15), (16): Xaa is A or G
  MOD_RES (17), (18), (19), (20): Xaa is A or G or is absent
QSHEELVTAKKXXXXXXXXXIKRMQVPRQGTPV

SEQ ID NO: 14508 - protein, 44 aa, Artificial Sequence
  Non-cyclic GFR-binding peptide
  MOD_RES (1), (3), (40): Xaa is C or S
XAXELHEELRSMEGILKPKKRVYEMIQVTINSHHVRSPQXKVSS

SEQ ID NO: 14509 - protein, 37 aa, Artificial Sequence
  Non-cyclic GFR-binding peptide
  MOD_RES (35), (35): Xaa is C or S
HEELRSMEGLLKPKKRVYEMIQVTINSHHVRSPQXKV

SEQ ID NO: 14510 - protein, 37 aa, Artificial Sequence
  Non-cyclic GFR-binding peptide
  MOD_RES (35), (35): Xaa is C or S
HEELRSMEGILKPKKRVYEMIQVTINSHHVRSPQXKV

SEQ ID NO: 14511 - protein, 36 aa, Artificial Sequence
  Non-cyclic GFR-binding peptide
  MOD_RES (2), (2): Xaa is C or S
  MOD_RES (15), (16), (17), (18), (19): Xaa is A or G
  MOD_RES (20), (21), (22), (23): Xaa is A or G or is absent
AXELHEELRSMEGLXXXXXXXXXMIQVTINSHHVRS

SEQ ID NO: 14512 - protein, 41 aa, Artificial Sequence
  Non-cyclic GFR-binding peptide
  MOD_RES (1), (3), (40): Xaa is C or S
XKXALHDELTSMEGLFIPKKRVIEMIQVTINSLQVQTPRXQ

SEQ ID NO: 14513 - protein, 37 aa, Artificial Sequence
  Non-cyclic GFR-binding peptide
  MOD_RES (2), (36): Xaa is C or S
EXQSHEELVQVEKHQGQHPKIRVKAMKVSRQGTPVXE

SEQ ID NO: 14514 - protein, 41 aa, Artificial Sequence
  Non-cyclic GFR-binding peptide
  MOD_RES (2), (39): Xaa is C or S
KXALHDELTSMEGIFIPKKRVIEMIQVTINSLQVQTPRXQV

SEQ ID NO: 14515 - protein, 41 aa, Artificial Sequence
  Non-cyclic GFR-binding peptide
  MOD_RES (2), (4), (38): Xaa is C or S
RXEXKNHQLFVQVEKHQGQHPKIRVKAMKVSREETPVXELG

SEQ ID NO: 14516 - protein, 37 aa, Artificial Sequence
  Non-cyclic GFR-binding peptide
  MOD_RES (36), (36): Xaa is C or S
  MOD_RES (12), (13), (14), (15), (16): Xaa is A or G
  MOD_RES (17), (18), (19), (20): Xaa is A or G or is absent
LHDELTSMEGLXXXXXXXXXMIQVTINSLQVQTPRXQ

SEQ ID NO: 14517 - protein, 40 aa, Artificial Sequence
  Non-cyclic GFR-binding peptide
  MOD_RES (2), (4), (38): Xaa is C or S
RXEXQSHEELVQVEKHQGQHPKIRVKAMKVSRQGTPVXEL

SEQ ID NO: 14518 - protein, 39 aa, Artificial Sequence
  Non-cyclic GFR-binding peptide
  MOD_RES (1), (3): Xaa is C or S
XAXELHEELRVTAKKLKPKKRVYEIKRVQVPRHHVRSPQ

SEQ ID NO: 14519 - protein, 38 aa, Artificial Sequence
  Non-cyclic GFR-binding peptide
  MOD_RES (1), (35): Xaa is C or S
XKNHQLFSMEGLHQGQHPKIRMIQMTINSEETPVXELG

SEQ ID NO: 14520 - protein, 39 aa, Artificial Sequence
  Non-cyclic GFR-binding peptide
  MOD_RES (37), (37): Xaa is C or S
ALHDELTVQVEKFIPKKRVIEVKAVKVSRLQVQTPRXQV

SEQ ID NO: 14521 - protein, 40 aa, Artificial Sequence
  Non-cyclic GFR-binding peptide
  MOD_RES (34), (34): Xaa is C or S
QSHEELVQVEKHQGQHPKIRVKAMKVSRQGTPVXELGEDN

SEQ ID NO: 14522 - protein, 39 aa, Artificial Sequence
  Non-cyclic GFR-binding peptide
  MOD_RES (1), (3), (37): Xaa is C or S
  MOD_RES (15), (16), (17), (18), (19): Xaa is A or G
  MOD_RES (20), (21), (22), (23): Xaa is A or G or is absent
XEXQSHEELVQVEKXXXXXXXXXVKAMKVSRQGTPVXEL

SEQ ID NO: 14523 - protein, 41 aa, Artificial Sequence
  Non-cyclic GFR-binding peptide
  MOD_RES (1), (3), (37): Xaa is C or S
  MOD_RES (15), (16), (17), (18), (19): Xaa is A or G
  MOD_RES (20), (21), (22), (23): Xaa is A or G or is absent
XEXQSHEELSMEGIXXXXXXXXXMIQMTINSQGTPVXELGE

SEQ ID NO: 14524 - protein, 35 aa, Artificial Sequence
  Non-cyclic GFR-binding peptide
  MOD_RES (12), (13), (14), (15), (16): Xaa is A or G
  MOD_RES (17), (18), (19), (20): Xaa is A or G or is absent
LHEELRVTAKKXXXXXXXXXIKRVQVPRHHVRSPQ

SEQ ID NO: 14525 - protein, 43 aa, Artificial Sequence
  Non-cyclic GFR-binding peptide
  MOD_RES (1), (3), (40): Xaa is C or S
  MOD_RES (16), (17), (18), (19), (20): Xaa is A or G
  MOD_RES (21), (22), (23), (24): Xaa is A or G or is absent
XAXELHEELRVTAKKXXXXXXXXXIKRVQVPRHHVRSPQXKVS

SEQ ID NO: 14526 - protein, 39 aa, Artificial Sequence
  Non-cyclic GFR-binding peptide
  MOD_RES (2), (4): Xaa is C or S
  MOD_RES (17), (18), (19), (20), (21): Xaa is A or G
  MOD_RES (22), (23), (24), (25): Xaa is A or G or is absent
AXAXELHEELRSMEGIXXXXXXXXXMIQVTINSHHVRSP

SEQ ID NO: 14527 - protein, 35 aa, Artificial Sequence
  Non-cyclic GFR-binding peptide
ALHDELTSMEGIFIPKKRVIEMIQVTINSLQVQTP

SEQ ID NO: 14528 - protein, 40 aa, Artificial Sequence
  Non-cyclic GFR-binding peptide
  MOD_RES (36), (36): Xaa is C or S
  MOD_RES (12), (13), (14), (15), (16): Xaa is A or G
  MOD_RES (17), (18), (19), (20): Xaa is A or G or is absent
LHDELTSMEGIXXXXXXXXXMIQVTINSLQVQTPRXQVNR

SEQ ID NO: 14529 - protein, 38 aa, Artificial Sequence
  Non-cyclic GFR-binding peptide
  MOD_RES (2), (36): Xaa is C or S
EXKNHQLFVTAKKHQGQHPKIRIKRMQVPREETPVXEL

SEQ ID NO: 14530 - protein, 43 aa, Artificial Sequence
  Non-cyclic GFR-binding peptide
  MOD_RES (2), (39): Xaa is C or S
  MOD_RES (15), (16), (17), (18), (19): Xaa is A or G
  MOD_RES (20), (21), (22), (23): Xaa is A or G or is absent
KXALHDELTSMEGLXXXXXXXXXMIQVTINSLQVQTPRXQVNR

SEQ ID NO: 14531 - protein, 41 aa, Artificial Sequence
  Non-cyclic GFR-binding peptide
  MOD_RES (1), (38): Xaa is C or S
  MOD_RES (14), (15), (16), (17), (18): Xaa is A or G
  MOD_RES (19), (20), (21), (22): Xaa is A or G or is absent
XALHDELTSMEGIXXXXXXXXXMIQVTINSLQVQTPRXQVN

SEQ ID NO: 14532 - protein, 38 aa, Artificial Sequence
  Non-cyclic GFR-binding peptide
  MOD_RES (2), (2): Xaa is C or S
  MOD_RES (15), (16), (17), (18), (19): Xaa is A or G
  MOD_RES (20), (21), (22), (23): Xaa is A or G or is absent
AXELHEELRSMEGLXXXXXXXXXMIQVTINSHHVRSPQ

SEQ ID NO: 14533 - protein, 34 aa, Artificial Sequence
  Non-cyclic GFR-binding peptide
  MOD_RES (34), (34): Xaa is C or S
  MOD_RES (12), (13), (14), (15), (16): Xaa is A or G
  MOD_RES (17), (18), (19), (20): Xaa is A or G or is absent
QSHEELVQVEKXXXXXXXXXVKAMKVSRQGTPVX

SEQ ID NO: 14534 - protein, 41 aa, Artificial Sequence
  Non-cyclic GFR-binding peptide
  MOD_RES (2), (4), (38): Xaa is C or S
  MOD_RES (16), (17), (18), (19), (20): Xaa is A or G
  MOD_RES (21), (22), (23), (24): Xaa is A or G or is absent
RXEXKNHQLFVTAKKXXXXXXXXXIKRMQVPREETPVXELG

SEQ ID NO: 14535 - protein, 41 aa, Artificial Sequence
  Non-cyclic GFR-binding peptide
  MOD_RES (2), (39): Xaa is C or S
  MOD_RES (15), (16), (17), (18), (19): Xaa is A or G
  MOD_RES (20), (21), (22), (23): Xaa is A or G or is absent
KXALHDELTSMEGIXXXXXXXXXMIQVTINSLQVQTPRXQV

SEQ ID NO: 14536 - protein, 35 aa, Artificial Sequence
  Non-cyclic GFR-binding peptide
  MOD_RES (1), (35): Xaa is C or S
  MOD_RES (13), (14), (15), (16), (17): Xaa is A or G
  MOD_RES (18), (19), (20), (21): Xaa is A or G or is absent
XKNHQLFVQVEKXXXXXXXXXVKAMKVSREETPVX

SEQ ID NO: 14537 - protein, 39 aa, Artificial Sequence
  Non-cyclic GFR-binding peptide
  MOD_RES (36), (36): Xaa is C or S
LHDELTSMEGIFIPKKRVIEMIQVTINSLQVQTPRXQVN

SEQ ID NO: 14538 - protein, 38 aa, Artificial Sequence
  Non-cyclic GFR-binding peptide
  MOD_RES (1), (35): Xaa is C or S
  MOD_RES (13), (14), (15), (16), (17): Xaa is A or G
  MOD_RES (18), (19), (20), (21): Xaa is A or G or is absent
XQSHEELVTAKKXXXXXXXXXIKRMQVPRQGTPVXELG

SEQ ID NO: 14539 - protein, 40 aa, Artificial Sequence
  Non-cyclic GFR-binding peptide
  MOD_RES (36), (36): Xaa is C or S
LHDELTVQVEKFIPKKRVIEVKAVKVSRLQVQTPRXQVNR

SEQ ID NO: 14540 - protein, 37 aa, Artificial Sequence
  Non-cyclic GFR-binding peptide
  MOD_RES (2), (2): Xaa is C or S
AXELHEELRSMEGILKPKKRVYEMIQVTINSHHVRSP

SEQ ID NO: 14541 - protein, 42 aa, Artificial Sequence
  Non-cyclic GFR-binding peptide
  MOD_RES (2), (36): Xaa is C or S
EXKNHQLFSMEGLHQGQHPKIRMIQMTINSEETPVXELGEDN

SEQ ID NO: 14542 - protein, 41 aa, Artificial Sequence
  Non-cyclic GFR-binding peptide
  MOD_RES (2), (4), (41): Xaa is C or S
  MOD_RES (17), (18), (19), (20), (21): Xaa is A or G
  MOD_RES (22), (23), (24), (25): Xaa is A or G or is absent
EXKXALHDELTSMEGLXXXXXXXXXMIQVTINSLQVQTPRX

SEQ ID NO: 14543 - protein, 36 aa, Artificial Sequence
  Non-cyclic GFR-binding peptide
  MOD_RES (1), (3): Xaa is C or S
XEXKNHQLFSMEGLHQGQHPKIRMIQMTINSEETPV

SEQ ID NO: 14544 - protein, 37 aa, Artificial Sequence
  Non-cyclic GFR-binding peptide
  MOD_RES (37), (37): Xaa is C or S
  MOD_RES (13), (14), (15), (16), (17): Xaa is A or G
  MOD_RES (18), (19), (20), (21): Xaa is A or G or is absent
ELHEELRSMEGIXXXXXXXXXMIQVTINSHHVRSPQX

SEQ ID NO: 14545 - protein, 41 aa, Artificial Sequence
  Non-cyclic GFR-binding peptide
  MOD_RES (1), (38): Xaa is C or S
XELHEELRVTAKKLKPKKRVYEIKRVQVPRHHVRSPQXKVS

SEQ ID NO: 14546 - protein, 36 aa, Artificial Sequence
  Non-cyclic GFR-binding peptide
  MOD_RES (34), (34): Xaa is C or S
QSHEELVTAKKHQGQHPKIRIKRMQVPRQGTPVXEL

SEQ ID NO: 14547 - protein, 40 aa, Artificial Sequence
  Non-cyclic GFR-binding peptide
  MOD_RES (1), (3), (40): Xaa is C or S
  MOD_RES (16), (17), (18), (19), (20): Xaa is A or G
  MOD_RES (21), (22), (23), (24): Xaa is A or G or is absent
XAXELHEELRVTAKKXXXXXXXXXIKRVQVPRHHVRSPQX

SEQ ID NO: 14548 - protein, 43 aa, Artificial Sequence
  Non-cyclic GFR-binding peptide
  MOD_RES (2), (39): Xaa is C or S
KXALHDELTSMEGLFIPKKRVIEMIQVTINSLQVQTPRXQVNR

SEQ ID NO: 14549 - protein, 37 aa, Artificial Sequence
  Non-cyclic GFR-binding peptide
  MOD_RES (2), (4): Xaa is C or S
  MOD_RES (16), (17), (18), (19), (20): Xaa is A or G
  MOD_RES (21), (22), (23), (24): Xaa is A or G or is absent
RXEXKNHQLFVTAKKXXXXXXXXXIKRMQVPREETPV

SEQ ID NO: 14550 - protein, 37 aa, Artificial Sequence
  Non-cyclic GFR-binding peptide
  MOD_RES (1), (3): Xaa is C or S
  MOD_RES (16), (17), (18), (19), (20): Xaa is A or G
  MOD_RES (21), (22), (23), (24): Xaa is A or G or is absent
XKXALHDELTVQVEKXXXXXXXXXVKAVKVSRLQVQT

SEQ ID NO: 14551 - protein, 40 aa, Artificial Sequence
  Non-cyclic GFR-binding peptide
  MOD_RES (1), (3), (37): Xaa is C or S
  MOD_RES (15), (16), (17), (18), (19): Xaa is A or G
  MOD_RES (20), (21), (22), (23): Xaa is A or G or is absent
XEXQSHEELVTAKKXXXXXXXXXIKRMQVPRQGTPVXELG

SEQ ID NO: 14552 - protein, 39 aa, Artificial Sequence
  Non-cyclic GFR-binding peptide
  MOD_RES (35), (35): Xaa is C or S
  MOD_RES (11), (12), (13), (14), (15): Xaa is A or G
  MOD_RES (16), (17), (18), (19): Xaa is A or G or is absent
HDELTSMEGIXXXXXXXXXMIQVTINSLQVQTPRXQVNR

SEQ ID NO: 14553 - protein, 34 aa, Artificial Sequence
  Non-cyclic GFR-binding peptide
  MOD_RES (1), (1): Xaa is C or S
  MOD_RES (13), (14), (15), (16), (17): Xaa is A or G
  MOD_RES (18), (19), (20), (21): Xaa is A or G or is absent
XKNHQLFVQVEKXXXXXXXXXVKAMKVSREETPV

SEQ ID NO: 14554 - protein, 36 aa, Artificial Sequence
  Non-cyclic GFR-binding peptide
  MOD_RES (34), (34): Xaa is C or S
QSHEELSMEGIHQGQHPKIRMIQMTINSQGTPVXEL

SEQ ID NO: 14555 - protein, 37 aa, Artificial Sequence
  Non-cyclic GFR-binding peptide
  MOD_RES (1), (1): Xaa is C or S
  MOD_RES (14), (15), (16), (17), (18): Xaa is A or G
  MOD_RES (19), (20), (21), (22): Xaa is A or G or is absent
XALHDELTSMEGLXXXXXXXXXMIQVTINSLQVQTPR

SEQ ID NO: 14556 - protein, 39 aa, Artificial Sequence
  Non-cyclic GFR-binding peptide
  MOD_RES (35), (35): Xaa is C or S
  MOD_RES (11), (12), (13), (14), (15): Xaa is A or G
  MOD_RES (16), (17), (18), (19): Xaa is A or G or is absent
HDELTSMEGLXXXXXXXXXMIQVTINSLQVQTPRXQVNR

SEQ ID NO: 14557 - protein, 38 aa, Artificial Sequence
  Non-cyclic GFR-binding peptide
  MOD_RES (1), (3), (37): Xaa is C or S
  MOD_RES (15), (16), (17), (18), (19): Xaa is A or G
  MOD_RES (20), (21), (22), (23): Xaa is A or G or is absent
XEXKNHQLFVTAKKXXXXXXXXXIKRMQVPREETPVXE

SEQ ID NO: 14558 - protein, 36 aa, Artificial Sequence
  Non-cyclic GFR-binding peptide
ELHEELRSMEGLLKPKKRVYEMIQVTINSHHVRSPQ

SEQ ID NO: 14559 - protein, 39 aa, Artificial Sequence
  Non-cyclic GFR-binding peptide
  MOD_RES (2), (36): Xaa is C or S
  MOD_RES (14), (15), (16), (17), (18): Xaa is A or G
  MOD_RES (19), (20), (21), (22): Xaa is A or G or is absent
EXKNHQLFVTAKKXXXXXXXXXIKRMQVPREETPVXELG

SEQ ID NO: 14560 - protein, 36 aa, Artificial Sequence
  Non-cyclic GFR-binding peptide
  MOD_RES (36), (36): Xaa is C or S
  MOD_RES (12), (13), (14), (15), (16): Xaa is A or G
  MOD_RES (17), (18), (19), (20): Xaa is A or G or is absent
LHEELRVTAKKXXXXXXXXXIKRVQVPRHHVRSPQX

SEQ ID NO: 14561 - protein, 42 aa, Artificial Sequence
  Non-cyclic GFR-binding peptide
  MOD_RES (2), (4), (41): Xaa is C or S
EXKXALHDELTSMEGIFIPKKRVIEMIQVTINSLQVQTPRXQ

SEQ ID NO: 14562 - protein, 41 aa, Artificial Sequence
  Non-cyclic GFR-binding peptide
  MOD_RES (2), (36): Xaa is C or S
  MOD_RES (14), (15), (16), (17), (18): Xaa is A or G
  MOD_RES (19), (20), (21), (22): Xaa is A or G or is absent
EXKNHQLFVTAKKXXXXXXXXXIKRMQVPREETPVXELGED

SEQ ID NO: 14563 - protein, 34 aa, Artificial Sequence
  Non-cyclic GFR-binding peptide
  MOD_RES (11), (12), (13), (14), (15): Xaa is A or G
  MOD_RES (16), (17), (18), (19): Xaa is A or G or is absent
HDELTSMEGIXXXXXXXXXMIQVTINSLQVQTPR

SEQ ID NO: 14564 - protein, 34 aa, Artificial Sequence
  Non-cyclic GFR-binding peptide
  MOD_RES (1), (1): Xaa is C or S
XKNHQLFVQVEKHQGQHPKIRVKAMKVSREETPV

SEQ ID NO: 14565 - protein, 36 aa, Artificial Sequence
  Non-cyclic GFR-binding peptide
  MOD_RES (36), (36): Xaa is C or S
  MOD_RES (12), (13), (14), (15), (16): Xaa is A or G
  MOD_RES (17), (18), (19), (20): Xaa is A or G or is absent
LHEELRSMEGIXXXXXXXXXMIQVTINSHHVRSPQX

SEQ ID NO: 14566 - protein, 41 aa, Artificial Sequence
  Non-cyclic GFR-binding peptide
  MOD_RES (1), (3), (37): Xaa is C or S
  MOD_RES (15), (16), (17), (18), (19): Xaa is A or G
  MOD_RES (20), (21), (22), (23): Xaa is A or G or is absent
XEXQSHEELVTAKKXXXXXXXXXIKRMQVPRQGTPVXELGE

SEQ ID NO: 14567 - protein, 39 aa, Artificial Sequence
  Non-cyclic GFR-binding peptide
  MOD_RES (37), (37): Xaa is C or S
ALHDELTSMEGLFIPKKRVIEMIQVTINSLQVQTPRXQV

SEQ ID NO: 14568 - protein, 40 aa, Artificial Sequence
  Non-cyclic GFR-binding peptide
  MOD_RES (1), (38): Xaa is C or S
  MOD_RES (14), (15), (16), (17), (18): Xaa is A or G
  MOD_RES (19), (20), (21), (22): Xaa is A or G or is absent
XELHEELRSMEGIXXXXXXXXXMIQVTINSHHVRSPQXKV

SEQ ID NO: 14569 - protein, 35 aa, Artificial Sequence
  Non-cyclic GFR-binding peptide
  MOD_RES (1), (1): Xaa is C or S
  MOD_RES (14), (15), (16), (17), (18): Xaa is A or G
  MOD_RES (19), (20), (21), (22): Xaa is A or G or is absent
XELHEELRSMEGLXXXXXXXXXMIQVTINSHHVRS

SEQ ID NO: 14570 - protein, 37 aa, Artificial Sequence
  Non-cyclic GFR-binding peptide
  MOD_RES (1), (35): Xaa is C or S
XQSHEELVQVEKHQGQHPKIRVKAMKVSRQGTPVXEL

SEQ ID NO: 14571 - protein, 41 aa, Artificial Sequence
  Non-cyclic GFR-binding peptide
  MOD_RES (1), (35): Xaa is C or S
  MOD_RES (13), (14), (15), (16), (17): Xaa is A or G
  MOD_RES (18), (19), (20), (21): Xaa is A or G or is absent
XKNHQLFVTAKKXXXXXXXXXIKRMQVPREETPVXELGEDN

SEQ ID NO: 14572 - protein, 37 aa, Artificial Sequence
  Non-cyclic GFR-binding peptide
  MOD_RES (1), (35): Xaa is C or S
  MOD_RES (13), (14), (15), (16), (17): Xaa is A or G
  MOD_RES (18), (19), (20), (21): Xaa is A or G or is absent
XQSHEELVQVEKXXXXXXXXXVKAMKVSRQGTPVXEL

SEQ ID NO: 14573 - protein, 40 aa, Artificial Sequence
  Non-cyclic GFR-binding peptide
  MOD_RES (2), (4), (38): Xaa is C or S
  MOD_RES (16), (17), (18), (19), (20): Xaa is A or G
  MOD_RES (21), (22), (23), (24): Xaa is A or G or is absent
RXEXQSHEELVTAKKXXXXXXXXXIKRMQVPRQGTPVXEL

SEQ ID NO: 14574 - protein, 38 aa, Artificial Sequence
  Non-cyclic GFR-binding peptide
  MOD_RES (2), (2): Xaa is C or S
  MOD_RES (15), (16), (17), (18), (19): Xaa is A or G
  MOD_RES (20), (21), (22), (23): Xaa is A or G or is absent
AXELHEELRVTAKKXXXXXXXXXIKRVQVPRHHVRSPQ

SEQ ID NO: 14575 - protein, 42 aa, Artificial Sequence
  Non-cyclic GFR-binding peptide
  MOD_RES (7), (41): Xaa is C or S
  MOD_RES (21), (22), (23), (24), (25): Xaa is A or G
  MOD_RES (26), (27), (28), (29): Xaa is A or G or is absent
NDEGLEXVPTEERSVKMAKVXXXXXXXXXKEVQVFLQHNKXE

SEQ ID NO: 14576 - protein, 37 aa, Artificial Sequence
  Non-cyclic GFR-binding peptide
  MOD_RES (37), (37): Xaa is C or S
  MOD_RES (16), (17), (18), (19), (20): Xaa is A or G
  MOD_RES (21), (22), (23), (24): Xaa is A or G or is absent
QPSRVHHSNITVQIMXXXXXXXXXLGEMSRLEEHLEX

SEQ ID NO: 14577 - protein, 36 aa, Artificial Sequence
  Non-cyclic GFR-binding peptide
  MOD_RES (34), (36): Xaa is C or S
VPTGQSNITMQIMRIKPHQGQHIGEMSLEEHSQXEX

SEQ ID NO: 14578 - protein, 43 aa, Artificial Sequence
  Non-cyclic GFR-binding peptide
  MOD_RES (7), (41), (43): Xaa is C or S
NDEGLEXVPTEESNITMQIMRIKPHQGQHLGEMSFLQHNKXEX

SEQ ID NO: 14579 - protein, 35 aa, Artificial Sequence
  Non-cyclic GFR-binding peptide
  MOD_RES (1), (35): Xaa is C or S
XVPTGQSNITMQIMRIKPHQGQHIGEMSLEEHSQX

SEQ ID NO: 14580 - protein, 42 aa, Artificial Sequence
  Non-cyclic GFR-binding peptide
  MOD_RES (2), (39), (41): Xaa is C or S
  MOD_RES (18), (19), (20), (21), (22): Xaa is A or G
  MOD_RES (23), (24), (25), (26): Xaa is A or G or is absent
KXQPSRVHHSNITVQIMXXXXXXXXXIGEMSRLEEHLEXAXA

SEQ ID NO: 14581 - protein, 38 aa, Artificial Sequence
  Non-cyclic GFR-binding peptide
  MOD_RES (36), (38): Xaa is C or S
  MOD_RES (15), (16), (17), (18), (19): Xaa is A or G
  MOD_RES (20), (21), (22), (23): Xaa is A or G or is absent
PSRVHHSNITVQIMXXXXXXXXXIGEMSRLEEHLEXAX

SEQ ID NO: 14582 - protein, 41 aa, Artificial Sequence
  Non-cyclic GFR-binding peptide
  MOD_RES (2), (39), (41): Xaa is C or S
  MOD_RES (18), (19), (20), (21), (22): Xaa is A or G
  MOD_RES (23), (24), (25), (26): Xaa is A or G or is absent
QXRPTQVQLSNITVQIMXXXXXXXXXIGEMSTLEDHLAXKX

SEQ ID NO: 14583 - protein, 39 aa, Artificial Sequence
  Non-cyclic GFR-binding peptide
  MOD_RES (4), (38): Xaa is C or S
  MOD_RES (18), (19), (20), (21), (22): Xaa is A or G
  MOD_RES (23), (24), (25), (26): Xaa is A or G or is absent
GLEXVPTEERSVKMAKVXXXXXXXXXKEVQVFLQHNKXE

SEQ ID NO: 14584 - protein, 32 aa, Artificial Sequence
  Non-cyclic GFR-binding peptide
VPTEERPVQMRKIRIKPHQGQHKKATVFLQHN

SEQ ID NO: 14585 - protein, 42 aa, Artificial Sequence
  Non-cyclic GFR-binding peptide
  MOD_RES (5), (42): Xaa is C or S
SSVKXQPSRVHHRPVQVRKIEYVRKKPKLKKATVRLEEHLEX

SEQ ID NO: 14586 - protein, 34 aa, Artificial Sequence
  Non-cyclic GFR-binding peptide
  MOD_RES (2), (2): Xaa is C or S
  MOD_RES (16), (17), (18), (19), (20): Xaa is A or G
  MOD_RES (21), (22), (23), (24): Xaa is A or G or is absent
EXVPTGQRPVQMRKIXXXXXXXXXKKATVLEEHS

SEQ ID NO: 14587 - protein, 36 aa, Artificial Sequence
  Non-cyclic GFR-binding peptide
  MOD_RES (2), (2): Xaa is C or S
  MOD_RES (18), (19), (20), (21), (22): Xaa is A or G
  MOD_RES (23), (24), (25), (26): Xaa is A or G or is absent
KXQPSRVHHSNITVQIMXXXXXXXXXLGEMSRLEEH

SEQ ID NO: 14588 - protein, 43 aa, Artificial Sequence
  Non-cyclic GFR-binding peptide
  MOD_RES (7), (41), (43): Xaa is C or S
  MOD_RES (21), (22), (23), (24), (25): Xaa is A or G
  MOD_RES (26), (27), (28), (29): Xaa is A or G or is absent
NDEGLEXVPTGQRSVKMAKVXXXXXXXXXKEVQVLEEHSQXEX

SEQ ID NO: 14589 - protein, 40 aa, Artificial Sequence
  Non-cyclic GFR-binding peptide
  MOD_RES (7), (7): Xaa is C or S
  MOD_RES (21), (22), (23), (24), (25): Xaa is A or G
  MOD_RES (26), (27), (28), (29): Xaa is A or G or is absent
NDEGLEXVPTGQRSVKMAKVXXXXXXXXXKEVQVLEEHSQ

SEQ ID NO: 14590 - protein, 38 aa, Artificial Sequence
  Non-cyclic GFR-binding peptide
  MOD_RES (2), (2): Xaa is C or S
  MOD_RES (18), (19), (20), (21), (22): Xaa is A or G
  MOD_RES (23), (24), (25), (26): Xaa is A or G or is absent
QXRPTQVQLRSVKVAKVXXXXXXXXXKEVQVTLEDHLA

SEQ ID NO: 14591 - protein, 41 aa, Artificial Sequence
  Non-cyclic GFR-binding peptide
  MOD_RES (4), (38), (40): Xaa is C or S
  MOD_RES (18), (19), (20), (21), (22): Xaa is A or G
  MOD_RES (23), (24), (25), (26): Xaa is A or G or is absent
GLEXVPTGQRSVKMAKVXXXXXXXXXKEVQVLEEHSQXEXR

SEQ ID NO: 14592 - protein, 36 aa, Artificial Sequence
  Non-cyclic GFR-binding peptide
  MOD_RES (1), (35): Xaa is C or S
  MOD_RES (15), (16), (17), (18), (19): Xaa is A or G
  MOD_RES (20), (21), (22), (23): Xaa is A or G or is absent
XVPTGQRSVKMAKVXXXXXXXXXKEVQVLEEHSQXE

SEQ ID NO: 14593 - protein, 35 aa, Artificial Sequence
  Non-cyclic GFR-binding peptide
  MOD_RES (34), (34): Xaa is C or S
VPTEESNITMQIMRIKPHQGQHLGEMSFLQHNKXE

SEQ ID NO: 14594 - protein, 39 aa, Artificial Sequence
  Non-cyclic GFR-binding peptide
  MOD_RES (2), (39): Xaa is C or S
KXQPSRVHHSNITVQIMEYVRKKPKLIGEMSRLEEHLEX

SEQ ID NO: 14595 - protein, 36 aa, Artificial Sequence
  Non-cyclic GFR-binding peptide
  MOD_RES (34), (36): Xaa is C or S
VPTEERSVKMAKVRIKPHQGQHKEVQVFLQHNKXEX

SEQ ID NO: 14596 - protein, 40 aa, Artificial Sequence
  Non-cyclic GFR-binding peptide
  MOD_RES (2), (39): Xaa is C or S
  MOD_RES (18), (19), (20), (21), (22): Xaa is A or G
  MOD_RES (23), (24), (25), (26): Xaa is A or G or is absent
QXRPTQVQLRSVKVAKVXXXXXXXXXKEVQVTLEDHLAXK

SEQ ID NO: 14597 - protein, 37 aa, Artificial Sequence
  Non-cyclic GFR-binding peptide
  MOD_RES (4), (4): Xaa is C or S
  MOD_RES (18), (19), (20), (21), (22): Xaa is A or G
  MOD_RES (23), (24), (25), (26): Xaa is A or G or is absent
GLEXVPTGQRSVKMAKVXXXXXXXXXKEVQVLEEHSQ

SEQ ID NO: 14598 - protein, 40 aa, Artificial Sequence
  Non-cyclic GFR-binding peptide
  MOD_RES (37), (39): Xaa is C or S
  MOD_RES (16), (17), (18), (19), (20): Xaa is A or G
  MOD_RES (21), (22), (23), (24): Xaa is A or G or is absent
RPTQVQLRSVKVAKVXXXXXXXXXKEVQVTLEDHLAXKXE

SEQ ID NO: 14599 - protein, 37 aa, Artificial Sequence
  Non-cyclic GFR-binding peptide
  MOD_RES (1), (1): Xaa is C or S
XRPTQVQLRSVKVAKVEIVRKKPIFKEVQVTLEDHLA

SEQ ID NO: 14600 - protein, 42 aa, Artificial Sequence
  Non-cyclic GFR-binding peptide
  MOD_RES (5), (42): Xaa is C or S
  MOD_RES (21), (22), (23), (24), (25): Xaa is A or G
  MOD_RES (26), (27), (28), (29): Xaa is A or G or is absent
RNVQXRPTQVQLSNITVQIMXXXXXXXXXIGEMSTLEDHLAX

SEQ ID NO: 14601 - protein, 36 aa, Artificial Sequence
  Non-cyclic GFR-binding peptide
  MOD_RES (35), (35): Xaa is C or S
  MOD_RES (14), (15), (16), (17), (18): Xaa is A or G
  MOD_RES (19), (20), (21), (22): Xaa is A or G or is absent
SRVHHRPVQVRKIXXXXXXXXXKKATVRLEEHLEXA

SEQ ID NO: 14602 - protein, 36 aa, Artificial Sequence
  Non-cyclic GFR-binding peptide
  MOD_RES (1), (1): Xaa is C or S
XQPSRVHHSNITVQIMEYVRKKPKLIGEMSRLEEHL

SEQ ID NO: 14603 - protein, 45 aa, Artificial Sequence
  Non-cyclic GFR-binding peptide
  MOD_RES (5), (42), (44): Xaa is C or S
SSVKXQPSRVHHSNITVQIMEYVRKKPKLIGEMSRLEEHLEXAXA

SEQ ID NO: 14604 - protein, 34 aa, Artificial Sequence
  Non-cyclic GFR-binding peptide
SRVHHRPVQVRKIEYVRKKPKLKKATVRLEEHLE

SEQ ID NO: 14605 - protein, 37 aa, Artificial Sequence
  Non-cyclic GFR-binding peptide
  MOD_RES (34), (36): Xaa is C or S
VPTGQRPVQMRKIRIKPHQGQHKKATVLEEHSQXEXR

SEQ ID NO: 14606 - protein, 35 aa, Artificial Sequence
  Non-cyclic GFR-binding peptide
  MOD_RES (1), (1): Xaa is C or S
XRPTQVQLSNITVQIMEIVRKKPIFIGEMSTLEDH

SEQ ID NO: 14607 - protein, 34 aa, Artificial Sequence
  Non-cyclic GFR-binding peptide
  MOD_RES (34), (34): Xaa is C or S
  MOD_RES (14), (15), (16), (17), (18): Xaa is A or G
  MOD_RES (19), (20), (21), (22): Xaa is A or G or is absent
VPTEESNITMQIMXXXXXXXXXLGEMSFLQHNKX

SEQ ID NO: 14608 - protein, 33 aa, Artificial Sequence
  Non-cyclic GFR-binding peptide
VPTEESNITMQIMRIKPHQGQHLGEMSFLQHNK

SEQ ID NO: 14609 - protein, 44 aa, Artificial Sequence
  Non-cyclic GFR-binding peptide
  MOD_RES (4), (41), (43): Xaa is C or S
NVQXRPTQVQLSNITVQIMEIVRKKPIFIGEMSTLEDHLAXKXE

SEQ ID NO: 14610 - protein, 40 aa, Artificial Sequence
  Non-cyclic GFR-binding peptide
  MOD_RES (4), (38), (40): Xaa is C or S
  MOD_RES (18), (19), (20), (21), (22): Xaa is A or G
  MOD_RES (23), (24), (25), (26): Xaa is A or G or is absent
GLEXVPTEERSVKMAKVXXXXXXXXXKEVQVFLQHNKXEX

SEQ ID NO: 14611 - protein, 39 aa, Artificial Sequence
  Non-cyclic GFR-binding peptide
  MOD_RES (4), (38): Xaa is C or S
  MOD_RES (18), (19), (20), (21), (22): Xaa is A or G
  MOD_RES (23), (24), (25), (26): Xaa is A or G or is absent
GLEXVPTEESNITMQIMXXXXXXXXXLGEMSFLQHNKXE

SEQ ID NO: 14612 - protein, 41 aa, Artificial Sequence
  Non-cyclic GFR-binding peptide
  MOD_RES (7), (41): Xaa is C or S
  MOD_RES (21), (22), (23), (24), (25): Xaa is A or G
  MOD_RES (26), (27), (28), (29): Xaa is A or G or is absent
NDEGLEXVPTGQRSVKMAKVXXXXXXXXXKEVQVLEEHSQX

SEQ ID NO: 14613 - protein, 42 aa, Artificial Sequence
  Non-cyclic GFR-binding peptide
  MOD_RES (4), (41): Xaa is C or S
  MOD_RES (20), (21), (22), (23), (24): Xaa is A or G
  MOD_RES (25), (26), (27), (28): Xaa is A or G or is absent
NVQXRPTQVQLSNITVQIMXXXXXXXXXIGEMSTLEDHLAXK

SEQ ID NO: 14614 - protein, 36 aa, Artificial Sequence
  Non-cyclic GFR-binding peptide
  MOD_RES (4), (4): Xaa is C or S
  MOD_RES (18), (19), (20), (21), (22): Xaa is A or G
  MOD_RES (23), (24), (25), (26): Xaa is A or G or is absent
GLEXVPTGQRSVKMAKVXXXXXXXXXKEVQVLEEHS

SEQ ID NO: 14615 - protein, 38 aa, Artificial Sequence
  Non-cyclic GFR-binding peptide
  MOD_RES (3), (37): Xaa is C or S
LEXVPTGQRSVKMAKVRIKPHQGQHKEVQVLEEHSQXE

SEQ ID NO: 14616 - protein, 38 aa, Artificial Sequence
  Non-cyclic GFR-binding peptide
  MOD_RES (37), (37): Xaa is C or S
QPSRVHHRPVQVRKIEYVRKKPKLKKATVRLEEHLEXA

SEQ ID NO: 14617 - protein, 40 aa, Artificial Sequence
  Non-cyclic GFR-binding peptide
  MOD_RES (6), (40): Xaa is C or S
DEGLEXVPTGQSNITMQIMRIKPHQGQHIGEMSLEEHSQX

SEQ ID NO: 14618 - protein, 37 aa, Artificial Sequence
  Non-cyclic GFR-binding peptide
  MOD_RES (34), (36): Xaa is C or S
  MOD_RES (14), (15), (16), (17), (18): Xaa is A or G
  MOD_RES (19), (20), (21), (22): Xaa is A or G or is absent
VPTGQSNITMQIMXXXXXXXXXIGEMSLEEHSQXEXR

SEQ ID NO: 14619 - protein, 39 aa, Artificial Sequence
  Non-cyclic GFR-binding peptide
  MOD_RES (5), (5): Xaa is C or S
  MOD_RES (21), (22), (23), (24), (25): Xaa is A or G
  MOD_RES (26), (27), (28), (29): Xaa is A or G or is absent
SSVKXQPSRVHHRPVQVRKIXXXXXXXXXKKATVRLEEH

SEQ ID NO: 14620 - protein, 37 aa, Artificial Sequence
  Non-cyclic GFR-binding peptide
  MOD_RES (3), (3): Xaa is C or S
VQXRPTQVQLSNITVQIMEIVRKKPIFIGEMSTLEDH

SEQ ID NO: 14621 - protein, 42 aa, Artificial Sequence
  Non-cyclic GFR-binding peptide
  MOD_RES (6), (40), (42): Xaa is C or S
DEGLEXVPTEERPVQMRKIRIKPHQGQHKKATVFLQHNKXEX

SEQ ID NO: 14622 - protein, 41 aa, Artificial Sequence
  Non-cyclic GFR-binding peptide
  MOD_RES (4), (41): Xaa is C or S
SVKXQPSRVHHSNITVQIMEYVRKKPKLIGEMSRLEEHLEX

SEQ ID NO: 14623 - protein, 35 aa, Artificial Sequence
  Non-cyclic GFR-binding peptide
  MOD_RES (15), (16), (17), (18), (19): Xaa is A or G
  MOD_RES (20), (21), (22), (23): Xaa is A or G or is absent
PTQVQLRSVKVAKVXXXXXXXXXKEVQVTLEDHLA

SEQ ID NO: 14624 - protein, 38 aa, Artificial Sequence
  Non-cyclic GFR-binding peptide
  MOD_RES (4), (4): Xaa is C or S
SVKXQPSRVHHRPVQVRKIEYVRKKPKLKKATVRLEEH

SEQ ID NO: 14625 - protein, 37 aa, Artificial Sequence
  Non-cyclic GFR-binding peptide
  MOD_RES (5), (5): Xaa is C or S
EGLEXVPTEERSVKMAKVRIKPHQGQHKEVQVFLQHN

SEQ ID NO: 14626 - protein, 38 aa, Artificial Sequence
  Non-cyclic GFR-binding peptide
  MOD_RES (1), (35), (37): Xaa is C or S
XVPTGQRPVQMRKIRIKPHQGQHKKATVLEEHSQXEXR

SEQ ID NO: 14627 - protein, 40 aa, Artificial Sequence
  Non-cyclic GFR-binding peptide
  MOD_RES (4), (38), (40): Xaa is C or S
  MOD_RES (18), (19), (20), (21), (22): Xaa is A or G
  MOD_RES (23), (24), (25), (26): Xaa is A or G or is absent
GLEXVPTGQSNITMQIMXXXXXXXXXIGEMSLEEHSQXEX

SEQ ID NO: 14628 - protein, 35 aa, Artificial Sequence
  Non-cyclic GFR-binding peptide
  MOD_RES (1), (1): Xaa is C or S
XQPSRVHHRPVQVRKIEYVRKKPKLKKATVRLEEH

SEQ ID NO: 14629 - protein, 39 aa, Artificial Sequence
  Non-cyclic GFR-binding peptide
  MOD_RES (2), (36), (38): Xaa is C or S
EXVPTGQSNITMQIMRIKPHQGQHIGEMSLEEHSQXEXR

SEQ ID NO: 14630 - protein, 35 aa, Artificial Sequence
  Non-cyclic GFR-binding peptide
  MOD_RES (3), (3): Xaa is C or S
LEXVPTEERSVKMAKVRIKPHQGQHKEVQVFLQHN

SEQ ID NO: 14631 - protein, 40 aa, Artificial Sequence
  Non-cyclic GFR-binding peptide
  MOD_RES (4), (4): Xaa is C or S
  MOD_RES (20), (21), (22), (23), (24): Xaa is A or G
  MOD_RES (25), (26), (27), (28): Xaa is A or G or is absent
SVKXQPSRVHHRPVQVRKIXXXXXXXXXKKATVRLEEHLE

SEQ ID NO: 14632 - protein, 40 aa, Artificial Sequence
  Non-cyclic GFR-binding peptide
  MOD_RES (4), (4): Xaa is C or S
NVQXRPTQVQLSNITVQIMEIVRKKPIFLGEMSTLEDHLA

SEQ ID NO: 14633 - protein, 38 aa, Artificial Sequence
  Non-cyclic GFR-binding peptide
  MOD_RES (1), (35), (37): Xaa is C or S
XVPTGQRSVKMAKVRIKPHQGQHKEVQVLEEHSQXEXR

SEQ ID NO: 14634 - protein, 42 aa, Artificial Sequence
  Non-cyclic GFR-binding peptide
  MOD_RES (7), (41): Xaa is C or S
  MOD_RES (21), (22), (23), (24), (25): Xaa is A or G
  MOD_RES (26), (27), (28), (29): Xaa is A or G or is absent
NDEGLEXVPTEESNITMQIMXXXXXXXXXLGEMSFLQHNKXE

SEQ ID NO: 14635 - protein, 45 aa, Artificial Sequence
  Non-cyclic GFR-binding peptide
  MOD_RES (5), (42), (44): Xaa is C or S
RNVQXRPTQVQLSNITVQIMEIVRKKPIFLGEMSTLEDHLAXKXE

SEQ ID NO: 14636 - protein, 42 aa, Artificial Sequence
  Non-cyclic GFR-binding peptide
  MOD_RES (5), (39), (41): Xaa is C or S
  MOD_RES (19), (20), (21), (22), (23): Xaa is A or G
  MOD_RES (24), (25), (26), (27): Xaa is A or G or is absent
EGLEXVPTGQRSVKMAKVXXXXXXXXXKEVQVLEEHSQXEXR

SEQ ID NO: 14637 - protein, 39 aa, Artificial Sequence
  Non-cyclic GFR-binding peptide
  MOD_RES (5), (39): Xaa is C or S
EGLEXVPTEESNITMQIMRIKPHQGQHLGEMSFLQHNKX

SEQ ID NO: 14638 - protein, 42 aa, Artificial Sequence
  Non-cyclic GFR-binding peptide
  MOD_RES (5), (42): Xaa is C or S
RNVQXRPTQVQLSNITVQIMEIVRKKPIFIGEMSTLEDHLAX

SEQ ID NO: 14639 - protein, 37 aa, Artificial Sequence
  Non-cyclic GFR-binding peptide
  MOD_RES (2), (36): Xaa is C or S
  MOD_RES (16), (17), (18), (19), (20): Xaa is A or G
  MOD_RES (21), (22), (23), (24): Xaa is A or G or is absent
EXVPTGQSNITMQIMXXXXXXXXXIGEMSLEEHSQXE

SEQ ID NO: 14640 - protein, 41 aa, Artificial Sequence
  Non-cyclic GFR-binding peptide
  MOD_RES (4), (38), (40): Xaa is C or S
  MOD_RES (18), (19), (20), (21), (22): Xaa is A or G
  MOD_RES (23), (24), (25), (26): Xaa is A or G or is absent
GLEXVPTGQRPVQMRKIXXXXXXXXXKKATVLEEHSQXEXR

SEQ ID NO: 14641 - protein, 35 aa, Artificial Sequence
  Non-cyclic GFR-binding peptide
  MOD_RES (2), (2): Xaa is C or S
  MOD_RES (16), (17), (18), (19), (20): Xaa is A or G
  MOD_RES (21), (22), (23), (24): Xaa is A or G or is absent
EXVPTEERPVQMRKIXXXXXXXXXKKATVFLQHNK

SEQ ID NO: 14642 - protein, 38 aa, Artificial Sequence
  Non-cyclic GFR-binding peptide
  MOD_RES (5), (5): Xaa is C or S
  MOD_RES (19), (20), (21), (22), (23): Xaa is A or G
  MOD_RES (24), (25), (26), (27): Xaa is A or G or is absent
EGLEXVPTGQSNITMQIMXXXXXXXXXIGEMSLEEHSQ

SEQ ID NO: 14643 - protein, 39 aa, Artificial Sequence
  Non-cyclic GFR-binding peptide
  MOD_RES (36), (38): Xaa is C or S
  MOD_RES (15), (16), (17), (18), (19): Xaa is A or G
  MOD_RES (20), (21), (22), (23): Xaa is A or G or is absent
PTQVQLSNITVQIMXXXXXXXXXIGEMSTLEDHLAXKXE

SEQ ID NO: 14644 - protein, 33 aa, Artificial Sequence
  Non-cyclic GFR-binding peptide
VPTGQRPVQMRKIRIKPHQGQHKKATVLEEHSQ

SEQ ID NO: 14645 - protein, 36 aa, Artificial Sequence
  Non-cyclic GFR-binding peptide
  MOD_RES (3), (3): Xaa is C or S
  MOD_RES (17), (18), (19), (20), (21): Xaa is A or G
  MOD_RES (22), (23), (24), (25): Xaa is A or G or is absent
LEXVPTEERSVKMAKVXXXXXXXXXKEVQVFLQHNK

SEQ ID NO: 14646 - protein, 40 aa, Artificial Sequence
  Non-cyclic GFR-binding peptide
  MOD_RES (5), (5): Xaa is C or S
RNVQXRPTQVQLSNITVQIMEIVRKKPIFLGEMSTLEDHL

SEQ ID NO: 14647 - protein, 35 aa, Artificial Sequence
  Non-cyclic GFR-binding peptide
RPTQVQLRSVKVAKVEIVRKKPIFKEVQVTLEDHL

SEQ ID NO: 14648 - protein, 39 aa, Artificial Sequence
  Non-cyclic GFR-binding peptide
  MOD_RES (3), (37), (39): Xaa is C or S
LEXVPTGQRPVQMRKIRIKPHQGQHKKATVLEEHSQXEX

SEQ ID NO: 14649 - protein, 41 aa, Artificial Sequence
  Non-cyclic GFR-binding peptide
  MOD_RES (5), (5): Xaa is C or S
RNVQXRPTQVQLRSVKVAKVEIVRKKPIFKEVQVTLEDHLA

SEQ ID NO: 14650 - protein, 35 aa, Artificial Sequence
  Non-cyclic GFR-binding peptide
  MOD_RES (34), (34): Xaa is C or S
VPTEERSVKMAKVRIKPHQGQHKEVQVFLQHNKXE

SEQ ID NO: 14651 - protein, 37 aa, Artificial Sequence
  Non-cyclic GFR-binding peptide
  MOD_RES (2), (36): Xaa is C or S
  MOD_RES (16), (17), (18), (19), (20): Xaa is A or G
  MOD_RES (21), (22), (23), (24): Xaa is A or G or is absent
EXVPTEERPVQMRKIXXXXXXXXXKKATVFLQHNKXE

SEQ ID NO: 14652 - protein, 38 aa, Artificial Sequence
  Non-cyclic GFR-binding peptide
  MOD_RES (2), (2): Xaa is C or S
  MOD_RES (18), (19), (20), (21), (22): Xaa is A or G
  MOD_RES (23), (24), (25), (26): Xaa is A or G or is absent
KXQPSRVHHRPVQVRKIXXXXXXXXXKKATVRLEEHLE

SEQ ID NO: 14653 - protein, 39 aa, Artificial Sequence
  Non-cyclic GFR-binding peptide
  MOD_RES (1), (38): Xaa is C or S
  MOD_RES (17), (18), (19), (20), (21): Xaa is A or G
  MOD_RES (22), (23), (24), (25): Xaa is A or G or is absent
XRPTQVQLSNITVQIMXXXXXXXXXIGEMSTLEDHLAXK

SEQ ID NO: 14654 - protein, 44 aa, Artificial Sequence
  Non-cyclic GFR-binding peptide
  MOD_RES (5), (42), (44): Xaa is C or S
  MOD_RES (21), (22), (23), (24), (25): Xaa is A or G
  MOD_RES (26), (27), (28), (29): Xaa is A or G or is absent
RNVQXRPTQVQLSNITVQIMXXXXXXXXXLGEMSTLEDHLAXKX

SEQ ID NO: 14655 - protein, 42 aa, Artificial Sequence
  Non-cyclic GFR-binding peptide
  MOD_RES (5), (39), (41): Xaa is C or S
  MOD_RES (19), (20), (21), (22), (23): Xaa is A or G
  MOD_RES (24), (25), (26), (27): Xaa is A or G or is absent
EGLEXVPTGQRPVQMRKIXXXXXXXXXKKATVLEEHSQXEXR

SEQ ID NO: 14656 - protein, 41 aa, Artificial Sequence
  Non-cyclic GFR-binding peptide
  MOD_RES (4), (41): Xaa is C or S
NVQXRPTQVQLSNITVQIMEIVRKKPIFIGEMSTLEDHLAX

SEQ ID NO: 14657 - protein, 38 aa, Artificial Sequence
  Non-cyclic GFR-binding peptide
  MOD_RES (6), (6): Xaa is C or S
  MOD_RES (20), (21), (22), (23), (24): Xaa is A or G
  MOD_RES (25), (26), (27), (28): Xaa is A or G or is absent
DEGLEXVPTEERSVKMAKVXXXXXXXXXKEVQVFLQHN

SEQ ID NO: 14658 - protein, 40 aa, Artificial Sequence
  Non-cyclic GFR-binding peptide
  MOD_RES (37), (39): Xaa is C or S
  MOD_RES (16), (17), (18), (19), (20): Xaa is A or G
  MOD_RES (21), (22), (23), (24): Xaa is A or G or is absent
QPSRVHHSNITVQIMXXXXXXXXXLGEMSRLEEHLEXAXA

SEQ ID NO: 14659 - protein, 36 aa, Artificial Sequence
  Non-cyclic GFR-binding peptide
  MOD_RES (16), (17), (18), (19), (20): Xaa is A or G
  MOD_RES (21), (22), (23), (24): Xaa is A or G or is absent
RPTQVQLSNITVQIMXXXXXXXXXIGEMSTLEDHLA

SEQ ID NO: 14660 - protein, 36 aa, Artificial Sequence
  Non-cyclic GFR-binding peptide
  MOD_RES (2), (36): Xaa is C or S
EXVPTEERPVQMRKIRIKPHQGQHKKATVFLQHNKX

SEQ ID NO: 14661 - protein, 37 aa, Artificial Sequence
  Non-cyclic GFR-binding peptide
  MOD_RES (1), (1): Xaa is C or S
XQPSRVHHRPVQVRKIEYVRKKPKLKKATVRLEEHLE

SEQ ID NO: 14662 - protein, 40 aa, Artificial Sequence
  Non-cyclic GFR-binding peptide
  MOD_RES (3), (40): Xaa is C or S
VQXRPTQVQLRSVKVAKVEIVRKKPIFKEVQVTLEDHLAX

SEQ ID NO: 14663 - protein, 45 aa, Artificial Sequence
  Non-cyclic GFR-binding peptide
  MOD_RES (5), (42), (44): Xaa is C or S
  MOD_RES (21), (22), (23), (24), (25): Xaa is A or G
  MOD_RES (26), (27), (28), (29): Xaa is A or G or is absent
RNVQXRPTQVQLRSVKVAKVXXXXXXXXXKEVQVTLEDHLAXKXE

SEQ ID NO: 14664 - protein, 43 aa, Artificial Sequence
  Non-cyclic GFR-binding peptide
  MOD_RES (6), (40), (42): Xaa is C or S
DEGLEXVPTEERPVQMRKIRIKPHQGQHKKATVFLQHNKXEXR

SEQ ID NO: 14665 - protein, 39 aa, Artificial Sequence
  Non-cyclic GFR-binding peptide
  MOD_RES (37), (39): Xaa is C or S
  MOD_RES (16), (17), (18), (19), (20): Xaa is A or G
  MOD_RES (21), (22), (23), (24): Xaa is A or G or is absent
QPSRVHHRPVQVRKIXXXXXXXXXKKATVRLEEHLEXAX

SEQ ID NO: 14666 - protein, 33 aa, Artificial Sequence
  Non-cyclic GFR-binding peptide
  MOD_RES (15), (16), (17), (18), (19): Xaa is A or G
  MOD_RES (20), (21), (22), (23): Xaa is A or G or is absent
PTQVQLSNITVQIMXXXXXXXXXIGEMSTLEDH

SEQ ID NO: 14667 - protein, 40 aa, Artificial Sequence
  Non-cyclic GFR-binding peptide
  MOD_RES (2), (39): Xaa is C or S
QXRPTQVQLRSVKVAKVEIVRKKPIFKEVQVTLEDHLAXK

SEQ ID NO: 14668 - protein, 35 aa, Artificial Sequence
  Non-cyclic GFR-binding peptide
  MOD_RES (2), (2): Xaa is C or S
EXVPTEERSVKMAKVRIKPHQGQHKEVQVFLQHNK

SEQ ID NO: 14669 - protein, 37 aa, Artificial Sequence
  Non-cyclic GFR-binding peptide
  MOD_RES (1), (1): Xaa is C or S
XQPSRVHHSNITVQIMEYVRKKPKLLGEMSRLEEHLE

SEQ ID NO: 14670 - protein, 40 aa, Artificial Sequence
  Non-cyclic GFR-binding peptide
  MOD_RES (37), (39): Xaa is C or S
  MOD_RES (16), (17), (18), (19), (20): Xaa is A or G
  MOD_RES (21), (22), (23), (24): Xaa is A or G or is absent
RPTQVQLSNITVQIMXXXXXXXXXLGEMSTLEDHLAXKXE

SEQ ID NO: 14671 - protein, 35 aa, Artificial Sequence
  Non-cyclic GFR-binding peptide
QPSRVHHRPVQVRKIEYVRKKPKLKKATVRLEEHL

SEQ ID NO: 14672 - protein, 36 aa, Artificial Sequence
  Non-cyclic GFR-binding peptide
  MOD_RES (2), (36): Xaa is C or S
EXVPTEESNITMQIMRIKPHQGQHLGEMSFLQHNKX

SEQ ID NO: 14673 - protein, 38 aa, Artificial Sequence
  Non-cyclic GFR-binding peptide
  MOD_RES (3), (3): Xaa is C or S
  MOD_RES (19), (20), (21), (22), (23): Xaa is A or G
  MOD_RES (24), (25), (26), (27): Xaa is A or G or is absent
VQXRPTQVQLSNITVQIMXXXXXXXXXIGEMSTLEDHL

SEQ ID NO: 14674 - protein, 40 aa, Artificial Sequence
  Non-cyclic GFR-binding peptide
  MOD_RES (37), (39): Xaa is C or S
  MOD_RES (16), (17), (18), (19), (20): Xaa is A or G
  MOD_RES (21), (22), (23), (24): Xaa is A or G or is absent
QPSRVHHRPVQVRKIXXXXXXXXXKKATVRLEEHLEXAXA

SEQ ID NO: 14675 - protein, 36 aa, Artificial Sequence
  Non-cyclic GFR-binding peptide
  MOD_RES (1), (35): Xaa is C or S
  MOD_RES (15), (16), (17), (18), (19): Xaa is A or G
  MOD_RES (20), (21), (22), (23): Xaa is A or G or is absent
XVPTGQRPVQMRKIXXXXXXXXXKKATVLEEHSQXE

SEQ ID NO: 14676 - protein, 44 aa, Artificial Sequence
  Non-cyclic GFR-binding peptide
  MOD_RES (4), (41), (43): Xaa is C or S
SVKXQPSRVHHSNITVQIMEYVRKKPKLIGEMSRLEEHLEXAXA

SEQ ID NO: 14677 - protein, 43 aa, Artificial Sequence
  Non-cyclic GFR-binding peptide
  MOD_RES (5), (42): Xaa is C or S
SSVKXQPSRVHHSNITVQIMEYVRKKPKLIGEMSRLEEHLEXA

SEQ ID NO: 14678 - protein, 34 aa, Artificial Sequence
  Non-cyclic GFR-binding peptide
  MOD_RES (34), (34): Xaa is C or S
  MOD_RES (14), (15), (16), (17), (18): Xaa is A or G
  MOD_RES (19), (20), (21), (22): Xaa is A or G or is absent
VPTGQRPVQMRKIXXXXXXXXXKKATVLEEHSQX

SEQ ID NO: 14679 - protein, 38 aa, Artificial Sequence
  Non-cyclic GFR-binding peptide
  MOD_RES (5), (5): Xaa is C or S
EGLEXVPTEERSVKMAKVRIKPHQGQHKEVQVFLQHNK

SEQ ID NO: 14680 - protein, 35 aa, Artificial Sequence
  Non-cyclic GFR-binding peptide
PSRVHHSNITVQIMEYVRKKPKLIGEMSRLEEHLE

SEQ ID NO: 14681 - protein, 38 aa, Artificial Sequence
  Non-cyclic GFR-binding peptide
  MOD_RES (4), (38): Xaa is C or S
GLEXVPTEERPVQMRKIRIKPHQGQHKKATVFLQHNKX

SEQ ID NO: 14682 - protein, 37 aa, Artificial Sequence
  Non-cyclic GFR-binding peptide
  MOD_RES (3), (3): Xaa is C or S
VKXQPSRVHHRPVQVRKIEYVRKKPKLKKATVRLEEH

SEQ ID NO: 14683 - protein, 37 aa, Artificial Sequence
  Non-cyclic GFR-binding peptide
  MOD_RES (37), (37): Xaa is C or S
  MOD_RES (16), (17), (18), (19), (20): Xaa is A or G
  MOD_RES (21), (22), (23), (24): Xaa is A or G or is absent
QPSRVHHRPVQVRKIXXXXXXXXXKKATVRLEEHLEX

SEQ ID NO: 14684 - protein, 39 aa, Artificial Sequence
  Non-cyclic GFR-binding peptide
  MOD_RES (2), (36), (38): Xaa is C or S
  MOD_RES (16), (17), (18), (19), (20): Xaa is A or G
  MOD_RES (21), (22), (23), (24): Xaa is A or G or is absent
EXVPTEESNITMQIMXXXXXXXXXLGEMSFLQHNKXEXR

SEQ ID NO: 14685 - protein, 34 aa, Artificial Sequence
  Non-cyclic GFR-binding peptide
QPSRVHHSNITVQIMEYVRKKPKLIGEMSRLEEH

SEQ ID NO: 14686 - protein, 38 aa, Artificial Sequence
  Non-cyclic GFR-binding peptide
  MOD_RES (1), (35), (37): Xaa is C or S
  MOD_RES (15), (16), (17), (18), (19): Xaa is A or G
  MOD_RES (20), (21), (22), (23): Xaa is A or G or is absent
XVPTGQRSVKMAKVXXXXXXXXXKEVQVLEEHSQXEXR

SEQ ID NO: 14687 - protein, 39 aa, Artificial Sequence
  Non-cyclic GFR-binding peptide
  MOD_RES (4), (38): Xaa is C or S
GLEXVPTGQRPVQMRKIRIKPHQGQHKKATVLEEHSQXE

SEQ ID NO: 14688 - protein, 40 aa, Artificial Sequence
  Non-cyclic GFR-binding peptide
  MOD_RES (4), (4): Xaa is C or S
  MOD_RES (20), (21), (22), (23), (24): Xaa is A or G
  MOD_RES (25), (26), (27), (28): Xaa is A or G or is absent
SVKXQPSRVHHSNITVQIMXXXXXXXXXLGEMSRLEEHLE

SEQ ID NO: 14689 - protein, 36 aa, Artificial Sequence
  Non-cyclic GFR-binding peptide
  MOD_RES (4), (4): Xaa is C or S
  MOD_RES (18), (19), (20), (21), (22): Xaa is A or G
  MOD_RES (23), (24), (25), (26): Xaa is A or G or is absent
GLEXVPTGQRPVQMRKIXXXXXXXXXKKATVLEEHS

SEQ ID NO: 14690 - protein, 36 aa, Artificial Sequence
  Non-cyclic GFR-binding peptide
  MOD_RES (34), (36): Xaa is C or S
  MOD_RES (14), (15), (16), (17), (18): Xaa is A or G
  MOD_RES (19), (20), (21), (22): Xaa is A or G or is absent
VPTGQRPVQMRKIXXXXXXXXXKKATVLEEHSQXEX

SEQ ID NO: 14691 - protein, 40 aa, Artificial Sequence
  Non-cyclic GFR-binding peptide
  MOD_RES (7), (7): Xaa is C or S
NDEGLEXVPTGQSNITMQIMRIKPHQGQHIGEMSLEEHSQ

SEQ ID NO: 14692 - protein, 36 aa, Artificial Sequence
  Non-cyclic GFR-binding peptide
  MOD_RES (36), (36): Xaa is C or S
  MOD_RES (15), (16), (17), (18), (19): Xaa is A or G
  MOD_RES (20), (21), (22), (23): Xaa is A or G or is absent
PTQVQLSNITVQIMXXXXXXXXXIGEMSTLEDHLAX

SEQ ID NO: 14693 - protein, 41 aa, Artificial Sequence
  Non-cyclic GFR-binding peptide
  MOD_RES (3), (40): Xaa is C or S
  MOD_RES (19), (20), (21), (22), (23): Xaa is A or G
  MOD_RES (24), (25), (26), (27): Xaa is A or G or is absent
VQXRPTQVQLRSVKVAKVXXXXXXXXXKEVQVTLEDHLAXK

SEQ ID NO: 14694 - protein, 40 aa, Artificial Sequence
  Non-cyclic GFR-binding peptide
  MOD_RES (2), (39): Xaa is C or S
  MOD_RES (18), (19), (20), (21), (22): Xaa is A or G
  MOD_RES (23), (24), (25), (26): Xaa is A or G or is absent
KXQPSRVHHRPVQVRKIXXXXXXXXXKKATVRLEEHLEXA

SEQ ID NO: 14695 - protein, 43 aa, Artificial Sequence
  Non-cyclic GFR-binding peptide
  MOD_RES (5), (42): Xaa is C or S
RNVQXRPTQVQLRSVKVAKVEIVRKKPIFKEVQVTLEDHLAXK

SEQ ID NO: 14696 - protein, 39 aa, Artificial Sequence
  Non-cyclic GFR-binding peptide
  MOD_RES (5), (39): Xaa is C or S
EGLEXVPTGQRSVKMAKVRIKPHQGQHKEVQVLEEHSQX

SEQ ID NO: 14697 - protein, 35 aa, Artificial Sequence
  Non-cyclic GFR-binding peptide
  MOD_RES (35), (35): Xaa is C or S
  MOD_RES (14), (15), (16), (17), (18): Xaa is A or G
  MOD_RES (19), (20), (21), (22): Xaa is A or G or is absent
TQVQLRSVKVAKVXXXXXXXXXKEVQVTLEDHLAX

SEQ ID NO: 14698 - protein, 38 aa, Artificial Sequence
  Non-cyclic GFR-binding peptide
  MOD_RES (1), (38): Xaa is C or S
XQPSRVHHRPVQVRKIEYVRKKPKLKKATVRLEEHLEX

SEQ ID NO: 14699 - protein, 37 aa, Artificial Sequence
  Non-cyclic GFR-binding peptide
  MOD_RES (4), (4): Xaa is C or S
GLEXVPTGQSNITMQIMRIKPHQGQHIGEMSLEEHSQ

SEQ ID NO: 14700 - protein, 34 aa, Artificial Sequence
  Non-cyclic GFR-binding peptide
  MOD_RES (1), (1): Xaa is C or S
  MOD_RES (15), (16), (17), (18), (19): Xaa is A or G
  MOD_RES (20), (21), (22), (23): Xaa is A or G or is absent
XVPTEESNITMQIMXXXXXXXXXLGEMSFLQHNK

SEQ ID NO: 14701 - protein, 41 aa, Artificial Sequence
  Non-cyclic GFR-binding peptide
  MOD_RES (3), (40): Xaa is C or S
  MOD_RES (19), (20), (21), (22), (23): Xaa is A or G
  MOD_RES (24), (25), (26), (27): Xaa is A or G or is absent
VKXQPSRVHHRPVQVRKIXXXXXXXXXKKATVRLEEHLEXA

SEQ ID NO: 14702 - protein, 35 aa, Artificial Sequence
  Non-cyclic GFR-binding peptide
  MOD_RES (35), (35): Xaa is C or S
TQVQLSNITVQIMEIVRKKPIFLGEMSTLEDHLAX

SEQ ID NO: 14703 - protein, 33 aa, Artificial Sequence
  Non-cyclic GFR-binding peptide
  MOD_RES (1), (1): Xaa is C or S
XVPTEERSVKMAKVRIKPHQGQHKEVQVFLQHN

SEQ ID NO: 14704 - protein, 34 aa, Artificial Sequence
  Non-cyclic GFR-binding peptide
  MOD_RES (2), (2): Xaa is C or S
  MOD_RES (16), (17), (18), (19), (20): Xaa is A or G
  MOD_RES (21), (22), (23), (24): Xaa is A or G or is absent
EXVPTEESNITMQIMXXXXXXXXXLGEMSFLQHN

SEQ ID NO: 14705 - protein, 41 aa, Artificial Sequence
  Non-cyclic GFR-binding peptide
  MOD_RES (6), (40): Xaa is C or S
DEGLEXVPTEERPVQMRKIRIKPHQGQHKKATVFLQHNKXE

SEQ ID NO: 14706 - protein, 34 aa, Artificial Sequence
  Non-cyclic GFR-binding peptide
SRVHHSNITVQIMEYVRKKPKLLGEMSRLEEHLE

SEQ ID NO: 14707 - protein, 43 aa, Artificial Sequence
  Non-cyclic GFR-binding peptide
  MOD_RES (5), (42): Xaa is C or S
SSVKXQPSRVHHSNITVQIMEYVRKKPKLLGEMSRLEEHLEXA

SEQ ID NO: 14708 - protein, 42 aa, Artificial Sequence
  Non-cyclic GFR-binding peptide
  MOD_RES (7), (41): Xaa is C or S
NDEGLEXVPTGQRPVQMRKIRIKPHQGQHKKATVLEEHSQXE

SEQ ID NO: 14709 - protein, 38 aa, Artificial Sequence
  Non-cyclic GFR-binding peptide
  MOD_RES (2), (2): Xaa is C or S
  MOD_RES (18), (19), (20), (21), (22): Xaa is A or G
  MOD_RES (23), (24), (25), (26): Xaa is A or G or is absent
KXQPSRVHHSNITVQIMXXXXXXXXXLGEMSRLEEHLE

SEQ ID NO: 14710 - protein, 43 aa, Artificial Sequence
  Non-cyclic GFR-binding peptide
  MOD_RES (6), (40), (42): Xaa is C or S
  MOD_RES (20), (21), (22), (23), (24): Xaa is A or G
  MOD_RES (25), (26), (27), (28): Xaa is A or G or is absent
DEGLEXVPTEERSVKMAKVXXXXXXXXXKEVQVFLQHNKXEXR

SEQ ID NO: 14711 - protein, 45 aa, Artificial Sequence
  Non-cyclic GFR-binding peptide
  MOD_RES (5), (42), (44): Xaa is C or S
RNVQXRPTQVQLRSVKVAKVEIVRKKPIFKEVQVTLEDHLAXKXE

SEQ ID NO: 14712 - protein, 36 aa, Artificial Sequence
  Non-cyclic GFR-binding peptide
  MOD_RES (34), (36): Xaa is C or S
VPTEERPVQMRKIRIKPHQGQHKKATVFLQHNKXEX

SEQ ID NO: 14713 - protein, 38 aa, Artificial Sequence
  Non-cyclic GFR-binding peptide
  MOD_RES (2), (2): Xaa is C or S
QXRPTQVQLSNITVQIMEIVRKKPIFIGEMSTLEDHLA

SEQ ID NO: 14714 - protein, 37 aa, Artificial Sequence
  Non-cyclic GFR-binding peptide
  MOD_RES (2), (2): Xaa is C or S
QXRPTQVQLSNITVQIMEIVRKKPIFLGEMSTLEDHL

SEQ ID NO: 14715 - protein, 43 aa, Artificial Sequence
  Non-cyclic GFR-binding peptide
  MOD_RES (7), (41), (43): Xaa is C or S
  MOD_RES (21), (22), (23), (24), (25): Xaa is A or G
  MOD_RES (26), (27), (28), (29): Xaa is A or G or is absent
NDEGLEXVPTGQRPVQMRKIXXXXXXXXXKKATVLEEHSQXEX

SEQ ID NO: 14716 - protein, 35 aa, Artificial Sequence
  Non-cyclic GFR-binding peptide
  MOD_RES (16), (17), (18), (19), (20): Xaa is A or G
  MOD_RES (21), (22), (23), (24): Xaa is A or G or is absent
RPTQVQLSNITVQIMXXXXXXXXXLGEMSTLEDHL

SEQ ID NO: 14717 - protein, 38 aa, Artificial Sequence
  Non-cyclic GFR-binding peptide
  MOD_RES (37), (37): Xaa is C or S
  MOD_RES (16), (17), (18), (19), (20): Xaa is A or G
  MOD_RES (21), (22), (23), (24): Xaa is A or G or is absent
RPTQVQLSNITVQIMXXXXXXXXXIGEMSTLEDHLAXK

SEQ ID NO: 14718 - protein, 37 aa, Artificial Sequence
  Non-cyclic GFR-binding peptide
  MOD_RES (3), (3): Xaa is C or S
  MOD_RES (19), (20), (21), (22), (23): Xaa is A or G
  MOD_RES (24), (25), (26), (27): Xaa is A or G or is absent
VQXRPTQVQLRSVKVAKVXXXXXXXXXKEVQVTLEDH

SEQ ID NO: 14719 - protein, 38 aa, Artificial Sequence
  Non-cyclic GFR-binding peptide
  MOD_RES (1), (38): Xaa is C or S
XQPSRVHHSNITVQIMEYVRKKPKLLGEMSRLEEHLEX

SEQ ID NO: 14720 - protein, 33 aa, Artificial Sequence
  Non-cyclic GFR-binding peptide
PSRVHHSNITVQIMEYVRKKPKLLGEMSRLEEH

SEQ ID NO: 14721 - protein, 41 aa, Artificial Sequence
  Non-cyclic GFR-binding peptide
  MOD_RES (3), (40): Xaa is C or S
VQXRPTQVQLRSVKVAKVEIVRKKPIFKEVQVTLEDHLAXK

SEQ ID NO: 14722 - protein, 34 aa, Artificial Sequence
  Non-cyclic GFR-binding peptide
  MOD_RES (2), (2): Xaa is C or S
  MOD_RES (16), (17), (18), (19), (20): Xaa is A or G
  MOD_RES (21), (22), (23), (24): Xaa is A or G or is absent
EXVPTGQRSVKMAKVXXXXXXXXXKEVQVLEEHS

SEQ ID NO: 14723 - protein, 36 aa, Artificial Sequence
  Non-cyclic GFR-binding peptide
  MOD_RES (16), (17), (18), (19), (20): Xaa is A or G
  MOD_RES (21), (22), (23), (24): Xaa is A or G or is absent
QPSRVHHSNITVQIMXXXXXXXXXIGEMSRLEEHLE

SEQ ID NO: 14724 - protein, 40 aa, Artificial Sequence
  Non-cyclic GFR-binding peptide
  MOD_RES (5), (39): Xaa is C or S
EGLEXVPTGQRPVQMRKIRIKPHQGQHKKATVLEEHSQXE

SEQ ID NO: 14725 - protein, 42 aa, Artificial Sequence
  Non-cyclic GFR-binding peptide
  MOD_RES (3), (40), (42): Xaa is C or S
VQXRPTQVQLSNITVQIMEIVRKKPIFIGEMSTLEDHLAXKX

SEQ ID NO: 14726 - protein, 40 aa, Artificial Sequence
  Non-cyclic GFR-binding peptide
  MOD_RES (37), (39): Xaa is C or S
RPTQVQLSNITVQIMEIVRKKPIFLGEMSTLEDHLAXKXE

SEQ ID NO: 14727 - protein, 39 aa, Artificial Sequence
  Non-cyclic GFR-binding peptide
  MOD_RES (6), (6): Xaa is C or S
  MOD_RES (20), (21), (22), (23), (24): Xaa is A or G
  MOD_RES (25), (26), (27), (28): Xaa is A or G or is absent
DEGLEXVPTEERSVKMAKVXXXXXXXXXKEVQVFLQHNK

SEQ ID NO: 14728 - protein, 37 aa, Artificial Sequence
  Non-cyclic GFR-binding peptide
  MOD_RES (3), (37): Xaa is C or S
  MOD_RES (17), (18), (19), (20), (21): Xaa is A or G
  MOD_RES (22), (23), (24), (25): Xaa is A or G or is absent
LEXVPTEERSVKMAKVXXXXXXXXXKEVQVFLQHNKX

SEQ ID NO: 14729 - protein, 39 aa, Artificial Sequence
  Non-cyclic GFR-binding peptide
  MOD_RES (3), (3): Xaa is C or S
  MOD_RES (19), (20), (21), (22), (23): Xaa is A or G
  MOD_RES (24), (25), (26), (27): Xaa is A or G or is absent
VKXQPSRVHHSNITVQIMXXXXXXXXXIGEMSRLEEHLE

SEQ ID NO: 14730 - protein, 34 aa, Artificial Sequence
  Non-cyclic GFR-binding peptide
  MOD_RES (34), (34): Xaa is C or S
  MOD_RES (14), (15), (16), (17), (18): Xaa is A or G
  MOD_RES (19), (20), (21), (22): Xaa is A or G or is absent
VPTGQRSVKMAKVXXXXXXXXXKEVQVLEEHSQX

SEQ ID NO: 14731 - protein, 39 aa, Artificial Sequence
  Non-cyclic GFR-binding peptide
  MOD_RES (5), (39): Xaa is C or S
EGLEXVPTGQRPVQMRKIRIKPHQGQHKKATVLEEHSQX

SEQ ID NO: 14732 - protein, 39 aa, Artificial Sequence
  Non-cyclic GFR-binding peptide
  MOD_RES (4), (4): Xaa is C or S
NVQXRPTQVQLRSVKVAKVEIVRKKPIFKEVQVTLEDHL

SEQ ID NO: 14733 - protein, 34 aa, Artificial Sequence
  Non-cyclic GFR-binding peptide
  MOD_RES (2), (2): Xaa is C or S
  MOD_RES (16), (17), (18), (19), (20): Xaa is A or G
  MOD_RES (21), (22), (23), (24): Xaa is A or G or is absent
EXVPTGQSNITMQIMXXXXXXXXXIGEMSLEEHS

SEQ ID NO: 14734 - protein, 37 aa, Artificial Sequence
  Non-cyclic GFR-binding peptide
  MOD_RES (2), (36): Xaa is C or S
EXVPTEERSVKMAKVRIKPHQGQHKEVQVFLQHNKXE

SEQ ID NO: 14735 - protein, 42 aa, Artificial Sequence
  Non-cyclic GFR-binding peptide
  MOD_RES (3), (40), (42): Xaa is C or S
  MOD_RES (19), (20), (21), (22), (23): Xaa is A or G
  MOD_RES (24), (25), (26), (27): Xaa is A or G or is absent
VKXQPSRVHHSNITVQIMXXXXXXXXXLGEMSRLEEHLEXAX

SEQ ID NO: 14736 - protein, 39 aa, Artificial Sequence
  Non-cyclic GFR-binding peptide
  MOD_RES (3), (37), (39): Xaa is C or S
  MOD_RES (17), (18), (19), (20), (21): Xaa is A or G
  MOD_RES (22), (23), (24), (25): Xaa is A or G or is absent
LEXVPTGQSNITMQIMXXXXXXXXXIGEMSLEEHSQXEX

SEQ ID NO: 14737 - protein, 37 aa, Artificial Sequence
  Non-cyclic GFR-binding peptide
  MOD_RES (2), (36): Xaa is C or S
  MOD_RES (16), (17), (18), (19), (20): Xaa is A or G
  MOD_RES (21), (22), (23), (24): Xaa is A or G or is absent
EXVPTEERSVKMAKVXXXXXXXXXKEVQVFLQHNKXE

SEQ ID NO: 14738 - protein, 35 aa, Artificial Sequence
  Non-cyclic GFR-binding peptide
  MOD_RES (3), (3): Xaa is C or S
LEXVPTGQSNITMQIMRIKPHQGQHIGEMSLEEHS

SEQ ID NO: 14739 - protein, 37 aa, Artificial Sequence
  Non-cyclic GFR-binding peptide
  MOD_RES (1), (35), (37): Xaa is C or S
XVPTEESNITMQIMRIKPHQGQHLGEMSFLQHNKXEX

SEQ ID NO: 14740 - protein, 39 aa, Artificial Sequence
  Non-cyclic GFR-binding peptide
  MOD_RES (7), (7): Xaa is C or S
  MOD_RES (21), (22), (23), (24), (25): Xaa is A or G
  MOD_RES (26), (27), (28), (29): Xaa is A or G or is absent
NDEGLEXVPTGQRSVKMAKVXXXXXXXXXKEVQVLEEHS

SEQ ID NO: 14741 - protein, 40 aa, Artificial Sequence
  Non-cyclic GFR-binding peptide
  MOD_RES (7), (7): Xaa is C or S
  MOD_RES (21), (22), (23), (24), (25): Xaa is A or G
  MOD_RES (26), (27), (28), (29): Xaa is A or G or is absent
NDEGLEXVPTEERSVKMAKVXXXXXXXXXKEVQVFLQHNK

SEQ ID NO: 14742 - protein, 34 aa, Artificial Sequence
  Non-cyclic GFR-binding peptide
PTQVQLSNITVQIMEIVRKKPIFIGEMSTLEDHL

SEQ ID NO: 14743 - protein, 37 aa, Artificial Sequence
  Non-cyclic GFR-binding peptide
  MOD_RES (3), (37): Xaa is C or S
  MOD_RES (17), (18), (19), (20), (21): Xaa is A or G
  MOD_RES (22), (23), (24), (25): Xaa is A or G or is absent
LEXVPTGQSNITMQIMXXXXXXXXXIGEMSLEEHSQX

SEQ ID NO: 14744 - protein, 40 aa, Artificial Sequence
  Non-cyclic GFR-binding peptide
  MOD_RES (4), (4): Xaa is C or S
SVKXQPSRVHHRPVQVRKIEYVRKKPKLKKATVRLEEHLE

SEQ ID NO: 14745 - protein, 34 aa, Artificial Sequence
  Non-cyclic GFR-binding peptide
  MOD_RES (1), (1): Xaa is C or S
  MOD_RES (15), (16), (17), (18), (19): Xaa is A or G
  MOD_RES (20), (21), (22), (23): Xaa is A or G or is absent
XVPTGQRPVQMRKIXXXXXXXXXKKATVLEEHSQ

SEQ ID NO: 14746 - protein, 39 aa, Artificial Sequence
  Non-cyclic GFR-binding peptide
  MOD_RES (1), (38): Xaa is C or S
  MOD_RES (17), (18), (19), (20), (21): Xaa is A or G
  MOD_RES (22), (23), (24), (25): Xaa is A or G or is absent
XRPTQVQLSNITVQIMXXXXXXXXXLGEMSTLEDHLAXK

SEQ ID NO: 14747 - protein, 40 aa, Artificial Sequence
  Non-cyclic GFR-binding peptide
  MOD_RES (4), (4): Xaa is C or S
SVKXQPSRVHHSNITVQIMEYVRKKPKLLGEMSRLEEHLE

SEQ ID NO: 14748 - protein, 37 aa, Artificial Sequence
  Non-cyclic GFR-binding peptide
  MOD_RES (35), (37): Xaa is C or S
  MOD_RES (14), (15), (16), (17), (18): Xaa is A or G
  MOD_RES (19), (20), (21), (22): Xaa is A or G or is absent
TQVQLSNITVQIMXXXXXXXXXLGEMSTLEDHLAXKX

SEQ ID NO: 14749 - protein, 35 aa, Artificial Sequence
  Non-cyclic GFR-binding peptide
  MOD_RES (34), (34): Xaa is C or S
VPTGQSNITMQIMRIKPHQGQHIGEMSLEEHSQXE

SEQ ID NO: 14750 - protein, 40 aa, Artificial Sequence
  Non-cyclic GFR-binding peptide
  MOD_RES (3), (40): Xaa is C or S
  MOD_RES (19), (20), (21), (22), (23): Xaa is A or G
  MOD_RES (24), (25), (26), (27): Xaa is A or G or is absent
VQXRPTQVQLSNITVQIMXXXXXXXXXLGEMSTLEDHLAX

SEQ ID NO: 14751 - protein, 34 aa, Artificial Sequence
  Non-cyclic GFR-binding peptide
  MOD_RES (14), (15), (16), (17), (18): Xaa is A or G
  MOD_RES (19), (20), (21), (22): Xaa is A or G or is absent
SRVHHRPVQVRKIXXXXXXXXXKKATVRLEEHLE

SEQ ID NO: 14752 - protein, 39 aa, Artificial Sequence
  Non-cyclic GFR-binding peptide
  MOD_RES (3), (37), (39): Xaa is C or S
  MOD_RES (17), (18), (19), (20), (21): Xaa is A or G
  MOD_RES (22), (23), (24), (25): Xaa is A or G or is absent
LEXVPTEERSVKMAKVXXXXXXXXXKEVQVFLQHNKXEX

SEQ ID NO: 14753 - protein, 43 aa, Artificial Sequence
  Non-cyclic GFR-binding peptide
  MOD_RES (3), (40), (42): Xaa is C or S
  MOD_RES (19), (20), (21), (22), (23): Xaa is A or G
  MOD_RES (24), (25), (26), (27): Xaa is A or G or is absent
VKXQPSRVHHSNITVQIMXXXXXXXXXLGEMSRLEEHLEXAXA

SEQ ID NO: 14754 - protein, 35 aa, Artificial Sequence
  Non-cyclic GFR-binding peptide
  MOD_RES (1), (1): Xaa is C or S
  MOD_RES (17), (18), (19), (20), (21): Xaa is A or G
  MOD_RES (22), (23), (24), (25): Xaa is A or G or is absent
XRPTQVQLRSVKVAKVXXXXXXXXXKEVQVTLEDH

SEQ ID NO: 14755 - protein, 38 aa, Artificial Sequence
  Non-cyclic GFR-binding peptide
  MOD_RES (35), (37): Xaa is C or S
SRVHHSNITVQIMEYVRKKPKLIGEMSRLEEHLEXAXA

SEQ ID NO: 14756 - protein, 35 aa, Artificial Sequence
  Non-cyclic GFR-binding peptide
  MOD_RES (2), (2): Xaa is C or S
  MOD_RES (16), (17), (18), (19), (20): Xaa is A or G
  MOD_RES (21), (22), (23), (24): Xaa is A or G or is absent
EXVPTEESNITMQIMXXXXXXXXXLGEMSFLQHNK

SEQ ID NO: 14757 - protein, 37 aa, Artificial Sequence
  Non-cyclic GFR-binding peptide
  MOD_RES (1), (35), (37): Xaa is C or S
  MOD_RES (15), (16), (17), (18), (19): Xaa is A or G
  MOD_RES (20), (21), (22), (23): Xaa is A or G or is absent
XVPTGQRSVKMAKVXXXXXXXXXKEVQVLEEHSQXEX

SEQ ID NO: 14758 - protein, 42 aa, Artificial Sequence
  Non-cyclic GFR-binding peptide
  MOD_RES (5), (39), (41): Xaa is C or S
EGLEXVPTGQRPVQMRKIRIKPHQGQHKKATVLEEHSQXEXR

SEQ ID NO: 14759 - protein, 41 aa, Artificial Sequence
  Non-cyclic GFR-binding peptide
  MOD_RES (2), (39), (41): Xaa is C or S
  MOD_RES (18), (19), (20), (21), (22): Xaa is A or G
  MOD_RES (23), (24), (25), (26): Xaa is A or G or is absent
QXRPTQVQLRSVKVAKVXXXXXXXXXKEVQVTLEDHLAXKX

SEQ ID NO: 14760 - protein, 38 aa, Artificial Sequence
  Non-cyclic GFR-binding peptide
  MOD_RES (37), (37): Xaa is C or S
  MOD_RES (16), (17), (18), (19), (20): Xaa is A or G
  MOD_RES (21), (22), (23), (24): Xaa is A or G or is absent
QPSRVHHSNITVQIMXXXXXXXXXIGEMSRLEEHLEXA

SEQ ID NO: 14761 - protein, 36 aa, Artificial Sequence
  Non-cyclic GFR-binding peptide
  MOD_RES (2), (2): Xaa is C or S
  MOD_RES (18), (19), (20), (21), (22): Xaa is A or G
  MOD_RES (23), (24), (25), (26): Xaa is A or G or is absent
QXRPTQVQLSNITVQIMXXXXXXXXXIGEMSTLEDH

SEQ ID NO: 14762 - protein, 33 aa, Artificial Sequence
  Non-cyclic GFR-binding peptide
  MOD_RES (1), (1): Xaa is C or S
XVPTEESNITMQIMRIKPHQGQHLGEMSFLQHN

SEQ ID NO: 14763 - protein, 39 aa, Artificial Sequence
  Non-cyclic GFR-binding peptide
  MOD_RES (4), (4): Xaa is C or S
SVKXQPSRVHHSNITVQIMEYVRKKPKLIGEMSRLEEHL

SEQ ID NO: 14764 - protein, 39 aa, Artificial Sequence
  Non-cyclic GFR-binding peptide
  MOD_RES (2), (39): Xaa is C or S
  MOD_RES (18), (19), (20), (21), (22): Xaa is A or G
  MOD_RES (23), (24), (25), (26): Xaa is A or G or is absent
QXRPTQVQLSNITVQIMXXXXXXXXXIGEMSTLEDHLAX

SEQ ID NO: 14765 - protein, 41 aa, Artificial Sequence
  Non-cyclic GFR-binding peptide
  MOD_RES (4), (38), (40): Xaa is C or S
GLEXVPTGQRPVQMRKIRIKPHQGQHKKATVLEEHSQXEXR

SEQ ID NO: 14766 - protein, 33 aa, Artificial Sequence
  Non-cyclic GFR-binding peptide
  MOD_RES (14), (15), (16), (17), (18): Xaa is A or G
  MOD_RES (19), (20), (21), (22): Xaa is A or G or is absent
TQVQLRSVKVAKVXXXXXXXXXKEVQVTLEDHL

SEQ ID NO: 14767 - protein, 38 aa, Artificial Sequence
  Non-cyclic GFR-binding peptide
  MOD_RES (6), (6): Xaa is C or S
DEGLEXVPTGQRPVQMRKIRIKPHQGQHKKATVLEEHS

SEQ ID NO: 14768 - protein, 39 aa, Artificial Sequence
  Non-cyclic GFR-binding peptide
  MOD_RES (2), (39): Xaa is C or S
QXRPTQVQLSNITVQIMEIVRKKPIFIGEMSTLEDHLAX

SEQ ID NO: 14769 - protein, 39 aa, Artificial Sequence
  Non-cyclic GFR-binding peptide
  MOD_RES (6), (6): Xaa is C or S
  MOD_RES (20), (21), (22), (23), (24): Xaa is A or G
  MOD_RES (25), (26), (27), (28): Xaa is A or G or is absent
DEGLEXVPTGQRSVKMAKVXXXXXXXXXKEVQVLEEHSQ

SEQ ID NO: 14770 - protein, 39 aa, Artificial Sequence
  Non-cyclic GFR-binding peptide
  MOD_RES (4), (4): Xaa is C or S
SVKXQPSRVHHRPVQVRKIEYVRKKPKLKKATVRLEEHL

SEQ ID NO: 14771 - protein, 35 aa, Artificial Sequence
  Non-cyclic GFR-binding peptide
  MOD_RES (34), (34): Xaa is C or S
  MOD_RES (14), (15), (16), (17), (18): Xaa is A or G
  MOD_RES (19), (20), (21), (22): Xaa is A or G or is absent
VPTGQSNITMQIMXXXXXXXXXIGEMSLEEHSQXE

SEQ ID NO: 14772 - protein, 40 aa, Artificial Sequence
  Non-cyclic GFR-binding peptide
  MOD_RES (5), (39): Xaa is C or S
  MOD_RES (19), (20), (21), (22), (23): Xaa is A or G
  MOD_RES (24), (25), (26), (27): Xaa is A or G or is absent
EGLEXVPTGQRPVQMRKIXXXXXXXXXKKATVLEEHSQXE

SEQ ID NO: 14773 - protein, 42 aa, Artificial Sequence
  Non-cyclic GFR-binding peptide
  MOD_RES (5), (39), (41): Xaa is C or S
EGLEXVPTGQRSVKMAKVRIKPHQGQHKEVQVLEEHSQXEXR

SEQ ID NO: 14774 - protein, 41 aa, Artificial Sequence
  Non-cyclic GFR-binding peptide
  MOD_RES (5), (39), (41): Xaa is C or S
  MOD_RES (19), (20), (21), (22), (23): Xaa is A or G
  MOD_RES (24), (25), (26), (27): Xaa is A or G or is absent
EGLEXVPTEERPVQMRKIXXXXXXXXXKKATVFLQHNKXEX

SEQ ID NO: 14775 - protein, 42 aa, Artificial Sequence
  Non-cyclic GFR-binding peptide
  MOD_RES (4), (41): Xaa is C or S
SVKXQPSRVHHSNITVQIMEYVRKKPKLIGEMSRLEEHLEXA

SEQ ID NO: 14776 - protein, 43 aa, Artificial Sequence
  Non-cyclic GFR-binding peptide
  MOD_RES (7), (41), (43): Xaa is C or S
NDEGLEXVPTEERSVKMAKVRIKPHQGQHKEVQVFLQHNKXEX

SEQ ID NO: 14777 - protein, 35 aa, Artificial Sequence
  Non-cyclic GFR-binding peptide
  MOD_RES (35), (35): Xaa is C or S
  MOD_RES (14), (15), (16), (17), (18): Xaa is A or G
  MOD_RES (19), (20), (21), (22): Xaa is A or G or is absent
SRVHHSNITVQIMXXXXXXXXXIGEMSRLEEHLEX

SEQ ID NO: 14778 - protein, 34 aa, Artificial Sequence
  Non-cyclic GFR-binding peptide
PSRVHHRPVQVRKIEYVRKKPKLKKATVRLEEHL

SEQ ID NO: 14779 - protein, 39 aa, Artificial Sequence
  Non-cyclic GFR-binding peptide
  MOD_RES (2), (36), (38): Xaa is C or S
  MOD_RES (16), (17), (18), (19), (20): Xaa is A or G
  MOD_RES (21), (22), (23), (24): Xaa is A or G or is absent
EXVPTGQSNITMQIMXXXXXXXXXIGEMSLEEHSQXEXR

SEQ ID NO: 14780 - protein, 38 aa, Artificial Sequence
  Non-cyclic GFR-binding peptide
  MOD_RES (3), (3): Xaa is C or S
VKXQPSRVHHSNITVQIMEYVRKKPKLLGEMSRLEEHL

SEQ ID NO: 14781 - protein, 40 aa, Artificial Sequence
  Non-cyclic GFR-binding peptide
  MOD_RES (4), (4): Xaa is C or S
  MOD_RES (20), (21), (22), (23), (24): Xaa is A or G
  MOD_RES (25), (26), (27), (28): Xaa is A or G or is absent
NVQXRPTQVQLSNITVQIMXXXXXXXXXLGEMSTLEDHLA

SEQ ID NO: 14782 - protein, 34 aa, Artificial Sequence
  Non-cyclic GFR-binding peptide
PSRVHHSNITVQIMEYVRKKPKLIGEMSRLEEHL

SEQ ID NO: 14783 - protein, 33 aa, Artificial Sequence
  Non-cyclic GFR-binding peptide
  MOD_RES (14), (15), (16), (17), (18): Xaa is A or G
  MOD_RES (19), (20), (21), (22): Xaa is A or G or is absent
VPTEERPVQMRKIXXXXXXXXXKKATVFLQHNK

SEQ ID NO: 14784 - protein, 39 aa, Artificial Sequence
  Non-cyclic GFR-binding peptide
  MOD_RES (4), (4): Xaa is C or S
  MOD_RES (20), (21), (22), (23), (24): Xaa is A or G
  MOD_RES (25), (26), (27), (28): Xaa is A or G or is absent
NVQXRPTQVQLSNITVQIMXXXXXXXXXLGEMSTLEDHL

SEQ ID NO: 14785 - protein, 41 aa, Artificial Sequence
  Non-cyclic GFR-binding peptide
  MOD_RES (4), (38), (40): Xaa is C or S
  MOD_RES (18), (19), (20), (21), (22): Xaa is A or G
  MOD_RES (23), (24), (25), (26): Xaa is A or G or is absent
GLEXVPTGQSNITMQIMXXXXXXXXXIGEMSLEEHSQXEXR

SEQ ID NO: 14786 - protein, 38 aa, Artificial Sequence
  Non-cyclic GFR-binding peptide
  MOD_RES (4), (4): Xaa is C or S
NVQXRPTQVQLSNITVQIMEIVRKKPIFLGEMSTLEDH

SEQ ID NO: 14787 - protein, 35 aa, Artificial Sequence
  Non-cyclic GFR-binding peptide
  MOD_RES (2), (2): Xaa is C or S
EXVPTGQRSVKMAKVRIKPHQGQHKEVQVLEEHSQ

SEQ ID NO: 14788 - protein, 37 aa, Artificial Sequence
  Non-cyclic GFR-binding peptide
  MOD_RES (3), (3): Xaa is C or S
  MOD_RES (19), (20), (21), (22), (23): Xaa is A or G
  MOD_RES (24), (25), (26), (27): Xaa is A or G or is absent
VQXRPTQVQLSNITVQIMXXXXXXXXXIGEMSTLEDH

SEQ ID NO: 14789 - protein, 37 aa, Artificial Sequence
  Non-cyclic GFR-binding peptide
  MOD_RES (2), (2): Xaa is C or S
  MOD_RES (18), (19), (20), (21), (22): Xaa is A or G
  MOD_RES (23), (24), (25), (26): Xaa is A or G or is absent
KXQPSRVHHSNITVQIMXXXXXXXXXLGEMSRLEEHL

SEQ ID NO: 14790 - protein, 36 aa, Artificial Sequence
  Non-cyclic GFR-binding peptide
  MOD_RES (2), (36): Xaa is C or S
EXVPTGQRPVQMRKIRIKPHQGQHKKATVLEEHSQX

SEQ ID NO: 14791 - protein, 42 aa, Artificial Sequence
  Non-cyclic GFR-binding peptide
  MOD_RES (6), (40), (42): Xaa is C or S
DEGLEXVPTEERSVKMAKVRIKPHQGQHKEVQVFLQHNKXEX

SEQ ID NO: 14792 - protein, 38 aa, Artificial Sequence
  Non-cyclic GFR-binding peptide
  MOD_RES (3), (37): Xaa is C or S
LEXVPTGQRPVQMRKIRIKPHQGQHKKATVLEEHSQXE

SEQ ID NO: 14793 - protein, 37 aa, Artificial Sequence
  Non-cyclic GFR-binding peptide
  MOD_RES (5), (5): Xaa is C or S
EGLEXVPTEERPVQMRKIRIKPHQGQHKKATVFLQHN

SEQ ID NO: 14794 - protein, 35 aa, Artificial Sequence
  Non-cyclic GFR-binding peptide
  MOD_RES (1), (35): Xaa is C or S
  MOD_RES (15), (16), (17), (18), (19): Xaa is A or G
  MOD_RES (20), (21), (22), (23): Xaa is A or G or is absent
XVPTGQRPVQMRKIXXXXXXXXXKKATVLEEHSQX

SEQ ID NO: 14795 - protein, 38 aa, Artificial Sequence
  Non-cyclic GFR-binding peptide
  MOD_RES (6), (6): Xaa is C or S
  MOD_RES (20), (21), (22), (23), (24): Xaa is A or G
  MOD_RES (25), (26), (27), (28): Xaa is A or G or is absent
DEGLEXVPTEESNITMQIMXXXXXXXXXLGEMSFLQHN

SEQ ID NO: 14796 - protein, 35 aa, Artificial Sequence
  Non-cyclic GFR-binding peptide
  MOD_RES (3), (3): Xaa is C or S
LEXVPTEERPVQMRKIRIKPHQGQHKKATVFLQHN

SEQ ID NO: 14797 - protein, 42 aa, Artificial Sequence
  Non-cyclic GFR-binding peptide
  MOD_RES (7), (41): Xaa is C or S
  MOD_RES (21), (22), (23), (24), (25): Xaa is A or G
  MOD_RES (26), (27), (28), (29): Xaa is A or G or is absent
NDEGLEXVPTGQSNITMQIMXXXXXXXXXIGEMSLEEHSQXE

SEQ ID NO: 14798 - protein, 42 aa, Artificial Sequence
  Non-cyclic GFR-binding peptide
  MOD_RES (6), (40), (42): Xaa is C or S
  MOD_RES (20), (21), (22), (23), (24): Xaa is A or G
  MOD_RES (25), (26), (27), (28): Xaa is A or G or is absent
DEGLEXVPTGQRPVQMRKIXXXXXXXXXKKATVLEEHSQXEX

SEQ ID NO: 14799 - protein, 37 aa, Artificial Sequence
  Non-cyclic GFR-binding peptide
  MOD_RES (36), (36): Xaa is C or S
  MOD_RES (15), (16), (17), (18), (19): Xaa is A or G
  MOD_RES (20), (21), (22), (23): Xaa is A or G or is absent
PTQVQLSNITVQIMXXXXXXXXXIGEMSTLEDHLAXK

SEQ ID NO: 14800 - protein, 33 aa, Artificial Sequence
  Non-cyclic GFR-binding peptide
  MOD_RES (15), (16), (17), (18), (19): Xaa is A or G
  MOD_RES (20), (21), (22), (23): Xaa is A or G or is absent
PSRVHHSNITVQIMXXXXXXXXXIGEMSRLEEH

SEQ ID NO: 14801 - protein, 43 aa, Artificial Sequence
  Non-cyclic GFR-binding peptide
  MOD_RES (3), (40), (42): Xaa is C or S
  MOD_RES (19), (20), (21), (22), (23): Xaa is A or G
  MOD_RES (24), (25), (26), (27): Xaa is A or G or is absent
VQXRPTQVQLSNITVQIMXXXXXXXXXIGEMSTLEDHLAXKXE

SEQ ID NO: 14802 - protein, 40 aa, Artificial Sequence
  Non-cyclic GFR-binding peptide
  MOD_RES (37), (39): Xaa is C or S
RPTQVQLRSVKVAKVEIVRKKPIFKEVQVTLEDHLAXKXE

SEQ ID NO: 14803 - protein, 37 aa, Artificial Sequence
  Non-cyclic GFR-binding peptide
  MOD_RES (36), (36): Xaa is C or S
PTQVQLSNITVQIMEIVRKKPIFIGEMSTLEDHLAXK

SEQ ID NO: 14804 - protein, 38 aa, Artificial Sequence
  Non-cyclic GFR-binding peptide
  MOD_RES (2), (2): Xaa is C or S
KXQPSRVHHSNITVQIMEYVRKKPKLLGEMSRLEEHLE

SEQ ID NO: 14805 - protein, 38 aa, Artificial Sequence
  Non-cyclic GFR-binding peptide
  MOD_RES (5), (5): Xaa is C or S
  MOD_RES (19), (20), (21), (22), (23): Xaa is A or G
  MOD_RES (24), (25), (26), (27): Xaa is A or G or is absent
EGLEXVPTEERPVQMRKIXXXXXXXXXKKATVFLQHNK

SEQ ID NO: 14806 - protein, 33 aa, Artificial Sequence
  Non-cyclic GFR-binding peptide
  MOD_RES (1), (1): Xaa is C or S
XVPTGQSNITMQIMRIKPHQGQHIGEMSLEEHS

SEQ ID NO: 14807 - protein, 35 aa, Artificial Sequence
  Non-cyclic GFR-binding peptide
  MOD_RES (34), (34): Xaa is C or S
VPTEERPVQMRKIRIKPHQGQHKKATVFLQHNKXE

SEQ ID NO: 14808 - protein, 41 aa, Artificial Sequence
  Non-cyclic GFR-binding peptide
  MOD_RES (7), (41): Xaa is C or S
  MOD_RES (21), (22), (23), (24), (25): Xaa is A or G
  MOD_RES (26), (27), (28), (29): Xaa is A or G or is absent
NDEGLEXVPTEESNITMQIMXXXXXXXXXLGEMSFLQHNKX

SEQ ID NO: 14809 - protein, 39 aa, Artificial Sequence
  Non-cyclic GFR-binding peptide
  MOD_RES (5), (5): Xaa is C or S
SSVKXQPSRVHHSNITVQIMEYVRKKPKLLGEMSRLEEH

SEQ ID NO: 14810 - protein, 37 aa, Artificial Sequence
  Non-cyclic GFR-binding peptide
  MOD_RES (36), (36): Xaa is C or S
  MOD_RES (15), (16), (17), (18), (19): Xaa is A or G
  MOD_RES (20), (21), (22), (23): Xaa is A or G or is absent
PSRVHHSNITVQIMXXXXXXXXXLGEMSRLEEHLEXA

SEQ ID NO: 14811 - protein, 42 aa, Artificial Sequence
  Non-cyclic GFR-binding peptide
  MOD_RES (4), (41): Xaa is C or S
NVQXRPTQVQLSNITVQIMEIVRKKPIFLGEMSTLEDHLAXK

SEQ ID NO: 14812 - protein, 38 aa, Artificial Sequence
  Non-cyclic GFR-binding peptide
  MOD_RES (5), (5): Xaa is C or S
EGLEXVPTEESNITMQIMRIKPHQGQHLGEMSFLQHNK

SEQ ID NO: 14813 - protein, 42 aa, Artificial Sequence
  Non-cyclic GFR-binding peptide
  MOD_RES (4), (41): Xaa is C or S
  MOD_RES (20), (21), (22), (23), (24): Xaa is A or G
  MOD_RES (25), (26), (27), (28): Xaa is A or G or is absent
NVQXRPTQVQLSNITVQIMXXXXXXXXXLGEMSTLEDHLAXK

SEQ ID NO: 14814 - protein, 41 aa, Artificial Sequence
  Non-cyclic GFR-binding peptide
  MOD_RES (1), (38), (40): Xaa is C or S
  MOD_RES (17), (18), (19), (20), (21): Xaa is A or G
  MOD_RES (22), (23), (24), (25): Xaa is A or G or is absent
XRPTQVQLSNITVQIMXXXXXXXXXIGEMSTLEDHLAXKXE

SEQ ID NO: 14815 - protein, 39 aa, Artificial Sequence
  Non-cyclic GFR-binding peptide
  MOD_RES (37), (39): Xaa is C or S
RPTQVQLRSVKVAKVEIVRKKPIFKEVQVTLEDHLAXKX

SEQ ID NO: 14816 - protein, 39 aa, Artificial Sequence
  Non-cyclic GFR-binding peptide
  MOD_RES (3), (3): Xaa is C or S
  MOD_RES (19), (20), (21), (22), (23): Xaa is A or G
  MOD_RES (24), (25), (26), (27): Xaa is A or G or is absent
VQXRPTQVQLSNITVQIMXXXXXXXXXIGEMSTLEDHLA

SEQ ID NO: 14817 - protein, 42 aa, Artificial Sequence
  Non-cyclic GFR-binding peptide
  MOD_RES (2), (39), (41): Xaa is C or S
  MOD_RES (18), (19), (20), (21), (22): Xaa is A or G
  MOD_RES (23), (24), (25), (26): Xaa is A or G or is absent
QXRPTQVQLSNITVQIMXXXXXXXXXIGEMSTLEDHLAXKXE

SEQ ID NO: 14818 - protein, 38 aa, Artificial Sequence
  Non-cyclic GFR-binding peptide
  MOD_RES (1), (38): Xaa is C or S
XRPTQVQLSNITVQIMEIVRKKPIFIGEMSTLEDHLAX

SEQ ID NO: 14819 - protein, 40 aa, Artificial Sequence
  Non-cyclic GFR-binding peptide
  MOD_RES (5), (5): Xaa is C or S
  MOD_RES (21), (22), (23), (24), (25): Xaa is A or G
  MOD_RES (26), (27), (28), (29): Xaa is A or G or is absent
SSVKXQPSRVHHSNITVQIMXXXXXXXXXLGEMSRLEEHL

SEQ ID NO: 14820 - protein, 42 aa, Artificial Sequence
  Non-cyclic GFR-binding peptide
  MOD_RES (5), (42): Xaa is C or S
  MOD_RES (21), (22), (23), (24), (25): Xaa is A or G
  MOD_RES (26), (27), (28), (29): Xaa is A or G or is absent
SSVKXQPSRVHHSNITVQIMXXXXXXXXXLGEMSRLEEHLEX

SEQ ID NO: 14821 - protein, 39 aa, Artificial Sequence
  Non-cyclic GFR-binding peptide
  MOD_RES (3), (37), (39): Xaa is C or S
LEXVPTGQRSVKMAKVRIKPHQGQHKEVQVLEEHSQXEX

SEQ ID NO: 14822 - protein, 35 aa, Artificial Sequence
  Non-cyclic GFR-binding peptide
  MOD_RES (1), (35): Xaa is C or S
  MOD_RES (15), (16), (17), (18), (19): Xaa is A or G
  MOD_RES (20), (21), (22), (23): Xaa is A or G or is absent
XVPTEESNITMQIMXXXXXXXXXLGEMSFLQHNKX

SEQ ID NO: 14823 - protein, 34 aa, Artificial Sequence
  Non-cyclic GFR-binding peptide
  MOD_RES (1), (1): Xaa is C or S
  MOD_RES (15), (16), (17), (18), (19): Xaa is A or G
  MOD_RES (20), (21), (22), (23): Xaa is A or G or is absent
XVPTEERSVKMAKVXXXXXXXXXKEVQVFLQHNK

SEQ ID NO: 14824 - protein, 36 aa, Artificial Sequence
  Non-cyclic GFR-binding peptide
RPTQVQLSNITVQIMEIVRKKPIFIGEMSTLEDHLA

SEQ ID NO: 14825 - protein, 41 aa, Artificial Sequence
  Non-cyclic GFR-binding peptide
  MOD_RES (1), (38), (40): Xaa is C or S
  MOD_RES (17), (18), (19), (20), (21): Xaa is A or G
  MOD_RES (22), (23), (24), (25): Xaa is A or G or is absent
XQPSRVHHSNITVQIMXXXXXXXXXIGEMSRLEEHLEXAXA

SEQ ID NO: 14826 - protein, 35 aa, Artificial Sequence
  Non-cyclic GFR-binding peptide
  MOD_RES (35), (35): Xaa is C or S
TQVQLRSVKVAKVEIVRKKPIFKEVQVTLEDHLAX

SEQ ID NO: 14827 - protein, 36 aa, Artificial Sequence
  Non-cyclic GFR-binding peptide
  MOD_RES (36), (36): Xaa is C or S
  MOD_RES (15), (16), (17), (18), (19): Xaa is A or G
  MOD_RES (20), (21), (22), (23): Xaa is A or G or is absent
PSRVHHSNITVQIMXXXXXXXXXLGEMSRLEEHLEX

SEQ ID NO: 14828 - protein, 44 aa, Artificial Sequence
  Non-cyclic GFR-binding peptide
  MOD_RES (5), (42), (44): Xaa is C or S
SSVKXQPSRVHHSNITVQIMEYVRKKPKLLGEMSRLEEHLEXAX

SEQ ID NO: 14829 - protein, 44 aa, Artificial Sequence
  Non-cyclic GFR-binding peptide
  MOD_RES (7), (41), (43): Xaa is C or S
  MOD_RES (21), (22), (23), (24), (25): Xaa is A or G
  MOD_RES (26), (27), (28), (29): Xaa is A or G or is absent
NDEGLEXVPTEERSVKMAKVXXXXXXXXXKEVQVFLQHNKXEXR

SEQ ID NO: 14830 - protein, 40 aa, Artificial Sequence
  Non-cyclic GFR-binding peptide
  MOD_RES (3), (37), (39): Xaa is C or S
  MOD_RES (17), (18), (19), (20), (21): Xaa is A or G
  MOD_RES (22), (23), (24), (25): Xaa is A or G or is absent
LEXVPTEERSVKMAKVXXXXXXXXXKEVQVFLQHNKXEXR

SEQ ID NO: 14831 - protein, 42 aa, Artificial Sequence
  Non-cyclic GFR-binding peptide
  MOD_RES (7), (41): Xaa is C or S
NDEGLEXVPTGQRSVKMAKVRIKPHQGQHKEVQVLEEHSQXE

SEQ ID NO: 14832 - protein, 34 aa, Artificial Sequence
  Non-cyclic GFR-binding peptide
RPTQVQLSNITVQIMEIVRKKPIFIGEMSTLEDH

SEQ ID NO: 14833 - protein, 36 aa, Artificial Sequence
  Non-cyclic GFR-binding peptide
  MOD_RES (2), (36): Xaa is C or S
EXVPTGQRSVKMAKVRIKPHQGQHKEVQVLEEHSQX

SEQ ID NO: 14834 - protein, 39 aa, Artificial Sequence
  Non-cyclic GFR-binding peptide
  MOD_RES (4), (38): Xaa is C or S
GLEXVPTGQRSVKMAKVRIKPHQGQHKEVQVLEEHSQXE

SEQ ID NO: 14835 - protein, 38 aa, Artificial Sequence
  Non-cyclic GFR-binding peptide
  MOD_RES (4), (38): Xaa is C or S
  MOD_RES (18), (19), (20), (21), (22): Xaa is A or G
  MOD_RES (23), (24), (25), (26): Xaa is A or G or is absent
GLEXVPTGQSNITMQIMXXXXXXXXXIGEMSLEEHSQX

SEQ ID NO: 14836 - protein, 41 aa, Artificial Sequence
  Non-cyclic GFR-binding peptide
  MOD_RES (4), (41): Xaa is C or S
  MOD_RES (20), (21), (22), (23), (24): Xaa is A or G
  MOD_RES (25), (26), (27), (28): Xaa is A or G or is absent
SVKXQPSRVHHRPVQVRKIXXXXXXXXXKKATVRLEEHLEX

SEQ ID NO: 14837 - protein, 43 aa, Artificial Sequence
  Non-cyclic GFR-binding peptide
  MOD_RES (6), (40), (42): Xaa is C or S
DEGLEXVPTEERSVKMAKVRIKPHQGQHKEVQVFLQHNKXEXR

SEQ ID NO: 14838 - protein, 40 aa, Artificial Sequence
  Non-cyclic GFR-binding peptide
  MOD_RES (3), (40): Xaa is C or S
VQXRPTQVQLSNITVQIMEIVRKKPIFLGEMSTLEDHLAX

SEQ ID NO: 14839 - protein, 33 aa, Artificial Sequence
  Non-cyclic GFR-binding peptide
VPTEERPVQMRKIRIKPHQGQHKKATVFLQHNK

SEQ ID NO: 14840 - protein, 39 aa, Artificial Sequence
  Non-cyclic GFR-binding peptide
  MOD_RES (4), (4): Xaa is C or S
  MOD_RES (20), (21), (22), (23), (24): Xaa is A or G
  MOD_RES (25), (26), (27), (28): Xaa is A or G or is absent
NVQXRPTQVQLRSVKVAKVXXXXXXXXXKEVQVTLEDHL

SEQ ID NO: 14841 - protein, 36 aa, Artificial Sequence
  Non-cyclic GFR-binding peptide
  MOD_RES (35), (35): Xaa is C or S
TQVQLRSVKVAKVEIVRKKPIFKEVQVTLEDHLAXK

SEQ ID NO: 14842 - protein, 38 aa, Artificial Sequence
  Non-cyclic GFR-binding peptide
  MOD_RES (3), (3): Xaa is C or S
  MOD_RES (19), (20), (21), (22), (23): Xaa is A or G
  MOD_RES (24), (25), (26), (27): Xaa is A or G or is absent
VKXQPSRVHHSNITVQIMXXXXXXXXXIGEMSRLEEHL

SEQ ID NO: 14843 - protein, 40 aa, Artificial Sequence
  Non-cyclic GFR-binding peptide
  MOD_RES (4), (38), (40): Xaa is C or S
GLEXVPTGQRPVQMRKIRIKPHQGQHKKATVLEEHSQXEX

SEQ ID NO: 14844 - protein, 40 aa, Artificial Sequence
  Non-cyclic GFR-binding peptide
  MOD_RES (5), (39): Xaa is C or S
EGLEXVPTGQRSVKMAKVRIKPHQGQHKEVQVLEEHSQXE

SEQ ID NO: 14845 - protein, 36 aa, Artificial Sequence
  Non-cyclic GFR-binding peptide
  MOD_RES (34), (36): Xaa is C or S
  MOD_RES (14), (15), (16), (17), (18): Xaa is A or G
  MOD_RES (19), (20), (21), (22): Xaa is A or G or is absent
VPTEESNITMQIMXXXXXXXXXLGEMSFLQHNKXEX

SEQ ID NO: 14846 - protein, 36 aa, Artificial Sequence
  Non-cyclic GFR-binding peptide
  MOD_RES (3), (3): Xaa is C or S
  MOD_RES (17), (18), (19), (20), (21): Xaa is A or G
  MOD_RES (22), (23), (24), (25): Xaa is A or G or is absent
LEXVPTEESNITMQIMXXXXXXXXXLGEMSFLQHNK

SEQ ID NO: 14847 - protein, 39 aa, Artificial Sequence
  Non-cyclic GFR-binding peptide
  MOD_RES (7), (7): Xaa is C or S
NDEGLEXVPTEERPVQMRKIRIKPHQGQHKKATVFLQHN

SEQ ID NO: 14848 - protein, 41 aa, Artificial Sequence
  Non-cyclic GFR-binding peptide
  MOD_RES (5), (5): Xaa is C or S
SSVKXQPSRVHHSNITVQIMEYVRKKPKLLGEMSRLEEHLE

SEQ ID NO: 14849 - protein, 37 aa, Artificial Sequence
  Non-cyclic GFR-binding peptide
  MOD_RES (2), (36): Xaa is C or S
EXVPTEESNITMQIMRIKPHQGQHLGEMSFLQHNKXE

SEQ ID NO: 14850 - protein, 38 aa, Artificial Sequence
  Non-cyclic GFR-binding peptide
  MOD_RES (3), (3): Xaa is C or S
  MOD_RES (19), (20), (21), (22), (23): Xaa is A or G
  MOD_RES (24), (25), (26), (27): Xaa is A or G or is absent
VKXQPSRVHHRPVQVRKIXXXXXXXXXKKATVRLEEHL

SEQ ID NO: 14851 - protein, 39 aa, Artificial Sequence
  Non-cyclic GFR-binding peptide
  MOD_RES (7), (7): Xaa is C or S
NDEGLEXVPTEERSVKMAKVRIKPHQGQHKEVQVFLQHN

SEQ ID NO: 14852 - protein, 39 aa, Artificial Sequence
  Non-cyclic GFR-binding peptide
  MOD_RES (37), (39): Xaa is C or S
QPSRVHHSNITVQIMEYVRKKPKLIGEMSRLEEHLEXAX

SEQ ID NO: 14853 - protein, 37 aa, Artificial Sequence
  Non-cyclic GFR-binding peptide
  MOD_RES (1), (1): Xaa is C or S
  MOD_RES (17), (18), (19), (20), (21): Xaa is A or G
  MOD_RES (22), (23), (24), (25): Xaa is A or G or is absent
XQPSRVHHRPVQVRKIXXXXXXXXXKKATVRLEEHLE

SEQ ID NO: 14854 - protein, 38 aa, Artificial Sequence
  Non-cyclic GFR-binding peptide
  MOD_RES (6), (6): Xaa is C or S
DEGLEXVPTGQRSVKMAKVRIKPHQGQHKEVQVLEEHS

SEQ ID NO: 14855 - protein, 40 aa, Artificial Sequence
  Non-cyclic GFR-binding peptide
  MOD_RES (3), (37), (39): Xaa is C or S
  MOD_RES (17), (18), (19), (20), (21): Xaa is A or G
  MOD_RES (22), (23), (24), (25): Xaa is A or G or is absent
LEXVPTGQSNITMQIMXXXXXXXXXIGEMSLEEHSQXEXR

SEQ ID NO: 14856 - protein, 33 aa, Artificial Sequence
  Non-cyclic GFR-binding peptide
  MOD_RES (15), (16), (17), (18), (19): Xaa is A or G
  MOD_RES (20), (21), (22), (23): Xaa is A or G or is absent
PSRVHHRPVQVRKIXXXXXXXXXKKATVRLEEH

SEQ ID NO: 14857 - protein, 43 aa, Artificial Sequence
  Non-cyclic GFR-binding peptide
  MOD_RES (4), (41), (43): Xaa is C or S
  MOD_RES (20), (21), (22), (23), (24): Xaa is A or G
  MOD_RES (25), (26), (27), (28): Xaa is A or G or is absent
SVKXQPSRVHHSNITVQIMXXXXXXXXXIGEMSRLEEHLEXAX

SEQ ID NO: 14858 - protein, 37 aa, Artificial Sequence
  Non-cyclic GFR-binding peptide
  MOD_RES (36), (36): Xaa is C or S
PSRVHHRPVQVRKIEYVRKKPKLKKATVRLEEHLEXA

SEQ ID NO: 14859 - protein, 38 aa, Artificial Sequence
  Non-cyclic GFR-binding peptide
  MOD_RES (3), (37): Xaa is C or S
  MOD_RES (17), (18), (19), (20), (21): Xaa is A or G
  MOD_RES (22), (23), (24), (25): Xaa is A or G or is absent
LEXVPTEERSVKMAKVXXXXXXXXXKEVQVFLQHNKXE

SEQ ID NO: 14860 - protein, 36 aa, Artificial Sequence
  Non-cyclic GFR-binding peptide
  MOD_RES (16), (17), (18), (19), (20): Xaa is A or G
  MOD_RES (21), (22), (23), (24): Xaa is A or G or is absent
RPTQVQLRSVKVAKVXXXXXXXXXKEVQVTLEDHLA

SEQ ID NO: 14861 - protein, 38 aa, Artificial Sequence
  Non-cyclic GFR-binding peptide
  MOD_RES (2), (36), (38): Xaa is C or S
  MOD_RES (16), (17), (18), (19), (20): Xaa is A or G
  MOD_RES (21), (22), (23), (24): Xaa is A or G or is absent
EXVPTGQRPVQMRKIXXXXXXXXXKKATVLEEHSQXEX

SEQ ID NO: 14862 - protein, 36 aa, Artificial Sequence
  Non-cyclic GFR-binding peptide
  MOD_RES (35), (35): Xaa is C or S
  MOD_RES (14), (15), (16), (17), (18): Xaa is A or G
  MOD_RES (19), (20), (21), (22): Xaa is A or G or is absent
TQVQLRSVKVAKVXXXXXXXXXKEVQVTLEDHLAXK

SEQ ID NO: 14863 - protein, 43 aa, Artificial Sequence
  Non-cyclic GFR-binding peptide
  MOD_RES (3), (40), (42): Xaa is C or S
VKXQPSRVHHSNITVQIMEYVRKKPKLIGEMSRLEEHLEXAXA

SEQ ID NO: 14864 - protein, 37 aa, Artificial Sequence
  Non-cyclic GFR-binding peptide
  MOD_RES (36), (36): Xaa is C or S
PSRVHHSNITVQIMEYVRKKPKLLGEMSRLEEHLEXA

SEQ ID NO: 14865 - protein, 40 aa, Artificial Sequence
  Non-cyclic GFR-binding peptide
  MOD_RES (3), (40): Xaa is C or S
VKXQPSRVHHSNITVQIMEYVRKKPKLIGEMSRLEEHLEX

SEQ ID NO: 14866 - protein, 38 aa, Artificial Sequence
  Non-cyclic GFR-binding peptide
  MOD_RES (1), (35), (37): Xaa is C or S
  MOD_RES (15), (16), (17), (18), (19): Xaa is A or G
  MOD_RES (20), (21), (22), (23): Xaa is A or G or is absent
XVPTGQSNITMQIMXXXXXXXXXIGEMSLEEHSQXEXR

SEQ ID NO: 14867 - protein, 38 aa, Artificial Sequence
  Non-cyclic GFR-binding peptide
  MOD_RES (6), (6): Xaa is C or S
  MOD_RES (20), (21), (22), (23), (24): Xaa is A or G
  MOD_RES (25), (26), (27), (28): Xaa is A or G or is absent
DEGLEXVPTGQSNITMQIMXXXXXXXXXIGEMSLEEHS

SEQ ID NO: 14868 - protein, 40 aa, Artificial Sequence
  Non-cyclic GFR-binding peptide
  MOD_RES (4), (38), (40): Xaa is C or S
  MOD_RES (18), (19), (20), (21), (22): Xaa is A or G
  MOD_RES (23), (24), (25), (26): Xaa is A or G or is absent
GLEXVPTEERPVQMRKIXXXXXXXXXKKATVFLQHNKXEX

SEQ ID NO: 14869 - protein, 43 aa, Artificial Sequence
  Non-cyclic GFR-binding peptide
  MOD_RES (6), (40), (42): Xaa is C or S
  MOD_RES (20), (21), (22), (23), (24): Xaa is A or G
  MOD_RES (25), (26), (27), (28): Xaa is A or G or is absent
DEGLEXVPTEERPVQMRKIXXXXXXXXXKKATVFLQHNKXEXR

SEQ ID NO: 14870 - protein, 35 aa, Artificial Sequence
  Non-cyclic GFR-binding peptide
  MOD_RES (35), (35): Xaa is C or S
  MOD_RES (14), (15), (16), (17), (18): Xaa is A or G
  MOD_RES (19), (20), (21), (22): Xaa is A or G or is absent
TQVQLSNITVQIMXXXXXXXXXLGEMSTLEDHLAX

SEQ ID NO: 14871 - protein, 39 aa, Artificial Sequence
  Non-cyclic GFR-binding peptide
  MOD_RES (5), (5): Xaa is C or S
RNVQXRPTQVQLSNITVQIMEIVRKKPIFLGEMSTLEDH

SEQ ID NO: 14872 - protein, 41 aa, Artificial Sequence
  Non-cyclic GFR-binding peptide
  MOD_RES (6), (40): Xaa is C or S
DEGLEXVPTGQSNITMQIMRIKPHQGQHIGEMSLEEHSQXE

SEQ ID NO: 14873 - protein, 38 aa, Artificial Sequence
  Non-cyclic GFR-binding peptide
  MOD_RES (6), (6): Xaa is C or S
DEGLEXVPTEESNITMQIMRIKPHQGQHLGEMSFLQHN

SEQ ID NO: 14874 - protein, 40 aa, Artificial Sequence
  Non-cyclic GFR-binding peptide
  MOD_RES (5), (5): Xaa is C or S
  MOD_RES (21), (22), (23), (24), (25): Xaa is A or G
  MOD_RES (26), (27), (28), (29): Xaa is A or G or is absent
SSVKXQPSRVHHRPVQVRKIXXXXXXXXXKKATVRLEEHL

SEQ ID NO: 14875 - protein, 40 aa, Artificial Sequence
  Non-cyclic GFR-binding peptide
  MOD_RES (1), (38), (40): Xaa is C or S
  MOD_RES (17), (18), (19), (20), (21): Xaa is A or G
  MOD_RES (22), (23), (24), (25): Xaa is A or G or is absent
XQPSRVHHSNITVQIMXXXXXXXXXIGEMSRLEEHLEXAX

SEQ ID NO: 14876 - protein, 35 aa, Artificial Sequence
  Non-cyclic GFR-binding peptide
  MOD_RES (3), (3): Xaa is C or S
LEXVPTEESNITMQIMRIKPHQGQHLGEMSFLQHN

SEQ ID NO: 14877 - protein, 39 aa, Artificial Sequence
  Non-cyclic GFR-binding peptide
  MOD_RES (5), (39): Xaa is C or S
EGLEXVPTEERPVQMRKIRIKPHQGQHKKATVFLQHNKX

SEQ ID NO: 14878 - protein, 41 aa, Artificial Sequence
  Non-cyclic GFR-binding peptide
  MOD_RES (5), (39), (41): Xaa is C or S
EGLEXVPTGQRPVQMRKIRIKPHQGQHKKATVLEEHSQXEX

SEQ ID NO: 14879 - protein, 37 aa, Artificial Sequence
  Non-cyclic GFR-binding peptide
  MOD_RES (1), (1): Xaa is C or S
XRPTQVQLSNITVQIMEIVRKKPIFIGEMSTLEDHLA

SEQ ID NO: 14880 - protein, 42 aa, Artificial Sequence
  Non-cyclic GFR-binding peptide
  MOD_RES (6), (40), (42): Xaa is C or S
DEGLEXVPTEESNITMQIMRIKPHQGQHLGEMSFLQHNKXEX

SEQ ID NO: 14881 - protein, 38 aa, Artificial Sequence
  Non-cyclic GFR-binding peptide
  MOD_RES (4), (4): Xaa is C or S
SVKXQPSRVHHSNITVQIMEYVRKKPKLLGEMSRLEEH

SEQ ID NO: 14882 - protein, 38 aa, Artificial Sequence
  Non-cyclic GFR-binding peptide
  MOD_RES (36), (38): Xaa is C or S
PTQVQLRSVKVAKVEIVRKKPIFKEVQVTLEDHLAXKX

SEQ ID NO: 14883 - protein, 41 aa, Artificial Sequence
  Non-cyclic GFR-binding peptide
  MOD_RES (3), (40): Xaa is C or S
VQXRPTQVQLSNITVQIMEIVRKKPIFLGEMSTLEDHLAXK

SEQ ID NO: 14884 - protein, 40 aa, Artificial Sequence
  Non-cyclic GFR-binding peptide
  MOD_RES (37), (39): Xaa is C or S
QPSRVHHSNITVQIMEYVRKKPKLIGEMSRLEEHLEXAXA

SEQ ID NO: 14885 - protein, 37 aa, Artificial Sequence
  Non-cyclic GFR-binding peptide
  MOD_RES (37), (37): Xaa is C or S
QPSRVHHSNITVQIMEYVRKKPKLLGEMSRLEEHLEX

SEQ ID NO: 14886 - protein, 40 aa, Artificial Sequence
  Non-cyclic GFR-binding peptide
  MOD_RES (6), (40): Xaa is C or S
DEGLEXVPTEERPVQMRKIRIKPHQGQHKKATVFLQHNKX

SEQ ID NO: 14887 - protein, 36 aa, Artificial Sequence
  Non-cyclic GFR-binding peptide
  MOD_RES (1), (1): Xaa is C or S
  MOD_RES (17), (18), (19), (20), (21): Xaa is A or G
  MOD_RES (22), (23), (24), (25): Xaa is A or G or is absent
XRPTQVQLSNITVQIMXXXXXXXXXLGEMSTLEDHL

SEQ ID NO: 14888 - protein, 38 aa, Artificial Sequence
  Non-cyclic GFR-binding peptide
  MOD_RES (2), (36), (38): Xaa is C or S
EXVPTGQRSVKMAKVRIKPHQGQHKEVQVLEEHSQXEX

SEQ ID NO: 14889 - protein, 32 aa, Artificial Sequence
  Non-cyclic GFR-binding peptide
  MOD_RES (14), (15), (16), (17), (18): Xaa is A or G
  MOD_RES (19), (20), (21), (22): Xaa is A or G or is absent
TQVQLSNITVQIMXXXXXXXXXIGEMSTLEDH

SEQ ID NO: 14890 - protein, 41 aa, Artificial Sequence
  Non-cyclic GFR-binding peptide
  MOD_RES (4), (38), (40): Xaa is C or S
GLEXVPTGQSNITMQIMRIKPHQGQHIGEMSLEEHSQXEXR

SEQ ID NO: 14891 - protein, 42 aa, Artificial Sequence
  Non-cyclic GFR-binding peptide
  MOD_RES (3), (40), (42): Xaa is C or S
VKXQPSRVHHSNITVQIMEYVRKKPKLIGEMSRLEEHLEXAX

SEQ ID NO: 14892 - protein, 39 aa, Artificial Sequence
  Non-cyclic GFR-binding peptide
  MOD_RES (5), (5): Xaa is C or S
  MOD_RES (21), (22), (23), (24), (25): Xaa is A or G
  MOD_RES (26), (27), (28), (29): Xaa is A or G or is absent
SSVKXQPSRVHHSNITVQIMXXXXXXXXXLGEMSRLEEH

SEQ ID NO: 14893 - protein, 41 aa, Artificial Sequence
  Non-cyclic GFR-binding peptide
  MOD_RES (5), (5): Xaa is C or S
  MOD_RES (21), (22), (23), (24), (25): Xaa is A or G
  MOD_RES (26), (27), (28), (29): Xaa is A or G or is absent
SSVKXQPSRVHHRPVQVRKIXXXXXXXXXKKATVRLEEHLE

SEQ ID NO: 14894 - protein, 37 aa, Artificial Sequence
  Non-cyclic GFR-binding peptide
  MOD_RES (1), (35), (37): Xaa is C or S
XVPTGQRSVKMAKVRIKPHQGQHKEVQVLEEHSQXEX

SEQ ID NO: 14895 - protein, 39 aa, Artificial Sequence
  Non-cyclic GFR-binding peptide
  MOD_RES (4), (4): Xaa is C or S
NVQXRPTQVQLSNITVQIMEIVRKKPIFLGEMSTLEDHL

SEQ ID NO: 14896 - protein, 38 aa, Artificial Sequence
  Non-cyclic GFR-binding peptide
  MOD_RES (35), (37): Xaa is C or S
  MOD_RES (14), (15), (16), (17), (18): Xaa is A or G
  MOD_RES (19), (20), (21), (22): Xaa is A or G or is absent
TQVQLRSVKVAKVXXXXXXXXXKEVQVTLEDHLAXKXE

SEQ ID NO: 14897 - protein, 42 aa, Artificial Sequence
  Non-cyclic GFR-binding peptide
  MOD_RES (2), (39), (41): Xaa is C or S
KXQPSRVHHSNITVQIMEYVRKKPKLLGEMSRLEEHLEXAXA

SEQ ID NO: 14898 - protein, 44 aa, Artificial Sequence
  Non-cyclic GFR-binding peptide
  MOD_RES (7), (41), (43): Xaa is C or S
  MOD_RES (21), (22), (23), (24), (25): Xaa is A or G
  MOD_RES (26), (27), (28), (29): Xaa is A or G or is absent
NDEGLEXVPTGQSNITMQIMXXXXXXXXXIGEMSLEEHSQXEXR

SEQ ID NO: 14899 - protein, 42 aa, Artificial Sequence
  Non-cyclic GFR-binding peptide
  MOD_RES (4), (41): Xaa is C or S
  MOD_RES (20), (21), (22), (23), (24): Xaa is A or G
  MOD_RES (25), (26), (27), (28): Xaa is A or G or is absent
SVKXQPSRVHHSNITVQIMXXXXXXXXXLGEMSRLEEHLEXA

SEQ ID NO: 14900 - protein, 42 aa, Artificial Sequence
  Non-cyclic GFR-binding peptide
  MOD_RES (7), (41): Xaa is C or S
NDEGLEXVPTEERSVKMAKVRIKPHQGQHKEVQVFLQHNKXE

SEQ ID NO: 14901 - protein, 37 aa, Artificial Sequence
  Non-cyclic GFR-binding peptide
  MOD_RES (37), (37): Xaa is C or S
RPTQVQLSNITVQIMEIVRKKPIFLGEMSTLEDHLAX

SEQ ID NO: 14902 - protein, 37 aa, Artificial Sequence
  Non-cyclic GFR-binding peptide
  MOD_RES (3), (37): Xaa is C or S
  MOD_RES (17), (18), (19), (20), (21): Xaa is A or G
  MOD_RES (22), (23), (24), (25): Xaa is A or G or is absent
LEXVPTEESNITMQIMXXXXXXXXXLGEMSFLQHNKX

SEQ ID NO: 14903 - protein, 38 aa, Artificial Sequence
  Non-cyclic GFR-binding peptide
  MOD_RES (36), (38): Xaa is C or S
PSRVHHRPVQVRKIEYVRKKPKLKKATVRLEEHLEXAX

SEQ ID NO: 14904 - protein, 38 aa, Artificial Sequence
  Non-cyclic GFR-binding peptide
  MOD_RES (6), (6): Xaa is C or S
DEGLEXVPTGQSNITMQIMRIKPHQGQHIGEMSLEEHS

SEQ ID NO: 14905 - protein, 39 aa, Artificial Sequence
  Non-cyclic GFR-binding peptide
  MOD_RES (2), (39): Xaa is C or S
  MOD_RES (18), (19), (20), (21), (22): Xaa is A or G
  MOD_RES (23), (24), (25), (26): Xaa is A or G or is absent
KXQPSRVHHRPVQVRKIXXXXXXXXXKKATVRLEEHLEX

SEQ ID NO: 14906 - protein, 40 aa, Artificial Sequence
  Non-cyclic GFR-binding peptide
  MOD_RES (6), (40): Xaa is C or S
DEGLEXVPTGQRSVKMAKVRIKPHQGQHKEVQVLEEHSQX

SEQ ID NO: 14907 - protein, 39 aa, Artificial Sequence
  Non-cyclic GFR-binding peptide
  MOD_RES (5), (39): Xaa is C or S
  MOD_RES (19), (20), (21), (22), (23): Xaa is A or G
  MOD_RES (24), (25), (26), (27): Xaa is A or G or is absent
EGLEXVPTEERSVKMAKVXXXXXXXXXKEVQVFLQHNKX

SEQ ID NO: 14908 - protein, 42 aa, Artificial Sequence
  Non-cyclic GFR-binding peptide
  MOD_RES (6), (40), (42): Xaa is C or S
  MOD_RES (20), (21), (22), (23), (24): Xaa is A or G
  MOD_RES (25), (26), (27), (28): Xaa is A or G or is absent
DEGLEXVPTGQRSVKMAKVXXXXXXXXXKEVQVLEEHSQXEX

SEQ ID NO: 14909 - protein, 39 aa, Artificial Sequence
  Non-cyclic GFR-binding peptide
  MOD_RES (36), (38): Xaa is C or S
PTQVQLRSVKVAKVEIVRKKPIFKEVQVTLEDHLAXKXE

SEQ ID NO: 14910 - protein, 39 aa, Artificial Sequence
  Non-cyclic GFR-binding peptide
  MOD_RES (1), (38): Xaa is C or S
XQPSRVHHSNITVQIMEYVRKKPKLIGEMSRLEEHLEXA

SEQ ID NO: 14911 - protein, 37 aa, Artificial Sequence
  Non-cyclic GFR-binding peptide
  MOD_RES (3), (37): Xaa is C or S
LEXVPTEESNITMQIMRIKPHQGQHLGEMSFLQHNKX

SEQ ID NO: 14912 - protein, 43 aa, Artificial Sequence
  Non-cyclic GFR-binding peptide
  MOD_RES (3), (40), (42): Xaa is C or S
VQXRPTQVQLSNITVQIMEIVRKKPIFLGEMSTLEDHLAXKXE

SEQ ID NO: 14913 - protein, 37 aa, Artificial Sequence
  Non-cyclic GFR-binding peptide
  MOD_RES (37), (37): Xaa is C or S
  MOD_RES (16), (17), (18), (19), (20): Xaa is A or G
  MOD_RES (21), (22), (23), (24): Xaa is A or G or is absent
RPTQVQLRSVKVAKVXXXXXXXXXKEVQVTLEDHLAX

SEQ ID NO: 14914 - protein, 33 aa, Artificial Sequence
  Non-cyclic GFR-binding peptide
  MOD_RES (14), (15), (16), (17), (18): Xaa is A or G
  MOD_RES (19), (20), (21), (22): Xaa is A or G or is absent
SRVHHSNITVQIMXXXXXXXXXIGEMSRLEEHL

SEQ ID NO: 14915 - protein, 37 aa, Artificial Sequence
  Non-cyclic GFR-binding peptide
  MOD_RES (5), (5): Xaa is C or S
  MOD_RES (19), (20), (21), (22), (23): Xaa is A or G
  MOD_RES (24), (25), (26), (27): Xaa is A or G or is absent
EGLEXVPTGQRSVKMAKVXXXXXXXXXKEVQVLEEHS

SEQ ID NO: 14916 - protein, 39 aa, Artificial Sequence
  Non-cyclic GFR-binding peptide
  MOD_RES (5), (39): Xaa is C or S
EGLEXVPTEERSVKMAKVRIKPHQGQHKEVQVFLQHNKX

SEQ ID NO: 14917 - protein, 39 aa, Artificial Sequence
  Non-cyclic GFR-binding peptide
  MOD_RES (4), (4): Xaa is C or S
SVKXQPSRVHHSNITVQIMEYVRKKPKLLGEMSRLEEHL

SEQ ID NO: 14918 - protein, 39 aa, Artificial Sequence
  Non-cyclic GFR-binding peptide
  MOD_RES (2), (39): Xaa is C or S
  MOD_RES (18), (19), (20), (21), (22): Xaa is A or G
  MOD_RES (23), (24), (25), (26): Xaa is A or G or is absent
KXQPSRVHHSNITVQIMXXXXXXXXXIGEMSRLEEHLEX

SEQ ID NO: 14919 - protein, 37 aa, Artificial Sequence
  Non-cyclic GFR-binding peptide
  MOD_RES (3), (37): Xaa is C or S
  MOD_RES (17), (18), (19), (20), (21): Xaa is A or G
  MOD_RES (22), (23), (24), (25): Xaa is A or G or is absent
LEXVPTGQRPVQMRKIXXXXXXXXXKKATVLEEHSQX

SEQ ID NO: 14920 - protein, 38 aa, Artificial Sequence
  Non-cyclic GFR-binding peptide
  MOD_RES (2), (36), (38): Xaa is C or S
EXVPTEERSVKMAKVRIKPHQGQHKEVQVFLQHNKXEX

SEQ ID NO: 14921 - protein, 38 aa, Artificial Sequence
  Non-cyclic GFR-binding peptide
  MOD_RES (37), (37): Xaa is C or S
RPTQVQLSNITVQIMEIVRKKPIFLGEMSTLEDHLAXK

SEQ ID NO: 14922 - protein, 39 aa, Artificial Sequence
  Non-cyclic GFR-binding peptide
  MOD_RES (4), (38): Xaa is C or S
GLEXVPTEERSVKMAKVRIKPHQGQHKEVQVFLQHNKXE

SEQ ID NO: 14923 - protein, 38 aa, Artificial Sequence
  Non-cyclic GFR-binding peptide
  MOD_RES (35), (37): Xaa is C or S
SRVHHRPVQVRKIEYVRKKPKLKKATVRLEEHLEXAXA

SEQ ID NO: 14924 - protein, 40 aa, Artificial Sequence
  Non-cyclic GFR-binding peptide
  MOD_RES (3), (40): Xaa is C or S
VKXQPSRVHHSNITVQIMEYVRKKPKLLGEMSRLEEHLEX

SEQ ID NO: 14925 - protein, 37 aa, Artificial Sequence
  Non-cyclic GFR-binding peptide
  MOD_RES (1), (35), (37): Xaa is C or S
XVPTGQSNITMQIMRIKPHQGQHIGEMSLEEHSQXEX

SEQ ID NO: 14926 - protein, 39 aa, Artificial Sequence
  Non-cyclic GFR-binding peptide
  MOD_RES (6), (6): Xaa is C or S
DEGLEXVPTEERPVQMRKIRIKPHQGQHKKATVFLQHNK

SEQ ID NO: 14927 - protein, 41 aa, Artificial Sequence
  Non-cyclic GFR-binding peptide
  MOD_RES (6), (40): Xaa is C or S
  MOD_RES (20), (21), (22), (23), (24): Xaa is A or G
  MOD_RES (25), (26), (27), (28): Xaa is A or G or is absent
DEGLEXVPTGQRPVQMRKIXXXXXXXXXKKATVLEEHSQXE

SEQ ID NO: 14928 - protein, 41 aa, Artificial Sequence
  Non-cyclic GFR-binding peptide
  MOD_RES (3), (40): Xaa is C or S
VKXQPSRVHHSNITVQIMEYVRKKPKLLGEMSRLEEHLEXA

SEQ ID NO: 14929 - protein, 39 aa, Artificial Sequence
  Non-cyclic GFR-binding peptide
  MOD_RES (3), (37), (39): Xaa is C or S
  MOD_RES (17), (18), (19), (20), (21): Xaa is A or G
  MOD_RES (22), (23), (24), (25): Xaa is A or G or is absent
LEXVPTEESNITMQIMXXXXXXXXXLGEMSFLQHNKXEX

SEQ ID NO: 14930 - protein, 42 aa, Artificial Sequence
  Non-cyclic GFR-binding peptide
  MOD_RES (5), (42): Xaa is C or S
  MOD_RES (21), (22), (23), (24), (25): Xaa is A or G
  MOD_RES (26), (27), (28), (29): Xaa is A or G or is absent
SSVKXQPSRVHHSNITVQIMXXXXXXXXXIGEMSRLEEHLEX

SEQ ID NO: 14931 - protein, 39 aa, Artificial Sequence
  Non-cyclic GFR-binding peptide
  MOD_RES (37), (39): Xaa is C or S
RPTQVQLSNITVQIMEIVRKKPIFIGEMSTLEDHLAXKX

SEQ ID NO: 14932 - protein, 43 aa, Artificial Sequence
  Non-cyclic GFR-binding peptide
  MOD_RES (4), (41), (43): Xaa is C or S
NVQXRPTQVQLSNITVQIMEIVRKKPIFIGEMSTLEDHLAXKX

SEQ ID NO: 14933 - protein, 33 aa, Artificial Sequence
  Non-cyclic GFR-binding peptide
VPTGQRSVKMAKVRIKPHQGQHKEVQVLEEHSQ

SEQ ID NO: 14934 - protein, 39 aa, Artificial Sequence
  Non-cyclic GFR-binding peptide
  MOD_RES (6), (6): Xaa is C or S
  MOD_RES (20), (21), (22), (23), (24): Xaa is A or G
  MOD_RES (25), (26), (27), (28): Xaa is A or G or is absent
DEGLEXVPTEESNITMQIMXXXXXXXXXLGEMSFLQHNK

SEQ ID NO: 14935 - protein, 44 aa, Artificial Sequence
  Non-cyclic GFR-binding peptide
  MOD_RES (5), (42), (44): Xaa is C or S
RNVQXRPTQVQLSNITVQIMEIVRKKPIFIGEMSTLEDHLAXKX

SEQ ID NO: 14936 - protein, 44 aa, Artificial Sequence
  Non-cyclic GFR-binding peptide
  MOD_RES (5), (42), (44): Xaa is C or S
RNVQXRPTQVQLSNITVQIMEIVRKKPIFLGEMSTLEDHLAXKX

SEQ ID NO: 14937 - protein, 38 aa, Artificial Sequence
  Non-cyclic GFR-binding peptide
  MOD_RES (35), (37): Xaa is C or S
TQVQLSNITVQIMEIVRKKPIFLGEMSTLEDHLAXKXE

SEQ ID NO: 14938 - protein, 38 aa, Artificial Sequence
  Non-cyclic GFR-binding peptide
  MOD_RES (5), (5): Xaa is C or S
  MOD_RES (19), (20), (21), (22), (23): Xaa is A or G
  MOD_RES (24), (25), (26), (27): Xaa is A or G or is absent
EGLEXVPTGQRPVQMRKIXXXXXXXXXKKATVLEEHSQ

SEQ ID NO: 14939 - protein, 32 aa, Artificial Sequence
  Non-cyclic GFR-binding peptide
  MOD_RES (14), (15), (16), (17), (18): Xaa is A or G
  MOD_RES (19), (20), (21), (22): Xaa is A or G or is absent
VPTGQRPVQMRKIXXXXXXXXXKKATVLEEHS

SEQ ID NO: 14940 - protein, 40 aa, Artificial Sequence
  Non-cyclic GFR-binding peptide
  MOD_RES (6), (40): Xaa is C or S
  MOD_RES (20), (21), (22), (23), (24): Xaa is A or G
  MOD_RES (25), (26), (27), (28): Xaa is A or G or is absent
DEGLEXVPTEERPVQMRKIXXXXXXXXXKKATVFLQHNKX

SEQ ID NO: 14941 - protein, 33 aa, Artificial Sequence
  Non-cyclic GFR-binding peptide
VPTGQSNITMQIMRIKPHQGQHIGEMSLEEHSQ

SEQ ID NO: 14942 - protein, 35 aa, Artificial Sequence
  Non-cyclic GFR-binding peptide
  MOD_RES (1), (35): Xaa is C or S
XVPTEERPVQMRKIRIKPHQGQHKKATVFLQHNKX

SEQ ID NO: 14943 - protein, 40 aa, Artificial Sequence
  Non-cyclic GFR-binding peptide
  MOD_RES (6), (40): Xaa is C or S
  MOD_RES (20), (21), (22), (23), (24): Xaa is A or G
  MOD_RES (25), (26), (27), (28): Xaa is A or G or is absent
DEGLEXVPTGQRSVKMAKVXXXXXXXXXKEVQVLEEHSQX

SEQ ID NO: 14944 - protein, 39 aa, Artificial Sequence
  Non-cyclic GFR-binding peptide
  MOD_RES (36), (38): Xaa is C or S
PSRVHHSNITVQIMEYVRKKPKLIGEMSRLEEHLEXAXA

SEQ ID NO: 14945 - protein, 43 aa, Artificial Sequence
  Non-cyclic GFR-binding peptide
  MOD_RES (5), (42): Xaa is C or S
  MOD_RES (21), (22), (23), (24), (25): Xaa is A or G
  MOD_RES (26), (27), (28), (29): Xaa is A or G or is absent
SSVKXQPSRVHHRPVQVRKIXXXXXXXXXKKATVRLEEHLEXA

SEQ ID NO: 14946 - protein, 37 aa, Artificial Sequence
  Non-cyclic GFR-binding peptide
  MOD_RES (2), (36): Xaa is C or S
EXVPTGQSNITMQIMRIKPHQGQHIGEMSLEEHSQXE

SEQ ID NO: 14947 - protein, 36 aa, Artificial Sequence
  Non-cyclic GFR-binding peptide
  MOD_RES (1), (1): Xaa is C or S
  MOD_RES (17), (18), (19), (20), (21): Xaa is A or G
  MOD_RES (22), (23), (24), (25): Xaa is A or G or is absent
XQPSRVHHSNITVQIMXXXXXXXXXLGEMSRLEEHL

SEQ ID NO: 14948 - protein, 33 aa, Artificial Sequence
  Non-cyclic GFR-binding peptide
  MOD_RES (1), (1): Xaa is C or S
  MOD_RES (15), (16), (17), (18), (19): Xaa is A or G
  MOD_RES (20), (21), (22), (23): Xaa is A or G or is absent
XVPTEERPVQMRKIXXXXXXXXXKKATVFLQHN

SEQ ID NO: 14949 - protein, 34 aa, Artificial Sequence
  Non-cyclic GFR-binding peptide
  MOD_RES (1), (1): Xaa is C or S
XVPTGQSNITMQIMRIKPHQGQHIGEMSLEEHSQ

SEQ ID NO: 14950 - protein, 33 aa, Artificial Sequence
  Non-cyclic GFR-binding peptide
  MOD_RES (15), (16), (17), (18), (19): Xaa is A or G
  MOD_RES (20), (21), (22), (23): Xaa is A or G or is absent
PTQVQLRSVKVAKVXXXXXXXXXKEVQVTLEDH

SEQ ID NO: 14951 - protein, 37 aa, Artificial Sequence
  Non-cyclic GFR-binding peptide
  MOD_RES (1), (1): Xaa is C or S
  MOD_RES (17), (18), (19), (20), (21): Xaa is A or G
  MOD_RES (22), (23), (24), (25): Xaa is A or G or is absent
XQPSRVHHSNITVQIMXXXXXXXXXLGEMSRLEEHLE

SEQ ID NO: 14952 - protein, 37 aa, Artificial Sequence
  Non-cyclic GFR-binding peptide
  MOD_RES (5), (5): Xaa is C or S
EGLEXVPTGQRPVQMRKIRIKPHQGQHKKATVLEEHS

SEQ ID NO: 14953 - protein, 40 aa, Artificial Sequence
  Non-cyclic GFR-binding peptide
  MOD_RES (3), (37), (39): Xaa is C or S
  MOD_RES (17), (18), (19), (20), (21): Xaa is A or G
  MOD_RES (22), (23), (24), (25): Xaa is A or G or is absent
LEXVPTEERPVQMRKIXXXXXXXXXKKATVFLQHNKXEXR

SEQ ID NO: 14954 - protein, 38 aa, Artificial Sequence
  Non-cyclic GFR-binding peptide
  MOD_RES (35), (37): Xaa is C or S
TQVQLSNITVQIMEIVRKKPIFIGEMSTLEDHLAXKXE

SEQ ID NO: 14955 - protein, 37 aa, Artificial Sequence
  Non-cyclic GFR-binding peptide
  MOD_RES (35), (37): Xaa is C or S
  MOD_RES (14), (15), (16), (17), (18): Xaa is A or G
  MOD_RES (19), (20), (21), (22): Xaa is A or G or is absent
SRVHHSNITVQIMXXXXXXXXXLGEMSRLEEHLEXAX

SEQ ID NO: 14956 - protein, 45 aa, Artificial Sequence
  Non-cyclic GFR-binding peptide
  MOD_RES (5), (42), (44): Xaa is C or S
  MOD_RES (21), (22), (23), (24), (25): Xaa is A or G
  MOD_RES (26), (27), (28), (29): Xaa is A or G or is absent
SSVKXQPSRVHHSNITVQIMXXXXXXXXXIGEMSRLEEHLEXAXA

SEQ ID NO: 14957 - protein, 38 aa, Artificial Sequence
  Non-cyclic GFR-binding peptide
  MOD_RES (2), (36), (38): Xaa is C or S
EXVPTGQSNITMQIMRIKPHQGQHIGEMSLEEHSQXEX

SEQ ID NO: 14958 - protein, 39 aa, Artificial Sequence
  Non-cyclic GFR-binding peptide
  MOD_RES (3), (3): Xaa is C or S
VKXQPSRVHHSNITVQIMEYVRKKPKLIGEMSRLEEHLE

SEQ ID NO: 14959 - protein, 45 aa, Artificial Sequence
  Non-cyclic GFR-binding peptide
  MOD_RES (5), (42), (44): Xaa is C or S
  MOD_RES (21), (22), (23), (24), (25): Xaa is A or G
  MOD_RES (26), (27), (28), (29): Xaa is A or G or is absent
SSVKXQPSRVHHSNITVQIMXXXXXXXXXLGEMSRLEEHLEXAXA

SEQ ID NO: 14960 - protein, 36 aa, Artificial Sequence
  Non-cyclic GFR-binding peptide
  MOD_RES (4), (4): Xaa is C or S
GLEXVPTEERSVKMAKVRIKPHQGQHKEVQVFLQHN

SEQ ID NO: 14961 - protein, 35 aa, Artificial Sequence
  Non-cyclic GFR-binding peptide
  MOD_RES (34), (34): Xaa is C or S
  MOD_RES (14), (15), (16), (17), (18): Xaa is A or G
  MOD_RES (19), (20), (21), (22): Xaa is A or G or is absent
VPTEESNITMQIMXXXXXXXXXLGEMSFLQHNKXE

SEQ ID NO: 14962 - protein, 37 aa, Artificial Sequence
  Non-cyclic GFR-binding peptide
  MOD_RES (1), (35), (37): Xaa is C or S
XVPTEERSVKMAKVRIKPHQGQHKEVQVFLQHNKXEX

SEQ ID NO: 14963 - protein, 34 aa, Artificial Sequence
  Non-cyclic GFR-binding peptide
  MOD_RES (15), (16), (17), (18), (19): Xaa is A or G
  MOD_RES (20), (21), (22), (23): Xaa is A or G or is absent
PSRVHHSNITVQIMXXXXXXXXXIGEMSRLEEHL

SEQ ID NO: 14964 - protein, 39 aa, Artificial Sequence
  Non-cyclic GFR-binding peptide
  MOD_RES (7), (7): Xaa is C or S
NDEGLEXVPTEESNITMQIMRIKPHQGQHLGEMSFLQHN

SEQ ID NO: 14965 - protein, 36 aa, Artificial Sequence
  Non-cyclic GFR-binding peptide
  MOD_RES (1), (35): Xaa is C or S
XVPTGQSNITMQIMRIKPHQGQHIGEMSLEEHSQXE

SEQ ID NO: 14966 - protein, 41 aa, Artificial Sequence
  Non-cyclic GFR-binding peptide
  MOD_RES (7), (41): Xaa is C or S
NDEGLEXVPTEESNITMQIMRIKPHQGQHLGEMSFLQHNKX

SEQ ID NO: 14967 - protein, 36 aa, Artificial Sequence
  Non-cyclic GFR-binding peptide
  MOD_RES (4), (4): Xaa is C or S
GLEXVPTEERPVQMRKIRIKPHQGQHKKATVFLQHN

SEQ ID NO: 14968 - protein, 41 aa, Artificial Sequence
  Non-cyclic GFR-binding peptide
  MOD_RES (7), (41): Xaa is C or S
  MOD_RES (21), (22), (23), (24), (25): Xaa is A or G
  MOD_RES (26), (27), (28), (29): Xaa is A or G or is absent
NDEGLEXVPTGQSNITMQIMXXXXXXXXXIGEMSLEEHSQX

SEQ ID NO: 14969 - protein, 35 aa, Artificial Sequence
  Non-cyclic GFR-binding peptide
  MOD_RES (34), (34): Xaa is C or S
  MOD_RES (14), (15), (16), (17), (18): Xaa is A or G
  MOD_RES (19), (20), (21), (22): Xaa is A or G or is absent
VPTGQRSVKMAKVXXXXXXXXXKEVQVLEEHSQXE

SEQ ID NO: 14970 - protein, 36 aa, Artificial Sequence
  Non-cyclic GFR-binding peptide
  MOD_RES (4), (4): Xaa is C or S
  MOD_RES (18), (19), (20), (21), (22): Xaa is A or G
  MOD_RES (23), (24), (25), (26): Xaa is A or G or is absent
GLEXVPTEESNITMQIMXXXXXXXXXLGEMSFLQHN

SEQ ID NO: 14971 - protein, 42 aa, Artificial Sequence
  Non-cyclic GFR-binding peptide
  MOD_RES (4), (41): Xaa is C or S
  MOD_RES (20), (21), (22), (23), (24): Xaa is A or G
  MOD_RES (25), (26), (27), (28): Xaa is A or G or is absent
SVKXQPSRVHHSNITVQIMXXXXXXXXXIGEMSRLEEHLEXA

SEQ ID NO: 14972 - protein, 41 aa, Artificial Sequence
  Non-cyclic GFR-binding peptide
  MOD_RES (5), (5): Xaa is C or S
  MOD_RES (21), (22), (23), (24), (25): Xaa is A or G
  MOD_RES (26), (27), (28), (29): Xaa is A or G or is absent
SSVKXQPSRVHHSNITVQIMXXXXXXXXXIGEMSRLEEHLE

SEQ ID NO: 14973 - protein, 40 aa, Artificial Sequence
  Non-cyclic GFR-binding peptide
  MOD_RES (2), (39): Xaa is C or S
  MOD_RES (18), (19), (20), (21), (22): Xaa is A or G
  MOD_RES (23), (24), (25), (26): Xaa is A or G or is absent
KXQPSRVHHSNITVQIMXXXXXXXXXIGEMSRLEEHLEXA

SEQ ID NO: 14974 - protein, 43 aa, Artificial Sequence
  Non-cyclic GFR-binding peptide
  MOD_RES (5), (42): Xaa is C or S
SSVKXQPSRVHHRPVQVRKIEYVRKKPKLKKATVRLEEHLEXA

SEQ ID NO: 14975 - protein, 37 aa, Artificial Sequence
  Non-cyclic GFR-binding peptide
  MOD_RES (4), (4): Xaa is C or S
GLEXVPTEERPVQMRKIRIKPHQGQHKKATVFLQHNK

SEQ ID NO: 14976 - protein, 37 aa, Artificial Sequence
  Non-cyclic GFR-binding peptide
  MOD_RES (1), (35), (37): Xaa is C or S
XVPTGQRPVQMRKIRIKPHQGQHKKATVLEEHSQXEX

SEQ ID NO: 14977 - protein, 38 aa, Artificial Sequence
  Non-cyclic GFR-binding peptide
  MOD_RES (37), (37): Xaa is C or S
RPTQVQLSNITVQIMEIVRKKPIFIGEMSTLEDHLAXK

SEQ ID NO: 14978 - protein, 41 aa, Artificial Sequence
  Non-cyclic GFR-binding peptide
  MOD_RES (1), (38), (40): Xaa is C or S
XQPSRVHHSNITVQIMEYVRKKPKLIGEMSRLEEHLEXAXA

SEQ ID NO: 14979 - protein, 39 aa, Artificial Sequence
  Non-cyclic GFR-binding peptide
  MOD_RES (36), (38): Xaa is C or S
PSRVHHSNITVQIMEYVRKKPKLLGEMSRLEEHLEXAXA

SEQ ID NO: 14980 - protein, 37 aa, Artificial Sequence
  Non-cyclic GFR-binding peptide
  MOD_RES (34), (36): Xaa is C or S
VPTEESNITMQIMRIKPHQGQHLGEMSFLQHNKXEXR

SEQ ID NO: 14981 - protein, 35 aa, Artificial Sequence
  Non-cyclic GFR-binding peptide
  MOD_RES (1), (35): Xaa is C or S
  MOD_RES (15), (16), (17), (18), (19): Xaa is A or G
  MOD_RES (20), (21), (22), (23): Xaa is A or G or is absent
XVPTGQRSVKMAKVXXXXXXXXXKEVQVLEEHSQX

SEQ ID NO: 14982 - protein, 44 aa, Artificial Sequence
  Non-cyclic GFR-binding peptide
  MOD_RES (7), (41), (43): Xaa is C or S
NDEGLEXVPTGQRPVQMRKIRIKPHQGQHKKATVLEEHSQXEXR

SEQ ID NO: 14983 - protein, 41 aa, Artificial Sequence
  Non-cyclic GFR-binding peptide
  MOD_RES (4), (38), (40): Xaa is C or S
GLEXVPTEESNITMQIMRIKPHQGQHLGEMSFLQHNKXEXR

SEQ ID NO: 14984 - protein, 39 aa, Artificial Sequence
  Non-cyclic GFR-binding peptide
  MOD_RES (2), (36), (38): Xaa is C or S
  MOD_RES (16), (17), (18), (19), (20): Xaa is A or G
  MOD_RES (21), (22), (23), (24): Xaa is A or G or is absent
EXVPTEERPVQMRKIXXXXXXXXXKKATVFLQHNKXEXR

SEQ ID NO: 14985 - protein, 41 aa, Artificial Sequence
  Non-cyclic GFR-binding peptide
  MOD_RES (3), (40): Xaa is C or S
  MOD_RES (19), (20), (21), (22), (23): Xaa is A or G
  MOD_RES (24), (25), (26), (27): Xaa is A or G or is absent
VKXQPSRVHHSNITVQIMXXXXXXXXXLGEMSRLEEHLEXA

SEQ ID NO: 14986 - protein, 35 aa, Artificial Sequence
  Non-cyclic GFR-binding peptide
  MOD_RES (1), (35): Xaa is C or S
XVPTGQRSVKMAKVRIKPHQGQHKEVQVLEEHSQX

SEQ ID NO: 14987 - protein, 37 aa, Artificial Sequence
  Non-cyclic GFR-binding peptide
  MOD_RES (37), (37): Xaa is C or S
QPSRVHHRPVQVRKIEYVRKKPKLKKATVRLEEHLEX

SEQ ID NO: 14988 - protein, 44 aa, Artificial Sequence
  Non-cyclic GFR-binding peptide
  MOD_RES (5), (42), (44): Xaa is C or S
  MOD_RES (21), (22), (23), (24), (25): Xaa is A or G
  MOD_RES (26), (27), (28), (29): Xaa is A or G or is absent
SSVKXQPSRVHHSNITVQIMXXXXXXXXXLGEMSRLEEHLEXAX

SEQ ID NO: 14989 - protein, 40 aa, Artificial Sequence
  Non-cyclic GFR-binding peptide
  MOD_RES (1), (38), (40): Xaa is C or S
XQPSRVHHRPVQVRKIEYVRKKPKLKKATVRLEEHLEXAX

SEQ ID NO: 14990 - protein, 37 aa, Artificial Sequence
  Non-cyclic GFR-binding peptide
  MOD_RES (3), (3): Xaa is C or S
  MOD_RES (19), (20), (21), (22), (23): Xaa is A or G
  MOD_RES (24), (25), (26), (27): Xaa is A or G or is absent
VKXQPSRVHHSNITVQIMXXXXXXXXXIGEMSRLEEH

SEQ ID NO: 14991 - protein, 36 aa, Artificial Sequence
  Non-cyclic GFR-binding peptide
  MOD_RES (3), (3): Xaa is C or S
  MOD_RES (17), (18), (19), (20), (21): Xaa is A or G
  MOD_RES (22), (23), (24), (25): Xaa is A or G or is absent
LEXVPTEERPVQMRKIXXXXXXXXXKKATVFLQHNK

SEQ ID NO: 14992 - protein, 33 aa, Artificial Sequence
  Non-cyclic GFR-binding peptide
  MOD_RES (1), (1): Xaa is C or S
  MOD_RES (15), (16), (17), (18), (19): Xaa is A or G
  MOD_RES (20), (21), (22), (23): Xaa is A or G or is absent
XVPTGQRSVKMAKVXXXXXXXXXKEVQVLEEHS

SEQ ID NO: 14993 - protein, 45 aa, Artificial Sequence
  Non-cyclic GFR-binding peptide
  MOD_RES (5), (42), (44): Xaa is C or S
  MOD_RES (21), (22), (23), (24), (25): Xaa is A or G
  MOD_RES (26), (27), (28), (29): Xaa is A or G or is absent
SSVKXQPSRVHHRPVQVRKIXXXXXXXXXKKATVRLEEHLEXAXA

SEQ ID NO: 14994 - protein, 44 aa, Artificial Sequence
  Non-cyclic GFR-binding peptide
  MOD_RES (5), (42), (44): Xaa is C or S
  MOD_RES (21), (22), (23), (24), (25): Xaa is A or G
  MOD_RES (26), (27), (28), (29): Xaa is A or G or is absent
SSVKXQPSRVHHSNITVQIMXXXXXXXXXIGEMSRLEEHLEXAX

SEQ ID NO: 14995 - protein, 37 aa, Artificial Sequence
  Non-cyclic GFR-binding peptide
  MOD_RES (4), (4): Xaa is C or S
  MOD_RES (18), (19), (20), (21), (22): Xaa is A or G
  MOD_RES (23), (24), (25), (26): Xaa is A or G or is absent
GLEXVPTEESNITMQIMXXXXXXXXXLGEMSFLQHNK

SEQ ID NO: 14996 - protein, 37 aa, Artificial Sequence
  Non-cyclic GFR-binding peptide
  MOD_RES (2), (2): Xaa is C or S
  MOD_RES (18), (19), (20), (21), (22): Xaa is A or G
  MOD_RES (23), (24), (25), (26): Xaa is A or G or is absent
KXQPSRVHHRPVQVRKIXXXXXXXXXKKATVRLEEHL

SEQ ID NO: 14997 - protein, 39 aa, Artificial Sequence
  Non-cyclic GFR-binding peptide
  MOD_RES (37), (39): Xaa is C or S
RPTQVQLSNITVQIMEIVRKKPIFLGEMSTLEDHLAXKX

SEQ ID NO: 14998 - protein, 38 aa, Artificial Sequence
  Non-cyclic GFR-binding peptide
  MOD_RES (4), (4): Xaa is C or S
NVQXRPTQVQLRSVKVAKVEIVRKKPIFKEVQVTLEDH

SEQ ID NO: 14999 - protein, 37 aa, Artificial Sequence
  Non-cyclic GFR-binding peptide
  MOD_RES (5), (5): Xaa is C or S
EGLEXVPTEESNITMQIMRIKPHQGQHLGEMSFLQHN

SEQ ID NO: 15000 - protein, 40 aa, Artificial Sequence
  Non-cyclic GFR-binding peptide
  MOD_RES (3), (37), (39): Xaa is C or S
LEXVPTEERSVKMAKVRIKPHQGQHKEVQVFLQHNKXEXR

SEQ ID NO: 15001 - protein, 38 aa, Artificial Sequence
  Non-cyclic GFR-binding peptide
  MOD_RES (37), (37): Xaa is C or S
  MOD_RES (16), (17), (18), (19), (20): Xaa is A or G
  MOD_RES (21), (22), (23), (24): Xaa is A or G or is absent
RPTQVQLSNITVQIMXXXXXXXXXLGEMSTLEDHLAXK

SEQ ID NO: 15002 - protein, 35 aa, Artificial Sequence
  Non-cyclic GFR-binding peptide
  MOD_RES (35), (35): Xaa is C or S
  MOD_RES (14), (15), (16), (17), (18): Xaa is A or G
  MOD_RES (19), (20), (21), (22): Xaa is A or G or is absent
TQVQLSNITVQIMXXXXXXXXXIGEMSTLEDHLAX

SEQ ID NO: 15003 - protein, 36 aa, Artificial Sequence
  Non-cyclic GFR-binding peptide
  MOD_RES (36), (36): Xaa is C or S
PTQVQLRSVKVAKVEIVRKKPIFKEVQVTLEDHLAX

SEQ ID NO: 15004 - protein, 40 aa, Artificial Sequence
  Non-cyclic GFR-binding peptide
  MOD_RES (5), (39): Xaa is C or S
  MOD_RES (19), (20), (21), (22), (23): Xaa is A or G
  MOD_RES (24), (25), (26), (27): Xaa is A or G or is absent
EGLEXVPTEERSVKMAKVXXXXXXXXXKEVQVFLQHNKXE

SEQ ID NO: 15005 - protein, 39 aa, Artificial Sequence
  Non-cyclic GFR-binding peptide
  MOD_RES (36), (38): Xaa is C or S
PSRVHHRPVQVRKIEYVRKKPKLKKATVRLEEHLEXAXA

SEQ ID NO: 15006 - protein, 41 aa, Artificial Sequence
  Non-cyclic GFR-binding peptide
  MOD_RES (5), (5): Xaa is C or S
RNVQXRPTQVQLSNITVQIMEIVRKKPIFLGEMSTLEDHLA

SEQ ID NO: 15007 - protein, 42 aa, Artificial Sequence
  Non-cyclic GFR-binding peptide
  MOD_RES (5), (39), (41): Xaa is C or S
EGLEXVPTEERSVKMAKVRIKPHQGQHKEVQVFLQHNKXEXR

SEQ ID NO: 15008 - protein, 39 aa, Artificial Sequence
  Non-cyclic GFR-binding peptide
  MOD_RES (2), (39): Xaa is C or S
QXRPTQVQLRSVKVAKVEIVRKKPIFKEVQVTLEDHLAX

SEQ ID NO: 15009 - protein, 36 aa, Artificial Sequence
  Non-cyclic GFR-binding peptide
  MOD_RES (35), (35): Xaa is C or S
  MOD_RES (14), (15), (16), (17), (18): Xaa is A or G
  MOD_RES (19), (20), (21), (22): Xaa is A or G or is absent
TQVQLSNITVQIMXXXXXXXXXLGEMSTLEDHLAXK

SEQ ID NO: 15010 - protein, 36 aa, Artificial Sequence
  Non-cyclic GFR-binding peptide
  MOD_RES (35), (35): Xaa is C or S
TQVQLSNITVQIMEIVRKKPIFIGEMSTLEDHLAXK

SEQ ID NO: 15011 - protein, 32 aa, Artificial Sequence
  Non-cyclic GFR-binding peptide
  MOD_RES (14), (15), (16), (17), (18): Xaa is A or G
  MOD_RES (19), (20), (21), (22): Xaa is A or G or is absent
TQVQLSNITVQIMXXXXXXXXXLGEMSTLEDH

SEQ ID NO: 15012 - protein, 39 aa, Artificial Sequence
  Non-cyclic GFR-binding peptide
  MOD_RES (1), (38): Xaa is C or S
  MOD_RES (17), (18), (19), (20), (21): Xaa is A or G
  MOD_RES (22), (23), (24), (25): Xaa is A or G or is absent
XQPSRVHHSNITVQIMXXXXXXXXXIGEMSRLEEHLEXA

SEQ ID NO: 15013 - protein, 43 aa, Artificial Sequence
  Non-cyclic GFR-binding peptide
  MOD_RES (7), (41), (43): Xaa is C or S
NDEGLEXVPTEERPVQMRKIRIKPHQGQHKKATVFLQHNKXEX

SEQ ID NO: 15014 - protein, 38 aa, Artificial Sequence
  Non-cyclic GFR-binding peptide
  MOD_RES (4), (4): Xaa is C or S
SVKXQPSRVHHSNITVQIMEYVRKKPKLIGEMSRLEEH

SEQ ID NO: 15015 - protein, 40 aa, Artificial Sequence
  Non-cyclic GFR-binding peptide
  MOD_RES (5), (5): Xaa is C or S
  MOD_RES (21), (22), (23), (24), (25): Xaa is A or G
  MOD_RES (26), (27), (28), (29): Xaa is A or G or is absent
RNVQXRPTQVQLSNITVQIMXXXXXXXXXLGEMSTLEDHL

SEQ ID NO: 15016 - protein, 32 aa, Artificial Sequence
  Non-cyclic GFR-binding peptide
SRVHHSNITVQIMEYVRKKPKLIGEMSRLEEH

SEQ ID NO: 15017 - protein, 40 aa, Artificial Sequence
  Non-cyclic GFR-binding peptide
  MOD_RES (5), (39): Xaa is C or S
  MOD_RES (19), (20), (21), (22), (23): Xaa is A or G
  MOD_RES (24), (25), (26), (27): Xaa is A or G or is absent
EGLEXVPTGQSNITMQIMXXXXXXXXXIGEMSLEEHSQXE

SEQ ID NO: 15018 - protein, 39 aa, Artificial Sequence
  Non-cyclic GFR-binding peptide
  MOD_RES (7), (7): Xaa is C or S
NDEGLEXVPTGQSNITMQIMRIKPHQGQHIGEMSLEEHS

SEQ ID NO: 15019 - protein, 37 aa, Artificial Sequence
  Non-cyclic GFR-binding peptide
  MOD_RES (2), (36): Xaa is C or S
EXVPTGQRPVQMRKIRIKPHQGQHKKATVLEEHSQXE

SEQ ID NO: 15020 - protein, 37 aa, Artificial Sequence
  Non-cyclic GFR-binding peptide
  MOD_RES (2), (2): Xaa is C or S
  MOD_RES (18), (19), (20), (21), (22): Xaa is A or G
  MOD_RES (23), (24), (25), (26): Xaa is A or G or is absent
QXRPTQVQLRSVKVAKVXXXXXXXXXKEVQVTLEDHL

SEQ ID NO: 15021 - protein, 36 aa, Artificial Sequence
  Non-cyclic GFR-binding peptide
  MOD_RES (4), (4): Xaa is C or S
  MOD_RES (18), (19), (20), (21), (22): Xaa is A or G
  MOD_RES (23), (24), (25), (26): Xaa is A or G or is absent
GLEXVPTEERSVKMAKVXXXXXXXXXKEVQVFLQHN

SEQ ID NO: 15022 - protein, 36 aa, Artificial Sequence
  Non-cyclic GFR-binding peptide
  MOD_RES (36), (36): Xaa is C or S
  MOD_RES (15), (16), (17), (18), (19): Xaa is A or G
  MOD_RES (20), (21), (22), (23): Xaa is A or G or is absent
PSRVHHSNITVQIMXXXXXXXXXIGEMSRLEEHLEX

SEQ ID NO: 15023 - protein, 41 aa, Artificial Sequence
  Non-cyclic GFR-binding peptide
  MOD_RES (2), (39), (41): Xaa is C or S
QXRPTQVQLRSVKVAKVEIVRKKPIFKEVQVTLEDHLAXKX

SEQ ID NO: 15024 - protein, 39 aa, Artificial Sequence
  Non-cyclic GFR-binding peptide
  MOD_RES (2), (39): Xaa is C or S
  MOD_RES (18), (19), (20), (21), (22): Xaa is A or G
  MOD_RES (23), (24), (25), (26): Xaa is A or G or is absent
QXRPTQVQLSNITVQIMXXXXXXXXXLGEMSTLEDHLAX

SEQ ID NO: 15025 - protein, 38 aa, Artificial Sequence
  Non-cyclic GFR-binding peptide
  MOD_RES (3), (37): Xaa is C or S
  MOD_RES (17), (18), (19), (20), (21): Xaa is A or G
  MOD_RES (22), (23), (24), (25): Xaa is A or G or is absent
LEXVPTEESNITMQIMXXXXXXXXXLGEMSFLQHNKXE

SEQ ID NO: 15026 - protein, 41 aa, Artificial Sequence
  Non-cyclic GFR-binding peptide
  MOD_RES (7), (41): Xaa is C or S
NDEGLEXVPTGQSNITMQIMRIKPHQGQHIGEMSLEEHSQX

SEQ ID NO: 15027 - protein, 38 aa, Artificial Sequence
  Non-cyclic GFR-binding peptide
  MOD_RES (35), (37): Xaa is C or S
TQVQLRSVKVAKVEIVRKKPIFKEVQVTLEDHLAXKXE

SEQ ID NO: 15028 - protein, 41 aa, Artificial Sequence
  Non-cyclic GFR-binding peptide
  MOD_RES (6), (40): Xaa is C or S
  MOD_RES (20), (21), (22), (23), (24): Xaa is A or G
  MOD_RES (25), (26), (27), (28): Xaa is A or G or is absent
DEGLEXVPTGQSNITMQIMXXXXXXXXXIGEMSLEEHSQXE

SEQ ID NO: 15029 - protein, 39 aa, Artificial Sequence
  Non-cyclic GFR-binding peptide
  MOD_RES (5), (39): Xaa is C or S
  MOD_RES (19), (20), (21), (22), (23): Xaa is A or G
  MOD_RES (24), (25), (26), (27): Xaa is A or G or is absent
EGLEXVPTGQSNITMQIMXXXXXXXXXIGEMSLEEHSQX

SEQ ID NO: 15030 - protein, 37 aa, Artificial Sequence
  Non-cyclic GFR-binding peptide
  MOD_RES (3), (3): Xaa is C or S
  MOD_RES (19), (20), (21), (22), (23): Xaa is A or G
  MOD_RES (24), (25), (26), (27): Xaa is A or G or is absent
VKXQPSRVHHSNITVQIMXXXXXXXXXLGEMSRLEEH

SEQ ID NO: 15031 - protein, 43 aa, Artificial Sequence
  Non-cyclic GFR-binding peptide
  MOD_RES (5), (42): Xaa is C or S
  MOD_RES (21), (22), (23), (24), (25): Xaa is A or G
  MOD_RES (26), (27), (28), (29): Xaa is A or G or is absent
RNVQXRPTQVQLRSVKVAKVXXXXXXXXXKEVQVTLEDHLAXK

SEQ ID NO: 15032 - protein, 37 aa, Artificial Sequence
  Non-cyclic GFR-binding peptide
  MOD_RES (35), (37): Xaa is C or S
TQVQLSNITVQIMEIVRKKPIFIGEMSTLEDHLAXKX

SEQ ID NO: 15033 - protein, 37 aa, Artificial Sequence
  Non-cyclic GFR-binding peptide
  MOD_RES (5), (5): Xaa is C or S
EGLEXVPTGQSNITMQIMRIKPHQGQHIGEMSLEEHS

SEQ ID NO: 15034 - protein, 34 aa, Artificial Sequence
  Non-cyclic GFR-binding peptide
  MOD_RES (14), (15), (16), (17), (18): Xaa is A or G
  MOD_RES (19), (20), (21), (22): Xaa is A or G or is absent
TQVQLSNITVQIMXXXXXXXXXLGEMSTLEDHLA

SEQ ID NO: 15035 - protein, 41 aa, Artificial Sequence
  Non-cyclic GFR-binding peptide
  MOD_RES (7), (41): Xaa is C or S
NDEGLEXVPTGQRPVQMRKIRIKPHQGQHKKATVLEEHSQX

SEQ ID NO: 15036 - protein, 43 aa, Artificial Sequence
  Non-cyclic GFR-binding peptide
  MOD_RES (6), (40), (42): Xaa is C or S
DEGLEXVPTEESNITMQIMRIKPHQGQHLGEMSFLQHNKXEXR

SEQ ID NO: 15037 - protein, 36 aa, Artificial Sequence
  Non-cyclic GFR-binding peptide
  MOD_RES (35), (35): Xaa is C or S
TQVQLSNITVQIMEIVRKKPIFLGEMSTLEDHLAXK

SEQ ID NO: 15038 - protein, 36 aa, Artificial Sequence
  Non-cyclic GFR-binding peptide
  MOD_RES (3), (3): Xaa is C or S
LEXVPTEERSVKMAKVRIKPHQGQHKEVQVFLQHNK

SEQ ID NO: 15039 - protein, 33 aa, Artificial Sequence
  Non-cyclic GFR-binding peptide
  MOD_RES (1), (1): Xaa is C or S
XVPTGQRSVKMAKVRIKPHQGQHKEVQVLEEHS

SEQ ID NO: 15040 - protein, 39 aa, Artificial Sequence
  Non-cyclic GFR-binding peptide
  MOD_RES (4), (4): Xaa is C or S
  MOD_RES (20), (21), (22), (23), (24): Xaa is A or G
  MOD_RES (25), (26), (27), (28): Xaa is A or G or is absent
SVKXQPSRVHHSNITVQIMXXXXXXXXXLGEMSRLEEHL

SEQ ID NO: 15041 - protein, 39 aa, Artificial Sequence
  Non-cyclic GFR-binding peptide
  MOD_RES (37), (39): Xaa is C or S
  MOD_RES (16), (17), (18), (19), (20): Xaa is A or G
  MOD_RES (21), (22), (23), (24): Xaa is A or G or is absent
QPSRVHHSNITVQIMXXXXXXXXXIGEMSRLEEHLEXAX

SEQ ID NO: 15042 - protein, 32 aa, Artificial Sequence
  Non-cyclic GFR-binding peptide
TQVQLSNITVQIMEIVRKKPIFLGEMSTLEDH

SEQ ID NO: 15043 - protein, 41 aa, Artificial Sequence
  Non-cyclic GFR-binding peptide
  MOD_RES (2), (39), (41): Xaa is C or S
  MOD_RES (18), (19), (20), (21), (22): Xaa is A or G
  MOD_RES (23), (24), (25), (26): Xaa is A or G or is absent
KXQPSRVHHSNITVQIMXXXXXXXXXIGEMSRLEEHLEXAX

SEQ ID NO: 15044 - protein, 35 aa, Artificial Sequence
  Non-cyclic GFR-binding peptide
  MOD_RES (15), (16), (17), (18), (19): Xaa is A or G
  MOD_RES (20), (21), (22), (23): Xaa is A or G or is absent
PTQVQLSNITVQIMXXXXXXXXXLGEMSTLEDHLA

SEQ ID NO: 15045 - protein, 38 aa, Artificial Sequence
  Non-cyclic GFR-binding peptide
  MOD_RES (2), (2): Xaa is C or S
KXQPSRVHHSNITVQIMEYVRKKPKLIGEMSRLEEHLE

SEQ ID NO: 15046 - protein, 39 aa, Artificial Sequence
  Non-cyclic GFR-binding peptide
  MOD_RES (4), (38): Xaa is C or S
  MOD_RES (18), (19), (20), (21), (22): Xaa is A or G
  MOD_RES (23), (24), (25), (26): Xaa is A or G or is absent
GLEXVPTGQSNITMQIMXXXXXXXXXIGEMSLEEHSQXE

SEQ ID NO: 15047 - protein, 39 aa, Artificial Sequence
  Non-cyclic GFR-binding peptide
  MOD_RES (5), (39): Xaa is C or S
EGLEXVPTGQSNITMQIMRIKPHQGQHIGEMSLEEHSQX

SEQ ID NO: 15048 - protein, 33 aa, Artificial Sequence
  Non-cyclic GFR-binding peptide
  MOD_RES (1), (1): Xaa is C or S
XVPTGQRPVQMRKIRIKPHQGQHKKATVLEEHS

SEQ ID NO: 15049 - protein, 41 aa, Artificial Sequence
  Non-cyclic GFR-binding peptide
  MOD_RES (7), (41): Xaa is C or S
  MOD_RES (21), (22), (23), (24), (25): Xaa is A or G
  MOD_RES (26), (27), (28), (29): Xaa is A or G or is absent
NDEGLEXVPTGQRPVQMRKIXXXXXXXXXKKATVLEEHSQX

SEQ ID NO: 15050 - protein, 43 aa, Artificial Sequence
  Non-cyclic GFR-binding peptide
  MOD_RES (3), (40), (42): Xaa is C or S
  MOD_RES (19), (20), (21), (22), (23): Xaa is A or G
  MOD_RES (24), (25), (26), (27): Xaa is A or G or is absent
VQXRPTQVQLRSVKVAKVXXXXXXXXXKEVQVTLEDHLAXKXE

SEQ ID NO: 15051 - protein, 42 aa, Artificial Sequence
  Non-cyclic GFR-binding peptide
  MOD_RES (5), (39), (41): Xaa is C or S
  MOD_RES (19), (20), (21), (22), (23): Xaa is A or G
  MOD_RES (24), (25), (26), (27): Xaa is A or G or is absent
EGLEXVPTEERPVQMRKIXXXXXXXXXKKATVFLQHNKXEXR

SEQ ID NO: 15052 - protein, 39 aa, Artificial Sequence
  Non-cyclic GFR-binding peptide
  MOD_RES (5), (5): Xaa is C or S
  MOD_RES (21), (22), (23), (24), (25): Xaa is A or G
  MOD_RES (26), (27), (28), (29): Xaa is A or G or is absent
SSVKXQPSRVHHSNITVQIMXXXXXXXXXIGEMSRLEEH

SEQ ID NO: 15053 - protein, 37 aa, Artificial Sequence
  Non-cyclic GFR-binding peptide
  MOD_RES (35), (37): Xaa is C or S
TQVQLSNITVQIMEIVRKKPIFLGEMSTLEDHLAXKX

SEQ ID NO: 15054 - protein, 35 aa, Artificial Sequence
  Non-cyclic GFR-binding peptide
  MOD_RES (34), (34): Xaa is C or S
VPTGQRPVQMRKIRIKPHQGQHKKATVLEEHSQXE

SEQ ID NO: 15055 - protein, 44 aa, Artificial Sequence
  Non-cyclic GFR-binding peptide
  MOD_RES (7), (41), (43): Xaa is C or S
NDEGLEXVPTGQSNITMQIMRIKPHQGQHIGEMSLEEHSQXEXR

SEQ ID NO: 15056 - protein, 35 aa, Artificial Sequence
  Non-cyclic GFR-binding peptide
  MOD_RES (1), (1): Xaa is C or S
  MOD_RES (17), (18), (19), (20), (21): Xaa is A or G
  MOD_RES (22), (23), (24), (25): Xaa is A or G or is absent
XRPTQVQLSNITVQIMXXXXXXXXXLGEMSTLEDH

SEQ ID NO: 15057 - protein, 42 aa, Artificial Sequence
  Non-cyclic GFR-binding peptide
  MOD_RES (5), (39), (41): Xaa is C or S
  MOD_RES (19), (20), (21), (22), (23): Xaa is A or G
  MOD_RES (24), (25), (26), (27): Xaa is A or G or is absent
EGLEXVPTEERSVKMAKVXXXXXXXXXKEVQVFLQHNKXEXR

SEQ ID NO: 15058 - protein, 35 aa, Artificial Sequence
  Non-cyclic GFR-binding peptide
  MOD_RES (1), (1): Xaa is C or S
  MOD_RES (17), (18), (19), (20), (21): Xaa is A or G
  MOD_RES (22), (23), (24), (25): Xaa is A or G or is absent
XRPTQVQLSNITVQIMXXXXXXXXXIGEMSTLEDH

SEQ ID NO: 15059 - protein, 32 aa, Artificial Sequence
  Non-cyclic GFR-binding peptide
VPTEERSVKMAKVRIKPHQGQHKEVQVFLQHN

SEQ ID NO: 15060 - protein, 38 aa, Artificial Sequence
  Non-cyclic GFR-binding peptide
  MOD_RES (4), (38): Xaa is C or S
  MOD_RES (18), (19), (20), (21), (22): Xaa is A or G
  MOD_RES (23), (24), (25), (26): Xaa is A or G or is absent
GLEXVPTGQRSVKMAKVXXXXXXXXXKEVQVLEEHSQX

SEQ ID NO: 15061 - protein, 38 aa, Artificial Sequence
  Non-cyclic GFR-binding peptide
  MOD_RES (2), (36), (38): Xaa is C or S
EXVPTEESNITMQIMRIKPHQGQHLGEMSFLQHNKXEX

SEQ ID NO: 15062 - protein, 41 aa, Artificial Sequence
  Non-cyclic GFR-binding peptide
  MOD_RES (1), (38), (40): Xaa is C or S
XRPTQVQLRSVKVAKVEIVRKKPIFKEVQVTLEDHLAXKXE

SEQ ID NO: 15063 - protein, 42 aa, Artificial Sequence
  Non-cyclic GFR-binding peptide
  MOD_RES (6), (40), (42): Xaa is C or S
DEGLEXVPTGQRSVKMAKVRIKPHQGQHKEVQVLEEHSQXEX

SEQ ID NO: 15064 - protein, 33 aa, Artificial Sequence
  Non-cyclic GFR-binding peptide
SRVHHRPVQVRKIEYVRKKPKLKKATVRLEEHL

SEQ ID NO: 15065 - protein, 42 aa, Artificial Sequence
  Non-cyclic GFR-binding peptide
  MOD_RES (2), (39), (41): Xaa is C or S
KXQPSRVHHRPVQVRKIEYVRKKPKLKKATVRLEEHLEXAXA

SEQ ID NO: 15066 - protein, 45 aa, Artificial Sequence
  Non-cyclic GFR-binding peptide
  MOD_RES (5), (42), (44): Xaa is C or S
  MOD_RES (21), (22), (23), (24), (25): Xaa is A or G
  MOD_RES (26), (27), (28), (29): Xaa is A or G or is absent
RNVQXRPTQVQLSNITVQIMXXXXXXXXXLGEMSTLEDHLAXKXE

SEQ ID NO: 15067 - protein, 32 aa, Artificial Sequence
  Non-cyclic GFR-binding peptide
SRVHHSNITVQIMEYVRKKPKLLGEMSRLEEH

SEQ ID NO: 15068 - protein, 39 aa, Artificial Sequence
  Non-cyclic GFR-binding peptide
  MOD_RES (6), (6): Xaa is C or S
DEGLEXVPTEERSVKMAKVRIKPHQGQHKEVQVFLQHNK

SEQ ID NO: 15069 - protein, 32 aa, Artificial Sequence
  Non-cyclic GFR-binding peptide
TQVQLSNITVQIMEIVRKKPIFIGEMSTLEDH

SEQ ID NO: 15070 - protein, 37 aa, Artificial Sequence
  Non-cyclic GFR-binding peptide
  MOD_RES (1), (1): Xaa is C or S
  MOD_RES (17), (18), (19), (20), (21): Xaa is A or G
  MOD_RES (22), (23), (24), (25): Xaa is A or G or is absent
XRPTQVQLSNITVQIMXXXXXXXXXIGEMSTLEDHLA

SEQ ID NO: 15071 - protein, 35 aa, Artificial Sequence
  Non-cyclic GFR-binding peptide
RPTQVQLSNITVQIMEIVRKKPIFLGEMSTLEDHL

SEQ ID NO: 15072 - protein, 37 aa, Artificial Sequence
  Non-cyclic GFR-binding peptide
  MOD_RES (34), (36): Xaa is C or S
  MOD_RES (14), (15), (16), (17), (18): Xaa is A or G
  MOD_RES (19), (20), (21), (22): Xaa is A or G or is absent
VPTGQRSVKMAKVXXXXXXXXXKEVQVLEEHSQXEXR

SEQ ID NO: 15073 - protein, 41 aa, Artificial Sequence
  Non-cyclic GFR-binding peptide
  MOD_RES (1), (38), (40): Xaa is C or S
  MOD_RES (17), (18), (19), (20), (21): Xaa is A or G
  MOD_RES (22), (23), (24), (25): Xaa is A or G or is absent
XQPSRVHHSNITVQIMXXXXXXXXXLGEMSRLEEHLEXAXA

SEQ ID NO: 15074 - protein, 40 aa, Artificial Sequence
  Non-cyclic GFR-binding peptide
  MOD_RES (2), (39): Xaa is C or S
QXRPTQVQLSNITVQIMEIVRKKPIFIGEMSTLEDHLAXK

SEQ ID NO: 15075 - protein, 32 aa, Artificial Sequence
  Non-cyclic GFR-binding peptide
  MOD_RES (14), (15), (16), (17), (18): Xaa is A or G
  MOD_RES (19), (20), (21), (22): Xaa is A or G or is absent
VPTEESNITMQIMXXXXXXXXXLGEMSFLQHN

SEQ ID NO: 15076 - protein, 35 aa, Artificial Sequence
  Non-cyclic GFR-binding peptide
  MOD_RES (15), (16), (17), (18), (19): Xaa is A or G
  MOD_RES (20), (21), (22), (23): Xaa is A or G or is absent
PSRVHHSNITVQIMXXXXXXXXXIGEMSRLEEHLE

SEQ ID NO: 15077 - protein, 37 aa, Artificial Sequence
  Non-cyclic GFR-binding peptide
  MOD_RES (34), (36): Xaa is C or S
VPTGQSNITMQIMRIKPHQGQHIGEMSLEEHSQXEXR

SEQ ID NO: 15078 - protein, 34 aa, Artificial Sequence
  Non-cyclic GFR-binding peptide
  MOD_RES (1), (1): Xaa is C or S
XVPTGQRSVKMAKVRIKPHQGQHKEVQVLEEHSQ

SEQ ID NO: 15079 - protein, 38 aa, Artificial Sequence
  Non-cyclic GFR-binding peptide
  MOD_RES (36), (38): Xaa is C or S
  MOD_RES (15), (16), (17), (18), (19): Xaa is A or G
  MOD_RES (20), (21), (22), (23): Xaa is A or G or is absent
PTQVQLSNITVQIMXXXXXXXXXLGEMSTLEDHLAXKX

SEQ ID NO: 15080 - protein, 37 aa, Artificial Sequence
  Non-cyclic GFR-binding peptide
  MOD_RES (2), (36): Xaa is C or S
  MOD_RES (16), (17), (18), (19), (20): Xaa is A or G
  MOD_RES (21), (22), (23), (24): Xaa is A or G or is absent
EXVPTEESNITMQIMXXXXXXXXXLGEMSFLQHNKXE

SEQ ID NO: 15081 - protein, 43 aa, Artificial Sequence
  Non-cyclic GFR-binding peptide
  MOD_RES (5), (42): Xaa is C or S
  MOD_RES (21), (22), (23), (24), (25): Xaa is A or G
  MOD_RES (26), (27), (28), (29): Xaa is A or G or is absent
SSVKXQPSRVHHSNITVQIMXXXXXXXXXLGEMSRLEEHLEXA

SEQ ID NO: 15082 - protein, 33 aa, Artificial Sequence
  Non-cyclic GFR-binding peptide
  MOD_RES (1), (1): Xaa is C or S
XVPTEERPVQMRKIRIKPHQGQHKKATVFLQHN

SEQ ID NO: 15083 - protein, 42 aa, Artificial Sequence
  Non-cyclic GFR-binding peptide
  MOD_RES (2), (39), (41): Xaa is C or S
  MOD_RES (18), (19), (20), (21), (22): Xaa is A or G
  MOD_RES (23), (24), (25), (26): Xaa is A or G or is absent
QXRPTQVQLSNITVQIMXXXXXXXXXLGEMSTLEDHLAXKXE

SEQ ID NO: 15084 - protein, 41 aa, Artificial Sequence
  Non-cyclic GFR-binding peptide
  MOD_RES (4), (38), (40): Xaa is C or S
GLEXVPTGQRSVKMAKVRIKPHQGQHKEVQVLEEHSQXEXR

SEQ ID NO: 15085 - protein, 38 aa, Artificial Sequence
  Non-cyclic GFR-binding peptide
  MOD_RES (35), (37): Xaa is C or S
  MOD_RES (14), (15), (16), (17), (18): Xaa is A or G
  MOD_RES (19), (20), (21), (22): Xaa is A or G or is absent
TQVQLSNITVQIMXXXXXXXXXIGEMSTLEDHLAXKXE

SEQ ID NO: 15086 - protein, 41 aa, Artificial Sequence
  Non-cyclic GFR-binding peptide
  MOD_RES (7), (41): Xaa is C or S
NDEGLEXVPTEERSVKMAKVRIKPHQGQHKEVQVFLQHNKX

SEQ ID NO: 15087 - protein, 41 aa, Artificial Sequence
  Non-cyclic GFR-binding peptide
  MOD_RES (7), (41): Xaa is C or S
  MOD_RES (21), (22), (23), (24), (25): Xaa is A or G
  MOD_RES (26), (27), (28), (29): Xaa is A or G or is absent
NDEGLEXVPTEERSVKMAKVXXXXXXXXXKEVQVFLQHNKX

SEQ ID NO: 15088 - protein, 39 aa, Artificial Sequence
  Non-cyclic GFR-binding peptide
  MOD_RES (36), (38): Xaa is C or S
PTQVQLSNITVQIMEIVRKKPIFIGEMSTLEDHLAXKXE

SEQ ID NO: 15089 - protein, 34 aa, Artificial Sequence
  Non-cyclic GFR-binding peptide
  MOD_RES (34), (34): Xaa is C or S
  MOD_RES (14), (15), (16), (17), (18): Xaa is A or G
  MOD_RES (19), (20), (21), (22): Xaa is A or G or is absent
VPTEERPVQMRKIXXXXXXXXXKKATVFLQHNKX

SEQ ID NO: 15090 - protein, 40 aa, Artificial Sequence
  Non-cyclic GFR-binding peptide
  MOD_RES (4), (38), (40): Xaa is C or S
GLEXVPTGQRSVKMAKVRIKPHQGQHKEVQVLEEHSQXEX

SEQ ID NO: 15091 - protein, 42 aa, Artificial Sequence
  Non-cyclic GFR-binding peptide
  MOD_RES (4), (41): Xaa is C or S
  MOD_RES (20), (21), (22), (23), (24): Xaa is A or G
  MOD_RES (25), (26), (27), (28): Xaa is A or G or is absent
SVKXQPSRVHHRPVQVRKIXXXXXXXXXKKATVRLEEHLEXA

SEQ ID NO: 15092 - protein, 37 aa, Artificial Sequence
  Non-cyclic GFR-binding peptide
  MOD_RES (2), (2): Xaa is C or S
  MOD_RES (18), (19), (20), (21), (22): Xaa is A or G
  MOD_RES (23), (24), (25), (26): Xaa is A or G or is absent
QXRPTQVQLSNITVQIMXXXXXXXXXIGEMSTLEDHL

SEQ ID NO: 15093 - protein, 32 aa, Artificial Sequence
  Non-cyclic GFR-binding peptide
  MOD_RES (14), (15), (16), (17), (18): Xaa is A or G
  MOD_RES (19), (20), (21), (22): Xaa is A or G or is absent
VPTGQRSVKMAKVXXXXXXXXXKEVQVLEEHS

SEQ ID NO: 15094 - protein, 32 aa, Artificial Sequence
  Non-cyclic GFR-binding peptide
  MOD_RES (14), (15), (16), (17), (18): Xaa is A or G
  MOD_RES (19), (20), (21), (22): Xaa is A or G or is absent
VPTEERPVQMRKIXXXXXXXXXKKATVFLQHN

SEQ ID NO: 15095 - protein, 35 aa, Artificial Sequence
  Non-cyclic GFR-binding peptide
  MOD_RES (16), (17), (18), (19), (20): Xaa is A or G
  MOD_RES (21), (22), (23), (24): Xaa is A or G or is absent
QPSRVHHSNITVQIMXXXXXXXXXLGEMSRLEEHL

SEQ ID NO: 15096 - protein, 41 aa, Artificial Sequence
  Non-cyclic GFR-binding peptide
  MOD_RES (5), (39), (41): Xaa is C or S
EGLEXVPTGQRSVKMAKVRIKPHQGQHKEVQVLEEHSQXEX

SEQ ID NO: 15097 - protein, 36 aa, Artificial Sequence
  Non-cyclic GFR-binding peptide
  MOD_RES (3), (3): Xaa is C or S
  MOD_RES (17), (18), (19), (20), (21): Xaa is A or G
  MOD_RES (22), (23), (24), (25): Xaa is A or G or is absent
LEXVPTGQRSVKMAKVXXXXXXXXXKEVQVLEEHSQ

SEQ ID NO: 15098 - protein, 36 aa, Artificial Sequence
  Non-cyclic GFR-binding peptide
  MOD_RES (1), (1): Xaa is C or S
XRPTQVQLSNITVQIMEIVRKKPIFLGEMSTLEDHL

SEQ ID NO: 15099 - protein, 38 aa, Artificial Sequence
  Non-cyclic GFR-binding peptide
  MOD_RES (35), (37): Xaa is C or S
SRVHHSNITVQIMEYVRKKPKLLGEMSRLEEHLEXAXA

SEQ ID NO: 15100 - protein, 41 aa, Artificial Sequence
  Non-cyclic GFR-binding peptide
  MOD_RES (4), (41): Xaa is C or S
  MOD_RES (20), (21), (22), (23), (24): Xaa is A or G
  MOD_RES (25), (26), (27), (28): Xaa is A or G or is absent
NVQXRPTQVQLRSVKVAKVXXXXXXXXXKEVQVTLEDHLAX

SEQ ID NO: 15101 - protein, 38 aa, Artificial Sequence
  Non-cyclic GFR-binding peptide
  MOD_RES (1), (38): Xaa is C or S
  MOD_RES (17), (18), (19), (20), (21): Xaa is A or G
  MOD_RES (22), (23), (24), (25): Xaa is A or G or is absent
XRPTQVQLSNITVQIMXXXXXXXXXIGEMSTLEDHLAX

SEQ ID NO: 15102 - protein, 35 aa, Artificial Sequence
  Non-cyclic GFR-binding peptide
  MOD_RES (2), (2): Xaa is C or S
  MOD_RES (16), (17), (18), (19), (20): Xaa is A or G
  MOD_RES (21), (22), (23), (24): Xaa is A or G or is absent
EXVPTGQRPVQMRKIXXXXXXXXXKKATVLEEHSQ

SEQ ID NO: 15103 - protein, 33 aa, Artificial Sequence
  Non-cyclic GFR-binding peptide
  MOD_RES (1), (1): Xaa is C or S
  MOD_RES (15), (16), (17), (18), (19): Xaa is A or G
  MOD_RES (20), (21), (22), (23): Xaa is A or G or is absent
XVPTGQRPVQMRKIXXXXXXXXXKKATVLEEHS

SEQ ID NO: 15104 - protein, 39 aa, Artificial Sequence
  Non-cyclic GFR-binding peptide
  MOD_RES (1), (38): Xaa is C or S
  MOD_RES (17), (18), (19), (20), (21): Xaa is A or G
  MOD_RES (22), (23), (24), (25): Xaa is A or G or is absent
XQPSRVHHSNITVQIMXXXXXXXXXLGEMSRLEEHLEXA

SEQ ID NO: 15105 - protein, 37 aa, Artificial Sequence
  Non-cyclic GFR-binding peptide
  MOD_RES (34), (36): Xaa is C or S
  MOD_RES (14), (15), (16), (17), (18): Xaa is A or G
  MOD_RES (19), (20), (21), (22): Xaa is A or G or is absent
VPTGQRPVQMRKIXXXXXXXXXKKATVLEEHSQXEXR

SEQ ID NO: 15106 - protein, 33 aa, Artificial Sequence
  Non-cyclic GFR-binding peptide
SRVHHSNITVQIMEYVRKKPKLIGEMSRLEEHL

SEQ ID NO: 15107 - protein, 43 aa, Artificial Sequence
  Non-cyclic GFR-binding peptide
  MOD_RES (4), (41), (43): Xaa is C or S
  MOD_RES (20), (21), (22), (23), (24): Xaa is A or G
  MOD_RES (25), (26), (27), (28): Xaa is A or G or is absent
NVQXRPTQVQLSNITVQIMXXXXXXXXXLGEMSTLEDHLAXKX

SEQ ID NO: 15108 - protein, 41 aa, Artificial Sequence
  Non-cyclic GFR-binding peptide
  MOD_RES (5), (5): Xaa is C or S
  MOD_RES (21), (22), (23), (24), (25): Xaa is A or G
  MOD_RES (26), (27), (28), (29): Xaa is A or G or is absent
RNVQXRPTQVQLRSVKVAKVXXXXXXXXXKEVQVTLEDHLA

SEQ ID NO: 15109 - protein, 44 aa, Artificial Sequence
  Non-cyclic GFR-binding peptide
  MOD_RES (7), (41), (43): Xaa is C or S
  MOD_RES (21), (22), (23), (24), (25): Xaa is A or G
  MOD_RES (26), (27), (28), (29): Xaa is A or G or is absent
NDEGLEXVPTEESNITMQIMXXXXXXXXXLGEMSFLQHNKXEXR

SEQ ID NO: 15110 - protein, 36 aa, Artificial Sequence
  Non-cyclic GFR-binding peptide
  MOD_RES (1), (35): Xaa is C or S
XVPTEERSVKMAKVRIKPHQGQHKEVQVFLQHNKXE

SEQ ID NO: 15111 - protein, 35 aa, Artificial Sequence
  Non-cyclic GFR-binding peptide
PTQVQLRSVKVAKVEIVRKKPIFKEVQVTLEDHLA

SEQ ID NO: 15112 - protein, 38 aa, Artificial Sequence
  Non-cyclic GFR-binding peptide
  MOD_RES (2), (36), (38): Xaa is C or S
  MOD_RES (16), (17), (18), (19), (20): Xaa is A or G
  MOD_RES (21), (22), (23), (24): Xaa is A or G or is absent
EXVPTGQRSVKMAKVXXXXXXXXXKEVQVLEEHSQXEX

SEQ ID NO: 15113 - protein, 36 aa, Artificial Sequence
  Non-cyclic GFR-binding peptide
  MOD_RES (36), (36): Xaa is C or S
  MOD_RES (15), (16), (17), (18), (19): Xaa is A or G
  MOD_RES (20), (21), (22), (23): Xaa is A or G or is absent
PTQVQLSNITVQIMXXXXXXXXXLGEMSTLEDHLAX

SEQ ID NO: 15114 - protein, 44 aa, Artificial Sequence
  Non-cyclic GFR-binding peptide
  MOD_RES (7), (41), (43): Xaa is C or S
NDEGLEXVPTEESNITMQIMRIKPHQGQHLGEMSFLQHNKXEXR

SEQ ID NO: 15115 - protein, 35 aa, Artificial Sequence
  Non-cyclic GFR-binding peptide
  MOD_RES (2), (2): Xaa is C or S
  MOD_RES (16), (17), (18), (19), (20): Xaa is A or G
  MOD_RES (21), (22), (23), (24): Xaa is A or G or is absent
EXVPTGQSNITMQIMXXXXXXXXXIGEMSLEEHSQ

SEQ ID NO: 15116 - protein, 38 aa, Artificial Sequence
  Non-cyclic GFR-binding peptide
  MOD_RES (3), (37): Xaa is C or S
  MOD_RES (17), (18), (19), (20), (21): Xaa is A or G
  MOD_RES (22), (23), (24), (25): Xaa is A or G or is absent
LEXVPTGQRPVQMRKIXXXXXXXXXKKATVLEEHSQXE

SEQ ID NO: 15117 - protein, 36 aa, Artificial Sequence
  Non-cyclic GFR-binding peptide
  MOD_RES (36), (36): Xaa is C or S
  MOD_RES (15), (16), (17), (18), (19): Xaa is A or G
  MOD_RES (20), (21), (22), (23): Xaa is A or G or is absent
PSRVHHRPVQVRKIXXXXXXXXXKKATVRLEEHLEX

SEQ ID NO: 15118 - protein, 37 aa, Artificial Sequence
  Non-cyclic GFR-binding peptide
  MOD_RES (4), (4): Xaa is C or S
  MOD_RES (18), (19), (20), (21), (22): Xaa is A or G
  MOD_RES (23), (24), (25), (26): Xaa is A or G or is absent
GLEXVPTGQRPVQMRKIXXXXXXXXXKKATVLEEHSQ

SEQ ID NO: 15119 - protein, 34 aa, Artificial Sequence
  Non-cyclic GFR-binding peptide
TQVQLRSVKVAKVEIVRKKPIFKEVQVTLEDHLA

SEQ ID NO: 15120 - protein, 38 aa, Artificial Sequence
  Non-cyclic GFR-binding peptide
  MOD_RES (4), (38): Xaa is C or S
GLEXVPTGQRSVKMAKVRIKPHQGQHKEVQVLEEHSQX

SEQ ID NO: 15121 - protein, 33 aa, Artificial Sequence
  Non-cyclic GFR-binding peptide
  MOD_RES (1), (1): Xaa is C or S
  MOD_RES (15), (16), (17), (18), (19): Xaa is A or G
  MOD_RES (20), (21), (22), (23): Xaa is A or G or is absent
XVPTEERSVKMAKVXXXXXXXXXKEVQVFLQHN

SEQ ID NO: 15122 - protein, 42 aa, Artificial Sequence
  Non-cyclic GFR-binding peptide
  MOD_RES (3), (40), (42): Xaa is C or S
VKXQPSRVHHRPVQVRKIEYVRKKPKLKKATVRLEEHLEXAX

SEQ ID NO: 15123 - protein, 36 aa, Artificial Sequence
  Non-cyclic GFR-binding peptide
  MOD_RES (3), (3): Xaa is C or S
  MOD_RES (17), (18), (19), (20), (21): Xaa is A or G
  MOD_RES (22), (23), (24), (25): Xaa is A or G or is absent
LEXVPTGQSNITMQIMXXXXXXXXXIGEMSLEEHSQ

SEQ ID NO: 15124 - protein, 43 aa, Artificial Sequence
  Non-cyclic GFR-binding peptide
  MOD_RES (3), (40), (42): Xaa is C or S
  MOD_RES (19), (20), (21), (22), (23): Xaa is A or G
  MOD_RES (24), (25), (26), (27): Xaa is A or G or is absent
VQXRPTQVQLSNITVQIMXXXXXXXXXLGEMSTLEDHLAXKXE

SEQ ID NO: 15125 - protein, 42 aa, Artificial Sequence
  Non-cyclic GFR-binding peptide
  MOD_RES (6), (40), (42): Xaa is C or S
DEGLEXVPTGQRPVQMRKIRIKPHQGQHKKATVLEEHSQXEX

SEQ ID NO: 15126 - protein, 41 aa, Artificial Sequence
  Non-cyclic GFR-binding peptide
  MOD_RES (5), (5): Xaa is C or S
SSVKXQPSRVHHRPVQVRKIEYVRKKPKLKKATVRLEEHLE

SEQ ID NO: 15127 - protein, 38 aa, Artificial Sequence
  Non-cyclic GFR-binding peptide
  MOD_RES (36), (38): Xaa is C or S
PTQVQLSNITVQIMEIVRKKPIFIGEMSTLEDHLAXKX

SEQ ID NO: 15128 - protein, 36 aa, Artificial Sequence
  Non-cyclic GFR-binding peptide
  MOD_RES (4), (4): Xaa is C or S
GLEXVPTGQRSVKMAKVRIKPHQGQHKEVQVLEEHS

SEQ ID NO: 15129 - protein, 37 aa, Artificial Sequence
  Non-cyclic GFR-binding peptide
  MOD_RES (2), (2): Xaa is C or S
QXRPTQVQLRSVKVAKVEIVRKKPIFKEVQVTLEDHL

SEQ ID NO: 15130 - protein, 41 aa, Artificial Sequence
  Non-cyclic GFR-binding peptide
  MOD_RES (5), (5): Xaa is C or S
  MOD_RES (21), (22), (23), (24), (25): Xaa is A or G
  MOD_RES (26), (27), (28), (29): Xaa is A or G or is absent
RNVQXRPTQVQLSNITVQIMXXXXXXXXXLGEMSTLEDHLA

SEQ ID NO: 15131 - protein, 43 aa, Artificial Sequence
  Non-cyclic GFR-binding peptide
  MOD_RES (4), (41), (43): Xaa is C or S
NVQXRPTQVQLRSVKVAKVEIVRKKPIFKEVQVTLEDHLAXKX

SEQ ID NO: 15132 - protein, 36 aa, Artificial Sequence
  Non-cyclic GFR-binding peptide
  MOD_RES (3), (3): Xaa is C or S
  MOD_RES (17), (18), (19), (20), (21): Xaa is A or G
  MOD_RES (22), (23), (24), (25): Xaa is A or G or is absent
LEXVPTGQRPVQMRKIXXXXXXXXXKKATVLEEHSQ

SEQ ID NO: 15133 - protein, 35 aa, Artificial Sequence
  Non-cyclic GFR-binding peptide
  MOD_RES (34), (34): Xaa is C or S
  MOD_RES (14), (15), (16), (17), (18): Xaa is A or G
  MOD_RES (19), (20), (21), (22): Xaa is A or G or is absent
VPTEERPVQMRKIXXXXXXXXXKKATVFLQHNKXE

SEQ ID NO: 15134 - protein, 36 aa, Artificial Sequence
  Non-cyclic GFR-binding peptide
  MOD_RES (1), (35): Xaa is C or S
  MOD_RES (15), (16), (17), (18), (19): Xaa is A or G
  MOD_RES (20), (21), (22), (23): Xaa is A or G or is absent
XVPTGQSNITMQIMXXXXXXXXXIGEMSLEEHSQXE

SEQ ID NO: 15135 - protein, 39 aa, Artificial Sequence
  Non-cyclic GFR-binding peptide
  MOD_RES (3), (3): Xaa is C or S
VQXRPTQVQLSNITVQIMEIVRKKPIFIGEMSTLEDHLA

SEQ ID NO: 15136 - protein, 41 aa, Artificial Sequence
  Non-cyclic GFR-binding peptide
  MOD_RES (6), (40): Xaa is C or S
DEGLEXVPTEERSVKMAKVRIKPHQGQHKEVQVFLQHNKXE

SEQ ID NO: 15137 - protein, 36 aa, Artificial Sequence
  Non-cyclic GFR-binding peptide
  MOD_RES (4), (4): Xaa is C or S
GLEXVPTGQRPVQMRKIRIKPHQGQHKKATVLEEHS

SEQ ID NO: 15138 - protein, 35 aa, Artificial Sequence
  Non-cyclic GFR-binding peptide
  MOD_RES (1), (35): Xaa is C or S
  MOD_RES (15), (16), (17), (18), (19): Xaa is A or G
  MOD_RES (20), (21), (22), (23): Xaa is A or G or is absent
XVPTEERPVQMRKIXXXXXXXXXKKATVFLQHNKX

SEQ ID NO: 15139 - protein, 43 aa, Artificial Sequence
  Non-cyclic GFR-binding peptide
  MOD_RES (4), (41), (43): Xaa is C or S
  MOD_RES (20), (21), (22), (23), (24): Xaa is A or G
  MOD_RES (25), (26), (27), (28): Xaa is A or G or is absent
SVKXQPSRVHHSNITVQIMXXXXXXXXXLGEMSRLEEHLEXAX

SEQ ID NO: 15140 - protein, 38 aa, Artificial Sequence
  Non-cyclic GFR-binding peptide
  MOD_RES (2), (36), (38): Xaa is C or S
EXVPTGQRPVQMRKIRIKPHQGQHKKATVLEEHSQXEX

SEQ ID NO: 15141 - protein, 34 aa, Artificial Sequence
  Non-cyclic GFR-binding peptide
  MOD_RES (14), (15), (16), (17), (18): Xaa is A or G
  MOD_RES (19), (20), (21), (22): Xaa is A or G or is absent
SRVHHSNITVQIMXXXXXXXXXIGEMSRLEEHLE

SEQ ID NO: 15142 - protein, 34 aa, Artificial Sequence
  Non-cyclic GFR-binding peptide
  MOD_RES (34), (34): Xaa is C or S
VPTEERPVQMRKIRIKPHQGQHKKATVFLQHNKX

SEQ ID NO: 15143 - protein, 37 aa, Artificial Sequence
  Non-cyclic GFR-binding peptide
  MOD_RES (2), (2): Xaa is C or S
KXQPSRVHHRPVQVRKIEYVRKKPKLKKATVRLEEHL

SEQ ID NO: 15144 - protein, 36 aa, Artificial Sequence
  Non-cyclic GFR-binding peptide
QPSRVHHSNITVQIMEYVRKKPKLIGEMSRLEEHLE

SEQ ID NO: 15145 - protein, 44 aa, Artificial Sequence
  Non-cyclic GFR-binding peptide
  MOD_RES (4), (41), (43): Xaa is C or S
NVQXRPTQVQLSNITVQIMEIVRKKPIFLGEMSTLEDHLAXKXE

SEQ ID NO: 15146 - protein, 36 aa, Artificial Sequence
  Non-cyclic GFR-binding peptide
  MOD_RES (4), (4): Xaa is C or S
GLEXVPTGQSNITMQIMRIKPHQGQHIGEMSLEEHS

SEQ ID NO: 15147 - protein, 40 aa, Artificial Sequence
  Non-cyclic GFR-binding peptide
  MOD_RES (3), (37), (39): Xaa is C or S
LEXVPTEERPVQMRKIRIKPHQGQHKKATVFLQHNKXEXR

SEQ ID NO: 15148 - protein, 43 aa, Artificial Sequence
  Non-cyclic GFR-binding peptide
  MOD_RES (7), (41), (43): Xaa is C or S
  MOD_RES (21), (22), (23), (24), (25): Xaa is A or G
  MOD_RES (26), (27), (28), (29): Xaa is A or G or is absent
NDEGLEXVPTEERSVKMAKVXXXXXXXXXKEVQVFLQHNKXEX

SEQ ID NO: 15149 - protein, 37 aa, Artificial Sequence
  Non-cyclic GFR-binding peptide
  MOD_RES (2), (2): Xaa is C or S
KXQPSRVHHSNITVQIMEYVRKKPKLIGEMSRLEEHL

SEQ ID NO: 15150 - protein, 37 aa, Artificial Sequence
  Non-cyclic GFR-binding peptide
  MOD_RES (36), (36): Xaa is C or S
PTQVQLRSVKVAKVEIVRKKPIFKEVQVTLEDHLAXK

SEQ ID NO: 15151 - protein, 34 aa, Artificial Sequence
  Non-cyclic GFR-binding peptide
  MOD_RES (15), (16), (17), (18), (19): Xaa is A or G
  MOD_RES (20), (21), (22), (23): Xaa is A or G or is absent
PTQVQLSNITVQIMXXXXXXXXXLGEMSTLEDHL

SEQ ID NO: 15152 - protein, 44 aa, Artificial Sequence
  Non-cyclic GFR-binding peptide
  MOD_RES (7), (41), (43): Xaa is C or S
NDEGLEXVPTGQRSVKMAKVRIKPHQGQHKEVQVLEEHSQXEXR

SEQ ID NO: 15153 - protein, 39 aa, Artificial Sequence
  Non-cyclic GFR-binding peptide
  MOD_RES (3), (37), (39): Xaa is C or S
  MOD_RES (17), (18), (19), (20), (21): Xaa is A or G
  MOD_RES (22), (23), (24), (25): Xaa is A or G or is absent
LEXVPTEERPVQMRKIXXXXXXXXXKKATVFLQHNKXEX

SEQ ID NO: 15154 - protein, 36 aa, Artificial Sequence
  Non-cyclic GFR-binding peptide
  MOD_RES (1), (1): Xaa is C or S
XQPSRVHHSNITVQIMEYVRKKPKLLGEMSRLEEHL

SEQ ID NO: 15155 - protein, 35 aa, Artificial Sequence
  Non-cyclic GFR-binding peptide
  MOD_RES (1), (1): Xaa is C or S
XQPSRVHHSNITVQIMEYVRKKPKLLGEMSRLEEH

SEQ ID NO: 15156 - protein, 36 aa, Artificial Sequence
  Non-cyclic GFR-binding peptide
  MOD_RES (4), (4): Xaa is C or S
  MOD_RES (18), (19), (20), (21), (22): Xaa is A or G
  MOD_RES (23), (24), (25), (26): Xaa is A or G or is absent
GLEXVPTGQSNITMQIMXXXXXXXXXIGEMSLEEHS

SEQ ID NO: 15157 - protein, 37 aa, Artificial Sequence
  Non-cyclic GFR-binding peptide
  MOD_RES (37), (37): Xaa is C or S
RPTQVQLSNITVQIMEIVRKKPIFIGEMSTLEDHLAX

SEQ ID NO: 15158 - protein, 43 aa, Artificial Sequence
  Non-cyclic GFR-binding peptide
  MOD_RES (3), (40), (42): Xaa is C or S
VKXQPSRVHHSNITVQIMEYVRKKPKLLGEMSRLEEHLEXAXA

SEQ ID NO: 15159 - protein, 34 aa, Artificial Sequence
  Non-cyclic GFR-binding peptide
TQVQLSNITVQIMEIVRKKPIFLGEMSTLEDHLA

SEQ ID NO: 15160 - protein, 37 aa, Artificial Sequence
  Non-cyclic GFR-binding peptide
  MOD_RES (4), (4): Xaa is C or S
GLEXVPTEERSVKMAKVRIKPHQGQHKEVQVFLQHNK

SEQ ID NO: 15161 - protein, 37 aa, Artificial Sequence
  Non-cyclic GFR-binding peptide
  MOD_RES (3), (37): Xaa is C or S
LEXVPTGQRPVQMRKIRIKPHQGQHKKATVLEEHSQX

SEQ ID NO: 15162 - protein, 37 aa, Artificial Sequence
  Non-cyclic GFR-binding peptide
  MOD_RES (34), (36): Xaa is C or S
VPTGQRSVKMAKVRIKPHQGQHKEVQVLEEHSQXEXR

SEQ ID NO: 15163 - protein, 40 aa, Artificial Sequence
  Non-cyclic GFR-binding peptide
  MOD_RES (3), (40): Xaa is C or S
  MOD_RES (19), (20), (21), (22), (23): Xaa is A or G
  MOD_RES (24), (25), (26), (27): Xaa is A or G or is absent
VQXRPTQVQLSNITVQIMXXXXXXXXXIGEMSTLEDHLAX

SEQ ID NO: 15164 - protein, 42 aa, Artificial Sequence
  Non-cyclic GFR-binding peptide
  MOD_RES (6), (40), (42): Xaa is C or S
DEGLEXVPTGQSNITMQIMRIKPHQGQHIGEMSLEEHSQXEX

SEQ ID NO: 15165 - protein, 39 aa, Artificial Sequence
  Non-cyclic GFR-binding peptide
  MOD_RES (37), (39): Xaa is C or S
QPSRVHHSNITVQIMEYVRKKPKLLGEMSRLEEHLEXAX

SEQ ID NO: 15166 - protein, 35 aa, Artificial Sequence
  Non-cyclic GFR-binding peptide
  MOD_RES (1), (1): Xaa is C or S
XQPSRVHHSNITVQIMEYVRKKPKLIGEMSRLEEH

SEQ ID NO: 15167 - protein, 36 aa, Artificial Sequence
  Non-cyclic GFR-binding peptide
  MOD_RES (4), (4): Xaa is C or S
GLEXVPTEESNITMQIMRIKPHQGQHLGEMSFLQHN

SEQ ID NO: 15168 - protein, 34 aa, Artificial Sequence
  Non-cyclic GFR-binding peptide
  MOD_RES (16), (17), (18), (19), (20): Xaa is A or G
  MOD_RES (21), (22), (23), (24): Xaa is A or G or is absent
QPSRVHHSNITVQIMXXXXXXXXXIGEMSRLEEH

SEQ ID NO: 15169 - protein, 38 aa, Artificial Sequence
  Non-cyclic GFR-binding peptide
  MOD_RES (1), (35), (37): Xaa is C or S
XVPTEERPVQMRKIRIKPHQGQHKKATVFLQHNKXEXR

SEQ ID NO: 15170 - protein, 38 aa, Artificial Sequence
  Non-cyclic GFR-binding peptide
  MOD_RES (3), (37): Xaa is C or S
  MOD_RES (17), (18), (19), (20), (21): Xaa is A or G
  MOD_RES (22), (23), (24), (25): Xaa is A or G or is absent
LEXVPTGQSNITMQIMXXXXXXXXXIGEMSLEEHSQXE

SEQ ID NO: 15171 - protein, 43 aa, Artificial Sequence
  Non-cyclic GFR-binding peptide
  MOD_RES (3), (40), (42): Xaa is C or S
VKXQPSRVHHRPVQVRKIEYVRKKPKLKKATVRLEEHLEXAXA

SEQ ID NO: 15172 - protein, 38 aa, Artificial Sequence
  Non-cyclic GFR-binding peptide
  MOD_RES (3), (3): Xaa is C or S
VQXRPTQVQLSNITVQIMEIVRKKPIFLGEMSTLEDHL

SEQ ID NO: 15173 - protein, 35 aa, Artificial Sequence
  Non-cyclic GFR-binding peptide
QPSRVHHSNITVQIMEYVRKKPKLLGEMSRLEEHL

SEQ ID NO: 15174 - protein, 42 aa, Artificial Sequence
  Non-cyclic GFR-binding peptide
  MOD_RES (4), (41): Xaa is C or S
SVKXQPSRVHHSNITVQIMEYVRKKPKLLGEMSRLEEHLEXA

SEQ ID NO: 15175 - protein, 42 aa, Artificial Sequence
  Non-cyclic GFR-binding peptide
  MOD_RES (5), (42): Xaa is C or S
  MOD_RES (21), (22), (23), (24), (25): Xaa is A or G
  MOD_RES (26), (27), (28), (29): Xaa is A or G or is absent
SSVKXQPSRVHHRPVQVRKIXXXXXXXXXKKATVRLEEHLEX

SEQ ID NO: 15176 - protein, 39 aa, Artificial Sequence
  Non-cyclic GFR-binding peptide
  MOD_RES (1), (38): Xaa is C or S
XQPSRVHHRPVQVRKIEYVRKKPKLKKATVRLEEHLEXA

SEQ ID NO: 15177 - protein, 43 aa, Artificial Sequence
  Non-cyclic GFR-binding peptide
  MOD_RES (7), (41), (43): Xaa is C or S
  MOD_RES (21), (22), (23), (24), (25): Xaa is A or G
  MOD_RES (26), (27), (28), (29): Xaa is A or G or is absent
NDEGLEXVPTEESNITMQIMXXXXXXXXXLGEMSFLQHNKXEX

SEQ ID NO: 15178 - protein, 41 aa, Artificial Sequence
  Non-cyclic GFR-binding peptide
  MOD_RES (1), (38), (40): Xaa is C or S
XRPTQVQLSNITVQIMEIVRKKPIFIGEMSTLEDHLAXKXE

SEQ ID NO: 15179 - protein, 44 aa, Artificial Sequence
  Non-cyclic GFR-binding peptide
  MOD_RES (4), (41), (43): Xaa is C or S
  MOD_RES (20), (21), (22), (23), (24): Xaa is A or G
  MOD_RES (25), (26), (27), (28): Xaa is A or G or is absent
NVQXRPTQVQLSNITVQIMXXXXXXXXXIGEMSTLEDHLAXKXE

SEQ ID NO: 15180 - protein, 39 aa, Artificial Sequence
  Non-cyclic GFR-binding peptide
  MOD_RES (1), (38): Xaa is C or S
XQPSRVHHSNITVQIMEYVRKKPKLLGEMSRLEEHLEXA

SEQ ID NO: 15181 - protein, 42 aa, Artificial Sequence
  Non-cyclic GFR-binding peptide
  MOD_RES (4), (41): Xaa is C or S
SVKXQPSRVHHRPVQVRKIEYVRKKPKLKKATVRLEEHLEXA

SEQ ID NO: 15182 - protein, 41 aa, Artificial Sequence
  Non-cyclic GFR-binding peptide
  MOD_RES (4), (38), (40): Xaa is C or S
  MOD_RES (18), (19), (20), (21), (22): Xaa is A or G
  MOD_RES (23), (24), (25), (26): Xaa is A or G or is absent
GLEXVPTEESNITMQIMXXXXXXXXXLGEMSFLQHNKXEXR

SEQ ID NO: 15183 - protein, 37 aa, Artificial Sequence
  Non-cyclic GFR-binding peptide
  MOD_RES (37), (37): Xaa is C or S
QPSRVHHSNITVQIMEYVRKKPKLIGEMSRLEEHLEX

SEQ ID NO: 15184 - protein, 39 aa, Artificial Sequence
  Non-cyclic GFR-binding peptide
  MOD_RES (6), (6): Xaa is C or S
  MOD_RES (20), (21), (22), (23), (24): Xaa is A or G
  MOD_RES (25), (26), (27), (28): Xaa is A or G or is absent
DEGLEXVPTGQRPVQMRKIXXXXXXXXXKKATVLEEHSQ

SEQ ID NO: 15185 - protein, 39 aa, Artificial Sequence
  Non-cyclic GFR-binding peptide
  MOD_RES (2), (36), (38): Xaa is C or S
EXVPTEERPVQMRKIRIKPHQGQHKKATVFLQHNKXEXR

SEQ ID NO: 15186 - protein, 41 aa, Artificial Sequence
  Non-cyclic GFR-binding peptide
  MOD_RES (2), (39), (41): Xaa is C or S
KXQPSRVHHSNITVQIMEYVRKKPKLLGEMSRLEEHLEXAX

SEQ ID NO: 15187 - protein, 34 aa, Artificial Sequence
  Non-cyclic GFR-binding peptide
  MOD_RES (16), (17), (18), (19), (20): Xaa is A or G
  MOD_RES (21), (22), (23), (24): Xaa is A or G or is absent
QPSRVHHSNITVQIMXXXXXXXXXLGEMSRLEEH

SEQ ID NO: 15188 - protein, 37 aa, Artificial Sequence
  Non-cyclic GFR-binding peptide
  MOD_RES (2), (36): Xaa is C or S
  MOD_RES (16), (17), (18), (19), (20): Xaa is A or G
  MOD_RES (21), (22), (23), (24): Xaa is A or G or is absent
EXVPTGQRPVQMRKIXXXXXXXXXKKATVLEEHSQXE

SEQ ID NO: 15189 - protein, 44 aa, Artificial Sequence
  Non-cyclic GFR-binding peptide
  MOD_RES (7), (41), (43): Xaa is C or S
  MOD_RES (21), (22), (23), (24), (25): Xaa is A or G
  MOD_RES (26), (27), (28), (29): Xaa is A or G or is absent
NDEGLEXVPTGQRPVQMRKIXXXXXXXXXKKATVLEEHSQXEXR

SEQ ID NO: 15190 - protein, 40 aa, Artificial Sequence
  Non-cyclic GFR-binding peptide
  MOD_RES (1), (38), (40): Xaa is C or S
  MOD_RES (17), (18), (19), (20), (21): Xaa is A or G
  MOD_RES (22), (23), (24), (25): Xaa is A or G or is absent
XQPSRVHHSNITVQIMXXXXXXXXXLGEMSRLEEHLEXAX

SEQ ID NO: 15191 - protein, 39 aa, Artificial Sequence
  Non-cyclic GFR-binding peptide
  MOD_RES (6), (6): Xaa is C or S
  MOD_RES (20), (21), (22), (23), (24): Xaa is A or G
  MOD_RES (25), (26), (27), (28): Xaa is A or G or is absent
DEGLEXVPTGQSNITMQIMXXXXXXXXXIGEMSLEEHSQ

SEQ ID NO: 15192 - protein, 37 aa, Artificial Sequence
  Non-cyclic GFR-binding peptide
  MOD_RES (34), (36): Xaa is C or S
  MOD_RES (14), (15), (16), (17), (18): Xaa is A or G
  MOD_RES (19), (20), (21), (22): Xaa is A or G or is absent
VPTEESNITMQIMXXXXXXXXXLGEMSFLQHNKXEXR

SEQ ID NO: 15193 - protein, 34 aa, Artificial Sequence
  Non-cyclic GFR-binding peptide
  MOD_RES (14), (15), (16), (17), (18): Xaa is A or G
  MOD_RES (19), (20), (21), (22): Xaa is A or G or is absent
TQVQLRSVKVAKVXXXXXXXXXKEVQVTLEDHLA

SEQ ID NO: 15194 - protein, 40 aa, Artificial Sequence
  Non-cyclic GFR-binding peptide
  MOD_RES (1), (38), (40): Xaa is C or S
  MOD_RES (17), (18), (19), (20), (21): Xaa is A or G
  MOD_RES (22), (23), (24), (25): Xaa is A or G or is absent
XRPTQVQLRSVKVAKVXXXXXXXXXKEVQVTLEDHLAXKX

SEQ ID NO: 15195 - protein, 35 aa, Artificial Sequence
  Non-cyclic GFR-binding peptide
PTQVQLSNITVQIMEIVRKKPIFLGEMSTLEDHLA

SEQ ID NO: 15196 - protein, 36 aa, Artificial Sequence
  Non-cyclic GFR-binding peptide
  MOD_RES (16), (17), (18), (19), (20): Xaa is A or G
  MOD_RES (21), (22), (23), (24): Xaa is A or G or is absent
RPTQVQLSNITVQIMXXXXXXXXXLGEMSTLEDHLA

SEQ ID NO: 15197 - protein, 38 aa, Artificial Sequence
  Non-cyclic GFR-binding peptide
  MOD_RES (36), (38): Xaa is C or S
  MOD_RES (15), (16), (17), (18), (19): Xaa is A or G
  MOD_RES (20), (21), (22), (23): Xaa is A or G or is absent
PSRVHHSNITVQIMXXXXXXXXXLGEMSRLEEHLEXAX

SEQ ID NO: 15198 - protein, 41 aa, Artificial Sequence
  Non-cyclic GFR-binding peptide
  MOD_RES (2), (39), (41): Xaa is C or S
  MOD_RES (18), (19), (20), (21), (22): Xaa is A or G
  MOD_RES (23), (24), (25), (26): Xaa is A or G or is absent
QXRPTQVQLSNITVQIMXXXXXXXXXLGEMSTLEDHLAXKX

SEQ ID NO: 15199 - protein, 39 aa, Artificial Sequence
  Non-cyclic GFR-binding peptide
  MOD_RES (4), (4): Xaa is C or S
  MOD_RES (20), (21), (22), (23), (24): Xaa is A or G
  MOD_RES (25), (26), (27), (28): Xaa is A or G or is absent
NVQXRPTQVQLSNITVQIMXXXXXXXXXIGEMSTLEDHL

SEQ ID NO: 15200 - protein, 41 aa, Artificial Sequence
  Non-cyclic GFR-binding peptide
  MOD_RES (5), (39), (41): Xaa is C or S
EGLEXVPTEERPVQMRKIRIKPHQGQHKKATVFLQHNKXEX

SEQ ID NO: 15201 - protein, 36 aa, Artificial Sequence
  Non-cyclic GFR-binding peptide
  MOD_RES (1), (35): Xaa is C or S
  MOD_RES (15), (16), (17), (18), (19): Xaa is A or G
  MOD_RES (20), (21), (22), (23): Xaa is A or G or is absent
XVPTEERPVQMRKIXXXXXXXXXKKATVFLQHNKXE

SEQ ID NO: 15202 - protein, 32 aa, Artificial Sequence
  Non-cyclic GFR-binding peptide
VPTGQRSVKMAKVRIKPHQGQHKEVQVLEEHS

SEQ ID NO: 15203 - protein, 36 aa, Artificial Sequence
  Non-cyclic GFR-binding peptide
  MOD_RES (3), (3): Xaa is C or S
LEXVPTEESNITMQIMRIKPHQGQHLGEMSFLQHNK

SEQ ID NO: 15204 - protein, 35 aa, Artificial Sequence
  Non-cyclic GFR-binding peptide
  MOD_RES (2), (2): Xaa is C or S
EXVPTGQSNITMQIMRIKPHQGQHIGEMSLEEHSQ

SEQ ID NO: 15205 - protein, 33 aa, Artificial Sequence
  Non-cyclic GFR-binding peptide
  MOD_RES (14), (15), (16), (17), (18): Xaa is A or G
  MOD_RES (19), (20), (21), (22): Xaa is A or G or is absent
SRVHHRPVQVRKIXXXXXXXXXKKATVRLEEHL

SEQ ID NO: 15206 - protein, 35 aa, Artificial Sequence
  Non-cyclic GFR-binding peptide
  MOD_RES (3), (3): Xaa is C or S
  MOD_RES (17), (18), (19), (20), (21): Xaa is A or G
  MOD_RES (22), (23), (24), (25): Xaa is A or G or is absent
LEXVPTEESNITMQIMXXXXXXXXXLGEMSFLQHN

SEQ ID NO: 15207 - protein, 37 aa, Artificial Sequence
  Non-cyclic GFR-binding peptide
  MOD_RES (5), (5): Xaa is C or S
  MOD_RES (19), (20), (21), (22), (23): Xaa is A or G
  MOD_RES (24), (25), (26), (27): Xaa is A or G or is absent
EGLEXVPTGQSNITMQIMXXXXXXXXXIGEMSLEEHS

SEQ ID NO: 15208 - protein, 43 aa, Artificial Sequence
  Non-cyclic GFR-binding peptide
  MOD_RES (6), (40), (42): Xaa is C or S
DEGLEXVPTGQRPVQMRKIRIKPHQGQHKKATVLEEHSQXEXR

SEQ ID NO: 15209 - protein, 33 aa, Artificial Sequence
  Non-cyclic GFR-binding peptide
TQVQLSNITVQIMEIVRKKPIFLGEMSTLEDHL

SEQ ID NO: 15210 - protein, 42 aa, Artificial Sequence
  Non-cyclic GFR-binding peptide
  MOD_RES (5), (42): Xaa is C or S
SSVKXQPSRVHHSNITVQIMEYVRKKPKLIGEMSRLEEHLEX

SEQ ID NO: 15211 - protein, 40 aa, Artificial Sequence
  Non-cyclic GFR-binding peptide
  MOD_RES (5), (5): Xaa is C or S
SSVKXQPSRVHHRPVQVRKIEYVRKKPKLKKATVRLEEHL

SEQ ID NO: 15212 - protein, 38 aa, Artificial Sequence
  Non-cyclic GFR-binding peptide
  MOD_RES (1), (35), (37): Xaa is C or S
  MOD_RES (15), (16), (17), (18), (19): Xaa is A or G
  MOD_RES (20), (21), (22), (23): Xaa is A or G or is absent
XVPTEERPVQMRKIXXXXXXXXXKKATVFLQHNKXEXR

SEQ ID NO: 15213 - protein, 35 aa, Artificial Sequence
  Non-cyclic GFR-binding peptide
PSRVHHRPVQVRKIEYVRKKPKLKKATVRLEEHLE

SEQ ID NO: 15214 - protein, 36 aa, Artificial Sequence
  Non-cyclic GFR-binding peptide
  MOD_RES (2), (2): Xaa is C or S
QXRPTQVQLRSVKVAKVEIVRKKPIFKEVQVTLEDH

SEQ ID NO: 15215 - protein, 38 aa, Artificial Sequence
  Non-cyclic GFR-binding peptide
  MOD_RES (1), (35), (37): Xaa is C or S
  MOD_RES (15), (16), (17), (18), (19): Xaa is A or G
  MOD_RES (20), (21), (22), (23): Xaa is A or G or is absent
XVPTEERSVKMAKVXXXXXXXXXKEVQVFLQHNKXEXR

SEQ ID NO: 15216 - protein, 41 aa, Artificial Sequence
  Non-cyclic GFR-binding peptide
  MOD_RES (4), (41): Xaa is C or S
SVKXQPSRVHHSNITVQIMEYVRKKPKLLGEMSRLEEHLEX

SEQ ID NO: 15217 - protein, 33 aa, Artificial Sequence
  Non-cyclic GFR-binding peptide
  MOD_RES (1), (1): Xaa is C or S
  MOD_RES (15), (16), (17), (18), (19): Xaa is A or G
  MOD_RES (20), (21), (22), (23): Xaa is A or G or is absent
XVPTEESNITMQIMXXXXXXXXXLGEMSFLQHN

SEQ ID NO: 15218 - protein, 35 aa, Artificial Sequence
  Non-cyclic GFR-binding peptide
RPTQVQLSNITVQIMEIVRKKPIFIGEMSTLEDHL

SEQ ID NO: 15219 - protein, 38 aa, Artificial Sequence
  Non-cyclic GFR-binding peptide
  MOD_RES (4), (38): Xaa is C or S
  MOD_RES (18), (19), (20), (21), (22): Xaa is A or G
  MOD_RES (23), (24), (25), (26): Xaa is A or G or is absent
GLEXVPTEESNITMQIMXXXXXXXXXLGEMSFLQHNKX

SEQ ID NO: 15220 - protein, 39 aa, Artificial Sequence
  Non-cyclic GFR-binding peptide
  MOD_RES (3), (37), (39): Xaa is C or S
LEXVPTGQSNITMQIMRIKPHQGQHIGEMSLEEHSQXEX

SEQ ID NO: 15221 - protein, 33 aa, Artificial Sequence
  Non-cyclic GFR-binding peptide
PSRVHHSNITVQIMEYVRKKPKLIGEMSRLEEH

SEQ ID NO: 15222 - protein, 37 aa, Artificial Sequence
  Non-cyclic GFR-binding peptide
  MOD_RES (35), (37): Xaa is C or S
SRVHHRPVQVRKIEYVRKKPKLKKATVRLEEHLEXAX

SEQ ID NO: 15223 - protein, 39 aa, Artificial Sequence
  Non-cyclic GFR-binding peptide
  MOD_RES (1), (38): Xaa is C or S
  MOD_RES (17), (18), (19), (20), (21): Xaa is A or G
  MOD_RES (22), (23), (24), (25): Xaa is A or G or is absent
XRPTQVQLRSVKVAKVXXXXXXXXXKEVQVTLEDHLAXK

SEQ ID NO: 15224 - protein, 37 aa, Artificial Sequence
  Non-cyclic GFR-binding peptide
  MOD_RES (36), (36): Xaa is C or S
  MOD_RES (15), (16), (17), (18), (19): Xaa is A or G
  MOD_RES (20), (21), (22), (23): Xaa is A or G or is absent
PTQVQLRSVKVAKVXXXXXXXXXKEVQVTLEDHLAXK

SEQ ID NO: 15225 - protein, 39 aa, Artificial Sequence
  Non-cyclic GFR-binding peptide
  MOD_RES (2), (39): Xaa is C or S
KXQPSRVHHRPVQVRKIEYVRKKPKLKKATVRLEEHLEX

SEQ ID NO: 15226 - protein, 38 aa, Artificial Sequence
  Non-cyclic GFR-binding peptide
  MOD_RES (3), (37): Xaa is C or S
LEXVPTEESNITMQIMRIKPHQGQHLGEMSFLQHNKXE

SEQ ID NO: 15227 - protein, 37 aa, Artificial Sequence
  Non-cyclic GFR-binding peptide
  MOD_RES (35), (37): Xaa is C or S
TQVQLRSVKVAKVEIVRKKPIFKEVQVTLEDHLAXKX

SEQ ID NO: 15228 - protein, 43 aa, Artificial Sequence
  Non-cyclic GFR-binding peptide
  MOD_RES (6), (40), (42): Xaa is C or S
DEGLEXVPTGQRSVKMAKVRIKPHQGQHKEVQVLEEHSQXEXR

SEQ ID NO: 15229 - protein, 37 aa, Artificial Sequence
  Non-cyclic GFR-binding peptide
  MOD_RES (1), (1): Xaa is C or S
XQPSRVHHSNITVQIMEYVRKKPKLIGEMSRLEEHLE

SEQ ID NO: 15230 - protein, 33 aa, Artificial Sequence
  Non-cyclic GFR-binding peptide
  MOD_RES (14), (15), (16), (17), (18): Xaa is A or G
  MOD_RES (19), (20), (21), (22): Xaa is A or G or is absent
VPTEERSVKMAKVXXXXXXXXXKEVQVFLQHNK

SEQ ID NO: 15231 - protein, 37 aa, Artificial Sequence
  Non-cyclic GFR-binding peptide
  MOD_RES (1), (35), (37): Xaa is C or S
  MOD_RES (15), (16), (17), (18), (19): Xaa is A or G
  MOD_RES (20), (21), (22), (23): Xaa is A or G or is absent
XVPTEESNITMQIMXXXXXXXXXLGEMSFLQHNKXEX

SEQ ID NO: 15232 - protein, 39 aa, Artificial Sequence
  Non-cyclic GFR-binding peptide
  MOD_RES (7), (7): Xaa is C or S
  MOD_RES (21), (22), (23), (24), (25): Xaa is A or G
  MOD_RES (26), (27), (28), (29): Xaa is A or G or is absent
NDEGLEXVPTEERSVKMAKVXXXXXXXXXKEVQVFLQHN

SEQ ID NO: 15233 - protein, 38 aa, Artificial Sequence
  Non-cyclic GFR-binding peptide
  MOD_RES (1), (38): Xaa is C or S
XRPTQVQLRSVKVAKVEIVRKKPIFKEVQVTLEDHLAX

SEQ ID NO: 15234 - protein, 32 aa, Artificial Sequence
  Non-cyclic GFR-binding peptide
  MOD_RES (14), (15), (16), (17), (18): Xaa is A or G
  MOD_RES (19), (20), (21), (22): Xaa is A or G or is absent
VPTEERSVKMAKVXXXXXXXXXKEVQVFLQHN

SEQ ID NO: 15235 - protein, 43 aa, Artificial Sequence
  Non-cyclic GFR-binding peptide
  MOD_RES (5), (42): Xaa is C or S
RNVQXRPTQVQLSNITVQIMEIVRKKPIFIGEMSTLEDHLAXK

SEQ ID NO: 15236 - protein, 38 aa, Artificial Sequence
  Non-cyclic GFR-binding peptide
  MOD_RES (3), (3): Xaa is C or S
VQXRPTQVQLRSVKVAKVEIVRKKPIFKEVQVTLEDHL

SEQ ID NO: 15237 - protein, 42 aa, Artificial Sequence
  Non-cyclic GFR-binding peptide
  MOD_RES (5), (42): Xaa is C or S
  MOD_RES (21), (22), (23), (24), (25): Xaa is A or G
  MOD_RES (26), (27), (28), (29): Xaa is A or G or is absent
RNVQXRPTQVQLSNITVQIMXXXXXXXXXLGEMSTLEDHLAX

SEQ ID NO: 15238 - protein, 34 aa, Artificial Sequence
  Non-cyclic GFR-binding peptide
PTQVQLSNITVQIMEIVRKKPIFLGEMSTLEDHL

SEQ ID NO: 15239 - protein, 38 aa, Artificial Sequence
  Non-cyclic GFR-binding peptide
  MOD_RES (2), (2): Xaa is C or S
  MOD_RES (18), (19), (20), (21), (22): Xaa is A or G
  MOD_RES (23), (24), (25), (26): Xaa is A or G or is absent
KXQPSRVHHSNITVQIMXXXXXXXXXIGEMSRLEEHLE

SEQ ID NO: 15240 - protein, 35 aa, Artificial Sequence
  Non-cyclic GFR-binding peptide
  MOD_RES (1), (35): Xaa is C or S
  MOD_RES (15), (16), (17), (18), (19): Xaa is A or G
  MOD_RES (20), (21), (22), (23): Xaa is A or G or is absent
XVPTGQSNITMQIMXXXXXXXXXIGEMSLEEHSQX

SEQ ID NO: 15241 - protein, 44 aa, Artificial Sequence
  Non-cyclic GFR-binding peptide
  MOD_RES (4), (41), (43): Xaa is C or S
  MOD_RES (20), (21), (22), (23), (24): Xaa is A or G
  MOD_RES (25), (26), (27), (28): Xaa is A or G or is absent
NVQXRPTQVQLRSVKVAKVXXXXXXXXXKEVQVTLEDHLAXKXE

SEQ ID NO: 15242 - protein, 39 aa, Artificial Sequence
  Non-cyclic GFR-binding peptide
  MOD_RES (5), (5): Xaa is C or S
  MOD_RES (21), (22), (23), (24), (25): Xaa is A or G
  MOD_RES (26), (27), (28), (29): Xaa is A or G or is absent
RNVQXRPTQVQLRSVKVAKVXXXXXXXXXKEVQVTLEDH

SEQ ID NO: 15243 - protein, 40 aa, Artificial Sequence
  Non-cyclic GFR-binding peptide
  MOD_RES (7), (7): Xaa is C or S
  MOD_RES (21), (22), (23), (24), (25): Xaa is A or G
  MOD_RES (26), (27), (28), (29): Xaa is A or G or is absent
NDEGLEXVPTEERPVQMRKIXXXXXXXXXKKATVFLQHNK

SEQ ID NO: 15244 - protein, 34 aa, Artificial Sequence
  Non-cyclic GFR-binding peptide
  MOD_RES (15), (16), (17), (18), (19): Xaa is A or G
  MOD_RES (20), (21), (22), (23): Xaa is A or G or is absent
PSRVHHRPVQVRKIXXXXXXXXXKKATVRLEEHL

SEQ ID NO: 15245 - protein, 39 aa, Artificial Sequence
  Non-cyclic GFR-binding peptide
  MOD_RES (7), (7): Xaa is C or S
NDEGLEXVPTGQRSVKMAKVRIKPHQGQHKEVQVLEEHS

SEQ ID NO: 15246 - protein, 42 aa, Artificial Sequence
  Non-cyclic GFR-binding peptide
  MOD_RES (4), (41): Xaa is C or S
  MOD_RES (20), (21), (22), (23), (24): Xaa is A or G
  MOD_RES (25), (26), (27), (28): Xaa is A or G or is absent
NVQXRPTQVQLRSVKVAKVXXXXXXXXXKEVQVTLEDHLAXK

SEQ ID NO: 15247 - protein, 32 aa, Artificial Sequence
  Non-cyclic GFR-binding peptide
  MOD_RES (14), (15), (16), (17), (18): Xaa is A or G
  MOD_RES (19), (20), (21), (22): Xaa is A or G or is absent
SRVHHSNITVQIMXXXXXXXXXLGEMSRLEEH

SEQ ID NO: 15248 - protein, 40 aa, Artificial Sequence
  Non-cyclic GFR-binding peptide
  MOD_RES (5), (39): Xaa is C or S
EGLEXVPTEERPVQMRKIRIKPHQGQHKKATVFLQHNKXE

SEQ ID NO: 15249 - protein, 39 aa, Artificial Sequence
  Non-cyclic GFR-binding peptide
  MOD_RES (3), (37), (39): Xaa is C or S
LEXVPTEERPVQMRKIRIKPHQGQHKKATVFLQHNKXEX

SEQ ID NO: 15250 - protein, 37 aa, Artificial Sequence
  Non-cyclic GFR-binding peptide
  MOD_RES (36), (36): Xaa is C or S
  MOD_RES (15), (16), (17), (18), (19): Xaa is A or G
  MOD_RES (20), (21), (22), (23): Xaa is A or G or is absent
PSRVHHRPVQVRKIXXXXXXXXXKKATVRLEEHLEXA

SEQ ID NO: 15251 - protein, 37 aa, Artificial Sequence
  Non-cyclic GFR-binding peptide
  MOD_RES (5), (5): Xaa is C or S
  MOD_RES (19), (20), (21), (22), (23): Xaa is A or G
  MOD_RES (24), (25), (26), (27): Xaa is A or G or is absent
EGLEXVPTEESNITMQIMXXXXXXXXXLGEMSFLQHN

SEQ ID NO: 15252 - protein, 41 aa, Artificial Sequence
  Non-cyclic GFR-binding peptide
  MOD_RES (1), (38), (40): Xaa is C or S
  MOD_RES (17), (18), (19), (20), (21): Xaa is A or G
  MOD_RES (22), (23), (24), (25): Xaa is A or G or is absent
XRPTQVQLRSVKVAKVXXXXXXXXXKEVQVTLEDHLAXKXE

SEQ ID NO: 15253 - protein, 38 aa, Artificial Sequence
  Non-cyclic GFR-binding peptide
  MOD_RES (37), (37): Xaa is C or S
  MOD_RES (16), (17), (18), (19), (20): Xaa is A or G
  MOD_RES (21), (22), (23), (24): Xaa is A or G or is absent
RPTQVQLRSVKVAKVXXXXXXXXXKEVQVTLEDHLAXK

SEQ ID NO: 15254 - protein, 38 aa, Artificial Sequence
  Non-cyclic GFR-binding peptide
  MOD_RES (36), (38): Xaa is C or S
  MOD_RES (15), (16), (17), (18), (19): Xaa is A or G
  MOD_RES (20), (21), (22), (23): Xaa is A or G or is absent
PTQVQLRSVKVAKVXXXXXXXXXKEVQVTLEDHLAXKX

SEQ ID NO: 15255 - protein, 37 aa, Artificial Sequence
  Non-cyclic GFR-binding peptide
  MOD_RES (4), (4): Xaa is C or S
  MOD_RES (18), (19), (20), (21), (22): Xaa is A or G
  MOD_RES (23), (24), (25), (26): Xaa is A or G or is absent
GLEXVPTEERPVQMRKIXXXXXXXXXKKATVFLQHNK

SEQ ID NO: 15256 - protein, 40 aa, Artificial Sequence
  Non-cyclic GFR-binding peptide
  MOD_RES (5), (39): Xaa is C or S
EGLEXVPTEESNITMQIMRIKPHQGQHLGEMSFLQHNKXE

SEQ ID NO: 15257 - protein, 40 aa, Artificial Sequence
  Non-cyclic GFR-binding peptide
  MOD_RES (4), (4): Xaa is C or S
  MOD_RES (20), (21), (22), (23), (24): Xaa is A or G
  MOD_RES (25), (26), (27), (28): Xaa is A or G or is absent
SVKXQPSRVHHSNITVQIMXXXXXXXXXIGEMSRLEEHLE

SEQ ID NO: 15258 - protein, 39 aa, Artificial Sequence
  Non-cyclic GFR-binding peptide
  MOD_RES (3), (37), (39): Xaa is C or S
LEXVPTEERSVKMAKVRIKPHQGQHKEVQVFLQHNKXEX

SEQ ID NO: 15259 - protein, 38 aa, Artificial Sequence
  Non-cyclic GFR-binding peptide
  MOD_RES (6), (6): Xaa is C or S
DEGLEXVPTEERPVQMRKIRIKPHQGQHKKATVFLQHN

SEQ ID NO: 15260 - protein, 39 aa, Artificial Sequence
  Non-cyclic GFR-binding peptide
  MOD_RES (3), (3): Xaa is C or S
  MOD_RES (19), (20), (21), (22), (23): Xaa is A or G
  MOD_RES (24), (25), (26), (27): Xaa is A or G or is absent
VKXQPSRVHHSNITVQIMXXXXXXXXXLGEMSRLEEHLE

SEQ ID NO: 15261 - protein, 43 aa, Artificial Sequence
  Non-cyclic GFR-binding peptide
  MOD_RES (6), (40), (42): Xaa is C or S
  MOD_RES (20), (21), (22), (23), (24): Xaa is A or G
  MOD_RES (25), (26), (27), (28): Xaa is A or G or is absent
DEGLEXVPTGQSNITMQIMXXXXXXXXXIGEMSLEEHSQXEXR

SEQ ID NO: 15262 - protein, 41 aa, Artificial Sequence
  Non-cyclic GFR-binding peptide
  MOD_RES (6), (40): Xaa is C or S
DEGLEXVPTGQRPVQMRKIRIKPHQGQHKKATVLEEHSQXE

SEQ ID NO: 15263 - protein, 34 aa, Artificial Sequence
  Non-cyclic GFR-binding peptide
  MOD_RES (16), (17), (18), (19), (20): Xaa is A or G
  MOD_RES (21), (22), (23), (24): Xaa is A or G or is absent
QPSRVHHRPVQVRKIXXXXXXXXXKKATVRLEEH

SEQ ID NO: 15264 - protein, 41 aa, Artificial Sequence
  Non-cyclic GFR-binding peptide
  MOD_RES (1), (38), (40): Xaa is C or S
  MOD_RES (17), (18), (19), (20), (21): Xaa is A or G
  MOD_RES (22), (23), (24), (25): Xaa is A or G or is absent
XQPSRVHHRPVQVRKIXXXXXXXXXKKATVRLEEHLEXAXA

SEQ ID NO: 15265 - protein, 36 aa, Artificial Sequence
  Non-cyclic GFR-binding peptide
  MOD_RES (34), (36): Xaa is C or S
VPTGQRSVKMAKVRIKPHQGQHKEVQVLEEHSQXEX

SEQ ID NO: 15266 - protein, 40 aa, Artificial Sequence
  Non-cyclic GFR-binding peptide
  MOD_RES (2), (39): Xaa is C or S
  MOD_RES (18), (19), (20), (21), (22): Xaa is A or G
  MOD_RES (23), (24), (25), (26): Xaa is A or G or is absent
QXRPTQVQLSNITVQIMXXXXXXXXXIGEMSTLEDHLAXK

SEQ ID NO: 15267 - protein, 40 aa, Artificial Sequence
  Non-cyclic GFR-binding peptide
  MOD_RES (3), (40): Xaa is C or S
  MOD_RES (19), (20), (21), (22), (23): Xaa is A or G
  MOD_RES (24), (25), (26), (27): Xaa is A or G or is absent
VKXQPSRVHHRPVQVRKIXXXXXXXXXKKATVRLEEHLEX

SEQ ID NO: 15268 - protein, 39 aa, Artificial Sequence
  Non-cyclic GFR-binding peptide
  MOD_RES (4), (4): Xaa is C or S
  MOD_RES (20), (21), (22), (23), (24): Xaa is A or G
  MOD_RES (25), (26), (27), (28): Xaa is A or G or is absent
SVKXQPSRVHHRPVQVRKIXXXXXXXXXKKATVRLEEHL

SEQ ID NO: 15269 - protein, 32 aa, Artificial Sequence
  Non-cyclic GFR-binding peptide
  MOD_RES (14), (15), (16), (17), (18): Xaa is A or G
  MOD_RES (19), (20), (21), (22): Xaa is A or G or is absent
TQVQLRSVKVAKVXXXXXXXXXKEVQVTLEDH

SEQ ID NO: 15270 - protein, 37 aa, Artificial Sequence
  Non-cyclic GFR-binding peptide
  MOD_RES (2), (2): Xaa is C or S
QXRPTQVQLSNITVQIMEIVRKKPIFIGEMSTLEDHL

SEQ ID NO: 15271 - protein, 40 aa, Artificial Sequence
  Non-cyclic GFR-binding peptide
  MOD_RES (4), (4): Xaa is C or S
  MOD_RES (20), (21), (22), (23), (24): Xaa is A or G
  MOD_RES (25), (26), (27), (28): Xaa is A or G or is absent
NVQXRPTQVQLRSVKVAKVXXXXXXXXXKEVQVTLEDHLA

SEQ ID NO: 15272 - protein, 40 aa, Artificial Sequence
  Non-cyclic GFR-binding peptide
  MOD_RES (4), (38), (40): Xaa is C or S
  MOD_RES (18), (19), (20), (21), (22): Xaa is A or G
  MOD_RES (23), (24), (25), (26): Xaa is A or G or is absent
GLEXVPTGQRSVKMAKVXXXXXXXXXKEVQVLEEHSQXEX

SEQ ID NO: 15273 - protein, 38 aa, Artificial Sequence
  Non-cyclic GFR-binding peptide
  MOD_RES (2), (2): Xaa is C or S
QXRPTQVQLSNITVQIMEIVRKKPIFLGEMSTLEDHLA

SEQ ID NO: 15274 - protein, 42 aa, Artificial Sequence
  Non-cyclic GFR-binding peptide
  MOD_RES (4), (41): Xaa is C or S
NVQXRPTQVQLRSVKVAKVEIVRKKPIFKEVQVTLEDHLAXK

SEQ ID NO: 15275 - protein, 40 aa, Artificial Sequence
  Non-cyclic GFR-binding peptide
  MOD_RES (5), (39): Xaa is C or S
EGLEXVPTEERSVKMAKVRIKPHQGQHKEVQVFLQHNKXE

SEQ ID NO: 15276 - protein, 36 aa, Artificial Sequence
  Non-cyclic GFR-binding peptide
  MOD_RES (36), (36): Xaa is C or S
PSRVHHSNITVQIMEYVRKKPKLLGEMSRLEEHLEX

SEQ ID NO: 15277 - protein, 42 aa, Artificial Sequence
  Non-cyclic GFR-binding peptide
  MOD_RES (2), (39), (41): Xaa is C or S
QXRPTQVQLRSVKVAKVEIVRKKPIFKEVQVTLEDHLAXKXE

SEQ ID NO: 15278 - protein, 40 aa, Artificial Sequence
  Non-cyclic GFR-binding peptide
  MOD_RES (6), (40): Xaa is C or S
  MOD_RES (20), (21), (22), (23), (24): Xaa is A or G
  MOD_RES (25), (26), (27), (28): Xaa is A or G or is absent
DEGLEXVPTGQSNITMQIMXXXXXXXXXIGEMSLEEHSQX

SEQ ID NO: 15279 - protein, 34 aa, Artificial Sequence
  Non-cyclic GFR-binding peptide
  MOD_RES (1), (1): Xaa is C or S
XVPTGQRPVQMRKIRIKPHQGQHKKATVLEEHSQ

SEQ ID NO: 15280 - protein, 39 aa, Artificial Sequence
  Non-cyclic GFR-binding peptide
  MOD_RES (36), (38): Xaa is C or S
  MOD_RES (15), (16), (17), (18), (19): Xaa is A or G
  MOD_RES (20), (21), (22), (23): Xaa is A or G or is absent
PSRVHHRPVQVRKIXXXXXXXXXKKATVRLEEHLEXAXA

SEQ ID NO: 15281 - protein, 36 aa, Artificial Sequence
  Non-cyclic GFR-binding peptide
  MOD_RES (16), (17), (18), (19), (20): Xaa is A or G
  MOD_RES (21), (22), (23), (24): Xaa is A or G or is absent
QPSRVHHSNITVQIMXXXXXXXXXLGEMSRLEEHLE

SEQ ID NO: 15282 - protein, 39 aa, Artificial Sequence
  Non-cyclic GFR-binding peptide
  MOD_RES (5), (39): Xaa is C or S
  MOD_RES (19), (20), (21), (22), (23): Xaa is A or G
  MOD_RES (24), (25), (26), (27): Xaa is A or G or is absent
EGLEXVPTEESNITMQIMXXXXXXXXXLGEMSFLQHNKX

SEQ ID NO: 15283 - protein, 44 aa, Artificial Sequence
  Non-cyclic GFR-binding peptide
  MOD_RES (5), (42), (44): Xaa is C or S
  MOD_RES (21), (22), (23), (24), (25): Xaa is A or G
  MOD_RES (26), (27), (28), (29): Xaa is A or G or is absent
RNVQXRPTQVQLSNITVQIMXXXXXXXXXIGEMSTLEDHLAXKX

SEQ ID NO: 15284 - protein, 44 aa, Artificial Sequence
  Non-cyclic GFR-binding peptide
  MOD_RES (5), (42), (44): Xaa is C or S
SSVKXQPSRVHHRPVQVRKIEYVRKKPKLKKATVRLEEHLEXAX

SEQ ID NO: 15285 - protein, 37 aa, Artificial Sequence
  Non-cyclic GFR-binding peptide
  MOD_RES (4), (4): Xaa is C or S
  MOD_RES (18), (19), (20), (21), (22): Xaa is A or G
  MOD_RES (23), (24), (25), (26): Xaa is A or G or is absent
GLEXVPTGQSNITMQIMXXXXXXXXXIGEMSLEEHSQ

SEQ ID NO: 15286 - protein, 41 aa, Artificial Sequence
  Non-cyclic GFR-binding peptide
  MOD_RES (5), (5): Xaa is C or S
SSVKXQPSRVHHSNITVQIMEYVRKKPKLIGEMSRLEEHLE

SEQ ID NO: 15287 - protein, 34 aa, Artificial Sequence
  Non-cyclic GFR-binding peptide
  MOD_RES (2), (2): Xaa is C or S
EXVPTEESNITMQIMRIKPHQGQHLGEMSFLQHN

SEQ ID NO: 15288 - protein, 37 aa, Artificial Sequence
  Non-cyclic GFR-binding peptide
  MOD_RES (2), (2): Xaa is C or S
  MOD_RES (18), (19), (20), (21), (22): Xaa is A or G
  MOD_RES (23), (24), (25), (26): Xaa is A or G or is absent
KXQPSRVHHSNITVQIMXXXXXXXXXIGEMSRLEEHL

SEQ ID NO: 15289 - protein, 39 aa, Artificial Sequence
  Non-cyclic GFR-binding peptide
  MOD_RES (5), (5): Xaa is C or S
SSVKXQPSRVHHRPVQVRKIEYVRKKPKLKKATVRLEEH

SEQ ID NO: 15290 - protein, 42 aa, Artificial Sequence
  Non-cyclic GFR-binding peptide
  MOD_RES (5), (42): Xaa is C or S
RNVQXRPTQVQLSNITVQIMEIVRKKPIFLGEMSTLEDHLAX

SEQ ID NO: 15291 - protein, 36 aa, Artificial Sequence
  Non-cyclic GFR-binding peptide
  MOD_RES (34), (36): Xaa is C or S
  MOD_RES (14), (15), (16), (17), (18): Xaa is A or G
  MOD_RES (19), (20), (21), (22): Xaa is A or G or is absent
VPTEERPVQMRKIXXXXXXXXXKKATVFLQHNKXEX

SEQ ID NO: 15292 - protein, 38 aa, Artificial Sequence
  Non-cyclic GFR-binding peptide
  MOD_RES (5), (5): Xaa is C or S
  MOD_RES (19), (20), (21), (22), (23): Xaa is A or G
  MOD_RES (24), (25), (26), (27): Xaa is A or G or is absent
EGLEXVPTGQRSVKMAKVXXXXXXXXXKEVQVLEEHSQ

SEQ ID NO: 15293 - protein, 39 aa, Artificial Sequence
  Non-cyclic GFR-binding peptide
  MOD_RES (2), (39): Xaa is C or S
KXQPSRVHHSNITVQIMEYVRKKPKLLGEMSRLEEHLEX

SEQ ID NO: 15294 - protein, 43 aa, Artificial Sequence
  Non-cyclic GFR-binding peptide
  MOD_RES (4), (41), (43): Xaa is C or S
SVKXQPSRVHHRPVQVRKIEYVRKKPKLKKATVRLEEHLEXAX

SEQ ID NO: 15295 - protein, 41 aa, Artificial Sequence
  Non-cyclic GFR-binding peptide
  MOD_RES (2), (39), (41): Xaa is C or S
  MOD_RES (18), (19), (20), (21), (22): Xaa is A or G
  MOD_RES (23), (24), (25), (26): Xaa is A or G or is absent
KXQPSRVHHRPVQVRKIXXXXXXXXXKKATVRLEEHLEXAX

SEQ ID NO: 15296 - protein, 34 aa, Artificial Sequence
  Non-cyclic GFR-binding peptide
  MOD_RES (34), (34): Xaa is C or S
VPTGQRPVQMRKIRIKPHQGQHKKATVLEEHSQX

SEQ ID NO: 15297 - protein, 41 aa, Artificial Sequence
  Non-cyclic GFR-binding peptide
  MOD_RES (6), (40): Xaa is C or S
  MOD_RES (20), (21), (22), (23), (24): Xaa is A or G
  MOD_RES (25), (26), (27), (28): Xaa is A or G or is absent
DEGLEXVPTEERSVKMAKVXXXXXXXXXKEVQVFLQHNKXE

SEQ ID NO: 15298 - protein, 43 aa, Artificial Sequence
  Non-cyclic GFR-binding peptide
  MOD_RES (7), (41), (43): Xaa is C or S
  MOD_RES (21), (22), (23), (24), (25): Xaa is A or G
  MOD_RES (26), (27), (28), (29): Xaa is A or G or is absent
NDEGLEXVPTGQSNITMQIMXXXXXXXXXIGEMSLEEHSQXEX

SEQ ID NO: 15299 - protein, 41 aa, Artificial Sequence
  Non-cyclic GFR-binding peptide
  MOD_RES (5), (39), (41): Xaa is C or S
EGLEXVPTEERSVKMAKVRIKPHQGQHKEVQVFLQHNKXEX

SEQ ID NO: 15300 - protein, 39 aa, Artificial Sequence
  Non-cyclic GFR-binding peptide
  MOD_RES (6), (6): Xaa is C or S
DEGLEXVPTGQRPVQMRKIRIKPHQGQHKKATVLEEHSQ

SEQ ID NO: 15301 - protein, 39 aa, Artificial Sequence
  Non-cyclic GFR-binding peptide
  MOD_RES (6), (6): Xaa is C or S
DEGLEXVPTEESNITMQIMRIKPHQGQHLGEMSFLQHNK

SEQ ID NO: 15302 - protein, 37 aa, Artificial Sequence
  Non-cyclic GFR-binding peptide
  MOD_RES (3), (3): Xaa is C or S
  MOD_RES (19), (20), (21), (22), (23): Xaa is A or G
  MOD_RES (24), (25), (26), (27): Xaa is A or G or is absent
VKXQPSRVHHRPVQVRKIXXXXXXXXXKKATVRLEEH

SEQ ID NO: 15303 - protein, 39 aa, Artificial Sequence
  Non-cyclic GFR-binding peptide
  MOD_RES (1), (38): Xaa is C or S
  MOD_RES (17), (18), (19), (20), (21): Xaa is A or G
  MOD_RES (22), (23), (24), (25): Xaa is A or G or is absent
XQPSRVHHRPVQVRKIXXXXXXXXXKKATVRLEEHLEXA

SEQ ID NO: 15304 - protein, 40 aa, Artificial Sequence
  Non-cyclic GFR-binding peptide
  MOD_RES (6), (40): Xaa is C or S
  MOD_RES (20), (21), (22), (23), (24): Xaa is A or G
  MOD_RES (25), (26), (27), (28): Xaa is A or G or is absent
DEGLEXVPTEERSVKMAKVXXXXXXXXXKEVQVFLQHNKX

SEQ ID NO: 15305 - protein, 37 aa, Artificial Sequence
  Non-cyclic GFR-binding peptide
  MOD_RES (2), (2): Xaa is C or S
KXQPSRVHHSNITVQIMEYVRKKPKLLGEMSRLEEHL

SEQ ID NO: 15306 - protein, 41 aa, Artificial Sequence
  Non-cyclic GFR-binding peptide
  MOD_RES (7), (41): Xaa is C or S
NDEGLEXVPTGQRSVKMAKVRIKPHQGQHKEVQVLEEHSQX

SEQ ID NO: 15307 - protein, 44 aa, Artificial Sequence
  Non-cyclic GFR-binding peptide
  MOD_RES (5), (42), (44): Xaa is C or S
RNVQXRPTQVQLRSVKVAKVEIVRKKPIFKEVQVTLEDHLAXKX

SEQ ID NO: 15308 - protein, 42 aa, Artificial Sequence
  Non-cyclic GFR-binding peptide
  MOD_RES (5), (42): Xaa is C or S
  MOD_RES (21), (22), (23), (24), (25): Xaa is A or G
  MOD_RES (26), (27), (28), (29): Xaa is A or G or is absent
RNVQXRPTQVQLRSVKVAKVXXXXXXXXXKEVQVTLEDHLAX

SEQ ID NO: 15309 - protein, 38 aa, Artificial Sequence
  Non-cyclic GFR-binding peptide
  MOD_RES (3), (3): Xaa is C or S
VKXQPSRVHHSNITVQIMEYVRKKPKLIGEMSRLEEHL

SEQ ID NO: 15310 - protein, 38 aa, Artificial Sequence
  Non-cyclic GFR-binding peptide
  MOD_RES (35), (37): Xaa is C or S
  MOD_RES (14), (15), (16), (17), (18): Xaa is A or G
  MOD_RES (19), (20), (21), (22): Xaa is A or G or is absent
SRVHHRPVQVRKIXXXXXXXXXKKATVRLEEHLEXAXA

SEQ ID NO: 15311 - protein, 40 aa, Artificial Sequence
  Non-cyclic GFR-binding peptide
  MOD_RES (3), (40): Xaa is C or S
  MOD_RES (19), (20), (21), (22), (23): Xaa is A or G
  MOD_RES (24), (25), (26), (27): Xaa is A or G or is absent
VKXQPSRVHHSNITVQIMXXXXXXXXXLGEMSRLEEHLEX

SEQ ID NO: 15312 - protein, 34 aa, Artificial Sequence
  Non-cyclic GFR-binding peptide
SRVHHSNITVQIMEYVRKKPKLIGEMSRLEEHLE

SEQ ID NO: 15313 - protein, 35 aa, Artificial Sequence
  Non-cyclic GFR-binding peptide
  MOD_RES (2), (2): Xaa is C or S
  MOD_RES (16), (17), (18), (19), (20): Xaa is A or G
  MOD_RES (21), (22), (23), (24): Xaa is A or G or is absent
EXVPTGQRSVKMAKVXXXXXXXXXKEVQVLEEHSQ

SEQ ID NO: 15314 - protein, 37 aa, Artificial Sequence
  Non-cyclic GFR-binding peptide
  MOD_RES (34), (36): Xaa is C or S
VPTEERPVQMRKIRIKPHQGQHKKATVFLQHNKXEXR

SEQ ID NO: 15315 - protein, 37 aa, Artificial Sequence
  Non-cyclic GFR-binding peptide
  MOD_RES (34), (36): Xaa is C or S
  MOD_RES (14), (15), (16), (17), (18): Xaa is A or G
  MOD_RES (19), (20), (21), (22): Xaa is A or G or is absent
VPTEERSVKMAKVXXXXXXXXXKEVQVFLQHNKXEXR

SEQ ID NO: 15316 - protein, 35 aa, Artificial Sequence
  Non-cyclic GFR-binding peptide
  MOD_RES (1), (1): Xaa is C or S
  MOD_RES (17), (18), (19), (20), (21): Xaa is A or G
  MOD_RES (22), (23), (24), (25): Xaa is A or G or is absent
XQPSRVHHRPVQVRKIXXXXXXXXXKKATVRLEEH

SEQ ID NO: 15317 - protein, 36 aa, Artificial Sequence
  Non-cyclic GFR-binding peptide
  MOD_RES (35), (35): Xaa is C or S
  MOD_RES (14), (15), (16), (17), (18): Xaa is A or G
  MOD_RES (19), (20), (21), (22): Xaa is A or G or is absent
TQVQLSNITVQIMXXXXXXXXXIGEMSTLEDHLAXK

SEQ ID NO: 15318 - protein, 33 aa, Artificial Sequence
  Non-cyclic GFR-binding peptide
PTQVQLRSVKVAKVEIVRKKPIFKEVQVTLEDH

SEQ ID NO: 15319 - protein, 38 aa, Artificial Sequence
  Non-cyclic GFR-binding peptide
  MOD_RES (1), (38): Xaa is C or S
  MOD_RES (17), (18), (19), (20), (21): Xaa is A or G
  MOD_RES (22), (23), (24), (25): Xaa is A or G or is absent
XRPTQVQLRSVKVAKVXXXXXXXXXKEVQVTLEDHLAX

SEQ ID NO: 15320 - protein, 36 aa, Artificial Sequence
  Non-cyclic GFR-binding peptide
  MOD_RES (4), (4): Xaa is C or S
  MOD_RES (18), (19), (20), (21), (22): Xaa is A or G
  MOD_RES (23), (24), (25), (26): Xaa is A or G or is absent
GLEXVPTEERPVQMRKIXXXXXXXXXKKATVFLQHN

SEQ ID NO: 15321 - protein, 40 aa, Artificial Sequence
  Non-cyclic GFR-binding peptide
  MOD_RES (37), (39): Xaa is C or S
RPTQVQLSNITVQIMEIVRKKPIFIGEMSTLEDHLAXKXE

SEQ ID NO: 15322 - protein, 42 aa, Artificial Sequence
  Non-cyclic GFR-binding peptide
  MOD_RES (2), (39), (41): Xaa is C or S
  MOD_RES (18), (19), (20), (21), (22): Xaa is A or G
  MOD_RES (23), (24), (25), (26): Xaa is A or G or is absent
KXQPSRVHHSNITVQIMXXXXXXXXXLGEMSRLEEHLEXAXA

SEQ ID NO: 15323 - protein, 45 aa, Artificial Sequence
  Non-cyclic GFR-binding peptide
  MOD_RES (5), (42), (44): Xaa is C or S
SSVKXQPSRVHHSNITVQIMEYVRKKPKLLGEMSRLEEHLEXAXA

SEQ ID NO: 15324 - protein, 34 aa, Artificial Sequence
  Non-cyclic GFR-binding peptide
  MOD_RES (34), (34): Xaa is C or S
VPTGQRSVKMAKVRIKPHQGQHKEVQVLEEHSQX

SEQ ID NO: 15325 - protein, 41 aa, Artificial Sequence
  Non-cyclic GFR-binding peptide
  MOD_RES (4), (38), (40): Xaa is C or S
  MOD_RES (18), (19), (20), (21), (22): Xaa is A or G
  MOD_RES (23), (24), (25), (26): Xaa is A or G or is absent
GLEXVPTEERSVKMAKVXXXXXXXXXKEVQVFLQHNKXEXR

SEQ ID NO: 15326 - protein, 38 aa, Artificial Sequence
  Non-cyclic GFR-binding peptide
  MOD_RES (3), (37): Xaa is C or S
LEXVPTGQSNITMQIMRIKPHQGQHIGEMSLEEHSQXE

SEQ ID NO: 15327 - protein, 38 aa, Artificial Sequence
  Non-cyclic GFR-binding peptide
  MOD_RES (1), (35), (37): Xaa is C or S
XVPTEERSVKMAKVRIKPHQGQHKEVQVFLQHNKXEXR

SEQ ID NO: 15328 - protein, 45 aa, Artificial Sequence
  Non-cyclic GFR-binding peptide
  MOD_RES (5), (42), (44): Xaa is C or S
SSVKXQPSRVHHRPVQVRKIEYVRKKPKLKKATVRLEEHLEXAXA

SEQ ID NO: 15329 - protein, 40 aa, Artificial Sequence
  Non-cyclic GFR-binding peptide
  MOD_RES (37), (39): Xaa is C or S
  MOD_RES (16), (17), (18), (19), (20): Xaa is A or G
  MOD_RES (21), (22), (23), (24): Xaa is A or G or is absent
QPSRVHHSNITVQIMXXXXXXXXXIGEMSRLEEHLEXAXA

SEQ ID NO: 15330 - protein, 35 aa, Artificial Sequence
  Non-cyclic GFR-binding peptide
  MOD_RES (1), (1): Xaa is C or S
XRPTQVQLSNITVQIMEIVRKKPIFLGEMSTLEDH

SEQ ID NO: 15331 - protein, 40 aa, Artificial Sequence
  Non-cyclic GFR-binding peptide
  MOD_RES (4), (38), (40): Xaa is C or S
GLEXVPTEESNITMQIMRIKPHQGQHLGEMSFLQHNKXEX

SEQ ID NO: 15332 - protein, 38 aa, Artificial Sequence
  Non-cyclic GFR-binding peptide
  MOD_RES (3), (37): Xaa is C or S
LEXVPTEERSVKMAKVRIKPHQGQHKEVQVFLQHNKXE

SEQ ID NO: 15333 - protein, 43 aa, Artificial Sequence
  Non-cyclic GFR-binding peptide
  MOD_RES (7), (41), (43): Xaa is C or S
  MOD_RES (21), (22), (23), (24), (25): Xaa is A or G
  MOD_RES (26), (27), (28), (29): Xaa is A or G or is absent
NDEGLEXVPTEERPVQMRKIXXXXXXXXXKKATVFLQHNKXEX

SEQ ID NO: 15334 - protein, 33 aa, Artificial Sequence
  Non-cyclic GFR-binding peptide
  MOD_RES (1), (1): Xaa is C or S
  MOD_RES (15), (16), (17), (18), (19): Xaa is A or G
  MOD_RES (20), (21), (22), (23): Xaa is A or G or is absent
XVPTGQSNITMQIMXXXXXXXXXIGEMSLEEHS

SEQ ID NO: 15335 - protein, 33 aa, Artificial Sequence
  Non-cyclic GFR-binding peptide
PTQVQLSNITVQIMEIVRKKPIFLGEMSTLEDH

SEQ ID NO: 15336 - protein, 39 aa, Artificial Sequence
  Non-cyclic GFR-binding peptide
  MOD_RES (3), (3): Xaa is C or S
  MOD_RES (19), (20), (21), (22), (23): Xaa is A or G
  MOD_RES (24), (25), (26), (27): Xaa is A or G or is absent
VQXRPTQVQLRSVKVAKVXXXXXXXXXKEVQVTLEDHLA

SEQ ID NO: 15337 - protein, 38 aa, Artificial Sequence
  Non-cyclic GFR-binding peptide
  MOD_RES (3), (3): Xaa is C or S
  MOD_RES (19), (20), (21), (22), (23): Xaa is A or G
  MOD_RES (24), (25), (26), (27): Xaa is A or G or is absent
VQXRPTQVQLSNITVQIMXXXXXXXXXLGEMSTLEDHL

SEQ ID NO: 15338 - protein, 39 aa, Artificial Sequence
  Non-cyclic GFR-binding peptide
  MOD_RES (2), (36), (38): Xaa is C or S
EXVPTEERSVKMAKVRIKPHQGQHKEVQVFLQHNKXEXR

SEQ ID NO: 15339 - protein, 40 aa, Artificial Sequence
  Non-cyclic GFR-binding peptide
  MOD_RES (2), (39): Xaa is C or S
KXQPSRVHHSNITVQIMEYVRKKPKLIGEMSRLEEHLEXA

SEQ ID NO: 15340 - protein, 36 aa, Artificial Sequence
  Non-cyclic GFR-binding peptide
  MOD_RES (34), (36): Xaa is C or S
VPTGQRPVQMRKIRIKPHQGQHKKATVLEEHSQXEX

SEQ ID NO: 15341 - protein, 35 aa, Artificial Sequence
  Non-cyclic GFR-binding peptide
PSRVHHSNITVQIMEYVRKKPKLLGEMSRLEEHLE

SEQ ID NO: 15342 - protein, 38 aa, Artificial Sequence
  Non-cyclic GFR-binding peptide
  MOD_RES (4), (4): Xaa is C or S
  MOD_RES (20), (21), (22), (23), (24): Xaa is A or G
  MOD_RES (25), (26), (27), (28): Xaa is A or G or is absent
NVQXRPTQVQLRSVKVAKVXXXXXXXXXKEVQVTLEDH

SEQ ID NO: 15343 - protein, 36 aa, Artificial Sequence
  Non-cyclic GFR-binding peptide
  MOD_RES (2), (2): Xaa is C or S
  MOD_RES (18), (19), (20), (21), (22): Xaa is A or G
  MOD_RES (23), (24), (25), (26): Xaa is A or G or is absent
QXRPTQVQLSNITVQIMXXXXXXXXXLGEMSTLEDH

SEQ ID NO: 15344 - protein, 39 aa, Artificial Sequence
  Non-cyclic GFR-binding peptide
  MOD_RES (3), (3): Xaa is C or S
  MOD_RES (19), (20), (21), (22), (23): Xaa is A or G
  MOD_RES (24), (25), (26), (27): Xaa is A or G or is absent
VKXQPSRVHHRPVQVRKIXXXXXXXXXKKATVRLEEHLE

SEQ ID NO: 15345 - protein, 39 aa, Artificial Sequence
  Non-cyclic GFR-binding peptide
  MOD_RES (5), (39): Xaa is C or S
  MOD_RES (19), (20), (21), (22), (23): Xaa is A or G
  MOD_RES (24), (25), (26), (27): Xaa is A or G or is absent
EGLEXVPTGQRPVQMRKIXXXXXXXXXKKATVLEEHSQX

SEQ ID NO: 15346 - protein, 44 aa, Artificial Sequence
  Non-cyclic GFR-binding peptide
  MOD_RES (7), (41), (43): Xaa is C or S
  MOD_RES (21), (22), (23), (24), (25): Xaa is A or G
  MOD_RES (26), (27), (28), (29): Xaa is A or G or is absent
NDEGLEXVPTGQRSVKMAKVXXXXXXXXXKEVQVLEEHSQXEXR

SEQ ID NO: 15347 - protein, 42 aa, Artificial Sequence
  Non-cyclic GFR-binding peptide
  MOD_RES (7), (41): Xaa is C or S
  MOD_RES (21), (22), (23), (24), (25): Xaa is A or G
  MOD_RES (26), (27), (28), (29): Xaa is A or G or is absent
NDEGLEXVPTGQRSVKMAKVXXXXXXXXXKEVQVLEEHSQXE

SEQ ID NO: 15348 - protein, 32 aa, Artificial Sequence
  Non-cyclic GFR-binding peptide
VPTGQRPVQMRKIRIKPHQGQHKKATVLEEHS

SEQ ID NO: 15349 - protein, 44 aa, Artificial Sequence
  Non-cyclic GFR-binding peptide
  MOD_RES (4), (41), (43): Xaa is C or S
SVKXQPSRVHHRPVQVRKIEYVRKKPKLKKATVRLEEHLEXAXA

SEQ ID NO: 15350 - protein, 36 aa, Artificial Sequence
  Non-cyclic GFR-binding peptide
  MOD_RES (2), (36): Xaa is C or S
  MOD_RES (16), (17), (18), (19), (20): Xaa is A or G
  MOD_RES (21), (22), (23), (24): Xaa is A or G or is absent
EXVPTEESNITMQIMXXXXXXXXXLGEMSFLQHNKX

SEQ ID NO: 15351 - protein, 38 aa, Artificial Sequence
  Non-cyclic GFR-binding peptide
  MOD_RES (2), (36), (38): Xaa is C or S
  MOD_RES (16), (17), (18), (19), (20): Xaa is A or G
  MOD_RES (21), (22), (23), (24): Xaa is A or G or is absent
EXVPTEESNITMQIMXXXXXXXXXLGEMSFLQHNKXEX

SEQ ID NO: 15352 - protein, 36 aa, Artificial Sequence
  Non-cyclic GFR-binding peptide
  MOD_RES (16), (17), (18), (19), (20): Xaa is A or G
  MOD_RES (21), (22), (23), (24): Xaa is A or G or is absent
QPSRVHHRPVQVRKIXXXXXXXXXKKATVRLEEHLE

SEQ ID NO: 15353 - protein, 33 aa, Artificial Sequence
  Non-cyclic GFR-binding peptide
  MOD_RES (15), (16), (17), (18), (19): Xaa is A or G
  MOD_RES (20), (21), (22), (23): Xaa is A or G or is absent
PTQVQLSNITVQIMXXXXXXXXXLGEMSTLEDH

SEQ ID NO: 15354 - protein, 38 aa, Artificial Sequence
  Non-cyclic GFR-binding peptide
  MOD_RES (1), (38): Xaa is C or S
XRPTQVQLSNITVQIMEIVRKKPIFLGEMSTLEDHLAX

SEQ ID NO: 15355 - protein, 42 aa, Artificial Sequence
  Non-cyclic GFR-binding peptide
  MOD_RES (3), (40), (42): Xaa is C or S
VQXRPTQVQLSNITVQIMEIVRKKPIFLGEMSTLEDHLAXKX

SEQ ID NO: 15356 - protein, 40 aa, Artificial Sequence
  Non-cyclic GFR-binding peptide
  MOD_RES (6), (40): Xaa is C or S
DEGLEXVPTEESNITMQIMRIKPHQGQHLGEMSFLQHNKX

SEQ ID NO: 15357 - protein, 37 aa, Artificial Sequence
  Non-cyclic GFR-binding peptide
  MOD_RES (2), (36): Xaa is C or S
  MOD_RES (16), (17), (18), (19), (20): Xaa is A or G
  MOD_RES (21), (22), (23), (24): Xaa is A or G or is absent
EXVPTGQRSVKMAKVXXXXXXXXXKEVQVLEEHSQXE

SEQ ID NO: 15358 - protein, 42 aa, Artificial Sequence
  Non-cyclic GFR-binding peptide
  MOD_RES (2), (39), (41): Xaa is C or S
  MOD_RES (18), (19), (20), (21), (22): Xaa is A or G
  MOD_RES (23), (24), (25), (26): Xaa is A or G or is absent
KXQPSRVHHRPVQVRKIXXXXXXXXXKKATVRLEEHLEXAXA

SEQ ID NO: 15359 - protein, 37 aa, Artificial Sequence
  Non-cyclic GFR-binding peptide
  MOD_RES (3), (37): Xaa is C or S
LEXVPTEERSVKMAKVRIKPHQGQHKEVQVFLQHNKX

SEQ ID NO: 15360 - protein, 40 aa, Artificial Sequence
  Non-cyclic GFR-binding peptide
  MOD_RES (3), (37), (39): Xaa is C or S
  MOD_RES (17), (18), (19), (20), (21): Xaa is A or G
  MOD_RES (22), (23), (24), (25): Xaa is A or G or is absent
LEXVPTGQRSVKMAKVXXXXXXXXXKEVQVLEEHSQXEXR

SEQ ID NO: 15361 - protein, 37 aa, Artificial Sequence
  Non-cyclic GFR-binding peptide
  MOD_RES (5), (5): Xaa is C or S
  MOD_RES (19), (20), (21), (22), (23): Xaa is A or G
  MOD_RES (24), (25), (26), (27): Xaa is A or G or is absent
EGLEXVPTEERSVKMAKVXXXXXXXXXKEVQVFLQHN

SEQ ID NO: 15362 - protein, 41 aa, Artificial Sequence
  Non-cyclic GFR-binding peptide
  MOD_RES (4), (41): Xaa is C or S
NVQXRPTQVQLRSVKVAKVEIVRKKPIFKEVQVTLEDHLAX

SEQ ID NO: 15363 - protein, 39 aa, Artificial Sequence
  Non-cyclic GFR-binding peptide
  MOD_RES (7), (7): Xaa is C or S
  MOD_RES (21), (22), (23), (24), (25): Xaa is A or G
  MOD_RES (26), (27), (28), (29): Xaa is A or G or is absent
NDEGLEXVPTEERPVQMRKIXXXXXXXXXKKATVFLQHN

SEQ ID NO: 15364 - protein, 40 aa, Artificial Sequence
  Non-cyclic GFR-binding peptide
  MOD_RES (4), (38), (40): Xaa is C or S
GLEXVPTEERSVKMAKVRIKPHQGQHKEVQVFLQHNKXEX

SEQ ID NO: 15365 - protein, 39 aa, Artificial Sequence
  Non-cyclic GFR-binding peptide
  MOD_RES (5), (39): Xaa is C or S
  MOD_RES (19), (20), (21), (22), (23): Xaa is A or G
  MOD_RES (24), (25), (26), (27): Xaa is A or G or is absent
EGLEXVPTGQRSVKMAKVXXXXXXXXXKEVQVLEEHSQX

SEQ ID NO: 15366 - protein, 43 aa, Artificial Sequence
  Non-cyclic GFR-binding peptide
  MOD_RES (6), (40), (42): Xaa is C or S
  MOD_RES (20), (21), (22), (23), (24): Xaa is A or G
  MOD_RES (25), (26), (27), (28): Xaa is A or G or is absent
DEGLEXVPTEESNITMQIMXXXXXXXXXLGEMSFLQHNKXEXR

SEQ ID NO: 15367 - protein, 35 aa, Artificial Sequence
  Non-cyclic GFR-binding peptide
  MOD_RES (1), (35): Xaa is C or S
XVPTGQRPVQMRKIRIKPHQGQHKKATVLEEHSQX

SEQ ID NO: 15368 - protein, 38 aa, Artificial Sequence
  Non-cyclic GFR-binding peptide
  MOD_RES (37), (37): Xaa is C or S
RPTQVQLRSVKVAKVEIVRKKPIFKEVQVTLEDHLAXK

SEQ ID NO: 15369 - protein, 40 aa, Artificial Sequence
  Non-cyclic GFR-binding peptide
  MOD_RES (2), (39): Xaa is C or S
  MOD_RES (18), (19), (20), (21), (22): Xaa is A or G
  MOD_RES (23), (24), (25), (26): Xaa is A or G or is absent
QXRPTQVQLSNITVQIMXXXXXXXXXLGEMSTLEDHLAXK

SEQ ID NO: 15370 - protein, 39 aa, Artificial Sequence
  Non-cyclic GFR-binding peptide
  MOD_RES (7), (7): Xaa is C or S
  MOD_RES (21), (22), (23), (24), (25): Xaa is A or G
  MOD_RES (26), (27), (28), (29): Xaa is A or G or is absent
NDEGLEXVPTGQSNITMQIMXXXXXXXXXIGEMSLEEHS

SEQ ID NO: 15371 - protein, 40 aa, Artificial Sequence
  Non-cyclic GFR-binding peptide
  MOD_RES (37), (39): Xaa is C or S
  MOD_RES (16), (17), (18), (19), (20): Xaa is A or G
  MOD_RES (21), (22), (23), (24): Xaa is A or G or is absent
RPTQVQLSNITVQIMXXXXXXXXXIGEMSTLEDHLAXKXE

SEQ ID NO: 15372 - protein, 38 aa, Artificial Sequence
  Non-cyclic GFR-binding peptide
  MOD_RES (36), (38): Xaa is C or S
PSRVHHSNITVQIMEYVRKKPKLLGEMSRLEEHLEXAX

SEQ ID NO: 15373 - protein, 39 aa, Artificial Sequence
  Non-cyclic GFR-binding peptide
  MOD_RES (6), (6): Xaa is C or S
  MOD_RES (20), (21), (22), (23), (24): Xaa is A or G
  MOD_RES (25), (26), (27), (28): Xaa is A or G or is absent
DEGLEXVPTEERPVQMRKIXXXXXXXXXKKATVFLQHNK

SEQ ID NO: 15374 - protein, 34 aa, Artificial Sequence
  Non-cyclic GFR-binding peptide
  MOD_RES (2), (2): Xaa is C or S
EXVPTEERSVKMAKVRIKPHQGQHKEVQVFLQHN

SEQ ID NO: 15375 - protein, 38 aa, Artificial Sequence
  Non-cyclic GFR-binding peptide
  MOD_RES (36), (38): Xaa is C or S
  MOD_RES (15), (16), (17), (18), (19): Xaa is A or G
  MOD_RES (20), (21), (22), (23): Xaa is A or G or is absent
PTQVQLSNITVQIMXXXXXXXXXIGEMSTLEDHLAXKX

SEQ ID NO: 15376 - protein, 35 aa, Artificial Sequence
  Non-cyclic GFR-binding peptide
  MOD_RES (34), (34): Xaa is C or S
  MOD_RES (14), (15), (16), (17), (18): Xaa is A or G
  MOD_RES (19), (20), (21), (22): Xaa is A or G or is absent
VPTGQRPVQMRKIXXXXXXXXXKKATVLEEHSQXE

SEQ ID NO: 15377 - protein, 36 aa, Artificial Sequence
  Non-cyclic GFR-binding peptide
QPSRVHHRPVQVRKIEYVRKKPKLKKATVRLEEHLE

SEQ ID NO: 15378 - protein, 36 aa, Artificial Sequence
  Non-cyclic GFR-binding peptide
  MOD_RES (36), (36): Xaa is C or S
PSRVHHRPVQVRKIEYVRKKPKLKKATVRLEEHLEX

SEQ ID NO: 15379 - protein, 38 aa, Artificial Sequence
  Non-cyclic GFR-binding peptide
  MOD_RES (4), (38): Xaa is C or S
  MOD_RES (18), (19), (20), (21), (22): Xaa is A or G
  MOD_RES (23), (24), (25), (26): Xaa is A or G or is absent
GLEXVPTEERPVQMRKIXXXXXXXXXKKATVFLQHNKX

SEQ ID NO: 15380 - protein, 33 aa, Artificial Sequence
  Non-cyclic GFR-binding peptide
PSRVHHRPVQVRKIEYVRKKPKLKKATVRLEEH

SEQ ID NO: 15381 - protein, 35 aa, Artificial Sequence
  Non-cyclic GFR-binding peptide
  MOD_RES (3), (3): Xaa is C or S
LEXVPTGQRSVKMAKVRIKPHQGQHKEVQVLEEHS

SEQ ID NO: 15382 - protein, 32 aa, Artificial Sequence
  Non-cyclic GFR-binding peptide
  MOD_RES (14), (15), (16), (17), (18): Xaa is A or G
  MOD_RES (19), (20), (21), (22): Xaa is A or G or is absent
VPTGQSNITMQIMXXXXXXXXXIGEMSLEEHS

SEQ ID NO: 15383 - protein, 34 aa, Artificial Sequence
  Non-cyclic GFR-binding peptide
  MOD_RES (1), (1): Xaa is C or S
XVPTEERPVQMRKIRIKPHQGQHKKATVFLQHNK

SEQ ID NO: 15384 - protein, 35 aa, Artificial Sequence
  Non-cyclic GFR-binding peptide
  MOD_RES (35), (35): Xaa is C or S
  MOD_RES (14), (15), (16), (17), (18): Xaa is A or G
  MOD_RES (19), (20), (21), (22): Xaa is A or G or is absent
SRVHHRPVQVRKIXXXXXXXXXKKATVRLEEHLEX

SEQ ID NO: 15385 - protein, 36 aa, Artificial Sequence
  Non-cyclic GFR-binding peptide
RPTQVQLSNITVQIMEIVRKKPIFLGEMSTLEDHLA

SEQ ID NO: 15386 - protein, 44 aa, Artificial Sequence
  Non-cyclic GFR-binding peptide
  MOD_RES (4), (41), (43): Xaa is C or S
NVQXRPTQVQLRSVKVAKVEIVRKKPIFKEVQVTLEDHLAXKXE

SEQ ID NO: 15387 - protein, 37 aa, Artificial Sequence
  Non-cyclic GFR-binding peptide
  MOD_RES (5), (5): Xaa is C or S
  MOD_RES (19), (20), (21), (22), (23): Xaa is A or G
  MOD_RES (24), (25), (26), (27): Xaa is A or G or is absent
EGLEXVPTGQRPVQMRKIXXXXXXXXXKKATVLEEHS

SEQ ID NO: 15388 - protein, 43 aa, Artificial Sequence
  Non-cyclic GFR-binding peptide
  MOD_RES (5), (42): Xaa is C or S
  MOD_RES (21), (22), (23), (24), (25): Xaa is A or G
  MOD_RES (26), (27), (28), (29): Xaa is A or G or is absent
RNVQXRPTQVQLSNITVQIMXXXXXXXXXIGEMSTLEDHLAXK

SEQ ID NO: 15389 - protein, 36 aa, Artificial Sequence
  Non-cyclic GFR-binding peptide
  MOD_RES (2), (36): Xaa is C or S
  MOD_RES (16), (17), (18), (19), (20): Xaa is A or G
  MOD_RES (21), (22), (23), (24): Xaa is A or G or is absent
EXVPTGQRSVKMAKVXXXXXXXXXKEVQVLEEHSQX

SEQ ID NO: 15390 - protein, 44 aa, Artificial Sequence
  Non-cyclic GFR-binding peptide
  MOD_RES (4), (41), (43): Xaa is C or S
SVKXQPSRVHHSNITVQIMEYVRKKPKLLGEMSRLEEHLEXAXA

SEQ ID NO: 15391 - protein, 40 aa, Artificial Sequence
  Non-cyclic GFR-binding peptide
  MOD_RES (4), (4): Xaa is C or S
NVQXRPTQVQLRSVKVAKVEIVRKKPIFKEVQVTLEDHLA

SEQ ID NO: 15392 - protein, 38 aa, Artificial Sequence
  Non-cyclic GFR-binding peptide
  MOD_RES (3), (3): Xaa is C or S
  MOD_RES (19), (20), (21), (22), (23): Xaa is A or G
  MOD_RES (24), (25), (26), (27): Xaa is A or G or is absent
VQXRPTQVQLRSVKVAKVXXXXXXXXXKEVQVTLEDHL

SEQ ID NO: 15393 - protein, 36 aa, Artificial Sequence
  Non-cyclic GFR-binding peptide
  MOD_RES (34), (36): Xaa is C or S
  MOD_RES (14), (15), (16), (17), (18): Xaa is A or G
  MOD_RES (19), (20), (21), (22): Xaa is A or G or is absent
VPTEERSVKMAKVXXXXXXXXXKEVQVFLQHNKXEX

SEQ ID NO: 15394 - protein, 41 aa, Artificial Sequence
  Non-cyclic GFR-binding peptide
  MOD_RES (3), (40): Xaa is C or S
VKXQPSRVHHRPVQVRKIEYVRKKPKLKKATVRLEEHLEXA

SEQ ID NO: 15395 - protein, 36 aa, Artificial Sequence
  Non-cyclic GFR-binding peptide
  MOD_RES (2), (2): Xaa is C or S
  MOD_RES (18), (19), (20), (21), (22): Xaa is A or G
  MOD_RES (23), (24), (25), (26): Xaa is A or G or is absent
KXQPSRVHHSNITVQIMXXXXXXXXXIGEMSRLEEH

SEQ ID NO: 15396 - protein, 41 aa, Artificial Sequence
  Non-cyclic GFR-binding peptide
  MOD_RES (1), (38), (40): Xaa is C or S
XQPSRVHHSNITVQIMEYVRKKPKLLGEMSRLEEHLEXAXA

SEQ ID NO: 15397 - protein, 44 aa, Artificial Sequence
  Non-cyclic GFR-binding peptide
  MOD_RES (5), (42), (44): Xaa is C or S
  MOD_RES (21), (22), (23), (24), (25): Xaa is A or G
  MOD_RES (26), (27), (28), (29): Xaa is A or G or is absent
SSVKXQPSRVHHRPVQVRKIXXXXXXXXXKKATVRLEEHLEXAX

SEQ ID NO: 15398 - protein, 39 aa, Artificial Sequence
  Non-cyclic GFR-binding peptide
  MOD_RES (4), (38): Xaa is C or S
  MOD_RES (18), (19), (20), (21), (22): Xaa is A or G
  MOD_RES (23), (24), (25), (26): Xaa is A or G or is absent
GLEXVPTGQRPVQMRKIXXXXXXXXXKKATVLEEHSQXE

SEQ ID NO: 15399 - protein, 38 aa, Artificial Sequence
  Non-cyclic GFR-binding peptide
  MOD_RES (6), (6): Xaa is C or S
DEGLEXVPTEERSVKMAKVRIKPHQGQHKEVQVFLQHN

SEQ ID NO: 15400 - protein, 39 aa, Artificial Sequence
  Non-cyclic GFR-binding peptide
  MOD_RES (7), (7): Xaa is C or S
NDEGLEXVPTGQRPVQMRKIRIKPHQGQHKKATVLEEHS

SEQ ID NO: 15401 - protein, 34 aa, Artificial Sequence
  Non-cyclic GFR-binding peptide
  MOD_RES (2), (2): Xaa is C or S
EXVPTGQRPVQMRKIRIKPHQGQHKKATVLEEHS

SEQ ID NO: 15402 - protein, 44 aa, Artificial Sequence
  Non-cyclic GFR-binding peptide
  MOD_RES (4), (41), (43): Xaa is C or S
  MOD_RES (20), (21), (22), (23), (24): Xaa is A or G
  MOD_RES (25), (26), (27), (28): Xaa is A or G or is absent
SVKXQPSRVHHSNITVQIMXXXXXXXXXIGEMSRLEEHLEXAXA

SEQ ID NO: 15403 - protein, 35 aa, Artificial Sequence
  Non-cyclic GFR-binding peptide
  MOD_RES (3), (3): Xaa is C or S
  MOD_RES (17), (18), (19), (20), (21): Xaa is A or G
  MOD_RES (22), (23), (24), (25): Xaa is A or G or is absent
LEXVPTGQRPVQMRKIXXXXXXXXXKKATVLEEHS

SEQ ID NO: 15404 - protein, 37 aa, Artificial Sequence
  Non-cyclic GFR-binding peptide
  MOD_RES (35), (37): Xaa is C or S
SRVHHSNITVQIMEYVRKKPKLIGEMSRLEEHLEXAX

SEQ ID NO: 15405 - protein, 36 aa, Artificial Sequence
  Non-cyclic GFR-binding peptide
  MOD_RES (1), (35): Xaa is C or S
  MOD_RES (15), (16), (17), (18), (19): Xaa is A or G
  MOD_RES (20), (21), (22), (23): Xaa is A or G or is absent
XVPTEERSVKMAKVXXXXXXXXXKEVQVFLQHNKXE

SEQ ID NO: 15406 - protein, 40 aa, Artificial Sequence
  Non-cyclic GFR-binding peptide
  MOD_RES (7), (7): Xaa is C or S
NDEGLEXVPTEESNITMQIMRIKPHQGQHLGEMSFLQHNK

SEQ ID NO: 15407 - protein, 37 aa, Artificial Sequence
  Non-cyclic GFR-binding peptide
  MOD_RES (5), (5): Xaa is C or S
EGLEXVPTGQRSVKMAKVRIKPHQGQHKEVQVLEEHS

SEQ ID NO: 15408 - protein, 40 aa, Artificial Sequence
  Non-cyclic GFR-binding peptide
  MOD_RES (5), (39): Xaa is C or S
EGLEXVPTGQSNITMQIMRIKPHQGQHIGEMSLEEHSQXE

SEQ ID NO: 15409 - protein, 41 aa, Artificial Sequence
  Non-cyclic GFR-binding peptide
  MOD_RES (6), (40): Xaa is C or S
DEGLEXVPTGQRSVKMAKVRIKPHQGQHKEVQVLEEHSQXE

SEQ ID NO: 15410 - protein, 41 aa, Artificial Sequence
  Non-cyclic GFR-binding peptide
  MOD_RES (4), (41): Xaa is C or S
NVQXRPTQVQLSNITVQIMEIVRKKPIFLGEMSTLEDHLAX

SEQ ID NO: 15411 - protein, 43 aa, Artificial Sequence
  Non-cyclic GFR-binding peptide
  MOD_RES (4), (41), (43): Xaa is C or S
  MOD_RES (20), (21), (22), (23), (24): Xaa is A or G
  MOD_RES (25), (26), (27), (28): Xaa is A or G or is absent
NVQXRPTQVQLSNITVQIMXXXXXXXXXIGEMSTLEDHLAXKX

SEQ ID NO: 15412 - protein, 41 aa, Artificial Sequence
  Non-cyclic GFR-binding peptide
  MOD_RES (4), (41): Xaa is C or S
  MOD_RES (20), (21), (22), (23), (24): Xaa is A or G
  MOD_RES (25), (26), (27), (28): Xaa is A or G or is absent
NVQXRPTQVQLSNITVQIMXXXXXXXXXLGEMSTLEDHLAX

SEQ ID NO: 15413 - protein, 43 aa, Artificial Sequence
  Non-cyclic GFR-binding peptide
  MOD_RES (6), (40), (42): Xaa is C or S
  MOD_RES (20), (21), (22), (23), (24): Xaa is A or G
  MOD_RES (25), (26), (27), (28): Xaa is A or G or is absent
DEGLEXVPTGQRSVKMAKVXXXXXXXXXKEVQVLEEHSQXEXR

SEQ ID NO: 15414 - protein, 36 aa, Artificial Sequence
  Non-cyclic GFR-binding peptide
  MOD_RES (1), (1): Xaa is C or S
  MOD_RES (17), (18), (19), (20), (21): Xaa is A or G
  MOD_RES (22), (23), (24), (25): Xaa is A or G or is absent
XRPTQVQLRSVKVAKVXXXXXXXXXKEVQVTLEDHL

SEQ ID NO: 15415 - protein, 33 aa, Artificial Sequence
  Non-cyclic GFR-binding peptide
  MOD_RES (15), (16), (17), (18), (19): Xaa is A or G
  MOD_RES (20), (21), (22), (23): Xaa is A or G or is absent
PSRVHHSNITVQIMXXXXXXXXXLGEMSRLEEH

SEQ ID NO: 15416 - protein, 38 aa, Artificial Sequence
  Non-cyclic GFR-binding peptide
  MOD_RES (5), (5): Xaa is C or S
  MOD_RES (19), (20), (21), (22), (23): Xaa is A or G
  MOD_RES (24), (25), (26), (27): Xaa is A or G or is absent
EGLEXVPTEERSVKMAKVXXXXXXXXXKEVQVFLQHNK

SEQ ID NO: 15417 - protein, 36 aa, Artificial Sequence
  Non-cyclic GFR-binding peptide
  MOD_RES (36), (36): Xaa is C or S
PTQVQLSNITVQIMEIVRKKPIFLGEMSTLEDHLAX

SEQ ID NO: 15418 - protein, 42 aa, Artificial Sequence
  Non-cyclic GFR-binding peptide
  MOD_RES (7), (41): Xaa is C or S
NDEGLEXVPTGQSNITMQIMRIKPHQGQHIGEMSLEEHSQXE

SEQ ID NO: 15419 - protein, 40 aa, Artificial Sequence
  Non-cyclic GFR-binding peptide
  MOD_RES (5), (5): Xaa is C or S
  MOD_RES (21), (22), (23), (24), (25): Xaa is A or G
  MOD_RES (26), (27), (28), (29): Xaa is A or G or is absent
RNVQXRPTQVQLRSVKVAKVXXXXXXXXXKEVQVTLEDHL

SEQ ID NO: 15420 - protein, 39 aa, Artificial Sequence
  Non-cyclic GFR-binding peptide
  MOD_RES (37), (39): Xaa is C or S
  MOD_RES (16), (17), (18), (19), (20): Xaa is A or G
  MOD_RES (21), (22), (23), (24): Xaa is A or G or is absent
RPTQVQLSNITVQIMXXXXXXXXXLGEMSTLEDHLAXKX

SEQ ID NO: 15421 - protein, 38 aa, Artificial Sequence
  Non-cyclic GFR-binding peptide
  MOD_RES (36), (38): Xaa is C or S
PTQVQLSNITVQIMEIVRKKPIFLGEMSTLEDHLAXKX

SEQ ID NO: 15422 - protein, 39 aa, Artificial Sequence
  Non-cyclic GFR-binding peptide
  MOD_RES (3), (37), (39): Xaa is C or S
  MOD_RES (17), (18), (19), (20), (21): Xaa is A or G
  MOD_RES (22), (23), (24), (25): Xaa is A or G or is absent
LEXVPTGQRPVQMRKIXXXXXXXXXKKATVLEEHSQXEX

SEQ ID NO: 15423 - protein, 43 aa, Artificial Sequence
  Non-cyclic GFR-binding peptide
  MOD_RES (6), (40), (42): Xaa is C or S
  MOD_RES (20), (21), (22), (23), (24): Xaa is A or G
  MOD_RES (25), (26), (27), (28): Xaa is A or G or is absent
DEGLEXVPTGQRPVQMRKIXXXXXXXXXKKATVLEEHSQXEXR

SEQ ID NO: 15424 - protein, 40 aa, Artificial Sequence
  Non-cyclic GFR-binding peptide
  MOD_RES (1), (38), (40): Xaa is C or S
  MOD_RES (17), (18), (19), (20), (21): Xaa is A or G
  MOD_RES (22), (23), (24), (25): Xaa is A or G or is absent
XRPTQVQLSNITVQIMXXXXXXXXXIGEMSTLEDHLAXKX

SEQ ID NO: 15425 - protein, 38 aa, Artificial Sequence
  Non-cyclic GFR-binding peptide
  MOD_RES (6), (6): Xaa is C or S
  MOD_RES (20), (21), (22), (23), (24): Xaa is A or G
  MOD_RES (25), (26), (27), (28): Xaa is A or G or is absent
DEGLEXVPTGQRSVKMAKVXXXXXXXXXKEVQVLEEHS

SEQ ID NO: 15426 - protein, 36 aa, Artificial Sequence
  Non-cyclic GFR-binding peptide
  MOD_RES (2), (36): Xaa is C or S
  MOD_RES (16), (17), (18), (19), (20): Xaa is A or G
  MOD_RES (21), (22), (23), (24): Xaa is A or G or is absent
EXVPTEERPVQMRKIXXXXXXXXXKKATVFLQHNKX

SEQ ID NO: 15427 - protein, 40 aa, Artificial Sequence
  Non-cyclic GFR-binding peptide
  MOD_RES (4), (38), (40): Xaa is C or S
GLEXVPTGQSNITMQIMRIKPHQGQHIGEMSLEEHSQXEX

SEQ ID NO: 15428 - protein, 33 aa, Artificial Sequence
  Non-cyclic GFR-binding peptide
  MOD_RES (14), (15), (16), (17), (18): Xaa is A or G
  MOD_RES (19), (20), (21), (22): Xaa is A or G or is absent
TQVQLSNITVQIMXXXXXXXXXLGEMSTLEDHL

SEQ ID NO: 15429 - protein, 43 aa, Artificial Sequence
  Non-cyclic GFR-binding peptide
  MOD_RES (6), (40), (42): Xaa is C or S
DEGLEXVPTGQSNITMQIMRIKPHQGQHIGEMSLEEHSQXEXR

SEQ ID NO: 15430 - protein, 40 aa, Artificial Sequence
  Non-cyclic GFR-binding peptide
  MOD_RES (7), (7): Xaa is C or S
  MOD_RES (21), (22), (23), (24), (25): Xaa is A or G
  MOD_RES (26), (27), (28), (29): Xaa is A or G or is absent
NDEGLEXVPTGQRPVQMRKIXXXXXXXXXKKATVLEEHSQ

SEQ ID NO: 15431 - protein, 40 aa, Artificial Sequence
  Non-cyclic GFR-binding peptide
  MOD_RES (7), (7): Xaa is C or S
  MOD_RES (21), (22), (23), (24), (25): Xaa is A or G
  MOD_RES (26), (27), (28), (29): Xaa is A or G or is absent
NDEGLEXVPTGQSNITMQIMXXXXXXXXXIGEMSLEEHSQ

SEQ ID NO: 15432 - protein, 38 aa, Artificial Sequence
  Non-cyclic GFR-binding peptide
  MOD_RES (4), (4): Xaa is C or S
NVQXRPTQVQLSNITVQIMEIVRKKPIFIGEMSTLEDH

SEQ ID NO: 15433 - protein, 36 aa, Artificial Sequence
  Non-cyclic GFR-binding peptide
  MOD_RES (2), (36): Xaa is C or S
  MOD_RES (16), (17), (18), (19), (20): Xaa is A or G
  MOD_RES (21), (22), (23), (24): Xaa is A or G or is absent
EXVPTGQRPVQMRKIXXXXXXXXXKKATVLEEHSQX

SEQ ID NO: 15434 - protein, 36 aa, Artificial Sequence
  Non-cyclic GFR-binding peptide
  MOD_RES (1), (35): Xaa is C or S
  MOD_RES (15), (16), (17), (18), (19): Xaa is A or G
  MOD_RES (20), (21), (22), (23): Xaa is A or G or is absent
XVPTEESNITMQIMXXXXXXXXXLGEMSFLQHNKXE

SEQ ID NO: 15435 - protein, 35 aa, Artificial Sequence
  Non-cyclic GFR-binding peptide
  MOD_RES (35), (35): Xaa is C or S
SRVHHSNITVQIMEYVRKKPKLLGEMSRLEEHLEX

SEQ ID NO: 15436 - protein, 41 aa, Artificial Sequence
  Non-cyclic GFR-binding peptide
  MOD_RES (5), (39), (41): Xaa is C or S
EGLEXVPTGQSNITMQIMRIKPHQGQHIGEMSLEEHSQXEX

SEQ ID NO: 15437 - protein, 38 aa, Artificial Sequence
  Non-cyclic GFR-binding peptide
  MOD_RES (35), (37): Xaa is C or S
  MOD_RES (14), (15), (16), (17), (18): Xaa is A or G
  MOD_RES (19), (20), (21), (22): Xaa is A or G or is absent
TQVQLSNITVQIMXXXXXXXXXLGEMSTLEDHLAXKXE

SEQ ID NO: 15438 - protein, 39 aa, Artificial Sequence
  Non-cyclic GFR-binding peptide
  MOD_RES (5), (5): Xaa is C or S
RNVQXRPTQVQLSNITVQIMEIVRKKPIFIGEMSTLEDH

SEQ ID NO: 15439 - protein, 40 aa, Artificial Sequence
  Non-cyclic GFR-binding peptide
  MOD_RES (2), (39): Xaa is C or S
QXRPTQVQLSNITVQIMEIVRKKPIFLGEMSTLEDHLAXK

SEQ ID NO: 15440 - protein, 38 aa, Artificial Sequence
  Non-cyclic GFR-binding peptide
  MOD_RES (37), (37): Xaa is C or S
QPSRVHHSNITVQIMEYVRKKPKLIGEMSRLEEHLEXA

SEQ ID NO: 15441 - protein, 38 aa, Artificial Sequence
  Non-cyclic GFR-binding peptide
  MOD_RES (2), (36), (38): Xaa is C or S
  MOD_RES (16), (17), (18), (19), (20): Xaa is A or G
  MOD_RES (21), (22), (23), (24): Xaa is A or G or is absent
EXVPTGQSNITMQIMXXXXXXXXXIGEMSLEEHSQXEX

SEQ ID NO: 15442 - protein, 39 aa, Artificial Sequence
  Non-cyclic GFR-binding peptide
  MOD_RES (2), (39): Xaa is C or S
  MOD_RES (18), (19), (20), (21), (22): Xaa is A or G
  MOD_RES (23), (24), (25), (26): Xaa is A or G or is absent
QXRPTQVQLRSVKVAKVXXXXXXXXXKEVQVTLEDHLAX

SEQ ID NO: 15443 - protein, 39 aa, Artificial Sequence
  Non-cyclic GFR-binding peptide
  MOD_RES (5), (5): Xaa is C or S
SSVKXQPSRVHHSNITVQIMEYVRKKPKLIGEMSRLEEH

SEQ ID NO: 15444 - protein, 40 aa, Artificial Sequence
  Non-cyclic GFR-binding peptide
  MOD_RES (5), (5): Xaa is C or S
SSVKXQPSRVHHSNITVQIMEYVRKKPKLLGEMSRLEEHL

SEQ ID NO: 15445 - protein, 40 aa, Artificial Sequence
  Non-cyclic GFR-binding peptide
  MOD_RES (1), (38), (40): Xaa is C or S
XRPTQVQLSNITVQIMEIVRKKPIFLGEMSTLEDHLAXKX

SEQ ID NO: 15446 - protein, 38 aa, Artificial Sequence
  Non-cyclic GFR-binding peptide
  MOD_RES (1), (38): Xaa is C or S
  MOD_RES (17), (18), (19), (20), (21): Xaa is A or G
  MOD_RES (22), (23), (24), (25): Xaa is A or G or is absent
XRPTQVQLSNITVQIMXXXXXXXXXLGEMSTLEDHLAX

SEQ ID NO: 15447 - protein, 41 aa, Artificial Sequence
  Non-cyclic GFR-binding peptide
  MOD_RES (1), (38), (40): Xaa is C or S
XRPTQVQLSNITVQIMEIVRKKPIFLGEMSTLEDHLAXKXE

SEQ ID NO: 15448 - protein, 37 aa, Artificial Sequence
  Non-cyclic GFR-binding peptide
  MOD_RES (1), (35), (37): Xaa is C or S
  MOD_RES (15), (16), (17), (18), (19): Xaa is A or G
  MOD_RES (20), (21), (22), (23): Xaa is A or G or is absent
XVPTGQSNITMQIMXXXXXXXXXIGEMSLEEHSQXEX

SEQ ID NO: 15449 - protein, 37 aa, Artificial Sequence
  Non-cyclic GFR-binding peptide
  MOD_RES (1), (1): Xaa is C or S
XRPTQVQLSNITVQIMEIVRKKPIFLGEMSTLEDHLA

SEQ ID NO: 15450 - protein, 33 aa, Artificial Sequence
  Non-cyclic GFR-binding peptide
  MOD_RES (14), (15), (16), (17), (18): Xaa is A or G
  MOD_RES (19), (20), (21), (22): Xaa is A or G or is absent
VPTEESNITMQIMXXXXXXXXXLGEMSFLQHNK

SEQ ID NO: 15451 - protein, 42 aa, Artificial Sequence
  Non-cyclic GFR-binding peptide
  MOD_RES (7), (41): Xaa is C or S
NDEGLEXVPTEERPVQMRKIRIKPHQGQHKKATVFLQHNKXE

SEQ ID NO: 15452 - protein, 39 aa, Artificial Sequence
  Non-cyclic GFR-binding peptide
  MOD_RES (36), (38): Xaa is C or S
  MOD_RES (15), (16), (17), (18), (19): Xaa is A or G
  MOD_RES (20), (21), (22), (23): Xaa is A or G or is absent
PSRVHHSNITVQIMXXXXXXXXXLGEMSRLEEHLEXAXA

SEQ ID NO: 15453 - protein, 36 aa, Artificial Sequence
  Non-cyclic GFR-binding peptide
  MOD_RES (35), (35): Xaa is C or S
SRVHHSNITVQIMEYVRKKPKLIGEMSRLEEHLEXA

SEQ ID NO: 15454 - protein, 33 aa, Artificial Sequence
  Non-cyclic GFR-binding peptide
  MOD_RES (14), (15), (16), (17), (18): Xaa is A or G
  MOD_RES (19), (20), (21), (22): Xaa is A or G or is absent
SRVHHSNITVQIMXXXXXXXXXLGEMSRLEEHL

SEQ ID NO: 15455 - protein, 38 aa, Artificial Sequence
  Non-cyclic GFR-binding peptide
  MOD_RES (2), (2): Xaa is C or S
  MOD_RES (18), (19), (20), (21), (22): Xaa is A or G
  MOD_RES (23), (24), (25), (26): Xaa is A or G or is absent
QXRPTQVQLSNITVQIMXXXXXXXXXLGEMSTLEDHLA

SEQ ID NO: 15456 - protein, 41 aa, Artificial Sequence
  Non-cyclic GFR-binding peptide
  MOD_RES (2), (39), (41): Xaa is C or S
QXRPTQVQLSNITVQIMEIVRKKPIFIGEMSTLEDHLAXKX

SEQ ID NO: 15457 - protein, 34 aa, Artificial Sequence
  Non-cyclic GFR-binding peptide
  MOD_RES (34), (34): Xaa is C or S
VPTEESNITMQIMRIKPHQGQHLGEMSFLQHNKX

SEQ ID NO: 15458 - protein, 39 aa, Artificial Sequence
  Non-cyclic GFR-binding peptide
  MOD_RES (5), (5): Xaa is C or S
RNVQXRPTQVQLRSVKVAKVEIVRKKPIFKEVQVTLEDH

SEQ ID NO: 15459 - protein, 42 aa, Artificial Sequence
  Non-cyclic GFR-binding peptide
  MOD_RES (6), (40), (42): Xaa is C or S
  MOD_RES (20), (21), (22), (23), (24): Xaa is A or G
  MOD_RES (25), (26), (27), (28): Xaa is A or G or is absent
DEGLEXVPTGQSNITMQIMXXXXXXXXXIGEMSLEEHSQXEX

SEQ ID NO: 15460 - protein, 39 aa, Artificial Sequence
  Non-cyclic GFR-binding peptide
  MOD_RES (36), (38): Xaa is C or S
PTQVQLSNITVQIMEIVRKKPIFLGEMSTLEDHLAXKXE

SEQ ID NO: 15461 - protein, 34 aa, Artificial Sequence
  Non-cyclic GFR-binding peptide
RPTQVQLRSVKVAKVEIVRKKPIFKEVQVTLEDH

SEQ ID NO: 15462 - protein, 42 aa, Artificial Sequence
  Non-cyclic GFR-binding peptide
  MOD_RES (2), (39), (41): Xaa is C or S
  MOD_RES (18), (19), (20), (21), (22): Xaa is A or G
  MOD_RES (23), (24), (25), (26): Xaa is A or G or is absent
QXRPTQVQLRSVKVAKVXXXXXXXXXKEVQVTLEDHLAXKXE

SEQ ID NO: 15463 - protein, 34 aa, Artificial Sequence
  Non-cyclic GFR-binding peptide
  MOD_RES (1), (1): Xaa is C or S
XVPTEESNITMQIMRIKPHQGQHLGEMSFLQHNK

SEQ ID NO: 15464 - protein, 38 aa, Artificial Sequence
  Non-cyclic GFR-binding peptide
  MOD_RES (1), (38): Xaa is C or S
XQPSRVHHSNITVQIMEYVRKKPKLIGEMSRLEEHLEX

SEQ ID NO: 15465 - protein, 38 aa, Artificial Sequence
  Non-cyclic GFR-binding peptide
  MOD_RES (4), (38): Xaa is C or S
GLEXVPTGQSNITMQIMRIKPHQGQHIGEMSLEEHSQX

SEQ ID NO: 15466 - protein, 39 aa, Artificial Sequence
  Non-cyclic GFR-binding peptide
  MOD_RES (1), (38): Xaa is C or S
XRPTQVQLRSVKVAKVEIVRKKPIFKEVQVTLEDHLAXK

SEQ ID NO: 15467 - protein, 37 aa, Artificial Sequence
  Non-cyclic GFR-binding peptide
  MOD_RES (4), (4): Xaa is C or S
GLEXVPTGQRSVKMAKVRIKPHQGQHKEVQVLEEHSQ

SEQ ID NO: 15468 - protein, 34 aa, Artificial Sequence
  Non-cyclic GFR-binding peptide
  MOD_RES (2), (2): Xaa is C or S
EXVPTGQSNITMQIMRIKPHQGQHIGEMSLEEHS

SEQ ID NO: 15469 - protein, 42 aa, Artificial Sequence
  Non-cyclic GFR-binding peptide
  MOD_RES (5), (39), (41): Xaa is C or S
EGLEXVPTEERPVQMRKIRIKPHQGQHKKATVFLQHNKXEXR

SEQ ID NO: 15470 - protein, 36 aa, Artificial Sequence
  Non-cyclic GFR-binding peptide
  MOD_RES (2), (2): Xaa is C or S
  MOD_RES (18), (19), (20), (21), (22): Xaa is A or G
  MOD_RES (23), (24), (25), (26): Xaa is A or G or is absent
KXQPSRVHHRPVQVRKIXXXXXXXXXKKATVRLEEH

SEQ ID NO: 15471 - protein, 40 aa, Artificial Sequence
  Non-cyclic GFR-binding peptide
  MOD_RES (5), (5): Xaa is C or S
  MOD_RES (21), (22), (23), (24), (25): Xaa is A or G
  MOD_RES (26), (27), (28), (29): Xaa is A or G or is absent
SSVKXQPSRVHHSNITVQIMXXXXXXXXXIGEMSRLEEHL

SEQ ID NO: 15472 - protein, 39 aa, Artificial Sequence
  Non-cyclic GFR-binding peptide
  MOD_RES (7), (7): Xaa is C or S
  MOD_RES (21), (22), (23), (24), (25): Xaa is A or G
  MOD_RES (26), (27), (28), (29): Xaa is A or G or is absent
NDEGLEXVPTEESNITMQIMXXXXXXXXXLGEMSFLQHN

SEQ ID NO: 15473 - protein, 41 aa, Artificial Sequence
  Non-cyclic GFR-binding peptide
  MOD_RES (2), (39), (41): Xaa is C or S
KXQPSRVHHSNITVQIMEYVRKKPKLIGEMSRLEEHLEXAX

SEQ ID NO: 15474 - protein, 37 aa, Artificial Sequence
  Non-cyclic GFR-binding peptide
  MOD_RES (3), (37): Xaa is C or S
LEXVPTGQSNITMQIMRIKPHQGQHIGEMSLEEHSQX

SEQ ID NO: 15475 - protein, 35 aa, Artificial Sequence
  Non-cyclic GFR-binding peptide
  MOD_RES (1), (35): Xaa is C or S
XVPTEESNITMQIMRIKPHQGQHLGEMSFLQHNKX

SEQ ID NO: 15476 - protein, 35 aa, Artificial Sequence
  Non-cyclic GFR-binding peptide
  MOD_RES (3), (3): Xaa is C or S
  MOD_RES (17), (18), (19), (20), (21): Xaa is A or G
  MOD_RES (22), (23), (24), (25): Xaa is A or G or is absent
LEXVPTGQSNITMQIMXXXXXXXXXIGEMSLEEHS

SEQ ID NO: 15477 - protein, 39 aa, Artificial Sequence
  Non-cyclic GFR-binding peptide
  MOD_RES (4), (38): Xaa is C or S
GLEXVPTGQSNITMQIMRIKPHQGQHIGEMSLEEHSQXE

SEQ ID NO: 15478 - protein, 38 aa, Artificial Sequence
  Non-cyclic GFR-binding peptide
  MOD_RES (2), (36), (38): Xaa is C or S
EXVPTEERPVQMRKIRIKPHQGQHKKATVFLQHNKXEX

SEQ ID NO: 15479 - protein, 43 aa, Artificial Sequence
  Non-cyclic GFR-binding peptide
  MOD_RES (5), (42): Xaa is C or S
  MOD_RES (21), (22), (23), (24), (25): Xaa is A or G
  MOD_RES (26), (27), (28), (29): Xaa is A or G or is absent
SSVKXQPSRVHHSNITVQIMXXXXXXXXXIGEMSRLEEHLEXA

SEQ ID NO: 15480 - protein, 42 aa, Artificial Sequence
  Non-cyclic GFR-binding peptide
  MOD_RES (3), (40), (42): Xaa is C or S
  MOD_RES (19), (20), (21), (22), (23): Xaa is A or G
  MOD_RES (24), (25), (26), (27): Xaa is A or G or is absent
VQXRPTQVQLRSVKVAKVXXXXXXXXXKEVQVTLEDHLAXKX

SEQ ID NO: 15481 - protein, 42 aa, Artificial Sequence
  Non-cyclic GFR-binding peptide
  MOD_RES (5), (42): Xaa is C or S
RNVQXRPTQVQLRSVKVAKVEIVRKKPIFKEVQVTLEDHLAX

SEQ ID NO: 15482 - protein, 45 aa, Artificial Sequence
  Non-cyclic GFR-binding peptide
  MOD_RES (5), (42), (44): Xaa is C or S
  MOD_RES (21), (22), (23), (24), (25): Xaa is A or G
  MOD_RES (26), (27), (28), (29): Xaa is A or G or is absent
RNVQXRPTQVQLSNITVQIMXXXXXXXXXIGEMSTLEDHLAXKXE

SEQ ID NO: 15483 - protein, 37 aa, Artificial Sequence
  Non-cyclic GFR-binding peptide
  MOD_RES (37), (37): Xaa is C or S
  MOD_RES (16), (17), (18), (19), (20): Xaa is A or G
  MOD_RES (21), (22), (23), (24): Xaa is A or G or is absent
QPSRVHHSNITVQIMXXXXXXXXXIGEMSRLEEHLEX

SEQ ID NO: 15484 - protein, 41 aa, Artificial Sequence
  Non-cyclic GFR-binding peptide
  MOD_RES (6), (40): Xaa is C or S
  MOD_RES (20), (21), (22), (23), (24): Xaa is A or G
  MOD_RES (25), (26), (27), (28): Xaa is A or G or is absent
DEGLEXVPTEESNITMQIMXXXXXXXXXLGEMSFLQHNKXE

SEQ ID NO: 15485 - protein, 42 aa, Artificial Sequence
  Non-cyclic GFR-binding peptide
  MOD_RES (5), (39), (41): Xaa is C or S
EGLEXVPTEESNITMQIMRIKPHQGQHLGEMSFLQHNKXEXR

SEQ ID NO: 15486 - protein, 39 aa, Artificial Sequence
  Non-cyclic GFR-binding peptide
  MOD_RES (3), (3): Xaa is C or S
VKXQPSRVHHSNITVQIMEYVRKKPKLLGEMSRLEEHLE

SEQ ID NO: 15487 - protein, 35 aa, Artificial Sequence
  Non-cyclic GFR-binding peptide
  MOD_RES (15), (16), (17), (18), (19): Xaa is A or G
  MOD_RES (20), (21), (22), (23): Xaa is A or G or is absent
PSRVHHRPVQVRKIXXXXXXXXXKKATVRLEEHLE

SEQ ID NO: 15488 - protein, 39 aa, Artificial Sequence
  Non-cyclic GFR-binding peptide
  MOD_RES (5), (39): Xaa is C or S
  MOD_RES (19), (20), (21), (22), (23): Xaa is A or G
  MOD_RES (24), (25), (26), (27): Xaa is A or G or is absent
EGLEXVPTEERPVQMRKIXXXXXXXXXKKATVFLQHNKX

SEQ ID NO: 15489 - protein, 36 aa, Artificial Sequence
  Non-cyclic GFR-binding peptide
  MOD_RES (3), (3): Xaa is C or S
LEXVPTEERPVQMRKIRIKPHQGQHKKATVFLQHNK

SEQ ID NO: 15490 - protein, 34 aa, Artificial Sequence
  Non-cyclic GFR-binding peptide
RPTQVQLSNITVQIMEIVRKKPIFLGEMSTLEDH

SEQ ID NO: 15491 - protein, 42 aa, Artificial Sequence
  Non-cyclic GFR-binding peptide
  MOD_RES (7), (41): Xaa is C or S
  MOD_RES (21), (22), (23), (24), (25): Xaa is A or G
  MOD_RES (26), (27), (28), (29): Xaa is A or G or is absent
NDEGLEXVPTGQRPVQMRKIXXXXXXXXXKKATVLEEHSQXE

SEQ ID NO: 15492 - protein, 36 aa, Artificial Sequence
  Non-cyclic GFR-binding peptide
  MOD_RES (1), (35): Xaa is C or S
XVPTGQRPVQMRKIRIKPHQGQHKKATVLEEHSQXE

SEQ ID NO: 15493 - protein, 40 aa, Artificial Sequence
  Non-cyclic GFR-binding peptide
  MOD_RES (4), (4): Xaa is C or S
NVQXRPTQVQLSNITVQIMEIVRKKPIFIGEMSTLEDHLA

SEQ ID NO: 15494 - protein, 42 aa, Artificial Sequence
  Non-cyclic GFR-binding peptide
  MOD_RES (2), (39), (41): Xaa is C or S
QXRPTQVQLSNITVQIMEIVRKKPIFLGEMSTLEDHLAXKXE

SEQ ID NO: 15495 - protein, 35 aa, Artificial Sequence
  Non-cyclic GFR-binding peptide
  MOD_RES (35), (35): Xaa is C or S
TQVQLSNITVQIMEIVRKKPIFIGEMSTLEDHLAX

SEQ ID NO: 15496 - protein, 38 aa, Artificial Sequence
  Non-cyclic GFR-binding peptide
  MOD_RES (5), (5): Xaa is C or S
EGLEXVPTEERPVQMRKIRIKPHQGQHKKATVFLQHNK

SEQ ID NO: 15497 - protein, 35 aa, Artificial Sequence
  Non-cyclic GFR-binding peptide
  MOD_RES (34), (34): Xaa is C or S
VPTGQRSVKMAKVRIKPHQGQHKEVQVLEEHSQXE

SEQ ID NO: 15498 - protein, 39 aa, Artificial Sequence
  Non-cyclic GFR-binding peptide
  MOD_RES (36), (38): Xaa is C or S
  MOD_RES (15), (16), (17), (18), (19): Xaa is A or G
  MOD_RES (20), (21), (22), (23): Xaa is A or G or is absent
PTQVQLRSVKVAKVXXXXXXXXXKEVQVTLEDHLAXKXE

SEQ ID NO: 15499 - protein, 44 aa, Artificial Sequence
  Non-cyclic GFR-binding peptide
  MOD_RES (4), (41), (43): Xaa is C or S
  MOD_RES (20), (21), (22), (23), (24): Xaa is A or G
  MOD_RES (25), (26), (27), (28): Xaa is A or G or is absent
NVQXRPTQVQLSNITVQIMXXXXXXXXXLGEMSTLEDHLAXKXE

SEQ ID NO: 15500 - protein, 37 aa, Artificial Sequence
  Non-cyclic GFR-binding peptide
  MOD_RES (5), (5): Xaa is C or S
  MOD_RES (19), (20), (21), (22), (23): Xaa is A or G
  MOD_RES (24), (25), (26), (27): Xaa is A or G or is absent
EGLEXVPTEERPVQMRKIXXXXXXXXXKKATVFLQHN

SEQ ID NO: 15501 - protein, 39 aa, Artificial Sequence
  Non-cyclic GFR-binding peptide
  MOD_RES (2), (36), (38): Xaa is C or S
  MOD_RES (16), (17), (18), (19), (20): Xaa is A or G
  MOD_RES (21), (22), (23), (24): Xaa is A or G or is absent
EXVPTEERSVKMAKVXXXXXXXXXKEVQVFLQHNKXEXR

SEQ ID NO: 15502 - protein, 40 aa, Artificial Sequence
  Non-cyclic GFR-binding peptide
  MOD_RES (7), (7): Xaa is C or S
NDEGLEXVPTEERSVKMAKVRIKPHQGQHKEVQVFLQHNK

SEQ ID NO: 15503 - protein, 35 aa, Artificial Sequence
  Non-cyclic GFR-binding peptide
  MOD_RES (2), (2): Xaa is C or S
EXVPTEERPVQMRKIRIKPHQGQHKKATVFLQHNK

SEQ ID NO: 15504 - protein, 41 aa, Artificial Sequence
  Non-cyclic GFR-binding peptide
  MOD_RES (3), (40): Xaa is C or S
  MOD_RES (19), (20), (21), (22), (23): Xaa is A or G
  MOD_RES (24), (25), (26), (27): Xaa is A or G or is absent
VQXRPTQVQLSNITVQIMXXXXXXXXXLGEMSTLEDHLAXK

SEQ ID NO: 15505 - protein, 38 aa, Artificial Sequence
  Non-cyclic GFR-binding peptide
  MOD_RES (4), (38): Xaa is C or S
GLEXVPTEERSVKMAKVRIKPHQGQHKEVQVFLQHNKX

SEQ ID NO: 15506 - protein, 38 aa, Artificial Sequence
  Non-cyclic GFR-binding peptide
  MOD_RES (4), (4): Xaa is C or S
  MOD_RES (20), (21), (22), (23), (24): Xaa is A or G
  MOD_RES (25), (26), (27), (28): Xaa is A or G or is absent
SVKXQPSRVHHSNITVQIMXXXXXXXXXIGEMSRLEEH

SEQ ID NO: 15507 - protein, 35 aa, Artificial Sequence
  Non-cyclic GFR-binding peptide
  MOD_RES (1), (1): Xaa is C or S
XRPTQVQLRSVKVAKVEIVRKKPIFKEVQVTLEDH

SEQ ID NO: 15508 - protein, 37 aa, Artificial Sequence
  Non-cyclic GFR-binding peptide
  MOD_RES (36), (36): Xaa is C or S
  MOD_RES (15), (16), (17), (18), (19): Xaa is A or G
  MOD_RES (20), (21), (22), (23): Xaa is A or G or is absent
PSRVHHSNITVQIMXXXXXXXXXIGEMSRLEEHLEXA

SEQ ID NO: 15509 - protein, 39 aa, Artificial Sequence
  Non-cyclic GFR-binding peptide
  MOD_RES (7), (7): Xaa is C or S
  MOD_RES (21), (22), (23), (24), (25): Xaa is A or G
  MOD_RES (26), (27), (28), (29): Xaa is A or G or is absent
NDEGLEXVPTGQRPVQMRKIXXXXXXXXXKKATVLEEHS

SEQ ID NO: 15510 - protein, 36 aa, Artificial Sequence
  Non-cyclic GFR-binding peptide
  MOD_RES (1), (35): Xaa is C or S
XVPTGQRSVKMAKVRIKPHQGQHKEVQVLEEHSQXE

SEQ ID NO: 15511 - protein, 35 aa, Artificial Sequence
  Non-cyclic GFR-binding peptide
  MOD_RES (2), (2): Xaa is C or S
EXVPTGQRPVQMRKIRIKPHQGQHKKATVLEEHSQ

SEQ ID NO: 15512 - protein, 38 aa, Artificial Sequence
  Non-cyclic GFR-binding peptide
  MOD_RES (5), (5): Xaa is C or S
  MOD_RES (19), (20), (21), (22), (23): Xaa is A or G
  MOD_RES (24), (25), (26), (27): Xaa is A or G or is absent
EGLEXVPTEESNITMQIMXXXXXXXXXLGEMSFLQHNK

SEQ ID NO: 15513 - protein, 36 aa, Artificial Sequence
  Non-cyclic GFR-binding peptide
  MOD_RES (35), (35): Xaa is C or S
SRVHHSNITVQIMEYVRKKPKLLGEMSRLEEHLEXA

SEQ ID NO: 15514 - protein, 41 aa, Artificial Sequence
  Non-cyclic GFR-binding peptide
  MOD_RES (5), (5): Xaa is C or S
  MOD_RES (21), (22), (23), (24), (25): Xaa is A or G
  MOD_RES (26), (27), (28), (29): Xaa is A or G or is absent
SSVKXQPSRVHHSNITVQIMXXXXXXXXXLGEMSRLEEHLE

SEQ ID NO: 15515 - protein, 39 aa, Artificial Sequence
  Non-cyclic GFR-binding peptide
  MOD_RES (3), (3): Xaa is C or S
  MOD_RES (19), (20), (21), (22), (23): Xaa is A or G
  MOD_RES (24), (25), (26), (27): Xaa is A or G or is absent
VQXRPTQVQLSNITVQIMXXXXXXXXXLGEMSTLEDHLA

SEQ ID NO: 15516 - protein, 38 aa, Artificial Sequence
  Non-cyclic GFR-binding peptide
  MOD_RES (3), (3): Xaa is C or S
  MOD_RES (19), (20), (21), (22), (23): Xaa is A or G
  MOD_RES (24), (25), (26), (27): Xaa is A or G or is absent
VKXQPSRVHHSNITVQIMXXXXXXXXXLGEMSRLEEHL

SEQ ID NO: 15517 - protein, 38 aa, Artificial Sequence
  Non-cyclic GFR-binding peptide
  MOD_RES (2), (2): Xaa is C or S
  MOD_RES (18), (19), (20), (21), (22): Xaa is A or G
  MOD_RES (23), (24), (25), (26): Xaa is A or G or is absent
QXRPTQVQLSNITVQIMXXXXXXXXXIGEMSTLEDHLA

SEQ ID NO: 15518 - protein, 35 aa, Artificial Sequence
  Non-cyclic GFR-binding peptide
  MOD_RES (3), (3): Xaa is C or S
LEXVPTGQRPVQMRKIRIKPHQGQHKKATVLEEHS

SEQ ID NO: 15519 - protein, 41 aa, Artificial Sequence
  Non-cyclic GFR-binding peptide
  MOD_RES (5), (5): Xaa is C or S
RNVQXRPTQVQLSNITVQIMEIVRKKPIFIGEMSTLEDHLA

SEQ ID NO: 15520 - protein, 32 aa, Artificial Sequence
  Non-cyclic GFR-binding peptide
  MOD_RES (14), (15), (16), (17), (18): Xaa is A or G
  MOD_RES (19), (20), (21), (22): Xaa is A or G or is absent
SRVHHRPVQVRKIXXXXXXXXXKKATVRLEEH

SEQ ID NO: 15521 - protein, 36 aa, Artificial Sequence
  Non-cyclic GFR-binding peptide
  MOD_RES (1), (1): Xaa is C or S
XRPTQVQLRSVKVAKVEIVRKKPIFKEVQVTLEDHL

SEQ ID NO: 15522 - protein, 36 aa, Artificial Sequence
  Non-cyclic GFR-binding peptide
  MOD_RES (35), (35): Xaa is C or S
  MOD_RES (14), (15), (16), (17), (18): Xaa is A or G
  MOD_RES (19), (20), (21), (22): Xaa is A or G or is absent
SRVHHSNITVQIMXXXXXXXXXIGEMSRLEEHLEXA

SEQ ID NO: 15523 - protein, 44 aa, Artificial Sequence
  Non-cyclic GFR-binding peptide
  MOD_RES (4), (41), (43): Xaa is C or S
  MOD_RES (20), (21), (22), (23), (24): Xaa is A or G
  MOD_RES (25), (26), (27), (28): Xaa is A or G or is absent
SVKXQPSRVHHRPVQVRKIXXXXXXXXXKKATVRLEEHLEXAXA

SEQ ID NO: 15524 - protein, 39 aa, Artificial Sequence
  Non-cyclic GFR-binding peptide
  MOD_RES (2), (36), (38): Xaa is C or S
  MOD_RES (16), (17), (18), (19), (20): Xaa is A or G
  MOD_RES (21), (22), (23), (24): Xaa is A or G or is absent
EXVPTGQRPVQMRKIXXXXXXXXXKKATVLEEHSQXEXR

SEQ ID NO: 15525 - protein, 42 aa, Artificial Sequence
  Non-cyclic GFR-binding peptide
  MOD_RES (3), (40), (42): Xaa is C or S
VKXQPSRVHHSNITVQIMEYVRKKPKLLGEMSRLEEHLEXAX

SEQ ID NO: 15526 - protein, 34 aa, Artificial Sequence
  Non-cyclic GFR-binding peptide
  MOD_RES (2), (2): Xaa is C or S
  MOD_RES (16), (17), (18), (19), (20): Xaa is A or G
  MOD_RES (21), (22), (23), (24): Xaa is A or G or is absent
EXVPTEERSVKMAKVXXXXXXXXXKEVQVFLQHN

SEQ ID NO: 15527 - protein, 43 aa, Artificial Sequence
  Non-cyclic GFR-binding peptide
  MOD_RES (3), (40), (42): Xaa is C or S
  MOD_RES (19), (20), (21), (22), (23): Xaa is A or G
  MOD_RES (24), (25), (26), (27): Xaa is A or G or is absent
VKXQPSRVHHRPVQVRKIXXXXXXXXXKKATVRLEEHLEXAXA

SEQ ID NO: 15528 - protein, 36 aa, Artificial Sequence
  Non-cyclic GFR-binding peptide
  MOD_RES (2), (2): Xaa is C or S
QXRPTQVQLSNITVQIMEIVRKKPIFIGEMSTLEDH

SEQ ID NO: 15529 - protein, 40 aa, Artificial Sequence
  Non-cyclic GFR-binding peptide
  MOD_RES (5), (39): Xaa is C or S
  MOD_RES (19), (20), (21), (22), (23): Xaa is A or G
  MOD_RES (24), (25), (26), (27): Xaa is A or G or is absent
EGLEXVPTEERPVQMRKIXXXXXXXXXKKATVFLQHNKXE

SEQ ID NO: 15530 - protein, 35 aa, Artificial Sequence
  Non-cyclic GFR-binding peptide
  MOD_RES (34), (34): Xaa is C or S
  MOD_RES (14), (15), (16), (17), (18): Xaa is A or G
  MOD_RES (19), (20), (21), (22): Xaa is A or G or is absent
VPTEERSVKMAKVXXXXXXXXXKEVQVFLQHNKXE

SEQ ID NO: 15531 - protein, 40 aa, Artificial Sequence
  Non-cyclic GFR-binding peptide
  MOD_RES (5), (39): Xaa is C or S
  MOD_RES (19), (20), (21), (22), (23): Xaa is A or G
  MOD_RES (24), (25), (26), (27): Xaa is A or G or is absent
EGLEXVPTGQRSVKMAKVXXXXXXXXXKEVQVLEEHSQXE

SEQ ID NO: 15532 - protein, 39 aa, Artificial Sequence
  Non-cyclic GFR-binding peptide
  MOD_RES (37), (39): Xaa is C or S
  MOD_RES (16), (17), (18), (19), (20): Xaa is A or G
  MOD_RES (21), (22), (23), (24): Xaa is A or G or is absent
RPTQVQLRSVKVAKVXXXXXXXXXKEVQVTLEDHLAXKX

SEQ ID NO: 15533 - protein, 36 aa, Artificial Sequence
  Non-cyclic GFR-binding peptide
  MOD_RES (2), (36): Xaa is C or S
  MOD_RES (16), (17), (18), (19), (20): Xaa is A or G
  MOD_RES (21), (22), (23), (24): Xaa is A or G or is absent
EXVPTEERSVKMAKVXXXXXXXXXKEVQVFLQHNKX

SEQ ID NO: 15534 - protein, 39 aa, Artificial Sequence
  Non-cyclic GFR-binding peptide
  MOD_RES (6), (6): Xaa is C or S
DEGLEXVPTGQRSVKMAKVRIKPHQGQHKEVQVLEEHSQ

SEQ ID NO: 15535 - protein, 38 aa, Artificial Sequence
  Non-cyclic GFR-binding peptide
  MOD_RES (1), (35), (37): Xaa is C or S
XVPTEESNITMQIMRIKPHQGQHLGEMSFLQHNKXEXR

SEQ ID NO: 15536 - protein, 34 aa, Artificial Sequence
  Non-cyclic GFR-binding peptide
  MOD_RES (1), (1): Xaa is C or S
  MOD_RES (15), (16), (17), (18), (19): Xaa is A or G
  MOD_RES (20), (21), (22), (23): Xaa is A or G or is absent
XVPTEERPVQMRKIXXXXXXXXXKKATVFLQHNK

SEQ ID NO: 15537 - protein, 35 aa, Artificial Sequence
  Non-cyclic GFR-binding peptide
  MOD_RES (16), (17), (18), (19), (20): Xaa is A or G
  MOD_RES (21), (22), (23), (24): Xaa is A or G or is absent
RPTQVQLRSVKVAKVXXXXXXXXXKEVQVTLEDHL

SEQ ID NO: 15538 - protein, 40 aa, Artificial Sequence
  Non-cyclic GFR-binding peptide
  MOD_RES (2), (39): Xaa is C or S
  MOD_RES (18), (19), (20), (21), (22): Xaa is A or G
  MOD_RES (23), (24), (25), (26): Xaa is A or G or is absent
KXQPSRVHHSNITVQIMXXXXXXXXXLGEMSRLEEHLEXA

SEQ ID NO: 15539 - protein, 44 aa, Artificial Sequence
  Non-cyclic GFR-binding peptide
  MOD_RES (7), (41), (43): Xaa is C or S
NDEGLEXVPTEERSVKMAKVRIKPHQGQHKEVQVFLQHNKXEXR

SEQ ID NO: 15540 - protein, 36 aa, Artificial Sequence
  Non-cyclic GFR-binding peptide
  MOD_RES (1), (1): Xaa is C or S
XQPSRVHHRPVQVRKIEYVRKKPKLKKATVRLEEHL

SEQ ID NO: 15541 - protein, 39 aa, Artificial Sequence
  Non-cyclic GFR-binding peptide
  MOD_RES (4), (38): Xaa is C or S
GLEXVPTEESNITMQIMRIKPHQGQHLGEMSFLQHNKXE

SEQ ID NO: 15542 - protein, 43 aa, Artificial Sequence
  Non-cyclic GFR-binding peptide
  MOD_RES (3), (40), (42): Xaa is C or S
VQXRPTQVQLSNITVQIMEIVRKKPIFIGEMSTLEDHLAXKXE

SEQ ID NO: 15543 - protein, 36 aa, Artificial Sequence
  Non-cyclic GFR-binding peptide
  MOD_RES (2), (36): Xaa is C or S
EXVPTGQSNITMQIMRIKPHQGQHIGEMSLEEHSQX

SEQ ID NO: 15544 - protein, 42 aa, Artificial Sequence
  Non-cyclic GFR-binding peptide
  MOD_RES (5), (39), (41): Xaa is C or S
EGLEXVPTGQSNITMQIMRIKPHQGQHIGEMSLEEHSQXEXR

SEQ ID NO: 15545 - protein, 41 aa, Artificial Sequence
  Non-cyclic GFR-binding peptide
  MOD_RES (4), (41): Xaa is C or S
  MOD_RES (20), (21), (22), (23), (24): Xaa is A or G
  MOD_RES (25), (26), (27), (28): Xaa is A or G or is absent
SVKXQPSRVHHSNITVQIMXXXXXXXXXIGEMSRLEEHLEX

SEQ ID NO: 15546 - protein, 40 aa, Artificial Sequence
  Non-cyclic GFR-binding peptide
  MOD_RES (5), (39): Xaa is C or S
  MOD_RES (19), (20), (21), (22), (23): Xaa is A or G
  MOD_RES (24), (25), (26), (27): Xaa is A or G or is absent
EGLEXVPTEESNITMQIMXXXXXXXXXLGEMSFLQHNKXE

SEQ ID NO: 15547 - protein, 44 aa, Artificial Sequence
  Non-cyclic GFR-binding peptide
  MOD_RES (7), (41), (43): Xaa is C or S
NDEGLEXVPTEERPVQMRKIRIKPHQGQHKKATVFLQHNKXEXR

SEQ ID NO: 15548 - protein, 37 aa, Artificial Sequence
  Non-cyclic GFR-binding peptide
  MOD_RES (36), (36): Xaa is C or S
PTQVQLSNITVQIMEIVRKKPIFLGEMSTLEDHLAXK

SEQ ID NO: 15549 - protein, 38 aa, Artificial Sequence
  Non-cyclic GFR-binding peptide
  MOD_RES (3), (37): Xaa is C or S
  MOD_RES (17), (18), (19), (20), (21): Xaa is A or G
  MOD_RES (22), (23), (24), (25): Xaa is A or G or is absent
LEXVPTGQRSVKMAKVXXXXXXXXXKEVQVLEEHSQXE

SEQ ID NO: 15550 - protein, 43 aa, Artificial Sequence
  Non-cyclic GFR-binding peptide
  MOD_RES (4), (41), (43): Xaa is C or S
  MOD_RES (20), (21), (22), (23), (24): Xaa is A or G
  MOD_RES (25), (26), (27), (28): Xaa is A or G or is absent
NVQXRPTQVQLRSVKVAKVXXXXXXXXXKEVQVTLEDHLAXKX

SEQ ID NO: 15551 - protein, 38 aa, Artificial Sequence
  Non-cyclic GFR-binding peptide
  MOD_RES (4), (38): Xaa is C or S
  MOD_RES (18), (19), (20), (21), (22): Xaa is A or G
  MOD_RES (23), (24), (25), (26): Xaa is A or G or is absent
GLEXVPTEERSVKMAKVXXXXXXXXXKEVQVFLQHNKX

SEQ ID NO: 15552 - protein, 34 aa, Artificial Sequence
  Non-cyclic GFR-binding peptide
  MOD_RES (2), (2): Xaa is C or S
EXVPTGQRSVKMAKVRIKPHQGQHKEVQVLEEHS

SEQ ID NO: 15553 - protein, 39 aa, Artificial Sequence
  Non-cyclic GFR-binding peptide
  MOD_RES (1), (38): Xaa is C or S
XRPTQVQLSNITVQIMEIVRKKPIFLGEMSTLEDHLAXK

SEQ ID NO: 15554 - protein, 38 aa, Artificial Sequence
  Non-cyclic GFR-binding peptide
  MOD_RES (4), (4): Xaa is C or S
  MOD_RES (20), (21), (22), (23), (24): Xaa is A or G
  MOD_RES (25), (26), (27), (28): Xaa is A or G or is absent
NVQXRPTQVQLSNITVQIMXXXXXXXXXLGEMSTLEDH

SEQ ID NO: 15555 - protein, 34 aa, Artificial Sequence
  Non-cyclic GFR-binding peptide
  MOD_RES (14), (15), (16), (17), (18): Xaa is A or G
  MOD_RES (19), (20), (21), (22): Xaa is A or G or is absent
TQVQLSNITVQIMXXXXXXXXXIGEMSTLEDHLA

SEQ ID NO: 15556 - protein, 42 aa, Artificial Sequence
  Non-cyclic GFR-binding peptide
  MOD_RES (6), (40), (42): Xaa is C or S
  MOD_RES (20), (21), (22), (23), (24): Xaa is A or G
  MOD_RES (25), (26), (27), (28): Xaa is A or G or is absent
DEGLEXVPTEERSVKMAKVXXXXXXXXXKEVQVFLQHNKXEX

SEQ ID NO: 15557 - protein, 38 aa, Artificial Sequence
  Non-cyclic GFR-binding peptide
  MOD_RES (5), (5): Xaa is C or S
EGLEXVPTGQRSVKMAKVRIKPHQGQHKEVQVLEEHSQ

SEQ ID NO: 15558 - protein, 42 aa, Artificial Sequence
  Non-cyclic GFR-binding peptide
  MOD_RES (3), (40), (42): Xaa is C or S
  MOD_RES (19), (20), (21), (22), (23): Xaa is A or G
  MOD_RES (24), (25), (26), (27): Xaa is A or G or is absent
VKXQPSRVHHRPVQVRKIXXXXXXXXXKKATVRLEEHLEXAX

SEQ ID NO: 15559 - protein, 41 aa, Artificial Sequence
  Non-cyclic GFR-binding peptide
  MOD_RES (4), (41): Xaa is C or S
  MOD_RES (20), (21), (22), (23), (24): Xaa is A or G
  MOD_RES (25), (26), (27), (28): Xaa is A or G or is absent
SVKXQPSRVHHSNITVQIMXXXXXXXXXLGEMSRLEEHLEX

SEQ ID NO: 15560 - protein, 37 aa, Artificial Sequence
  Non-cyclic GFR-binding peptide
  MOD_RES (35), (37): Xaa is C or S
  MOD_RES (14), (15), (16), (17), (18): Xaa is A or G
  MOD_RES (19), (20), (21), (22): Xaa is A or G or is absent
SRVHHSNITVQIMXXXXXXXXXIGEMSRLEEHLEXAX

SEQ ID NO: 15561 - protein, 38 aa, Artificial Sequence
  Non-cyclic GFR-binding peptide
  MOD_RES (6), (6): Xaa is C or S
  MOD_RES (20), (21), (22), (23), (24): Xaa is A or G
  MOD_RES (25), (26), (27), (28): Xaa is A or G or is absent
DEGLEXVPTGQRPVQMRKIXXXXXXXXXKKATVLEEHS

SEQ ID NO: 15562 - protein, 43 aa, Artificial Sequence
  Non-cyclic GFR-binding peptide
  MOD_RES (4), (41), (43): Xaa is C or S
NVQXRPTQVQLSNITVQIMEIVRKKPIFLGEMSTLEDHLAXKX

SEQ ID NO: 15563 - protein, 39 aa, Artificial Sequence
  Non-cyclic GFR-binding peptide
  MOD_RES (2), (36), (38): Xaa is C or S
  MOD_RES (16), (17), (18), (19), (20): Xaa is A or G
  MOD_RES (21), (22), (23), (24): Xaa is A or G or is absent
EXVPTGQRSVKMAKVXXXXXXXXXKEVQVLEEHSQXEXR

SEQ ID NO: 15564 - protein, 35 aa, Artificial Sequence
  Non-cyclic GFR-binding peptide
  MOD_RES (3), (3): Xaa is C or S
  MOD_RES (17), (18), (19), (20), (21): Xaa is A or G
  MOD_RES (22), (23), (24), (25): Xaa is A or G or is absent
LEXVPTGQRSVKMAKVXXXXXXXXXKEVQVLEEHS

SEQ ID NO: 15565 - protein, 34 aa, Artificial Sequence
  Non-cyclic GFR-binding peptide
  MOD_RES (1), (1): Xaa is C or S
XVPTEERSVKMAKVRIKPHQGQHKEVQVFLQHNK

SEQ ID NO: 15566 - protein, 39 aa, Artificial Sequence
  Non-cyclic GFR-binding peptide
  MOD_RES (3), (3): Xaa is C or S
VKXQPSRVHHRPVQVRKIEYVRKKPKLKKATVRLEEHLE

SEQ ID NO: 15567 - protein, 37 aa, Artificial Sequence
  Non-cyclic GFR-binding peptide
  MOD_RES (3), (3): Xaa is C or S
  MOD_RES (19), (20), (21), (22), (23): Xaa is A or G
  MOD_RES (24), (25), (26), (27): Xaa is A or G or is absent
VQXRPTQVQLSNITVQIMXXXXXXXXXLGEMSTLEDH

SEQ ID NO: 15568 - protein, 35 aa, Artificial Sequence
  Non-cyclic GFR-binding peptide
  MOD_RES (2), (2): Xaa is C or S
EXVPTEESNITMQIMRIKPHQGQHLGEMSFLQHNK

SEQ ID NO: 15569 - protein, 38 aa, Artificial Sequence
  Non-cyclic GFR-binding peptide
  MOD_RES (4), (4): Xaa is C or S
  MOD_RES (20), (21), (22), (23), (24): Xaa is A or G
  MOD_RES (25), (26), (27), (28): Xaa is A or G or is absent
NVQXRPTQVQLSNITVQIMXXXXXXXXXIGEMSTLEDH

SEQ ID NO: 15570 - protein, 37 aa, Artificial Sequence
  Non-cyclic GFR-binding peptide
  MOD_RES (37), (37): Xaa is C or S
RPTQVQLRSVKVAKVEIVRKKPIFKEVQVTLEDHLAX

SEQ ID NO: 15571 - protein, 36 aa, Artificial Sequence
  Non-cyclic GFR-binding peptide
  MOD_RES (1), (35): Xaa is C or S
XVPTEERPVQMRKIRIKPHQGQHKKATVFLQHNKXE

SEQ ID NO: 15572 - protein, 35 aa, Artificial Sequence
  Non-cyclic GFR-binding peptide
  MOD_RES (2), (2): Xaa is C or S
  MOD_RES (16), (17), (18), (19), (20): Xaa is A or G
  MOD_RES (21), (22), (23), (24): Xaa is A or G or is absent
EXVPTEERSVKMAKVXXXXXXXXXKEVQVFLQHNK

SEQ ID NO: 15573 - protein, 39 aa, Artificial Sequence
  Non-cyclic GFR-binding peptide
  MOD_RES (4), (4): Xaa is C or S
  MOD_RES (20), (21), (22), (23), (24): Xaa is A or G
  MOD_RES (25), (26), (27), (28): Xaa is A or G or is absent
SVKXQPSRVHHSNITVQIMXXXXXXXXXIGEMSRLEEHL

SEQ ID NO: 15574 - protein, 40 aa, Artificial Sequence
  Non-cyclic GFR-binding peptide
  MOD_RES (37), (39): Xaa is C or S
QPSRVHHSNITVQIMEYVRKKPKLLGEMSRLEEHLEXAXA

SEQ ID NO: 15575 - protein, 40 aa, Artificial Sequence
  Non-cyclic GFR-binding peptide
  MOD_RES (3), (40): Xaa is C or S
VKXQPSRVHHRPVQVRKIEYVRKKPKLKKATVRLEEHLEX

SEQ ID NO: 15576 - protein, 36 aa, Artificial Sequence
  Non-cyclic GFR-binding peptide
  MOD_RES (2), (2): Xaa is C or S
KXQPSRVHHRPVQVRKIEYVRKKPKLKKATVRLEEH

SEQ ID NO: 15577 - protein, 35 aa, Artificial Sequence
  Non-cyclic GFR-binding peptide
QPSRVHHSNITVQIMEYVRKKPKLIGEMSRLEEHL

SEQ ID NO: 15578 - protein, 39 aa, Artificial Sequence
  Non-cyclic GFR-binding peptide
  MOD_RES (6), (6): Xaa is C or S
DEGLEXVPTGQSNITMQIMRIKPHQGQHIGEMSLEEHSQ

SEQ ID NO: 15579 - protein, 38 aa, Artificial Sequence
  Non-cyclic GFR-binding peptide
  MOD_RES (35), (37): Xaa is C or S
  MOD_RES (14), (15), (16), (17), (18): Xaa is A or G
  MOD_RES (19), (20), (21), (22): Xaa is A or G or is absent
SRVHHSNITVQIMXXXXXXXXXLGEMSRLEEHLEXAXA

SEQ ID NO: 15580 - protein, 43 aa, Artificial Sequence
  Non-cyclic GFR-binding peptide
  MOD_RES (7), (41), (43): Xaa is C or S
NDEGLEXVPTGQRPVQMRKIRIKPHQGQHKKATVLEEHSQXEX

SEQ ID NO: 15581 - protein, 40 aa, Artificial Sequence
  Non-cyclic GFR-binding peptide
  MOD_RES (1), (38), (40): Xaa is C or S
XQPSRVHHSNITVQIMEYVRKKPKLLGEMSRLEEHLEXAX

SEQ ID NO: 15582 - protein, 40 aa, Artificial Sequence
  Non-cyclic GFR-binding peptide
  MOD_RES (1), (38), (40): Xaa is C or S
XQPSRVHHSNITVQIMEYVRKKPKLIGEMSRLEEHLEXAX

SEQ ID NO: 15583 - protein, 44 aa, Artificial Sequence
  Non-cyclic GFR-binding peptide
  MOD_RES (7), (41), (43): Xaa is C or S
  MOD_RES (21), (22), (23), (24), (25): Xaa is A or G
  MOD_RES (26), (27), (28), (29): Xaa is A or G or is absent
NDEGLEXVPTEERPVQMRKIXXXXXXXXXKKATVFLQHNKXEXR

SEQ ID NO: 15584 - protein, 33 aa, Artificial Sequence
  Non-cyclic GFR-binding peptide
PTQVQLSNITVQIMEIVRKKPIFIGEMSTLEDH

SEQ ID NO: 15585 - protein, 36 aa, Artificial Sequence
  Non-cyclic GFR-binding peptide
  MOD_RES (1), (1): Xaa is C or S
XRPTQVQLSNITVQIMEIVRKKPIFIGEMSTLEDHL

SEQ ID NO: 15586 - protein, 33 aa, Artificial Sequence
  Non-cyclic GFR-binding peptide
TQVQLRSVKVAKVEIVRKKPIFKEVQVTLEDHL

SEQ ID NO: 15587 - protein, 34 aa, Artificial Sequence
  Non-cyclic GFR-binding peptide
PSRVHHSNITVQIMEYVRKKPKLLGEMSRLEEHL

SEQ ID NO: 15588 - protein, 40 aa, Artificial Sequence
  Non-cyclic GFR-binding peptide
  MOD_RES (4), (4): Xaa is C or S
SVKXQPSRVHHSNITVQIMEYVRKKPKLIGEMSRLEEHLE

SEQ ID NO: 15589 - protein, 35 aa, Artificial Sequence
  Non-cyclic GFR-binding peptide
  MOD_RES (15), (16), (17), (18), (19): Xaa is A or G
  MOD_RES (20), (21), (22), (23): Xaa is A or G or is absent
PTQVQLSNITVQIMXXXXXXXXXIGEMSTLEDHLA

SEQ ID NO: 15590 - protein, 41 aa, Artificial Sequence
  Non-cyclic GFR-binding peptide
  MOD_RES (5), (39), (41): Xaa is C or S
  MOD_RES (19), (20), (21), (22), (23): Xaa is A or G
  MOD_RES (24), (25), (26), (27): Xaa is A or G or is absent
EGLEXVPTEERSVKMAKVXXXXXXXXXKEVQVFLQHNKXEX

SEQ ID NO: 15591 - protein, 34 aa, Artificial Sequence
  Non-cyclic GFR-binding peptide
  MOD_RES (34), (34): Xaa is C or S
VPTGQSNITMQIMRIKPHQGQHIGEMSLEEHSQX

SEQ ID NO: 15592 - protein, 36 aa, Artificial Sequence
  Non-cyclic GFR-binding peptide
  MOD_RES (2), (2): Xaa is C or S
KXQPSRVHHSNITVQIMEYVRKKPKLIGEMSRLEEH

SEQ ID NO: 15593 - protein, 40 aa, Artificial Sequence
  Non-cyclic GFR-binding peptide
  MOD_RES (7), (7): Xaa is C or S
NDEGLEXVPTEERPVQMRKIRIKPHQGQHKKATVFLQHNK

SEQ ID NO: 15594 - protein, 36 aa, Artificial Sequence
  Non-cyclic GFR-binding peptide
RPTQVQLRSVKVAKVEIVRKKPIFKEVQVTLEDHLA

SEQ ID NO: 15595 - protein, 37 aa, Artificial Sequence
  Non-cyclic GFR-binding peptide
  MOD_RES (37), (37): Xaa is C or S
  MOD_RES (16), (17), (18), (19), (20): Xaa is A or G
  MOD_RES (21), (22), (23), (24): Xaa is A or G or is absent
RPTQVQLSNITVQIMXXXXXXXXXIGEMSTLEDHLAX

SEQ ID NO: 15596 - protein, 34 aa, Artificial Sequence
  Non-cyclic GFR-binding peptide
  MOD_RES (15), (16), (17), (18), (19): Xaa is A or G
  MOD_RES (20), (21), (22), (23): Xaa is A or G or is absent
PTQVQLSNITVQIMXXXXXXXXXIGEMSTLEDHL

SEQ ID NO: 15597 - protein, 35 aa, Artificial Sequence
  Non-cyclic GFR-binding peptide
  MOD_RES (3), (3): Xaa is C or S
  MOD_RES (17), (18), (19), (20), (21): Xaa is A or G
  MOD_RES (22), (23), (24), (25): Xaa is A or G or is absent
LEXVPTEERPVQMRKIXXXXXXXXXKKATVFLQHN

SEQ ID NO: 15598 - protein, 40 aa, Artificial Sequence
  Non-cyclic GFR-binding peptide
  MOD_RES (2), (39): Xaa is C or S
KXQPSRVHHSNITVQIMEYVRKKPKLLGEMSRLEEHLEXA

SEQ ID NO: 15599 - protein, 38 aa, Artificial Sequence
  Non-cyclic GFR-binding peptide
  MOD_RES (3), (3): Xaa is C or S
VKXQPSRVHHRPVQVRKIEYVRKKPKLKKATVRLEEHL

SEQ ID NO: 15600 - protein, 44 aa, Artificial Sequence
  Non-cyclic GFR-binding peptide
  MOD_RES (5), (42), (44): Xaa is C or S
  MOD_RES (21), (22), (23), (24), (25): Xaa is A or G
  MOD_RES (26), (27), (28), (29): Xaa is A or G or is absent
RNVQXRPTQVQLRSVKVAKVXXXXXXXXXKEVQVTLEDHLAXKX

SEQ ID NO: 15601 - protein, 38 aa, Artificial Sequence
  Non-cyclic GFR-binding peptide
  MOD_RES (1), (35), (37): Xaa is C or S
XVPTGQSNITMQIMRIKPHQGQHIGEMSLEEHSQXEXR

SEQ ID NO: 15602 - protein, 43 aa, Artificial Sequence
  Non-cyclic GFR-binding peptide
  MOD_RES (4), (41), (43): Xaa is C or S
SVKXQPSRVHHSNITVQIMEYVRKKPKLIGEMSRLEEHLEXAX

SEQ ID NO: 15603 - protein, 40 aa, Artificial Sequence
  Non-cyclic GFR-binding peptide
  MOD_RES (2), (39): Xaa is C or S
KXQPSRVHHRPVQVRKIEYVRKKPKLKKATVRLEEHLEXA

SEQ ID NO: 15604 - protein, 43 aa, Artificial Sequence
  Non-cyclic GFR-binding peptide
  MOD_RES (4), (41), (43): Xaa is C or S
SVKXQPSRVHHSNITVQIMEYVRKKPKLLGEMSRLEEHLEXAX

SEQ ID NO: 15605 - protein, 34 aa, Artificial Sequence
  Non-cyclic GFR-binding peptide
  MOD_RES (34), (34): Xaa is C or S
  MOD_RES (14), (15), (16), (17), (18): Xaa is A or G
  MOD_RES (19), (20), (21), (22): Xaa is A or G or is absent
VPTGQSNITMQIMXXXXXXXXXIGEMSLEEHSQX

SEQ ID NO: 15606 - protein, 37 aa, Artificial Sequence
  Non-cyclic GFR-binding peptide
  MOD_RES (1), (35), (37): Xaa is C or S
  MOD_RES (15), (16), (17), (18), (19): Xaa is A or G
  MOD_RES (20), (21), (22), (23): Xaa is A or G or is absent
XVPTGQRPVQMRKIXXXXXXXXXKKATVLEEHSQXEX

SEQ ID NO: 15607 - protein, 43 aa, Artificial Sequence
  Non-cyclic GFR-binding peptide
  MOD_RES (3), (40), (42): Xaa is C or S
VQXRPTQVQLRSVKVAKVEIVRKKPIFKEVQVTLEDHLAXKXE

SEQ ID NO: 15608 - protein, 38 aa, Artificial Sequence
  Non-cyclic GFR-binding peptide
  MOD_RES (6), (6): Xaa is C or S
  MOD_RES (20), (21), (22), (23), (24): Xaa is A or G
  MOD_RES (25), (26), (27), (28): Xaa is A or G or is absent
DEGLEXVPTEERPVQMRKIXXXXXXXXXKKATVFLQHN

SEQ ID NO: 15609 - protein, 40 aa, Artificial Sequence
  Non-cyclic GFR-binding peptide
  MOD_RES (7), (7): Xaa is C or S
  MOD_RES (21), (22), (23), (24), (25): Xaa is A or G
  MOD_RES (26), (27), (28), (29): Xaa is A or G or is absent
NDEGLEXVPTEESNITMQIMXXXXXXXXXLGEMSFLQHNK

SEQ ID NO: 15610 - protein, 41 aa, Artificial Sequence
  Non-cyclic GFR-binding peptide
  MOD_RES (5), (39), (41): Xaa is C or S
  MOD_RES (19), (20), (21), (22), (23): Xaa is A or G
  MOD_RES (24), (25), (26), (27): Xaa is A or G or is absent
EGLEXVPTGQRSVKMAKVXXXXXXXXXKEVQVLEEHSQXEX

SEQ ID NO: 15611 - protein, 41 aa, Artificial Sequence
  Non-cyclic GFR-binding peptide
  MOD_RES (4), (38), (40): Xaa is C or S
GLEXVPTEERPVQMRKIRIKPHQGQHKKATVFLQHNKXEXR

SEQ ID NO: 15612 - protein, 38 aa, Artificial Sequence
  Non-cyclic GFR-binding peptide
  MOD_RES (2), (36), (38): Xaa is C or S
  MOD_RES (16), (17), (18), (19), (20): Xaa is A or G
  MOD_RES (21), (22), (23), (24): Xaa is A or G or is absent
EXVPTEERSVKMAKVXXXXXXXXXKEVQVFLQHNKXEX

SEQ ID NO: 15613 - protein, 35 aa, Artificial Sequence
  Non-cyclic GFR-binding peptide
  MOD_RES (1), (1): Xaa is C or S
  MOD_RES (17), (18), (19), (20), (21): Xaa is A or G
  MOD_RES (22), (23), (24), (25): Xaa is A or G or is absent
XQPSRVHHSNITVQIMXXXXXXXXXIGEMSRLEEH

SEQ ID NO: 15614 - protein, 36 aa, Artificial Sequence
  Non-cyclic GFR-binding peptide
  MOD_RES (1), (35): Xaa is C or S
XVPTEESNITMQIMRIKPHQGQHLGEMSFLQHNKXE

SEQ ID NO: 15615 - protein, 36 aa, Artificial Sequence
  Non-cyclic GFR-binding peptide
  MOD_RES (3), (3): Xaa is C or S
LEXVPTGQRSVKMAKVRIKPHQGQHKEVQVLEEHSQ

SEQ ID NO: 15616 - protein, 39 aa, Artificial Sequence
  Non-cyclic GFR-binding peptide
  MOD_RES (4), (38): Xaa is C or S
GLEXVPTEERPVQMRKIRIKPHQGQHKKATVFLQHNKXE

SEQ ID NO: 15617 - protein, 37 aa, Artificial Sequence
  Non-cyclic GFR-binding peptide
  MOD_RES (1), (1): Xaa is C or S
  MOD_RES (17), (18), (19), (20), (21): Xaa is A or G
  MOD_RES (22), (23), (24), (25): Xaa is A or G or is absent
XRPTQVQLSNITVQIMXXXXXXXXXLGEMSTLEDHLA

SEQ ID NO: 15618 - protein, 35 aa, Artificial Sequence
  Non-cyclic GFR-binding peptide
  MOD_RES (3), (3): Xaa is C or S
  MOD_RES (17), (18), (19), (20), (21): Xaa is A or G
  MOD_RES (22), (23), (24), (25): Xaa is A or G or is absent
LEXVPTEERSVKMAKVXXXXXXXXXKEVQVFLQHN

SEQ ID NO: 15619 - protein, 37 aa, Artificial Sequence
  Non-cyclic GFR-binding peptide
  MOD_RES (3), (3): Xaa is C or S
VQXRPTQVQLRSVKVAKVEIVRKKPIFKEVQVTLEDH

SEQ ID NO: 15620 - protein, 33 aa, Artificial Sequence
  Non-cyclic GFR-binding peptide
  MOD_RES (14), (15), (16), (17), (18): Xaa is A or G
  MOD_RES (19), (20), (21), (22): Xaa is A or G or is absent
TQVQLSNITVQIMXXXXXXXXXIGEMSTLEDHL

SEQ ID NO: 15621 - protein, 40 aa, Artificial Sequence
  Non-cyclic GFR-binding peptide
  MOD_RES (4), (4): Xaa is C or S
  MOD_RES (20), (21), (22), (23), (24): Xaa is A or G
  MOD_RES (25), (26), (27), (28): Xaa is A or G or is absent
NVQXRPTQVQLSNITVQIMXXXXXXXXXIGEMSTLEDHLA

SEQ ID NO: 15622 - protein, 40 aa, Artificial Sequence
  Non-cyclic GFR-binding peptide
  MOD_RES (3), (37), (39): Xaa is C or S
LEXVPTGQRPVQMRKIRIKPHQGQHKKATVLEEHSQXEXR

SEQ ID NO: 15623 - protein, 41 aa, Artificial Sequence
  Non-cyclic GFR-binding peptide
  MOD_RES (5), (39), (41): Xaa is C or S
EGLEXVPTEESNITMQIMRIKPHQGQHLGEMSFLQHNKXEX

SEQ ID NO: 15624 - protein, 38 aa, Artificial Sequence
  Non-cyclic GFR-binding peptide
  MOD_RES (3), (37): Xaa is C or S
  MOD_RES (17), (18), (19), (20), (21): Xaa is A or G
  MOD_RES (22), (23), (24), (25): Xaa is A or G or is absent
LEXVPTEERPVQMRKIXXXXXXXXXKKATVFLQHNKXE

SEQ ID NO: 15625 - protein, 38 aa, Artificial Sequence
  Non-cyclic GFR-binding peptide
  MOD_RES (1), (38): Xaa is C or S
  MOD_RES (17), (18), (19), (20), (21): Xaa is A or G
  MOD_RES (22), (23), (24), (25): Xaa is A or G or is absent
XQPSRVHHRPVQVRKIXXXXXXXXXKKATVRLEEHLEX

SEQ ID NO: 15626 - protein, 36 aa, Artificial Sequence
  Non-cyclic GFR-binding peptide
  MOD_RES (2), (36): Xaa is C or S
EXVPTEERSVKMAKVRIKPHQGQHKEVQVFLQHNKX

SEQ ID NO: 15627 - protein, 37 aa, Artificial Sequence
  Non-cyclic GFR-binding peptide
  MOD_RES (1), (1): Xaa is C or S
  MOD_RES (17), (18), (19), (20), (21): Xaa is A or G
  MOD_RES (22), (23), (24), (25): Xaa is A or G or is absent
XRPTQVQLRSVKVAKVXXXXXXXXXKEVQVTLEDHLA

SEQ ID NO: 15628 - protein, 40 aa, Artificial Sequence
  Non-cyclic GFR-binding peptide
  MOD_RES (1), (38), (40): Xaa is C or S
XRPTQVQLRSVKVAKVEIVRKKPIFKEVQVTLEDHLAXKX

SEQ ID NO: 15629 - protein, 40 aa, Artificial Sequence
  Non-cyclic GFR-binding peptide
  MOD_RES (5), (5): Xaa is C or S
SSVKXQPSRVHHSNITVQIMEYVRKKPKLIGEMSRLEEHL

SEQ ID NO: 15630 - protein, 37 aa, Artificial Sequence
  Non-cyclic GFR-binding peptide
  MOD_RES (4), (4): Xaa is C or S
GLEXVPTGQRPVQMRKIRIKPHQGQHKKATVLEEHSQ

SEQ ID NO: 15631 - protein, 40 aa, Artificial Sequence
  Non-cyclic GFR-binding peptide
  MOD_RES (7), (7): Xaa is C or S
NDEGLEXVPTGQRPVQMRKIRIKPHQGQHKKATVLEEHSQ

SEQ ID NO: 15632 - protein, 37 aa, Artificial Sequence
  Non-cyclic GFR-binding peptide
  MOD_RES (1), (35), (37): Xaa is C or S
XVPTEERPVQMRKIRIKPHQGQHKKATVFLQHNKXEX

SEQ ID NO: 15633 - protein, 42 aa, Artificial Sequence
  Non-cyclic GFR-binding peptide
  MOD_RES (5), (39), (41): Xaa is C or S
  MOD_RES (19), (20), (21), (22), (23): Xaa is A or G
  MOD_RES (24), (25), (26), (27): Xaa is A or G or is absent
EGLEXVPTEESNITMQIMXXXXXXXXXLGEMSFLQHNKXEXR

SEQ ID NO: 15634 - protein, 34 aa, Artificial Sequence
  Non-cyclic GFR-binding peptide
  MOD_RES (2), (2): Xaa is C or S
EXVPTEERPVQMRKIRIKPHQGQHKKATVFLQHN

SEQ ID NO: 15635 - protein, 35 aa, Artificial Sequence
  Non-cyclic GFR-binding peptide
  MOD_RES (1), (1): Xaa is C or S
  MOD_RES (17), (18), (19), (20), (21): Xaa is A or G
  MOD_RES (22), (23), (24), (25): Xaa is A or G or is absent
XQPSRVHHSNITVQIMXXXXXXXXXLGEMSRLEEH

SEQ ID NO: 15636 - protein, 38 aa, Artificial Sequence
  Non-cyclic GFR-binding peptide
  MOD_RES (1), (38): Xaa is C or S
  MOD_RES (17), (18), (19), (20), (21): Xaa is A or G
  MOD_RES (22), (23), (24), (25): Xaa is A or G or is absent
XQPSRVHHSNITVQIMXXXXXXXXXLGEMSRLEEHLEX

SEQ ID NO: 15637 - protein, 42 aa, Artificial Sequence
  Non-cyclic GFR-binding peptide
  MOD_RES (2), (39), (41): Xaa is C or S
KXQPSRVHHSNITVQIMEYVRKKPKLIGEMSRLEEHLEXAXA

SEQ ID NO: 15638 - protein, 34 aa, Artificial Sequence
  Non-cyclic GFR-binding peptide
PTQVQLRSVKVAKVEIVRKKPIFKEVQVTLEDHL

SEQ ID NO: 15639 - protein, 41 aa, Artificial Sequence
  Non-cyclic GFR-binding peptide
  MOD_RES (1), (38), (40): Xaa is C or S
XQPSRVHHRPVQVRKIEYVRKKPKLKKATVRLEEHLEXAXA

SEQ ID NO: 15640 - protein, 34 aa, Artificial Sequence
  Non-cyclic GFR-binding peptide
  MOD_RES (1), (1): Xaa is C or S
  MOD_RES (15), (16), (17), (18), (19): Xaa is A or G
  MOD_RES (20), (21), (22), (23): Xaa is A or G or is absent
XVPTGQSNITMQIMXXXXXXXXXIGEMSLEEHSQ

SEQ ID NO: 15641 - protein, 37 aa, Artificial Sequence
  Non-cyclic GFR-binding peptide
  MOD_RES (1), (35), (37): Xaa is C or S
  MOD_RES (15), (16), (17), (18), (19): Xaa is A or G
  MOD_RES (20), (21), (22), (23): Xaa is A or G or is absent
XVPTEERPVQMRKIXXXXXXXXXKKATVFLQHNKXEX

SEQ ID NO: 15642 - protein, 40 aa, Artificial Sequence
  Non-cyclic GFR-binding peptide
  MOD_RES (3), (37), (39): Xaa is C or S
LEXVPTGQSNITMQIMRIKPHQGQHIGEMSLEEHSQXEXR

SEQ ID NO: 15643 - protein, 41 aa, Artificial Sequence
  Non-cyclic GFR-binding peptide
  MOD_RES (3), (40): Xaa is C or S
  MOD_RES (19), (20), (21), (22), (23): Xaa is A or G
  MOD_RES (24), (25), (26), (27): Xaa is A or G or is absent
VKXQPSRVHHSNITVQIMXXXXXXXXXIGEMSRLEEHLEXA

SEQ ID NO: 15644 - protein, 42 aa, Artificial Sequence
  Non-cyclic GFR-binding peptide
  MOD_RES (3), (40), (42): Xaa is C or S
  MOD_RES (19), (20), (21), (22), (23): Xaa is A or G
  MOD_RES (24), (25), (26), (27): Xaa is A or G or is absent
VQXRPTQVQLSNITVQIMXXXXXXXXXIGEMSTLEDHLAXKX

SEQ ID NO: 15645 - protein, 42 aa, Artificial Sequence
  Non-cyclic GFR-binding peptide
  MOD_RES (3), (40), (42): Xaa is C or S
  MOD_RES (19), (20), (21), (22), (23): Xaa is A or G
  MOD_RES (24), (25), (26), (27): Xaa is A or G or is absent
VQXRPTQVQLSNITVQIMXXXXXXXXXLGEMSTLEDHLAXKX

SEQ ID NO: 15646 - protein, 40 aa, Artificial Sequence
  Non-cyclic GFR-binding peptide
  MOD_RES (6), (40): Xaa is C or S
  MOD_RES (20), (21), (22), (23), (24): Xaa is A or G
  MOD_RES (25), (26), (27), (28): Xaa is A or G or is absent
DEGLEXVPTEESNITMQIMXXXXXXXXXLGEMSFLQHNKX

SEQ ID NO: 15647 - protein, 38 aa, Artificial Sequence
  Non-cyclic GFR-binding peptide
  MOD_RES (35), (37): Xaa is C or S
  MOD_RES (14), (15), (16), (17), (18): Xaa is A or G
  MOD_RES (19), (20), (21), (22): Xaa is A or G or is absent
SRVHHSNITVQIMXXXXXXXXXIGEMSRLEEHLEXAXA

SEQ ID NO: 15648 - protein, 38 aa, Artificial Sequence
  Non-cyclic GFR-binding peptide
  MOD_RES (2), (2): Xaa is C or S
KXQPSRVHHRPVQVRKIEYVRKKPKLKKATVRLEEHLE

SEQ ID NO: 15649 - protein, 41 aa, Artificial Sequence
  Non-cyclic GFR-binding peptide
  MOD_RES (2), (39), (41): Xaa is C or S
  MOD_RES (18), (19), (20), (21), (22): Xaa is A or G
  MOD_RES (23), (24), (25), (26): Xaa is A or G or is absent
KXQPSRVHHSNITVQIMXXXXXXXXXLGEMSRLEEHLEXAX

SEQ ID NO: 15650 - protein, 39 aa, Artificial Sequence
  Non-cyclic GFR-binding peptide
  MOD_RES (37), (39): Xaa is C or S
  MOD_RES (16), (17), (18), (19), (20): Xaa is A or G
  MOD_RES (21), (22), (23), (24): Xaa is A or G or is absent
QPSRVHHSNITVQIMXXXXXXXXXLGEMSRLEEHLEXAX

SEQ ID NO: 15651 - protein, 41 aa, Artificial Sequence
  Non-cyclic GFR-binding peptide
  MOD_RES (5), (39), (41): Xaa is C or S
  MOD_RES (19), (20), (21), (22), (23): Xaa is A or G
  MOD_RES (24), (25), (26), (27): Xaa is A or G or is absent
EGLEXVPTEESNITMQIMXXXXXXXXXLGEMSFLQHNKXEX

SEQ ID NO: 15652 - protein, 33 aa, Artificial Sequence
  Non-cyclic GFR-binding peptide
  MOD_RES (14), (15), (16), (17), (18): Xaa is A or G
  MOD_RES (19), (20), (21), (22): Xaa is A or G or is absent
VPTGQRSVKMAKVXXXXXXXXXKEVQVLEEHSQ

SEQ ID NO: 15653 - protein, 40 aa, Artificial Sequence
  Non-cyclic GFR-binding peptide
  MOD_RES (3), (40): Xaa is C or S
VQXRPTQVQLSNITVQIMEIVRKKPIFIGEMSTLEDHLAX

SEQ ID NO: 15654 - protein, 39 aa, Artificial Sequence
  Non-cyclic GFR-binding peptide
  MOD_RES (2), (39): Xaa is C or S
  MOD_RES (18), (19), (20), (21), (22): Xaa is A or G
  MOD_RES (23), (24), (25), (26): Xaa is A or G or is absent
KXQPSRVHHSNITVQIMXXXXXXXXXLGEMSRLEEHLEX

SEQ ID NO: 15655 - protein, 33 aa, Artificial Sequence
  Non-cyclic GFR-binding peptide
SRVHHSNITVQIMEYVRKKPKLLGEMSRLEEHL

SEQ ID NO: 15656 - protein, 40 aa, Artificial Sequence
  Non-cyclic GFR-binding peptide
  MOD_RES (5), (5): Xaa is C or S
RNVQXRPTQVQLSNITVQIMEIVRKKPIFIGEMSTLEDHL

SEQ ID NO: 15657 - protein, 36 aa, Artificial Sequence
  Non-cyclic GFR-binding peptide
  MOD_RES (36), (36): Xaa is C or S
PTQVQLSNITVQIMEIVRKKPIFIGEMSTLEDHLAX

SEQ ID NO: 15658 - protein, 43 aa, Artificial Sequence
  Non-cyclic GFR-binding peptide
  MOD_RES (7), (41), (43): Xaa is C or S
NDEGLEXVPTGQRSVKMAKVRIKPHQGQHKEVQVLEEHSQXEX

SEQ ID NO: 15659 - protein, 42 aa, Artificial Sequence
  Non-cyclic GFR-binding peptide
  MOD_RES (3), (40), (42): Xaa is C or S
  MOD_RES (19), (20), (21), (22), (23): Xaa is A or G
  MOD_RES (24), (25), (26), (27): Xaa is A or G or is absent
VKXQPSRVHHSNITVQIMXXXXXXXXXIGEMSRLEEHLEXAX

SEQ ID NO: 15660 - protein, 40 aa, Artificial Sequence
  Non-cyclic GFR-binding peptide
  MOD_RES (6), (40): Xaa is C or S
  MOD_RES (20), (21), (22), (23), (24): Xaa is A or G
  MOD_RES (25), (26), (27), (28): Xaa is A or G or is absent
DEGLEXVPTGQRPVQMRKIXXXXXXXXXKKATVLEEHSQX

SEQ ID NO: 15661 - protein, 38 aa, Artificial Sequence
  Non-cyclic GFR-binding peptide
  MOD_RES (4), (4): Xaa is C or S
  MOD_RES (20), (21), (22), (23), (24): Xaa is A or G
  MOD_RES (25), (26), (27), (28): Xaa is A or G or is absent
SVKXQPSRVHHRPVQVRKIXXXXXXXXXKKATVRLEEH

SEQ ID NO: 15662 - protein, 37 aa, Artificial Sequence
  Non-cyclic GFR-binding peptide
  MOD_RES (4), (4): Xaa is C or S
  MOD_RES (18), (19), (20), (21), (22): Xaa is A or G
  MOD_RES (23), (24), (25), (26): Xaa is A or G or is absent
GLEXVPTEERSVKMAKVXXXXXXXXXKEVQVFLQHNK

SEQ ID NO: 15663 - protein, 37 aa, Artificial Sequence
  Non-cyclic GFR-binding peptide
  MOD_RES (35), (37): Xaa is C or S
  MOD_RES (14), (15), (16), (17), (18): Xaa is A or G
  MOD_RES (19), (20), (21), (22): Xaa is A or G or is absent
SRVHHRPVQVRKIXXXXXXXXXKKATVRLEEHLEXAX

SEQ ID NO: 15664 - protein, 32 aa, Artificial Sequence
  Non-cyclic GFR-binding peptide
  MOD_RES (14), (15), (16), (17), (18): Xaa is A or G
  MOD_RES (19), (20), (21), (22): Xaa is A or G or is absent
SRVHHSNITVQIMXXXXXXXXXIGEMSRLEEH

SEQ ID NO: 15665 - protein, 41 aa, Artificial Sequence
  Non-cyclic GFR-binding peptide
  MOD_RES (5), (5): Xaa is C or S
  MOD_RES (21), (22), (23), (24), (25): Xaa is A or G
  MOD_RES (26), (27), (28), (29): Xaa is A or G or is absent
RNVQXRPTQVQLSNITVQIMXXXXXXXXXIGEMSTLEDHLA

SEQ ID NO: 15666 - protein, 37 aa, Artificial Sequence
  Non-cyclic GFR-binding peptide
  MOD_RES (35), (37): Xaa is C or S
  MOD_RES (14), (15), (16), (17), (18): Xaa is A or G
  MOD_RES (19), (20), (21), (22): Xaa is A or G or is absent
TQVQLSNITVQIMXXXXXXXXXIGEMSTLEDHLAXKX

SEQ ID NO: 15667 - protein, 36 aa, Artificial Sequence
  Non-cyclic GFR-binding peptide
  MOD_RES (34), (36): Xaa is C or S
  MOD_RES (14), (15), (16), (17), (18): Xaa is A or G
  MOD_RES (19), (20), (21), (22): Xaa is A or G or is absent
VPTGQSNITMQIMXXXXXXXXXIGEMSLEEHSQXEX

SEQ ID NO: 15668 - protein, 38 aa, Artificial Sequence
  Non-cyclic GFR-binding peptide
  MOD_RES (36), (38): Xaa is C or S
PSRVHHSNITVQIMEYVRKKPKLIGEMSRLEEHLEXAX

SEQ ID NO: 15669 - protein, 40 aa, Artificial Sequence
  Non-cyclic GFR-binding peptide
  MOD_RES (4), (38), (40): Xaa is C or S
  MOD_RES (18), (19), (20), (21), (22): Xaa is A or G
  MOD_RES (23), (24), (25), (26): Xaa is A or G or is absent
GLEXVPTEESNITMQIMXXXXXXXXXLGEMSFLQHNKXEX

SEQ ID NO: 15670 - protein, 37 aa, Artificial Sequence
  Non-cyclic GFR-binding peptide
  MOD_RES (3), (3): Xaa is C or S
VQXRPTQVQLSNITVQIMEIVRKKPIFLGEMSTLEDH

SEQ ID NO: 15671 - protein, 34 aa, Artificial Sequence
  Non-cyclic GFR-binding peptide
  MOD_RES (15), (16), (17), (18), (19): Xaa is A or G
  MOD_RES (20), (21), (22), (23): Xaa is A or G or is absent
PTQVQLRSVKVAKVXXXXXXXXXKEVQVTLEDHL

SEQ ID NO: 15672 - protein, 35 aa, Artificial Sequence
  Non-cyclic GFR-binding peptide
  MOD_RES (35), (35): Xaa is C or S
SRVHHSNITVQIMEYVRKKPKLIGEMSRLEEHLEX

SEQ ID NO: 15673 - protein, 38 aa, Artificial Sequence
  Non-cyclic GFR-binding peptide
  MOD_RES (3), (3): Xaa is C or S
VQXRPTQVQLSNITVQIMEIVRKKPIFIGEMSTLEDHL

SEQ ID NO: 15674 - protein, 34 aa, Artificial Sequence
  Non-cyclic GFR-binding peptide
  MOD_RES (2), (2): Xaa is C or S
  MOD_RES (16), (17), (18), (19), (20): Xaa is A or G
  MOD_RES (21), (22), (23), (24): Xaa is A or G or is absent
EXVPTEERPVQMRKIXXXXXXXXXKKATVFLQHN

SEQ ID NO: 15675 - protein, 42 aa, Artificial Sequence
  Non-cyclic GFR-binding peptide
  MOD_RES (6), (40), (42): Xaa is C or S
  MOD_RES (20), (21), (22), (23), (24): Xaa is A or G
  MOD_RES (25), (26), (27), (28): Xaa is A or G or is absent
DEGLEXVPTEERPVQMRKIXXXXXXXXXKKATVFLQHNKXEX

SEQ ID NO: 15676 - protein, 42 aa, Artificial Sequence
  Non-cyclic GFR-binding peptide
  MOD_RES (4), (41): Xaa is C or S
NVQXRPTQVQLSNITVQIMEIVRKKPIFIGEMSTLEDHLAXK

SEQ ID NO: 15677 - protein, 38 aa, Artificial Sequence
  Non-cyclic GFR-binding peptide
  MOD_RES (5), (5): Xaa is C or S
EGLEXVPTGQSNITMQIMRIKPHQGQHIGEMSLEEHSQ

SEQ ID NO: 15678 - protein, 38 aa, Artificial Sequence
  Non-cyclic GFR-binding peptide
  MOD_RES (36), (38): Xaa is C or S
  MOD_RES (15), (16), (17), (18), (19): Xaa is A or G
  MOD_RES (20), (21), (22), (23): Xaa is A or G or is absent
PSRVHHRPVQVRKIXXXXXXXXXKKATVRLEEHLEXAX

SEQ ID NO: 15679 - protein, 36 aa, Artificial Sequence
  Non-cyclic GFR-binding peptide
  MOD_RES (36), (36): Xaa is C or S
PSRVHHSNITVQIMEYVRKKPKLIGEMSRLEEHLEX

SEQ ID NO: 15680 - protein, 35 aa, Artificial Sequence
  Non-cyclic GFR-binding peptide
  MOD_RES (35), (35): Xaa is C or S
SRVHHRPVQVRKIEYVRKKPKLKKATVRLEEHLEX

SEQ ID NO: 15681 - protein, 38 aa, Artificial Sequence
  Non-cyclic GFR-binding peptide
  MOD_RES (5), (5): Xaa is C or S
EGLEXVPTGQRPVQMRKIRIKPHQGQHKKATVLEEHSQ

SEQ ID NO: 15682 - protein, 36 aa, Artificial Sequence
  Non-cyclic GFR-binding peptide
  MOD_RES (2), (2): Xaa is C or S
QXRPTQVQLSNITVQIMEIVRKKPIFLGEMSTLEDH

SEQ ID NO: 15683 - protein, 37 aa, Artificial Sequence
  Non-cyclic GFR-binding peptide
  MOD_RES (36), (36): Xaa is C or S
  MOD_RES (15), (16), (17), (18), (19): Xaa is A or G
  MOD_RES (20), (21), (22), (23): Xaa is A or G or is absent
PTQVQLSNITVQIMXXXXXXXXXLGEMSTLEDHLAXK

SEQ ID NO: 15684 - protein, 33 aa, Artificial Sequence
  Non-cyclic GFR-binding peptide
TQVQLSNITVQIMEIVRKKPIFIGEMSTLEDHL

SEQ ID NO: 15685 - protein, 34 aa, Artificial Sequence
  Non-cyclic GFR-binding peptide
TQVQLSNITVQIMEIVRKKPIFIGEMSTLEDHLA

SEQ ID NO: 15686 - protein, 37 aa, Artificial Sequence
  Non-cyclic GFR-binding peptide
  MOD_RES (3), (37): Xaa is C or S
LEXVPTEERPVQMRKIRIKPHQGQHKKATVFLQHNKX

SEQ ID NO: 15687 - protein, 36 aa, Artificial Sequence
  Non-cyclic GFR-binding peptide
  MOD_RES (2), (2): Xaa is C or S
KXQPSRVHHSNITVQIMEYVRKKPKLLGEMSRLEEH

SEQ ID NO: 15688 - protein, 37 aa, Artificial Sequence
  Non-cyclic GFR-binding peptide
  MOD_RES (3), (37): Xaa is C or S
  MOD_RES (17), (18), (19), (20), (21): Xaa is A or G
  MOD_RES (22), (23), (24), (25): Xaa is A or G or is absent
LEXVPTEERPVQMRKIXXXXXXXXXKKATVFLQHNKX

SEQ ID NO: 15689 - protein, 38 aa, Artificial Sequence
  Non-cyclic GFR-binding peptide
  MOD_RES (2), (2): Xaa is C or S
QXRPTQVQLRSVKVAKVEIVRKKPIFKEVQVTLEDHLA

SEQ ID NO: 15690 - protein, 38 aa, Artificial Sequence
  Non-cyclic GFR-binding peptide
  MOD_RES (4), (4): Xaa is C or S
  MOD_RES (20), (21), (22), (23), (24): Xaa is A or G
  MOD_RES (25), (26), (27), (28): Xaa is A or G or is absent
SVKXQPSRVHHSNITVQIMXXXXXXXXXLGEMSRLEEH

SEQ ID NO: 15691 - protein, 36 aa, Artificial Sequence
  Non-cyclic GFR-binding peptide
  MOD_RES (34), (36): Xaa is C or S
  MOD_RES (14), (15), (16), (17), (18): Xaa is A or G
  MOD_RES (19), (20), (21), (22): Xaa is A or G or is absent
VPTGQRSVKMAKVXXXXXXXXXKEVQVLEEHSQXEX

SEQ ID NO: 15692 - protein, 40 aa, Artificial Sequence
  Non-cyclic GFR-binding peptide
  MOD_RES (6), (40): Xaa is C or S
DEGLEXVPTEERSVKMAKVRIKPHQGQHKEVQVFLQHNKX

SEQ ID NO: 15693 - protein, 38 aa, Artificial Sequence
  Non-cyclic GFR-binding peptide
  MOD_RES (1), (35), (37): Xaa is C or S
  MOD_RES (15), (16), (17), (18), (19): Xaa is A or G
  MOD_RES (20), (21), (22), (23): Xaa is A or G or is absent
XVPTEESNITMQIMXXXXXXXXXLGEMSFLQHNKXEXR

SEQ ID NO: 15694 - protein, 37 aa, Artificial Sequence
  Non-cyclic GFR-binding peptide
  MOD_RES (1), (35), (37): Xaa is C or S
  MOD_RES (15), (16), (17), (18), (19): Xaa is A or G
  MOD_RES (20), (21), (22), (23): Xaa is A or G or is absent
XVPTEERSVKMAKVXXXXXXXXXKEVQVFLQHNKXEX

SEQ ID NO: 15695 - protein, 40 aa, Artificial Sequence
  Non-cyclic GFR-binding peptide
  MOD_RES (6), (40): Xaa is C or S
DEGLEXVPTGQRPVQMRKIRIKPHQGQHKKATVLEEHSQX

SEQ ID NO: 15696 - protein, 36 aa, Artificial Sequence
  Non-cyclic GFR-binding peptide
  MOD_RES (2), (2): Xaa is C or S
  MOD_RES (18), (19), (20), (21), (22): Xaa is A or G
  MOD_RES (23), (24), (25), (26): Xaa is A or G or is absent
QXRPTQVQLRSVKVAKVXXXXXXXXXKEVQVTLEDH

SEQ ID NO: 15697 - protein, 40 aa, Artificial Sequence
  Non-cyclic GFR-binding peptide
  MOD_RES (3), (37), (39): Xaa is C or S
  MOD_RES (17), (18), (19), (20), (21): Xaa is A or G
  MOD_RES (22), (23), (24), (25): Xaa is A or G or is absent
LEXVPTEESNITMQIMXXXXXXXXXLGEMSFLQHNKXEXR

SEQ ID NO: 15698 - protein, 40 aa, Artificial Sequence
  Non-cyclic GFR-binding peptide
  MOD_RES (3), (40): Xaa is C or S
  MOD_RES (19), (20), (21), (22), (23): Xaa is A or G
  MOD_RES (24), (25), (26), (27): Xaa is A or G or is absent
VQXRPTQVQLRSVKVAKVXXXXXXXXXKEVQVTLEDHLAX

SEQ ID NO: 15699 - protein, 34 aa, Artificial Sequence
  Non-cyclic GFR-binding peptide
  MOD_RES (16), (17), (18), (19), (20): Xaa is A or G
  MOD_RES (21), (22), (23), (24): Xaa is A or G or is absent
RPTQVQLRSVKVAKVXXXXXXXXXKEVQVTLEDH

SEQ ID NO: 15700 - protein, 41 aa, Artificial Sequence
  Non-cyclic GFR-binding peptide
  MOD_RES (6), (40): Xaa is C or S
DEGLEXVPTEESNITMQIMRIKPHQGQHLGEMSFLQHNKXE

SEQ ID NO: 15701 - protein, 40 aa, Artificial Sequence
  Non-cyclic GFR-binding peptide
  MOD_RES (37), (39): Xaa is C or S
QPSRVHHRPVQVRKIEYVRKKPKLKKATVRLEEHLEXAXA

SEQ ID NO: 15702 - protein, 36 aa, Artificial Sequence
  Non-cyclic GFR-binding peptide
  MOD_RES (35), (35): Xaa is C or S
SRVHHRPVQVRKIEYVRKKPKLKKATVRLEEHLEXA

SEQ ID NO: 15703 - protein, 36 aa, Artificial Sequence
  Non-cyclic GFR-binding peptide
  MOD_RES (1), (1): Xaa is C or S
  MOD_RES (17), (18), (19), (20), (21): Xaa is A or G
  MOD_RES (22), (23), (24), (25): Xaa is A or G or is absent
XRPTQVQLSNITVQIMXXXXXXXXXIGEMSTLEDHL

SEQ ID NO: 15704 - protein, 37 aa, Artificial Sequence
  Non-cyclic GFR-binding peptide
  MOD_RES (35), (37): Xaa is C or S
SRVHHSNITVQIMEYVRKKPKLLGEMSRLEEHLEXAX

SEQ ID NO: 15705 - protein, 33 aa, Artificial Sequence
  Non-cyclic GFR-binding peptide
VPTEERSVKMAKVRIKPHQGQHKEVQVFLQHNK

SEQ ID NO: 15706 - protein, 43 aa, Artificial Sequence
  Non-cyclic GFR-binding peptide
  MOD_RES (7), (41), (43): Xaa is C or S
NDEGLEXVPTGQSNITMQIMRIKPHQGQHIGEMSLEEHSQXEX

SEQ ID NO: 15707 - protein, 45 aa, Artificial Sequence
  Non-cyclic GFR-binding peptide
  MOD_RES (5), (42), (44): Xaa is C or S
RNVQXRPTQVQLSNITVQIMEIVRKKPIFIGEMSTLEDHLAXKXE

SEQ ID NO: 15708 - protein, 38 aa, Artificial Sequence
  Non-cyclic GFR-binding peptide
  MOD_RES (1), (38): Xaa is C or S
  MOD_RES (17), (18), (19), (20), (21): Xaa is A or G
  MOD_RES (22), (23), (24), (25): Xaa is A or G or is absent
XQPSRVHHSNITVQIMXXXXXXXXXIGEMSRLEEHLEX

SEQ ID NO: 15709 - protein, 36 aa, Artificial Sequence
  Non-cyclic GFR-binding peptide
  MOD_RES (36), (36): Xaa is C or S
  MOD_RES (15), (16), (17), (18), (19): Xaa is A or G
  MOD_RES (20), (21), (22), (23): Xaa is A or G or is absent
PTQVQLRSVKVAKVXXXXXXXXXKEVQVTLEDHLAX

SEQ ID NO: 15710 - protein, 39 aa, Artificial Sequence
  Non-cyclic GFR-binding peptide
  MOD_RES (4), (38): Xaa is C or S
  MOD_RES (18), (19), (20), (21), (22): Xaa is A or G
  MOD_RES (23), (24), (25), (26): Xaa is A or G or is absent
GLEXVPTGQRSVKMAKVXXXXXXXXXKEVQVLEEHSQXE

SEQ ID NO: 15711 - protein, 34 aa, Artificial Sequence
  Non-cyclic GFR-binding peptide
QPSRVHHSNITVQIMEYVRKKPKLLGEMSRLEEH

SEQ ID NO: 15712 - protein, 37 aa, Artificial Sequence
  Non-cyclic GFR-binding peptide
  MOD_RES (4), (4): Xaa is C or S
GLEXVPTEESNITMQIMRIKPHQGQHLGEMSFLQHNK

SEQ ID NO: 15713 - protein, 39 aa, Artificial Sequence
  Non-cyclic GFR-binding peptide
  MOD_RES (2), (36), (38): Xaa is C or S
EXVPTGQRSVKMAKVRIKPHQGQHKEVQVLEEHSQXEXR

SEQ ID NO: 15714 - protein, 34 aa, Artificial Sequence
  Non-cyclic GFR-binding peptide
  MOD_RES (14), (15), (16), (17), (18): Xaa is A or G
  MOD_RES (19), (20), (21), (22): Xaa is A or G or is absent
SRVHHSNITVQIMXXXXXXXXXLGEMSRLEEHLE

SEQ ID NO: 15715 - protein, 44 aa, Artificial Sequence
  Non-cyclic GFR-binding peptide
  MOD_RES (4), (41), (43): Xaa is C or S
  MOD_RES (20), (21), (22), (23), (24): Xaa is A or G
  MOD_RES (25), (26), (27), (28): Xaa is A or G or is absent
SVKXQPSRVHHSNITVQIMXXXXXXXXXLGEMSRLEEHLEXAXA

SEQ ID NO: 15716 - protein, 42 aa, Artificial Sequence
  Non-cyclic GFR-binding peptide
  MOD_RES (6), (40), (42): Xaa is C or S
  MOD_RES (20), (21), (22), (23), (24): Xaa is A or G
  MOD_RES (25), (26), (27), (28): Xaa is A or G or is absent
DEGLEXVPTEESNITMQIMXXXXXXXXXLGEMSFLQHNKXEX

SEQ ID NO: 15717 - protein, 42 aa, Artificial Sequence
  Non-cyclic GFR-binding peptide
  MOD_RES (7), (41): Xaa is C or S
  MOD_RES (21), (22), (23), (24), (25): Xaa is A or G
  MOD_RES (26), (27), (28), (29): Xaa is A or G or is absent
NDEGLEXVPTEERPVQMRKIXXXXXXXXXKKATVFLQHNKXE

SEQ ID NO: 15718 - protein, 41 aa, Artificial Sequence
  Non-cyclic GFR-binding peptide
  MOD_RES (6), (40): Xaa is C or S
  MOD_RES (20), (21), (22), (23), (24): Xaa is A or G
  MOD_RES (25), (26), (27), (28): Xaa is A or G or is absent
DEGLEXVPTGQRSVKMAKVXXXXXXXXXKEVQVLEEHSQXE

SEQ ID NO: 15719 - protein, 35 aa, Artificial Sequence
  Non-cyclic GFR-binding peptide
  MOD_RES (16), (17), (18), (19), (20): Xaa is A or G
  MOD_RES (21), (22), (23), (24): Xaa is A or G or is absent
RPTQVQLSNITVQIMXXXXXXXXXIGEMSTLEDHL

SEQ ID NO: 15720 - protein, 39 aa, Artificial Sequence
  Non-cyclic GFR-binding peptide
  MOD_RES (37), (39): Xaa is C or S
  MOD_RES (16), (17), (18), (19), (20): Xaa is A or G
  MOD_RES (21), (22), (23), (24): Xaa is A or G or is absent
RPTQVQLSNITVQIMXXXXXXXXXIGEMSTLEDHLAXKX

SEQ ID NO: 15721 - protein, 39 aa, Artificial Sequence
  Non-cyclic GFR-binding peptide
  MOD_RES (1), (38): Xaa is C or S
XRPTQVQLSNITVQIMEIVRKKPIFIGEMSTLEDHLAXK

SEQ ID NO: 15722 - protein, 41 aa, Artificial Sequence
  Non-cyclic GFR-binding peptide
  MOD_RES (3), (40): Xaa is C or S
VKXQPSRVHHSNITVQIMEYVRKKPKLIGEMSRLEEHLEXA

SEQ ID NO: 15723 - protein, 39 aa, Artificial Sequence
  Non-cyclic GFR-binding peptide
  MOD_RES (3), (37), (39): Xaa is C or S
LEXVPTEESNITMQIMRIKPHQGQHLGEMSFLQHNKXEX

SEQ ID NO: 15724 - protein, 38 aa, Artificial Sequence
  Non-cyclic GFR-binding peptide
  MOD_RES (37), (37): Xaa is C or S
QPSRVHHSNITVQIMEYVRKKPKLLGEMSRLEEHLEXA

SEQ ID NO: 15725 - protein, 35 aa, Artificial Sequence
  Non-cyclic GFR-binding peptide
  MOD_RES (15), (16), (17), (18), (19): Xaa is A or G
  MOD_RES (20), (21), (22), (23): Xaa is A or G or is absent
PSRVHHSNITVQIMXXXXXXXXXLGEMSRLEEHLE

SEQ ID NO: 15726 - protein, 39 aa, Artificial Sequence
  Non-cyclic GFR-binding peptide
  MOD_RES (2), (36), (38): Xaa is C or S
EXVPTGQRPVQMRKIRIKPHQGQHKKATVLEEHSQXEXR

SEQ ID NO: 15727 - protein, 40 aa, Artificial Sequence
  Non-cyclic GFR-binding peptide
  MOD_RES (1), (38), (40): Xaa is C or S
  MOD_RES (17), (18), (19), (20), (21): Xaa is A or G
  MOD_RES (22), (23), (24), (25): Xaa is A or G or is absent
XRPTQVQLSNITVQIMXXXXXXXXXLGEMSTLEDHLAXKX

SEQ ID NO: 15728 - protein, 39 aa, Artificial Sequence
  Non-cyclic GFR-binding peptide
  MOD_RES (36), (38): Xaa is C or S
  MOD_RES (15), (16), (17), (18), (19): Xaa is A or G
  MOD_RES (20), (21), (22), (23): Xaa is A or G or is absent
PTQVQLSNITVQIMXXXXXXXXXLGEMSTLEDHLAXKXE

SEQ ID NO: 15729 - protein, 40 aa, Artificial Sequence
  Non-cyclic GFR-binding peptide
  MOD_RES (4), (38), (40): Xaa is C or S
GLEXVPTEERPVQMRKIRIKPHQGQHKKATVFLQHNKXEX

SEQ ID NO: 15730 - protein, 34 aa, Artificial Sequence
  Non-cyclic GFR-binding peptide
QPSRVHHRPVQVRKIEYVRKKPKLKKATVRLEEH

SEQ ID NO: 15731 - protein, 38 aa, Artificial Sequence
  Non-cyclic GFR-binding peptide
  MOD_RES (1), (35), (37): Xaa is C or S
  MOD_RES (15), (16), (17), (18), (19): Xaa is A or G
  MOD_RES (20), (21), (22), (23): Xaa is A or G or is absent
XVPTGQRPVQMRKIXXXXXXXXXKKATVLEEHSQXEXR

SEQ ID NO: 15732 - protein, 34 aa, Artificial Sequence
  Non-cyclic GFR-binding peptide
  MOD_RES (15), (16), (17), (18), (19): Xaa is A or G
  MOD_RES (20), (21), (22), (23): Xaa is A or G or is absent
PSRVHHSNITVQIMXXXXXXXXXLGEMSRLEEHL

SEQ ID NO: 15733 - protein, 39 aa, Artificial Sequence
  Non-cyclic GFR-binding peptide
  MOD_RES (2), (39): Xaa is C or S
QXRPTQVQLSNITVQIMEIVRKKPIFLGEMSTLEDHLAX

SEQ ID NO: 15734 - protein, 42 aa, Artificial Sequence
  Non-cyclic GFR-binding peptide
  MOD_RES (5), (42): Xaa is C or S
SSVKXQPSRVHHSNITVQIMEYVRKKPKLLGEMSRLEEHLEX

SEQ ID NO: 15735 - protein, 38 aa, Artificial Sequence
  Non-cyclic GFR-binding peptide
  MOD_RES (4), (38): Xaa is C or S
GLEXVPTGQRPVQMRKIRIKPHQGQHKKATVLEEHSQX

SEQ ID NO: 15736 - protein, 42 aa, Artificial Sequence
  Non-cyclic GFR-binding peptide
  MOD_RES (3), (40), (42): Xaa is C or S
VQXRPTQVQLRSVKVAKVEIVRKKPIFKEVQVTLEDHLAXKX

SEQ ID NO: 15737 - protein, 41 aa, Artificial Sequence
  Non-cyclic GFR-binding peptide
  MOD_RES (7), (41): Xaa is C or S
NDEGLEXVPTEERPVQMRKIRIKPHQGQHKKATVFLQHNKX

SEQ ID NO: 15738 - protein, 33 aa, Artificial Sequence
  Non-cyclic GFR-binding peptide
  MOD_RES (14), (15), (16), (17), (18): Xaa is A or G
  MOD_RES (19), (20), (21), (22): Xaa is A or G or is absent
VPTGQSNITMQIMXXXXXXXXXIGEMSLEEHSQ

SEQ ID NO: 15739 - protein, 40 aa, Artificial Sequence
  Non-cyclic GFR-binding peptide
  MOD_RES (3), (37), (39): Xaa is C or S
LEXVPTEESNITMQIMRIKPHQGQHLGEMSFLQHNKXEXR

SEQ ID NO: 15740 - protein, 42 aa, Artificial Sequence
  Non-cyclic GFR-binding peptide
  MOD_RES (5), (39), (41): Xaa is C or S
  MOD_RES (19), (20), (21), (22), (23): Xaa is A or G
  MOD_RES (24), (25), (26), (27): Xaa is A or G or is absent
EGLEXVPTGQSNITMQIMXXXXXXXXXIGEMSLEEHSQXEXR

SEQ ID NO: 15741 - protein, 34 aa, Artificial Sequence
  Non-cyclic GFR-binding peptide
  MOD_RES (16), (17), (18), (19), (20): Xaa is A or G
  MOD_RES (21), (22), (23), (24): Xaa is A or G or is absent
RPTQVQLSNITVQIMXXXXXXXXXLGEMSTLEDH

SEQ ID NO: 15742 - protein, 35 aa, Artificial Sequence
  Non-cyclic GFR-binding peptide
  MOD_RES (16), (17), (18), (19), (20): Xaa is A or G
  MOD_RES (21), (22), (23), (24): Xaa is A or G or is absent
QPSRVHHSNITVQIMXXXXXXXXXIGEMSRLEEHL

SEQ ID NO: 15743 - protein, 43 aa, Artificial Sequence
  Non-cyclic GFR-binding peptide
  MOD_RES (3), (40), (42): Xaa is C or S
  MOD_RES (19), (20), (21), (22), (23): Xaa is A or G
  MOD_RES (24), (25), (26), (27): Xaa is A or G or is absent
VKXQPSRVHHSNITVQIMXXXXXXXXXIGEMSRLEEHLEXAXA

SEQ ID NO: 15744 - protein, 35 aa, Artificial Sequence
  Non-cyclic GFR-binding peptide
  MOD_RES (1), (35): Xaa is C or S
XVPTEERSVKMAKVRIKPHQGQHKEVQVFLQHNKX

SEQ ID NO: 15745 - protein, 39 aa, Artificial Sequence
  Non-cyclic GFR-binding peptide
  MOD_RES (2), (36), (38): Xaa is C or S
EXVPTEESNITMQIMRIKPHQGQHLGEMSFLQHNKXEXR

SEQ ID NO: 15746 - protein, 36 aa, Artificial Sequence
  Non-cyclic GFR-binding peptide
  MOD_RES (2), (36): Xaa is C or S
  MOD_RES (16), (17), (18), (19), (20): Xaa is A or G
  MOD_RES (21), (22), (23), (24): Xaa is A or G or is absent
EXVPTGQSNITMQIMXXXXXXXXXIGEMSLEEHSQX

SEQ ID NO: 15747 - protein, 41 aa, Artificial Sequence
  Non-cyclic GFR-binding peptide
  MOD_RES (2), (39), (41): Xaa is C or S
KXQPSRVHHRPVQVRKIEYVRKKPKLKKATVRLEEHLEXAX

SEQ ID NO: 15748 - protein, 37 aa, Artificial Sequence
  Non-cyclic GFR-binding peptide
  MOD_RES (34), (36): Xaa is C or S
VPTEERSVKMAKVRIKPHQGQHKEVQVFLQHNKXEXR

SEQ ID NO: 15749 - protein, 37 aa, Artificial Sequence
  Non-cyclic GFR-binding peptide
  MOD_RES (2), (36): Xaa is C or S
EXVPTEERPVQMRKIRIKPHQGQHKKATVFLQHNKXE

SEQ ID NO: 15750 - protein, 40 aa, Artificial Sequence
  Non-cyclic GFR-binding peptide
  MOD_RES (1), (38), (40): Xaa is C or S
XRPTQVQLSNITVQIMEIVRKKPIFIGEMSTLEDHLAXKX

SEQ ID NO: 15751 - protein, 33 aa, Artificial Sequence
  Non-cyclic GFR-binding peptide
  MOD_RES (14), (15), (16), (17), (18): Xaa is A or G
  MOD_RES (19), (20), (21), (22): Xaa is A or G or is absent
VPTGQRPVQMRKIXXXXXXXXXKKATVLEEHSQ

SEQ ID NO: 15752 - protein, 44 aa, Artificial Sequence
  Non-cyclic GFR-binding peptide
  MOD_RES (5), (42), (44): Xaa is C or S
SSVKXQPSRVHHSNITVQIMEYVRKKPKLIGEMSRLEEHLEXAX

SEQ ID NO: 15753 - protein, 37 aa, Artificial Sequence
  Non-cyclic GFR-binding peptide
  MOD_RES (3), (3): Xaa is C or S
VKXQPSRVHHSNITVQIMEYVRKKPKLLGEMSRLEEH

SEQ ID NO: 15754 - protein, 37 aa, Artificial Sequence
  Non-cyclic GFR-binding peptide
  MOD_RES (3), (3): Xaa is C or S
VKXQPSRVHHSNITVQIMEYVRKKPKLIGEMSRLEEH

SEQ ID NO: 15755 - protein, 36 aa, Artificial Sequence
  Non-cyclic GFR-binding peptide
  MOD_RES (35), (35): Xaa is C or S
  MOD_RES (14), (15), (16), (17), (18): Xaa is A or G
  MOD_RES (19), (20), (21), (22): Xaa is A or G or is absent
SRVHHSNITVQIMXXXXXXXXXLGEMSRLEEHLEXA

SEQ ID NO: 15756 - protein, 41 aa, Artificial Sequence
  Non-cyclic GFR-binding peptide
  MOD_RES (2), (39), (41): Xaa is C or S
QXRPTQVQLSNITVQIMEIVRKKPIFLGEMSTLEDHLAXKX

SEQ ID NO: 15757 - protein, 37 aa, Artificial Sequence
  Non-cyclic GFR-binding peptide
  MOD_RES (2), (36): Xaa is C or S
EXVPTGQRSVKMAKVRIKPHQGQHKEVQVLEEHSQXE

SEQ ID NO: 15758 - protein, 41 aa, Artificial Sequence
  Non-cyclic GFR-binding peptide
  MOD_RES (3), (40): Xaa is C or S
VQXRPTQVQLSNITVQIMEIVRKKPIFIGEMSTLEDHLAXK

SEQ ID NO: 15759 - protein, 41 aa, Artificial Sequence
  Non-cyclic GFR-binding peptide
  MOD_RES (4), (38), (40): Xaa is C or S
GLEXVPTEERSVKMAKVRIKPHQGQHKEVQVFLQHNKXEXR

SEQ ID NO: 15760 - protein, 37 aa, Artificial Sequence
  Non-cyclic GFR-binding peptide
  MOD_RES (2), (2): Xaa is C or S
  MOD_RES (18), (19), (20), (21), (22): Xaa is A or G
  MOD_RES (23), (24), (25), (26): Xaa is A or G or is absent
QXRPTQVQLSNITVQIMXXXXXXXXXLGEMSTLEDHL

SEQ ID NO: 15761 - protein, 40 aa, Artificial Sequence
  Non-cyclic GFR-binding peptide
  MOD_RES (3), (37), (39): Xaa is C or S
LEXVPTGQRSVKMAKVRIKPHQGQHKEVQVLEEHSQXEXR

SEQ ID NO: 15762 - protein, 39 aa, Artificial Sequence
  Non-cyclic GFR-binding peptide
  MOD_RES (37), (39): Xaa is C or S
QPSRVHHRPVQVRKIEYVRKKPKLKKATVRLEEHLEXAX

SEQ ID NO: 15763 - protein, 38 aa, Artificial Sequence
  Non-cyclic GFR-binding peptide
  MOD_RES (4), (38): Xaa is C or S
GLEXVPTEESNITMQIMRIKPHQGQHLGEMSFLQHNKX

SEQ ID NO: 15764 - protein, 39 aa, Artificial Sequence
  Non-cyclic GFR-binding peptide
  MOD_RES (3), (3): Xaa is C or S
VQXRPTQVQLRSVKVAKVEIVRKKPIFKEVQVTLEDHLA

SEQ ID NO: 15765 - protein, 40 aa, Artificial Sequence
  Non-cyclic GFR-binding peptide
  MOD_RES (7), (7): Xaa is C or S
NDEGLEXVPTGQRSVKMAKVRIKPHQGQHKEVQVLEEHSQ

SEQ ID NO: 15766 - protein, 39 aa, Artificial Sequence
  Non-cyclic GFR-binding peptide
  MOD_RES (3), (37), (39): Xaa is C or S
  MOD_RES (17), (18), (19), (20), (21): Xaa is A or G
  MOD_RES (22), (23), (24), (25): Xaa is A or G or is absent
LEXVPTGQRSVKMAKVXXXXXXXXXKEVQVLEEHSQXEX

SEQ ID NO: 15767 - protein, 41 aa, Artificial Sequence
  Non-cyclic GFR-binding peptide
  MOD_RES (5), (39), (41): Xaa is C or S
  MOD_RES (19), (20), (21), (22), (23): Xaa is A or G
  MOD_RES (24), (25), (26), (27): Xaa is A or G or is absent
EGLEXVPTGQSNITMQIMXXXXXXXXXIGEMSLEEHSQXEX

SEQ ID NO: 15768 - protein, 35 aa, Artificial Sequence
  Non-cyclic GFR-binding peptide
  MOD_RES (16), (17), (18), (19), (20): Xaa is A or G
  MOD_RES (21), (22), (23), (24): Xaa is A or G or is absent
QPSRVHHRPVQVRKIXXXXXXXXXKKATVRLEEHL

SEQ ID NO: 15769 - protein, 43 aa, Artificial Sequence
  Non-cyclic GFR-binding peptide
  MOD_RES (4), (41), (43): Xaa is C or S
  MOD_RES (20), (21), (22), (23), (24): Xaa is A or G
  MOD_RES (25), (26), (27), (28): Xaa is A or G or is absent
SVKXQPSRVHHRPVQVRKIXXXXXXXXXKKATVRLEEHLEXAX

SEQ ID NO: 15770 - protein, 39 aa, Artificial Sequence
  Non-cyclic GFR-binding peptide
  MOD_RES (36), (38): Xaa is C or S
  MOD_RES (15), (16), (17), (18), (19): Xaa is A or G
  MOD_RES (20), (21), (22), (23): Xaa is A or G or is absent
PSRVHHSNITVQIMXXXXXXXXXIGEMSRLEEHLEXAXA

SEQ ID NO: 15771 - protein, 35 aa, Artificial Sequence
  Non-cyclic GFR-binding peptide
PTQVQLSNITVQIMEIVRKKPIFIGEMSTLEDHLA

SEQ ID NO: 15772 - protein, 40 aa, Artificial Sequence
  Non-cyclic GFR-binding peptide
  MOD_RES (5), (5): Xaa is C or S
  MOD_RES (21), (22), (23), (24), (25): Xaa is A or G
  MOD_RES (26), (27), (28), (29): Xaa is A or G or is absent
RNVQXRPTQVQLSNITVQIMXXXXXXXXXIGEMSTLEDHL

SEQ ID NO: 15773 - protein, 38 aa, Artificial Sequence
  Non-cyclic GFR-binding peptide
  MOD_RES (3), (37): Xaa is C or S
LEXVPTEERPVQMRKIRIKPHQGQHKKATVFLQHNKXE

SEQ ID NO: 15774 - protein, 43 aa, Artificial Sequence
  Non-cyclic GFR-binding peptide
  MOD_RES (5), (42): Xaa is C or S
  MOD_RES (21), (22), (23), (24), (25): Xaa is A or G
  MOD_RES (26), (27), (28), (29): Xaa is A or G or is absent
RNVQXRPTQVQLSNITVQIMXXXXXXXXXLGEMSTLEDHLAXK

SEQ ID NO: 15775 - protein, 41 aa, Artificial Sequence
  Non-cyclic GFR-binding peptide
  MOD_RES (4), (41): Xaa is C or S
  MOD_RES (20), (21), (22), (23), (24): Xaa is A or G
  MOD_RES (25), (26), (27), (28): Xaa is A or G or is absent
NVQXRPTQVQLSNITVQIMXXXXXXXXXIGEMSTLEDHLAX

SEQ ID NO: 15776 - protein, 38 aa, Artificial Sequence
  Non-cyclic GFR-binding peptide
  MOD_RES (37), (37): Xaa is C or S
  MOD_RES (16), (17), (18), (19), (20): Xaa is A or G
  MOD_RES (21), (22), (23), (24): Xaa is A or G or is absent
QPSRVHHSNITVQIMXXXXXXXXXLGEMSRLEEHLEXA

SEQ ID NO: 15777 - protein, 34 aa, Artificial Sequence
  Non-cyclic GFR-binding peptide
  MOD_RES (1), (1): Xaa is C or S
  MOD_RES (15), (16), (17), (18), (19): Xaa is A or G
  MOD_RES (20), (21), (22), (23): Xaa is A or G or is absent
XVPTGQRSVKMAKVXXXXXXXXXKEVQVLEEHSQ

SEQ ID NO: 15778 - protein, 41 aa, Artificial Sequence
  Non-cyclic GFR-binding peptide
  MOD_RES (4), (38), (40): Xaa is C or S
  MOD_RES (18), (19), (20), (21), (22): Xaa is A or G
  MOD_RES (23), (24), (25), (26): Xaa is A or G or is absent
GLEXVPTEERPVQMRKIXXXXXXXXXKKATVFLQHNKXEXR

SEQ ID NO: 15779 - protein, 41 aa, Artificial Sequence
  Non-cyclic GFR-binding peptide
  MOD_RES (3), (40): Xaa is C or S
  MOD_RES (19), (20), (21), (22), (23): Xaa is A or G
  MOD_RES (24), (25), (26), (27): Xaa is A or G or is absent
VQXRPTQVQLSNITVQIMXXXXXXXXXIGEMSTLEDHLAXK

SEQ ID NO: 15780 - protein, 35 aa, Artificial Sequence
  Non-cyclic GFR-binding peptide
  MOD_RES (1), (35): Xaa is C or S
  MOD_RES (15), (16), (17), (18), (19): Xaa is A or G
  MOD_RES (20), (21), (22), (23): Xaa is A or G or is absent
XVPTEERSVKMAKVXXXXXXXXXKEVQVFLQHNKX

SEQ ID NO: 15781 - protein, 39 aa, Artificial Sequence
  Non-cyclic GFR-binding peptide
  MOD_RES (4), (4): Xaa is C or S
NVQXRPTQVQLSNITVQIMEIVRKKPIFIGEMSTLEDHL

SEQ ID NO: 15782 - protein, 38 aa, Artificial Sequence
  Non-cyclic GFR-binding peptide
  MOD_RES (4), (38): Xaa is C or S
  MOD_RES (18), (19), (20), (21), (22): Xaa is A or G
  MOD_RES (23), (24), (25), (26): Xaa is A or G or is absent
GLEXVPTGQRPVQMRKIXXXXXXXXXKKATVLEEHSQX

SEQ ID NO: 15783 - protein, 40 aa, Artificial Sequence
  Non-cyclic GFR-binding peptide
  MOD_RES (5), (5): Xaa is C or S
RNVQXRPTQVQLRSVKVAKVEIVRKKPIFKEVQVTLEDHL

SEQ ID NO: 15784 - protein, 37 aa, Artificial Sequence
  Non-cyclic GFR-binding peptide
  MOD_RES (36), (36): Xaa is C or S
PSRVHHSNITVQIMEYVRKKPKLIGEMSRLEEHLEXA

SEQ ID NO: 15785 - protein, 42 aa, Artificial Sequence
  Non-cyclic GFR-binding peptide
  MOD_RES (7), (41): Xaa is C or S
NDEGLEXVPTEESNITMQIMRIKPHQGQHLGEMSFLQHNKXE

SEQ ID NO: 15786 - protein, 41 aa, Artificial Sequence
  Non-cyclic GFR-binding peptide
  MOD_RES (1), (38), (40): Xaa is C or S
  MOD_RES (17), (18), (19), (20), (21): Xaa is A or G
  MOD_RES (22), (23), (24), (25): Xaa is A or G or is absent
XRPTQVQLSNITVQIMXXXXXXXXXLGEMSTLEDHLAXKXE

SEQ ID NO: 15787 - protein, 36 aa, Artificial Sequence
  Non-cyclic GFR-binding peptide
  MOD_RES (34), (36): Xaa is C or S
VPTEESNITMQIMRIKPHQGQHLGEMSFLQHNKXEX

SEQ ID NO: 15788 - protein, 37 aa, Artificial Sequence
  Non-cyclic GFR-binding peptide
  MOD_RES (1), (1): Xaa is C or S
  MOD_RES (17), (18), (19), (20), (21): Xaa is A or G
  MOD_RES (22), (23), (24), (25): Xaa is A or G or is absent
XQPSRVHHSNITVQIMXXXXXXXXXIGEMSRLEEHLE

SEQ ID NO: 15789 - protein, 41 aa, Artificial Sequence
  Non-cyclic GFR-binding peptide
  MOD_RES (4), (41): Xaa is C or S
SVKXQPSRVHHRPVQVRKIEYVRKKPKLKKATVRLEEHLEX

SEQ ID NO: 15790 - protein, 36 aa, Artificial Sequence
  Non-cyclic GFR-binding peptide
  MOD_RES (3), (3): Xaa is C or S
LEXVPTGQRPVQMRKIRIKPHQGQHKKATVLEEHSQ

SEQ ID NO: 15791 - protein, 40 aa, Artificial Sequence
  Non-cyclic GFR-binding peptide
  MOD_RES (1), (38), (40): Xaa is C or S
  MOD_RES (17), (18), (19), (20), (21): Xaa is A or G
  MOD_RES (22), (23), (24), (25): Xaa is A or G or is absent
XQPSRVHHRPVQVRKIXXXXXXXXXKKATVRLEEHLEXAX

SEQ ID NO: 15792 - protein, 43 aa, Artificial Sequence
  Non-cyclic GFR-binding peptide
  MOD_RES (5), (42): Xaa is C or S
RNVQXRPTQVQLSNITVQIMEIVRKKPIFLGEMSTLEDHLAXK

SEQ ID NO: 15793 - protein, 37 aa, Artificial Sequence
  Non-cyclic GFR-binding peptide
  MOD_RES (34), (36): Xaa is C or S
  MOD_RES (14), (15), (16), (17), (18): Xaa is A or G
  MOD_RES (19), (20), (21), (22): Xaa is A or G or is absent
VPTEERPVQMRKIXXXXXXXXXKKATVFLQHNKXEXR

SEQ ID NO: 15794 - protein, 37 aa, Artificial Sequence
  Non-cyclic GFR-binding peptide
  MOD_RES (35), (37): Xaa is C or S
  MOD_RES (14), (15), (16), (17), (18): Xaa is A or G
  MOD_RES (19), (20), (21), (22): Xaa is A or G or is absent
TQVQLRSVKVAKVXXXXXXXXXKEVQVTLEDHLAXKX

SEQ ID NO: 15795 - protein, 40 aa, Artificial Sequence
  Non-cyclic GFR-binding peptide
  MOD_RES (4), (38), (40): Xaa is C or S
  MOD_RES (18), (19), (20), (21), (22): Xaa is A or G
  MOD_RES (23), (24), (25), (26): Xaa is A or G or is absent
GLEXVPTGQRPVQMRKIXXXXXXXXXKKATVLEEHSQXEX

SEQ ID NO: 15796 - protein, 39 aa, Artificial Sequence
  Non-cyclic GFR-binding peptide
  MOD_RES (5), (5): Xaa is C or S
  MOD_RES (21), (22), (23), (24), (25): Xaa is A or G
  MOD_RES (26), (27), (28), (29): Xaa is A or G or is absent
RNVQXRPTQVQLSNITVQIMXXXXXXXXXIGEMSTLEDH

SEQ ID NO: 15797 - protein, 34 aa, Artificial Sequence
  Non-cyclic GFR-binding peptide
  MOD_RES (34), (34): Xaa is C or S
  MOD_RES (14), (15), (16), (17), (18): Xaa is A or G
  MOD_RES (19), (20), (21), (22): Xaa is A or G or is absent
VPTEERSVKMAKVXXXXXXXXXKEVQVFLQHNKX

SEQ ID NO: 15798 - protein, 36 aa, Artificial Sequence
  Non-cyclic GFR-binding peptide
  MOD_RES (3), (3): Xaa is C or S
LEXVPTGQSNITMQIMRIKPHQGQHIGEMSLEEHSQ

SEQ ID NO: 15799 - protein, 37 aa, Artificial Sequence
  Non-cyclic GFR-binding peptide
  MOD_RES (37), (37): Xaa is C or S
  MOD_RES (16), (17), (18), (19), (20): Xaa is A or G
  MOD_RES (21), (22), (23), (24): Xaa is A or G or is absent
RPTQVQLSNITVQIMXXXXXXXXXLGEMSTLEDHLAX

SEQ ID NO: 15800 - protein, 39 aa, Artificial Sequence
  Non-cyclic GFR-binding peptide
  MOD_RES (5), (5): Xaa is C or S
  MOD_RES (21), (22), (23), (24), (25): Xaa is A or G
  MOD_RES (26), (27), (28), (29): Xaa is A or G or is absent
RNVQXRPTQVQLSNITVQIMXXXXXXXXXLGEMSTLEDH

SEQ ID NO: 15801 - protein, 38 aa, Artificial Sequence
  Non-cyclic GFR-binding peptide
  MOD_RES (2), (36), (38): Xaa is C or S
  MOD_RES (16), (17), (18), (19), (20): Xaa is A or G
  MOD_RES (21), (22), (23), (24): Xaa is A or G or is absent
EXVPTEERPVQMRKIXXXXXXXXXKKATVFLQHNKXEX

SEQ ID NO: 15802 - protein, 36 aa, Artificial Sequence
  Non-cyclic GFR-binding peptide
QPSRVHHSNITVQIMEYVRKKPKLLGEMSRLEEHLE

SEQ ID NO: 15803 - protein, 39 aa, Artificial Sequence
  Non-cyclic GFR-binding peptide
  MOD_RES (4), (38): Xaa is C or S
  MOD_RES (18), (19), (20), (21), (22): Xaa is A or G
  MOD_RES (23), (24), (25), (26): Xaa is A or G or is absent
GLEXVPTEERPVQMRKIXXXXXXXXXKKATVFLQHNKXE

SEQ ID NO: 15804 - protein, 36 aa, Artificial Sequence
  Non-cyclic GFR-binding peptide
  MOD_RES (1), (1): Xaa is C or S
  MOD_RES (17), (18), (19), (20), (21): Xaa is A or G
  MOD_RES (22), (23), (24), (25): Xaa is A or G or is absent
XQPSRVHHRPVQVRKIXXXXXXXXXKKATVRLEEHL

SEQ ID NO: 15805 - protein, 42 aa, Artificial Sequence
  Non-cyclic GFR-binding peptide
  MOD_RES (2), (39), (41): Xaa is C or S
QXRPTQVQLSNITVQIMEIVRKKPIFIGEMSTLEDHLAXKXE

SEQ ID NO: 15806 - protein, 41 aa, Artificial Sequence
  Non-cyclic GFR-binding peptide
  MOD_RES (6), (40): Xaa is C or S
  MOD_RES (20), (21), (22), (23), (24): Xaa is A or G
  MOD_RES (25), (26), (27), (28): Xaa is A or G or is absent
DEGLEXVPTEERPVQMRKIXXXXXXXXXKKATVFLQHNKXE

SEQ ID NO: 15807 - protein, 34 aa, Artificial Sequence
  Non-cyclic GFR-binding peptide
  MOD_RES (16), (17), (18), (19), (20): Xaa is A or G
  MOD_RES (21), (22), (23), (24): Xaa is A or G or is absent
RPTQVQLSNITVQIMXXXXXXXXXIGEMSTLEDH

SEQ ID NO: 15808 - protein, 34 aa, Artificial Sequence
  Non-cyclic GFR-binding peptide
  MOD_RES (34), (34): Xaa is C or S
VPTEERSVKMAKVRIKPHQGQHKEVQVFLQHNKX

SEQ ID NO: 15809 - protein, 36 aa, Artificial Sequence
  Non-cyclic GFR-binding peptide
  MOD_RES (1), (1): Xaa is C or S
  MOD_RES (17), (18), (19), (20), (21): Xaa is A or G
  MOD_RES (22), (23), (24), (25): Xaa is A or G or is absent
XQPSRVHHSNITVQIMXXXXXXXXXIGEMSRLEEHL

SEQ ID NO: 15810 - protein, 41 aa, Artificial Sequence
  Non-cyclic GFR-binding peptide
  MOD_RES (5), (39), (41): Xaa is C or S
  MOD_RES (19), (20), (21), (22), (23): Xaa is A or G
  MOD_RES (24), (25), (26), (27): Xaa is A or G or is absent
EGLEXVPTGQRPVQMRKIXXXXXXXXXKKATVLEEHSQXEX

SEQ ID NO: 15811 - protein, 39 aa, Artificial Sequence
  Non-cyclic GFR-binding peptide
  MOD_RES (3), (3): Xaa is C or S
VQXRPTQVQLSNITVQIMEIVRKKPIFLGEMSTLEDHLA

SEQ ID NO: 15812 - protein, 40 aa, Artificial Sequence
  Non-cyclic GFR-binding peptide
  MOD_RES (3), (40): Xaa is C or S
  MOD_RES (19), (20), (21), (22), (23): Xaa is A or G
  MOD_RES (24), (25), (26), (27): Xaa is A or G or is absent
VKXQPSRVHHSNITVQIMXXXXXXXXXIGEMSRLEEHLEX

SEQ ID NO: 15813 - protein, 35 aa, Artificial Sequence
  Non-cyclic GFR-binding peptide
  MOD_RES (35), (35): Xaa is C or S
  MOD_RES (14), (15), (16), (17), (18): Xaa is A or G
  MOD_RES (19), (20), (21), (22): Xaa is A or G or is absent
SRVHHSNITVQIMXXXXXXXXXLGEMSRLEEHLEX

SEQ ID NO: 15814 - protein, 37 aa, Artificial Sequence
  Non-cyclic GFR-binding peptide
  MOD_RES (3), (37): Xaa is C or S
LEXVPTGQRSVKMAKVRIKPHQGQHKEVQVLEEHSQX

SEQ ID NO: 15815 - protein, 41 aa, Artificial Sequence
  Non-cyclic GFR-binding peptide
  MOD_RES (7), (41): Xaa is C or S
  MOD_RES (21), (22), (23), (24), (25): Xaa is A or G
  MOD_RES (26), (27), (28), (29): Xaa is A or G or is absent
NDEGLEXVPTEERPVQMRKIXXXXXXXXXKKATVFLQHNKX

SEQ ID NO: 15816 - protein, 37 aa, Artificial Sequence
  Non-cyclic GFR-binding peptide
  MOD_RES (3), (37): Xaa is C or S
  MOD_RES (17), (18), (19), (20), (21): Xaa is A or G
  MOD_RES (22), (23), (24), (25): Xaa is A or G or is absent
LEXVPTGQRSVKMAKVXXXXXXXXXKEVQVLEEHSQX

SEQ ID NO: 15817 - protein, 40 aa, Artificial Sequence
  Non-cyclic GFR-binding peptide
  MOD_RES (3), (37), (39): Xaa is C or S
  MOD_RES (17), (18), (19), (20), (21): Xaa is A or G
  MOD_RES (22), (23), (24), (25): Xaa is A or G or is absent
LEXVPTGQRPVQMRKIXXXXXXXXXKKATVLEEHSQXEXR

SEQ ID NO: 15818 - protein, 38 aa, Artificial Sequence
  Non-cyclic GFR-binding peptide
  MOD_RES (37), (37): Xaa is C or S
  MOD_RES (16), (17), (18), (19), (20): Xaa is A or G
  MOD_RES (21), (22), (23), (24): Xaa is A or G or is absent
QPSRVHHRPVQVRKIXXXXXXXXXKKATVRLEEHLEXA

SEQ ID NO: 15819 - protein, 40 aa, Artificial Sequence
  Non-cyclic GFR-binding peptide
  MOD_RES (1), (3), (38), (39): Xaa is C or S
  MOD_RES (16), (17), (18), (19), (20): Xaa is A or G
  MOD_RES (21), (22), (23), (24): Xaa is A or G or is absent
XGXEAVSMGEEYQKYXXXXXXXXXIYLVSIPSLKTPVXXA

SEQ ID NO: 15820 - protein, 36 aa, Artificial Sequence
  Non-cyclic GFR-binding peptide
  MOD_RES (2), (36): Xaa is C or S
  MOD_RES (14), (15), (16), (17), (18): Xaa is A or G
  MOD_RES (19), (20), (21), (22): Xaa is A or G or is absent
GXESVAMGEYQKYXXXXXXXXXIYLISIPSLKTPVX

SEQ ID NO: 15821 - protein, 35 aa, Artificial Sequence
  Non-cyclic GFR-binding peptide
  MOD_RES (1), (33), (34): Xaa is C or S
XGEVVMDEYQKYVVKENEDIYLMSIPSLETPVXXA

SEQ ID NO: 15822 - protein, 40 aa, Artificial Sequence
  Non-cyclic GFR-binding peptide
  MOD_RES (2), (4), (36), (37): Xaa is C or S
RXGXGEVVMEEYKFKVVKDYEDLYLMSIPELETPVXXAKP

SEQ ID NO: 15823 - protein, 41 aa, Artificial Sequence
  Non-cyclic GFR-binding peptide
  MOD_RES (2), (4), (39), (40): Xaa is C or S
  MOD_RES (17), (18), (19), (20), (21): Xaa is A or G
  MOD_RES (22), (23), (24), (25): Xaa is A or G or is absent
RXGXEAVSMGEEYQKYXXXXXXXXXIYLVSIPSLKTPVXXA

SEQ ID NO: 15824 - protein, 32 aa, Artificial Sequence
  Non-cyclic GFR-binding peptide
  MOD_RES (31), (32): Xaa is C or S
KVVMNEYQKYIVNNSSDIYLVSIPSLKTPAXX

SEQ ID NO: 15825 - protein, 40 aa, Artificial Sequence
  Non-cyclic GFR-binding peptide
  MOD_RES (2), (4), (39), (40): Xaa is C or S
  MOD_RES (17), (18), (19), (20), (21): Xaa is A or G
  MOD_RES (22), (23), (24), (25): Xaa is A or G or is absent
RXGXEAVSMGEEYQKYXXXXXXXXXIYLVSIPSLKTPVXX

SEQ ID NO: 15826 - protein, 33 aa, Artificial Sequence
  Non-cyclic GFR-binding peptide
  MOD_RES (31), (32): Xaa is C or S
SKVVMEYKFKVKPTRGVLYLISIPELDQPVXXP

SEQ ID NO: 15827 - protein, 40 aa, Artificial Sequence
  Non-cyclic GFR-binding peptide
  MOD_RES (1), (3), (36), (37): Xaa is C or S
  MOD_RES (14), (15), (16), (17), (18): Xaa is A or G
  MOD_RES (19), (20), (21), (22): Xaa is A or G or is absent
XKXSKVVMEYKFKXXXXXXXXXLYLISIPELDQPVXXPSA

SEQ ID NO: 15828 - protein, 33 aa, Artificial Sequence
  Non-cyclic GFR-binding peptide
  MOD_RES (1), (1): Xaa is C or S
  MOD_RES (12), (13), (14), (15), (16): Xaa is A or G
  MOD_RES (17), (18), (19), (20): Xaa is A or G or is absent
XSRVIMEYQKYXXXXXXXXXIYLISIPSLAQPV

SEQ ID NO: 15829 - protein, 39 aa, Artificial Sequence
  Non-cyclic GFR-binding peptide
  MOD_RES (2), (36): Xaa is C or S
  MOD_RES (14), (15), (16), (17), (18): Xaa is A or G
  MOD_RES (19), (20), (21), (22): Xaa is A or G or is absent
GXSRVVMNEYQKYXXXXXXXXXIYLVSIPSLKTPAXTPK

SEQ ID NO: 15830 - protein, 37 aa, Artificial Sequence
  Non-cyclic GFR-binding peptide
  MOD_RES (2), (33), (34): Xaa is C or S
KXSKVIMEYKFKIKPTKGILYLISIPELDQSVXXPSA

SEQ ID NO: 15831 - protein, 40 aa, Artificial Sequence
  Non-cyclic GFR-binding peptide
  MOD_RES (2), (4), (36), (37): Xaa is C or S
HXGXARVVMNEYKFKIVNSSDDLYLVSIPELQTPAXXPKP

SEQ ID NO: 15832 - protein, 36 aa, Artificial Sequence
  Non-cyclic GFR-binding peptide
  MOD_RES (33), (34): Xaa is C or S
  MOD_RES (11), (12), (13), (14), (15): Xaa is A or G
  MOD_RES (16), (17), (18), (19): Xaa is A or G or is absent
KVVMNEYQKYXXXXXXXXXIYLVSIPSLKTPAXXAK

SEQ ID NO: 15833 - protein, 36 aa, Artificial Sequence
  Non-cyclic GFR-binding peptide
  MOD_RES (31), (32): Xaa is C or S
EVVMEEYQKYVVKDYEDIYLMSIPSLETPVXXAKPI

SEQ ID NO: 15834 - protein, 38 aa, Artificial Sequence
  Non-cyclic GFR-binding peptide
  MOD_RES (33), (34): Xaa is C or S
  MOD_RES (11), (12), (13), (14), (15): Xaa is A or G
  MOD_RES (16), (17), (18), (19): Xaa is A or G or is absent
EVVMEEYQKYXXXXXXXXXIYLMSIPSLETPVXXAKPI

SEQ ID NO: 15835 - protein, 34 aa, Artificial Sequence
  Non-cyclic GFR-binding peptide
  MOD_RES (1), (33), (34): Xaa is C or S
XAEVVMDYHYKLVVNNAADKYLISIPSLRAPVXX

SEQ ID NO: 15836 - protein, 35 aa, Artificial Sequence
  Non-cyclic GFR-binding peptide
  MOD_RES (1), (35): Xaa is C or S
  MOD_RES (13), (14), (15), (16), (17): Xaa is A or G
  MOD_RES (18), (19), (20), (21): Xaa is A or G or is absent
XARVVMNEYKFKXXXXXXXXXLYLVSIPELQTPAX

SEQ ID NO: 15837 - protein, 35 aa, Artificial Sequence
  Non-cyclic GFR-binding peptide
  MOD_RES (33), (34): Xaa is C or S
  MOD_RES (11), (12), (13), (14), (15): Xaa is A or G
  MOD_RES (16), (17), (18), (19): Xaa is A or G or is absent
EVVMDRYKKLXXXXXXXXXFYLISIANLRAPVXXS

SEQ ID NO: 15838 - protein, 36 aa, Artificial Sequence
  Non-cyclic GFR-binding peptide
  MOD_RES (1), (35), (36): Xaa is C or S
  MOD_RES (13), (14), (15), (16), (17): Xaa is A or G
  MOD_RES (18), (19), (20), (21): Xaa is A or G or is absent
XESVAMGYHYKLXXXXXXXXXKYLISIPSLKTPVXX

SEQ ID NO: 15839 - protein, 35 aa, Artificial Sequence
  Non-cyclic GFR-binding peptide
  MOD_RES (1), (3), (35): Xaa is C or S
XGXGEVVMEEYKFKVVKDYEDLYLMSIPELETPVX

SEQ ID NO: 15840 - protein, 35 aa, Artificial Sequence
  Non-cyclic GFR-binding peptide
  MOD_RES (1), (3): Xaa is C or S
  MOD_RES (14), (15), (16), (17), (18): Xaa is A or G
  MOD_RES (19), (20), (21), (22): Xaa is A or G or is absent
XKXSKVVMEYKFKXXXXXXXXXLYLISIPELDQPV

SEQ ID NO: 15841 - protein, 31 aa, Artificial Sequence
  Non-cyclic GFR-binding peptide
  MOD_RES (31), (31): Xaa is C or S
SVAMGRYKKLYTVVGKDFYLISIANLKTPVX

SEQ ID NO: 15842 - protein, 40 aa, Artificial Sequence
  Non-cyclic GFR-binding peptide
  MOD_RES (1), (35), (36): Xaa is C or S
  MOD_RES (13), (14), (15), (16), (17): Xaa is A or G
  MOD_RES (18), (19), (20), (21): Xaa is A or G or is absent
XESVAMGRYKKLXXXXXXXXXFYLISIANLKTPVXXAKSA

SEQ ID NO: 15843 - protein, 34 aa, Artificial Sequence
  Non-cyclic GFR-binding peptide
  MOD_RES (2), (34): Xaa is C or S
GXGEVVMEEYQKYVVKDYEDIYLMSIPSLETPVX

SEQ ID NO: 15844 - protein, 30 aa, Artificial Sequence
  Non-cyclic GFR-binding peptide
KVVMNEYKFKIVNNSSDLYLVSIPELKTPA

SEQ ID NO: 15845 - protein, 42 aa, Artificial Sequence
  Non-cyclic GFR-binding peptide
  MOD_RES (2), (4), (36), (37): Xaa is C or S
RXGXAEVVMDEYKFKVVNNAADLYLISIPELRAPVXXSAPAA

SEQ ID NO: 15846 - protein, 37 aa, Artificial Sequence
  Non-cyclic GFR-binding peptide
  MOD_RES (34), (35): Xaa is C or S
  MOD_RES (12), (13), (14), (15), (16): Xaa is A or G
  MOD_RES (17), (18), (19), (20): Xaa is A or G or is absent
ESVAMGEYQKYXXXXXXXXXIYLISIPSLKTPVXXAK

SEQ ID NO: 15847 - protein, 36 aa, Artificial Sequence
  Non-cyclic GFR-binding peptide
  MOD_RES (31), (32): Xaa is C or S
SKVVMEYQKYVKPTRGVIYLISIPSLDQPVXXPSAS

SEQ ID NO: 15848 - protein, 35 aa, Artificial Sequence
  Non-cyclic GFR-binding peptide
  MOD_RES (34), (35): Xaa is C or S
  MOD_RES (12), (13), (14), (15), (16): Xaa is A or G
  MOD_RES (17), (18), (19), (20): Xaa is A or G or is absent
GEVVMDEYKFKXXXXXXXXXLYLMSIPELETPVXX

SEQ ID NO: 15849 - protein, 40 aa, Artificial Sequence
  Non-cyclic GFR-binding peptide
  MOD_RES (35), (36): Xaa is C or S
  MOD_RES (13), (14), (15), (16), (17): Xaa is A or G
  MOD_RES (18), (19), (20), (21): Xaa is A or G or is absent
EAVSMGEEYKFKXXXXXXXXXLYLVSIPELKTPVXXAKGV

SEQ ID NO: 15850 - protein, 38 aa, Artificial Sequence
  Non-cyclic GFR-binding peptide
  MOD_RES (2), (4), (36): Xaa is C or S
HXGXSRVVMNEYQKYIVNSSDDIYLVSIPSLKTPAXTP

SEQ ID NO: 15851 - protein, 37 aa, Artificial Sequence
  Non-cyclic GFR-binding peptide
  MOD_RES (31), (32): Xaa is C or S
SRVIMEYQKYVKPKRGVIYLISIPSLAQPVXXPAASA

SEQ ID NO: 15852 - protein, 38 aa, Artificial Sequence
  Non-cyclic GFR-binding peptide
  MOD_RES (2), (4), (38): Xaa is C or S
  MOD_RES (16), (17), (18), (19), (20): Xaa is A or G
  MOD_RES (21), (22), (23), (24): Xaa is A or G or is absent
HXGXARVVMNEYQKYXXXXXXXXXIYLVSIPSLQTPAX

SEQ ID NO: 15853 - protein, 41 aa, Artificial Sequence
  Non-cyclic GFR-binding peptide
  MOD_RES (1), (3), (35), (36): Xaa is C or S
XGXSRVVMNEYQKYIVNSSDDIYLVSIPSLKTPAXXPKPVY

SEQ ID NO: 15854 - protein, 32 aa, Artificial Sequence
  Non-cyclic GFR-binding peptide
  MOD_RES (1), (32): Xaa is C or S
XSKVVMEYQKYVKPTRGVIYLISIPSLDQPVX

SEQ ID NO: 15855 - protein, 40 aa, Artificial Sequence
  Non-cyclic GFR-binding peptide
  MOD_RES (1), (3), (35), (36): Xaa is C or S
XGXSRVVMNEYKFKIVNSSDDLYLVSIPELKTPAXXPKPV

SEQ ID NO: 15856 - protein, 37 aa, Artificial Sequence
  Non-cyclic GFR-binding peptide
  MOD_RES (1), (33), (34): Xaa is C or S
XESVAMGRYKKLYTVVGKDFYLISIANLKTPVXXAKS

SEQ ID NO: 15857 - protein, 43 aa, Artificial Sequence
  Non-cyclic GFR-binding peptide
  MOD_RES (2), (4), (38), (39): Xaa is C or S
  MOD_RES (16), (17), (18), (19), (20): Xaa is A or G
  MOD_RES (21), (22), (23), (24): Xaa is A or G or is absent
HXGXARVVMNEYKFKXXXXXXXXXLYLVSIPELQTPAXXPKPV

SEQ ID NO: 15858 - protein, 42 aa, Artificial Sequence
  Non-cyclic GFR-binding peptide
  MOD_RES (2), (4), (36), (37): Xaa is C or S
RXGXAEVVMDYHYKLVVNNAADKYLISIPSLRAPVXXSAPAA

SEQ ID NO: 15859 - protein, 37 aa, Artificial Sequence
  Non-cyclic GFR-binding peptide
  MOD_RES (2), (35), (36): Xaa is C or S
  MOD_RES (13), (14), (15), (16), (17): Xaa is A or G
  MOD_RES (18), (19), (20), (21): Xaa is A or G or is absent
KXSKVVMEYKFKXXXXXXXXXLYLISIPELDQPVXXP

SEQ ID NO: 15860 - protein, 41 aa, Artificial Sequence
  Non-cyclic GFR-binding peptide
  MOD_RES (1), (3), (35), (36): Xaa is C or S
XGXGEVVMDEYQKYVVKENEDIYLMSIPSLETPVXXAKPIK

SEQ ID NO: 15861 - protein, 37 aa, Artificial Sequence
  Non-cyclic GFR-binding peptide
  MOD_RES (2), (34), (35): Xaa is C or S
GXAEVVMDEYKFKVVNNAADLYLISIPELRAPVXXSA

SEQ ID NO: 15862 - protein, 36 aa, Artificial Sequence
  Non-cyclic GFR-binding peptide
  MOD_RES (2), (36): Xaa is C or S
  MOD_RES (14), (15), (16), (17), (18): Xaa is A or G
  MOD_RES (19), (20), (21), (22): Xaa is A or G or is absent
GXSRVVMNEYQKYXXXXXXXXXIYLVSIPSLKTPAX

SEQ ID NO: 15863 - protein, 42 aa, Artificial Sequence
  Non-cyclic GFR-binding peptide
  MOD_RES (2), (36), (37): Xaa is C or S
  MOD_RES (14), (15), (16), (17), (18): Xaa is A or G
  MOD_RES (19), (20), (21), (22): Xaa is A or G or is absent
GXAKVVMNEYQKYXXXXXXXXXIYLVSIPSLKTPAXXAKPVA

SEQ ID NO: 15864 - protein, 36 aa, Artificial Sequence
  Non-cyclic GFR-binding peptide
  MOD_RES (31), (31): Xaa is C or S
RVVMNEYQKYIVNSSDDIYLVSIPSLKTPAXTPKTV

SEQ ID NO: 15865 - protein, 37 aa, Artificial Sequence
  Non-cyclic GFR-binding peptide
  MOD_RES (1), (33), (34): Xaa is C or S
XGEVVMDEYKFKVVKENEDLYLMSIPELETPVXXAKP

SEQ ID NO: 15866 - protein, 36 aa, Artificial Sequence
  Non-cyclic GFR-binding peptide
  MOD_RES (1), (3), (36): Xaa is C or S
  MOD_RES (14), (15), (16), (17), (18): Xaa is A or G
  MOD_RES (19), (20), (21), (22): Xaa is A or G or is absent
XKXSKVVMEYKFKXXXXXXXXXLYLISIPELDQPVX

SEQ ID NO: 15867 - protein, 36 aa, Artificial Sequence
  Non-cyclic GFR-binding peptide
  MOD_RES (34), (35): Xaa is C or S
  MOD_RES (12), (13), (14), (15), (16): Xaa is A or G
  MOD_RES (17), (18), (19), (20): Xaa is A or G or is absent
SRVVMNEYKFKXXXXXXXXXLYLVSIPELKTPAXXP

SEQ ID NO: 15868 - protein, 35 aa, Artificial Sequence
  Non-cyclic GFR-binding peptide
  MOD_RES (1), (32), (33): Xaa is C or S
XSKVVMEYKFKVKPTRGVLYLISIPELDQPVXXPS

SEQ ID NO: 15869 - protein, 36 aa, Artificial Sequence
  Non-cyclic GFR-binding peptide
  MOD_RES (1), (35), (36): Xaa is C or S
  MOD_RES (13), (14), (15), (16), (17): Xaa is A or G
  MOD_RES (18), (19), (20), (21): Xaa is A or G or is absent
XARVVMNEYKFKXXXXXXXXXLYLVSIPELQTPAXX

SEQ ID NO: 15870 - protein, 41 aa, Artificial Sequence
  Non-cyclic GFR-binding peptide
  MOD_RES (2), (4), (36), (37): Xaa is C or S
HXGXAKVVMNEYKFKIVNNSSDLYLVSIPELKTPAXXAKPV

SEQ ID NO: 15871 - protein, 39 aa, Artificial Sequence
  Non-cyclic GFR-binding peptide
  MOD_RES (33), (34): Xaa is C or S
  MOD_RES (11), (12), (13), (14), (15): Xaa is A or G
  MOD_RES (16), (17), (18), (19): Xaa is A or G or is absent
EVVMDEYKFKXXXXXXXXXLYLISIPELRAPVXXSAPAA

SEQ ID NO: 15872 - protein, 33 aa, Artificial Sequence
  Non-cyclic GFR-binding peptide
  MOD_RES (1), (33): Xaa is C or S
XSRVVMNEYKFKIVNSSDDLYLVSIPELKTPAX

SEQ ID NO: 15873 - protein, 36 aa, Artificial Sequence
  Non-cyclic GFR-binding peptide
  MOD_RES (2), (4), (35), (36): Xaa is C or S
SXKXSKVIMEYKFKIKPTKGILYLISIPELDQSVXX

SEQ ID NO: 15874 - protein, 33 aa, Artificial Sequence
  Non-cyclic GFR-binding peptide
  MOD_RES (2), (2): Xaa is C or S
GXESVAMGEYQKYYTVVGKDIYLISIPSLKTPV

SEQ ID NO: 15875 - protein, 38 aa, Artificial Sequence
  Non-cyclic GFR-binding peptide
  MOD_RES (32), (33): Xaa is C or S
GEVVMDEYKFKVVKENEDLYLMSIPELETPVXXAKPIK

SEQ ID NO: 15876 - protein, 38 aa, Artificial Sequence
  Non-cyclic GFR-binding peptide
  MOD_RES (34), (35): Xaa is C or S
  MOD_RES (12), (13), (14), (15), (16): Xaa is A or G
  MOD_RES (17), (18), (19), (20): Xaa is A or G or is absent
AKVVMNEYKFKXXXXXXXXXLYLVSIPELKTPAXXAKP

SEQ ID NO: 15877 - protein, 38 aa, Artificial Sequence
  Non-cyclic GFR-binding peptide
  MOD_RES (1), (3), (35), (36): Xaa is C or S
XGXGEVVMDEYKFKVVKENEDLYLMSIPELETPVXXAK

SEQ ID NO: 15878 - protein, 39 aa, Artificial Sequence
  Non-cyclic GFR-binding peptide
  MOD_RES (2), (4), (36), (37): Xaa is C or S
HXGXSRVVMNEYQKYIVNSSDDIYLVSIPSLKTPAXXPK

SEQ ID NO: 15879 - protein, 41 aa, Artificial Sequence
  Non-cyclic GFR-binding peptide
  MOD_RES (1), (3), (35), (36): Xaa is C or S
XGXESVAMGYHYKLYTVVGKDKYLISIPSLKTPVXXAKSAK

SEQ ID NO: 15880 - protein, 44 aa, Artificial Sequence
  Non-cyclic GFR-binding peptide
  MOD_RES (1), (3), (38), (39): Xaa is C or S
  MOD_RES (16), (17), (18), (19), (20): Xaa is A or G
  MOD_RES (21), (22), (23), (24): Xaa is A or G or is absent
XGXEAVSMGEEYKFKXXXXXXXXXLYLVSIPELKTPVXXAKGVK

SEQ ID NO: 15881 - protein, 35 aa, Artificial Sequence
  Non-cyclic GFR-binding peptide
  MOD_RES (1), (3), (35): Xaa is C or S
XGXAKVVMNEYKFKIVNNSSDLYLVSIPELKTPAX

SEQ ID NO: 15882 - protein, 36 aa, Artificial Sequence
  Non-cyclic GFR-binding peptide
  MOD_RES (33), (34): Xaa is C or S
  MOD_RES (11), (12), (13), (14), (15): Xaa is A or G
  MOD_RES (16), (17), (18), (19): Xaa is A or G or is absent
EVVMEEYKFKXXXXXXXXXLYLMSIPELETPVXXAK

SEQ ID NO: 15883 - protein, 36 aa, Artificial Sequence
  Non-cyclic GFR-binding peptide
  MOD_RES (33), (34): Xaa is C or S
  MOD_RES (11), (12), (13), (14), (15): Xaa is A or G
  MOD_RES (16), (17), (18), (19): Xaa is A or G or is absent
SRVIMEYQKYXXXXXXXXXIYLISIPSLAQPVXXPA

SEQ ID NO: 15884 - protein, 39 aa, Artificial Sequence
  Non-cyclic GFR-binding peptide
  MOD_RES (1), (35), (36): Xaa is C or S
  MOD_RES (13), (14), (15), (16), (17): Xaa is A or G
  MOD_RES (18), (19), (20), (21): Xaa is A or G or is absent
XARVVMNEYQKYXXXXXXXXXIYLVSIPSLQTPAXXPKP

SEQ ID NO: 15885 - protein, 34 aa, Artificial Sequence
  Non-cyclic GFR-binding peptide
  MOD_RES (1), (3): Xaa is C or S
XGXESVAMGEYQKYYTVVGKDIYLISIPSLKTPV

SEQ ID NO: 15886 - protein, 35 aa, Artificial Sequence
  Non-cyclic GFR-binding peptide
  MOD_RES (1), (34), (35): Xaa is C or S
  MOD_RES (12), (13), (14), (15), (16): Xaa is A or G
  MOD_RES (17), (18), (19), (20): Xaa is A or G or is absent
XSKVVMEYQKYXXXXXXXXXIYLISIPSLDQPVXX

SEQ ID NO: 15887 - protein, 36 aa, Artificial Sequence
  Non-cyclic GFR-binding peptide
  MOD_RES (2), (34), (35): Xaa is C or S
GXGEVVMDEYQKYVVKENEDIYLMSIPSLETPVXXA

SEQ ID NO: 15888 - protein, 38 aa, Artificial Sequence
  Non-cyclic GFR-binding peptide
  MOD_RES (1), (34), (35): Xaa is C or S
  MOD_RES (12), (13), (14), (15), (16): Xaa is A or G
  MOD_RES (17), (18), (19), (20): Xaa is A or G or is absent
XSRVIMEYQKYXXXXXXXXXIYLISIPSLAQPVXXPAA

SEQ ID NO: 15889 - protein, 39 aa, Artificial Sequence
  Non-cyclic GFR-binding peptide
  MOD_RES (2), (35), (36): Xaa is C or S
  MOD_RES (13), (14), (15), (16), (17): Xaa is A or G
  MOD_RES (18), (19), (20), (21): Xaa is A or G or is absent
KXSRVIMEYQKYXXXXXXXXXIYLISIPSLAQPVXXPAA

SEQ ID NO: 15890 - protein, 31 aa, Artificial Sequence
  Non-cyclic GFR-binding peptide
SRVVMNEYQKYIVNSSDDIYLVSIPSLKTPA

SEQ ID NO: 15891 - protein, 42 aa, Artificial Sequence
  Non-cyclic GFR-binding peptide
  MOD_RES (1), (3), (37), (38): Xaa is C or S
  MOD_RES (15), (16), (17), (18), (19): Xaa is A or G
  MOD_RES (20), (21), (22), (23): Xaa is A or G or is absent
XGXAEVVMDEYKFKXXXXXXXXXLYLISIPELRAPVXXSAPA

SEQ ID NO: 15892 - protein, 35 aa, Artificial Sequence
  Non-cyclic GFR-binding peptide
  MOD_RES (1), (35): Xaa is C or S
  MOD_RES (13), (14), (15), (16), (17): Xaa is A or G
  MOD_RES (18), (19), (20), (21): Xaa is A or G or is absent
XESVAMGEYQKYXXXXXXXXXIYLISIPSLKTPVX

SEQ ID NO: 15893 - protein, 40 aa, Artificial Sequence
  Non-cyclic GFR-binding peptide
  MOD_RES (1), (3), (35), (36): Xaa is C or S
XGXGEVVMEEYKFKVVKDYEDLYLMSIPELETPVXXAKPI

SEQ ID NO: 15894 - protein, 38 aa, Artificial Sequence
  Non-cyclic GFR-binding peptide
  MOD_RES (2), (4), (37), (38): Xaa is C or S
  MOD_RES (15), (16), (17), (18), (19): Xaa is A or G
  MOD_RES (20), (21), (22), (23): Xaa is A or G or is absent
SXKXSKVIMEYKFKXXXXXXXXXLYLISIPELDQSVXX

SEQ ID NO: 15895 - protein, 34 aa, Artificial Sequence
  Non-cyclic GFR-binding peptide
  MOD_RES (31), (32): Xaa is C or S
EVVMDEYQKYVVKENEDIYLMSIPSLETPVXXAK

SEQ ID NO: 15896 - protein, 37 aa, Artificial Sequence
  Non-cyclic GFR-binding peptide
  MOD_RES (2), (34), (35): Xaa is C or S
GXAEVVMDRYKKLVVNNAADFYLISIANLRAPVXXSA

SEQ ID NO: 15897 - protein, 37 aa, Artificial Sequence
  Non-cyclic GFR-binding peptide
  MOD_RES (2), (4), (36), (37): Xaa is C or S
RXGXAEVVMDYHYKLVVNNAADKYLISIPSLRAPVXX

SEQ ID NO: 15898 - protein, 38 aa, Artificial Sequence
  Non-cyclic GFR-binding peptide
  MOD_RES (2), (34), (35): Xaa is C or S
GXAEVVMDRYKKLVVNNAADFYLISIANLRAPVXXSAP

SEQ ID NO: 15899 - protein, 40 aa, Artificial Sequence
  Non-cyclic GFR-binding peptide
  MOD_RES (2), (36): Xaa is C or S
  MOD_RES (14), (15), (16), (17), (18): Xaa is A or G
  MOD_RES (19), (20), (21), (22): Xaa is A or G or is absent
GXSRVVMNEYQKYXXXXXXXXXIYLVSIPSLKTPAXTPKT

SEQ ID NO: 15900 - protein, 41 aa, Artificial Sequence
  Non-cyclic GFR-binding peptide
  MOD_RES (2), (4), (36), (37): Xaa is C or S
RXGXGEVVMEEYKFKVVKDYEDLYLMSIPELETPVXXAKPI

SEQ ID NO: 15901 - protein, 41 aa, Artificial Sequence
  Non-cyclic GFR-binding peptide
  MOD_RES (1), (3), (36), (37): Xaa is C or S
  MOD_RES (14), (15), (16), (17), (18): Xaa is A or G
  MOD_RES (19), (20), (21), (22): Xaa is A or G or is absent
XKXSRVIMEYKFKXXXXXXXXXLYLISIPELAQPVXXPAAS

SEQ ID NO: 15902 - protein, 39 aa, Artificial Sequence
  Non-cyclic GFR-binding peptide
  MOD_RES (1), (3), (37), (38): Xaa is C or S
  MOD_RES (15), (16), (17), (18), (19): Xaa is A or G
  MOD_RES (20), (21), (22), (23): Xaa is A or G or is absent
XGXGEVVMDEYQKYXXXXXXXXXIYLMSIPSLETPVXXA

SEQ ID NO: 15903 - protein, 37 aa, Artificial Sequence
  Non-cyclic GFR-binding peptide
  MOD_RES (34), (35): Xaa is C or S
  MOD_RES (12), (13), (14), (15), (16): Xaa is A or G
  MOD_RES (17), (18), (19), (20): Xaa is A or G or is absent
SRVVMNEYQKYXXXXXXXXXIYLVSIPSLKTPAXXPK

SEQ ID NO: 15904 - protein, 42 aa, Artificial Sequence
  Non-cyclic GFR-binding peptide
  MOD_RES (2), (4), (36), (37): Xaa is C or S
RXGXESVAMGEYQKYYTVVGKDIYLISIPSLKTPVXXAKSAK

SEQ ID NO: 15905 - protein, 38 aa, Artificial Sequence
  Non-cyclic GFR-binding peptide
  MOD_RES (1), (3), (35), (36): Xaa is C or S
XGXSRVVMNEYQKYIVNSSDDIYLVSIPSLKTPAXXPK

SEQ ID NO: 15906 - protein, 35 aa, Artificial Sequence
  Non-cyclic GFR-binding peptide
  MOD_RES (2), (35): Xaa is C or S
  MOD_RES (13), (14), (15), (16), (17): Xaa is A or G
  MOD_RES (18), (19), (20), (21): Xaa is A or G or is absent
KXSRVIMEYKFKXXXXXXXXXLYLISIPELAQPVX

SEQ ID NO: 15907 - protein, 40 aa, Artificial Sequence
  Non-cyclic GFR-binding peptide
  MOD_RES (2), (36), (37): Xaa is C or S
  MOD_RES (14), (15), (16), (17), (18): Xaa is A or G
  MOD_RES (19), (20), (21), (22): Xaa is A or G or is absent
GXAEVVMDEYKFKXXXXXXXXXLYLISIPELRAPVXXSAP

SEQ ID NO: 15908 - protein, 33 aa, Artificial Sequence
  Non-cyclic GFR-binding peptide
  MOD_RES (31), (32): Xaa is C or S
SVAMGRYKKLYTVVGKDFYLISIANLKTPVXXA

SEQ ID NO: 15909 - protein, 32 aa, Artificial Sequence
  Non-cyclic GFR-binding peptide
  MOD_RES (11), (12), (13), (14), (15): Xaa is A or G
  MOD_RES (16), (17), (18), (19): Xaa is A or G or is absent
EVVMEEYQKYXXXXXXXXXIYLMSIPSLETPV

SEQ ID NO: 15910 - protein, 43 aa, Artificial Sequence
  Non-cyclic GFR-binding peptide
  MOD_RES (1), (3), (37), (38): Xaa is C or S
  MOD_RES (15), (16), (17), (18), (19): Xaa is A or G
  MOD_RES (20), (21), (22), (23): Xaa is A or G or is absent
XGXSRVVMNEYKFKXXXXXXXXXLYLVSIPELKTPAXXPKPVY

SEQ ID NO: 15911 - protein, 38 aa, Artificial Sequence
  Non-cyclic GFR-binding peptide
  MOD_RES (1), (35), (36): Xaa is C or S
  MOD_RES (13), (14), (15), (16), (17): Xaa is A or G
  MOD_RES (18), (19), (20), (21): Xaa is A or G or is absent
XAEVVMDYHYKLXXXXXXXXXKYLISIPSLRAPVXXSA

SEQ ID NO: 15912 - protein, 37 aa, Artificial Sequence
  Non-cyclic GFR-binding peptide
  MOD_RES (33), (34): Xaa is C or S
  MOD_RES (11), (12), (13), (14), (15): Xaa is A or G
  MOD_RES (16), (17), (18), (19): Xaa is A or G or is absent
EVVMDEYKFKXXXXXXXXXLYLISIPELRAPVXXSAP

SEQ ID NO: 15913 - protein, 36 aa, Artificial Sequence
  Non-cyclic GFR-binding peptide
  MOD_RES (2), (36): Xaa is C or S
  MOD_RES (14), (15), (16), (17), (18): Xaa is A or G
  MOD_RES (19), (20), (21), (22): Xaa is A or G or is absent
GXAKVVMNEYKFKXXXXXXXXXLYLVSIPELKTPAX

SEQ ID NO: 15914 - protein, 35 aa, Artificial Sequence
  Non-cyclic GFR-binding peptide
  MOD_RES (2), (34), (35): Xaa is C or S
GXESVAMGYHYKLYTVVGKDKYLISIPSLKTPVXX

SEQ ID NO: 15915 - protein, 37 aa, Artificial Sequence
  Non-cyclic GFR-binding peptide
  MOD_RES (2), (36): Xaa is C or S
  MOD_RES (14), (15), (16), (17), (18): Xaa is A or G
  MOD_RES (19), (20), (21), (22): Xaa is A or G or is absent
GXSRVVMNEYKFKXXXXXXXXXLYLVSIPELKTPAXT

SEQ ID NO: 15916 - protein, 41 aa, Artificial Sequence
  Non-cyclic GFR-binding peptide
  MOD_RES (2), (4), (36), (37): Xaa is C or S
HXGXARVVMNEYQKYIVNSSDDIYLVSIPSLQTPAXXPKPV

SEQ ID NO: 15917 - protein, 41 aa, Artificial Sequence
  Non-cyclic GFR-binding peptide
  MOD_RES (2), (36), (37): Xaa is C or S
  MOD_RES (14), (15), (16), (17), (18): Xaa is A or G
  MOD_RES (19), (20), (21), (22): Xaa is A or G or is absent
GXAKVVMNEYQKYXXXXXXXXXIYLVSIPSLKTPAXXAKPV

SEQ ID NO: 15918 - protein, 36 aa, Artificial Sequence
  Non-cyclic GFR-binding peptide
  MOD_RES (33), (34): Xaa is C or S
  MOD_RES (11), (12), (13), (14), (15): Xaa is A or G
  MOD_RES (16), (17), (18), (19): Xaa is A or G or is absent
RVVMNEYQKYXXXXXXXXXIYLVSIPSLQTPAXXPK

SEQ ID NO: 15919 - protein, 35 aa, Artificial Sequence
  Non-cyclic GFR-binding peptide
  MOD_RES (33), (34): Xaa is C or S
  MOD_RES (11), (12), (13), (14), (15): Xaa is A or G
  MOD_RES (16), (17), (18), (19): Xaa is A or G or is absent
KVVMNEYQKYXXXXXXXXXIYLVSIPSLKTPAXXA

SEQ ID NO: 15920 - protein, 37 aa, Artificial Sequence
  Non-cyclic GFR-binding peptide
  MOD_RES (1), (3), (35): Xaa is C or S
XGXSRVVMNEYKFKIVNSSDDLYLVSIPELKTPAXTP

SEQ ID NO: 15921 - protein, 33 aa, Artificial Sequence
  Non-cyclic GFR-binding peptide
  MOD_RES (12), (13), (14), (15), (16): Xaa is A or G
  MOD_RES (17), (18), (19), (20): Xaa is A or G or is absent
ESVAMGEYQKYXXXXXXXXXIYLISIPSLKTPV

SEQ ID NO: 15922 - protein, 40 aa, Artificial Sequence
  Non-cyclic GFR-binding peptide
  MOD_RES (1), (3), (36), (37): Xaa is C or S
  MOD_RES (14), (15), (16), (17), (18): Xaa is A or G
  MOD_RES (19), (20), (21), (22): Xaa is A or G or is absent
XKXSRVIMEYQKYXXXXXXXXXIYLISIPSLAQPVXXPAA

SEQ ID NO: 15923 - protein, 41 aa, Artificial Sequence
  Non-cyclic GFR-binding peptide
  MOD_RES (1), (3), (37), (38): Xaa is C or S
  MOD_RES (15), (16), (17), (18), (19): Xaa is A or G
  MOD_RES (20), (21), (22), (23): Xaa is A or G or is absent
XGXESVAMGRYKKLXXXXXXXXXFYLISIANLKTPVXXAKS

SEQ ID NO: 15924 - protein, 39 aa, Artificial Sequence
  Non-cyclic GFR-binding peptide
  MOD_RES (1), (3), (36), (37): Xaa is C or S
XGXEAVSMGEEYQKYTPVGMDDIYLVSIPSLKTPVXXAK

SEQ ID NO: 15925 - protein, 40 aa, Artificial Sequence
  Non-cyclic GFR-binding peptide
  MOD_RES (1), (35), (36): Xaa is C or S
  MOD_RES (13), (14), (15), (16), (17): Xaa is A or G
  MOD_RES (18), (19), (20), (21): Xaa is A or G or is absent
XGEVVMDEYKFKXXXXXXXXXLYLMSIPELETPVXXAKPI

SEQ ID NO: 15926 - protein, 39 aa, Artificial Sequence
  Non-cyclic GFR-binding peptide
  MOD_RES (33), (34): Xaa is C or S
  MOD_RES (11), (12), (13), (14), (15): Xaa is A or G
  MOD_RES (16), (17), (18), (19): Xaa is A or G or is absent
RVVMNEYKFKXXXXXXXXXLYLVSIPELQTPAXXPKPVT

SEQ ID NO: 15927 - protein, 42 aa, Artificial Sequence
  Non-cyclic GFR-binding peptide
  MOD_RES (1), (3), (37), (38): Xaa is C or S
  MOD_RES (15), (16), (17), (18), (19): Xaa is A or G
  MOD_RES (20), (21), (22), (23): Xaa is A or G or is absent
XGXESVAMGRYKKLXXXXXXXXXFYLISIANLKTPVXXAKSA

SEQ ID NO: 15928 - protein, 42 aa, Artificial Sequence
  Non-cyclic GFR-binding peptide
  MOD_RES (2), (36), (37): Xaa is C or S
  MOD_RES (14), (15), (16), (17), (18): Xaa is A or G
  MOD_RES (19), (20), (21), (22): Xaa is A or G or is absent
GXGEVVMDEYKFKXXXXXXXXXLYLMSIPELETPVXXAKPIK

SEQ ID NO: 15929 - protein, 37 aa, Artificial Sequence
  Non-cyclic GFR-binding peptide
  MOD_RES (1), (3), (37): Xaa is C or S
  MOD_RES (15), (16), (17), (18), (19): Xaa is A or G
  MOD_RES (20), (21), (22), (23): Xaa is A or G or is absent
XGXESVAMGRYKKLXXXXXXXXXFYLISIANLKTPVX

SEQ ID NO: 15930 - protein, 40 aa, Artificial Sequence
  Non-cyclic GFR-binding peptide
  MOD_RES (1), (3), (37), (38): Xaa is C or S
  MOD_RES (15), (16), (17), (18), (19): Xaa is A or G
  MOD_RES (20), (21), (22), (23): Xaa is A or G or is absent
XGXAEVVMDRYKKLXXXXXXXXXFYLISIANLRAPVXXSA

SEQ ID NO: 15931 - protein, 35 aa, Artificial Sequence
  Non-cyclic GFR-binding peptide
  MOD_RES (2), (2): Xaa is C or S
  MOD_RES (14), (15), (16), (17), (18): Xaa is A or G
  MOD_RES (19), (20), (21), (22): Xaa is A or G or is absent
GXGEVVMEEYQKYXXXXXXXXXIYLMSIPSLETPV

SEQ ID NO: 15932 - protein, 35 aa, Artificial Sequence
  Non-cyclic GFR-binding peptide
  MOD_RES (2), (34): Xaa is C or S
GXSRVVMNEYQKYIVNSSDDIYLVSIPSLKTPAXT

SEQ ID NO: 15933 - protein, 38 aa, Artificial Sequence
  Non-cyclic GFR-binding peptide
  MOD_RES (2), (36), (37): Xaa is C or S
  MOD_RES (14), (15), (16), (17), (18): Xaa is A or G
  MOD_RES (19), (20), (21), (22): Xaa is A or G or is absent
GXESVAMGYHYKLXXXXXXXXXKYLISIPSLKTPVXXA

SEQ ID NO: 15934 - protein, 35 aa, Artificial Sequence
  Non-cyclic GFR-binding peptide
  MOD_RES (1), (35): Xaa is C or S
  MOD_RES (13), (14), (15), (16), (17): Xaa is A or G
  MOD_RES (18), (19), (20), (21): Xaa is A or G or is absent
XESVAMGYHYKLXXXXXXXXXKYLISIPSLKTPVX

SEQ ID NO: 15935 - protein, 39 aa, Artificial Sequence
  Non-cyclic GFR-binding peptide
  MOD_RES (1), (3), (37), (38): Xaa is C or S
  MOD_RES (15), (16), (17), (18), (19): Xaa is A or G
  MOD_RES (20), (21), (22), (23): Xaa is A or G or is absent
XGXGEVVMDEYKFKXXXXXXXXXLYLMSIPELETPVXXA

SEQ ID NO: 15936 - protein, 40 aa, Artificial Sequence
  Non-cyclic GFR-binding peptide
  MOD_RES (1), (3), (36), (37): Xaa is C or S
  MOD_RES (14), (15), (16), (17), (18): Xaa is A or G
  MOD_RES (19), (20), (21), (22): Xaa is A or G or is absent
XKXSKVIMEYQKYXXXXXXXXXIYLISIPSLDQSVXXPSA

SEQ ID NO: 15937 - protein, 33 aa, Artificial Sequence
  Non-cyclic GFR-binding peptide
  MOD_RES (2), (2): Xaa is C or S
GXGEVVMDEYKFKVVKENEDLYLMSIPELETPV

SEQ ID NO: 15938 - protein, 38 aa, Artificial Sequence
  Non-cyclic GFR-binding peptide
  MOD_RES (2), (35), (36): Xaa is C or S
  MOD_RES (13), (14), (15), (16), (17): Xaa is A or G
  MOD_RES (18), (19), (20), (21): Xaa is A or G or is absent
KXSKVIMEYQKYXXXXXXXXXIYLISIPSLDQSVXXPS

SEQ ID NO: 15939 - protein, 37 aa, Artificial Sequence
  Non-cyclic GFR-binding peptide
  MOD_RES (31), (32): Xaa is C or S
SKVVMEYQKYVKPTRGVIYLISIPSLDQPVXXPSASA

SEQ ID NO: 15940 - protein, 39 aa, Artificial Sequence
  Non-cyclic GFR-binding peptide
  MOD_RES (2), (4), (38), (39): Xaa is C or S
  MOD_RES (16), (17), (18), (19), (20): Xaa is A or G
  MOD_RES (21), (22), (23), (24): Xaa is A or G or is absent
RXGXAEVVMDYHYKLXXXXXXXXXKYLISIPSLRAPVXX

SEQ ID NO: 15941 - protein, 32 aa, Artificial Sequence
  Non-cyclic GFR-binding peptide
  MOD_RES (31), (32): Xaa is C or S
RVVMNEYQKYIVNSSDDIYLVSIPSLKTPAXX

SEQ ID NO: 15942 - protein, 30 aa, Artificial Sequence
  Non-cyclic GFR-binding peptide
RVVMNEYKFKIVNSSDDLYLVSIPELKTPA

SEQ ID NO: 15943 - protein, 43 aa, Artificial Sequence
  Non-cyclic GFR-binding peptide
  MOD_RES (1), (3), (37), (38): Xaa is C or S
  MOD_RES (15), (16), (17), (18), (19): Xaa is A or G
  MOD_RES (20), (21), (22), (23): Xaa is A or G or is absent
XGXSRVVMNEYQKYXXXXXXXXXIYLVSIPSLKTPAXXPKPVY

SEQ ID NO: 15944 - protein, 38 aa, Artificial Sequence
  Non-cyclic GFR-binding peptide
  MOD_RES (2), (4), (37), (38): Xaa is C or S
  MOD_RES (15), (16), (17), (18), (19): Xaa is A or G
  MOD_RES (20), (21), (22), (23): Xaa is A or G or is absent
SXKXSKVIMEYQKYXXXXXXXXXIYLISIPSLDQSVXX

SEQ ID NO: 15945 - protein, 39 aa, Artificial Sequence
  Non-cyclic GFR-binding peptide
  MOD_RES (1), (3), (35), (36): Xaa is C or S
XGXESVAMGEYQKYYTVVGKDIYLISIPSLKTPVXXAKS

SEQ ID NO: 15946 - protein, 40 aa, Artificial Sequence
  Non-cyclic GFR-binding peptide
  MOD_RES (35), (36): Xaa is C or S
  MOD_RES (13), (14), (15), (16), (17): Xaa is A or G
  MOD_RES (18), (19), (20), (21): Xaa is A or G or is absent
EAVSMGEEYQKYXXXXXXXXXIYLVSIPSLKTPVXXAKGV

SEQ ID NO: 15947 - protein, 37 aa, Artificial Sequence
  Non-cyclic GFR-binding peptide
  MOD_RES (2), (36), (37): Xaa is C or S
  MOD_RES (14), (15), (16), (17), (18): Xaa is A or G
  MOD_RES (19), (20), (21), (22): Xaa is A or G or is absent
GXAEVVMDRYKKLXXXXXXXXXFYLISIANLRAPVXX

SEQ ID NO: 15948 - protein, 39 aa, Artificial Sequence
  Non-cyclic GFR-binding peptide
  MOD_RES (1), (35), (36): Xaa is C or S
  MOD_RES (13), (14), (15), (16), (17): Xaa is A or G
  MOD_RES (18), (19), (20), (21): Xaa is A or G or is absent
XAKVVMNEYQKYXXXXXXXXXIYLVSIPSLKTPAXXAKP

SEQ ID NO: 15949 - protein, 35 aa, Artificial Sequence
  Non-cyclic GFR-binding peptide
  MOD_RES (1), (3), (35): Xaa is C or S
XGXARVVMNEYKFKIVNSSDDLYLVSIPELQTPAX

SEQ ID NO: 15950 - protein, 38 aa, Artificial Sequence
  Non-cyclic GFR-binding peptide
  MOD_RES (2), (35), (36): Xaa is C or S
  MOD_RES (13), (14), (15), (16), (17): Xaa is A or G
  MOD_RES (18), (19), (20), (21): Xaa is A or G or is absent
KXSRVIMEYKFKXXXXXXXXXLYLISIPELAQPVXXPA

SEQ ID NO: 15951 - protein, 34 aa, Artificial Sequence
  Non-cyclic GFR-binding peptide
  MOD_RES (31), (32): Xaa is C or S
SVAMGEYQKYYTVVGKDIYLISIPSLKTPVXXAK

SEQ ID NO: 15952 - protein, 39 aa, Artificial Sequence
  Non-cyclic GFR-binding peptide
  MOD_RES (2), (4), (38), (39): Xaa is C or S
  MOD_RES (16), (17), (18), (19), (20): Xaa is A or G
  MOD_RES (21), (22), (23), (24): Xaa is A or G or is absent
HXGXARVVMNEYKFKXXXXXXXXXLYLVSIPELQTPAXX

SEQ ID NO: 15953 - protein, 35 aa, Artificial Sequence
  Non-cyclic GFR-binding peptide
  MOD_RES (1), (34), (35): Xaa is C or S
XEAVSMGEEYKFKTPVGMDDLYLVSIPELKTPVXX

SEQ ID NO: 15954 - protein, 41 aa, Artificial Sequence
  Non-cyclic GFR-binding peptide
  MOD_RES (1), (3), (36), (37): Xaa is C or S
  MOD_RES (14), (15), (16), (17), (18): Xaa is A or G
  MOD_RES (19), (20), (21), (22): Xaa is A or G or is absent
XKXSKVIMEYKFKXXXXXXXXXLYLISIPELDQSVXXPSAS

SEQ ID NO: 15955 - protein, 32 aa, Artificial Sequence
  Non-cyclic GFR-binding peptide
  MOD_RES (11), (12), (13), (14), (15): Xaa is A or G
  MOD_RES (16), (17), (18), (19): Xaa is A or G or is absent
SRVIMEYQKYXXXXXXXXXIYLISIPSLAQPV

SEQ ID NO: 15956 - protein, 39 aa, Artificial Sequence
  Non-cyclic GFR-binding peptide
  MOD_RES (2), (36), (37): Xaa is C or S
  MOD_RES (14), (15), (16), (17), (18): Xaa is A or G
  MOD_RES (19), (20), (21), (22): Xaa is A or G or is absent
GXARVVMNEYQKYXXXXXXXXXIYLVSIPSLQTPAXXPK

SEQ ID NO: 15957 - protein, 40 aa, Artificial Sequence
  Non-cyclic GFR-binding peptide
  MOD_RES (1), (35): Xaa is C or S
  MOD_RES (13), (14), (15), (16), (17): Xaa is A or G
  MOD_RES (18), (19), (20), (21): Xaa is A or G or is absent
XSRVVMNEYQKYXXXXXXXXXIYLVSIPSLKTPAXTPKTV

SEQ ID NO: 15958 - protein, 36 aa, Artificial Sequence
  Non-cyclic GFR-binding peptide
  MOD_RES (34), (34): Xaa is C or S
  MOD_RES (12), (13), (14), (15), (16): Xaa is A or G
  MOD_RES (17), (18), (19), (20): Xaa is A or G or is absent
SRVVMNEYQKYXXXXXXXXXIYLVSIPSLKTPAXTP

SEQ ID NO: 15959 - protein, 33 aa, Artificial Sequence
  Non-cyclic GFR-binding peptide
  MOD_RES (1), (1): Xaa is C or S
  MOD_RES (12), (13), (14), (15), (16): Xaa is A or G
  MOD_RES (17), (18), (19), (20): Xaa is A or G or is absent
XSRVIMEYKFKXXXXXXXXXLYLISIPELAQPV

SEQ ID NO: 15960 - protein, 38 aa, Artificial Sequence
  Non-cyclic GFR-binding peptide
  MOD_RES (1), (3), (35), (36): Xaa is C or S
XGXAEVVMDYHYKLVVNNAADKYLISIPSLRAPVXXSA

SEQ ID NO: 15961 - protein, 40 aa, Artificial Sequence
  Non-cyclic GFR-binding peptide
  MOD_RES (2), (4), (38), (39): Xaa is C or S
  MOD_RES (16), (17), (18), (19), (20): Xaa is A or G
  MOD_RES (21), (22), (23), (24): Xaa is A or G or is absent
HXGXSRVVMNEYQKYXXXXXXXXXIYLVSIPSLKTPAXXP

SEQ ID NO: 15962 - protein, 37 aa, Artificial Sequence
  Non-cyclic GFR-binding peptide
  MOD_RES (2), (4), (36), (37): Xaa is C or S
RXGXAEVVMDEYKFKVVNNAADLYLISIPELRAPVXX

SEQ ID NO: 15963 - protein, 41 aa, Artificial Sequence
  Non-cyclic GFR-binding peptide
  MOD_RES (1), (35), (36): Xaa is C or S
  MOD_RES (13), (14), (15), (16), (17): Xaa is A or G
  MOD_RES (18), (19), (20), (21): Xaa is A or G or is absent
XGEVVMDEYKFKXXXXXXXXXLYLMSIPELETPVXXAKPIK

SEQ ID NO: 15964 - protein, 35 aa, Artificial Sequence
  Non-cyclic GFR-binding peptide
  MOD_RES (1), (3), (34), (35): Xaa is C or S
XKXSKVIMEYKFKIKPTKGILYLISIPELDQSVXX

SEQ ID NO: 15965 - protein, 38 aa, Artificial Sequence
  Non-cyclic GFR-binding peptide
  MOD_RES (1), (3), (35), (36): Xaa is C or S
XGXSRVVMNEYKFKIVNSSDDLYLVSIPELKTPAXXPK

SEQ ID NO: 15966 - protein, 36 aa, Artificial Sequence
  Non-cyclic GFR-binding peptide
  MOD_RES (2), (35), (36): Xaa is C or S
  MOD_RES (13), (14), (15), (16), (17): Xaa is A or G
  MOD_RES (18), (19), (20), (21): Xaa is A or G or is absent
KXSRVIMEYQKYXXXXXXXXXIYLISIPSLAQPVXX

SEQ ID NO: 15967 - protein, 43 aa, Artificial Sequence
  Non-cyclic GFR-binding peptide
  MOD_RES (2), (4), (37), (38): Xaa is C or S
  MOD_RES (15), (16), (17), (18), (19): Xaa is A or G
  MOD_RES (20), (21), (22), (23): Xaa is A or G or is absent
SXKXSRVIMEYKFKXXXXXXXXXLYLISIPELAQPVXXPAASA

SEQ ID NO: 15968 - protein, 41 aa, Artificial Sequence
  Non-cyclic GFR-binding peptide
  MOD_RES (2), (36), (37): Xaa is C or S
  MOD_RES (14), (15), (16), (17), (18): Xaa is A or G
  MOD_RES (19), (20), (21), (22): Xaa is A or G or is absent
GXAEVVMDEYKFKXXXXXXXXXLYLISIPELRAPVXXSAPA

SEQ ID NO: 15969 - protein, 36 aa, Artificial Sequence
  Non-cyclic GFR-binding peptide
  MOD_RES (33), (34): Xaa is C or S
  MOD_RES (11), (12), (13), (14), (15): Xaa is A or G
  MOD_RES (16), (17), (18), (19): Xaa is A or G or is absent
RVVMNEYQKYXXXXXXXXXIYLVSIPSLKTPAXXPK

SEQ ID NO: 15970 - protein, 35 aa, Artificial Sequence
  Non-cyclic GFR-binding peptide
  MOD_RES (1), (3): Xaa is C or S
  MOD_RES (14), (15), (16), (17), (18): Xaa is A or G
  MOD_RES (19), (20), (21), (22): Xaa is A or G or is absent
XKXSKVIMEYQKYXXXXXXXXXIYLISIPSLDQSV

SEQ ID NO: 15971 - protein, 36 aa, Artificial Sequence
  Non-cyclic GFR-binding peptide
  MOD_RES (1), (32), (33): Xaa is C or S
XSKVVMEYKFKVKPTRGVLYLISIPELDQPVXXPSA

SEQ ID NO: 15972 - protein, 35 aa, Artificial Sequence
  Non-cyclic GFR-binding peptide
  MOD_RES (31), (32): Xaa is C or S
KVVMNEYKFKIVNNSSDLYLVSIPELKTPAXXAKP

SEQ ID NO: 15973 - protein, 40 aa, Artificial Sequence
  Non-cyclic GFR-binding peptide
  MOD_RES (2), (4), (38), (39): Xaa is C or S
  MOD_RES (16), (17), (18), (19), (20): Xaa is A or G
  MOD_RES (21), (22), (23), (24): Xaa is A or G or is absent
HXGXARVVMNEYKFKXXXXXXXXXLYLVSIPELQTPAXXP

SEQ ID NO: 15974 - protein, 36 aa, Artificial Sequence
  Non-cyclic GFR-binding peptide
  MOD_RES (2), (4), (36): Xaa is C or S
RXGXAEVVMDYHYKLVVNNAADKYLISIPSLRAPVX

SEQ ID NO: 15975 - protein, 36 aa, Artificial Sequence
  Non-cyclic GFR-binding peptide
  MOD_RES (31), (32): Xaa is C or S
SRVIMEYQKYVKPKRGVIYLISIPSLAQPVXXPAAS

SEQ ID NO: 15976 - protein, 40 aa, Artificial Sequence
  Non-cyclic GFR-binding peptide
  MOD_RES (1), (3), (35), (36): Xaa is C or S
XGXGEVVMEEYQKYVVKDYEDIYLMSIPSLETPVXXAKPI

SEQ ID NO: 15977 - protein, 42 aa, Artificial Sequence
  Non-cyclic GFR-binding peptide
  MOD_RES (2), (36): Xaa is C or S
  MOD_RES (14), (15), (16), (17), (18): Xaa is A or G
  MOD_RES (19), (20), (21), (22): Xaa is A or G or is absent
GXSRVVMNEYQKYXXXXXXXXXIYLVSIPSLKTPAXTPKTVH

SEQ ID NO: 15978 - protein, 40 aa, Artificial Sequence
  Non-cyclic GFR-binding peptide
  MOD_RES (1), (35): Xaa is C or S
  MOD_RES (13), (14), (15), (16), (17): Xaa is A or G
  MOD_RES (18), (19), (20), (21): Xaa is A or G or is absent
XSRVVMNEYKFKXXXXXXXXXLYLVSIPELKTPAXTPKTV

SEQ ID NO: 15979 - protein, 43 aa, Artificial Sequence
  Non-cyclic GFR-binding peptide
  MOD_RES (1), (3), (38), (39): Xaa is C or S
  MOD_RES (16), (17), (18), (19), (20): Xaa is A or G
  MOD_RES (21), (22), (23), (24): Xaa is A or G or is absent
XGXEAVSMGEEYKFKXXXXXXXXXLYLVSIPELKTPVXXAKGV

SEQ ID NO: 15980 - protein, 36 aa, Artificial Sequence
  Non-cyclic GFR-binding peptide
  MOD_RES (2), (4): Xaa is C or S
  MOD_RES (15), (16), (17), (18), (19): Xaa is A or G
  MOD_RES (20), (21), (22), (23): Xaa is A or G or is absent
SXKXSKVIMEYKFKXXXXXXXXXLYLISIPELDQSV

SEQ ID NO: 15981 - protein, 37 aa, Artificial Sequence
  Non-cyclic GFR-binding peptide
  MOD_RES (1), (3), (35): Xaa is C or S
XGXSRVVMNEYQKYIVNSSDDIYLVSIPSLKTPAXTP

SEQ ID NO: 15982 - protein, 37 aa, Artificial Sequence
  Non-cyclic GFR-binding peptide
  MOD_RES (2), (34): Xaa is C or S
GXSRVVMNEYKFKIVNSSDDLYLVSIPELKTPAXTPK

SEQ ID NO: 15983 - protein, 34 aa, Artificial Sequence
  Non-cyclic GFR-binding peptide
  MOD_RES (33), (34): Xaa is C or S
  MOD_RES (11), (12), (13), (14), (15): Xaa is A or G
  MOD_RES (16), (17), (18), (19): Xaa is A or G or is absent
EVVMEEYQKYXXXXXXXXXIYLMSIPSLETPVXX

SEQ ID NO: 15984 - protein, 36 aa, Artificial Sequence
  Non-cyclic GFR-binding peptide
  MOD_RES (2), (4), (36): Xaa is C or S
RXGXGEVVMDEYQKYVVKENEDIYLMSIPSLETPVX

SEQ ID NO: 15985 - protein, 36 aa, Artificial Sequence
  Non-cyclic GFR-binding peptide
  MOD_RES (34), (35): Xaa is C or S
  MOD_RES (12), (13), (14), (15), (16): Xaa is A or G
  MOD_RES (17), (18), (19), (20): Xaa is A or G or is absent
ARVVMNEYKFKXXXXXXXXXLYLVSIPELQTPAXXP

SEQ ID NO: 15986 - protein, 39 aa, Artificial Sequence
  Non-cyclic GFR-binding peptide
  MOD_RES (2), (4), (36), (37): Xaa is C or S
RXGXESVAMGEYQKYYTVVGKDIYLISIPSLKTPVXXAK

SEQ ID NO: 15987 - protein, 35 aa, Artificial Sequence
  Non-cyclic GFR-binding peptide
  MOD_RES (1), (33), (34): Xaa is C or S
XSRVVMNEYQKYIVNSSDDIYLVSIPSLKTPAXXP

SEQ ID NO: 15988 - protein, 40 aa, Artificial Sequence
  Non-cyclic GFR-binding peptide
  MOD_RES (2), (4), (38), (39): Xaa is C or S
  MOD_RES (16), (17), (18), (19), (20): Xaa is A or G
  MOD_RES (21), (22), (23), (24): Xaa is A or G or is absent
RXGXESVAMGYHYKLXXXXXXXXXKYLISIPSLKTPVXXA

SEQ ID NO: 15989 - protein, 39 aa, Artificial Sequence
  Non-cyclic GFR-binding peptide
  MOD_RES (2), (4), (38), (39): Xaa is C or S
  MOD_RES (16), (17), (18), (19), (20): Xaa is A or G
  MOD_RES (21), (22), (23), (24): Xaa is A or G or is absent
HXGXSRVVMNEYQKYXXXXXXXXXIYLVSIPSLKTPAXX

SEQ ID NO: 15990 - protein, 39 aa, Artificial Sequence
  Non-cyclic GFR-binding peptide
  MOD_RES (2), (4), (36), (37): Xaa is C or S
RXGXAEVVMDYHYKLVVNNAADKYLISIPSLRAPVXXSA

SEQ ID NO: 15991 - protein, 37 aa, Artificial Sequence
  Non-cyclic GFR-binding peptide
  MOD_RES (1), (3), (37): Xaa is C or S
  MOD_RES (15), (16), (17), (18), (19): Xaa is A or G
  MOD_RES (20), (21), (22), (23): Xaa is A or G or is absent
XGXAEVVMDRYKKLXXXXXXXXXFYLISIANLRAPVX

SEQ ID NO: 15992 - protein, 41 aa, Artificial Sequence
  Non-cyclic GFR-binding peptide
  MOD_RES (1), (35), (36): Xaa is C or S
  MOD_RES (13), (14), (15), (16), (17): Xaa is A or G
  MOD_RES (18), (19), (20), (21): Xaa is A or G or is absent
XGEVVMEEYQKYXXXXXXXXXIYLMSIPSLETPVXXAKPIS

SEQ ID NO: 15993 - protein, 37 aa, Artificial Sequence
  Non-cyclic GFR-binding peptide
  MOD_RES (1), (35): Xaa is C or S
  MOD_RES (13), (14), (15), (16), (17): Xaa is A or G
  MOD_RES (18), (19), (20), (21): Xaa is A or G or is absent
XSRVVMNEYQKYXXXXXXXXXIYLVSIPSLKTPAXTP

SEQ ID NO: 15994 - protein, 36 aa, Artificial Sequence
  Non-cyclic GFR-binding peptide
  MOD_RES (2), (4), (36): Xaa is C or S
RXGXESVAMGEYQKYYTVVGKDIYLISIPSLKTPVX

SEQ ID NO: 15995 - protein, 40 aa, Artificial Sequence
  Non-cyclic GFR-binding peptide
  MOD_RES (1), (34), (35): Xaa is C or S
  MOD_RES (12), (13), (14), (15), (16): Xaa is A or G
  MOD_RES (17), (18), (19), (20): Xaa is A or G or is absent
XSKVVMEYKFKXXXXXXXXXLYLISIPELDQPVXXPSASA

SEQ ID NO: 15996 - protein, 32 aa, Artificial Sequence
  Non-cyclic GFR-binding peptide
  MOD_RES (11), (12), (13), (14), (15): Xaa is A or G
  MOD_RES (16), (17), (18), (19): Xaa is A or G or is absent
RVVMNEYKFKXXXXXXXXXLYLVSIPELQTPA

SEQ ID NO: 15997 - protein, 37 aa, Artificial Sequence
  Non-cyclic GFR-binding peptide
  MOD_RES (34), (35): Xaa is C or S
  MOD_RES (12), (13), (14), (15), (16): Xaa is A or G
  MOD_RES (17), (18), (19), (20): Xaa is A or G or is absent
AEVVMDRYKKLXXXXXXXXXFYLISIANLRAPVXXSA

SEQ ID NO: 15998 - protein, 35 aa, Artificial Sequence
  Non-cyclic GFR-binding peptide
  MOD_RES (1), (35): Xaa is C or S
  MOD_RES (13), (14), (15), (16), (17): Xaa is A or G
  MOD_RES (18), (19), (20), (21): Xaa is A or G or is absent
XAEVVMDRYKKLXXXXXXXXXFYLISIANLRAPVX

SEQ ID NO: 15999 - protein, 39 aa, Artificial Sequence
  Non-cyclic GFR-binding peptide
  MOD_RES (1), (3), (37), (38): Xaa is C or S
  MOD_RES (15), (16), (17), (18), (19): Xaa is A or G
  MOD_RES (20), (21), (22), (23): Xaa is A or G or is absent
XGXAEVVMDRYKKLXXXXXXXXXFYLISIANLRAPVXXS

SEQ ID NO: 16000 - protein, 42 aa, Artificial Sequence
  Non-cyclic GFR-binding peptide
  MOD_RES (2), (36), (37): Xaa is C or S
  MOD_RES (14), (15), (16), (17), (18): Xaa is A or G
  MOD_RES (19), (20), (21), (22): Xaa is A or G or is absent
GXAEVVMDEYKFKXXXXXXXXXLYLISIPELRAPVXXSAPAA

SEQ ID NO: 16001 - protein, 39 aa, Artificial Sequence
  Non-cyclic GFR-binding peptide
  MOD_RES (2), (36), (37): Xaa is C or S
  MOD_RES (14), (15), (16), (17), (18): Xaa is A or G
  MOD_RES (19), (20), (21), (22): Xaa is A or G or is absent
GXAKVVMNEYQKYXXXXXXXXXIYLVSIPSLKTPAXXAK

SEQ ID NO: 16002 - protein, 38 aa, Artificial Sequence
  Non-cyclic GFR-binding peptide
  MOD_RES (1), (3), (34), (35): Xaa is C or S
XKXSRVIMEYQKYVKPKRGVIYLISIPSLAQPVXXPAA

SEQ ID NO: 16003 - protein, 37 aa, Artificial Sequence
  Non-cyclic GFR-binding peptide
  MOD_RES (1), (35), (36): Xaa is C or S
  MOD_RES (13), (14), (15), (16), (17): Xaa is A or G
  MOD_RES (18), (19), (20), (21): Xaa is A or G or is absent
XGEVVMEEYKFKXXXXXXXXXLYLMSIPELETPVXXA

SEQ ID NO: 16004 - protein, 42 aa, Artificial Sequence
  Non-cyclic GFR-binding peptide
  MOD_RES (2), (36), (37): Xaa is C or S
  MOD_RES (14), (15), (16), (17), (18): Xaa is A or G
  MOD_RES (19), (20), (21), (22): Xaa is A or G or is absent
GXAEVVMDYHYKLXXXXXXXXXKYLISIPSLRAPVXXSAPAA

SEQ ID NO: 16005 - protein, 41 aa, Artificial Sequence
  Non-cyclic GFR-binding peptide
  MOD_RES (2), (4), (36), (37): Xaa is C or S
RXGXAEVVMDYHYKLVVNNAADKYLISIPSLRAPVXXSAPA

SEQ ID NO: 16006 - protein, 41 aa, Artificial Sequence
  Non-cyclic GFR-binding peptide
  MOD_RES (2), (4), (38), (39): Xaa is C or S
  MOD_RES (16), (17), (18), (19), (20): Xaa is A or G
  MOD_RES (21), (22), (23), (24): Xaa is A or G or is absent
RXGXGEVVMEEYKFKXXXXXXXXXLYLMSIPELETPVXXAK

SEQ ID NO: 16007 - protein, 38 aa, Artificial Sequence
  Non-cyclic GFR-binding peptide
  MOD_RES (2), (34), (35): Xaa is C or S
GXESVAMGYHYKLYTVVGKDKYLISIPSLKTPVXXAKS

SEQ ID NO: 16008 - protein, 38 aa, Artificial Sequence
  Non-cyclic GFR-binding peptide
  MOD_RES (32), (33): Xaa is C or S
ESVAMGYHYKLYTVVGKDKYLISIPSLKTPVXXAKSAK

SEQ ID NO: 16009 - protein, 36 aa, Artificial Sequence
  Non-cyclic GFR-binding peptide
  MOD_RES (2), (36): Xaa is C or S
  MOD_RES (14), (15), (16), (17), (18): Xaa is A or G
  MOD_RES (19), (20), (21), (22): Xaa is A or G or is absent
GXGEVVMDEYQKYXXXXXXXXXIYLMSIPSLETPVX

SEQ ID NO: 16010 - protein, 37 aa, Artificial Sequence
  Non-cyclic GFR-binding peptide
  MOD_RES (2), (4), (36), (37): Xaa is C or S
RXGXGEVVMDEYQKYVVKENEDIYLMSIPSLETPVXX

SEQ ID NO: 16011 - protein, 37 aa, Artificial Sequence
  Non-cyclic GFR-binding peptide
  MOD_RES (2), (4), (35), (36): Xaa is C or S
SXKXSKVIMEYQKYIKPTKGIIYLISIPSLDQSVXXP

SEQ ID NO: 16012 - protein, 35 aa, Artificial Sequence
  Non-cyclic GFR-binding peptide
  MOD_RES (1), (34), (35): Xaa is C or S
  MOD_RES (12), (13), (14), (15), (16): Xaa is A or G
  MOD_RES (17), (18), (19), (20): Xaa is A or G or is absent
XSKVVMEYKFKXXXXXXXXXLYLISIPELDQPVXX

SEQ ID NO: 16013 - protein, 38 aa, Artificial Sequence
  Non-cyclic GFR-binding peptide
  MOD_RES (1), (35), (36): Xaa is C or S
  MOD_RES (13), (14), (15), (16), (17): Xaa is A or G
  MOD_RES (18), (19), (20), (21): Xaa is A or G or is absent
XGEVVMDEYQKYXXXXXXXXXIYLMSIPSLETPVXXAK

SEQ ID NO: 16014 - protein, 35 aa, Artificial Sequence
  Non-cyclic GFR-binding peptide
  MOD_RES (32), (33): Xaa is C or S
AEVVMDEYKFKVVNNAADLYLISIPELRAPVXXSA

SEQ ID NO: 16015 - protein, 37 aa, Artificial Sequence
  Non-cyclic GFR-binding peptide
  MOD_RES (33), (34): Xaa is C or S
  MOD_RES (11), (12), (13), (14), (15): Xaa is A or G
  MOD_RES (16), (17), (18), (19): Xaa is A or G or is absent
SKVIMEYKFKXXXXXXXXXLYLISIPELDQSVXXPSA

SEQ ID NO: 16016 - protein, 39 aa, Artificial Sequence
  Non-cyclic GFR-binding peptide
  MOD_RES (34), (35): Xaa is C or S
  MOD_RES (12), (13), (14), (15), (16): Xaa is A or G
  MOD_RES (17), (18), (19), (20): Xaa is A or G or is absent
ESVAMGYHYKLXXXXXXXXXKYLISIPSLKTPVXXAKSA

SEQ ID NO: 16017 - protein, 39 aa, Artificial Sequence
  Non-cyclic GFR-binding peptide
  MOD_RES (2), (34), (35): Xaa is C or S
GXSRVVMNEYQKYIVNSSDDIYLVSIPSLKTPAXXPKPV

SEQ ID NO: 16018 - protein, 35 aa, Artificial Sequence
  Non-cyclic GFR-binding peptide
  MOD_RES (33), (34): Xaa is C or S
  MOD_RES (11), (12), (13), (14), (15): Xaa is A or G
  MOD_RES (16), (17), (18), (19): Xaa is A or G or is absent
RVVMNEYQKYXXXXXXXXXIYLVSIPSLKTPAXXP

SEQ ID NO: 16019 - protein, 36 aa, Artificial Sequence
  Non-cyclic GFR-binding peptide
  MOD_RES (2), (34), (35): Xaa is C or S
GXESVAMGYHYKLYTVVGKDKYLISIPSLKTPVXXA

SEQ ID NO: 16020 - protein, 37 aa, Artificial Sequence
  Non-cyclic GFR-binding peptide
  MOD_RES (2), (4), (35), (36): Xaa is C or S
SXKXSKVIMEYKFKIKPTKGILYLISIPELDQSVXXP

SEQ ID NO: 16021 - protein, 36 aa, Artificial Sequence
  Non-cyclic GFR-binding peptide
  MOD_RES (32), (32): Xaa is C or S
SRVVMNEYQKYIVNSSDDIYLVSIPSLKTPAXTPKT

SEQ ID NO: 16022 - protein, 41 aa, Artificial Sequence
  Non-cyclic GFR-binding peptide
  MOD_RES (2), (4), (36), (37): Xaa is C or S
RXGXAEVVMDEYKFKVVNNAADLYLISIPELRAPVXXSAPA

SEQ ID NO: 16023 - protein, 38 aa, Artificial Sequence
  Non-cyclic GFR-binding peptide
  MOD_RES (1), (3), (36), (37): Xaa is C or S
XGXEAVSMGEEYKFKTPVGMDDLYLVSIPELKTPVXXA

SEQ ID NO: 16024 - protein, 36 aa, Artificial Sequence
  Non-cyclic GFR-binding peptide
  MOD_RES (2), (35), (36): Xaa is C or S
  MOD_RES (13), (14), (15), (16), (17): Xaa is A or G
  MOD_RES (18), (19), (20), (21): Xaa is A or G or is absent
KXSRVIMEYKFKXXXXXXXXXLYLISIPELAQPVXX

SEQ ID NO: 16025 - protein, 40 aa, Artificial Sequence
  Non-cyclic GFR-binding peptide
  MOD_RES (2), (4), (36), (37): Xaa is C or S
RXGXAEVVMDYHYKLVVNNAADKYLISIPSLRAPVXXSAP

SEQ ID NO: 16026 - protein, 34 aa, Artificial Sequence
  Non-cyclic GFR-binding peptide
  MOD_RES (32), (33): Xaa is C or S
ARVVMNEYQKYIVNSSDDIYLVSIPSLQTPAXXP

SEQ ID NO: 16027 - protein, 33 aa, Artificial Sequence
  Non-cyclic GFR-binding peptide
  MOD_RES (33), (33): Xaa is C or S
  MOD_RES (11), (12), (13), (14), (15): Xaa is A or G
  MOD_RES (16), (17), (18), (19): Xaa is A or G or is absent
EVVMDRYKKLXXXXXXXXXFYLISIANLRAPVX

SEQ ID NO: 16028 - protein, 41 aa, Artificial Sequence
  Non-cyclic GFR-binding peptide
  MOD_RES (2), (36), (37): Xaa is C or S
  MOD_RES (14), (15), (16), (17), (18): Xaa is A or G
  MOD_RES (19), (20), (21), (22): Xaa is A or G or is absent
GXGEVVMDEYQKYXXXXXXXXXIYLMSIPSLETPVXXAKPI

SEQ ID NO: 16029 - protein, 41 aa, Artificial Sequence
  Non-cyclic GFR-binding peptide
  MOD_RES (2), (4), (37), (38): Xaa is C or S
RXGXEAVSMGEEYQKYTPVGMDDIYLVSIPSLKTPVXXAKG

SEQ ID NO: 16030 - protein, 35 aa, Artificial Sequence
  Non-cyclic GFR-binding peptide
  MOD_RES (33), (34): Xaa is C or S
  MOD_RES (11), (12), (13), (14), (15): Xaa is A or G
  MOD_RES (16), (17), (18), (19): Xaa is A or G or is absent
SRVIMEYKFKXXXXXXXXXLYLISIPELAQPVXXP

SEQ ID NO: 16031 - protein, 36 aa, Artificial Sequence
  Non-cyclic GFR-binding peptide
  MOD_RES (2), (4), (36): Xaa is C or S
RXGXAEVVMDEYKFKVVNNAADLYLISIPELRAPVX

SEQ ID NO: 16032 - protein, 30 aa, Artificial Sequence
  Non-cyclic GFR-binding peptide
SVAMGYHYKLYTVVGKDKYLISIPSLKTPV

SEQ ID NO: 16033 - protein, 34 aa, Artificial Sequence
  Non-cyclic GFR-binding peptide
  MOD_RES (1), (1): Xaa is C or S
  MOD_RES (13), (14), (15), (16), (17): Xaa is A or G
  MOD_RES (18), (19), (20), (21): Xaa is A or G or is absent
XESVAMGEYQKYXXXXXXXXXIYLISIPSLKTPV

SEQ ID NO: 16034 - protein, 42 aa, Artificial Sequence
  Non-cyclic GFR-binding peptide
  MOD_RES (2), (4), (37), (38): Xaa is C or S
RXGXEAVSMGEEYQKYTPVGMDDIYLVSIPSLKTPVXXAKGV

SEQ ID NO: 16035 - protein, 37 aa, Artificial Sequence
  Non-cyclic GFR-binding peptide
  MOD_RES (1), (35), (36): Xaa is C or S
  MOD_RES (13), (14), (15), (16), (17): Xaa is A or G
  MOD_RES (18), (19), (20), (21): Xaa is A or G or is absent
XESVAMGRYKKLXXXXXXXXXFYLISIANLKTPVXXA

SEQ ID NO: 16036 - protein, 33 aa, Artificial Sequence
  Non-cyclic GFR-binding peptide
  MOD_RES (32), (33): Xaa is C or S
AEVVMDYHYKLVVNNAADKYLISIPSLRAPVXX

SEQ ID NO: 16037 - protein, 40 aa, Artificial Sequence
  Non-cyclic GFR-binding peptide
  MOD_RES (1), (3), (35), (36): Xaa is C or S
XGXESVAMGEYQKYYTVVGKDIYLISIPSLKTPVXXAKSA

SEQ ID NO: 16038 - protein, 31 aa, Artificial Sequence
  Non-cyclic GFR-binding peptide
ARVVMNEYKFKIVNSSDDLYLVSIPELQTPA

SEQ ID NO: 16039 - protein, 37 aa, Artificial Sequence
  Non-cyclic GFR-binding peptide
  MOD_RES (34), (35): Xaa is C or S
  MOD_RES (12), (13), (14), (15), (16): Xaa is A or G
  MOD_RES (17), (18), (19), (20): Xaa is A or G or is absent
ESVAMGRYKKLXXXXXXXXXFYLISIANLKTPVXXAK

SEQ ID NO: 16040 - protein, 37 aa, Artificial Sequence
  Non-cyclic GFR-binding peptide
  MOD_RES (2), (4), (36): Xaa is C or S
HXGXSRVVMNEYQKYIVNSSDDIYLVSIPSLKTPAXT

SEQ ID NO: 16041 - protein, 37 aa, Artificial Sequence
  Non-cyclic GFR-binding peptide
  MOD_RES (1), (3), (37): Xaa is C or S
  MOD_RES (15), (16), (17), (18), (19): Xaa is A or G
  MOD_RES (20), (21), (22), (23): Xaa is A or G or is absent
XGXAKVVMNEYQKYXXXXXXXXXIYLVSIPSLKTPAX

SEQ ID NO: 16042 - protein, 34 aa, Artificial Sequence
  Non-cyclic GFR-binding peptide
  MOD_RES (31), (32): Xaa is C or S
RVVMNEYKFKIVNSSDDLYLVSIPELKTPAXXPK

SEQ ID NO: 16043 - protein, 38 aa, Artificial Sequence
  Non-cyclic GFR-binding peptide
  MOD_RES (2), (4), (38): Xaa is C or S
  MOD_RES (16), (17), (18), (19), (20): Xaa is A or G
  MOD_RES (21), (22), (23), (24): Xaa is A or G or is absent
HXGXAKVVMNEYKFKXXXXXXXXXLYLVSIPELKTPAX

SEQ ID NO: 16044 - protein, 33 aa, Artificial Sequence
  Non-cyclic GFR-binding peptide
  MOD_RES (1), (33): Xaa is C or S
XARVVMNEYKFKIVNSSDDLYLVSIPELQTPAX

SEQ ID NO: 16045 - protein, 31 aa, Artificial Sequence
  Non-cyclic GFR-binding peptide
ESVAMGRYKKLYTVVGKDFYLISIANLKTPV

SEQ ID NO: 16046 - protein, 37 aa, Artificial Sequence
  Non-cyclic GFR-binding peptide
  MOD_RES (32), (33): Xaa is C or S
GEVVMDEYQKYVVKENEDIYLMSIPSLETPVXXAKPI

SEQ ID NO: 16047 - protein, 37 aa, Artificial Sequence
  Non-cyclic GFR-binding peptide
  MOD_RES (1), (33), (34): Xaa is C or S
XSRVVMNEYKFKIVNSSDDLYLVSIPELKTPAXXPKP

SEQ ID NO: 16048 - protein, 39 aa, Artificial Sequence
  Non-cyclic GFR-binding peptide
  MOD_RES (1), (35), (36): Xaa is C or S
  MOD_RES (13), (14), (15), (16), (17): Xaa is A or G
  MOD_RES (18), (19), (20), (21): Xaa is A or G or is absent
XAKVVMNEYKFKXXXXXXXXXLYLVSIPELKTPAXXAKP

SEQ ID NO: 16049 - protein, 39 aa, Artificial Sequence
  Non-cyclic GFR-binding peptide
  MOD_RES (2), (36), (37): Xaa is C or S
  MOD_RES (14), (15), (16), (17), (18): Xaa is A or G
  MOD_RES (19), (20), (21), (22): Xaa is A or G or is absent
GXGEVVMDEYKFKXXXXXXXXXLYLMSIPELETPVXXAK

SEQ ID NO: 16050 - protein, 35 aa, Artificial Sequence
  Non-cyclic GFR-binding peptide
  MOD_RES (31), (32): Xaa is C or S
EVVMEEYKFKVVKDYEDLYLMSIPELETPVXXAKP

SEQ ID NO: 16051 - protein, 39 aa, Artificial Sequence
  Non-cyclic GFR-binding peptide
  MOD_RES (33), (33): Xaa is C or S
  MOD_RES (11), (12), (13), (14), (15): Xaa is A or G
  MOD_RES (16), (17), (18), (19): Xaa is A or G or is absent
RVVMNEYQKYXXXXXXXXXIYLVSIPSLKTPAXTPKTVH

SEQ ID NO: 16052 - protein, 38 aa, Artificial Sequence
  Non-cyclic GFR-binding peptide
  MOD_RES (1), (35), (36): Xaa is C or S
  MOD_RES (13), (14), (15), (16), (17): Xaa is A or G
  MOD_RES (18), (19), (20), (21): Xaa is A or G or is absent
XGEVVMDEYKFKXXXXXXXXXLYLMSIPELETPVXXAK

SEQ ID NO: 16053 - protein, 41 aa, Artificial Sequence
  Non-cyclic GFR-binding peptide
  MOD_RES (1), (3), (37), (38): Xaa is C or S
  MOD_RES (15), (16), (17), (18), (19): Xaa is A or G
  MOD_RES (20), (21), (22), (23): Xaa is A or G or is absent
XGXAEVVMDEYKFKXXXXXXXXXLYLISIPELRAPVXXSAP

SEQ ID NO: 16054 - protein, 36 aa, Artificial Sequence
  Non-cyclic GFR-binding peptide
  MOD_RES (1), (35), (36): Xaa is C or S
  MOD_RES (13), (14), (15), (16), (17): Xaa is A or G
  MOD_RES (18), (19), (20), (21): Xaa is A or G or is absent
XARVVMNEYQKYXXXXXXXXXIYLVSIPSLQTPAXX

SEQ ID NO: 16055 - protein, 37 aa, Artificial Sequence
  Non-cyclic GFR-binding peptide
  MOD_RES (2), (36), (37): Xaa is C or S
  MOD_RES (14), (15), (16), (17), (18): Xaa is A or G
  MOD_RES (19), (20), (21), (22): Xaa is A or G or is absent
GXGEVVMEEYKFKXXXXXXXXXLYLMSIPELETPVXX

SEQ ID NO: 16056 - protein, 42 aa, Artificial Sequence
  Non-cyclic GFR-binding peptide
  MOD_RES (2), (4), (38), (39): Xaa is C or S
  MOD_RES (16), (17), (18), (19), (20): Xaa is A or G
  MOD_RES (21), (22), (23), (24): Xaa is A or G or is absent
HXGXSRVVMNEYQKYXXXXXXXXXIYLVSIPSLKTPAXXPKP

SEQ ID NO: 16057 - protein, 39 aa, Artificial Sequence
  Non-cyclic GFR-binding peptide
  MOD_RES (33), (34): Xaa is C or S
  MOD_RES (11), (12), (13), (14), (15): Xaa is A or G
  MOD_RES (16), (17), (18), (19): Xaa is A or G or is absent
EVVMDRYKKLXXXXXXXXXFYLISIANLRAPVXXSAPAA

SEQ ID NO: 16058 - protein, 35 aa, Artificial Sequence
  Non-cyclic GFR-binding peptide
  MOD_RES (1), (35): Xaa is C or S
  MOD_RES (13), (14), (15), (16), (17): Xaa is A or G
  MOD_RES (18), (19), (20), (21): Xaa is A or G or is absent
XAKVVMNEYKFKXXXXXXXXXLYLVSIPELKTPAX

SEQ ID NO: 16059 - protein, 42 aa, Artificial Sequence
  Non-cyclic GFR-binding peptide
  MOD_RES (1), (3), (37), (38): Xaa is C or S
  MOD_RES (15), (16), (17), (18), (19): Xaa is A or G
  MOD_RES (20), (21), (22), (23): Xaa is A or G or is absent
XGXARVVMNEYKFKXXXXXXXXXLYLVSIPELQTPAXXPKPV

SEQ ID NO: 16060 - protein, 35 aa, Artificial Sequence
  Non-cyclic GFR-binding peptide
  MOD_RES (2), (4): Xaa is C or S
RXGXAEVVMDEYKFKVVNNAADLYLISIPELRAPV

SEQ ID NO: 16061 - protein, 40 aa, Artificial Sequence
  Non-cyclic GFR-binding peptide
  MOD_RES (1), (3), (35), (36): Xaa is C or S
XGXAEVVMDYHYKLVVNNAADKYLISIPSLRAPVXXSAPA

SEQ ID NO: 16062 - protein, 37 aa, Artificial Sequence
  Non-cyclic GFR-binding peptide
  MOD_RES (2), (4): Xaa is C or S
  MOD_RES (16), (17), (18), (19), (20): Xaa is A or G
  MOD_RES (21), (22), (23), (24): Xaa is A or G or is absent
HXGXAKVVMNEYKFKXXXXXXXXXLYLVSIPELKTPA

SEQ ID NO: 16063 - protein, 37 aa, Artificial Sequence
  Non-cyclic GFR-binding peptide
  MOD_RES (1), (35), (36): Xaa is C or S
  MOD_RES (13), (14), (15), (16), (17): Xaa is A or G
  MOD_RES (18), (19), (20), (21): Xaa is A or G or is absent
XGEVVMEEYQKYXXXXXXXXXIYLMSIPSLETPVXXA

SEQ ID NO: 16064 - protein, 37 aa, Artificial Sequence
  Non-cyclic GFR-binding peptide
  MOD_RES (33), (34): Xaa is C or S
  MOD_RES (11), (12), (13), (14), (15): Xaa is A or G
  MOD_RES (16), (17), (18), (19): Xaa is A or G or is absent
RVVMNEYKFKXXXXXXXXXLYLVSIPELKTPAXXPKP

SEQ ID NO: 16065 - protein, 35 aa, Artificial Sequence
  Non-cyclic GFR-binding peptide
  MOD_RES (32), (33): Xaa is C or S
SRVVMNEYKFKIVNSSDDLYLVSIPELKTPAXXPK

SEQ ID NO: 16066 - protein, 40 aa, Artificial Sequence
  Non-cyclic GFR-binding peptide
  MOD_RES (2), (37), (38): Xaa is C or S
  MOD_RES (15), (16), (17), (18), (19): Xaa is A or G
  MOD_RES (20), (21), (22), (23): Xaa is A or G or is absent
GXEAVSMGEEYKFKXXXXXXXXXLYLVSIPELKTPVXXAK

SEQ ID NO: 16067 - protein, 38 aa, Artificial Sequence
  Non-cyclic GFR-binding peptide
  MOD_RES (2), (34), (35): Xaa is C or S
GXAEVVMDEYKFKVVNNAADLYLISIPELRAPVXXSAP

SEQ ID NO: 16068 - protein, 32 aa, Artificial Sequence
  Non-cyclic GFR-binding peptide
  MOD_RES (31), (32): Xaa is C or S
SRVIMEYKFKVKPKRGVLYLISIPELAQPVXX

SEQ ID NO: 16069 - protein, 34 aa, Artificial Sequence
  Non-cyclic GFR-binding peptide
  MOD_RES (1), (34): Xaa is C or S
  MOD_RES (12), (13), (14), (15), (16): Xaa is A or G
  MOD_RES (17), (18), (19), (20): Xaa is A or G or is absent
XSKVVMEYKFKXXXXXXXXXLYLISIPELDQPVX

SEQ ID NO: 16070 - protein, 38 aa, Artificial Sequence
  Non-cyclic GFR-binding peptide
  MOD_RES (2), (4), (36), (37): Xaa is C or S
RXGXESVAMGYHYKLYTVVGKDKYLISIPSLKTPVXXA

SEQ ID NO: 16071 - protein, 41 aa, Artificial Sequence
  Non-cyclic GFR-binding peptide
  MOD_RES (2), (4), (39), (40): Xaa is C or S
  MOD_RES (17), (18), (19), (20), (21): Xaa is A or G
  MOD_RES (22), (23), (24), (25): Xaa is A or G or is absent
RXGXEAVSMGEEYKFKXXXXXXXXXLYLVSIPELKTPVXXA

SEQ ID NO: 16072 - protein, 43 aa, Artificial Sequence
  Non-cyclic GFR-binding peptide
  MOD_RES (2), (4), (38), (39): Xaa is C or S
  MOD_RES (16), (17), (18), (19), (20): Xaa is A or G
  MOD_RES (21), (22), (23), (24): Xaa is A or G or is absent
RXGXAEVVMDRYKKLXXXXXXXXXFYLISIANLRAPVXXSAPA

SEQ ID NO: 16073 - protein, 41 aa, Artificial Sequence
  Non-cyclic GFR-binding peptide
  MOD_RES (2), (4), (37), (38): Xaa is C or S
RXGXEAVSMGEEYKFKTPVGMDDLYLVSIPELKTPVXXAKG

SEQ ID NO: 16074 - protein, 43 aa, Artificial Sequence
  Non-cyclic GFR-binding peptide
  MOD_RES (1), (3), (37), (38): Xaa is C or S
  MOD_RES (15), (16), (17), (18), (19): Xaa is A or G
  MOD_RES (20), (21), (22), (23): Xaa is A or G or is absent
XGXGEVVMDEYKFKXXXXXXXXXLYLMSIPELETPVXXAKPIK

SEQ ID NO: 16075 - protein, 42 aa, Artificial Sequence
  Non-cyclic GFR-binding peptide
  MOD_RES (1), (3), (38), (39): Xaa is C or S
  MOD_RES (16), (17), (18), (19), (20): Xaa is A or G
  MOD_RES (21), (22), (23), (24): Xaa is A or G or is absent
XGXEAVSMGEEYKFKXXXXXXXXXLYLVSIPELKTPVXXAKG

SEQ ID NO: 16076 - protein, 37 aa, Artificial Sequence
  Non-cyclic GFR-binding peptide
  MOD_RES (1), (3), (36), (37): Xaa is C or S
  MOD_RES (14), (15), (16), (17), (18): Xaa is A or G
  MOD_RES (19), (20), (21), (22): Xaa is A or G or is absent
XKXSKVVMEYKFKXXXXXXXXXLYLISIPELDQPVXX

SEQ ID NO: 16077 - protein, 35 aa, Artificial Sequence
  Non-cyclic GFR-binding peptide
  MOD_RES (2), (2): Xaa is C or S
  MOD_RES (14), (15), (16), (17), (18): Xaa is A or G
  MOD_RES (19), (20), (21), (22): Xaa is A or G or is absent
GXARVVMNEYKFKXXXXXXXXXLYLVSIPELQTPA

SEQ ID NO: 16078 - protein, 35 aa, Artificial Sequence
  Non-cyclic GFR-binding peptide
  MOD_RES (1), (32), (33): Xaa is C or S
XSKVVMEYQKYVKPTRGVIYLISIPSLDQPVXXPS

SEQ ID NO: 16079 - protein, 40 aa, Artificial Sequence
  Non-cyclic GFR-binding peptide
  MOD_RES (1), (3), (37), (38): Xaa is C or S
  MOD_RES (15), (16), (17), (18), (19): Xaa is A or G
  MOD_RES (20), (21), (22), (23): Xaa is A or G or is absent
XGXGEVVMEEYKFKXXXXXXXXXLYLMSIPELETPVXXAK

SEQ ID NO: 16080 - protein, 43 aa, Artificial Sequence
  Non-cyclic GFR-binding peptide
  MOD_RES (2), (4), (38), (39): Xaa is C or S
  MOD_RES (16), (17), (18), (19), (20): Xaa is A or G
  MOD_RES (21), (22), (23), (24): Xaa is A or G or is absent
RXGXAEVVMDEYKFKXXXXXXXXXLYLISIPELRAPVXXSAPA

SEQ ID NO: 16081 - protein, 34 aa, Artificial Sequence
  Non-cyclic GFR-binding peptide
  MOD_RES (32), (33): Xaa is C or S
ESVAMGEYQKYYTVVGKDIYLISIPSLKTPVXXA

SEQ ID NO: 16082 - protein, 33 aa, Artificial Sequence
  Non-cyclic GFR-binding peptide
  MOD_RES (2), (33): Xaa is C or S
KXSRVIMEYQKYVKPKRGVIYLISIPSLAQPVX

SEQ ID NO: 16083 - protein, 37 aa, Artificial Sequence
  Non-cyclic GFR-binding peptide
  MOD_RES (1), (32), (33): Xaa is C or S
XSRVIMEYKFKVKPKRGVLYLISIPELAQPVXXPAAS

SEQ ID NO: 16084 - protein, 34 aa, Artificial Sequence
  Non-cyclic GFR-binding peptide
  MOD_RES (1), (3): Xaa is C or S
XGXARVVMNEYKFKIVNSSDDLYLVSIPELQTPA

SEQ ID NO: 16085 - protein, 43 aa, Artificial Sequence
  Non-cyclic GFR-binding peptide
  MOD_RES (1), (3), (37), (38): Xaa is C or S
  MOD_RES (15), (16), (17), (18), (19): Xaa is A or G
  MOD_RES (20), (21), (22), (23): Xaa is A or G or is absent
XGXAEVVMDEYKFKXXXXXXXXXLYLISIPELRAPVXXSAPAA

SEQ ID NO: 16086 - protein, 39 aa, Artificial Sequence
  Non-cyclic GFR-binding peptide
  MOD_RES (33), (34): Xaa is C or S
  MOD_RES (11), (12), (13), (14), (15): Xaa is A or G
  MOD_RES (16), (17), (18), (19): Xaa is A or G or is absent
SKVVMEYKFKXXXXXXXXXLYLISIPELDQPVXXPSASA

SEQ ID NO: 16087 - protein, 40 aa, Artificial Sequence
  Non-cyclic GFR-binding peptide
  MOD_RES (1), (3), (34), (35): Xaa is C or S
XKXSKVVMEYKFKVKPTRGVLYLISIPELDQPVXXPSASA

SEQ ID NO: 16088 - protein, 37 aa, Artificial Sequence
  Non-cyclic GFR-binding peptide
  MOD_RES (33), (34): Xaa is C or S
  MOD_RES (11), (12), (13), (14), (15): Xaa is A or G
  MOD_RES (16), (17), (18), (19): Xaa is A or G or is absent
SRVIMEYQKYXXXXXXXXXIYLISIPSLAQPVXXPAA

SEQ ID NO: 16089 - protein, 35 aa, Artificial Sequence
  Non-cyclic GFR-binding peptide
  MOD_RES (1), (3), (35): Xaa is C or S
XGXESVAMGRYKKLYTVVGKDFYLISIANLKTPVX

SEQ ID NO: 16090 - protein, 30 aa, Artificial Sequence
  Non-cyclic GFR-binding peptide
EVVMDYHYKLVVNNAADKYLISIPSLRAPV

SEQ ID NO: 16091 - protein, 35 aa, Artificial Sequence
  Non-cyclic GFR-binding peptide
  MOD_RES (33), (34): Xaa is C or S
EAVSMGEEYKFKTPVGMDDLYLVSIPELKTPVXXA

SEQ ID NO: 16092 - protein, 36 aa, Artificial Sequence
  Non-cyclic GFR-binding peptide
  MOD_RES (31), (32): Xaa is C or S
EVVMDEYKFKVVKENEDLYLMSIPELETPVXXAKPI

SEQ ID NO: 16093 - protein, 35 aa, Artificial Sequence
  Non-cyclic GFR-binding peptide
  MOD_RES (2), (2): Xaa is C or S
  MOD_RES (14), (15), (16), (17), (18): Xaa is A or G
  MOD_RES (19), (20), (21), (22): Xaa is A or G or is absent
GXAEVVMDYHYKLXXXXXXXXXKYLISIPSLRAPV

SEQ ID NO: 16094 - protein, 38 aa, Artificial Sequence
  Non-cyclic GFR-binding peptide
  MOD_RES (1), (3), (37): Xaa is C or S
  MOD_RES (15), (16), (17), (18), (19): Xaa is A or G
  MOD_RES (20), (21), (22), (23): Xaa is A or G or is absent
XGXSRVVMNEYKFKXXXXXXXXXLYLVSIPELKTPAXT

SEQ ID NO: 16095 - protein, 36 aa, Artificial Sequence
  Non-cyclic GFR-binding peptide
  MOD_RES (1), (3), (35), (36): Xaa is C or S
XGXGEVVMDEYKFKVVKENEDLYLMSIPELETPVXX

SEQ ID NO: 16096 - protein, 40 aa, Artificial Sequence
  Non-cyclic GFR-binding peptide
  MOD_RES (1), (3), (37), (38): Xaa is C or S
  MOD_RES (15), (16), (17), (18), (19): Xaa is A or G
  MOD_RES (20), (21), (22), (23): Xaa is A or G or is absent
XGXGEVVMDEYKFKXXXXXXXXXLYLMSIPELETPVXXAK

SEQ ID NO: 16097 - protein, 34 aa, Artificial Sequence
  Non-cyclic GFR-binding peptide
  MOD_RES (31), (32): Xaa is C or S
EVVMEEYQKYVVKDYEDIYLMSIPSLETPVXXAK

SEQ ID NO: 16098 - protein, 33 aa, Artificial Sequence
  Non-cyclic GFR-binding peptide
  MOD_RES (1), (3): Xaa is C or S
XKXSRVIMEYKFKVKPKRGVLYLISIPELAQPV

SEQ ID NO: 16099 - protein, 37 aa, Artificial Sequence
  Non-cyclic GFR-binding peptide
  MOD_RES (1), (32), (33): Xaa is C or S
XSRVIMEYQKYVKPKRGVIYLISIPSLAQPVXXPAAS

SEQ ID NO: 16100 - protein, 33 aa, Artificial Sequence
  Non-cyclic GFR-binding peptide
  MOD_RES (1), (33): Xaa is C or S
XGEVVMDEYKFKVVKENEDLYLMSIPELETPVX

SEQ ID NO: 16101 - protein, 35 aa, Artificial Sequence
  Non-cyclic GFR-binding peptide
  MOD_RES (31), (32): Xaa is C or S
RVVMNEYKFKIVNSSDDLYLVSIPELQTPAXXPKP

SEQ ID NO: 16102 - protein, 43 aa, Artificial Sequence
  Non-cyclic GFR-binding peptide
  MOD_RES (1), (3), (37), (38): Xaa is C or S
  MOD_RES (15), (16), (17), (18), (19): Xaa is A or G
  MOD_RES (20), (21), (22), (23): Xaa is A or G or is absent
XGXESVAMGYHYKLXXXXXXXXXKYLISIPSLKTPVXXAKSAK

SEQ ID NO: 16103 - protein, 44 aa, Artificial Sequence
  Non-cyclic GFR-binding peptide
  MOD_RES (2), (4), (39), (40): Xaa is C or S
  MOD_RES (17), (18), (19), (20), (21): Xaa is A or G
  MOD_RES (22), (23), (24), (25): Xaa is A or G or is absent
RXGXEAVSMGEEYKFKXXXXXXXXXLYLVSIPELKTPVXXAKGV

SEQ ID NO: 16104 - protein, 43 aa, Artificial Sequence
  Non-cyclic GFR-binding peptide
  MOD_RES (2), (4), (38), (39): Xaa is C or S
  MOD_RES (16), (17), (18), (19), (20): Xaa is A or G
  MOD_RES (21), (22), (23), (24): Xaa is A or G or is absent
RXGXGEVVMDEYQKYXXXXXXXXXIYLMSIPSLETPVXXAKPI

SEQ ID NO: 16105 - protein, 42 aa, Artificial Sequence
  Non-cyclic GFR-binding peptide
  MOD_RES (2), (4), (38), (39): Xaa is C or S
  MOD_RES (16), (17), (18), (19), (20): Xaa is A or G
  MOD_RES (21), (22), (23), (24): Xaa is A or G or is absent
HXGXARVVMNEYQKYXXXXXXXXXIYLVSIPSLQTPAXXPKP

SEQ ID NO: 16106 - protein, 37 aa, Artificial Sequence
  Non-cyclic GFR-binding peptide
  MOD_RES (1), (34), (35): Xaa is C or S
  MOD_RES (12), (13), (14), (15), (16): Xaa is A or G
  MOD_RES (17), (18), (19), (20): Xaa is A or G or is absent
XSKVIMEYQKYXXXXXXXXXIYLISIPSLDQSVXXPS

SEQ ID NO: 16107 - protein, 34 aa, Artificial Sequence
  Non-cyclic GFR-binding peptide
  MOD_RES (33), (34): Xaa is C or S
  MOD_RES (11), (12), (13), (14), (15): Xaa is A or G
  MOD_RES (16), (17), (18), (19): Xaa is A or G or is absent
SRVIMEYQKYXXXXXXXXXIYLISIPSLAQPVXX

SEQ ID NO: 16108 - protein, 37 aa, Artificial Sequence
  Non-cyclic GFR-binding peptide
  MOD_RES (34), (35): Xaa is C or S
  MOD_RES (12), (13), (14), (15), (16): Xaa is A or G
  MOD_RES (17), (18), (19), (20): Xaa is A or G or is absent
ARVVMNEYQKYXXXXXXXXXIYLVSIPSLQTPAXXPK

SEQ ID NO: 16109 - protein, 38 aa, Artificial Sequence
  Non-cyclic GFR-binding peptide
  MOD_RES (1), (32), (33): Xaa is C or S
XSKVIMEYQKYIKPTKGIIYLISIPSLDQSVXXPSASA

SEQ ID NO: 16110 - protein, 34 aa, Artificial Sequence
  Non-cyclic GFR-binding peptide
  MOD_RES (2), (33), (34): Xaa is C or S
KXSRVIMEYQKYVKPKRGVIYLISIPSLAQPVXX

SEQ ID NO: 16111 - protein, 41 aa, Artificial Sequence
  Non-cyclic GFR-binding peptide
  MOD_RES (1), (35), (36): Xaa is C or S
  MOD_RES (13), (14), (15), (16), (17): Xaa is A or G
  MOD_RES (18), (19), (20), (21): Xaa is A or G or is absent
XSRVVMNEYKFKXXXXXXXXXLYLVSIPELKTPAXXPKPVY

SEQ ID NO: 16112 - protein, 43 aa, Artificial Sequence
  Non-cyclic GFR-binding peptide
  MOD_RES (2), (4), (38), (39): Xaa is C or S
  MOD_RES (16), (17), (18), (19), (20): Xaa is A or G
  MOD_RES (21), (22), (23), (24): Xaa is A or G or is absent
HXGXSRVVMNEYQKYXXXXXXXXXIYLVSIPSLKTPAXXPKPV

SEQ ID NO: 16113 - protein, 37 aa, Artificial Sequence
  Non-cyclic GFR-binding peptide
  MOD_RES (33), (34): Xaa is C or S
  MOD_RES (11), (12), (13), (14), (15): Xaa is A or G
  MOD_RES (16), (17), (18), (19): Xaa is A or G or is absent
EVVMDEYKFKXXXXXXXXXLYLMSIPELETPVXXAKP

SEQ ID NO: 16114 - protein, 34 aa, Artificial Sequence
  Non-cyclic GFR-binding peptide
  MOD_RES (34), (34): Xaa is C or S
  MOD_RES (12), (13), (14), (15), (16): Xaa is A or G
  MOD_RES (17), (18), (19), (20): Xaa is A or G or is absent
SRVVMNEYKFKXXXXXXXXXLYLVSIPELKTPAX

SEQ ID NO: 16115 - protein, 39 aa, Artificial Sequence
  Non-cyclic GFR-binding peptide
  MOD_RES (2), (4), (36), (37): Xaa is C or S
HXGXARVVMNEYKFKIVNSSDDLYLVSIPELQTPAXXPK

SEQ ID NO: 16116 - protein, 35 aa, Artificial Sequence
  Non-cyclic GFR-binding peptide
  MOD_RES (2), (34), (35): Xaa is C or S
GXGEVVMEEYKFKVVKDYEDLYLMSIPELETPVXX

SEQ ID NO: 16117 - protein, 38 aa, Artificial Sequence
  Non-cyclic GFR-binding peptide
  MOD_RES (1), (3), (34), (35): Xaa is C or S
XKXSKVIMEYKFKIKPTKGILYLISIPELDQSVXXPSA

SEQ ID NO: 16118 - protein, 33 aa, Artificial Sequence
  Non-cyclic GFR-binding peptide
  MOD_RES (12), (13), (14), (15), (16): Xaa is A or G
  MOD_RES (17), (18), (19), (20): Xaa is A or G or is absent
ESVAMGRYKKLXXXXXXXXXFYLISIANLKTPV

SEQ ID NO: 16119 - protein, 34 aa, Artificial Sequence
  Non-cyclic GFR-binding peptide
  MOD_RES (31), (32): Xaa is C or S
EVVMDEYKFKVVNNAADLYLISIPELRAPVXXSA

SEQ ID NO: 16120 - protein, 34 aa, Artificial Sequence
  Non-cyclic GFR-binding peptide
  MOD_RES (1), (1): Xaa is C or S
  MOD_RES (13), (14), (15), (16), (17): Xaa is A or G
  MOD_RES (18), (19), (20), (21): Xaa is A or G or is absent
XSRVVMNEYQKYXXXXXXXXXIYLVSIPSLKTPA

SEQ ID NO: 16121 - protein, 41 aa, Artificial Sequence
  Non-cyclic GFR-binding peptide
  MOD_RES (1), (35), (36): Xaa is C or S
  MOD_RES (13), (14), (15), (16), (17): Xaa is A or G
  MOD_RES (18), (19), (20), (21): Xaa is A or G or is absent
XSRVVMNEYQKYXXXXXXXXXIYLVSIPSLKTPAXXPKPVY

SEQ ID NO: 16122 - protein, 37 aa, Artificial Sequence
  Non-cyclic GFR-binding peptide
  MOD_RES (2), (4): Xaa is C or S
  MOD_RES (16), (17), (18), (19), (20): Xaa is A or G
  MOD_RES (21), (22), (23), (24): Xaa is A or G or is absent
RXGXAEVVMDYHYKLXXXXXXXXXKYLISIPSLRAPV

SEQ ID NO: 16123 - protein, 34 aa, Artificial Sequence
  Non-cyclic GFR-binding peptide
  MOD_RES (2), (34): Xaa is C or S
GXAKVVMNEYQKYIVNNSSDIYLVSIPSLKTPAX

SEQ ID NO: 16124 - protein, 36 aa, Artificial Sequence
  Non-cyclic GFR-binding peptide
  MOD_RES (2), (34), (35): Xaa is C or S
GXSRVVMNEYQKYIVNSSDDIYLVSIPSLKTPAXXP

SEQ ID NO: 16125 - protein, 36 aa, Artificial Sequence
  Non-cyclic GFR-binding peptide
  MOD_RES (1), (3), (35), (36): Xaa is C or S
XGXAEVVMDEYKFKVVNNAADLYLISIPELRAPVXX

SEQ ID NO: 16126 - protein, 40 aa, Artificial Sequence
  Non-cyclic GFR-binding peptide
  MOD_RES (1), (3), (34), (35): Xaa is C or S
XKXSKVIMEYQKYIKPTKGIIYLISIPSLDQSVXXPSASA

SEQ ID NO: 16127 - protein, 40 aa, Artificial Sequence
  Non-cyclic GFR-binding peptide
  MOD_RES (2), (34), (35): Xaa is C or S
GXGEVVMDEYKFKVVKENEDLYLMSIPELETPVXXAKPIK

SEQ ID NO: 16128 - protein, 32 aa, Artificial Sequence
  Non-cyclic GFR-binding peptide
  MOD_RES (31), (32): Xaa is C or S
RVVMNEYKFKIVNSSDDLYLVSIPELKTPAXX

SEQ ID NO: 16129 - protein, 40 aa, Artificial Sequence
  Non-cyclic GFR-binding peptide
  MOD_RES (2), (4), (36), (37): Xaa is C or S
RXGXGEVVMEEYQKYVVKDYEDIYLMSIPSLETPVXXAKP

SEQ ID NO: 16130 - protein, 35 aa, Artificial Sequence
  Non-cyclic GFR-binding peptide
  MOD_RES (33), (34): Xaa is C or S
  MOD_RES (11), (12), (13), (14), (15): Xaa is A or G
  MOD_RES (16), (17), (18), (19): Xaa is A or G or is absent
EVVMDEYKFKXXXXXXXXXLYLISIPELRAPVXXS

SEQ ID NO: 16131 - protein, 37 aa, Artificial Sequence
  Non-cyclic GFR-binding peptide
  MOD_RES (2), (35), (36): Xaa is C or S
  MOD_RES (13), (14), (15), (16), (17): Xaa is A or G
  MOD_RES (18), (19), (20), (21): Xaa is A or G or is absent
KXSKVVMEYQKYXXXXXXXXXIYLISIPSLDQPVXXP

SEQ ID NO: 16132 - protein, 36 aa, Artificial Sequence
  Non-cyclic GFR-binding peptide
  MOD_RES (31), (32): Xaa is C or S
EVVMDEYQKYVVKENEDIYLMSIPSLETPVXXAKPI

SEQ ID NO: 16133 - protein, 33 aa, Artificial Sequence
  Non-cyclic GFR-binding peptide
  MOD_RES (32), (33): Xaa is C or S
GEVVMDEYKFKVVKENEDLYLMSIPELETPVXX

SEQ ID NO: 16134 - protein, 39 aa, Artificial Sequence
  Non-cyclic GFR-binding peptide
  MOD_RES (1), (35), (36): Xaa is C or S
  MOD_RES (13), (14), (15), (16), (17): Xaa is A or G
  MOD_RES (18), (19), (20), (21): Xaa is A or G or is absent
XAEVVMDRYKKLXXXXXXXXXFYLISIANLRAPVXXSAP

SEQ ID NO: 16135 - protein, 40 aa, Artificial Sequence
  Non-cyclic GFR-binding peptide
  MOD_RES (2), (36), (37): Xaa is C or S
  MOD_RES (14), (15), (16), (17), (18): Xaa is A or G
  MOD_RES (19), (20), (21), (22): Xaa is A or G or is absent
GXSRVVMNEYKFKXXXXXXXXXLYLVSIPELKTPAXXPKP

SEQ ID NO: 16136 - protein, 42 aa, Artificial Sequence
  Non-cyclic GFR-binding peptide
  MOD_RES (1), (3), (36), (37): Xaa is C or S
XGXEAVSMGEEYKFKTPVGMDDLYLVSIPELKTPVXXAKGVK

SEQ ID NO: 16137 - protein, 38 aa, Artificial Sequence
  Non-cyclic GFR-binding peptide
  MOD_RES (1), (34), (35): Xaa is C or S
  MOD_RES (12), (13), (14), (15), (16): Xaa is A or G
  MOD_RES (17), (18), (19), (20): Xaa is A or G or is absent
XSKVVMEYQKYXXXXXXXXXIYLISIPSLDQPVXXPSA

SEQ ID NO: 16138 - protein, 38 aa, Artificial Sequence
  Non-cyclic GFR-binding peptide
  MOD_RES (33), (34): Xaa is C or S
  MOD_RES (11), (12), (13), (14), (15): Xaa is A or G
  MOD_RES (16), (17), (18), (19): Xaa is A or G or is absent
SVAMGEYQKYXXXXXXXXXIYLISIPSLKTPVXXAKSA

SEQ ID NO: 16139 - protein, 34 aa, Artificial Sequence
  Non-cyclic GFR-binding peptide
  MOD_RES (1), (32), (33): Xaa is C or S
XSKVIMEYKFKIKPTKGILYLISIPELDQSVXXP

SEQ ID NO: 16140 - protein, 35 aa, Artificial Sequence
  Non-cyclic GFR-binding peptide
  MOD_RES (1), (33), (34): Xaa is C or S
XARVVMNEYQKYIVNSSDDIYLVSIPSLQTPAXXP

SEQ ID NO: 16141 - protein, 38 aa, Artificial Sequence
  Non-cyclic GFR-binding peptide
  MOD_RES (2), (36), (37): Xaa is C or S
  MOD_RES (14), (15), (16), (17), (18): Xaa is A or G
  MOD_RES (19), (20), (21), (22): Xaa is A or G or is absent
GXGEVVMEEYQKYXXXXXXXXXIYLMSIPSLETPVXXA

SEQ ID NO: 16142 - protein, 40 aa, Artificial Sequence
  Non-cyclic GFR-binding peptide
  MOD_RES (2), (4), (36), (37): Xaa is C or S
HXGXSRVVMNEYQKYIVNSSDDIYLVSIPSLKTPAXXPKP

SEQ ID NO: 16143 - protein, 35 aa, Artificial Sequence
  Non-cyclic GFR-binding peptide
  MOD_RES (1), (33), (34): Xaa is C or S
XGEVVMEEYKFKVVKDYEDLYLMSIPELETPVXXA

SEQ ID NO: 16144 - protein, 40 aa, Artificial Sequence
  Non-cyclic GFR-binding peptide
  MOD_RES (34), (34): Xaa is C or S
  MOD_RES (12), (13), (14), (15), (16): Xaa is A or G
  MOD_RES (17), (18), (19), (20): Xaa is A or G or is absent
SRVVMNEYQKYXXXXXXXXXIYLVSIPSLKTPAXTPKTVH

SEQ ID NO: 16145 - protein, 34 aa, Artificial Sequence
  Non-cyclic GFR-binding peptide
  MOD_RES (2), (34): Xaa is C or S
GXESVAMGYHYKLYTVVGKDKYLISIPSLKTPVX

SEQ ID NO: 16146 - protein, 38 aa, Artificial Sequence
  Non-cyclic GFR-binding peptide
  MOD_RES (2), (35), (36): Xaa is C or S
  MOD_RES (13), (14), (15), (16), (17): Xaa is A or G
  MOD_RES (18), (19), (20), (21): Xaa is A or G or is absent
KXSKVIMEYKFKXXXXXXXXXLYLISIPELDQSVXXPS

SEQ ID NO: 16147 - protein, 43 aa, Artificial Sequence
  Non-cyclic GFR-binding peptide
  MOD_RES (1), (3), (37), (38): Xaa is C or S
  MOD_RES (15), (16), (17), (18), (19): Xaa is A or G
  MOD_RES (20), (21), (22), (23): Xaa is A or G or is absent
XGXARVVMNEYQKYXXXXXXXXXIYLVSIPSLQTPAXXPKPVT

SEQ ID NO: 16148 - protein, 35 aa, Artificial Sequence
  Non-cyclic GFR-binding peptide
  MOD_RES (34), (35): Xaa is C or S
  MOD_RES (12), (13), (14), (15), (16): Xaa is A or G
  MOD_RES (17), (18), (19), (20): Xaa is A or G or is absent
ESVAMGEYQKYXXXXXXXXXIYLISIPSLKTPVXX

SEQ ID NO: 16149 - protein, 34 aa, Artificial Sequence
  Non-cyclic GFR-binding peptide
  MOD_RES (13), (14), (15), (16), (17): Xaa is A or G
  MOD_RES (18), (19), (20), (21): Xaa is A or G or is absent
EAVSMGEEYQKYXXXXXXXXXIYLVSIPSLKTPV

SEQ ID NO: 16150 - protein, 33 aa, Artificial Sequence
  Non-cyclic GFR-binding peptide
  MOD_RES (33), (33): Xaa is C or S
  MOD_RES (11), (12), (13), (14), (15): Xaa is A or G
  MOD_RES (16), (17), (18), (19): Xaa is A or G or is absent
SRVIMEYKFKXXXXXXXXXLYLISIPELAQPVX

SEQ ID NO: 16151 - protein, 37 aa, Artificial Sequence
  Non-cyclic GFR-binding peptide
  MOD_RES (1), (33), (34): Xaa is C or S
XARVVMNEYKFKIVNSSDDLYLVSIPELQTPAXXPKP

SEQ ID NO: 16152 - protein, 39 aa, Artificial Sequence
  Non-cyclic GFR-binding peptide
  MOD_RES (33), (34): Xaa is C or S
  MOD_RES (11), (12), (13), (14), (15): Xaa is A or G
  MOD_RES (16), (17), (18), (19): Xaa is A or G or is absent
EVVMDEYKFKXXXXXXXXXLYLMSIPELETPVXXAKPIK

SEQ ID NO: 16153 - protein, 37 aa, Artificial Sequence
  Non-cyclic GFR-binding peptide
  MOD_RES (2), (36), (37): Xaa is C or S
  MOD_RES (14), (15), (16), (17), (18): Xaa is A or G
  MOD_RES (19), (20), (21), (22): Xaa is A or G or is absent
GXARVVMNEYQKYXXXXXXXXXIYLVSIPSLQTPAXX

SEQ ID NO: 16154 - protein, 36 aa, Artificial Sequence
  Non-cyclic GFR-binding peptide
  MOD_RES (1), (32), (33): Xaa is C or S
XSRVIMEYQKYVKPKRGVIYLISIPSLAQPVXXPAA

SEQ ID NO: 16155 - protein, 41 aa, Artificial Sequence
  Non-cyclic GFR-binding peptide
  MOD_RES (2), (4), (36), (37): Xaa is C or S
RXGXESVAMGYHYKLYTVVGKDKYLISIPSLKTPVXXAKSA

SEQ ID NO: 16156 - protein, 40 aa, Artificial Sequence
  Non-cyclic GFR-binding peptide
  MOD_RES (1), (3), (35), (36): Xaa is C or S
XGXSRVVMNEYQKYIVNSSDDIYLVSIPSLKTPAXXPKPV

SEQ ID NO: 16157 - protein, 37 aa, Artificial Sequence
  Non-cyclic GFR-binding peptide
  MOD_RES (2), (35), (36): Xaa is C or S
GXEAVSMGEEYQKYTPVGMDDIYLVSIPSLKTPVXXA

SEQ ID NO: 16158 - protein, 37 aa, Artificial Sequence
  Non-cyclic GFR-binding peptide
  MOD_RES (32), (33): Xaa is C or S
ARVVMNEYQKYIVNSSDDIYLVSIPSLQTPAXXPKPV

SEQ ID NO: 16159 - protein, 35 aa, Artificial Sequence
  Non-cyclic GFR-binding peptide
  MOD_RES (1), (33), (34): Xaa is C or S
XARVVMNEYKFKIVNSSDDLYLVSIPELQTPAXXP

SEQ ID NO: 16160 - protein, 41 aa, Artificial Sequence
  Non-cyclic GFR-binding peptide
  MOD_RES (2), (4), (36), (37): Xaa is C or S
HXGXAKVVMNEYQKYIVNNSSDIYLVSIPSLKTPAXXAKPV

SEQ ID NO: 16161 - protein, 41 aa, Artificial Sequence
  Non-cyclic GFR-binding peptide
  MOD_RES (1), (3), (36), (37): Xaa is C or S
  MOD_RES (14), (15), (16), (17), (18): Xaa is A or G
  MOD_RES (19), (20), (21), (22): Xaa is A or G or is absent
XKXSKVVMEYQKYXXXXXXXXXIYLISIPSLDQPVXXPSAS

SEQ ID NO: 16162 - protein, 31 aa, Artificial Sequence
  Non-cyclic GFR-binding peptide
  MOD_RES (31), (31): Xaa is C or S
RVVMNEYKFKIVNSSDDLYLVSIPELQTPAX

SEQ ID NO: 16163 - protein, 39 aa, Artificial Sequence
  Non-cyclic GFR-binding peptide
  MOD_RES (2), (37), (38): Xaa is C or S
  MOD_RES (15), (16), (17), (18), (19): Xaa is A or G
  MOD_RES (20), (21), (22), (23): Xaa is A or G or is absent
GXEAVSMGEEYQKYXXXXXXXXXIYLVSIPSLKTPVXXA

SEQ ID NO: 16164 - protein, 35 aa, Artificial Sequence
  Non-cyclic GFR-binding peptide
  MOD_RES (33), (34): Xaa is C or S
  MOD_RES (11), (12), (13), (14), (15): Xaa is A or G
  MOD_RES (16), (17), (18), (19): Xaa is A or G or is absent
SKVIMEYQKYXXXXXXXXXIYLISIPSLDQSVXXP

SEQ ID NO: 16165 - protein, 37 aa, Artificial Sequence
  Non-cyclic GFR-binding peptide
  MOD_RES (31), (32): Xaa is C or S
RVVMNEYKFKIVNSSDDLYLVSIPELQTPAXXPKPVT

SEQ ID NO: 16166 - protein, 39 aa, Artificial Sequence
  Non-cyclic GFR-binding peptide
  MOD_RES (1), (33), (34): Xaa is C or S
XESVAMGRYKKLYTVVGKDFYLISIANLKTPVXXAKSAK

SEQ ID NO: 16167 - protein, 42 aa, Artificial Sequence
  Non-cyclic GFR-binding peptide
  MOD_RES (2), (4), (38), (39): Xaa is C or S
  MOD_RES (16), (17), (18), (19), (20): Xaa is A or G
  MOD_RES (21), (22), (23), (24): Xaa is A or G or is absent
RXGXAEVVMDRYKKLXXXXXXXXXFYLISIANLRAPVXXSAP

SEQ ID NO: 16168 - protein, 40 aa, Artificial Sequence
  Non-cyclic GFR-binding peptide
  MOD_RES (34), (35): Xaa is C or S
  MOD_RES (12), (13), (14), (15), (16): Xaa is A or G
  MOD_RES (17), (18), (19), (20): Xaa is A or G or is absent
AKVVMNEYQKYXXXXXXXXXIYLVSIPSLKTPAXXAKPVA

SEQ ID NO: 16169 - protein, 36 aa, Artificial Sequence
  Non-cyclic GFR-binding peptide
  MOD_RES (1), (34), (35): Xaa is C or S
  MOD_RES (12), (13), (14), (15), (16): Xaa is A or G
  MOD_RES (17), (18), (19), (20): Xaa is A or G or is absent
XSKVIMEYQKYXXXXXXXXXIYLISIPSLDQSVXXP

SEQ ID NO: 16170 - protein, 33 aa, Artificial Sequence
  Non-cyclic GFR-binding peptide
  MOD_RES (32), (33): Xaa is C or S
SRVVMNEYKFKIVNSSDDLYLVSIPELKTPAXX

SEQ ID NO: 16171 - protein, 39 aa, Artificial Sequence
  Non-cyclic GFR-binding peptide
  MOD_RES (1), (3), (34), (35): Xaa is C or S
XKXSKVVMEYKFKVKPTRGVLYLISIPELDQPVXXPSAS

SEQ ID NO: 16172 - protein, 40 aa, Artificial Sequence
  Non-cyclic GFR-binding peptide
  MOD_RES (1), (34), (35): Xaa is C or S
  MOD_RES (12), (13), (14), (15), (16): Xaa is A or G
  MOD_RES (17), (18), (19), (20): Xaa is A or G or is absent
XSRVIMEYQKYXXXXXXXXXIYLISIPSLAQPVXXPAASA

SEQ ID NO: 16173 - protein, 37 aa, Artificial Sequence
  Non-cyclic GFR-binding peptide
  MOD_RES (32), (33): Xaa is C or S
GEVVMEEYQKYVVKDYEDIYLMSIPSLETPVXXAKPI

SEQ ID NO: 16174 - protein, 37 aa, Artificial Sequence
  Non-cyclic GFR-binding peptide
  MOD_RES (31), (32): Xaa is C or S
SKVVMEYKFKVKPTRGVLYLISIPELDQPVXXPSASA

SEQ ID NO: 16175 - protein, 33 aa, Artificial Sequence
  Non-cyclic GFR-binding peptide
  MOD_RES (1), (33): Xaa is C or S
XAEVVMDYHYKLVVNNAADKYLISIPSLRAPVX

SEQ ID NO: 16176 - protein, 36 aa, Artificial Sequence
  Non-cyclic GFR-binding peptide
  MOD_RES (33), (34): Xaa is C or S
  MOD_RES (11), (12), (13), (14), (15): Xaa is A or G
  MOD_RES (16), (17), (18), (19): Xaa is A or G or is absent
EVVMDEYQKYXXXXXXXXXIYLMSIPSLETPVXXAK

SEQ ID NO: 16177 - protein, 34 aa, Artificial Sequence
  Non-cyclic GFR-binding peptide
  MOD_RES (1), (1): Xaa is C or S
  MOD_RES (13), (14), (15), (16), (17): Xaa is A or G
  MOD_RES (18), (19), (20), (21): Xaa is A or G or is absent
XARVVMNEYKFKXXXXXXXXXLYLVSIPELQTPA

SEQ ID NO: 16178 - protein, 38 aa, Artificial Sequence
  Non-cyclic GFR-binding peptide
  MOD_RES (2), (4), (36): Xaa is C or S
HXGXSRVVMNEYKFKIVNSSDDLYLVSIPELKTPAXTP

SEQ ID NO: 16179 - protein, 43 aa, Artificial Sequence
  Non-cyclic GFR-binding peptide
  MOD_RES (2), (4), (38), (39): Xaa is C or S
  MOD_RES (16), (17), (18), (19), (20): Xaa is A or G
  MOD_RES (21), (22), (23), (24): Xaa is A or G or is absent
RXGXGEVVMEEYQKYXXXXXXXXXIYLMSIPSLETPVXXAKPI

SEQ ID NO: 16180 - protein, 37 aa, Artificial Sequence
  Non-cyclic GFR-binding peptide
  MOD_RES (1), (3), (37): Xaa is C or S
  MOD_RES (15), (16), (17), (18), (19): Xaa is A or G
  MOD_RES (20), (21), (22), (23): Xaa is A or G or is absent
XGXARVVMNEYKFKXXXXXXXXXLYLVSIPELQTPAX

SEQ ID NO: 16181 - protein, 37 aa, Artificial Sequence
  Non-cyclic GFR-binding peptide
  MOD_RES (1), (35), (36): Xaa is C or S
  MOD_RES (13), (14), (15), (16), (17): Xaa is A or G
  MOD_RES (18), (19), (20), (21): Xaa is A or G or is absent
XGEVVMDEYQKYXXXXXXXXXIYLMSIPSLETPVXXA

SEQ ID NO: 16182 - protein, 37 aa, Artificial Sequence
  Non-cyclic GFR-binding peptide
  MOD_RES (1), (3), (34), (35): Xaa is C or S
XKXSRVIMEYKFKVKPKRGVLYLISIPELAQPVXXPA

SEQ ID NO: 16183 - protein, 40 aa, Artificial Sequence
  Non-cyclic GFR-binding peptide
  MOD_RES (34), (35): Xaa is C or S
  MOD_RES (12), (13), (14), (15), (16): Xaa is A or G
  MOD_RES (17), (18), (19), (20): Xaa is A or G or is absent
ESVAMGYHYKLXXXXXXXXXKYLISIPSLKTPVXXAKSAK

SEQ ID NO: 16184 - protein, 35 aa, Artificial Sequence
  Non-cyclic GFR-binding peptide
  MOD_RES (32), (33): Xaa is C or S
GEVVMEEYQKYVVKDYEDIYLMSIPSLETPVXXAK

SEQ ID NO: 16185 - protein, 40 aa, Artificial Sequence
  Non-cyclic GFR-binding peptide
  MOD_RES (2), (36), (37): Xaa is C or S
  MOD_RES (14), (15), (16), (17), (18): Xaa is A or G
  MOD_RES (19), (20), (21), (22): Xaa is A or G or is absent
GXESVAMGEYQKYXXXXXXXXXIYLISIPSLKTPVXXAKS

SEQ ID NO: 16186 - protein, 35 aa, Artificial Sequence
  Non-cyclic GFR-binding peptide
  MOD_RES (32), (33): Xaa is C or S
GEVVMDEYKFKVVKENEDLYLMSIPELETPVXXAK

SEQ ID NO: 16187 - protein, 39 aa, Artificial Sequence
  Non-cyclic GFR-binding peptide
  MOD_RES (33), (34): Xaa is C or S
  MOD_RES (11), (12), (13), (14), (15): Xaa is A or G
  MOD_RES (16), (17), (18), (19): Xaa is A or G or is absent
SKVIMEYQKYXXXXXXXXXIYLISIPSLDQSVXXPSASA

SEQ ID NO: 16188 - protein, 35 aa, Artificial Sequence
  Non-cyclic GFR-binding peptide
  MOD_RES (33), (34): Xaa is C or S
  MOD_RES (11), (12), (13), (14), (15): Xaa is A or G
  MOD_RES (16), (17), (18), (19): Xaa is A or G or is absent
EVVMDEYQKYXXXXXXXXXIYLMSIPSLETPVXXA

SEQ ID NO: 16189 - protein, 37 aa, Artificial Sequence
  Non-cyclic GFR-binding peptide
  MOD_RES (1), (3), (37): Xaa is C or S
  MOD_RES (15), (16), (17), (18), (19): Xaa is A or G
  MOD_RES (20), (21), (22), (23): Xaa is A or G or is absent
XGXARVVMNEYQKYXXXXXXXXXIYLVSIPSLQTPAX

SEQ ID NO: 16190 - protein, 36 aa, Artificial Sequence
  Non-cyclic GFR-binding peptide
  MOD_RES (2), (36): Xaa is C or S
  MOD_RES (14), (15), (16), (17), (18): Xaa is A or G
  MOD_RES (19), (20), (21), (22): Xaa is A or G or is absent
GXAEVVMDYHYKLXXXXXXXXXKYLISIPSLRAPVX

SEQ ID NO: 16191 - protein, 41 aa, Artificial Sequence
  Non-cyclic GFR-binding peptide
  MOD_RES (1), (3), (35), (36): Xaa is C or S
XGXAEVVMDYHYKLVVNNAADKYLISIPSLRAPVXXSAPAA

SEQ ID NO: 16192 - protein, 39 aa, Artificial Sequence
  Non-cyclic GFR-binding peptide
  MOD_RES (2), (4), (35), (36): Xaa is C or S
SXKXSKVIMEYKFKIKPTKGILYLISIPELDQSVXXPSA

SEQ ID NO: 16193 - protein, 42 aa, Artificial Sequence
  Non-cyclic GFR-binding peptide
  MOD_RES (2), (4), (38), (39): Xaa is C or S
  MOD_RES (16), (17), (18), (19), (20): Xaa is A or G
  MOD_RES (21), (22), (23), (24): Xaa is A or G or is absent
HXGXARVVMNEYKFKXXXXXXXXXLYLVSIPELQTPAXXPKP

SEQ ID NO: 16194 - protein, 38 aa, Artificial Sequence
  Non-cyclic GFR-binding peptide
  MOD_RES (33), (34): Xaa is C or S
  MOD_RES (11), (12), (13), (14), (15): Xaa is A or G
  MOD_RES (16), (17), (18), (19): Xaa is A or G or is absent
SKVIMEYKFKXXXXXXXXXLYLISIPELDQSVXXPSAS

SEQ ID NO: 16195 - protein, 34 aa, Artificial Sequence
  Non-cyclic GFR-binding peptide
  MOD_RES (1), (33): Xaa is C or S
XSRVVMNEYKFKIVNSSDDLYLVSIPELKTPAXT

SEQ ID NO: 16196 - protein, 39 aa, Artificial Sequence
  Non-cyclic GFR-binding peptide
  MOD_RES (2), (36), (37): Xaa is C or S
  MOD_RES (14), (15), (16), (17), (18): Xaa is A or G
  MOD_RES (19), (20), (21), (22): Xaa is A or G or is absent
GXGEVVMEEYKFKXXXXXXXXXLYLMSIPELETPVXXAK

SEQ ID NO: 16197 - protein, 35 aa, Artificial Sequence
  Non-cyclic GFR-binding peptide
  MOD_RES (32), (33): Xaa is C or S
GEVVMEEYKFKVVKDYEDLYLMSIPELETPVXXAK

SEQ ID NO: 16198 - protein, 38 aa, Artificial Sequence
  Non-cyclic GFR-binding peptide
  MOD_RES (1), (33), (34): Xaa is C or S
XAEVVMDYHYKLVVNNAADKYLISIPSLRAPVXXSAPA

SEQ ID NO: 16199 - protein, 39 aa, Artificial Sequence
  Non-cyclic GFR-binding peptide
  MOD_RES (2), (33), (34): Xaa is C or S
KXSRVIMEYQKYVKPKRGVIYLISIPSLAQPVXXPAASA

SEQ ID NO: 16200 - protein, 35 aa, Artificial Sequence
  Non-cyclic GFR-binding peptide
  MOD_RES (32), (33): Xaa is C or S
GEVVMDEYQKYVVKENEDIYLMSIPSLETPVXXAK

SEQ ID NO: 16201 - protein, 39 aa, Artificial Sequence
  Non-cyclic GFR-binding peptide
  MOD_RES (2), (34), (35): Xaa is C or S
GXAEVVMDEYKFKVVNNAADLYLISIPELRAPVXXSAPA

SEQ ID NO: 16202 - protein, 37 aa, Artificial Sequence
  Non-cyclic GFR-binding peptide
  MOD_RES (1), (35), (36): Xaa is C or S
  MOD_RES (13), (14), (15), (16), (17): Xaa is A or G
  MOD_RES (18), (19), (20), (21): Xaa is A or G or is absent
XSRVVMNEYQKYXXXXXXXXXIYLVSIPSLKTPAXXP

SEQ ID NO: 16203 - protein, 40 aa, Artificial Sequence
  Non-cyclic GFR-binding peptide
  MOD_RES (2), (4), (36), (37): Xaa is C or S
RXGXESVAMGYHYKLYTVVGKDKYLISIPSLKTPVXXAKS

SEQ ID NO: 16204 - protein, 39 aa, Artificial Sequence
  Non-cyclic GFR-binding peptide
  MOD_RES (34), (35): Xaa is C or S
  MOD_RES (12), (13), (14), (15), (16): Xaa is A or G
  MOD_RES (17), (18), (19), (20): Xaa is A or G or is absent
AEVVMDRYKKLXXXXXXXXXFYLISIANLRAPVXXSAPA

SEQ ID NO: 16205 - protein, 37 aa, Artificial Sequence
  Non-cyclic GFR-binding peptide
  MOD_RES (2), (4): Xaa is C or S
  MOD_RES (16), (17), (18), (19), (20): Xaa is A or G
  MOD_RES (21), (22), (23), (24): Xaa is A or G or is absent
HXGXAKVVMNEYQKYXXXXXXXXXIYLVSIPSLKTPA

SEQ ID NO: 16206 - protein, 37 aa, Artificial Sequence
  Non-cyclic GFR-binding peptide
  MOD_RES (2), (34), (35): Xaa is C or S
GXGEVVMEEYQKYVVKDYEDIYLMSIPSLETPVXXAK

SEQ ID NO: 16207 - protein, 35 aa, Artificial Sequence
  Non-cyclic GFR-binding peptide
  MOD_RES (1), (3), (35): Xaa is C or S
XGXGEVVMEEYQKYVVKDYEDIYLMSIPSLETPVX

SEQ ID NO: 16208 - protein, 35 aa, Artificial Sequence
  Non-cyclic GFR-binding peptide
  MOD_RES (31), (32): Xaa is C or S
RVVMNEYQKYIVNSSDDIYLVSIPSLQTPAXXPKP

SEQ ID NO: 16209 - protein, 36 aa, Artificial Sequence
  Non-cyclic GFR-binding peptide
  MOD_RES (1), (3), (35), (36): Xaa is C or S
XGXAEVVMDRYKKLVVNNAADFYLISIANLRAPVXX

SEQ ID NO: 16210 - protein, 36 aa, Artificial Sequence
  Non-cyclic GFR-binding peptide
  MOD_RES (2), (4), (35), (36): Xaa is C or S
SXKXSKVIMEYQKYIKPTKGIIYLISIPSLDQSVXX

SEQ ID NO: 16211 - protein, 39 aa, Artificial Sequence
  Non-cyclic GFR-binding peptide
  MOD_RES (1), (35): Xaa is C or S
  MOD_RES (13), (14), (15), (16), (17): Xaa is A or G
  MOD_RES (18), (19), (20), (21): Xaa is A or G or is absent
XSRVVMNEYQKYXXXXXXXXXIYLVSIPSLKTPAXTPKT

SEQ ID NO: 16212 - protein, 36 aa, Artificial Sequence
  Non-cyclic GFR-binding peptide
  MOD_RES (1), (3), (35), (36): Xaa is C or S
XGXSRVVMNEYQKYIVNSSDDIYLVSIPSLKTPAXX

SEQ ID NO: 16213 - protein, 37 aa, Artificial Sequence
  Non-cyclic GFR-binding peptide
  MOD_RES (2), (4), (35), (36): Xaa is C or S
SXKXSKVVMEYQKYVKPTRGVIYLISIPSLDQPVXXP

SEQ ID NO: 16214 - protein, 39 aa, Artificial Sequence
  Non-cyclic GFR-binding peptide
  MOD_RES (1), (3), (37), (38): Xaa is C or S
  MOD_RES (15), (16), (17), (18), (19): Xaa is A or G
  MOD_RES (20), (21), (22), (23): Xaa is A or G or is absent
XGXESVAMGEYQKYXXXXXXXXXIYLISIPSLKTPVXXA

SEQ ID NO: 16215 - protein, 44 aa, Artificial Sequence
  Non-cyclic GFR-binding peptide
  MOD_RES (2), (4), (38), (39): Xaa is C or S
  MOD_RES (16), (17), (18), (19), (20): Xaa is A or G
  MOD_RES (21), (22), (23), (24): Xaa is A or G or is absent
RXGXGEVVMDEYQKYXXXXXXXXXIYLMSIPSLETPVXXAKPIK

SEQ ID NO: 16216 - protein, 37 aa, Artificial Sequence
  Non-cyclic GFR-binding peptide
  MOD_RES (33), (33): Xaa is C or S
  MOD_RES (11), (12), (13), (14), (15): Xaa is A or G
  MOD_RES (16), (17), (18), (19): Xaa is A or G or is absent
RVVMNEYQKYXXXXXXXXXIYLVSIPSLKTPAXTPKT

SEQ ID NO: 16217 - protein, 34 aa, Artificial Sequence
  Non-cyclic GFR-binding peptide
  MOD_RES (2), (2): Xaa is C or S
  MOD_RES (13), (14), (15), (16), (17): Xaa is A or G
  MOD_RES (18), (19), (20), (21): Xaa is A or G or is absent
KXSKVVMEYQKYXXXXXXXXXIYLISIPSLDQPV

SEQ ID NO: 16218 - protein, 37 aa, Artificial Sequence
  Non-cyclic GFR-binding peptide
  MOD_RES (1), (3), (35), (36): Xaa is C or S
XGXGEVVMDEYQKYVVKENEDIYLMSIPSLETPVXXA

SEQ ID NO: 16219 - protein, 42 aa, Artificial Sequence
  Non-cyclic GFR-binding peptide
  MOD_RES (1), (36), (37): Xaa is C or S
  MOD_RES (14), (15), (16), (17), (18): Xaa is A or G
  MOD_RES (19), (20), (21), (22): Xaa is A or G or is absent
XEAVSMGEEYQKYXXXXXXXXXIYLVSIPSLKTPVXXAKGVK

SEQ ID NO: 16220 - protein, 39 aa, Artificial Sequence
  Non-cyclic GFR-binding peptide
  MOD_RES (1), (3), (36), (37): Xaa is C or S
  MOD_RES (14), (15), (16), (17), (18): Xaa is A or G
  MOD_RES (19), (20), (21), (22): Xaa is A or G or is absent
XKXSKVVMEYKFKXXXXXXXXXLYLISIPELDQPVXXPS

SEQ ID NO: 16221 - protein, 39 aa, Artificial Sequence
  Non-cyclic GFR-binding peptide
  MOD_RES (1), (3), (38), (39): Xaa is C or S
  MOD_RES (16), (17), (18), (19), (20): Xaa is A or G
  MOD_RES (21), (22), (23), (24): Xaa is A or G or is absent
XGXEAVSMGEEYQKYXXXXXXXXXIYLVSIPSLKTPVXX

SEQ ID NO: 16222 - protein, 43 aa, Artificial Sequence
  Non-cyclic GFR-binding peptide
  MOD_RES (2), (4), (37), (38): Xaa is C or S
  MOD_RES (15), (16), (17), (18), (19): Xaa is A or G
  MOD_RES (20), (21), (22), (23): Xaa is A or G or is absent
SXKXSRVIMEYQKYXXXXXXXXXIYLISIPSLAQPVXXPAASA

SEQ ID NO: 16223 - protein, 37 aa, Artificial Sequence
  Non-cyclic GFR-binding peptide
  MOD_RES (1), (33), (34): Xaa is C or S
XAEVVMDYHYKLVVNNAADKYLISIPSLRAPVXXSAP

SEQ ID NO: 16224 - protein, 41 aa, Artificial Sequence
  Non-cyclic GFR-binding peptide
  MOD_RES (2), (4), (37), (38): Xaa is C or S
  MOD_RES (15), (16), (17), (18), (19): Xaa is A or G
  MOD_RES (20), (21), (22), (23): Xaa is A or G or is absent
SXKXSKVVMEYQKYXXXXXXXXXIYLISIPSLDQPVXXPSA

SEQ ID NO: 16225 - protein, 33 aa, Artificial Sequence
  Non-cyclic GFR-binding peptide
  MOD_RES (32), (33): Xaa is C or S
GEVVMDEYQKYVVKENEDIYLMSIPSLETPVXX

SEQ ID NO: 16226 - protein, 38 aa, Artificial Sequence
  Non-cyclic GFR-binding peptide
  MOD_RES (1), (3), (35): Xaa is C or S
XGXSRVVMNEYKFKIVNSSDDLYLVSIPELKTPAXTPK

SEQ ID NO: 16227 - protein, 34 aa, Artificial Sequence
  Non-cyclic GFR-binding peptide
  MOD_RES (1), (32), (33): Xaa is C or S
XSKVVMEYQKYVKPTRGVIYLISIPSLDQPVXXP

SEQ ID NO: 16228 - protein, 33 aa, Artificial Sequence
  Non-cyclic GFR-binding peptide
  MOD_RES (2), (2): Xaa is C or S
GXAKVVMNEYKFKIVNNSSDLYLVSIPELKTPA

SEQ ID NO: 16229 - protein, 39 aa, Artificial Sequence
  Non-cyclic GFR-binding peptide
  MOD_RES (34), (35): Xaa is C or S
  MOD_RES (12), (13), (14), (15), (16): Xaa is A or G
  MOD_RES (17), (18), (19), (20): Xaa is A or G or is absent
GEVVMEEYQKYXXXXXXXXXIYLMSIPSLETPVXXAKPI

SEQ ID NO: 16230 - protein, 36 aa, Artificial Sequence
  Non-cyclic GFR-binding peptide
  MOD_RES (1), (3), (36): Xaa is C or S
  MOD_RES (14), (15), (16), (17), (18): Xaa is A or G
  MOD_RES (19), (20), (21), (22): Xaa is A or G or is absent
XKXSKVIMEYQKYXXXXXXXXXIYLISIPSLDQSVX

SEQ ID NO: 16231 - protein, 39 aa, Artificial Sequence
  Non-cyclic GFR-binding peptide
  MOD_RES (1), (3), (37), (38): Xaa is C or S
  MOD_RES (15), (16), (17), (18), (19): Xaa is A or G
  MOD_RES (20), (21), (22), (23): Xaa is A or G or is absent
XGXARVVMNEYQKYXXXXXXXXXIYLVSIPSLQTPAXXP

SEQ ID NO: 16232 - protein, 36 aa, Artificial Sequence
  Non-cyclic GFR-binding peptide
  MOD_RES (34), (35): Xaa is C or S
  MOD_RES (12), (13), (14), (15), (16): Xaa is A or G
  MOD_RES (17), (18), (19), (20): Xaa is A or G or is absent
AEVVMDRYKKLXXXXXXXXXFYLISIANLRAPVXXS

SEQ ID NO: 16233 - protein, 42 aa, Artificial Sequence
  Non-cyclic GFR-binding peptide
  MOD_RES (1), (3), (38), (39): Xaa is C or S
  MOD_RES (16), (17), (18), (19), (20): Xaa is A or G
  MOD_RES (21), (22), (23), (24): Xaa is A or G or is absent
XGXEAVSMGEEYQKYXXXXXXXXXIYLVSIPSLKTPVXXAKG

SEQ ID NO: 16234 - protein, 37 aa, Artificial Sequence
  Non-cyclic GFR-binding peptide
  MOD_RES (1), (3), (36), (37): Xaa is C or S
  MOD_RES (14), (15), (16), (17), (18): Xaa is A or G
  MOD_RES (19), (20), (21), (22): Xaa is A or G or is absent
XKXSRVIMEYKFKXXXXXXXXXLYLISIPELAQPVXX

SEQ ID NO: 16235 - protein, 37 aa, Artificial Sequence
  Non-cyclic GFR-binding peptide
  MOD_RES (32), (33): Xaa is C or S
SRVVMNEYQKYIVNSSDDIYLVSIPSLKTPAXXPKPV

SEQ ID NO: 16236 - protein, 37 aa, Artificial Sequence
  Non-cyclic GFR-binding peptide
  MOD_RES (32), (33): Xaa is C or S
ARVVMNEYKFKIVNSSDDLYLVSIPELQTPAXXPKPV

SEQ ID NO: 16237 - protein, 33 aa, Artificial Sequence
  Non-cyclic GFR-binding peptide
  MOD_RES (1), (32), (33): Xaa is C or S
XSKVIMEYQKYIKPTKGIIYLISIPSLDQSVXX

SEQ ID NO: 16238 - protein, 32 aa, Artificial Sequence
  Non-cyclic GFR-binding peptide
  MOD_RES (2), (2): Xaa is C or S
KXSRVIMEYQKYVKPKRGVIYLISIPSLAQPV

SEQ ID NO: 16239 - protein, 31 aa, Artificial Sequence
  Non-cyclic GFR-binding peptide
  MOD_RES (31), (31): Xaa is C or S
RVVMNEYQKYIVNSSDDIYLVSIPSLQTPAX

SEQ ID NO: 16240 - protein, 40 aa, Artificial Sequence
  Non-cyclic GFR-binding peptide
  MOD_RES (2), (34), (35): Xaa is C or S
GXARVVMNEYQKYIVNSSDDIYLVSIPSLQTPAXXPKPVT

SEQ ID NO: 16241 - protein, 36 aa, Artificial Sequence
  Non-cyclic GFR-binding peptide
  MOD_RES (33), (34): Xaa is C or S
EAVSMGEEYKFKTPVGMDDLYLVSIPELKTPVXXAK

SEQ ID NO: 16242 - protein, 35 aa, Artificial Sequence
  Non-cyclic GFR-binding peptide
  MOD_RES (33), (34): Xaa is C or S
  MOD_RES (11), (12), (13), (14), (15): Xaa is A or G
  MOD_RES (16), (17), (18), (19): Xaa is A or G or is absent
EVVMDYHYKLXXXXXXXXXKYLISIPSLRAPVXXS

SEQ ID NO: 16243 - protein, 37 aa, Artificial Sequence
  Non-cyclic GFR-binding peptide
  MOD_RES (2), (34), (35): Xaa is C or S
GXESVAMGRYKKLYTVVGKDFYLISIANLKTPVXXAK

SEQ ID NO: 16244 - protein, 41 aa, Artificial Sequence
  Non-cyclic GFR-binding peptide
  MOD_RES (2), (4), (36), (37): Xaa is C or S
HXGXARVVMNEYKFKIVNSSDDLYLVSIPELQTPAXXPKPV

SEQ ID NO: 16245 - protein, 42 aa, Artificial Sequence
  Non-cyclic GFR-binding peptide
  MOD_RES (2), (4), (36), (37): Xaa is C or S
HXGXARVVMNEYQKYIVNSSDDIYLVSIPSLQTPAXXPKPVT

SEQ ID NO: 16246 - protein, 41 aa, Artificial Sequence
  Non-cyclic GFR-binding peptide
  MOD_RES (2), (36): Xaa is C or S
  MOD_RES (14), (15), (16), (17), (18): Xaa is A or G
  MOD_RES (19), (20), (21), (22): Xaa is A or G or is absent
GXSRVVMNEYKFKXXXXXXXXXLYLVSIPELKTPAXTPKTV

SEQ ID NO: 16247 - protein, 41 aa, Artificial Sequence
  Non-cyclic GFR-binding peptide
  MOD_RES (2), (4), (38), (39): Xaa is C or S
  MOD_RES (16), (17), (18), (19), (20): Xaa is A or G
  MOD_RES (21), (22), (23), (24): Xaa is A or G or is absent
RXGXGEVVMDEYKFKXXXXXXXXXLYLMSIPELETPVXXAK

SEQ ID NO: 16248 - protein, 38 aa, Artificial Sequence
  Non-cyclic GFR-binding peptide
  MOD_RES (1), (34), (35): Xaa is C or S
  MOD_RES (12), (13), (14), (15), (16): Xaa is A or G
  MOD_RES (17), (18), (19), (20): Xaa is A or G or is absent
XSRVIMEYKFKXXXXXXXXXLYLISIPELAQPVXXPAA

SEQ ID NO: 16249 - protein, 33 aa, Artificial Sequence
  Non-cyclic GFR-binding peptide
  MOD_RES (33), (33): Xaa is C or S
  MOD_RES (11), (12), (13), (14), (15): Xaa is A or G
  MOD_RES (16), (17), (18), (19): Xaa is A or G or is absent
EVVMEEYKFKXXXXXXXXXLYLMSIPELETPVX

SEQ ID NO: 16250 - protein, 40 aa, Artificial Sequence
  Non-cyclic GFR-binding peptide
  MOD_RES (2), (4), (38), (39): Xaa is C or S
  MOD_RES (16), (17), (18), (19), (20): Xaa is A or G
  MOD_RES (21), (22), (23), (24): Xaa is A or G or is absent
RXGXESVAMGEYQKYXXXXXXXXXIYLISIPSLKTPVXXA

SEQ ID NO: 16251 - protein, 40 aa, Artificial Sequence
  Non-cyclic GFR-binding peptide
  MOD_RES (1), (3), (35), (36): Xaa is C or S
XGXARVVMNEYQKYIVNSSDDIYLVSIPSLQTPAXXPKPV

SEQ ID NO: 16252 - protein, 37 aa, Artificial Sequence
  Non-cyclic GFR-binding peptide
  MOD_RES (1), (3), (35), (36): Xaa is C or S
XGXESVAMGEYQKYYTVVGKDIYLISIPSLKTPVXXA

SEQ ID NO: 16253 - protein, 39 aa, Artificial Sequence
  Non-cyclic GFR-binding peptide
  MOD_RES (2), (4), (38), (39): Xaa is C or S
  MOD_RES (16), (17), (18), (19), (20): Xaa is A or G
  MOD_RES (21), (22), (23), (24): Xaa is A or G or is absent
RXGXESVAMGEYQKYXXXXXXXXXIYLISIPSLKTPVXX

SEQ ID NO: 16254 - protein, 36 aa, Artificial Sequence
  Non-cyclic GFR-binding peptide
  MOD_RES (32), (33): Xaa is C or S
AKVVMNEYKFKIVNNSSDLYLVSIPELKTPAXXAKP

SEQ ID NO: 16255 - protein, 34 aa, Artificial Sequence
  Non-cyclic GFR-binding peptide
  MOD_RES (2), (2): Xaa is C or S
  MOD_RES (13), (14), (15), (16), (17): Xaa is A or G
  MOD_RES (18), (19), (20), (21): Xaa is A or G or is absent
KXSRVIMEYKFKXXXXXXXXXLYLISIPELAQPV

SEQ ID NO: 16256 - protein, 32 aa, Artificial Sequence
  Non-cyclic GFR-binding peptide
  MOD_RES (31), (32): Xaa is C or S
KVVMNEYKFKIVNNSSDLYLVSIPELKTPAXX

SEQ ID NO: 16257 - protein, 39 aa, Artificial Sequence
  Non-cyclic GFR-binding peptide
  MOD_RES (1), (33): Xaa is C or S
XSRVVMNEYQKYIVNSSDDIYLVSIPSLKTPAXTPKTVH

SEQ ID NO: 16258 - protein, 39 aa, Artificial Sequence
  Non-cyclic GFR-binding peptide
  MOD_RES (34), (35): Xaa is C or S
  MOD_RES (12), (13), (14), (15), (16): Xaa is A or G
  MOD_RES (17), (18), (19), (20): Xaa is A or G or is absent
SRVVMNEYQKYXXXXXXXXXIYLVSIPSLKTPAXXPKPV

SEQ ID NO: 16259 - protein, 36 aa, Artificial Sequence
  Non-cyclic GFR-binding peptide
  MOD_RES (31), (32): Xaa is C or S
SKVVMEYKFKVKPTRGVLYLISIPELDQPVXXPSAS

SEQ ID NO: 16260 - protein, 35 aa, Artificial Sequence
  Non-cyclic GFR-binding peptide
  MOD_RES (1), (3), (34), (35): Xaa is C or S
XKXSRVIMEYKFKVKPKRGVLYLISIPELAQPVXX

SEQ ID NO: 16261 - protein, 36 aa, Artificial Sequence
  Non-cyclic GFR-binding peptide
  MOD_RES (1), (35), (36): Xaa is C or S
  MOD_RES (13), (14), (15), (16), (17): Xaa is A or G
  MOD_RES (18), (19), (20), (21): Xaa is A or G or is absent
XAEVVMDRYKKLXXXXXXXXXFYLISIANLRAPVXX

SEQ ID NO: 16262 - protein, 37 aa, Artificial Sequence
  Non-cyclic GFR-binding peptide
  MOD_RES (33), (34): Xaa is C or S
  MOD_RES (11), (12), (13), (14), (15): Xaa is A or G
  MOD_RES (16), (17), (18), (19): Xaa is A or G or is absent
RVVMNEYKFKXXXXXXXXXLYLVSIPELQTPAXXPKP

SEQ ID NO: 16263 - protein, 37 aa, Artificial Sequence
  Non-cyclic GFR-binding peptide
  MOD_RES (31), (32): Xaa is C or S
SRVIMEYKFKVKPKRGVLYLISIPELAQPVXXPAASA

SEQ ID NO: 16264 - protein, 38 aa, Artificial Sequence
  Non-cyclic GFR-binding peptide
  MOD_RES (1), (3), (37): Xaa is C or S
  MOD_RES (15), (16), (17), (18), (19): Xaa is A or G
  MOD_RES (20), (21), (22), (23): Xaa is A or G or is absent
XGXSRVVMNEYQKYXXXXXXXXXIYLVSIPSLKTPAXT

SEQ ID NO: 16265 - protein, 39 aa, Artificial Sequence
  Non-cyclic GFR-binding peptide
  MOD_RES (2), (34): Xaa is C or S
GXSRVVMNEYKFKIVNSSDDLYLVSIPELKTPAXTPKTV

SEQ ID NO: 16266 - protein, 36 aa, Artificial Sequence
  Non-cyclic GFR-binding peptide
  MOD_RES (1), (34), (35): Xaa is C or S
  MOD_RES (12), (13), (14), (15), (16): Xaa is A or G
  MOD_RES (17), (18), (19), (20): Xaa is A or G or is absent
XSKVIMEYKFKXXXXXXXXXLYLISIPELDQSVXXP

SEQ ID NO: 16267 - protein, 33 aa, Artificial Sequence
  Non-cyclic GFR-binding peptide
  MOD_RES (1), (3): Xaa is C or S
XKXSRVIMEYQKYVKPKRGVIYLISIPSLAQPV

SEQ ID NO: 16268 - protein, 36 aa, Artificial Sequence
  Non-cyclic GFR-binding peptide
  MOD_RES (2), (4), (36): Xaa is C or S
HXGXARVVMNEYQKYIVNSSDDIYLVSIPSLQTPAX

SEQ ID NO: 16269 - protein, 35 aa, Artificial Sequence
  Non-cyclic GFR-binding peptide
  MOD_RES (2), (2): Xaa is C or S
  MOD_RES (14), (15), (16), (17), (18): Xaa is A or G
  MOD_RES (19), (20), (21), (22): Xaa is A or G or is absent
GXAEVVMDEYKFKXXXXXXXXXLYLISIPELRAPV

SEQ ID NO: 16270 - protein, 37 aa, Artificial Sequence
  Non-cyclic GFR-binding peptide
  MOD_RES (1), (3), (35), (36): Xaa is C or S
XGXAEVVMDYHYKLVVNNAADKYLISIPSLRAPVXXS

SEQ ID NO: 16271 - protein, 32 aa, Artificial Sequence
  Non-cyclic GFR-binding peptide
  MOD_RES (32), (32): Xaa is C or S
GEVVMDEYQKYVVKENEDIYLMSIPSLETPVX

SEQ ID NO: 16272 - protein, 42 aa, Artificial Sequence
  Non-cyclic GFR-binding peptide
  MOD_RES (2), (4), (37), (38): Xaa is C or S
RXGXEAVSMGEEYKFKTPVGMDDLYLVSIPELKTPVXXAKGV

SEQ ID NO: 16273 - protein, 35 aa, Artificial Sequence
  Non-cyclic GFR-binding peptide
  MOD_RES (2), (4): Xaa is C or S
RXGXESVAMGYHYKLYTVVGKDKYLISIPSLKTPV

SEQ ID NO: 16274 - protein, 38 aa, Artificial Sequence
  Non-cyclic GFR-binding peptide
  MOD_RES (2), (4), (36), (37): Xaa is C or S
RXGXGEVVMDEYKFKVVKENEDLYLMSIPELETPVXXA

SEQ ID NO: 16275 - protein, 35 aa, Artificial Sequence
  Non-cyclic GFR-binding peptide
  MOD_RES (2), (4): Xaa is C or S
RXGXAEVVMDYHYKLVVNNAADKYLISIPSLRAPV

SEQ ID NO: 16276 - protein, 34 aa, Artificial Sequence
  Non-cyclic GFR-binding peptide
  MOD_RES (1), (32), (33): Xaa is C or S
XSRVIMEYKFKVKPKRGVLYLISIPELAQPVXXP

SEQ ID NO: 16277 - protein, 38 aa, Artificial Sequence
  Non-cyclic GFR-binding peptide
  MOD_RES (2), (4), (35), (36): Xaa is C or S
SXKXSRVIMEYQKYVKPKRGVIYLISIPSLAQPVXXPA

SEQ ID NO: 16278 - protein, 32 aa, Artificial Sequence
  Non-cyclic GFR-binding peptide
  MOD_RES (32), (32): Xaa is C or S
SRVVMNEYQKYIVNSSDDIYLVSIPSLKTPAX

SEQ ID NO: 16279 - protein, 33 aa, Artificial Sequence
  Non-cyclic GFR-binding peptide
  MOD_RES (33), (33): Xaa is C or S
  MOD_RES (11), (12), (13), (14), (15): Xaa is A or G
  MOD_RES (16), (17), (18), (19): Xaa is A or G or is absent
SKVIMEYKFKXXXXXXXXXLYLISIPELDQSVX

SEQ ID NO: 16280 - protein, 39 aa, Artificial Sequence
  Non-cyclic GFR-binding peptide
  MOD_RES (33), (34): Xaa is C or S
EAVSMGEEYKFKTPVGMDDLYLVSIPELKTPVXXAKGVK

SEQ ID NO: 16281 - protein, 37 aa, Artificial Sequence
  Non-cyclic GFR-binding peptide
  MOD_RES (2), (36), (37): Xaa is C or S
  MOD_RES (14), (15), (16), (17), (18): Xaa is A or G
  MOD_RES (19), (20), (21), (22): Xaa is A or G or is absent
GXGEVVMDEYKFKXXXXXXXXXLYLMSIPELETPVXX

SEQ ID NO: 16282 - protein, 38 aa, Artificial Sequence
  Non-cyclic GFR-binding peptide
  MOD_RES (34), (35): Xaa is C or S
  MOD_RES (12), (13), (14), (15), (16): Xaa is A or G
  MOD_RES (17), (18), (19), (20): Xaa is A or G or is absent
GEVVMEEYKFKXXXXXXXXXLYLMSIPELETPVXXAKP

SEQ ID NO: 16283 - protein, 36 aa, Artificial Sequence
  Non-cyclic GFR-binding peptide
  MOD_RES (2), (35), (36): Xaa is C or S
  MOD_RES (13), (14), (15), (16), (17): Xaa is A or G
  MOD_RES (18), (19), (20), (21): Xaa is A or G or is absent
KXSKVIMEYQKYXXXXXXXXXIYLISIPSLDQSVXX

SEQ ID NO: 16284 - protein, 33 aa, Artificial Sequence
  Non-cyclic GFR-binding peptide
  MOD_RES (32), (33): Xaa is C or S
GEVVMEEYQKYVVKDYEDIYLMSIPSLETPVXX

SEQ ID NO: 16285 - protein, 37 aa, Artificial Sequence
  Non-cyclic GFR-binding peptide
  MOD_RES (1), (33), (34): Xaa is C or S
XESVAMGEYQKYYTVVGKDIYLISIPSLKTPVXXAKS

SEQ ID NO: 16286 - protein, 39 aa, Artificial Sequence
  Non-cyclic GFR-binding peptide
  MOD_RES (1), (35), (36): Xaa is C or S
  MOD_RES (13), (14), (15), (16), (17): Xaa is A or G
  MOD_RES (18), (19), (20), (21): Xaa is A or G or is absent
XESVAMGEYQKYXXXXXXXXXIYLISIPSLKTPVXXAKS

SEQ ID NO: 16287 - protein, 37 aa, Artificial Sequence
  Non-cyclic GFR-binding peptide
  MOD_RES (1), (35): Xaa is C or S
  MOD_RES (13), (14), (15), (16), (17): Xaa is A or G
  MOD_RES (18), (19), (20), (21): Xaa is A or G or is absent
XSRVVMNEYKFKXXXXXXXXXLYLVSIPELKTPAXTP

SEQ ID NO: 16288 - protein, 35 aa, Artificial Sequence
  Non-cyclic GFR-binding peptide
  MOD_RES (32), (33): Xaa is C or S
AEVVMDRYKKLVVNNAADFYLISIANLRAPVXXSA

SEQ ID NO: 16289 - protein, 37 aa, Artificial Sequence
  Non-cyclic GFR-binding peptide
  MOD_RES (2), (4), (36), (37): Xaa is C or S
RXGXESVAMGEYQKYYTVVGKDIYLISIPSLKTPVXX

SEQ ID NO: 16290 - protein, 33 aa, Artificial Sequence
  Non-cyclic GFR-binding peptide
  MOD_RES (32), (33): Xaa is C or S
GEVVMEEYKFKVVKDYEDLYLMSIPELETPVXX

SEQ ID NO: 16291 - protein, 36 aa, Artificial Sequence
  Non-cyclic GFR-binding peptide
  MOD_RES (2), (34), (35): Xaa is C or S
GXARVVMNEYQKYIVNSSDDIYLVSIPSLQTPAXXP

SEQ ID NO: 16292 - protein, 37 aa, Artificial Sequence
  Non-cyclic GFR-binding peptide
  MOD_RES (2), (35), (36): Xaa is C or S
  MOD_RES (13), (14), (15), (16), (17): Xaa is A or G
  MOD_RES (18), (19), (20), (21): Xaa is A or G or is absent
KXSKVIMEYQKYXXXXXXXXXIYLISIPSLDQSVXXP

SEQ ID NO: 16293 - protein, 34 aa, Artificial Sequence
  Non-cyclic GFR-binding peptide
  MOD_RES (34), (34): Xaa is C or S
  MOD_RES (12), (13), (14), (15), (16): Xaa is A or G
  MOD_RES (17), (18), (19), (20): Xaa is A or G or is absent
GEVVMEEYKFKXXXXXXXXXLYLMSIPELETPVX

SEQ ID NO: 16294 - protein, 42 aa, Artificial Sequence
  Non-cyclic GFR-binding peptide
  MOD_RES (2), (4), (36), (37): Xaa is C or S
HXGXARVVMNEYKFKIVNSSDDLYLVSIPELQTPAXXPKPVT

SEQ ID NO: 16295 - protein, 35 aa, Artificial Sequence
  Non-cyclic GFR-binding peptide
  MOD_RES (2), (35): Xaa is C or S
  MOD_RES (13), (14), (15), (16), (17): Xaa is A or G
  MOD_RES (18), (19), (20), (21): Xaa is A or G or is absent
KXSKVIMEYQKYXXXXXXXXXIYLISIPSLDQSVX

SEQ ID NO: 16296 - protein, 42 aa, Artificial Sequence
  Non-cyclic GFR-binding peptide
  MOD_RES (2), (4), (36), (37): Xaa is C or S
HXGXAKVVMNEYKFKIVNNSSDLYLVSIPELKTPAXXAKPVA

SEQ ID NO: 16297 - protein, 38 aa, Artificial Sequence
  Non-cyclic GFR-binding peptide
  MOD_RES (2), (35), (36): Xaa is C or S
GXEAVSMGEEYQKYTPVGMDDIYLVSIPSLKTPVXXAK

SEQ ID NO: 16298 - protein, 34 aa, Artificial Sequence
  Non-cyclic GFR-binding peptide
  MOD_RES (2), (2): Xaa is C or S
  MOD_RES (13), (14), (15), (16), (17): Xaa is A or G
  MOD_RES (18), (19), (20), (21): Xaa is A or G or is absent
KXSKVIMEYQKYXXXXXXXXXIYLISIPSLDQSV

SEQ ID NO: 16299 - protein, 39 aa, Artificial Sequence
  Non-cyclic GFR-binding peptide
  MOD_RES (33), (34): Xaa is C or S
  MOD_RES (11), (12), (13), (14), (15): Xaa is A or G
  MOD_RES (16), (17), (18), (19): Xaa is A or G or is absent
KVVMNEYKFKXXXXXXXXXLYLVSIPELKTPAXXAKPVA

SEQ ID NO: 16300 - protein, 35 aa, Artificial Sequence
  Non-cyclic GFR-binding peptide
  MOD_RES (2), (4): Xaa is C or S
HXGXARVVMNEYQKYIVNSSDDIYLVSIPSLQTPA

SEQ ID NO: 16301 - protein, 43 aa, Artificial Sequence
  Non-cyclic GFR-binding peptide
  MOD_RES (2), (4), (38), (39): Xaa is C or S
  MOD_RES (16), (17), (18), (19), (20): Xaa is A or G
  MOD_RES (21), (22), (23), (24): Xaa is A or G or is absent
RXGXAEVVMDYHYKLXXXXXXXXXKYLISIPSLRAPVXXSAPA

SEQ ID NO: 16302 - protein, 34 aa, Artificial Sequence
  Non-cyclic GFR-binding peptide
  MOD_RES (1), (33), (34): Xaa is C or S
XSRVVMNEYKFKIVNSSDDLYLVSIPELKTPAXX

SEQ ID NO: 16303 - protein, 40 aa, Artificial Sequence
  Non-cyclic GFR-binding peptide
  MOD_RES (2), (4), (36), (37): Xaa is C or S
RXGXAEVVMDEYKFKVVNNAADLYLISIPELRAPVXXSAP

SEQ ID NO: 16304 - protein, 40 aa, Artificial Sequence
  Non-cyclic GFR-binding peptide
  MOD_RES (2), (34), (35): Xaa is C or S
GXGEVVMEEYQKYVVKDYEDIYLMSIPSLETPVXXAKPIS

SEQ ID NO: 16305 - protein, 36 aa, Artificial Sequence
  Non-cyclic GFR-binding peptide
  MOD_RES (1), (35), (36): Xaa is C or S
  MOD_RES (13), (14), (15), (16), (17): Xaa is A or G
  MOD_RES (18), (19), (20), (21): Xaa is A or G or is absent
XESVAMGEYQKYXXXXXXXXXIYLISIPSLKTPVXX

SEQ ID NO: 16306 - protein, 38 aa, Artificial Sequence
  Non-cyclic GFR-binding peptide
  MOD_RES (2), (4), (36), (37): Xaa is C or S
RXGXGEVVMDEYQKYVVKENEDIYLMSIPSLETPVXXA

SEQ ID NO: 16307 - protein, 40 aa, Artificial Sequence
  Non-cyclic GFR-binding peptide
  MOD_RES (1), (34), (35): Xaa is C or S
XEAVSMGEEYKFKTPVGMDDLYLVSIPELKTPVXXAKGVK

SEQ ID NO: 16308 - protein, 39 aa, Artificial Sequence
  Non-cyclic GFR-binding peptide
  MOD_RES (2), (4), (36), (37): Xaa is C or S
RXGXESVAMGYHYKLYTVVGKDKYLISIPSLKTPVXXAK

SEQ ID NO: 16309 - protein, 38 aa, Artificial Sequence
  Non-cyclic GFR-binding peptide
  MOD_RES (2), (37), (38): Xaa is C or S
  MOD_RES (15), (16), (17), (18), (19): Xaa is A or G
  MOD_RES (20), (21), (22), (23): Xaa is A or G or is absent
GXEAVSMGEEYKFKXXXXXXXXXLYLVSIPELKTPVXX

SEQ ID NO: 16310 - protein, 38 aa, Artificial Sequence
  Non-cyclic GFR-binding peptide
  MOD_RES (2), (35), (36): Xaa is C or S
  MOD_RES (13), (14), (15), (16), (17): Xaa is A or G
  MOD_RES (18), (19), (20), (21): Xaa is A or G or is absent
KXSKVVMEYKFKXXXXXXXXXLYLISIPELDQPVXXPS

SEQ ID NO: 16311 - protein, 32 aa, Artificial Sequence
  Non-cyclic GFR-binding peptide
  MOD_RES (32), (32): Xaa is C or S
SRVVMNEYKFKIVNSSDDLYLVSIPELKTPAX

SEQ ID NO: 16312 - protein, 38 aa, Artificial Sequence
  Non-cyclic GFR-binding peptide
  MOD_RES (32), (33): Xaa is C or S
AKVVMNEYQKYIVNNSSDIYLVSIPSLKTPAXXAKPVA

SEQ ID NO: 16313 - protein, 36 aa, Artificial Sequence
  Non-cyclic GFR-binding peptide
  MOD_RES (2), (34), (35): Xaa is C or S
GXGEVVMEEYKFKVVKDYEDLYLMSIPELETPVXXA

SEQ ID NO: 16314 - protein, 37 aa, Artificial Sequence
  Non-cyclic GFR-binding peptide
  MOD_RES (2), (36), (37): Xaa is C or S
  MOD_RES (14), (15), (16), (17), (18): Xaa is A or G
  MOD_RES (19), (20), (21), (22): Xaa is A or G or is absent
GXAKVVMNEYQKYXXXXXXXXXIYLVSIPSLKTPAXX

SEQ ID NO: 16315 - protein, 37 aa, Artificial Sequence
  Non-cyclic GFR-binding peptide
  MOD_RES (33), (34): Xaa is C or S
  MOD_RES (11), (12), (13), (14), (15): Xaa is A or G
  MOD_RES (16), (17), (18), (19): Xaa is A or G or is absent
EVVMDYHYKLXXXXXXXXXKYLISIPSLRAPVXXSAP

SEQ ID NO: 16316 - protein, 40 aa, Artificial Sequence
  Non-cyclic GFR-binding peptide
  MOD_RES (2), (36), (37): Xaa is C or S
  MOD_RES (14), (15), (16), (17), (18): Xaa is A or G
  MOD_RES (19), (20), (21), (22): Xaa is A or G or is absent
GXGEVVMEEYQKYXXXXXXXXXIYLMSIPSLETPVXXAKP

SEQ ID NO: 16317 - protein, 38 aa, Artificial Sequence
  Non-cyclic GFR-binding peptide
  MOD_RES (1), (34), (35): Xaa is C or S
  MOD_RES (12), (13), (14), (15), (16): Xaa is A or G
  MOD_RES (17), (18), (19), (20): Xaa is A or G or is absent
XSKVVMEYKFKXXXXXXXXXLYLISIPELDQPVXXPSA

SEQ ID NO: 16318 - protein, 40 aa, Artificial Sequence
  Non-cyclic GFR-binding peptide
  MOD_RES (1), (3), (34), (35): Xaa is C or S
XKXSKVVMEYQKYVKPTRGVIYLISIPSLDQPVXXPSASA

SEQ ID NO: 16319 - protein, 34 aa, Artificial Sequence
  Non-cyclic GFR-binding peptide
  MOD_RES (13), (14), (15), (16), (17): Xaa is A or G
  MOD_RES (18), (19), (20), (21): Xaa is A or G or is absent
EAVSMGEEYKFKXXXXXXXXXLYLVSIPELKTPV

SEQ ID NO: 16320 - protein, 37 aa, Artificial Sequence
  Non-cyclic GFR-binding peptide
  MOD_RES (1), (33), (34): Xaa is C or S
XGEVVMEEYKFKVVKDYEDLYLMSIPELETPVXXAKP

SEQ ID NO: 16321 - protein, 36 aa, Artificial Sequence
  Non-cyclic GFR-binding peptide
  MOD_RES (31), (32): Xaa is C or S
RVVMNEYKFKIVNSSDDLYLVSIPELKTPAXXPKPV

SEQ ID NO: 16322 - protein, 36 aa, Artificial Sequence
  Non-cyclic GFR-binding peptide
  MOD_RES (2), (4), (35), (36): Xaa is C or S
SXKXSKVVMEYQKYVKPTRGVIYLISIPSLDQPVXX

SEQ ID NO: 16323 - protein, 43 aa, Artificial Sequence
  Non-cyclic GFR-binding peptide
  MOD_RES (1), (3), (37), (38): Xaa is C or S
  MOD_RES (15), (16), (17), (18), (19): Xaa is A or G
  MOD_RES (20), (21), (22), (23): Xaa is A or G or is absent
XGXGEVVMEEYKFKXXXXXXXXXLYLMSIPELETPVXXAKPIS

SEQ ID NO: 16324 - protein, 35 aa, Artificial Sequence
  Non-cyclic GFR-binding peptide
  MOD_RES (2), (2): Xaa is C or S
  MOD_RES (14), (15), (16), (17), (18): Xaa is A or G
  MOD_RES (19), (20), (21), (22): Xaa is A or G or is absent
GXSRVVMNEYQKYXXXXXXXXXIYLVSIPSLKTPA

SEQ ID NO: 16325 - protein, 38 aa, Artificial Sequence
  Non-cyclic GFR-binding peptide
  MOD_RES (2), (4), (36), (37): Xaa is C or S
RXGXESVAMGEYQKYYTVVGKDIYLISIPSLKTPVXXA

SEQ ID NO: 16326 - protein, 35 aa, Artificial Sequence
  Non-cyclic GFR-binding peptide
  MOD_RES (1), (3), (34), (35): Xaa is C or S
XKXSRVIMEYQKYVKPKRGVIYLISIPSLAQPVXX

SEQ ID NO: 16327 - protein, 34 aa, Artificial Sequence
  Non-cyclic GFR-binding peptide
  MOD_RES (1), (3), (34): Xaa is C or S
XKXSRVIMEYQKYVKPKRGVIYLISIPSLAQPVX

SEQ ID NO: 16328 - protein, 45 aa, Artificial Sequence
  Non-cyclic GFR-binding peptide
  MOD_RES (2), (4), (39), (40): Xaa is C or S
  MOD_RES (17), (18), (19), (20), (21): Xaa is A or G
  MOD_RES (22), (23), (24), (25): Xaa is A or G or is absent
RXGXEAVSMGEEYQKYXXXXXXXXXIYLVSIPSLKTPVXXAKGVK

SEQ ID NO: 16329 - protein, 40 aa, Artificial Sequence
  Non-cyclic GFR-binding peptide
  MOD_RES (2), (35), (36): Xaa is C or S
GXEAVSMGEEYQKYTPVGMDDIYLVSIPSLKTPVXXAKGV

SEQ ID NO: 16330 - protein, 34 aa, Artificial Sequence
  Non-cyclic GFR-binding peptide
  MOD_RES (1), (32), (33): Xaa is C or S
XSKVIMEYQKYIKPTKGIIYLISIPSLDQSVXXP

SEQ ID NO: 16331 - protein, 37 aa, Artificial Sequence
  Non-cyclic GFR-binding peptide
  MOD_RES (33), (34): Xaa is C or S
  MOD_RES (11), (12), (13), (14), (15): Xaa is A or G
  MOD_RES (16), (17), (18), (19): Xaa is A or G or is absent
KVVMNEYKFKXXXXXXXXXLYLVSIPELKTPAXXAKP

SEQ ID NO: 16332 - protein, 38 aa, Artificial Sequence
  Non-cyclic GFR-binding peptide
  MOD_RES (2), (34), (35): Xaa is C or S
GXGEVVMEEYQKYVVKDYEDIYLMSIPSLETPVXXAKP

SEQ ID NO: 16333 - protein, 40 aa, Artificial Sequence
  Non-cyclic GFR-binding peptide
  MOD_RES (34), (35): Xaa is C or S
  MOD_RES (12), (13), (14), (15), (16): Xaa is A or G
  MOD_RES (17), (18), (19), (20): Xaa is A or G or is absent
AEVVMDRYKKLXXXXXXXXXFYLISIANLRAPVXXSAPAA

SEQ ID NO: 16334 - protein, 38 aa, Artificial Sequence
  Non-cyclic GFR-binding peptide
  MOD_RES (1), (3), (34), (35): Xaa is C or S
XKXSKVVMEYKFKVKPTRGVLYLISIPELDQPVXXPSA

SEQ ID NO: 16335 - protein, 37 aa, Artificial Sequence
  Non-cyclic GFR-binding peptide
  MOD_RES (2), (4): Xaa is C or S
  MOD_RES (16), (17), (18), (19), (20): Xaa is A or G
  MOD_RES (21), (22), (23), (24): Xaa is A or G or is absent
HXGXARVVMNEYQKYXXXXXXXXXIYLVSIPSLQTPA

SEQ ID NO: 16336 - protein, 33 aa, Artificial Sequence
  Non-cyclic GFR-binding peptide
  MOD_RES (2), (2): Xaa is C or S
GXSRVVMNEYKFKIVNSSDDLYLVSIPELKTPA

SEQ ID NO: 16337 - protein, 40 aa, Artificial Sequence
  Non-cyclic GFR-binding peptide
  MOD_RES (2), (36), (37): Xaa is C or S
  MOD_RES (14), (15), (16), (17), (18): Xaa is A or G
  MOD_RES (19), (20), (21), (22): Xaa is A or G or is absent
GXAEVVMDYHYKLXXXXXXXXXKYLISIPSLRAPVXXSAP

SEQ ID NO: 16338 - protein, 37 aa, Artificial Sequence
  Non-cyclic GFR-binding peptide
  MOD_RES (1), (3), (36), (37): Xaa is C or S
XGXEAVSMGEEYQKYTPVGMDDIYLVSIPSLKTPVXX

SEQ ID NO: 16339 - protein, 37 aa, Artificial Sequence
  Non-cyclic GFR-binding peptide
  MOD_RES (1), (3), (36), (37): Xaa is C or S
XGXEAVSMGEEYKFKTPVGMDDLYLVSIPELKTPVXX

SEQ ID NO: 16340 - protein, 38 aa, Artificial Sequence
  Non-cyclic GFR-binding peptide
  MOD_RES (2), (36), (37): Xaa is C or S
  MOD_RES (14), (15), (16), (17), (18): Xaa is A or G
  MOD_RES (19), (20), (21), (22): Xaa is A or G or is absent
GXAKVVMNEYQKYXXXXXXXXXIYLVSIPSLKTPAXXA

SEQ ID NO: 16341 - protein, 35 aa, Artificial Sequence
  Non-cyclic GFR-binding peptide
  MOD_RES (2), (34), (35): Xaa is C or S
GXGEVVMDEYQKYVVKENEDIYLMSIPSLETPVXX

SEQ ID NO: 16342 - protein, 38 aa, Artificial Sequence
  Non-cyclic GFR-binding peptide
  MOD_RES (2), (36), (37): Xaa is C or S
  MOD_RES (14), (15), (16), (17), (18): Xaa is A or G
  MOD_RES (19), (20), (21), (22): Xaa is A or G or is absent
GXGEVVMDEYKFKXXXXXXXXXLYLMSIPELETPVXXA

SEQ ID NO: 16343 - protein, 38 aa, Artificial Sequence
  Non-cyclic GFR-binding peptide
  MOD_RES (33), (34): Xaa is C or S
  MOD_RES (11), (12), (13), (14), (15): Xaa is A or G
  MOD_RES (16), (17), (18), (19): Xaa is A or G or is absent
SKVVMEYQKYXXXXXXXXXIYLISIPSLDQPVXXPSAS

SEQ ID NO: 16344 - protein, 39 aa, Artificial Sequence
  Non-cyclic GFR-binding peptide
  MOD_RES (33), (34): Xaa is C or S
  MOD_RES (11), (12), (13), (14), (15): Xaa is A or G
  MOD_RES (16), (17), (18), (19): Xaa is A or G or is absent
EVVMEEYQKYXXXXXXXXXIYLMSIPSLETPVXXAKPIS

SEQ ID NO: 16345 - protein, 36 aa, Artificial Sequence
  Non-cyclic GFR-binding peptide
  MOD_RES (2), (4): Xaa is C or S
  MOD_RES (15), (16), (17), (18), (19): Xaa is A or G
  MOD_RES (20), (21), (22), (23): Xaa is A or G or is absent
SXKXSKVIMEYQKYXXXXXXXXXIYLISIPSLDQSV

SEQ ID NO: 16346 - protein, 32 aa, Artificial Sequence
  Non-cyclic GFR-binding peptide
  MOD_RES (32), (32): Xaa is C or S
ARVVMNEYKFKIVNSSDDLYLVSIPELQTPAX

SEQ ID NO: 16347 - protein, 37 aa, Artificial Sequence
  Non-cyclic GFR-binding peptide
  MOD_RES (2), (33), (34): Xaa is C or S
KXSKVVMEYKFKVKPTRGVLYLISIPELDQPVXXPSA

SEQ ID NO: 16348 - protein, 34 aa, Artificial Sequence
  Non-cyclic GFR-binding peptide
  MOD_RES (1), (33), (34): Xaa is C or S
XESVAMGYHYKLYTVVGKDKYLISIPSLKTPVXX

SEQ ID NO: 16349 - protein, 40 aa, Artificial Sequence
  Non-cyclic GFR-binding peptide
  MOD_RES (2), (4), (35), (36): Xaa is C or S
SXKXSRVIMEYQKYVKPKRGVIYLISIPSLAQPVXXPAAS

SEQ ID NO: 16350 - protein, 39 aa, Artificial Sequence
  Non-cyclic GFR-binding peptide
  MOD_RES (1), (3), (34), (35): Xaa is C or S
XKXSKVIMEYQKYIKPTKGIIYLISIPSLDQSVXXPSAS

SEQ ID NO: 16351 - protein, 34 aa, Artificial Sequence
  Non-cyclic GFR-binding peptide
  MOD_RES (2), (34): Xaa is C or S
GXAEVVMDRYKKLVVNNAADFYLISIANLRAPVX

SEQ ID NO: 16352 - protein, 38 aa, Artificial Sequence
  Non-cyclic GFR-binding peptide
  MOD_RES (1), (33), (34): Xaa is C or S
XGEVVMEEYQKYVVKDYEDIYLMSIPSLETPVXXAKPI

SEQ ID NO: 16353 - protein, 34 aa, Artificial Sequence
  Non-cyclic GFR-binding peptide
  MOD_RES (1), (3): Xaa is C or S
XGXGEVVMEEYKFKVVKDYEDLYLMSIPELETPV

SEQ ID NO: 16354 - protein, 33 aa, Artificial Sequence
  Non-cyclic GFR-binding peptide
  MOD_RES (1), (33): Xaa is C or S
XSRVVMNEYQKYIVNSSDDIYLVSIPSLKTPAX

SEQ ID NO: 16355 - protein, 34 aa, Artificial Sequence
  Non-cyclic GFR-binding peptide
  MOD_RES (1), (3): Xaa is C or S
XGXAEVVMDYHYKLVVNNAADKYLISIPSLRAPV

SEQ ID NO: 16356 - protein, 35 aa, Artificial Sequence
  Non-cyclic GFR-binding peptide
  MOD_RES (2), (33), (34): Xaa is C or S
KXSRVIMEYQKYVKPKRGVIYLISIPSLAQPVXXP

SEQ ID NO: 16357 - protein, 39 aa, Artificial Sequence
  Non-cyclic GFR-binding peptide
  MOD_RES (1), (3), (35), (36): Xaa is C or S
XGXSRVVMNEYQKYIVNSSDDIYLVSIPSLKTPAXXPKP

SEQ ID NO: 16358 - protein, 32 aa, Artificial Sequence
  Non-cyclic GFR-binding peptide
  MOD_RES (31), (32): Xaa is C or S
EVVMEEYKFKVVKDYEDLYLMSIPELETPVXX

SEQ ID NO: 16359 - protein, 39 aa, Artificial Sequence
  Non-cyclic GFR-binding peptide
  MOD_RES (2), (35), (36): Xaa is C or S
  MOD_RES (13), (14), (15), (16), (17): Xaa is A or G
  MOD_RES (18), (19), (20), (21): Xaa is A or G or is absent
KXSRVIMEYKFKXXXXXXXXXLYLISIPELAQPVXXPAA

SEQ ID NO: 16360 - protein, 38 aa, Artificial Sequence
  Non-cyclic GFR-binding peptide
  MOD_RES (1), (3), (35), (36): Xaa is C or S
XGXARVVMNEYQKYIVNSSDDIYLVSIPSLQTPAXXPK

SEQ ID NO: 16361 - protein, 40 aa, Artificial Sequence
  Non-cyclic GFR-binding peptide
  MOD_RES (1), (34), (35): Xaa is C or S
  MOD_RES (12), (13), (14), (15), (16): Xaa is A or G
  MOD_RES (17), (18), (19), (20): Xaa is A or G or is absent
XSKVVMEYQKYXXXXXXXXXIYLISIPSLDQPVXXPSASA

SEQ ID NO: 16362 - protein, 36 aa, Artificial Sequence
  Non-cyclic GFR-binding peptide
  MOD_RES (2), (4): Xaa is C or S
  MOD_RES (15), (16), (17), (18), (19): Xaa is A or G
  MOD_RES (20), (21), (22), (23): Xaa is A or G or is absent
SXKXSKVVMEYQKYXXXXXXXXXIYLISIPSLDQPV

SEQ ID NO: 16363 - protein, 38 aa, Artificial Sequence
  Non-cyclic GFR-binding peptide
  MOD_RES (1), (35), (36): Xaa is C or S
  MOD_RES (13), (14), (15), (16), (17): Xaa is A or G
  MOD_RES (18), (19), (20), (21): Xaa is A or G or is absent
XGEVVMEEYQKYXXXXXXXXXIYLMSIPSLETPVXXAK

SEQ ID NO: 16364 - protein, 38 aa, Artificial Sequence
  Non-cyclic GFR-binding peptide
  MOD_RES (1), (3), (36), (37): Xaa is C or S
  MOD_RES (14), (15), (16), (17), (18): Xaa is A or G
  MOD_RES (19), (20), (21), (22): Xaa is A or G or is absent
XKXSKVIMEYKFKXXXXXXXXXLYLISIPELDQSVXXP

SEQ ID NO: 16365 - protein, 34 aa, Artificial Sequence
  Non-cyclic GFR-binding peptide
  MOD_RES (2), (4): Xaa is C or S
SXKXSRVIMEYKFKVKPKRGVLYLISIPELAQPV

SEQ ID NO: 16366 - protein, 32 aa, Artificial Sequence
  Non-cyclic GFR-binding peptide
  MOD_RES (32), (32): Xaa is C or S
ESVAMGRYKKLYTVVGKDFYLISIANLKTPVX

SEQ ID NO: 16367 - protein, 36 aa, Artificial Sequence
  Non-cyclic GFR-binding peptide
  MOD_RES (1), (35), (36): Xaa is C or S
  MOD_RES (13), (14), (15), (16), (17): Xaa is A or G
  MOD_RES (18), (19), (20), (21): Xaa is A or G or is absent
XSRVVMNEYQKYXXXXXXXXXIYLVSIPSLKTPAXX

SEQ ID NO: 16368 - protein, 37 aa, Artificial Sequence
  Non-cyclic GFR-binding peptide
  MOD_RES (31), (32): Xaa is C or S
EVVMEEYQKYVVKDYEDIYLMSIPSLETPVXXAKPIS

SEQ ID NO: 16369 - protein, 39 aa, Artificial Sequence
  Non-cyclic GFR-binding peptide
  MOD_RES (33), (34): Xaa is C or S
EAVSMGEEYQKYTPVGMDDIYLVSIPSLKTPVXXAKGVK

SEQ ID NO: 16370 - protein, 35 aa, Artificial Sequence
  Non-cyclic GFR-binding peptide
  MOD_RES (31), (32): Xaa is C or S
SKVVMEYQKYVKPTRGVIYLISIPSLDQPVXXPSA

SEQ ID NO: 16371 - protein, 32 aa, Artificial Sequence
  Non-cyclic GFR-binding peptide
  MOD_RES (32), (32): Xaa is C or S
GEVVMEEYQKYVVKDYEDIYLMSIPSLETPVX

SEQ ID NO: 16372 - protein, 34 aa, Artificial Sequence
  Non-cyclic GFR-binding peptide
  MOD_RES (1), (34): Xaa is C or S
XEAVSMGEEYKFKTPVGMDDLYLVSIPELKTPVX

SEQ ID NO: 16373 - protein, 40 aa, Artificial Sequence
  Non-cyclic GFR-binding peptide
  MOD_RES (2), (4), (37), (38): Xaa is C or S
  MOD_RES (15), (16), (17), (18), (19): Xaa is A or G
  MOD_RES (20), (21), (22), (23): Xaa is A or G or is absent
SXKXSKVVMEYKFKXXXXXXXXXLYLISIPELDQPVXXPS

SEQ ID NO: 16374 - protein, 35 aa, Artificial Sequence
  Non-cyclic GFR-binding peptide
  MOD_RES (1), (33), (34): Xaa is C or S
XGEVVMEEYQKYVVKDYEDIYLMSIPSLETPVXXA

SEQ ID NO: 16375 - protein, 43 aa, Artificial Sequence
  Non-cyclic GFR-binding peptide
  MOD_RES (2), (37), (38): Xaa is C or S
  MOD_RES (15), (16), (17), (18), (19): Xaa is A or G
  MOD_RES (20), (21), (22), (23): Xaa is A or G or is absent
GXEAVSMGEEYQKYXXXXXXXXXIYLVSIPSLKTPVXXAKGVK

SEQ ID NO: 16376 - protein, 35 aa, Artificial Sequence
  Non-cyclic GFR-binding peptide
  MOD_RES (33), (34): Xaa is C or S
  MOD_RES (11), (12), (13), (14), (15): Xaa is A or G
  MOD_RES (16), (17), (18), (19): Xaa is A or G or is absent
RVVMNEYQKYXXXXXXXXXIYLVSIPSLQTPAXXP

SEQ ID NO: 16377 - protein, 36 aa, Artificial Sequence
  Non-cyclic GFR-binding peptide
  MOD_RES (2), (33), (34): Xaa is C or S
KXSRVIMEYQKYVKPKRGVIYLISIPSLAQPVXXPA

SEQ ID NO: 16378 - protein, 40 aa, Artificial Sequence
  Non-cyclic GFR-binding peptide
  MOD_RES (1), (3), (37), (38): Xaa is C or S
  MOD_RES (15), (16), (17), (18), (19): Xaa is A or G
  MOD_RES (20), (21), (22), (23): Xaa is A or G or is absent
XGXGEVVMEEYQKYXXXXXXXXXIYLMSIPSLETPVXXAK

SEQ ID NO: 16379 - protein, 39 aa, Artificial Sequence
  Non-cyclic GFR-binding peptide
  MOD_RES (2), (36), (37): Xaa is C or S
  MOD_RES (14), (15), (16), (17), (18): Xaa is A or G
  MOD_RES (19), (20), (21), (22): Xaa is A or G or is absent
GXAEVVMDYHYKLXXXXXXXXXKYLISIPSLRAPVXXSA

SEQ ID NO: 16380 - protein, 39 aa, Artificial Sequence
  Non-cyclic GFR-binding peptide
  MOD_RES (2), (35), (36): Xaa is C or S
  MOD_RES (13), (14), (15), (16), (17): Xaa is A or G
  MOD_RES (18), (19), (20), (21): Xaa is A or G or is absent
KXSKVIMEYKFKXXXXXXXXXLYLISIPELDQSVXXPSA

SEQ ID NO: 16381 - protein, 36 aa, Artificial Sequence
  Non-cyclic GFR-binding peptide
  MOD_RES (2), (4), (36): Xaa is C or S
RXGXESVAMGYHYKLYTVVGKDKYLISIPSLKTPVX

SEQ ID NO: 16382 - protein, 41 aa, Artificial Sequence
  Non-cyclic GFR-binding peptide
  MOD_RES (2), (36), (37): Xaa is C or S
  MOD_RES (14), (15), (16), (17), (18): Xaa is A or G
  MOD_RES (19), (20), (21), (22): Xaa is A or G or is absent
GXAEVVMDYHYKLXXXXXXXXXKYLISIPSLRAPVXXSAPA

SEQ ID NO: 16383 - protein, 38 aa, Artificial Sequence
  Non-cyclic GFR-binding peptide
  MOD_RES (1), (36), (37): Xaa is C or S
  MOD_RES (14), (15), (16), (17), (18): Xaa is A or G
  MOD_RES (19), (20), (21), (22): Xaa is A or G or is absent
XEAVSMGEEYQKYXXXXXXXXXIYLVSIPSLKTPVXXA

SEQ ID NO: 16384 - protein, 37 aa, Artificial Sequence
  Non-cyclic GFR-binding peptide
  MOD_RES (34), (35): Xaa is C or S
  MOD_RES (12), (13), (14), (15), (16): Xaa is A or G
  MOD_RES (17), (18), (19), (20): Xaa is A or G or is absent
AKVVMNEYQKYXXXXXXXXXIYLVSIPSLKTPAXXAK

SEQ ID NO: 16385 - protein, 42 aa, Artificial Sequence
  Non-cyclic GFR-binding peptide
  MOD_RES (1), (3), (36), (37): Xaa is C or S
XGXEAVSMGEEYQKYTPVGMDDIYLVSIPSLKTPVXXAKGVK

SEQ ID NO: 16386 - protein, 38 aa, Artificial Sequence
  Non-cyclic GFR-binding peptide
  MOD_RES (1), (33), (34): Xaa is C or S
XGEVVMDEYQKYVVKENEDIYLMSIPSLETPVXXAKPI

SEQ ID NO: 16387 - protein, 42 aa, Artificial Sequence
  Non-cyclic GFR-binding peptide
  MOD_RES (2), (4), (39), (40): Xaa is C or S
  MOD_RES (17), (18), (19), (20), (21): Xaa is A or G
  MOD_RES (22), (23), (24), (25): Xaa is A or G or is absent
RXGXEAVSMGEEYKFKXXXXXXXXXLYLVSIPELKTPVXXAK

SEQ ID NO: 16388 - protein, 37 aa, Artificial Sequence
  Non-cyclic GFR-binding peptide
  MOD_RES (31), (32): Xaa is C or S
KVVMNEYQKYIVNNSSDIYLVSIPSLKTPAXXAKPVA

SEQ ID NO: 16389 - protein, 39 aa, Artificial Sequence
  Non-cyclic GFR-binding peptide
  MOD_RES (1), (3), (34), (35): Xaa is C or S
XKXSKVVMEYQKYVKPTRGVIYLISIPSLDQPVXXPSAS

SEQ ID NO: 16390 - protein, 39 aa, Artificial Sequence
  Non-cyclic GFR-binding peptide
  MOD_RES (2), (4), (38), (39): Xaa is C or S
  MOD_RES (16), (17), (18), (19), (20): Xaa is A or G
  MOD_RES (21), (22), (23), (24): Xaa is A or G or is absent
RXGXAEVVMDEYKFKXXXXXXXXXLYLISIPELRAPVXX

SEQ ID NO: 16391 - protein, 36 aa, Artificial Sequence
  Non-cyclic GFR-binding peptide
  MOD_RES (33), (34): Xaa is C or S
  MOD_RES (11), (12), (13), (14), (15): Xaa is A or G
  MOD_RES (16), (17), (18), (19): Xaa is A or G or is absent
SVAMGEYQKYXXXXXXXXXIYLISIPSLKTPVXXAK

SEQ ID NO: 16392 - protein, 37 aa, Artificial Sequence
  Non-cyclic GFR-binding peptide
  MOD_RES (1), (3), (34), (35): Xaa is C or S
XKXSRVIMEYQKYVKPKRGVIYLISIPSLAQPVXXPA

SEQ ID NO: 16393 - protein, 32 aa, Artificial Sequence
  Non-cyclic GFR-binding peptide
  MOD_RES (2), (2): Xaa is C or S
KXSRVIMEYKFKVKPKRGVLYLISIPELAQPV

SEQ ID NO: 16394 - protein, 35 aa, Artificial Sequence
  Non-cyclic GFR-binding peptide
  MOD_RES (31), (32): Xaa is C or S
KVVMNEYQKYIVNNSSDIYLVSIPSLKTPAXXAKP

SEQ ID NO: 16395 - protein, 37 aa, Artificial Sequence
  Non-cyclic GFR-binding peptide
  MOD_RES (1), (36), (37): Xaa is C or S
  MOD_RES (14), (15), (16), (17), (18): Xaa is A or G
  MOD_RES (19), (20), (21), (22): Xaa is A or G or is absent
XEAVSMGEEYKFKXXXXXXXXXLYLVSIPELKTPVXX

SEQ ID NO: 16396 - protein, 41 aa, Artificial Sequence
  Non-cyclic GFR-binding peptide
  MOD_RES (2), (36), (37): Xaa is C or S
  MOD_RES (14), (15), (16), (17), (18): Xaa is A or G
  MOD_RES (19), (20), (21), (22): Xaa is A or G or is absent
GXARVVMNEYQKYXXXXXXXXXIYLVSIPSLQTPAXXPKPV

SEQ ID NO: 16397 - protein, 42 aa, Artificial Sequence
  Non-cyclic GFR-binding peptide
  MOD_RES (2), (4), (36), (37): Xaa is C or S
HXGXAKVVMNEYQKYIVNNSSDIYLVSIPSLKTPAXXAKPVA

SEQ ID NO: 16398 - protein, 32 aa, Artificial Sequence
  Non-cyclic GFR-binding peptide
  MOD_RES (11), (12), (13), (14), (15): Xaa is A or G
  MOD_RES (16), (17), (18), (19): Xaa is A or G or is absent
SKVVMEYKFKXXXXXXXXXLYLISIPELDQPV

SEQ ID NO: 16399 - protein, 36 aa, Artificial Sequence
  Non-cyclic GFR-binding peptide
  MOD_RES (2), (34), (35): Xaa is C or S
GXAEVVMDYHYKLVVNNAADKYLISIPSLRAPVXXS

SEQ ID NO: 16400 - protein, 33 aa, Artificial Sequence
  Non-cyclic GFR-binding peptide
  MOD_RES (1), (33): Xaa is C or S
XESVAMGYHYKLYTVVGKDKYLISIPSLKTPVX

SEQ ID NO: 16401 - protein, 38 aa, Artificial Sequence
  Non-cyclic GFR-binding peptide
  MOD_RES (2), (4), (38): Xaa is C or S
  MOD_RES (16), (17), (18), (19), (20): Xaa is A or G
  MOD_RES (21), (22), (23), (24): Xaa is A or G or is absent
HXGXARVVMNEYKFKXXXXXXXXXLYLVSIPELQTPAX

SEQ ID NO: 16402 - protein, 39 aa, Artificial Sequence
  Non-cyclic GFR-binding peptide
  MOD_RES (2), (35), (36): Xaa is C or S
GXEAVSMGEEYKFKTPVGMDDLYLVSIPELKTPVXXAKG

SEQ ID NO: 16403 - protein, 34 aa, Artificial Sequence
  Non-cyclic GFR-binding peptide
  MOD_RES (1), (32), (33): Xaa is C or S
XSRVIMEYQKYVKPKRGVIYLISIPSLAQPVXXP

SEQ ID NO: 16404 - protein, 42 aa, Artificial Sequence
  Non-cyclic GFR-binding peptide
  MOD_RES (2), (36), (37): Xaa is C or S
  MOD_RES (14), (15), (16), (17), (18): Xaa is A or G
  MOD_RES (19), (20), (21), (22): Xaa is A or G or is absent
GXSRVVMNEYQKYXXXXXXXXXIYLVSIPSLKTPAXXPKPVY

SEQ ID NO: 16405 - protein, 35 aa, Artificial Sequence
  Non-cyclic GFR-binding peptide
  MOD_RES (31), (32): Xaa is C or S
EVVMDEYKFKVVNNAADLYLISIPELRAPVXXSAP

SEQ ID NO: 16406 - protein, 37 aa, Artificial Sequence
  Non-cyclic GFR-binding peptide
  MOD_RES (2), (36), (37): Xaa is C or S
  MOD_RES (14), (15), (16), (17), (18): Xaa is A or G
  MOD_RES (19), (20), (21), (22): Xaa is A or G or is absent
GXESVAMGYHYKLXXXXXXXXXKYLISIPSLKTPVXX

SEQ ID NO: 16407 - protein, 38 aa, Artificial Sequence
  Non-cyclic GFR-binding peptide
  MOD_RES (32), (32): Xaa is C or S
SRVVMNEYKFKIVNSSDDLYLVSIPELKTPAXTPKTVH

SEQ ID NO: 16408 - protein, 37 aa, Artificial Sequence
  Non-cyclic GFR-binding peptide
  MOD_RES (33), (33): Xaa is C or S
  MOD_RES (11), (12), (13), (14), (15): Xaa is A or G
  MOD_RES (16), (17), (18), (19): Xaa is A or G or is absent
RVVMNEYKFKXXXXXXXXXLYLVSIPELKTPAXTPKT

SEQ ID NO: 16409 - protein, 34 aa, Artificial Sequence
  Non-cyclic GFR-binding peptide
  MOD_RES (34), (34): Xaa is C or S
  MOD_RES (12), (13), (14), (15), (16): Xaa is A or G
  MOD_RES (17), (18), (19), (20): Xaa is A or G or is absent
AEVVMDYHYKLXXXXXXXXXKYLISIPSLRAPVX

SEQ ID NO: 16410 - protein, 34 aa, Artificial Sequence
  Non-cyclic GFR-binding peptide
  MOD_RES (1), (3): Xaa is C or S
XGXGEVVMEEYQKYVVKDYEDIYLMSIPSLETPV

SEQ ID NO: 16411 - protein, 39 aa, Artificial Sequence
  Non-cyclic GFR-binding peptide
  MOD_RES (2), (4), (38), (39): Xaa is C or S
  MOD_RES (16), (17), (18), (19), (20): Xaa is A or G
  MOD_RES (21), (22), (23), (24): Xaa is A or G or is absent
HXGXSRVVMNEYKFKXXXXXXXXXLYLVSIPELKTPAXX

SEQ ID NO: 16412 - protein, 40 aa, Artificial Sequence
  Non-cyclic GFR-binding peptide
  MOD_RES (34), (35): Xaa is C or S
  MOD_RES (12), (13), (14), (15), (16): Xaa is A or G
  MOD_RES (17), (18), (19), (20): Xaa is A or G or is absent
ESVAMGRYKKLXXXXXXXXXFYLISIANLKTPVXXAKSAK

SEQ ID NO: 16413 - protein, 35 aa, Artificial Sequence
  Non-cyclic GFR-binding peptide
  MOD_RES (1), (34), (35): Xaa is C or S
  MOD_RES (12), (13), (14), (15), (16): Xaa is A or G
  MOD_RES (17), (18), (19), (20): Xaa is A or G or is absent
XSRVIMEYKFKXXXXXXXXXLYLISIPELAQPVXX

SEQ ID NO: 16414 - protein, 34 aa, Artificial Sequence
  Non-cyclic GFR-binding peptide
  MOD_RES (31), (31): Xaa is C or S
RVVMNEYKFKIVNSSDDLYLVSIPELKTPAXTPK

SEQ ID NO: 16415 - protein, 38 aa, Artificial Sequence
  Non-cyclic GFR-binding peptide
  MOD_RES (33), (34): Xaa is C or S
  MOD_RES (11), (12), (13), (14), (15): Xaa is A or G
  MOD_RES (16), (17), (18), (19): Xaa is A or G or is absent
KVVMNEYKFKXXXXXXXXXLYLVSIPELKTPAXXAKPV

SEQ ID NO: 16416 - protein, 39 aa, Artificial Sequence
  Non-cyclic GFR-binding peptide
  MOD_RES (2), (4), (36), (37): Xaa is C or S
HXGXARVVMNEYQKYIVNSSDDIYLVSIPSLQTPAXXPK

SEQ ID NO: 16417 - protein, 37 aa, Artificial Sequence
  Non-cyclic GFR-binding peptide
  MOD_RES (2), (34), (35): Xaa is C or S
GXSRVVMNEYQKYIVNSSDDIYLVSIPSLKTPAXXPK

SEQ ID NO: 16418 - protein, 34 aa, Artificial Sequence
  Non-cyclic GFR-binding peptide
  MOD_RES (34), (34): Xaa is C or S
  MOD_RES (12), (13), (14), (15), (16): Xaa is A or G
  MOD_RES (17), (18), (19), (20): Xaa is A or G or is absent
ESVAMGEYQKYXXXXXXXXXIYLISIPSLKTPVX

SEQ ID NO: 16419 - protein, 39 aa, Artificial Sequence
  Non-cyclic GFR-binding peptide
  MOD_RES (1), (34), (35): Xaa is C or S
  MOD_RES (12), (13), (14), (15), (16): Xaa is A or G
  MOD_RES (17), (18), (19), (20): Xaa is A or G or is absent
XSKVIMEYQKYXXXXXXXXXIYLISIPSLDQSVXXPSAS

SEQ ID NO: 16420 - protein, 38 aa, Artificial Sequence
  Non-cyclic GFR-binding peptide
  MOD_RES (2), (4), (37), (38): Xaa is C or S
  MOD_RES (15), (16), (17), (18), (19): Xaa is A or G
  MOD_RES (20), (21), (22), (23): Xaa is A or G or is absent
SXKXSRVIMEYKFKXXXXXXXXXLYLISIPELAQPVXX

SEQ ID NO: 16421 - protein, 30 aa, Artificial Sequence
  Non-cyclic GFR-binding peptide
SVAMGRYKKLYTVVGKDFYLISIANLKTPV

SEQ ID NO: 16422 - protein, 33 aa, Artificial Sequence
  Non-cyclic GFR-binding peptide
  MOD_RES (1), (32), (33): Xaa is C or S
XSKVIMEYKFKIKPTKGILYLISIPELDQSVXX

SEQ ID NO: 16423 - protein, 39 aa, Artificial Sequence
  Non-cyclic GFR-binding peptide
  MOD_RES (1), (34), (35): Xaa is C or S
XEAVSMGEEYQKYTPVGMDDIYLVSIPSLKTPVXXAKGV

SEQ ID NO: 16424 - protein, 37 aa, Artificial Sequence
  Non-cyclic GFR-binding peptide
  MOD_RES (1), (3), (34), (35): Xaa is C or S
XKXSKVIMEYKFKIKPTKGILYLISIPELDQSVXXPS

SEQ ID NO: 16425 - protein, 35 aa, Artificial Sequence
  Non-cyclic GFR-binding peptide
  MOD_RES (33), (34): Xaa is C or S
  MOD_RES (11), (12), (13), (14), (15): Xaa is A or G
  MOD_RES (16), (17), (18), (19): Xaa is A or G or is absent
SKVVMEYKFKXXXXXXXXXLYLISIPELDQPVXXP

SEQ ID NO: 16426 - protein, 36 aa, Artificial Sequence
  Non-cyclic GFR-binding peptide
  MOD_RES (31), (32): Xaa is C or S
RVVMNEYQKYIVNSSDDIYLVSIPSLQTPAXXPKPV

SEQ ID NO: 16427 - protein, 40 aa, Artificial Sequence
  Non-cyclic GFR-binding peptide
  MOD_RES (2), (4), (36): Xaa is C or S
HXGXSRVVMNEYKFKIVNSSDDLYLVSIPELKTPAXTPKT

SEQ ID NO: 16428 - protein, 38 aa, Artificial Sequence
  Non-cyclic GFR-binding peptide
  MOD_RES (2), (37), (38): Xaa is C or S
  MOD_RES (15), (16), (17), (18), (19): Xaa is A or G
  MOD_RES (20), (21), (22), (23): Xaa is A or G or is absent
GXEAVSMGEEYQKYXXXXXXXXXIYLVSIPSLKTPVXX

SEQ ID NO: 16429 - protein, 38 aa, Artificial Sequence
  Non-cyclic GFR-binding peptide
  MOD_RES (2), (36), (37): Xaa is C or S
  MOD_RES (14), (15), (16), (17), (18): Xaa is A or G
  MOD_RES (19), (20), (21), (22): Xaa is A or G or is absent
GXGEVVMEEYKFKXXXXXXXXXLYLMSIPELETPVXXA

SEQ ID NO: 16430 - protein, 38 aa, Artificial Sequence
  Non-cyclic GFR-binding peptide
  MOD_RES (2), (33), (34): Xaa is C or S
KXSKVVMEYKFKVKPTRGVLYLISIPELDQPVXXPSAS

SEQ ID NO: 16431 - protein, 35 aa, Artificial Sequence
  Non-cyclic GFR-binding peptide
  MOD_RES (34), (35): Xaa is C or S
  MOD_RES (12), (13), (14), (15), (16): Xaa is A or G
  MOD_RES (17), (18), (19), (20): Xaa is A or G or is absent
AKVVMNEYKFKXXXXXXXXXLYLVSIPELKTPAXX

SEQ ID NO: 16432 - protein, 35 aa, Artificial Sequence
  Non-cyclic GFR-binding peptide
  MOD_RES (1), (33), (34): Xaa is C or S
XGEVVMDEYKFKVVKENEDLYLMSIPELETPVXXA

SEQ ID NO: 16433 - protein, 37 aa, Artificial Sequence
  Non-cyclic GFR-binding peptide
  MOD_RES (2), (34), (35): Xaa is C or S
GXAKVVMNEYQKYIVNNSSDIYLVSIPSLKTPAXXAK

SEQ ID NO: 16434 - protein, 35 aa, Artificial Sequence
  Non-cyclic GFR-binding peptide
  MOD_RES (34), (35): Xaa is C or S
  MOD_RES (12), (13), (14), (15), (16): Xaa is A or G
  MOD_RES (17), (18), (19), (20): Xaa is A or G or is absent
ESVAMGRYKKLXXXXXXXXXFYLISIANLKTPVXX

SEQ ID NO: 16435 - protein, 38 aa, Artificial Sequence
  Non-cyclic GFR-binding peptide
  MOD_RES (34), (35): Xaa is C or S
  MOD_RES (12), (13), (14), (15), (16): Xaa is A or G
  MOD_RES (17), (18), (19), (20): Xaa is A or G or is absent
AEVVMDEYKFKXXXXXXXXXLYLISIPELRAPVXXSAP

SEQ ID NO: 16436 - protein, 39 aa, Artificial Sequence
  Non-cyclic GFR-binding peptide
  MOD_RES (34), (35): Xaa is C or S
  MOD_RES (12), (13), (14), (15), (16): Xaa is A or G
  MOD_RES (17), (18), (19), (20): Xaa is A or G or is absent
AKVVMNEYQKYXXXXXXXXXIYLVSIPSLKTPAXXAKPV

SEQ ID NO: 16437 - protein, 35 aa, Artificial Sequence
  Non-cyclic GFR-binding peptide
  MOD_RES (31), (32): Xaa is C or S
EVVMDRYKKLVVNNAADFYLISIANLRAPVXXSAP

SEQ ID NO: 16438 - protein, 41 aa, Artificial Sequence
  Non-cyclic GFR-binding peptide
  MOD_RES (2), (35), (36): Xaa is C or S
  MOD_RES (13), (14), (15), (16), (17): Xaa is A or G
  MOD_RES (18), (19), (20), (21): Xaa is A or G or is absent
KXSRVIMEYQKYXXXXXXXXXIYLISIPSLAQPVXXPAASA

SEQ ID NO: 16439 - protein, 34 aa, Artificial Sequence
  Non-cyclic GFR-binding peptide
  MOD_RES (31), (32): Xaa is C or S
EVVMDYHYKLVVNNAADKYLISIPSLRAPVXXSA

SEQ ID NO: 16440 - protein, 39 aa, Artificial Sequence
  Non-cyclic GFR-binding peptide
  MOD_RES (1), (33), (34): Xaa is C or S
XAEVVMDRYKKLVVNNAADFYLISIANLRAPVXXSAPAA

SEQ ID NO: 16441 - protein, 36 aa, Artificial Sequence
  Non-cyclic GFR-binding peptide
  MOD_RES (2), (4): Xaa is C or S
RXGXEAVSMGEEYKFKTPVGMDDLYLVSIPELKTPV

SEQ ID NO: 16442 - protein, 36 aa, Artificial Sequence
  Non-cyclic GFR-binding peptide
  MOD_RES (1), (3): Xaa is C or S
  MOD_RES (15), (16), (17), (18), (19): Xaa is A or G
  MOD_RES (20), (21), (22), (23): Xaa is A or G or is absent
XGXGEVVMDEYQKYXXXXXXXXXIYLMSIPSLETPV

SEQ ID NO: 16443 - protein, 40 aa, Artificial Sequence
  Non-cyclic GFR-binding peptide
  MOD_RES (2), (36), (37): Xaa is C or S
  MOD_RES (14), (15), (16), (17), (18): Xaa is A or G
  MOD_RES (19), (20), (21), (22): Xaa is A or G or is absent
GXESVAMGYHYKLXXXXXXXXXKYLISIPSLKTPVXXAKS

SEQ ID NO: 16444 - protein, 41 aa, Artificial Sequence
  Non-cyclic GFR-binding peptide
  MOD_RES (1), (3), (35), (36): Xaa is C or S
XGXESVAMGRYKKLYTVVGKDFYLISIANLKTPVXXAKSAK

SEQ ID NO: 16445 - protein, 37 aa, Artificial Sequence
  Non-cyclic GFR-binding peptide
  MOD_RES (31), (32): Xaa is C or S
EVVMDEYQKYVVKENEDIYLMSIPSLETPVXXAKPIK

SEQ ID NO: 16446 - protein, 34 aa, Artificial Sequence
  Non-cyclic GFR-binding peptide
  MOD_RES (1), (1): Xaa is C or S
  MOD_RES (13), (14), (15), (16), (17): Xaa is A or G
  MOD_RES (18), (19), (20), (21): Xaa is A or G or is absent
XGEVVMEEYKFKXXXXXXXXXLYLMSIPELETPV

SEQ ID NO: 16447 - protein, 37 aa, Artificial Sequence
  Non-cyclic GFR-binding peptide
  MOD_RES (31), (32): Xaa is C or S
SKVIMEYKFKIKPTKGILYLISIPELDQSVXXPSASA

SEQ ID NO: 16448 - protein, 39 aa, Artificial Sequence
  Non-cyclic GFR-binding peptide
  MOD_RES (2), (34), (35): Xaa is C or S
GXAEVVMDYHYKLVVNNAADKYLISIPSLRAPVXXSAPA

SEQ ID NO: 16449 - protein, 38 aa, Artificial Sequence
  Non-cyclic GFR-binding peptide
  MOD_RES (33), (34): Xaa is C or S
  MOD_RES (11), (12), (13), (14), (15): Xaa is A or G
  MOD_RES (16), (17), (18), (19): Xaa is A or G or is absent
SRVIMEYQKYXXXXXXXXXIYLISIPSLAQPVXXPAAS

SEQ ID NO: 16450 - protein, 32 aa, Artificial Sequence
  Non-cyclic GFR-binding peptide
  MOD_RES (11), (12), (13), (14), (15): Xaa is A or G
  MOD_RES (16), (17), (18), (19): Xaa is A or G or is absent
SVAMGEYQKYXXXXXXXXXIYLISIPSLKTPV

SEQ ID NO: 16451 - protein, 37 aa, Artificial Sequence
  Non-cyclic GFR-binding peptide
  MOD_RES (33), (34): Xaa is C or S
  MOD_RES (11), (12), (13), (14), (15): Xaa is A or G
  MOD_RES (16), (17), (18), (19): Xaa is A or G or is absent
EVVMEEYQKYXXXXXXXXXIYLMSIPSLETPVXXAKP

SEQ ID NO: 16452 - protein, 38 aa, Artificial Sequence
  Non-cyclic GFR-binding peptide
  MOD_RES (33), (34): Xaa is C or S
  MOD_RES (11), (12), (13), (14), (15): Xaa is A or G
  MOD_RES (16), (17), (18), (19): Xaa is A or G or is absent
EVVMDEYKFKXXXXXXXXXLYLISIPELRAPVXXSAPA

SEQ ID NO: 16453 - protein, 33 aa, Artificial Sequence
  Non-cyclic GFR-binding peptide
  MOD_RES (33), (33): Xaa is C or S
EAVSMGEEYKFKTPVGMDDLYLVSIPELKTPVX

SEQ ID NO: 16454 - protein, 32 aa, Artificial Sequence
  Non-cyclic GFR-binding peptide
  MOD_RES (32), (32): Xaa is C or S
AEVVMDYHYKLVVNNAADKYLISIPSLRAPVX

SEQ ID NO: 16455 - protein, 43 aa, Artificial Sequence
  Non-cyclic GFR-binding peptide
  MOD_RES (2), (4), (38), (39): Xaa is C or S
  MOD_RES (16), (17), (18), (19), (20): Xaa is A or G
  MOD_RES (21), (22), (23), (24): Xaa is A or G or is absent
RXGXESVAMGYHYKLXXXXXXXXXKYLISIPSLKTPVXXAKSA

SEQ ID NO: 16456 - protein, 41 aa, Artificial Sequence
  Non-cyclic GFR-binding peptide
  MOD_RES (2), (4), (38), (39): Xaa is C or S
  MOD_RES (16), (17), (18), (19), (20): Xaa is A or G
  MOD_RES (21), (22), (23), (24): Xaa is A or G or is absent
HXGXARVVMNEYQKYXXXXXXXXXIYLVSIPSLQTPAXXPK

SEQ ID NO: 16457 - protein, 44 aa, Artificial Sequence
  Non-cyclic GFR-binding peptide
  MOD_RES (2), (4), (38): Xaa is C or S
  MOD_RES (16), (17), (18), (19), (20): Xaa is A or G
  MOD_RES (21), (22), (23), (24): Xaa is A or G or is absent
HXGXSRVVMNEYQKYXXXXXXXXXIYLVSIPSLKTPAXTPKTVH

SEQ ID NO: 16458 - protein, 42 aa, Artificial Sequence
  Non-cyclic GFR-binding peptide
  MOD_RES (2), (4), (36), (37): Xaa is C or S
RXGXGEVVMEEYKFKVVKDYEDLYLMSIPELETPVXXAKPIS

SEQ ID NO: 16459 - protein, 42 aa, Artificial Sequence
  Non-cyclic GFR-binding peptide
  MOD_RES (2), (4), (38), (39): Xaa is C or S
  MOD_RES (16), (17), (18), (19), (20): Xaa is A or G
  MOD_RES (21), (22), (23), (24): Xaa is A or G or is absent
HXGXAKVVMNEYQKYXXXXXXXXXIYLVSIPSLKTPAXXAKP

SEQ ID NO: 16460 - protein, 44 aa, Artificial Sequence
  Non-cyclic GFR-binding peptide
  MOD_RES (2), (4), (38), (39): Xaa is C or S
  MOD_RES (16), (17), (18), (19), (20): Xaa is A or G
  MOD_RES (21), (22), (23), (24): Xaa is A or G or is absent
HXGXAKVVMNEYQKYXXXXXXXXXIYLVSIPSLKTPAXXAKPVA

SEQ ID NO: 16461 - protein, 38 aa, Artificial Sequence
  Non-cyclic GFR-binding peptide
  MOD_RES (34), (35): Xaa is C or S
  MOD_RES (12), (13), (14), (15), (16): Xaa is A or G
  MOD_RES (17), (18), (19), (20): Xaa is A or G or is absent
ESVAMGYHYKLXXXXXXXXXKYLISIPSLKTPVXXAKS

SEQ ID NO: 16462 - protein, 38 aa, Artificial Sequence
  Non-cyclic GFR-binding peptide
  MOD_RES (34), (35): Xaa is C or S
  MOD_RES (12), (13), (14), (15), (16): Xaa is A or G
  MOD_RES (17), (18), (19), (20): Xaa is A or G or is absent
AEVVMDYHYKLXXXXXXXXXKYLISIPSLRAPVXXSAP

SEQ ID NO: 16463 - protein, 40 aa, Artificial Sequence
  Non-cyclic GFR-binding peptide
  MOD_RES (1), (3), (34), (35): Xaa is C or S
XKXSRVIMEYQKYVKPKRGVIYLISIPSLAQPVXXPAASA

SEQ ID NO: 16464 - protein, 36 aa, Artificial Sequence
  Non-cyclic GFR-binding peptide
  MOD_RES (2), (35), (36): Xaa is C or S
GXEAVSMGEEYKFKTPVGMDDLYLVSIPELKTPVXX

SEQ ID NO: 16465 - protein, 34 aa, Artificial Sequence
  Non-cyclic GFR-binding peptide
  MOD_RES (1), (1): Xaa is C or S
  MOD_RES (13), (14), (15), (16), (17): Xaa is A or G
  MOD_RES (18), (19), (20), (21): Xaa is A or G or is absent
XESVAMGRYKKLXXXXXXXXXFYLISIANLKTPV

SEQ ID NO: 16466 - protein, 43 aa, Artificial Sequence
  Non-cyclic GFR-binding peptide
  MOD_RES (2), (4), (38), (39): Xaa is C or S
  MOD_RES (16), (17), (18), (19), (20): Xaa is A or G
  MOD_RES (21), (22), (23), (24): Xaa is A or G or is absent
RXGXESVAMGEYQKYXXXXXXXXXIYLISIPSLKTPVXXAKSA

SEQ ID NO: 16467 - protein, 38 aa, Artificial Sequence
  Non-cyclic GFR-binding peptide
  MOD_RES (1), (3), (35), (36): Xaa is C or S
XGXESVAMGYHYKLYTVVGKDKYLISIPSLKTPVXXAK

SEQ ID NO: 16468 - protein, 37 aa, Artificial Sequence
  Non-cyclic GFR-binding peptide
  MOD_RES (1), (33), (34): Xaa is C or S
XGEVVMDEYQKYVVKENEDIYLMSIPSLETPVXXAKP

SEQ ID NO: 16469 - protein, 39 aa, Artificial Sequence
  Non-cyclic GFR-binding peptide
  MOD_RES (2), (4), (37), (38): Xaa is C or S
  MOD_RES (15), (16), (17), (18), (19): Xaa is A or G
  MOD_RES (20), (21), (22), (23): Xaa is A or G or is absent
SXKXSKVIMEYKFKXXXXXXXXXLYLISIPELDQSVXXP

SEQ ID NO: 16470 - protein, 37 aa, Artificial Sequence
  Non-cyclic GFR-binding peptide
  MOD_RES (2), (33), (34): Xaa is C or S
KXSRVIMEYKFKVKPKRGVLYLISIPELAQPVXXPAA

SEQ ID NO: 16471 - protein, 33 aa, Artificial Sequence
  Non-cyclic GFR-binding peptide
  MOD_RES (31), (32): Xaa is C or S
RVVMNEYQKYIVNSSDDIYLVSIPSLKTPAXXP

SEQ ID NO: 16472 - protein, 34 aa, Artificial Sequence
  Non-cyclic GFR-binding peptide
  MOD_RES (2), (34): Xaa is C or S
GXGEVVMEEYKFKVVKDYEDLYLMSIPELETPVX

SEQ ID NO: 16473 - protein, 38 aa, Artificial Sequence
  Non-cyclic GFR-binding peptide
  MOD_RES (1), (33), (34): Xaa is C or S
XGEVVMEEYKFKVVKDYEDLYLMSIPELETPVXXAKPI

SEQ ID NO: 16474 - protein, 38 aa, Artificial Sequence
  Non-cyclic GFR-binding peptide
  MOD_RES (1), (3), (36), (37): Xaa is C or S
XGXEAVSMGEEYQKYTPVGMDDIYLVSIPSLKTPVXXA

SEQ ID NO: 16475 - protein, 38 aa, Artificial Sequence
  Non-cyclic GFR-binding peptide
  MOD_RES (2), (4), (37), (38): Xaa is C or S
  MOD_RES (15), (16), (17), (18), (19): Xaa is A or G
  MOD_RES (20), (21), (22), (23): Xaa is A or G or is absent
SXKXSRVIMEYQKYXXXXXXXXXIYLISIPSLAQPVXX

SEQ ID NO: 16476 - protein, 31 aa, Artificial Sequence
  Non-cyclic GFR-binding peptide
GEVVMDEYQKYVVKENEDIYLMSIPSLETPV

SEQ ID NO: 16477 - protein, 40 aa, Artificial Sequence
  Non-cyclic GFR-binding peptide
  MOD_RES (2), (36), (37): Xaa is C or S
  MOD_RES (14), (15), (16), (17), (18): Xaa is A or G
  MOD_RES (19), (20), (21), (22): Xaa is A or G or is absent
GXARVVMNEYQKYXXXXXXXXXIYLVSIPSLQTPAXXPKP

SEQ ID NO: 16478 - protein, 38 aa, Artificial Sequence
  Non-cyclic GFR-binding peptide
  MOD_RES (33), (34): Xaa is C or S
  MOD_RES (11), (12), (13), (14), (15): Xaa is A or G
  MOD_RES (16), (17), (18), (19): Xaa is A or G or is absent
RVVMNEYQKYXXXXXXXXXIYLVSIPSLKTPAXXPKPV

SEQ ID NO: 16479 - protein, 35 aa, Artificial Sequence
  Non-cyclic GFR-binding peptide
  MOD_RES (32), (32): Xaa is C or S
SRVVMNEYKFKIVNSSDDLYLVSIPELKTPAXTPK

SEQ ID NO: 16480 - protein, 37 aa, Artificial Sequence
  Non-cyclic GFR-binding peptide
  MOD_RES (2), (4): Xaa is C or S
  MOD_RES (16), (17), (18), (19), (20): Xaa is A or G
  MOD_RES (21), (22), (23), (24): Xaa is A or G or is absent
RXGXESVAMGYHYKLXXXXXXXXXKYLISIPSLKTPV

SEQ ID NO: 16481 - protein, 35 aa, Artificial Sequence
  Non-cyclic GFR-binding peptide
  MOD_RES (34), (35): Xaa is C or S
  MOD_RES (12), (13), (14), (15), (16): Xaa is A or G
  MOD_RES (17), (18), (19), (20): Xaa is A or G or is absent
SRVVMNEYKFKXXXXXXXXXLYLVSIPELKTPAXX

SEQ ID NO: 16482 - protein, 39 aa, Artificial Sequence
  Non-cyclic GFR-binding peptide
  MOD_RES (2), (36), (37): Xaa is C or S
  MOD_RES (14), (15), (16), (17), (18): Xaa is A or G
  MOD_RES (19), (20), (21), (22): Xaa is A or G or is absent
GXSRVVMNEYQKYXXXXXXXXXIYLVSIPSLKTPAXXPK

SEQ ID NO: 16483 - protein, 36 aa, Artificial Sequence
  Non-cyclic GFR-binding peptide
  MOD_RES (2), (36): Xaa is C or S
  MOD_RES (14), (15), (16), (17), (18): Xaa is A or G
  MOD_RES (19), (20), (21), (22): Xaa is A or G or is absent
GXARVVMNEYQKYXXXXXXXXXIYLVSIPSLQTPAX

SEQ ID NO: 16484 - protein, 38 aa, Artificial Sequence
  Non-cyclic GFR-binding peptide
  MOD_RES (33), (34): Xaa is C or S
  MOD_RES (11), (12), (13), (14), (15): Xaa is A or G
  MOD_RES (16), (17), (18), (19): Xaa is A or G or is absent
RVVMNEYKFKXXXXXXXXXLYLVSIPELQTPAXXPKPV

SEQ ID NO: 16485 - protein, 38 aa, Artificial Sequence
  Non-cyclic GFR-binding peptide
  MOD_RES (34), (35): Xaa is C or S
  MOD_RES (12), (13), (14), (15), (16): Xaa is A or G
  MOD_RES (17), (18), (19), (20): Xaa is A or G or is absent
ESVAMGEYQKYXXXXXXXXXIYLISIPSLKTPVXXAKS

SEQ ID NO: 16486 - protein, 35 aa, Artificial Sequence
  Non-cyclic GFR-binding peptide
  MOD_RES (2), (4): Xaa is C or S
RXGXGEVVMEEYKFKVVKDYEDLYLMSIPELETPV

SEQ ID NO: 16487 - protein, 35 aa, Artificial Sequence
  Non-cyclic GFR-binding peptide
  MOD_RES (1), (35): Xaa is C or S
  MOD_RES (13), (14), (15), (16), (17): Xaa is A or G
  MOD_RES (18), (19), (20), (21): Xaa is A or G or is absent
XSRVVMNEYQKYXXXXXXXXXIYLVSIPSLKTPAX

SEQ ID NO: 16488 - protein, 32 aa, Artificial Sequence
  Non-cyclic GFR-binding peptide
  MOD_RES (31), (32): Xaa is C or S
SKVVMEYKFKVKPTRGVLYLISIPELDQPVXX

SEQ ID NO: 16489 - protein, 41 aa, Artificial Sequence
  Non-cyclic GFR-binding peptide
  MOD_RES (2), (4), (36), (37): Xaa is C or S
RXGXESVAMGEYQKYYTVVGKDIYLISIPSLKTPVXXAKSA

SEQ ID NO: 16490 - protein, 35 aa, Artificial Sequence
  Non-cyclic GFR-binding peptide
  MOD_RES (1), (33), (34): Xaa is C or S
XESVAMGYHYKLYTVVGKDKYLISIPSLKTPVXXA

SEQ ID NO: 16491 - protein, 37 aa, Artificial Sequence
  Non-cyclic GFR-binding peptide
  MOD_RES (1), (3): Xaa is C or S
  MOD_RES (16), (17), (18), (19), (20): Xaa is A or G
  MOD_RES (21), (22), (23), (24): Xaa is A or G or is absent
XGXEAVSMGEEYQKYXXXXXXXXXIYLVSIPSLKTPV

SEQ ID NO: 16492 - protein, 37 aa, Artificial Sequence
  Non-cyclic GFR-binding peptide
  MOD_RES (2), (4), (37): Xaa is C or S
  MOD_RES (15), (16), (17), (18), (19): Xaa is A or G
  MOD_RES (20), (21), (22), (23): Xaa is A or G or is absent
SXKXSKVIMEYKFKXXXXXXXXXLYLISIPELDQSVX

SEQ ID NO: 16493 - protein, 40 aa, Artificial Sequence
  Non-cyclic GFR-binding peptide
  MOD_RES (1), (3), (35), (36): Xaa is C or S
XGXESVAMGRYKKLYTVVGKDFYLISIANLKTPVXXAKSA

SEQ ID NO: 16494 - protein, 38 aa, Artificial Sequence
  Non-cyclic GFR-binding peptide
  MOD_RES (2), (34), (35): Xaa is C or S
GXGEVVMDEYQKYVVKENEDIYLMSIPSLETPVXXAKP

SEQ ID NO: 16495 - protein, 37 aa, Artificial Sequence
  Non-cyclic GFR-binding peptide
  MOD_RES (1), (35), (36): Xaa is C or S
  MOD_RES (13), (14), (15), (16), (17): Xaa is A or G
  MOD_RES (18), (19), (20), (21): Xaa is A or G or is absent
XESVAMGEYQKYXXXXXXXXXIYLISIPSLKTPVXXA

SEQ ID NO: 16496 - protein, 40 aa, Artificial Sequence
  Non-cyclic GFR-binding peptide
  MOD_RES (1), (3), (35), (36): Xaa is C or S
XGXAKVVMNEYQKYIVNNSSDIYLVSIPSLKTPAXXAKPV

SEQ ID NO: 16497 - protein, 38 aa, Artificial Sequence
  Non-cyclic GFR-binding peptide
  MOD_RES (2), (33), (34): Xaa is C or S
KXSKVIMEYKFKIKPTKGILYLISIPELDQSVXXPSAS

SEQ ID NO: 16498 - protein, 37 aa, Artificial Sequence
  Non-cyclic GFR-binding peptide
  MOD_RES (1), (3), (37): Xaa is C or S
  MOD_RES (15), (16), (17), (18), (19): Xaa is A or G
  MOD_RES (20), (21), (22), (23): Xaa is A or G or is absent
XGXESVAMGEYQKYXXXXXXXXXIYLISIPSLKTPVX

SEQ ID NO: 16499 - protein, 43 aa, Artificial Sequence
  Non-cyclic GFR-binding peptide
  MOD_RES (2), (4), (38), (39): Xaa is C or S
  MOD_RES (16), (17), (18), (19), (20): Xaa is A or G
  MOD_RES (21), (22), (23), (24): Xaa is A or G or is absent
RXGXGEVVMDEYKFKXXXXXXXXXLYLMSIPELETPVXXAKPI

SEQ ID NO: 16500 - protein, 32 aa, Artificial Sequence
  Non-cyclic GFR-binding peptide
  MOD_RES (1), (1): Xaa is C or S
XESVAMGRYKKLYTVVGKDFYLISIANLKTPV

SEQ ID NO: 16501 - protein, 40 aa, Artificial Sequence
  Non-cyclic GFR-binding peptide
  MOD_RES (2), (36), (37): Xaa is C or S
  MOD_RES (14), (15), (16), (17), (18): Xaa is A or G
  MOD_RES (19), (20), (21), (22): Xaa is A or G or is absent
GXESVAMGRYKKLXXXXXXXXXFYLISIANLKTPVXXAKS

SEQ ID NO: 16502 - protein, 33 aa, Artificial Sequence
  Non-cyclic GFR-binding peptide
  MOD_RES (33), (33): Xaa is C or S
  MOD_RES (11), (12), (13), (14), (15): Xaa is A or G
  MOD_RES (16), (17), (18), (19): Xaa is A or G or is absent
SKVIMEYQKYXXXXXXXXXIYLISIPSLDQSVX

SEQ ID NO: 16503 - protein, 36 aa, Artificial Sequence
  Non-cyclic GFR-binding peptide
  MOD_RES (2), (34), (35): Xaa is C or S
GXAEVVMDEYKFKVVNNAADLYLISIPELRAPVXXS

SEQ ID NO: 16504 - protein, 33 aa, Artificial Sequence
  Non-cyclic GFR-binding peptide
  MOD_RES (33), (33): Xaa is C or S
  MOD_RES (11), (12), (13), (14), (15): Xaa is A or G
  MOD_RES (16), (17), (18), (19): Xaa is A or G or is absent
EVVMDYHYKLXXXXXXXXXKYLISIPSLRAPVX

SEQ ID NO: 16505 - protein, 32 aa, Artificial Sequence
  Non-cyclic GFR-binding peptide
  MOD_RES (11), (12), (13), (14), (15): Xaa is A or G
  MOD_RES (16), (17), (18), (19): Xaa is A or G or is absent
EVVMDEYKFKXXXXXXXXXLYLMSIPELETPV

SEQ ID NO: 16506 - protein, 36 aa, Artificial Sequence
  Non-cyclic GFR-binding peptide
  MOD_RES (2), (34): Xaa is C or S
GXSRVVMNEYQKYIVNSSDDIYLVSIPSLKTPAXTP

SEQ ID NO: 16507 - protein, 34 aa, Artificial Sequence
  Non-cyclic GFR-binding peptide
  MOD_RES (32), (33): Xaa is C or S
AEVVMDRYKKLVVNNAADFYLISIANLRAPVXXS

SEQ ID NO: 16508 - protein, 32 aa, Artificial Sequence
  Non-cyclic GFR-binding peptide
  MOD_RES (1), (1): Xaa is C or S
XESVAMGYHYKLYTVVGKDKYLISIPSLKTPV

SEQ ID NO: 16509 - protein, 39 aa, Artificial Sequence
  Non-cyclic GFR-binding peptide
  MOD_RES (1), (3), (35), (36): Xaa is C or S
XGXAEVVMDEYKFKVVNNAADLYLISIPELRAPVXXSAP

SEQ ID NO: 16510 - protein, 33 aa, Artificial Sequence
  Non-cyclic GFR-binding peptide
  MOD_RES (12), (13), (14), (15), (16): Xaa is A or G
  MOD_RES (17), (18), (19), (20): Xaa is A or G or is absent
AEVVMDRYKKLXXXXXXXXXFYLISIANLRAPV

SEQ ID NO: 16511 - protein, 36 aa, Artificial Sequence
  Non-cyclic GFR-binding peptide
  MOD_RES (2), (35), (36): Xaa is C or S
  MOD_RES (13), (14), (15), (16), (17): Xaa is A or G
  MOD_RES (18), (19), (20), (21): Xaa is A or G or is absent
KXSKVIMEYKFKXXXXXXXXXLYLISIPELDQSVXX

SEQ ID NO: 16512 - protein, 36 aa, Artificial Sequence
  Non-cyclic GFR-binding peptide
  MOD_RES (1), (33), (34): Xaa is C or S
XAKVVMNEYQKYIVNNSSDIYLVSIPSLKTPAXXAK

SEQ ID NO: 16513 - protein, 34 aa, Artificial Sequence
  Non-cyclic GFR-binding peptide
  MOD_RES (2), (2): Xaa is C or S
  MOD_RES (13), (14), (15), (16), (17): Xaa is A or G
  MOD_RES (18), (19), (20), (21): Xaa is A or G or is absent
KXSKVVMEYKFKXXXXXXXXXLYLISIPELDQPV

SEQ ID NO: 16514 - protein, 31 aa, Artificial Sequence
  Non-cyclic GFR-binding peptide
  MOD_RES (31), (31): Xaa is C or S
SKVVMEYKFKVKPTRGVLYLISIPELDQPVX

SEQ ID NO: 16515 - protein, 37 aa, Artificial Sequence
  Non-cyclic GFR-binding peptide
  MOD_RES (2), (33), (34): Xaa is C or S
KXSKVVMEYQKYVKPTRGVIYLISIPSLDQPVXXPSA

SEQ ID NO: 16516 - protein, 36 aa, Artificial Sequence
  Non-cyclic GFR-binding peptide
  MOD_RES (1), (3): Xaa is C or S
  MOD_RES (15), (16), (17), (18), (19): Xaa is A or G
  MOD_RES (20), (21), (22), (23): Xaa is A or G or is absent
XGXGEVVMDEYKFKXXXXXXXXXLYLMSIPELETPV

SEQ ID NO: 16517 - protein, 34 aa, Artificial Sequence
  Non-cyclic GFR-binding peptide
  MOD_RES (2), (33), (34): Xaa is C or S
KXSKVIMEYQKYIKPTKGIIYLISIPSLDQSVXX

SEQ ID NO: 16518 - protein, 41 aa, Artificial Sequence
  Non-cyclic GFR-binding peptide
  MOD_RES (2), (4), (36), (37): Xaa is C or S
HXGXSRVVMNEYQKYIVNSSDDIYLVSIPSLKTPAXXPKPV

SEQ ID NO: 16519 - protein, 42 aa, Artificial Sequence
  Non-cyclic GFR-binding peptide
  MOD_RES (1), (3), (37), (38): Xaa is C or S
  MOD_RES (15), (16), (17), (18), (19): Xaa is A or G
  MOD_RES (20), (21), (22), (23): Xaa is A or G or is absent
XGXSRVVMNEYQKYXXXXXXXXXIYLVSIPSLKTPAXXPKPV

SEQ ID NO: 16520 - protein, 35 aa, Artificial Sequence
  Non-cyclic GFR-binding peptide
  MOD_RES (1), (33), (34): Xaa is C or S
XESVAMGRYKKLYTVVGKDFYLISIANLKTPVXXA

SEQ ID NO: 16521 - protein, 40 aa, Artificial Sequence
  Non-cyclic GFR-binding peptide
  MOD_RES (1), (3), (35): Xaa is C or S
XGXSRVVMNEYKFKIVNSSDDLYLVSIPELKTPAXTPKTV

SEQ ID NO: 16522 - protein, 36 aa, Artificial Sequence
  Non-cyclic GFR-binding peptide
  MOD_RES (1), (33), (34): Xaa is C or S
XARVVMNEYQKYIVNSSDDIYLVSIPSLQTPAXXPK

SEQ ID NO: 16523 - protein, 37 aa, Artificial Sequence
  Non-cyclic GFR-binding peptide
  MOD_RES (1), (34), (35): Xaa is C or S
  MOD_RES (12), (13), (14), (15), (16): Xaa is A or G
  MOD_RES (17), (18), (19), (20): Xaa is A or G or is absent
XSRVIMEYKFKXXXXXXXXXLYLISIPELAQPVXXPA

SEQ ID NO: 16524 - protein, 35 aa, Artificial Sequence
  Non-cyclic GFR-binding peptide
  MOD_RES (2), (4): Xaa is C or S
RXGXGEVVMDEYKFKVVKENEDLYLMSIPELETPV

SEQ ID NO: 16525 - protein, 40 aa, Artificial Sequence
  Non-cyclic GFR-binding peptide
  MOD_RES (2), (4), (36), (37): Xaa is C or S
HXGXAKVVMNEYQKYIVNNSSDIYLVSIPSLKTPAXXAKP

SEQ ID NO: 16526 - protein, 34 aa, Artificial Sequence
  Non-cyclic GFR-binding peptide
  MOD_RES (2), (33), (34): Xaa is C or S
KXSKVVMEYQKYVKPTRGVIYLISIPSLDQPVXX

SEQ ID NO: 16527 - protein, 36 aa, Artificial Sequence
  Non-cyclic GFR-binding peptide
  MOD_RES (1), (3): Xaa is C or S
  MOD_RES (15), (16), (17), (18), (19): Xaa is A or G
  MOD_RES (20), (21), (22), (23): Xaa is A or G or is absent
XGXESVAMGRYKKLXXXXXXXXXFYLISIANLKTPV

SEQ ID NO: 16528 - protein, 39 aa, Artificial Sequence
  Non-cyclic GFR-binding peptide
  MOD_RES (1), (35), (36): Xaa is C or S
  MOD_RES (13), (14), (15), (16), (17): Xaa is A or G
  MOD_RES (18), (19), (20), (21): Xaa is A or G or is absent
XESVAMGRYKKLXXXXXXXXXFYLISIANLKTPVXXAKS

SEQ ID NO: 16529 - protein, 35 aa, Artificial Sequence
  Non-cyclic GFR-binding peptide
  MOD_RES (2), (34), (35): Xaa is C or S
GXGEVVMDEYKFKVVKENEDLYLMSIPELETPVXX

SEQ ID NO: 16530 - protein, 42 aa, Artificial Sequence
  Non-cyclic GFR-binding peptide
  MOD_RES (2), (4), (37), (38): Xaa is C or S
  MOD_RES (15), (16), (17), (18), (19): Xaa is A or G
  MOD_RES (20), (21), (22), (23): Xaa is A or G or is absent
SXKXSKVIMEYQKYXXXXXXXXXIYLISIPSLDQSVXXPSAS

SEQ ID NO: 16531 - protein, 35 aa, Artificial Sequence
  Non-cyclic GFR-binding peptide
  MOD_RES (2), (2): Xaa is C or S
  MOD_RES (14), (15), (16), (17), (18): Xaa is A or G
  MOD_RES (19), (20), (21), (22): Xaa is A or G or is absent
GXAKVVMNEYKFKXXXXXXXXXLYLVSIPELKTPA

SEQ ID NO: 16532 - protein, 35 aa, Artificial Sequence
  Non-cyclic GFR-binding peptide
  MOD_RES (2), (33), (34): Xaa is C or S
KXSKVVMEYKFKVKPTRGVLYLISIPELDQPVXXP

SEQ ID NO: 16533 - protein, 36 aa, Artificial Sequence
  Non-cyclic GFR-binding peptide
  MOD_RES (2), (34), (35): Xaa is C or S
GXAKVVMNEYKFKIVNNSSDLYLVSIPELKTPAXXA

SEQ ID NO: 16534 - protein, 38 aa, Artificial Sequence
  Non-cyclic GFR-binding peptide
  MOD_RES (2), (4), (36), (37): Xaa is C or S
RXGXAEVVMDRYKKLVVNNAADFYLISIANLRAPVXXS

SEQ ID NO: 16535 - protein, 32 aa, Artificial Sequence
  Non-cyclic GFR-binding peptide
  MOD_RES (1), (1): Xaa is C or S
XSRVVMNEYKFKIVNSSDDLYLVSIPELKTPA

SEQ ID NO: 16536 - protein, 41 aa, Artificial Sequence
  Non-cyclic GFR-binding peptide
  MOD_RES (1), (35): Xaa is C or S
  MOD_RES (13), (14), (15), (16), (17): Xaa is A or G
  MOD_RES (18), (19), (20), (21): Xaa is A or G or is absent
XSRVVMNEYKFKXXXXXXXXXLYLVSIPELKTPAXTPKTVH

SEQ ID NO: 16537 - protein, 35 aa, Artificial Sequence
  Non-cyclic GFR-binding peptide
  MOD_RES (1), (33), (34): Xaa is C or S
XAEVVMDRYKKLVVNNAADFYLISIANLRAPVXXS

SEQ ID NO: 16538 - protein, 35 aa, Artificial Sequence
  Non-cyclic GFR-binding peptide
  MOD_RES (32), (33): Xaa is C or S
ESVAMGYHYKLYTVVGKDKYLISIPSLKTPVXXAK

SEQ ID NO: 16539 - protein, 34 aa, Artificial Sequence
  Non-cyclic GFR-binding peptide
  MOD_RES (31), (32): Xaa is C or S
SVAMGRYKKLYTVVGKDFYLISIANLKTPVXXAK

SEQ ID NO: 16540 - protein, 38 aa, Artificial Sequence
  Non-cyclic GFR-binding peptide
  MOD_RES (2), (34), (35): Xaa is C or S
GXESVAMGRYKKLYTVVGKDFYLISIANLKTPVXXAKS

SEQ ID NO: 16541 - protein, 39 aa, Artificial Sequence
  Non-cyclic GFR-binding peptide
  MOD_RES (1), (33), (34): Xaa is C or S
XGEVVMEEYKFKVVKDYEDLYLMSIPELETPVXXAKPIS

SEQ ID NO: 16542 - protein, 39 aa, Artificial Sequence
  Non-cyclic GFR-binding peptide
  MOD_RES (1), (3), (34), (35): Xaa is C or S
XKXSRVIMEYQKYVKPKRGVIYLISIPSLAQPVXXPAAS

SEQ ID NO: 16543 - protein, 36 aa, Artificial Sequence
  Non-cyclic GFR-binding peptide
  MOD_RES (1), (3), (35), (36): Xaa is C or S
XGXARVVMNEYQKYIVNSSDDIYLVSIPSLQTPAXX

SEQ ID NO: 16544 - protein, 36 aa, Artificial Sequence
  Non-cyclic GFR-binding peptide
  MOD_RES (34), (35): Xaa is C or S
  MOD_RES (12), (13), (14), (15), (16): Xaa is A or G
  MOD_RES (17), (18), (19), (20): Xaa is A or G or is absent
AKVVMNEYQKYXXXXXXXXXIYLVSIPSLKTPAXXA

SEQ ID NO: 16545 - protein, 38 aa, Artificial Sequence
  Non-cyclic GFR-binding peptide
  MOD_RES (1), (3), (37), (38): Xaa is C or S
  MOD_RES (15), (16), (17), (18), (19): Xaa is A or G
  MOD_RES (20), (21), (22), (23): Xaa is A or G or is absent
XGXAEVVMDRYKKLXXXXXXXXXFYLISIANLRAPVXX

SEQ ID NO: 16546 - protein, 38 aa, Artificial Sequence
  Non-cyclic GFR-binding peptide
  MOD_RES (33), (34): Xaa is C or S
  MOD_RES (11), (12), (13), (14), (15): Xaa is A or G
  MOD_RES (16), (17), (18), (19): Xaa is A or G or is absent
SKVVMEYKFKXXXXXXXXXLYLISIPELDQPVXXPSAS

SEQ ID NO: 16547 - protein, 37 aa, Artificial Sequence
  Non-cyclic GFR-binding peptide
  MOD_RES (31), (32): Xaa is C or S
RVVMNEYKFKIVNSSDDLYLVSIPELKTPAXXPKPVY

SEQ ID NO: 16548 - protein, 34 aa, Artificial Sequence
  Non-cyclic GFR-binding peptide
  MOD_RES (32), (33): Xaa is C or S
GEVVMEEYKFKVVKDYEDLYLMSIPELETPVXXA

SEQ ID NO: 16549 - protein, 41 aa, Artificial Sequence
  Non-cyclic GFR-binding peptide
  MOD_RES (2), (4), (38): Xaa is C or S
  MOD_RES (16), (17), (18), (19), (20): Xaa is A or G
  MOD_RES (21), (22), (23), (24): Xaa is A or G or is absent
HXGXSRVVMNEYQKYXXXXXXXXXIYLVSIPSLKTPAXTPK

SEQ ID NO: 16550 - protein, 40 aa, Artificial Sequence
  Non-cyclic GFR-binding peptide
  MOD_RES (2), (36), (37): Xaa is C or S
  MOD_RES (14), (15), (16), (17), (18): Xaa is A or G
  MOD_RES (19), (20), (21), (22): Xaa is A or G or is absent
GXAKVVMNEYQKYXXXXXXXXXIYLVSIPSLKTPAXXAKP

SEQ ID NO: 16551 - protein, 38 aa, Artificial Sequence
  Non-cyclic GFR-binding peptide
  MOD_RES (1), (35), (36): Xaa is C or S
  MOD_RES (13), (14), (15), (16), (17): Xaa is A or G
  MOD_RES (18), (19), (20), (21): Xaa is A or G or is absent
XAEVVMDEYKFKXXXXXXXXXLYLISIPELRAPVXXSA

SEQ ID NO: 16552 - protein, 35 aa, Artificial Sequence
  Non-cyclic GFR-binding peptide
  MOD_RES (1), (3), (35): Xaa is C or S
XGXSRVVMNEYKFKIVNSSDDLYLVSIPELKTPAX

SEQ ID NO: 16553 - protein, 37 aa, Artificial Sequence
  Non-cyclic GFR-binding peptide
  MOD_RES (2), (4), (36), (37): Xaa is C or S
RXGXGEVVMDEYKFKVVKENEDLYLMSIPELETPVXX

SEQ ID NO: 16554 - protein, 33 aa, Artificial Sequence
  Non-cyclic GFR-binding peptide
  MOD_RES (2), (2): Xaa is C or S
GXGEVVMEEYKFKVVKDYEDLYLMSIPELETPV

SEQ ID NO: 16555 - protein, 38 aa, Artificial Sequence
  Non-cyclic GFR-binding peptide
  MOD_RES (2), (36): Xaa is C or S
  MOD_RES (14), (15), (16), (17), (18): Xaa is A or G
  MOD_RES (19), (20), (21), (22): Xaa is A or G or is absent
GXSRVVMNEYQKYXXXXXXXXXIYLVSIPSLKTPAXTP

SEQ ID NO: 16556 - protein, 42 aa, Artificial Sequence
  Non-cyclic GFR-binding peptide
  MOD_RES (2), (36), (37): Xaa is C or S
  MOD_RES (14), (15), (16), (17), (18): Xaa is A or G
  MOD_RES (19), (20), (21), (22): Xaa is A or G or is absent
GXESVAMGYHYKLXXXXXXXXXKYLISIPSLKTPVXXAKSAK

SEQ ID NO: 16557 - protein, 36 aa, Artificial Sequence
  Non-cyclic GFR-binding peptide
  MOD_RES (1), (3), (34), (35): Xaa is C or S
XKXSKVVMEYQKYVKPTRGVIYLISIPSLDQPVXXP

SEQ ID NO: 16558 - protein, 36 aa, Artificial Sequence
  Non-cyclic GFR-binding peptide
  MOD_RES (1), (3), (35): Xaa is C or S
XGXSRVVMNEYQKYIVNSSDDIYLVSIPSLKTPAXT

SEQ ID NO: 16559 - protein, 35 aa, Artificial Sequence
  Non-cyclic GFR-binding peptide
  MOD_RES (2), (4), (35): Xaa is C or S
SXKXSKVVMEYQKYVKPTRGVIYLISIPSLDQPVX

SEQ ID NO: 16560 - protein, 36 aa, Artificial Sequence
  Non-cyclic GFR-binding peptide
  MOD_RES (1), (35), (36): Xaa is C or S
  MOD_RES (13), (14), (15), (16), (17): Xaa is A or G
  MOD_RES (18), (19), (20), (21): Xaa is A or G or is absent
XAKVVMNEYQKYXXXXXXXXXIYLVSIPSLKTPAXX

SEQ ID NO: 16561 - protein, 40 aa, Artificial Sequence
  Non-cyclic GFR-binding peptide
  MOD_RES (34), (35): Xaa is C or S
  MOD_RES (12), (13), (14), (15), (16): Xaa is A or G
  MOD_RES (17), (18), (19), (20): Xaa is A or G or is absent
AEVVMDEYKFKXXXXXXXXXLYLISIPELRAPVXXSAPAA

SEQ ID NO: 16562 - protein, 37 aa, Artificial Sequence
  Non-cyclic GFR-binding peptide
  MOD_RES (34), (35): Xaa is C or S
  MOD_RES (12), (13), (14), (15), (16): Xaa is A or G
  MOD_RES (17), (18), (19), (20): Xaa is A or G or is absent
GEVVMEEYQKYXXXXXXXXXIYLMSIPSLETPVXXAK

SEQ ID NO: 16563 - protein, 34 aa, Artificial Sequence
  Non-cyclic GFR-binding peptide
  MOD_RES (32), (33): Xaa is C or S
SRVVMNEYQKYIVNSSDDIYLVSIPSLKTPAXXP

SEQ ID NO: 16564 - protein, 39 aa, Artificial Sequence
  Non-cyclic GFR-binding peptide
  MOD_RES (2), (36), (37): Xaa is C or S
  MOD_RES (14), (15), (16), (17), (18): Xaa is A or G
  MOD_RES (19), (20), (21), (22): Xaa is A or G or is absent
GXAEVVMDRYKKLXXXXXXXXXFYLISIANLRAPVXXSA

SEQ ID NO: 16565 - protein, 42 aa, Artificial Sequence
  Non-cyclic GFR-binding peptide
  MOD_RES (2), (36), (37): Xaa is C or S
  MOD_RES (14), (15), (16), (17), (18): Xaa is A or G
  MOD_RES (19), (20), (21), (22): Xaa is A or G or is absent
GXGEVVMEEYQKYXXXXXXXXXIYLMSIPSLETPVXXAKPIS

SEQ ID NO: 16566 - protein, 42 aa, Artificial Sequence
  Non-cyclic GFR-binding peptide
  MOD_RES (1), (3), (37), (38): Xaa is C or S
  MOD_RES (15), (16), (17), (18), (19): Xaa is A or G
  MOD_RES (20), (21), (22), (23): Xaa is A or G or is absent
XGXSRVVMNEYKFKXXXXXXXXXLYLVSIPELKTPAXXPKPV

SEQ ID NO: 16567 - protein, 40 aa, Artificial Sequence
  Non-cyclic GFR-binding peptide
  MOD_RES (1), (3), (37), (38): Xaa is C or S
  MOD_RES (15), (16), (17), (18), (19): Xaa is A or G
  MOD_RES (20), (21), (22), (23): Xaa is A or G or is absent
XGXAEVVMDYHYKLXXXXXXXXXKYLISIPSLRAPVXXSA

SEQ ID NO: 16568 - protein, 40 aa, Artificial Sequence
  Non-cyclic GFR-binding peptide
  MOD_RES (2), (34), (35): Xaa is C or S
GXAKVVMNEYKFKIVNNSSDLYLVSIPELKTPAXXAKPVA

SEQ ID NO: 16569 - protein, 35 aa, Artificial Sequence
  Non-cyclic GFR-binding peptide
  MOD_RES (1), (33), (34): Xaa is C or S
XAEVVMDYHYKLVVNNAADKYLISIPSLRAPVXXS

SEQ ID NO: 16570 - protein, 39 aa, Artificial Sequence
  Non-cyclic GFR-binding peptide
  MOD_RES (1), (3), (35), (36): Xaa is C or S
XGXAEVVMDYHYKLVVNNAADKYLISIPSLRAPVXXSAP

SEQ ID NO: 16571 - protein, 42 aa, Artificial Sequence
  Non-cyclic GFR-binding peptide
  MOD_RES (1), (3), (37), (38): Xaa is C or S
  MOD_RES (15), (16), (17), (18), (19): Xaa is A or G
  MOD_RES (20), (21), (22), (23): Xaa is A or G or is absent
XGXGEVVMEEYKFKXXXXXXXXXLYLMSIPELETPVXXAKPI

SEQ ID NO: 16572 - protein, 35 aa, Artificial Sequence
  Non-cyclic GFR-binding peptide
  MOD_RES (34), (35): Xaa is C or S
  MOD_RES (12), (13), (14), (15), (16): Xaa is A or G
  MOD_RES (17), (18), (19), (20): Xaa is A or G or is absent
AEVVMDRYKKLXXXXXXXXXFYLISIANLRAPVXX

SEQ ID NO: 16573 - protein, 38 aa, Artificial Sequence
  Non-cyclic GFR-binding peptide
  MOD_RES (2), (4), (38): Xaa is C or S
  MOD_RES (16), (17), (18), (19), (20): Xaa is A or G
  MOD_RES (21), (22), (23), (24): Xaa is A or G or is absent
HXGXSRVVMNEYQKYXXXXXXXXXIYLVSIPSLKTPAX

SEQ ID NO: 16574 - protein, 35 aa, Artificial Sequence
  Non-cyclic GFR-binding peptide
  MOD_RES (32), (33): Xaa is C or S
ESVAMGEYQKYYTVVGKDIYLISIPSLKTPVXXAK

SEQ ID NO: 16575 - protein, 36 aa, Artificial Sequence
  Non-cyclic GFR-binding peptide
  MOD_RES (1), (36): Xaa is C or S
  MOD_RES (14), (15), (16), (17), (18): Xaa is A or G
  MOD_RES (19), (20), (21), (22): Xaa is A or G or is absent
XEAVSMGEEYKFKXXXXXXXXXLYLVSIPELKTPVX

SEQ ID NO: 16576 - protein, 34 aa, Artificial Sequence
  Non-cyclic GFR-binding peptide
  MOD_RES (1), (1): Xaa is C or S
  MOD_RES (13), (14), (15), (16), (17): Xaa is A or G
  MOD_RES (18), (19), (20), (21): Xaa is A or G or is absent
XGEVVMDEYQKYXXXXXXXXXIYLMSIPSLETPV

SEQ ID NO: 16577 - protein, 41 aa, Artificial Sequence
  Non-cyclic GFR-binding peptide
  MOD_RES (2), (4), (38), (39): Xaa is C or S
  MOD_RES (16), (17), (18), (19), (20): Xaa is A or G
  MOD_RES (21), (22), (23), (24): Xaa is A or G or is absent
RXGXGEVVMDEYQKYXXXXXXXXXIYLMSIPSLETPVXXAK

SEQ ID NO: 16578 - protein, 39 aa, Artificial Sequence
  Non-cyclic GFR-binding peptide
  MOD_RES (2), (33), (34): Xaa is C or S
KXSKVIMEYKFKIKPTKGILYLISIPELDQSVXXPSASA

SEQ ID NO: 16579 - protein, 40 aa, Artificial Sequence
  Non-cyclic GFR-binding peptide
  MOD_RES (2), (34), (35): Xaa is C or S
GXESVAMGRYKKLYTVVGKDFYLISIANLKTPVXXAKSAK

SEQ ID NO: 16580 - protein, 34 aa, Artificial Sequence
  Non-cyclic GFR-binding peptide
  MOD_RES (31), (32): Xaa is C or S
SKVIMEYKFKIKPTKGILYLISIPELDQSVXXPS

SEQ ID NO: 16581 - protein, 44 aa, Artificial Sequence
  Non-cyclic GFR-binding peptide
  MOD_RES (1), (3), (38), (39): Xaa is C or S
  MOD_RES (16), (17), (18), (19), (20): Xaa is A or G
  MOD_RES (21), (22), (23), (24): Xaa is A or G or is absent
XGXEAVSMGEEYQKYXXXXXXXXXIYLVSIPSLKTPVXXAKGVK

SEQ ID NO: 16582 - protein, 33 aa, Artificial Sequence
  Non-cyclic GFR-binding peptide
  MOD_RES (33), (33): Xaa is C or S
  MOD_RES (11), (12), (13), (14), (15): Xaa is A or G
  MOD_RES (16), (17), (18), (19): Xaa is A or G or is absent
EVVMDEYKFKXXXXXXXXXLYLISIPELRAPVX

SEQ ID NO: 16583 - protein, 42 aa, Artificial Sequence
  Non-cyclic GFR-binding peptide
  MOD_RES (1), (3), (37), (38): Xaa is C or S
  MOD_RES (15), (16), (17), (18), (19): Xaa is A or G
  MOD_RES (20), (21), (22), (23): Xaa is A or G or is absent
XGXAEVVMDYHYKLXXXXXXXXXKYLISIPSLRAPVXXSAPA

SEQ ID NO: 16584 - protein, 34 aa, Artificial Sequence
  Non-cyclic GFR-binding peptide
  MOD_RES (1), (3): Xaa is C or S
XGXARVVMNEYQKYIVNSSDDIYLVSIPSLQTPA

SEQ ID NO: 16585 - protein, 40 aa, Artificial Sequence
  Non-cyclic GFR-binding peptide
  MOD_RES (2), (34): Xaa is C or S
GXSRVVMNEYQKYIVNSSDDIYLVSIPSLKTPAXTPKTVH

SEQ ID NO: 16586 - protein, 41 aa, Artificial Sequence
  Non-cyclic GFR-binding peptide
  MOD_RES (1), (35), (36): Xaa is C or S
  MOD_RES (13), (14), (15), (16), (17): Xaa is A or G
  MOD_RES (18), (19), (20), (21): Xaa is A or G or is absent
XGEVVMEEYKFKXXXXXXXXXLYLMSIPELETPVXXAKPIS

SEQ ID NO: 16587 - protein, 38 aa, Artificial Sequence
  Non-cyclic GFR-binding peptide
  MOD_RES (32), (33): Xaa is C or S
ESVAMGEYQKYYTVVGKDIYLISIPSLKTPVXXAKSAK

SEQ ID NO: 16588 - protein, 36 aa, Artificial Sequence
  Non-cyclic GFR-binding peptide
  MOD_RES (33), (34): Xaa is C or S
EAVSMGEEYQKYTPVGMDDIYLVSIPSLKTPVXXAK

SEQ ID NO: 16589 - protein, 41 aa, Artificial Sequence
  Non-cyclic GFR-binding peptide
  MOD_RES (1), (35), (36): Xaa is C or S
  MOD_RES (13), (14), (15), (16), (17): Xaa is A or G
  MOD_RES (18), (19), (20), (21): Xaa is A or G or is absent
XARVVMNEYKFKXXXXXXXXXLYLVSIPELQTPAXXPKPVT

SEQ ID NO: 16590 - protein, 39 aa, Artificial Sequence
  Non-cyclic GFR-binding peptide
  MOD_RES (2), (4), (37), (38): Xaa is C or S
RXGXEAVSMGEEYQKYTPVGMDDIYLVSIPSLKTPVXXA

SEQ ID NO: 16591 - protein, 40 aa, Artificial Sequence
  Non-cyclic GFR-binding peptide
  MOD_RES (1), (3), (38), (39): Xaa is C or S
  MOD_RES (16), (17), (18), (19), (20): Xaa is A or G
  MOD_RES (21), (22), (23), (24): Xaa is A or G or is absent
XGXEAVSMGEEYKFKXXXXXXXXXLYLVSIPELKTPVXXA

SEQ ID NO: 16592 - protein, 35 aa, Artificial Sequence
  Non-cyclic GFR-binding peptide
  MOD_RES (2), (34), (35): Xaa is C or S
GXESVAMGEYQKYYTVVGKDIYLISIPSLKTPVXX

SEQ ID NO: 16593 - protein, 41 aa, Artificial Sequence
  Non-cyclic GFR-binding peptide
  MOD_RES (1), (35), (36): Xaa is C or S
  MOD_RES (13), (14), (15), (16), (17): Xaa is A or G
  MOD_RES (18), (19), (20), (21): Xaa is A or G or is absent
XGEVVMDEYQKYXXXXXXXXXIYLMSIPSLETPVXXAKPIK

SEQ ID NO: 16594 - protein, 36 aa, Artificial Sequence
  Non-cyclic GFR-binding peptide
  MOD_RES (32), (33): Xaa is C or S
ESVAMGRYKKLYTVVGKDFYLISIANLKTPVXXAKS

SEQ ID NO: 16595 - protein, 38 aa, Artificial Sequence
  Non-cyclic GFR-binding peptide
  MOD_RES (1), (3), (37), (38): Xaa is C or S
  MOD_RES (15), (16), (17), (18), (19): Xaa is A or G
  MOD_RES (20), (21), (22), (23): Xaa is A or G or is absent
XGXGEVVMDEYKFKXXXXXXXXXLYLMSIPELETPVXX

SEQ ID NO: 16596 - protein, 40 aa, Artificial Sequence
  Non-cyclic GFR-binding peptide
  MOD_RES (1), (3), (35): Xaa is C or S
XGXSRVVMNEYQKYIVNSSDDIYLVSIPSLKTPAXTPKTV

SEQ ID NO: 16597 - protein, 37 aa, Artificial Sequence
  Non-cyclic GFR-binding peptide
  MOD_RES (1), (3), (34), (35): Xaa is C or S
XKXSKVVMEYKFKVKPTRGVLYLISIPELDQPVXXPS

SEQ ID NO: 16598 - protein, 35 aa, Artificial Sequence
  Non-cyclic GFR-binding peptide
  MOD_RES (1), (3), (35): Xaa is C or S
XGXESVAMGEYQKYYTVVGKDIYLISIPSLKTPVX

SEQ ID NO: 16599 - protein, 34 aa, Artificial Sequence
  Non-cyclic GFR-binding peptide
  MOD_RES (1), (1): Xaa is C or S
  MOD_RES (13), (14), (15), (16), (17): Xaa is A or G
  MOD_RES (18), (19), (20), (21): Xaa is A or G or is absent
XAEVVMDRYKKLXXXXXXXXXFYLISIANLRAPV

SEQ ID NO: 16600 - protein, 34 aa, Artificial Sequence
  Non-cyclic GFR-binding peptide
  MOD_RES (34), (34): Xaa is C or S
  MOD_RES (12), (13), (14), (15), (16): Xaa is A or G
  MOD_RES (17), (18), (19), (20): Xaa is A or G or is absent
ESVAMGRYKKLXXXXXXXXXFYLISIANLKTPVX

SEQ ID NO: 16601 - protein, 33 aa, Artificial Sequence
  Non-cyclic GFR-binding peptide
  MOD_RES (12), (13), (14), (15), (16): Xaa is A or G
  MOD_RES (17), (18), (19), (20): Xaa is A or G or is absent
SRVVMNEYKFKXXXXXXXXXLYLVSIPELKTPA

SEQ ID NO: 16602 - protein, 38 aa, Artificial Sequence
  Non-cyclic GFR-binding peptide
  MOD_RES (2), (4), (36), (37): Xaa is C or S
RXGXAEVVMDEYKFKVVNNAADLYLISIPELRAPVXXS

SEQ ID NO: 16603 - protein, 39 aa, Artificial Sequence
  Non-cyclic GFR-binding peptide
  MOD_RES (2), (4), (35), (36): Xaa is C or S
SXKXSKVVMEYQKYVKPTRGVIYLISIPSLDQPVXXPSA

SEQ ID NO: 16604 - protein, 35 aa, Artificial Sequence
  Non-cyclic GFR-binding peptide
  MOD_RES (2), (2): Xaa is C or S
  MOD_RES (14), (15), (16), (17), (18): Xaa is A or G
  MOD_RES (19), (20), (21), (22): Xaa is A or G or is absent
GXGEVVMDEYKFKXXXXXXXXXLYLMSIPELETPV

SEQ ID NO: 16605 - protein, 38 aa, Artificial Sequence
  Non-cyclic GFR-binding peptide
  MOD_RES (1), (3), (37), (38): Xaa is C or S
  MOD_RES (15), (16), (17), (18), (19): Xaa is A or G
  MOD_RES (20), (21), (22), (23): Xaa is A or G or is absent
XGXESVAMGRYKKLXXXXXXXXXFYLISIANLKTPVXX

SEQ ID NO: 16606 - protein, 38 aa, Artificial Sequence
  Non-cyclic GFR-binding peptide
  MOD_RES (1), (3), (36), (37): Xaa is C or S
  MOD_RES (14), (15), (16), (17), (18): Xaa is A or G
  MOD_RES (19), (20), (21), (22): Xaa is A or G or is absent
XKXSKVVMEYQKYXXXXXXXXXIYLISIPSLDQPVXXP

SEQ ID NO: 16607 - protein, 37 aa, Artificial Sequence
  Non-cyclic GFR-binding peptide
  MOD_RES (2), (4), (37): Xaa is C or S
  MOD_RES (15), (16), (17), (18), (19): Xaa is A or G
  MOD_RES (20), (21), (22), (23): Xaa is A or G or is absent
SXKXSKVIMEYQKYXXXXXXXXXIYLISIPSLDQSVX

SEQ ID NO: 16608 - protein, 36 aa, Artificial Sequence
  Non-cyclic GFR-binding peptide
  MOD_RES (31), (32): Xaa is C or S
EVVMDRYKKLVVNNAADFYLISIANLRAPVXXSAPA

SEQ ID NO: 16609 - protein, 35 aa, Artificial Sequence
  Non-cyclic GFR-binding peptide
  MOD_RES (1), (3), (34), (35): Xaa is C or S
XKXSKVIMEYQKYIKPTKGIIYLISIPSLDQSVXX

SEQ ID NO: 16610 - protein, 37 aa, Artificial Sequence
  Non-cyclic GFR-binding peptide
  MOD_RES (33), (34): Xaa is C or S
  MOD_RES (11), (12), (13), (14), (15): Xaa is A or G
  MOD_RES (16), (17), (18), (19): Xaa is A or G or is absent
SVAMGYHYKLXXXXXXXXXKYLISIPSLKTPVXXAKS

SEQ ID NO: 16611 - protein, 40 aa, Artificial Sequence
  Non-cyclic GFR-binding peptide
  MOD_RES (1), (35), (36): Xaa is C or S
  MOD_RES (13), (14), (15), (16), (17): Xaa is A or G
  MOD_RES (18), (19), (20), (21): Xaa is A or G or is absent
XSRVVMNEYQKYXXXXXXXXXIYLVSIPSLKTPAXXPKPV

SEQ ID NO: 16612 - protein, 33 aa, Artificial Sequence
  Non-cyclic GFR-binding peptide
  MOD_RES (31), (32): Xaa is C or S
RVVMNEYKFKIVNSSDDLYLVSIPELQTPAXXP

SEQ ID NO: 16613 - protein, 40 aa, Artificial Sequence
  Non-cyclic GFR-binding peptide
  MOD_RES (2), (36), (37): Xaa is C or S
  MOD_RES (14), (15), (16), (17), (18): Xaa is A or G
  MOD_RES (19), (20), (21), (22): Xaa is A or G or is absent
GXGEVVMDEYQKYXXXXXXXXXIYLMSIPSLETPVXXAKP

SEQ ID NO: 16614 - protein, 37 aa, Artificial Sequence
  Non-cyclic GFR-binding peptide
  MOD_RES (1), (33), (34): Xaa is C or S
XARVVMNEYQKYIVNSSDDIYLVSIPSLQTPAXXPKP

SEQ ID NO: 16615 - protein, 38 aa, Artificial Sequence
  Non-cyclic GFR-binding peptide
  MOD_RES (33), (34): Xaa is C or S
EAVSMGEEYQKYTPVGMDDIYLVSIPSLKTPVXXAKGV

SEQ ID NO: 16616 - protein, 37 aa, Artificial Sequence
  Non-cyclic GFR-binding peptide
  MOD_RES (1), (3), (37): Xaa is C or S
  MOD_RES (15), (16), (17), (18), (19): Xaa is A or G
  MOD_RES (20), (21), (22), (23): Xaa is A or G or is absent
XGXSRVVMNEYKFKXXXXXXXXXLYLVSIPELKTPAX

SEQ ID NO: 16617 - protein, 35 aa, Artificial Sequence
  Non-cyclic GFR-binding peptide
  MOD_RES (1), (3): Xaa is C or S
  MOD_RES (14), (15), (16), (17), (18): Xaa is A or G
  MOD_RES (19), (20), (21), (22): Xaa is A or G or is absent
XKXSRVIMEYQKYXXXXXXXXXIYLISIPSLAQPV

SEQ ID NO: 16618 - protein, 41 aa, Artificial Sequence
  Non-cyclic GFR-binding peptide
  MOD_RES (2), (35), (36): Xaa is C or S
  MOD_RES (13), (14), (15), (16), (17): Xaa is A or G
  MOD_RES (18), (19), (20), (21): Xaa is A or G or is absent
KXSRVIMEYKFKXXXXXXXXXLYLISIPELAQPVXXPAASA

SEQ ID NO: 16619 - protein, 31 aa, Artificial Sequence
  Non-cyclic GFR-binding peptide
  MOD_RES (1), (1): Xaa is C or S
XSRVIMEYQKYVKPKRGVIYLISIPSLAQPV

SEQ ID NO: 16620 - protein, 34 aa, Artificial Sequence
  Non-cyclic GFR-binding peptide
  MOD_RES (34), (34): Xaa is C or S
  MOD_RES (12), (13), (14), (15), (16): Xaa is A or G
  MOD_RES (17), (18), (19), (20): Xaa is A or G or is absent
AKVVMNEYKFKXXXXXXXXXLYLVSIPELKTPAX

SEQ ID NO: 16621 - protein, 37 aa, Artificial Sequence
  Non-cyclic GFR-binding peptide
  MOD_RES (2), (4), (37): Xaa is C or S
RXGXEAVSMGEEYQKYTPVGMDDIYLVSIPSLKTPVX

SEQ ID NO: 16622 - protein, 38 aa, Artificial Sequence
  Non-cyclic GFR-binding peptide
  MOD_RES (32), (33): Xaa is C or S
GEVVMDEYQKYVVKENEDIYLMSIPSLETPVXXAKPIK

SEQ ID NO: 16623 - protein, 41 aa, Artificial Sequence
  Non-cyclic GFR-binding peptide
  MOD_RES (2), (36), (37): Xaa is C or S
  MOD_RES (14), (15), (16), (17), (18): Xaa is A or G
  MOD_RES (19), (20), (21), (22): Xaa is A or G or is absent
GXSRVVMNEYQKYXXXXXXXXXIYLVSIPSLKTPAXXPKPV

SEQ ID NO: 16624 - protein, 32 aa, Artificial Sequence
  Non-cyclic GFR-binding peptide
  MOD_RES (31), (32): Xaa is C or S
EVVMEEYQKYVVKDYEDIYLMSIPSLETPVXX

SEQ ID NO: 16625 - protein, 37 aa, Artificial Sequence
  Non-cyclic GFR-binding peptide
  MOD_RES (1), (32), (33): Xaa is C or S
XSKVVMEYQKYVKPTRGVIYLISIPSLDQPVXXPSAS

SEQ ID NO: 16626 - protein, 32 aa, Artificial Sequence
  Non-cyclic GFR-binding peptide
  MOD_RES (1), (1): Xaa is C or S
XGEVVMEEYQKYVVKDYEDIYLMSIPSLETPV

SEQ ID NO: 16627 - protein, 33 aa, Artificial Sequence
  Non-cyclic GFR-binding peptide
  MOD_RES (1), (33): Xaa is C or S
XGEVVMEEYKFKVVKDYEDLYLMSIPELETPVX

SEQ ID NO: 16628 - protein, 33 aa, Artificial Sequence
  Non-cyclic GFR-binding peptide
  MOD_RES (31), (32): Xaa is C or S
KVVMNEYKFKIVNNSSDLYLVSIPELKTPAXXA

SEQ ID NO: 16629 - protein, 34 aa, Artificial Sequence
  Non-cyclic GFR-binding peptide
  MOD_RES (33), (34): Xaa is C or S
  MOD_RES (11), (12), (13), (14), (15): Xaa is A or G
  MOD_RES (16), (17), (18), (19): Xaa is A or G or is absent
EVVMDEYQKYXXXXXXXXXIYLMSIPSLETPVXX

SEQ ID NO: 16630 - protein, 36 aa, Artificial Sequence
  Non-cyclic GFR-binding peptide
  MOD_RES (34), (35): Xaa is C or S
  MOD_RES (12), (13), (14), (15), (16): Xaa is A or G
  MOD_RES (17), (18), (19), (20): Xaa is A or G or is absent
GEVVMEEYKFKXXXXXXXXXLYLMSIPELETPVXXA

SEQ ID NO: 16631 - protein, 42 aa, Artificial Sequence
  Non-cyclic GFR-binding peptide
  MOD_RES (2), (4), (38), (39): Xaa is C or S
  MOD_RES (16), (17), (18), (19), (20): Xaa is A or G
  MOD_RES (21), (22), (23), (24): Xaa is A or G or is absent
HXGXSRVVMNEYKFKXXXXXXXXXLYLVSIPELKTPAXXPKP

SEQ ID NO: 16632 - protein, 39 aa, Artificial Sequence
  Non-cyclic GFR-binding peptide
  MOD_RES (1), (35), (36): Xaa is C or S
  MOD_RES (13), (14), (15), (16), (17): Xaa is A or G
  MOD_RES (18), (19), (20), (21): Xaa is A or G or is absent
XAEVVMDYHYKLXXXXXXXXXKYLISIPSLRAPVXXSAP

SEQ ID NO: 16633 - protein, 32 aa, Artificial Sequence
  Non-cyclic GFR-binding peptide
  MOD_RES (1), (32): Xaa is C or S
XSRVIMEYQKYVKPKRGVIYLISIPSLAQPVX

SEQ ID NO: 16634 - protein, 41 aa, Artificial Sequence
  Non-cyclic GFR-binding peptide
  MOD_RES (2), (4), (36), (37): Xaa is C or S
RXGXGEVVMDEYQKYVVKENEDIYLMSIPSLETPVXXAKPI

SEQ ID NO: 16635 - protein, 38 aa, Artificial Sequence
  Non-cyclic GFR-binding peptide
  MOD_RES (33), (33): Xaa is C or S
  MOD_RES (11), (12), (13), (14), (15): Xaa is A or G
  MOD_RES (16), (17), (18), (19): Xaa is A or G or is absent
RVVMNEYQKYXXXXXXXXXIYLVSIPSLKTPAXTPKTV

SEQ ID NO: 16636 - protein, 31 aa, Artificial Sequence
  Non-cyclic GFR-binding peptide
  MOD_RES (31), (31): Xaa is C or S
EVVMDEYQKYVVKENEDIYLMSIPSLETPVX

SEQ ID NO: 16637 - protein, 40 aa, Artificial Sequence
  Non-cyclic GFR-binding peptide
  MOD_RES (2), (34), (35): Xaa is C or S
GXAEVVMDRYKKLVVNNAADFYLISIANLRAPVXXSAPAA

SEQ ID NO: 16638 - protein, 32 aa, Artificial Sequence
  Non-cyclic GFR-binding peptide
  MOD_RES (31), (32): Xaa is C or S
EVVMDEYQKYVVKENEDIYLMSIPSLETPVXX

SEQ ID NO: 16639 - protein, 34 aa, Artificial Sequence
  Non-cyclic GFR-binding peptide
  MOD_RES (32), (33): Xaa is C or S
ESVAMGYHYKLYTVVGKDKYLISIPSLKTPVXXA

SEQ ID NO: 16640 - protein, 34 aa, Artificial Sequence
  Non-cyclic GFR-binding peptide
  MOD_RES (33), (34): Xaa is C or S
EAVSMGEEYQKYTPVGMDDIYLVSIPSLKTPVXX

SEQ ID NO: 16641 - protein, 35 aa, Artificial Sequence
  Non-cyclic GFR-binding peptide
  MOD_RES (2), (34), (35): Xaa is C or S
GXARVVMNEYKFKIVNSSDDLYLVSIPELQTPAXX

SEQ ID NO: 16642 - protein, 39 aa, Artificial Sequence
  Non-cyclic GFR-binding peptide
  MOD_RES (2), (4), (38), (39): Xaa is C or S
  MOD_RES (16), (17), (18), (19), (20): Xaa is A or G
  MOD_RES (21), (22), (23), (24): Xaa is A or G or is absent
HXGXARVVMNEYQKYXXXXXXXXXIYLVSIPSLQTPAXX

SEQ ID NO: 16643 - protein, 39 aa, Artificial Sequence
  Non-cyclic GFR-binding peptide
  MOD_RES (1), (34), (35): Xaa is C or S
  MOD_RES (12), (13), (14), (15), (16): Xaa is A or G
  MOD_RES (17), (18), (19), (20): Xaa is A or G or is absent
XSKVVMEYQKYXXXXXXXXXIYLISIPSLDQPVXXPSAS

SEQ ID NO: 16644 - protein, 37 aa, Artificial Sequence
  Non-cyclic GFR-binding peptide
  MOD_RES (33), (34): Xaa is C or S
  MOD_RES (11), (12), (13), (14), (15): Xaa is A or G
  MOD_RES (16), (17), (18), (19): Xaa is A or G or is absent
EVVMEEYKFKXXXXXXXXXLYLMSIPELETPVXXAKP

SEQ ID NO: 16645 - protein, 36 aa, Artificial Sequence
  Non-cyclic GFR-binding peptide
  MOD_RES (33), (34): Xaa is C or S
  MOD_RES (11), (12), (13), (14), (15): Xaa is A or G
  MOD_RES (16), (17), (18), (19): Xaa is A or G or is absent
SVAMGRYKKLXXXXXXXXXFYLISIANLKTPVXXAK

SEQ ID NO: 16646 - protein, 38 aa, Artificial Sequence
  Non-cyclic GFR-binding peptide
  MOD_RES (2), (4), (35), (36): Xaa is C or S
SXKXSKVIMEYQKYIKPTKGIIYLISIPSLDQSVXXPS

SEQ ID NO: 16647 - protein, 41 aa, Artificial Sequence
  Non-cyclic GFR-binding peptide
  MOD_RES (2), (37), (38): Xaa is C or S
  MOD_RES (15), (16), (17), (18), (19): Xaa is A or G
  MOD_RES (20), (21), (22), (23): Xaa is A or G or is absent
GXEAVSMGEEYKFKXXXXXXXXXLYLVSIPELKTPVXXAKG

SEQ ID NO: 16648 - protein, 37 aa, Artificial Sequence
  Non-cyclic GFR-binding peptide
  MOD_RES (2), (36), (37): Xaa is C or S
  MOD_RES (14), (15), (16), (17), (18): Xaa is A or G
  MOD_RES (19), (20), (21), (22): Xaa is A or G or is absent
GXSRVVMNEYQKYXXXXXXXXXIYLVSIPSLKTPAXX

SEQ ID NO: 16649 - protein, 33 aa, Artificial Sequence
  Non-cyclic GFR-binding peptide
  MOD_RES (31), (32): Xaa is C or S
SVAMGEYQKYYTVVGKDIYLISIPSLKTPVXXA

SEQ ID NO: 16650 - protein, 36 aa, Artificial Sequence
  Non-cyclic GFR-binding peptide
  MOD_RES (1), (35), (36): Xaa is C or S
  MOD_RES (13), (14), (15), (16), (17): Xaa is A or G
  MOD_RES (18), (19), (20), (21): Xaa is A or G or is absent
XGEVVMEEYQKYXXXXXXXXXIYLMSIPSLETPVXX

SEQ ID NO: 16651 - protein, 38 aa, Artificial Sequence
  Non-cyclic GFR-binding peptide
  MOD_RES (1), (34), (35): Xaa is C or S
  MOD_RES (12), (13), (14), (15), (16): Xaa is A or G
  MOD_RES (17), (18), (19), (20): Xaa is A or G or is absent
XSKVIMEYQKYXXXXXXXXXIYLISIPSLDQSVXXPSA

SEQ ID NO: 16652 - protein, 41 aa, Artificial Sequence
  Non-cyclic GFR-binding peptide
  MOD_RES (2), (36), (37): Xaa is C or S
  MOD_RES (14), (15), (16), (17), (18): Xaa is A or G
  MOD_RES (19), (20), (21), (22): Xaa is A or G or is absent
GXESVAMGYHYKLXXXXXXXXXKYLISIPSLKTPVXXAKSA

SEQ ID NO: 16653 - protein, 34 aa, Artificial Sequence
  Non-cyclic GFR-binding peptide
  MOD_RES (1), (3), (34): Xaa is C or S
XKXSRVIMEYKFKVKPKRGVLYLISIPELAQPVX

SEQ ID NO: 16654 - protein, 36 aa, Artificial Sequence
  Non-cyclic GFR-binding peptide
  MOD_RES (32), (32): Xaa is C or S
SRVVMNEYKFKIVNSSDDLYLVSIPELKTPAXTPKT

SEQ ID NO: 16655 - protein, 34 aa, Artificial Sequence
  Non-cyclic GFR-binding peptide
  MOD_RES (32), (33): Xaa is C or S
ARVVMNEYKFKIVNSSDDLYLVSIPELQTPAXXP

SEQ ID NO: 16656 - protein, 38 aa, Artificial Sequence
  Non-cyclic GFR-binding peptide
  MOD_RES (1), (3), (37), (38): Xaa is C or S
  MOD_RES (15), (16), (17), (18), (19): Xaa is A or G
  MOD_RES (20), (21), (22), (23): Xaa is A or G or is absent
XGXAKVVMNEYKFKXXXXXXXXXLYLVSIPELKTPAXX

SEQ ID NO: 16657 - protein, 38 aa, Artificial Sequence
  Non-cyclic GFR-binding peptide
  MOD_RES (1), (3), (38): Xaa is C or S
  MOD_RES (16), (17), (18), (19), (20): Xaa is A or G
  MOD_RES (21), (22), (23), (24): Xaa is A or G or is absent
XGXEAVSMGEEYQKYXXXXXXXXXIYLVSIPSLKTPVX

SEQ ID NO: 16658 - protein, 33 aa, Artificial Sequence
  Non-cyclic GFR-binding peptide
  MOD_RES (2), (2): Xaa is C or S
GXAKVVMNEYQKYIVNNSSDIYLVSIPSLKTPA

SEQ ID NO: 16659 - protein, 40 aa, Artificial Sequence
  Non-cyclic GFR-binding peptide
  MOD_RES (2), (35), (36): Xaa is C or S
  MOD_RES (13), (14), (15), (16), (17): Xaa is A or G
  MOD_RES (18), (19), (20), (21): Xaa is A or G or is absent
KXSRVIMEYQKYXXXXXXXXXIYLISIPSLAQPVXXPAAS

SEQ ID NO: 16660 - protein, 40 aa, Artificial Sequence
  Non-cyclic GFR-binding peptide
  MOD_RES (2), (4), (38), (39): Xaa is C or S
  MOD_RES (16), (17), (18), (19), (20): Xaa is A or G
  MOD_RES (21), (22), (23), (24): Xaa is A or G or is absent
HXGXARVVMNEYQKYXXXXXXXXXIYLVSIPSLQTPAXXP

SEQ ID NO: 16661 - protein, 38 aa, Artificial Sequence
  Non-cyclic GFR-binding peptide
  MOD_RES (34), (35): Xaa is C or S
  MOD_RES (12), (13), (14), (15), (16): Xaa is A or G
  MOD_RES (17), (18), (19), (20): Xaa is A or G or is absent
GEVVMDEYKFKXXXXXXXXXLYLMSIPELETPVXXAKP

SEQ ID NO: 16662 - protein, 41 aa, Artificial Sequence
  Non-cyclic GFR-binding peptide
  MOD_RES (1), (3), (37), (38): Xaa is C or S
  MOD_RES (15), (16), (17), (18), (19): Xaa is A or G
  MOD_RES (20), (21), (22), (23): Xaa is A or G or is absent
XGXAEVVMDRYKKLXXXXXXXXXFYLISIANLRAPVXXSAP

SEQ ID NO: 16663 - protein, 35 aa, Artificial Sequence
  Non-cyclic GFR-binding peptide
  MOD_RES (1), (32), (33): Xaa is C or S
XSRVIMEYKFKVKPKRGVLYLISIPELAQPVXXPA

SEQ ID NO: 16664 - protein, 34 aa, Artificial Sequence
  Non-cyclic GFR-binding peptide
  MOD_RES (32), (33): Xaa is C or S
AEVVMDYHYKLVVNNAADKYLISIPSLRAPVXXS

SEQ ID NO: 16665 - protein, 36 aa, Artificial Sequence
  Non-cyclic GFR-binding peptide
  MOD_RES (33), (34): Xaa is C or S
  MOD_RES (11), (12), (13), (14), (15): Xaa is A or G
  MOD_RES (16), (17), (18), (19): Xaa is A or G or is absent
EVVMDYHYKLXXXXXXXXXKYLISIPSLRAPVXXSA

SEQ ID NO: 16666 - protein, 32 aa, Artificial Sequence
  Non-cyclic GFR-binding peptide
  MOD_RES (2), (2): Xaa is C or S
KXSKVIMEYQKYIKPTKGIIYLISIPSLDQSV

SEQ ID NO: 16667 - protein, 40 aa, Artificial Sequence
  Non-cyclic GFR-binding peptide
  MOD_RES (2), (4), (37), (38): Xaa is C or S
  MOD_RES (15), (16), (17), (18), (19): Xaa is A or G
  MOD_RES (20), (21), (22), (23): Xaa is A or G or is absent
SXKXSKVVMEYQKYXXXXXXXXXIYLISIPSLDQPVXXPS

SEQ ID NO: 16668 - protein, 36 aa, Artificial Sequence
  Non-cyclic GFR-binding peptide
  MOD_RES (1), (3), (34), (35): Xaa is C or S
XKXSKVIMEYQKYIKPTKGIIYLISIPSLDQSVXXP

SEQ ID NO: 16669 - protein, 37 aa, Artificial Sequence
  Non-cyclic GFR-binding peptide
  MOD_RES (33), (34): Xaa is C or S
  MOD_RES (11), (12), (13), (14), (15): Xaa is A or G
  MOD_RES (16), (17), (18), (19): Xaa is A or G or is absent
KVVMNEYQKYXXXXXXXXXIYLVSIPSLKTPAXXAKP

SEQ ID NO: 16670 - protein, 38 aa, Artificial Sequence
  Non-cyclic GFR-binding peptide
  MOD_RES (2), (4), (36), (37): Xaa is C or S
HXGXSRVVMNEYQKYIVNSSDDIYLVSIPSLKTPAXXP

SEQ ID NO: 16671 - protein, 38 aa, Artificial Sequence
  Non-cyclic GFR-binding peptide
  MOD_RES (1), (32), (33): Xaa is C or S
XSRVIMEYQKYVKPKRGVIYLISIPSLAQPVXXPAASA

SEQ ID NO: 16672 - protein, 36 aa, Artificial Sequence
  Non-cyclic GFR-binding peptide
  MOD_RES (31), (32): Xaa is C or S
RVVMNEYQKYIVNSSDDIYLVSIPSLKTPAXXPKPV

SEQ ID NO: 16673 - protein, 38 aa, Artificial Sequence
  Non-cyclic GFR-binding peptide
  MOD_RES (32), (33): Xaa is C or S
SRVVMNEYKFKIVNSSDDLYLVSIPELKTPAXXPKPVY

SEQ ID NO: 16674 - protein, 34 aa, Artificial Sequence
  Non-cyclic GFR-binding peptide
  MOD_RES (1), (33), (34): Xaa is C or S
XGEVVMEEYKFKVVKDYEDLYLMSIPELETPVXX

SEQ ID NO: 16675 - protein, 34 aa, Artificial Sequence
  Non-cyclic GFR-binding peptide
  MOD_RES (1), (1): Xaa is C or S
  MOD_RES (13), (14), (15), (16), (17): Xaa is A or G
  MOD_RES (18), (19), (20), (21): Xaa is A or G or is absent
XAKVVMNEYKFKXXXXXXXXXLYLVSIPELKTPA

SEQ ID NO: 16676 - protein, 34 aa, Artificial Sequence
  Non-cyclic GFR-binding peptide
  MOD_RES (33), (34): Xaa is C or S
  MOD_RES (11), (12), (13), (14), (15): Xaa is A or G
  MOD_RES (16), (17), (18), (19): Xaa is A or G or is absent
SKVIMEYQKYXXXXXXXXXIYLISIPSLDQSVXX

SEQ ID NO: 16677 - protein, 37 aa, Artificial Sequence
  Non-cyclic GFR-binding peptide
  MOD_RES (1), (32), (33): Xaa is C or S
XSKVIMEYQKYIKPTKGIIYLISIPSLDQSVXXPSAS

SEQ ID NO: 16678 - protein, 39 aa, Artificial Sequence
  Non-cyclic GFR-binding peptide
  MOD_RES (1), (3), (35), (36): Xaa is C or S
XGXAKVVMNEYKFKIVNNSSDLYLVSIPELKTPAXXAKP

SEQ ID NO: 16679 - protein, 39 aa, Artificial Sequence
  Non-cyclic GFR-binding peptide
  MOD_RES (1), (3), (38), (39): Xaa is C or S
  MOD_RES (16), (17), (18), (19), (20): Xaa is A or G
  MOD_RES (21), (22), (23), (24): Xaa is A or G or is absent
XGXEAVSMGEEYKFKXXXXXXXXXLYLVSIPELKTPVXX

SEQ ID NO: 16680 - protein, 37 aa, Artificial Sequence
  Non-cyclic GFR-binding peptide
  MOD_RES (1), (3), (35), (36): Xaa is C or S
XGXAEVVMDEYKFKVVNNAADLYLISIPELRAPVXXS

SEQ ID NO: 16681 - protein, 32 aa, Artificial Sequence
  Non-cyclic GFR-binding peptide
  MOD_RES (31), (32): Xaa is C or S
SKVIMEYKFKIKPTKGILYLISIPELDQSVXX

SEQ ID NO: 16682 - protein, 37 aa, Artificial Sequence
  Non-cyclic GFR-binding peptide
  MOD_RES (31), (32): Xaa is C or S
SVAMGRYKKLYTVVGKDFYLISIANLKTPVXXAKSAK

SEQ ID NO: 16683 - protein, 41 aa, Artificial Sequence
  Non-cyclic GFR-binding peptide
  MOD_RES (1), (3), (37), (38): Xaa is C or S
  MOD_RES (15), (16), (17), (18), (19): Xaa is A or G
  MOD_RES (20), (21), (22), (23): Xaa is A or G or is absent
XGXSRVVMNEYKFKXXXXXXXXXLYLVSIPELKTPAXXPKP

SEQ ID NO: 16684 - protein, 37 aa, Artificial Sequence
  Non-cyclic GFR-binding peptide
  MOD_RES (1), (3), (35), (36): Xaa is C or S
XGXSRVVMNEYQKYIVNSSDDIYLVSIPSLKTPAXXP

SEQ ID NO: 16685 - protein, 31 aa, Artificial Sequence
  Non-cyclic GFR-binding peptide
AEVVMDRYKKLVVNNAADFYLISIANLRAPV

SEQ ID NO: 16686 - protein, 38 aa, Artificial Sequence
  Non-cyclic GFR-binding peptide
  MOD_RES (2), (4), (36), (37): Xaa is C or S
HXGXSRVVMNEYKFKIVNSSDDLYLVSIPELKTPAXXP

SEQ ID NO: 16687 - protein, 33 aa, Artificial Sequence
  Non-cyclic GFR-binding peptide
  MOD_RES (1), (1): Xaa is C or S
XEAVSMGEEYKFKTPVGMDDLYLVSIPELKTPV

SEQ ID NO: 16688 - protein, 38 aa, Artificial Sequence
  Non-cyclic GFR-binding peptide
  MOD_RES (1), (35), (36): Xaa is C or S
  MOD_RES (13), (14), (15), (16), (17): Xaa is A or G
  MOD_RES (18), (19), (20), (21): Xaa is A or G or is absent
XGEVVMEEYKFKXXXXXXXXXLYLMSIPELETPVXXAK

SEQ ID NO: 16689 - protein, 35 aa, Artificial Sequence
  Non-cyclic GFR-binding peptide
  MOD_RES (33), (34): Xaa is C or S
  MOD_RES (11), (12), (13), (14), (15): Xaa is A or G
  MOD_RES (16), (17), (18), (19): Xaa is A or G or is absent
SVAMGRYKKLXXXXXXXXXFYLISIANLKTPVXXA

SEQ ID NO: 16690 - protein, 39 aa, Artificial Sequence
  Non-cyclic GFR-binding peptide
  MOD_RES (1), (3), (37): Xaa is C or S
  MOD_RES (15), (16), (17), (18), (19): Xaa is A or G
  MOD_RES (20), (21), (22), (23): Xaa is A or G or is absent
XGXSRVVMNEYQKYXXXXXXXXXIYLVSIPSLKTPAXTP

SEQ ID NO: 16691 - protein, 35 aa, Artificial Sequence
  Non-cyclic GFR-binding peptide
  MOD_RES (1), (33), (34): Xaa is C or S
XAEVVMDEYKFKVVNNAADLYLISIPELRAPVXXS

SEQ ID NO: 16692 - protein, 37 aa, Artificial Sequence
  Non-cyclic GFR-binding peptide
  MOD_RES (32), (33): Xaa is C or S
AEVVMDRYKKLVVNNAADFYLISIANLRAPVXXSAPA

SEQ ID NO: 16693 - protein, 41 aa, Artificial Sequence
  Non-cyclic GFR-binding peptide
  MOD_RES (1), (3), (37), (38): Xaa is C or S
  MOD_RES (15), (16), (17), (18), (19): Xaa is A or G
  MOD_RES (20), (21), (22), (23): Xaa is A or G or is absent
XGXSRVVMNEYQKYXXXXXXXXXIYLVSIPSLKTPAXXPKP

SEQ ID NO: 16694 - protein, 35 aa, Artificial Sequence
  Non-cyclic GFR-binding peptide
  MOD_RES (35), (35): Xaa is C or S
  MOD_RES (13), (14), (15), (16), (17): Xaa is A or G
  MOD_RES (18), (19), (20), (21): Xaa is A or G or is absent
EAVSMGEEYQKYXXXXXXXXXIYLVSIPSLKTPVX

SEQ ID NO: 16695 - protein, 33 aa, Artificial Sequence
  Non-cyclic GFR-binding peptide
  MOD_RES (1), (32), (33): Xaa is C or S
XSRVIMEYQKYVKPKRGVIYLISIPSLAQPVXX

SEQ ID NO: 16696 - protein, 32 aa, Artificial Sequence
  Non-cyclic GFR-binding peptide
  MOD_RES (11), (12), (13), (14), (15): Xaa is A or G
  MOD_RES (16), (17), (18), (19): Xaa is A or G or is absent
SKVIMEYQKYXXXXXXXXXIYLISIPSLDQSV

SEQ ID NO: 16697 - protein, 39 aa, Artificial Sequence
  Non-cyclic GFR-binding peptide
  MOD_RES (34), (35): Xaa is C or S
  MOD_RES (12), (13), (14), (15), (16): Xaa is A or G
  MOD_RES (17), (18), (19), (20): Xaa is A or G or is absent
AKVVMNEYKFKXXXXXXXXXLYLVSIPELKTPAXXAKPV

SEQ ID NO: 16698 - protein, 38 aa, Artificial Sequence
  Non-cyclic GFR-binding peptide
  MOD_RES (2), (4), (38): Xaa is C or S
  MOD_RES (16), (17), (18), (19), (20): Xaa is A or G
  MOD_RES (21), (22), (23), (24): Xaa is A or G or is absent
RXGXGEVVMDEYQKYXXXXXXXXXIYLMSIPSLETPVX

SEQ ID NO: 16699 - protein, 37 aa, Artificial Sequence
  Non-cyclic GFR-binding peptide
  MOD_RES (1), (3), (35), (36): Xaa is C or S
XGXARVVMNEYQKYIVNSSDDIYLVSIPSLQTPAXXP

SEQ ID NO: 16700 - protein, 39 aa, Artificial Sequence
  Non-cyclic GFR-binding peptide
  MOD_RES (1), (35), (36): Xaa is C or S
  MOD_RES (13), (14), (15), (16), (17): Xaa is A or G
  MOD_RES (18), (19), (20), (21): Xaa is A or G or is absent
XARVVMNEYKFKXXXXXXXXXLYLVSIPELQTPAXXPKP

SEQ ID NO: 16701 - protein, 33 aa, Artificial Sequence
  Non-cyclic GFR-binding peptide
  MOD_RES (31), (32): Xaa is C or S
SRVIMEYKFKVKPKRGVLYLISIPELAQPVXXP

SEQ ID NO: 16702 - protein, 36 aa, Artificial Sequence
  Non-cyclic GFR-binding peptide
  MOD_RES (2), (4), (35), (36): Xaa is C or S
SXKXSKVVMEYKFKVKPTRGVLYLISIPELDQPVXX

SEQ ID NO: 16703 - protein, 32 aa, Artificial Sequence
  Non-cyclic GFR-binding peptide
  MOD_RES (11), (12), (13), (14), (15): Xaa is A or G
  MOD_RES (16), (17), (18), (19): Xaa is A or G or is absent
EVVMDYHYKLXXXXXXXXXKYLISIPSLRAPV

SEQ ID NO: 16704 - protein, 40 aa, Artificial Sequence
  Non-cyclic GFR-binding peptide
  MOD_RES (34), (35): Xaa is C or S
  MOD_RES (12), (13), (14), (15), (16): Xaa is A or G
  MOD_RES (17), (18), (19), (20): Xaa is A or G or is absent
AEVVMDYHYKLXXXXXXXXXKYLISIPSLRAPVXXSAPAA

SEQ ID NO: 16705 - protein, 37 aa, Artificial Sequence
  Non-cyclic GFR-binding peptide
  MOD_RES (1), (34), (35): Xaa is C or S
  MOD_RES (12), (13), (14), (15), (16): Xaa is A or G
  MOD_RES (17), (18), (19), (20): Xaa is A or G or is absent
XSKVIMEYKFKXXXXXXXXXLYLISIPELDQSVXXPS

SEQ ID NO: 16706 - protein, 35 aa, Artificial Sequence
  Non-cyclic GFR-binding peptide
  MOD_RES (2), (4), (35): Xaa is C or S
SXKXSRVIMEYKFKVKPKRGVLYLISIPELAQPVX

SEQ ID NO: 16707 - protein, 39 aa, Artificial Sequence
  Non-cyclic GFR-binding peptide
  MOD_RES (2), (35), (36): Xaa is C or S
  MOD_RES (13), (14), (15), (16), (17): Xaa is A or G
  MOD_RES (18), (19), (20), (21): Xaa is A or G or is absent
KXSKVIMEYQKYXXXXXXXXXIYLISIPSLDQSVXXPSA

SEQ ID NO: 16708 - protein, 31 aa, Artificial Sequence
  Non-cyclic GFR-binding peptide
AKVVMNEYQKYIVNNSSDIYLVSIPSLKTPA

SEQ ID NO: 16709 - protein, 33 aa, Artificial Sequence
  Non-cyclic GFR-binding peptide
  MOD_RES (33), (33): Xaa is C or S
  MOD_RES (11), (12), (13), (14), (15): Xaa is A or G
  MOD_RES (16), (17), (18), (19): Xaa is A or G or is absent
EVVMDEYKFKXXXXXXXXXLYLMSIPELETPVX

SEQ ID NO: 16710 - protein, 37 aa, Artificial Sequence
  Non-cyclic GFR-binding peptide
  MOD_RES (1), (3), (35), (36): Xaa is C or S
XGXAKVVMNEYKFKIVNNSSDLYLVSIPELKTPAXXA

SEQ ID NO: 16711 - protein, 41 aa, Artificial Sequence
  Non-cyclic GFR-binding peptide
  MOD_RES (2), (4), (35), (36): Xaa is C or S
SXKXSRVIMEYKFKVKPKRGVLYLISIPELAQPVXXPAASA

SEQ ID NO: 16712 - protein, 41 aa, Artificial Sequence
  Non-cyclic GFR-binding peptide
  MOD_RES (1), (3), (36), (37): Xaa is C or S
  MOD_RES (14), (15), (16), (17), (18): Xaa is A or G
  MOD_RES (19), (20), (21), (22): Xaa is A or G or is absent
XKXSRVIMEYQKYXXXXXXXXXIYLISIPSLAQPVXXPAAS

SEQ ID NO: 16713 - protein, 42 aa, Artificial Sequence
  Non-cyclic GFR-binding peptide
  MOD_RES (2), (4), (38), (39): Xaa is C or S
  MOD_RES (16), (17), (18), (19), (20): Xaa is A or G
  MOD_RES (21), (22), (23), (24): Xaa is A or G or is absent
RXGXGEVVMEEYQKYXXXXXXXXXIYLMSIPSLETPVXXAKP

SEQ ID NO: 16714 - protein, 34 aa, Artificial Sequence
  Non-cyclic GFR-binding peptide
  MOD_RES (1), (1): Xaa is C or S
  MOD_RES (13), (14), (15), (16), (17): Xaa is A or G
  MOD_RES (18), (19), (20), (21): Xaa is A or G or is absent
XESVAMGYHYKLXXXXXXXXXKYLISIPSLKTPV

SEQ ID NO: 16715 - protein, 38 aa, Artificial Sequence
  Non-cyclic GFR-binding peptide
  MOD_RES (2), (34), (35): Xaa is C or S
GXAEVVMDYHYKLVVNNAADKYLISIPSLRAPVXXSAP

SEQ ID NO: 16716 - protein, 36 aa, Artificial Sequence
  Non-cyclic GFR-binding peptide
  MOD_RES (2), (2): Xaa is C or S
  MOD_RES (15), (16), (17), (18), (19): Xaa is A or G
  MOD_RES (20), (21), (22), (23): Xaa is A or G or is absent
GXEAVSMGEEYKFKXXXXXXXXXLYLVSIPELKTPV

SEQ ID NO: 16717 - protein, 35 aa, Artificial Sequence
  Non-cyclic GFR-binding peptide
  MOD_RES (1), (1): Xaa is C or S
  MOD_RES (14), (15), (16), (17), (18): Xaa is A or G
  MOD_RES (19), (20), (21), (22): Xaa is A or G or is absent
XEAVSMGEEYQKYXXXXXXXXXIYLVSIPSLKTPV

SEQ ID NO: 16718 - protein, 39 aa, Artificial Sequence
  Non-cyclic GFR-binding peptide
  MOD_RES (2), (4), (36), (37): Xaa is C or S
HXGXSRVVMNEYKFKIVNSSDDLYLVSIPELKTPAXXPK

SEQ ID NO: 16719 - protein, 39 aa, Artificial Sequence
  Non-cyclic GFR-binding peptide
  MOD_RES (2), (36), (37): Xaa is C or S
  MOD_RES (14), (15), (16), (17), (18): Xaa is A or G
  MOD_RES (19), (20), (21), (22): Xaa is A or G or is absent
GXESVAMGYHYKLXXXXXXXXXKYLISIPSLKTPVXXAK

SEQ ID NO: 16720 - protein, 35 aa, Artificial Sequence
  Non-cyclic GFR-binding peptide
  MOD_RES (2), (35): Xaa is C or S
  MOD_RES (13), (14), (15), (16), (17): Xaa is A or G
  MOD_RES (18), (19), (20), (21): Xaa is A or G or is absent
KXSKVVMEYKFKXXXXXXXXXLYLISIPELDQPVX

SEQ ID NO: 16721 - protein, 36 aa, Artificial Sequence
  Non-cyclic GFR-binding peptide
  MOD_RES (1), (32), (33): Xaa is C or S
XSKVIMEYKFKIKPTKGILYLISIPELDQSVXXPSA

SEQ ID NO: 16722 - protein, 41 aa, Artificial Sequence
  Non-cyclic GFR-binding peptide
  MOD_RES (1), (36), (37): Xaa is C or S
  MOD_RES (14), (15), (16), (17), (18): Xaa is A or G
  MOD_RES (19), (20), (21), (22): Xaa is A or G or is absent
XEAVSMGEEYQKYXXXXXXXXXIYLVSIPSLKTPVXXAKGV

SEQ ID NO: 16723 - protein, 41 aa, Artificial Sequence
  Non-cyclic GFR-binding peptide
  MOD_RES (1), (3), (35), (36): Xaa is C or S
XGXAKVVMNEYKFKIVNNSSDLYLVSIPELKTPAXXAKPVA

SEQ ID NO: 16724 - protein, 37 aa, Artificial Sequence
  Non-cyclic GFR-binding peptide
  MOD_RES (31), (32): Xaa is C or S
EVVMEEYKFKVVKDYEDLYLMSIPELETPVXXAKPIS

SEQ ID NO: 16725 - protein, 40 aa, Artificial Sequence
  Non-cyclic GFR-binding peptide
  MOD_RES (1), (3), (35), (36): Xaa is C or S
XGXAEVVMDEYKFKVVNNAADLYLISIPELRAPVXXSAPA

SEQ ID NO: 16726 - protein, 39 aa, Artificial Sequence
  Non-cyclic GFR-binding peptide
  MOD_RES (2), (34), (35): Xaa is C or S
GXSRVVMNEYKFKIVNSSDDLYLVSIPELKTPAXXPKPV

SEQ ID NO: 16727 - protein, 40 aa, Artificial Sequence
  Non-cyclic GFR-binding peptide
  MOD_RES (2), (4), (36), (37): Xaa is C or S
HXGXARVVMNEYQKYIVNSSDDIYLVSIPSLQTPAXXPKP

SEQ ID NO: 16728 - protein, 37 aa, Artificial Sequence
  Non-cyclic GFR-binding peptide
  MOD_RES (1), (35), (36): Xaa is C or S
  MOD_RES (13), (14), (15), (16), (17): Xaa is A or G
  MOD_RES (18), (19), (20), (21): Xaa is A or G or is absent
XAEVVMDEYKFKXXXXXXXXXLYLISIPELRAPVXXS

SEQ ID NO: 16729 - protein, 35 aa, Artificial Sequence
  Non-cyclic GFR-binding peptide
  MOD_RES (2), (34), (35): Xaa is C or S
GXAEVVMDYHYKLVVNNAADKYLISIPSLRAPVXX

SEQ ID NO: 16730 - protein, 35 aa, Artificial Sequence
  Non-cyclic GFR-binding peptide
  MOD_RES (31), (32): Xaa is C or S
EVVMDYHYKLVVNNAADKYLISIPSLRAPVXXSAP

SEQ ID NO: 16731 - protein, 37 aa, Artificial Sequence
  Non-cyclic GFR-binding peptide
  MOD_RES (1), (33): Xaa is C or S
XSRVVMNEYKFKIVNSSDDLYLVSIPELKTPAXTPKT

SEQ ID NO: 16732 - protein, 38 aa, Artificial Sequence
  Non-cyclic GFR-binding peptide
  MOD_RES (1), (3), (35), (36): Xaa is C or S
XGXESVAMGEYQKYYTVVGKDIYLISIPSLKTPVXXAK

SEQ ID NO: 16733 - protein, 43 aa, Artificial Sequence
  Non-cyclic GFR-binding peptide
  MOD_RES (2), (4), (38), (39): Xaa is C or S
  MOD_RES (16), (17), (18), (19), (20): Xaa is A or G
  MOD_RES (21), (22), (23), (24): Xaa is A or G or is absent
HXGXAKVVMNEYKFKXXXXXXXXXLYLVSIPELKTPAXXAKPV

SEQ ID NO: 16734 - protein, 37 aa, Artificial Sequence
  Non-cyclic GFR-binding peptide
  MOD_RES (1), (3), (35), (36): Xaa is C or S
XGXESVAMGYHYKLYTVVGKDKYLISIPSLKTPVXXA

SEQ ID NO: 16735 - protein, 36 aa, Artificial Sequence
  Non-cyclic GFR-binding peptide
  MOD_RES (1), (3): Xaa is C or S
  MOD_RES (15), (16), (17), (18), (19): Xaa is A or G
  MOD_RES (20), (21), (22), (23): Xaa is A or G or is absent
XGXAKVVMNEYQKYXXXXXXXXXIYLVSIPSLKTPA

SEQ ID NO: 16736 - protein, 35 aa, Artificial Sequence
  Non-cyclic GFR-binding peptide
  MOD_RES (31), (31): Xaa is C or S
RVVMNEYQKYIVNSSDDIYLVSIPSLKTPAXTPKT

SEQ ID NO: 16737 - protein, 37 aa, Artificial Sequence
  Non-cyclic GFR-binding peptide
  MOD_RES (34), (35): Xaa is C or S
  MOD_RES (12), (13), (14), (15), (16): Xaa is A or G
  MOD_RES (17), (18), (19), (20): Xaa is A or G or is absent
AEVVMDYHYKLXXXXXXXXXKYLISIPSLRAPVXXSA

SEQ ID NO: 16738 - protein, 34 aa, Artificial Sequence
  Non-cyclic GFR-binding peptide
  MOD_RES (33), (33): Xaa is C or S
  MOD_RES (11), (12), (13), (14), (15): Xaa is A or G
  MOD_RES (16), (17), (18), (19): Xaa is A or G or is absent
RVVMNEYKFKXXXXXXXXXLYLVSIPELKTPAXT

SEQ ID NO: 16739 - protein, 38 aa, Artificial Sequence
  Non-cyclic GFR-binding peptide
  MOD_RES (33), (34): Xaa is C or S
  MOD_RES (11), (12), (13), (14), (15): Xaa is A or G
  MOD_RES (16), (17), (18), (19): Xaa is A or G or is absent
EVVMEEYKFKXXXXXXXXXLYLMSIPELETPVXXAKPI

SEQ ID NO: 16740 - protein, 39 aa, Artificial Sequence
  Non-cyclic GFR-binding peptide
  MOD_RES (34), (35): Xaa is C or S
  MOD_RES (12), (13), (14), (15), (16): Xaa is A or G
  MOD_RES (17), (18), (19), (20): Xaa is A or G or is absent
GEVVMDEYQKYXXXXXXXXXIYLMSIPSLETPVXXAKPI

SEQ ID NO: 16741 - protein, 40 aa, Artificial Sequence
  Non-cyclic GFR-binding peptide
  MOD_RES (1), (35), (36): Xaa is C or S
  MOD_RES (13), (14), (15), (16), (17): Xaa is A or G
  MOD_RES (18), (19), (20), (21): Xaa is A or G or is absent
XGEVVMEEYKFKXXXXXXXXXLYLMSIPELETPVXXAKPI

SEQ ID NO: 16742 - protein, 40 aa, Artificial Sequence
  Non-cyclic GFR-binding peptide
  MOD_RES (1), (3), (35), (36): Xaa is C or S
XGXAKVVMNEYKFKIVNNSSDLYLVSIPELKTPAXXAKPV

SEQ ID NO: 16743 - protein, 36 aa, Artificial Sequence
  Non-cyclic GFR-binding peptide
  MOD_RES (31), (32): Xaa is C or S
SKVIMEYQKYIKPTKGIIYLISIPSLDQSVXXPSAS

SEQ ID NO: 16744 - protein, 40 aa, Artificial Sequence
  Non-cyclic GFR-binding peptide
  MOD_RES (2), (36): Xaa is C or S
  MOD_RES (14), (15), (16), (17), (18): Xaa is A or G
  MOD_RES (19), (20), (21), (22): Xaa is A or G or is absent
GXSRVVMNEYKFKXXXXXXXXXLYLVSIPELKTPAXTPKT

SEQ ID NO: 16745 - protein, 40 aa, Artificial Sequence
  Non-cyclic GFR-binding peptide
  MOD_RES (2), (4), (38), (39): Xaa is C or S
  MOD_RES (16), (17), (18), (19), (20): Xaa is A or G
  MOD_RES (21), (22), (23), (24): Xaa is A or G or is absent
HXGXSRVVMNEYKFKXXXXXXXXXLYLVSIPELKTPAXXP

SEQ ID NO: 16746 - protein, 37 aa, Artificial Sequence
  Non-cyclic GFR-binding peptide
  MOD_RES (33), (34): Xaa is C or S
  MOD_RES (11), (12), (13), (14), (15): Xaa is A or G
  MOD_RES (16), (17), (18), (19): Xaa is A or G or is absent
SKVIMEYQKYXXXXXXXXXIYLISIPSLDQSVXXPSA

SEQ ID NO: 16747 - protein, 42 aa, Artificial Sequence
  Non-cyclic GFR-binding peptide
  MOD_RES (2), (4), (36), (37): Xaa is C or S
RXGXESVAMGYHYKLYTVVGKDKYLISIPSLKTPVXXAKSAK

SEQ ID NO: 16748 - protein, 41 aa, Artificial Sequence
  Non-cyclic GFR-binding peptide
  MOD_RES (2), (35), (36): Xaa is C or S
GXEAVSMGEEYQKYTPVGMDDIYLVSIPSLKTPVXXAKGVK

SEQ ID NO: 16749 - protein, 32 aa, Artificial Sequence
  Non-cyclic GFR-binding peptide
  MOD_RES (1), (1): Xaa is C or S
XAEVVMDYHYKLVVNNAADKYLISIPSLRAPV

SEQ ID NO: 16750 - protein, 39 aa, Artificial Sequence
  Non-cyclic GFR-binding peptide
  MOD_RES (1), (3), (37), (38): Xaa is C or S
  MOD_RES (15), (16), (17), (18), (19): Xaa is A or G
  MOD_RES (20), (21), (22), (23): Xaa is A or G or is absent
XGXARVVMNEYKFKXXXXXXXXXLYLVSIPELQTPAXXP

SEQ ID NO: 16751 - protein, 38 aa, Artificial Sequence
  Non-cyclic GFR-binding peptide
  MOD_RES (1), (3), (37), (38): Xaa is C or S
  MOD_RES (15), (16), (17), (18), (19): Xaa is A or G
  MOD_RES (20), (21), (22), (23): Xaa is A or G or is absent
XGXESVAMGYHYKLXXXXXXXXXKYLISIPSLKTPVXX

SEQ ID NO: 16752 - protein, 39 aa, Artificial Sequence
  Non-cyclic GFR-binding peptide
  MOD_RES (2), (33), (34): Xaa is C or S
KXSKVVMEYQKYVKPTRGVIYLISIPSLDQPVXXPSASA

SEQ ID NO: 16753 - protein, 38 aa, Artificial Sequence
  Non-cyclic GFR-binding peptide
  MOD_RES (2), (36), (37): Xaa is C or S
  MOD_RES (14), (15), (16), (17), (18): Xaa is A or G
  MOD_RES (19), (20), (21), (22): Xaa is A or G or is absent
GXSRVVMNEYQKYXXXXXXXXXIYLVSIPSLKTPAXXP

SEQ ID NO: 16754 - protein, 40 aa, Artificial Sequence
  Non-cyclic GFR-binding peptide
  MOD_RES (1), (3), (37): Xaa is C or S
  MOD_RES (15), (16), (17), (18), (19): Xaa is A or G
  MOD_RES (20), (21), (22), (23): Xaa is A or G or is absent
XGXSRVVMNEYQKYXXXXXXXXXIYLVSIPSLKTPAXTPK

SEQ ID NO: 16755 - protein, 38 aa, Artificial Sequence
  Non-cyclic GFR-binding peptide
  MOD_RES (2), (4): Xaa is C or S
  MOD_RES (17), (18), (19), (20), (21): Xaa is A or G
  MOD_RES (22), (23), (24), (25): Xaa is A or G or is absent
RXGXEAVSMGEEYKFKXXXXXXXXXLYLVSIPELKTPV

SEQ ID NO: 16756 - protein, 38 aa, Artificial Sequence
  Non-cyclic GFR-binding peptide
  MOD_RES (33), (34): Xaa is C or S
  MOD_RES (11), (12), (13), (14), (15): Xaa is A or G
  MOD_RES (16), (17), (18), (19): Xaa is A or G or is absent
SVAMGRYKKLXXXXXXXXXFYLISIANLKTPVXXAKSA

SEQ ID NO: 16757 - protein, 39 aa, Artificial Sequence
  Non-cyclic GFR-binding peptide
  MOD_RES (2), (33), (34): Xaa is C or S
KXSKVVMEYKFKVKPTRGVLYLISIPELDQPVXXPSASA

SEQ ID NO: 16758 - protein, 40 aa, Artificial Sequence
  Non-cyclic GFR-binding peptide
  MOD_RES (2), (34), (35): Xaa is C or S
GXGEVVMDEYQKYVVKENEDIYLMSIPSLETPVXXAKPIK

SEQ ID NO: 16759 - protein, 38 aa, Artificial Sequence
  Non-cyclic GFR-binding peptide
  MOD_RES (1), (32), (33): Xaa is C or S
XSKVVMEYQKYVKPTRGVIYLISIPSLDQPVXXPSASA

SEQ ID NO: 16760 - protein, 38 aa, Artificial Sequence
  Non-cyclic GFR-binding peptide
  MOD_RES (1), (35), (36): Xaa is C or S
  MOD_RES (13), (14), (15), (16), (17): Xaa is A or G
  MOD_RES (18), (19), (20), (21): Xaa is A or G or is absent
XESVAMGRYKKLXXXXXXXXXFYLISIANLKTPVXXAK

SEQ ID NO: 16761 - protein, 34 aa, Artificial Sequence
  Non-cyclic GFR-binding peptide
  MOD_RES (31), (32): Xaa is C or S
SVAMGYHYKLYTVVGKDKYLISIPSLKTPVXXAK

SEQ ID NO: 16762 - protein, 40 aa, Artificial Sequence
  Non-cyclic GFR-binding peptide
  MOD_RES (2), (4), (36): Xaa is C or S
HXGXSRVVMNEYQKYIVNSSDDIYLVSIPSLKTPAXTPKT

SEQ ID NO: 16763 - protein, 36 aa, Artificial Sequence
  Non-cyclic GFR-binding peptide
  MOD_RES (2), (36): Xaa is C or S
  MOD_RES (14), (15), (16), (17), (18): Xaa is A or G
  MOD_RES (19), (20), (21), (22): Xaa is A or G or is absent
GXSRVVMNEYKFKXXXXXXXXXLYLVSIPELKTPAX

SEQ ID NO: 16764 - protein, 35 aa, Artificial Sequence
  Non-cyclic GFR-binding peptide
  MOD_RES (34), (35): Xaa is C or S
  MOD_RES (12), (13), (14), (15), (16): Xaa is A or G
  MOD_RES (17), (18), (19), (20): Xaa is A or G or is absent
AEVVMDYHYKLXXXXXXXXXKYLISIPSLRAPVXX

SEQ ID NO: 16765 - protein, 31 aa, Artificial Sequence
  Non-cyclic GFR-binding peptide
ESVAMGYHYKLYTVVGKDKYLISIPSLKTPV

SEQ ID NO: 16766 - protein, 34 aa, Artificial Sequence
  Non-cyclic GFR-binding peptide
  MOD_RES (2), (4): Xaa is C or S
SXKXSRVIMEYQKYVKPKRGVIYLISIPSLAQPV

SEQ ID NO: 16767 - protein, 38 aa, Artificial Sequence
  Non-cyclic GFR-binding peptide
  MOD_RES (34), (35): Xaa is C or S
  MOD_RES (12), (13), (14), (15), (16): Xaa is A or G
  MOD_RES (17), (18), (19), (20): Xaa is A or G or is absent
ARVVMNEYKFKXXXXXXXXXLYLVSIPELQTPAXXPKP

SEQ ID NO: 16768 - protein, 44 aa, Artificial Sequence
  Non-cyclic GFR-binding peptide
  MOD_RES (2), (4), (38), (39): Xaa is C or S
  MOD_RES (16), (17), (18), (19), (20): Xaa is A or G
  MOD_RES (21), (22), (23), (24): Xaa is A or G or is absent
RXGXGEVVMEEYQKYXXXXXXXXXIYLMSIPSLETPVXXAKPIS

SEQ ID NO: 16769 - protein, 38 aa, Artificial Sequence
  Non-cyclic GFR-binding peptide
  MOD_RES (2), (34), (35): Xaa is C or S
GXARVVMNEYQKYIVNSSDDIYLVSIPSLQTPAXXPKP

SEQ ID NO: 16770 - protein, 36 aa, Artificial Sequence
  Non-cyclic GFR-binding peptide
  MOD_RES (1), (3), (35), (36): Xaa is C or S
XGXAEVVMDYHYKLVVNNAADKYLISIPSLRAPVXX

SEQ ID NO: 16771 - protein, 43 aa, Artificial Sequence
  Non-cyclic GFR-binding peptide
  MOD_RES (1), (3), (37), (38): Xaa is C or S
  MOD_RES (15), (16), (17), (18), (19): Xaa is A or G
  MOD_RES (20), (21), (22), (23): Xaa is A or G or is absent
XGXESVAMGEYQKYXXXXXXXXXIYLISIPSLKTPVXXAKSAK

SEQ ID NO: 16772 - protein, 38 aa, Artificial Sequence
  Non-cyclic GFR-binding peptide
  MOD_RES (2), (4), (36), (37): Xaa is C or S
RXGXAEVVMDYHYKLVVNNAADKYLISIPSLRAPVXXS

SEQ ID NO: 16773 - protein, 42 aa, Artificial Sequence
  Non-cyclic GFR-binding peptide
  MOD_RES (2), (4), (38), (39): Xaa is C or S
  MOD_RES (16), (17), (18), (19), (20): Xaa is A or G
  MOD_RES (21), (22), (23), (24): Xaa is A or G or is absent
RXGXAEVVMDEYKFKXXXXXXXXXLYLISIPELRAPVXXSAP

SEQ ID NO: 16774 - protein, 31 aa, Artificial Sequence
  Non-cyclic GFR-binding peptide
  MOD_RES (1), (1): Xaa is C or S
XSKVVMEYKFKVKPTRGVLYLISIPELDQPV

SEQ ID NO: 16775 - protein, 34 aa, Artificial Sequence
  Non-cyclic GFR-binding peptide
  MOD_RES (2), (2): Xaa is C or S
GXEAVSMGEEYQKYTPVGMDDIYLVSIPSLKTPV

SEQ ID NO: 16776 - protein, 35 aa, Artificial Sequence
  Non-cyclic GFR-binding peptide
  MOD_RES (2), (34), (35): Xaa is C or S
GXGEVVMEEYQKYVVKDYEDIYLMSIPSLETPVXX

SEQ ID NO: 16777 - protein, 38 aa, Artificial Sequence
  Non-cyclic GFR-binding peptide
  MOD_RES (34), (35): Xaa is C or S
  MOD_RES (12), (13), (14), (15), (16): Xaa is A or G
  MOD_RES (17), (18), (19), (20): Xaa is A or G or is absent
GEVVMDEYQKYXXXXXXXXXIYLMSIPSLETPVXXAKP

SEQ ID NO: 16778 - protein, 37 aa, Artificial Sequence
  Non-cyclic GFR-binding peptide
  MOD_RES (1), (3), (37): Xaa is C or S
  MOD_RES (15), (16), (17), (18), (19): Xaa is A or G
  MOD_RES (20), (21), (22), (23): Xaa is A or G or is absent
XGXAEVVMDEYKFKXXXXXXXXXLYLISIPELRAPVX

SEQ ID NO: 16779 - protein, 33 aa, Artificial Sequence
  Non-cyclic GFR-binding peptide
  MOD_RES (2), (33): Xaa is C or S
KXSKVIMEYQKYIKPTKGIIYLISIPSLDQSVX

SEQ ID NO: 16780 - protein, 38 aa, Artificial Sequence
  Non-cyclic GFR-binding peptide
  MOD_RES (1), (35), (36): Xaa is C or S
  MOD_RES (13), (14), (15), (16), (17): Xaa is A or G
  MOD_RES (18), (19), (20), (21): Xaa is A or G or is absent
XSRVVMNEYQKYXXXXXXXXXIYLVSIPSLKTPAXXPK

SEQ ID NO: 16781 - protein, 40 aa, Artificial Sequence
  Non-cyclic GFR-binding peptide
  MOD_RES (2), (4), (38), (39): Xaa is C or S
  MOD_RES (16), (17), (18), (19), (20): Xaa is A or G
  MOD_RES (21), (22), (23), (24): Xaa is A or G or is absent
RXGXGEVVMDEYKFKXXXXXXXXXLYLMSIPELETPVXXA

SEQ ID NO: 16782 - protein, 40 aa, Artificial Sequence
  Non-cyclic GFR-binding peptide
  MOD_RES (2), (4), (39), (40): Xaa is C or S
  MOD_RES (17), (18), (19), (20), (21): Xaa is A or G
  MOD_RES (22), (23), (24), (25): Xaa is A or G or is absent
RXGXEAVSMGEEYKFKXXXXXXXXXLYLVSIPELKTPVXX

SEQ ID NO: 16783 - protein, 36 aa, Artificial Sequence
  Non-cyclic GFR-binding peptide
  MOD_RES (32), (33): Xaa is C or S
GEVVMEEYQKYVVKDYEDIYLMSIPSLETPVXXAKP

SEQ ID NO: 16784 - protein, 36 aa, Artificial Sequence
  Non-cyclic GFR-binding peptide
  MOD_RES (31), (32): Xaa is C or S
EVVMDYHYKLVVNNAADKYLISIPSLRAPVXXSAPA

SEQ ID NO: 16785 - protein, 38 aa, Artificial Sequence
  Non-cyclic GFR-binding peptide
  MOD_RES (1), (35), (36): Xaa is C or S
  MOD_RES (13), (14), (15), (16), (17): Xaa is A or G
  MOD_RES (18), (19), (20), (21): Xaa is A or G or is absent
XAKVVMNEYKFKXXXXXXXXXLYLVSIPELKTPAXXAK

SEQ ID NO: 16786 - protein, 37 aa, Artificial Sequence
  Non-cyclic GFR-binding peptide
  MOD_RES (33), (34): Xaa is C or S
  MOD_RES (11), (12), (13), (14), (15): Xaa is A or G
  MOD_RES (16), (17), (18), (19): Xaa is A or G or is absent
RVVMNEYQKYXXXXXXXXXIYLVSIPSLQTPAXXPKP

SEQ ID NO: 16787 - protein, 34 aa, Artificial Sequence
  Non-cyclic GFR-binding peptide
  MOD_RES (2), (34): Xaa is C or S
GXAEVVMDEYKFKVVNNAADLYLISIPELRAPVX

SEQ ID NO: 16788 - protein, 35 aa, Artificial Sequence
  Non-cyclic GFR-binding peptide
  MOD_RES (2), (4): Xaa is C or S
HXGXSRVVMNEYKFKIVNSSDDLYLVSIPELKTPA

SEQ ID NO: 16789 - protein, 33 aa, Artificial Sequence
  Non-cyclic GFR-binding peptide
  MOD_RES (2), (2): Xaa is C or S
GXESVAMGYHYKLYTVVGKDKYLISIPSLKTPV

SEQ ID NO: 16790 - protein, 36 aa, Artificial Sequence
  Non-cyclic GFR-binding peptide
  MOD_RES (32), (33): Xaa is C or S
GEVVMDEYKFKVVKENEDLYLMSIPELETPVXXAKP

SEQ ID NO: 16791 - protein, 37 aa, Artificial Sequence
  Non-cyclic GFR-binding peptide
  MOD_RES (34), (35): Xaa is C or S
  MOD_RES (12), (13), (14), (15), (16): Xaa is A or G
  MOD_RES (17), (18), (19), (20): Xaa is A or G or is absent
GEVVMDEYKFKXXXXXXXXXLYLMSIPELETPVXXAK

SEQ ID NO: 16792 - protein, 40 aa, Artificial Sequence
  Non-cyclic GFR-binding peptide
  MOD_RES (1), (3), (37): Xaa is C or S
  MOD_RES (15), (16), (17), (18), (19): Xaa is A or G
  MOD_RES (20), (21), (22), (23): Xaa is A or G or is absent
XGXSRVVMNEYKFKXXXXXXXXXLYLVSIPELKTPAXTPK

SEQ ID NO: 16793 - protein, 33 aa, Artificial Sequence
  Non-cyclic GFR-binding peptide
  MOD_RES (33), (33): Xaa is C or S
  MOD_RES (11), (12), (13), (14), (15): Xaa is A or G
  MOD_RES (16), (17), (18), (19): Xaa is A or G or is absent
SVAMGYHYKLXXXXXXXXXKYLISIPSLKTPVX

SEQ ID NO: 16794 - protein, 36 aa, Artificial Sequence
  Non-cyclic GFR-binding peptide
  MOD_RES (2), (4): Xaa is C or S
  MOD_RES (15), (16), (17), (18), (19): Xaa is A or G
  MOD_RES (20), (21), (22), (23): Xaa is A or G or is absent
SXKXSRVIMEYKFKXXXXXXXXXLYLISIPELAQPV

SEQ ID NO: 16795 - protein, 36 aa, Artificial Sequence
  Non-cyclic GFR-binding peptide
  MOD_RES (33), (34): Xaa is C or S
  MOD_RES (11), (12), (13), (14), (15): Xaa is A or G
  MOD_RES (16), (17), (18), (19): Xaa is A or G or is absent
SKVIMEYKFKXXXXXXXXXLYLISIPELDQSVXXPS

SEQ ID NO: 16796 - protein, 39 aa, Artificial Sequence
  Non-cyclic GFR-binding peptide
  MOD_RES (1), (36), (37): Xaa is C or S
  MOD_RES (14), (15), (16), (17), (18): Xaa is A or G
  MOD_RES (19), (20), (21), (22): Xaa is A or G or is absent
XEAVSMGEEYKFKXXXXXXXXXLYLVSIPELKTPVXXAK

SEQ ID NO: 16797 - protein, 35 aa, Artificial Sequence
  Non-cyclic GFR-binding peptide
  MOD_RES (2), (2): Xaa is C or S
  MOD_RES (14), (15), (16), (17), (18): Xaa is A or G
  MOD_RES (19), (20), (21), (22): Xaa is A or G or is absent
GXESVAMGEYQKYXXXXXXXXXIYLISIPSLKTPV

SEQ ID NO: 16798 - protein, 42 aa, Artificial Sequence
  Non-cyclic GFR-binding peptide
  MOD_RES (1), (3), (36), (37): Xaa is C or S
  MOD_RES (14), (15), (16), (17), (18): Xaa is A or G
  MOD_RES (19), (20), (21), (22): Xaa is A or G or is absent
XKXSKVIMEYKFKXXXXXXXXXLYLISIPELDQSVXXPSASA

SEQ ID NO: 16799 - protein, 30 aa, Artificial Sequence
  Non-cyclic GFR-binding peptide
EVVMEEYQKYVVKDYEDIYLMSIPSLETPV

SEQ ID NO: 16800 - protein, 37 aa, Artificial Sequence
  Non-cyclic GFR-binding peptide
  MOD_RES (2), (34), (35): Xaa is C or S
GXARVVMNEYQKYIVNSSDDIYLVSIPSLQTPAXXPK

SEQ ID NO: 16801 - protein, 39 aa, Artificial Sequence
  Non-cyclic GFR-binding peptide
  MOD_RES (2), (4), (35), (36): Xaa is C or S
SXKXSRVIMEYKFKVKPKRGVLYLISIPELAQPVXXPAA

SEQ ID NO: 16802 - protein, 35 aa, Artificial Sequence
  Non-cyclic GFR-binding peptide
  MOD_RES (1), (33), (34): Xaa is C or S
XSRVVMNEYKFKIVNSSDDLYLVSIPELKTPAXXP

SEQ ID NO: 16803 - protein, 37 aa, Artificial Sequence
  Non-cyclic GFR-binding peptide
  MOD_RES (35), (36): Xaa is C or S
  MOD_RES (13), (14), (15), (16), (17): Xaa is A or G
  MOD_RES (18), (19), (20), (21): Xaa is A or G or is absent
EAVSMGEEYKFKXXXXXXXXXLYLVSIPELKTPVXXA

SEQ ID NO: 16804 - protein, 40 aa, Artificial Sequence
  Non-cyclic GFR-binding peptide
  MOD_RES (2), (4), (38): Xaa is C or S
  MOD_RES (16), (17), (18), (19), (20): Xaa is A or G
  MOD_RES (21), (22), (23), (24): Xaa is A or G or is absent
HXGXSRVVMNEYQKYXXXXXXXXXIYLVSIPSLKTPAXTP

SEQ ID NO: 16805 - protein, 38 aa, Artificial Sequence
  Non-cyclic GFR-binding peptide
  MOD_RES (2), (35), (36): Xaa is C or S
  MOD_RES (13), (14), (15), (16), (17): Xaa is A or G
  MOD_RES (18), (19), (20), (21): Xaa is A or G or is absent
KXSRVIMEYQKYXXXXXXXXXIYLISIPSLAQPVXXPA

SEQ ID NO: 16806 - protein, 36 aa, Artificial Sequence
  Non-cyclic GFR-binding peptide
  MOD_RES (2), (36): Xaa is C or S
  MOD_RES (14), (15), (16), (17), (18): Xaa is A or G
  MOD_RES (19), (20), (21), (22): Xaa is A or G or is absent
GXAEVVMDEYKFKXXXXXXXXXLYLISIPELRAPVX

SEQ ID NO: 16807 - protein, 38 aa, Artificial Sequence
  Non-cyclic GFR-binding peptide
  MOD_RES (2), (4), (37), (38): Xaa is C or S
RXGXEAVSMGEEYKFKTPVGMDDLYLVSIPELKTPVXX

SEQ ID NO: 16808 - protein, 35 aa, Artificial Sequence
  Non-cyclic GFR-binding peptide
  MOD_RES (2), (4): Xaa is C or S
RXGXGEVVMDEYQKYVVKENEDIYLMSIPSLETPV

SEQ ID NO: 16809 - protein, 44 aa, Artificial Sequence
  Non-cyclic GFR-binding peptide
  MOD_RES (2), (4), (38): Xaa is C or S
  MOD_RES (16), (17), (18), (19), (20): Xaa is A or G
  MOD_RES (21), (22), (23), (24): Xaa is A or G or is absent
HXGXSRVVMNEYKFKXXXXXXXXXLYLVSIPELKTPAXTPKTVH

SEQ ID NO: 16810 - protein, 32 aa, Artificial Sequence
  Non-cyclic GFR-binding peptide
  MOD_RES (11), (12), (13), (14), (15): Xaa is A or G
  MOD_RES (16), (17), (18), (19): Xaa is A or G or is absent
SVAMGYHYKLXXXXXXXXXKYLISIPSLKTPV

SEQ ID NO: 16811 - protein, 32 aa, Artificial Sequence
  Non-cyclic GFR-binding peptide
  MOD_RES (1), (1): Xaa is C or S
XAEVVMDRYKKLVVNNAADFYLISIANLRAPV

SEQ ID NO: 16812 - protein, 40 aa, Artificial Sequence
  Non-cyclic GFR-binding peptide
  MOD_RES (2), (4), (37), (38): Xaa is C or S
  MOD_RES (15), (16), (17), (18), (19): Xaa is A or G
  MOD_RES (20), (21), (22), (23): Xaa is A or G or is absent
SXKXSRVIMEYKFKXXXXXXXXXLYLISIPELAQPVXXPA

SEQ ID NO: 16813 - protein, 37 aa, Artificial Sequence
  Non-cyclic GFR-binding peptide
  MOD_RES (32), (33): Xaa is C or S
AKVVMNEYKFKIVNNSSDLYLVSIPELKTPAXXAKPV

SEQ ID NO: 16814 - protein, 36 aa, Artificial Sequence
  Non-cyclic GFR-binding peptide
  MOD_RES (31), (32): Xaa is C or S
SVAMGEYQKYYTVVGKDIYLISIPSLKTPVXXAKSA

SEQ ID NO: 16815 - protein, 35 aa, Artificial Sequence
  Non-cyclic GFR-binding peptide
  MOD_RES (1), (35): Xaa is C or S
  MOD_RES (13), (14), (15), (16), (17): Xaa is A or G
  MOD_RES (18), (19), (20), (21): Xaa is A or G or is absent
XGEVVMDEYQKYXXXXXXXXXIYLMSIPSLETPVX

SEQ ID NO: 16816 - protein, 34 aa, Artificial Sequence
  Non-cyclic GFR-binding peptide
  MOD_RES (33), (34): Xaa is C or S
  MOD_RES (11), (12), (13), (14), (15): Xaa is A or G
  MOD_RES (16), (17), (18), (19): Xaa is A or G or is absent
SKVVMEYKFKXXXXXXXXXLYLISIPELDQPVXX

SEQ ID NO: 16817 - protein, 40 aa, Artificial Sequence
  Non-cyclic GFR-binding peptide
  MOD_RES (1), (35), (36): Xaa is C or S
  MOD_RES (13), (14), (15), (16), (17): Xaa is A or G
  MOD_RES (18), (19), (20), (21): Xaa is A or G or is absent
XESVAMGEYQKYXXXXXXXXXIYLISIPSLKTPVXXAKSA

SEQ ID NO: 16818 - protein, 39 aa, Artificial Sequence
  Non-cyclic GFR-binding peptide
  MOD_RES (2), (4), (38), (39): Xaa is C or S
  MOD_RES (16), (17), (18), (19), (20): Xaa is A or G
  MOD_RES (21), (22), (23), (24): Xaa is A or G or is absent
RXGXESVAMGYHYKLXXXXXXXXXKYLISIPSLKTPVXX

SEQ ID NO: 16819 - protein, 38 aa, Artificial Sequence
  Non-cyclic GFR-binding peptide
  MOD_RES (1), (3), (37), (38): Xaa is C or S
  MOD_RES (15), (16), (17), (18), (19): Xaa is A or G
  MOD_RES (20), (21), (22), (23): Xaa is A or G or is absent
XGXGEVVMDEYQKYXXXXXXXXXIYLMSIPSLETPVXX

SEQ ID NO: 16820 - protein, 32 aa, Artificial Sequence
  Non-cyclic GFR-binding peptide
  MOD_RES (11), (12), (13), (14), (15): Xaa is A or G
  MOD_RES (16), (17), (18), (19): Xaa is A or G or is absent
KVVMNEYQKYXXXXXXXXXIYLVSIPSLKTPA

SEQ ID NO: 16821 - protein, 36 aa, Artificial Sequence
  Non-cyclic GFR-binding peptide
  MOD_RES (2), (4), (36): Xaa is C or S
RXGXAEVVMDRYKKLVVNNAADFYLISIANLRAPVX

SEQ ID NO: 16822 - protein, 33 aa, Artificial Sequence
  Non-cyclic GFR-binding peptide
  MOD_RES (33), (33): Xaa is C or S
  MOD_RES (11), (12), (13), (14), (15): Xaa is A or G
  MOD_RES (16), (17), (18), (19): Xaa is A or G or is absent
KVVMNEYQKYXXXXXXXXXIYLVSIPSLKTPAX

SEQ ID NO: 16823 - protein, 35 aa, Artificial Sequence
  Non-cyclic GFR-binding peptide
  MOD_RES (1), (3), (35): Xaa is C or S
XGXAKVVMNEYQKYIVNNSSDIYLVSIPSLKTPAX

SEQ ID NO: 16824 - protein, 32 aa, Artificial Sequence
  Non-cyclic GFR-binding peptide
  MOD_RES (11), (12), (13), (14), (15): Xaa is A or G
  MOD_RES (16), (17), (18), (19): Xaa is A or G or is absent
RVVMNEYQKYXXXXXXXXXIYLVSIPSLKTPA

SEQ ID NO: 16825 - protein, 33 aa, Artificial Sequence
  Non-cyclic GFR-binding peptide
  MOD_RES (33), (33): Xaa is C or S
  MOD_RES (11), (12), (13), (14), (15): Xaa is A or G
  MOD_RES (16), (17), (18), (19): Xaa is A or G or is absent
RVVMNEYQKYXXXXXXXXXIYLVSIPSLKTPAX

SEQ ID NO: 16826 - protein, 39 aa, Artificial Sequence
  Non-cyclic GFR-binding peptide
  MOD_RES (35), (36): Xaa is C or S
  MOD_RES (13), (14), (15), (16), (17): Xaa is A or G
  MOD_RES (18), (19), (20), (21): Xaa is A or G or is absent
EAVSMGEEYQKYXXXXXXXXXIYLVSIPSLKTPVXXAKG

SEQ ID NO: 16827 - protein, 36 aa, Artificial Sequence
  Non-cyclic GFR-binding peptide
  MOD_RES (1), (35): Xaa is C or S
  MOD_RES (13), (14), (15), (16), (17): Xaa is A or G
  MOD_RES (18), (19), (20), (21): Xaa is A or G or is absent
XSRVVMNEYKFKXXXXXXXXXLYLVSIPELKTPAXT

SEQ ID NO: 16828 - protein, 33 aa, Artificial Sequence
  Non-cyclic GFR-binding peptide
  MOD_RES (12), (13), (14), (15), (16): Xaa is A or G
  MOD_RES (17), (18), (19), (20): Xaa is A or G or is absent
AKVVMNEYKFKXXXXXXXXXLYLVSIPELKTPA

SEQ ID NO: 16829 - protein, 39 aa, Artificial Sequence
  Non-cyclic GFR-binding peptide
  MOD_RES (34), (35): Xaa is C or S
  MOD_RES (12), (13), (14), (15), (16): Xaa is A or G
  MOD_RES (17), (18), (19), (20): Xaa is A or G or is absent
ESVAMGRYKKLXXXXXXXXXFYLISIANLKTPVXXAKSA

SEQ ID NO: 16830 - protein, 39 aa, Artificial Sequence
  Non-cyclic GFR-binding peptide
  MOD_RES (2), (34), (35): Xaa is C or S
GXAKVVMNEYQKYIVNNSSDIYLVSIPSLKTPAXXAKPV

SEQ ID NO: 16831 - protein, 32 aa, Artificial Sequence
  Non-cyclic GFR-binding peptide
  MOD_RES (32), (32): Xaa is C or S
AKVVMNEYKFKIVNNSSDLYLVSIPELKTPAX

SEQ ID NO: 16832 - protein, 39 aa, Artificial Sequence
  Non-cyclic GFR-binding peptide
  MOD_RES (2), (36): Xaa is C or S
  MOD_RES (14), (15), (16), (17), (18): Xaa is A or G
  MOD_RES (19), (20), (21), (22): Xaa is A or G or is absent
GXSRVVMNEYKFKXXXXXXXXXLYLVSIPELKTPAXTPK

SEQ ID NO: 16833 - protein, 39 aa, Artificial Sequence
  Non-cyclic GFR-binding peptide
  MOD_RES (35), (36): Xaa is C or S
  MOD_RES (13), (14), (15), (16), (17): Xaa is A or G
  MOD_RES (18), (19), (20), (21): Xaa is A or G or is absent
EAVSMGEEYKFKXXXXXXXXXLYLVSIPELKTPVXXAKG

SEQ ID NO: 16834 - protein, 37 aa, Artificial Sequence
  Non-cyclic GFR-binding peptide
  MOD_RES (31), (31): Xaa is C or S
RVVMNEYKFKIVNSSDDLYLVSIPELKTPAXTPKTVH

SEQ ID NO: 16835 - protein, 40 aa, Artificial Sequence
  Non-cyclic GFR-binding peptide
  MOD_RES (2), (37), (38): Xaa is C or S
  MOD_RES (15), (16), (17), (18), (19): Xaa is A or G
  MOD_RES (20), (21), (22), (23): Xaa is A or G or is absent
GXEAVSMGEEYQKYXXXXXXXXXIYLVSIPSLKTPVXXAK

SEQ ID NO: 16836 - protein, 32 aa, Artificial Sequence
  Non-cyclic GFR-binding peptide
  MOD_RES (31), (32): Xaa is C or S
SRVIMEYQKYVKPKRGVIYLISIPSLAQPVXX

SEQ ID NO: 16837 - protein, 35 aa, Artificial Sequence
  Non-cyclic GFR-binding peptide
  MOD_RES (32), (33): Xaa is C or S
AKVVMNEYQKYIVNNSSDIYLVSIPSLKTPAXXAK

SEQ ID NO: 16838 - protein, 40 aa, Artificial Sequence
  Non-cyclic GFR-binding peptide
  MOD_RES (2), (34), (35): Xaa is C or S
GXAEVVMDEYKFKVVNNAADLYLISIPELRAPVXXSAPAA

SEQ ID NO: 16839 - protein, 35 aa, Artificial Sequence
  Non-cyclic GFR-binding peptide
  MOD_RES (33), (34): Xaa is C or S
  MOD_RES (11), (12), (13), (14), (15): Xaa is A or G
  MOD_RES (16), (17), (18), (19): Xaa is A or G or is absent
KVVMNEYKFKXXXXXXXXXLYLVSIPELKTPAXXA

SEQ ID NO: 16840 - protein, 40 aa, Artificial Sequence
  Non-cyclic GFR-binding peptide
  MOD_RES (2), (4), (35), (36): Xaa is C or S
SXKXSRVIMEYKFKVKPKRGVLYLISIPELAQPVXXPAAS

SEQ ID NO: 16841 - protein, 39 aa, Artificial Sequence
  Non-cyclic GFR-binding peptide
  MOD_RES (1), (35), (36): Xaa is C or S
  MOD_RES (13), (14), (15), (16), (17): Xaa is A or G
  MOD_RES (18), (19), (20), (21): Xaa is A or G or is absent
XESVAMGYHYKLXXXXXXXXXKYLISIPSLKTPVXXAKS

SEQ ID NO: 16842 - protein, 39 aa, Artificial Sequence
  Non-cyclic GFR-binding peptide
  MOD_RES (1), (3), (37), (38): Xaa is C or S
  MOD_RES (15), (16), (17), (18), (19): Xaa is A or G
  MOD_RES (20), (21), (22), (23): Xaa is A or G or is absent
XGXGEVVMEEYQKYXXXXXXXXXIYLMSIPSLETPVXXA

SEQ ID NO: 16843 - protein, 32 aa, Artificial Sequence
  Non-cyclic GFR-binding peptide
  MOD_RES (2), (2): Xaa is C or S
KXSKVVMEYKFKVKPTRGVLYLISIPELDQPV

SEQ ID NO: 16844 - protein, 38 aa, Artificial Sequence
  Non-cyclic GFR-binding peptide
  MOD_RES (34), (35): Xaa is C or S
  MOD_RES (12), (13), (14), (15), (16): Xaa is A or G
  MOD_RES (17), (18), (19), (20): Xaa is A or G or is absent
ESVAMGRYKKLXXXXXXXXXFYLISIANLKTPVXXAKS

SEQ ID NO: 16845 - protein, 39 aa, Artificial Sequence
  Non-cyclic GFR-binding peptide
  MOD_RES (2), (4), (38), (39): Xaa is C or S
  MOD_RES (16), (17), (18), (19), (20): Xaa is A or G
  MOD_RES (21), (22), (23), (24): Xaa is A or G or is absent
RXGXGEVVMDEYKFKXXXXXXXXXLYLMSIPELETPVXX

SEQ ID NO: 16846 - protein, 36 aa, Artificial Sequence
  Non-cyclic GFR-binding peptide
  MOD_RES (31), (32): Xaa is C or S
KVVMNEYKFKIVNNSSDLYLVSIPELKTPAXXAKPV

SEQ ID NO: 16847 - protein, 36 aa, Artificial Sequence
  Non-cyclic GFR-binding peptide
  MOD_RES (33), (34): Xaa is C or S
  MOD_RES (11), (12), (13), (14), (15): Xaa is A or G
  MOD_RES (16), (17), (18), (19): Xaa is A or G or is absent
RVVMNEYKFKXXXXXXXXXLYLVSIPELQTPAXXPK

SEQ ID NO: 16848 - protein, 42 aa, Artificial Sequence
  Non-cyclic GFR-binding peptide
  MOD_RES (1), (3), (36), (37): Xaa is C or S
  MOD_RES (14), (15), (16), (17), (18): Xaa is A or G
  MOD_RES (19), (20), (21), (22): Xaa is A or G or is absent
XKXSRVIMEYKFKXXXXXXXXXLYLISIPELAQPVXXPAASA

SEQ ID NO: 16849 - protein, 39 aa, Artificial Sequence
  Non-cyclic GFR-binding peptide
  MOD_RES (2), (4), (38), (39): Xaa is C or S
  MOD_RES (16), (17), (18), (19), (20): Xaa is A or G
  MOD_RES (21), (22), (23), (24): Xaa is A or G or is absent
RXGXGEVVMEEYQKYXXXXXXXXXIYLMSIPSLETPVXX

SEQ ID NO: 16850 - protein, 40 aa, Artificial Sequence
  Non-cyclic GFR-binding peptide
  MOD_RES (1), (35), (36): Xaa is C or S
  MOD_RES (13), (14), (15), (16), (17): Xaa is A or G
  MOD_RES (18), (19), (20), (21): Xaa is A or G or is absent
XGEVVMDEYQKYXXXXXXXXXIYLMSIPSLETPVXXAKPI

SEQ ID NO: 16851 - protein, 38 aa, Artificial Sequence
  Non-cyclic GFR-binding peptide
  MOD_RES (2), (34), (35): Xaa is C or S
GXSRVVMNEYQKYIVNSSDDIYLVSIPSLKTPAXXPKP

SEQ ID NO: 16852 - protein, 40 aa, Artificial Sequence
  Non-cyclic GFR-binding peptide
  MOD_RES (1), (36), (37): Xaa is C or S
  MOD_RES (14), (15), (16), (17), (18): Xaa is A or G
  MOD_RES (19), (20), (21), (22): Xaa is A or G or is absent
XEAVSMGEEYQKYXXXXXXXXXIYLVSIPSLKTPVXXAKG

SEQ ID NO: 16853 - protein, 36 aa, Artificial Sequence
  Non-cyclic GFR-binding peptide
  MOD_RES (32), (33): Xaa is C or S
ARVVMNEYQKYIVNSSDDIYLVSIPSLQTPAXXPKP

SEQ ID NO: 16854 - protein, 42 aa, Artificial Sequence
  Non-cyclic GFR-binding peptide
  MOD_RES (1), (3), (37), (38): Xaa is C or S
  MOD_RES (15), (16), (17), (18), (19): Xaa is A or G
  MOD_RES (20), (21), (22), (23): Xaa is A or G or is absent
XGXESVAMGEYQKYXXXXXXXXXIYLISIPSLKTPVXXAKSA

SEQ ID NO: 16855 - protein, 39 aa, Artificial Sequence
  Non-cyclic GFR-binding peptide
  MOD_RES (34), (35): Xaa is C or S
  MOD_RES (12), (13), (14), (15), (16): Xaa is A or G
  MOD_RES (17), (18), (19), (20): Xaa is A or G or is absent
AEVVMDEYKFKXXXXXXXXXLYLISIPELRAPVXXSAPA

SEQ ID NO: 16856 - protein, 33 aa, Artificial Sequence
  Non-cyclic GFR-binding peptide
  MOD_RES (2), (33): Xaa is C or S
KXSKVVMEYQKYVKPTRGVIYLISIPSLDQPVX

SEQ ID NO: 16857 - protein, 37 aa, Artificial Sequence
  Non-cyclic GFR-binding peptide
  MOD_RES (1), (33), (34): Xaa is C or S
XAKVVMNEYQKYIVNNSSDIYLVSIPSLKTPAXXAKP

SEQ ID NO: 16858 - protein, 34 aa, Artificial Sequence
  Non-cyclic GFR-binding peptide
  MOD_RES (2), (33), (34): Xaa is C or S
KXSKVVMEYKFKVKPTRGVLYLISIPELDQPVXX

SEQ ID NO: 16859 - protein, 36 aa, Artificial Sequence
  Non-cyclic GFR-binding peptide
  MOD_RES (2), (4): Xaa is C or S
  MOD_RES (15), (16), (17), (18), (19): Xaa is A or G
  MOD_RES (20), (21), (22), (23): Xaa is A or G or is absent
SXKXSRVIMEYQKYXXXXXXXXXIYLISIPSLAQPV

SEQ ID NO: 16860 - protein, 41 aa, Artificial Sequence
  Non-cyclic GFR-binding peptide
  MOD_RES (2), (4), (36): Xaa is C or S
HXGXSRVVMNEYKFKIVNSSDDLYLVSIPELKTPAXTPKTV

SEQ ID NO: 16861 - protein, 42 aa, Artificial Sequence
  Non-cyclic GFR-binding peptide
  MOD_RES (2), (4), (36), (37): Xaa is C or S
RXGXESVAMGRYKKLYTVVGKDFYLISIANLKTPVXXAKSAK

SEQ ID NO: 16862 - protein, 38 aa, Artificial Sequence
  Non-cyclic GFR-binding peptide
  MOD_RES (2), (33), (34): Xaa is C or S
KXSKVIMEYQKYIKPTKGIIYLISIPSLDQSVXXPSAS

SEQ ID NO: 16863 - protein, 36 aa, Artificial Sequence
  Non-cyclic GFR-binding peptide
  MOD_RES (1), (3): Xaa is C or S
  MOD_RES (15), (16), (17), (18), (19): Xaa is A or G
  MOD_RES (20), (21), (22), (23): Xaa is A or G or is absent
XGXAEVVMDYHYKLXXXXXXXXXKYLISIPSLRAPV

SEQ ID NO: 16864 - protein, 39 aa, Artificial Sequence
  Non-cyclic GFR-binding peptide
  MOD_RES (33), (34): Xaa is C or S
  MOD_RES (11), (12), (13), (14), (15): Xaa is A or G
  MOD_RES (16), (17), (18), (19): Xaa is A or G or is absent
SVAMGEYQKYXXXXXXXXXIYLISIPSLKTPVXXAKSAK

SEQ ID NO: 16865 - protein, 37 aa, Artificial Sequence
  Non-cyclic GFR-binding peptide
  MOD_RES (2), (35), (36): Xaa is C or S
  MOD_RES (13), (14), (15), (16), (17): Xaa is A or G
  MOD_RES (18), (19), (20), (21): Xaa is A or G or is absent
KXSRVIMEYQKYXXXXXXXXXIYLISIPSLAQPVXXP

SEQ ID NO: 16866 - protein, 39 aa, Artificial Sequence
  Non-cyclic GFR-binding peptide
  MOD_RES (1), (3), (36), (37): Xaa is C or S
XGXEAVSMGEEYKFKTPVGMDDLYLVSIPELKTPVXXAK

SEQ ID NO: 16867 - protein, 39 aa, Artificial Sequence
  Non-cyclic GFR-binding peptide
  MOD_RES (2), (34), (35): Xaa is C or S
GXESVAMGRYKKLYTVVGKDFYLISIANLKTPVXXAKSA

SEQ ID NO: 16868 - protein, 34 aa, Artificial Sequence
  Non-cyclic GFR-binding peptide
  MOD_RES (31), (32): Xaa is C or S
SKVVMEYKFKVKPTRGVLYLISIPELDQPVXXPS

SEQ ID NO: 16869 - protein, 41 aa, Artificial Sequence
  Non-cyclic GFR-binding peptide
  MOD_RES (2), (4), (38), (39): Xaa is C or S
  MOD_RES (16), (17), (18), (19), (20): Xaa is A or G
  MOD_RES (21), (22), (23), (24): Xaa is A or G or is absent
RXGXESVAMGRYKKLXXXXXXXXXFYLISIANLKTPVXXAK

SEQ ID NO: 16870 - protein, 40 aa, Artificial Sequence
  Non-cyclic GFR-binding peptide
  MOD_RES (2), (4), (36), (37): Xaa is C or S
HXGXAKVVMNEYKFKIVNNSSDLYLVSIPELKTPAXXAKP

SEQ ID NO: 16871 - protein, 41 aa, Artificial Sequence
  Non-cyclic GFR-binding peptide
  MOD_RES (1), (3), (37), (38): Xaa is C or S
  MOD_RES (15), (16), (17), (18), (19): Xaa is A or G
  MOD_RES (20), (21), (22), (23): Xaa is A or G or is absent
XGXESVAMGYHYKLXXXXXXXXXKYLISIPSLKTPVXXAKS

SEQ ID NO: 16872 - protein, 36 aa, Artificial Sequence
  Non-cyclic GFR-binding peptide
  MOD_RES (1), (3), (36): Xaa is C or S
XGXEAVSMGEEYKFKTPVGMDDLYLVSIPELKTPVX

SEQ ID NO: 16873 - protein, 40 aa, Artificial Sequence
  Non-cyclic GFR-binding peptide
  MOD_RES (1), (3), (37), (38): Xaa is C or S
  MOD_RES (15), (16), (17), (18), (19): Xaa is A or G
  MOD_RES (20), (21), (22), (23): Xaa is A or G or is absent
XGXESVAMGEYQKYXXXXXXXXXIYLISIPSLKTPVXXAK

SEQ ID NO: 16874 - protein, 33 aa, Artificial Sequence
  Non-cyclic GFR-binding peptide
  MOD_RES (31), (32): Xaa is C or S
SKVVMEYQKYVKPTRGVIYLISIPSLDQPVXXP

SEQ ID NO: 16875 - protein, 36 aa, Artificial Sequence
  Non-cyclic GFR-binding peptide
  MOD_RES (31), (32): Xaa is C or S
EVVMDEYKFKVVNNAADLYLISIPELRAPVXXSAPA

SEQ ID NO: 16876 - protein, 39 aa, Artificial Sequence
  Non-cyclic GFR-binding peptide
  MOD_RES (1), (3), (37), (38): Xaa is C or S
  MOD_RES (15), (16), (17), (18), (19): Xaa is A or G
  MOD_RES (20), (21), (22), (23): Xaa is A or G or is absent
XGXGEVVMEEYKFKXXXXXXXXXLYLMSIPELETPVXXA

SEQ ID NO: 16877 - protein, 41 aa, Artificial Sequence
  Non-cyclic GFR-binding peptide
  MOD_RES (2), (4), (36), (37): Xaa is C or S
HXGXSRVVMNEYKFKIVNSSDDLYLVSIPELKTPAXXPKPV

SEQ ID NO: 16878 - protein, 40 aa, Artificial Sequence
  Non-cyclic GFR-binding peptide
  MOD_RES (1), (35), (36): Xaa is C or S
  MOD_RES (13), (14), (15), (16), (17): Xaa is A or G
  MOD_RES (18), (19), (20), (21): Xaa is A or G or is absent
XAEVVMDEYKFKXXXXXXXXXLYLISIPELRAPVXXSAPA

SEQ ID NO: 16879 - protein, 39 aa, Artificial Sequence
  Non-cyclic GFR-binding peptide
  MOD_RES (1), (34), (35): Xaa is C or S
  MOD_RES (12), (13), (14), (15), (16): Xaa is A or G
  MOD_RES (17), (18), (19), (20): Xaa is A or G or is absent
XSKVIMEYKFKXXXXXXXXXLYLISIPELDQSVXXPSAS

SEQ ID NO: 16880 - protein, 37 aa, Artificial Sequence
  Non-cyclic GFR-binding peptide
  MOD_RES (2), (4): Xaa is C or S
  MOD_RES (16), (17), (18), (19), (20): Xaa is A or G
  MOD_RES (21), (22), (23), (24): Xaa is A or G or is absent
HXGXSRVVMNEYQKYXXXXXXXXXIYLVSIPSLKTPA

SEQ ID NO: 16881 - protein, 37 aa, Artificial Sequence
  Non-cyclic GFR-binding peptide
  MOD_RES (2), (4), (36), (37): Xaa is C or S
HXGXARVVMNEYKFKIVNSSDDLYLVSIPELQTPAXX

SEQ ID NO: 16882 - protein, 36 aa, Artificial Sequence
  Non-cyclic GFR-binding peptide
  MOD_RES (2), (36): Xaa is C or S
  MOD_RES (14), (15), (16), (17), (18): Xaa is A or G
  MOD_RES (19), (20), (21), (22): Xaa is A or G or is absent
GXESVAMGRYKKLXXXXXXXXXFYLISIANLKTPVX

SEQ ID NO: 16883 - protein, 39 aa, Artificial Sequence
  Non-cyclic GFR-binding peptide
  MOD_RES (1), (3), (35), (36): Xaa is C or S
XGXESVAMGRYKKLYTVVGKDFYLISIANLKTPVXXAKS

SEQ ID NO: 16884 - protein, 33 aa, Artificial Sequence
  Non-cyclic GFR-binding peptide
  MOD_RES (31), (32): Xaa is C or S
SKVIMEYQKYIKPTKGIIYLISIPSLDQSVXXP

SEQ ID NO: 16885 - protein, 34 aa, Artificial Sequence
  Non-cyclic GFR-binding peptide
  MOD_RES (33), (34): Xaa is C or S
  MOD_RES (11), (12), (13), (14), (15): Xaa is A or G
  MOD_RES (16), (17), (18), (19): Xaa is A or G or is absent
SVAMGEYQKYXXXXXXXXXIYLISIPSLKTPVXX

SEQ ID NO: 16886 - protein, 37 aa, Artificial Sequence
  Non-cyclic GFR-binding peptide
  MOD_RES (2), (34), (35): Xaa is C or S
GXAEVVMDYHYKLVVNNAADKYLISIPSLRAPVXXSA

SEQ ID NO: 16887 - protein, 37 aa, Artificial Sequence
  Non-cyclic GFR-binding peptide
  MOD_RES (2), (35), (36): Xaa is C or S
  MOD_RES (13), (14), (15), (16), (17): Xaa is A or G
  MOD_RES (18), (19), (20), (21): Xaa is A or G or is absent
KXSKVIMEYKFKXXXXXXXXXLYLISIPELDQSVXXP

SEQ ID NO: 16888 - protein, 39 aa, Artificial Sequence
  Non-cyclic GFR-binding peptide
  MOD_RES (1), (35), (36): Xaa is C or S
  MOD_RES (13), (14), (15), (16), (17): Xaa is A or G
  MOD_RES (18), (19), (20), (21): Xaa is A or G or is absent
XGEVVMEEYQKYXXXXXXXXXIYLMSIPSLETPVXXAKP

SEQ ID NO: 16889 - protein, 40 aa, Artificial Sequence
  Non-cyclic GFR-binding peptide
  MOD_RES (2), (4), (37), (38): Xaa is C or S
RXGXEAVSMGEEYQKYTPVGMDDIYLVSIPSLKTPVXXAK

SEQ ID NO: 16890 - protein, 36 aa, Artificial Sequence
  Non-cyclic GFR-binding peptide
  MOD_RES (34), (35): Xaa is C or S
  MOD_RES (12), (13), (14), (15), (16): Xaa is A or G
  MOD_RES (17), (18), (19), (20): Xaa is A or G or is absent
AKVVMNEYKFKXXXXXXXXXLYLVSIPELKTPAXXA

SEQ ID NO: 16891 - protein, 37 aa, Artificial Sequence
  Non-cyclic GFR-binding peptide
  MOD_RES (31), (32): Xaa is C or S
SVAMGYHYKLYTVVGKDKYLISIPSLKTPVXXAKSAK

SEQ ID NO: 16892 - protein, 39 aa, Artificial Sequence
  Non-cyclic GFR-binding peptide
  MOD_RES (2), (4), (37), (38): Xaa is C or S
  MOD_RES (15), (16), (17), (18), (19): Xaa is A or G
  MOD_RES (20), (21), (22), (23): Xaa is A or G or is absent
SXKXSRVIMEYQKYXXXXXXXXXIYLISIPSLAQPVXXP

SEQ ID NO: 16893 - protein, 36 aa, Artificial Sequence
  Non-cyclic GFR-binding peptide
  MOD_RES (1), (3), (36): Xaa is C or S
XGXEAVSMGEEYQKYTPVGMDDIYLVSIPSLKTPVX

SEQ ID NO: 16894 - protein, 35 aa, Artificial Sequence
  Non-cyclic GFR-binding peptide
  MOD_RES (33), (34): Xaa is C or S
  MOD_RES (11), (12), (13), (14), (15): Xaa is A or G
  MOD_RES (16), (17), (18), (19): Xaa is A or G or is absent
EVVMEEYKFKXXXXXXXXXLYLMSIPELETPVXXA

SEQ ID NO: 16895 - protein, 38 aa, Artificial Sequence
  Non-cyclic GFR-binding peptide
  MOD_RES (34), (34): Xaa is C or S
  MOD_RES (12), (13), (14), (15), (16): Xaa is A or G
  MOD_RES (17), (18), (19), (20): Xaa is A or G or is absent
SRVVMNEYKFKXXXXXXXXXLYLVSIPELKTPAXTPKT

SEQ ID NO: 16896 - protein, 39 aa, Artificial Sequence
  Non-cyclic GFR-binding peptide
  MOD_RES (2), (4), (38): Xaa is C or S
  MOD_RES (16), (17), (18), (19), (20): Xaa is A or G
  MOD_RES (21), (22), (23), (24): Xaa is A or G or is absent
HXGXSRVVMNEYQKYXXXXXXXXXIYLVSIPSLKTPAXT

SEQ ID NO: 16897 - protein, 37 aa, Artificial Sequence
  Non-cyclic GFR-binding peptide
  MOD_RES (2), (4): Xaa is C or S
  MOD_RES (16), (17), (18), (19), (20): Xaa is A or G
  MOD_RES (21), (22), (23), (24): Xaa is A or G or is absent
RXGXGEVVMDEYKFKXXXXXXXXXLYLMSIPELETPV

SEQ ID NO: 16898 - protein, 32 aa, Artificial Sequence
  Non-cyclic GFR-binding peptide
  MOD_RES (1), (32): Xaa is C or S
XSKVVMEYKFKVKPTRGVLYLISIPELDQPVX

SEQ ID NO: 16899 - protein, 38 aa, Artificial Sequence
  Non-cyclic GFR-binding peptide
  MOD_RES (32), (33): Xaa is C or S
AEVVMDYHYKLVVNNAADKYLISIPSLRAPVXXSAPAA

SEQ ID NO: 16900 - protein, 36 aa, Artificial Sequence
  Non-cyclic GFR-binding peptide
  MOD_RES (32), (33): Xaa is C or S
SRVVMNEYKFKIVNSSDDLYLVSIPELKTPAXXPKP

SEQ ID NO: 16901 - protein, 33 aa, Artificial Sequence
  Non-cyclic GFR-binding peptide
  MOD_RES (2), (2): Xaa is C or S
GXAEVVMDYHYKLVVNNAADKYLISIPSLRAPV

SEQ ID NO: 16902 - protein, 38 aa, Artificial Sequence
  Non-cyclic GFR-binding peptide
  MOD_RES (2), (4), (35), (36): Xaa is C or S
SXKXSKVVMEYKFKVKPTRGVLYLISIPELDQPVXXPS

SEQ ID NO: 16903 - protein, 38 aa, Artificial Sequence
  Non-cyclic GFR-binding peptide
  MOD_RES (2), (36), (37): Xaa is C or S
  MOD_RES (14), (15), (16), (17), (18): Xaa is A or G
  MOD_RES (19), (20), (21), (22): Xaa is A or G or is absent
GXAEVVMDRYKKLXXXXXXXXXFYLISIANLRAPVXXS

SEQ ID NO: 16904 - protein, 39 aa, Artificial Sequence
  Non-cyclic GFR-binding peptide
  MOD_RES (1), (3), (35): Xaa is C or S
XGXSRVVMNEYKFKIVNSSDDLYLVSIPELKTPAXTPKT

SEQ ID NO: 16905 - protein, 36 aa, Artificial Sequence
  Non-cyclic GFR-binding peptide
  MOD_RES (33), (34): Xaa is C or S
  MOD_RES (11), (12), (13), (14), (15): Xaa is A or G
  MOD_RES (16), (17), (18), (19): Xaa is A or G or is absent
EVVMDEYKFKXXXXXXXXXLYLISIPELRAPVXXSA

SEQ ID NO: 16906 - protein, 41 aa, Artificial Sequence
  Non-cyclic GFR-binding peptide
  MOD_RES (2), (36), (37): Xaa is C or S
  MOD_RES (14), (15), (16), (17), (18): Xaa is A or G
  MOD_RES (19), (20), (21), (22): Xaa is A or G or is absent
GXESVAMGRYKKLXXXXXXXXXFYLISIANLKTPVXXAKSA

SEQ ID NO: 16907 - protein, 34 aa, Artificial Sequence
  Non-cyclic GFR-binding peptide
  MOD_RES (32), (32): Xaa is C or S
SRVVMNEYQKYIVNSSDDIYLVSIPSLKTPAXTP

SEQ ID NO: 16908 - protein, 35 aa, Artificial Sequence
  Non-cyclic GFR-binding peptide
  MOD_RES (31), (32): Xaa is C or S
EVVMDEYQKYVVKENEDIYLMSIPSLETPVXXAKP

SEQ ID NO: 16909 - protein, 38 aa, Artificial Sequence
  Non-cyclic GFR-binding peptide
  MOD_RES (1), (3), (37), (38): Xaa is C or S
  MOD_RES (15), (16), (17), (18), (19): Xaa is A or G
  MOD_RES (20), (21), (22), (23): Xaa is A or G or is absent
XGXAEVVMDYHYKLXXXXXXXXXKYLISIPSLRAPVXX

SEQ ID NO: 16910 - protein, 36 aa, Artificial Sequence
  Non-cyclic GFR-binding peptide
  MOD_RES (1), (35), (36): Xaa is C or S
  MOD_RES (13), (14), (15), (16), (17): Xaa is A or G
  MOD_RES (18), (19), (20), (21): Xaa is A or G or is absent
XSRVVMNEYKFKXXXXXXXXXLYLVSIPELKTPAXX

SEQ ID NO: 16911 - protein, 44 aa, Artificial Sequence
  Non-cyclic GFR-binding peptide
  MOD_RES (2), (4), (38), (39): Xaa is C or S
  MOD_RES (16), (17), (18), (19), (20): Xaa is A or G
  MOD_RES (21), (22), (23), (24): Xaa is A or G or is absent
HXGXARVVMNEYQKYXXXXXXXXXIYLVSIPSLQTPAXXPKPVT

SEQ ID NO: 16912 - protein, 44 aa, Artificial Sequence
  Non-cyclic GFR-binding peptide
  MOD_RES (2), (4), (38), (39): Xaa is C or S
  MOD_RES (16), (17), (18), (19), (20): Xaa is A or G
  MOD_RES (21), (22), (23), (24): Xaa is A or G or is absent
RXGXESVAMGEYQKYXXXXXXXXXIYLISIPSLKTPVXXAKSAK

SEQ ID NO: 16913 - protein, 37 aa, Artificial Sequence
  Non-cyclic GFR-binding peptide
  MOD_RES (2), (37): Xaa is C or S
  MOD_RES (15), (16), (17), (18), (19): Xaa is A or G
  MOD_RES (20), (21), (22), (23): Xaa is A or G or is absent
GXEAVSMGEEYQKYXXXXXXXXXIYLVSIPSLKTPVX

SEQ ID NO: 16914 - protein, 40 aa, Artificial Sequence
  Non-cyclic GFR-binding peptide
  MOD_RES (2), (4), (38), (39): Xaa is C or S
  MOD_RES (16), (17), (18), (19), (20): Xaa is A or G
  MOD_RES (21), (22), (23), (24): Xaa is A or G or is absent
RXGXGEVVMEEYQKYXXXXXXXXXIYLMSIPSLETPVXXA

SEQ ID NO: 16915 - protein, 32 aa, Artificial Sequence
  Non-cyclic GFR-binding peptide
  MOD_RES (2), (2): Xaa is C or S
KXSKVVMEYQKYVKPTRGVIYLISIPSLDQPV

SEQ ID NO: 16916 - protein, 37 aa, Artificial Sequence
  Non-cyclic GFR-binding peptide
  MOD_RES (1), (34), (35): Xaa is C or S
XEAVSMGEEYQKYTPVGMDDIYLVSIPSLKTPVXXAK

SEQ ID NO: 16917 - protein, 35 aa, Artificial Sequence
  Non-cyclic GFR-binding peptide
  MOD_RES (2), (34), (35): Xaa is C or S
GXAKVVMNEYQKYIVNNSSDIYLVSIPSLKTPAXX

SEQ ID NO: 16918 - protein, 43 aa, Artificial Sequence
  Non-cyclic GFR-binding peptide
  MOD_RES (2), (4), (39), (40): Xaa is C or S
  MOD_RES (17), (18), (19), (20), (21): Xaa is A or G
  MOD_RES (22), (23), (24), (25): Xaa is A or G or is absent
RXGXEAVSMGEEYQKYXXXXXXXXXIYLVSIPSLKTPVXXAKG

SEQ ID NO: 16919 - protein, 31 aa, Artificial Sequence
  Non-cyclic GFR-binding peptide
  MOD_RES (31), (31): Xaa is C or S
SVAMGYHYKLYTVVGKDKYLISIPSLKTPVX

SEQ ID NO: 16920 - protein, 37 aa, Artificial Sequence
  Non-cyclic GFR-binding peptide
  MOD_RES (1), (35), (36): Xaa is C or S
  MOD_RES (13), (14), (15), (16), (17): Xaa is A or G
  MOD_RES (18), (19), (20), (21): Xaa is A or G or is absent
XSRVVMNEYKFKXXXXXXXXXLYLVSIPELKTPAXXP

SEQ ID NO: 16921 - protein, 35 aa, Artificial Sequence
  Non-cyclic GFR-binding peptide
  MOD_RES (2), (2): Xaa is C or S
  MOD_RES (14), (15), (16), (17), (18): Xaa is A or G
  MOD_RES (19), (20), (21), (22): Xaa is A or G or is absent
GXAEVVMDRYKKLXXXXXXXXXFYLISIANLRAPV

SEQ ID NO: 16922 - protein, 36 aa, Artificial Sequence
  Non-cyclic GFR-binding peptide
  MOD_RES (1), (3), (36): Xaa is C or S
  MOD_RES (14), (15), (16), (17), (18): Xaa is A or G
  MOD_RES (19), (20), (21), (22): Xaa is A or G or is absent
XKXSRVIMEYKFKXXXXXXXXXLYLISIPELAQPVX

SEQ ID NO: 16923 - protein, 37 aa, Artificial Sequence
  Non-cyclic GFR-binding peptide
  MOD_RES (2), (4), (36), (37): Xaa is C or S
HXGXARVVMNEYQKYIVNSSDDIYLVSIPSLQTPAXX

SEQ ID NO: 16924 - protein, 35 aa, Artificial Sequence
  Non-cyclic GFR-binding peptide
  MOD_RES (1), (3), (35): Xaa is C or S
XGXGEVVMDEYKFKVVKENEDLYLMSIPELETPVX

SEQ ID NO: 16925 - protein, 44 aa, Artificial Sequence
  Non-cyclic GFR-binding peptide
  MOD_RES (2), (4), (38), (39): Xaa is C or S
  MOD_RES (16), (17), (18), (19), (20): Xaa is A or G
  MOD_RES (21), (22), (23), (24): Xaa is A or G or is absent
RXGXAEVVMDYHYKLXXXXXXXXXKYLISIPSLRAPVXXSAPAA

SEQ ID NO: 16926 - protein, 37 aa, Artificial Sequence
  Non-cyclic GFR-binding peptide
  MOD_RES (2), (33), (34): Xaa is C or S
KXSRVIMEYQKYVKPKRGVIYLISIPSLAQPVXXPAA

SEQ ID NO: 16927 - protein, 38 aa, Artificial Sequence
  Non-cyclic GFR-binding peptide
  MOD_RES (2), (4), (38): Xaa is C or S
  MOD_RES (16), (17), (18), (19), (20): Xaa is A or G
  MOD_RES (21), (22), (23), (24): Xaa is A or G or is absent
RXGXAEVVMDYHYKLXXXXXXXXXKYLISIPSLRAPVX

SEQ ID NO: 16928 - protein, 34 aa, Artificial Sequence
  Non-cyclic GFR-binding peptide
  MOD_RES (1), (3), (34): Xaa is C or S
XKXSKVVMEYKFKVKPTRGVLYLISIPELDQPVX

SEQ ID NO: 16929 - protein, 32 aa, Artificial Sequence
  Non-cyclic GFR-binding peptide
  MOD_RES (31), (32): Xaa is C or S
SVAMGYHYKLYTVVGKDKYLISIPSLKTPVXX

SEQ ID NO: 16930 - protein, 37 aa, Artificial Sequence
  Non-cyclic GFR-binding peptide
  MOD_RES (1), (33), (34): Xaa is C or S
XAKVVMNEYKFKIVNNSSDLYLVSIPELKTPAXXAKP

SEQ ID NO: 16931 - protein, 34 aa, Artificial Sequence
  Non-cyclic GFR-binding peptide
  MOD_RES (2), (34): Xaa is C or S
GXAKVVMNEYKFKIVNNSSDLYLVSIPELKTPAX

SEQ ID NO: 16932 - protein, 34 aa, Artificial Sequence
  Non-cyclic GFR-binding peptide
  MOD_RES (33), (34): Xaa is C or S
  MOD_RES (11), (12), (13), (14), (15): Xaa is A or G
  MOD_RES (16), (17), (18), (19): Xaa is A or G or is absent
RVVMNEYKFKXXXXXXXXXLYLVSIPELQTPAXX

SEQ ID NO: 16933 - protein, 36 aa, Artificial Sequence
  Non-cyclic GFR-binding peptide
  MOD_RES (1), (3), (35), (36): Xaa is C or S
XGXESVAMGYHYKLYTVVGKDKYLISIPSLKTPVXX

SEQ ID NO: 16934 - protein, 36 aa, Artificial Sequence
  Non-cyclic GFR-binding peptide
  MOD_RES (1), (33), (34): Xaa is C or S
XAKVVMNEYKFKIVNNSSDLYLVSIPELKTPAXXAK

SEQ ID NO: 16935 - protein, 42 aa, Artificial Sequence
  Non-cyclic GFR-binding peptide
  MOD_RES (2), (4), (36), (37): Xaa is C or S
RXGXGEVVMEEYQKYVVKDYEDIYLMSIPSLETPVXXAKPIS

SEQ ID NO: 16936 - protein, 36 aa, Artificial Sequence
  Non-cyclic GFR-binding peptide
  MOD_RES (1), (3), (35), (36): Xaa is C or S
XGXAKVVMNEYKFKIVNNSSDLYLVSIPELKTPAXX

SEQ ID NO: 16937 - protein, 36 aa, Artificial Sequence
  Non-cyclic GFR-binding peptide
  MOD_RES (33), (34): Xaa is C or S
  MOD_RES (11), (12), (13), (14), (15): Xaa is A or G
  MOD_RES (16), (17), (18), (19): Xaa is A or G or is absent
SKVVMEYQKYXXXXXXXXXIYLISIPSLDQPVXXPS

SEQ ID NO: 16938 - protein, 41 aa, Artificial Sequence
  Non-cyclic GFR-binding peptide
  MOD_RES (1), (3), (35), (36): Xaa is C or S
XGXARVVMNEYKFKIVNSSDDLYLVSIPELQTPAXXPKPVT

SEQ ID NO: 16939 - protein, 34 aa, Artificial Sequence
  Non-cyclic GFR-binding peptide
  MOD_RES (1), (3), (34): Xaa is C or S
XKXSKVIMEYKFKIKPTKGILYLISIPELDQSVX

SEQ ID NO: 16940 - protein, 36 aa, Artificial Sequence
  Non-cyclic GFR-binding peptide
  MOD_RES (1), (33), (34): Xaa is C or S
XESVAMGEYQKYYTVVGKDIYLISIPSLKTPVXXAK

SEQ ID NO: 16941 - protein, 33 aa, Artificial Sequence
  Non-cyclic GFR-binding peptide
  MOD_RES (32), (33): Xaa is C or S
AKVVMNEYKFKIVNNSSDLYLVSIPELKTPAXX

SEQ ID NO: 16942 - protein, 41 aa, Artificial Sequence
  Non-cyclic GFR-binding peptide
  MOD_RES (1), (35), (36): Xaa is C or S
  MOD_RES (13), (14), (15), (16), (17): Xaa is A or G
  MOD_RES (18), (19), (20), (21): Xaa is A or G or is absent
XAEVVMDEYKFKXXXXXXXXXLYLISIPELRAPVXXSAPAA

SEQ ID NO: 16943 - protein, 38 aa, Artificial Sequence
  Non-cyclic GFR-binding peptide
  MOD_RES (1), (3), (37), (38): Xaa is C or S
  MOD_RES (15), (16), (17), (18), (19): Xaa is A or G
  MOD_RES (20), (21), (22), (23): Xaa is A or G or is absent
XGXAKVVMNEYQKYXXXXXXXXXIYLVSIPSLKTPAXX

SEQ ID NO: 16944 - protein, 31 aa, Artificial Sequence
  Non-cyclic GFR-binding peptide
  MOD_RES (1), (1): Xaa is C or S
XSKVIMEYKFKIKPTKGILYLISIPELDQSV

SEQ ID NO: 16945 - protein, 33 aa, Artificial Sequence
  Non-cyclic GFR-binding peptide
  MOD_RES (1), (3): Xaa is C or S
XKXSKVVMEYKFKVKPTRGVLYLISIPELDQPV

SEQ ID NO: 16946 - protein, 37 aa, Artificial Sequence
  Non-cyclic GFR-binding peptide
  MOD_RES (1), (35), (36): Xaa is C or S
  MOD_RES (13), (14), (15), (16), (17): Xaa is A or G
  MOD_RES (18), (19), (20), (21): Xaa is A or G or is absent
XGEVVMDEYKFKXXXXXXXXXLYLMSIPELETPVXXA

SEQ ID NO: 16947 - protein, 38 aa, Artificial Sequence
  Non-cyclic GFR-binding peptide
  MOD_RES (1), (34), (35): Xaa is C or S
  MOD_RES (12), (13), (14), (15), (16): Xaa is A or G
  MOD_RES (17), (18), (19), (20): Xaa is A or G or is absent
XSKVIMEYKFKXXXXXXXXXLYLISIPELDQSVXXPSA

SEQ ID NO: 16948 - protein, 36 aa, Artificial Sequence
  Non-cyclic GFR-binding peptide
  MOD_RES (2), (36): Xaa is C or S
  MOD_RES (14), (15), (16), (17), (18): Xaa is A or G
  MOD_RES (19), (20), (21), (22): Xaa is A or G or is absent
GXGEVVMEEYQKYXXXXXXXXXIYLMSIPSLETPVX

SEQ ID NO: 16949 - protein, 34 aa, Artificial Sequence
  Non-cyclic GFR-binding peptide
  MOD_RES (1), (3): Xaa is C or S
XGXGEVVMDEYQKYVVKENEDIYLMSIPSLETPV

SEQ ID NO: 16950 - protein, 38 aa, Artificial Sequence
  Non-cyclic GFR-binding peptide
  MOD_RES (33), (34): Xaa is C or S
  MOD_RES (11), (12), (13), (14), (15): Xaa is A or G
  MOD_RES (16), (17), (18), (19): Xaa is A or G or is absent
EVVMDYHYKLXXXXXXXXXKYLISIPSLRAPVXXSAPA

SEQ ID NO: 16951 - protein, 44 aa, Artificial Sequence
  Non-cyclic GFR-binding peptide
  MOD_RES (2), (4), (38), (39): Xaa is C or S
  MOD_RES (16), (17), (18), (19), (20): Xaa is A or G
  MOD_RES (21), (22), (23), (24): Xaa is A or G or is absent
RXGXGEVVMDEYKFKXXXXXXXXXLYLMSIPELETPVXXAKPIK

SEQ ID NO: 16952 - protein, 37 aa, Artificial Sequence
  Non-cyclic GFR-binding peptide
  MOD_RES (2), (4), (35), (36): Xaa is C or S
SXKXSKVVMEYKFKVKPTRGVLYLISIPELDQPVXXP

SEQ ID NO: 16953 - protein, 36 aa, Artificial Sequence
  Non-cyclic GFR-binding peptide
  MOD_RES (32), (33): Xaa is C or S
AEVVMDEYKFKVVNNAADLYLISIPELRAPVXXSAP

SEQ ID NO: 16954 - protein, 33 aa, Artificial Sequence
  Non-cyclic GFR-binding peptide
  MOD_RES (1), (3): Xaa is C or S
XKXSKVIMEYKFKIKPTKGILYLISIPELDQSV

SEQ ID NO: 16955 - protein, 40 aa, Artificial Sequence
  Non-cyclic GFR-binding peptide
  MOD_RES (2), (4), (36), (37): Xaa is C or S
RXGXESVAMGEYQKYYTVVGKDIYLISIPSLKTPVXXAKS

SEQ ID NO: 16956 - protein, 33 aa, Artificial Sequence
  Non-cyclic GFR-binding peptide
  MOD_RES (32), (32): Xaa is C or S
SRVVMNEYKFKIVNSSDDLYLVSIPELKTPAXT

SEQ ID NO: 16957 - protein, 32 aa, Artificial Sequence
  Non-cyclic GFR-binding peptide
  MOD_RES (1), (32): Xaa is C or S
XSKVIMEYKFKIKPTKGILYLISIPELDQSVX

SEQ ID NO: 16958 - protein, 37 aa, Artificial Sequence
  Non-cyclic GFR-binding peptide
  MOD_RES (34), (35): Xaa is C or S
  MOD_RES (12), (13), (14), (15), (16): Xaa is A or G
  MOD_RES (17), (18), (19), (20): Xaa is A or G or is absent
AEVVMDEYKFKXXXXXXXXXLYLISIPELRAPVXXSA

SEQ ID NO: 16959 - protein, 37 aa, Artificial Sequence
  Non-cyclic GFR-binding peptide
  MOD_RES (2), (34), (35): Xaa is C or S
GXGEVVMDEYQKYVVKENEDIYLMSIPSLETPVXXAK

SEQ ID NO: 16960 - protein, 33 aa, Artificial Sequence
  Non-cyclic GFR-binding peptide
  MOD_RES (2), (33): Xaa is C or S
KXSKVVMEYKFKVKPTRGVLYLISIPELDQPVX

SEQ ID NO: 16961 - protein, 39 aa, Artificial Sequence
  Non-cyclic GFR-binding peptide
  MOD_RES (2), (34): Xaa is C or S
GXSRVVMNEYQKYIVNSSDDIYLVSIPSLKTPAXTPKTV

SEQ ID NO: 16962 - protein, 36 aa, Artificial Sequence
  Non-cyclic GFR-binding peptide
  MOD_RES (1), (3): Xaa is C or S
  MOD_RES (15), (16), (17), (18), (19): Xaa is A or G
  MOD_RES (20), (21), (22), (23): Xaa is A or G or is absent
XGXESVAMGYHYKLXXXXXXXXXKYLISIPSLKTPV

SEQ ID NO: 16963 - protein, 39 aa, Artificial Sequence
  Non-cyclic GFR-binding peptide
  MOD_RES (33), (34): Xaa is C or S
  MOD_RES (11), (12), (13), (14), (15): Xaa is A or G
  MOD_RES (16), (17), (18), (19): Xaa is A or G or is absent
EVVMDYHYKLXXXXXXXXXKYLISIPSLRAPVXXSAPAA

SEQ ID NO: 16964 - protein, 38 aa, Artificial Sequence
  Non-cyclic GFR-binding peptide
  MOD_RES (2), (4), (38): Xaa is C or S
  MOD_RES (16), (17), (18), (19), (20): Xaa is A or G
  MOD_RES (21), (22), (23), (24): Xaa is A or G or is absent
RXGXESVAMGRYKKLXXXXXXXXXFYLISIANLKTPVX

SEQ ID NO: 16965 - protein, 35 aa, Artificial Sequence
  Non-cyclic GFR-binding peptide
  MOD_RES (31), (32): Xaa is C or S
RVVMNEYQKYIVNSSDDIYLVSIPSLKTPAXXPKP

SEQ ID NO: 16966 - protein, 39 aa, Artificial Sequence
  Non-cyclic GFR-binding peptide
  MOD_RES (1), (34), (35): Xaa is C or S
  MOD_RES (12), (13), (14), (15), (16): Xaa is A or G
  MOD_RES (17), (18), (19), (20): Xaa is A or G or is absent
XSRVIMEYKFKXXXXXXXXXLYLISIPELAQPVXXPAAS

SEQ ID NO: 16967 - protein, 40 aa, Artificial Sequence
  Non-cyclic GFR-binding peptide
  MOD_RES (34), (35): Xaa is C or S
  MOD_RES (12), (13), (14), (15), (16): Xaa is A or G
  MOD_RES (17), (18), (19), (20): Xaa is A or G or is absent
AKVVMNEYKFKXXXXXXXXXLYLVSIPELKTPAXXAKPVA

SEQ ID NO: 16968 - protein, 41 aa, Artificial Sequence
  Non-cyclic GFR-binding peptide
  MOD_RES (2), (4), (38): Xaa is C or S
  MOD_RES (16), (17), (18), (19), (20): Xaa is A or G
  MOD_RES (21), (22), (23), (24): Xaa is A or G or is absent
HXGXSRVVMNEYKFKXXXXXXXXXLYLVSIPELKTPAXTPK

SEQ ID NO: 16969 - protein, 37 aa, Artificial Sequence
  Non-cyclic GFR-binding peptide
  MOD_RES (1), (3), (34), (35): Xaa is C or S
XKXSKVIMEYQKYIKPTKGIIYLISIPSLDQSVXXPS

SEQ ID NO: 16970 - protein, 35 aa, Artificial Sequence
  Non-cyclic GFR-binding peptide
  MOD_RES (1), (3), (35): Xaa is C or S
XGXAEVVMDRYKKLVVNNAADFYLISIANLRAPVX

SEQ ID NO: 16971 - protein, 34 aa, Artificial Sequence
  Non-cyclic GFR-binding peptide
  MOD_RES (1), (33), (34): Xaa is C or S
XAEVVMDRYKKLVVNNAADFYLISIANLRAPVXX

SEQ ID NO: 16972 - protein, 39 aa, Artificial Sequence
  Non-cyclic GFR-binding peptide
  MOD_RES (1), (3), (37), (38): Xaa is C or S
  MOD_RES (15), (16), (17), (18), (19): Xaa is A or G
  MOD_RES (20), (21), (22), (23): Xaa is A or G or is absent
XGXESVAMGRYKKLXXXXXXXXXFYLISIANLKTPVXXA

SEQ ID NO: 16973 - protein, 33 aa, Artificial Sequence
  Non-cyclic GFR-binding peptide
  MOD_RES (12), (13), (14), (15), (16): Xaa is A or G
  MOD_RES (17), (18), (19), (20): Xaa is A or G or is absent
AEVVMDEYKFKXXXXXXXXXLYLISIPELRAPV

SEQ ID NO: 16974 - protein, 38 aa, Artificial Sequence
  Non-cyclic GFR-binding peptide
  MOD_RES (32), (32): Xaa is C or S
SRVVMNEYQKYIVNSSDDIYLVSIPSLKTPAXTPKTVH

SEQ ID NO: 16975 - protein, 37 aa, Artificial Sequence
  Non-cyclic GFR-binding peptide
  MOD_RES (1), (35), (36): Xaa is C or S
  MOD_RES (13), (14), (15), (16), (17): Xaa is A or G
  MOD_RES (18), (19), (20), (21): Xaa is A or G or is absent
XAKVVMNEYQKYXXXXXXXXXIYLVSIPSLKTPAXXA

SEQ ID NO: 16976 - protein, 33 aa, Artificial Sequence
  Non-cyclic GFR-binding peptide
  MOD_RES (1), (32), (33): Xaa is C or S
XSKVVMEYQKYVKPTRGVIYLISIPSLDQPVXX

SEQ ID NO: 16977 - protein, 32 aa, Artificial Sequence
  Non-cyclic GFR-binding peptide
  MOD_RES (11), (12), (13), (14), (15): Xaa is A or G
  MOD_RES (16), (17), (18), (19): Xaa is A or G or is absent
EVVMDRYKKLXXXXXXXXXFYLISIANLRAPV

SEQ ID NO: 16978 - protein, 39 aa, Artificial Sequence
  Non-cyclic GFR-binding peptide
  MOD_RES (34), (35): Xaa is C or S
  MOD_RES (12), (13), (14), (15), (16): Xaa is A or G
  MOD_RES (17), (18), (19), (20): Xaa is A or G or is absent
ESVAMGEYQKYXXXXXXXXXIYLISIPSLKTPVXXAKSA

SEQ ID NO: 16979 - protein, 43 aa, Artificial Sequence
  Non-cyclic GFR-binding peptide
  MOD_RES (2), (4), (37), (38): Xaa is C or S
  MOD_RES (15), (16), (17), (18), (19): Xaa is A or G
  MOD_RES (20), (21), (22), (23): Xaa is A or G or is absent
SXKXSKVVMEYQKYXXXXXXXXXIYLISIPSLDQPVXXPSASA

SEQ ID NO: 16980 - protein, 40 aa, Artificial Sequence
  Non-cyclic GFR-binding peptide
  MOD_RES (2), (4), (38), (39): Xaa is C or S
  MOD_RES (16), (17), (18), (19), (20): Xaa is A or G
  MOD_RES (21), (22), (23), (24): Xaa is A or G or is absent
RXGXAEVVMDEYKFKXXXXXXXXXLYLISIPELRAPVXXS

SEQ ID NO: 16981 - protein, 37 aa, Artificial Sequence
  Non-cyclic GFR-binding peptide
  MOD_RES (33), (34): Xaa is C or S
  MOD_RES (11), (12), (13), (14), (15): Xaa is A or G
  MOD_RES (16), (17), (18), (19): Xaa is A or G or is absent
EVVMDEYQKYXXXXXXXXXIYLMSIPSLETPVXXAKP

SEQ ID NO: 16982 - protein, 35 aa, Artificial Sequence
  Non-cyclic GFR-binding peptide
  MOD_RES (2), (33), (34): Xaa is C or S
KXSKVIMEYQKYIKPTKGIIYLISIPSLDQSVXXP

SEQ ID NO: 16983 - protein, 33 aa, Artificial Sequence
  Non-cyclic GFR-binding peptide
  MOD_RES (12), (13), (14), (15), (16): Xaa is A or G
  MOD_RES (17), (18), (19), (20): Xaa is A or G or is absent
GEVVMDEYQKYXXXXXXXXXIYLMSIPSLETPV

SEQ ID NO: 16984 - protein, 40 aa, Artificial Sequence
  Non-cyclic GFR-binding peptide
  MOD_RES (2), (4), (38), (39): Xaa is C or S
  MOD_RES (16), (17), (18), (19), (20): Xaa is A or G
  MOD_RES (21), (22), (23), (24): Xaa is A or G or is absent
RXGXAEVVMDRYKKLXXXXXXXXXFYLISIANLRAPVXXS

SEQ ID NO: 16985 - protein, 38 aa, Artificial Sequence
  Non-cyclic GFR-binding peptide
  MOD_RES (2), (34), (35): Xaa is C or S
GXAKVVMNEYKFKIVNNSSDLYLVSIPELKTPAXXAKP

SEQ ID NO: 16986 - protein, 38 aa, Artificial Sequence
  Non-cyclic GFR-binding peptide
  MOD_RES (32), (33): Xaa is C or S
SRVVMNEYQKYIVNSSDDIYLVSIPSLKTPAXXPKPVY

SEQ ID NO: 16987 - protein, 38 aa, Artificial Sequence
  Non-cyclic GFR-binding peptide
  MOD_RES (32), (33): Xaa is C or S
ESVAMGRYKKLYTVVGKDFYLISIANLKTPVXXAKSAK

SEQ ID NO: 16988 - protein, 41 aa, Artificial Sequence
  Non-cyclic GFR-binding peptide
  MOD_RES (1), (3), (35), (36): Xaa is C or S
XGXGEVVMEEYQKYVVKDYEDIYLMSIPSLETPVXXAKPIS

SEQ ID NO: 16989 - protein, 32 aa, Artificial Sequence
  Non-cyclic GFR-binding peptide
  MOD_RES (1), (1): Xaa is C or S
XARVVMNEYQKYIVNSSDDIYLVSIPSLQTPA

SEQ ID NO: 16990 - protein, 39 aa, Artificial Sequence
  Non-cyclic GFR-binding peptide
  MOD_RES (1), (33), (34): Xaa is C or S
XGEVVMDEYKFKVVKENEDLYLMSIPELETPVXXAKPIK

SEQ ID NO: 16991 - protein, 42 aa, Artificial Sequence
  Non-cyclic GFR-binding peptide
  MOD_RES (2), (4), (36), (37): Xaa is C or S
RXGXGEVVMDEYQKYVVKENEDIYLMSIPSLETPVXXAKPIK

SEQ ID NO: 16992 - protein, 35 aa, Artificial Sequence
  Non-cyclic GFR-binding peptide
  MOD_RES (32), (32): Xaa is C or S
SRVVMNEYQKYIVNSSDDIYLVSIPSLKTPAXTPK

SEQ ID NO: 16993 - protein, 38 aa, Artificial Sequence
  Non-cyclic GFR-binding peptide
  MOD_RES (2), (33), (34): Xaa is C or S
KXSKVVMEYQKYVKPTRGVIYLISIPSLDQPVXXPSAS

SEQ ID NO: 16994 - protein, 44 aa, Artificial Sequence
  Non-cyclic GFR-binding peptide
  MOD_RES (2), (4), (38), (39): Xaa is C or S
  MOD_RES (16), (17), (18), (19), (20): Xaa is A or G
  MOD_RES (21), (22), (23), (24): Xaa is A or G or is absent
HXGXAKVVMNEYKFKXXXXXXXXXLYLVSIPELKTPAXXAKPVA

SEQ ID NO: 16995 - protein, 37 aa, Artificial Sequence
  Non-cyclic GFR-binding peptide
  MOD_RES (33), (34): Xaa is C or S
  MOD_RES (11), (12), (13), (14), (15): Xaa is A or G
  MOD_RES (16), (17), (18), (19): Xaa is A or G or is absent
SKVVMEYKFKXXXXXXXXXLYLISIPELDQPVXXPSA

SEQ ID NO: 16996 - protein, 35 aa, Artificial Sequence
  Non-cyclic GFR-binding peptide
  MOD_RES (31), (32): Xaa is C or S
SKVIMEYKFKIKPTKGILYLISIPELDQSVXXPSA

SEQ ID NO: 16997 - protein, 36 aa, Artificial Sequence
  Non-cyclic GFR-binding peptide
  MOD_RES (32), (33): Xaa is C or S
ESVAMGEYQKYYTVVGKDIYLISIPSLKTPVXXAKS

SEQ ID NO: 16998 - protein, 38 aa, Artificial Sequence
  Non-cyclic GFR-binding peptide
  MOD_RES (1), (3), (34), (35): Xaa is C or S
XKXSKVVMEYQKYVKPTRGVIYLISIPSLDQPVXXPSA

SEQ ID NO: 16999 - protein, 37 aa, Artificial Sequence
  Non-cyclic GFR-binding peptide
  MOD_RES (1), (3), (36), (37): Xaa is C or S
  MOD_RES (14), (15), (16), (17), (18): Xaa is A or G
  MOD_RES (19), (20), (21), (22): Xaa is A or G or is absent
XKXSKVIMEYKFKXXXXXXXXXLYLISIPELDQSVXX

SEQ ID NO: 17000 - protein, 33 aa, Artificial Sequence
  Non-cyclic GFR-binding peptide
  MOD_RES (2), (2): Xaa is C or S
GXGEVVMEEYQKYVVKDYEDIYLMSIPSLETPV

SEQ ID NO: 17001 - protein, 33 aa, Artificial Sequence
  Non-cyclic GFR-binding peptide
  MOD_RES (31), (32): Xaa is C or S
EVVMDEYKFKVVKENEDLYLMSIPELETPVXXA

SEQ ID NO: 17002 - protein, 34 aa, Artificial Sequence
  Non-cyclic GFR-binding peptide
  MOD_RES (31), (32): Xaa is C or S
SKVVMEYQKYVKPTRGVIYLISIPSLDQPVXXPS

SEQ ID NO: 17003 - protein, 34 aa, Artificial Sequence
  Non-cyclic GFR-binding peptide
  MOD_RES (34), (34): Xaa is C or S
  MOD_RES (12), (13), (14), (15), (16): Xaa is A or G
  MOD_RES (17), (18), (19), (20): Xaa is A or G or is absent
SRVVMNEYQKYXXXXXXXXXIYLVSIPSLKTPAX

SEQ ID NO: 17004 - protein, 39 aa, Artificial Sequence
  Non-cyclic GFR-binding peptide
  MOD_RES (2), (4), (38), (39): Xaa is C or S
  MOD_RES (16), (17), (18), (19), (20): Xaa is A or G
  MOD_RES (21), (22), (23), (24): Xaa is A or G or is absent
RXGXGEVVMEEYKFKXXXXXXXXXLYLMSIPELETPVXX

SEQ ID NO: 17005 - protein, 42 aa, Artificial Sequence
  Non-cyclic GFR-binding peptide
  MOD_RES (2), (4), (38), (39): Xaa is C or S
  MOD_RES (16), (17), (18), (19), (20): Xaa is A or G
  MOD_RES (21), (22), (23), (24): Xaa is A or G or is absent
RXGXGEVVMDEYKFKXXXXXXXXXLYLMSIPELETPVXXAKP

SEQ ID NO: 17006 - protein, 41 aa, Artificial Sequence
  Non-cyclic GFR-binding peptide
  MOD_RES (2), (4), (35), (36): Xaa is C or S
SXKXSKVVMEYQKYVKPTRGVIYLISIPSLDQPVXXPSASA

SEQ ID NO: 17007 - protein, 32 aa, Artificial Sequence
  Non-cyclic GFR-binding peptide
  MOD_RES (11), (12), (13), (14), (15): Xaa is A or G
  MOD_RES (16), (17), (18), (19): Xaa is A or G or is absent
RVVMNEYQKYXXXXXXXXXIYLVSIPSLQTPA

SEQ ID NO: 17008 - protein, 39 aa, Artificial Sequence
  Non-cyclic GFR-binding peptide
  MOD_RES (2), (34), (35): Xaa is C or S
GXARVVMNEYKFKIVNSSDDLYLVSIPELQTPAXXPKPV

SEQ ID NO: 17009 - protein, 38 aa, Artificial Sequence
  Non-cyclic GFR-binding peptide
  MOD_RES (1), (35), (36): Xaa is C or S
  MOD_RES (13), (14), (15), (16), (17): Xaa is A or G
  MOD_RES (18), (19), (20), (21): Xaa is A or G or is absent
XESVAMGYHYKLXXXXXXXXXKYLISIPSLKTPVXXAK

SEQ ID NO: 17010 - protein, 38 aa, Artificial Sequence
  Non-cyclic GFR-binding peptide
  MOD_RES (2), (4), (36), (37): Xaa is C or S
HXGXARVVMNEYQKYIVNSSDDIYLVSIPSLQTPAXXP

SEQ ID NO: 17011 - protein, 32 aa, Artificial Sequence
  Non-cyclic GFR-binding peptide
  MOD_RES (31), (32): Xaa is C or S
RVVMNEYKFKIVNSSDDLYLVSIPELQTPAXX

SEQ ID NO: 17012 - protein, 39 aa, Artificial Sequence
  Non-cyclic GFR-binding peptide
  MOD_RES (2), (4), (35), (36): Xaa is C or S
SXKXSRVIMEYQKYVKPKRGVIYLISIPSLAQPVXXPAA

SEQ ID NO: 17013 - protein, 39 aa, Artificial Sequence
  Non-cyclic GFR-binding peptide
  MOD_RES (34), (35): Xaa is C or S
  MOD_RES (12), (13), (14), (15), (16): Xaa is A or G
  MOD_RES (17), (18), (19), (20): Xaa is A or G or is absent
ARVVMNEYKFKXXXXXXXXXLYLVSIPELQTPAXXPKPV

SEQ ID NO: 17014 - protein, 40 aa, Artificial Sequence
  Non-cyclic GFR-binding peptide
  MOD_RES (1), (34), (35): Xaa is C or S
XEAVSMGEEYQKYTPVGMDDIYLVSIPSLKTPVXXAKGVK

SEQ ID NO: 17015 - protein, 39 aa, Artificial Sequence
  Non-cyclic GFR-binding peptide
  MOD_RES (2), (36), (37): Xaa is C or S
  MOD_RES (14), (15), (16), (17), (18): Xaa is A or G
  MOD_RES (19), (20), (21), (22): Xaa is A or G or is absent
GXGEVVMDEYQKYXXXXXXXXXIYLMSIPSLETPVXXAK

SEQ ID NO: 17016 - protein, 37 aa, Artificial Sequence
  Non-cyclic GFR-binding peptide
  MOD_RES (1), (33), (34): Xaa is C or S
XESVAMGYHYKLYTVVGKDKYLISIPSLKTPVXXAKS

SEQ ID NO: 17017 - protein, 38 aa, Artificial Sequence
  Non-cyclic GFR-binding peptide
  MOD_RES (2), (33), (34): Xaa is C or S
KXSRVIMEYKFKVKPKRGVLYLISIPELAQPVXXPAAS

SEQ ID NO: 17018 - protein, 37 aa, Artificial Sequence
  Non-cyclic GFR-binding peptide
  MOD_RES (31), (32): Xaa is C or S
RVVMNEYQKYIVNSSDDIYLVSIPSLKTPAXXPKPVY

SEQ ID NO: 17019 - protein, 39 aa, Artificial Sequence
  Non-cyclic GFR-binding peptide
  MOD_RES (34), (35): Xaa is C or S
  MOD_RES (12), (13), (14), (15), (16): Xaa is A or G
  MOD_RES (17), (18), (19), (20): Xaa is A or G or is absent
GEVVMDEYKFKXXXXXXXXXLYLMSIPELETPVXXAKPI

SEQ ID NO: 17020 - protein, 38 aa, Artificial Sequence
  Non-cyclic GFR-binding peptide
  MOD_RES (34), (35): Xaa is C or S
  MOD_RES (12), (13), (14), (15), (16): Xaa is A or G
  MOD_RES (17), (18), (19), (20): Xaa is A or G or is absent
ARVVMNEYQKYXXXXXXXXXIYLVSIPSLQTPAXXPKP

SEQ ID NO: 17021 - protein, 37 aa, Artificial Sequence
  Non-cyclic GFR-binding peptide
  MOD_RES (34), (35): Xaa is C or S
  MOD_RES (12), (13), (14), (15), (16): Xaa is A or G
  MOD_RES (17), (18), (19), (20): Xaa is A or G or is absent
ARVVMNEYKFKXXXXXXXXXLYLVSIPELQTPAXXPK

SEQ ID NO: 17022 - protein, 35 aa, Artificial Sequence
  Non-cyclic GFR-binding peptide
  MOD_RES (1), (35): Xaa is C or S
  MOD_RES (13), (14), (15), (16), (17): Xaa is A or G
  MOD_RES (18), (19), (20), (21): Xaa is A or G or is absent
XGEVVMDEYKFKXXXXXXXXXLYLMSIPELETPVX

SEQ ID NO: 17023 - protein, 36 aa, Artificial Sequence
  Non-cyclic GFR-binding peptide
  MOD_RES (1), (33), (34): Xaa is C or S
XGEVVMEEYKFKVVKDYEDLYLMSIPELETPVXXAK

SEQ ID NO: 17024 - protein, 38 aa, Artificial Sequence
  Non-cyclic GFR-binding peptide
  MOD_RES (2), (34), (35): Xaa is C or S
GXSRVVMNEYKFKIVNSSDDLYLVSIPELKTPAXXPKP

SEQ ID NO: 17025 - protein, 31 aa, Artificial Sequence
  Non-cyclic GFR-binding peptide
AEVVMDYHYKLVVNNAADKYLISIPSLRAPV

SEQ ID NO: 17026 - protein, 31 aa, Artificial Sequence
  Non-cyclic GFR-binding peptide
  MOD_RES (31), (31): Xaa is C or S
EVVMDEYKFKVVKENEDLYLMSIPELETPVX

SEQ ID NO: 17027 - protein, 40 aa, Artificial Sequence
  Non-cyclic GFR-binding peptide
  MOD_RES (2), (4), (35), (36): Xaa is C or S
SXKXSKVVMEYQKYVKPTRGVIYLISIPSLDQPVXXPSAS

SEQ ID NO: 17028 - protein, 37 aa, Artificial Sequence
  Non-cyclic GFR-binding peptide
  MOD_RES (32), (33): Xaa is C or S
AEVVMDYHYKLVVNNAADKYLISIPSLRAPVXXSAPA

SEQ ID NO: 17029 - protein, 39 aa, Artificial Sequence
  Non-cyclic GFR-binding peptide
  MOD_RES (33), (34): Xaa is C or S
  MOD_RES (11), (12), (13), (14), (15): Xaa is A or G
  MOD_RES (16), (17), (18), (19): Xaa is A or G or is absent
SRVIMEYQKYXXXXXXXXXIYLISIPSLAQPVXXPAASA

SEQ ID NO: 17030 - protein, 31 aa, Artificial Sequence
  Non-cyclic GFR-binding peptide
GEVVMDEYKFKVVKENEDLYLMSIPELETPV

SEQ ID NO: 17031 - protein, 36 aa, Artificial Sequence
  Non-cyclic GFR-binding peptide
  MOD_RES (2), (34), (35): Xaa is C or S
GXESVAMGRYKKLYTVVGKDFYLISIANLKTPVXXA

SEQ ID NO: 17032 - protein, 38 aa, Artificial Sequence
  Non-cyclic GFR-binding peptide
  MOD_RES (32), (33): Xaa is C or S
ARVVMNEYKFKIVNSSDDLYLVSIPELQTPAXXPKPVT

SEQ ID NO: 17033 - protein, 41 aa, Artificial Sequence
  Non-cyclic GFR-binding peptide
  MOD_RES (2), (36), (37): Xaa is C or S
  MOD_RES (14), (15), (16), (17), (18): Xaa is A or G
  MOD_RES (19), (20), (21), (22): Xaa is A or G or is absent
GXGEVVMDEYKFKXXXXXXXXXLYLMSIPELETPVXXAKPI

SEQ ID NO: 17034 - protein, 38 aa, Artificial Sequence
  Non-cyclic GFR-binding peptide
  MOD_RES (1), (35), (36): Xaa is C or S
  MOD_RES (13), (14), (15), (16), (17): Xaa is A or G
  MOD_RES (18), (19), (20), (21): Xaa is A or G or is absent
XESVAMGEYQKYXXXXXXXXXIYLISIPSLKTPVXXAK

SEQ ID NO: 17035 - protein, 38 aa, Artificial Sequence
  Non-cyclic GFR-binding peptide
  MOD_RES (1), (3), (35), (36): Xaa is C or S
XGXESVAMGRYKKLYTVVGKDFYLISIANLKTPVXXAK

SEQ ID NO: 17036 - protein, 37 aa, Artificial Sequence
  Non-cyclic GFR-binding peptide
  MOD_RES (1), (3), (35), (36): Xaa is C or S
XGXAKVVMNEYQKYIVNNSSDIYLVSIPSLKTPAXXA

SEQ ID NO: 17037 - protein, 40 aa, Artificial Sequence
  Non-cyclic GFR-binding peptide
  MOD_RES (1), (3), (37), (38): Xaa is C or S
  MOD_RES (15), (16), (17), (18), (19): Xaa is A or G
  MOD_RES (20), (21), (22), (23): Xaa is A or G or is absent
XGXSRVVMNEYKFKXXXXXXXXXLYLVSIPELKTPAXXPK

SEQ ID NO: 17038 - protein, 40 aa, Artificial Sequence
  Non-cyclic GFR-binding peptide
  MOD_RES (1), (3), (35), (36): Xaa is C or S
XGXGEVVMDEYQKYVVKENEDIYLMSIPSLETPVXXAKPI

SEQ ID NO: 17039 - protein, 42 aa, Artificial Sequence
  Non-cyclic GFR-binding peptide
  MOD_RES (2), (4), (36), (37): Xaa is C or S
RXGXAEVVMDRYKKLVVNNAADFYLISIANLRAPVXXSAPAA

SEQ ID NO: 17040 - protein, 31 aa, Artificial Sequence
  Non-cyclic GFR-binding peptide
  MOD_RES (31), (31): Xaa is C or S
RVVMNEYQKYIVNSSDDIYLVSIPSLKTPAX

SEQ ID NO: 17041 - protein, 39 aa, Artificial Sequence
  Non-cyclic GFR-binding peptide
  MOD_RES (2), (36), (37): Xaa is C or S
  MOD_RES (14), (15), (16), (17), (18): Xaa is A or G
  MOD_RES (19), (20), (21), (22): Xaa is A or G or is absent
GXESVAMGEYQKYXXXXXXXXXIYLISIPSLKTPVXXAK

SEQ ID NO: 17042 - protein, 41 aa, Artificial Sequence
  Non-cyclic GFR-binding peptide
  MOD_RES (2), (4), (38), (39): Xaa is C or S
  MOD_RES (16), (17), (18), (19), (20): Xaa is A or G
  MOD_RES (21), (22), (23), (24): Xaa is A or G or is absent
HXGXARVVMNEYKFKXXXXXXXXXLYLVSIPELQTPAXXPK

SEQ ID NO: 17043 - protein, 35 aa, Artificial Sequence
  Non-cyclic GFR-binding peptide
  MOD_RES (1), (35): Xaa is C or S
  MOD_RES (13), (14), (15), (16), (17): Xaa is A or G
  MOD_RES (18), (19), (20), (21): Xaa is A or G or is absent
XAEVVMDYHYKLXXXXXXXXXKYLISIPSLRAPVX

SEQ ID NO: 17044 - protein, 33 aa, Artificial Sequence
  Non-cyclic GFR-binding peptide
  MOD_RES (33), (33): Xaa is C or S
  MOD_RES (11), (12), (13), (14), (15): Xaa is A or G
  MOD_RES (16), (17), (18), (19): Xaa is A or G or is absent
EVVMEEYQKYXXXXXXXXXIYLMSIPSLETPVX

SEQ ID NO: 17045 - protein, 35 aa, Artificial Sequence
  Non-cyclic GFR-binding peptide
  MOD_RES (1), (1): Xaa is C or S
  MOD_RES (14), (15), (16), (17), (18): Xaa is A or G
  MOD_RES (19), (20), (21), (22): Xaa is A or G or is absent
XEAVSMGEEYKFKXXXXXXXXXLYLVSIPELKTPV

SEQ ID NO: 17046 - protein, 36 aa, Artificial Sequence
  Non-cyclic GFR-binding peptide
  MOD_RES (1), (3), (34), (35): Xaa is C or S
XKXSKVVMEYKFKVKPTRGVLYLISIPELDQPVXXP

SEQ ID NO: 17047 - protein, 40 aa, Artificial Sequence
  Non-cyclic GFR-binding peptide
  MOD_RES (1), (3), (34), (35): Xaa is C or S
XKXSRVIMEYKFKVKPKRGVLYLISIPELAQPVXXPAASA

SEQ ID NO: 17048 - protein, 41 aa, Artificial Sequence
  Non-cyclic GFR-binding peptide
  MOD_RES (1), (3), (38), (39): Xaa is C or S
  MOD_RES (16), (17), (18), (19), (20): Xaa is A or G
  MOD_RES (21), (22), (23), (24): Xaa is A or G or is absent
XGXEAVSMGEEYQKYXXXXXXXXXIYLVSIPSLKTPVXXAK

SEQ ID NO: 17049 - protein, 36 aa, Artificial Sequence
  Non-cyclic GFR-binding peptide
  MOD_RES (1), (3): Xaa is C or S
  MOD_RES (15), (16), (17), (18), (19): Xaa is A or G
  MOD_RES (20), (21), (22), (23): Xaa is A or G or is absent
XGXARVVMNEYKFKXXXXXXXXXLYLVSIPELQTPA

SEQ ID NO: 17050 - protein, 30 aa, Artificial Sequence
  Non-cyclic GFR-binding peptide
EVVMDRYKKLVVNNAADFYLISIANLRAPV

SEQ ID NO: 17051 - protein, 41 aa, Artificial Sequence
  Non-cyclic GFR-binding peptide
  MOD_RES (2), (35), (36): Xaa is C or S
  MOD_RES (13), (14), (15), (16), (17): Xaa is A or G
  MOD_RES (18), (19), (20), (21): Xaa is A or G or is absent
KXSKVVMEYQKYXXXXXXXXXIYLISIPSLDQPVXXPSASA

SEQ ID NO: 17052 - protein, 36 aa, Artificial Sequence
  Non-cyclic GFR-binding peptide
  MOD_RES (1), (3), (35), (36): Xaa is C or S
XGXESVAMGEYQKYYTVVGKDIYLISIPSLKTPVXX

SEQ ID NO: 17053 - protein, 40 aa, Artificial Sequence
  Non-cyclic GFR-binding peptide
  MOD_RES (1), (3), (36), (37): Xaa is C or S
XGXEAVSMGEEYKFKTPVGMDDLYLVSIPELKTPVXXAKG

SEQ ID NO: 17054 - protein, 38 aa, Artificial Sequence
  Non-cyclic GFR-binding peptide
  MOD_RES (1), (3), (35), (36): Xaa is C or S
XGXAEVVMDEYKFKVVNNAADLYLISIPELRAPVXXSA

SEQ ID NO: 17055 - protein, 37 aa, Artificial Sequence
  Non-cyclic GFR-binding peptide
  MOD_RES (2), (36), (37): Xaa is C or S
  MOD_RES (14), (15), (16), (17), (18): Xaa is A or G
  MOD_RES (19), (20), (21), (22): Xaa is A or G or is absent
GXAEVVMDEYKFKXXXXXXXXXLYLISIPELRAPVXX

SEQ ID NO: 17056 - protein, 35 aa, Artificial Sequence
  Non-cyclic GFR-binding peptide
  MOD_RES (33), (33): Xaa is C or S
  MOD_RES (11), (12), (13), (14), (15): Xaa is A or G
  MOD_RES (16), (17), (18), (19): Xaa is A or G or is absent
RVVMNEYQKYXXXXXXXXXIYLVSIPSLKTPAXTP

SEQ ID NO: 17057 - protein, 36 aa, Artificial Sequence
  Non-cyclic GFR-binding peptide
  MOD_RES (1), (3): Xaa is C or S
  MOD_RES (15), (16), (17), (18), (19): Xaa is A or G
  MOD_RES (20), (21), (22), (23): Xaa is A or G or is absent
XGXARVVMNEYQKYXXXXXXXXXIYLVSIPSLQTPA

SEQ ID NO: 17058 - protein, 33 aa, Artificial Sequence
  Non-cyclic GFR-binding peptide
  MOD_RES (1), (33): Xaa is C or S
XGEVVMEEYQKYVVKDYEDIYLMSIPSLETPVX

SEQ ID NO: 17059 - protein, 34 aa, Artificial Sequence
  Non-cyclic GFR-binding peptide
  MOD_RES (2), (4): Xaa is C or S
SXKXSKVVMEYQKYVKPTRGVIYLISIPSLDQPV

SEQ ID NO: 17060 - protein, 39 aa, Artificial Sequence
  Non-cyclic GFR-binding peptide
  MOD_RES (34), (35): Xaa is C or S
  MOD_RES (12), (13), (14), (15), (16): Xaa is A or G
  MOD_RES (17), (18), (19), (20): Xaa is A or G or is absent
AEVVMDYHYKLXXXXXXXXXKYLISIPSLRAPVXXSAPA

SEQ ID NO: 17061 - protein, 39 aa, Artificial Sequence
  Non-cyclic GFR-binding peptide
  MOD_RES (2), (4), (37), (38): Xaa is C or S
  MOD_RES (15), (16), (17), (18), (19): Xaa is A or G
  MOD_RES (20), (21), (22), (23): Xaa is A or G or is absent
SXKXSRVIMEYKFKXXXXXXXXXLYLISIPELAQPVXXP

SEQ ID NO: 17062 - protein, 34 aa, Artificial Sequence
  Non-cyclic GFR-binding peptide
  MOD_RES (32), (33): Xaa is C or S
GEVVMEEYQKYVVKDYEDIYLMSIPSLETPVXXA

SEQ ID NO: 17063 - protein, 42 aa, Artificial Sequence
  Non-cyclic GFR-binding peptide
  MOD_RES (2), (37), (38): Xaa is C or S
  MOD_RES (15), (16), (17), (18), (19): Xaa is A or G
  MOD_RES (20), (21), (22), (23): Xaa is A or G or is absent
GXEAVSMGEEYKFKXXXXXXXXXLYLVSIPELKTPVXXAKGV

SEQ ID NO: 17064 - protein, 35 aa, Artificial Sequence
  Non-cyclic GFR-binding peptide
  MOD_RES (2), (33), (34): Xaa is C or S
KXSRVIMEYKFKVKPKRGVLYLISIPELAQPVXXP

SEQ ID NO: 17065 - protein, 40 aa, Artificial Sequence
  Non-cyclic GFR-binding peptide
  MOD_RES (2), (36), (37): Xaa is C or S
  MOD_RES (14), (15), (16), (17), (18): Xaa is A or G
  MOD_RES (19), (20), (21), (22): Xaa is A or G or is absent
GXSRVVMNEYQKYXXXXXXXXXIYLVSIPSLKTPAXXPKP

SEQ ID NO: 17066 - protein, 38 aa, Artificial Sequence
  Non-cyclic GFR-binding peptide
  MOD_RES (2), (34): Xaa is C or S
GXSRVVMNEYKFKIVNSSDDLYLVSIPELKTPAXTPKT

SEQ ID NO: 17067 - protein, 41 aa, Artificial Sequence
  Non-cyclic GFR-binding peptide
  MOD_RES (2), (4), (36), (37): Xaa is C or S
RXGXESVAMGRYKKLYTVVGKDFYLISIANLKTPVXXAKSA

SEQ ID NO: 17068 - protein, 35 aa, Artificial Sequence
  Non-cyclic GFR-binding peptide
  MOD_RES (2), (2): Xaa is C or S
  MOD_RES (14), (15), (16), (17), (18): Xaa is A or G
  MOD_RES (19), (20), (21), (22): Xaa is A or G or is absent
GXGEVVMEEYKFKXXXXXXXXXLYLMSIPELETPV

SEQ ID NO: 17069 - protein, 31 aa, Artificial Sequence
  Non-cyclic GFR-binding peptide
  MOD_RES (31), (31): Xaa is C or S
SRVIMEYQKYVKPKRGVIYLISIPSLAQPVX

SEQ ID NO: 17070 - protein, 37 aa, Artificial Sequence
  Non-cyclic GFR-binding peptide
  MOD_RES (2), (4), (37): Xaa is C or S
  MOD_RES (15), (16), (17), (18), (19): Xaa is A or G
  MOD_RES (20), (21), (22), (23): Xaa is A or G or is absent
SXKXSRVIMEYKFKXXXXXXXXXLYLISIPELAQPVX

SEQ ID NO: 17071 - protein, 34 aa, Artificial Sequence
  Non-cyclic GFR-binding peptide
  MOD_RES (1), (33), (34): Xaa is C or S
XGEVVMDEYQKYVVKENEDIYLMSIPSLETPVXX

SEQ ID NO: 17072 - protein, 40 aa, Artificial Sequence
  Non-cyclic GFR-binding peptide
  MOD_RES (1), (35), (36): Xaa is C or S
  MOD_RES (13), (14), (15), (16), (17): Xaa is A or G
  MOD_RES (18), (19), (20), (21): Xaa is A or G or is absent
XARVVMNEYQKYXXXXXXXXXIYLVSIPSLQTPAXXPKPV

SEQ ID NO: 17073 - protein, 38 aa, Artificial Sequence
  Non-cyclic GFR-binding peptide
  MOD_RES (1), (3), (37), (38): Xaa is C or S
  MOD_RES (15), (16), (17), (18), (19): Xaa is A or G
  MOD_RES (20), (21), (22), (23): Xaa is A or G or is absent
XGXESVAMGEYQKYXXXXXXXXXIYLISIPSLKTPVXX

SEQ ID NO: 17074 - protein, 34 aa, Artificial Sequence
  Non-cyclic GFR-binding peptide
  MOD_RES (32), (33): Xaa is C or S
GEVVMDEYQKYVVKENEDIYLMSIPSLETPVXXA

SEQ ID NO: 17075 - protein, 39 aa, Artificial Sequence
  Non-cyclic GFR-binding peptide
  MOD_RES (33), (34): Xaa is C or S
  MOD_RES (11), (12), (13), (14), (15): Xaa is A or G
  MOD_RES (16), (17), (18), (19): Xaa is A or G or is absent
SKVIMEYKFKXXXXXXXXXLYLISIPELDQSVXXPSASA

SEQ ID NO: 17076 - protein, 37 aa, Artificial Sequence
  Non-cyclic GFR-binding peptide
  MOD_RES (31), (32): Xaa is C or S
SVAMGEYQKYYTVVGKDIYLISIPSLKTPVXXAKSAK

SEQ ID NO: 17077 - protein, 34 aa, Artificial Sequence
  Non-cyclic GFR-binding peptide
  MOD_RES (31), (32): Xaa is C or S
KVVMNEYKFKIVNNSSDLYLVSIPELKTPAXXAK

SEQ ID NO: 17078 - protein, 38 aa, Artificial Sequence
  Non-cyclic GFR-binding peptide
  MOD_RES (2), (4), (35), (36): Xaa is C or S
SXKXSKVIMEYKFKIKPTKGILYLISIPELDQSVXXPS

SEQ ID NO: 17079 - protein, 39 aa, Artificial Sequence
  Non-cyclic GFR-binding peptide
  MOD_RES (34), (34): Xaa is C or S
  MOD_RES (12), (13), (14), (15), (16): Xaa is A or G
  MOD_RES (17), (18), (19), (20): Xaa is A or G or is absent
SRVVMNEYQKYXXXXXXXXXIYLVSIPSLKTPAXTPKTV

SEQ ID NO: 17080 - protein, 35 aa, Artificial Sequence
  Non-cyclic GFR-binding peptide
  MOD_RES (2), (35): Xaa is C or S
GXEAVSMGEEYQKYTPVGMDDIYLVSIPSLKTPVX

SEQ ID NO: 17081 - protein, 34 aa, Artificial Sequence
  Non-cyclic GFR-binding peptide
  MOD_RES (34), (34): Xaa is C or S
  MOD_RES (12), (13), (14), (15), (16): Xaa is A or G
  MOD_RES (17), (18), (19), (20): Xaa is A or G or is absent
AKVVMNEYQKYXXXXXXXXXIYLVSIPSLKTPAX

SEQ ID NO: 17082 - protein, 43 aa, Artificial Sequence
  Non-cyclic GFR-binding peptide
  MOD_RES (2), (4), (37), (38): Xaa is C or S
RXGXEAVSMGEEYKFKTPVGMDDLYLVSIPELKTPVXXAKGVK

SEQ ID NO: 17083 - protein, 40 aa, Artificial Sequence
  Non-cyclic GFR-binding peptide
  MOD_RES (2), (34), (35): Xaa is C or S
GXSRVVMNEYQKYIVNSSDDIYLVSIPSLKTPAXXPKPVY

SEQ ID NO: 17084 - protein, 40 aa, Artificial Sequence
  Non-cyclic GFR-binding peptide
  MOD_RES (2), (34), (35): Xaa is C or S
GXESVAMGEYQKYYTVVGKDIYLISIPSLKTPVXXAKSAK

SEQ ID NO: 17085 - protein, 36 aa, Artificial Sequence
  Non-cyclic GFR-binding peptide
  MOD_RES (34), (35): Xaa is C or S
  MOD_RES (12), (13), (14), (15), (16): Xaa is A or G
  MOD_RES (17), (18), (19), (20): Xaa is A or G or is absent
GEVVMDEYKFKXXXXXXXXXLYLMSIPELETPVXXA

SEQ ID NO: 17086 - protein, 34 aa, Artificial Sequence
  Non-cyclic GFR-binding peptide
  MOD_RES (1), (33), (34): Xaa is C or S
XGEVVMEEYQKYVVKDYEDIYLMSIPSLETPVXX

SEQ ID NO: 17087 - protein, 33 aa, Artificial Sequence
  Non-cyclic GFR-binding peptide
  MOD_RES (33), (33): Xaa is C or S
  MOD_RES (11), (12), (13), (14), (15): Xaa is A or G
  MOD_RES (16), (17), (18), (19): Xaa is A or G or is absent
SRVIMEYQKYXXXXXXXXXIYLISIPSLAQPVX

SEQ ID NO: 17088 - protein, 38 aa, Artificial Sequence
  Non-cyclic GFR-binding peptide
  MOD_RES (33), (34): Xaa is C or S
  MOD_RES (11), (12), (13), (14), (15): Xaa is A or G
  MOD_RES (16), (17), (18), (19): Xaa is A or G or is absent
SKVIMEYQKYXXXXXXXXXIYLISIPSLDQSVXXPSAS

SEQ ID NO: 17089 - protein, 35 aa, Artificial Sequence
  Non-cyclic GFR-binding peptide
  MOD_RES (2), (4): Xaa is C or S
HXGXSRVVMNEYQKYIVNSSDDIYLVSIPSLKTPA

SEQ ID NO: 17090 - protein, 42 aa, Artificial Sequence
  Non-cyclic GFR-binding peptide
  MOD_RES (2), (36), (37): Xaa is C or S
  MOD_RES (14), (15), (16), (17), (18): Xaa is A or G
  MOD_RES (19), (20), (21), (22): Xaa is A or G or is absent
GXAEVVMDRYKKLXXXXXXXXXFYLISIANLRAPVXXSAPAA

SEQ ID NO: 17091 - protein, 41 aa, Artificial Sequence
  Non-cyclic GFR-binding peptide
  MOD_RES (2), (4), (38), (39): Xaa is C or S
  MOD_RES (16), (17), (18), (19), (20): Xaa is A or G
  MOD_RES (21), (22), (23), (24): Xaa is A or G or is absent
RXGXAEVVMDRYKKLXXXXXXXXXFYLISIANLRAPVXXSA

SEQ ID NO: 17092 - protein, 44 aa, Artificial Sequence
  Non-cyclic GFR-binding peptide
  MOD_RES (2), (4), (38), (39): Xaa is C or S
  MOD_RES (16), (17), (18), (19), (20): Xaa is A or G
  MOD_RES (21), (22), (23), (24): Xaa is A or G or is absent
RXGXESVAMGRYKKLXXXXXXXXXFYLISIANLKTPVXXAKSAK

SEQ ID NO: 17093 - protein, 40 aa, Artificial Sequence
  Non-cyclic GFR-binding peptide
  MOD_RES (2), (4), (37), (38): Xaa is C or S
  MOD_RES (15), (16), (17), (18), (19): Xaa is A or G
  MOD_RES (20), (21), (22), (23): Xaa is A or G or is absent
SXKXSRVIMEYQKYXXXXXXXXXIYLISIPSLAQPVXXPA

SEQ ID NO: 17094 - protein, 40 aa, Artificial Sequence
  Non-cyclic GFR-binding peptide
  MOD_RES (1), (3), (35), (36): Xaa is C or S
XGXESVAMGYHYKLYTVVGKDKYLISIPSLKTPVXXAKSA

SEQ ID NO: 17095 - protein, 35 aa, Artificial Sequence
  Non-cyclic GFR-binding peptide
  MOD_RES (1), (3), (35): Xaa is C or S
XGXGEVVMDEYQKYVVKENEDIYLMSIPSLETPVX

SEQ ID NO: 17096 - protein, 44 aa, Artificial Sequence
  Non-cyclic GFR-binding peptide
  MOD_RES (2), (4), (38), (39): Xaa is C or S
  MOD_RES (16), (17), (18), (19), (20): Xaa is A or G
  MOD_RES (21), (22), (23), (24): Xaa is A or G or is absent
HXGXSRVVMNEYQKYXXXXXXXXXIYLVSIPSLKTPAXXPKPVY

SEQ ID NO: 17097 - protein, 41 aa, Artificial Sequence
  Non-cyclic GFR-binding peptide
  MOD_RES (2), (4), (38), (39): Xaa is C or S
  MOD_RES (16), (17), (18), (19), (20): Xaa is A or G
  MOD_RES (21), (22), (23), (24): Xaa is A or G or is absent
RXGXAEVVMDEYKFKXXXXXXXXXLYLISIPELRAPVXXSA

SEQ ID NO: 17098 - protein, 35 aa, Artificial Sequence
  Non-cyclic GFR-binding peptide
  MOD_RES (1), (3): Xaa is C or S
  MOD_RES (14), (15), (16), (17), (18): Xaa is A or G
  MOD_RES (19), (20), (21), (22): Xaa is A or G or is absent
XKXSKVIMEYKFKXXXXXXXXXLYLISIPELDQSV

SEQ ID NO: 17099 - protein, 36 aa, Artificial Sequence
  Non-cyclic GFR-binding peptide
  MOD_RES (1), (34), (35): Xaa is C or S
  MOD_RES (12), (13), (14), (15), (16): Xaa is A or G
  MOD_RES (17), (18), (19), (20): Xaa is A or G or is absent
XSKVVMEYKFKXXXXXXXXXLYLISIPELDQPVXXP

SEQ ID NO: 17100 - protein, 39 aa, Artificial Sequence
  Non-cyclic GFR-binding peptide
  MOD_RES (1), (35), (36): Xaa is C or S
  MOD_RES (13), (14), (15), (16), (17): Xaa is A or G
  MOD_RES (18), (19), (20), (21): Xaa is A or G or is absent
XGEVVMEEYKFKXXXXXXXXXLYLMSIPELETPVXXAKP

SEQ ID NO: 17101 - protein, 41 aa, Artificial Sequence
  Non-cyclic GFR-binding peptide
  MOD_RES (1), (3), (35), (36): Xaa is C or S
XGXESVAMGEYQKYYTVVGKDIYLISIPSLKTPVXXAKSAK

SEQ ID NO: 17102 - protein, 41 aa, Artificial Sequence
  Non-cyclic GFR-binding peptide
  MOD_RES (2), (36): Xaa is C or S
  MOD_RES (14), (15), (16), (17), (18): Xaa is A or G
  MOD_RES (19), (20), (21), (22): Xaa is A or G or is absent
GXSRVVMNEYQKYXXXXXXXXXIYLVSIPSLKTPAXTPKTV

SEQ ID NO: 17103 - protein, 39 aa, Artificial Sequence
  Non-cyclic GFR-binding peptide
  MOD_RES (1), (3), (36), (37): Xaa is C or S
  MOD_RES (14), (15), (16), (17), (18): Xaa is A or G
  MOD_RES (19), (20), (21), (22): Xaa is A or G or is absent
XKXSRVIMEYKFKXXXXXXXXXLYLISIPELAQPVXXPA

SEQ ID NO: 17104 - protein, 38 aa, Artificial Sequence
  Non-cyclic GFR-binding peptide
  MOD_RES (1), (3), (36), (37): Xaa is C or S
  MOD_RES (14), (15), (16), (17), (18): Xaa is A or G
  MOD_RES (19), (20), (21), (22): Xaa is A or G or is absent
XKXSRVIMEYQKYXXXXXXXXXIYLISIPSLAQPVXXP

SEQ ID NO: 17105 - protein, 35 aa, Artificial Sequence
  Non-cyclic GFR-binding peptide
  MOD_RES (31), (32): Xaa is C or S
SRVIMEYKFKVKPKRGVLYLISIPELAQPVXXPAA

SEQ ID NO: 17106 - protein, 38 aa, Artificial Sequence
  Non-cyclic GFR-binding peptide
  MOD_RES (34), (35): Xaa is C or S
  MOD_RES (12), (13), (14), (15), (16): Xaa is A or G
  MOD_RES (17), (18), (19), (20): Xaa is A or G or is absent
GEVVMEEYQKYXXXXXXXXXIYLMSIPSLETPVXXAKP

SEQ ID NO: 17107 - protein, 31 aa, Artificial Sequence
  Non-cyclic GFR-binding peptide
  MOD_RES (31), (31): Xaa is C or S
SKVIMEYKFKIKPTKGILYLISIPELDQSVX

SEQ ID NO: 17108 - protein, 32 aa, Artificial Sequence
  Non-cyclic GFR-binding peptide
  MOD_RES (11), (12), (13), (14), (15): Xaa is A or G
  MOD_RES (16), (17), (18), (19): Xaa is A or G or is absent
EVVMEEYKFKXXXXXXXXXLYLMSIPELETPV

SEQ ID NO: 17109 - protein, 34 aa, Artificial Sequence
  Non-cyclic GFR-binding peptide
  MOD_RES (31), (31): Xaa is C or S
RVVMNEYQKYIVNSSDDIYLVSIPSLKTPAXTPK

SEQ ID NO: 17110 - protein, 36 aa, Artificial Sequence
  Non-cyclic GFR-binding peptide
  MOD_RES (33), (34): Xaa is C or S
  MOD_RES (11), (12), (13), (14), (15): Xaa is A or G
  MOD_RES (16), (17), (18), (19): Xaa is A or G or is absent
SKVVMEYKFKXXXXXXXXXLYLISIPELDQPVXXPS

SEQ ID NO: 17111 - protein, 33 aa, Artificial Sequence
  Non-cyclic GFR-binding peptide
  MOD_RES (32), (33): Xaa is C or S
AEVVMDEYKFKVVNNAADLYLISIPELRAPVXX

SEQ ID NO: 17112 - protein, 37 aa, Artificial Sequence
  Non-cyclic GFR-binding peptide
  MOD_RES (32), (33): Xaa is C or S
ESVAMGYHYKLYTVVGKDKYLISIPSLKTPVXXAKSA

SEQ ID NO: 17113 - protein, 37 aa, Artificial Sequence
  Non-cyclic GFR-binding peptide
  MOD_RES (2), (4), (36), (37): Xaa is C or S
HXGXSRVVMNEYKFKIVNSSDDLYLVSIPELKTPAXX

SEQ ID NO: 17114 - protein, 35 aa, Artificial Sequence
  Non-cyclic GFR-binding peptide
  MOD_RES (34), (35): Xaa is C or S
  MOD_RES (12), (13), (14), (15), (16): Xaa is A or G
  MOD_RES (17), (18), (19), (20): Xaa is A or G or is absent
ARVVMNEYQKYXXXXXXXXXIYLVSIPSLQTPAXX

SEQ ID NO: 17115 - protein, 38 aa, Artificial Sequence
  Non-cyclic GFR-binding peptide
  MOD_RES (32), (33): Xaa is C or S
AEVVMDRYKKLVVNNAADFYLISIANLRAPVXXSAPAA

SEQ ID NO: 17116 - protein, 41 aa, Artificial Sequence
  Non-cyclic GFR-binding peptide
  MOD_RES (2), (4), (37), (38): Xaa is C or S
  MOD_RES (15), (16), (17), (18), (19): Xaa is A or G
  MOD_RES (20), (21), (22), (23): Xaa is A or G or is absent
SXKXSKVIMEYKFKXXXXXXXXXLYLISIPELDQSVXXPSA

SEQ ID NO: 17117 - protein, 39 aa, Artificial Sequence
  Non-cyclic GFR-binding peptide
  MOD_RES (2), (33), (34): Xaa is C or S
KXSKVIMEYQKYIKPTKGIIYLISIPSLDQSVXXPSASA

SEQ ID NO: 17118 - protein, 41 aa, Artificial Sequence
  Non-cyclic GFR-binding peptide
  MOD_RES (2), (4), (36): Xaa is C or S
HXGXSRVVMNEYQKYIVNSSDDIYLVSIPSLKTPAXTPKTV

SEQ ID NO: 17119 - protein, 39 aa, Artificial Sequence
  Non-cyclic GFR-binding peptide
  MOD_RES (1), (3), (36), (37): Xaa is C or S
  MOD_RES (14), (15), (16), (17), (18): Xaa is A or G
  MOD_RES (19), (20), (21), (22): Xaa is A or G or is absent
XKXSKVIMEYKFKXXXXXXXXXLYLISIPELDQSVXXPS

SEQ ID NO: 17120 - protein, 35 aa, Artificial Sequence
  Non-cyclic GFR-binding peptide
  MOD_RES (1), (34), (35): Xaa is C or S
  MOD_RES (12), (13), (14), (15), (16): Xaa is A or G
  MOD_RES (17), (18), (19), (20): Xaa is A or G or is absent
XSKVIMEYKFKXXXXXXXXXLYLISIPELDQSVXX

SEQ ID NO: 17121 - protein, 39 aa, Artificial Sequence
  Non-cyclic GFR-binding peptide
  MOD_RES (1), (33), (34): Xaa is C or S
XAKVVMNEYKFKIVNNSSDLYLVSIPELKTPAXXAKPVA

SEQ ID NO: 17122 - protein, 34 aa, Artificial Sequence
  Non-cyclic GFR-binding peptide
  MOD_RES (1), (3): Xaa is C or S
XGXSRVVMNEYQKYIVNSSDDIYLVSIPSLKTPA

SEQ ID NO: 17123 - protein, 42 aa, Artificial Sequence
  Non-cyclic GFR-binding peptide
  MOD_RES (2), (4), (38), (39): Xaa is C or S
  MOD_RES (16), (17), (18), (19), (20): Xaa is A or G
  MOD_RES (21), (22), (23), (24): Xaa is A or G or is absent
RXGXGEVVMEEYKFKXXXXXXXXXLYLMSIPELETPVXXAKP

SEQ ID NO: 17124 - protein, 38 aa, Artificial Sequence
  Non-cyclic GFR-binding peptide
  MOD_RES (2), (34), (35): Xaa is C or S
GXGEVVMDEYKFKVVKENEDLYLMSIPELETPVXXAKP

SEQ ID NO: 17125 - protein, 32 aa, Artificial Sequence
  Non-cyclic GFR-binding peptide
  MOD_RES (31), (32): Xaa is C or S
SVAMGRYKKLYTVVGKDFYLISIANLKTPVXX

SEQ ID NO: 17126 - protein, 33 aa, Artificial Sequence
  Non-cyclic GFR-binding peptide
  MOD_RES (1), (3): Xaa is C or S
XKXSKVIMEYQKYIKPTKGIIYLISIPSLDQSV

SEQ ID NO: 17127 - protein, 40 aa, Artificial Sequence
  Non-cyclic GFR-binding peptide
  MOD_RES (1), (35), (36): Xaa is C or S
  MOD_RES (13), (14), (15), (16), (17): Xaa is A or G
  MOD_RES (18), (19), (20), (21): Xaa is A or G or is absent
XAKVVMNEYKFKXXXXXXXXXLYLVSIPELKTPAXXAKPV

SEQ ID NO: 17128 - protein, 39 aa, Artificial Sequence
  Non-cyclic GFR-binding peptide
  MOD_RES (34), (35): Xaa is C or S
  MOD_RES (12), (13), (14), (15), (16): Xaa is A or G
  MOD_RES (17), (18), (19), (20): Xaa is A or G or is absent
SRVVMNEYKFKXXXXXXXXXLYLVSIPELKTPAXXPKPV

SEQ ID NO: 17129 - protein, 34 aa, Artificial Sequence
  Non-cyclic GFR-binding peptide
  MOD_RES (1), (3), (34): Xaa is C or S
XKXSKVVMEYQKYVKPTRGVIYLISIPSLDQPVX

SEQ ID NO: 17130 - protein, 40 aa, Artificial Sequence
  Non-cyclic GFR-binding peptide
  MOD_RES (2), (4), (35), (36): Xaa is C or S
SXKXSKVIMEYKFKIKPTKGILYLISIPELDQSVXXPSAS

SEQ ID NO: 17131 - protein, 40 aa, Artificial Sequence
  Non-cyclic GFR-binding peptide
  MOD_RES (2), (35), (36): Xaa is C or S
  MOD_RES (13), (14), (15), (16), (17): Xaa is A or G
  MOD_RES (18), (19), (20), (21): Xaa is A or G or is absent
KXSKVVMEYQKYXXXXXXXXXIYLISIPSLDQPVXXPSAS

SEQ ID NO: 17132 - protein, 39 aa, Artificial Sequence
  Non-cyclic GFR-binding peptide
  MOD_RES (2), (4), (36), (37): Xaa is C or S
HXGXAKVVMNEYQKYIVNNSSDIYLVSIPSLKTPAXXAK

SEQ ID NO: 17133 - protein, 41 aa, Artificial Sequence
  Non-cyclic GFR-binding peptide
  MOD_RES (2), (4), (37), (38): Xaa is C or S
  MOD_RES (15), (16), (17), (18), (19): Xaa is A or G
  MOD_RES (20), (21), (22), (23): Xaa is A or G or is absent
SXKXSRVIMEYQKYXXXXXXXXXIYLISIPSLAQPVXXPAA

SEQ ID NO: 17134 - protein, 40 aa, Artificial Sequence
  Non-cyclic GFR-binding peptide
  MOD_RES (2), (36), (37): Xaa is C or S
  MOD_RES (14), (15), (16), (17), (18): Xaa is A or G
  MOD_RES (19), (20), (21), (22): Xaa is A or G or is absent
GXAEVVMDRYKKLXXXXXXXXXFYLISIANLRAPVXXSAP

SEQ ID NO: 17135 - protein, 35 aa, Artificial Sequence
  Non-cyclic GFR-binding peptide
  MOD_RES (32), (33): Xaa is C or S
ARVVMNEYQKYIVNSSDDIYLVSIPSLQTPAXXPK

SEQ ID NO: 17136 - protein, 41 aa, Artificial Sequence
  Non-cyclic GFR-binding peptide
  MOD_RES (1), (3), (36), (37): Xaa is C or S
  MOD_RES (14), (15), (16), (17), (18): Xaa is A or G
  MOD_RES (19), (20), (21), (22): Xaa is A or G or is absent
XKXSKVVMEYKFKXXXXXXXXXLYLISIPELDQPVXXPSAS

SEQ ID NO: 17137 - protein, 38 aa, Artificial Sequence
  Non-cyclic GFR-binding peptide
  MOD_RES (2), (36), (37): Xaa is C or S
  MOD_RES (14), (15), (16), (17), (18): Xaa is A or G
  MOD_RES (19), (20), (21), (22): Xaa is A or G or is absent
GXESVAMGRYKKLXXXXXXXXXFYLISIANLKTPVXXA

SEQ ID NO: 17138 - protein, 40 aa, Artificial Sequence
  Non-cyclic GFR-binding peptide
  MOD_RES (2), (35), (36): Xaa is C or S
  MOD_RES (13), (14), (15), (16), (17): Xaa is A or G
  MOD_RES (18), (19), (20), (21): Xaa is A or G or is absent
KXSRVIMEYKFKXXXXXXXXXLYLISIPELAQPVXXPAAS

SEQ ID NO: 17139 - protein, 36 aa, Artificial Sequence
  Non-cyclic GFR-binding peptide
  MOD_RES (34), (35): Xaa is C or S
  MOD_RES (12), (13), (14), (15), (16): Xaa is A or G
  MOD_RES (17), (18), (19), (20): Xaa is A or G or is absent
AEVVMDYHYKLXXXXXXXXXKYLISIPSLRAPVXXS

SEQ ID NO: 17140 - protein, 41 aa, Artificial Sequence
  Non-cyclic GFR-binding peptide
  MOD_RES (1), (35), (36): Xaa is C or S
  MOD_RES (13), (14), (15), (16), (17): Xaa is A or G
  MOD_RES (18), (19), (20), (21): Xaa is A or G or is absent
XARVVMNEYQKYXXXXXXXXXIYLVSIPSLQTPAXXPKPVT

SEQ ID NO: 17141 - protein, 41 aa, Artificial Sequence
  Non-cyclic GFR-binding peptide
  MOD_RES (2), (4), (35), (36): Xaa is C or S
SXKXSKVVMEYKFKVKPTRGVLYLISIPELDQPVXXPSASA

SEQ ID NO: 17142 - protein, 34 aa, Artificial Sequence
  Non-cyclic GFR-binding peptide
  MOD_RES (32), (33): Xaa is C or S
SRVVMNEYKFKIVNSSDDLYLVSIPELKTPAXXP

SEQ ID NO: 17143 - protein, 37 aa, Artificial Sequence
  Non-cyclic GFR-binding peptide
  MOD_RES (2), (4): Xaa is C or S
  MOD_RES (16), (17), (18), (19), (20): Xaa is A or G
  MOD_RES (21), (22), (23), (24): Xaa is A or G or is absent
RXGXGEVVMEEYQKYXXXXXXXXXIYLMSIPSLETPV

SEQ ID NO: 17144 - protein, 37 aa, Artificial Sequence
  Non-cyclic GFR-binding peptide
  MOD_RES (2), (36), (37): Xaa is C or S
  MOD_RES (14), (15), (16), (17), (18): Xaa is A or G
  MOD_RES (19), (20), (21), (22): Xaa is A or G or is absent
GXGEVVMEEYQKYXXXXXXXXXIYLMSIPSLETPVXX

SEQ ID NO: 17145 - protein, 38 aa, Artificial Sequence
  Non-cyclic GFR-binding peptide
  MOD_RES (1), (32), (33): Xaa is C or S
XSKVVMEYKFKVKPTRGVLYLISIPELDQPVXXPSASA

SEQ ID NO: 17146 - protein, 37 aa, Artificial Sequence
  Non-cyclic GFR-binding peptide
  MOD_RES (32), (33): Xaa is C or S
ESVAMGEYQKYYTVVGKDIYLISIPSLKTPVXXAKSA

SEQ ID NO: 17147 - protein, 40 aa, Artificial Sequence
  Non-cyclic GFR-binding peptide
  MOD_RES (2), (4), (36), (37): Xaa is C or S
RXGXGEVVMDEYKFKVVKENEDLYLMSIPELETPVXXAKP

SEQ ID NO: 17148 - protein, 39 aa, Artificial Sequence
  Non-cyclic GFR-binding peptide
  MOD_RES (1), (34), (35): Xaa is C or S
  MOD_RES (12), (13), (14), (15), (16): Xaa is A or G
  MOD_RES (17), (18), (19), (20): Xaa is A or G or is absent
XSRVIMEYQKYXXXXXXXXXIYLISIPSLAQPVXXPAAS

SEQ ID NO: 17149 - protein, 38 aa, Artificial Sequence
  Non-cyclic GFR-binding peptide
  MOD_RES (1), (3), (37), (38): Xaa is C or S
  MOD_RES (15), (16), (17), (18), (19): Xaa is A or G
  MOD_RES (20), (21), (22), (23): Xaa is A or G or is absent
XGXSRVVMNEYQKYXXXXXXXXXIYLVSIPSLKTPAXX

SEQ ID NO: 17150 - protein, 35 aa, Artificial Sequence
  Non-cyclic GFR-binding peptide
  MOD_RES (2), (33), (34): Xaa is C or S
KXSKVVMEYQKYVKPTRGVIYLISIPSLDQPVXXP

SEQ ID NO: 17151 - protein, 41 aa, Artificial Sequence
  Non-cyclic GFR-binding peptide
  MOD_RES (1), (35): Xaa is C or S
  MOD_RES (13), (14), (15), (16), (17): Xaa is A or G
  MOD_RES (18), (19), (20), (21): Xaa is A or G or is absent
XSRVVMNEYQKYXXXXXXXXXIYLVSIPSLKTPAXTPKTVH

SEQ ID NO: 17152 - protein, 41 aa, Artificial Sequence
  Non-cyclic GFR-binding peptide
  MOD_RES (1), (3), (37), (38): Xaa is C or S
  MOD_RES (15), (16), (17), (18), (19): Xaa is A or G
  MOD_RES (20), (21), (22), (23): Xaa is A or G or is absent
XGXAKVVMNEYKFKXXXXXXXXXLYLVSIPELKTPAXXAKP

SEQ ID NO: 17153 - protein, 38 aa, Artificial Sequence
  Non-cyclic GFR-binding peptide
  MOD_RES (2), (4), (38): Xaa is C or S
  MOD_RES (16), (17), (18), (19), (20): Xaa is A or G
  MOD_RES (21), (22), (23), (24): Xaa is A or G or is absent
RXGXGEVVMEEYQKYXXXXXXXXXIYLMSIPSLETPVX

SEQ ID NO: 17154 - protein, 37 aa, Artificial Sequence
  Non-cyclic GFR-binding peptide
  MOD_RES (2), (4), (37): Xaa is C or S
  MOD_RES (15), (16), (17), (18), (19): Xaa is A or G
  MOD_RES (20), (21), (22), (23): Xaa is A or G or is absent
SXKXSRVIMEYQKYXXXXXXXXXIYLISIPSLAQPVX

SEQ ID NO: 17155 - protein, 35 aa, Artificial Sequence
  Non-cyclic GFR-binding peptide
  MOD_RES (2), (34), (35): Xaa is C or S
GXARVVMNEYQKYIVNSSDDIYLVSIPSLQTPAXX

SEQ ID NO: 17156 - protein, 34 aa, Artificial Sequence
  Non-cyclic GFR-binding peptide
  MOD_RES (1), (33), (34): Xaa is C or S
XAKVVMNEYQKYIVNNSSDIYLVSIPSLKTPAXX

SEQ ID NO: 17157 - protein, 36 aa, Artificial Sequence
  Non-cyclic GFR-binding peptide
  MOD_RES (1), (3): Xaa is C or S
  MOD_RES (15), (16), (17), (18), (19): Xaa is A or G
  MOD_RES (20), (21), (22), (23): Xaa is A or G or is absent
XGXAKVVMNEYKFKXXXXXXXXXLYLVSIPELKTPA

SEQ ID NO: 17158 - protein, 36 aa, Artificial Sequence
  Non-cyclic GFR-binding peptide
  MOD_RES (2), (36): Xaa is C or S
  MOD_RES (14), (15), (16), (17), (18): Xaa is A or G
  MOD_RES (19), (20), (21), (22): Xaa is A or G or is absent
GXAKVVMNEYQKYXXXXXXXXXIYLVSIPSLKTPAX

SEQ ID NO: 17159 - protein, 38 aa, Artificial Sequence
  Non-cyclic GFR-binding peptide
  MOD_RES (1), (35): Xaa is C or S
  MOD_RES (13), (14), (15), (16), (17): Xaa is A or G
  MOD_RES (18), (19), (20), (21): Xaa is A or G or is absent
XSRVVMNEYQKYXXXXXXXXXIYLVSIPSLKTPAXTPK

SEQ ID NO: 17160 - protein, 36 aa, Artificial Sequence
  Non-cyclic GFR-binding peptide
  MOD_RES (2), (36): Xaa is C or S
  MOD_RES (14), (15), (16), (17), (18): Xaa is A or G
  MOD_RES (19), (20), (21), (22): Xaa is A or G or is absent
GXGEVVMDEYKFKXXXXXXXXXLYLMSIPELETPVX

SEQ ID NO: 17161 - protein, 34 aa, Artificial Sequence
  Non-cyclic GFR-binding peptide
  MOD_RES (34), (34): Xaa is C or S
  MOD_RES (12), (13), (14), (15), (16): Xaa is A or G
  MOD_RES (17), (18), (19), (20): Xaa is A or G or is absent
ARVVMNEYQKYXXXXXXXXXIYLVSIPSLQTPAX

SEQ ID NO: 17162 - protein, 36 aa, Artificial Sequence
  Non-cyclic GFR-binding peptide
  MOD_RES (31), (32): Xaa is C or S
RVVMNEYKFKIVNSSDDLYLVSIPELQTPAXXPKPV

SEQ ID NO: 17163 - protein, 39 aa, Artificial Sequence
  Non-cyclic GFR-binding peptide
  MOD_RES (33), (34): Xaa is C or S
  MOD_RES (11), (12), (13), (14), (15): Xaa is A or G
  MOD_RES (16), (17), (18), (19): Xaa is A or G or is absent
KVVMNEYQKYXXXXXXXXXIYLVSIPSLKTPAXXAKPVA

SEQ ID NO: 17164 - protein, 36 aa, Artificial Sequence
  Non-cyclic GFR-binding peptide
  MOD_RES (1), (33): Xaa is C or S
XSRVVMNEYKFKIVNSSDDLYLVSIPELKTPAXTPK

SEQ ID NO: 17165 - protein, 35 aa, Artificial Sequence
  Non-cyclic GFR-binding peptide
  MOD_RES (35), (35): Xaa is C or S
  MOD_RES (13), (14), (15), (16), (17): Xaa is A or G
  MOD_RES (18), (19), (20), (21): Xaa is A or G or is absent
EAVSMGEEYKFKXXXXXXXXXLYLVSIPELKTPVX

SEQ ID NO: 17166 - protein, 39 aa, Artificial Sequence
  Non-cyclic GFR-binding peptide
  MOD_RES (2), (4), (37), (38): Xaa is C or S
  MOD_RES (15), (16), (17), (18), (19): Xaa is A or G
  MOD_RES (20), (21), (22), (23): Xaa is A or G or is absent
SXKXSKVVMEYKFKXXXXXXXXXLYLISIPELDQPVXXP

SEQ ID NO: 17167 - protein, 41 aa, Artificial Sequence
  Non-cyclic GFR-binding peptide
  MOD_RES (1), (3), (37): Xaa is C or S
  MOD_RES (15), (16), (17), (18), (19): Xaa is A or G
  MOD_RES (20), (21), (22), (23): Xaa is A or G or is absent
XGXSRVVMNEYKFKXXXXXXXXXLYLVSIPELKTPAXTPKT

SEQ ID NO: 17168 - protein, 38 aa, Artificial Sequence
  Non-cyclic GFR-binding peptide
  MOD_RES (1), (33), (34): Xaa is C or S
XAEVVMDEYKFKVVNNAADLYLISIPELRAPVXXSAPA

SEQ ID NO: 17169 - protein, 39 aa, Artificial Sequence
  Non-cyclic GFR-binding peptide
  MOD_RES (33), (34): Xaa is C or S
  MOD_RES (11), (12), (13), (14), (15): Xaa is A or G
  MOD_RES (16), (17), (18), (19): Xaa is A or G or is absent
EVVMDEYQKYXXXXXXXXXIYLMSIPSLETPVXXAKPIK

SEQ ID NO: 17170 - protein, 38 aa, Artificial Sequence
  Non-cyclic GFR-binding peptide
  MOD_RES (1), (3), (35), (36): Xaa is C or S
XGXAKVVMNEYKFKIVNNSSDLYLVSIPELKTPAXXAK

SEQ ID NO: 17171 - protein, 36 aa, Artificial Sequence
  Non-cyclic GFR-binding peptide
  MOD_RES (2), (33), (34): Xaa is C or S
KXSKVVMEYQKYVKPTRGVIYLISIPSLDQPVXXPS

SEQ ID NO: 17172 - protein, 37 aa, Artificial Sequence
  Non-cyclic GFR-binding peptide
  MOD_RES (2), (4), (36), (37): Xaa is C or S
RXGXAEVVMDRYKKLVVNNAADFYLISIANLRAPVXX

SEQ ID NO: 17173 - protein, 38 aa, Artificial Sequence
  Non-cyclic GFR-binding peptide
  MOD_RES (2), (4), (36), (37): Xaa is C or S
HXGXAKVVMNEYKFKIVNNSSDLYLVSIPELKTPAXXA

SEQ ID NO: 17174 - protein, 34 aa, Artificial Sequence
  Non-cyclic GFR-binding peptide
  MOD_RES (32), (33): Xaa is C or S
AKVVMNEYQKYIVNNSSDIYLVSIPSLKTPAXXA

SEQ ID NO: 17175 - protein, 36 aa, Artificial Sequence
  Non-cyclic GFR-binding peptide
  MOD_RES (1), (32), (33): Xaa is C or S
XSKVIMEYQKYIKPTKGIIYLISIPSLDQSVXXPSA

SEQ ID NO: 17176 - protein, 33 aa, Artificial Sequence
  Non-cyclic GFR-binding peptide
  MOD_RES (12), (13), (14), (15), (16): Xaa is A or G
  MOD_RES (17), (18), (19), (20): Xaa is A or G or is absent
AEVVMDYHYKLXXXXXXXXXKYLISIPSLRAPV

SEQ ID NO: 17177 - protein, 37 aa, Artificial Sequence
  Non-cyclic GFR-binding peptide
  MOD_RES (2), (4), (36), (37): Xaa is C or S
HXGXSRVVMNEYQKYIVNSSDDIYLVSIPSLKTPAXX

SEQ ID NO: 17178 - protein, 39 aa, Artificial Sequence
  Non-cyclic GFR-binding peptide
  MOD_RES (1), (3), (35), (36): Xaa is C or S
XGXAEVVMDRYKKLVVNNAADFYLISIANLRAPVXXSAP

SEQ ID NO: 17179 - protein, 36 aa, Artificial Sequence
  Non-cyclic GFR-binding peptide
  MOD_RES (34), (35): Xaa is C or S
  MOD_RES (12), (13), (14), (15), (16): Xaa is A or G
  MOD_RES (17), (18), (19), (20): Xaa is A or G or is absent
ESVAMGEYQKYXXXXXXXXXIYLISIPSLKTPVXXA

SEQ ID NO: 17180 - protein, 37 aa, Artificial Sequence
  Non-cyclic GFR-binding peptide
  MOD_RES (33), (34): Xaa is C or S
EAVSMGEEYQKYTPVGMDDIYLVSIPSLKTPVXXAKG

SEQ ID NO: 17181 - protein, 42 aa, Artificial Sequence
  Non-cyclic GFR-binding peptide
  MOD_RES (1), (3), (37), (38): Xaa is C or S
  MOD_RES (15), (16), (17), (18), (19): Xaa is A or G
  MOD_RES (20), (21), (22), (23): Xaa is A or G or is absent
XGXAKVVMNEYQKYXXXXXXXXXIYLVSIPSLKTPAXXAKPV

SEQ ID NO: 17182 - protein, 41 aa, Artificial Sequence
  Non-cyclic GFR-binding peptide
  MOD_RES (1), (35), (36): Xaa is C or S
  MOD_RES (13), (14), (15), (16), (17): Xaa is A or G
  MOD_RES (18), (19), (20), (21): Xaa is A or G or is absent
XAKVVMNEYKFKXXXXXXXXXLYLVSIPELKTPAXXAKPVA

SEQ ID NO: 17183 - protein, 40 aa, Artificial Sequence
  Non-cyclic GFR-binding peptide
  MOD_RES (1), (35), (36): Xaa is C or S
  MOD_RES (13), (14), (15), (16), (17): Xaa is A or G
  MOD_RES (18), (19), (20), (21): Xaa is A or G or is absent
XAKVVMNEYQKYXXXXXXXXXIYLVSIPSLKTPAXXAKPV

SEQ ID NO: 17184 - protein, 39 aa, Artificial Sequence
  Non-cyclic GFR-binding peptide
  MOD_RES (1), (35), (36): Xaa is C or S
  MOD_RES (13), (14), (15), (16), (17): Xaa is A or G
  MOD_RES (18), (19), (20), (21): Xaa is A or G or is absent
XSRVVMNEYKFKXXXXXXXXXLYLVSIPELKTPAXXPKP

SEQ ID NO: 17185 - protein, 34 aa, Artificial Sequence
  Non-cyclic GFR-binding peptide
  MOD_RES (33), (34): Xaa is C or S
  MOD_RES (11), (12), (13), (14), (15): Xaa is A or G
  MOD_RES (16), (17), (18), (19): Xaa is A or G or is absent
RVVMNEYQKYXXXXXXXXXIYLVSIPSLQTPAXX

SEQ ID NO: 17186 - protein, 36 aa, Artificial Sequence
  Non-cyclic GFR-binding peptide
  MOD_RES (33), (34): Xaa is C or S
  MOD_RES (11), (12), (13), (14), (15): Xaa is A or G
  MOD_RES (16), (17), (18), (19): Xaa is A or G or is absent
KVVMNEYKFKXXXXXXXXXLYLVSIPELKTPAXXAK

SEQ ID NO: 17187 - protein, 33 aa, Artificial Sequence
  Non-cyclic GFR-binding peptide
  MOD_RES (1), (3): Xaa is C or S
XKXSKVVMEYQKYVKPTRGVIYLISIPSLDQPV

SEQ ID NO: 17188 - protein, 36 aa, Artificial Sequence
  Non-cyclic GFR-binding peptide
  MOD_RES (31), (32): Xaa is C or S
SVAMGYHYKLYTVVGKDKYLISIPSLKTPVXXAKSA

SEQ ID NO: 17189 - protein, 38 aa, Artificial Sequence
  Non-cyclic GFR-binding peptide
  MOD_RES (1), (33), (34): Xaa is C or S
XARVVMNEYKFKIVNSSDDLYLVSIPELQTPAXXPKPV

SEQ ID NO: 17190 - protein, 37 aa, Artificial Sequence
  Non-cyclic GFR-binding peptide
  MOD_RES (32), (33): Xaa is C or S
GEVVMEEYKFKVVKDYEDLYLMSIPELETPVXXAKPI

SEQ ID NO: 17191 - protein, 42 aa, Artificial Sequence
  Non-cyclic GFR-binding peptide
  MOD_RES (2), (4), (38), (39): Xaa is C or S
  MOD_RES (16), (17), (18), (19), (20): Xaa is A or G
  MOD_RES (21), (22), (23), (24): Xaa is A or G or is absent
RXGXESVAMGRYKKLXXXXXXXXXFYLISIANLKTPVXXAKS

SEQ ID NO: 17192 - protein, 41 aa, Artificial Sequence
  Non-cyclic GFR-binding peptide
  MOD_RES (2), (4), (36), (37): Xaa is C or S
RXGXGEVVMDEYKFKVVKENEDLYLMSIPELETPVXXAKPI

SEQ ID NO: 17193 - protein, 34 aa, Artificial Sequence
  Non-cyclic GFR-binding peptide
  MOD_RES (34), (34): Xaa is C or S
  MOD_RES (12), (13), (14), (15), (16): Xaa is A or G
  MOD_RES (17), (18), (19), (20): Xaa is A or G or is absent
AEVVMDRYKKLXXXXXXXXXFYLISIANLRAPVX

SEQ ID NO: 17194 - protein, 35 aa, Artificial Sequence
  Non-cyclic GFR-binding peptide
  MOD_RES (1), (32), (33): Xaa is C or S
XSKVIMEYQKYIKPTKGIIYLISIPSLDQSVXXPS

SEQ ID NO: 17195 - protein, 43 aa, Artificial Sequence
  Non-cyclic GFR-binding peptide
  MOD_RES (2), (4), (37), (38): Xaa is C or S
RXGXEAVSMGEEYQKYTPVGMDDIYLVSIPSLKTPVXXAKGVK

SEQ ID NO: 17196 - protein, 38 aa, Artificial Sequence
  Non-cyclic GFR-binding peptide
  MOD_RES (2), (4): Xaa is C or S
  MOD_RES (17), (18), (19), (20), (21): Xaa is A or G
  MOD_RES (22), (23), (24), (25): Xaa is A or G or is absent
RXGXEAVSMGEEYQKYXXXXXXXXXIYLVSIPSLKTPV

SEQ ID NO: 17197 - protein, 39 aa, Artificial Sequence
  Non-cyclic GFR-binding peptide
  MOD_RES (1), (3), (37), (38): Xaa is C or S
  MOD_RES (15), (16), (17), (18), (19): Xaa is A or G
  MOD_RES (20), (21), (22), (23): Xaa is A or G or is absent
XGXAKVVMNEYQKYXXXXXXXXXIYLVSIPSLKTPAXXA

SEQ ID NO: 17198 - protein, 36 aa, Artificial Sequence
  Non-cyclic GFR-binding peptide
  MOD_RES (1), (35), (36): Xaa is C or S
  MOD_RES (13), (14), (15), (16), (17): Xaa is A or G
  MOD_RES (18), (19), (20), (21): Xaa is A or G or is absent
XAEVVMDYHYKLXXXXXXXXXKYLISIPSLRAPVXX

SEQ ID NO: 17199 - protein, 43 aa, Artificial Sequence
  Non-cyclic GFR-binding peptide
  MOD_RES (2), (4), (38): Xaa is C or S
  MOD_RES (16), (17), (18), (19), (20): Xaa is A or G
  MOD_RES (21), (22), (23), (24): Xaa is A or G or is absent
HXGXSRVVMNEYQKYXXXXXXXXXIYLVSIPSLKTPAXTPKTV

SEQ ID NO: 17200 - protein, 32 aa, Artificial Sequence
  Non-cyclic GFR-binding peptide
  MOD_RES (1), (1): Xaa is C or S
XAEVVMDEYKFKVVNNAADLYLISIPELRAPV

SEQ ID NO: 17201 - protein, 39 aa, Artificial Sequence
  Non-cyclic GFR-binding peptide
  MOD_RES (2), (34), (35): Xaa is C or S
GXGEVVMDEYQKYVVKENEDIYLMSIPSLETPVXXAKPI

SEQ ID NO: 17202 - protein, 40 aa, Artificial Sequence
  Non-cyclic GFR-binding peptide
  MOD_RES (1), (3), (36), (37): Xaa is C or S
  MOD_RES (14), (15), (16), (17), (18): Xaa is A or G
  MOD_RES (19), (20), (21), (22): Xaa is A or G or is absent
XKXSRVIMEYKFKXXXXXXXXXLYLISIPELAQPVXXPAA

SEQ ID NO: 17203 - protein, 33 aa, Artificial Sequence
  Non-cyclic GFR-binding peptide
  MOD_RES (12), (13), (14), (15), (16): Xaa is A or G
  MOD_RES (17), (18), (19), (20): Xaa is A or G or is absent
ESVAMGYHYKLXXXXXXXXXKYLISIPSLKTPV

SEQ ID NO: 17204 - protein, 38 aa, Artificial Sequence
  Non-cyclic GFR-binding peptide
  MOD_RES (2), (36), (37): Xaa is C or S
  MOD_RES (14), (15), (16), (17), (18): Xaa is A or G
  MOD_RES (19), (20), (21), (22): Xaa is A or G or is absent
GXARVVMNEYKFKXXXXXXXXXLYLVSIPELQTPAXXP

SEQ ID NO: 17205 - protein, 40 aa, Artificial Sequence
  Non-cyclic GFR-binding peptide
  MOD_RES (1), (34), (35): Xaa is C or S
  MOD_RES (12), (13), (14), (15), (16): Xaa is A or G
  MOD_RES (17), (18), (19), (20): Xaa is A or G or is absent
XSKVIMEYKFKXXXXXXXXXLYLISIPELDQSVXXPSASA

SEQ ID NO: 17206 - protein, 41 aa, Artificial Sequence
  Non-cyclic GFR-binding peptide
  MOD_RES (2), (35), (36): Xaa is C or S
  MOD_RES (13), (14), (15), (16), (17): Xaa is A or G
  MOD_RES (18), (19), (20), (21): Xaa is A or G or is absent
KXSKVIMEYQKYXXXXXXXXXIYLISIPSLDQSVXXPSASA

SEQ ID NO: 17207 - protein, 40 aa, Artificial Sequence
  Non-cyclic GFR-binding peptide
  MOD_RES (2), (34), (35): Xaa is C or S
GXAEVVMDYHYKLVVNNAADKYLISIPSLRAPVXXSAPAA

SEQ ID NO: 17208 - protein, 37 aa, Artificial Sequence
  Non-cyclic GFR-binding peptide
  MOD_RES (2), (4), (37): Xaa is C or S
  MOD_RES (15), (16), (17), (18), (19): Xaa is A or G
  MOD_RES (20), (21), (22), (23): Xaa is A or G or is absent
SXKXSKVVMEYQKYXXXXXXXXXIYLISIPSLDQPVX

SEQ ID NO: 17209 - protein, 37 aa, Artificial Sequence
  Non-cyclic GFR-binding peptide
  MOD_RES (34), (35): Xaa is C or S
  MOD_RES (12), (13), (14), (15), (16): Xaa is A or G
  MOD_RES (17), (18), (19), (20): Xaa is A or G or is absent
GEVVMDEYQKYXXXXXXXXXIYLMSIPSLETPVXXAK

SEQ ID NO: 17210 - protein, 40 aa, Artificial Sequence
  Non-cyclic GFR-binding peptide
  MOD_RES (2), (4), (37), (38): Xaa is C or S
  MOD_RES (15), (16), (17), (18), (19): Xaa is A or G
  MOD_RES (20), (21), (22), (23): Xaa is A or G or is absent
SXKXSKVIMEYQKYXXXXXXXXXIYLISIPSLDQSVXXPS

SEQ ID NO: 17211 - protein, 37 aa, Artificial Sequence
  Non-cyclic GFR-binding peptide
  MOD_RES (1), (35), (36): Xaa is C or S
  MOD_RES (13), (14), (15), (16), (17): Xaa is A or G
  MOD_RES (18), (19), (20), (21): Xaa is A or G or is absent
XARVVMNEYQKYXXXXXXXXXIYLVSIPSLQTPAXXP

SEQ ID NO: 17212 - protein, 34 aa, Artificial Sequence
  Non-cyclic GFR-binding peptide
  MOD_RES (2), (4): Xaa is C or S
SXKXSKVIMEYKFKIKPTKGILYLISIPELDQSV

SEQ ID NO: 17213 - protein, 35 aa, Artificial Sequence
  Non-cyclic GFR-binding peptide
  MOD_RES (2), (34), (35): Xaa is C or S
GXSRVVMNEYKFKIVNSSDDLYLVSIPELKTPAXX

SEQ ID NO: 17214 - protein, 37 aa, Artificial Sequence
  Non-cyclic GFR-binding peptide
  MOD_RES (1), (34), (35): Xaa is C or S
  MOD_RES (12), (13), (14), (15), (16): Xaa is A or G
  MOD_RES (17), (18), (19), (20): Xaa is A or G or is absent
XSKVVMEYQKYXXXXXXXXXIYLISIPSLDQPVXXPS

SEQ ID NO: 17215 - protein, 37 aa, Artificial Sequence
  Non-cyclic GFR-binding peptide
  MOD_RES (2), (4): Xaa is C or S
  MOD_RES (16), (17), (18), (19), (20): Xaa is A or G
  MOD_RES (21), (22), (23), (24): Xaa is A or G or is absent
RXGXESVAMGRYKKLXXXXXXXXXFYLISIANLKTPV

SEQ ID NO: 17216 - protein, 36 aa, Artificial Sequence
  Non-cyclic GFR-binding peptide
  MOD_RES (2), (4), (36): Xaa is C or S
HXGXSRVVMNEYKFKIVNSSDDLYLVSIPELKTPAX

SEQ ID NO: 17217 - protein, 35 aa, Artificial Sequence
  Non-cyclic GFR-binding peptide
  MOD_RES (2), (2): Xaa is C or S
  MOD_RES (14), (15), (16), (17), (18): Xaa is A or G
  MOD_RES (19), (20), (21), (22): Xaa is A or G or is absent
GXAKVVMNEYQKYXXXXXXXXXIYLVSIPSLKTPA

SEQ ID NO: 17218 - protein, 37 aa, Artificial Sequence
  Non-cyclic GFR-binding peptide
  MOD_RES (1), (3), (37): Xaa is C or S
  MOD_RES (15), (16), (17), (18), (19): Xaa is A or G
  MOD_RES (20), (21), (22), (23): Xaa is A or G or is absent
XGXESVAMGYHYKLXXXXXXXXXKYLISIPSLKTPVX

SEQ ID NO: 17219 - protein, 31 aa, Artificial Sequence
  Non-cyclic GFR-binding peptide
  MOD_RES (31), (31): Xaa is C or S
EVVMEEYQKYVVKDYEDIYLMSIPSLETPVX

SEQ ID NO: 17220 - protein, 34 aa, Artificial Sequence
  Non-cyclic GFR-binding peptide
  MOD_RES (1), (34): Xaa is C or S
  MOD_RES (12), (13), (14), (15), (16): Xaa is A or G
  MOD_RES (17), (18), (19), (20): Xaa is A or G or is absent
XSRVIMEYKFKXXXXXXXXXLYLISIPELAQPVX

SEQ ID NO: 17221 - protein, 39 aa, Artificial Sequence
  Non-cyclic GFR-binding peptide
  MOD_RES (1), (3), (37), (38): Xaa is C or S
  MOD_RES (15), (16), (17), (18), (19): Xaa is A or G
  MOD_RES (20), (21), (22), (23): Xaa is A or G or is absent
XGXAEVVMDYHYKLXXXXXXXXXKYLISIPSLRAPVXXS

SEQ ID NO: 17222 - protein, 41 aa, Artificial Sequence
  Non-cyclic GFR-binding peptide
  MOD_RES (2), (36), (37): Xaa is C or S
  MOD_RES (14), (15), (16), (17), (18): Xaa is A or G
  MOD_RES (19), (20), (21), (22): Xaa is A or G or is absent
GXAEVVMDRYKKLXXXXXXXXXFYLISIANLRAPVXXSAPA

SEQ ID NO: 17223 - protein, 34 aa, Artificial Sequence
  Non-cyclic GFR-binding peptide
  MOD_RES (33), (34): Xaa is C or S
  MOD_RES (11), (12), (13), (14), (15): Xaa is A or G
  MOD_RES (16), (17), (18), (19): Xaa is A or G or is absent
EVVMDRYKKLXXXXXXXXXFYLISIANLRAPVXX

SEQ ID NO: 17224 - protein, 37 aa, Artificial Sequence
  Non-cyclic GFR-binding peptide
  MOD_RES (1), (32), (33): Xaa is C or S
XSKVIMEYKFKIKPTKGILYLISIPELDQSVXXPSAS

SEQ ID NO: 17225 - protein, 39 aa, Artificial Sequence
  Non-cyclic GFR-binding peptide
  MOD_RES (1), (35), (36): Xaa is C or S
  MOD_RES (13), (14), (15), (16), (17): Xaa is A or G
  MOD_RES (18), (19), (20), (21): Xaa is A or G or is absent
XGEVVMDEYQKYXXXXXXXXXIYLMSIPSLETPVXXAKP

SEQ ID NO: 17226 - protein, 35 aa, Artificial Sequence
  Non-cyclic GFR-binding peptide
  MOD_RES (33), (34): Xaa is C or S
  MOD_RES (11), (12), (13), (14), (15): Xaa is A or G
  MOD_RES (16), (17), (18), (19): Xaa is A or G or is absent
RVVMNEYKFKXXXXXXXXXLYLVSIPELQTPAXXP

SEQ ID NO: 17227 - protein, 39 aa, Artificial Sequence
  Non-cyclic GFR-binding peptide
  MOD_RES (2), (36), (37): Xaa is C or S
  MOD_RES (14), (15), (16), (17), (18): Xaa is A or G
  MOD_RES (19), (20), (21), (22): Xaa is A or G or is absent
GXAKVVMNEYKFKXXXXXXXXXLYLVSIPELKTPAXXAK

SEQ ID NO: 17228 - protein, 36 aa, Artificial Sequence
  Non-cyclic GFR-binding peptide
  MOD_RES (2), (4), (36): Xaa is C or S
HXGXSRVVMNEYQKYIVNSSDDIYLVSIPSLKTPAX

SEQ ID NO: 17229 - protein, 34 aa, Artificial Sequence
  Non-cyclic GFR-binding peptide
  MOD_RES (31), (32): Xaa is C or S
EVVMDRYKKLVVNNAADFYLISIANLRAPVXXSA

SEQ ID NO: 17230 - protein, 33 aa, Artificial Sequence
  Non-cyclic GFR-binding peptide
  MOD_RES (2), (33): Xaa is C or S
KXSKVIMEYKFKIKPTKGILYLISIPELDQSVX

SEQ ID NO: 17231 - protein, 37 aa, Artificial Sequence
  Non-cyclic GFR-binding peptide
  MOD_RES (33), (34): Xaa is C or S
EAVSMGEEYKFKTPVGMDDLYLVSIPELKTPVXXAKG

SEQ ID NO: 17232 - protein, 33 aa, Artificial Sequence
  Non-cyclic GFR-binding peptide
  MOD_RES (1), (33): Xaa is C or S
XAEVVMDRYKKLVVNNAADFYLISIANLRAPVX

SEQ ID NO: 17233 - protein, 41 aa, Artificial Sequence
  Non-cyclic GFR-binding peptide
  MOD_RES (1), (3), (35), (36): Xaa is C or S
XGXGEVVMEEYKFKVVKDYEDLYLMSIPELETPVXXAKPIS

SEQ ID NO: 17234 - protein, 37 aa, Artificial Sequence
  Non-cyclic GFR-binding peptide
  MOD_RES (34), (35): Xaa is C or S
  MOD_RES (12), (13), (14), (15), (16): Xaa is A or G
  MOD_RES (17), (18), (19), (20): Xaa is A or G or is absent
ESVAMGYHYKLXXXXXXXXXKYLISIPSLKTPVXXAK

SEQ ID NO: 17235 - protein, 31 aa, Artificial Sequence
  Non-cyclic GFR-binding peptide
  MOD_RES (31), (31): Xaa is C or S
KVVMNEYQKYIVNNSSDIYLVSIPSLKTPAX

SEQ ID NO: 17236 - protein, 38 aa, Artificial Sequence
  Non-cyclic GFR-binding peptide
  MOD_RES (1), (3), (37), (38): Xaa is C or S
  MOD_RES (15), (16), (17), (18), (19): Xaa is A or G
  MOD_RES (20), (21), (22), (23): Xaa is A or G or is absent
XGXARVVMNEYKFKXXXXXXXXXLYLVSIPELQTPAXX

SEQ ID NO: 17237 - protein, 33 aa, Artificial Sequence
  Non-cyclic GFR-binding peptide
  MOD_RES (1), (33): Xaa is C or S
XAKVVMNEYQKYIVNNSSDIYLVSIPSLKTPAX

SEQ ID NO: 17238 - protein, 36 aa, Artificial Sequence
  Non-cyclic GFR-binding peptide
  MOD_RES (1), (35), (36): Xaa is C or S
  MOD_RES (13), (14), (15), (16), (17): Xaa is A or G
  MOD_RES (18), (19), (20), (21): Xaa is A or G or is absent
XESVAMGRYKKLXXXXXXXXXFYLISIANLKTPVXX

SEQ ID NO: 17239 - protein, 37 aa, Artificial Sequence
  Non-cyclic GFR-binding peptide
  MOD_RES (34), (35): Xaa is C or S
  MOD_RES (12), (13), (14), (15), (16): Xaa is A or G
  MOD_RES (17), (18), (19), (20): Xaa is A or G or is absent
SRVVMNEYKFKXXXXXXXXXLYLVSIPELKTPAXXPK

SEQ ID NO: 17240 - protein, 38 aa, Artificial Sequence
  Non-cyclic GFR-binding peptide
  MOD_RES (33), (34): Xaa is C or S
  MOD_RES (11), (12), (13), (14), (15): Xaa is A or G
  MOD_RES (16), (17), (18), (19): Xaa is A or G or is absent
SVAMGYHYKLXXXXXXXXXKYLISIPSLKTPVXXAKSA

SEQ ID NO: 17241 - protein, 41 aa, Artificial Sequence
  Non-cyclic GFR-binding peptide
  MOD_RES (2), (36), (37): Xaa is C or S
  MOD_RES (14), (15), (16), (17), (18): Xaa is A or G
  MOD_RES (19), (20), (21), (22): Xaa is A or G or is absent
GXSRVVMNEYKFKXXXXXXXXXLYLVSIPELKTPAXXPKPV

SEQ ID NO: 17242 - protein, 41 aa, Artificial Sequence
  Non-cyclic GFR-binding peptide
  MOD_RES (1), (3), (36), (37): Xaa is C or S
XGXEAVSMGEEYQKYTPVGMDDIYLVSIPSLKTPVXXAKGV

SEQ ID NO: 17243 - protein, 41 aa, Artificial Sequence
  Non-cyclic GFR-binding peptide
  MOD_RES (2), (4), (38), (39): Xaa is C or S
  MOD_RES (16), (17), (18), (19), (20): Xaa is A or G
  MOD_RES (21), (22), (23), (24): Xaa is A or G or is absent
HXGXSRVVMNEYQKYXXXXXXXXXIYLVSIPSLKTPAXXPK

SEQ ID NO: 17244 - protein, 34 aa, Artificial Sequence
  Non-cyclic GFR-binding peptide
  MOD_RES (2), (33), (34): Xaa is C or S
KXSKVIMEYKFKIKPTKGILYLISIPELDQSVXX

SEQ ID NO: 17245 - protein, 39 aa, Artificial Sequence
  Non-cyclic GFR-binding peptide
  MOD_RES (1), (34), (35): Xaa is C or S
XEAVSMGEEYKFKTPVGMDDLYLVSIPELKTPVXXAKGV

SEQ ID NO: 17246 - protein, 36 aa, Artificial Sequence
  Non-cyclic GFR-binding peptide
  MOD_RES (1), (33), (34): Xaa is C or S
XARVVMNEYKFKIVNSSDDLYLVSIPELQTPAXXPK

SEQ ID NO: 17247 - protein, 36 aa, Artificial Sequence
  Non-cyclic GFR-binding peptide
  MOD_RES (1), (33), (34): Xaa is C or S
XGEVVMDEYQKYVVKENEDIYLMSIPSLETPVXXAK

SEQ ID NO: 17248 - protein, 37 aa, Artificial Sequence
  Non-cyclic GFR-binding peptide
  MOD_RES (1), (3), (35), (36): Xaa is C or S
XGXARVVMNEYKFKIVNSSDDLYLVSIPELQTPAXXP

SEQ ID NO: 17249 - protein, 38 aa, Artificial Sequence
  Non-cyclic GFR-binding peptide
  MOD_RES (2), (34), (35): Xaa is C or S
GXESVAMGEYQKYYTVVGKDIYLISIPSLKTPVXXAKS

SEQ ID NO: 17250 - protein, 37 aa, Artificial Sequence
  Non-cyclic GFR-binding peptide
  MOD_RES (32), (32): Xaa is C or S
SRVVMNEYQKYIVNSSDDIYLVSIPSLKTPAXTPKTV

SEQ ID NO: 17251 - protein, 36 aa, Artificial Sequence
  Non-cyclic GFR-binding peptide
  MOD_RES (2), (35), (36): Xaa is C or S
GXEAVSMGEEYQKYTPVGMDDIYLVSIPSLKTPVXX

SEQ ID NO: 17252 - protein, 43 aa, Artificial Sequence
  Non-cyclic GFR-binding peptide
  MOD_RES (2), (4), (37), (38): Xaa is C or S
  MOD_RES (15), (16), (17), (18), (19): Xaa is A or G
  MOD_RES (20), (21), (22), (23): Xaa is A or G or is absent
SXKXSKVVMEYKFKXXXXXXXXXLYLISIPELDQPVXXPSASA

SEQ ID NO: 17253 - protein, 40 aa, Artificial Sequence
  Non-cyclic GFR-binding peptide
  MOD_RES (2), (35), (36): Xaa is C or S
  MOD_RES (13), (14), (15), (16), (17): Xaa is A or G
  MOD_RES (18), (19), (20), (21): Xaa is A or G or is absent
KXSKVIMEYQKYXXXXXXXXXIYLISIPSLDQSVXXPSAS

SEQ ID NO: 17254 - protein, 41 aa, Artificial Sequence
  Non-cyclic GFR-binding peptide
  MOD_RES (2), (35), (36): Xaa is C or S
  MOD_RES (13), (14), (15), (16), (17): Xaa is A or G
  MOD_RES (18), (19), (20), (21): Xaa is A or G or is absent
KXSKVIMEYKFKXXXXXXXXXLYLISIPELDQSVXXPSASA

SEQ ID NO: 17255 - protein, 32 aa, Artificial Sequence
  Non-cyclic GFR-binding peptide
  MOD_RES (1), (1): Xaa is C or S
XGEVVMDEYQKYVVKENEDIYLMSIPSLETPV

SEQ ID NO: 17256 - protein, 40 aa, Artificial Sequence
  Non-cyclic GFR-binding peptide
  MOD_RES (1), (3), (36), (37): Xaa is C or S
  MOD_RES (14), (15), (16), (17), (18): Xaa is A or G
  MOD_RES (19), (20), (21), (22): Xaa is A or G or is absent
XKXSKVIMEYKFKXXXXXXXXXLYLISIPELDQSVXXPSA

SEQ ID NO: 17257 - protein, 40 aa, Artificial Sequence
  Non-cyclic GFR-binding peptide
  MOD_RES (2), (4), (38), (39): Xaa is C or S
  MOD_RES (16), (17), (18), (19), (20): Xaa is A or G
  MOD_RES (21), (22), (23), (24): Xaa is A or G or is absent
HXGXAKVVMNEYQKYXXXXXXXXXIYLVSIPSLKTPAXXA

SEQ ID NO: 17258 - protein, 35 aa, Artificial Sequence
  Non-cyclic GFR-binding peptide
  MOD_RES (1), (35): Xaa is C or S
  MOD_RES (13), (14), (15), (16), (17): Xaa is A or G
  MOD_RES (18), (19), (20), (21): Xaa is A or G or is absent
XGEVVMEEYKFKXXXXXXXXXLYLMSIPELETPVX

SEQ ID NO: 17259 - protein, 38 aa, Artificial Sequence
  Non-cyclic GFR-binding peptide
  MOD_RES (2), (36), (37): Xaa is C or S
  MOD_RES (14), (15), (16), (17), (18): Xaa is A or G
  MOD_RES (19), (20), (21), (22): Xaa is A or G or is absent
GXAKVVMNEYKFKXXXXXXXXXLYLVSIPELKTPAXXA

SEQ ID NO: 17260 - protein, 39 aa, Artificial Sequence
  Non-cyclic GFR-binding peptide
  MOD_RES (2), (36), (37): Xaa is C or S
  MOD_RES (14), (15), (16), (17), (18): Xaa is A or G
  MOD_RES (19), (20), (21), (22): Xaa is A or G or is absent
GXSRVVMNEYKFKXXXXXXXXXLYLVSIPELKTPAXXPK

SEQ ID NO: 17261 - protein, 36 aa, Artificial Sequence
  Non-cyclic GFR-binding peptide
  MOD_RES (2), (4), (36): Xaa is C or S
RXGXGEVVMEEYQKYVVKDYEDIYLMSIPSLETPVX

SEQ ID NO: 17262 - protein, 37 aa, Artificial Sequence
  Non-cyclic GFR-binding peptide
  MOD_RES (1), (33): Xaa is C or S
XSRVVMNEYQKYIVNSSDDIYLVSIPSLKTPAXTPKT

SEQ ID NO: 17263 - protein, 42 aa, Artificial Sequence
  Non-cyclic GFR-binding peptide
  MOD_RES (1), (3), (36), (37): Xaa is C or S
  MOD_RES (14), (15), (16), (17), (18): Xaa is A or G
  MOD_RES (19), (20), (21), (22): Xaa is A or G or is absent
XKXSKVVMEYKFKXXXXXXXXXLYLISIPELDQPVXXPSASA

SEQ ID NO: 17264 - protein, 37 aa, Artificial Sequence
  Non-cyclic GFR-binding peptide
  MOD_RES (32), (33): Xaa is C or S
SRVVMNEYKFKIVNSSDDLYLVSIPELKTPAXXPKPV

SEQ ID NO: 17265 - protein, 35 aa, Artificial Sequence
  Non-cyclic GFR-binding peptide
  MOD_RES (2), (4): Xaa is C or S
RXGXESVAMGRYKKLYTVVGKDFYLISIANLKTPV

SEQ ID NO: 17266 - protein, 32 aa, Artificial Sequence
  Non-cyclic GFR-binding peptide
  MOD_RES (31), (32): Xaa is C or S
EVVMDRYKKLVVNNAADFYLISIANLRAPVXX

SEQ ID NO: 17267 - protein, 39 aa, Artificial Sequence
  Non-cyclic GFR-binding peptide
  MOD_RES (1), (3), (35), (36): Xaa is C or S
XGXAKVVMNEYQKYIVNNSSDIYLVSIPSLKTPAXXAKP

SEQ ID NO: 17268 - protein, 37 aa, Artificial Sequence
  Non-cyclic GFR-binding peptide
  MOD_RES (31), (32): Xaa is C or S
EVVMDRYKKLVVNNAADFYLISIANLRAPVXXSAPAA

SEQ ID NO: 17269 - protein, 41 aa, Artificial Sequence
  Non-cyclic GFR-binding peptide
  MOD_RES (1), (3), (36), (37): Xaa is C or S
  MOD_RES (14), (15), (16), (17), (18): Xaa is A or G
  MOD_RES (19), (20), (21), (22): Xaa is A or G or is absent
XKXSKVIMEYQKYXXXXXXXXXIYLISIPSLDQSVXXPSAS

SEQ ID NO: 17270 - protein, 37 aa, Artificial Sequence
  Non-cyclic GFR-binding peptide
  MOD_RES (1), (3), (35), (36): Xaa is C or S
XGXESVAMGRYKKLYTVVGKDFYLISIANLKTPVXXA

SEQ ID NO: 17271 - protein, 33 aa, Artificial Sequence
  Non-cyclic GFR-binding peptide
  MOD_RES (31), (31): Xaa is C or S
RVVMNEYKFKIVNSSDDLYLVSIPELKTPAXTP

SEQ ID NO: 17272 - protein, 39 aa, Artificial Sequence
  Non-cyclic GFR-binding peptide
  MOD_RES (1), (3), (37), (38): Xaa is C or S
  MOD_RES (15), (16), (17), (18), (19): Xaa is A or G
  MOD_RES (20), (21), (22), (23): Xaa is A or G or is absent
XGXAKVVMNEYKFKXXXXXXXXXLYLVSIPELKTPAXXA

SEQ ID NO: 17273 - protein, 36 aa, Artificial Sequence
  Non-cyclic GFR-binding peptide
  MOD_RES (2), (36): Xaa is C or S
  MOD_RES (14), (15), (16), (17), (18): Xaa is A or G
  MOD_RES (19), (20), (21), (22): Xaa is A or G or is absent
GXAEVVMDRYKKLXXXXXXXXXFYLISIANLRAPVX

SEQ ID NO: 17274 - protein, 34 aa, Artificial Sequence
  Non-cyclic GFR-binding peptide
  MOD_RES (1), (3): Xaa is C or S
XGXGEVVMDEYKFKVVKENEDLYLMSIPELETPV

SEQ ID NO: 17275 - protein, 33 aa, Artificial Sequence
  Non-cyclic GFR-binding peptide
  MOD_RES (32), (33): Xaa is C or S
ESVAMGRYKKLYTVVGKDFYLISIANLKTPVXX

SEQ ID NO: 17276 - protein, 37 aa, Artificial Sequence
  Non-cyclic GFR-binding peptide
  MOD_RES (1), (3), (37): Xaa is C or S
  MOD_RES (15), (16), (17), (18), (19): Xaa is A or G
  MOD_RES (20), (21), (22), (23): Xaa is A or G or is absent
XGXGEVVMEEYKFKXXXXXXXXXLYLMSIPELETPVX

SEQ ID NO: 17277 - protein, 41 aa, Artificial Sequence
  Non-cyclic GFR-binding peptide
  MOD_RES (2), (36), (37): Xaa is C or S
  MOD_RES (14), (15), (16), (17), (18): Xaa is A or G
  MOD_RES (19), (20), (21), (22): Xaa is A or G or is absent
GXAKVVMNEYKFKXXXXXXXXXLYLVSIPELKTPAXXAKPV

SEQ ID NO: 17278 - protein, 36 aa, Artificial Sequence
  Non-cyclic GFR-binding peptide
  MOD_RES (2), (4), (35), (36): Xaa is C or S
SXKXSRVIMEYQKYVKPKRGVIYLISIPSLAQPVXX

SEQ ID NO: 17279 - protein, 35 aa, Artificial Sequence
  Non-cyclic GFR-binding peptide
  MOD_RES (2), (4), (35): Xaa is C or S
SXKXSKVIMEYKFKIKPTKGILYLISIPELDQSVX

SEQ ID NO: 17280 - protein, 41 aa, Artificial Sequence
  Non-cyclic GFR-binding peptide
  MOD_RES (2), (36), (37): Xaa is C or S
  MOD_RES (14), (15), (16), (17), (18): Xaa is A or G
  MOD_RES (19), (20), (21), (22): Xaa is A or G or is absent
GXGEVVMEEYKFKXXXXXXXXXLYLMSIPELETPVXXAKPI

SEQ ID NO: 17281 - protein, 43 aa, Artificial Sequence
  Non-cyclic GFR-binding peptide
  MOD_RES (1), (3), (37), (38): Xaa is C or S
  MOD_RES (15), (16), (17), (18), (19): Xaa is A or G
  MOD_RES (20), (21), (22), (23): Xaa is A or G or is absent
XGXAKVVMNEYQKYXXXXXXXXXIYLVSIPSLKTPAXXAKPVA

SEQ ID NO: 17282 - protein, 39 aa, Artificial Sequence
  Non-cyclic GFR-binding peptide
  MOD_RES (2), (4), (38), (39): Xaa is C or S
  MOD_RES (16), (17), (18), (19), (20): Xaa is A or G
  MOD_RES (21), (22), (23), (24): Xaa is A or G or is absent
RXGXESVAMGRYKKLXXXXXXXXXFYLISIANLKTPVXX

SEQ ID NO: 17283 - protein, 38 aa, Artificial Sequence
  Non-cyclic GFR-binding peptide
  MOD_RES (2), (4), (36), (37): Xaa is C or S
HXGXARVVMNEYKFKIVNSSDDLYLVSIPELQTPAXXP

SEQ ID NO: 17284 - protein, 32 aa, Artificial Sequence
  Non-cyclic GFR-binding peptide
  MOD_RES (11), (12), (13), (14), (15): Xaa is A or G
  MOD_RES (16), (17), (18), (19): Xaa is A or G or is absent
EVVMDEYKFKXXXXXXXXXLYLISIPELRAPV

SEQ ID NO: 17285 - protein, 38 aa, Artificial Sequence
  Non-cyclic GFR-binding peptide
  MOD_RES (1), (3), (35), (36): Xaa is C or S
XGXAKVVMNEYQKYIVNNSSDIYLVSIPSLKTPAXXAK

SEQ ID NO: 17286 - protein, 39 aa, Artificial Sequence
  Non-cyclic GFR-binding peptide
  MOD_RES (2), (33), (34): Xaa is C or S
KXSRVIMEYKFKVKPKRGVLYLISIPELAQPVXXPAASA

SEQ ID NO: 17287 - protein, 33 aa, Artificial Sequence
  Non-cyclic GFR-binding peptide
  MOD_RES (31), (32): Xaa is C or S
EVVMEEYKFKVVKDYEDLYLMSIPELETPVXXA

SEQ ID NO: 17288 - protein, 35 aa, Artificial Sequence
  Non-cyclic GFR-binding peptide
  MOD_RES (34), (35): Xaa is C or S
  MOD_RES (12), (13), (14), (15), (16): Xaa is A or G
  MOD_RES (17), (18), (19), (20): Xaa is A or G or is absent
AKVVMNEYQKYXXXXXXXXXIYLVSIPSLKTPAXX

SEQ ID NO: 17289 - protein, 38 aa, Artificial Sequence
  Non-cyclic GFR-binding peptide
  MOD_RES (1), (3), (37), (38): Xaa is C or S
  MOD_RES (15), (16), (17), (18), (19): Xaa is A or G
  MOD_RES (20), (21), (22), (23): Xaa is A or G or is absent
XGXARVVMNEYQKYXXXXXXXXXIYLVSIPSLQTPAXX

SEQ ID NO: 17290 - protein, 36 aa, Artificial Sequence
  Non-cyclic GFR-binding peptide
  MOD_RES (2), (4), (36): Xaa is C or S
RXGXESVAMGRYKKLYTVVGKDFYLISIANLKTPVX

SEQ ID NO: 17291 - protein, 38 aa, Artificial Sequence
  Non-cyclic GFR-binding peptide
  MOD_RES (33), (34): Xaa is C or S
  MOD_RES (11), (12), (13), (14), (15): Xaa is A or G
  MOD_RES (16), (17), (18), (19): Xaa is A or G or is absent
EVVMDRYKKLXXXXXXXXXFYLISIANLRAPVXXSAPA

SEQ ID NO: 17292 - protein, 43 aa, Artificial Sequence
  Non-cyclic GFR-binding peptide
  MOD_RES (2), (4), (39), (40): Xaa is C or S
  MOD_RES (17), (18), (19), (20), (21): Xaa is A or G
  MOD_RES (22), (23), (24), (25): Xaa is A or G or is absent
RXGXEAVSMGEEYKFKXXXXXXXXXLYLVSIPELKTPVXXAKG

SEQ ID NO: 17293 - protein, 38 aa, Artificial Sequence
  Non-cyclic GFR-binding peptide
  MOD_RES (32), (33): Xaa is C or S
GEVVMEEYKFKVVKDYEDLYLMSIPELETPVXXAKPIS

SEQ ID NO: 17294 - protein, 35 aa, Artificial Sequence
  Non-cyclic GFR-binding peptide
  MOD_RES (34), (35): Xaa is C or S
  MOD_RES (12), (13), (14), (15), (16): Xaa is A or G
  MOD_RES (17), (18), (19), (20): Xaa is A or G or is absent
SRVVMNEYQKYXXXXXXXXXIYLVSIPSLKTPAXX

SEQ ID NO: 17295 - protein, 42 aa, Artificial Sequence
  Non-cyclic GFR-binding peptide
  MOD_RES (2), (4), (38), (39): Xaa is C or S
  MOD_RES (16), (17), (18), (19), (20): Xaa is A or G
  MOD_RES (21), (22), (23), (24): Xaa is A or G or is absent
RXGXESVAMGEYQKYXXXXXXXXXIYLISIPSLKTPVXXAKS

SEQ ID NO: 17296 - protein, 38 aa, Artificial Sequence
  Non-cyclic GFR-binding peptide
  MOD_RES (2), (34), (35): Xaa is C or S
GXARVVMNEYKFKIVNSSDDLYLVSIPELQTPAXXPKP

SEQ ID NO: 17297 - protein, 40 aa, Artificial Sequence
  Non-cyclic GFR-binding peptide
  MOD_RES (2), (35), (36): Xaa is C or S
  MOD_RES (13), (14), (15), (16), (17): Xaa is A or G
  MOD_RES (18), (19), (20), (21): Xaa is A or G or is absent
KXSKVIMEYKFKXXXXXXXXXLYLISIPELDQSVXXPSAS

SEQ ID NO: 17298 - protein, 33 aa, Artificial Sequence
  Non-cyclic GFR-binding peptide
  MOD_RES (2), (2): Xaa is C or S
GXARVVMNEYKFKIVNSSDDLYLVSIPELQTPA

SEQ ID NO: 17299 - protein, 36 aa, Artificial Sequence
  Non-cyclic GFR-binding peptide
  MOD_RES (1), (34), (35): Xaa is C or S
XEAVSMGEEYQKYTPVGMDDIYLVSIPSLKTPVXXA

SEQ ID NO: 17300 - protein, 38 aa, Artificial Sequence
  Non-cyclic GFR-binding peptide
  MOD_RES (1), (33), (34): Xaa is C or S
XSRVVMNEYQKYIVNSSDDIYLVSIPSLKTPAXXPKPV

SEQ ID NO: 17301 - protein, 41 aa, Artificial Sequence
  Non-cyclic GFR-binding peptide
  MOD_RES (2), (4), (38), (39): Xaa is C or S
  MOD_RES (16), (17), (18), (19), (20): Xaa is A or G
  MOD_RES (21), (22), (23), (24): Xaa is A or G or is absent
HXGXAKVVMNEYKFKXXXXXXXXXLYLVSIPELKTPAXXAK

SEQ ID NO: 17302 - protein, 40 aa, Artificial Sequence
  Non-cyclic GFR-binding peptide
  MOD_RES (2), (4), (38): Xaa is C or S
  MOD_RES (16), (17), (18), (19), (20): Xaa is A or G
  MOD_RES (21), (22), (23), (24): Xaa is A or G or is absent
HXGXSRVVMNEYKFKXXXXXXXXXLYLVSIPELKTPAXTP

SEQ ID NO: 17303 - protein, 35 aa, Artificial Sequence
  Non-cyclic GFR-binding peptide
  MOD_RES (33), (34): Xaa is C or S
  MOD_RES (11), (12), (13), (14), (15): Xaa is A or G
  MOD_RES (16), (17), (18), (19): Xaa is A or G or is absent
RVVMNEYKFKXXXXXXXXXLYLVSIPELKTPAXXP

SEQ ID NO: 17304 - protein, 33 aa, Artificial Sequence
  Non-cyclic GFR-binding peptide
  MOD_RES (32), (33): Xaa is C or S
ARVVMNEYQKYIVNSSDDIYLVSIPSLQTPAXX

SEQ ID NO: 17305 - protein, 34 aa, Artificial Sequence
  Non-cyclic GFR-binding peptide
  MOD_RES (1), (3): Xaa is C or S
XGXAEVVMDEYKFKVVNNAADLYLISIPELRAPV

SEQ ID NO: 17306 - protein, 32 aa, Artificial Sequence
  Non-cyclic GFR-binding peptide
  MOD_RES (32), (32): Xaa is C or S
GEVVMEEYKFKVVKDYEDLYLMSIPELETPVX

SEQ ID NO: 17307 - protein, 42 aa, Artificial Sequence
  Non-cyclic GFR-binding peptide
  MOD_RES (2), (36), (37): Xaa is C or S
  MOD_RES (14), (15), (16), (17), (18): Xaa is A or G
  MOD_RES (19), (20), (21), (22): Xaa is A or G or is absent
GXAKVVMNEYKFKXXXXXXXXXLYLVSIPELKTPAXXAKPVA

SEQ ID NO: 17308 - protein, 42 aa, Artificial Sequence
  Non-cyclic GFR-binding peptide
  MOD_RES (2), (4), (38): Xaa is C or S
  MOD_RES (16), (17), (18), (19), (20): Xaa is A or G
  MOD_RES (21), (22), (23), (24): Xaa is A or G or is absent
HXGXSRVVMNEYQKYXXXXXXXXXIYLVSIPSLKTPAXTPKT

SEQ ID NO: 17309 - protein, 38 aa, Artificial Sequence
  Non-cyclic GFR-binding peptide
  MOD_RES (2), (4), (38): Xaa is C or S
  MOD_RES (16), (17), (18), (19), (20): Xaa is A or G
  MOD_RES (21), (22), (23), (24): Xaa is A or G or is absent
RXGXGEVVMEEYKFKXXXXXXXXXLYLMSIPELETPVX

SEQ ID NO: 17310 - protein, 39 aa, Artificial Sequence
  Non-cyclic GFR-binding peptide
  MOD_RES (33), (34): Xaa is C or S
  MOD_RES (11), (12), (13), (14), (15): Xaa is A or G
  MOD_RES (16), (17), (18), (19): Xaa is A or G or is absent
SKVVMEYQKYXXXXXXXXXIYLISIPSLDQPVXXPSASA

SEQ ID NO: 17311 - protein, 40 aa, Artificial Sequence
  Non-cyclic GFR-binding peptide
  MOD_RES (1), (3), (36), (37): Xaa is C or S
XGXEAVSMGEEYQKYTPVGMDDIYLVSIPSLKTPVXXAKG

SEQ ID NO: 17312 - protein, 38 aa, Artificial Sequence
  Non-cyclic GFR-binding peptide
  MOD_RES (1), (3), (34), (35): Xaa is C or S
XKXSKVIMEYQKYIKPTKGIIYLISIPSLDQSVXXPSA

SEQ ID NO: 17313 - protein, 34 aa, Artificial Sequence
  Non-cyclic GFR-binding peptide
  MOD_RES (1), (34): Xaa is C or S
  MOD_RES (12), (13), (14), (15), (16): Xaa is A or G
  MOD_RES (17), (18), (19), (20): Xaa is A or G or is absent
XSKVIMEYKFKXXXXXXXXXLYLISIPELDQSVX

SEQ ID NO: 17314 - protein, 36 aa, Artificial Sequence
  Non-cyclic GFR-binding peptide
  MOD_RES (34), (35): Xaa is C or S
  MOD_RES (12), (13), (14), (15), (16): Xaa is A or G
  MOD_RES (17), (18), (19), (20): Xaa is A or G or is absent
SRVVMNEYQKYXXXXXXXXXIYLVSIPSLKTPAXXP

SEQ ID NO: 17315 - protein, 34 aa, Artificial Sequence
  Non-cyclic GFR-binding peptide
  MOD_RES (2), (4): Xaa is C or S
SXKXSKVIMEYQKYIKPTKGIIYLISIPSLDQSV

SEQ ID NO: 17316 - protein, 39 aa, Artificial Sequence
  Non-cyclic GFR-binding peptide
  MOD_RES (2), (36), (37): Xaa is C or S
  MOD_RES (14), (15), (16), (17), (18): Xaa is A or G
  MOD_RES (19), (20), (21), (22): Xaa is A or G or is absent
GXESVAMGRYKKLXXXXXXXXXFYLISIANLKTPVXXAK

SEQ ID NO: 17317 - protein, 37 aa, Artificial Sequence
  Non-cyclic GFR-binding peptide
  MOD_RES (1), (34), (35): Xaa is C or S
  MOD_RES (12), (13), (14), (15), (16): Xaa is A or G
  MOD_RES (17), (18), (19), (20): Xaa is A or G or is absent
XSKVVMEYKFKXXXXXXXXXLYLISIPELDQPVXXPS

SEQ ID NO: 17318 - protein, 37 aa, Artificial Sequence
  Non-cyclic GFR-binding peptide
  MOD_RES (35), (36): Xaa is C or S
  MOD_RES (13), (14), (15), (16), (17): Xaa is A or G
  MOD_RES (18), (19), (20), (21): Xaa is A or G or is absent
EAVSMGEEYQKYXXXXXXXXXIYLVSIPSLKTPVXXA

SEQ ID NO: 17319 - protein, 36 aa, Artificial Sequence
  Non-cyclic GFR-binding peptide
  MOD_RES (1), (3), (36): Xaa is C or S
  MOD_RES (14), (15), (16), (17), (18): Xaa is A or G
  MOD_RES (19), (20), (21), (22): Xaa is A or G or is absent
XKXSKVVMEYQKYXXXXXXXXXIYLISIPSLDQPVX

SEQ ID NO: 17320 - protein, 40 aa, Artificial Sequence
  Non-cyclic GFR-binding peptide
  MOD_RES (2), (36), (37): Xaa is C or S
  MOD_RES (14), (15), (16), (17), (18): Xaa is A or G
  MOD_RES (19), (20), (21), (22): Xaa is A or G or is absent
GXGEVVMEEYKFKXXXXXXXXXLYLMSIPELETPVXXAKP

SEQ ID NO: 17321 - protein, 37 aa, Artificial Sequence
  Non-cyclic GFR-binding peptide
  MOD_RES (2), (4): Xaa is C or S
  MOD_RES (16), (17), (18), (19), (20): Xaa is A or G
  MOD_RES (21), (22), (23), (24): Xaa is A or G or is absent
RXGXAEVVMDEYKFKXXXXXXXXXLYLISIPELRAPV

SEQ ID NO: 17322 - protein, 41 aa, Artificial Sequence
  Non-cyclic GFR-binding peptide
  MOD_RES (1), (3), (35), (36): Xaa is C or S
XGXAEVVMDEYKFKVVNNAADLYLISIPELRAPVXXSAPAA

SEQ ID NO: 17323 - protein, 40 aa, Artificial Sequence
  Non-cyclic GFR-binding peptide
  MOD_RES (1), (35), (36): Xaa is C or S
  MOD_RES (13), (14), (15), (16), (17): Xaa is A or G
  MOD_RES (18), (19), (20), (21): Xaa is A or G or is absent
XARVVMNEYKFKXXXXXXXXXLYLVSIPELQTPAXXPKPV

SEQ ID NO: 17324 - protein, 38 aa, Artificial Sequence
  Non-cyclic GFR-binding peptide
  MOD_RES (1), (33), (34): Xaa is C or S
XSRVVMNEYKFKIVNSSDDLYLVSIPELKTPAXXPKPV

SEQ ID NO: 17325 - protein, 34 aa, Artificial Sequence
  Non-cyclic GFR-binding peptide
  MOD_RES (1), (3): Xaa is C or S
XGXSRVVMNEYKFKIVNSSDDLYLVSIPELKTPA

SEQ ID NO: 17326 - protein, 32 aa, Artificial Sequence
  Non-cyclic GFR-binding peptide
  MOD_RES (31), (32): Xaa is C or S
RVVMNEYQKYIVNSSDDIYLVSIPSLQTPAXX

SEQ ID NO: 17327 - protein, 32 aa, Artificial Sequence
  Non-cyclic GFR-binding peptide
  MOD_RES (32), (32): Xaa is C or S
ARVVMNEYQKYIVNSSDDIYLVSIPSLQTPAX

SEQ ID NO: 17328 - protein, 38 aa, Artificial Sequence
  Non-cyclic GFR-binding peptide
  MOD_RES (2), (36): Xaa is C or S
  MOD_RES (14), (15), (16), (17), (18): Xaa is A or G
  MOD_RES (19), (20), (21), (22): Xaa is A or G or is absent
GXSRVVMNEYKFKXXXXXXXXXLYLVSIPELKTPAXTP

SEQ ID NO: 17329 - protein, 39 aa, Artificial Sequence
  Non-cyclic GFR-binding peptide
  MOD_RES (2), (34), (35): Xaa is C or S
GXGEVVMEEYQKYVVKDYEDIYLMSIPSLETPVXXAKPI

SEQ ID NO: 17330 - protein, 31 aa, Artificial Sequence
  Non-cyclic GFR-binding peptide
GEVVMEEYQKYVVKDYEDIYLMSIPSLETPV

SEQ ID NO: 17331 - protein, 35 aa, Artificial Sequence
  Non-cyclic GFR-binding peptide
  MOD_RES (2), (4): Xaa is C or S
HXGXAKVVMNEYKFKIVNNSSDLYLVSIPELKTPA

SEQ ID NO: 17332 - protein, 36 aa, Artificial Sequence
  Non-cyclic GFR-binding peptide
  MOD_RES (1), (3): Xaa is C or S
  MOD_RES (15), (16), (17), (18), (19): Xaa is A or G
  MOD_RES (20), (21), (22), (23): Xaa is A or G or is absent
XGXAEVVMDRYKKLXXXXXXXXXFYLISIANLRAPV

SEQ ID NO: 17333 - protein, 40 aa, Artificial Sequence
  Non-cyclic GFR-binding peptide
  MOD_RES (2), (4), (38), (39): Xaa is C or S
  MOD_RES (16), (17), (18), (19), (20): Xaa is A or G
  MOD_RES (21), (22), (23), (24): Xaa is A or G or is absent
RXGXGEVVMEEYKFKXXXXXXXXXLYLMSIPELETPVXXA

SEQ ID NO: 17334 - protein, 38 aa, Artificial Sequence
  Non-cyclic GFR-binding peptide
  MOD_RES (1), (33), (34): Xaa is C or S
XAEVVMDRYKKLVVNNAADFYLISIANLRAPVXXSAPA

SEQ ID NO: 17335 - protein, 35 aa, Artificial Sequence
  Non-cyclic GFR-binding peptide
  MOD_RES (34), (35): Xaa is C or S
  MOD_RES (12), (13), (14), (15), (16): Xaa is A or G
  MOD_RES (17), (18), (19), (20): Xaa is A or G or is absent
AEVVMDEYKFKXXXXXXXXXLYLISIPELRAPVXX

SEQ ID NO: 17336 - protein, 37 aa, Artificial Sequence
  Non-cyclic GFR-binding peptide
  MOD_RES (2), (34), (35): Xaa is C or S
GXESVAMGEYQKYYTVVGKDIYLISIPSLKTPVXXAK

SEQ ID NO: 17337 - protein, 36 aa, Artificial Sequence
  Non-cyclic GFR-binding peptide
  MOD_RES (1), (3), (35): Xaa is C or S
XGXSRVVMNEYKFKIVNSSDDLYLVSIPELKTPAXT

SEQ ID NO: 17338 - protein, 40 aa, Artificial Sequence
  Non-cyclic GFR-binding peptide
  MOD_RES (1), (35), (36): Xaa is C or S
  MOD_RES (13), (14), (15), (16), (17): Xaa is A or G
  MOD_RES (18), (19), (20), (21): Xaa is A or G or is absent
XESVAMGYHYKLXXXXXXXXXKYLISIPSLKTPVXXAKSA

SEQ ID NO: 17339 - protein, 38 aa, Artificial Sequence
  Non-cyclic GFR-binding peptide
  MOD_RES (1), (3), (37), (38): Xaa is C or S
  MOD_RES (15), (16), (17), (18), (19): Xaa is A or G
  MOD_RES (20), (21), (22), (23): Xaa is A or G or is absent
XGXGEVVMEEYQKYXXXXXXXXXIYLMSIPSLETPVXX

SEQ ID NO: 17340 - protein, 39 aa, Artificial Sequence
  Non-cyclic GFR-binding peptide
  MOD_RES (33), (34): Xaa is C or S
  MOD_RES (11), (12), (13), (14), (15): Xaa is A or G
  MOD_RES (16), (17), (18), (19): Xaa is A or G or is absent
RVVMNEYKFKXXXXXXXXXLYLVSIPELKTPAXXPKPVY

SEQ ID NO: 17341 - protein, 30 aa, Artificial Sequence
  Non-cyclic GFR-binding peptide
RVVMNEYKFKIVNSSDDLYLVSIPELQTPA

SEQ ID NO: 17342 - protein, 31 aa, Artificial Sequence
  Non-cyclic GFR-binding peptide
GEVVMEEYKFKVVKDYEDLYLMSIPELETPV

SEQ ID NO: 17343 - protein, 37 aa, Artificial Sequence
  Non-cyclic GFR-binding peptide
  MOD_RES (1), (35), (36): Xaa is C or S
  MOD_RES (13), (14), (15), (16), (17): Xaa is A or G
  MOD_RES (18), (19), (20), (21): Xaa is A or G or is absent
XAKVVMNEYKFKXXXXXXXXXLYLVSIPELKTPAXXA

SEQ ID NO: 17344 - protein, 35 aa, Artificial Sequence
  Non-cyclic GFR-binding peptide
  MOD_RES (2), (4): Xaa is C or S
HXGXARVVMNEYKFKIVNSSDDLYLVSIPELQTPA

SEQ ID NO: 17345 - protein, 41 aa, Artificial Sequence
  Non-cyclic GFR-binding peptide
  MOD_RES (2), (4), (36), (37): Xaa is C or S
RXGXAEVVMDRYKKLVVNNAADFYLISIANLRAPVXXSAPA

SEQ ID NO: 17346 - protein, 31 aa, Artificial Sequence
  Non-cyclic GFR-binding peptide
  MOD_RES (31), (31): Xaa is C or S
SVAMGEYQKYYTVVGKDIYLISIPSLKTPVX

SEQ ID NO: 17347 - protein, 33 aa, Artificial Sequence
  Non-cyclic GFR-binding peptide
  MOD_RES (33), (33): Xaa is C or S
  MOD_RES (11), (12), (13), (14), (15): Xaa is A or G
  MOD_RES (16), (17), (18), (19): Xaa is A or G or is absent
RVVMNEYKFKXXXXXXXXXLYLVSIPELQTPAX

SEQ ID NO: 17348 - protein, 35 aa, Artificial Sequence
  Non-cyclic GFR-binding peptide
  MOD_RES (1), (3), (34), (35): Xaa is C or S
XKXSKVVMEYQKYVKPTRGVIYLISIPSLDQPVXX

SEQ ID NO: 17349 - protein, 36 aa, Artificial Sequence
  Non-cyclic GFR-binding peptide
  MOD_RES (2), (33), (34): Xaa is C or S
KXSRVIMEYKFKVKPKRGVLYLISIPELAQPVXXPA

SEQ ID NO: 17350 - protein, 44 aa, Artificial Sequence
  Non-cyclic GFR-binding peptide
  MOD_RES (2), (4), (38), (39): Xaa is C or S
  MOD_RES (16), (17), (18), (19), (20): Xaa is A or G
  MOD_RES (21), (22), (23), (24): Xaa is A or G or is absent
RXGXGEVVMEEYKFKXXXXXXXXXLYLMSIPELETPVXXAKPIS

SEQ ID NO: 17351 - protein, 39 aa, Artificial Sequence
  Non-cyclic GFR-binding peptide
  MOD_RES (1), (33), (34): Xaa is C or S
XGEVVMEEYQKYVVKDYEDIYLMSIPSLETPVXXAKPIS

SEQ ID NO: 17352 - protein, 38 aa, Artificial Sequence
  Non-cyclic GFR-binding peptide
  MOD_RES (2), (36), (37): Xaa is C or S
  MOD_RES (14), (15), (16), (17), (18): Xaa is A or G
  MOD_RES (19), (20), (21), (22): Xaa is A or G or is absent
GXAEVVMDYHYKLXXXXXXXXXKYLISIPSLRAPVXXS

SEQ ID NO: 17353 - protein, 37 aa, Artificial Sequence
  Non-cyclic GFR-binding peptide
  MOD_RES (2), (36): Xaa is C or S
  MOD_RES (14), (15), (16), (17), (18): Xaa is A or G
  MOD_RES (19), (20), (21), (22): Xaa is A or G or is absent
GXSRVVMNEYQKYXXXXXXXXXIYLVSIPSLKTPAXT

SEQ ID NO: 17354 - protein, 39 aa, Artificial Sequence
  Non-cyclic GFR-binding peptide
  MOD_RES (1), (3), (37): Xaa is C or S
  MOD_RES (15), (16), (17), (18), (19): Xaa is A or G
  MOD_RES (20), (21), (22), (23): Xaa is A or G or is absent
XGXSRVVMNEYKFKXXXXXXXXXLYLVSIPELKTPAXTP

SEQ ID NO: 17355 - protein, 41 aa, Artificial Sequence
  Non-cyclic GFR-binding peptide
  MOD_RES (1), (3), (37), (38): Xaa is C or S
  MOD_RES (15), (16), (17), (18), (19): Xaa is A or G
  MOD_RES (20), (21), (22), (23): Xaa is A or G or is absent
XGXAKVVMNEYQKYXXXXXXXXXIYLVSIPSLKTPAXXAKP

SEQ ID NO: 17356 - protein, 35 aa, Artificial Sequence
  Non-cyclic GFR-binding peptide
  MOD_RES (33), (34): Xaa is C or S
  MOD_RES (11), (12), (13), (14), (15): Xaa is A or G
  MOD_RES (16), (17), (18), (19): Xaa is A or G or is absent
SKVVMEYQKYXXXXXXXXXIYLISIPSLDQPVXXP

SEQ ID NO: 17357 - protein, 35 aa, Artificial Sequence
  Non-cyclic GFR-binding peptide
  MOD_RES (2), (4): Xaa is C or S
RXGXGEVVMEEYQKYVVKDYEDIYLMSIPSLETPV

SEQ ID NO: 17358 - protein, 33 aa, Artificial Sequence
  Non-cyclic GFR-binding peptide
  MOD_RES (33), (33): Xaa is C or S
EAVSMGEEYQKYTPVGMDDIYLVSIPSLKTPVX

SEQ ID NO: 17359 - protein, 34 aa, Artificial Sequence
  Non-cyclic GFR-binding peptide
  MOD_RES (34), (34): Xaa is C or S
  MOD_RES (12), (13), (14), (15), (16): Xaa is A or G
  MOD_RES (17), (18), (19), (20): Xaa is A or G or is absent
ESVAMGYHYKLXXXXXXXXXKYLISIPSLKTPVX

SEQ ID NO: 17360 - protein, 39 aa, Artificial Sequence
  Non-cyclic GFR-binding peptide
  MOD_RES (2), (4), (38): Xaa is C or S
  MOD_RES (16), (17), (18), (19), (20): Xaa is A or G
  MOD_RES (21), (22), (23), (24): Xaa is A or G or is absent
HXGXSRVVMNEYKFKXXXXXXXXXLYLVSIPELKTPAXT

SEQ ID NO: 17361 - protein, 33 aa, Artificial Sequence
  Non-cyclic GFR-binding peptide
  MOD_RES (32), (33): Xaa is C or S
ARVVMNEYKFKIVNSSDDLYLVSIPELQTPAXX

SEQ ID NO: 17362 - protein, 33 aa, Artificial Sequence
  Non-cyclic GFR-binding peptide
  MOD_RES (31), (32): Xaa is C or S
RVVMNEYQKYIVNSSDDIYLVSIPSLQTPAXXP

SEQ ID NO: 17363 - protein, 38 aa, Artificial Sequence
  Non-cyclic GFR-binding peptide
  MOD_RES (32), (33): Xaa is C or S
AKVVMNEYKFKIVNNSSDLYLVSIPELKTPAXXAKPVA

SEQ ID NO: 17364 - protein, 34 aa, Artificial Sequence
  Non-cyclic GFR-binding peptide
  MOD_RES (1), (34): Xaa is C or S
  MOD_RES (12), (13), (14), (15), (16): Xaa is A or G
  MOD_RES (17), (18), (19), (20): Xaa is A or G or is absent
XSKVIMEYQKYXXXXXXXXXIYLISIPSLDQSVX

SEQ ID NO: 17365 - protein, 34 aa, Artificial Sequence
  Non-cyclic GFR-binding peptide
  MOD_RES (1), (1): Xaa is C or S
  MOD_RES (13), (14), (15), (16), (17): Xaa is A or G
  MOD_RES (18), (19), (20), (21): Xaa is A or G or is absent
XAEVVMDEYKFKXXXXXXXXXLYLISIPELRAPV

SEQ ID NO: 17366 - protein, 36 aa, Artificial Sequence
  Non-cyclic GFR-binding peptide
  MOD_RES (31), (32): Xaa is C or S
SKVIMEYKFKIKPTKGILYLISIPELDQSVXXPSAS

SEQ ID NO: 17367 - protein, 38 aa, Artificial Sequence
  Non-cyclic GFR-binding peptide
  MOD_RES (1), (3), (37), (38): Xaa is C or S
  MOD_RES (15), (16), (17), (18), (19): Xaa is A or G
  MOD_RES (20), (21), (22), (23): Xaa is A or G or is absent
XGXAEVVMDEYKFKXXXXXXXXXLYLISIPELRAPVXX

SEQ ID NO: 17368 - protein, 41 aa, Artificial Sequence
  Non-cyclic GFR-binding peptide
  MOD_RES (2), (4), (38), (39): Xaa is C or S
  MOD_RES (16), (17), (18), (19), (20): Xaa is A or G
  MOD_RES (21), (22), (23), (24): Xaa is A or G or is absent
HXGXSRVVMNEYKFKXXXXXXXXXLYLVSIPELKTPAXXPK

SEQ ID NO: 17369 - protein, 35 aa, Artificial Sequence
  Non-cyclic GFR-binding peptide
  MOD_RES (34), (35): Xaa is C or S
  MOD_RES (12), (13), (14), (15), (16): Xaa is A or G
  MOD_RES (17), (18), (19), (20): Xaa is A or G or is absent
GEVVMDEYQKYXXXXXXXXXIYLMSIPSLETPVXX

SEQ ID NO: 17370 - protein, 41 aa, Artificial Sequence
  Non-cyclic GFR-binding peptide
  MOD_RES (1), (3), (37), (38): Xaa is C or S
  MOD_RES (15), (16), (17), (18), (19): Xaa is A or G
  MOD_RES (20), (21), (22), (23): Xaa is A or G or is absent
XGXAEVVMDYHYKLXXXXXXXXXKYLISIPSLRAPVXXSAP

SEQ ID NO: 17371 - protein, 35 aa, Artificial Sequence
  Non-cyclic GFR-binding peptide
  MOD_RES (1), (34), (35): Xaa is C or S
  MOD_RES (12), (13), (14), (15), (16): Xaa is A or G
  MOD_RES (17), (18), (19), (20): Xaa is A or G or is absent
XSRVIMEYQKYXXXXXXXXXIYLISIPSLAQPVXX

SEQ ID NO: 17372 - protein, 37 aa, Artificial Sequence
  Non-cyclic GFR-binding peptide
  MOD_RES (1), (33), (34): Xaa is C or S
XAEVVMDRYKKLVVNNAADFYLISIANLRAPVXXSAP

SEQ ID NO: 17373 - protein, 41 aa, Artificial Sequence
  Non-cyclic GFR-binding peptide
  MOD_RES (1), (35), (36): Xaa is C or S
  MOD_RES (13), (14), (15), (16), (17): Xaa is A or G
  MOD_RES (18), (19), (20), (21): Xaa is A or G or is absent
XAKVVMNEYQKYXXXXXXXXXIYLVSIPSLKTPAXXAKPVA

SEQ ID NO: 17374 - protein, 35 aa, Artificial Sequence
  Non-cyclic GFR-binding peptide
  MOD_RES (31), (31): Xaa is C or S
RVVMNEYKFKIVNSSDDLYLVSIPELKTPAXTPKT

SEQ ID NO: 17375 - protein, 37 aa, Artificial Sequence
  Non-cyclic GFR-binding peptide
  MOD_RES (2), (34), (35): Xaa is C or S
GXGEVVMDEYKFKVVKENEDLYLMSIPELETPVXXAK

SEQ ID NO: 17376 - protein, 33 aa, Artificial Sequence
  Non-cyclic GFR-binding peptide
  MOD_RES (32), (33): Xaa is C or S
SRVVMNEYQKYIVNSSDDIYLVSIPSLKTPAXX

SEQ ID NO: 17377 - protein, 36 aa, Artificial Sequence
  Non-cyclic GFR-binding peptide
  MOD_RES (34), (34): Xaa is C or S
  MOD_RES (12), (13), (14), (15), (16): Xaa is A or G
  MOD_RES (17), (18), (19), (20): Xaa is A or G or is absent
SRVVMNEYKFKXXXXXXXXXLYLVSIPELKTPAXTP

SEQ ID NO: 17378 - protein, 35 aa, Artificial Sequence
  Non-cyclic GFR-binding peptide
  MOD_RES (1), (35): Xaa is C or S
  MOD_RES (13), (14), (15), (16), (17): Xaa is A or G
  MOD_RES (18), (19), (20), (21): Xaa is A or G or is absent
XESVAMGRYKKLXXXXXXXXXFYLISIANLKTPVX

SEQ ID NO: 17379 - protein, 36 aa, Artificial Sequence
  Non-cyclic GFR-binding peptide
  MOD_RES (2), (36): Xaa is C or S
  MOD_RES (14), (15), (16), (17), (18): Xaa is A or G
  MOD_RES (19), (20), (21), (22): Xaa is A or G or is absent
GXESVAMGYHYKLXXXXXXXXXKYLISIPSLKTPVX

SEQ ID NO: 17380 - protein, 32 aa, Artificial Sequence
  Non-cyclic GFR-binding peptide
  MOD_RES (1), (1): Xaa is C or S
XGEVVMDEYKFKVVKENEDLYLMSIPELETPV

SEQ ID NO: 17381 - protein, 41 aa, Artificial Sequence
  Non-cyclic GFR-binding peptide
  MOD_RES (2), (4), (38), (39): Xaa is C or S
  MOD_RES (16), (17), (18), (19), (20): Xaa is A or G
  MOD_RES (21), (22), (23), (24): Xaa is A or G or is absent
RXGXESVAMGYHYKLXXXXXXXXXKYLISIPSLKTPVXXAK

SEQ ID NO: 17382 - protein, 33 aa, Artificial Sequence
  Non-cyclic GFR-binding peptide
  MOD_RES (1), (1): Xaa is C or S
  MOD_RES (12), (13), (14), (15), (16): Xaa is A or G
  MOD_RES (17), (18), (19), (20): Xaa is A or G or is absent
XSKVVMEYKFKXXXXXXXXXLYLISIPELDQPV

SEQ ID NO: 17383 - protein, 44 aa, Artificial Sequence
  Non-cyclic GFR-binding peptide
  MOD_RES (2), (4), (38), (39): Xaa is C or S
  MOD_RES (16), (17), (18), (19), (20): Xaa is A or G
  MOD_RES (21), (22), (23), (24): Xaa is A or G or is absent
RXGXAEVVMDRYKKLXXXXXXXXXFYLISIANLRAPVXXSAPAA

SEQ ID NO: 17384 - protein, 37 aa, Artificial Sequence
  Non-cyclic GFR-binding peptide
  MOD_RES (2), (35), (36): Xaa is C or S
  MOD_RES (13), (14), (15), (16), (17): Xaa is A or G
  MOD_RES (18), (19), (20), (21): Xaa is A or G or is absent
KXSRVIMEYKFKXXXXXXXXXLYLISIPELAQPVXXP

SEQ ID NO: 17385 - protein, 39 aa, Artificial Sequence
  Non-cyclic GFR-binding peptide
  MOD_RES (2), (36), (37): Xaa is C or S
  MOD_RES (14), (15), (16), (17), (18): Xaa is A or G
  MOD_RES (19), (20), (21), (22): Xaa is A or G or is absent
GXARVVMNEYKFKXXXXXXXXXLYLVSIPELQTPAXXPK

SEQ ID NO: 17386 - protein, 35 aa, Artificial Sequence
  Non-cyclic GFR-binding peptide
  MOD_RES (34), (35): Xaa is C or S
  MOD_RES (12), (13), (14), (15), (16): Xaa is A or G
  MOD_RES (17), (18), (19), (20): Xaa is A or G or is absent
ESVAMGYHYKLXXXXXXXXXKYLISIPSLKTPVXX

SEQ ID NO: 17387 - protein, 43 aa, Artificial Sequence
  Non-cyclic GFR-binding peptide
  MOD_RES (2), (4), (38): Xaa is C or S
  MOD_RES (16), (17), (18), (19), (20): Xaa is A or G
  MOD_RES (21), (22), (23), (24): Xaa is A or G or is absent
HXGXSRVVMNEYKFKXXXXXXXXXLYLVSIPELKTPAXTPKTV

SEQ ID NO: 17388 - protein, 35 aa, Artificial Sequence
  Non-cyclic GFR-binding peptide
  MOD_RES (31), (32): Xaa is C or S
SKVIMEYQKYIKPTKGIIYLISIPSLDQSVXXPSA

SEQ ID NO: 17389 - protein, 38 aa, Artificial Sequence
  Non-cyclic GFR-binding peptide
  MOD_RES (1), (33), (34): Xaa is C or S
XGEVVMDEYKFKVVKENEDLYLMSIPELETPVXXAKPI

SEQ ID NO: 17390 - protein, 37 aa, Artificial Sequence
  Non-cyclic GFR-binding peptide
  MOD_RES (33), (34): Xaa is C or S
  MOD_RES (11), (12), (13), (14), (15): Xaa is A or G
  MOD_RES (16), (17), (18), (19): Xaa is A or G or is absent
SVAMGRYKKLXXXXXXXXXFYLISIANLKTPVXXAKS

SEQ ID NO: 17391 - protein, 32 aa, Artificial Sequence
  Non-cyclic GFR-binding peptide
  MOD_RES (32), (32): Xaa is C or S
AEVVMDEYKFKVVNNAADLYLISIPELRAPVX

SEQ ID NO: 17392 - protein, 35 aa, Artificial Sequence
  Non-cyclic GFR-binding peptide
  MOD_RES (1), (35): Xaa is C or S
  MOD_RES (13), (14), (15), (16), (17): Xaa is A or G
  MOD_RES (18), (19), (20), (21): Xaa is A or G or is absent
XAEVVMDEYKFKXXXXXXXXXLYLISIPELRAPVX

SEQ ID NO: 17393 - protein, 42 aa, Artificial Sequence
  Non-cyclic GFR-binding peptide
  MOD_RES (2), (4), (37), (38): Xaa is C or S
  MOD_RES (15), (16), (17), (18), (19): Xaa is A or G
  MOD_RES (20), (21), (22), (23): Xaa is A or G or is absent
SXKXSKVVMEYQKYXXXXXXXXXIYLISIPSLDQPVXXPSAS

SEQ ID NO: 17394 - protein, 36 aa, Artificial Sequence
  Non-cyclic GFR-binding peptide
  MOD_RES (1), (33), (34): Xaa is C or S
XGEVVMDEYKFKVVKENEDLYLMSIPELETPVXXAK

SEQ ID NO: 17395 - protein, 38 aa, Artificial Sequence
  Non-cyclic GFR-binding peptide
  MOD_RES (2), (4), (38): Xaa is C or S
  MOD_RES (16), (17), (18), (19), (20): Xaa is A or G
  MOD_RES (21), (22), (23), (24): Xaa is A or G or is absent
RXGXAEVVMDRYKKLXXXXXXXXXFYLISIANLRAPVX

SEQ ID NO: 17396 - protein, 40 aa, Artificial Sequence
  Non-cyclic GFR-binding peptide
  MOD_RES (34), (35): Xaa is C or S
  MOD_RES (12), (13), (14), (15), (16): Xaa is A or G
  MOD_RES (17), (18), (19), (20): Xaa is A or G or is absent
GEVVMDEYQKYXXXXXXXXXIYLMSIPSLETPVXXAKPIK

SEQ ID NO: 17397 - protein, 32 aa, Artificial Sequence
  Non-cyclic GFR-binding peptide
  MOD_RES (1), (1): Xaa is C or S
XGEVVMEEYKFKVVKDYEDLYLMSIPELETPV

SEQ ID NO: 17398 - protein, 37 aa, Artificial Sequence
  Non-cyclic GFR-binding peptide
  MOD_RES (1), (3), (37): Xaa is C or S
  MOD_RES (15), (16), (17), (18), (19): Xaa is A or G
  MOD_RES (20), (21), (22), (23): Xaa is A or G or is absent
XGXGEVVMEEYQKYXXXXXXXXXIYLMSIPSLETPVX

SEQ ID NO: 17399 - protein, 36 aa, Artificial Sequence
  Non-cyclic GFR-binding peptide
  MOD_RES (1), (33), (34): Xaa is C or S
XSRVVMNEYKFKIVNSSDDLYLVSIPELKTPAXXPK

SEQ ID NO: 17400 - protein, 32 aa, Artificial Sequence
  Non-cyclic GFR-binding peptide
  MOD_RES (2), (2): Xaa is C or S
KXSKVIMEYKFKIKPTKGILYLISIPELDQSV

SEQ ID NO: 17401 - protein, 36 aa, Artificial Sequence
  Non-cyclic GFR-binding peptide
  MOD_RES (1), (33), (34): Xaa is C or S
XESVAMGYHYKLYTVVGKDKYLISIPSLKTPVXXAK

SEQ ID NO: 17402 - protein, 34 aa, Artificial Sequence
  Non-cyclic GFR-binding peptide
  MOD_RES (1), (3): Xaa is C or S
XGXESVAMGYHYKLYTVVGKDKYLISIPSLKTPV

SEQ ID NO: 17403 - protein, 33 aa, Artificial Sequence
  Non-cyclic GFR-binding peptide
  MOD_RES (1), (32), (33): Xaa is C or S
XSKVVMEYKFKVKPTRGVLYLISIPELDQPVXX

SEQ ID NO: 17404 - protein, 33 aa, Artificial Sequence
  Non-cyclic GFR-binding peptide
  MOD_RES (2), (33): Xaa is C or S
KXSRVIMEYKFKVKPKRGVLYLISIPELAQPVX

SEQ ID NO: 17405 - protein, 35 aa, Artificial Sequence
  Non-cyclic GFR-binding peptide
  MOD_RES (31), (32): Xaa is C or S
RVVMNEYKFKIVNSSDDLYLVSIPELKTPAXXPKP

SEQ ID NO: 17406 - protein, 37 aa, Artificial Sequence
  Non-cyclic GFR-binding peptide
  MOD_RES (2), (4), (37): Xaa is C or S
  MOD_RES (15), (16), (17), (18), (19): Xaa is A or G
  MOD_RES (20), (21), (22), (23): Xaa is A or G or is absent
SXKXSKVVMEYKFKXXXXXXXXXLYLISIPELDQPVX

SEQ ID NO: 17407 - protein, 35 aa, Artificial Sequence
  Non-cyclic GFR-binding peptide
  MOD_RES (33), (34): Xaa is C or S
  MOD_RES (11), (12), (13), (14), (15): Xaa is A or G
  MOD_RES (16), (17), (18), (19): Xaa is A or G or is absent
SRVIMEYQKYXXXXXXXXXIYLISIPSLAQPVXXP

SEQ ID NO: 17408 - protein, 39 aa, Artificial Sequence
  Non-cyclic GFR-binding peptide
  MOD_RES (1), (33), (34): Xaa is C or S
XARVVMNEYKFKIVNSSDDLYLVSIPELQTPAXXPKPVT

SEQ ID NO: 17409 - protein, 40 aa, Artificial Sequence
  Non-cyclic GFR-binding peptide
  MOD_RES (1), (3), (37), (38): Xaa is C or S
  MOD_RES (15), (16), (17), (18), (19): Xaa is A or G
  MOD_RES (20), (21), (22), (23): Xaa is A or G or is absent
XGXSRVVMNEYQKYXXXXXXXXXIYLVSIPSLKTPAXXPK

SEQ ID NO: 17410 - protein, 39 aa, Artificial Sequence
  Non-cyclic GFR-binding peptide
  MOD_RES (2), (4), (37), (38): Xaa is C or S
RXGXEAVSMGEEYKFKTPVGMDDLYLVSIPELKTPVXXA

SEQ ID NO: 17411 - protein, 37 aa, Artificial Sequence
  Non-cyclic GFR-binding peptide
  MOD_RES (34), (35): Xaa is C or S
  MOD_RES (12), (13), (14), (15), (16): Xaa is A or G
  MOD_RES (17), (18), (19), (20): Xaa is A or G or is absent
GEVVMEEYKFKXXXXXXXXXLYLMSIPELETPVXXAK

SEQ ID NO: 17412 - protein, 43 aa, Artificial Sequence
  Non-cyclic GFR-binding peptide
  MOD_RES (2), (37), (38): Xaa is C or S
  MOD_RES (15), (16), (17), (18), (19): Xaa is A or G
  MOD_RES (20), (21), (22), (23): Xaa is A or G or is absent
GXEAVSMGEEYKFKXXXXXXXXXLYLVSIPELKTPVXXAKGVK

SEQ ID NO: 17413 - protein, 34 aa, Artificial Sequence
  Non-cyclic GFR-binding peptide
  MOD_RES (1), (33), (34): Xaa is C or S
XSRVVMNEYQKYIVNSSDDIYLVSIPSLKTPAXX

SEQ ID NO: 17414 - protein, 34 aa, Artificial Sequence
  Non-cyclic GFR-binding peptide
  MOD_RES (31), (32): Xaa is C or S
SRVIMEYQKYVKPKRGVIYLISIPSLAQPVXXPA

SEQ ID NO: 17415 - protein, 33 aa, Artificial Sequence
  Non-cyclic GFR-binding peptide
  MOD_RES (31), (32): Xaa is C or S
EVVMEEYQKYVVKDYEDIYLMSIPSLETPVXXA

SEQ ID NO: 17416 - protein, 39 aa, Artificial Sequence
  Non-cyclic GFR-binding peptide
  MOD_RES (2), (36), (37): Xaa is C or S
  MOD_RES (14), (15), (16), (17), (18): Xaa is A or G
  MOD_RES (19), (20), (21), (22): Xaa is A or G or is absent
GXGEVVMEEYQKYXXXXXXXXXIYLMSIPSLETPVXXAK

SEQ ID NO: 17417 - protein, 40 aa, Artificial Sequence
  Non-cyclic GFR-binding peptide
  MOD_RES (2), (4), (37), (38): Xaa is C or S
  MOD_RES (15), (16), (17), (18), (19): Xaa is A or G
  MOD_RES (20), (21), (22), (23): Xaa is A or G or is absent
SXKXSKVIMEYKFKXXXXXXXXXLYLISIPELDQSVXXPS

SEQ ID NO: 17418 - protein, 39 aa, Artificial Sequence
  Non-cyclic GFR-binding peptide
  MOD_RES (2), (35), (36): Xaa is C or S
  MOD_RES (13), (14), (15), (16), (17): Xaa is A or G
  MOD_RES (18), (19), (20), (21): Xaa is A or G or is absent
KXSKVVMEYKFKXXXXXXXXXLYLISIPELDQPVXXPSA

SEQ ID NO: 17419 - protein, 37 aa, Artificial Sequence
  Non-cyclic GFR-binding peptide
  MOD_RES (1), (3), (35), (36): Xaa is C or S
XGXGEVVMEEYQKYVVKDYEDIYLMSIPSLETPVXXA

SEQ ID NO: 17420 - protein, 37 aa, Artificial Sequence
  Non-cyclic GFR-binding peptide
  MOD_RES (2), (34), (35): Xaa is C or S
GXARVVMNEYKFKIVNSSDDLYLVSIPELQTPAXXPK

SEQ ID NO: 17421 - protein, 36 aa, Artificial Sequence
  Non-cyclic GFR-binding peptide
  MOD_RES (34), (35): Xaa is C or S
  MOD_RES (12), (13), (14), (15), (16): Xaa is A or G
  MOD_RES (17), (18), (19), (20): Xaa is A or G or is absent
ESVAMGRYKKLXXXXXXXXXFYLISIANLKTPVXXA

SEQ ID NO: 17422 - protein, 37 aa, Artificial Sequence
  Non-cyclic GFR-binding peptide
  MOD_RES (2), (4), (35), (36): Xaa is C or S
SXKXSRVIMEYQKYVKPKRGVIYLISIPSLAQPVXXP

SEQ ID NO: 17423 - protein, 40 aa, Artificial Sequence
  Non-cyclic GFR-binding peptide
  MOD_RES (2), (36), (37): Xaa is C or S
  MOD_RES (14), (15), (16), (17), (18): Xaa is A or G
  MOD_RES (19), (20), (21), (22): Xaa is A or G or is absent
GXARVVMNEYKFKXXXXXXXXXLYLVSIPELQTPAXXPKP

SEQ ID NO: 17424 - protein, 35 aa, Artificial Sequence
  Non-cyclic GFR-binding peptide
  MOD_RES (33), (34): Xaa is C or S
  MOD_RES (11), (12), (13), (14), (15): Xaa is A or G
  MOD_RES (16), (17), (18), (19): Xaa is A or G or is absent
EVVMDEYKFKXXXXXXXXXLYLMSIPELETPVXXA

SEQ ID NO: 17425 - protein, 34 aa, Artificial Sequence
  Non-cyclic GFR-binding peptide
  MOD_RES (1), (1): Xaa is C or S
  MOD_RES (13), (14), (15), (16), (17): Xaa is A or G
  MOD_RES (18), (19), (20), (21): Xaa is A or G or is absent
XGEVVMDEYKFKXXXXXXXXXLYLMSIPELETPV

SEQ ID NO: 17426 - protein, 43 aa, Artificial Sequence
  Non-cyclic GFR-binding peptide
  MOD_RES (2), (4), (38), (39): Xaa is C or S
  MOD_RES (16), (17), (18), (19), (20): Xaa is A or G
  MOD_RES (21), (22), (23), (24): Xaa is A or G or is absent
HXGXAKVVMNEYQKYXXXXXXXXXIYLVSIPSLKTPAXXAKPV

SEQ ID NO: 17427 - protein, 38 aa, Artificial Sequence
  Non-cyclic GFR-binding peptide
  MOD_RES (34), (35): Xaa is C or S
  MOD_RES (12), (13), (14), (15), (16): Xaa is A or G
  MOD_RES (17), (18), (19), (20): Xaa is A or G or is absent
AEVVMDRYKKLXXXXXXXXXFYLISIANLRAPVXXSAP

SEQ ID NO: 17428 - protein, 36 aa, Artificial Sequence
  Non-cyclic GFR-binding peptide
  MOD_RES (32), (33): Xaa is C or S
AKVVMNEYQKYIVNNSSDIYLVSIPSLKTPAXXAKP

SEQ ID NO: 17429 - protein, 32 aa, Artificial Sequence
  Non-cyclic GFR-binding peptide
  MOD_RES (11), (12), (13), (14), (15): Xaa is A or G
  MOD_RES (16), (17), (18), (19): Xaa is A or G or is absent
SRVIMEYKFKXXXXXXXXXLYLISIPELAQPV

SEQ ID NO: 17430 - protein, 42 aa, Artificial Sequence
  Non-cyclic GFR-binding peptide
  MOD_RES (2), (4), (37), (38): Xaa is C or S
  MOD_RES (15), (16), (17), (18), (19): Xaa is A or G
  MOD_RES (20), (21), (22), (23): Xaa is A or G or is absent
SXKXSKVVMEYKFKXXXXXXXXXLYLISIPELDQPVXXPSAS

SEQ ID NO: 17431 - protein, 42 aa, Artificial Sequence
  Non-cyclic GFR-binding peptide
  MOD_RES (1), (36), (37): Xaa is C or S
  MOD_RES (14), (15), (16), (17), (18): Xaa is A or G
  MOD_RES (19), (20), (21), (22): Xaa is A or G or is absent
XEAVSMGEEYKFKXXXXXXXXXLYLVSIPELKTPVXXAKGVK

SEQ ID NO: 17432 - protein, 38 aa, Artificial Sequence
  Non-cyclic GFR-binding peptide
  MOD_RES (1), (35), (36): Xaa is C or S
  MOD_RES (13), (14), (15), (16), (17): Xaa is A or G
  MOD_RES (18), (19), (20), (21): Xaa is A or G or is absent
XARVVMNEYKFKXXXXXXXXXLYLVSIPELQTPAXXPK

SEQ ID NO: 17433 - protein, 34 aa, Artificial Sequence
  Non-cyclic GFR-binding peptide
  MOD_RES (33), (34): Xaa is C or S
  MOD_RES (11), (12), (13), (14), (15): Xaa is A or G
  MOD_RES (16), (17), (18), (19): Xaa is A or G or is absent
SVAMGYHYKLXXXXXXXXXKYLISIPSLKTPVXX

SEQ ID NO: 17434 - protein, 32 aa, Artificial Sequence
  Non-cyclic GFR-binding peptide
  MOD_RES (32), (32): Xaa is C or S
ESVAMGEYQKYYTVVGKDIYLISIPSLKTPVX

SEQ ID NO: 17435 - protein, 41 aa, Artificial Sequence
  Non-cyclic GFR-binding peptide
  MOD_RES (1), (3), (37): Xaa is C or S
  MOD_RES (15), (16), (17), (18), (19): Xaa is A or G
  MOD_RES (20), (21), (22), (23): Xaa is A or G or is absent
XGXSRVVMNEYQKYXXXXXXXXXIYLVSIPSLKTPAXTPKT

SEQ ID NO: 17436 - protein, 33 aa, Artificial Sequence
  Non-cyclic GFR-binding peptide
  MOD_RES (1), (33): Xaa is C or S
XESVAMGRYKKLYTVVGKDFYLISIANLKTPVX

SEQ ID NO: 17437 - protein, 34 aa, Artificial Sequence
  Non-cyclic GFR-binding peptide
  MOD_RES (34), (34): Xaa is C or S
  MOD_RES (12), (13), (14), (15), (16): Xaa is A or G
  MOD_RES (17), (18), (19), (20): Xaa is A or G or is absent
AEVVMDEYKFKXXXXXXXXXLYLISIPELRAPVX

SEQ ID NO: 17438 - protein, 32 aa, Artificial Sequence
  Non-cyclic GFR-binding peptide
  MOD_RES (1), (1): Xaa is C or S
XSRVVMNEYQKYIVNSSDDIYLVSIPSLKTPA

SEQ ID NO: 17439 - protein, 36 aa, Artificial Sequence
  Non-cyclic GFR-binding peptide
  MOD_RES (33), (34): Xaa is C or S
  MOD_RES (11), (12), (13), (14), (15): Xaa is A or G
  MOD_RES (16), (17), (18), (19): Xaa is A or G or is absent
EVVMDRYKKLXXXXXXXXXFYLISIANLRAPVXXSA

SEQ ID NO: 17440 - protein, 36 aa, Artificial Sequence
  Non-cyclic GFR-binding peptide
  MOD_RES (2), (34): Xaa is C or S
GXSRVVMNEYKFKIVNSSDDLYLVSIPELKTPAXTP

SEQ ID NO: 17441 - protein, 41 aa, Artificial Sequence
  Non-cyclic GFR-binding peptide
  MOD_RES (1), (3), (35), (36): Xaa is C or S
XGXARVVMNEYQKYIVNSSDDIYLVSIPSLQTPAXXPKPVT

SEQ ID NO: 17442 - protein, 39 aa, Artificial Sequence
  Non-cyclic GFR-binding peptide
  MOD_RES (1), (33): Xaa is C or S
XSRVVMNEYKFKIVNSSDDLYLVSIPELKTPAXTPKTVH

SEQ ID NO: 17443 - protein, 37 aa, Artificial Sequence
  Non-cyclic GFR-binding peptide
  MOD_RES (2), (36), (37): Xaa is C or S
  MOD_RES (14), (15), (16), (17), (18): Xaa is A or G
  MOD_RES (19), (20), (21), (22): Xaa is A or G or is absent
GXARVVMNEYKFKXXXXXXXXXLYLVSIPELQTPAXX

SEQ ID NO: 17444 - protein, 43 aa, Artificial Sequence
  Non-cyclic GFR-binding peptide
  MOD_RES (2), (4), (38), (39): Xaa is C or S
  MOD_RES (16), (17), (18), (19), (20): Xaa is A or G
  MOD_RES (21), (22), (23), (24): Xaa is A or G or is absent
RXGXESVAMGRYKKLXXXXXXXXXFYLISIANLKTPVXXAKSA

SEQ ID NO: 17445 - protein, 37 aa, Artificial Sequence
  Non-cyclic GFR-binding peptide
  MOD_RES (2), (36), (37): Xaa is C or S
  MOD_RES (14), (15), (16), (17), (18): Xaa is A or G
  MOD_RES (19), (20), (21), (22): Xaa is A or G or is absent
GXAKVVMNEYKFKXXXXXXXXXLYLVSIPELKTPAXX

SEQ ID NO: 17446 - protein, 40 aa, Artificial Sequence
  Non-cyclic GFR-binding peptide
  MOD_RES (2), (4), (36), (37): Xaa is C or S
RXGXESVAMGRYKKLYTVVGKDFYLISIANLKTPVXXAKS

SEQ ID NO: 17447 - protein, 34 aa, Artificial Sequence
  Non-cyclic GFR-binding peptide
  MOD_RES (2), (34): Xaa is C or S
GXESVAMGEYQKYYTVVGKDIYLISIPSLKTPVX

SEQ ID NO: 17448 - protein, 34 aa, Artificial Sequence
  Non-cyclic GFR-binding peptide
  MOD_RES (1), (1): Xaa is C or S
  MOD_RES (13), (14), (15), (16), (17): Xaa is A or G
  MOD_RES (18), (19), (20), (21): Xaa is A or G or is absent
XAEVVMDYHYKLXXXXXXXXXKYLISIPSLRAPV

SEQ ID NO: 17449 - protein, 38 aa, Artificial Sequence
  Non-cyclic GFR-binding peptide
  MOD_RES (34), (35): Xaa is C or S
  MOD_RES (12), (13), (14), (15), (16): Xaa is A or G
  MOD_RES (17), (18), (19), (20): Xaa is A or G or is absent
SRVVMNEYQKYXXXXXXXXXIYLVSIPSLKTPAXXPKP

SEQ ID NO: 17450 - protein, 32 aa, Artificial Sequence
  Non-cyclic GFR-binding peptide
  MOD_RES (32), (32): Xaa is C or S
GEVVMDEYKFKVVKENEDLYLMSIPELETPVX

SEQ ID NO: 17451 - protein, 39 aa, Artificial Sequence
  Non-cyclic GFR-binding peptide
  MOD_RES (1), (3), (35), (36): Xaa is C or S
XGXARVVMNEYQKYIVNSSDDIYLVSIPSLQTPAXXPKP

SEQ ID NO: 17452 - protein, 38 aa, Artificial Sequence
  Non-cyclic GFR-binding peptide
  MOD_RES (34), (34): Xaa is C or S
  MOD_RES (12), (13), (14), (15), (16): Xaa is A or G
  MOD_RES (17), (18), (19), (20): Xaa is A or G or is absent
SRVVMNEYQKYXXXXXXXXXIYLVSIPSLKTPAXTPKT

SEQ ID NO: 17453 - protein, 36 aa, Artificial Sequence
  Non-cyclic GFR-binding peptide
  MOD_RES (2), (4), (36): Xaa is C or S
HXGXAKVVMNEYQKYIVNNSSDIYLVSIPSLKTPAX

SEQ ID NO: 17454 - protein, 34 aa, Artificial Sequence
  Non-cyclic GFR-binding peptide
  MOD_RES (2), (34): Xaa is C or S
GXSRVVMNEYQKYIVNSSDDIYLVSIPSLKTPAX

SEQ ID NO: 17455 - protein, 34 aa, Artificial Sequence
  Non-cyclic GFR-binding peptide
  MOD_RES (2), (34): Xaa is C or S
GXAEVVMDYHYKLVVNNAADKYLISIPSLRAPVX

SEQ ID NO: 17456 - protein, 30 aa, Artificial Sequence
  Non-cyclic GFR-binding peptide
EVVMDEYQKYVVKENEDIYLMSIPSLETPV

SEQ ID NO: 17457 - protein, 36 aa, Artificial Sequence
  Non-cyclic GFR-binding peptide
  MOD_RES (2), (4), (36): Xaa is C or S
HXGXAKVVMNEYKFKIVNNSSDLYLVSIPELKTPAX

SEQ ID NO: 17458 - protein, 32 aa, Artificial Sequence
  Non-cyclic GFR-binding peptide
  MOD_RES (31), (31): Xaa is C or S
RVVMNEYQKYIVNSSDDIYLVSIPSLKTPAXT

SEQ ID NO: 17459 - protein, 42 aa, Artificial Sequence
  Non-cyclic GFR-binding peptide
  MOD_RES (2), (36), (37): Xaa is C or S
  MOD_RES (14), (15), (16), (17), (18): Xaa is A or G
  MOD_RES (19), (20), (21), (22): Xaa is A or G or is absent
GXARVVMNEYKFKXXXXXXXXXLYLVSIPELQTPAXXPKPVT

SEQ ID NO: 17460 - protein, 39 aa, Artificial Sequence
  Non-cyclic GFR-binding peptide
  MOD_RES (1), (3), (35), (36): Xaa is C or S
XGXESVAMGYHYKLYTVVGKDKYLISIPSLKTPVXXAKS

SEQ ID NO: 17461 - protein, 37 aa, Artificial Sequence
  Non-cyclic GFR-binding peptide
  MOD_RES (1), (35), (36): Xaa is C or S
  MOD_RES (13), (14), (15), (16), (17): Xaa is A or G
  MOD_RES (18), (19), (20), (21): Xaa is A or G or is absent
XESVAMGYHYKLXXXXXXXXXKYLISIPSLKTPVXXA

SEQ ID NO: 17462 - protein, 42 aa, Artificial Sequence
  Non-cyclic GFR-binding peptide
  MOD_RES (1), (3), (37), (38): Xaa is C or S
  MOD_RES (15), (16), (17), (18), (19): Xaa is A or G
  MOD_RES (20), (21), (22), (23): Xaa is A or G or is absent
XGXAEVVMDRYKKLXXXXXXXXXFYLISIANLRAPVXXSAPA

SEQ ID NO: 17463 - protein, 38 aa, Artificial Sequence
  Non-cyclic GFR-binding peptide
  MOD_RES (1), (35), (36): Xaa is C or S
  MOD_RES (13), (14), (15), (16), (17): Xaa is A or G
  MOD_RES (18), (19), (20), (21): Xaa is A or G or is absent
XAKVVMNEYQKYXXXXXXXXXIYLVSIPSLKTPAXXAK

SEQ ID NO: 17464 - protein, 41 aa, Artificial Sequence
  Non-cyclic GFR-binding peptide
  MOD_RES (2), (4), (35), (36): Xaa is C or S
SXKXSKVIMEYKFKIKPTKGILYLISIPELDQSVXXPSASA

SEQ ID NO: 17465 - protein, 40 aa, Artificial Sequence
  Non-cyclic GFR-binding peptide
  MOD_RES (1), (3), (35), (36): Xaa is C or S
XGXGEVVMDEYKFKVVKENEDLYLMSIPELETPVXXAKPI

SEQ ID NO: 17466 - protein, 39 aa, Artificial Sequence
  Non-cyclic GFR-binding peptide
  MOD_RES (2), (4), (37), (38): Xaa is C or S
  MOD_RES (15), (16), (17), (18), (19): Xaa is A or G
  MOD_RES (20), (21), (22), (23): Xaa is A or G or is absent
SXKXSKVIMEYQKYXXXXXXXXXIYLISIPSLDQSVXXP

SEQ ID NO: 17467 - protein, 34 aa, Artificial Sequence
  Non-cyclic GFR-binding peptide
  MOD_RES (31), (32): Xaa is C or S
EVVMEEYKFKVVKDYEDLYLMSIPELETPVXXAK

SEQ ID NO: 17468 - protein, 41 aa, Artificial Sequence
  Non-cyclic GFR-binding peptide
  MOD_RES (2), (4), (37), (38): Xaa is C or S
  MOD_RES (15), (16), (17), (18), (19): Xaa is A or G
  MOD_RES (20), (21), (22), (23): Xaa is A or G or is absent
SXKXSRVIMEYKFKXXXXXXXXXLYLISIPELAQPVXXPAA

SEQ ID NO: 17469 - protein, 36 aa, Artificial Sequence
  Non-cyclic GFR-binding peptide
  MOD_RES (32), (33): Xaa is C or S
AEVVMDYHYKLVVNNAADKYLISIPSLRAPVXXSAP

SEQ ID NO: 17470 - protein, 32 aa, Artificial Sequence
  Non-cyclic GFR-binding peptide
EAVSMGEEYKFKTPVGMDDLYLVSIPELKTPV

SEQ ID NO: 17471 - protein, 38 aa, Artificial Sequence
  Non-cyclic GFR-binding peptide
  MOD_RES (2), (4), (37), (38): Xaa is C or S
  MOD_RES (15), (16), (17), (18), (19): Xaa is A or G
  MOD_RES (20), (21), (22), (23): Xaa is A or G or is absent
SXKXSKVVMEYQKYXXXXXXXXXIYLISIPSLDQPVXX

SEQ ID NO: 17472 - protein, 35 aa, Artificial Sequence
  Non-cyclic GFR-binding peptide
  MOD_RES (34), (34): Xaa is C or S
  MOD_RES (12), (13), (14), (15), (16): Xaa is A or G
  MOD_RES (17), (18), (19), (20): Xaa is A or G or is absent
SRVVMNEYKFKXXXXXXXXXLYLVSIPELKTPAXT

SEQ ID NO: 17473 - protein, 40 aa, Artificial Sequence
  Non-cyclic GFR-binding peptide
  MOD_RES (1), (3), (36), (37): Xaa is C or S
  MOD_RES (14), (15), (16), (17), (18): Xaa is A or G
  MOD_RES (19), (20), (21), (22): Xaa is A or G or is absent
XKXSKVVMEYQKYXXXXXXXXXIYLISIPSLDQPVXXPSA

SEQ ID NO: 17474 - protein, 33 aa, Artificial Sequence
  Non-cyclic GFR-binding peptide
  MOD_RES (33), (33): Xaa is C or S
  MOD_RES (11), (12), (13), (14), (15): Xaa is A or G
  MOD_RES (16), (17), (18), (19): Xaa is A or G or is absent
SVAMGEYQKYXXXXXXXXXIYLISIPSLKTPVX

SEQ ID NO: 17475 - protein, 35 aa, Artificial Sequence
  Non-cyclic GFR-binding peptide
  MOD_RES (1), (3): Xaa is C or S
  MOD_RES (14), (15), (16), (17), (18): Xaa is A or G
  MOD_RES (19), (20), (21), (22): Xaa is A or G or is absent
XKXSKVVMEYQKYXXXXXXXXXIYLISIPSLDQPV

SEQ ID NO: 17476 - protein, 36 aa, Artificial Sequence
  Non-cyclic GFR-binding peptide
  MOD_RES (1), (35): Xaa is C or S
  MOD_RES (13), (14), (15), (16), (17): Xaa is A or G
  MOD_RES (18), (19), (20), (21): Xaa is A or G or is absent
XSRVVMNEYQKYXXXXXXXXXIYLVSIPSLKTPAXT

SEQ ID NO: 17477 - protein, 33 aa, Artificial Sequence
  Non-cyclic GFR-binding peptide
  MOD_RES (2), (2): Xaa is C or S
GXAEVVMDEYKFKVVNNAADLYLISIPELRAPV

SEQ ID NO: 17478 - protein, 41 aa, Artificial Sequence
  Non-cyclic GFR-binding peptide
  MOD_RES (2), (4), (37), (38): Xaa is C or S
  MOD_RES (15), (16), (17), (18), (19): Xaa is A or G
  MOD_RES (20), (21), (22), (23): Xaa is A or G or is absent
SXKXSKVIMEYQKYXXXXXXXXXIYLISIPSLDQSVXXPSA

SEQ ID NO: 17479 - protein, 34 aa, Artificial Sequence
  Non-cyclic GFR-binding peptide
  MOD_RES (2), (34): Xaa is C or S
GXARVVMNEYQKYIVNSSDDIYLVSIPSLQTPAX

SEQ ID NO: 17480 - protein, 43 aa, Artificial Sequence
  Non-cyclic GFR-binding peptide
  MOD_RES (1), (3), (37), (38): Xaa is C or S
  MOD_RES (15), (16), (17), (18), (19): Xaa is A or G
  MOD_RES (20), (21), (22), (23): Xaa is A or G or is absent
XGXAKVVMNEYKFKXXXXXXXXXLYLVSIPELKTPAXXAKPVA

SEQ ID NO: 17481 - protein, 35 aa, Artificial Sequence
  Non-cyclic GFR-binding peptide
  MOD_RES (1), (33): Xaa is C or S
XSRVVMNEYKFKIVNSSDDLYLVSIPELKTPAXTP

SEQ ID NO: 17482 - protein, 42 aa, Artificial Sequence
  Non-cyclic GFR-binding peptide
  MOD_RES (2), (36), (37): Xaa is C or S
  MOD_RES (14), (15), (16), (17), (18): Xaa is A or G
  MOD_RES (19), (20), (21), (22): Xaa is A or G or is absent
GXARVVMNEYQKYXXXXXXXXXIYLVSIPSLQTPAXXPKPVT

SEQ ID NO: 17483 - protein, 38 aa, Artificial Sequence
  Non-cyclic GFR-binding peptide
  MOD_RES (34), (35): Xaa is C or S
  MOD_RES (12), (13), (14), (15), (16): Xaa is A or G
  MOD_RES (17), (18), (19), (20): Xaa is A or G or is absent
AKVVMNEYQKYXXXXXXXXXIYLVSIPSLKTPAXXAKP

SEQ ID NO: 17484 - protein, 34 aa, Artificial Sequence
  Non-cyclic GFR-binding peptide
  MOD_RES (2), (34): Xaa is C or S
GXGEVVMDEYKFKVVKENEDLYLMSIPELETPVX

SEQ ID NO: 17485 - protein, 42 aa, Artificial Sequence
  Non-cyclic GFR-binding peptide
  MOD_RES (2), (4), (36), (37): Xaa is C or S
HXGXSRVVMNEYQKYIVNSSDDIYLVSIPSLKTPAXXPKPVY

SEQ ID NO: 17486 - protein, 39 aa, Artificial Sequence
  Non-cyclic GFR-binding peptide
  MOD_RES (1), (34), (35): Xaa is C or S
  MOD_RES (12), (13), (14), (15), (16): Xaa is A or G
  MOD_RES (17), (18), (19), (20): Xaa is A or G or is absent
XSKVVMEYKFKXXXXXXXXXLYLISIPELDQPVXXPSAS

SEQ ID NO: 17487 - protein, 33 aa, Artificial Sequence
  Non-cyclic GFR-binding peptide
  MOD_RES (31), (32): Xaa is C or S
KVVMNEYQKYIVNNSSDIYLVSIPSLKTPAXXA

SEQ ID NO: 17488 - protein, 37 aa, Artificial Sequence
  Non-cyclic GFR-binding peptide
  MOD_RES (2), (35), (36): Xaa is C or S
GXEAVSMGEEYKFKTPVGMDDLYLVSIPELKTPVXXA

SEQ ID NO: 17489 - protein, 35 aa, Artificial Sequence
  Non-cyclic GFR-binding peptide
  MOD_RES (31), (32): Xaa is C or S
EVVMEEYQKYVVKDYEDIYLMSIPSLETPVXXAKP

SEQ ID NO: 17490 - protein, 35 aa, Artificial Sequence
  Non-cyclic GFR-binding peptide
  MOD_RES (32), (33): Xaa is C or S
ESVAMGRYKKLYTVVGKDFYLISIANLKTPVXXAK

SEQ ID NO: 17491 - protein, 34 aa, Artificial Sequence
  Non-cyclic GFR-binding peptide
  MOD_RES (33), (34): Xaa is C or S
  MOD_RES (11), (12), (13), (14), (15): Xaa is A or G
  MOD_RES (16), (17), (18), (19): Xaa is A or G or is absent
EVVMDYHYKLXXXXXXXXXKYLISIPSLRAPVXX

SEQ ID NO: 17492 - protein, 39 aa, Artificial Sequence
  Non-cyclic GFR-binding peptide
  MOD_RES (2), (4), (38), (39): Xaa is C or S
  MOD_RES (16), (17), (18), (19), (20): Xaa is A or G
  MOD_RES (21), (22), (23), (24): Xaa is A or G or is absent
HXGXAKVVMNEYQKYXXXXXXXXXIYLVSIPSLKTPAXX

SEQ ID NO: 17493 - protein, 37 aa, Artificial Sequence
  Non-cyclic GFR-binding peptide
  MOD_RES (1), (3): Xaa is C or S
  MOD_RES (16), (17), (18), (19), (20): Xaa is A or G
  MOD_RES (21), (22), (23), (24): Xaa is A or G or is absent
XGXEAVSMGEEYKFKXXXXXXXXXLYLVSIPELKTPV

SEQ ID NO: 17494 - protein, 37 aa, Artificial Sequence
  Non-cyclic GFR-binding peptide
  MOD_RES (2), (36), (37): Xaa is C or S
  MOD_RES (14), (15), (16), (17), (18): Xaa is A or G
  MOD_RES (19), (20), (21), (22): Xaa is A or G or is absent
GXGEVVMDEYQKYXXXXXXXXXIYLMSIPSLETPVXX

SEQ ID NO: 17495 - protein, 35 aa, Artificial Sequence
  Non-cyclic GFR-binding peptide
  MOD_RES (2), (4): Xaa is C or S
HXGXAKVVMNEYQKYIVNNSSDIYLVSIPSLKTPA

SEQ ID NO: 17496 - protein, 38 aa, Artificial Sequence
  Non-cyclic GFR-binding peptide
  MOD_RES (1), (34), (35): Xaa is C or S
XEAVSMGEEYKFKTPVGMDDLYLVSIPELKTPVXXAKG

SEQ ID NO: 17497 - protein, 33 aa, Artificial Sequence
  Non-cyclic GFR-binding peptide
  MOD_RES (32), (33): Xaa is C or S
ESVAMGEYQKYYTVVGKDIYLISIPSLKTPVXX

SEQ ID NO: 17498 - protein, 34 aa, Artificial Sequence
  Non-cyclic GFR-binding peptide
  MOD_RES (1), (33), (34): Xaa is C or S
XESVAMGRYKKLYTVVGKDFYLISIANLKTPVXX

SEQ ID NO: 17499 - protein, 35 aa, Artificial Sequence
  Non-cyclic GFR-binding peptide
  MOD_RES (2), (33), (34): Xaa is C or S
KXSKVIMEYKFKIKPTKGILYLISIPELDQSVXXP

SEQ ID NO: 17500 - protein, 42 aa, Artificial Sequence
  Non-cyclic GFR-binding peptide
  MOD_RES (2), (4), (37), (38): Xaa is C or S
  MOD_RES (15), (16), (17), (18), (19): Xaa is A or G
  MOD_RES (20), (21), (22), (23): Xaa is A or G or is absent
SXKXSKVIMEYKFKXXXXXXXXXLYLISIPELDQSVXXPSAS

SEQ ID NO: 17501 - protein, 38 aa, Artificial Sequence
  Non-cyclic GFR-binding peptide
  MOD_RES (1), (33), (34): Xaa is C or S
XESVAMGEYQKYYTVVGKDIYLISIPSLKTPVXXAKSA

SEQ ID NO: 17502 - protein, 38 aa, Artificial Sequence
  Non-cyclic GFR-binding peptide
  MOD_RES (2), (33), (34): Xaa is C or S
KXSRVIMEYQKYVKPKRGVIYLISIPSLAQPVXXPAAS

SEQ ID NO: 17503 - protein, 31 aa, Artificial Sequence
  Non-cyclic GFR-binding peptide
  MOD_RES (31), (31): Xaa is C or S
EVVMEEYKFKVVKDYEDLYLMSIPELETPVX

SEQ ID NO: 17504 - protein, 41 aa, Artificial Sequence
  Non-cyclic GFR-binding peptide
  MOD_RES (1), (35), (36): Xaa is C or S
  MOD_RES (13), (14), (15), (16), (17): Xaa is A or G
  MOD_RES (18), (19), (20), (21): Xaa is A or G or is absent
XESVAMGEYQKYXXXXXXXXXIYLISIPSLKTPVXXAKSAK

SEQ ID NO: 17505 - protein, 39 aa, Artificial Sequence
  Non-cyclic GFR-binding peptide
  MOD_RES (33), (34): Xaa is C or S
  MOD_RES (11), (12), (13), (14), (15): Xaa is A or G
  MOD_RES (16), (17), (18), (19): Xaa is A or G or is absent
SVAMGYHYKLXXXXXXXXXKYLISIPSLKTPVXXAKSAK

SEQ ID NO: 17506 - protein, 33 aa, Artificial Sequence
  Non-cyclic GFR-binding peptide
  MOD_RES (31), (32): Xaa is C or S
RVVMNEYKFKIVNSSDDLYLVSIPELKTPAXXP

SEQ ID NO: 17507 - protein, 39 aa, Artificial Sequence
  Non-cyclic GFR-binding peptide
  MOD_RES (1), (3), (35), (36): Xaa is C or S
XGXGEVVMDEYKFKVVKENEDLYLMSIPELETPVXXAKP

SEQ ID NO: 17508 - protein, 36 aa, Artificial Sequence
  Non-cyclic GFR-binding peptide
  MOD_RES (2), (34), (35): Xaa is C or S
GXAEVVMDRYKKLVVNNAADFYLISIANLRAPVXXS

SEQ ID NO: 17509 - protein, 35 aa, Artificial Sequence
  Non-cyclic GFR-binding peptide
  MOD_RES (1), (34), (35): Xaa is C or S
XEAVSMGEEYQKYTPVGMDDIYLVSIPSLKTPVXX

SEQ ID NO: 17510 - protein, 34 aa, Artificial Sequence
  Non-cyclic GFR-binding peptide
  MOD_RES (31), (32): Xaa is C or S
RVVMNEYKFKIVNSSDDLYLVSIPELQTPAXXPK

SEQ ID NO: 17511 - protein, 31 aa, Artificial Sequence
  Non-cyclic GFR-binding peptide
  MOD_RES (31), (31): Xaa is C or S
RVVMNEYKFKIVNSSDDLYLVSIPELKTPAX

SEQ ID NO: 17512 - protein, 38 aa, Artificial Sequence
  Non-cyclic GFR-binding peptide
  MOD_RES (2), (36), (37): Xaa is C or S
  MOD_RES (14), (15), (16), (17), (18): Xaa is A or G
  MOD_RES (19), (20), (21), (22): Xaa is A or G or is absent
GXAEVVMDEYKFKXXXXXXXXXLYLISIPELRAPVXXS

SEQ ID NO: 17513 - protein, 36 aa, Artificial Sequence
  Non-cyclic GFR-binding peptide
  MOD_RES (33), (33): Xaa is C or S
  MOD_RES (11), (12), (13), (14), (15): Xaa is A or G
  MOD_RES (16), (17), (18), (19): Xaa is A or G or is absent
RVVMNEYKFKXXXXXXXXXLYLVSIPELKTPAXTPK

SEQ ID NO: 17514 - protein, 34 aa, Artificial Sequence
  Non-cyclic GFR-binding peptide
  MOD_RES (31), (32): Xaa is C or S
SKVIMEYQKYIKPTKGIIYLISIPSLDQSVXXPS

SEQ ID NO: 17515 - protein, 40 aa, Artificial Sequence
  Non-cyclic GFR-binding peptide
  MOD_RES (34), (35): Xaa is C or S
  MOD_RES (12), (13), (14), (15), (16): Xaa is A or G
  MOD_RES (17), (18), (19), (20): Xaa is A or G or is absent
ARVVMNEYKFKXXXXXXXXXLYLVSIPELQTPAXXPKPVT

SEQ ID NO: 17516 - protein, 39 aa, Artificial Sequence
  Non-cyclic GFR-binding peptide
  MOD_RES (2), (4), (36), (37): Xaa is C or S
RXGXAEVVMDRYKKLVVNNAADFYLISIANLRAPVXXSA

SEQ ID NO: 17517 - protein, 36 aa, Artificial Sequence
  Non-cyclic GFR-binding peptide
  MOD_RES (1), (35), (36): Xaa is C or S
  MOD_RES (13), (14), (15), (16), (17): Xaa is A or G
  MOD_RES (18), (19), (20), (21): Xaa is A or G or is absent
XGEVVMDEYKFKXXXXXXXXXLYLMSIPELETPVXX

SEQ ID NO: 17518 - protein, 36 aa, Artificial Sequence
  Non-cyclic GFR-binding peptide
  MOD_RES (33), (34): Xaa is C or S
  MOD_RES (11), (12), (13), (14), (15): Xaa is A or G
  MOD_RES (16), (17), (18), (19): Xaa is A or G or is absent
SRVIMEYKFKXXXXXXXXXLYLISIPELAQPVXXPA

SEQ ID NO: 17519 - protein, 40 aa, Artificial Sequence
  Non-cyclic GFR-binding peptide
  MOD_RES (34), (35): Xaa is C or S
  MOD_RES (12), (13), (14), (15), (16): Xaa is A or G
  MOD_RES (17), (18), (19), (20): Xaa is A or G or is absent
GEVVMEEYQKYXXXXXXXXXIYLMSIPSLETPVXXAKPIS

SEQ ID NO: 17520 - protein, 37 aa, Artificial Sequence
  Non-cyclic GFR-binding peptide
  MOD_RES (2), (4): Xaa is C or S
  MOD_RES (16), (17), (18), (19), (20): Xaa is A or G
  MOD_RES (21), (22), (23), (24): Xaa is A or G or is absent
RXGXGEVVMDEYQKYXXXXXXXXXIYLMSIPSLETPV

SEQ ID NO: 17521 - protein, 39 aa, Artificial Sequence
  Non-cyclic GFR-binding peptide
  MOD_RES (1), (33), (34): Xaa is C or S
XARVVMNEYQKYIVNSSDDIYLVSIPSLQTPAXXPKPVT

SEQ ID NO: 17522 - protein, 37 aa, Artificial Sequence
  Non-cyclic GFR-binding peptide
  MOD_RES (31), (32): Xaa is C or S
EVVMDEYKFKVVKENEDLYLMSIPELETPVXXAKPIK

SEQ ID NO: 17523 - protein, 40 aa, Artificial Sequence
  Non-cyclic GFR-binding peptide
  MOD_RES (2), (4), (38), (39): Xaa is C or S
  MOD_RES (16), (17), (18), (19), (20): Xaa is A or G
  MOD_RES (21), (22), (23), (24): Xaa is A or G or is absent
RXGXESVAMGRYKKLXXXXXXXXXFYLISIANLKTPVXXA

SEQ ID NO: 17524 - protein, 36 aa, Artificial Sequence
  Non-cyclic GFR-binding peptide
  MOD_RES (1), (33), (34): Xaa is C or S
XSRVVMNEYQKYIVNSSDDIYLVSIPSLKTPAXXPK

SEQ ID NO: 17525 - protein, 36 aa, Artificial Sequence
  Non-cyclic GFR-binding peptide
  MOD_RES (2), (35), (36): Xaa is C or S
  MOD_RES (13), (14), (15), (16), (17): Xaa is A or G
  MOD_RES (18), (19), (20), (21): Xaa is A or G or is absent
KXSKVVMEYQKYXXXXXXXXXIYLISIPSLDQPVXX

SEQ ID NO: 17526 - protein, 39 aa, Artificial Sequence
  Non-cyclic GFR-binding peptide
  MOD_RES (1), (33), (34): Xaa is C or S
XESVAMGYHYKLYTVVGKDKYLISIPSLKTPVXXAKSAK

SEQ ID NO: 17527 - protein, 41 aa, Artificial Sequence
  Non-cyclic GFR-binding peptide
  MOD_RES (1), (3), (35): Xaa is C or S
XGXSRVVMNEYQKYIVNSSDDIYLVSIPSLKTPAXTPKTVH

SEQ ID NO: 17528 - protein, 38 aa, Artificial Sequence
  Non-cyclic GFR-binding peptide
  MOD_RES (1), (3), (35), (36): Xaa is C or S
XGXGEVVMEEYKFKVVKDYEDLYLMSIPELETPVXXAK

SEQ ID NO: 17529 - protein, 39 aa, Artificial Sequence
  Non-cyclic GFR-binding peptide
  MOD_RES (1), (3), (36), (37): Xaa is C or S
  MOD_RES (14), (15), (16), (17), (18): Xaa is A or G
  MOD_RES (19), (20), (21), (22): Xaa is A or G or is absent
XKXSKVVMEYQKYXXXXXXXXXIYLISIPSLDQPVXXPS

SEQ ID NO: 17530 - protein, 41 aa, Artificial Sequence
  Non-cyclic GFR-binding peptide
  MOD_RES (2), (4), (38), (39): Xaa is C or S
  MOD_RES (16), (17), (18), (19), (20): Xaa is A or G
  MOD_RES (21), (22), (23), (24): Xaa is A or G or is absent
RXGXAEVVMDYHYKLXXXXXXXXXKYLISIPSLRAPVXXSA

SEQ ID NO: 17531 - protein, 33 aa, Artificial Sequence
  Non-cyclic GFR-binding peptide
  MOD_RES (12), (13), (14), (15), (16): Xaa is A or G
  MOD_RES (17), (18), (19), (20): Xaa is A or G or is absent
GEVVMEEYKFKXXXXXXXXXLYLMSIPELETPV

SEQ ID NO: 17532 - protein, 39 aa, Artificial Sequence
  Non-cyclic GFR-binding peptide
  MOD_RES (2), (4), (37), (38): Xaa is C or S
  MOD_RES (15), (16), (17), (18), (19): Xaa is A or G
  MOD_RES (20), (21), (22), (23): Xaa is A or G or is absent
SXKXSKVVMEYQKYXXXXXXXXXIYLISIPSLDQPVXXP

SEQ ID NO: 17533 - protein, 36 aa, Artificial Sequence
  Non-cyclic GFR-binding peptide
  MOD_RES (35), (36): Xaa is C or S
  MOD_RES (13), (14), (15), (16), (17): Xaa is A or G
  MOD_RES (18), (19), (20), (21): Xaa is A or G or is absent
EAVSMGEEYQKYXXXXXXXXXIYLVSIPSLKTPVXX

SEQ ID NO: 17534 - protein, 36 aa, Artificial Sequence
  Non-cyclic GFR-binding peptide
  MOD_RES (2), (4), (36): Xaa is C or S
HXGXARVVMNEYKFKIVNSSDDLYLVSIPELQTPAX

SEQ ID NO: 17535 - protein, 37 aa, Artificial Sequence
  Non-cyclic GFR-binding peptide
  MOD_RES (33), (34): Xaa is C or S
  MOD_RES (11), (12), (13), (14), (15): Xaa is A or G
  MOD_RES (16), (17), (18), (19): Xaa is A or G or is absent
SRVIMEYKFKXXXXXXXXXLYLISIPELAQPVXXPAA

SEQ ID NO: 17536 - protein, 34 aa, Artificial Sequence
  Non-cyclic GFR-binding peptide
  MOD_RES (2), (4): Xaa is C or S
SXKXSKVVMEYKFKVKPTRGVLYLISIPELDQPV

SEQ ID NO: 17537 - protein, 34 aa, Artificial Sequence
  Non-cyclic GFR-binding peptide
  MOD_RES (33), (34): Xaa is C or S
  MOD_RES (11), (12), (13), (14), (15): Xaa is A or G
  MOD_RES (16), (17), (18), (19): Xaa is A or G or is absent
EVVMDEYKFKXXXXXXXXXLYLMSIPELETPVXX

SEQ ID NO: 17538 - protein, 44 aa, Artificial Sequence
  Non-cyclic GFR-binding peptide
  MOD_RES (2), (4), (38), (39): Xaa is C or S
  MOD_RES (16), (17), (18), (19), (20): Xaa is A or G
  MOD_RES (21), (22), (23), (24): Xaa is A or G or is absent
RXGXESVAMGYHYKLXXXXXXXXXKYLISIPSLKTPVXXAKSAK

SEQ ID NO: 17539 - protein, 37 aa, Artificial Sequence
  Non-cyclic GFR-binding peptide
  MOD_RES (2), (4): Xaa is C or S
  MOD_RES (16), (17), (18), (19), (20): Xaa is A or G
  MOD_RES (21), (22), (23), (24): Xaa is A or G or is absent
HXGXSRVVMNEYKFKXXXXXXXXXLYLVSIPELKTPA

SEQ ID NO: 17540 - protein, 38 aa, Artificial Sequence
  Non-cyclic GFR-binding peptide
  MOD_RES (2), (4), (35), (36): Xaa is C or S
SXKXSKVVMEYQKYVKPTRGVIYLISIPSLDQPVXXPS

SEQ ID NO: 17541 - protein, 40 aa, Artificial Sequence
  Non-cyclic GFR-binding peptide
  MOD_RES (34), (35): Xaa is C or S
  MOD_RES (12), (13), (14), (15), (16): Xaa is A or G
  MOD_RES (17), (18), (19), (20): Xaa is A or G or is absent
ESVAMGEYQKYXXXXXXXXXIYLISIPSLKTPVXXAKSAK

SEQ ID NO: 17542 - protein, 39 aa, Artificial Sequence
  Non-cyclic GFR-binding peptide
  MOD_RES (1), (33), (34): Xaa is C or S
XAEVVMDYHYKLVVNNAADKYLISIPSLRAPVXXSAPAA

SEQ ID NO: 17543 - protein, 36 aa, Artificial Sequence
  Non-cyclic GFR-binding peptide
  MOD_RES (1), (3), (35), (36): Xaa is C or S
XGXESVAMGRYKKLYTVVGKDFYLISIANLKTPVXX

SEQ ID NO: 17544 - protein, 39 aa, Artificial Sequence
  Non-cyclic GFR-binding peptide
  MOD_RES (2), (34), (35): Xaa is C or S
GXAKVVMNEYKFKIVNNSSDLYLVSIPELKTPAXXAKPV

SEQ ID NO: 17545 - protein, 37 aa, Artificial Sequence
  Non-cyclic GFR-binding peptide
  MOD_RES (2), (34), (35): Xaa is C or S
GXSRVVMNEYKFKIVNSSDDLYLVSIPELKTPAXXPK

SEQ ID NO: 17546 - protein, 38 aa, Artificial Sequence
  Non-cyclic GFR-binding peptide
  MOD_RES (2), (36), (37): Xaa is C or S
  MOD_RES (14), (15), (16), (17), (18): Xaa is A or G
  MOD_RES (19), (20), (21), (22): Xaa is A or G or is absent
GXGEVVMDEYQKYXXXXXXXXXIYLMSIPSLETPVXXA

SEQ ID NO: 17547 - protein, 42 aa, Artificial Sequence
  Non-cyclic GFR-binding peptide
  MOD_RES (2), (4), (36), (37): Xaa is C or S
HXGXSRVVMNEYKFKIVNSSDDLYLVSIPELKTPAXXPKPVY

SEQ ID NO: 17548 - protein, 38 aa, Artificial Sequence
  Non-cyclic GFR-binding peptide
  MOD_RES (2), (4), (38): Xaa is C or S
  MOD_RES (16), (17), (18), (19), (20): Xaa is A or G
  MOD_RES (21), (22), (23), (24): Xaa is A or G or is absent
RXGXESVAMGYHYKLXXXXXXXXXKYLISIPSLKTPVX

SEQ ID NO: 17549 - protein, 36 aa, Artificial Sequence
  Non-cyclic GFR-binding peptide
  MOD_RES (1), (3), (36): Xaa is C or S
  MOD_RES (14), (15), (16), (17), (18): Xaa is A or G
  MOD_RES (19), (20), (21), (22): Xaa is A or G or is absent
XKXSKVIMEYKFKXXXXXXXXXLYLISIPELDQSVX

SEQ ID NO: 17550 - protein, 34 aa, Artificial Sequence
  Non-cyclic GFR-binding peptide
  MOD_RES (33), (34): Xaa is C or S
  MOD_RES (11), (12), (13), (14), (15): Xaa is A or G
  MOD_RES (16), (17), (18), (19): Xaa is A or G or is absent
KVVMNEYQKYXXXXXXXXXIYLVSIPSLKTPAXX

SEQ ID NO: 17551 - protein, 34 aa, Artificial Sequence
  Non-cyclic GFR-binding peptide
  MOD_RES (33), (34): Xaa is C or S
  MOD_RES (11), (12), (13), (14), (15): Xaa is A or G
  MOD_RES (16), (17), (18), (19): Xaa is A or G or is absent
RVVMNEYQKYXXXXXXXXXIYLVSIPSLKTPAXX

SEQ ID NO: 17552 - protein, 38 aa, Artificial Sequence
  Non-cyclic GFR-binding peptide
  MOD_RES (1), (36), (37): Xaa is C or S
  MOD_RES (14), (15), (16), (17), (18): Xaa is A or G
  MOD_RES (19), (20), (21), (22): Xaa is A or G or is absent
XEAVSMGEEYKFKXXXXXXXXXLYLVSIPELKTPVXXA

SEQ ID NO: 17553 - protein, 38 aa, Artificial Sequence
  Non-cyclic GFR-binding peptide
  MOD_RES (2), (4), (38): Xaa is C or S
  MOD_RES (16), (17), (18), (19), (20): Xaa is A or G
  MOD_RES (21), (22), (23), (24): Xaa is A or G or is absent
RXGXGEVVMDEYKFKXXXXXXXXXLYLMSIPELETPVX

SEQ ID NO: 17554 - protein, 37 aa, Artificial Sequence
  Non-cyclic GFR-binding peptide
  MOD_RES (1), (36), (37): Xaa is C or S
  MOD_RES (14), (15), (16), (17), (18): Xaa is A or G
  MOD_RES (19), (20), (21), (22): Xaa is A or G or is absent
XEAVSMGEEYQKYXXXXXXXXXIYLVSIPSLKTPVXX

SEQ ID NO: 17555 - protein, 35 aa, Artificial Sequence
  Non-cyclic GFR-binding peptide
  MOD_RES (31), (32): Xaa is C or S
SVAMGEYQKYYTVVGKDIYLISIPSLKTPVXXAKS

SEQ ID NO: 17556 - protein, 41 aa, Artificial Sequence
  Non-cyclic GFR-binding peptide
  MOD_RES (2), (36), (37): Xaa is C or S
  MOD_RES (14), (15), (16), (17), (18): Xaa is A or G
  MOD_RES (19), (20), (21), (22): Xaa is A or G or is absent
GXARVVMNEYKFKXXXXXXXXXLYLVSIPELQTPAXXPKPV

SEQ ID NO: 17557 - protein, 37 aa, Artificial Sequence
  Non-cyclic GFR-binding peptide
  MOD_RES (1), (3), (37): Xaa is C or S
  MOD_RES (15), (16), (17), (18), (19): Xaa is A or G
  MOD_RES (20), (21), (22), (23): Xaa is A or G or is absent
XGXSRVVMNEYQKYXXXXXXXXXIYLVSIPSLKTPAX

SEQ ID NO: 17558 - protein, 39 aa, Artificial Sequence
  Non-cyclic GFR-binding peptide
  MOD_RES (2), (4), (39): Xaa is C or S
  MOD_RES (17), (18), (19), (20), (21): Xaa is A or G
  MOD_RES (22), (23), (24), (25): Xaa is A or G or is absent
RXGXEAVSMGEEYQKYXXXXXXXXXIYLVSIPSLKTPVX

SEQ ID NO: 17559 - protein, 38 aa, Artificial Sequence
  Non-cyclic GFR-binding peptide
  MOD_RES (32), (33): Xaa is C or S
AEVVMDEYKFKVVNNAADLYLISIPELRAPVXXSAPAA

SEQ ID NO: 17560 - protein, 42 aa, Artificial Sequence
  Non-cyclic GFR-binding peptide
  MOD_RES (1), (3), (37), (38): Xaa is C or S
  MOD_RES (15), (16), (17), (18), (19): Xaa is A or G
  MOD_RES (20), (21), (22), (23): Xaa is A or G or is absent
XGXGEVVMEEYQKYXXXXXXXXXIYLMSIPSLETPVXXAKPI

SEQ ID NO: 17561 - protein, 33 aa, Artificial Sequence
  Non-cyclic GFR-binding peptide
  MOD_RES (33), (33): Xaa is C or S
  MOD_RES (11), (12), (13), (14), (15): Xaa is A or G
  MOD_RES (16), (17), (18), (19): Xaa is A or G or is absent
SKVVMEYKFKXXXXXXXXXLYLISIPELDQPVX

SEQ ID NO: 17562 - protein, 36 aa, Artificial Sequence
  Non-cyclic GFR-binding peptide
  MOD_RES (1), (3), (34), (35): Xaa is C or S
XKXSRVIMEYQKYVKPKRGVIYLISIPSLAQPVXXP

SEQ ID NO: 17563 - protein, 40 aa, Artificial Sequence
  Non-cyclic GFR-binding peptide
  MOD_RES (2), (4), (36), (37): Xaa is C or S
HXGXSRVVMNEYKFKIVNSSDDLYLVSIPELKTPAXXPKP

SEQ ID NO: 17564 - protein, 34 aa, Artificial Sequence
  Non-cyclic GFR-binding peptide
  MOD_RES (2), (34): Xaa is C or S
GXESVAMGRYKKLYTVVGKDFYLISIANLKTPVX

SEQ ID NO: 17565 - protein, 33 aa, Artificial Sequence
  Non-cyclic GFR-binding peptide
  MOD_RES (31), (32): Xaa is C or S
EVVMDEYKFKVVNNAADLYLISIPELRAPVXXS

SEQ ID NO: 17566 - protein, 37 aa, Artificial Sequence
  Non-cyclic GFR-binding peptide
  MOD_RES (1), (34), (35): Xaa is C or S
XEAVSMGEEYKFKTPVGMDDLYLVSIPELKTPVXXAK

SEQ ID NO: 17567 - protein, 41 aa, Artificial Sequence
  Non-cyclic GFR-binding peptide
  MOD_RES (35), (36): Xaa is C or S
  MOD_RES (13), (14), (15), (16), (17): Xaa is A or G
  MOD_RES (18), (19), (20), (21): Xaa is A or G or is absent
EAVSMGEEYKFKXXXXXXXXXLYLVSIPELKTPVXXAKGVK

SEQ ID NO: 17568 - protein, 37 aa, Artificial Sequence
  Non-cyclic GFR-binding peptide
  MOD_RES (1), (3), (36), (37): Xaa is C or S
  MOD_RES (14), (15), (16), (17), (18): Xaa is A or G
  MOD_RES (19), (20), (21), (22): Xaa is A or G or is absent
XKXSRVIMEYQKYXXXXXXXXXIYLISIPSLAQPVXX

SEQ ID NO: 17569 - protein, 39 aa, Artificial Sequence
  Non-cyclic GFR-binding peptide
  MOD_RES (1), (33), (34): Xaa is C or S
XGEVVMDEYQKYVVKENEDIYLMSIPSLETPVXXAKPIK

SEQ ID NO: 17570 - protein, 41 aa, Artificial Sequence
  Non-cyclic GFR-binding peptide
  MOD_RES (2), (36), (37): Xaa is C or S
  MOD_RES (14), (15), (16), (17), (18): Xaa is A or G
  MOD_RES (19), (20), (21), (22): Xaa is A or G or is absent
GXESVAMGEYQKYXXXXXXXXXIYLISIPSLKTPVXXAKSA

SEQ ID NO: 17571 - protein, 33 aa, Artificial Sequence
  Non-cyclic GFR-binding peptide
  MOD_RES (33), (33): Xaa is C or S
  MOD_RES (11), (12), (13), (14), (15): Xaa is A or G
  MOD_RES (16), (17), (18), (19): Xaa is A or G or is absent
RVVMNEYKFKXXXXXXXXXLYLVSIPELKTPAX

SEQ ID NO: 17572 - protein, 31 aa, Artificial Sequence
  Non-cyclic GFR-binding peptide
  MOD_RES (31), (31): Xaa is C or S
SKVIMEYQKYIKPTKGIIYLISIPSLDQSVX

SEQ ID NO: 17573 - protein, 33 aa, Artificial Sequence
  Non-cyclic GFR-binding peptide
  MOD_RES (33), (33): Xaa is C or S
  MOD_RES (11), (12), (13), (14), (15): Xaa is A or G
  MOD_RES (16), (17), (18), (19): Xaa is A or G or is absent
KVVMNEYKFKXXXXXXXXXLYLVSIPELKTPAX

SEQ ID NO: 17574 - protein, 33 aa, Artificial Sequence
  Non-cyclic GFR-binding peptide
  MOD_RES (12), (13), (14), (15), (16): Xaa is A or G
  MOD_RES (17), (18), (19), (20): Xaa is A or G or is absent
AKVVMNEYQKYXXXXXXXXXIYLVSIPSLKTPA

SEQ ID NO: 17575 - protein, 36 aa, Artificial Sequence
  Non-cyclic GFR-binding peptide
  MOD_RES (1), (33), (34): Xaa is C or S
XAEVVMDYHYKLVVNNAADKYLISIPSLRAPVXXSA

SEQ ID NO: 17576 - protein, 36 aa, Artificial Sequence
  Non-cyclic GFR-binding peptide
  MOD_RES (31), (32): Xaa is C or S
KVVMNEYQKYIVNNSSDIYLVSIPSLKTPAXXAKPV

SEQ ID NO: 17577 - protein, 42 aa, Artificial Sequence
  Non-cyclic GFR-binding peptide
  MOD_RES (1), (3), (37): Xaa is C or S
  MOD_RES (15), (16), (17), (18), (19): Xaa is A or G
  MOD_RES (20), (21), (22), (23): Xaa is A or G or is absent
XGXSRVVMNEYKFKXXXXXXXXXLYLVSIPELKTPAXTPKTV

SEQ ID NO: 17578 - protein, 36 aa, Artificial Sequence
  Non-cyclic GFR-binding peptide
  MOD_RES (31), (32): Xaa is C or S
SVAMGRYKKLYTVVGKDFYLISIANLKTPVXXAKSA

SEQ ID NO: 17579 - protein, 35 aa, Artificial Sequence
  Non-cyclic GFR-binding peptide
  MOD_RES (2), (35): Xaa is C or S
  MOD_RES (13), (14), (15), (16), (17): Xaa is A or G
  MOD_RES (18), (19), (20), (21): Xaa is A or G or is absent
KXSKVVMEYQKYXXXXXXXXXIYLISIPSLDQPVX

SEQ ID NO: 17580 - protein, 36 aa, Artificial Sequence
  Non-cyclic GFR-binding peptide
  MOD_RES (1), (3), (35), (36): Xaa is C or S
XGXAKVVMNEYQKYIVNNSSDIYLVSIPSLKTPAXX

SEQ ID NO: 17581 - protein, 36 aa, Artificial Sequence
  Non-cyclic GFR-binding peptide
  MOD_RES (2), (34), (35): Xaa is C or S
GXGEVVMDEYKFKVVKENEDLYLMSIPELETPVXXA

SEQ ID NO: 17582 - protein, 35 aa, Artificial Sequence
  Non-cyclic GFR-binding peptide
  MOD_RES (2), (34), (35): Xaa is C or S
GXAEVVMDRYKKLVVNNAADFYLISIANLRAPVXX

SEQ ID NO: 17583 - protein, 39 aa, Artificial Sequence
  Non-cyclic GFR-binding peptide
  MOD_RES (1), (3), (35), (36): Xaa is C or S
XGXGEVVMEEYKFKVVKDYEDLYLMSIPELETPVXXAKP

SEQ ID NO: 17584 - protein, 33 aa, Artificial Sequence
  Non-cyclic GFR-binding peptide
  MOD_RES (33), (33): Xaa is C or S
  MOD_RES (11), (12), (13), (14), (15): Xaa is A or G
  MOD_RES (16), (17), (18), (19): Xaa is A or G or is absent
SKVVMEYQKYXXXXXXXXXIYLISIPSLDQPVX

SEQ ID NO: 17585 - protein, 37 aa, Artificial Sequence
  Non-cyclic GFR-binding peptide
  MOD_RES (2), (36), (37): Xaa is C or S
  MOD_RES (14), (15), (16), (17), (18): Xaa is A or G
  MOD_RES (19), (20), (21), (22): Xaa is A or G or is absent
GXSRVVMNEYKFKXXXXXXXXXLYLVSIPELKTPAXX

SEQ ID NO: 17586 - protein, 35 aa, Artificial Sequence
  Non-cyclic GFR-binding peptide
  MOD_RES (2), (34), (35): Xaa is C or S
GXAKVVMNEYKFKIVNNSSDLYLVSIPELKTPAXX

SEQ ID NO: 17587 - protein, 35 aa, Artificial Sequence
  Non-cyclic GFR-binding peptide
  MOD_RES (2), (34), (35): Xaa is C or S
GXAEVVMDEYKFKVVNNAADLYLISIPELRAPVXX

SEQ ID NO: 17588 - protein, 41 aa, Artificial Sequence
  Non-cyclic GFR-binding peptide
  MOD_RES (2), (4), (38), (39): Xaa is C or S
  MOD_RES (16), (17), (18), (19), (20): Xaa is A or G
  MOD_RES (21), (22), (23), (24): Xaa is A or G or is absent
RXGXGEVVMEEYQKYXXXXXXXXXIYLMSIPSLETPVXXAK

SEQ ID NO: 17589 - protein, 35 aa, Artificial Sequence
  Non-cyclic GFR-binding peptide
  MOD_RES (2), (34), (35): Xaa is C or S
GXSRVVMNEYQKYIVNSSDDIYLVSIPSLKTPAXX

SEQ ID NO: 17590 - protein, 39 aa, Artificial Sequence
  Non-cyclic GFR-binding peptide
  MOD_RES (2), (34), (35): Xaa is C or S
GXARVVMNEYQKYIVNSSDDIYLVSIPSLQTPAXXPKPV

SEQ ID NO: 17591 - protein, 36 aa, Artificial Sequence
  Non-cyclic GFR-binding peptide
  MOD_RES (31), (32): Xaa is C or S
SRVIMEYKFKVKPKRGVLYLISIPELAQPVXXPAAS

SEQ ID NO: 17592 - protein, 31 aa, Artificial Sequence
  Non-cyclic GFR-binding peptide
  MOD_RES (31), (31): Xaa is C or S
KVVMNEYKFKIVNNSSDLYLVSIPELKTPAX

SEQ ID NO: 17593 - protein, 35 aa, Artificial Sequence
  Non-cyclic GFR-binding peptide
  MOD_RES (1), (3), (35): Xaa is C or S
XGXAEVVMDYHYKLVVNNAADKYLISIPSLRAPVX

SEQ ID NO: 17594 - protein, 32 aa, Artificial Sequence
  Non-cyclic GFR-binding peptide
EAVSMGEEYQKYTPVGMDDIYLVSIPSLKTPV

SEQ ID NO: 17595 - protein, 42 aa, Artificial Sequence
  Non-cyclic GFR-binding peptide
  MOD_RES (1), (3), (37), (38): Xaa is C or S
  MOD_RES (15), (16), (17), (18), (19): Xaa is A or G
  MOD_RES (20), (21), (22), (23): Xaa is A or G or is absent
XGXGEVVMDEYQKYXXXXXXXXXIYLMSIPSLETPVXXAKPI

SEQ ID NO: 17596 - protein, 42 aa, Artificial Sequence
  Non-cyclic GFR-binding peptide
  MOD_RES (2), (4), (39), (40): Xaa is C or S
  MOD_RES (17), (18), (19), (20), (21): Xaa is A or G
  MOD_RES (22), (23), (24), (25): Xaa is A or G or is absent
RXGXEAVSMGEEYQKYXXXXXXXXXIYLVSIPSLKTPVXXAK

SEQ ID NO: 17597 - protein, 36 aa, Artificial Sequence
  Non-cyclic GFR-binding peptide
  MOD_RES (2), (4), (36): Xaa is C or S
RXGXGEVVMEEYKFKVVKDYEDLYLMSIPELETPVX

SEQ ID NO: 17598 - protein, 43 aa, Artificial Sequence
  Non-cyclic GFR-binding peptide
  MOD_RES (1), (3), (37), (38): Xaa is C or S
  MOD_RES (15), (16), (17), (18), (19): Xaa is A or G
  MOD_RES (20), (21), (22), (23): Xaa is A or G or is absent
XGXAEVVMDRYKKLXXXXXXXXXFYLISIANLRAPVXXSAPAA

SEQ ID NO: 17599 - protein, 34 aa, Artificial Sequence
  Non-cyclic GFR-binding peptide
  MOD_RES (33), (34): Xaa is C or S
  MOD_RES (11), (12), (13), (14), (15): Xaa is A or G
  MOD_RES (16), (17), (18), (19): Xaa is A or G or is absent
SKVVMEYQKYXXXXXXXXXIYLISIPSLDQPVXX

SEQ ID NO: 17600 - protein, 36 aa, Artificial Sequence
  Non-cyclic GFR-binding peptide
  MOD_RES (33), (34): Xaa is C or S
  MOD_RES (11), (12), (13), (14), (15): Xaa is A or G
  MOD_RES (16), (17), (18), (19): Xaa is A or G or is absent
SVAMGYHYKLXXXXXXXXXKYLISIPSLKTPVXXAK

SEQ ID NO: 17601 - protein, 32 aa, Artificial Sequence
  Non-cyclic GFR-binding peptide
  MOD_RES (31), (32): Xaa is C or S
SVAMGEYQKYYTVVGKDIYLISIPSLKTPVXX

SEQ ID NO: 17602 - protein, 34 aa, Artificial Sequence
  Non-cyclic GFR-binding peptide
  MOD_RES (32), (33): Xaa is C or S
ESVAMGRYKKLYTVVGKDFYLISIANLKTPVXXA

SEQ ID NO: 17603 - protein, 39 aa, Artificial Sequence
  Non-cyclic GFR-binding peptide
  MOD_RES (34), (35): Xaa is C or S
  MOD_RES (12), (13), (14), (15), (16): Xaa is A or G
  MOD_RES (17), (18), (19), (20): Xaa is A or G or is absent
GEVVMEEYKFKXXXXXXXXXLYLMSIPELETPVXXAKPI

SEQ ID NO: 17604 - protein, 36 aa, Artificial Sequence
  Non-cyclic GFR-binding peptide
  MOD_RES (2), (34), (35): Xaa is C or S
GXESVAMGEYQKYYTVVGKDIYLISIPSLKTPVXXA

SEQ ID NO: 17605 - protein, 41 aa, Artificial Sequence
  Non-cyclic GFR-binding peptide
  MOD_RES (2), (36), (37): Xaa is C or S
  MOD_RES (14), (15), (16), (17), (18): Xaa is A or G
  MOD_RES (19), (20), (21), (22): Xaa is A or G or is absent
GXGEVVMEEYQKYXXXXXXXXXIYLMSIPSLETPVXXAKPI

SEQ ID NO: 17606 - protein, 39 aa, Artificial Sequence
  Non-cyclic GFR-binding peptide
  MOD_RES (2), (4), (38), (39): Xaa is C or S
  MOD_RES (16), (17), (18), (19), (20): Xaa is A or G
  MOD_RES (21), (22), (23), (24): Xaa is A or G or is absent
RXGXGEVVMDEYQKYXXXXXXXXXIYLMSIPSLETPVXX

SEQ ID NO: 17607 - protein, 35 aa, Artificial Sequence
  Non-cyclic GFR-binding peptide
  MOD_RES (31), (32): Xaa is C or S
SRVIMEYQKYVKPKRGVIYLISIPSLAQPVXXPAA

SEQ ID NO: 17608 - protein, 34 aa, Artificial Sequence
  Non-cyclic GFR-binding peptide
  MOD_RES (33), (34): Xaa is C or S
  MOD_RES (11), (12), (13), (14), (15): Xaa is A or G
  MOD_RES (16), (17), (18), (19): Xaa is A or G or is absent
RVVMNEYKFKXXXXXXXXXLYLVSIPELKTPAXX

SEQ ID NO: 17609 - protein, 39 aa, Artificial Sequence
  Non-cyclic GFR-binding peptide
  MOD_RES (33), (34): Xaa is C or S
  MOD_RES (11), (12), (13), (14), (15): Xaa is A or G
  MOD_RES (16), (17), (18), (19): Xaa is A or G or is absent
RVVMNEYQKYXXXXXXXXXIYLVSIPSLKTPAXXPKPVY

SEQ ID NO: 17610 - protein, 35 aa, Artificial Sequence
  Non-cyclic GFR-binding peptide
  MOD_RES (1), (33): Xaa is C or S
XSRVVMNEYQKYIVNSSDDIYLVSIPSLKTPAXTP

SEQ ID NO: 17611 - protein, 39 aa, Artificial Sequence
  Non-cyclic GFR-binding peptide
  MOD_RES (1), (33), (34): Xaa is C or S
XSRVVMNEYKFKIVNSSDDLYLVSIPELKTPAXXPKPVY

SEQ ID NO: 17612 - protein, 41 aa, Artificial Sequence
  Non-cyclic GFR-binding peptide
  MOD_RES (1), (3), (35): Xaa is C or S
XGXSRVVMNEYKFKIVNSSDDLYLVSIPELKTPAXTPKTVH

SEQ ID NO: 17613 - protein, 35 aa, Artificial Sequence
  Non-cyclic GFR-binding peptide
  MOD_RES (1), (35): Xaa is C or S
  MOD_RES (13), (14), (15), (16), (17): Xaa is A or G
  MOD_RES (18), (19), (20), (21): Xaa is A or G or is absent
XGEVVMEEYQKYXXXXXXXXXIYLMSIPSLETPVX

SEQ ID NO: 17614 - protein, 41 aa, Artificial Sequence
  Non-cyclic GFR-binding peptide
  MOD_RES (1), (3), (37), (38): Xaa is C or S
  MOD_RES (15), (16), (17), (18), (19): Xaa is A or G
  MOD_RES (20), (21), (22), (23): Xaa is A or G or is absent
XGXGEVVMDEYQKYXXXXXXXXXIYLMSIPSLETPVXXAKP

SEQ ID NO: 17615 - protein, 40 aa, Artificial Sequence
  Non-cyclic GFR-binding peptide
  MOD_RES (34), (35): Xaa is C or S
  MOD_RES (12), (13), (14), (15), (16): Xaa is A or G
  MOD_RES (17), (18), (19), (20): Xaa is A or G or is absent
SRVVMNEYQKYXXXXXXXXXIYLVSIPSLKTPAXXPKPVY

SEQ ID NO: 17616 - protein, 37 aa, Artificial Sequence
  Non-cyclic GFR-binding peptide
  MOD_RES (1), (32), (33): Xaa is C or S
XSKVVMEYKFKVKPTRGVLYLISIPELDQPVXXPSAS

SEQ ID NO: 17617 - protein, 39 aa, Artificial Sequence
  Non-cyclic GFR-binding peptide
  MOD_RES (1), (36), (37): Xaa is C or S
  MOD_RES (14), (15), (16), (17), (18): Xaa is A or G
  MOD_RES (19), (20), (21), (22): Xaa is A or G or is absent
XEAVSMGEEYQKYXXXXXXXXXIYLVSIPSLKTPVXXAK

SEQ ID NO: 17618 - protein, 34 aa, Artificial Sequence
  Non-cyclic GFR-binding peptide
  MOD_RES (32), (33): Xaa is C or S
GEVVMDEYKFKVVKENEDLYLMSIPELETPVXXA

SEQ ID NO: 17619 - protein, 38 aa, Artificial Sequence
  Non-cyclic GFR-binding peptide
  MOD_RES (33), (34): Xaa is C or S
  MOD_RES (11), (12), (13), (14), (15): Xaa is A or G
  MOD_RES (16), (17), (18), (19): Xaa is A or G or is absent
EVVMDEYQKYXXXXXXXXXIYLMSIPSLETPVXXAKPI

SEQ ID NO: 17620 - protein, 37 aa, Artificial Sequence
  Non-cyclic GFR-binding peptide
  MOD_RES (1), (3), (35), (36): Xaa is C or S
XGXSRVVMNEYKFKIVNSSDDLYLVSIPELKTPAXXP

SEQ ID NO: 17621 - protein, 43 aa, Artificial Sequence
  Non-cyclic GFR-binding peptide
  MOD_RES (1), (3), (38), (39): Xaa is C or S
  MOD_RES (16), (17), (18), (19), (20): Xaa is A or G
  MOD_RES (21), (22), (23), (24): Xaa is A or G or is absent
XGXEAVSMGEEYQKYXXXXXXXXXIYLVSIPSLKTPVXXAKGV

SEQ ID NO: 17622 - protein, 41 aa, Artificial Sequence
  Non-cyclic GFR-binding peptide
  MOD_RES (1), (36), (37): Xaa is C or S
  MOD_RES (14), (15), (16), (17), (18): Xaa is A or G
  MOD_RES (19), (20), (21), (22): Xaa is A or G or is absent
XEAVSMGEEYKFKXXXXXXXXXLYLVSIPELKTPVXXAKGV

SEQ ID NO: 17623 - protein, 33 aa, Artificial Sequence
  Non-cyclic GFR-binding peptide
  MOD_RES (1), (33): Xaa is C or S
XARVVMNEYQKYIVNSSDDIYLVSIPSLQTPAX

SEQ ID NO: 17624 - protein, 34 aa, Artificial Sequence
  Non-cyclic GFR-binding peptide
  MOD_RES (31), (32): Xaa is C or S
KVVMNEYQKYIVNNSSDIYLVSIPSLKTPAXXAK

SEQ ID NO: 17625 - protein, 38 aa, Artificial Sequence
  Non-cyclic GFR-binding peptide
  MOD_RES (1), (3), (36), (37): Xaa is C or S
  MOD_RES (14), (15), (16), (17), (18): Xaa is A or G
  MOD_RES (19), (20), (21), (22): Xaa is A or G or is absent
XKXSKVVMEYKFKXXXXXXXXXLYLISIPELDQPVXXP

SEQ ID NO: 17626 - protein, 34 aa, Artificial Sequence
  Non-cyclic GFR-binding peptide
  MOD_RES (33), (33): Xaa is C or S
  MOD_RES (11), (12), (13), (14), (15): Xaa is A or G
  MOD_RES (16), (17), (18), (19): Xaa is A or G or is absent
RVVMNEYQKYXXXXXXXXXIYLVSIPSLKTPAXT

SEQ ID NO: 17627 - protein, 34 aa, Artificial Sequence
  Non-cyclic GFR-binding peptide
  MOD_RES (32), (33): Xaa is C or S
AEVVMDEYKFKVVNNAADLYLISIPELRAPVXXS

SEQ ID NO: 17628 - protein, 39 aa, Artificial Sequence
  Non-cyclic GFR-binding peptide
  MOD_RES (1), (3), (34), (35): Xaa is C or S
XKXSKVIMEYKFKIKPTKGILYLISIPELDQSVXXPSAS

SEQ ID NO: 17629 - protein, 40 aa, Artificial Sequence
  Non-cyclic GFR-binding peptide
  MOD_RES (1), (3), (37), (38): Xaa is C or S
  MOD_RES (15), (16), (17), (18), (19): Xaa is A or G
  MOD_RES (20), (21), (22), (23): Xaa is A or G or is absent
XGXARVVMNEYKFKXXXXXXXXXLYLVSIPELQTPAXXPK

SEQ ID NO: 17630 - protein, 42 aa, Artificial Sequence
  Non-cyclic GFR-binding peptide
  MOD_RES (1), (3), (37): Xaa is C or S
  MOD_RES (15), (16), (17), (18), (19): Xaa is A or G
  MOD_RES (20), (21), (22), (23): Xaa is A or G or is absent
XGXSRVVMNEYQKYXXXXXXXXXIYLVSIPSLKTPAXTPKTV

SEQ ID NO: 17631 - protein, 36 aa, Artificial Sequence
  Non-cyclic GFR-binding peptide
  MOD_RES (1), (33), (34): Xaa is C or S
XAEVVMDRYKKLVVNNAADFYLISIANLRAPVXXSA

SEQ ID NO: 17632 - protein, 35 aa, Artificial Sequence
  Non-cyclic GFR-binding peptide
  MOD_RES (2), (2): Xaa is C or S
  MOD_RES (14), (15), (16), (17), (18): Xaa is A or G
  MOD_RES (19), (20), (21), (22): Xaa is A or G or is absent
GXSRVVMNEYKFKXXXXXXXXXLYLVSIPELKTPA

SEQ ID NO: 17633 - protein, 35 aa, Artificial Sequence
  Non-cyclic GFR-binding peptide
  MOD_RES (2), (4), (35): Xaa is C or S
SXKXSRVIMEYQKYVKPKRGVIYLISIPSLAQPVX

SEQ ID NO: 17634 - protein, 32 aa, Artificial Sequence
  Non-cyclic GFR-binding peptide
  MOD_RES (1), (1): Xaa is C or S
XARVVMNEYKFKIVNSSDDLYLVSIPELQTPA

SEQ ID NO: 17635 - protein, 35 aa, Artificial Sequence
  Non-cyclic GFR-binding peptide
  MOD_RES (1), (3), (35): Xaa is C or S
XGXAEVVMDEYKFKVVNNAADLYLISIPELRAPVX

SEQ ID NO: 17636 - protein, 34 aa, Artificial Sequence
  Non-cyclic GFR-binding peptide
  MOD_RES (31), (32): Xaa is C or S
SRVIMEYKFKVKPKRGVLYLISIPELAQPVXXPA

SEQ ID NO: 17637 - protein, 36 aa, Artificial Sequence
  Non-cyclic GFR-binding peptide
  MOD_RES (2), (4), (35), (36): Xaa is C or S
SXKXSRVIMEYKFKVKPKRGVLYLISIPELAQPVXX

SEQ ID NO: 17638 - protein, 36 aa, Artificial Sequence
  Non-cyclic GFR-binding peptide
  MOD_RES (1), (3): Xaa is C or S
  MOD_RES (15), (16), (17), (18), (19): Xaa is A or G
  MOD_RES (20), (21), (22), (23): Xaa is A or G or is absent
XGXAEVVMDEYKFKXXXXXXXXXLYLISIPELRAPV

SEQ ID NO: 17639 - protein, 34 aa, Artificial Sequence
  Non-cyclic GFR-binding peptide
  MOD_RES (33), (34): Xaa is C or S
EAVSMGEEYKFKTPVGMDDLYLVSIPELKTPVXX

SEQ ID NO: 17640 - protein, 39 aa, Artificial Sequence
  Non-cyclic GFR-binding peptide
  MOD_RES (2), (36), (37): Xaa is C or S
  MOD_RES (14), (15), (16), (17), (18): Xaa is A or G
  MOD_RES (19), (20), (21), (22): Xaa is A or G or is absent
GXAEVVMDEYKFKXXXXXXXXXLYLISIPELRAPVXXSA

SEQ ID NO: 17641 - protein, 39 aa, Artificial Sequence
  Non-cyclic GFR-binding peptide
  MOD_RES (2), (4), (36), (37): Xaa is C or S
RXGXGEVVMEEYQKYVVKDYEDIYLMSIPSLETPVXXAK

SEQ ID NO: 17642 - protein, 38 aa, Artificial Sequence
  Non-cyclic GFR-binding peptide
  MOD_RES (1), (3), (35): Xaa is C or S
XGXSRVVMNEYQKYIVNSSDDIYLVSIPSLKTPAXTPK

SEQ ID NO: 17643 - protein, 31 aa, Artificial Sequence
  Non-cyclic GFR-binding peptide
ESVAMGEYQKYYTVVGKDIYLISIPSLKTPV

SEQ ID NO: 17644 - protein, 35 aa, Artificial Sequence
  Non-cyclic GFR-binding peptide
  MOD_RES (2), (2): Xaa is C or S
  MOD_RES (14), (15), (16), (17), (18): Xaa is A or G
  MOD_RES (19), (20), (21), (22): Xaa is A or G or is absent
GXESVAMGRYKKLXXXXXXXXXFYLISIANLKTPV

SEQ ID NO: 17645 - protein, 33 aa, Artificial Sequence
  Non-cyclic GFR-binding peptide
  MOD_RES (12), (13), (14), (15), (16): Xaa is A or G
  MOD_RES (17), (18), (19), (20): Xaa is A or G or is absent
SRVVMNEYQKYXXXXXXXXXIYLVSIPSLKTPA

SEQ ID NO: 17646 - protein, 40 aa, Artificial Sequence
  Non-cyclic GFR-binding peptide
  MOD_RES (1), (35), (36): Xaa is C or S
  MOD_RES (13), (14), (15), (16), (17): Xaa is A or G
  MOD_RES (18), (19), (20), (21): Xaa is A or G or is absent
XGEVVMEEYQKYXXXXXXXXXIYLMSIPSLETPVXXAKPI

SEQ ID NO: 17647 - protein, 38 aa, Artificial Sequence
  Non-cyclic GFR-binding peptide
  MOD_RES (32), (33): Xaa is C or S
ARVVMNEYQKYIVNSSDDIYLVSIPSLQTPAXXPKPVT

SEQ ID NO: 17648 - protein, 35 aa, Artificial Sequence
  Non-cyclic GFR-binding peptide
  MOD_RES (31), (32): Xaa is C or S
EVVMDEYKFKVVKENEDLYLMSIPELETPVXXAKP

SEQ ID NO: 17649 - protein, 36 aa, Artificial Sequence
  Non-cyclic GFR-binding peptide
  MOD_RES (1), (3): Xaa is C or S
  MOD_RES (15), (16), (17), (18), (19): Xaa is A or G
  MOD_RES (20), (21), (22), (23): Xaa is A or G or is absent
XGXGEVVMEEYKFKXXXXXXXXXLYLMSIPELETPV

SEQ ID NO: 17650 - protein, 32 aa, Artificial Sequence
  Non-cyclic GFR-binding peptide
  MOD_RES (1), (32): Xaa is C or S
XSRVIMEYKFKVKPKRGVLYLISIPELAQPVX

SEQ ID NO: 17651 - protein, 39 aa, Artificial Sequence
  Non-cyclic GFR-binding peptide
  MOD_RES (2), (37), (38): Xaa is C or S
  MOD_RES (15), (16), (17), (18), (19): Xaa is A or G
  MOD_RES (20), (21), (22), (23): Xaa is A or G or is absent
GXEAVSMGEEYKFKXXXXXXXXXLYLVSIPELKTPVXXA

SEQ ID NO: 17652 - protein, 31 aa, Artificial Sequence
  Non-cyclic GFR-binding peptide
SRVVMNEYKFKIVNSSDDLYLVSIPELKTPA

SEQ ID NO: 17653 - protein, 37 aa, Artificial Sequence
  Non-cyclic GFR-binding peptide
  MOD_RES (1), (33), (34): Xaa is C or S
XSRVVMNEYQKYIVNSSDDIYLVSIPSLKTPAXXPKP

SEQ ID NO: 17654 - protein, 36 aa, Artificial Sequence
  Non-cyclic GFR-binding peptide
  MOD_RES (34), (35): Xaa is C or S
  MOD_RES (12), (13), (14), (15), (16): Xaa is A or G
  MOD_RES (17), (18), (19), (20): Xaa is A or G or is absent
GEVVMEEYQKYXXXXXXXXXIYLMSIPSLETPVXXA

SEQ ID NO: 17655 - protein, 34 aa, Artificial Sequence
  Non-cyclic GFR-binding peptide
  MOD_RES (34), (34): Xaa is C or S
  MOD_RES (12), (13), (14), (15), (16): Xaa is A or G
  MOD_RES (17), (18), (19), (20): Xaa is A or G or is absent
GEVVMDEYQKYXXXXXXXXXIYLMSIPSLETPVX

SEQ ID NO: 17656 - protein, 42 aa, Artificial Sequence
  Non-cyclic GFR-binding peptide
  MOD_RES (2), (36), (37): Xaa is C or S
  MOD_RES (14), (15), (16), (17), (18): Xaa is A or G
  MOD_RES (19), (20), (21), (22): Xaa is A or G or is absent
GXESVAMGEYQKYXXXXXXXXXIYLISIPSLKTPVXXAKSAK

SEQ ID NO: 17657 - protein, 38 aa, Artificial Sequence
  Non-cyclic GFR-binding peptide
  MOD_RES (2), (34), (35): Xaa is C or S
GXAKVVMNEYQKYIVNNSSDIYLVSIPSLKTPAXXAKP

SEQ ID NO: 17658 - protein, 40 aa, Artificial Sequence
  Non-cyclic GFR-binding peptide
  MOD_RES (2), (34), (35): Xaa is C or S
GXESVAMGYHYKLYTVVGKDKYLISIPSLKTPVXXAKSAK

SEQ ID NO: 17659 - protein, 39 aa, Artificial Sequence
  Non-cyclic GFR-binding peptide
  MOD_RES (1), (35), (36): Xaa is C or S
  MOD_RES (13), (14), (15), (16), (17): Xaa is A or G
  MOD_RES (18), (19), (20), (21): Xaa is A or G or is absent
XGEVVMDEYKFKXXXXXXXXXLYLMSIPELETPVXXAKP

SEQ ID NO: 17660 - protein, 33 aa, Artificial Sequence
  Non-cyclic GFR-binding peptide
  MOD_RES (12), (13), (14), (15), (16): Xaa is A or G
  MOD_RES (17), (18), (19), (20): Xaa is A or G or is absent
GEVVMEEYQKYXXXXXXXXXIYLMSIPSLETPV

SEQ ID NO: 17661 - protein, 37 aa, Artificial Sequence
  Non-cyclic GFR-binding peptide
  MOD_RES (2), (34), (35): Xaa is C or S
GXESVAMGYHYKLYTVVGKDKYLISIPSLKTPVXXAK

SEQ ID NO: 17662 - protein, 32 aa, Artificial Sequence
  Non-cyclic GFR-binding peptide
  MOD_RES (31), (32): Xaa is C or S
EVVMDYHYKLVVNNAADKYLISIPSLRAPVXX

SEQ ID NO: 17663 - protein, 33 aa, Artificial Sequence
  Non-cyclic GFR-binding peptide
  MOD_RES (1), (33): Xaa is C or S
XESVAMGEYQKYYTVVGKDIYLISIPSLKTPVX

SEQ ID NO: 17664 - protein, 42 aa, Artificial Sequence
  Non-cyclic GFR-binding peptide
  MOD_RES (1), (3), (36), (37): Xaa is C or S
  MOD_RES (14), (15), (16), (17), (18): Xaa is A or G
  MOD_RES (19), (20), (21), (22): Xaa is A or G or is absent
XKXSKVVMEYQKYXXXXXXXXXIYLISIPSLDQPVXXPSASA

SEQ ID NO: 17665 - protein, 40 aa, Artificial Sequence
  Non-cyclic GFR-binding peptide
  MOD_RES (34), (34): Xaa is C or S
  MOD_RES (12), (13), (14), (15), (16): Xaa is A or G
  MOD_RES (17), (18), (19), (20): Xaa is A or G or is absent
SRVVMNEYKFKXXXXXXXXXLYLVSIPELKTPAXTPKTVH

SEQ ID NO: 17666 - protein, 41 aa, Artificial Sequence
  Non-cyclic GFR-binding peptide
  MOD_RES (1), (3), (37), (38): Xaa is C or S
  MOD_RES (15), (16), (17), (18), (19): Xaa is A or G
  MOD_RES (20), (21), (22), (23): Xaa is A or G or is absent
XGXGEVVMDEYKFKXXXXXXXXXLYLMSIPELETPVXXAKP

SEQ ID NO: 17667 - protein, 40 aa, Artificial Sequence
  Non-cyclic GFR-binding peptide
  MOD_RES (1), (3), (37), (38): Xaa is C or S
  MOD_RES (15), (16), (17), (18), (19): Xaa is A or G
  MOD_RES (20), (21), (22), (23): Xaa is A or G or is absent
XGXESVAMGYHYKLXXXXXXXXXKYLISIPSLKTPVXXAK

SEQ ID NO: 17668 - protein, 32 aa, Artificial Sequence
  Non-cyclic GFR-binding peptide
  MOD_RES (11), (12), (13), (14), (15): Xaa is A or G
  MOD_RES (16), (17), (18), (19): Xaa is A or G or is absent
SKVIMEYKFKXXXXXXXXXLYLISIPELDQSV

SEQ ID NO: 17669 - protein, 38 aa, Artificial Sequence
  Non-cyclic GFR-binding peptide
  MOD_RES (1), (3), (34), (35): Xaa is C or S
XKXSRVIMEYKFKVKPKRGVLYLISIPELAQPVXXPAA

SEQ ID NO: 17670 - protein, 37 aa, Artificial Sequence
  Non-cyclic GFR-binding peptide
  MOD_RES (31), (32): Xaa is C or S
EVVMDYHYKLVVNNAADKYLISIPSLRAPVXXSAPAA

SEQ ID NO: 17671 - protein, 37 aa, Artificial Sequence
  Non-cyclic GFR-binding peptide
  MOD_RES (1), (35), (36): Xaa is C or S
  MOD_RES (13), (14), (15), (16), (17): Xaa is A or G
  MOD_RES (18), (19), (20), (21): Xaa is A or G or is absent
XAEVVMDYHYKLXXXXXXXXXKYLISIPSLRAPVXXS

SEQ ID NO: 17672 - protein, 38 aa, Artificial Sequence
  Non-cyclic GFR-binding peptide
  MOD_RES (1), (3), (36), (37): Xaa is C or S
  MOD_RES (14), (15), (16), (17), (18): Xaa is A or G
  MOD_RES (19), (20), (21), (22): Xaa is A or G or is absent
XKXSKVIMEYQKYXXXXXXXXXIYLISIPSLDQSVXXP

SEQ ID NO: 17673 - protein, 39 aa, Artificial Sequence
  Non-cyclic GFR-binding peptide
  MOD_RES (2), (35), (36): Xaa is C or S
  MOD_RES (13), (14), (15), (16), (17): Xaa is A or G
  MOD_RES (18), (19), (20), (21): Xaa is A or G or is absent
KXSKVVMEYQKYXXXXXXXXXIYLISIPSLDQPVXXPSA

SEQ ID NO: 17674 - protein, 37 aa, Artificial Sequence
  Non-cyclic GFR-binding peptide
  MOD_RES (2), (36), (37): Xaa is C or S
  MOD_RES (14), (15), (16), (17), (18): Xaa is A or G
  MOD_RES (19), (20), (21), (22): Xaa is A or G or is absent
GXESVAMGRYKKLXXXXXXXXXFYLISIANLKTPVXX

SEQ ID NO: 17675 - protein, 39 aa, Artificial Sequence
  Non-cyclic GFR-binding peptide
  MOD_RES (2), (34), (35): Xaa is C or S
GXESVAMGEYQKYYTVVGKDIYLISIPSLKTPVXXAKSA

SEQ ID NO: 17676 - protein, 33 aa, Artificial Sequence
  Non-cyclic GFR-binding peptide
  MOD_RES (1), (33): Xaa is C or S
XAKVVMNEYKFKIVNNSSDLYLVSIPELKTPAX

SEQ ID NO: 17677 - protein, 42 aa, Artificial Sequence
  Non-cyclic GFR-binding peptide
  MOD_RES (2), (36), (37): Xaa is C or S
  MOD_RES (14), (15), (16), (17), (18): Xaa is A or G
  MOD_RES (19), (20), (21), (22): Xaa is A or G or is absent
GXGEVVMEEYKFKXXXXXXXXXLYLMSIPELETPVXXAKPIS

SEQ ID NO: 17678 - protein, 40 aa, Artificial Sequence
  Non-cyclic GFR-binding peptide
  MOD_RES (1), (34), (35): Xaa is C or S
  MOD_RES (12), (13), (14), (15), (16): Xaa is A or G
  MOD_RES (17), (18), (19), (20): Xaa is A or G or is absent
XSRVIMEYKFKXXXXXXXXXLYLISIPELAQPVXXPAASA

SEQ ID NO: 17679 - protein, 36 aa, Artificial Sequence
  Non-cyclic GFR-binding peptide
  MOD_RES (33), (34): Xaa is C or S
  MOD_RES (11), (12), (13), (14), (15): Xaa is A or G
  MOD_RES (16), (17), (18), (19): Xaa is A or G or is absent
SKVIMEYQKYXXXXXXXXXIYLISIPSLDQSVXXPS

SEQ ID NO: 17680 - protein, 35 aa, Artificial Sequence
  Non-cyclic GFR-binding peptide
  MOD_RES (31), (32): Xaa is C or S
SVAMGRYKKLYTVVGKDFYLISIANLKTPVXXAKS

SEQ ID NO: 17681 - protein, 43 aa, Artificial Sequence
  Non-cyclic GFR-binding peptide
  MOD_RES (2), (4), (38), (39): Xaa is C or S
  MOD_RES (16), (17), (18), (19), (20): Xaa is A or G
  MOD_RES (21), (22), (23), (24): Xaa is A or G or is absent
HXGXSRVVMNEYKFKXXXXXXXXXLYLVSIPELKTPAXXPKPV

SEQ ID NO: 17682 - protein, 34 aa, Artificial Sequence
  Non-cyclic GFR-binding peptide
  MOD_RES (1), (1): Xaa is C or S
  MOD_RES (13), (14), (15), (16), (17): Xaa is A or G
  MOD_RES (18), (19), (20), (21): Xaa is A or G or is absent
XARVVMNEYQKYXXXXXXXXXIYLVSIPSLQTPA

SEQ ID NO: 17683 - protein, 34 aa, Artificial Sequence
  Non-cyclic GFR-binding peptide
  MOD_RES (1), (1): Xaa is C or S
  MOD_RES (13), (14), (15), (16), (17): Xaa is A or G
  MOD_RES (18), (19), (20), (21): Xaa is A or G or is absent
XSRVVMNEYKFKXXXXXXXXXLYLVSIPELKTPA

SEQ ID NO: 17684 - protein, 39 aa, Artificial Sequence
  Non-cyclic GFR-binding peptide
  MOD_RES (2), (4), (36), (37): Xaa is C or S
HXGXAKVVMNEYKFKIVNNSSDLYLVSIPELKTPAXXAK

SEQ ID NO: 17685 - protein, 33 aa, Artificial Sequence
  Non-cyclic GFR-binding peptide
  MOD_RES (2), (2): Xaa is C or S
GXESVAMGRYKKLYTVVGKDFYLISIANLKTPV

SEQ ID NO: 17686 - protein, 39 aa, Artificial Sequence
  Non-cyclic GFR-binding peptide
  MOD_RES (1), (3), (35): Xaa is C or S
XGXSRVVMNEYQKYIVNSSDDIYLVSIPSLKTPAXTPKT

SEQ ID NO: 17687 - protein, 40 aa, Artificial Sequence
  Non-cyclic GFR-binding peptide
  MOD_RES (1), (3), (37), (38): Xaa is C or S
  MOD_RES (15), (16), (17), (18), (19): Xaa is A or G
  MOD_RES (20), (21), (22), (23): Xaa is A or G or is absent
XGXAKVVMNEYKFKXXXXXXXXXLYLVSIPELKTPAXXAK

SEQ ID NO: 17688 - protein, 37 aa, Artificial Sequence
  Non-cyclic GFR-binding peptide
  MOD_RES (2), (4), (36), (37): Xaa is C or S
RXGXGEVVMEEYKFKVVKDYEDLYLMSIPELETPVXX

SEQ ID NO: 17689 - protein, 37 aa, Artificial Sequence
  Non-cyclic GFR-binding peptide
  MOD_RES (1), (34), (35): Xaa is C or S
  MOD_RES (12), (13), (14), (15), (16): Xaa is A or G
  MOD_RES (17), (18), (19), (20): Xaa is A or G or is absent
XSRVIMEYQKYXXXXXXXXXIYLISIPSLAQPVXXPA

SEQ ID NO: 17690 - protein, 44 aa, Artificial Sequence
  Non-cyclic GFR-binding peptide
  MOD_RES (2), (4), (38), (39): Xaa is C or S
  MOD_RES (16), (17), (18), (19), (20): Xaa is A or G
  MOD_RES (21), (22), (23), (24): Xaa is A or G or is absent
HXGXARVVMNEYKFKXXXXXXXXXLYLVSIPELQTPAXXPKPVT

SEQ ID NO: 17691 - protein, 36 aa, Artificial Sequence
  Non-cyclic GFR-binding peptide
  MOD_RES (1), (3), (35), (36): Xaa is C or S
XGXGEVVMEEYQKYVVKDYEDIYLMSIPSLETPVXX

SEQ ID NO: 17692 - protein, 36 aa, Artificial Sequence
  Non-cyclic GFR-binding peptide
  MOD_RES (1), (3), (36): Xaa is C or S
  MOD_RES (14), (15), (16), (17), (18): Xaa is A or G
  MOD_RES (19), (20), (21), (22): Xaa is A or G or is absent
XKXSRVIMEYQKYXXXXXXXXXIYLISIPSLAQPVX

SEQ ID NO: 17693 - protein, 34 aa, Artificial Sequence
  Non-cyclic GFR-binding peptide
  MOD_RES (2), (33), (34): Xaa is C or S
KXSRVIMEYKFKVKPKRGVLYLISIPELAQPVXX

SEQ ID NO: 17694 - protein, 35 aa, Artificial Sequence
  Non-cyclic GFR-binding peptide
  MOD_RES (1), (3), (35): Xaa is C or S
XGXSRVVMNEYQKYIVNSSDDIYLVSIPSLKTPAX

SEQ ID NO: 17695 - protein, 40 aa, Artificial Sequence
  Non-cyclic GFR-binding peptide
  MOD_RES (2), (4), (38), (39): Xaa is C or S
  MOD_RES (16), (17), (18), (19), (20): Xaa is A or G
  MOD_RES (21), (22), (23), (24): Xaa is A or G or is absent
RXGXAEVVMDYHYKLXXXXXXXXXKYLISIPSLRAPVXXS

SEQ ID NO: 17696 - protein, 42 aa, Artificial Sequence
  Non-cyclic GFR-binding peptide
  MOD_RES (2), (36), (37): Xaa is C or S
  MOD_RES (14), (15), (16), (17), (18): Xaa is A or G
  MOD_RES (19), (20), (21), (22): Xaa is A or G or is absent
GXESVAMGRYKKLXXXXXXXXXFYLISIANLKTPVXXAKSAK

SEQ ID NO: 17697 - protein, 35 aa, Artificial Sequence
  Non-cyclic GFR-binding peptide
  MOD_RES (33), (34): Xaa is C or S
  MOD_RES (11), (12), (13), (14), (15): Xaa is A or G
  MOD_RES (16), (17), (18), (19): Xaa is A or G or is absent
SVAMGYHYKLXXXXXXXXXKYLISIPSLKTPVXXA

SEQ ID NO: 17698 - protein, 37 aa, Artificial Sequence
  Non-cyclic GFR-binding peptide
  MOD_RES (2), (4): Xaa is C or S
  MOD_RES (16), (17), (18), (19), (20): Xaa is A or G
  MOD_RES (21), (22), (23), (24): Xaa is A or G or is absent
RXGXESVAMGEYQKYXXXXXXXXXIYLISIPSLKTPV

SEQ ID NO: 17699 - protein, 35 aa, Artificial Sequence
  Non-cyclic GFR-binding peptide
  MOD_RES (34), (35): Xaa is C or S
  MOD_RES (12), (13), (14), (15), (16): Xaa is A or G
  MOD_RES (17), (18), (19), (20): Xaa is A or G or is absent
GEVVMEEYKFKXXXXXXXXXLYLMSIPELETPVXX

SEQ ID NO: 17700 - protein, 35 aa, Artificial Sequence
  Non-cyclic GFR-binding peptide
  MOD_RES (2), (4), (35): Xaa is C or S
SXKXSKVVMEYKFKVKPTRGVLYLISIPELDQPVX

SEQ ID NO: 17701 - protein, 32 aa, Artificial Sequence
  Non-cyclic GFR-binding peptide
  MOD_RES (11), (12), (13), (14), (15): Xaa is A or G
  MOD_RES (16), (17), (18), (19): Xaa is A or G or is absent
EVVMDEYQKYXXXXXXXXXIYLMSIPSLETPV

SEQ ID NO: 17702 - protein, 40 aa, Artificial Sequence
  Non-cyclic GFR-binding peptide
  MOD_RES (2), (35), (36): Xaa is C or S
GXEAVSMGEEYKFKTPVGMDDLYLVSIPELKTPVXXAKGV

SEQ ID NO: 17703 - protein, 43 aa, Artificial Sequence
  Non-cyclic GFR-binding peptide
  MOD_RES (1), (3), (37), (38): Xaa is C or S
  MOD_RES (15), (16), (17), (18), (19): Xaa is A or G
  MOD_RES (20), (21), (22), (23): Xaa is A or G or is absent
XGXESVAMGRYKKLXXXXXXXXXFYLISIANLKTPVXXAKSAK

SEQ ID NO: 17704 - protein, 37 aa, Artificial Sequence
  Non-cyclic GFR-binding peptide
  MOD_RES (2), (33), (34): Xaa is C or S
KXSKVIMEYQKYIKPTKGIIYLISIPSLDQSVXXPSA

SEQ ID NO: 17705 - protein, 33 aa, Artificial Sequence
  Non-cyclic GFR-binding peptide
  MOD_RES (33), (33): Xaa is C or S
  MOD_RES (11), (12), (13), (14), (15): Xaa is A or G
  MOD_RES (16), (17), (18), (19): Xaa is A or G or is absent
EVVMDEYQKYXXXXXXXXXIYLMSIPSLETPVX

SEQ ID NO: 17706 - protein, 39 aa, Artificial Sequence
  Non-cyclic GFR-binding peptide
  MOD_RES (1), (33), (34): Xaa is C or S
XESVAMGEYQKYYTVVGKDIYLISIPSLKTPVXXAKSAK

SEQ ID NO: 17707 - protein, 41 aa, Artificial Sequence
  Non-cyclic GFR-binding peptide
  MOD_RES (1), (3), (37), (38): Xaa is C or S
  MOD_RES (15), (16), (17), (18), (19): Xaa is A or G
  MOD_RES (20), (21), (22), (23): Xaa is A or G or is absent
XGXGEVVMEEYKFKXXXXXXXXXLYLMSIPELETPVXXAKP

SEQ ID NO: 17708 - protein, 33 aa, Artificial Sequence
  Non-cyclic GFR-binding peptide
  MOD_RES (31), (31): Xaa is C or S
RVVMNEYQKYIVNSSDDIYLVSIPSLKTPAXTP

SEQ ID NO: 17709 - protein, 39 aa, Artificial Sequence
  Non-cyclic GFR-binding peptide
  MOD_RES (33), (34): Xaa is C or S
  MOD_RES (11), (12), (13), (14), (15): Xaa is A or G
  MOD_RES (16), (17), (18), (19): Xaa is A or G or is absent
EVVMEEYKFKXXXXXXXXXLYLMSIPELETPVXXAKPIS

SEQ ID NO: 17710 - protein, 43 aa, Artificial Sequence
  Non-cyclic GFR-binding peptide
  MOD_RES (1), (3), (37), (38): Xaa is C or S
  MOD_RES (15), (16), (17), (18), (19): Xaa is A or G
  MOD_RES (20), (21), (22), (23): Xaa is A or G or is absent
XGXGEVVMEEYQKYXXXXXXXXXIYLMSIPSLETPVXXAKPIS

SEQ ID NO: 17711 - protein, 39 aa, Artificial Sequence
  Non-cyclic GFR-binding peptide
  MOD_RES (2), (34), (35): Xaa is C or S
GXGEVVMEEYKFKVVKDYEDLYLMSIPELETPVXXAKPI

SEQ ID NO: 17712 - protein, 37 aa, Artificial Sequence
  Non-cyclic GFR-binding peptide
  MOD_RES (2), (4), (36): Xaa is C or S
HXGXSRVVMNEYKFKIVNSSDDLYLVSIPELKTPAXT

SEQ ID NO: 17713 - protein, 36 aa, Artificial Sequence
  Non-cyclic GFR-binding peptide
  MOD_RES (2), (36): Xaa is C or S
  MOD_RES (14), (15), (16), (17), (18): Xaa is A or G
  MOD_RES (19), (20), (21), (22): Xaa is A or G or is absent
GXARVVMNEYKFKXXXXXXXXXLYLVSIPELQTPAX

SEQ ID NO: 17714 - protein, 39 aa, Artificial Sequence
  Non-cyclic GFR-binding peptide
  MOD_RES (2), (4), (36), (37): Xaa is C or S
RXGXGEVVMDEYQKYVVKENEDIYLMSIPSLETPVXXAK

SEQ ID NO: 17715 - protein, 38 aa, Artificial Sequence
  Non-cyclic GFR-binding peptide
  MOD_RES (2), (4), (36), (37): Xaa is C or S
HXGXAKVVMNEYQKYIVNNSSDIYLVSIPSLKTPAXXA

SEQ ID NO: 17716 - protein, 35 aa, Artificial Sequence
  Non-cyclic GFR-binding peptide
  MOD_RES (32), (33): Xaa is C or S
ARVVMNEYKFKIVNSSDDLYLVSIPELQTPAXXPK

SEQ ID NO: 17717 - protein, 36 aa, Artificial Sequence
  Non-cyclic GFR-binding peptide
  MOD_RES (33), (33): Xaa is C or S
  MOD_RES (11), (12), (13), (14), (15): Xaa is A or G
  MOD_RES (16), (17), (18), (19): Xaa is A or G or is absent
RVVMNEYQKYXXXXXXXXXIYLVSIPSLKTPAXTPK

SEQ ID NO: 17718 - protein, 33 aa, Artificial Sequence
  Non-cyclic GFR-binding peptide
  MOD_RES (1), (1): Xaa is C or S
  MOD_RES (12), (13), (14), (15), (16): Xaa is A or G
  MOD_RES (17), (18), (19), (20): Xaa is A or G or is absent
XSKVIMEYQKYXXXXXXXXXIYLISIPSLDQSV

SEQ ID NO: 17719 - protein, 34 aa, Artificial Sequence
  Non-cyclic GFR-binding peptide
  MOD_RES (1), (33), (34): Xaa is C or S
XAKVVMNEYKFKIVNNSSDLYLVSIPELKTPAXX

SEQ ID NO: 17720 - protein, 36 aa, Artificial Sequence
  Non-cyclic GFR-binding peptide
  MOD_RES (1), (35), (36): Xaa is C or S
  MOD_RES (13), (14), (15), (16), (17): Xaa is A or G
  MOD_RES (18), (19), (20), (21): Xaa is A or G or is absent
XAEVVMDEYKFKXXXXXXXXXLYLISIPELRAPVXX

SEQ ID NO: 17721 - protein, 37 aa, Artificial Sequence
  Non-cyclic GFR-binding peptide
  MOD_RES (32), (32): Xaa is C or S
SRVVMNEYKFKIVNSSDDLYLVSIPELKTPAXTPKTV

SEQ ID NO: 17722 - protein, 34 aa, Artificial Sequence
  Non-cyclic GFR-binding peptide
  MOD_RES (33), (34): Xaa is C or S
  MOD_RES (11), (12), (13), (14), (15): Xaa is A or G
  MOD_RES (16), (17), (18), (19): Xaa is A or G or is absent
SVAMGRYKKLXXXXXXXXXFYLISIANLKTPVXX

SEQ ID NO: 17723 - protein, 34 aa, Artificial Sequence
  Non-cyclic GFR-binding peptide
  MOD_RES (1), (1): Xaa is C or S
  MOD_RES (13), (14), (15), (16), (17): Xaa is A or G
  MOD_RES (18), (19), (20), (21): Xaa is A or G or is absent
XAKVVMNEYQKYXXXXXXXXXIYLVSIPSLKTPA

SEQ ID NO: 17724 - protein, 35 aa, Artificial Sequence
  Non-cyclic GFR-binding peptide
  MOD_RES (32), (33): Xaa is C or S
AKVVMNEYKFKIVNNSSDLYLVSIPELKTPAXXAK

SEQ ID NO: 17725 - protein, 39 aa, Artificial Sequence
  Non-cyclic GFR-binding peptide
  MOD_RES (1), (3), (37), (38): Xaa is C or S
  MOD_RES (15), (16), (17), (18), (19): Xaa is A or G
  MOD_RES (20), (21), (22), (23): Xaa is A or G or is absent
XGXAEVVMDEYKFKXXXXXXXXXLYLISIPELRAPVXXS

SEQ ID NO: 17726 - protein, 40 aa, Artificial Sequence
  Non-cyclic GFR-binding peptide
  MOD_RES (2), (36), (37): Xaa is C or S
  MOD_RES (14), (15), (16), (17), (18): Xaa is A or G
  MOD_RES (19), (20), (21), (22): Xaa is A or G or is absent
GXGEVVMDEYKFKXXXXXXXXXLYLMSIPELETPVXXAKP

SEQ ID NO: 17727 - protein, 36 aa, Artificial Sequence
  Non-cyclic GFR-binding peptide
  MOD_RES (31), (32): Xaa is C or S
EVVMEEYKFKVVKDYEDLYLMSIPELETPVXXAKPI

SEQ ID NO: 17728 - protein, 36 aa, Artificial Sequence
  Non-cyclic GFR-binding peptide
  MOD_RES (1), (3): Xaa is C or S
  MOD_RES (15), (16), (17), (18), (19): Xaa is A or G
  MOD_RES (20), (21), (22), (23): Xaa is A or G or is absent
XGXGEVVMEEYQKYXXXXXXXXXIYLMSIPSLETPV

SEQ ID NO: 17729 - protein, 38 aa, Artificial Sequence
  Non-cyclic GFR-binding peptide
  MOD_RES (1), (33), (34): Xaa is C or S
XESVAMGRYKKLYTVVGKDFYLISIANLKTPVXXAKSA

SEQ ID NO: 17730 - protein, 37 aa, Artificial Sequence
  Non-cyclic GFR-binding peptide
  MOD_RES (1), (33), (34): Xaa is C or S
XGEVVMEEYQKYVVKDYEDIYLMSIPSLETPVXXAKP

SEQ ID NO: 17731 - protein, 34 aa, Artificial Sequence
  Non-cyclic GFR-binding peptide
  MOD_RES (1), (3): Xaa is C or S
XGXESVAMGRYKKLYTVVGKDFYLISIANLKTPV

SEQ ID NO: 17732 - protein, 41 aa, Artificial Sequence
  Non-cyclic GFR-binding peptide
  MOD_RES (1), (3), (37), (38): Xaa is C or S
  MOD_RES (15), (16), (17), (18), (19): Xaa is A or G
  MOD_RES (20), (21), (22), (23): Xaa is A or G or is absent
XGXGEVVMEEYQKYXXXXXXXXXIYLMSIPSLETPVXXAKP

SEQ ID NO: 17733 - protein, 35 aa, Artificial Sequence
  Non-cyclic GFR-binding peptide
  MOD_RES (1), (32), (33): Xaa is C or S
XSRVIMEYQKYVKPKRGVIYLISIPSLAQPVXXPA

SEQ ID NO: 17734 - protein, 44 aa, Artificial Sequence
  Non-cyclic GFR-binding peptide
  MOD_RES (2), (4), (39), (40): Xaa is C or S
  MOD_RES (17), (18), (19), (20), (21): Xaa is A or G
  MOD_RES (22), (23), (24), (25): Xaa is A or G or is absent
RXGXEAVSMGEEYQKYXXXXXXXXXIYLVSIPSLKTPVXXAKGV

SEQ ID NO: 17735 - protein, 34 aa, Artificial Sequence
  Non-cyclic GFR-binding peptide
  MOD_RES (2), (34): Xaa is C or S
GXSRVVMNEYKFKIVNSSDDLYLVSIPELKTPAX

SEQ ID NO: 17736 - protein, 34 aa, Artificial Sequence
  Non-cyclic GFR-binding peptide
  MOD_RES (1), (32), (33): Xaa is C or S
XSKVVMEYKFKVKPTRGVLYLISIPELDQPVXXP

SEQ ID NO: 17737 - protein, 38 aa, Artificial Sequence
  Non-cyclic GFR-binding peptide
  MOD_RES (2), (4), (37), (38): Xaa is C or S
  MOD_RES (15), (16), (17), (18), (19): Xaa is A or G
  MOD_RES (20), (21), (22), (23): Xaa is A or G or is absent
SXKXSKVVMEYKFKXXXXXXXXXLYLISIPELDQPVXX

SEQ ID NO: 17738 - protein, 37 aa, Artificial Sequence
  Non-cyclic GFR-binding peptide
  MOD_RES (34), (34): Xaa is C or S
  MOD_RES (12), (13), (14), (15), (16): Xaa is A or G
  MOD_RES (17), (18), (19), (20): Xaa is A or G or is absent
SRVVMNEYKFKXXXXXXXXXLYLVSIPELKTPAXTPK

SEQ ID NO: 17739 - protein, 42 aa, Artificial Sequence
  Non-cyclic GFR-binding peptide
  MOD_RES (2), (4), (38), (39): Xaa is C or S
  MOD_RES (16), (17), (18), (19), (20): Xaa is A or G
  MOD_RES (21), (22), (23), (24): Xaa is A or G or is absent
RXGXGEVVMDEYQKYXXXXXXXXXIYLMSIPSLETPVXXAKP

SEQ ID NO: 17740 - protein, 36 aa, Artificial Sequence
  Non-cyclic GFR-binding peptide
  MOD_RES (1), (33), (34): Xaa is C or S
XESVAMGRYKKLYTVVGKDFYLISIANLKTPVXXAK

SEQ ID NO: 17741 - protein, 38 aa, Artificial Sequence
  Non-cyclic GFR-binding peptide
  MOD_RES (35), (36): Xaa is C or S
  MOD_RES (13), (14), (15), (16), (17): Xaa is A or G
  MOD_RES (18), (19), (20), (21): Xaa is A or G or is absent
EAVSMGEEYKFKXXXXXXXXXLYLVSIPELKTPVXXAK

SEQ ID NO: 17742 - protein, 38 aa, Artificial Sequence
  Non-cyclic GFR-binding peptide
  MOD_RES (1), (35): Xaa is C or S
  MOD_RES (13), (14), (15), (16), (17): Xaa is A or G
  MOD_RES (18), (19), (20), (21): Xaa is A or G or is absent
XSRVVMNEYKFKXXXXXXXXXLYLVSIPELKTPAXTPK

SEQ ID NO: 17743 - protein, 33 aa, Artificial Sequence
  Non-cyclic GFR-binding peptide
  MOD_RES (31), (32): Xaa is C or S
SVAMGYHYKLYTVVGKDKYLISIPSLKTPVXXA

SEQ ID NO: 17744 - protein, 36 aa, Artificial Sequence
  Non-cyclic GFR-binding peptide
  MOD_RES (1), (3), (35), (36): Xaa is C or S
XGXGEVVMDEYQKYVVKENEDIYLMSIPSLETPVXX

SEQ ID NO: 17745 - protein, 33 aa, Artificial Sequence
  Non-cyclic GFR-binding peptide
  MOD_RES (1), (33): Xaa is C or S
XAEVVMDEYKFKVVNNAADLYLISIPELRAPVX

SEQ ID NO: 17746 - protein, 33 aa, Artificial Sequence
  Non-cyclic GFR-binding peptide
  MOD_RES (1), (1): Xaa is C or S
  MOD_RES (12), (13), (14), (15), (16): Xaa is A or G
  MOD_RES (17), (18), (19), (20): Xaa is A or G or is absent
XSKVVMEYQKYXXXXXXXXXIYLISIPSLDQPV

SEQ ID NO: 17747 - protein, 43 aa, Artificial Sequence
  Non-cyclic GFR-binding peptide
  MOD_RES (2), (4), (38), (39): Xaa is C or S
  MOD_RES (16), (17), (18), (19), (20): Xaa is A or G
  MOD_RES (21), (22), (23), (24): Xaa is A or G or is absent
RXGXGEVVMEEYKFKXXXXXXXXXLYLMSIPELETPVXXAKPI

SEQ ID NO: 17748 - protein, 38 aa, Artificial Sequence
  Non-cyclic GFR-binding peptide
  MOD_RES (1), (33), (34): Xaa is C or S
XARVVMNEYQKYIVNSSDDIYLVSIPSLQTPAXXPKPV

SEQ ID NO: 17749 - protein, 32 aa, Artificial Sequence
  Non-cyclic GFR-binding peptide
  MOD_RES (11), (12), (13), (14), (15): Xaa is A or G
  MOD_RES (16), (17), (18), (19): Xaa is A or G or is absent
RVVMNEYKFKXXXXXXXXXLYLVSIPELKTPA

SEQ ID NO: 17750 - protein, 38 aa, Artificial Sequence
  Non-cyclic GFR-binding peptide
  MOD_RES (2), (35), (36): Xaa is C or S
GXEAVSMGEEYKFKTPVGMDDLYLVSIPELKTPVXXAK

SEQ ID NO: 17751 - protein, 32 aa, Artificial Sequence
  Non-cyclic GFR-binding peptide
  MOD_RES (11), (12), (13), (14), (15): Xaa is A or G
  MOD_RES (16), (17), (18), (19): Xaa is A or G or is absent
KVVMNEYKFKXXXXXXXXXLYLVSIPELKTPA

SEQ ID NO: 17752 - protein, 34 aa, Artificial Sequence
  Non-cyclic GFR-binding peptide
  MOD_RES (1), (33), (34): Xaa is C or S
XESVAMGEYQKYYTVVGKDIYLISIPSLKTPVXX

SEQ ID NO: 17753 - protein, 31 aa, Artificial Sequence
  Non-cyclic GFR-binding peptide
  MOD_RES (31), (31): Xaa is C or S
SRVIMEYKFKVKPKRGVLYLISIPELAQPVX

SEQ ID NO: 17754 - protein, 36 aa, Artificial Sequence
  Non-cyclic GFR-binding peptide
  MOD_RES (1), (3), (34), (35): Xaa is C or S
XKXSRVIMEYKFKVKPKRGVLYLISIPELAQPVXXP

SEQ ID NO: 17755 - protein, 38 aa, Artificial Sequence
  Non-cyclic GFR-binding peptide
  MOD_RES (2), (36), (37): Xaa is C or S
  MOD_RES (14), (15), (16), (17), (18): Xaa is A or G
  MOD_RES (19), (20), (21), (22): Xaa is A or G or is absent
GXARVVMNEYQKYXXXXXXXXXIYLVSIPSLQTPAXXP

SEQ ID NO: 17756 - protein, 42 aa, Artificial Sequence
  Non-cyclic GFR-binding peptide
  MOD_RES (2), (36): Xaa is C or S
  MOD_RES (14), (15), (16), (17), (18): Xaa is A or G
  MOD_RES (19), (20), (21), (22): Xaa is A or G or is absent
GXSRVVMNEYKFKXXXXXXXXXLYLVSIPELKTPAXTPKTVH

SEQ ID NO: 17757 - protein, 31 aa, Artificial Sequence
  Non-cyclic GFR-binding peptide
  MOD_RES (1), (1): Xaa is C or S
XSRVIMEYKFKVKPKRGVLYLISIPELAQPV

SEQ ID NO: 17758 - protein, 33 aa, Artificial Sequence
  Non-cyclic GFR-binding peptide
  MOD_RES (1), (32), (33): Xaa is C or S
XSRVIMEYKFKVKPKRGVLYLISIPELAQPVXX

SEQ ID NO: 17759 - protein, 37 aa, Artificial Sequence
  Non-cyclic GFR-binding peptide
  MOD_RES (33), (34): Xaa is C or S
  MOD_RES (11), (12), (13), (14), (15): Xaa is A or G
  MOD_RES (16), (17), (18), (19): Xaa is A or G or is absent
SVAMGEYQKYXXXXXXXXXIYLISIPSLKTPVXXAKS

SEQ ID NO: 17760 - protein, 39 aa, Artificial Sequence
  Non-cyclic GFR-binding peptide
  MOD_RES (33), (34): Xaa is C or S
  MOD_RES (11), (12), (13), (14), (15): Xaa is A or G
  MOD_RES (16), (17), (18), (19): Xaa is A or G or is absent
SVAMGRYKKLXXXXXXXXXFYLISIANLKTPVXXAKSAK

SEQ ID NO: 17761 - protein, 38 aa, Artificial Sequence
  Non-cyclic GFR-binding peptide
  MOD_RES (33), (34): Xaa is C or S
  MOD_RES (11), (12), (13), (14), (15): Xaa is A or G
  MOD_RES (16), (17), (18), (19): Xaa is A or G or is absent
RVVMNEYKFKXXXXXXXXXLYLVSIPELKTPAXXPKPV

SEQ ID NO: 17762 - protein, 41 aa, Artificial Sequence
  Non-cyclic GFR-binding peptide
  MOD_RES (2), (37), (38): Xaa is C or S
  MOD_RES (15), (16), (17), (18), (19): Xaa is A or G
  MOD_RES (20), (21), (22), (23): Xaa is A or G or is absent
GXEAVSMGEEYQKYXXXXXXXXXIYLVSIPSLKTPVXXAKG

SEQ ID NO: 17763 - protein, 43 aa, Artificial Sequence
  Non-cyclic GFR-binding peptide
  MOD_RES (2), (4), (37), (38): Xaa is C or S
  MOD_RES (15), (16), (17), (18), (19): Xaa is A or G
  MOD_RES (20), (21), (22), (23): Xaa is A or G or is absent
SXKXSKVIMEYKFKXXXXXXXXXLYLISIPELDQSVXXPSASA

SEQ ID NO: 17764 - protein, 41 aa, Artificial Sequence
  Non-cyclic GFR-binding peptide
  MOD_RES (2), (4), (37), (38): Xaa is C or S
  MOD_RES (15), (16), (17), (18), (19): Xaa is A or G
  MOD_RES (20), (21), (22), (23): Xaa is A or G or is absent
SXKXSKVVMEYKFKXXXXXXXXXLYLISIPELDQPVXXPSA

SEQ ID NO: 17765 - protein, 38 aa, Artificial Sequence
  Non-cyclic GFR-binding peptide
  MOD_RES (34), (35): Xaa is C or S
  MOD_RES (12), (13), (14), (15), (16): Xaa is A or G
  MOD_RES (17), (18), (19), (20): Xaa is A or G or is absent
SRVVMNEYKFKXXXXXXXXXLYLVSIPELKTPAXXPKP

SEQ ID NO: 17766 - protein, 35 aa, Artificial Sequence
  Non-cyclic GFR-binding peptide
  MOD_RES (33), (34): Xaa is C or S
  MOD_RES (11), (12), (13), (14), (15): Xaa is A or G
  MOD_RES (16), (17), (18), (19): Xaa is A or G or is absent
SKVIMEYKFKXXXXXXXXXLYLISIPELDQSVXXP

SEQ ID NO: 17767 - protein, 41 aa, Artificial Sequence
  Non-cyclic GFR-binding peptide
  MOD_RES (2), (4), (35), (36): Xaa is C or S
SXKXSRVIMEYQKYVKPKRGVIYLISIPSLAQPVXXPAASA

SEQ ID NO: 17768 - protein, 39 aa, Artificial Sequence
  Non-cyclic GFR-binding peptide
  MOD_RES (2), (4), (36), (37): Xaa is C or S
RXGXGEVVMDEYKFKVVKENEDLYLMSIPELETPVXXAK

SEQ ID NO: 17769 - protein, 43 aa, Artificial Sequence
  Non-cyclic GFR-binding peptide
  MOD_RES (2), (4), (38), (39): Xaa is C or S
  MOD_RES (16), (17), (18), (19), (20): Xaa is A or G
  MOD_RES (21), (22), (23), (24): Xaa is A or G or is absent
HXGXARVVMNEYQKYXXXXXXXXXIYLVSIPSLQTPAXXPKPV

SEQ ID NO: 17770 - protein, 34 aa, Artificial Sequence
  Non-cyclic GFR-binding peptide
  MOD_RES (1), (3), (34): Xaa is C or S
XKXSKVIMEYQKYIKPTKGIIYLISIPSLDQSVX

SEQ ID NO: 17771 - protein, 34 aa, Artificial Sequence
  Non-cyclic GFR-binding peptide
  MOD_RES (1), (3): Xaa is C or S
XGXAKVVMNEYKFKIVNNSSDLYLVSIPELKTPA

SEQ ID NO: 17772 - protein, 38 aa, Artificial Sequence
  Non-cyclic GFR-binding peptide
  MOD_RES (33), (34): Xaa is C or S
  MOD_RES (11), (12), (13), (14), (15): Xaa is A or G
  MOD_RES (16), (17), (18), (19): Xaa is A or G or is absent
EVVMDEYKFKXXXXXXXXXLYLMSIPELETPVXXAKPI

SEQ ID NO: 17773 - protein, 41 aa, Artificial Sequence
  Non-cyclic GFR-binding peptide
  MOD_RES (2), (4), (36), (37): Xaa is C or S
RXGXGEVVMEEYQKYVVKDYEDIYLMSIPSLETPVXXAKPI

SEQ ID NO: 17774 - protein, 40 aa, Artificial Sequence
  Non-cyclic GFR-binding peptide
  MOD_RES (2), (35), (36): Xaa is C or S
  MOD_RES (13), (14), (15), (16), (17): Xaa is A or G
  MOD_RES (18), (19), (20), (21): Xaa is A or G or is absent
KXSKVVMEYKFKXXXXXXXXXLYLISIPELDQPVXXPSAS

SEQ ID NO: 17775 - protein, 36 aa, Artificial Sequence
  Non-cyclic GFR-binding peptide
  MOD_RES (32), (33): Xaa is C or S
AEVVMDRYKKLVVNNAADFYLISIANLRAPVXXSAP

SEQ ID NO: 17776 - protein, 37 aa, Artificial Sequence
  Non-cyclic GFR-binding peptide
  MOD_RES (2), (4): Xaa is C or S
  MOD_RES (16), (17), (18), (19), (20): Xaa is A or G
  MOD_RES (21), (22), (23), (24): Xaa is A or G or is absent
RXGXAEVVMDRYKKLXXXXXXXXXFYLISIANLRAPV

SEQ ID NO: 17777 - protein, 40 aa, Artificial Sequence
  Non-cyclic GFR-binding peptide
  MOD_RES (2), (4), (36), (37): Xaa is C or S
RXGXGEVVMDEYQKYVVKENEDIYLMSIPSLETPVXXAKP

SEQ ID NO: 17778 - protein, 32 aa, Artificial Sequence
  Non-cyclic GFR-binding peptide
  MOD_RES (32), (32): Xaa is C or S
AEVVMDRYKKLVVNNAADFYLISIANLRAPVX

SEQ ID NO: 17779 - protein, 33 aa, Artificial Sequence
  Non-cyclic GFR-binding peptide
  MOD_RES (12), (13), (14), (15), (16): Xaa is A or G
  MOD_RES (17), (18), (19), (20): Xaa is A or G or is absent
ARVVMNEYQKYXXXXXXXXXIYLVSIPSLQTPA

SEQ ID NO: 17780 - protein, 36 aa, Artificial Sequence
  Non-cyclic GFR-binding peptide
  MOD_RES (2), (33), (34): Xaa is C or S
KXSKVIMEYKFKIKPTKGILYLISIPELDQSVXXPS

SEQ ID NO: 17781 - protein, 37 aa, Artificial Sequence
  Non-cyclic GFR-binding peptide
  MOD_RES (1), (33), (34): Xaa is C or S
XAEVVMDEYKFKVVNNAADLYLISIPELRAPVXXSAP

SEQ ID NO: 17782 - protein, 38 aa, Artificial Sequence
  Non-cyclic GFR-binding peptide
  MOD_RES (1), (33), (34): Xaa is C or S
XESVAMGYHYKLYTVVGKDKYLISIPSLKTPVXXAKSA

SEQ ID NO: 17783 - protein, 33 aa, Artificial Sequence
  Non-cyclic GFR-binding peptide
  MOD_RES (1), (1): Xaa is C or S
XEAVSMGEEYQKYTPVGMDDIYLVSIPSLKTPV

SEQ ID NO: 17784 - protein, 36 aa, Artificial Sequence
  Non-cyclic GFR-binding peptide
  MOD_RES (1), (36): Xaa is C or S
  MOD_RES (14), (15), (16), (17), (18): Xaa is A or G
  MOD_RES (19), (20), (21), (22): Xaa is A or G or is absent
XEAVSMGEEYQKYXXXXXXXXXIYLVSIPSLKTPVX

SEQ ID NO: 17785 - protein, 33 aa, Artificial Sequence
  Non-cyclic GFR-binding peptide
  MOD_RES (12), (13), (14), (15), (16): Xaa is A or G
  MOD_RES (17), (18), (19), (20): Xaa is A or G or is absent
ARVVMNEYKFKXXXXXXXXXLYLVSIPELQTPA

SEQ ID NO: 17786 - protein, 35 aa, Artificial Sequence
  Non-cyclic GFR-binding peptide
  MOD_RES (32), (33): Xaa is C or S
SRVVMNEYQKYIVNSSDDIYLVSIPSLKTPAXXPK

SEQ ID NO: 17787 - protein, 35 aa, Artificial Sequence
  Non-cyclic GFR-binding peptide
  MOD_RES (33), (34): Xaa is C or S
EAVSMGEEYQKYTPVGMDDIYLVSIPSLKTPVXXA

SEQ ID NO: 17788 - protein, 37 aa, Artificial Sequence
  Non-cyclic GFR-binding peptide
  MOD_RES (1), (3), (35), (36): Xaa is C or S
XGXGEVVMEEYKFKVVKDYEDLYLMSIPELETPVXXA

SEQ ID NO: 17789 - protein, 41 aa, Artificial Sequence
  Non-cyclic GFR-binding peptide
  MOD_RES (1), (3), (36), (37): Xaa is C or S
XGXEAVSMGEEYKFKTPVGMDDLYLVSIPELKTPVXXAKGV

SEQ ID NO: 17790 - protein, 39 aa, Artificial Sequence
  Non-cyclic GFR-binding peptide
  MOD_RES (1), (35), (36): Xaa is C or S
  MOD_RES (13), (14), (15), (16), (17): Xaa is A or G
  MOD_RES (18), (19), (20), (21): Xaa is A or G or is absent
XSRVVMNEYQKYXXXXXXXXXIYLVSIPSLKTPAXXPKP

SEQ ID NO: 17791 - protein, 42 aa, Artificial Sequence
  Non-cyclic GFR-binding peptide
  MOD_RES (2), (4), (36): Xaa is C or S
HXGXSRVVMNEYKFKIVNSSDDLYLVSIPELKTPAXTPKTVH

SEQ ID NO: 17792 - protein, 42 aa, Artificial Sequence
  Non-cyclic GFR-binding peptide
  MOD_RES (2), (4), (36): Xaa is C or S
HXGXSRVVMNEYQKYIVNSSDDIYLVSIPSLKTPAXTPKTVH

SEQ ID NO: 17793 - protein, 40 aa, Artificial Sequence
  Non-cyclic GFR-binding peptide
  MOD_RES (1), (3), (37), (38): Xaa is C or S
  MOD_RES (15), (16), (17), (18), (19): Xaa is A or G
  MOD_RES (20), (21), (22), (23): Xaa is A or G or is absent
XGXARVVMNEYQKYXXXXXXXXXIYLVSIPSLQTPAXXPK

SEQ ID NO: 17794 - protein, 40 aa, Artificial Sequence
  Non-cyclic GFR-binding peptide
  MOD_RES (2), (4), (35), (36): Xaa is C or S
SXKXSKVIMEYQKYIKPTKGIIYLISIPSLDQSVXXPSAS

SEQ ID NO: 17795 - protein, 42 aa, Artificial Sequence
  Non-cyclic GFR-binding peptide
  MOD_RES (2), (36), (37): Xaa is C or S
  MOD_RES (14), (15), (16), (17), (18): Xaa is A or G
  MOD_RES (19), (20), (21), (22): Xaa is A or G or is absent
GXSRVVMNEYKFKXXXXXXXXXLYLVSIPELKTPAXXPKPVY

SEQ ID NO: 17796 - protein, 38 aa, Artificial Sequence
  Non-cyclic GFR-binding peptide
  MOD_RES (1), (33): Xaa is C or S
XSRVVMNEYQKYIVNSSDDIYLVSIPSLKTPAXTPKTV

SEQ ID NO: 17797 - protein, 30 aa, Artificial Sequence
  Non-cyclic GFR-binding peptide
RVVMNEYQKYIVNSSDDIYLVSIPSLKTPA

SEQ ID NO: 17798 - protein, 39 aa, Artificial Sequence
  Non-cyclic GFR-binding peptide
  MOD_RES (2), (4), (35), (36): Xaa is C or S
SXKXSKVVMEYKFKVKPTRGVLYLISIPELDQPVXXPSA

SEQ ID NO: 17799 - protein, 41 aa, Artificial Sequence
  Non-cyclic GFR-binding peptide
  MOD_RES (1), (35), (36): Xaa is C or S
  MOD_RES (13), (14), (15), (16), (17): Xaa is A or G
  MOD_RES (18), (19), (20), (21): Xaa is A or G or is absent
XAEVVMDRYKKLXXXXXXXXXFYLISIANLRAPVXXSAPAA

SEQ ID NO: 17800 - protein, 38 aa, Artificial Sequence
  Non-cyclic GFR-binding peptide
  MOD_RES (33), (34): Xaa is C or S
EAVSMGEEYKFKTPVGMDDLYLVSIPELKTPVXXAKGV

SEQ ID NO: 17801 - protein, 40 aa, Artificial Sequence
  Non-cyclic GFR-binding peptide
  MOD_RES (2), (34), (35): Xaa is C or S
GXSRVVMNEYKFKIVNSSDDLYLVSIPELKTPAXXPKPVY

SEQ ID NO: 17802 - protein, 31 aa, Artificial Sequence
  Non-cyclic GFR-binding peptide
AEVVMDEYKFKVVNNAADLYLISIPELRAPV

SEQ ID NO: 17803 - protein, 34 aa, Artificial Sequence
  Non-cyclic GFR-binding peptide
  MOD_RES (1), (3): Xaa is C or S
XGXAKVVMNEYQKYIVNNSSDIYLVSIPSLKTPA

SEQ ID NO: 17804 - protein, 35 aa, Artificial Sequence
  Non-cyclic GFR-binding peptide
  MOD_RES (1), (35): Xaa is C or S
  MOD_RES (13), (14), (15), (16), (17): Xaa is A or G
  MOD_RES (18), (19), (20), (21): Xaa is A or G or is absent
XAKVVMNEYQKYXXXXXXXXXIYLVSIPSLKTPAX

SEQ ID NO: 17805 - protein, 44 aa, Artificial Sequence
  Non-cyclic GFR-binding peptide
  MOD_RES (2), (4), (38), (39): Xaa is C or S
  MOD_RES (16), (17), (18), (19), (20): Xaa is A or G
  MOD_RES (21), (22), (23), (24): Xaa is A or G or is absent
HXGXSRVVMNEYKFKXXXXXXXXXLYLVSIPELKTPAXXPKPVY

SEQ ID NO: 17806 - protein, 36 aa, Artificial Sequence
  Non-cyclic GFR-binding peptide
  MOD_RES (2), (4): Xaa is C or S
  MOD_RES (15), (16), (17), (18), (19): Xaa is A or G
  MOD_RES (20), (21), (22), (23): Xaa is A or G or is absent
SXKXSKVVMEYKFKXXXXXXXXXLYLISIPELDQPV

SEQ ID NO: 17807 - protein, 32 aa, Artificial Sequence
  Non-cyclic GFR-binding peptide
  MOD_RES (11), (12), (13), (14), (15): Xaa is A or G
  MOD_RES (16), (17), (18), (19): Xaa is A or G or is absent
SKVVMEYQKYXXXXXXXXXIYLISIPSLDQPV

SEQ ID NO: 17808 - protein, 33 aa, Artificial Sequence
  Non-cyclic GFR-binding peptide
  MOD_RES (2), (2): Xaa is C or S
GXGEVVMDEYQKYVVKENEDIYLMSIPSLETPV

SEQ ID NO: 17809 - protein, 32 aa, Artificial Sequence
  Non-cyclic GFR-binding peptide
  MOD_RES (11), (12), (13), (14), (15): Xaa is A or G
  MOD_RES (16), (17), (18), (19): Xaa is A or G or is absent
SVAMGRYKKLXXXXXXXXXFYLISIANLKTPV

SEQ ID NO: 17810 - protein, 34 aa, Artificial Sequence
  Non-cyclic GFR-binding peptide
  MOD_RES (1), (33), (34): Xaa is C or S
XGEVVMDEYKFKVVKENEDLYLMSIPELETPVXX

SEQ ID NO: 17811 - protein, 36 aa, Artificial Sequence
  Non-cyclic GFR-binding peptide
  MOD_RES (1), (32), (33): Xaa is C or S
XSRVIMEYKFKVKPKRGVLYLISIPELAQPVXXPAA

SEQ ID NO: 17812 - protein, 34 aa, Artificial Sequence
  Non-cyclic GFR-binding peptide
  MOD_RES (31), (32): Xaa is C or S
RVVMNEYQKYIVNSSDDIYLVSIPSLQTPAXXPK

SEQ ID NO: 17813 - protein, 34 aa, Artificial Sequence
  Non-cyclic GFR-binding peptide
  MOD_RES (33), (34): Xaa is C or S
  MOD_RES (11), (12), (13), (14), (15): Xaa is A or G
  MOD_RES (16), (17), (18), (19): Xaa is A or G or is absent
EVVMDEYKFKXXXXXXXXXLYLISIPELRAPVXX

SEQ ID NO: 17814 - protein, 36 aa, Artificial Sequence
  Non-cyclic GFR-binding peptide
  MOD_RES (1), (33), (34): Xaa is C or S
XGEVVMEEYQKYVVKDYEDIYLMSIPSLETPVXXAK

SEQ ID NO: 17815 - protein, 39 aa, Artificial Sequence
  Non-cyclic GFR-binding peptide
  MOD_RES (1), (3), (37), (38): Xaa is C or S
  MOD_RES (15), (16), (17), (18), (19): Xaa is A or G
  MOD_RES (20), (21), (22), (23): Xaa is A or G or is absent
XGXESVAMGYHYKLXXXXXXXXXKYLISIPSLKTPVXXA

SEQ ID NO: 17816 - protein, 33 aa, Artificial Sequence
  Non-cyclic GFR-binding peptide
  MOD_RES (33), (33): Xaa is C or S
  MOD_RES (11), (12), (13), (14), (15): Xaa is A or G
  MOD_RES (16), (17), (18), (19): Xaa is A or G or is absent
SVAMGRYKKLXXXXXXXXXFYLISIANLKTPVX

SEQ ID NO: 17817 - protein, 34 aa, Artificial Sequence
  Non-cyclic GFR-binding peptide
  MOD_RES (33), (34): Xaa is C or S
  MOD_RES (11), (12), (13), (14), (15): Xaa is A or G
  MOD_RES (16), (17), (18), (19): Xaa is A or G or is absent
KVVMNEYKFKXXXXXXXXXLYLVSIPELKTPAXX

SEQ ID NO: 17818 - protein, 38 aa, Artificial Sequence
  Non-cyclic GFR-binding peptide
  MOD_RES (1), (32), (33): Xaa is C or S
XSRVIMEYKFKVKPKRGVLYLISIPELAQPVXXPAASA

SEQ ID NO: 17819 - protein, 36 aa, Artificial Sequence
  Non-cyclic GFR-binding peptide
  MOD_RES (1), (3): Xaa is C or S
  MOD_RES (15), (16), (17), (18), (19): Xaa is A or G
  MOD_RES (20), (21), (22), (23): Xaa is A or G or is absent
XGXSRVVMNEYQKYXXXXXXXXXIYLVSIPSLKTPA

SEQ ID NO: 17820 - protein, 36 aa, Artificial Sequence
  Non-cyclic GFR-binding peptide
  MOD_RES (2), (4), (36): Xaa is C or S
RXGXGEVVMDEYKFKVVKENEDLYLMSIPELETPVX

SEQ ID NO: 17821 - protein, 34 aa, Artificial Sequence
  Non-cyclic GFR-binding peptide
  MOD_RES (32), (33): Xaa is C or S
AKVVMNEYKFKIVNNSSDLYLVSIPELKTPAXXA

SEQ ID NO: 17822 - protein, 40 aa, Artificial Sequence
  Non-cyclic GFR-binding peptide
  MOD_RES (2), (4), (38), (39): Xaa is C or S
  MOD_RES (16), (17), (18), (19), (20): Xaa is A or G
  MOD_RES (21), (22), (23), (24): Xaa is A or G or is absent
RXGXGEVVMDEYQKYXXXXXXXXXIYLMSIPSLETPVXXA

SEQ ID NO: 17823 - protein, 40 aa, Artificial Sequence
  Non-cyclic GFR-binding peptide
  MOD_RES (1), (3), (34), (35): Xaa is C or S
XKXSKVIMEYKFKIKPTKGILYLISIPELDQSVXXPSASA

SEQ ID NO: 17824 - protein, 42 aa, Artificial Sequence
  Non-cyclic GFR-binding peptide
  MOD_RES (2), (4), (38): Xaa is C or S
  MOD_RES (16), (17), (18), (19), (20): Xaa is A or G
  MOD_RES (21), (22), (23), (24): Xaa is A or G or is absent
HXGXSRVVMNEYKFKXXXXXXXXXLYLVSIPELKTPAXTPKT

SEQ ID NO: 17825 - protein, 41 aa, Artificial Sequence
  Non-cyclic GFR-binding peptide
  MOD_RES (1), (3), (38), (39): Xaa is C or S
  MOD_RES (16), (17), (18), (19), (20): Xaa is A or G
  MOD_RES (21), (22), (23), (24): Xaa is A or G or is absent
XGXEAVSMGEEYKFKXXXXXXXXXLYLVSIPELKTPVXXAK

SEQ ID NO: 17826 - protein, 37 aa, Artificial Sequence
  Non-cyclic GFR-binding peptide
  MOD_RES (1), (3), (37): Xaa is C or S
  MOD_RES (15), (16), (17), (18), (19): Xaa is A or G
  MOD_RES (20), (21), (22), (23): Xaa is A or G or is absent
XGXAEVVMDYHYKLXXXXXXXXXKYLISIPSLRAPVX

SEQ ID NO: 17827 - protein, 41 aa, Artificial Sequence
  Non-cyclic GFR-binding peptide
  MOD_RES (1), (3), (35), (36): Xaa is C or S
XGXAKVVMNEYQKYIVNNSSDIYLVSIPSLKTPAXXAKPVA

SEQ ID NO: 17828 - protein, 38 aa, Artificial Sequence
  Non-cyclic GFR-binding peptide
  MOD_RES (1), (35), (36): Xaa is C or S
  MOD_RES (13), (14), (15), (16), (17): Xaa is A or G
  MOD_RES (18), (19), (20), (21): Xaa is A or G or is absent
XSRVVMNEYKFKXXXXXXXXXLYLVSIPELKTPAXXPK

SEQ ID NO: 17829 - protein, 42 aa, Artificial Sequence
  Non-cyclic GFR-binding peptide
  MOD_RES (1), (3), (37), (38): Xaa is C or S
  MOD_RES (15), (16), (17), (18), (19): Xaa is A or G
  MOD_RES (20), (21), (22), (23): Xaa is A or G or is absent
XGXESVAMGYHYKLXXXXXXXXXKYLISIPSLKTPVXXAKSA

SEQ ID NO: 17830 - protein, 35 aa, Artificial Sequence
  Non-cyclic GFR-binding peptide
  MOD_RES (2), (34): Xaa is C or S
GXSRVVMNEYKFKIVNSSDDLYLVSIPELKTPAXT

SEQ ID NO: 17831 - protein, 40 aa, Artificial Sequence
  Non-cyclic GFR-binding peptide
  MOD_RES (2), (36), (37): Xaa is C or S
  MOD_RES (14), (15), (16), (17), (18): Xaa is A or G
  MOD_RES (19), (20), (21), (22): Xaa is A or G or is absent
GXAKVVMNEYKFKXXXXXXXXXLYLVSIPELKTPAXXAKP

SEQ ID NO: 17832 - protein, 36 aa, Artificial Sequence
  Non-cyclic GFR-binding peptide
  MOD_RES (1), (32), (33): Xaa is C or S
XSKVVMEYQKYVKPTRGVIYLISIPSLDQPVXXPSA

SEQ ID NO: 17833 - protein, 42 aa, Artificial Sequence
  Non-cyclic GFR-binding peptide
  MOD_RES (1), (3), (37), (38): Xaa is C or S
  MOD_RES (15), (16), (17), (18), (19): Xaa is A or G
  MOD_RES (20), (21), (22), (23): Xaa is A or G or is absent
XGXGEVVMDEYKFKXXXXXXXXXLYLMSIPELETPVXXAKPI

SEQ ID NO: 17834 - protein, 35 aa, Artificial Sequence
  Non-cyclic GFR-binding peptide
  MOD_RES (1), (32), (33): Xaa is C or S
XSKVIMEYKFKIKPTKGILYLISIPELDQSVXXPS

SEQ ID NO: 17835 - protein, 31 aa, Artificial Sequence
  Non-cyclic GFR-binding peptide
  MOD_RES (31), (31): Xaa is C or S
EVVMDRYKKLVVNNAADFYLISIANLRAPVX

SEQ ID NO: 17836 - protein, 40 aa, Artificial Sequence
  Non-cyclic GFR-binding peptide
  MOD_RES (1), (35), (36): Xaa is C or S
  MOD_RES (13), (14), (15), (16), (17): Xaa is A or G
  MOD_RES (18), (19), (20), (21): Xaa is A or G or is absent
XAEVVMDRYKKLXXXXXXXXXFYLISIANLRAPVXXSAPA

SEQ ID NO: 17837 - protein, 33 aa, Artificial Sequence
  Non-cyclic GFR-binding peptide
  MOD_RES (31), (32): Xaa is C or S
SKVIMEYKFKIKPTKGILYLISIPELDQSVXXP

SEQ ID NO: 17838 - protein, 40 aa, Artificial Sequence
  Non-cyclic GFR-binding peptide
  MOD_RES (1), (3), (35), (36): Xaa is C or S
XGXAEVVMDRYKKLVVNNAADFYLISIANLRAPVXXSAPA

SEQ ID NO: 17839 - protein, 42 aa, Artificial Sequence
  Non-cyclic GFR-binding peptide
  MOD_RES (2), (37), (38): Xaa is C or S
  MOD_RES (15), (16), (17), (18), (19): Xaa is A or G
  MOD_RES (20), (21), (22), (23): Xaa is A or G or is absent
GXEAVSMGEEYQKYXXXXXXXXXIYLVSIPSLKTPVXXAKGV

SEQ ID NO: 17840 - protein, 37 aa, Artificial Sequence
  Non-cyclic GFR-binding peptide
  MOD_RES (1), (35), (36): Xaa is C or S
  MOD_RES (13), (14), (15), (16), (17): Xaa is A or G
  MOD_RES (18), (19), (20), (21): Xaa is A or G or is absent
XARVVMNEYKFKXXXXXXXXXLYLVSIPELQTPAXXP

SEQ ID NO: 17841 - protein, 39 aa, Artificial Sequence
  Non-cyclic GFR-binding peptide
  MOD_RES (2), (4), (36), (37): Xaa is C or S
RXGXESVAMGRYKKLYTVVGKDFYLISIANLKTPVXXAK

SEQ ID NO: 17842 - protein, 35 aa, Artificial Sequence
  Non-cyclic GFR-binding peptide
  MOD_RES (1), (3), (35): Xaa is C or S
XGXESVAMGYHYKLYTVVGKDKYLISIPSLKTPVX

SEQ ID NO: 17843 - protein, 30 aa, Artificial Sequence
  Non-cyclic GFR-binding peptide
EVVMDEYKFKVVKENEDLYLMSIPELETPV

SEQ ID NO: 17844 - protein, 36 aa, Artificial Sequence
  Non-cyclic GFR-binding peptide
  MOD_RES (1), (33), (34): Xaa is C or S
XAEVVMDEYKFKVVNNAADLYLISIPELRAPVXXSA

SEQ ID NO: 17845 - protein, 38 aa, Artificial Sequence
  Non-cyclic GFR-binding peptide
  MOD_RES (32), (33): Xaa is C or S
GEVVMEEYQKYVVKDYEDIYLMSIPSLETPVXXAKPIS

SEQ ID NO: 17846 - protein, 38 aa, Artificial Sequence
  Non-cyclic GFR-binding peptide
  MOD_RES (1), (3), (35), (36): Xaa is C or S
XGXAEVVMDRYKKLVVNNAADFYLISIANLRAPVXXSA

SEQ ID NO: 17847 - protein, 37 aa, Artificial Sequence
  Non-cyclic GFR-binding peptide
  MOD_RES (1), (3), (35), (36): Xaa is C or S
XGXGEVVMDEYKFKVVKENEDLYLMSIPELETPVXXA

SEQ ID NO: 17848 - protein, 39 aa, Artificial Sequence
  Non-cyclic GFR-binding peptide
  MOD_RES (1), (3), (37), (38): Xaa is C or S
  MOD_RES (15), (16), (17), (18), (19): Xaa is A or G
  MOD_RES (20), (21), (22), (23): Xaa is A or G or is absent
XGXSRVVMNEYQKYXXXXXXXXXIYLVSIPSLKTPAXXP

SEQ ID NO: 17849 - protein, 39 aa, Artificial Sequence
  Non-cyclic GFR-binding peptide
  MOD_RES (1), (35), (36): Xaa is C or S
  MOD_RES (13), (14), (15), (16), (17): Xaa is A or G
  MOD_RES (18), (19), (20), (21): Xaa is A or G or is absent
XAEVVMDEYKFKXXXXXXXXXLYLISIPELRAPVXXSAP

SEQ ID NO: 17850 - protein, 31 aa, Artificial Sequence
  Non-cyclic GFR-binding peptide
ARVVMNEYQKYIVNSSDDIYLVSIPSLQTPA

SEQ ID NO: 17851 - protein, 40 aa, Artificial Sequence
  Non-cyclic GFR-binding peptide
  MOD_RES (34), (35): Xaa is C or S
  MOD_RES (12), (13), (14), (15), (16): Xaa is A or G
  MOD_RES (17), (18), (19), (20): Xaa is A or G or is absent
GEVVMDEYKFKXXXXXXXXXLYLMSIPELETPVXXAKPIK

SEQ ID NO: 17852 - protein, 37 aa, Artificial Sequence
  Non-cyclic GFR-binding peptide
  MOD_RES (32), (33): Xaa is C or S
GEVVMDEYKFKVVKENEDLYLMSIPELETPVXXAKPI

SEQ ID NO: 17853 - protein, 41 aa, Artificial Sequence
  Non-cyclic GFR-binding peptide
  MOD_RES (1), (3), (37), (38): Xaa is C or S
  MOD_RES (15), (16), (17), (18), (19): Xaa is A or G
  MOD_RES (20), (21), (22), (23): Xaa is A or G or is absent
XGXESVAMGEYQKYXXXXXXXXXIYLISIPSLKTPVXXAKS

SEQ ID NO: 17854 - protein, 34 aa, Artificial Sequence
  Non-cyclic GFR-binding peptide
  MOD_RES (1), (33), (34): Xaa is C or S
XARVVMNEYQKYIVNSSDDIYLVSIPSLQTPAXX

SEQ ID NO: 17855 - protein, 37 aa, Artificial Sequence
  Non-cyclic GFR-binding peptide
  MOD_RES (2), (4): Xaa is C or S
  MOD_RES (16), (17), (18), (19), (20): Xaa is A or G
  MOD_RES (21), (22), (23), (24): Xaa is A or G or is absent
RXGXGEVVMEEYKFKXXXXXXXXXLYLMSIPELETPV

SEQ ID NO: 17856 - protein, 35 aa, Artificial Sequence
  Non-cyclic GFR-binding peptide
  MOD_RES (2), (2): Xaa is C or S
  MOD_RES (14), (15), (16), (17), (18): Xaa is A or G
  MOD_RES (19), (20), (21), (22): Xaa is A or G or is absent
GXARVVMNEYQKYXXXXXXXXXIYLVSIPSLQTPA

SEQ ID NO: 17857 - protein, 31 aa, Artificial Sequence
  Non-cyclic GFR-binding peptide
AKVVMNEYKFKIVNNSSDLYLVSIPELKTPA

SEQ ID NO: 17858 - protein, 38 aa, Artificial Sequence
  Non-cyclic GFR-binding peptide
  MOD_RES (2), (34), (35): Xaa is C or S
GXGEVVMEEYKFKVVKDYEDLYLMSIPELETPVXXAKP

SEQ ID NO: 17859 - protein, 38 aa, Artificial Sequence
  Non-cyclic GFR-binding peptide
  MOD_RES (33), (34): Xaa is C or S
  MOD_RES (11), (12), (13), (14), (15): Xaa is A or G
  MOD_RES (16), (17), (18), (19): Xaa is A or G or is absent
RVVMNEYQKYXXXXXXXXXIYLVSIPSLQTPAXXPKPV

SEQ ID NO: 17860 - protein, 41 aa, Artificial Sequence
  Non-cyclic GFR-binding peptide
  MOD_RES (1), (35), (36): Xaa is C or S
  MOD_RES (13), (14), (15), (16), (17): Xaa is A or G
  MOD_RES (18), (19), (20), (21): Xaa is A or G or is absent
XESVAMGRYKKLXXXXXXXXXFYLISIANLKTPVXXAKSAK

SEQ ID NO: 17861 - protein, 40 aa, Artificial Sequence
  Non-cyclic GFR-binding peptide
  MOD_RES (34), (35): Xaa is C or S
  MOD_RES (12), (13), (14), (15), (16): Xaa is A or G
  MOD_RES (17), (18), (19), (20): Xaa is A or G or is absent
SRVVMNEYKFKXXXXXXXXXLYLVSIPELKTPAXXPKPVY

SEQ ID NO: 17862 - protein, 35 aa, Artificial Sequence
  Non-cyclic GFR-binding peptide
  MOD_RES (2), (4): Xaa is C or S
RXGXAEVVMDRYKKLVVNNAADFYLISIANLRAPV

SEQ ID NO: 17863 - protein, 38 aa, Artificial Sequence
  Non-cyclic GFR-binding peptide
  MOD_RES (2), (4), (38): Xaa is C or S
  MOD_RES (16), (17), (18), (19), (20): Xaa is A or G
  MOD_RES (21), (22), (23), (24): Xaa is A or G or is absent
RXGXAEVVMDEYKFKXXXXXXXXXLYLISIPELRAPVX

SEQ ID NO: 17864 - protein, 34 aa, Artificial Sequence
  Non-cyclic GFR-binding peptide
  MOD_RES (2), (34): Xaa is C or S
GXARVVMNEYKFKIVNSSDDLYLVSIPELQTPAX

SEQ ID NO: 17865 - protein, 37 aa, Artificial Sequence
  Non-cyclic GFR-binding peptide
  MOD_RES (1), (3), (36), (37): Xaa is C or S
  MOD_RES (14), (15), (16), (17), (18): Xaa is A or G
  MOD_RES (19), (20), (21), (22): Xaa is A or G or is absent
XKXSKVVMEYQKYXXXXXXXXXIYLISIPSLDQPVXX

SEQ ID NO: 17866 - protein, 38 aa, Artificial Sequence
  Non-cyclic GFR-binding peptide
  MOD_RES (1), (3), (37), (38): Xaa is C or S
  MOD_RES (15), (16), (17), (18), (19): Xaa is A or G
  MOD_RES (20), (21), (22), (23): Xaa is A or G or is absent
XGXGEVVMEEYKFKXXXXXXXXXLYLMSIPELETPVXX

SEQ ID NO: 17867 - protein, 37 aa, Artificial Sequence
  Non-cyclic GFR-binding peptide
  MOD_RES (31), (32): Xaa is C or S
KVVMNEYKFKIVNNSSDLYLVSIPELKTPAXXAKPVA

SEQ ID NO: 17868 - protein, 37 aa, Artificial Sequence
  Non-cyclic GFR-binding peptide
  MOD_RES (2), (4), (37): Xaa is C or S
RXGXEAVSMGEEYKFKTPVGMDDLYLVSIPELKTPVX

SEQ ID NO: 17869 - protein, 38 aa, Artificial Sequence
  Non-cyclic GFR-binding peptide
  MOD_RES (1), (32), (33): Xaa is C or S
XSKVIMEYKFKIKPTKGILYLISIPELDQSVXXPSASA

SEQ ID NO: 17870 - protein, 31 aa, Artificial Sequence
  Non-cyclic GFR-binding peptide
  MOD_RES (31), (31): Xaa is C or S
SKVVMEYQKYVKPTRGVIYLISIPSLDQPVX

SEQ ID NO: 17871 - protein, 36 aa, Artificial Sequence
  Non-cyclic GFR-binding peptide
  MOD_RES (2), (4): Xaa is C or S
RXGXEAVSMGEEYQKYTPVGMDDIYLVSIPSLKTPV

SEQ ID NO: 17872 - protein, 44 aa, Artificial Sequence
  Non-cyclic GFR-binding peptide
  MOD_RES (2), (4), (38), (39): Xaa is C or S
  MOD_RES (16), (17), (18), (19), (20): Xaa is A or G
  MOD_RES (21), (22), (23), (24): Xaa is A or G or is absent
RXGXAEVVMDEYKFKXXXXXXXXXLYLISIPELRAPVXXSAPAA

SEQ ID NO: 17873 - protein, 36 aa, Artificial Sequence
  Non-cyclic GFR-binding peptide
  MOD_RES (32), (33): Xaa is C or S
ESVAMGYHYKLYTVVGKDKYLISIPSLKTPVXXAKS

SEQ ID NO: 17874 - protein, 37 aa, Artificial Sequence
  Non-cyclic GFR-binding peptide
  MOD_RES (1), (35), (36): Xaa is C or S
  MOD_RES (13), (14), (15), (16), (17): Xaa is A or G
  MOD_RES (18), (19), (20), (21): Xaa is A or G or is absent
XAEVVMDRYKKLXXXXXXXXXFYLISIANLRAPVXXS

SEQ ID NO: 17875 - protein, 32 aa, Artificial Sequence
  Non-cyclic GFR-binding peptide
  MOD_RES (31), (31): Xaa is C or S
RVVMNEYKFKIVNSSDDLYLVSIPELKTPAXT

SEQ ID NO: 17876 - protein, 36 aa, Artificial Sequence
  Non-cyclic GFR-binding peptide
  MOD_RES (1), (34), (35): Xaa is C or S
  MOD_RES (12), (13), (14), (15), (16): Xaa is A or G
  MOD_RES (17), (18), (19), (20): Xaa is A or G or is absent
XSKVVMEYQKYXXXXXXXXXIYLISIPSLDQPVXXP

SEQ ID NO: 17877 - protein, 40 aa, Artificial Sequence
  Non-cyclic GFR-binding peptide
  MOD_RES (1), (3), (37), (38): Xaa is C or S
  MOD_RES (15), (16), (17), (18), (19): Xaa is A or G
  MOD_RES (20), (21), (22), (23): Xaa is A or G or is absent
XGXESVAMGRYKKLXXXXXXXXXFYLISIANLKTPVXXAK

SEQ ID NO: 17878 - protein, 34 aa, Artificial Sequence
  Non-cyclic GFR-binding peptide
  MOD_RES (1), (33): Xaa is C or S
XSRVVMNEYQKYIVNSSDDIYLVSIPSLKTPAXT

SEQ ID NO: 17879 - protein, 31 aa, Artificial Sequence
  Non-cyclic GFR-binding peptide
  MOD_RES (31), (31): Xaa is C or S
EVVMDYHYKLVVNNAADKYLISIPSLRAPVX

SEQ ID NO: 17880 - protein, 36 aa, Artificial Sequence
  Non-cyclic GFR-binding peptide
  MOD_RES (2), (35), (36): Xaa is C or S
  MOD_RES (13), (14), (15), (16), (17): Xaa is A or G
  MOD_RES (18), (19), (20), (21): Xaa is A or G or is absent
KXSKVVMEYKFKXXXXXXXXXLYLISIPELDQPVXX

SEQ ID NO: 17881 - protein, 39 aa, Artificial Sequence
  Non-cyclic GFR-binding peptide
  MOD_RES (2), (4), (39): Xaa is C or S
  MOD_RES (17), (18), (19), (20), (21): Xaa is A or G
  MOD_RES (22), (23), (24), (25): Xaa is A or G or is absent
RXGXEAVSMGEEYKFKXXXXXXXXXLYLVSIPELKTPVX

SEQ ID NO: 17882 - protein, 37 aa, Artificial Sequence
  Non-cyclic GFR-binding peptide
  MOD_RES (32), (33): Xaa is C or S
AKVVMNEYQKYIVNNSSDIYLVSIPSLKTPAXXAKPV

SEQ ID NO: 17883 - protein, 39 aa, Artificial Sequence
  Non-cyclic GFR-binding peptide
  MOD_RES (2), (4), (36), (37): Xaa is C or S
RXGXGEVVMEEYKFKVVKDYEDLYLMSIPELETPVXXAK

SEQ ID NO: 17884 - protein, 36 aa, Artificial Sequence
  Non-cyclic GFR-binding peptide
  MOD_RES (33), (34): Xaa is C or S
  MOD_RES (11), (12), (13), (14), (15): Xaa is A or G
  MOD_RES (16), (17), (18), (19): Xaa is A or G or is absent
EVVMEEYQKYXXXXXXXXXIYLMSIPSLETPVXXAK

SEQ ID NO: 17885 - protein, 35 aa, Artificial Sequence
  Non-cyclic GFR-binding peptide
  MOD_RES (1), (3): Xaa is C or S
  MOD_RES (14), (15), (16), (17), (18): Xaa is A or G
  MOD_RES (19), (20), (21), (22): Xaa is A or G or is absent
XKXSRVIMEYKFKXXXXXXXXXLYLISIPELAQPV

SEQ ID NO: 17886 - protein, 40 aa, Artificial Sequence
  Non-cyclic GFR-binding peptide
  MOD_RES (34), (35): Xaa is C or S
  MOD_RES (12), (13), (14), (15), (16): Xaa is A or G
  MOD_RES (17), (18), (19), (20): Xaa is A or G or is absent
ARVVMNEYQKYXXXXXXXXXIYLVSIPSLQTPAXXPKPVT

SEQ ID NO: 17887 - protein, 38 aa, Artificial Sequence
  Non-cyclic GFR-binding peptide
  MOD_RES (2), (4), (38): Xaa is C or S
  MOD_RES (16), (17), (18), (19), (20): Xaa is A or G
  MOD_RES (21), (22), (23), (24): Xaa is A or G or is absent
HXGXSRVVMNEYKFKXXXXXXXXXLYLVSIPELKTPAX

SEQ ID NO: 17888 - protein, 38 aa, Artificial Sequence
  Non-cyclic GFR-binding peptide
  MOD_RES (2), (4), (38): Xaa is C or S
  MOD_RES (16), (17), (18), (19), (20): Xaa is A or G
  MOD_RES (21), (22), (23), (24): Xaa is A or G or is absent
HXGXAKVVMNEYQKYXXXXXXXXXIYLVSIPSLKTPAX

SEQ ID NO: 17889 - protein, 36 aa, Artificial Sequence
  Non-cyclic GFR-binding peptide
  MOD_RES (1), (34), (35): Xaa is C or S
XEAVSMGEEYKFKTPVGMDDLYLVSIPELKTPVXXA

SEQ ID NO: 17890 - protein, 42 aa, Artificial Sequence
  Non-cyclic GFR-binding peptide
  MOD_RES (2), (4), (37), (38): Xaa is C or S
  MOD_RES (15), (16), (17), (18), (19): Xaa is A or G
  MOD_RES (20), (21), (22), (23): Xaa is A or G or is absent
SXKXSRVIMEYKFKXXXXXXXXXLYLISIPELAQPVXXPAAS

SEQ ID NO: 17891 - protein, 37 aa, Artificial Sequence
  Non-cyclic GFR-binding peptide
  MOD_RES (32), (33): Xaa is C or S
AEVVMDEYKFKVVNNAADLYLISIPELRAPVXXSAPA

SEQ ID NO: 17892 - protein, 33 aa, Artificial Sequence
  Non-cyclic GFR-binding peptide
  MOD_RES (12), (13), (14), (15), (16): Xaa is A or G
  MOD_RES (17), (18), (19), (20): Xaa is A or G or is absent
GEVVMDEYKFKXXXXXXXXXLYLMSIPELETPV

SEQ ID NO: 17893 - protein, 36 aa, Artificial Sequence
  Non-cyclic GFR-binding peptide
  MOD_RES (35), (36): Xaa is C or S
  MOD_RES (13), (14), (15), (16), (17): Xaa is A or G
  MOD_RES (18), (19), (20), (21): Xaa is A or G or is absent
EAVSMGEEYKFKXXXXXXXXXLYLVSIPELKTPVXX

SEQ ID NO: 17894 - protein, 39 aa, Artificial Sequence
  Non-cyclic GFR-binding peptide
  MOD_RES (34), (35): Xaa is C or S
  MOD_RES (12), (13), (14), (15), (16): Xaa is A or G
  MOD_RES (17), (18), (19), (20): Xaa is A or G or is absent
ARVVMNEYQKYXXXXXXXXXIYLVSIPSLQTPAXXPKPV

SEQ ID NO: 17895 - protein, 36 aa, Artificial Sequence
  Non-cyclic GFR-binding peptide
  MOD_RES (1), (35), (36): Xaa is C or S
  MOD_RES (13), (14), (15), (16), (17): Xaa is A or G
  MOD_RES (18), (19), (20), (21): Xaa is A or G or is absent
XGEVVMEEYKFKXXXXXXXXXLYLMSIPELETPVXX

SEQ ID NO: 17896 - protein, 35 aa, Artificial Sequence
  Non-cyclic GFR-binding peptide
  MOD_RES (33), (34): Xaa is C or S
  MOD_RES (11), (12), (13), (14), (15): Xaa is A or G
  MOD_RES (16), (17), (18), (19): Xaa is A or G or is absent
EVVMEEYQKYXXXXXXXXXIYLMSIPSLETPVXXA

SEQ ID NO: 17897 - protein, 43 aa, Artificial Sequence
  Non-cyclic GFR-binding peptide
  MOD_RES (1), (3), (37), (38): Xaa is C or S
  MOD_RES (15), (16), (17), (18), (19): Xaa is A or G
  MOD_RES (20), (21), (22), (23): Xaa is A or G or is absent
XGXARVVMNEYKFKXXXXXXXXXLYLVSIPELQTPAXXPKPVT

SEQ ID NO: 17898 - protein, 33 aa, Artificial Sequence
  Non-cyclic GFR-binding peptide
  MOD_RES (2), (2): Xaa is C or S
GXARVVMNEYQKYIVNSSDDIYLVSIPSLQTPA

SEQ ID NO: 17899 - protein, 37 aa, Artificial Sequence
  Non-cyclic GFR-binding peptide
  MOD_RES (2), (4), (36), (37): Xaa is C or S
RXGXGEVVMEEYQKYVVKDYEDIYLMSIPSLETPVXX

SEQ ID NO: 17900 - protein, 40 aa, Artificial Sequence
  Non-cyclic GFR-binding peptide
  MOD_RES (2), (34), (35): Xaa is C or S
GXAKVVMNEYQKYIVNNSSDIYLVSIPSLKTPAXXAKPVA

SEQ ID NO: 17901 - protein, 39 aa, Artificial Sequence
  Non-cyclic GFR-binding peptide
  MOD_RES (33), (34): Xaa is C or S
  MOD_RES (11), (12), (13), (14), (15): Xaa is A or G
  MOD_RES (16), (17), (18), (19): Xaa is A or G or is absent
SRVIMEYKFKXXXXXXXXXLYLISIPELAQPVXXPAASA

SEQ ID NO: 17902 - protein, 34 aa, Artificial Sequence
  Non-cyclic GFR-binding peptide
  MOD_RES (1), (33), (34): Xaa is C or S
XARVVMNEYKFKIVNSSDDLYLVSIPELQTPAXX

SEQ ID NO: 17903 - protein, 39 aa, Artificial Sequence
  Non-cyclic GFR-binding peptide
  MOD_RES (2), (34), (35): Xaa is C or S
GXAEVVMDRYKKLVVNNAADFYLISIANLRAPVXXSAPA

SEQ ID NO: 17904 - protein, 35 aa, Artificial Sequence
  Non-cyclic GFR-binding peptide
  MOD_RES (1), (33), (34): Xaa is C or S
XAKVVMNEYKFKIVNNSSDLYLVSIPELKTPAXXA

SEQ ID NO: 17905 - protein, 37 aa, Artificial Sequence
  Non-cyclic GFR-binding peptide
  MOD_RES (2), (36), (37): Xaa is C or S
  MOD_RES (14), (15), (16), (17), (18): Xaa is A or G
  MOD_RES (19), (20), (21), (22): Xaa is A or G or is absent
GXESVAMGEYQKYXXXXXXXXXIYLISIPSLKTPVXX

SEQ ID NO: 17906 - protein, 42 aa, Artificial Sequence
  Non-cyclic GFR-binding peptide
  MOD_RES (2), (4), (36), (37): Xaa is C or S
RXGXGEVVMDEYKFKVVKENEDLYLMSIPELETPVXXAKPIK

SEQ ID NO: 17907 - protein, 30 aa, Artificial Sequence
  Non-cyclic GFR-binding peptide
EVVMEEYKFKVVKDYEDLYLMSIPELETPV

SEQ ID NO: 17908 - protein, 36 aa, Artificial Sequence
  Non-cyclic GFR-binding peptide
  MOD_RES (2), (33), (34): Xaa is C or S
KXSKVVMEYKFKVKPTRGVLYLISIPELDQPVXXPS

SEQ ID NO: 17909 - protein, 39 aa, Artificial Sequence
  Non-cyclic GFR-binding peptide
  MOD_RES (1), (3), (36), (37): Xaa is C or S
  MOD_RES (14), (15), (16), (17), (18): Xaa is A or G
  MOD_RES (19), (20), (21), (22): Xaa is A or G or is absent
XKXSKVIMEYQKYXXXXXXXXXIYLISIPSLDQSVXXPS

SEQ ID NO: 17910 - protein, 41 aa, Artificial Sequence
  Non-cyclic GFR-binding peptide
  MOD_RES (2), (4), (38), (39): Xaa is C or S
  MOD_RES (16), (17), (18), (19), (20): Xaa is A or G
  MOD_RES (21), (22), (23), (24): Xaa is A or G or is absent
RXGXESVAMGEYQKYXXXXXXXXXIYLISIPSLKTPVXXAK

SEQ ID NO: 17911 - protein, 36 aa, Artificial Sequence
  Non-cyclic GFR-binding peptide
  MOD_RES (1), (3): Xaa is C or S
  MOD_RES (15), (16), (17), (18), (19): Xaa is A or G
  MOD_RES (20), (21), (22), (23): Xaa is A or G or is absent
XGXESVAMGEYQKYXXXXXXXXXIYLISIPSLKTPV

SEQ ID NO: 17912 - protein, 35 aa, Artificial Sequence
  Non-cyclic GFR-binding peptide
  MOD_RES (2), (2): Xaa is C or S
  MOD_RES (14), (15), (16), (17), (18): Xaa is A or G
  MOD_RES (19), (20), (21), (22): Xaa is A or G or is absent
GXGEVVMDEYQKYXXXXXXXXXIYLMSIPSLETPV

SEQ ID NO: 17913 - protein, 36 aa, Artificial Sequence
  Non-cyclic GFR-binding peptide
  MOD_RES (1), (34), (35): Xaa is C or S
  MOD_RES (12), (13), (14), (15), (16): Xaa is A or G
  MOD_RES (17), (18), (19), (20): Xaa is A or G or is absent
XSRVIMEYKFKXXXXXXXXXLYLISIPELAQPVXXP

SEQ ID NO: 17914 - protein, 37 aa, Artificial Sequence
  Non-cyclic GFR-binding peptide
  MOD_RES (1), (3), (36), (37): Xaa is C or S
  MOD_RES (14), (15), (16), (17), (18): Xaa is A or G
  MOD_RES (19), (20), (21), (22): Xaa is A or G or is absent
XKXSKVIMEYQKYXXXXXXXXXIYLISIPSLDQSVXX

SEQ ID NO: 17915 - protein, 36 aa, Artificial Sequence
  Non-cyclic GFR-binding peptide
  MOD_RES (1), (3), (35), (36): Xaa is C or S
XGXGEVVMEEYKFKVVKDYEDLYLMSIPELETPVXX

SEQ ID NO: 17916 - protein, 38 aa, Artificial Sequence
  Non-cyclic GFR-binding peptide
  MOD_RES (1), (3), (35), (36): Xaa is C or S
XGXGEVVMEEYQKYVVKDYEDIYLMSIPSLETPVXXAK

SEQ ID NO: 17917 - protein, 37 aa, Artificial Sequence
  Non-cyclic GFR-binding peptide
  MOD_RES (31), (31): Xaa is C or S
RVVMNEYQKYIVNSSDDIYLVSIPSLKTPAXTPKTVH

SEQ ID NO: 17918 - protein, 34 aa, Artificial Sequence
  Non-cyclic GFR-binding peptide
  MOD_RES (2), (2): Xaa is C or S
GXEAVSMGEEYKFKTPVGMDDLYLVSIPELKTPV

SEQ ID NO: 17919 - protein, 35 aa, Artificial Sequence
  Non-cyclic GFR-binding peptide
  MOD_RES (1), (33), (34): Xaa is C or S
XAKVVMNEYQKYIVNNSSDIYLVSIPSLKTPAXXA

SEQ ID NO: 17920 - protein, 33 aa, Artificial Sequence
  Non-cyclic GFR-binding peptide
  MOD_RES (1), (1): Xaa is C or S
  MOD_RES (12), (13), (14), (15), (16): Xaa is A or G
  MOD_RES (17), (18), (19), (20): Xaa is A or G or is absent
XSKVIMEYKFKXXXXXXXXXLYLISIPELDQSV

SEQ ID NO: 17921 - protein, 38 aa, Artificial Sequence
  Non-cyclic GFR-binding peptide
  MOD_RES (2), (4), (35), (36): Xaa is C or S
SXKXSRVIMEYKFKVKPKRGVLYLISIPELAQPVXXPA

SEQ ID NO: 17922 - protein, 35 aa, Artificial Sequence
  Non-cyclic GFR-binding peptide
  MOD_RES (1), (33), (34): Xaa is C or S
XESVAMGEYQKYYTVVGKDIYLISIPSLKTPVXXA

SEQ ID NO: 17923 - protein, 35 aa, Artificial Sequence
  Non-cyclic GFR-binding peptide
  MOD_RES (31), (32): Xaa is C or S
SKVVMEYKFKVKPTRGVLYLISIPELDQPVXXPSA

SEQ ID NO: 17924 - protein, 37 aa, Artificial Sequence
  Non-cyclic GFR-binding peptide
  MOD_RES (34), (35): Xaa is C or S
  MOD_RES (12), (13), (14), (15), (16): Xaa is A or G
  MOD_RES (17), (18), (19), (20): Xaa is A or G or is absent
AKVVMNEYKFKXXXXXXXXXLYLVSIPELKTPAXXAK

SEQ ID NO: 17925 - protein, 42 aa, Artificial Sequence
  Non-cyclic GFR-binding peptide
  MOD_RES (2), (4), (38), (39): Xaa is C or S
  MOD_RES (16), (17), (18), (19), (20): Xaa is A or G
  MOD_RES (21), (22), (23), (24): Xaa is A or G or is absent
RXGXAEVVMDYHYKLXXXXXXXXXKYLISIPSLRAPVXXSAP

SEQ ID NO: 17926 - protein, 41 aa, Artificial Sequence
  Non-cyclic GFR-binding peptide
  MOD_RES (1), (3), (37), (38): Xaa is C or S
  MOD_RES (15), (16), (17), (18), (19): Xaa is A or G
  MOD_RES (20), (21), (22), (23): Xaa is A or G or is absent
XGXARVVMNEYQKYXXXXXXXXXIYLVSIPSLQTPAXXPKP

SEQ ID NO: 17927 - protein, 32 aa, Artificial Sequence
  Non-cyclic GFR-binding peptide
  MOD_RES (1), (1): Xaa is C or S
XAKVVMNEYQKYIVNNSSDIYLVSIPSLKTPA

SEQ ID NO: 17928 - protein, 34 aa, Artificial Sequence
  Non-cyclic GFR-binding peptide
  MOD_RES (31), (32): Xaa is C or S
EVVMDEYKFKVVKENEDLYLMSIPELETPVXXAK

SEQ ID NO: 17929 - protein, 32 aa, Artificial Sequence
  Non-cyclic GFR-binding peptide
  MOD_RES (32), (32): Xaa is C or S
AKVVMNEYQKYIVNNSSDIYLVSIPSLKTPAX

SEQ ID NO: 17930 - protein, 43 aa, Artificial Sequence
  Non-cyclic GFR-binding peptide
  MOD_RES (1), (3), (37), (38): Xaa is C or S
  MOD_RES (15), (16), (17), (18), (19): Xaa is A or G
  MOD_RES (20), (21), (22), (23): Xaa is A or G or is absent
XGXAEVVMDYHYKLXXXXXXXXXKYLISIPSLRAPVXXSAPAA

SEQ ID NO: 17931 - protein, 37 aa, Artificial Sequence
  Non-cyclic GFR-binding peptide
  MOD_RES (1), (3), (37): Xaa is C or S
  MOD_RES (15), (16), (17), (18), (19): Xaa is A or G
  MOD_RES (20), (21), (22), (23): Xaa is A or G or is absent
XGXGEVVMDEYQKYXXXXXXXXXIYLMSIPSLETPVX

SEQ ID NO: 17932 - protein, 40 aa, Artificial Sequence
  Non-cyclic GFR-binding peptide
  MOD_RES (1), (3), (37), (38): Xaa is C or S
  MOD_RES (15), (16), (17), (18), (19): Xaa is A or G
  MOD_RES (20), (21), (22), (23): Xaa is A or G or is absent
XGXAEVVMDEYKFKXXXXXXXXXLYLISIPELRAPVXXSA

SEQ ID NO: 17933 - protein, 37 aa, Artificial Sequence
  Non-cyclic GFR-binding peptide
  MOD_RES (1), (3), (34), (35): Xaa is C or S
XKXSKVVMEYQKYVKPTRGVIYLISIPSLDQPVXXPS

SEQ ID NO: 17934 - protein, 38 aa, Artificial Sequence
  Non-cyclic GFR-binding peptide
  MOD_RES (33), (34): Xaa is C or S
  MOD_RES (11), (12), (13), (14), (15): Xaa is A or G
  MOD_RES (16), (17), (18), (19): Xaa is A or G or is absent
KVVMNEYQKYXXXXXXXXXIYLVSIPSLKTPAXXAKPV

SEQ ID NO: 17935 - protein, 34 aa, Artificial Sequence
  Non-cyclic GFR-binding peptide
  MOD_RES (1), (1): Xaa is C or S
  MOD_RES (13), (14), (15), (16), (17): Xaa is A or G
  MOD_RES (18), (19), (20), (21): Xaa is A or G or is absent
XGEVVMEEYQKYXXXXXXXXXIYLMSIPSLETPV

SEQ ID NO: 17936 - protein, 36 aa, Artificial Sequence
  Non-cyclic GFR-binding peptide
  MOD_RES (32), (33): Xaa is C or S
GEVVMDEYQKYVVKENEDIYLMSIPSLETPVXXAKP

SEQ ID NO: 17937 - protein, 35 aa, Artificial Sequence
  Non-cyclic GFR-binding peptide
  MOD_RES (1), (35): Xaa is C or S
  MOD_RES (13), (14), (15), (16), (17): Xaa is A or G
  MOD_RES (18), (19), (20), (21): Xaa is A or G or is absent
XSRVVMNEYKFKXXXXXXXXXLYLVSIPELKTPAX

SEQ ID NO: 17938 - protein, 38 aa, Artificial Sequence
  Non-cyclic GFR-binding peptide
  MOD_RES (2), (36), (37): Xaa is C or S
  MOD_RES (14), (15), (16), (17), (18): Xaa is A or G
  MOD_RES (19), (20), (21), (22): Xaa is A or G or is absent
GXESVAMGEYQKYXXXXXXXXXIYLISIPSLKTPVXXA

SEQ ID NO: 17939 - protein, 35 aa, Artificial Sequence
  Non-cyclic GFR-binding peptide
  MOD_RES (32), (33): Xaa is C or S
AEVVMDYHYKLVVNNAADKYLISIPSLRAPVXXSA

SEQ ID NO: 17940 - protein, 39 aa, Artificial Sequence
  Non-cyclic GFR-binding peptide
  MOD_RES (1), (3), (35), (36): Xaa is C or S
XGXGEVVMEEYQKYVVKDYEDIYLMSIPSLETPVXXAKP

SEQ ID NO: 17941 - protein, 41 aa, Artificial Sequence
  Non-cyclic GFR-binding peptide
  MOD_RES (1), (3), (35), (36): Xaa is C or S
XGXAEVVMDRYKKLVVNNAADFYLISIANLRAPVXXSAPAA

SEQ ID NO: 17942 - protein, 43 aa, Artificial Sequence
  Non-cyclic GFR-binding peptide
  MOD_RES (1), (3), (37): Xaa is C or S
  MOD_RES (15), (16), (17), (18), (19): Xaa is A or G
  MOD_RES (20), (21), (22), (23): Xaa is A or G or is absent
XGXSRVVMNEYKFKXXXXXXXXXLYLVSIPELKTPAXTPKTVH

SEQ ID NO: 17943 - protein, 38 aa, Artificial Sequence
  Non-cyclic GFR-binding peptide
  MOD_RES (1), (3), (37), (38): Xaa is C or S
  MOD_RES (15), (16), (17), (18), (19): Xaa is A or G
  MOD_RES (20), (21), (22), (23): Xaa is A or G or is absent
XGXSRVVMNEYKFKXXXXXXXXXLYLVSIPELKTPAXX

SEQ ID NO: 17944 - protein, 37 aa, Artificial Sequence
  Non-cyclic GFR-binding peptide
  MOD_RES (34), (34): Xaa is C or S
  MOD_RES (12), (13), (14), (15), (16): Xaa is A or G
  MOD_RES (17), (18), (19), (20): Xaa is A or G or is absent
SRVVMNEYQKYXXXXXXXXXIYLVSIPSLKTPAXTPK

SEQ ID NO: 17945 - protein, 36 aa, Artificial Sequence
  Non-cyclic GFR-binding peptide
  MOD_RES (1), (3), (35), (36): Xaa is C or S
XGXARVVMNEYKFKIVNSSDDLYLVSIPELQTPAXX

SEQ ID NO: 17946 - protein, 40 aa, Artificial Sequence
  Non-cyclic GFR-binding peptide
  MOD_RES (34), (35): Xaa is C or S
  MOD_RES (12), (13), (14), (15), (16): Xaa is A or G
  MOD_RES (17), (18), (19), (20): Xaa is A or G or is absent
GEVVMEEYKFKXXXXXXXXXLYLMSIPELETPVXXAKPIS

SEQ ID NO: 17947 - protein, 42 aa, Artificial Sequence
  Non-cyclic GFR-binding peptide
  MOD_RES (2), (4), (38), (39): Xaa is C or S
  MOD_RES (16), (17), (18), (19), (20): Xaa is A or G
  MOD_RES (21), (22), (23), (24): Xaa is A or G or is absent
RXGXESVAMGYHYKLXXXXXXXXXKYLISIPSLKTPVXXAKS

SEQ ID NO: 17948 - protein, 42 aa, Artificial Sequence
  Non-cyclic GFR-binding peptide
  MOD_RES (1), (3), (37), (38): Xaa is C or S
  MOD_RES (15), (16), (17), (18), (19): Xaa is A or G
  MOD_RES (20), (21), (22), (23): Xaa is A or G or is absent
XGXAKVVMNEYKFKXXXXXXXXXLYLVSIPELKTPAXXAKPV

SEQ ID NO: 17949 - protein, 35 aa, Artificial Sequence
  Non-cyclic GFR-binding peptide
  MOD_RES (1), (35): Xaa is C or S
  MOD_RES (13), (14), (15), (16), (17): Xaa is A or G
  MOD_RES (18), (19), (20), (21): Xaa is A or G or is absent
XARVVMNEYQKYXXXXXXXXXIYLVSIPSLQTPAX

SEQ ID NO: 17950 - protein, 39 aa, Artificial Sequence
  Non-cyclic GFR-binding peptide
  MOD_RES (1), (3), (36), (37): Xaa is C or S
  MOD_RES (14), (15), (16), (17), (18): Xaa is A or G
  MOD_RES (19), (20), (21), (22): Xaa is A or G or is absent
XKXSRVIMEYQKYXXXXXXXXXIYLISIPSLAQPVXXPA

SEQ ID NO: 17951 - protein, 37 aa, Artificial Sequence
  Non-cyclic GFR-binding peptide
  MOD_RES (32), (33): Xaa is C or S
ESVAMGRYKKLYTVVGKDFYLISIANLKTPVXXAKSA

SEQ ID NO: 17952 - protein, 35 aa, Artificial Sequence
  Non-cyclic GFR-binding peptide
  MOD_RES (1), (3), (34), (35): Xaa is C or S
XKXSKVVMEYKFKVKPTRGVLYLISIPELDQPVXX

SEQ ID NO: 17953 - protein, 37 aa, Artificial Sequence
  Non-cyclic GFR-binding peptide
  MOD_RES (33), (34): Xaa is C or S
  MOD_RES (11), (12), (13), (14), (15): Xaa is A or G
  MOD_RES (16), (17), (18), (19): Xaa is A or G or is absent
EVVMDRYKKLXXXXXXXXXFYLISIANLRAPVXXSAP

SEQ ID NO: 17954 - protein, 40 aa, Artificial Sequence
  Non-cyclic GFR-binding peptide
  MOD_RES (1), (35), (36): Xaa is C or S
  MOD_RES (13), (14), (15), (16), (17): Xaa is A or G
  MOD_RES (18), (19), (20), (21): Xaa is A or G or is absent
XSRVVMNEYKFKXXXXXXXXXLYLVSIPELKTPAXXPKPV

SEQ ID NO: 17955 - protein, 37 aa, Artificial Sequence
  Non-cyclic GFR-binding peptide
  MOD_RES (2), (37): Xaa is C or S
  MOD_RES (15), (16), (17), (18), (19): Xaa is A or G
  MOD_RES (20), (21), (22), (23): Xaa is A or G or is absent
GXEAVSMGEEYKFKXXXXXXXXXLYLVSIPELKTPVX

SEQ ID NO: 17956 - protein, 33 aa, Artificial Sequence
  Non-cyclic GFR-binding peptide
  MOD_RES (31), (32): Xaa is C or S
EVVMDYHYKLVVNNAADKYLISIPSLRAPVXXS

SEQ ID NO: 17957 - protein, 30 aa, Artificial Sequence
  Non-cyclic GFR-binding peptide
KVVMNEYQKYIVNNSSDIYLVSIPSLKTPA

SEQ ID NO: 17958 - protein, 35 aa, Artificial Sequence
  Non-cyclic GFR-binding peptide
  MOD_RES (33), (34): Xaa is C or S
  MOD_RES (11), (12), (13), (14), (15): Xaa is A or G
  MOD_RES (16), (17), (18), (19): Xaa is A or G or is absent
SVAMGEYQKYXXXXXXXXXIYLISIPSLKTPVXXA

SEQ ID NO: 17959 - protein, 32 aa, Artificial Sequence
  Non-cyclic GFR-binding peptide
  MOD_RES (32), (32): Xaa is C or S
ESVAMGYHYKLYTVVGKDKYLISIPSLKTPVX

SEQ ID NO: 17960 - protein, 37 aa, Artificial Sequence
  Non-cyclic GFR-binding peptide
  MOD_RES (31), (32): Xaa is C or S
RVVMNEYQKYIVNSSDDIYLVSIPSLQTPAXXPKPVT

SEQ ID NO: 17961 - protein, 41 aa, Artificial Sequence
  Non-cyclic GFR-binding peptide
  MOD_RES (2), (35), (36): Xaa is C or S
  MOD_RES (13), (14), (15), (16), (17): Xaa is A or G
  MOD_RES (18), (19), (20), (21): Xaa is A or G or is absent
KXSKVVMEYKFKXXXXXXXXXLYLISIPELDQPVXXPSASA

SEQ ID NO: 17962 - protein, 39 aa, Artificial Sequence
  Non-cyclic GFR-binding peptide
  MOD_RES (33), (34): Xaa is C or S
  MOD_RES (11), (12), (13), (14), (15): Xaa is A or G
  MOD_RES (16), (17), (18), (19): Xaa is A or G or is absent
RVVMNEYQKYXXXXXXXXXIYLVSIPSLQTPAXXPKPVT

SEQ ID NO: 17963 - protein, 36 aa, Artificial Sequence
  Non-cyclic GFR-binding peptide
  MOD_RES (1), (35), (36): Xaa is C or S
  MOD_RES (13), (14), (15), (16), (17): Xaa is A or G
  MOD_RES (18), (19), (20), (21): Xaa is A or G or is absent
XAKVVMNEYKFKXXXXXXXXXLYLVSIPELKTPAXX

SEQ ID NO: 17964 - protein, 38 aa, Artificial Sequence
  Non-cyclic GFR-binding peptide
  MOD_RES (1), (33): Xaa is C or S
XSRVVMNEYKFKIVNSSDDLYLVSIPELKTPAXTPKTV

SEQ ID NO: 17965 - protein, 32 aa, Artificial Sequence
  Non-cyclic GFR-binding peptide
  MOD_RES (31), (32): Xaa is C or S
EVVMDEYKFKVVKENEDLYLMSIPELETPVXX

SEQ ID NO: 17966 - protein, 41 aa, Artificial Sequence
  Non-cyclic GFR-binding peptide
  MOD_RES (2), (4), (35), (36): Xaa is C or S
SXKXSKVIMEYQKYIKPTKGIIYLISIPSLDQSVXXPSASA

SEQ ID NO: 17967 - protein, 34 aa, Artificial Sequence
  Non-cyclic GFR-binding peptide
  MOD_RES (1), (33), (34): Xaa is C or S
XAEVVMDEYKFKVVNNAADLYLISIPELRAPVXX

SEQ ID NO: 17968 - protein, 37 aa, Artificial Sequence
  Non-cyclic GFR-binding peptide
  MOD_RES (2), (4), (36), (37): Xaa is C or S
RXGXESVAMGRYKKLYTVVGKDFYLISIANLKTPVXX

SEQ ID NO: 17969 - protein, 36 aa, Artificial Sequence
  Non-cyclic GFR-binding peptide
  MOD_RES (31), (31): Xaa is C or S
RVVMNEYKFKIVNSSDDLYLVSIPELKTPAXTPKTV

SEQ ID NO: 17970 - protein, 33 aa, Artificial Sequence
  Non-cyclic GFR-binding peptide
  MOD_RES (1), (33): Xaa is C or S
XGEVVMDEYQKYVVKENEDIYLMSIPSLETPVX

SEQ ID NO: 17971 - protein, 33 aa, Artificial Sequence
  Non-cyclic GFR-binding peptide
  MOD_RES (31), (32): Xaa is C or S
SRVIMEYQKYVKPKRGVIYLISIPSLAQPVXXP

SEQ ID NO: 17972 - protein, 39 aa, Artificial Sequence
  Non-cyclic GFR-binding peptide
  MOD_RES (2), (34), (35): Xaa is C or S
GXGEVVMDEYKFKVVKENEDLYLMSIPELETPVXXAKPI

SEQ ID NO: 17973 - protein, 38 aa, Artificial Sequence
  Non-cyclic GFR-binding peptide
  MOD_RES (1), (34), (35): Xaa is C or S
XEAVSMGEEYQKYTPVGMDDIYLVSIPSLKTPVXXAKG

SEQ ID NO: 17974 - protein, 42 aa, Artificial Sequence
  Non-cyclic GFR-binding peptide
  MOD_RES (2), (36), (37): Xaa is C or S
  MOD_RES (14), (15), (16), (17), (18): Xaa is A or G
  MOD_RES (19), (20), (21), (22): Xaa is A or G or is absent
GXGEVVMDEYQKYXXXXXXXXXIYLMSIPSLETPVXXAKPIK

SEQ ID NO: 17975 - protein, 38 aa, Artificial Sequence
  Non-cyclic GFR-binding peptide
  MOD_RES (1), (3), (38): Xaa is C or S
  MOD_RES (16), (17), (18), (19), (20): Xaa is A or G
  MOD_RES (21), (22), (23), (24): Xaa is A or G or is absent
XGXEAVSMGEEYKFKXXXXXXXXXLYLVSIPELKTPVX

SEQ ID NO: 17976 - protein, 41 aa, Artificial Sequence
  Non-cyclic GFR-binding peptide
  MOD_RES (1), (3), (35), (36): Xaa is C or S
XGXGEVVMDEYKFKVVKENEDLYLMSIPELETPVXXAKPIK

SEQ ID NO: 17977 - protein, 35 aa, Artificial Sequence
  Non-cyclic GFR-binding peptide
  MOD_RES (2), (34), (35): Xaa is C or S
GXESVAMGRYKKLYTVVGKDFYLISIANLKTPVXX

SEQ ID NO: 17978 - protein, 37 aa, Artificial Sequence
  Non-cyclic GFR-binding peptide
  MOD_RES (1), (3), (37): Xaa is C or S
  MOD_RES (15), (16), (17), (18), (19): Xaa is A or G
  MOD_RES (20), (21), (22), (23): Xaa is A or G or is absent
XGXAKVVMNEYKFKXXXXXXXXXLYLVSIPELKTPAX

SEQ ID NO: 17979 - protein, 37 aa, Artificial Sequence
  Non-cyclic GFR-binding peptide
  MOD_RES (2), (4), (36), (37): Xaa is C or S
HXGXAKVVMNEYKFKIVNNSSDLYLVSIPELKTPAXX

SEQ ID NO: 17980 - protein, 36 aa, Artificial Sequence
  Non-cyclic GFR-binding peptide
  MOD_RES (34), (35): Xaa is C or S
  MOD_RES (12), (13), (14), (15), (16): Xaa is A or G
  MOD_RES (17), (18), (19), (20): Xaa is A or G or is absent
GEVVMDEYQKYXXXXXXXXXIYLMSIPSLETPVXXA

SEQ ID NO: 17981 - protein, 33 aa, Artificial Sequence
  Non-cyclic GFR-binding peptide
  MOD_RES (2), (2): Xaa is C or S
GXSRVVMNEYQKYIVNSSDDIYLVSIPSLKTPA

SEQ ID NO: 17982 - protein, 32 aa, Artificial Sequence
  Non-cyclic GFR-binding peptide
  MOD_RES (1), (32): Xaa is C or S
XSKVIMEYQKYIKPTKGIIYLISIPSLDQSVX

SEQ ID NO: 17983 - protein, 43 aa, Artificial Sequence
  Non-cyclic GFR-binding peptide
  MOD_RES (1), (3), (37), (38): Xaa is C or S
  MOD_RES (15), (16), (17), (18), (19): Xaa is A or G
  MOD_RES (20), (21), (22), (23): Xaa is A or G or is absent
XGXGEVVMDEYQKYXXXXXXXXXIYLMSIPSLETPVXXAKPIK

SEQ ID NO: 17984 - protein, 34 aa, Artificial Sequence
  Non-cyclic GFR-binding peptide
  MOD_RES (2), (2): Xaa is C or S
  MOD_RES (13), (14), (15), (16), (17): Xaa is A or G
  MOD_RES (18), (19), (20), (21): Xaa is A or G or is absent
KXSKVIMEYKFKXXXXXXXXXLYLISIPELDQSV

SEQ ID NO: 17985 - protein, 34 aa, Artificial Sequence
  Non-cyclic GFR-binding peptide
  MOD_RES (2), (34): Xaa is C or S
GXGEVVMDEYQKYVVKENEDIYLMSIPSLETPVX

SEQ ID NO: 17986 - protein, 36 aa, Artificial Sequence
  Non-cyclic GFR-binding peptide
  MOD_RES (32), (33): Xaa is C or S
ARVVMNEYKFKIVNSSDDLYLVSIPELQTPAXXPKP

SEQ ID NO: 17987 - protein, 36 aa, Artificial Sequence
  Non-cyclic GFR-binding peptide
  MOD_RES (34), (35): Xaa is C or S
  MOD_RES (12), (13), (14), (15), (16): Xaa is A or G
  MOD_RES (17), (18), (19), (20): Xaa is A or G or is absent
ARVVMNEYQKYXXXXXXXXXIYLVSIPSLQTPAXXP

SEQ ID NO: 17988 - protein, 39 aa, Artificial Sequence
  Non-cyclic GFR-binding peptide
  MOD_RES (2), (4), (35), (36): Xaa is C or S
SXKXSKVIMEYQKYIKPTKGIIYLISIPSLDQSVXXPSA

SEQ ID NO: 17989 - protein, 37 aa, Artificial Sequence
  Non-cyclic GFR-binding peptide
  MOD_RES (1), (3), (37): Xaa is C or S
  MOD_RES (15), (16), (17), (18), (19): Xaa is A or G
  MOD_RES (20), (21), (22), (23): Xaa is A or G or is absent
XGXGEVVMDEYKFKXXXXXXXXXLYLMSIPELETPVX

SEQ ID NO: 17990 - protein, 39 aa, Artificial Sequence
  Non-cyclic GFR-binding peptide
  MOD_RES (1), (3), (35), (36): Xaa is C or S
XGXSRVVMNEYKFKIVNSSDDLYLVSIPELKTPAXXPKP

SEQ ID NO: 17991 - protein, 38 aa, Artificial Sequence
  Non-cyclic GFR-binding peptide
  MOD_RES (1), (33), (34): Xaa is C or S
XAKVVMNEYKFKIVNNSSDLYLVSIPELKTPAXXAKPV

SEQ ID NO: 17992 - protein, 41 aa, Artificial Sequence
  Non-cyclic GFR-binding peptide
  MOD_RES (1), (3), (37), (38): Xaa is C or S
  MOD_RES (15), (16), (17), (18), (19): Xaa is A or G
  MOD_RES (20), (21), (22), (23): Xaa is A or G or is absent
XGXARVVMNEYKFKXXXXXXXXXLYLVSIPELQTPAXXPKP

SEQ ID NO: 17993 - protein, 36 aa, Artificial Sequence
  Non-cyclic GFR-binding peptide
  MOD_RES (1), (35), (36): Xaa is C or S
  MOD_RES (13), (14), (15), (16), (17): Xaa is A or G
  MOD_RES (18), (19), (20), (21): Xaa is A or G or is absent
XGEVVMDEYQKYXXXXXXXXXIYLMSIPSLETPVXX

SEQ ID NO: 17994 - protein, 37 aa, Artificial Sequence
  Non-cyclic GFR-binding peptide
  MOD_RES (33), (34): Xaa is C or S
  MOD_RES (11), (12), (13), (14), (15): Xaa is A or G
  MOD_RES (16), (17), (18), (19): Xaa is A or G or is absent
RVVMNEYQKYXXXXXXXXXIYLVSIPSLKTPAXXPKP

SEQ ID NO: 17995 - protein, 41 aa, Artificial Sequence
  Non-cyclic GFR-binding peptide
  MOD_RES (1), (35), (36): Xaa is C or S
  MOD_RES (13), (14), (15), (16), (17): Xaa is A or G
  MOD_RES (18), (19), (20), (21): Xaa is A or G or is absent
XAEVVMDYHYKLXXXXXXXXXKYLISIPSLRAPVXXSAPAA

SEQ ID NO: 17996 - protein, 38 aa, Artificial Sequence
  Non-cyclic GFR-binding peptide
  MOD_RES (1), (35), (36): Xaa is C or S
  MOD_RES (13), (14), (15), (16), (17): Xaa is A or G
  MOD_RES (18), (19), (20), (21): Xaa is A or G or is absent
XAEVVMDRYKKLXXXXXXXXXFYLISIANLRAPVXXSA

SEQ ID NO: 17997 - protein, 42 aa, Artificial Sequence
  Non-cyclic GFR-binding peptide
  MOD_RES (1), (3), (36), (37): Xaa is C or S
  MOD_RES (14), (15), (16), (17), (18): Xaa is A or G
  MOD_RES (19), (20), (21), (22): Xaa is A or G or is absent
XKXSRVIMEYQKYXXXXXXXXXIYLISIPSLAQPVXXPAASA

SEQ ID NO: 17998 - protein, 39 aa, Artificial Sequence
  Non-cyclic GFR-binding peptide
  MOD_RES (2), (4), (36): Xaa is C or S
HXGXSRVVMNEYKFKIVNSSDDLYLVSIPELKTPAXTPK

SEQ ID NO: 17999 - protein, 39 aa, Artificial Sequence
  Non-cyclic GFR-binding peptide
  MOD_RES (1), (35): Xaa is C or S
  MOD_RES (13), (14), (15), (16), (17): Xaa is A or G
  MOD_RES (18), (19), (20), (21): Xaa is A or G or is absent
XSRVVMNEYKFKXXXXXXXXXLYLVSIPELKTPAXTPKT

SEQ ID NO: 18000 - protein, 40 aa, Artificial Sequence
  Non-cyclic GFR-binding peptide
  MOD_RES (2), (4), (38), (39): Xaa is C or S
  MOD_RES (16), (17), (18), (19), (20): Xaa is A or G
  MOD_RES (21), (22), (23), (24): Xaa is A or G or is absent
HXGXAKVVMNEYKFKXXXXXXXXXLYLVSIPELKTPAXXA

SEQ ID NO: 18001 - protein, 34 aa, Artificial Sequence
  Non-cyclic GFR-binding peptide
  MOD_RES (34), (34): Xaa is C or S
  MOD_RES (12), (13), (14), (15), (16): Xaa is A or G
  MOD_RES (17), (18), (19), (20): Xaa is A or G or is absent
GEVVMEEYQKYXXXXXXXXXIYLMSIPSLETPVX

SEQ ID NO: 18002 - protein, 35 aa, Artificial Sequence
  Non-cyclic GFR-binding peptide
  MOD_RES (33), (33): Xaa is C or S
  MOD_RES (11), (12), (13), (14), (15): Xaa is A or G
  MOD_RES (16), (17), (18), (19): Xaa is A or G or is absent
RVVMNEYKFKXXXXXXXXXLYLVSIPELKTPAXTP

SEQ ID NO: 18003 - protein, 37 aa, Artificial Sequence
  Non-cyclic GFR-binding peptide
  MOD_RES (1), (3), (35), (36): Xaa is C or S
XGXAEVVMDRYKKLVVNNAADFYLISIANLRAPVXXS

SEQ ID NO: 18004 - protein, 40 aa, Artificial Sequence
  Non-cyclic GFR-binding peptide
  MOD_RES (1), (3), (37), (38): Xaa is C or S
  MOD_RES (15), (16), (17), (18), (19): Xaa is A or G
  MOD_RES (20), (21), (22), (23): Xaa is A or G or is absent
XGXGEVVMDEYQKYXXXXXXXXXIYLMSIPSLETPVXXAK

SEQ ID NO: 18005 - protein, 34 aa, Artificial Sequence
  Non-cyclic GFR-binding peptide
  MOD_RES (1), (34): Xaa is C or S
XEAVSMGEEYQKYTPVGMDDIYLVSIPSLKTPVX

SEQ ID NO: 18006 - protein, 33 aa, Artificial Sequence
  Non-cyclic GFR-binding peptide
  MOD_RES (2), (2): Xaa is C or S
GXAEVVMDRYKKLVVNNAADFYLISIANLRAPV

SEQ ID NO: 18007 - protein, 33 aa, Artificial Sequence
  Non-cyclic GFR-binding peptide
  MOD_RES (31), (32): Xaa is C or S
EVVMDEYQKYVVKENEDIYLMSIPSLETPVXXA

SEQ ID NO: 18008 - protein, 35 aa, Artificial Sequence
  Non-cyclic GFR-binding peptide
  MOD_RES (1), (3): Xaa is C or S
XGXEAVSMGEEYKFKTPVGMDDLYLVSIPELKTPV

SEQ ID NO: 18009 - protein, 32 aa, Artificial Sequence
  Non-cyclic GFR-binding peptide
  MOD_RES (1), (1): Xaa is C or S
XESVAMGEYQKYYTVVGKDIYLISIPSLKTPV

SEQ ID NO: 18010 - protein, 38 aa, Artificial Sequence
  Non-cyclic GFR-binding peptide
  MOD_RES (1), (33), (34): Xaa is C or S
XAKVVMNEYQKYIVNNSSDIYLVSIPSLKTPAXXAKPV

SEQ ID NO: 18011 - protein, 35 aa, Artificial Sequence
  Non-cyclic GFR-binding peptide
  MOD_RES (2), (35): Xaa is C or S
  MOD_RES (13), (14), (15), (16), (17): Xaa is A or G
  MOD_RES (18), (19), (20), (21): Xaa is A or G or is absent
KXSRVIMEYQKYXXXXXXXXXIYLISIPSLAQPVX

SEQ ID NO: 18012 - protein, 36 aa, Artificial Sequence
  Non-cyclic GFR-binding peptide
  MOD_RES (1), (34), (35): Xaa is C or S
  MOD_RES (12), (13), (14), (15), (16): Xaa is A or G
  MOD_RES (17), (18), (19), (20): Xaa is A or G or is absent
XSRVIMEYQKYXXXXXXXXXIYLISIPSLAQPVXXP

SEQ ID NO: 18013 - protein, 34 aa, Artificial Sequence
  Non-cyclic GFR-binding peptide
  MOD_RES (33), (34): Xaa is C or S
  MOD_RES (11), (12), (13), (14), (15): Xaa is A or G
  MOD_RES (16), (17), (18), (19): Xaa is A or G or is absent
SKVIMEYKFKXXXXXXXXXLYLISIPELDQSVXX

SEQ ID NO: 18014 - protein, 38 aa, Artificial Sequence
  Non-cyclic GFR-binding peptide
  MOD_RES (2), (36), (37): Xaa is C or S
  MOD_RES (14), (15), (16), (17), (18): Xaa is A or G
  MOD_RES (19), (20), (21), (22): Xaa is A or G or is absent
GXSRVVMNEYKFKXXXXXXXXXLYLVSIPELKTPAXXP

SEQ ID NO: 18015 - protein, 40 aa, Artificial Sequence
  Non-cyclic GFR-binding peptide
  MOD_RES (1), (3), (37), (38): Xaa is C or S
  MOD_RES (15), (16), (17), (18), (19): Xaa is A or G
  MOD_RES (20), (21), (22), (23): Xaa is A or G or is absent
XGXAKVVMNEYQKYXXXXXXXXXIYLVSIPSLKTPAXXAK

SEQ ID NO: 18016 - protein, 39 aa, Artificial Sequence
  Non-cyclic GFR-binding peptide
  MOD_RES (1), (3), (34), (35): Xaa is C or S
XKXSRVIMEYKFKVKPKRGVLYLISIPELAQPVXXPAAS

SEQ ID NO: 18017 - protein, 33 aa, Artificial Sequence
  Non-cyclic GFR-binding peptide
  MOD_RES (32), (32): Xaa is C or S
SRVVMNEYQKYIVNSSDDIYLVSIPSLKTPAXT

SEQ ID NO: 18018 - protein, 33 aa, Artificial Sequence
  Non-cyclic GFR-binding peptide
  MOD_RES (33), (33): Xaa is C or S
  MOD_RES (11), (12), (13), (14), (15): Xaa is A or G
  MOD_RES (16), (17), (18), (19): Xaa is A or G or is absent
RVVMNEYQKYXXXXXXXXXIYLVSIPSLQTPAX

SEQ ID NO: 18019 - protein, 32 aa, Artificial Sequence
  Non-cyclic GFR-binding peptide
  MOD_RES (1), (1): Xaa is C or S
XAKVVMNEYKFKIVNNSSDLYLVSIPELKTPA

SEQ ID NO: 18020 - protein, 38 aa, Artificial Sequence
  Non-cyclic GFR-binding peptide
  MOD_RES (2), (4), (38): Xaa is C or S
  MOD_RES (16), (17), (18), (19), (20): Xaa is A or G
  MOD_RES (21), (22), (23), (24): Xaa is A or G or is absent
RXGXESVAMGEYQKYXXXXXXXXXIYLISIPSLKTPVX

SEQ ID NO: 18021 - protein, 39 aa, Artificial Sequence
  Non-cyclic GFR-binding peptide
  MOD_RES (1), (3), (35), (36): Xaa is C or S
XGXARVVMNEYKFKIVNSSDDLYLVSIPELQTPAXXPKP

SEQ ID NO: 18022 - protein, 35 aa, Artificial Sequence
  Non-cyclic GFR-binding peptide
  MOD_RES (31), (32): Xaa is C or S
SVAMGYHYKLYTVVGKDKYLISIPSLKTPVXXAKS

SEQ ID NO: 18023 - protein, 37 aa, Artificial Sequence
  Non-cyclic GFR-binding peptide
  MOD_RES (2), (34), (35): Xaa is C or S
GXAKVVMNEYKFKIVNNSSDLYLVSIPELKTPAXXAK

SEQ ID NO: 18024 - protein, 38 aa, Artificial Sequence
  Non-cyclic GFR-binding peptide
  MOD_RES (1), (3), (35), (36): Xaa is C or S
XGXARVVMNEYKFKIVNSSDDLYLVSIPELQTPAXXPK

SEQ ID NO: 18025 - protein, 40 aa, Artificial Sequence
  Non-cyclic GFR-binding peptide
  MOD_RES (2), (34), (35): Xaa is C or S
GXGEVVMEEYKFKVVKDYEDLYLMSIPELETPVXXAKPIS

SEQ ID NO: 18026 - protein, 36 aa, Artificial Sequence
  Non-cyclic GFR-binding peptide
  MOD_RES (1), (3), (34), (35): Xaa is C or S
XKXSKVIMEYKFKIKPTKGILYLISIPELDQSVXXP

SEQ ID NO: 18027 - protein, 34 aa, Artificial Sequence
  Non-cyclic GFR-binding peptide
  MOD_RES (34), (34): Xaa is C or S
  MOD_RES (12), (13), (14), (15), (16): Xaa is A or G
  MOD_RES (17), (18), (19), (20): Xaa is A or G or is absent
ARVVMNEYKFKXXXXXXXXXLYLVSIPELQTPAX

SEQ ID NO: 18028 - protein, 36 aa, Artificial Sequence
  Non-cyclic GFR-binding peptide
  MOD_RES (2), (34), (35): Xaa is C or S
GXARVVMNEYKFKIVNSSDDLYLVSIPELQTPAXXP

SEQ ID NO: 18029 - protein, 33 aa, Artificial Sequence
  Non-cyclic GFR-binding peptide
  MOD_RES (32), (33): Xaa is C or S
AKVVMNEYQKYIVNNSSDIYLVSIPSLKTPAXX

SEQ ID NO: 18030 - protein, 39 aa, Artificial Sequence
  Non-cyclic GFR-binding peptide
  MOD_RES (2), (4), (38), (39): Xaa is C or S
  MOD_RES (16), (17), (18), (19), (20): Xaa is A or G
  MOD_RES (21), (22), (23), (24): Xaa is A or G or is absent
HXGXAKVVMNEYKFKXXXXXXXXXLYLVSIPELKTPAXX

SEQ ID NO: 18031 - protein, 36 aa, Artificial Sequence
  Non-cyclic GFR-binding peptide
  MOD_RES (2), (33), (34): Xaa is C or S
KXSKVIMEYQKYIKPTKGIIYLISIPSLDQSVXXPS

SEQ ID NO: 18032 - protein, 37 aa, Artificial Sequence
  Non-cyclic GFR-binding peptide
  MOD_RES (2), (4): Xaa is C or S
  MOD_RES (16), (17), (18), (19), (20): Xaa is A or G
  MOD_RES (21), (22), (23), (24): Xaa is A or G or is absent
HXGXARVVMNEYKFKXXXXXXXXXLYLVSIPELQTPA

SEQ ID NO: 18033 - protein, 37 aa, Artificial Sequence
  Non-cyclic GFR-binding peptide
  MOD_RES (2), (36), (37): Xaa is C or S
  MOD_RES (14), (15), (16), (17), (18): Xaa is A or G
  MOD_RES (19), (20), (21), (22): Xaa is A or G or is absent
GXAEVVMDYHYKLXXXXXXXXXKYLISIPSLRAPVXX

SEQ ID NO: 18034 - protein, 35 aa, Artificial Sequence
  Non-cyclic GFR-binding peptide
  MOD_RES (2), (35): Xaa is C or S
GXEAVSMGEEYKFKTPVGMDDLYLVSIPELKTPVX

SEQ ID NO: 18035 - protein, 35 aa, Artificial Sequence
  Non-cyclic GFR-binding peptide
  MOD_RES (2), (4), (35): Xaa is C or S
SXKXSKVIMEYQKYIKPTKGIIYLISIPSLDQSVX

SEQ ID NO: 18036 - protein, 43 aa, Artificial Sequence
  Non-cyclic GFR-binding peptide
  MOD_RES (1), (3), (37): Xaa is C or S
  MOD_RES (15), (16), (17), (18), (19): Xaa is A or G
  MOD_RES (20), (21), (22), (23): Xaa is A or G or is absent
XGXSRVVMNEYQKYXXXXXXXXXIYLVSIPSLKTPAXTPKTVH

SEQ ID NO: 18037 - protein, 36 aa, Artificial Sequence
  Non-cyclic GFR-binding peptide
  MOD_RES (32), (33): Xaa is C or S
GEVVMEEYKFKVVKDYEDLYLMSIPELETPVXXAKP

SEQ ID NO: 18038 - protein, 37 aa, Artificial Sequence
  Non-cyclic GFR-binding peptide
  MOD_RES (2), (34): Xaa is C or S
GXSRVVMNEYQKYIVNSSDDIYLVSIPSLKTPAXTPK

SEQ ID NO: 18039 - protein, 32 aa, Artificial Sequence
  Non-cyclic GFR-binding peptide
  MOD_RES (31), (32): Xaa is C or S
SKVIMEYQKYIKPTKGIIYLISIPSLDQSVXX

SEQ ID NO: 18040 - protein, 36 aa, Artificial Sequence
  Non-cyclic GFR-binding peptide
  MOD_RES (33), (34): Xaa is C or S
  MOD_RES (11), (12), (13), (14), (15): Xaa is A or G
  MOD_RES (16), (17), (18), (19): Xaa is A or G or is absent
RVVMNEYKFKXXXXXXXXXLYLVSIPELKTPAXXPK

SEQ ID NO: 18041 - protein, 36 aa, Artificial Sequence
  Non-cyclic GFR-binding peptide
  MOD_RES (2), (34), (35): Xaa is C or S
GXSRVVMNEYKFKIVNSSDDLYLVSIPELKTPAXXP

SEQ ID NO: 18042 - protein, 36 aa, Artificial Sequence
  Non-cyclic GFR-binding peptide
  MOD_RES (2), (34), (35): Xaa is C or S
GXGEVVMEEYQKYVVKDYEDIYLMSIPSLETPVXXA

SEQ ID NO: 18043 - protein, 41 aa, Artificial Sequence
  Non-cyclic GFR-binding peptide
  MOD_RES (35), (36): Xaa is C or S
  MOD_RES (13), (14), (15), (16), (17): Xaa is A or G
  MOD_RES (18), (19), (20), (21): Xaa is A or G or is absent
EAVSMGEEYQKYXXXXXXXXXIYLVSIPSLKTPVXXAKGVK

SEQ ID NO: 18044 - protein, 36 aa, Artificial Sequence
  Non-cyclic GFR-binding peptide
  MOD_RES (2), (2): Xaa is C or S
  MOD_RES (15), (16), (17), (18), (19): Xaa is A or G
  MOD_RES (20), (21), (22), (23): Xaa is A or G or is absent
GXEAVSMGEEYQKYXXXXXXXXXIYLVSIPSLKTPV

SEQ ID NO: 18045 - protein, 36 aa, Artificial Sequence
  Non-cyclic GFR-binding peptide
  MOD_RES (1), (33): Xaa is C or S
XSRVVMNEYQKYIVNSSDDIYLVSIPSLKTPAXTPK

SEQ ID NO: 18046 - protein, 39 aa, Artificial Sequence
  Non-cyclic GFR-binding peptide
  MOD_RES (1), (3), (35), (36): Xaa is C or S
XGXGEVVMDEYQKYVVKENEDIYLMSIPSLETPVXXAKP

SEQ ID NO: 18047 - protein, 39 aa, Artificial Sequence
  Non-cyclic GFR-binding peptide
  MOD_RES (1), (33), (34): Xaa is C or S
XAKVVMNEYQKYIVNNSSDIYLVSIPSLKTPAXXAKPVA

SEQ ID NO: 18048 - protein, 33 aa, Artificial Sequence
  Non-cyclic GFR-binding peptide
  MOD_RES (32), (33): Xaa is C or S
AEVVMDRYKKLVVNNAADFYLISIANLRAPVXX

SEQ ID NO: 18049 - protein, 35 aa, Artificial Sequence
  Non-cyclic GFR-binding peptide
  MOD_RES (34), (35): Xaa is C or S
  MOD_RES (12), (13), (14), (15), (16): Xaa is A or G
  MOD_RES (17), (18), (19), (20): Xaa is A or G or is absent
ARVVMNEYKFKXXXXXXXXXLYLVSIPELQTPAXX

SEQ ID NO: 18050 - protein, 39 aa, Artificial Sequence
  Non-cyclic GFR-binding peptide
  MOD_RES (2), (34), (35): Xaa is C or S
GXESVAMGYHYKLYTVVGKDKYLISIPSLKTPVXXAKSA

SEQ ID NO: 18051 - protein, 42 aa, Artificial Sequence
  Non-cyclic GFR-binding peptide
  MOD_RES (1), (3), (36), (37): Xaa is C or S
  MOD_RES (14), (15), (16), (17), (18): Xaa is A or G
  MOD_RES (19), (20), (21), (22): Xaa is A or G or is absent
XKXSKVIMEYQKYXXXXXXXXXIYLISIPSLDQSVXXPSASA

SEQ ID NO: 18052 - protein, 38 aa, Artificial Sequence
  Non-cyclic GFR-binding peptide
  MOD_RES (33), (33): Xaa is C or S
  MOD_RES (11), (12), (13), (14), (15): Xaa is A or G
  MOD_RES (16), (17), (18), (19): Xaa is A or G or is absent
RVVMNEYKFKXXXXXXXXXLYLVSIPELKTPAXTPKTV

SEQ ID NO: 18053 - protein, 37 aa, Artificial Sequence
  Non-cyclic GFR-binding peptide
  MOD_RES (2), (4), (36), (37): Xaa is C or S
RXGXESVAMGYHYKLYTVVGKDKYLISIPSLKTPVXX

SEQ ID NO: 18054 - protein, 40 aa, Artificial Sequence
  Non-cyclic GFR-binding peptide
  MOD_RES (2), (34): Xaa is C or S
GXSRVVMNEYKFKIVNSSDDLYLVSIPELKTPAXTPKTVH

SEQ ID NO: 18055 - protein, 35 aa, Artificial Sequence
  Non-cyclic GFR-binding peptide
  MOD_RES (34), (34): Xaa is C or S
  MOD_RES (12), (13), (14), (15), (16): Xaa is A or G
  MOD_RES (17), (18), (19), (20): Xaa is A or G or is absent
SRVVMNEYQKYXXXXXXXXXIYLVSIPSLKTPAXT

SEQ ID NO: 18056 - protein, 35 aa, Artificial Sequence
  Non-cyclic GFR-binding peptide
  MOD_RES (1), (3): Xaa is C or S
XGXEAVSMGEEYQKYTPVGMDDIYLVSIPSLKTPV

SEQ ID NO: 18057 - protein, 38 aa, Artificial Sequence
  Non-cyclic GFR-binding peptide
  MOD_RES (33), (34): Xaa is C or S
  MOD_RES (11), (12), (13), (14), (15): Xaa is A or G
  MOD_RES (16), (17), (18), (19): Xaa is A or G or is absent
SRVIMEYKFKXXXXXXXXXLYLISIPELAQPVXXPAAS

SEQ ID NO: 18058 - protein, 39 aa, Artificial Sequence
  Non-cyclic GFR-binding peptide
  MOD_RES (1), (33), (34): Xaa is C or S
XSRVVMNEYQKYIVNSSDDIYLVSIPSLKTPAXXPKPVY

SEQ ID NO: 18059 - protein, 36 aa, Artificial Sequence
  Non-cyclic GFR-binding peptide
  MOD_RES (2), (34), (35): Xaa is C or S
GXAKVVMNEYQKYIVNNSSDIYLVSIPSLKTPAXXA

SEQ ID NO: 18060 - protein, 31 aa, Artificial Sequence
  Non-cyclic GFR-binding peptide
  MOD_RES (31), (31): Xaa is C or S
EVVMDEYKFKVVNNAADLYLISIPELRAPVX

SEQ ID NO: 18061 - protein, 36 aa, Artificial Sequence
  Non-cyclic GFR-binding peptide
  MOD_RES (34), (35): Xaa is C or S
  MOD_RES (12), (13), (14), (15), (16): Xaa is A or G
  MOD_RES (17), (18), (19), (20): Xaa is A or G or is absent
AEVVMDEYKFKXXXXXXXXXLYLISIPELRAPVXXS

SEQ ID NO: 18062 - protein, 40 aa, Artificial Sequence
  Non-cyclic GFR-binding peptide
  MOD_RES (1), (34), (35): Xaa is C or S
  MOD_RES (12), (13), (14), (15), (16): Xaa is A or G
  MOD_RES (17), (18), (19), (20): Xaa is A or G or is absent
XSKVIMEYQKYXXXXXXXXXIYLISIPSLDQSVXXPSASA

SEQ ID NO: 18063 - protein, 34 aa, Artificial Sequence
  Non-cyclic GFR-binding peptide
  MOD_RES (1), (34): Xaa is C or S
  MOD_RES (12), (13), (14), (15), (16): Xaa is A or G
  MOD_RES (17), (18), (19), (20): Xaa is A or G or is absent
XSKVVMEYQKYXXXXXXXXXIYLISIPSLDQPVX

SEQ ID NO: 18064 - protein, 41 aa, Artificial Sequence
  Non-cyclic GFR-binding peptide
  MOD_RES (1), (35), (36): Xaa is C or S
  MOD_RES (13), (14), (15), (16), (17): Xaa is A or G
  MOD_RES (18), (19), (20), (21): Xaa is A or G or is absent
XESVAMGYHYKLXXXXXXXXXKYLISIPSLKTPVXXAKSAK

SEQ ID NO: 18065 - protein, 40 aa, Artificial Sequence
  Non-cyclic GFR-binding peptide
  MOD_RES (1), (3), (35), (36): Xaa is C or S
XGXARVVMNEYKFKIVNSSDDLYLVSIPELQTPAXXPKPV

SEQ ID NO: 18066 - protein, 34 aa, Artificial Sequence
  Non-cyclic GFR-binding peptide
  MOD_RES (33), (34): Xaa is C or S
  MOD_RES (11), (12), (13), (14), (15): Xaa is A or G
  MOD_RES (16), (17), (18), (19): Xaa is A or G or is absent
EVVMEEYKFKXXXXXXXXXLYLMSIPELETPVXX

SEQ ID NO: 18067 - protein, 35 aa, Artificial Sequence
  Non-cyclic GFR-binding peptide
  MOD_RES (1), (3), (35): Xaa is C or S
XGXARVVMNEYQKYIVNSSDDIYLVSIPSLQTPAX

SEQ ID NO: 18068 - protein, 34 aa, Artificial Sequence
  Non-cyclic GFR-binding peptide
  MOD_RES (34), (34): Xaa is C or S
  MOD_RES (12), (13), (14), (15), (16): Xaa is A or G
  MOD_RES (17), (18), (19), (20): Xaa is A or G or is absent
GEVVMDEYKFKXXXXXXXXXLYLMSIPELETPVX

SEQ ID NO: 18069 - protein, 41 aa, Artificial Sequence
  Non-cyclic GFR-binding peptide
  MOD_RES (2), (4), (38), (39): Xaa is C or S
  MOD_RES (16), (17), (18), (19), (20): Xaa is A or G
  MOD_RES (21), (22), (23), (24): Xaa is A or G or is absent
HXGXAKVVMNEYQKYXXXXXXXXXIYLVSIPSLKTPAXXAK

SEQ ID NO: 18070 - protein, 40 aa, Artificial Sequence
  Non-cyclic GFR-binding peptide
  MOD_RES (1), (36), (37): Xaa is C or S
  MOD_RES (14), (15), (16), (17), (18): Xaa is A or G
  MOD_RES (19), (20), (21), (22): Xaa is A or G or is absent
XEAVSMGEEYKFKXXXXXXXXXLYLVSIPELKTPVXXAKG

SEQ ID NO: 18071 - protein, 32 aa, Artificial Sequence
  Non-cyclic GFR-binding peptide
  MOD_RES (31), (32): Xaa is C or S
EVVMDEYKFKVVNNAADLYLISIPELRAPVXX

SEQ ID NO: 18072 - protein, 35 aa, Artificial Sequence
  Non-cyclic GFR-binding peptide
  MOD_RES (2), (4): Xaa is C or S
RXGXESVAMGEYQKYYTVVGKDIYLISIPSLKTPV

SEQ ID NO: 18073 - protein, 39 aa, Artificial Sequence
  Non-cyclic GFR-binding peptide
  MOD_RES (1), (3), (37), (38): Xaa is C or S
  MOD_RES (15), (16), (17), (18), (19): Xaa is A or G
  MOD_RES (20), (21), (22), (23): Xaa is A or G or is absent
XGXSRVVMNEYKFKXXXXXXXXXLYLVSIPELKTPAXXP

SEQ ID NO: 18074 - protein, 38 aa, Artificial Sequence
  Non-cyclic GFR-binding peptide
  MOD_RES (1), (3), (36), (37): Xaa is C or S
  MOD_RES (14), (15), (16), (17), (18): Xaa is A or G
  MOD_RES (19), (20), (21), (22): Xaa is A or G or is absent
XKXSRVIMEYKFKXXXXXXXXXLYLISIPELAQPVXXP

SEQ ID NO: 18075 - protein, 36 aa, Artificial Sequence
  Non-cyclic GFR-binding peptide
  MOD_RES (33), (34): Xaa is C or S
  MOD_RES (11), (12), (13), (14), (15): Xaa is A or G
  MOD_RES (16), (17), (18), (19): Xaa is A or G or is absent
EVVMDEYKFKXXXXXXXXXLYLMSIPELETPVXXAK

SEQ ID NO: 18076 - protein, 38 aa, Artificial Sequence
  Non-cyclic GFR-binding peptide
  MOD_RES (2), (4), (36), (37): Xaa is C or S
RXGXESVAMGRYKKLYTVVGKDFYLISIANLKTPVXXA

SEQ ID NO: 18077 - protein, 37 aa, Artificial Sequence
  Non-cyclic GFR-binding peptide
  MOD_RES (2), (4), (35), (36): Xaa is C or S
SXKXSRVIMEYKFKVKPKRGVLYLISIPELAQPVXXP

SEQ ID NO: 18078 - protein, 39 aa, Artificial Sequence
  Non-cyclic GFR-binding peptide
  MOD_RES (2), (4), (36), (37): Xaa is C or S
RXGXAEVVMDEYKFKVVNNAADLYLISIPELRAPVXXSA

SEQ ID NO: 18079 - protein, 34 aa, Artificial Sequence
  Non-cyclic GFR-binding peptide
  MOD_RES (33), (34): Xaa is C or S
  MOD_RES (11), (12), (13), (14), (15): Xaa is A or G
  MOD_RES (16), (17), (18), (19): Xaa is A or G or is absent
SRVIMEYKFKXXXXXXXXXLYLISIPELAQPVXX

SEQ ID NO: 18080 - protein, 35 aa, Artificial Sequence
  Non-cyclic GFR-binding peptide
  MOD_RES (2), (2): Xaa is C or S
  MOD_RES (14), (15), (16), (17), (18): Xaa is A or G
  MOD_RES (19), (20), (21), (22): Xaa is A or G or is absent
GXESVAMGYHYKLXXXXXXXXXKYLISIPSLKTPV

SEQ ID NO: 18081 - protein, 39 aa, Artificial Sequence
  Non-cyclic GFR-binding peptide
  MOD_RES (1), (33), (34): Xaa is C or S
XAEVVMDEYKFKVVNNAADLYLISIPELRAPVXXSAPAA

SEQ ID NO: 18082 - protein, 31 aa, Artificial Sequence
  Non-cyclic GFR-binding peptide
  MOD_RES (1), (1): Xaa is C or S
XSKVVMEYQKYVKPTRGVIYLISIPSLDQPV

SEQ ID NO: 18083 - protein, 45 aa, Artificial Sequence
  Non-cyclic GFR-binding peptide
  MOD_RES (2), (4), (39), (40): Xaa is C or S
  MOD_RES (17), (18), (19), (20), (21): Xaa is A or G
  MOD_RES (22), (23), (24), (25): Xaa is A or G or is absent
RXGXEAVSMGEEYKFKXXXXXXXXXLYLVSIPELKTPVXXAKGVK

SEQ ID NO: 18084 - protein, 32 aa, Artificial Sequence
  Non-cyclic GFR-binding peptide
  MOD_RES (31), (32): Xaa is C or S
SKVVMEYQKYVKPTRGVIYLISIPSLDQPVXX

SEQ ID NO: 18085 - protein, 35 aa, Artificial Sequence
  Non-cyclic GFR-binding peptide
  MOD_RES (34), (35): Xaa is C or S
  MOD_RES (12), (13), (14), (15), (16): Xaa is A or G
  MOD_RES (17), (18), (19), (20): Xaa is A or G or is absent
GEVVMEEYQKYXXXXXXXXXIYLMSIPSLETPVXX

SEQ ID NO: 18086 - protein, 43 aa, Artificial Sequence
  Non-cyclic GFR-binding peptide
  MOD_RES (2), (4), (37), (38): Xaa is C or S
  MOD_RES (15), (16), (17), (18), (19): Xaa is A or G
  MOD_RES (20), (21), (22), (23): Xaa is A or G or is absent
SXKXSKVIMEYQKYXXXXXXXXXIYLISIPSLDQSVXXPSASA

SEQ ID NO: 18087 - protein, 39 aa, Artificial Sequence
  Non-cyclic GFR-binding peptide
  MOD_RES (2), (4), (36): Xaa is C or S
HXGXSRVVMNEYQKYIVNSSDDIYLVSIPSLKTPAXTPK

SEQ ID NO: 18088 - protein, 33 aa, Artificial Sequence
  Non-cyclic GFR-binding peptide
  MOD_RES (31), (32): Xaa is C or S
EVVMDRYKKLVVNNAADFYLISIANLRAPVXXS

SEQ ID NO: 18089 - protein, 38 aa, Artificial Sequence
  Non-cyclic GFR-binding peptide
  MOD_RES (35), (36): Xaa is C or S
  MOD_RES (13), (14), (15), (16), (17): Xaa is A or G
  MOD_RES (18), (19), (20), (21): Xaa is A or G or is absent
EAVSMGEEYQKYXXXXXXXXXIYLVSIPSLKTPVXXAK

SEQ ID NO: 18090 - protein, 34 aa, Artificial Sequence
  Non-cyclic GFR-binding peptide
  MOD_RES (2), (2): Xaa is C or S
  MOD_RES (13), (14), (15), (16), (17): Xaa is A or G
  MOD_RES (18), (19), (20), (21): Xaa is A or G or is absent
KXSRVIMEYQKYXXXXXXXXXIYLISIPSLAQPV

SEQ ID NO: 18091 - protein, 39 aa, Artificial Sequence
  Non-cyclic GFR-binding peptide
  MOD_RES (34), (34): Xaa is C or S
  MOD_RES (12), (13), (14), (15), (16): Xaa is A or G
  MOD_RES (17), (18), (19), (20): Xaa is A or G or is absent
SRVVMNEYKFKXXXXXXXXXLYLVSIPELKTPAXTPKTV

SEQ ID NO: 18092 - protein, 31 aa, Artificial Sequence
  Non-cyclic GFR-binding peptide
  MOD_RES (1), (1): Xaa is C or S
XSKVIMEYQKYIKPTKGIIYLISIPSLDQSV

SEQ ID NO: 18093 - protein, 36 aa, Artificial Sequence
  Non-cyclic GFR-binding peptide
  MOD_RES (34), (35): Xaa is C or S
  MOD_RES (12), (13), (14), (15), (16): Xaa is A or G
  MOD_RES (17), (18), (19), (20): Xaa is A or G or is absent
ESVAMGYHYKLXXXXXXXXXKYLISIPSLKTPVXXA

SEQ ID NO: 18094 - protein, 36 aa, Artificial Sequence
  Non-cyclic GFR-binding peptide
  MOD_RES (1), (3), (35), (36): Xaa is C or S
XGXSRVVMNEYKFKIVNSSDDLYLVSIPELKTPAXX

SEQ ID NO: 18095 - protein, 41 aa, Artificial Sequence
  Non-cyclic GFR-binding peptide
  MOD_RES (2), (35), (36): Xaa is C or S
GXEAVSMGEEYKFKTPVGMDDLYLVSIPELKTPVXXAKGVK

SEQ ID NO: 18096 - protein, 38 aa, Artificial Sequence
  Non-cyclic GFR-binding peptide
  MOD_RES (1), (35), (36): Xaa is C or S
  MOD_RES (13), (14), (15), (16), (17): Xaa is A or G
  MOD_RES (18), (19), (20), (21): Xaa is A or G or is absent
XARVVMNEYQKYXXXXXXXXXIYLVSIPSLQTPAXXPK

SEQ ID NO: 18097 - protein, 40 aa, Artificial Sequence
  Non-cyclic GFR-binding peptide
  MOD_RES (2), (4), (37), (38): Xaa is C or S
RXGXEAVSMGEEYKFKTPVGMDDLYLVSIPELKTPVXXAK

SEQ ID NO: 18098 - protein, 39 aa, Artificial Sequence
  Non-cyclic GFR-binding peptide
  MOD_RES (2), (35), (36): Xaa is C or S
GXEAVSMGEEYQKYTPVGMDDIYLVSIPSLKTPVXXAKG

SEQ ID NO: 18099 - protein, 35 aa, Artificial Sequence
  Non-cyclic GFR-binding peptide
  MOD_RES (2), (35): Xaa is C or S
  MOD_RES (13), (14), (15), (16), (17): Xaa is A or G
  MOD_RES (18), (19), (20), (21): Xaa is A or G or is absent
KXSKVIMEYKFKXXXXXXXXXLYLISIPELDQSVX

SEQ ID NO: 18100 - protein, 35 aa, Artificial Sequence
  Non-cyclic GFR-binding peptide
  MOD_RES (1), (34), (35): Xaa is C or S
  MOD_RES (12), (13), (14), (15), (16): Xaa is A or G
  MOD_RES (17), (18), (19), (20): Xaa is A or G or is absent
XSKVIMEYQKYXXXXXXXXXIYLISIPSLDQSVXX

SEQ ID NO: 18101 - protein, 37 aa, Artificial Sequence
  Non-cyclic GFR-binding peptide
  MOD_RES (31), (32): Xaa is C or S
EVVMDEYKFKVVNNAADLYLISIPELRAPVXXSAPAA

SEQ ID NO: 18102 - protein, 42 aa, Artificial Sequence
  Non-cyclic GFR-binding peptide
  MOD_RES (2), (4), (38), (39): Xaa is C or S
  MOD_RES (16), (17), (18), (19), (20): Xaa is A or G
  MOD_RES (21), (22), (23), (24): Xaa is A or G or is absent
HXGXAKVVMNEYKFKXXXXXXXXXLYLVSIPELKTPAXXAKP

SEQ ID NO: 18103 - protein, 41 aa, Artificial Sequence
  Non-cyclic GFR-binding peptide
  MOD_RES (1), (3), (35), (36): Xaa is C or S
XGXSRVVMNEYKFKIVNSSDDLYLVSIPELKTPAXXPKPVY

SEQ ID NO: 18104 - protein, 36 aa, Artificial Sequence
  Non-cyclic GFR-binding peptide
  MOD_RES (1), (3): Xaa is C or S
  MOD_RES (15), (16), (17), (18), (19): Xaa is A or G
  MOD_RES (20), (21), (22), (23): Xaa is A or G or is absent
XGXSRVVMNEYKFKXXXXXXXXXLYLVSIPELKTPA

SEQ ID NO: 18105 - protein, 38 aa, Artificial Sequence
  Non-cyclic GFR-binding peptide
  MOD_RES (2), (4), (36), (37): Xaa is C or S
RXGXGEVVMEEYQKYVVKDYEDIYLMSIPSLETPVXXA

SEQ ID NO: 18106 - protein, 37 aa, Artificial Sequence
  Non-cyclic GFR-binding peptide
  MOD_RES (33), (34): Xaa is C or S
  MOD_RES (11), (12), (13), (14), (15): Xaa is A or G
  MOD_RES (16), (17), (18), (19): Xaa is A or G or is absent
SKVVMEYQKYXXXXXXXXXIYLISIPSLDQPVXXPSA

SEQ ID NO: 18107 - protein, 40 aa, Artificial Sequence
  Non-cyclic GFR-binding peptide
  MOD_RES (1), (35), (36): Xaa is C or S
  MOD_RES (13), (14), (15), (16), (17): Xaa is A or G
  MOD_RES (18), (19), (20), (21): Xaa is A or G or is absent
XAEVVMDYHYKLXXXXXXXXXKYLISIPSLRAPVXXSAPA

SEQ ID NO: 18108 - protein, 38 aa, Artificial Sequence
  Non-cyclic GFR-binding peptide
  MOD_RES (1), (3), (35), (36): Xaa is C or S
XGXGEVVMDEYQKYVVKENEDIYLMSIPSLETPVXXAK

SEQ ID NO: 18109 - protein, 39 aa, Artificial Sequence
  Non-cyclic GFR-binding peptide
  MOD_RES (33), (33): Xaa is C or S
  MOD_RES (11), (12), (13), (14), (15): Xaa is A or G
  MOD_RES (16), (17), (18), (19): Xaa is A or G or is absent
RVVMNEYKFKXXXXXXXXXLYLVSIPELKTPAXTPKTVH

SEQ ID NO: 18110 - protein, 42 aa, Artificial Sequence
  Non-cyclic GFR-binding peptide
  MOD_RES (1), (3), (37), (38): Xaa is C or S
  MOD_RES (15), (16), (17), (18), (19): Xaa is A or G
  MOD_RES (20), (21), (22), (23): Xaa is A or G or is absent
XGXARVVMNEYQKYXXXXXXXXXIYLVSIPSLQTPAXXPKPV

SEQ ID NO: 18111 - protein, 40 aa, Artificial Sequence
  Non-cyclic GFR-binding peptide
  MOD_RES (2), (4), (36), (37): Xaa is C or S
RXGXAEVVMDRYKKLVVNNAADFYLISIANLRAPVXXSAP

SEQ ID NO: 18112 - protein, 33 aa, Artificial Sequence
  Non-cyclic GFR-binding peptide
  MOD_RES (32), (33): Xaa is C or S
ESVAMGYHYKLYTVVGKDKYLISIPSLKTPVXX

SEQ ID NO: 18113 - protein, 38 aa, Artificial Sequence
  Non-cyclic GFR-binding peptide
  MOD_RES (2), (4), (36), (37): Xaa is C or S
RXGXGEVVMEEYKFKVVKDYEDLYLMSIPELETPVXXA

SEQ ID NO: 18114 - protein, 37 aa, Artificial Sequence
  Non-cyclic GFR-binding peptide
  MOD_RES (2), (4), (36), (37): Xaa is C or S
HXGXAKVVMNEYQKYIVNNSSDIYLVSIPSLKTPAXX

SEQ ID NO: 18115 - protein, 38 aa, Artificial Sequence
  Non-cyclic GFR-binding peptide
  MOD_RES (2), (4), (37), (38): Xaa is C or S
RXGXEAVSMGEEYQKYTPVGMDDIYLVSIPSLKTPVXX

SEQ ID NO: 18116 - protein, 36 aa, Artificial Sequence
  Non-cyclic GFR-binding peptide
  MOD_RES (32), (33): Xaa is C or S
SRVVMNEYQKYIVNSSDDIYLVSIPSLKTPAXXPKP

SEQ ID NO: 18117 - protein, 39 aa, Artificial Sequence
  Non-cyclic GFR-binding peptide
  MOD_RES (2), (4), (38), (39): Xaa is C or S
  MOD_RES (16), (17), (18), (19), (20): Xaa is A or G
  MOD_RES (21), (22), (23), (24): Xaa is A or G or is absent
RXGXAEVVMDRYKKLXXXXXXXXXFYLISIANLRAPVXX

SEQ ID NO: 18118 - protein, 34 aa, Artificial Sequence
  Non-cyclic GFR-binding peptide
  MOD_RES (1), (3): Xaa is C or S
XGXAEVVMDRYKKLVVNNAADFYLISIANLRAPV

SEQ ID NO: 18119 - protein, 34 aa, Artificial Sequence
  Non-cyclic GFR-binding peptide
  MOD_RES (31), (32): Xaa is C or S
RVVMNEYQKYIVNSSDDIYLVSIPSLKTPAXXPK

SEQ ID NO: 18120 - protein, 30 aa, Artificial Sequence
  Non-cyclic GFR-binding peptide
RVVMNEYQKYIVNSSDDIYLVSIPSLQTPA

SEQ ID NO: 18121 - protein, 40 aa, Artificial Sequence
  Non-cyclic GFR-binding peptide
  MOD_RES (2), (34), (35): Xaa is C or S
GXARVVMNEYKFKIVNSSDDLYLVSIPELQTPAXXPKPVT

SEQ ID NO: 18122 - protein, 42 aa, Artificial Sequence
  Non-cyclic GFR-binding peptide
  MOD_RES (2), (4), (37), (38): Xaa is C or S
  MOD_RES (15), (16), (17), (18), (19): Xaa is A or G
  MOD_RES (20), (21), (22), (23): Xaa is A or G or is absent
SXKXSRVIMEYQKYXXXXXXXXXIYLISIPSLAQPVXXPAAS

SEQ ID NO: 18123 - protein, 34 aa, Artificial Sequence
  Non-cyclic GFR-binding peptide
  MOD_RES (32), (32): Xaa is C or S
SRVVMNEYKFKIVNSSDDLYLVSIPELKTPAXTP

SEQ ID NO: 18124 - protein, 38 aa, Artificial Sequence
  Non-cyclic GFR-binding peptide
  MOD_RES (2), (34): Xaa is C or S
GXSRVVMNEYQKYIVNSSDDIYLVSIPSLKTPAXTPKT

SEQ ID NO: 18125 - protein, 38 aa, Artificial Sequence
  Non-cyclic GFR-binding peptide
  MOD_RES (2), (35), (36): Xaa is C or S
  MOD_RES (13), (14), (15), (16), (17): Xaa is A or G
  MOD_RES (18), (19), (20), (21): Xaa is A or G or is absent
KXSKVVMEYQKYXXXXXXXXXIYLISIPSLDQPVXXPS

SEQ ID NO: 18126 - protein, 36 aa, Artificial Sequence
  Non-cyclic GFR-binding peptide
  MOD_RES (2), (36): Xaa is C or S
  MOD_RES (14), (15), (16), (17), (18): Xaa is A or G
  MOD_RES (19), (20), (21), (22): Xaa is A or G or is absent
GXGEVVMEEYKFKXXXXXXXXXLYLMSIPELETPVX

SEQ ID NO: 18127 - protein, 40 aa, Artificial Sequence
  Non-cyclic GFR-binding peptide
  MOD_RES (2), (4), (35), (36): Xaa is C or S
SXKXSKVVMEYKFKVKPTRGVLYLISIPELDQPVXXPSAS

SEQ ID NO: 18128 - protein, 37 aa, Artificial Sequence
  Non-cyclic GFR-binding peptide
  MOD_RES (31), (32): Xaa is C or S
SKVIMEYQKYIKPTKGIIYLISIPSLDQSVXXPSASA

SEQ ID NO: 18129 - protein, 37 aa, Artificial Sequence
  Non-cyclic GFR-binding peptide
  MOD_RES (2), (34), (35): Xaa is C or S
GXGEVVMEEYKFKVVKDYEDLYLMSIPELETPVXXAK

SEQ ID NO: 18130 - protein, 34 aa, Artificial Sequence
  Non-cyclic GFR-binding peptide
  MOD_RES (1), (34): Xaa is C or S
  MOD_RES (12), (13), (14), (15), (16): Xaa is A or G
  MOD_RES (17), (18), (19), (20): Xaa is A or G or is absent
XSRVIMEYQKYXXXXXXXXXIYLISIPSLAQPVX

SEQ ID NO: 18131 - protein, 40 aa, Artificial Sequence
  Non-cyclic GFR-binding peptide
  MOD_RES (2), (3), (38), (40): Xaa is C or S
  MOD_RES (17), (18), (19), (20), (21): Xaa is A or G
  MOD_RES (22), (23), (24), (25): Xaa is A or G or is absent
AXXVPTKLSPISVLYIXXXXXXXXXYKQYEEGMSVAEXGX

SEQ ID NO: 18132 - protein, 36 aa, Artificial Sequence
  Non-cyclic GFR-binding peptide
  MOD_RES (1), (35): Xaa is C or S
  MOD_RES (15), (16), (17), (18), (19): Xaa is A or G
  MOD_RES (20), (21), (22), (23): Xaa is A or G or is absent
XVPTKLSPISILYIXXXXXXXXXYKQYEGMAVSEXG

SEQ ID NO: 18133 - protein, 35 aa, Artificial Sequence
  Non-cyclic GFR-binding peptide
  MOD_RES (2), (3), (35): Xaa is C or S
AXXVPTELSPISMLYIDENEKVVYKQYEDMVVEGX

SEQ ID NO: 18134 - protein, 40 aa, Artificial Sequence
  Non-cyclic GFR-binding peptide
  MOD_RES (4), (5), (37), (39): Xaa is C or S
PKAXXVPTELEPISMLYLDEYDKVVKFKYEEMVVEGXGXR

SEQ ID NO: 18135 - protein, 41 aa, Artificial Sequence
  Non-cyclic GFR-binding peptide
  MOD_RES (2), (3), (38), (40): Xaa is C or S
  MOD_RES (17), (18), (19), (20), (21): Xaa is A or G
  MOD_RES (22), (23), (24), (25): Xaa is A or G or is absent
AXXVPTKLSPISVLYIXXXXXXXXXYKQYEEGMSVAEXGXR

SEQ ID NO: 18136 - protein, 32 aa, Artificial Sequence
  Non-cyclic GFR-binding peptide
  MOD_RES (1), (2): Xaa is C or S
XXAPTKLSPISVLYIDSSNNVIYKQYENMVVK

SEQ ID NO: 18137 - protein, 40 aa, Artificial Sequence
  Non-cyclic GFR-binding peptide
  MOD_RES (1), (2), (37), (39): Xaa is C or S
  MOD_RES (16), (17), (18), (19), (20): Xaa is A or G
  MOD_RES (21), (22), (23), (24): Xaa is A or G or is absent
XXVPTKLSPISVLYIXXXXXXXXXYKQYEEGMSVAEXGXR

SEQ ID NO: 18138 - protein, 33 aa, Artificial Sequence
  Non-cyclic GFR-binding peptide
  MOD_RES (2), (3): Xaa is C or S
PXXVPQDLEPISILYLVGRTPKVKFKYEMVVKS

SEQ ID NO: 18139 - protein, 40 aa, Artificial Sequence
  Non-cyclic GFR-binding peptide
  MOD_RES (4), (5), (38), (40): Xaa is C or S
  MOD_RES (19), (20), (21), (22), (23): Xaa is A or G
  MOD_RES (24), (25), (26), (27): Xaa is A or G or is absent
ASPXXVPQDLEPISILYLXXXXXXXXXKFKYEMVVKSXKX

SEQ ID NO: 18140 - protein, 33 aa, Artificial Sequence
  Non-cyclic GFR-binding peptide
  MOD_RES (33), (33): Xaa is C or S
  MOD_RES (14), (15), (16), (17), (18): Xaa is A or G
  MOD_RES (19), (20), (21), (22): Xaa is A or G or is absent
VPQALSPISILYIXXXXXXXXXYKQYEMIVRSX

SEQ ID NO: 18141 - protein, 39 aa, Artificial Sequence
  Non-cyclic GFR-binding peptide
  MOD_RES (4), (38): Xaa is C or S
  MOD_RES (18), (19), (20), (21), (22): Xaa is A or G
  MOD_RES (23), (24), (25), (26): Xaa is A or G or is absent
KPTXAPTKLSPISVLYIXXXXXXXXXYKQYENMVVRSXG

SEQ ID NO: 18142 - protein, 37 aa, Artificial Sequence
  Non-cyclic GFR-binding peptide
  MOD_RES (4), (5), (36): Xaa is C or S
ASPXXVSQDLEPISILYLIGKTPKIKFKYEMIVKSXK

SEQ ID NO: 18143 - protein, 40 aa, Artificial Sequence
  Non-cyclic GFR-binding peptide
  MOD_RES (4), (5), (37), (39): Xaa is C or S
PKPXXAPTQLEPISVLYLDDSSNVIKFKYENMVVRAXGXH

SEQ ID NO: 18144 - protein, 36 aa, Artificial Sequence
  Non-cyclic GFR-binding peptide
  MOD_RES (3), (4): Xaa is C or S
  MOD_RES (18), (19), (20), (21), (22): Xaa is A or G
  MOD_RES (23), (24), (25), (26): Xaa is A or G or is absent
KAXXAPTKLSPISVLYIXXXXXXXXXYKQYENMVVK

SEQ ID NO: 18145 - protein, 36 aa, Artificial Sequence
  Non-cyclic GFR-binding peptide
  MOD_RES (5), (6): Xaa is C or S
IPKAXXVPTELSPISMLYIDEYDKVVYKQYEEMVVE

SEQ ID NO: 18146 - protein, 38 aa, Artificial Sequence
  Non-cyclic GFR-binding peptide
  MOD_RES (5), (6): Xaa is C or S
  MOD_RES (20), (21), (22), (23), (24): Xaa is A or G
  MOD_RES (25), (26), (27), (28): Xaa is A or G or is absent
IPKAXXVPTELSPISMLYIXXXXXXXXXYKQYEEMVVE

SEQ ID NO: 18147 - protein, 34 aa, Artificial Sequence
  Non-cyclic GFR-binding peptide
  MOD_RES (1), (2), (34): Xaa is C or S
XXVPARLSPISILYKDAANNVVLKYHYDMVVEAX

SEQ ID NO: 18148 - protein, 35 aa, Artificial Sequence
  Non-cyclic GFR-binding peptide
  MOD_RES (1), (35): Xaa is C or S
  MOD_RES (15), (16), (17), (18), (19): Xaa is A or G
  MOD_RES (20), (21), (22), (23): Xaa is A or G or is absent
XAPTQLEPISVLYLXXXXXXXXXKFKYENMVVRAX

SEQ ID NO: 18149 - protein, 35 aa, Artificial Sequence
  Non-cyclic GFR-binding peptide
  MOD_RES (2), (3): Xaa is C or S
  MOD_RES (17), (18), (19), (20), (21): Xaa is A or G
  MOD_RES (22), (23), (24), (25): Xaa is A or G or is absent
SXXVPARLNAISILYFXXXXXXXXXLKKYRDMVVE

SEQ ID NO: 18150 - protein, 36 aa, Artificial Sequence
  Non-cyclic GFR-binding peptide
  MOD_RES (1), (2), (36): Xaa is C or S
  MOD_RES (16), (17), (18), (19), (20): Xaa is A or G
  MOD_RES (21), (22), (23), (24): Xaa is A or G or is absent
XXVPTKLSPISILYKXXXXXXXXXLKYHYGMAVSEX

SEQ ID NO: 18151 - protein, 35 aa, Artificial Sequence
  Non-cyclic GFR-binding peptide
  MOD_RES (1), (33), (35): Xaa is C or S
XVPTELEPISMLYLDEYDKVVKFKYEEMVVEGXGX

SEQ ID NO: 18152 - protein, 35 aa, Artificial Sequence
  Non-cyclic GFR-binding peptide
  MOD_RES (33), (35): Xaa is C or S
  MOD_RES (14), (15), (16), (17), (18): Xaa is A or G
  MOD_RES (19), (20), (21), (22): Xaa is A or G or is absent
VPQDLEPISILYLXXXXXXXXXKFKYEMVVKSXKX

SEQ ID NO: 18153 - protein, 31 aa, Artificial Sequence
  Non-cyclic GFR-binding peptide
  MOD_RES (1), (1): Xaa is C or S
XVPTKLNAISILYFDKGVVTYLKKYRGMAVS

SEQ ID NO: 18154 - protein, 40 aa, Artificial Sequence
  Non-cyclic GFR-binding peptide
  MOD_RES (5), (6), (40): Xaa is C or S
  MOD_RES (20), (21), (22), (23), (24): Xaa is A or G
  MOD_RES (25), (26), (27), (28): Xaa is A or G or is absent
ASKAXXVPTKLNAISILYFXXXXXXXXXLKKYRGMAVSEX

SEQ ID NO: 18155 - protein, 34 aa, Artificial Sequence
  Non-cyclic GFR-binding peptide
  MOD_RES (1), (33): Xaa is C or S
XVPTELSPISMLYIDEYDKVVYKQYEEMVVEGXG

SEQ ID NO: 18156 - protein, 30 aa, Artificial Sequence
  Non-cyclic GFR-binding peptide
APTKLEPISVLYLDSSNNVIKFKYENMVVK

SEQ ID NO: 18157 - protein, 42 aa, Artificial Sequence
  Non-cyclic GFR-binding peptide
  MOD_RES (6), (7), (39), (41): Xaa is C or S
AAPASXXVPARLEPISILYLDAANNVVKFKYEDMVVEAXGXR

SEQ ID NO: 18158 - protein, 37 aa, Artificial Sequence
  Non-cyclic GFR-binding peptide
  MOD_RES (3), (4): Xaa is C or S
  MOD_RES (18), (19), (20), (21), (22): Xaa is A or G
  MOD_RES (23), (24), (25), (26): Xaa is A or G or is absent
KAXXVPTKLSPISILYIXXXXXXXXXYKQYEGMAVSE

SEQ ID NO: 18159 - protein, 36 aa, Artificial Sequence
  Non-cyclic GFR-binding peptide
  MOD_RES (5), (6): Xaa is C or S
SASPXXVPQDLSPISILYIVGRTPKVYKQYEMVVKS

SEQ ID NO: 18160 - protein, 35 aa, Artificial Sequence
  Non-cyclic GFR-binding peptide
  MOD_RES (1), (2): Xaa is C or S
  MOD_RES (16), (17), (18), (19), (20): Xaa is A or G
  MOD_RES (21), (22), (23), (24): Xaa is A or G or is absent
XXVPTELEPISMLYLXXXXXXXXXKFKYEDMVVEG

SEQ ID NO: 18161 - protein, 40 aa, Artificial Sequence
  Non-cyclic GFR-binding peptide
  MOD_RES (5), (6): Xaa is C or S
  MOD_RES (20), (21), (22), (23), (24): Xaa is A or G
  MOD_RES (25), (26), (27), (28): Xaa is A or G or is absent
VGKAXXVPTKLEPISVLYLXXXXXXXXXKFKYEEGMSVAE

SEQ ID NO: 18162 - protein, 38 aa, Artificial Sequence
  Non-cyclic GFR-binding peptide
  MOD_RES (3), (35), (37): Xaa is C or S
PTXAPTKLSPISVLYIDDSSNVIYKQYENMVVRSXGXH

SEQ ID NO: 18163 - protein, 37 aa, Artificial Sequence
  Non-cyclic GFR-binding peptide
  MOD_RES (6), (7): Xaa is C or S
ASAAPXXVPQALSPISILYIVGRKPKVYKQYEMIVRS

SEQ ID NO: 18164 - protein, 38 aa, Artificial Sequence
  Non-cyclic GFR-binding peptide
  MOD_RES (1), (35), (37): Xaa is C or S
  MOD_RES (15), (16), (17), (18), (19): Xaa is A or G
  MOD_RES (20), (21), (22), (23): Xaa is A or G or is absent
XAPTQLSPISVLYIXXXXXXXXXYKQYENMVVRAXGXH

SEQ ID NO: 18165 - protein, 41 aa, Artificial Sequence
  Non-cyclic GFR-binding peptide
  MOD_RES (6), (7), (39), (41): Xaa is C or S
YVPKPXXAPTKLSPISVLYIDDSSNVIYKQYENMVVRSXGX

SEQ ID NO: 18166 - protein, 32 aa, Artificial Sequence
  Non-cyclic GFR-binding peptide
  MOD_RES (1), (32): Xaa is C or S
XVPQDLSPISILYIVGRTPKVYKQYEMVVKSX

SEQ ID NO: 18167 - protein, 40 aa, Artificial Sequence
  Non-cyclic GFR-binding peptide
  MOD_RES (5), (6), (38), (40): Xaa is C or S
VPKPXXAPTKLEPISVLYLDDSSNVIKFKYENMVVRSXGX

SEQ ID NO: 18168 - protein, 37 aa, Artificial Sequence
  Non-cyclic GFR-binding peptide
  MOD_RES (4), (5), (37): Xaa is C or S
SKAXXVPTKLNAISILYFDKGVVTYLKKYRGMAVSEX

SEQ ID NO: 18169 - protein, 43 aa, Artificial Sequence
  Non-cyclic GFR-binding peptide
  MOD_RES (5), (6), (40), (42): Xaa is C or S
  MOD_RES (20), (21), (22), (23), (24): Xaa is A or G
  MOD_RES (25), (26), (27), (28): Xaa is A or G or is absent
VPKPXXAPTQLEPISVLYLXXXXXXXXXKFKYENMVVRAXGXH

SEQ ID NO: 18170 - protein, 42 aa, Artificial Sequence
  Non-cyclic GFR-binding peptide
  MOD_RES (6), (7), (39), (41): Xaa is C or S
AAPASXXVPARLSPISILYKDAANNVVLKYHYDMVVEAXGXR

SEQ ID NO: 18171 - protein, 37 aa, Artificial Sequence
  Non-cyclic GFR-binding peptide
  MOD_RES (2), (3), (36): Xaa is C or S
  MOD_RES (17), (18), (19), (20), (21): Xaa is A or G
  MOD_RES (22), (23), (24), (25): Xaa is A or G or is absent
PXXVPQDLEPISILYLXXXXXXXXXKFKYEMVVKSXK

SEQ ID NO: 18172 - protein, 41 aa, Artificial Sequence
  Non-cyclic GFR-binding peptide
  MOD_RES (6), (7), (39), (41): Xaa is C or S
KIPKAXXVPTELSPISMLYIDENEKVVYKQYEDMVVEGXGX

SEQ ID NO: 18173 - protein, 37 aa, Artificial Sequence
  Non-cyclic GFR-binding peptide
  MOD_RES (3), (4), (36): Xaa is C or S
ASXXVPARLEPISILYLDAANNVVKFKYEDMVVEAXG

SEQ ID NO: 18174 - protein, 36 aa, Artificial Sequence
  Non-cyclic GFR-binding peptide
  MOD_RES (1), (35): Xaa is C or S
  MOD_RES (15), (16), (17), (18), (19): Xaa is A or G
  MOD_RES (20), (21), (22), (23): Xaa is A or G or is absent
XAPTKLSPISVLYIXXXXXXXXXYKQYENMVVRSXG

SEQ ID NO: 18175 - protein, 42 aa, Artificial Sequence
  Non-cyclic GFR-binding peptide
  MOD_RES (6), (7), (41): Xaa is C or S
  MOD_RES (21), (22), (23), (24), (25): Xaa is A or G
  MOD_RES (26), (27), (28), (29): Xaa is A or G or is absent
AVPKAXXAPTKLSPISVLYIXXXXXXXXXYKQYENMVVKAXG

SEQ ID NO: 18176 - protein, 36 aa, Artificial Sequence
  Non-cyclic GFR-binding peptide
  MOD_RES (6), (6): Xaa is C or S
VTKPTXAPTKLSPISVLYIDDSSNVIYKQYENMVVR

SEQ ID NO: 18177 - protein, 37 aa, Artificial Sequence
  Non-cyclic GFR-binding peptide
  MOD_RES (4), (5), (37): Xaa is C or S
PKAXXVPTELEPISMLYLDENEKVVKFKYEDMVVEGX

SEQ ID NO: 18178 - protein, 36 aa, Artificial Sequence
  Non-cyclic GFR-binding peptide
  MOD_RES (1), (34), (36): Xaa is C or S
  MOD_RES (15), (16), (17), (18), (19): Xaa is A or G
  MOD_RES (20), (21), (22), (23): Xaa is A or G or is absent
XVPQDLEPISILYLXXXXXXXXXKFKYEMVVKSXKX

SEQ ID NO: 18179 - protein, 36 aa, Artificial Sequence
  Non-cyclic GFR-binding peptide
  MOD_RES (2), (3): Xaa is C or S
  MOD_RES (17), (18), (19), (20), (21): Xaa is A or G
  MOD_RES (22), (23), (24), (25): Xaa is A or G or is absent
PXXAPTKLEPISVLYLXXXXXXXXXKFKYENMVVRS

SEQ ID NO: 18180 - protein, 35 aa, Artificial Sequence
  Non-cyclic GFR-binding peptide
  MOD_RES (3), (4), (35): Xaa is C or S
SPXXVPQDLEPISILYLVGRTPKVKFKYEMVVKSX

SEQ ID NO: 18181 - protein, 36 aa, Artificial Sequence
  Non-cyclic GFR-binding peptide
  MOD_RES (1), (2), (36): Xaa is C or S
  MOD_RES (16), (17), (18), (19), (20): Xaa is A or G
  MOD_RES (21), (22), (23), (24): Xaa is A or G or is absent
XXAPTQLEPISVLYLXXXXXXXXXKFKYENMVVRAX

SEQ ID NO: 18182 - protein, 41 aa, Artificial Sequence
  Non-cyclic GFR-binding peptide
  MOD_RES (5), (6), (38), (40): Xaa is C or S
VPKAXXAPTKLEPISVLYLDSSNNVIKFKYENMVVKAXGXH

SEQ ID NO: 18183 - protein, 39 aa, Artificial Sequence
  Non-cyclic GFR-binding peptide
  MOD_RES (6), (7): Xaa is C or S
  MOD_RES (21), (22), (23), (24), (25): Xaa is A or G
  MOD_RES (26), (27), (28), (29): Xaa is A or G or is absent
AAPASXXVPARLEPISILYLXXXXXXXXXKFKYEDMVVE

SEQ ID NO: 18184 - protein, 33 aa, Artificial Sequence
  Non-cyclic GFR-binding peptide
  MOD_RES (1), (33): Xaa is C or S
XAPTKLEPISVLYLDDSSNVIKFKYENMVVRSX

SEQ ID NO: 18185 - protein, 36 aa, Artificial Sequence
  Non-cyclic GFR-binding peptide
  MOD_RES (1), (2), (33), (35): Xaa is C or S
XXVSQDLEPISILYLIGKTPKIKFKYEMIVKSXKXS

SEQ ID NO: 18186 - protein, 33 aa, Artificial Sequence
  Non-cyclic GFR-binding peptide
  MOD_RES (32), (32): Xaa is C or S
VPTKLSPISILYIDKGVVTYYKQYEGMAVSEXG

SEQ ID NO: 18187 - protein, 38 aa, Artificial Sequence
  Non-cyclic GFR-binding peptide
  MOD_RES (6), (7): Xaa is C or S
KIPKAXXVPTELEPISMLYLDENEKVVKFKYEDMVVEG

SEQ ID NO: 18188 - protein, 38 aa, Artificial Sequence
  Non-cyclic GFR-binding peptide
  MOD_RES (4), (5): Xaa is C or S
  MOD_RES (19), (20), (21), (22), (23): Xaa is A or G
  MOD_RES (24), (25), (26), (27): Xaa is A or G or is absent
PKAXXAPTKLEPISVLYLXXXXXXXXXKFKYENMVVKA

SEQ ID NO: 18189 - protein, 38 aa, Artificial Sequence
  Non-cyclic GFR-binding peptide
  MOD_RES (3), (4), (36), (38): Xaa is C or S
KAXXVPTELEPISMLYLDENEKVVKFKYEDMVVEGXGX

SEQ ID NO: 18190 - protein, 39 aa, Artificial Sequence
  Non-cyclic GFR-binding peptide
  MOD_RES (3), (4), (36), (38): Xaa is C or S
KPXXAPTKLSPISVLYIDDSSNVIYKQYENMVVRSXGXH

SEQ ID NO: 18191 - protein, 41 aa, Artificial Sequence
  Non-cyclic GFR-binding peptide
  MOD_RES (6), (7), (39), (41): Xaa is C or S
KASKAXXVPTKLSPISILYKDKGVVTYLKYHYGMAVSEXGX

SEQ ID NO: 18192 - protein, 44 aa, Artificial Sequence
  Non-cyclic GFR-binding peptide
  MOD_RES (6), (7), (42), (44): Xaa is C or S
  MOD_RES (21), (22), (23), (24), (25): Xaa is A or G
  MOD_RES (26), (27), (28), (29): Xaa is A or G or is absent
KVGKAXXVPTKLEPISVLYLXXXXXXXXXKFKYEEGMSVAEXGX

SEQ ID NO: 18193 - protein, 35 aa, Artificial Sequence
  Non-cyclic GFR-binding peptide
  MOD_RES (1), (33), (35): Xaa is C or S
XAPTKLEPISVLYLDSSNNVIKFKYENMVVKAXGX

SEQ ID NO: 18194 - protein, 36 aa, Artificial Sequence
  Non-cyclic GFR-binding peptide
  MOD_RES (3), (4): Xaa is C or S
  MOD_RES (18), (19), (20), (21), (22): Xaa is A or G
  MOD_RES (23), (24), (25), (26): Xaa is A or G or is absent
KAXXVPTELEPISMLYLXXXXXXXXXKFKYEEMVVE

SEQ ID NO: 18195 - protein, 36 aa, Artificial Sequence
  Non-cyclic GFR-binding peptide
  MOD_RES (3), (4): Xaa is C or S
  MOD_RES (18), (19), (20), (21), (22): Xaa is A or G
  MOD_RES (23), (24), (25), (26): Xaa is A or G or is absent
APXXVPQALSPISILYIXXXXXXXXXYKQYEMIVRS

SEQ ID NO: 18196 - protein, 39 aa, Artificial Sequence
  Non-cyclic GFR-binding peptide
  MOD_RES (4), (5), (39): Xaa is C or S
  MOD_RES (19), (20), (21), (22), (23): Xaa is A or G
  MOD_RES (24), (25), (26), (27): Xaa is A or G or is absent
PKPXXAPTQLSPISVLYIXXXXXXXXXYKQYENMVVRAX

SEQ ID NO: 18197 - protein, 34 aa, Artificial Sequence
  Non-cyclic GFR-binding peptide
  MOD_RES (32), (34): Xaa is C or S
VPTKLSPISILYIDKGVVTYYKQYEGMAVSEXGX

SEQ ID NO: 18198 - protein, 35 aa, Artificial Sequence
  Non-cyclic GFR-binding peptide
  MOD_RES (1), (2), (35): Xaa is C or S
  MOD_RES (16), (17), (18), (19), (20): Xaa is A or G
  MOD_RES (21), (22), (23), (24): Xaa is A or G or is absent
XXVPQDLSPISILYIXXXXXXXXXYKQYEMVVKSX

SEQ ID NO: 18199 - protein, 36 aa, Artificial Sequence
  Non-cyclic GFR-binding peptide
  MOD_RES (2), (3), (35): Xaa is C or S
AXXVPTELSPISMLYIDENEKVVYKQYEDMVVEGXG

SEQ ID NO: 18200 - protein, 38 aa, Artificial Sequence
  Non-cyclic GFR-binding peptide
  MOD_RES (4), (5), (38): Xaa is C or S
  MOD_RES (19), (20), (21), (22), (23): Xaa is A or G
  MOD_RES (24), (25), (26), (27): Xaa is A or G or is absent
AAPXXVPQALSPISILYIXXXXXXXXXYKQYEMIVRSX

SEQ ID NO: 18201 - protein, 39 aa, Artificial Sequence
  Non-cyclic GFR-binding peptide
  MOD_RES (4), (5), (38): Xaa is C or S
  MOD_RES (19), (20), (21), (22), (23): Xaa is A or G
  MOD_RES (24), (25), (26), (27): Xaa is A or G or is absent
AAPXXVPQALSPISILYIXXXXXXXXXYKQYEMIVRSXK

SEQ ID NO: 18202 - protein, 31 aa, Artificial Sequence
  Non-cyclic GFR-binding peptide
APTKLSPISVLYIDDSSNVIYKQYENMVVRS

SEQ ID NO: 18203 - protein, 42 aa, Artificial Sequence
  Non-cyclic GFR-binding peptide
  MOD_RES (5), (6), (40), (42): Xaa is C or S
  MOD_RES (20), (21), (22), (23), (24): Xaa is A or G
  MOD_RES (25), (26), (27), (28): Xaa is A or G or is absent
APASXXVPARLEPISILYLXXXXXXXXXKFKYEDMVVEAXGX

SEQ ID NO: 18204 - protein, 35 aa, Artificial Sequence
  Non-cyclic GFR-binding peptide
  MOD_RES (1), (35): Xaa is C or S
  MOD_RES (15), (16), (17), (18), (19): Xaa is A or G
  MOD_RES (20), (21), (22), (23): Xaa is A or G or is absent
XVPTKLSPISILYIXXXXXXXXXYKQYEGMAVSEX

SEQ ID NO: 18205 - protein, 40 aa, Artificial Sequence
  Non-cyclic GFR-binding peptide
  MOD_RES (5), (6), (38), (40): Xaa is C or S
IPKAXXVPTELEPISMLYLDEYDKVVKFKYEEMVVEGXGX

SEQ ID NO: 18206 - protein, 38 aa, Artificial Sequence
  Non-cyclic GFR-binding peptide
  MOD_RES (1), (2), (35), (37): Xaa is C or S
  MOD_RES (16), (17), (18), (19), (20): Xaa is A or G
  MOD_RES (21), (22), (23), (24): Xaa is A or G or is absent
XXVSQDLEPISILYLXXXXXXXXXKFKYEMIVKSXKXS

SEQ ID NO: 18207 - protein, 34 aa, Artificial Sequence
  Non-cyclic GFR-binding peptide
  MOD_RES (3), (4): Xaa is C or S
KAXXVPTELSPISMLYIDENEKVVYKQYEDMVVE

SEQ ID NO: 18208 - protein, 37 aa, Artificial Sequence
  Non-cyclic GFR-binding peptide
  MOD_RES (3), (4), (36): Xaa is C or S
ASXXVPARLNAISILYFDAANNVVLKKYRDMVVEAXG

SEQ ID NO: 18209 - protein, 37 aa, Artificial Sequence
  Non-cyclic GFR-binding peptide
  MOD_RES (1), (2), (34), (36): Xaa is C or S
XXVPARLSPISILYKDAANNVVLKYHYDMVVEAXGXR

SEQ ID NO: 18210 - protein, 38 aa, Artificial Sequence
  Non-cyclic GFR-binding peptide
  MOD_RES (4), (5), (37): Xaa is C or S
PASXXVPARLNAISILYFDAANNVVLKKYRDMVVEAXG

SEQ ID NO: 18211 - protein, 40 aa, Artificial Sequence
  Non-cyclic GFR-binding peptide
  MOD_RES (5), (39): Xaa is C or S
  MOD_RES (19), (20), (21), (22), (23): Xaa is A or G
  MOD_RES (24), (25), (26), (27): Xaa is A or G or is absent
TKPTXAPTKLSPISVLYIXXXXXXXXXYKQYENMVVRSXG

SEQ ID NO: 18212 - protein, 41 aa, Artificial Sequence
  Non-cyclic GFR-binding peptide
  MOD_RES (5), (6), (38), (40): Xaa is C or S
IPKAXXVPTELEPISMLYLDEYDKVVKFKYEEMVVEGXGXR

SEQ ID NO: 18213 - protein, 41 aa, Artificial Sequence
  Non-cyclic GFR-binding peptide
  MOD_RES (5), (6), (39), (41): Xaa is C or S
  MOD_RES (20), (21), (22), (23), (24): Xaa is A or G
  MOD_RES (25), (26), (27), (28): Xaa is A or G or is absent
SAAPXXVPQALEPISILYLXXXXXXXXXKFKYEMIVRSXKX

SEQ ID NO: 18214 - protein, 39 aa, Artificial Sequence
  Non-cyclic GFR-binding peptide
  MOD_RES (2), (3), (37), (39): Xaa is C or S
  MOD_RES (17), (18), (19), (20), (21): Xaa is A or G
  MOD_RES (22), (23), (24), (25): Xaa is A or G or is absent
AXXVPTELSPISMLYIXXXXXXXXXYKQYEDMVVEGXGX

SEQ ID NO: 18215 - protein, 37 aa, Artificial Sequence
  Non-cyclic GFR-binding peptide
  MOD_RES (3), (4): Xaa is C or S
  MOD_RES (18), (19), (20), (21), (22): Xaa is A or G
  MOD_RES (23), (24), (25), (26): Xaa is A or G or is absent
KPXXAPTKLSPISVLYIXXXXXXXXXYKQYENMVVRS

SEQ ID NO: 18216 - protein, 42 aa, Artificial Sequence
  Non-cyclic GFR-binding peptide
  MOD_RES (6), (7), (39), (41): Xaa is C or S
KASKAXXVPTKLSPISILYIDKGVVTYYKQYEGMAVSEXGXR

SEQ ID NO: 18217 - protein, 38 aa, Artificial Sequence
  Non-cyclic GFR-binding peptide
  MOD_RES (3), (4), (36), (38): Xaa is C or S
KPXXAPTKLSPISVLYIDDSSNVIYKQYENMVVRSXGX

SEQ ID NO: 18218 - protein, 35 aa, Artificial Sequence
  Non-cyclic GFR-binding peptide
  MOD_RES (1), (34): Xaa is C or S
  MOD_RES (15), (16), (17), (18), (19): Xaa is A or G
  MOD_RES (20), (21), (22), (23): Xaa is A or G or is absent
XVPQALEPISILYLXXXXXXXXXKFKYEMIVRSXK

SEQ ID NO: 18219 - protein, 40 aa, Artificial Sequence
  Non-cyclic GFR-binding peptide
  MOD_RES (4), (5), (39): Xaa is C or S
  MOD_RES (19), (20), (21), (22), (23): Xaa is A or G
  MOD_RES (24), (25), (26), (27): Xaa is A or G or is absent
PASXXVPARLEPISILYLXXXXXXXXXKFKYEDMVVEAXG

SEQ ID NO: 18220 - protein, 33 aa, Artificial Sequence
  Non-cyclic GFR-binding peptide
  MOD_RES (2), (3): Xaa is C or S
AXXVPTKLNAISILYFDKGVVTYLKKYRGMAVS

SEQ ID NO: 18221 - protein, 32 aa, Artificial Sequence
  Non-cyclic GFR-binding peptide
  MOD_RES (14), (15), (16), (17), (18): Xaa is A or G
  MOD_RES (19), (20), (21), (22): Xaa is A or G or is absent
VPTELSPISMLYIXXXXXXXXXYKQYEEMVVE

SEQ ID NO: 18222 - protein, 43 aa, Artificial Sequence
  Non-cyclic GFR-binding peptide
  MOD_RES (6), (7), (41), (43): Xaa is C or S
  MOD_RES (21), (22), (23), (24), (25): Xaa is A or G
  MOD_RES (26), (27), (28), (29): Xaa is A or G or is absent
YVPKPXXAPTKLEPISVLYLXXXXXXXXXKFKYENMVVRSXGX

SEQ ID NO: 18223 - protein, 38 aa, Artificial Sequence
  Non-cyclic GFR-binding peptide
  MOD_RES (3), (4), (38): Xaa is C or S
  MOD_RES (18), (19), (20), (21), (22): Xaa is A or G
  MOD_RES (23), (24), (25), (26): Xaa is A or G or is absent
ASXXVPARLSPISILYKXXXXXXXXXLKYHYDMVVEAX

SEQ ID NO: 18224 - protein, 37 aa, Artificial Sequence
  Non-cyclic GFR-binding peptide
  MOD_RES (4), (5): Xaa is C or S
  MOD_RES (19), (20), (21), (22), (23): Xaa is A or G
  MOD_RES (24), (25), (26), (27): Xaa is A or G or is absent
PASXXVPARLEPISILYLXXXXXXXXXKFKYEDMVVE

SEQ ID NO: 18225 - protein, 36 aa, Artificial Sequence
  Non-cyclic GFR-binding peptide
  MOD_RES (1), (35): Xaa is C or S
  MOD_RES (15), (16), (17), (18), (19): Xaa is A or G
  MOD_RES (20), (21), (22), (23): Xaa is A or G or is absent
XAPTKLEPISVLYLXXXXXXXXXKFKYENMVVKAXG

SEQ ID NO: 18226 - protein, 35 aa, Artificial Sequence
  Non-cyclic GFR-binding peptide
  MOD_RES (1), (2), (34): Xaa is C or S
XXVPTKLSPISILYKDKGVVTYLKYHYGMAVSEXG

SEQ ID NO: 18227 - protein, 37 aa, Artificial Sequence
  Non-cyclic GFR-binding peptide
  MOD_RES (2), (36): Xaa is C or S
  MOD_RES (16), (17), (18), (19), (20): Xaa is A or G
  MOD_RES (21), (22), (23), (24): Xaa is A or G or is absent
TXAPTKLEPISVLYLXXXXXXXXXKFKYENMVVRSXG

SEQ ID NO: 18228 - protein, 41 aa, Artificial Sequence
  Non-cyclic GFR-binding peptide
  MOD_RES (5), (6), (38), (40): Xaa is C or S
VPKPXXAPTQLSPISVLYIDDSSNVIYKQYENMVVRAXGXH

SEQ ID NO: 18229 - protein, 41 aa, Artificial Sequence
  Non-cyclic GFR-binding peptide
  MOD_RES (5), (6), (40): Xaa is C or S
  MOD_RES (20), (21), (22), (23), (24): Xaa is A or G
  MOD_RES (25), (26), (27), (28): Xaa is A or G or is absent
VPKAXXAPTKLSPISVLYIXXXXXXXXXYKQYENMVVKAXG

SEQ ID NO: 18230 - protein, 36 aa, Artificial Sequence
  Non-cyclic GFR-binding peptide
  MOD_RES (3), (4): Xaa is C or S
  MOD_RES (18), (19), (20), (21), (22): Xaa is A or G
  MOD_RES (23), (24), (25), (26): Xaa is A or G or is absent
KPXXAPTQLSPISVLYIXXXXXXXXXYKQYENMVVR

SEQ ID NO: 18231 - protein, 35 aa, Artificial Sequence
  Non-cyclic GFR-binding peptide
  MOD_RES (2), (3): Xaa is C or S
  MOD_RES (17), (18), (19), (20), (21): Xaa is A or G
  MOD_RES (22), (23), (24), (25): Xaa is A or G or is absent
AXXAPTKLSPISVLYIXXXXXXXXXYKQYENMVVK

SEQ ID NO: 18232 - protein, 37 aa, Artificial Sequence
  Non-cyclic GFR-binding peptide
  MOD_RES (3), (35), (37): Xaa is C or S
PTXAPTKLEPISVLYLDDSSNVIKFKYENMVVRSXGX

SEQ ID NO: 18233 - protein, 33 aa, Artificial Sequence
  Non-cyclic GFR-binding peptide
  MOD_RES (14), (15), (16), (17), (18): Xaa is A or G
  MOD_RES (19), (20), (21), (22): Xaa is A or G or is absent
VPTKLSPISILYIXXXXXXXXXYKQYEGMAVSE

SEQ ID NO: 18234 - protein, 40 aa, Artificial Sequence
  Non-cyclic GFR-binding peptide
  MOD_RES (4), (5), (38), (40): Xaa is C or S
  MOD_RES (19), (20), (21), (22), (23): Xaa is A or G
  MOD_RES (24), (25), (26), (27): Xaa is A or G or is absent
AAPXXVPQALSPISILYIXXXXXXXXXYKQYEMIVRSXKX

SEQ ID NO: 18235 - protein, 41 aa, Artificial Sequence
  Non-cyclic GFR-binding peptide
  MOD_RES (4), (5), (39), (41): Xaa is C or S
  MOD_RES (19), (20), (21), (22), (23): Xaa is A or G
  MOD_RES (24), (25), (26), (27): Xaa is A or G or is absent
SKAXXVPTKLNAISILYFXXXXXXXXXLKKYRGMAVSEXGX

SEQ ID NO: 18236 - protein, 39 aa, Artificial Sequence
  Non-cyclic GFR-binding peptide
  MOD_RES (3), (4), (37), (39): Xaa is C or S
KAXXVPTKLSPISVLYIDDMGVPTYKQYEEGMSVAEXGX

SEQ ID NO: 18237 - protein, 40 aa, Artificial Sequence
  Non-cyclic GFR-binding peptide
  MOD_RES (5), (6), (40): Xaa is C or S
  MOD_RES (20), (21), (22), (23), (24): Xaa is A or G
  MOD_RES (25), (26), (27), (28): Xaa is A or G or is absent
IPKAXXVPTELEPISMLYLXXXXXXXXXKFKYEDMVVEGX

SEQ ID NO: 18238 - protein, 39 aa, Artificial Sequence
  Non-cyclic GFR-binding peptide
  MOD_RES (6), (7): Xaa is C or S
  MOD_RES (21), (22), (23), (24), (25): Xaa is A or G
  MOD_RES (26), (27), (28), (29): Xaa is A or G or is absent
TVPKPXXAPTQLEPISVLYLXXXXXXXXXKFKYENMVVR

SEQ ID NO: 18239 - protein, 42 aa, Artificial Sequence
  Non-cyclic GFR-binding peptide
  MOD_RES (5), (6), (40), (42): Xaa is C or S
  MOD_RES (20), (21), (22), (23), (24): Xaa is A or G
  MOD_RES (25), (26), (27), (28): Xaa is A or G or is absent
ASKAXXVPTKLNAISILYFXXXXXXXXXLKKYRGMAVSEXGX

SEQ ID NO: 18240 - protein, 42 aa, Artificial Sequence
  Non-cyclic GFR-binding peptide
  MOD_RES (6), (7), (41): Xaa is C or S
  MOD_RES (21), (22), (23), (24), (25): Xaa is A or G
  MOD_RES (26), (27), (28), (29): Xaa is A or G or is absent
KIPKAXXVPTELEPISMLYLXXXXXXXXXKFKYEDMVVEGXG

SEQ ID NO: 18241 - protein, 37 aa, Artificial Sequence
  Non-cyclic GFR-binding peptide
  MOD_RES (1), (35), (37): Xaa is C or S
  MOD_RES (15), (16), (17), (18), (19): Xaa is A or G
  MOD_RES (20), (21), (22), (23): Xaa is A or G or is absent
XVPTKLNAISILYFXXXXXXXXXLKKYRGMAVSEXGX

SEQ ID NO: 18242 - protein, 40 aa, Artificial Sequence
  Non-cyclic GFR-binding peptide
  MOD_RES (3), (4), (38), (40): Xaa is C or S
  MOD_RES (18), (19), (20), (21), (22): Xaa is A or G
  MOD_RES (23), (24), (25), (26): Xaa is A or G or is absent
ASXXVPARLNAISILYFXXXXXXXXXLKKYRDMVVEAXGX

SEQ ID NO: 18243 - protein, 35 aa, Artificial Sequence
  Non-cyclic GFR-binding peptide
  MOD_RES (34), (34): Xaa is C or S
  MOD_RES (14), (15), (16), (17), (18): Xaa is A or G
  MOD_RES (19), (20), (21), (22): Xaa is A or G or is absent
VPTELSPISMLYIXXXXXXXXXYKQYEEMVVEGXG

SEQ ID NO: 18244 - protein, 35 aa, Artificial Sequence
  Non-cyclic GFR-binding peptide
  MOD_RES (2), (34): Xaa is C or S
TXAPTKLSPISVLYIDDSSNVIYKQYENMVVRSXG

SEQ ID NO: 18245 - protein, 38 aa, Artificial Sequence
  Non-cyclic GFR-binding peptide
  MOD_RES (2), (3), (37): Xaa is C or S
  MOD_RES (17), (18), (19), (20), (21): Xaa is A or G
  MOD_RES (22), (23), (24), (25): Xaa is A or G or is absent
AXXVPTKLSPISILYKXXXXXXXXXLKYHYGMAVSEXG

SEQ ID NO: 18246 - protein, 35 aa, Artificial Sequence
  Non-cyclic GFR-binding peptide
  MOD_RES (1), (35): Xaa is C or S
  MOD_RES (15), (16), (17), (18), (19): Xaa is A or G
  MOD_RES (20), (21), (22), (23): Xaa is A or G or is absent
XVPTKLSPISILYKXXXXXXXXXLKYHYGMAVSEX

SEQ ID NO: 18247 - protein, 39 aa, Artificial Sequence
  Non-cyclic GFR-binding peptide
  MOD_RES (2), (3), (37), (39): Xaa is C or S
  MOD_RES (17), (18), (19), (20), (21): Xaa is A or G
  MOD_RES (22), (23), (24), (25): Xaa is A or G or is absent
AXXVPTELEPISMLYLXXXXXXXXXKFKYEDMVVEGXGX

SEQ ID NO: 18248 - protein, 40 aa, Artificial Sequence
  Non-cyclic GFR-binding peptide
  MOD_RES (4), (5), (38), (40): Xaa is C or S
  MOD_RES (19), (20), (21), (22), (23): Xaa is A or G
  MOD_RES (24), (25), (26), (27): Xaa is A or G or is absent
ASPXXVSQDLSPISILYIXXXXXXXXXYKQYEMIVKSXKX

SEQ ID NO: 18249 - protein, 33 aa, Artificial Sequence
  Non-cyclic GFR-binding peptide
  MOD_RES (32), (32): Xaa is C or S
VPTELEPISMLYLDENEKVVKFKYEDMVVEGXG

SEQ ID NO: 18250 - protein, 38 aa, Artificial Sequence
  Non-cyclic GFR-binding peptide
  MOD_RES (3), (4), (37): Xaa is C or S
  MOD_RES (18), (19), (20), (21), (22): Xaa is A or G
  MOD_RES (23), (24), (25), (26): Xaa is A or G or is absent
SPXXVSQDLSPISILYIXXXXXXXXXYKQYEMIVKSXK

SEQ ID NO: 18251 - protein, 37 aa, Artificial Sequence
  Non-cyclic GFR-binding peptide
  MOD_RES (6), (7): Xaa is C or S
ASASPXXVPQDLSPISILYIVGRTPKVYKQYEMVVKS

SEQ ID NO: 18252 - protein, 39 aa, Artificial Sequence
  Non-cyclic GFR-binding peptide
  MOD_RES (1), (2), (36), (38): Xaa is C or S
  MOD_RES (16), (17), (18), (19), (20): Xaa is A or G
  MOD_RES (21), (22), (23), (24): Xaa is A or G or is absent
XXVPARLSPISILYKXXXXXXXXXLKYHYDMVVEAXGXR

SEQ ID NO: 18253 - protein, 32 aa, Artificial Sequence
  Non-cyclic GFR-binding peptide
  MOD_RES (1), (2): Xaa is C or S
XXAPTKLSPISVLYIDDSSNVIYKQYENMVVR

SEQ ID NO: 18254 - protein, 30 aa, Artificial Sequence
  Non-cyclic GFR-binding peptide
APTKLEPISVLYLDDSSNVIKFKYENMVVR

SEQ ID NO: 18255 - protein, 43 aa, Artificial Sequence
  Non-cyclic GFR-binding peptide
  MOD_RES (6), (7), (41), (43): Xaa is C or S
  MOD_RES (21), (22), (23), (24), (25): Xaa is A or G
  MOD_RES (26), (27), (28), (29): Xaa is A or G or is absent
YVPKPXXAPTKLSPISVLYIXXXXXXXXXYKQYENMVVRSXGX

SEQ ID NO: 18256 - protein, 38 aa, Artificial Sequence
  Non-cyclic GFR-binding peptide
  MOD_RES (1), (2), (35), (37): Xaa is C or S
  MOD_RES (16), (17), (18), (19), (20): Xaa is A or G
  MOD_RES (21), (22), (23), (24): Xaa is A or G or is absent
XXVSQDLSPISILYIXXXXXXXXXYKQYEMIVKSXKXS

SEQ ID NO: 18257 - protein, 39 aa, Artificial Sequence
  Non-cyclic GFR-binding peptide
  MOD_RES (4), (5), (37), (39): Xaa is C or S
SKAXXVPTKLSPISILYIDKGVVTYYKQYEGMAVSEXGX

SEQ ID NO: 18258 - protein, 40 aa, Artificial Sequence
  Non-cyclic GFR-binding peptide
  MOD_RES (5), (6): Xaa is C or S
  MOD_RES (20), (21), (22), (23), (24): Xaa is A or G
  MOD_RES (25), (26), (27), (28): Xaa is A or G or is absent
VGKAXXVPTKLSPISVLYIXXXXXXXXXYKQYEEGMSVAE

SEQ ID NO: 18259 - protein, 37 aa, Artificial Sequence
  Non-cyclic GFR-binding peptide
  MOD_RES (1), (2), (36): Xaa is C or S
  MOD_RES (16), (17), (18), (19), (20): Xaa is A or G
  MOD_RES (21), (22), (23), (24): Xaa is A or G or is absent
XXVPARLNAISILYFXXXXXXXXXLKKYRDMVVEAXG

SEQ ID NO: 18260 - protein, 39 aa, Artificial Sequence
  Non-cyclic GFR-binding peptide
  MOD_RES (4), (5), (39): Xaa is C or S
  MOD_RES (19), (20), (21), (22), (23): Xaa is A or G
  MOD_RES (24), (25), (26), (27): Xaa is A or G or is absent
PKAXXAPTKLSPISVLYIXXXXXXXXXYKQYENMVVKAX

SEQ ID NO: 18261 - protein, 35 aa, Artificial Sequence
  Non-cyclic GFR-binding peptide
  MOD_RES (1), (33), (35): Xaa is C or S
XAPTQLEPISVLYLDDSSNVIKFKYENMVVRAXGX

SEQ ID NO: 18262 - protein, 38 aa, Artificial Sequence
  Non-cyclic GFR-binding peptide
  MOD_RES (3), (4), (37): Xaa is C or S
  MOD_RES (18), (19), (20), (21), (22): Xaa is A or G
  MOD_RES (23), (24), (25), (26): Xaa is A or G or is absent
APXXVPQALEPISILYLXXXXXXXXXKFKYEMIVRSXK

SEQ ID NO: 18263 - protein, 34 aa, Artificial Sequence
  Non-cyclic GFR-binding peptide
  MOD_RES (3), (4): Xaa is C or S
KAXXVPTKLSPISILYIDKGVVTYYKQYEGMAVS

SEQ ID NO: 18264 - protein, 39 aa, Artificial Sequence
  Non-cyclic GFR-binding peptide
  MOD_RES (1), (2), (36), (38): Xaa is C or S
  MOD_RES (16), (17), (18), (19), (20): Xaa is A or G
  MOD_RES (21), (22), (23), (24): Xaa is A or G or is absent
XXAPTQLEPISVLYLXXXXXXXXXKFKYENMVVRAXGXH

SEQ ID NO: 18265 - protein, 35 aa, Artificial Sequence
  Non-cyclic GFR-binding peptide
  MOD_RES (1), (2), (35): Xaa is C or S
XXVPTKLEPISVLYLDDMGVPTKFKYEEGMSVAEX

SEQ ID NO: 18266 - protein, 41 aa, Artificial Sequence
  Non-cyclic GFR-binding peptide
  MOD_RES (5), (6), (39), (41): Xaa is C or S
  MOD_RES (20), (21), (22), (23), (24): Xaa is A or G
  MOD_RES (25), (26), (27), (28): Xaa is A or G or is absent
SASPXXVSQDLEPISILYLXXXXXXXXXKFKYEMIVKSXKX

SEQ ID NO: 18267 - protein, 32 aa, Artificial Sequence
  Non-cyclic GFR-binding peptide
  MOD_RES (14), (15), (16), (17), (18): Xaa is A or G
  MOD_RES (19), (20), (21), (22): Xaa is A or G or is absent
VPQALSPISILYIXXXXXXXXXYKQYEMIVRS

SEQ ID NO: 18268 - protein, 39 aa, Artificial Sequence
  Non-cyclic GFR-binding peptide
  MOD_RES (3), (4), (38): Xaa is C or S
  MOD_RES (18), (19), (20), (21), (22): Xaa is A or G
  MOD_RES (23), (24), (25), (26): Xaa is A or G or is absent
KPXXAPTQLSPISVLYIXXXXXXXXXYKQYENMVVRAXG

SEQ ID NO: 18269 - protein, 40 aa, Artificial Sequence
  Non-cyclic GFR-binding peptide
  MOD_RES (6), (40): Xaa is C or S
  MOD_RES (20), (21), (22), (23), (24): Xaa is A or G
  MOD_RES (25), (26), (27), (28): Xaa is A or G or is absent
VTKPTXAPTKLSPISVLYIXXXXXXXXXYKQYENMVVRSX

SEQ ID NO: 18270 - protein, 36 aa, Artificial Sequence
  Non-cyclic GFR-binding peptide
  MOD_RES (3), (3): Xaa is C or S
  MOD_RES (17), (18), (19), (20), (21): Xaa is A or G
  MOD_RES (22), (23), (24), (25): Xaa is A or G or is absent
PTXAPTKLSPISVLYIXXXXXXXXXYKQYENMVVRS

SEQ ID NO: 18271 - protein, 33 aa, Artificial Sequence
  Non-cyclic GFR-binding peptide
  MOD_RES (33), (33): Xaa is C or S
  MOD_RES (14), (15), (16), (17), (18): Xaa is A or G
  MOD_RES (19), (20), (21), (22): Xaa is A or G or is absent
VPQALEPISILYLXXXXXXXXXKFKYEMIVRSX

SEQ ID NO: 18272 - protein, 38 aa, Artificial Sequence
  Non-cyclic GFR-binding peptide
  MOD_RES (3), (4), (36), (38): Xaa is C or S
ASXXVPARLSPISILYKDAANNVVLKYHYDMVVEAXGX

SEQ ID NO: 18273 - protein, 40 aa, Artificial Sequence
  Non-cyclic GFR-binding peptide
  MOD_RES (2), (3), (37), (39): Xaa is C or S
  MOD_RES (17), (18), (19), (20), (21): Xaa is A or G
  MOD_RES (22), (23), (24), (25): Xaa is A or G or is absent
PXXAPTKLSPISVLYIXXXXXXXXXYKQYENMVVRSXGXH

SEQ ID NO: 18274 - protein, 37 aa, Artificial Sequence
  Non-cyclic GFR-binding peptide
  MOD_RES (1), (2), (34), (36): Xaa is C or S
XXVPARLEPISILYLDAANNVVKFKYEDMVVEAXGXR

SEQ ID NO: 18275 - protein, 41 aa, Artificial Sequence
  Non-cyclic GFR-binding peptide
  MOD_RES (6), (7), (41): Xaa is C or S
  MOD_RES (21), (22), (23), (24), (25): Xaa is A or G
  MOD_RES (26), (27), (28), (29): Xaa is A or G or is absent
KIPKAXXVPTELEPISMLYLXXXXXXXXXKFKYEDMVVEGX

SEQ ID NO: 18276 - protein, 35 aa, Artificial Sequence
  Non-cyclic GFR-binding peptide
  MOD_RES (1), (2), (33), (35): Xaa is C or S
XXVSQDLEPISILYLIGKTPKIKFKYEMIVKSXKX

SEQ ID NO: 18277 - protein, 38 aa, Artificial Sequence
  Non-cyclic GFR-binding peptide
  MOD_RES (3), (4), (36), (38): Xaa is C or S
KPXXAPTKLEPISVLYLDDSSNVIKFKYENMVVRSXGX

SEQ ID NO: 18278 - protein, 36 aa, Artificial Sequence
  Non-cyclic GFR-binding peptide
  MOD_RES (1), (2), (35): Xaa is C or S
  MOD_RES (16), (17), (18), (19), (20): Xaa is A or G
  MOD_RES (21), (22), (23), (24): Xaa is A or G or is absent
XXVPQALSPISILYIXXXXXXXXXYKQYEMIVRSXK

SEQ ID NO: 18279 - protein, 43 aa, Artificial Sequence
  Non-cyclic GFR-binding peptide
  MOD_RES (6), (7), (40), (42): Xaa is C or S
  MOD_RES (21), (22), (23), (24), (25): Xaa is A or G
  MOD_RES (26), (27), (28), (29): Xaa is A or G or is absent
ASAAPXXVPQALEPISILYLXXXXXXXXXKFKYEMIVRSXKXS

SEQ ID NO: 18280 - protein, 41 aa, Artificial Sequence
  Non-cyclic GFR-binding peptide
  MOD_RES (5), (6), (40): Xaa is C or S
  MOD_RES (20), (21), (22), (23), (24): Xaa is A or G
  MOD_RES (25), (26), (27), (28): Xaa is A or G or is absent
APASXXVPARLEPISILYLXXXXXXXXXKFKYEDMVVEAXG

SEQ ID NO: 18281 - protein, 36 aa, Artificial Sequence
  Non-cyclic GFR-binding peptide
  MOD_RES (3), (4): Xaa is C or S
  MOD_RES (18), (19), (20), (21), (22): Xaa is A or G
  MOD_RES (23), (24), (25), (26): Xaa is A or G or is absent
KPXXAPTKLSPISVLYIXXXXXXXXXYKQYENMVVR

SEQ ID NO: 18282 - protein, 35 aa, Artificial Sequence
  Non-cyclic GFR-binding peptide
  MOD_RES (33), (35): Xaa is C or S
  MOD_RES (14), (15), (16), (17), (18): Xaa is A or G
  MOD_RES (19), (20), (21), (22): Xaa is A or G or is absent
VSQDLSPISILYIXXXXXXXXXYKQYEMIVKSXKX

SEQ ID NO: 18283 - protein, 36 aa, Artificial Sequence
  Non-cyclic GFR-binding peptide
  MOD_RES (4), (5), (36): Xaa is C or S
ASPXXVPQDLEPISILYLVGRTPKVKFKYEMVVKSX

SEQ ID NO: 18284 - protein, 35 aa, Artificial Sequence
  Non-cyclic GFR-binding peptide
  MOD_RES (4), (5): Xaa is C or S
PKAXXAPTKLEPISVLYLDSSNNVIKFKYENMVVK

SEQ ID NO: 18285 - protein, 40 aa, Artificial Sequence
  Non-cyclic GFR-binding peptide
  MOD_RES (2), (3), (37), (39): Xaa is C or S
  MOD_RES (17), (18), (19), (20), (21): Xaa is A or G
  MOD_RES (22), (23), (24), (25): Xaa is A or G or is absent
PXXAPTQLEPISVLYLXXXXXXXXXKFKYENMVVRAXGXH

SEQ ID NO: 18286 - protein, 36 aa, Artificial Sequence
  Non-cyclic GFR-binding peptide
  MOD_RES (1), (33), (35): Xaa is C or S
XVPARLSPISILYKDAANNVVLKYHYDMVVEAXGXR

SEQ ID NO: 18287 - protein, 36 aa, Artificial Sequence
  Non-cyclic GFR-binding peptide
  MOD_RES (5), (6): Xaa is C or S
SAAPXXVPQALSPISILYIVGRKPKVYKQYEMIVRS

SEQ ID NO: 18288 - protein, 40 aa, Artificial Sequence
  Non-cyclic GFR-binding peptide
  MOD_RES (5), (6), (38), (40): Xaa is C or S
IPKAXXVPTELSPISMLYIDEYDKVVYKQYEEMVVEGXGX

SEQ ID NO: 18289 - protein, 42 aa, Artificial Sequence
  Non-cyclic GFR-binding peptide
  MOD_RES (7), (41): Xaa is C or S
  MOD_RES (21), (22), (23), (24), (25): Xaa is A or G
  MOD_RES (26), (27), (28), (29): Xaa is A or G or is absent
HVTKPTXAPTKLSPISVLYIXXXXXXXXXYKQYENMVVRSXG

SEQ ID NO: 18290 - protein, 40 aa, Artificial Sequence
  Non-cyclic GFR-binding peptide
  MOD_RES (6), (40): Xaa is C or S
  MOD_RES (20), (21), (22), (23), (24): Xaa is A or G
  MOD_RES (25), (26), (27), (28): Xaa is A or G or is absent
VTKPTXAPTKLEPISVLYLXXXXXXXXXKFKYENMVVRSX

SEQ ID NO: 18291 - protein, 43 aa, Artificial Sequence
  Non-cyclic GFR-binding peptide
  MOD_RES (5), (6), (41), (43): Xaa is C or S
  MOD_RES (20), (21), (22), (23), (24): Xaa is A or G
  MOD_RES (25), (26), (27), (28): Xaa is A or G or is absent
VGKAXXVPTKLEPISVLYLXXXXXXXXXKFKYEEGMSVAEXGX

SEQ ID NO: 18292 - protein, 36 aa, Artificial Sequence
  Non-cyclic GFR-binding peptide
  MOD_RES (33), (35): Xaa is C or S
  MOD_RES (14), (15), (16), (17), (18): Xaa is A or G
  MOD_RES (19), (20), (21), (22): Xaa is A or G or is absent
VSQDLEPISILYLXXXXXXXXXKFKYEMIVKSXKXS

SEQ ID NO: 18293 - protein, 37 aa, Artificial Sequence
  Non-cyclic GFR-binding peptide
  MOD_RES (3), (35), (37): Xaa is C or S
PTXAPTKLSPISVLYIDDSSNVIYKQYENMVVRSXGX

SEQ ID NO: 18294 - protein, 37 aa, Artificial Sequence
  Non-cyclic GFR-binding peptide
  MOD_RES (4), (36): Xaa is C or S
KPTXAPTKLEPISVLYLDDSSNVIKFKYENMVVRSXG

SEQ ID NO: 18295 - protein, 34 aa, Artificial Sequence
  Non-cyclic GFR-binding peptide
  MOD_RES (1), (2): Xaa is C or S
  MOD_RES (16), (17), (18), (19), (20): Xaa is A or G
  MOD_RES (21), (22), (23), (24): Xaa is A or G or is absent
XXVPTELSPISMLYIXXXXXXXXXYKQYEEMVVE

SEQ ID NO: 18296 - protein, 36 aa, Artificial Sequence
  Non-cyclic GFR-binding peptide
  MOD_RES (1), (33), (35): Xaa is C or S
XVPTELSPISMLYIDENEKVVYKQYEDMVVEGXGXR

SEQ ID NO: 18297 - protein, 36 aa, Artificial Sequence
  Non-cyclic GFR-binding peptide
  MOD_RES (2), (3): Xaa is C or S
  MOD_RES (17), (18), (19), (20), (21): Xaa is A or G
  MOD_RES (22), (23), (24), (25): Xaa is A or G or is absent
PXXAPTQLEPISVLYLXXXXXXXXXKFKYENMVVRA

SEQ ID NO: 18298 - protein, 39 aa, Artificial Sequence
  Non-cyclic GFR-binding peptide
  MOD_RES (3), (4), (36), (38): Xaa is C or S
KAXXVPTKLSPISILYIDKGVVTYYKQYEGMAVSEXGXR

SEQ ID NO: 18299 - protein, 35 aa, Artificial Sequence
  Non-cyclic GFR-binding peptide
  MOD_RES (2), (3), (35): Xaa is C or S
PXXAPTKLSPISVLYIDDSSNVIYKQYENMVVRSX

SEQ ID NO: 18300 - protein, 40 aa, Artificial Sequence
  Non-cyclic GFR-binding peptide
  MOD_RES (2), (3), (37), (39): Xaa is C or S
  MOD_RES (17), (18), (19), (20), (21): Xaa is A or G
  MOD_RES (22), (23), (24), (25): Xaa is A or G or is absent
AXXVPTKLSPISILYKXXXXXXXXXLKYHYGMAVSEXGXR

SEQ ID NO: 18301 - protein, 39 aa, Artificial Sequence
  Non-cyclic GFR-binding peptide
  MOD_RES (1), (2), (36), (38): Xaa is C or S
  MOD_RES (16), (17), (18), (19), (20): Xaa is A or G
  MOD_RES (21), (22), (23), (24): Xaa is A or G or is absent
XXAPTKLSPISVLYIXXXXXXXXXYKQYENMVVRSXGXH

SEQ ID NO: 18302 - protein, 39 aa, Artificial Sequence
  Non-cyclic GFR-binding peptide
  MOD_RES (3), (4), (36), (38): Xaa is C or S
ASXXVPARLSPISILYKDAANNVVLKYHYDMVVEAXGXR

SEQ ID NO: 18303 - protein, 37 aa, Artificial Sequence
  Non-cyclic GFR-binding peptide
  MOD_RES (1), (35), (37): Xaa is C or S
  MOD_RES (15), (16), (17), (18), (19): Xaa is A or G
  MOD_RES (20), (21), (22), (23): Xaa is A or G or is absent
XVPARLNAISILYFXXXXXXXXXLKKYRDMVVEAXGX

SEQ ID NO: 18304 - protein, 41 aa, Artificial Sequence
  Non-cyclic GFR-binding peptide
  MOD_RES (6), (7), (41): Xaa is C or S
  MOD_RES (21), (22), (23), (24), (25): Xaa is A or G
  MOD_RES (26), (27), (28), (29): Xaa is A or G or is absent
SIPKAXXVPTELSPISMLYIXXXXXXXXXYKQYEEMVVEGX

SEQ ID NO: 18305 - protein, 37 aa, Artificial Sequence
  Non-cyclic GFR-binding peptide
  MOD_RES (3), (37): Xaa is C or S
  MOD_RES (17), (18), (19), (20), (21): Xaa is A or G
  MOD_RES (22), (23), (24), (25): Xaa is A or G or is absent
PTXAPTKLSPISVLYIXXXXXXXXXYKQYENMVVRSX

SEQ ID NO: 18306 - protein, 36 aa, Artificial Sequence
  Non-cyclic GFR-binding peptide
  MOD_RES (1), (33), (35): Xaa is C or S
XVPTKLSPISILYIDKGVVTYYKQYEGMAVSEXGXR

SEQ ID NO: 18307 - protein, 40 aa, Artificial Sequence
  Non-cyclic GFR-binding peptide
  MOD_RES (6), (7), (40): Xaa is C or S
  MOD_RES (21), (22), (23), (24), (25): Xaa is A or G
  MOD_RES (26), (27), (28), (29): Xaa is A or G or is absent
ASASPXXVPQDLEPISILYLXXXXXXXXXKFKYEMVVKSX

SEQ ID NO: 18308 - protein, 32 aa, Artificial Sequence
  Non-cyclic GFR-binding peptide
  MOD_RES (14), (15), (16), (17), (18): Xaa is A or G
  MOD_RES (19), (20), (21), (22): Xaa is A or G or is absent
APTQLEPISVLYLXXXXXXXXXKFKYENMVVR

SEQ ID NO: 18309 - protein, 37 aa, Artificial Sequence
  Non-cyclic GFR-binding peptide
  MOD_RES (3), (4): Xaa is C or S
  MOD_RES (18), (19), (20), (21), (22): Xaa is A or G
  MOD_RES (23), (24), (25), (26): Xaa is A or G or is absent
ASXXVPARLNAISILYFXXXXXXXXXLKKYRDMVVEA

SEQ ID NO: 18310 - protein, 35 aa, Artificial Sequence
  Non-cyclic GFR-binding peptide
  MOD_RES (1), (35): Xaa is C or S
  MOD_RES (15), (16), (17), (18), (19): Xaa is A or G
  MOD_RES (20), (21), (22), (23): Xaa is A or G or is absent
XVPARLNAISILYFXXXXXXXXXLKKYRDMVVEAX

SEQ ID NO: 18311 - protein, 39 aa, Artificial Sequence
  Non-cyclic GFR-binding peptide
  MOD_RES (2), (3), (37), (39): Xaa is C or S
  MOD_RES (17), (18), (19), (20), (21): Xaa is A or G
  MOD_RES (22), (23), (24), (25): Xaa is A or G or is absent
SXXVPARLNAISILYFXXXXXXXXXLKKYRDMVVEAXGX

SEQ ID NO: 18312 - protein, 42 aa, Artificial Sequence
  Non-cyclic GFR-binding peptide
  MOD_RES (6), (7), (41): Xaa is C or S
  MOD_RES (21), (22), (23), (24), (25): Xaa is A or G
  MOD_RES (26), (27), (28), (29): Xaa is A or G or is absent
AAPASXXVPARLEPISILYLXXXXXXXXXKFKYEDMVVEAXG

SEQ ID NO: 18313 - protein, 39 aa, Artificial Sequence
  Non-cyclic GFR-binding peptide
  MOD_RES (3), (4), (38): Xaa is C or S
  MOD_RES (18), (19), (20), (21), (22): Xaa is A or G
  MOD_RES (23), (24), (25), (26): Xaa is A or G or is absent
KAXXAPTKLSPISVLYIXXXXXXXXXYKQYENMVVKAXG

SEQ ID NO: 18314 - protein, 38 aa, Artificial Sequence
  Non-cyclic GFR-binding peptide
  MOD_RES (4), (5), (36), (38): Xaa is C or S
AAPXXVPQALSPISILYIVGRKPKVYKQYEMIVRSXKX

SEQ ID NO: 18315 - protein, 37 aa, Artificial Sequence
  Non-cyclic GFR-binding peptide
  MOD_RES (2), (3), (37): Xaa is C or S
  MOD_RES (17), (18), (19), (20), (21): Xaa is A or G
  MOD_RES (22), (23), (24), (25): Xaa is A or G or is absent
AXXVPTELEPISMLYLXXXXXXXXXKFKYEEMVVEGX

SEQ ID NO: 18316 - protein, 42 aa, Artificial Sequence
  Non-cyclic GFR-binding peptide
  MOD_RES (6), (7), (41): Xaa is C or S
  MOD_RES (21), (22), (23), (24), (25): Xaa is A or G
  MOD_RES (26), (27), (28), (29): Xaa is A or G or is absent
AAPASXXVPARLSPISILYKXXXXXXXXXLKYHYDMVVEAXG

SEQ ID NO: 18317 - protein, 41 aa, Artificial Sequence
  Non-cyclic GFR-binding peptide
  MOD_RES (5), (6), (38), (40): Xaa is C or S
APASXXVPARLSPISILYKDAANNVVLKYHYDMVVEAXGXR

SEQ ID NO: 18318 - protein, 41 aa, Artificial Sequence
  Non-cyclic GFR-binding peptide
  MOD_RES (3), (4), (38), (40): Xaa is C or S
  MOD_RES (18), (19), (20), (21), (22): Xaa is A or G
  MOD_RES (23), (24), (25), (26): Xaa is A or G or is absent
KAXXVPTELEPISMLYLXXXXXXXXXKFKYEEMVVEGXGXR

SEQ ID NO: 18319 - protein, 38 aa, Artificial Sequence
  Non-cyclic GFR-binding peptide
  MOD_RES (4), (5), (37): Xaa is C or S
SKAXXVPTKLSPISILYKDKGVVTYLKYHYGMAVSEXG

SEQ ID NO: 18320 - protein, 38 aa, Artificial Sequence
  Non-cyclic GFR-binding peptide
  MOD_RES (6), (7): Xaa is C or S
KASKAXXVPTKLSPISILYKDKGVVTYLKYHYGMAVSE

SEQ ID NO: 18321 - protein, 36 aa, Artificial Sequence
  Non-cyclic GFR-binding peptide
  MOD_RES (1), (35): Xaa is C or S
  MOD_RES (15), (16), (17), (18), (19): Xaa is A or G
  MOD_RES (20), (21), (22), (23): Xaa is A or G or is absent
XVPTELSPISMLYIXXXXXXXXXYKQYEDMVVEGXG

SEQ ID NO: 18322 - protein, 37 aa, Artificial Sequence
  Non-cyclic GFR-binding peptide
  MOD_RES (1), (2), (34), (36): Xaa is C or S
XXVPTELSPISMLYIDENEKVVYKQYEDMVVEGXGXR

SEQ ID NO: 18323 - protein, 37 aa, Artificial Sequence
  Non-cyclic GFR-binding peptide
  MOD_RES (2), (3), (34), (36): Xaa is C or S
PXXVSQDLSPISILYIIGKTPKIYKQYEMIVKSXKXS

SEQ ID NO: 18324 - protein, 35 aa, Artificial Sequence
  Non-cyclic GFR-binding peptide
  MOD_RES (1), (2), (35): Xaa is C or S
  MOD_RES (16), (17), (18), (19), (20): Xaa is A or G
  MOD_RES (21), (22), (23), (24): Xaa is A or G or is absent
XXVPQDLEPISILYLXXXXXXXXXKFKYEMVVKSX

SEQ ID NO: 18325 - protein, 38 aa, Artificial Sequence
  Non-cyclic GFR-binding peptide
  MOD_RES (3), (4), (38): Xaa is C or S
  MOD_RES (18), (19), (20), (21), (22): Xaa is A or G
  MOD_RES (23), (24), (25), (26): Xaa is A or G or is absent
KAXXVPTELSPISMLYIXXXXXXXXXYKQYEDMVVEGX

SEQ ID NO: 18326 - protein, 35 aa, Artificial Sequence
  Non-cyclic GFR-binding peptide
  MOD_RES (3), (4): Xaa is C or S
ASXXVPARLEPISILYLDAANNVVKFKYEDMVVEA

SEQ ID NO: 18327 - protein, 37 aa, Artificial Sequence
  Non-cyclic GFR-binding peptide
  MOD_RES (4), (5): Xaa is C or S
  MOD_RES (19), (20), (21), (22), (23): Xaa is A or G
  MOD_RES (24), (25), (26), (27): Xaa is A or G or is absent
ASPXXVSQDLEPISILYLXXXXXXXXXKFKYEMIVKS

SEQ ID NO: 18328 - protein, 39 aa, Artificial Sequence
  Non-cyclic GFR-binding peptide
  MOD_RES (5), (6): Xaa is C or S
  MOD_RES (20), (21), (22), (23), (24): Xaa is A or G
  MOD_RES (25), (26), (27), (28): Xaa is A or G or is absent
ASKAXXVPTKLSPISILYKXXXXXXXXXLKYHYGMAVSE

SEQ ID NO: 18329 - protein, 39 aa, Artificial Sequence
  Non-cyclic GFR-binding peptide
  MOD_RES (5), (6), (38): Xaa is C or S
VPKPXXAPTKLSPISVLYIDDSSNVIYKQYENMVVRSXG

SEQ ID NO: 18330 - protein, 35 aa, Artificial Sequence
  Non-cyclic GFR-binding peptide
  MOD_RES (2), (3): Xaa is C or S
  MOD_RES (17), (18), (19), (20), (21): Xaa is A or G
  MOD_RES (22), (23), (24), (25): Xaa is A or G or is absent
PXXAPTKLSPISVLYIXXXXXXXXXYKQYENMVVR

SEQ ID NO: 18331 - protein, 36 aa, Artificial Sequence
  Non-cyclic GFR-binding peptide
  MOD_RES (2), (3), (35): Xaa is C or S
AXXVPTKLSPISILYKDKGVVTYLKYHYGMAVSEXG

SEQ ID NO: 18332 - protein, 37 aa, Artificial Sequence
  Non-cyclic GFR-binding peptide
  MOD_RES (2), (3), (34), (36): Xaa is C or S
PXXVSQDLEPISILYLIGKTPKIKFKYEMIVKSXKXS

SEQ ID NO: 18333 - protein, 36 aa, Artificial Sequence
  Non-cyclic GFR-binding peptide
  MOD_RES (5), (5): Xaa is C or S
TKPTXAPTKLSPISVLYIDDSSNVIYKQYENMVVRS

SEQ ID NO: 18334 - protein, 41 aa, Artificial Sequence
  Non-cyclic GFR-binding peptide
  MOD_RES (5), (6), (38), (40): Xaa is C or S
APASXXVPARLEPISILYLDAANNVVKFKYEDMVVEAXGXR

SEQ ID NO: 18335 - protein, 38 aa, Artificial Sequence
  Non-cyclic GFR-binding peptide
  MOD_RES (2), (3), (36), (38): Xaa is C or S
AXXVPTKLEPISVLYLDDMGVPTKFKYEEGMSVAEXGX

SEQ ID NO: 18336 - protein, 36 aa, Artificial Sequence
  Non-cyclic GFR-binding peptide
  MOD_RES (1), (2), (35): Xaa is C or S
  MOD_RES (16), (17), (18), (19), (20): Xaa is A or G
  MOD_RES (21), (22), (23), (24): Xaa is A or G or is absent
XXVPQALEPISILYLXXXXXXXXXKFKYEMIVRSXK

SEQ ID NO: 18337 - protein, 40 aa, Artificial Sequence
  Non-cyclic GFR-binding peptide
  MOD_RES (4), (5), (37), (39): Xaa is C or S
PASXXVPARLSPISILYKDAANNVVLKYHYDMVVEAXGXR

SEQ ID NO: 18338 - protein, 34 aa, Artificial Sequence
  Non-cyclic GFR-binding peptide
  MOD_RES (2), (3): Xaa is C or S
PXXAPTQLSPISVLYIDDSSNVIYKQYENMVVRA

SEQ ID NO: 18339 - protein, 33 aa, Artificial Sequence
  Non-cyclic GFR-binding peptide
  MOD_RES (1), (1): Xaa is C or S
  MOD_RES (15), (16), (17), (18), (19): Xaa is A or G
  MOD_RES (20), (21), (22), (23): Xaa is A or G or is absent
XVPARLNAISILYFXXXXXXXXXLKKYRDMVVE

SEQ ID NO: 18340 - protein, 41 aa, Artificial Sequence
  Non-cyclic GFR-binding peptide
  MOD_RES (5), (6), (40): Xaa is C or S
  MOD_RES (20), (21), (22), (23), (24): Xaa is A or G
  MOD_RES (25), (26), (27), (28): Xaa is A or G or is absent
IPKAXXVPTELSPISMLYIXXXXXXXXXYKQYEDMVVEGXG

SEQ ID NO: 18341 - protein, 41 aa, Artificial Sequence
  Non-cyclic GFR-binding peptide
  MOD_RES (4), (5), (38), (40): Xaa is C or S
GKAXXVPTKLSPISVLYIDDMGVPTYKQYEEGMSVAEXGXR

SEQ ID NO: 18342 - protein, 35 aa, Artificial Sequence
  Non-cyclic GFR-binding peptide
  MOD_RES (2), (3): Xaa is C or S
  MOD_RES (17), (18), (19), (20), (21): Xaa is A or G
  MOD_RES (22), (23), (24), (25): Xaa is A or G or is absent
PXXVPQALEPISILYLXXXXXXXXXKFKYEMIVRS

SEQ ID NO: 18343 - protein, 36 aa, Artificial Sequence
  Non-cyclic GFR-binding peptide
  MOD_RES (1), (33), (35): Xaa is C or S
XVPARLEPISILYLDAANNVVKFKYEDMVVEAXGXR

SEQ ID NO: 18344 - protein, 30 aa, Artificial Sequence
  Non-cyclic GFR-binding peptide
VPTKLSPISILYKDKGVVTYLKYHYGMAVS

SEQ ID NO: 18345 - protein, 34 aa, Artificial Sequence
  Non-cyclic GFR-binding peptide
  MOD_RES (34), (34): Xaa is C or S
  MOD_RES (14), (15), (16), (17), (18): Xaa is A or G
  MOD_RES (19), (20), (21), (22): Xaa is A or G or is absent
VPTKLSPISILYIXXXXXXXXXYKQYEGMAVSEX

SEQ ID NO: 18346 - protein, 42 aa, Artificial Sequence
  Non-cyclic GFR-binding peptide
  MOD_RES (5), (6), (39), (41): Xaa is C or S
VGKAXXVPTKLSPISVLYIDDMGVPTYKQYEEGMSVAEXGXR

SEQ ID NO: 18347 - protein, 37 aa, Artificial Sequence
  Non-cyclic GFR-binding peptide
  MOD_RES (2), (3), (37): Xaa is C or S
  MOD_RES (17), (18), (19), (20), (21): Xaa is A or G
  MOD_RES (22), (23), (24), (25): Xaa is A or G or is absent
AXXVPTKLNAISILYFXXXXXXXXXLKKYRGMAVSEX

SEQ ID NO: 18348 - protein, 33 aa, Artificial Sequence
  Non-cyclic GFR-binding peptide
  MOD_RES (1), (2): Xaa is C or S
XXVPARLSPISILYKDAANNVVLKYHYDMVVEA

SEQ ID NO: 18349 - protein, 40 aa, Artificial Sequence
  Non-cyclic GFR-binding peptide
  MOD_RES (5), (6), (38), (40): Xaa is C or S
ASKAXXVPTKLSPISILYIDKGVVTYYKQYEGMAVSEXGX

SEQ ID NO: 18350 - protein, 31 aa, Artificial Sequence
  Non-cyclic GFR-binding peptide
APTQLEPISVLYLDDSSNVIKFKYENMVVRA

SEQ ID NO: 18351 - protein, 37 aa, Artificial Sequence
  Non-cyclic GFR-binding peptide
  MOD_RES (3), (4): Xaa is C or S
  MOD_RES (18), (19), (20), (21), (22): Xaa is A or G
  MOD_RES (23), (24), (25), (26): Xaa is A or G or is absent
KAXXVPTKLNAISILYFXXXXXXXXXLKKYRGMAVSE

SEQ ID NO: 18352 - protein, 37 aa, Artificial Sequence
  Non-cyclic GFR-binding peptide
  MOD_RES (2), (34), (36): Xaa is C or S
TXAPTKLSPISVLYIDDSSNVIYKQYENMVVRSXGXH

SEQ ID NO: 18353 - protein, 37 aa, Artificial Sequence
  Non-cyclic GFR-binding peptide
  MOD_RES (1), (35), (37): Xaa is C or S
  MOD_RES (15), (16), (17), (18), (19): Xaa is A or G
  MOD_RES (20), (21), (22), (23): Xaa is A or G or is absent
XAPTKLSPISVLYIXXXXXXXXXYKQYENMVVKAXGX

SEQ ID NO: 18354 - protein, 34 aa, Artificial Sequence
  Non-cyclic GFR-binding peptide
  MOD_RES (3), (4): Xaa is C or S
KPXXAPTKLEPISVLYLDDSSNVIKFKYENMVVR

SEQ ID NO: 18355 - protein, 38 aa, Artificial Sequence
  Non-cyclic GFR-binding peptide
  MOD_RES (1), (35), (37): Xaa is C or S
  MOD_RES (15), (16), (17), (18), (19): Xaa is A or G
  MOD_RES (20), (21), (22), (23): Xaa is A or G or is absent
XAPTKLEPISVLYLXXXXXXXXXKFKYENMVVKAXGXH

SEQ ID NO: 18356 - protein, 33 aa, Artificial Sequence
  Non-cyclic GFR-binding peptide
  MOD_RES (1), (33): Xaa is C or S
XAPTQLEPISVLYLDDSSNVIKFKYENMVVRAX

SEQ ID NO: 18357 - protein, 31 aa, Artificial Sequence
  Non-cyclic GFR-binding peptide
VPTKLNAISILYFDKGVVTYLKKYRGMAVSE

SEQ ID NO: 18358 - protein, 37 aa, Artificial Sequence
  Non-cyclic GFR-binding peptide
  MOD_RES (5), (6): Xaa is C or S
IPKAXXVPTELSPISMLYIDENEKVVYKQYEDMVVEG

SEQ ID NO: 18359 - protein, 37 aa, Artificial Sequence
  Non-cyclic GFR-binding peptide
  MOD_RES (4), (5), (37): Xaa is C or S
PKPXXAPTKLEPISVLYLDDSSNVIKFKYENMVVRSX

SEQ ID NO: 18360 - protein, 39 aa, Artificial Sequence
  Non-cyclic GFR-binding peptide
  MOD_RES (4), (5), (39): Xaa is C or S
  MOD_RES (19), (20), (21), (22), (23): Xaa is A or G
  MOD_RES (24), (25), (26), (27): Xaa is A or G or is absent
PKAXXAPTKLEPISVLYLXXXXXXXXXKFKYENMVVKAX

SEQ ID NO: 18361 - protein, 39 aa, Artificial Sequence
  Non-cyclic GFR-binding peptide
  MOD_RES (3), (4), (38): Xaa is C or S
  MOD_RES (18), (19), (20), (21), (22): Xaa is A or G
  MOD_RES (23), (24), (25), (26): Xaa is A or G or is absent
KAXXVPTELEPISMLYLXXXXXXXXXKFKYEDMVVEGXG

SEQ ID NO: 18362 - protein, 35 aa, Artificial Sequence
  Non-cyclic GFR-binding peptide
  MOD_RES (4), (5): Xaa is C or S
PKAXXVPTELEPISMLYLDEYDKVVKFKYEEMVVE

SEQ ID NO: 18363 - protein, 39 aa, Artificial Sequence
  Non-cyclic GFR-binding peptide
  MOD_RES (7), (7): Xaa is C or S
  MOD_RES (21), (22), (23), (24), (25): Xaa is A or G
  MOD_RES (26), (27), (28), (29): Xaa is A or G or is absent
HVTKPTXAPTKLSPISVLYIXXXXXXXXXYKQYENMVVR

SEQ ID NO: 18364 - protein, 38 aa, Artificial Sequence
  Non-cyclic GFR-binding peptide
  MOD_RES (3), (4), (38): Xaa is C or S
  MOD_RES (18), (19), (20), (21), (22): Xaa is A or G
  MOD_RES (23), (24), (25), (26): Xaa is A or G or is absent
KAXXVPTELEPISMLYLXXXXXXXXXKFKYEDMVVEGX

SEQ ID NO: 18365 - protein, 41 aa, Artificial Sequence
  Non-cyclic GFR-binding peptide
  MOD_RES (4), (5), (39), (41): Xaa is C or S
  MOD_RES (19), (20), (21), (22), (23): Xaa is A or G
  MOD_RES (24), (25), (26), (27): Xaa is A or G or is absent
PASXXVPARLEPISILYLXXXXXXXXXKFKYEDMVVEAXGX

SEQ ID NO: 18366 - protein, 36 aa, Artificial Sequence
  Non-cyclic GFR-binding peptide
  MOD_RES (1), (2), (36): Xaa is C or S
  MOD_RES (16), (17), (18), (19), (20): Xaa is A or G
  MOD_RES (21), (22), (23), (24): Xaa is A or G or is absent
XXAPTQLSPISVLYIXXXXXXXXXYKQYENMVVRAX

SEQ ID NO: 18367 - protein, 37 aa, Artificial Sequence
  Non-cyclic GFR-binding peptide
  MOD_RES (1), (2), (36): Xaa is C or S
  MOD_RES (16), (17), (18), (19), (20): Xaa is A or G
  MOD_RES (21), (22), (23), (24): Xaa is A or G or is absent
XXVPTELEPISMLYLXXXXXXXXXKFKYEEMVVEGXG

SEQ ID NO: 18368 - protein, 42 aa, Artificial Sequence
  Non-cyclic GFR-binding peptide
  MOD_RES (4), (5), (39), (41): Xaa is C or S
  MOD_RES (19), (20), (21), (22), (23): Xaa is A or G
  MOD_RES (24), (25), (26), (27): Xaa is A or G or is absent
PKPXXAPTKLSPISVLYIXXXXXXXXXYKQYENMVVRSXGXH

SEQ ID NO: 18369 - protein, 39 aa, Artificial Sequence
  Non-cyclic GFR-binding peptide
  MOD_RES (6), (7): Xaa is C or S
  MOD_RES (21), (22), (23), (24), (25): Xaa is A or G
  MOD_RES (26), (27), (28), (29): Xaa is A or G or is absent
AAPASXXVPARLNAISILYFXXXXXXXXXLKKYRDMVVE

SEQ ID NO: 18370 - protein, 35 aa, Artificial Sequence
  Non-cyclic GFR-binding peptide
  MOD_RES (1), (35): Xaa is C or S
  MOD_RES (15), (16), (17), (18), (19): Xaa is A or G
  MOD_RES (20), (21), (22), (23): Xaa is A or G or is absent
XAPTKLEPISVLYLXXXXXXXXXKFKYENMVVKAX

SEQ ID NO: 18371 - protein, 42 aa, Artificial Sequence
  Non-cyclic GFR-binding peptide
  MOD_RES (5), (6), (40), (42): Xaa is C or S
  MOD_RES (20), (21), (22), (23), (24): Xaa is A or G
  MOD_RES (25), (26), (27), (28): Xaa is A or G or is absent
VPKPXXAPTQLEPISVLYLXXXXXXXXXKFKYENMVVRAXGX

SEQ ID NO: 18372 - protein, 35 aa, Artificial Sequence
  Non-cyclic GFR-binding peptide
  MOD_RES (32), (34): Xaa is C or S
VPARLEPISILYLDAANNVVKFKYEDMVVEAXGXR

SEQ ID NO: 18373 - protein, 40 aa, Artificial Sequence
  Non-cyclic GFR-binding peptide
  MOD_RES (5), (6), (38), (40): Xaa is C or S
APASXXVPARLSPISILYKDAANNVVLKYHYDMVVEAXGX

SEQ ID NO: 18374 - protein, 37 aa, Artificial Sequence
  Non-cyclic GFR-binding peptide
  MOD_RES (34), (36): Xaa is C or S
  MOD_RES (14), (15), (16), (17), (18): Xaa is A or G
  MOD_RES (19), (20), (21), (22): Xaa is A or G or is absent
APTKLEPISVLYLXXXXXXXXXKFKYENMVVKAXGXH

SEQ ID NO: 18375 - protein, 37 aa, Artificial Sequence
  Non-cyclic GFR-binding peptide
  MOD_RES (2), (3), (37): Xaa is C or S
  MOD_RES (17), (18), (19), (20), (21): Xaa is A or G
  MOD_RES (22), (23), (24), (25): Xaa is A or G or is absent
AXXVPTELSPISMLYIXXXXXXXXXYKQYEEMVVEGX

SEQ ID NO: 18376 - protein, 37 aa, Artificial Sequence
  Non-cyclic GFR-binding peptide
  MOD_RES (4), (5): Xaa is C or S
  MOD_RES (19), (20), (21), (22), (23): Xaa is A or G
  MOD_RES (24), (25), (26), (27): Xaa is A or G or is absent
PKPXXAPTKLEPISVLYLXXXXXXXXXKFKYENMVVR

SEQ ID NO: 18377 - protein, 35 aa, Artificial Sequence
  Non-cyclic GFR-binding peptide
  MOD_RES (3), (4): Xaa is C or S
KPXXAPTKLEPISVLYLDDSSNVIKFKYENMVVRS

SEQ ID NO: 18378 - protein, 40 aa, Artificial Sequence
  Non-cyclic GFR-binding peptide
  MOD_RES (3), (4), (39): Xaa is C or S
  MOD_RES (18), (19), (20), (21), (22): Xaa is A or G
  MOD_RES (23), (24), (25), (26): Xaa is A or G or is absent
KAXXVPTKLEPISVLYLXXXXXXXXXKFKYEEGMSVAEXG

SEQ ID NO: 18379 - protein, 38 aa, Artificial Sequence
  Non-cyclic GFR-binding peptide
  MOD_RES (4), (5), (37): Xaa is C or S
PASXXVPARLEPISILYLDAANNVVKFKYEDMVVEAXG

SEQ ID NO: 18380 - protein, 32 aa, Artificial Sequence
  Non-cyclic GFR-binding peptide
  MOD_RES (1), (2): Xaa is C or S
XXVPQALEPISILYLVGRKPKVKFKYEMIVRS

SEQ ID NO: 18381 - protein, 34 aa, Artificial Sequence
  Non-cyclic GFR-binding peptide
  MOD_RES (1), (34): Xaa is C or S
  MOD_RES (15), (16), (17), (18), (19): Xaa is A or G
  MOD_RES (20), (21), (22), (23): Xaa is A or G or is absent
XVPQDLEPISILYLXXXXXXXXXKFKYEMVVKSX

SEQ ID NO: 18382 - protein, 38 aa, Artificial Sequence
  Non-cyclic GFR-binding peptide
  MOD_RES (2), (3), (35), (37): Xaa is C or S
AXXVPTKLSPISILYKDKGVVTYLKYHYGMAVSEXGXR

SEQ ID NO: 18383 - protein, 41 aa, Artificial Sequence
  Non-cyclic GFR-binding peptide
  MOD_RES (2), (3), (38), (40): Xaa is C or S
  MOD_RES (17), (18), (19), (20), (21): Xaa is A or G
  MOD_RES (22), (23), (24), (25): Xaa is A or G or is absent
AXXVPTKLEPISVLYLXXXXXXXXXKFKYEEGMSVAEXGXR

SEQ ID NO: 18384 - protein, 43 aa, Artificial Sequence
  Non-cyclic GFR-binding peptide
  MOD_RES (5), (6), (40), (42): Xaa is C or S
  MOD_RES (20), (21), (22), (23), (24): Xaa is A or G
  MOD_RES (25), (26), (27), (28): Xaa is A or G or is absent
APASXXVPARLNAISILYFXXXXXXXXXLKKYRDMVVEAXGXR

SEQ ID NO: 18385 - protein, 41 aa, Artificial Sequence
  Non-cyclic GFR-binding peptide
  MOD_RES (4), (5), (38), (40): Xaa is C or S
GKAXXVPTKLEPISVLYLDDMGVPTKFKYEEGMSVAEXGXR

SEQ ID NO: 18386 - protein, 43 aa, Artificial Sequence
  Non-cyclic GFR-binding peptide
  MOD_RES (6), (7), (41), (43): Xaa is C or S
  MOD_RES (21), (22), (23), (24), (25): Xaa is A or G
  MOD_RES (26), (27), (28), (29): Xaa is A or G or is absent
KIPKAXXVPTELEPISMLYLXXXXXXXXXKFKYEDMVVEGXGX

SEQ ID NO: 18387 - protein, 42 aa, Artificial Sequence
  Non-cyclic GFR-binding peptide
  MOD_RES (4), (5), (40), (42): Xaa is C or S
  MOD_RES (19), (20), (21), (22), (23): Xaa is A or G
  MOD_RES (24), (25), (26), (27): Xaa is A or G or is absent
GKAXXVPTKLEPISVLYLXXXXXXXXXKFKYEEGMSVAEXGX

SEQ ID NO: 18388 - protein, 37 aa, Artificial Sequence
  Non-cyclic GFR-binding peptide
  MOD_RES (1), (2), (35), (37): Xaa is C or S
  MOD_RES (16), (17), (18), (19), (20): Xaa is A or G
  MOD_RES (21), (22), (23), (24): Xaa is A or G or is absent
XXVPQDLEPISILYLXXXXXXXXXKFKYEMVVKSXKX

SEQ ID NO: 18389 - protein, 35 aa, Artificial Sequence
  Non-cyclic GFR-binding peptide
  MOD_RES (34), (34): Xaa is C or S
  MOD_RES (14), (15), (16), (17), (18): Xaa is A or G
  MOD_RES (19), (20), (21), (22): Xaa is A or G or is absent
APTQLEPISVLYLXXXXXXXXXKFKYENMVVRAXG

SEQ ID NO: 18390 - protein, 35 aa, Artificial Sequence
  Non-cyclic GFR-binding peptide
  MOD_RES (3), (4), (35): Xaa is C or S
SPXXVPQDLSPISILYIVGRTPKVYKQYEMVVKSX

SEQ ID NO: 18391 - protein, 40 aa, Artificial Sequence
  Non-cyclic GFR-binding peptide
  MOD_RES (3), (4), (38), (40): Xaa is C or S
  MOD_RES (18), (19), (20), (21), (22): Xaa is A or G
  MOD_RES (23), (24), (25), (26): Xaa is A or G or is absent
KAXXVPTELEPISMLYLXXXXXXXXXKFKYEEMVVEGXGX

SEQ ID NO: 18392 - protein, 43 aa, Artificial Sequence
  Non-cyclic GFR-binding peptide
  MOD_RES (5), (6), (40), (42): Xaa is C or S
  MOD_RES (20), (21), (22), (23), (24): Xaa is A or G
  MOD_RES (25), (26), (27), (28): Xaa is A or G or is absent
APASXXVPARLEPISILYLXXXXXXXXXKFKYEDMVVEAXGXR

SEQ ID NO: 18393 - protein, 34 aa, Artificial Sequence
  Non-cyclic GFR-binding peptide
  MOD_RES (2), (3): Xaa is C or S
AXXVPTKLSPISILYIDKGVVTYYKQYEGMAVSE

SEQ ID NO: 18394 - protein, 33 aa, Artificial Sequence
  Non-cyclic GFR-binding peptide
  MOD_RES (1), (32): Xaa is C or S
XVPQALSPISILYIVGRKPKVYKQYEMIVRSXK

SEQ ID NO: 18395 - protein, 37 aa, Artificial Sequence
  Non-cyclic GFR-binding peptide
  MOD_RES (5), (6), (37): Xaa is C or S
SAAPXXVPQALEPISILYLVGRKPKVKFKYEMIVRSX

SEQ ID NO: 18396 - protein, 34 aa, Artificial Sequence
  Non-cyclic GFR-binding peptide
  MOD_RES (32), (34): Xaa is C or S
APTQLEPISVLYLDDSSNVIKFKYENMVVRAXGX

SEQ ID NO: 18397 - protein, 43 aa, Artificial Sequence
  Non-cyclic GFR-binding peptide
  MOD_RES (6), (7), (41), (43): Xaa is C or S
  MOD_RES (21), (22), (23), (24), (25): Xaa is A or G
  MOD_RES (26), (27), (28), (29): Xaa is A or G or is absent
AAPASXXVPARLEPISILYLXXXXXXXXXKFKYEDMVVEAXGX

SEQ ID NO: 18398 - protein, 39 aa, Artificial Sequence
  Non-cyclic GFR-binding peptide
  MOD_RES (6), (7): Xaa is C or S
  MOD_RES (21), (22), (23), (24), (25): Xaa is A or G
  MOD_RES (26), (27), (28), (29): Xaa is A or G or is absent
ASASPXXVPQDLEPISILYLXXXXXXXXXKFKYEMVVKS

SEQ ID NO: 18399 - protein, 40 aa, Artificial Sequence
  Non-cyclic GFR-binding peptide
  MOD_RES (6), (7), (38), (40): Xaa is C or S
ASASPXXVPQDLEPISILYLVGRTPKVKFKYEMVVKSXKX

SEQ ID NO: 18400 - protein, 37 aa, Artificial Sequence
  Non-cyclic GFR-binding peptide
  MOD_RES (4), (5): Xaa is C or S
  MOD_RES (19), (20), (21), (22), (23): Xaa is A or G
  MOD_RES (24), (25), (26), (27): Xaa is A or G or is absent
AAPXXVPQALSPISILYIXXXXXXXXXYKQYEMIVRS

SEQ ID NO: 18401 - protein, 35 aa, Artificial Sequence
  Non-cyclic GFR-binding peptide
  MOD_RES (1), (33), (35): Xaa is C or S
XVPTKLNAISILYFDKGVVTYLKKYRGMAVSEXGX

SEQ ID NO: 18402 - protein, 30 aa, Artificial Sequence
  Non-cyclic GFR-binding peptide
VPARLSPISILYKDAANNVVLKYHYDMVVE

SEQ ID NO: 18403 - protein, 35 aa, Artificial Sequence
  Non-cyclic GFR-binding peptide
  MOD_RES (2), (3): Xaa is C or S
AXXVPTKLEPISVLYLDDMGVPTKFKYEEGMSVAE

SEQ ID NO: 18404 - protein, 36 aa, Artificial Sequence
  Non-cyclic GFR-binding peptide
  MOD_RES (5), (6): Xaa is C or S
IPKAXXVPTELEPISMLYLDENEKVVKFKYEDMVVE

SEQ ID NO: 18405 - protein, 35 aa, Artificial Sequence
  Non-cyclic GFR-binding peptide
  MOD_RES (34), (34): Xaa is C or S
  MOD_RES (14), (15), (16), (17), (18): Xaa is A or G
  MOD_RES (19), (20), (21), (22): Xaa is A or G or is absent
VPARLSPISILYKXXXXXXXXXLKYHYDMVVEAXG

SEQ ID NO: 18406 - protein, 38 aa, Artificial Sequence
  Non-cyclic GFR-binding peptide
  MOD_RES (2), (36), (38): Xaa is C or S
  MOD_RES (16), (17), (18), (19), (20): Xaa is A or G
  MOD_RES (21), (22), (23), (24): Xaa is A or G or is absent
TXAPTKLEPISVLYLXXXXXXXXXKFKYENMVVRSXGX

SEQ ID NO: 18407 - protein, 36 aa, Artificial Sequence
  Non-cyclic GFR-binding peptide
  MOD_RES (1), (2), (34), (36): Xaa is C or S
XXVPTELEPISMLYLDENEKVVKFKYEDMVVEGXGX

SEQ ID NO: 18408 - protein, 40 aa, Artificial Sequence
  Non-cyclic GFR-binding peptide
  MOD_RES (3), (4), (38), (40): Xaa is C or S
  MOD_RES (18), (19), (20), (21), (22): Xaa is A or G
  MOD_RES (23), (24), (25), (26): Xaa is A or G or is absent
KAXXVPTELEPISMLYLXXXXXXXXXKFKYEDMVVEGXGX

SEQ ID NO: 18409 - protein, 34 aa, Artificial Sequence
  Non-cyclic GFR-binding peptide
  MOD_RES (3), (4): Xaa is C or S
KAXXVPTELSPISMLYIDEYDKVVYKQYEEMVVE

SEQ ID NO: 18410 - protein, 33 aa, Artificial Sequence
  Non-cyclic GFR-binding peptide
  MOD_RES (31), (33): Xaa is C or S
VPQALEPISILYLVGRKPKVKFKYEMIVRSXKX

SEQ ID NO: 18411 - protein, 37 aa, Artificial Sequence
  Non-cyclic GFR-binding peptide
  MOD_RES (5), (6), (37): Xaa is C or S
SAAPXXVPQALSPISILYIVGRKPKVYKQYEMIVRSX

SEQ ID NO: 18412 - protein, 33 aa, Artificial Sequence
  Non-cyclic GFR-binding peptide
  MOD_RES (1), (33): Xaa is C or S
XVPTELEPISMLYLDENEKVVKFKYEDMVVEGX

SEQ ID NO: 18413 - protein, 35 aa, Artificial Sequence
  Non-cyclic GFR-binding peptide
  MOD_RES (4), (5): Xaa is C or S
PKPXXAPTQLEPISVLYLDDSSNVIKFKYENMVVR

SEQ ID NO: 18414 - protein, 43 aa, Artificial Sequence
  Non-cyclic GFR-binding peptide
  MOD_RES (6), (7), (41), (43): Xaa is C or S
  MOD_RES (21), (22), (23), (24), (25): Xaa is A or G
  MOD_RES (26), (27), (28), (29): Xaa is A or G or is absent
KASKAXXVPTKLSPISILYKXXXXXXXXXLKYHYGMAVSEXGX

SEQ ID NO: 18415 - protein, 44 aa, Artificial Sequence
  Non-cyclic GFR-binding peptide
  MOD_RES (5), (6), (41), (43): Xaa is C or S
  MOD_RES (20), (21), (22), (23), (24): Xaa is A or G
  MOD_RES (25), (26), (27), (28): Xaa is A or G or is absent
VGKAXXVPTKLEPISVLYLXXXXXXXXXKFKYEEGMSVAEXGXR

SEQ ID NO: 18416 - protein, 43 aa, Artificial Sequence
  Non-cyclic GFR-binding peptide
  MOD_RES (5), (6), (40), (42): Xaa is C or S
  MOD_RES (20), (21), (22), (23), (24): Xaa is A or G
  MOD_RES (25), (26), (27), (28): Xaa is A or G or is absent
IPKAXXVPTELSPISMLYIXXXXXXXXXYKQYEDMVVEGXGXR

SEQ ID NO: 18417 - protein, 42 aa, Artificial Sequence
  Non-cyclic GFR-binding peptide
  MOD_RES (4), (5), (39), (41): Xaa is C or S
  MOD_RES (19), (20), (21), (22), (23): Xaa is A or G
  MOD_RES (24), (25), (26), (27): Xaa is A or G or is absent
PKPXXAPTQLSPISVLYIXXXXXXXXXYKQYENMVVRAXGXH

SEQ ID NO: 18418 - protein, 37 aa, Artificial Sequence
  Non-cyclic GFR-binding peptide
  MOD_RES (3), (4), (37): Xaa is C or S
  MOD_RES (18), (19), (20), (21), (22): Xaa is A or G
  MOD_RES (23), (24), (25), (26): Xaa is A or G or is absent
SPXXVSQDLSPISILYIXXXXXXXXXYKQYEMIVKSX

SEQ ID NO: 18419 - protein, 34 aa, Artificial Sequence
  Non-cyclic GFR-binding peptide
  MOD_RES (1), (2): Xaa is C or S
  MOD_RES (16), (17), (18), (19), (20): Xaa is A or G
  MOD_RES (21), (22), (23), (24): Xaa is A or G or is absent
XXVPQALSPISILYIXXXXXXXXXYKQYEMIVRS

SEQ ID NO: 18420 - protein, 37 aa, Artificial Sequence
  Non-cyclic GFR-binding peptide
  MOD_RES (3), (4): Xaa is C or S
  MOD_RES (18), (19), (20), (21), (22): Xaa is A or G
  MOD_RES (23), (24), (25), (26): Xaa is A or G or is absent
KPXXAPTQLSPISVLYIXXXXXXXXXYKQYENMVVRA

SEQ ID NO: 18421 - protein, 38 aa, Artificial Sequence
  Non-cyclic GFR-binding peptide
  MOD_RES (6), (7), (38): Xaa is C or S
ASASPXXVSQDLSPISILYIIGKTPKIYKQYEMIVKSX

SEQ ID NO: 18422 - protein, 34 aa, Artificial Sequence
  Non-cyclic GFR-binding peptide
  MOD_RES (1), (2), (33): Xaa is C or S
XXVPQALSPISILYIVGRKPKVYKQYEMIVRSXK

SEQ ID NO: 18423 - protein, 41 aa, Artificial Sequence
  Non-cyclic GFR-binding peptide
  MOD_RES (6), (7), (41): Xaa is C or S
  MOD_RES (21), (22), (23), (24), (25): Xaa is A or G
  MOD_RES (26), (27), (28), (29): Xaa is A or G or is absent
YVPKPXXAPTKLEPISVLYLXXXXXXXXXKFKYENMVVRSX

SEQ ID NO: 18424 - protein, 43 aa, Artificial Sequence
  Non-cyclic GFR-binding peptide
  MOD_RES (5), (6), (40), (42): Xaa is C or S
  MOD_RES (20), (21), (22), (23), (24): Xaa is A or G
  MOD_RES (25), (26), (27), (28): Xaa is A or G or is absent
VPKPXXAPTKLSPISVLYIXXXXXXXXXYKQYENMVVRSXGXH

SEQ ID NO: 18425 - protein, 37 aa, Artificial Sequence
  Non-cyclic GFR-binding peptide
  MOD_RES (4), (5): Xaa is C or S
  MOD_RES (19), (20), (21), (22), (23): Xaa is A or G
  MOD_RES (24), (25), (26), (27): Xaa is A or G or is absent
PKAXXVPTELEPISMLYLXXXXXXXXXKFKYEDMVVE

SEQ ID NO: 18426 - protein, 34 aa, Artificial Sequence
  Non-cyclic GFR-binding peptide
  MOD_RES (1), (1): Xaa is C or S
  MOD_RES (15), (16), (17), (18), (19): Xaa is A or G
  MOD_RES (20), (21), (22), (23): Xaa is A or G or is absent
XAPTKLEPISVLYLXXXXXXXXXKFKYENMVVRS

SEQ ID NO: 18427 - protein, 39 aa, Artificial Sequence
  Non-cyclic GFR-binding peptide
  MOD_RES (3), (4), (36), (38): Xaa is C or S
KPXXAPTQLEPISVLYLDDSSNVIKFKYENMVVRAXGXH

SEQ ID NO: 18428 - protein, 35 aa, Artificial Sequence
  Non-cyclic GFR-binding peptide
  MOD_RES (1), (2), (34): Xaa is C or S
XXVPTELEPISMLYLDEYDKVVKFKYEEMVVEGXG

SEQ ID NO: 18429 - protein, 38 aa, Artificial Sequence
  Non-cyclic GFR-binding peptide
  MOD_RES (4), (5), (36), (38): Xaa is C or S
ASPXXVSQDLEPISILYLIGKTPKIKFKYEMIVKSXKX

SEQ ID NO: 18430 - protein, 33 aa, Artificial Sequence
  Non-cyclic GFR-binding peptide
  MOD_RES (14), (15), (16), (17), (18): Xaa is A or G
  MOD_RES (19), (20), (21), (22): Xaa is A or G or is absent
VPTKLNAISILYFXXXXXXXXXLKKYRGMAVSE

SEQ ID NO: 18431 - protein, 34 aa, Artificial Sequence
  Non-cyclic GFR-binding peptide
  MOD_RES (3), (4): Xaa is C or S
ASXXVPARLEPISILYLDAANNVVKFKYEDMVVE

SEQ ID NO: 18432 - protein, 34 aa, Artificial Sequence
  Non-cyclic GFR-binding peptide
  MOD_RES (34), (34): Xaa is C or S
  MOD_RES (14), (15), (16), (17), (18): Xaa is A or G
  MOD_RES (19), (20), (21), (22): Xaa is A or G or is absent
APTKLSPISVLYIXXXXXXXXXYKQYENMVVRSX

SEQ ID NO: 18433 - protein, 41 aa, Artificial Sequence
  Non-cyclic GFR-binding peptide
  MOD_RES (6), (7), (41): Xaa is C or S
  MOD_RES (21), (22), (23), (24), (25): Xaa is A or G
  MOD_RES (26), (27), (28), (29): Xaa is A or G or is absent
YVPKPXXAPTKLSPISVLYIXXXXXXXXXYKQYENMVVRSX

SEQ ID NO: 18434 - protein, 37 aa, Artificial Sequence
  Non-cyclic GFR-binding peptide
  MOD_RES (34), (36): Xaa is C or S
  MOD_RES (14), (15), (16), (17), (18): Xaa is A or G
  MOD_RES (19), (20), (21), (22): Xaa is A or G or is absent
VPARLSPISILYKXXXXXXXXXLKYHYDMVVEAXGXR

SEQ ID NO: 18435 - protein, 34 aa, Artificial Sequence
  Non-cyclic GFR-binding peptide
  MOD_RES (1), (33): Xaa is C or S
XAPTKLSPISVLYIDSSNNVIYKQYENMVVKAXG

SEQ ID NO: 18436 - protein, 36 aa, Artificial Sequence
  Non-cyclic GFR-binding peptide
  MOD_RES (2), (3), (35): Xaa is C or S
PXXAPTKLSPISVLYIDDSSNVIYKQYENMVVRSXG

SEQ ID NO: 18437 - protein, 36 aa, Artificial Sequence
  Non-cyclic GFR-binding peptide
  MOD_RES (1), (2), (34), (36): Xaa is C or S
XXVPARLEPISILYLDAANNVVKFKYEDMVVEAXGX

SEQ ID NO: 18438 - protein, 40 aa, Artificial Sequence
  Non-cyclic GFR-binding peptide
  MOD_RES (6), (7), (38), (40): Xaa is C or S
ASASPXXVSQDLSPISILYIIGKTPKIYKQYEMIVKSXKX

SEQ ID NO: 18439 - protein, 40 aa, Artificial Sequence
  Non-cyclic GFR-binding peptide
  MOD_RES (6), (7), (39): Xaa is C or S
KIPKAXXVPTELEPISMLYLDENEKVVKFKYEDMVVEGXG

SEQ ID NO: 18440 - protein, 32 aa, Artificial Sequence
  Non-cyclic GFR-binding peptide
  MOD_RES (1), (2): Xaa is C or S
XXAPTKLEPISVLYLDDSSNVIKFKYENMVVR

SEQ ID NO: 18441 - protein, 40 aa, Artificial Sequence
  Non-cyclic GFR-binding peptide
  MOD_RES (4), (5), (37), (39): Xaa is C or S
PKAXXVPTELSPISMLYIDEYDKVVYKQYEEMVVEGXGXR

SEQ ID NO: 18442 - protein, 35 aa, Artificial Sequence
  Non-cyclic GFR-binding peptide
  MOD_RES (2), (3): Xaa is C or S
  MOD_RES (17), (18), (19), (20), (21): Xaa is A or G
  MOD_RES (22), (23), (24), (25): Xaa is A or G or is absent
SXXVPARLEPISILYLXXXXXXXXXKFKYEDMVVE

SEQ ID NO: 18443 - protein, 37 aa, Artificial Sequence
  Non-cyclic GFR-binding peptide
  MOD_RES (2), (3), (36): Xaa is C or S
  MOD_RES (17), (18), (19), (20), (21): Xaa is A or G
  MOD_RES (22), (23), (24), (25): Xaa is A or G or is absent
PXXVPQDLSPISILYIXXXXXXXXXYKQYEMVVKSXK

SEQ ID NO: 18444 - protein, 36 aa, Artificial Sequence
  Non-cyclic GFR-binding peptide
  MOD_RES (5), (6): Xaa is C or S
IPKAXXVPTELSPISMLYIDENEKVVYKQYEDMVVE

SEQ ID NO: 18445 - protein, 33 aa, Artificial Sequence
  Non-cyclic GFR-binding peptide
  MOD_RES (1), (2): Xaa is C or S
XXVPTELEPISMLYLDENEKVVKFKYEDMVVEG

SEQ ID NO: 18446 - protein, 39 aa, Artificial Sequence
  Non-cyclic GFR-binding peptide
  MOD_RES (4), (5), (39): Xaa is C or S
  MOD_RES (19), (20), (21), (22), (23): Xaa is A or G
  MOD_RES (24), (25), (26), (27): Xaa is A or G or is absent
PASXXVPARLNAISILYFXXXXXXXXXLKKYRDMVVEAX

SEQ ID NO: 18447 - protein, 40 aa, Artificial Sequence
  Non-cyclic GFR-binding peptide
  MOD_RES (4), (5), (39): Xaa is C or S
  MOD_RES (19), (20), (21), (22), (23): Xaa is A or G
  MOD_RES (24), (25), (26), (27): Xaa is A or G or is absent
PKPXXAPTKLEPISVLYLXXXXXXXXXKFKYENMVVRSXG

SEQ ID NO: 18448 - protein, 42 aa, Artificial Sequence
  Non-cyclic GFR-binding peptide
  MOD_RES (6), (7), (40), (42): Xaa is C or S
KVGKAXXVPTKLEPISVLYLDDMGVPTKFKYEEGMSVAEXGX

SEQ ID NO: 18449 - protein, 38 aa, Artificial Sequence
  Non-cyclic GFR-binding peptide
  MOD_RES (4), (5), (38): Xaa is C or S
  MOD_RES (19), (20), (21), (22), (23): Xaa is A or G
  MOD_RES (24), (25), (26), (27): Xaa is A or G or is absent
ASPXXVPQDLSPISILYIXXXXXXXXXYKQYEMVVKSX

SEQ ID NO: 18450 - protein, 38 aa, Artificial Sequence
  Non-cyclic GFR-binding peptide
  MOD_RES (5), (6): Xaa is C or S
  MOD_RES (20), (21), (22), (23), (24): Xaa is A or G
  MOD_RES (25), (26), (27), (28): Xaa is A or G or is absent
ASKAXXVPTKLSPISILYIXXXXXXXXXYKQYEGMAVS

SEQ ID NO: 18451 - protein, 34 aa, Artificial Sequence
  Non-cyclic GFR-binding peptide
  MOD_RES (2), (3), (34): Xaa is C or S
PXXVSQDLEPISILYLIGKTPKIKFKYEMIVKSX

SEQ ID NO: 18452 - protein, 35 aa, Artificial Sequence
  Non-cyclic GFR-binding peptide
  MOD_RES (2), (3), (35): Xaa is C or S
PXXAPTQLSPISVLYIDDSSNVIYKQYENMVVRAX

SEQ ID NO: 18453 - protein, 38 aa, Artificial Sequence
  Non-cyclic GFR-binding peptide
  MOD_RES (2), (3), (37): Xaa is C or S
  MOD_RES (17), (18), (19), (20), (21): Xaa is A or G
  MOD_RES (22), (23), (24), (25): Xaa is A or G or is absent
AXXVPTELSPISMLYIXXXXXXXXXYKQYEEMVVEGXG

SEQ ID NO: 18454 - protein, 40 aa, Artificial Sequence
  Non-cyclic GFR-binding peptide
  MOD_RES (4), (5), (37), (39): Xaa is C or S
PKPXXAPTKLSPISVLYIDDSSNVIYKQYENMVVRSXGXH

SEQ ID NO: 18455 - protein, 35 aa, Artificial Sequence
  Non-cyclic GFR-binding peptide
  MOD_RES (2), (3), (35): Xaa is C or S
AXXVPTELEPISMLYLDEYDKVVKFKYEEMVVEGX

SEQ ID NO: 18456 - protein, 40 aa, Artificial Sequence
  Non-cyclic GFR-binding peptide
  MOD_RES (7), (7): Xaa is C or S
  MOD_RES (21), (22), (23), (24), (25): Xaa is A or G
  MOD_RES (26), (27), (28), (29): Xaa is A or G or is absent
HVTKPTXAPTKLSPISVLYIXXXXXXXXXYKQYENMVVRS

SEQ ID NO: 18457 - protein, 34 aa, Artificial Sequence
  Non-cyclic GFR-binding peptide
  MOD_RES (1), (33): Xaa is C or S
XVPTKLSPISILYKDKGVVTYLKYHYGMAVSEXG

SEQ ID NO: 18458 - protein, 38 aa, Artificial Sequence
  Non-cyclic GFR-binding peptide
  MOD_RES (3), (4), (37): Xaa is C or S
  MOD_RES (18), (19), (20), (21), (22): Xaa is A or G
  MOD_RES (23), (24), (25), (26): Xaa is A or G or is absent
SPXXVSQDLEPISILYLXXXXXXXXXKFKYEMIVKSXK

SEQ ID NO: 18459 - protein, 43 aa, Artificial Sequence
  Non-cyclic GFR-binding peptide
  MOD_RES (6), (7), (41), (43): Xaa is C or S
  MOD_RES (21), (22), (23), (24), (25): Xaa is A or G
  MOD_RES (26), (27), (28), (29): Xaa is A or G or is absent
TVPKPXXAPTQLSPISVLYIXXXXXXXXXYKQYENMVVRAXGX

SEQ ID NO: 18460 - protein, 35 aa, Artificial Sequence
  Non-cyclic GFR-binding peptide
  MOD_RES (1), (2): Xaa is C or S
  MOD_RES (16), (17), (18), (19), (20): Xaa is A or G
  MOD_RES (21), (22), (23), (24): Xaa is A or G or is absent
XXVPTKLSPISILYIXXXXXXXXXYKQYEGMAVSE

SEQ ID NO: 18461 - protein, 34 aa, Artificial Sequence
  Non-cyclic GFR-binding peptide
  MOD_RES (14), (15), (16), (17), (18): Xaa is A or G
  MOD_RES (19), (20), (21), (22): Xaa is A or G or is absent
VPTKLSPISVLYIXXXXXXXXXYKQYEEGMSVAE

SEQ ID NO: 18462 - protein, 33 aa, Artificial Sequence
  Non-cyclic GFR-binding peptide
  MOD_RES (1), (1): Xaa is C or S
  MOD_RES (15), (16), (17), (18), (19): Xaa is A or G
  MOD_RES (20), (21), (22), (23): Xaa is A or G or is absent
XVPQALEPISILYLXXXXXXXXXKFKYEMIVRS

SEQ ID NO: 18463 - protein, 37 aa, Artificial Sequence
  Non-cyclic GFR-binding peptide
  MOD_RES (4), (5), (37): Xaa is C or S
PKPXXAPTQLEPISVLYLDDSSNVIKFKYENMVVRAX

SEQ ID NO: 18464 - protein, 39 aa, Artificial Sequence
  Non-cyclic GFR-binding peptide
  MOD_RES (6), (7): Xaa is C or S
  MOD_RES (21), (22), (23), (24), (25): Xaa is A or G
  MOD_RES (26), (27), (28), (29): Xaa is A or G or is absent
KIPKAXXVPTELEPISMLYLXXXXXXXXXKFKYEDMVVE

SEQ ID NO: 18465 - protein, 37 aa, Artificial Sequence
  Non-cyclic GFR-binding peptide
  MOD_RES (1), (2), (36): Xaa is C or S
  MOD_RES (16), (17), (18), (19), (20): Xaa is A or G
  MOD_RES (21), (22), (23), (24): Xaa is A or G or is absent
XXAPTQLSPISVLYIXXXXXXXXXYKQYENMVVRAXG

SEQ ID NO: 18466 - protein, 36 aa, Artificial Sequence
  Non-cyclic GFR-binding peptide
  MOD_RES (4), (5), (36): Xaa is C or S
AAPXXVPQALSPISILYIVGRKPKVYKQYEMIVRSX

SEQ ID NO: 18467 - protein, 41 aa, Artificial Sequence
  Non-cyclic GFR-binding peptide
  MOD_RES (5), (6), (38), (40): Xaa is C or S
ASKAXXVPTKLSPISILYKDKGVVTYLKYHYGMAVSEXGXR

SEQ ID NO: 18468 - protein, 40 aa, Artificial Sequence
  Non-cyclic GFR-binding peptide
  MOD_RES (5), (6), (38), (40): Xaa is C or S
VPKPXXAPTKLSPISVLYIDDSSNVIYKQYENMVVRSXGX

SEQ ID NO: 18469 - protein, 37 aa, Artificial Sequence
  Non-cyclic GFR-binding peptide
  MOD_RES (2), (3), (36): Xaa is C or S
AXXVPTKLSPISVLYIDDMGVPTYKQYEEGMSVAEXG

SEQ ID NO: 18470 - protein, 37 aa, Artificial Sequence
  Non-cyclic GFR-binding peptide
  MOD_RES (5), (6): Xaa is C or S
VPKPXXAPTQLSPISVLYIDDSSNVIYKQYENMVVRA

SEQ ID NO: 18471 - protein, 35 aa, Artificial Sequence
  Non-cyclic GFR-binding peptide
  MOD_RES (2), (3), (35): Xaa is C or S
PXXAPTQLEPISVLYLDDSSNVIKFKYENMVVRAX

SEQ ID NO: 18472 - protein, 41 aa, Artificial Sequence
  Non-cyclic GFR-binding peptide
  MOD_RES (5), (6), (38), (40): Xaa is C or S
VPKAXXAPTKLSPISVLYIDSSNNVIYKQYENMVVKAXGXH

SEQ ID NO: 18473 - protein, 41 aa, Artificial Sequence
  Non-cyclic GFR-binding peptide
  MOD_RES (5), (6), (39), (41): Xaa is C or S
  MOD_RES (20), (21), (22), (23), (24): Xaa is A or G
  MOD_RES (25), (26), (27), (28): Xaa is A or G or is absent
SASPXXVPQDLSPISILYIXXXXXXXXXYKQYEMVVKSXKX

SEQ ID NO: 18474 - protein, 31 aa, Artificial Sequence
  Non-cyclic GFR-binding peptide
  MOD_RES (1), (1): Xaa is C or S
XAPTQLEPISVLYLDDSSNVIKFKYENMVVR

SEQ ID NO: 18475 - protein, 39 aa, Artificial Sequence
  Non-cyclic GFR-binding peptide
  MOD_RES (2), (3), (38): Xaa is C or S
  MOD_RES (17), (18), (19), (20), (21): Xaa is A or G
  MOD_RES (22), (23), (24), (25): Xaa is A or G or is absent
AXXVPTKLSPISVLYIXXXXXXXXXYKQYEEGMSVAEXG

SEQ ID NO: 18476 - protein, 35 aa, Artificial Sequence
  Non-cyclic GFR-binding peptide
  MOD_RES (2), (3): Xaa is C or S
  MOD_RES (17), (18), (19), (20), (21): Xaa is A or G
  MOD_RES (22), (23), (24), (25): Xaa is A or G or is absent
PXXVSQDLSPISILYIXXXXXXXXXYKQYEMIVKS

SEQ ID NO: 18477 - protein, 37 aa, Artificial Sequence
  Non-cyclic GFR-binding peptide
  MOD_RES (6), (7): Xaa is C or S
TVPKPXXAPTQLEPISVLYLDDSSNVIKFKYENMVVR

SEQ ID NO: 18478 - protein, 39 aa, Artificial Sequence
  Non-cyclic GFR-binding peptide
  MOD_RES (6), (7), (39): Xaa is C or S
KASKAXXVPTKLNAISILYFDKGVVTYLKKYRGMAVSEX

SEQ ID NO: 18479 - protein, 42 aa, Artificial Sequence
  Non-cyclic GFR-binding peptide
  MOD_RES (4), (5), (39), (41): Xaa is C or S
  MOD_RES (19), (20), (21), (22), (23): Xaa is A or G
  MOD_RES (24), (25), (26), (27): Xaa is A or G or is absent
PASXXVPARLNAISILYFXXXXXXXXXLKKYRDMVVEAXGXR

SEQ ID NO: 18480 - protein, 40 aa, Artificial Sequence
  Non-cyclic GFR-binding peptide
  MOD_RES (6), (7): Xaa is C or S
  MOD_RES (21), (22), (23), (24), (25): Xaa is A or G
  MOD_RES (26), (27), (28), (29): Xaa is A or G or is absent
AVPKAXXAPTKLSPISVLYIXXXXXXXXXYKQYENMVVKA

SEQ ID NO: 18481 - protein, 36 aa, Artificial Sequence
  Non-cyclic GFR-binding peptide
  MOD_RES (2), (3), (36): Xaa is C or S
  MOD_RES (17), (18), (19), (20), (21): Xaa is A or G
  MOD_RES (22), (23), (24), (25): Xaa is A or G or is absent
PXXVSQDLSPISILYIXXXXXXXXXYKQYEMIVKSX

SEQ ID NO: 18482 - protein, 33 aa, Artificial Sequence
  Non-cyclic GFR-binding peptide
  MOD_RES (1), (2): Xaa is C or S
XXAPTKLEPISVLYLDDSSNVIKFKYENMVVRS

SEQ ID NO: 18483 - protein, 39 aa, Artificial Sequence
  Non-cyclic GFR-binding peptide
  MOD_RES (5), (6), (37), (39): Xaa is C or S
SASPXXVPQDLEPISILYLVGRTPKVKFKYEMVVKSXKX

SEQ ID NO: 18484 - protein, 40 aa, Artificial Sequence
  Non-cyclic GFR-binding peptide
  MOD_RES (6), (7), (40): Xaa is C or S
  MOD_RES (21), (22), (23), (24), (25): Xaa is A or G
  MOD_RES (26), (27), (28), (29): Xaa is A or G or is absent
ASAAPXXVPQALSPISILYIXXXXXXXXXYKQYEMIVRSX

SEQ ID NO: 18485 - protein, 37 aa, Artificial Sequence
  Non-cyclic GFR-binding peptide
  MOD_RES (5), (6): Xaa is C or S
IPKAXXVPTELSPISMLYIDEYDKVVYKQYEEMVVEG

SEQ ID NO: 18486 - protein, 37 aa, Artificial Sequence
  Non-cyclic GFR-binding peptide
  MOD_RES (6), (7): Xaa is C or S
ASASPXXVPQDLEPISILYLVGRTPKVKFKYEMVVKS

SEQ ID NO: 18487 - protein, 33 aa, Artificial Sequence
  Non-cyclic GFR-binding peptide
  MOD_RES (1), (33): Xaa is C or S
XVPARLSPISILYKDAANNVVLKYHYDMVVEAX

SEQ ID NO: 18488 - protein, 36 aa, Artificial Sequence
  Non-cyclic GFR-binding peptide
  MOD_RES (3), (4): Xaa is C or S
  MOD_RES (18), (19), (20), (21), (22): Xaa is A or G
  MOD_RES (23), (24), (25), (26): Xaa is A or G or is absent
KAXXVPTELSPISMLYIXXXXXXXXXYKQYEDMVVE

SEQ ID NO: 18489 - protein, 34 aa, Artificial Sequence
  Non-cyclic GFR-binding peptide
  MOD_RES (34), (34): Xaa is C or S
  MOD_RES (14), (15), (16), (17), (18): Xaa is A or G
  MOD_RES (19), (20), (21), (22): Xaa is A or G or is absent
APTQLEPISVLYLXXXXXXXXXKFKYENMVVRAX

SEQ ID NO: 18490 - protein, 38 aa, Artificial Sequence
  Non-cyclic GFR-binding peptide
  MOD_RES (3), (35), (37): Xaa is C or S
PTXAPTKLEPISVLYLDDSSNVIKFKYENMVVRSXGXH

SEQ ID NO: 18491 - protein, 43 aa, Artificial Sequence
  Non-cyclic GFR-binding peptide
  MOD_RES (5), (6), (40), (42): Xaa is C or S
  MOD_RES (20), (21), (22), (23), (24): Xaa is A or G
  MOD_RES (25), (26), (27), (28): Xaa is A or G or is absent
IPKAXXVPTELSPISMLYIXXXXXXXXXYKQYEEMVVEGXGXR

SEQ ID NO: 18492 - protein, 37 aa, Artificial Sequence
  Non-cyclic GFR-binding peptide
  MOD_RES (1), (35), (37): Xaa is C or S
  MOD_RES (15), (16), (17), (18), (19): Xaa is A or G
  MOD_RES (20), (21), (22), (23): Xaa is A or G or is absent
XAPTQLEPISVLYLXXXXXXXXXKFKYENMVVRAXGX

SEQ ID NO: 18493 - protein, 37 aa, Artificial Sequence
  Non-cyclic GFR-binding peptide
  MOD_RES (2), (3), (37): Xaa is C or S
  MOD_RES (17), (18), (19), (20), (21): Xaa is A or G
  MOD_RES (22), (23), (24), (25): Xaa is A or G or is absent
AXXVPTELSPISMLYIXXXXXXXXXYKQYEDMVVEGX

SEQ ID NO: 18494 - protein, 37 aa, Artificial Sequence
  Non-cyclic GFR-binding peptide
  MOD_RES (3), (4), (35), (37): Xaa is C or S
APXXVPQALEPISILYLVGRKPKVKFKYEMIVRSXKX

SEQ ID NO: 18495 - protein, 40 aa, Artificial Sequence
  Non-cyclic GFR-binding peptide
  MOD_RES (6), (7): Xaa is C or S
  MOD_RES (21), (22), (23), (24), (25): Xaa is A or G
  MOD_RES (26), (27), (28), (29): Xaa is A or G or is absent
KASKAXXVPTKLSPISILYKXXXXXXXXXLKYHYGMAVSE

SEQ ID NO: 18496 - protein, 35 aa, Artificial Sequence
  Non-cyclic GFR-binding peptide
  MOD_RES (3), (4): Xaa is C or S
KAXXVPTELSPISMLYIDEYDKVVYKQYEEMVVEG

SEQ ID NO: 18497 - protein, 40 aa, Artificial Sequence
  Non-cyclic GFR-binding peptide
  MOD_RES (4), (5), (39): Xaa is C or S
  MOD_RES (19), (20), (21), (22), (23): Xaa is A or G
  MOD_RES (24), (25), (26), (27): Xaa is A or G or is absent
SKAXXVPTKLSPISILYIXXXXXXXXXYKQYEGMAVSEXG

SEQ ID NO: 18498 - protein, 35 aa, Artificial Sequence
  Non-cyclic GFR-binding peptide
  MOD_RES (3), (4): Xaa is C or S
KAXXVPTELEPISMLYLDENEKVVKFKYEDMVVEG

SEQ ID NO: 18499 - protein, 39 aa, Artificial Sequence
  Non-cyclic GFR-binding peptide
  MOD_RES (6), (7): Xaa is C or S
  MOD_RES (21), (22), (23), (24), (25): Xaa is A or G
  MOD_RES (26), (27), (28), (29): Xaa is A or G or is absent
ASASPXXVSQDLSPISILYIXXXXXXXXXYKQYEMIVKS

SEQ ID NO: 18500 - protein, 35 aa, Artificial Sequence
  Non-cyclic GFR-binding peptide
  MOD_RES (2), (3): Xaa is C or S
  MOD_RES (17), (18), (19), (20), (21): Xaa is A or G
  MOD_RES (22), (23), (24), (25): Xaa is A or G or is absent
AXXVPTELSPISMLYIXXXXXXXXXYKQYEDMVVE

SEQ ID NO: 18501 - protein, 37 aa, Artificial Sequence
  Non-cyclic GFR-binding peptide
  MOD_RES (1), (35), (37): Xaa is C or S
  MOD_RES (15), (16), (17), (18), (19): Xaa is A or G
  MOD_RES (20), (21), (22), (23): Xaa is A or G or is absent
XAPTQLSPISVLYIXXXXXXXXXYKQYENMVVRAXGX

SEQ ID NO: 18502 - protein, 36 aa, Artificial Sequence
  Non-cyclic GFR-binding peptide
  MOD_RES (1), (35): Xaa is C or S
  MOD_RES (15), (16), (17), (18), (19): Xaa is A or G
  MOD_RES (20), (21), (22), (23): Xaa is A or G or is absent
XVPARLSPISILYKXXXXXXXXXLKYHYDMVVEAXG

SEQ ID NO: 18503 - protein, 41 aa, Artificial Sequence
  Non-cyclic GFR-binding peptide
  MOD_RES (6), (7), (39), (41): Xaa is C or S
AAPASXXVPARLSPISILYKDAANNVVLKYHYDMVVEAXGX

SEQ ID NO: 18504 - protein, 39 aa, Artificial Sequence
  Non-cyclic GFR-binding peptide
  MOD_RES (4), (5), (36), (38): Xaa is C or S
ASPXXVSQDLEPISILYLIGKTPKIKFKYEMIVKSXKXS

SEQ ID NO: 18505 - protein, 42 aa, Artificial Sequence
  Non-cyclic GFR-binding peptide
  MOD_RES (4), (5), (39), (41): Xaa is C or S
  MOD_RES (19), (20), (21), (22), (23): Xaa is A or G
  MOD_RES (24), (25), (26), (27): Xaa is A or G or is absent
PKPXXAPTQLEPISVLYLXXXXXXXXXKFKYENMVVRAXGXH

SEQ ID NO: 18506 - protein, 38 aa, Artificial Sequence
  Non-cyclic GFR-binding peptide
  MOD_RES (5), (6): Xaa is C or S
  MOD_RES (20), (21), (22), (23), (24): Xaa is A or G
  MOD_RES (25), (26), (27), (28): Xaa is A or G or is absent
SASPXXVSQDLEPISILYLXXXXXXXXXKFKYEMIVKS

SEQ ID NO: 18507 - protein, 34 aa, Artificial Sequence
  Non-cyclic GFR-binding peptide
  MOD_RES (2), (34): Xaa is C or S
TXAPTKLEPISVLYLDDSSNVIKFKYENMVVRSX

SEQ ID NO: 18508 - protein, 39 aa, Artificial Sequence
  Non-cyclic GFR-binding peptide
  MOD_RES (3), (4), (38): Xaa is C or S
  MOD_RES (18), (19), (20), (21), (22): Xaa is A or G
  MOD_RES (23), (24), (25), (26): Xaa is A or G or is absent
KAXXVPTELEPISMLYLXXXXXXXXXKFKYEEMVVEGXG

SEQ ID NO: 18509 - protein, 35 aa, Artificial Sequence
  Non-cyclic GFR-binding peptide
  MOD_RES (3), (4): Xaa is C or S
KAXXVPTELEPISMLYLDEYDKVVKFKYEEMVVEG

SEQ ID NO: 18510 - protein, 38 aa, Artificial Sequence
  Non-cyclic GFR-binding peptide
  MOD_RES (5), (6), (38): Xaa is C or S
APASXXVPARLSPISILYKDAANNVVLKYHYDMVVEAX

SEQ ID NO: 18511 - protein, 39 aa, Artificial Sequence
  Non-cyclic GFR-binding peptide
  MOD_RES (6), (7), (38): Xaa is C or S
ASAAPXXVPQALSPISILYIVGRKPKVYKQYEMIVRSXK

SEQ ID NO: 18512 - protein, 35 aa, Artificial Sequence
  Non-cyclic GFR-binding peptide
  MOD_RES (3), (4): Xaa is C or S
KAXXVPTELSPISMLYIDENEKVVYKQYEDMVVEG

SEQ ID NO: 18513 - protein, 39 aa, Artificial Sequence
  Non-cyclic GFR-binding peptide
  MOD_RES (5), (6), (38): Xaa is C or S
APASXXVPARLEPISILYLDAANNVVKFKYEDMVVEAXG

SEQ ID NO: 18514 - protein, 37 aa, Artificial Sequence
  Non-cyclic GFR-binding peptide
  MOD_RES (2), (3), (37): Xaa is C or S
  MOD_RES (17), (18), (19), (20), (21): Xaa is A or G
  MOD_RES (22), (23), (24), (25): Xaa is A or G or is absent
PXXAPTKLSPISVLYIXXXXXXXXXYKQYENMVVRSX

SEQ ID NO: 18515 - protein, 40 aa, Artificial Sequence
  Non-cyclic GFR-binding peptide
  MOD_RES (4), (5), (37), (39): Xaa is C or S
SKAXXVPTKLSPISILYKDKGVVTYLKYHYGMAVSEXGXR

SEQ ID NO: 18516 - protein, 39 aa, Artificial Sequence
  Non-cyclic GFR-binding peptide
  MOD_RES (5), (6): Xaa is C or S
  MOD_RES (20), (21), (22), (23), (24): Xaa is A or G
  MOD_RES (25), (26), (27), (28): Xaa is A or G or is absent
APASXXVPARLNAISILYFXXXXXXXXXLKKYRDMVVEA

SEQ ID NO: 18517 - protein, 37 aa, Artificial Sequence
  Non-cyclic GFR-binding peptide
  MOD_RES (34), (36): Xaa is C or S
  MOD_RES (14), (15), (16), (17), (18): Xaa is A or G
  MOD_RES (19), (20), (21), (22): Xaa is A or G or is absent
APTKLSPISVLYIXXXXXXXXXYKQYENMVVKAXGXH

SEQ ID NO: 18518 - protein, 37 aa, Artificial Sequence
  Non-cyclic GFR-binding peptide
  MOD_RES (3), (4), (36): Xaa is C or S
KAXXVPTELSPISMLYIDEYDKVVYKQYEEMVVEGXG

SEQ ID NO: 18519 - protein, 35 aa, Artificial Sequence
  Non-cyclic GFR-binding peptide
  MOD_RES (1), (33), (35): Xaa is C or S
XVPTELSPISMLYIDEYDKVVYKQYEEMVVEGXGX

SEQ ID NO: 18520 - protein, 35 aa, Artificial Sequence
  Non-cyclic GFR-binding peptide
  MOD_RES (4), (5): Xaa is C or S
PKPXXAPTQLSPISVLYIDDSSNVIYKQYENMVVR

SEQ ID NO: 18521 - protein, 36 aa, Artificial Sequence
  Non-cyclic GFR-binding peptide
  MOD_RES (1), (2), (34), (36): Xaa is C or S
XXVPARLNAISILYFDAANNVVLKKYRDMVVEAXGX

SEQ ID NO: 18522 - protein, 36 aa, Artificial Sequence
  Non-cyclic GFR-binding peptide
  MOD_RES (1), (2), (33), (35): Xaa is C or S
XXVSQDLSPISILYIIGKTPKIYKQYEMIVKSXKXS

SEQ ID NO: 18523 - protein, 39 aa, Artificial Sequence
  Non-cyclic GFR-binding peptide
  MOD_RES (5), (39): Xaa is C or S
  MOD_RES (19), (20), (21), (22), (23): Xaa is A or G
  MOD_RES (24), (25), (26), (27): Xaa is A or G or is absent
TKPTXAPTKLSPISVLYIXXXXXXXXXYKQYENMVVRSX

SEQ ID NO: 18524 - protein, 36 aa, Artificial Sequence
  Non-cyclic GFR-binding peptide
  MOD_RES (1), (2), (34), (36): Xaa is C or S
XXAPTKLSPISVLYIDDSSNVIYKQYENMVVRSXGX

SEQ ID NO: 18525 - protein, 37 aa, Artificial Sequence
  Non-cyclic GFR-binding peptide
  MOD_RES (2), (3), (34), (36): Xaa is C or S
PXXVPQDLSPISILYIVGRTPKVYKQYEMVVKSXKXS

SEQ ID NO: 18526 - protein, 39 aa, Artificial Sequence
  Non-cyclic GFR-binding peptide
  MOD_RES (2), (3), (37), (39): Xaa is C or S
  MOD_RES (17), (18), (19), (20), (21): Xaa is A or G
  MOD_RES (22), (23), (24), (25): Xaa is A or G or is absent
AXXVPTKLSPISILYIXXXXXXXXXYKQYEGMAVSEXGX

SEQ ID NO: 18527 - protein, 44 aa, Artificial Sequence
  Non-cyclic GFR-binding peptide
  MOD_RES (6), (7), (41), (43): Xaa is C or S
  MOD_RES (21), (22), (23), (24), (25): Xaa is A or G
  MOD_RES (26), (27), (28), (29): Xaa is A or G or is absent
KIPKAXXVPTELSPISMLYIXXXXXXXXXYKQYEDMVVEGXGXR

SEQ ID NO: 18528 - protein, 37 aa, Artificial Sequence
  Non-cyclic GFR-binding peptide
  MOD_RES (5), (5): Xaa is C or S
  MOD_RES (19), (20), (21), (22), (23): Xaa is A or G
  MOD_RES (24), (25), (26), (27): Xaa is A or G or is absent
TKPTXAPTKLSPISVLYIXXXXXXXXXYKQYENMVVR

SEQ ID NO: 18529 - protein, 34 aa, Artificial Sequence
  Non-cyclic GFR-binding peptide
  MOD_RES (33), (33): Xaa is C or S
  MOD_RES (14), (15), (16), (17), (18): Xaa is A or G
  MOD_RES (19), (20), (21), (22): Xaa is A or G or is absent
VPQDLSPISILYIXXXXXXXXXYKQYEMVVKSXK

SEQ ID NO: 18530 - protein, 37 aa, Artificial Sequence
  Non-cyclic GFR-binding peptide
  MOD_RES (2), (3), (35), (37): Xaa is C or S
AXXVPTELSPISMLYIDENEKVVYKQYEDMVVEGXGX

SEQ ID NO: 18531 - protein, 42 aa, Artificial Sequence
  Non-cyclic GFR-binding peptide
  MOD_RES (6), (7), (42): Xaa is C or S
  MOD_RES (21), (22), (23), (24), (25): Xaa is A or G
  MOD_RES (26), (27), (28), (29): Xaa is A or G or is absent
KVGKAXXVPTKLSPISVLYIXXXXXXXXXYKQYEEGMSVAEX

SEQ ID NO: 18532 - protein, 39 aa, Artificial Sequence
  Non-cyclic GFR-binding peptide
  MOD_RES (3), (4), (37), (39): Xaa is C or S
  MOD_RES (18), (19), (20), (21), (22): Xaa is A or G
  MOD_RES (23), (24), (25), (26): Xaa is A or G or is absent
SPXXVPQDLEPISILYLXXXXXXXXXKFKYEMVVKSXKX

SEQ ID NO: 18533 - protein, 39 aa, Artificial Sequence
  Non-cyclic GFR-binding peptide
  MOD_RES (1), (2), (37), (39): Xaa is C or S
  MOD_RES (16), (17), (18), (19), (20): Xaa is A or G
  MOD_RES (21), (22), (23), (24): Xaa is A or G or is absent
XXVPTKLSPISVLYIXXXXXXXXXYKQYEEGMSVAEXGX

SEQ ID NO: 18534 - protein, 43 aa, Artificial Sequence
  Non-cyclic GFR-binding peptide
  MOD_RES (6), (7), (40), (42): Xaa is C or S
  MOD_RES (21), (22), (23), (24), (25): Xaa is A or G
  MOD_RES (26), (27), (28), (29): Xaa is A or G or is absent
ASAAPXXVPQALSPISILYIXXXXXXXXXYKQYEMIVRSXKXS

SEQ ID NO: 18535 - protein, 37 aa, Artificial Sequence
  Non-cyclic GFR-binding peptide
  MOD_RES (4), (5), (37): Xaa is C or S
PASXXVPARLSPISILYKDAANNVVLKYHYDMVVEAX

SEQ ID NO: 18536 - protein, 41 aa, Artificial Sequence
  Non-cyclic GFR-binding peptide
  MOD_RES (4), (5), (38), (40): Xaa is C or S
  MOD_RES (19), (20), (21), (22), (23): Xaa is A or G
  MOD_RES (24), (25), (26), (27): Xaa is A or G or is absent
ASPXXVPQDLSPISILYIXXXXXXXXXYKQYEMVVKSXKXS

SEQ ID NO: 18537 - protein, 33 aa, Artificial Sequence
  Non-cyclic GFR-binding peptide
  MOD_RES (1), (2): Xaa is C or S
XXVPTELSPISMLYIDENEKVVYKQYEDMVVEG

SEQ ID NO: 18538 - protein, 38 aa, Artificial Sequence
  Non-cyclic GFR-binding peptide
  MOD_RES (4), (36), (38): Xaa is C or S
KPTXAPTKLEPISVLYLDDSSNVIKFKYENMVVRSXGX

SEQ ID NO: 18539 - protein, 34 aa, Artificial Sequence
  Non-cyclic GFR-binding peptide
  MOD_RES (2), (3), (34): Xaa is C or S
PXXVPQDLSPISILYIVGRTPKVYKQYEMVVKSX

SEQ ID NO: 18540 - protein, 33 aa, Artificial Sequence
  Non-cyclic GFR-binding peptide
  MOD_RES (32), (32): Xaa is C or S
APTKLEPISVLYLDSSNNVIKFKYENMVVKAXG

SEQ ID NO: 18541 - protein, 39 aa, Artificial Sequence
  Non-cyclic GFR-binding peptide
  MOD_RES (5), (6): Xaa is C or S
  MOD_RES (20), (21), (22), (23), (24): Xaa is A or G
  MOD_RES (25), (26), (27), (28): Xaa is A or G or is absent
IPKAXXVPTELSPISMLYIXXXXXXXXXYKQYEEMVVEG

SEQ ID NO: 18542 - protein, 36 aa, Artificial Sequence
  Non-cyclic GFR-binding peptide
  MOD_RES (1), (34), (36): Xaa is C or S
  MOD_RES (15), (16), (17), (18), (19): Xaa is A or G
  MOD_RES (20), (21), (22), (23): Xaa is A or G or is absent
XVSQDLSPISILYIXXXXXXXXXYKQYEMIVKSXKX

SEQ ID NO: 18543 - protein, 39 aa, Artificial Sequence
  Non-cyclic GFR-binding peptide
  MOD_RES (2), (3), (37), (39): Xaa is C or S
  MOD_RES (17), (18), (19), (20), (21): Xaa is A or G
  MOD_RES (22), (23), (24), (25): Xaa is A or G or is absent
PXXAPTQLSPISVLYIXXXXXXXXXYKQYENMVVRAXGX

SEQ ID NO: 18544 - protein, 36 aa, Artificial Sequence
  Non-cyclic GFR-binding peptide
  MOD_RES (2), (3): Xaa is C or S
  MOD_RES (17), (18), (19), (20), (21): Xaa is A or G
  MOD_RES (22), (23), (24), (25): Xaa is A or G or is absent
SXXVPARLNAISILYFXXXXXXXXXLKKYRDMVVEA

SEQ ID NO: 18545 - protein, 42 aa, Artificial Sequence
  Non-cyclic GFR-binding peptide
  MOD_RES (4), (5), (40), (42): Xaa is C or S
  MOD_RES (19), (20), (21), (22), (23): Xaa is A or G
  MOD_RES (24), (25), (26), (27): Xaa is A or G or is absent
GKAXXVPTKLSPISVLYIXXXXXXXXXYKQYEEGMSVAEXGX

SEQ ID NO: 18546 - protein, 37 aa, Artificial Sequence
  Non-cyclic GFR-binding peptide
  MOD_RES (1), (2), (35), (37): Xaa is C or S
  MOD_RES (16), (17), (18), (19), (20): Xaa is A or G
  MOD_RES (21), (22), (23), (24): Xaa is A or G or is absent
XXVPQALEPISILYLXXXXXXXXXKFKYEMIVRSXKX

SEQ ID NO: 18547 - protein, 37 aa, Artificial Sequence
  Non-cyclic GFR-binding peptide
  MOD_RES (5), (6): Xaa is C or S
VPKPXXAPTKLSPISVLYIDDSSNVIYKQYENMVVRS

SEQ ID NO: 18548 - protein, 37 aa, Artificial Sequence
  Non-cyclic GFR-binding peptide
  MOD_RES (5), (6): Xaa is C or S
VPKPXXAPTQLEPISVLYLDDSSNVIKFKYENMVVRA

SEQ ID NO: 18549 - protein, 33 aa, Artificial Sequence
  Non-cyclic GFR-binding peptide
  MOD_RES (1), (2), (33): Xaa is C or S
XXVSQDLSPISILYIIGKTPKIYKQYEMIVKSX

SEQ ID NO: 18550 - protein, 32 aa, Artificial Sequence
  Non-cyclic GFR-binding peptide
  MOD_RES (31), (31): Xaa is C or S
VPQALSPISILYIVGRKPKVYKQYEMIVRSXK

SEQ ID NO: 18551 - protein, 31 aa, Artificial Sequence
  Non-cyclic GFR-binding peptide
  MOD_RES (1), (1): Xaa is C or S
XAPTQLSPISVLYIDDSSNVIYKQYENMVVR

SEQ ID NO: 18552 - protein, 40 aa, Artificial Sequence
  Non-cyclic GFR-binding peptide
  MOD_RES (6), (7), (39): Xaa is C or S
TVPKPXXAPTQLSPISVLYIDDSSNVIYKQYENMVVRAXG

SEQ ID NO: 18553 - protein, 36 aa, Artificial Sequence
  Non-cyclic GFR-binding peptide
  MOD_RES (3), (4): Xaa is C or S
KAXXVPTKLEPISVLYLDDMGVPTKFKYEEGMSVAE

SEQ ID NO: 18554 - protein, 35 aa, Artificial Sequence
  Non-cyclic GFR-binding peptide
  MOD_RES (2), (3): Xaa is C or S
  MOD_RES (17), (18), (19), (20), (21): Xaa is A or G
  MOD_RES (22), (23), (24), (25): Xaa is A or G or is absent
SXXVPARLSPISILYKXXXXXXXXXLKYHYDMVVE

SEQ ID NO: 18555 - protein, 37 aa, Artificial Sequence
  Non-cyclic GFR-binding peptide
  MOD_RES (3), (4), (36): Xaa is C or S
KAXXVPTKLNAISILYFDKGVVTYLKKYRGMAVSEXG

SEQ ID NO: 18556 - protein, 41 aa, Artificial Sequence
  Non-cyclic GFR-binding peptide
  MOD_RES (5), (6), (38), (40): Xaa is C or S
VPKPXXAPTQLEPISVLYLDDSSNVIKFKYENMVVRAXGXH

SEQ ID NO: 18557 - protein, 42 aa, Artificial Sequence
  Non-cyclic GFR-binding peptide
  MOD_RES (6), (7), (39), (41): Xaa is C or S
TVPKPXXAPTQLSPISVLYIDDSSNVIYKQYENMVVRAXGXH

SEQ ID NO: 18558 - protein, 41 aa, Artificial Sequence
  Non-cyclic GFR-binding peptide
  MOD_RES (6), (40): Xaa is C or S
  MOD_RES (20), (21), (22), (23), (24): Xaa is A or G
  MOD_RES (25), (26), (27), (28): Xaa is A or G or is absent
VTKPTXAPTKLEPISVLYLXXXXXXXXXKFKYENMVVRSXG

SEQ ID NO: 18559 - protein, 41 aa, Artificial Sequence
  Non-cyclic GFR-binding peptide
  MOD_RES (3), (4), (38), (40): Xaa is C or S
  MOD_RES (18), (19), (20), (21), (22): Xaa is A or G
  MOD_RES (23), (24), (25), (26): Xaa is A or G or is absent
KAXXVPTELEPISMLYLXXXXXXXXXKFKYEDMVVEGXGXR

SEQ ID NO: 18560 - protein, 38 aa, Artificial Sequence
  Non-cyclic GFR-binding peptide
  MOD_RES (4), (5), (38): Xaa is C or S
  MOD_RES (19), (20), (21), (22), (23): Xaa is A or G
  MOD_RES (24), (25), (26), (27): Xaa is A or G or is absent
AAPXXVPQALEPISILYLXXXXXXXXXKFKYEMIVRSX

SEQ ID NO: 18561 - protein, 33 aa, Artificial Sequence
  Non-cyclic GFR-binding peptide
  MOD_RES (1), (1): Xaa is C or S
  MOD_RES (15), (16), (17), (18), (19): Xaa is A or G
  MOD_RES (20), (21), (22), (23): Xaa is A or G or is absent
XVPTELEPISMLYLXXXXXXXXXKFKYEEMVVE

SEQ ID NO: 18562 - protein, 40 aa, Artificial Sequence
  Non-cyclic GFR-binding peptide
  MOD_RES (2), (3), (37), (39): Xaa is C or S
  MOD_RES (17), (18), (19), (20), (21): Xaa is A or G
  MOD_RES (22), (23), (24), (25): Xaa is A or G or is absent
AXXVPTKLSPISILYIXXXXXXXXXYKQYEGMAVSEXGXR

SEQ ID NO: 18563 - protein, 40 aa, Artificial Sequence
  Non-cyclic GFR-binding peptide
  MOD_RES (5), (6), (38), (40): Xaa is C or S
VPKPXXAPTQLSPISVLYIDDSSNVIYKQYENMVVRAXGX

SEQ ID NO: 18564 - protein, 37 aa, Artificial Sequence
  Non-cyclic GFR-binding peptide
  MOD_RES (2), (3), (35), (37): Xaa is C or S
AXXVPTKLSPISILYIDKGVVTYYKQYEGMAVSEXGX

SEQ ID NO: 18565 - protein, 39 aa, Artificial Sequence
  Non-cyclic GFR-binding peptide
  MOD_RES (1), (2), (36), (38): Xaa is C or S
  MOD_RES (16), (17), (18), (19), (20): Xaa is A or G
  MOD_RES (21), (22), (23), (24): Xaa is A or G or is absent
XXVPTKLSPISILYIXXXXXXXXXYKQYEGMAVSEXGXR

SEQ ID NO: 18566 - protein, 36 aa, Artificial Sequence
  Non-cyclic GFR-binding peptide
  MOD_RES (4), (5): Xaa is C or S
PKAXXAPTKLEPISVLYLDSSNNVIKFKYENMVVKA

SEQ ID NO: 18567 - protein, 34 aa, Artificial Sequence
  Non-cyclic GFR-binding peptide
  MOD_RES (33), (33): Xaa is C or S
  MOD_RES (14), (15), (16), (17), (18): Xaa is A or G
  MOD_RES (19), (20), (21), (22): Xaa is A or G or is absent
VPQALEPISILYLXXXXXXXXXKFKYEMIVRSXK

SEQ ID NO: 18568 - protein, 32 aa, Artificial Sequence
  Non-cyclic GFR-binding peptide
  MOD_RES (1), (2): Xaa is C or S
XXAPTKLEPISVLYLDSSNNVIKFKYENMVVK

SEQ ID NO: 18569 - protein, 39 aa, Artificial Sequence
  Non-cyclic GFR-binding peptide
  MOD_RES (7), (39): Xaa is C or S
HVTKPTXAPTKLSPISVLYIDDSSNVIYKQYENMVVRSX

SEQ ID NO: 18570 - protein, 39 aa, Artificial Sequence
  Non-cyclic GFR-binding peptide
  MOD_RES (5), (6): Xaa is C or S
  MOD_RES (20), (21), (22), (23), (24): Xaa is A or G
  MOD_RES (25), (26), (27), (28): Xaa is A or G or is absent
VPKPXXAPTKLSPISVLYIXXXXXXXXXYKQYENMVVRS

SEQ ID NO: 18571 - protein, 36 aa, Artificial Sequence
  Non-cyclic GFR-binding peptide
  MOD_RES (5), (6): Xaa is C or S
SASPXXVPQDLEPISILYLVGRTPKVKFKYEMVVKS

SEQ ID NO: 18572 - protein, 35 aa, Artificial Sequence
  Non-cyclic GFR-binding peptide
  MOD_RES (1), (2), (33), (35): Xaa is C or S
XXVPQALEPISILYLVGRKPKVKFKYEMIVRSXKX

SEQ ID NO: 18573 - protein, 36 aa, Artificial Sequence
  Non-cyclic GFR-binding peptide
  MOD_RES (1), (2), (36): Xaa is C or S
  MOD_RES (16), (17), (18), (19), (20): Xaa is A or G
  MOD_RES (21), (22), (23), (24): Xaa is A or G or is absent
XXVPARLNAISILYFXXXXXXXXXLKKYRDMVVEAX

SEQ ID NO: 18574 - protein, 37 aa, Artificial Sequence
  Non-cyclic GFR-binding peptide
  MOD_RES (4), (5): Xaa is C or S
  MOD_RES (19), (20), (21), (22), (23): Xaa is A or G
  MOD_RES (24), (25), (26), (27): Xaa is A or G or is absent
PKPXXAPTQLEPISVLYLXXXXXXXXXKFKYENMVVR

SEQ ID NO: 18575 - protein, 37 aa, Artificial Sequence
  Non-cyclic GFR-binding peptide
  MOD_RES (6), (7): Xaa is C or S
ASAAPXXVPQALEPISILYLVGRKPKVKFKYEMIVRS

SEQ ID NO: 18576 - protein, 38 aa, Artificial Sequence
  Non-cyclic GFR-binding peptide
  MOD_RES (2), (36), (38): Xaa is C or S
  MOD_RES (16), (17), (18), (19), (20): Xaa is A or G
  MOD_RES (21), (22), (23), (24): Xaa is A or G or is absent
TXAPTKLSPISVLYIXXXXXXXXXYKQYENMVVRSXGX

SEQ ID NO: 18577 - protein, 39 aa, Artificial Sequence
  Non-cyclic GFR-binding peptide
  MOD_RES (6), (38): Xaa is C or S
VTKPTXAPTKLEPISVLYLDDSSNVIKFKYENMVVRSXG

SEQ ID NO: 18578 - protein, 36 aa, Artificial Sequence
  Non-cyclic GFR-binding peptide
  MOD_RES (2), (3), (36): Xaa is C or S
  MOD_RES (17), (18), (19), (20), (21): Xaa is A or G
  MOD_RES (22), (23), (24), (25): Xaa is A or G or is absent
PXXVSQDLEPISILYLXXXXXXXXXKFKYEMIVKSX

SEQ ID NO: 18579 - protein, 33 aa, Artificial Sequence
  Non-cyclic GFR-binding peptide
  MOD_RES (31), (33): Xaa is C or S
VPQALSPISILYIVGRKPKVYKQYEMIVRSXKX

SEQ ID NO: 18580 - protein, 36 aa, Artificial Sequence
  Non-cyclic GFR-binding peptide
  MOD_RES (1), (33), (35): Xaa is C or S
XAPTQLSPISVLYIDDSSNVIYKQYENMVVRAXGXH

SEQ ID NO: 18581 - protein, 35 aa, Artificial Sequence
  Non-cyclic GFR-binding peptide
  MOD_RES (34), (34): Xaa is C or S
  MOD_RES (14), (15), (16), (17), (18): Xaa is A or G
  MOD_RES (19), (20), (21), (22): Xaa is A or G or is absent
VPARLEPISILYLXXXXXXXXXKFKYEDMVVEAXG

SEQ ID NO: 18582 - protein, 37 aa, Artificial Sequence
  Non-cyclic GFR-binding peptide
  MOD_RES (2), (3), (35), (37): Xaa is C or S
SXXVPARLSPISILYKDAANNVVLKYHYDMVVEAXGX

SEQ ID NO: 18583 - protein, 32 aa, Artificial Sequence
  Non-cyclic GFR-binding peptide
  MOD_RES (1), (1): Xaa is C or S
XVPTELSPISMLYIDENEKVVYKQYEDMVVEG

SEQ ID NO: 18584 - protein, 42 aa, Artificial Sequence
  Non-cyclic GFR-binding peptide
  MOD_RES (5), (6), (39), (41): Xaa is C or S
VGKAXXVPTKLEPISVLYLDDMGVPTKFKYEEGMSVAEXGXR

SEQ ID NO: 18585 - protein, 35 aa, Artificial Sequence
  Non-cyclic GFR-binding peptide
  MOD_RES (32), (34): Xaa is C or S
VPTKLSPISILYKDKGVVTYLKYHYGMAVSEXGXR

SEQ ID NO: 18586 - protein, 38 aa, Artificial Sequence
  Non-cyclic GFR-binding peptide
  MOD_RES (2), (3), (35), (37): Xaa is C or S
AXXVPTELEPISMLYLDENEKVVKFKYEDMVVEGXGXR

SEQ ID NO: 18587 - protein, 35 aa, Artificial Sequence
  Non-cyclic GFR-binding peptide
  MOD_RES (32), (34): Xaa is C or S
VPARLSPISILYKDAANNVVLKYHYDMVVEAXGXR

SEQ ID NO: 18588 - protein, 34 aa, Artificial Sequence
  Non-cyclic GFR-binding peptide
  MOD_RES (2), (3), (34): Xaa is C or S
PXXVPQALEPISILYLVGRKPKVKFKYEMIVRSX

SEQ ID NO: 18589 - protein, 38 aa, Artificial Sequence
  Non-cyclic GFR-binding peptide
  MOD_RES (3), (4), (35), (37): Xaa is C or S
APXXVPQALSPISILYIVGRKPKVYKQYEMIVRSXKXS

SEQ ID NO: 18590 - protein, 32 aa, Artificial Sequence
  Non-cyclic GFR-binding peptide
  MOD_RES (1), (1): Xaa is C or S
XAPTKLSPISVLYIDDSSNVIYKQYENMVVRS

SEQ ID NO: 18591 - protein, 33 aa, Artificial Sequence
  Non-cyclic GFR-binding peptide
  MOD_RES (1), (1): Xaa is C or S
  MOD_RES (15), (16), (17), (18), (19): Xaa is A or G
  MOD_RES (20), (21), (22), (23): Xaa is A or G or is absent
XVSQDLEPISILYLXXXXXXXXXKFKYEMIVKS

SEQ ID NO: 18592 - protein, 39 aa, Artificial Sequence
  Non-cyclic GFR-binding peptide
  MOD_RES (6), (7): Xaa is C or S
KVGKAXXVPTKLEPISVLYLDDMGVPTKFKYEEGMSVAE

SEQ ID NO: 18593 - protein, 37 aa, Artificial Sequence
  Non-cyclic GFR-binding peptide
  MOD_RES (1), (2), (36): Xaa is C or S
  MOD_RES (16), (17), (18), (19), (20): Xaa is A or G
  MOD_RES (21), (22), (23), (24): Xaa is A or G or is absent
XXVPTELEPISMLYLXXXXXXXXXKFKYEDMVVEGXG

SEQ ID NO: 18594 - protein, 38 aa, Artificial Sequence
  Non-cyclic GFR-binding peptide
  MOD_RES (4), (5): Xaa is C or S
  MOD_RES (19), (20), (21), (22), (23): Xaa is A or G
  MOD_RES (24), (25), (26), (27): Xaa is A or G or is absent
PKAXXVPTELEPISMLYLXXXXXXXXXKFKYEEMVVEG

SEQ ID NO: 18595 - protein, 36 aa, Artificial Sequence
  Non-cyclic GFR-binding peptide
  MOD_RES (1), (2), (35): Xaa is C or S
  MOD_RES (16), (17), (18), (19), (20): Xaa is A or G
  MOD_RES (21), (22), (23), (24): Xaa is A or G or is absent
XXVSQDLSPISILYIXXXXXXXXXYKQYEMIVKSXK

SEQ ID NO: 18596 - protein, 33 aa, Artificial Sequence
  Non-cyclic GFR-binding peptide
  MOD_RES (1), (2): Xaa is C or S
XXVPTELSPISMLYIDEYDKVVYKQYEEMVVEG

SEQ ID NO: 18597 - protein, 37 aa, Artificial Sequence
  Non-cyclic GFR-binding peptide
  MOD_RES (4), (5), (37): Xaa is C or S
SKAXXVPTKLSPISILYIDKGVVTYYKQYEGMAVSEX

SEQ ID NO: 18598 - protein, 39 aa, Artificial Sequence
  Non-cyclic GFR-binding peptide
  MOD_RES (4), (5), (39): Xaa is C or S
  MOD_RES (19), (20), (21), (22), (23): Xaa is A or G
  MOD_RES (24), (25), (26), (27): Xaa is A or G or is absent
SKAXXVPTKLSPISILYIXXXXXXXXXYKQYEGMAVSEX

SEQ ID NO: 18599 - protein, 37 aa, Artificial Sequence
  Non-cyclic GFR-binding peptide
  MOD_RES (3), (37): Xaa is C or S
  MOD_RES (17), (18), (19), (20), (21): Xaa is A or G
  MOD_RES (22), (23), (24), (25): Xaa is A or G or is absent
PTXAPTKLEPISVLYLXXXXXXXXXKFKYENMVVRSX

SEQ ID NO: 18600 - protein, 35 aa, Artificial Sequence
  Non-cyclic GFR-binding peptide
  MOD_RES (3), (4): Xaa is C or S
ASXXVPARLNAISILYFDAANNVVLKKYRDMVVEA

SEQ ID NO: 18601 - protein, 37 aa, Artificial Sequence
  Non-cyclic GFR-binding peptide
  MOD_RES (1), (2), (34), (36): Xaa is C or S
XXVPTKLSPISILYIDKGVVTYYKQYEGMAVSEXGXR

SEQ ID NO: 18602 - protein, 33 aa, Artificial Sequence
  Non-cyclic GFR-binding peptide
  MOD_RES (1), (2): Xaa is C or S
XXVPTELEPISMLYLDEYDKVVKFKYEEMVVEG

SEQ ID NO: 18603 - protein, 36 aa, Artificial Sequence
  Non-cyclic GFR-binding peptide
  MOD_RES (2), (3), (35): Xaa is C or S
PXXAPTQLSPISVLYIDDSSNVIYKQYENMVVRAXG

SEQ ID NO: 18604 - protein, 37 aa, Artificial Sequence
  Non-cyclic GFR-binding peptide
  MOD_RES (2), (3), (36): Xaa is C or S
  MOD_RES (17), (18), (19), (20), (21): Xaa is A or G
  MOD_RES (22), (23), (24), (25): Xaa is A or G or is absent
PXXVSQDLSPISILYIXXXXXXXXXYKQYEMIVKSXK

SEQ ID NO: 18605 - protein, 34 aa, Artificial Sequence
  Non-cyclic GFR-binding peptide
  MOD_RES (1), (1): Xaa is C or S
  MOD_RES (15), (16), (17), (18), (19): Xaa is A or G
  MOD_RES (20), (21), (22), (23): Xaa is A or G or is absent
XVPTELEPISMLYLXXXXXXXXXKFKYEEMVVEG

SEQ ID NO: 18606 - protein, 42 aa, Artificial Sequence
  Non-cyclic GFR-binding peptide
  MOD_RES (6), (7), (39), (41): Xaa is C or S
TVPKPXXAPTQLEPISVLYLDDSSNVIKFKYENMVVRAXGXH

SEQ ID NO: 18607 - protein, 35 aa, Artificial Sequence
  Non-cyclic GFR-binding peptide
  MOD_RES (1), (34): Xaa is C or S
  MOD_RES (15), (16), (17), (18), (19): Xaa is A or G
  MOD_RES (20), (21), (22), (23): Xaa is A or G or is absent
XVSQDLSPISILYIXXXXXXXXXYKQYEMIVKSXK

SEQ ID NO: 18608 - protein, 42 aa, Artificial Sequence
  Non-cyclic GFR-binding peptide
  MOD_RES (6), (7), (39), (41): Xaa is C or S
AVPKAXXAPTKLEPISVLYLDSSNNVIKFKYENMVVKAXGXH

SEQ ID NO: 18609 - protein, 38 aa, Artificial Sequence
  Non-cyclic GFR-binding peptide
  MOD_RES (3), (4), (37): Xaa is C or S
KAXXVPTKLSPISVLYIDDMGVPTYKQYEEGMSVAEXG

SEQ ID NO: 18610 - protein, 34 aa, Artificial Sequence
  Non-cyclic GFR-binding peptide
  MOD_RES (33), (33): Xaa is C or S
  MOD_RES (14), (15), (16), (17), (18): Xaa is A or G
  MOD_RES (19), (20), (21), (22): Xaa is A or G or is absent
VSQDLSPISILYIXXXXXXXXXYKQYEMIVKSXK

SEQ ID NO: 18611 - protein, 39 aa, Artificial Sequence
  Non-cyclic GFR-binding peptide
  MOD_RES (6), (7): Xaa is C or S
  MOD_RES (21), (22), (23), (24), (25): Xaa is A or G
  MOD_RES (26), (27), (28), (29): Xaa is A or G or is absent
AVPKAXXAPTKLEPISVLYLXXXXXXXXXKFKYENMVVK

SEQ ID NO: 18612 - protein, 35 aa, Artificial Sequence
  Non-cyclic GFR-binding peptide
  MOD_RES (32), (34): Xaa is C or S
APTQLSPISVLYIDDSSNVIYKQYENMVVRAXGXH

SEQ ID NO: 18613 - protein, 43 aa, Artificial Sequence
  Non-cyclic GFR-binding peptide
  MOD_RES (5), (6), (40), (42): Xaa is C or S
  MOD_RES (20), (21), (22), (23), (24): Xaa is A or G
  MOD_RES (25), (26), (27), (28): Xaa is A or G or is absent
APASXXVPARLSPISILYKXXXXXXXXXLKYHYDMVVEAXGXR

SEQ ID NO: 18614 - protein, 34 aa, Artificial Sequence
  Non-cyclic GFR-binding peptide
  MOD_RES (1), (2), (34): Xaa is C or S
XXAPTKLEPISVLYLDDSSNVIKFKYENMVVRSX

SEQ ID NO: 18615 - protein, 40 aa, Artificial Sequence
  Non-cyclic GFR-binding peptide
  MOD_RES (4), (5), (37), (39): Xaa is C or S
PASXXVPARLEPISILYLDAANNVVKFKYEDMVVEAXGXR

SEQ ID NO: 18616 - protein, 40 aa, Artificial Sequence
  Non-cyclic GFR-binding peptide
  MOD_RES (6), (7), (39): Xaa is C or S
SIPKAXXVPTELSPISMLYIDEYDKVVYKQYEEMVVEGXG

SEQ ID NO: 18617 - protein, 36 aa, Artificial Sequence
  Non-cyclic GFR-binding peptide
  MOD_RES (1), (2), (36): Xaa is C or S
  MOD_RES (16), (17), (18), (19), (20): Xaa is A or G
  MOD_RES (21), (22), (23), (24): Xaa is A or G or is absent
XXVPTKLSPISILYIXXXXXXXXXYKQYEGMAVSEX

SEQ ID NO: 18618 - protein, 38 aa, Artificial Sequence
  Non-cyclic GFR-binding peptide
  MOD_RES (2), (3), (35), (37): Xaa is C or S
AXXVPTELSPISMLYIDENEKVVYKQYEDMVVEGXGXR

SEQ ID NO: 18619 - protein, 40 aa, Artificial Sequence
  Non-cyclic GFR-binding peptide
  MOD_RES (6), (7), (40): Xaa is C or S
KVGKAXXVPTKLEPISVLYLDDMGVPTKFKYEEGMSVAEX

SEQ ID NO: 18620 - protein, 39 aa, Artificial Sequence
  Non-cyclic GFR-binding peptide
  MOD_RES (3), (4), (36), (38): Xaa is C or S
KAXXVPTKLSPISILYKDKGVVTYLKYHYGMAVSEXGXR

SEQ ID NO: 18621 - protein, 38 aa, Artificial Sequence
  Non-cyclic GFR-binding peptide
  MOD_RES (1), (2), (37): Xaa is C or S
  MOD_RES (16), (17), (18), (19), (20): Xaa is A or G
  MOD_RES (21), (22), (23), (24): Xaa is A or G or is absent
XXVPTKLEPISVLYLXXXXXXXXXKFKYEEGMSVAEXG

SEQ ID NO: 18622 - protein, 38 aa, Artificial Sequence
  Non-cyclic GFR-binding peptide
  MOD_RES (3), (4), (37): Xaa is C or S
  MOD_RES (18), (19), (20), (21), (22): Xaa is A or G
  MOD_RES (23), (24), (25), (26): Xaa is A or G or is absent
SPXXVPQDLEPISILYLXXXXXXXXXKFKYEMVVKSXK

SEQ ID NO: 18623 - protein, 32 aa, Artificial Sequence
  Non-cyclic GFR-binding peptide
  MOD_RES (1), (1): Xaa is C or S
XAPTKLEPISVLYLDDSSNVIKFKYENMVVRS

SEQ ID NO: 18624 - protein, 38 aa, Artificial Sequence
  Non-cyclic GFR-binding peptide
  MOD_RES (6), (7): Xaa is C or S
AVPKAXXAPTKLSPISVLYIDSSNNVIYKQYENMVVKA

SEQ ID NO: 18625 - protein, 36 aa, Artificial Sequence
  Non-cyclic GFR-binding peptide
  MOD_RES (2), (3), (35): Xaa is C or S
AXXVPTELEPISMLYLDEYDKVVKFKYEEMVVEGXG

SEQ ID NO: 18626 - protein, 37 aa, Artificial Sequence
  Non-cyclic GFR-binding peptide
  MOD_RES (1), (2), (36): Xaa is C or S
  MOD_RES (16), (17), (18), (19), (20): Xaa is A or G
  MOD_RES (21), (22), (23), (24): Xaa is A or G or is absent
XXAPTKLSPISVLYIXXXXXXXXXYKQYENMVVKAXG

SEQ ID NO: 18627 - protein, 37 aa, Artificial Sequence
  Non-cyclic GFR-binding peptide
  MOD_RES (4), (5): Xaa is C or S
  MOD_RES (19), (20), (21), (22), (23): Xaa is A or G
  MOD_RES (24), (25), (26), (27): Xaa is A or G or is absent
PASXXVPARLSPISILYKXXXXXXXXXLKYHYDMVVE

SEQ ID NO: 18628 - protein, 40 aa, Artificial Sequence
  Non-cyclic GFR-binding peptide
  MOD_RES (4), (5), (39): Xaa is C or S
  MOD_RES (19), (20), (21), (22), (23): Xaa is A or G
  MOD_RES (24), (25), (26), (27): Xaa is A or G or is absent
PKAXXVPTELSPISMLYIXXXXXXXXXYKQYEEMVVEGXG

SEQ ID NO: 18629 - protein, 38 aa, Artificial Sequence
  Non-cyclic GFR-binding peptide
  MOD_RES (4), (5), (38): Xaa is C or S
  MOD_RES (19), (20), (21), (22), (23): Xaa is A or G
  MOD_RES (24), (25), (26), (27): Xaa is A or G or is absent
ASPXXVPQDLEPISILYLXXXXXXXXXKFKYEMVVKSX

SEQ ID NO: 18630 - protein, 40 aa, Artificial Sequence
  Non-cyclic GFR-binding peptide
  MOD_RES (6), (7), (38), (40): Xaa is C or S
ASASPXXVPQDLSPISILYIVGRTPKVYKQYEMVVKSXKX

SEQ ID NO: 18631 - protein, 34 aa, Artificial Sequence
  Non-cyclic GFR-binding peptide
  MOD_RES (14), (15), (16), (17), (18): Xaa is A or G
  MOD_RES (19), (20), (21), (22): Xaa is A or G or is absent
VPTKLEPISVLYLXXXXXXXXXKFKYEEGMSVAE

SEQ ID NO: 18632 - protein, 37 aa, Artificial Sequence
  Non-cyclic GFR-binding peptide
  MOD_RES (4), (5), (37): Xaa is C or S
PKAXXVPTELEPISMLYLDEYDKVVKFKYEEMVVEGX

SEQ ID NO: 18633 - protein, 36 aa, Artificial Sequence
  Non-cyclic GFR-binding peptide
  MOD_RES (5), (6): Xaa is C or S
VPKPXXAPTKLEPISVLYLDDSSNVIKFKYENMVVR

SEQ ID NO: 18634 - protein, 36 aa, Artificial Sequence
  Non-cyclic GFR-binding peptide
  MOD_RES (1), (2), (33), (35): Xaa is C or S
XXVPQDLSPISILYIVGRTPKVYKQYEMVVKSXKXS

SEQ ID NO: 18635 - protein, 43 aa, Artificial Sequence
  Non-cyclic GFR-binding peptide
  MOD_RES (6), (7), (41), (43): Xaa is C or S
  MOD_RES (21), (22), (23), (24), (25): Xaa is A or G
  MOD_RES (26), (27), (28), (29): Xaa is A or G or is absent
SIPKAXXVPTELEPISMLYLXXXXXXXXXKFKYEEMVVEGXGX

SEQ ID NO: 18636 - protein, 35 aa, Artificial Sequence
  Non-cyclic GFR-binding peptide
  MOD_RES (34), (34): Xaa is C or S
  MOD_RES (14), (15), (16), (17), (18): Xaa is A or G
  MOD_RES (19), (20), (21), (22): Xaa is A or G or is absent
APTKLSPISVLYIXXXXXXXXXYKQYENMVVRSXG

SEQ ID NO: 18637 - protein, 38 aa, Artificial Sequence
  Non-cyclic GFR-binding peptide
  MOD_RES (2), (3), (35), (37): Xaa is C or S
AXXVPTKLSPISILYIDKGVVTYYKQYEGMAVSEXGXR

SEQ ID NO: 18638 - protein, 35 aa, Artificial Sequence
  Non-cyclic GFR-binding peptide
  MOD_RES (1), (2), (33), (35): Xaa is C or S
XXVPQALSPISILYIVGRKPKVYKQYEMIVRSXKX

SEQ ID NO: 18639 - protein, 34 aa, Artificial Sequence
  Non-cyclic GFR-binding peptide
  MOD_RES (1), (32), (34): Xaa is C or S
XVPQALSPISILYIVGRKPKVYKQYEMIVRSXKX

SEQ ID NO: 18640 - protein, 45 aa, Artificial Sequence
  Non-cyclic GFR-binding peptide
  MOD_RES (6), (7), (42), (44): Xaa is C or S
  MOD_RES (21), (22), (23), (24), (25): Xaa is A or G
  MOD_RES (26), (27), (28), (29): Xaa is A or G or is absent
KVGKAXXVPTKLSPISVLYIXXXXXXXXXYKQYEEGMSVAEXGXR

SEQ ID NO: 18641 - protein, 40 aa, Artificial Sequence
  Non-cyclic GFR-binding peptide
  MOD_RES (5), (6), (39): Xaa is C or S
VGKAXXVPTKLSPISVLYIDDMGVPTYKQYEEGMSVAEXG

SEQ ID NO: 18642 - protein, 34 aa, Artificial Sequence
  Non-cyclic GFR-binding peptide
  MOD_RES (2), (3), (34): Xaa is C or S
PXXVSQDLSPISILYIIGKTPKIYKQYEMIVKSX

SEQ ID NO: 18643 - protein, 37 aa, Artificial Sequence
  Non-cyclic GFR-binding peptide
  MOD_RES (4), (5): Xaa is C or S
  MOD_RES (19), (20), (21), (22), (23): Xaa is A or G
  MOD_RES (24), (25), (26), (27): Xaa is A or G or is absent
PKAXXAPTKLEPISVLYLXXXXXXXXXKFKYENMVVK

SEQ ID NO: 18644 - protein, 38 aa, Artificial Sequence
  Non-cyclic GFR-binding peptide
  MOD_RES (4), (5), (37): Xaa is C or S
PKAXXVPTELSPISMLYIDEYDKVVYKQYEEMVVEGXG

SEQ ID NO: 18645 - protein, 40 aa, Artificial Sequence
  Non-cyclic GFR-binding peptide
  MOD_RES (6), (7): Xaa is C or S
  MOD_RES (21), (22), (23), (24), (25): Xaa is A or G
  MOD_RES (26), (27), (28), (29): Xaa is A or G or is absent
AAPASXXVPARLNAISILYFXXXXXXXXXLKKYRDMVVEA

SEQ ID NO: 18646 - protein, 38 aa, Artificial Sequence
  Non-cyclic GFR-binding peptide
  MOD_RES (4), (5), (36), (38): Xaa is C or S
ASPXXVPQDLEPISILYLVGRTPKVKFKYEMVVKSXKX

SEQ ID NO: 18647 - protein, 37 aa, Artificial Sequence
  Non-cyclic GFR-binding peptide
  MOD_RES (34), (36): Xaa is C or S
  MOD_RES (14), (15), (16), (17), (18): Xaa is A or G
  MOD_RES (19), (20), (21), (22): Xaa is A or G or is absent
APTQLSPISVLYIXXXXXXXXXYKQYENMVVRAXGXH

SEQ ID NO: 18648 - protein, 33 aa, Artificial Sequence
  Non-cyclic GFR-binding peptide
  MOD_RES (32), (32): Xaa is C or S
APTKLEPISVLYLDDSSNVIKFKYENMVVRSXG

SEQ ID NO: 18649 - protein, 40 aa, Artificial Sequence
  Non-cyclic GFR-binding peptide
  MOD_RES (4), (5), (39): Xaa is C or S
  MOD_RES (19), (20), (21), (22), (23): Xaa is A or G
  MOD_RES (24), (25), (26), (27): Xaa is A or G or is absent
PASXXVPARLSPISILYKXXXXXXXXXLKYHYDMVVEAXG

SEQ ID NO: 18650 - protein, 37 aa, Artificial Sequence
  Non-cyclic GFR-binding peptide
  MOD_RES (1), (2), (35), (37): Xaa is C or S
XXVPTKLSPISVLYIDDMGVPTYKQYEEGMSVAEXGX

SEQ ID NO: 18651 - protein, 37 aa, Artificial Sequence
  Non-cyclic GFR-binding peptide
  MOD_RES (1), (2), (35), (37): Xaa is C or S
XXVPTKLEPISVLYLDDMGVPTKFKYEEGMSVAEXGX

SEQ ID NO: 18652 - protein, 38 aa, Artificial Sequence
  Non-cyclic GFR-binding peptide
  MOD_RES (2), (3), (37): Xaa is C or S
  MOD_RES (17), (18), (19), (20), (21): Xaa is A or G
  MOD_RES (22), (23), (24), (25): Xaa is A or G or is absent
AXXAPTKLSPISVLYIXXXXXXXXXYKQYENMVVKAXG

SEQ ID NO: 18653 - protein, 35 aa, Artificial Sequence
  Non-cyclic GFR-binding peptide
  MOD_RES (1), (2), (34): Xaa is C or S
XXVPTELSPISMLYIDENEKVVYKQYEDMVVEGXG

SEQ ID NO: 18654 - protein, 38 aa, Artificial Sequence
  Non-cyclic GFR-binding peptide
  MOD_RES (2), (3), (37): Xaa is C or S
  MOD_RES (17), (18), (19), (20), (21): Xaa is A or G
  MOD_RES (22), (23), (24), (25): Xaa is A or G or is absent
AXXVPTELEPISMLYLXXXXXXXXXKFKYEDMVVEGXG

SEQ ID NO: 18655 - protein, 38 aa, Artificial Sequence
  Non-cyclic GFR-binding peptide
  MOD_RES (5), (6): Xaa is C or S
  MOD_RES (20), (21), (22), (23), (24): Xaa is A or G
  MOD_RES (25), (26), (27), (28): Xaa is A or G or is absent
SASPXXVPQDLSPISILYIXXXXXXXXXYKQYEMVVKS

SEQ ID NO: 18656 - protein, 39 aa, Artificial Sequence
  Non-cyclic GFR-binding peptide
  MOD_RES (6), (7): Xaa is C or S
  MOD_RES (21), (22), (23), (24), (25): Xaa is A or G
  MOD_RES (26), (27), (28), (29): Xaa is A or G or is absent
SIPKAXXVPTELSPISMLYIXXXXXXXXXYKQYEEMVVE

SEQ ID NO: 18657 - protein, 36 aa, Artificial Sequence
  Non-cyclic GFR-binding peptide
  MOD_RES (33), (35): Xaa is C or S
  MOD_RES (14), (15), (16), (17), (18): Xaa is A or G
  MOD_RES (19), (20), (21), (22): Xaa is A or G or is absent
VSQDLSPISILYIXXXXXXXXXYKQYEMIVKSXKXS

SEQ ID NO: 18658 - protein, 32 aa, Artificial Sequence
  Non-cyclic GFR-binding peptide
  MOD_RES (1), (1): Xaa is C or S
XAPTQLEPISVLYLDDSSNVIKFKYENMVVRA

SEQ ID NO: 18659 - protein, 37 aa, Artificial Sequence
  Non-cyclic GFR-binding peptide
  MOD_RES (4), (5), (36): Xaa is C or S
ASPXXVPQDLEPISILYLVGRTPKVKFKYEMVVKSXK

SEQ ID NO: 18660 - protein, 34 aa, Artificial Sequence
  Non-cyclic GFR-binding peptide
  MOD_RES (1), (2), (34): Xaa is C or S
XXVPTKLSPISILYKDKGVVTYLKYHYGMAVSEX

SEQ ID NO: 18661 - protein, 40 aa, Artificial Sequence
  Non-cyclic GFR-binding peptide
  MOD_RES (5), (6), (37), (39): Xaa is C or S
SAAPXXVPQALSPISILYIVGRKPKVYKQYEMIVRSXKXS

SEQ ID NO: 18662 - protein, 39 aa, Artificial Sequence
  Non-cyclic GFR-binding peptide
  MOD_RES (5), (6), (37), (39): Xaa is C or S
SASPXXVSQDLSPISILYIIGKTPKIYKQYEMIVKSXKX

SEQ ID NO: 18663 - protein, 34 aa, Artificial Sequence
  Non-cyclic GFR-binding peptide
  MOD_RES (1), (33): Xaa is C or S
XVPARLNAISILYFDAANNVVLKKYRDMVVEAXG

SEQ ID NO: 18664 - protein, 38 aa, Artificial Sequence
  Non-cyclic GFR-binding peptide
  MOD_RES (5), (6), (38): Xaa is C or S
IPKAXXVPTELSPISMLYIDEYDKVVYKQYEEMVVEGX

SEQ ID NO: 18665 - protein, 34 aa, Artificial Sequence
  Non-cyclic GFR-binding peptide
  MOD_RES (32), (34): Xaa is C or S
VPTELEPISMLYLDEYDKVVKFKYEEMVVEGXGX

SEQ ID NO: 18666 - protein, 33 aa, Artificial Sequence
  Non-cyclic GFR-binding peptide
  MOD_RES (1), (33): Xaa is C or S
XAPTKLSPISVLYIDDSSNVIYKQYENMVVRSX

SEQ ID NO: 18667 - protein, 34 aa, Artificial Sequence
  Non-cyclic GFR-binding peptide
  MOD_RES (32), (34): Xaa is C or S
VPARLSPISILYKDAANNVVLKYHYDMVVEAXGX

SEQ ID NO: 18668 - protein, 35 aa, Artificial Sequence
  Non-cyclic GFR-binding peptide
  MOD_RES (2), (3), (34): Xaa is C or S
PXXVPQALSPISILYIVGRKPKVYKQYEMIVRSXK

SEQ ID NO: 18669 - protein, 39 aa, Artificial Sequence
  Non-cyclic GFR-binding peptide
  MOD_RES (4), (5), (37), (39): Xaa is C or S
PKPXXAPTKLSPISVLYIDDSSNVIYKQYENMVVRSXGX

SEQ ID NO: 18670 - protein, 32 aa, Artificial Sequence
  Non-cyclic GFR-binding peptide
  MOD_RES (1), (2): Xaa is C or S
XXVPTELEPISMLYLDEYDKVVKFKYEEMVVE

SEQ ID NO: 18671 - protein, 39 aa, Artificial Sequence
  Non-cyclic GFR-binding peptide
  MOD_RES (4), (5), (38): Xaa is C or S
  MOD_RES (19), (20), (21), (22), (23): Xaa is A or G
  MOD_RES (24), (25), (26), (27): Xaa is A or G or is absent
AAPXXVPQALEPISILYLXXXXXXXXXKFKYEMIVRSXK

SEQ ID NO: 18672 - protein, 38 aa, Artificial Sequence
  Non-cyclic GFR-binding peptide
  MOD_RES (3), (4), (36), (38): Xaa is C or S
KPXXAPTQLSPISVLYIDDSSNVIYKQYENMVVRAXGX

SEQ ID NO: 18673 - protein, 40 aa, Artificial Sequence
  Non-cyclic GFR-binding peptide
  MOD_RES (6), (7), (40): Xaa is C or S
  MOD_RES (21), (22), (23), (24), (25): Xaa is A or G
  MOD_RES (26), (27), (28), (29): Xaa is A or G or is absent
ASASPXXVPQDLSPISILYIXXXXXXXXXYKQYEMVVKSX

SEQ ID NO: 18674 - protein, 36 aa, Artificial Sequence
  Non-cyclic GFR-binding peptide
  MOD_RES (33), (35): Xaa is C or S
  MOD_RES (14), (15), (16), (17), (18): Xaa is A or G
  MOD_RES (19), (20), (21), (22): Xaa is A or G or is absent
VPQDLSPISILYIXXXXXXXXXYKQYEMVVKSXKXS

SEQ ID NO: 18675 - protein, 38 aa, Artificial Sequence
  Non-cyclic GFR-binding peptide
  MOD_RES (3), (4), (38): Xaa is C or S
  MOD_RES (18), (19), (20), (21), (22): Xaa is A or G
  MOD_RES (23), (24), (25), (26): Xaa is A or G or is absent
KAXXVPTELSPISMLYIXXXXXXXXXYKQYEEMVVEGX

SEQ ID NO: 18676 - protein, 38 aa, Artificial Sequence
  Non-cyclic GFR-binding peptide
  MOD_RES (2), (3), (36), (38): Xaa is C or S
  MOD_RES (17), (18), (19), (20), (21): Xaa is A or G
  MOD_RES (22), (23), (24), (25): Xaa is A or G or is absent
PXXVSQDLEPISILYLXXXXXXXXXKFKYEMIVKSXKX

SEQ ID NO: 18677 - protein, 34 aa, Artificial Sequence
  Non-cyclic GFR-binding peptide
  MOD_RES (31), (33): Xaa is C or S
VPQALEPISILYLVGRKPKVKFKYEMIVRSXKXS

SEQ ID NO: 18678 - protein, 32 aa, Artificial Sequence
  Non-cyclic GFR-binding peptide
  MOD_RES (1), (1): Xaa is C or S
XVPTKLNAISILYFDKGVVTYLKKYRGMAVSE

SEQ ID NO: 18679 - protein, 36 aa, Artificial Sequence
  Non-cyclic GFR-binding peptide
  MOD_RES (1), (2), (36): Xaa is C or S
  MOD_RES (16), (17), (18), (19), (20): Xaa is A or G
  MOD_RES (21), (22), (23), (24): Xaa is A or G or is absent
XXAPTKLSPISVLYIXXXXXXXXXYKQYENMVVRSX

SEQ ID NO: 18680 - protein, 37 aa, Artificial Sequence
  Non-cyclic GFR-binding peptide
  MOD_RES (6), (7): Xaa is C or S
SIPKAXXVPTELSPISMLYIDEYDKVVYKQYEEMVVE

SEQ ID NO: 18681 - protein, 39 aa, Artificial Sequence
  Non-cyclic GFR-binding peptide
  MOD_RES (6), (7): Xaa is C or S
KVGKAXXVPTKLSPISVLYIDDMGVPTYKQYEEGMSVAE

SEQ ID NO: 18682 - protein, 35 aa, Artificial Sequence
  Non-cyclic GFR-binding peptide
  MOD_RES (4), (5): Xaa is C or S
ASPXXVPQDLSPISILYIVGRTPKVYKQYEMVVKS

SEQ ID NO: 18683 - protein, 32 aa, Artificial Sequence
  Non-cyclic GFR-binding peptide
  MOD_RES (1), (1): Xaa is C or S
XVPTELSPISMLYIDEYDKVVYKQYEEMVVEG

SEQ ID NO: 18684 - protein, 34 aa, Artificial Sequence
  Non-cyclic GFR-binding peptide
  MOD_RES (1), (34): Xaa is C or S
XVPTKLEPISVLYLDDMGVPTKFKYEEGMSVAEX

SEQ ID NO: 18685 - protein, 40 aa, Artificial Sequence
  Non-cyclic GFR-binding peptide
  MOD_RES (3), (4), (37), (39): Xaa is C or S
  MOD_RES (18), (19), (20), (21), (22): Xaa is A or G
  MOD_RES (23), (24), (25), (26): Xaa is A or G or is absent
SPXXVPQDLEPISILYLXXXXXXXXXKFKYEMVVKSXKXS

SEQ ID NO: 18686 - protein, 35 aa, Artificial Sequence
  Non-cyclic GFR-binding peptide
  MOD_RES (2), (3), (35): Xaa is C or S
AXXVPTELSPISMLYIDEYDKVVYKQYEEMVVEGX

SEQ ID NO: 18687 - protein, 43 aa, Artificial Sequence
  Non-cyclic GFR-binding peptide
  MOD_RES (6), (7), (42): Xaa is C or S
  MOD_RES (21), (22), (23), (24), (25): Xaa is A or G
  MOD_RES (26), (27), (28), (29): Xaa is A or G or is absent
KVGKAXXVPTKLSPISVLYIXXXXXXXXXYKQYEEGMSVAEXG

SEQ ID NO: 18688 - protein, 35 aa, Artificial Sequence
  Non-cyclic GFR-binding peptide
  MOD_RES (2), (3): Xaa is C or S
  MOD_RES (17), (18), (19), (20), (21): Xaa is A or G
  MOD_RES (22), (23), (24), (25): Xaa is A or G or is absent
PXXAPTQLSPISVLYIXXXXXXXXXYKQYENMVVR

SEQ ID NO: 18689 - protein, 36 aa, Artificial Sequence
  Non-cyclic GFR-binding peptide
  MOD_RES (3), (4), (35): Xaa is C or S
APXXVPQALSPISILYIVGRKPKVYKQYEMIVRSXK

SEQ ID NO: 18690 - protein, 40 aa, Artificial Sequence
  Non-cyclic GFR-binding peptide
  MOD_RES (3), (4), (38), (40): Xaa is C or S
  MOD_RES (18), (19), (20), (21), (22): Xaa is A or G
  MOD_RES (23), (24), (25), (26): Xaa is A or G or is absent
KAXXVPTELSPISMLYIXXXXXXXXXYKQYEEMVVEGXGX

SEQ ID NO: 18691 - protein, 39 aa, Artificial Sequence
  Non-cyclic GFR-binding peptide
  MOD_RES (3), (4), (38): Xaa is C or S
  MOD_RES (18), (19), (20), (21), (22): Xaa is A or G
  MOD_RES (23), (24), (25), (26): Xaa is A or G or is absent
ASXXVPARLSPISILYKXXXXXXXXXLKYHYDMVVEAXG

SEQ ID NO: 18692 - protein, 39 aa, Artificial Sequence
  Non-cyclic GFR-binding peptide
  MOD_RES (4), (5), (38): Xaa is C or S
  MOD_RES (19), (20), (21), (22), (23): Xaa is A or G
  MOD_RES (24), (25), (26), (27): Xaa is A or G or is absent
ASPXXVSQDLEPISILYLXXXXXXXXXKFKYEMIVKSXK

SEQ ID NO: 18693 - protein, 36 aa, Artificial Sequence
  Non-cyclic GFR-binding peptide
  MOD_RES (1), (33), (35): Xaa is C or S
XVPTKLSPISILYKDKGVVTYLKYHYGMAVSEXGXR

SEQ ID NO: 18694 - protein, 41 aa, Artificial Sequence
  Non-cyclic GFR-binding peptide
  MOD_RES (5), (6), (40): Xaa is C or S
  MOD_RES (20), (21), (22), (23), (24): Xaa is A or G
  MOD_RES (25), (26), (27), (28): Xaa is A or G or is absent
APASXXVPARLSPISILYKXXXXXXXXXLKYHYDMVVEAXG

SEQ ID NO: 18695 - protein, 38 aa, Artificial Sequence
  Non-cyclic GFR-binding peptide
  MOD_RES (2), (3), (38): Xaa is C or S
  MOD_RES (17), (18), (19), (20), (21): Xaa is A or G
  MOD_RES (22), (23), (24), (25): Xaa is A or G or is absent
AXXVPTKLSPISVLYIXXXXXXXXXYKQYEEGMSVAEX

SEQ ID NO: 18696 - protein, 37 aa, Artificial Sequence
  Non-cyclic GFR-binding peptide
  MOD_RES (3), (4): Xaa is C or S
  MOD_RES (18), (19), (20), (21), (22): Xaa is A or G
  MOD_RES (23), (24), (25), (26): Xaa is A or G or is absent
KAXXAPTKLSPISVLYIXXXXXXXXXYKQYENMVVKA

SEQ ID NO: 18697 - protein, 42 aa, Artificial Sequence
  Non-cyclic GFR-binding peptide
  MOD_RES (6), (7), (40), (42): Xaa is C or S
KVGKAXXVPTKLSPISVLYIDDMGVPTYKQYEEGMSVAEXGX

SEQ ID NO: 18698 - protein, 38 aa, Artificial Sequence
  Non-cyclic GFR-binding peptide
  MOD_RES (5), (6), (38): Xaa is C or S
IPKAXXVPTELSPISMLYIDENEKVVYKQYEDMVVEGX

SEQ ID NO: 18699 - protein, 42 aa, Artificial Sequence
  Non-cyclic GFR-binding peptide
  MOD_RES (3), (4), (39), (41): Xaa is C or S
  MOD_RES (18), (19), (20), (21), (22): Xaa is A or G
  MOD_RES (23), (24), (25), (26): Xaa is A or G or is absent
KAXXVPTKLEPISVLYLXXXXXXXXXKFKYEEGMSVAEXGXR

SEQ ID NO: 18700 - protein, 37 aa, Artificial Sequence
  Non-cyclic GFR-binding peptide
  MOD_RES (6), (7): Xaa is C or S
AVPKAXXAPTKLSPISVLYIDSSNNVIYKQYENMVVK

SEQ ID NO: 18701 - protein, 39 aa, Artificial Sequence
  Non-cyclic GFR-binding peptide
  MOD_RES (5), (6), (37), (39): Xaa is C or S
SASPXXVPQDLSPISILYIVGRTPKVYKQYEMVVKSXKX

SEQ ID NO: 18702 - protein, 39 aa, Artificial Sequence
  Non-cyclic GFR-binding peptide
  MOD_RES (1), (2), (36), (38): Xaa is C or S
  MOD_RES (16), (17), (18), (19), (20): Xaa is A or G
  MOD_RES (21), (22), (23), (24): Xaa is A or G or is absent
XXVPARLEPISILYLXXXXXXXXXKFKYEDMVVEAXGXR

SEQ ID NO: 18703 - protein, 36 aa, Artificial Sequence
  Non-cyclic GFR-binding peptide
  MOD_RES (3), (4): Xaa is C or S
  MOD_RES (18), (19), (20), (21), (22): Xaa is A or G
  MOD_RES (23), (24), (25), (26): Xaa is A or G or is absent
KAXXVPTKLSPISILYIXXXXXXXXXYKQYEGMAVS

SEQ ID NO: 18704 - protein, 37 aa, Artificial Sequence
  Non-cyclic GFR-binding peptide
  MOD_RES (3), (4), (35), (37): Xaa is C or S
APXXVPQALSPISILYIVGRKPKVYKQYEMIVRSXKX

SEQ ID NO: 18705 - protein, 32 aa, Artificial Sequence
  Non-cyclic GFR-binding peptide
  MOD_RES (31), (31): Xaa is C or S
VPQALEPISILYLVGRKPKVKFKYEMIVRSXK

SEQ ID NO: 18706 - protein, 35 aa, Artificial Sequence
  Non-cyclic GFR-binding peptide
  MOD_RES (4), (5): Xaa is C or S
PKAXXAPTKLSPISVLYIDSSNNVIYKQYENMVVK

SEQ ID NO: 18707 - protein, 37 aa, Artificial Sequence
  Non-cyclic GFR-binding peptide
  MOD_RES (1), (2), (37): Xaa is C or S
  MOD_RES (16), (17), (18), (19), (20): Xaa is A or G
  MOD_RES (21), (22), (23), (24): Xaa is A or G or is absent
XXVPTKLEPISVLYLXXXXXXXXXKFKYEEGMSVAEX

SEQ ID NO: 18708 - protein, 41 aa, Artificial Sequence
  Non-cyclic GFR-binding peptide
  MOD_RES (5), (6), (40): Xaa is C or S
  MOD_RES (20), (21), (22), (23), (24): Xaa is A or G
  MOD_RES (25), (26), (27), (28): Xaa is A or G or is absent
VPKPXXAPTQLSPISVLYIXXXXXXXXXYKQYENMVVRAXG

SEQ ID NO: 18709 - protein, 42 aa, Artificial Sequence
  Non-cyclic GFR-binding peptide
  MOD_RES (6), (7), (39), (41): Xaa is C or S
AVPKAXXAPTKLSPISVLYIDSSNNVIYKQYENMVVKAXGXH

SEQ ID NO: 18710 - protein, 32 aa, Artificial Sequence
  Non-cyclic GFR-binding peptide
  MOD_RES (14), (15), (16), (17), (18): Xaa is A or G
  MOD_RES (19), (20), (21), (22): Xaa is A or G or is absent
VPQDLEPISILYLXXXXXXXXXKFKYEMVVKS

SEQ ID NO: 18711 - protein, 36 aa, Artificial Sequence
  Non-cyclic GFR-binding peptide
  MOD_RES (2), (3), (35): Xaa is C or S
SXXVPARLSPISILYKDAANNVVLKYHYDMVVEAXG

SEQ ID NO: 18712 - protein, 33 aa, Artificial Sequence
  Non-cyclic GFR-binding peptide
  MOD_RES (1), (33): Xaa is C or S
XVPTKLSPISILYKDKGVVTYLKYHYGMAVSEX

SEQ ID NO: 18713 - protein, 38 aa, Artificial Sequence
  Non-cyclic GFR-binding peptide
  MOD_RES (1), (35), (37): Xaa is C or S
  MOD_RES (15), (16), (17), (18), (19): Xaa is A or G
  MOD_RES (20), (21), (22), (23): Xaa is A or G or is absent
XAPTQLEPISVLYLXXXXXXXXXKFKYENMVVRAXGXH

SEQ ID NO: 18714 - protein, 39 aa, Artificial Sequence
  Non-cyclic GFR-binding peptide
  MOD_RES (4), (5), (38): Xaa is C or S
GKAXXVPTKLEPISVLYLDDMGVPTKFKYEEGMSVAEXG

SEQ ID NO: 18715 - protein, 34 aa, Artificial Sequence
  Non-cyclic GFR-binding peptide
  MOD_RES (2), (3), (34): Xaa is C or S
PXXVPQALSPISILYIVGRKPKVYKQYEMIVRSX

SEQ ID NO: 18716 - protein, 42 aa, Artificial Sequence
  Non-cyclic GFR-binding peptide
  MOD_RES (6), (7), (41): Xaa is C or S
  MOD_RES (21), (22), (23), (24), (25): Xaa is A or G
  MOD_RES (26), (27), (28), (29): Xaa is A or G or is absent
YVPKPXXAPTKLSPISVLYIXXXXXXXXXYKQYENMVVRSXG

SEQ ID NO: 18717 - protein, 35 aa, Artificial Sequence
  Non-cyclic GFR-binding peptide
  MOD_RES (4), (5): Xaa is C or S
PASXXVPARLEPISILYLDAANNVVKFKYEDMVVE

SEQ ID NO: 18718 - protein, 37 aa, Artificial Sequence
  Non-cyclic GFR-binding peptide
  MOD_RES (1), (2), (36): Xaa is C or S
  MOD_RES (16), (17), (18), (19), (20): Xaa is A or G
  MOD_RES (21), (22), (23), (24): Xaa is A or G or is absent
XXVPTKLSPISILYKXXXXXXXXXLKYHYGMAVSEXG

SEQ ID NO: 18719 - protein, 38 aa, Artificial Sequence
  Non-cyclic GFR-binding peptide
  MOD_RES (7), (7): Xaa is C or S
HVTKPTXAPTKLEPISVLYLDDSSNVIKFKYENMVVRS

SEQ ID NO: 18720 - protein, 37 aa, Artificial Sequence
  Non-cyclic GFR-binding peptide
  MOD_RES (5), (5): Xaa is C or S
  MOD_RES (19), (20), (21), (22), (23): Xaa is A or G
  MOD_RES (24), (25), (26), (27): Xaa is A or G or is absent
TKPTXAPTKLEPISVLYLXXXXXXXXXKFKYENMVVR

SEQ ID NO: 18721 - protein, 34 aa, Artificial Sequence
  Non-cyclic GFR-binding peptide
  MOD_RES (1), (1): Xaa is C or S
  MOD_RES (15), (16), (17), (18), (19): Xaa is A or G
  MOD_RES (20), (21), (22), (23): Xaa is A or G or is absent
XVPARLSPISILYKXXXXXXXXXLKYHYDMVVEA

SEQ ID NO: 18722 - protein, 34 aa, Artificial Sequence
  Non-cyclic GFR-binding peptide
  MOD_RES (32), (34): Xaa is C or S
VPTELSPISMLYIDEYDKVVYKQYEEMVVEGXGX

SEQ ID NO: 18723 - protein, 39 aa, Artificial Sequence
  Non-cyclic GFR-binding peptide
  MOD_RES (1), (2), (36), (38): Xaa is C or S
  MOD_RES (16), (17), (18), (19), (20): Xaa is A or G
  MOD_RES (21), (22), (23), (24): Xaa is A or G or is absent
XXAPTKLEPISVLYLXXXXXXXXXKFKYENMVVRSXGXH

SEQ ID NO: 18724 - protein, 40 aa, Artificial Sequence
  Non-cyclic GFR-binding peptide
  MOD_RES (6), (7): Xaa is C or S
  MOD_RES (21), (22), (23), (24), (25): Xaa is A or G
  MOD_RES (26), (27), (28), (29): Xaa is A or G or is absent
KASKAXXVPTKLNAISILYFXXXXXXXXXLKKYRGMAVSE

SEQ ID NO: 18725 - protein, 35 aa, Artificial Sequence
  Non-cyclic GFR-binding peptide
  MOD_RES (1), (2), (35): Xaa is C or S
  MOD_RES (16), (17), (18), (19), (20): Xaa is A or G
  MOD_RES (21), (22), (23), (24): Xaa is A or G or is absent
XXVPQALEPISILYLXXXXXXXXXKFKYEMIVRSX

SEQ ID NO: 18726 - protein, 34 aa, Artificial Sequence
  Non-cyclic GFR-binding peptide
  MOD_RES (4), (4): Xaa is C or S
KPTXAPTKLEPISVLYLDDSSNVIKFKYENMVVR

SEQ ID NO: 18727 - protein, 38 aa, Artificial Sequence
  Non-cyclic GFR-binding peptide
  MOD_RES (5), (6): Xaa is C or S
  MOD_RES (20), (21), (22), (23), (24): Xaa is A or G
  MOD_RES (25), (26), (27), (28): Xaa is A or G or is absent
VPKAXXAPTKLEPISVLYLXXXXXXXXXKFKYENMVVK

SEQ ID NO: 18728 - protein, 39 aa, Artificial Sequence
  Non-cyclic GFR-binding peptide
  MOD_RES (3), (4), (36), (38): Xaa is C or S
KPXXAPTQLSPISVLYIDDSSNVIYKQYENMVVRAXGXH

SEQ ID NO: 18729 - protein, 37 aa, Artificial Sequence
  Non-cyclic GFR-binding peptide
  MOD_RES (3), (4), (36): Xaa is C or S
KPXXAPTKLSPISVLYIDDSSNVIYKQYENMVVRSXG

SEQ ID NO: 18730 - protein, 34 aa, Artificial Sequence
  Non-cyclic GFR-binding peptide
  MOD_RES (1), (1): Xaa is C or S
  MOD_RES (15), (16), (17), (18), (19): Xaa is A or G
  MOD_RES (20), (21), (22), (23): Xaa is A or G or is absent
XVPTKLSPISILYIXXXXXXXXXYKQYEGMAVSE

SEQ ID NO: 18731 - protein, 39 aa, Artificial Sequence
  Non-cyclic GFR-binding peptide
  MOD_RES (5), (6), (39): Xaa is C or S
  MOD_RES (20), (21), (22), (23), (24): Xaa is A or G
  MOD_RES (25), (26), (27), (28): Xaa is A or G or is absent
SASPXXVSQDLSPISILYIXXXXXXXXXYKQYEMIVKSX

SEQ ID NO: 18732 - protein, 38 aa, Artificial Sequence
  Non-cyclic GFR-binding peptide
  MOD_RES (1), (2), (35), (37): Xaa is C or S
  MOD_RES (16), (17), (18), (19), (20): Xaa is A or G
  MOD_RES (21), (22), (23), (24): Xaa is A or G or is absent
XXVPQALEPISILYLXXXXXXXXXKFKYEMIVRSXKXS

SEQ ID NO: 18733 - protein, 30 aa, Artificial Sequence
  Non-cyclic GFR-binding peptide
VPTKLNAISILYFDKGVVTYLKKYRGMAVS

SEQ ID NO: 18734 - protein, 33 aa, Artificial Sequence
  Non-cyclic GFR-binding peptide
  MOD_RES (1), (2), (33): Xaa is C or S
XXVSQDLEPISILYLIGKTPKIKFKYEMIVKSX

SEQ ID NO: 18735 - protein, 39 aa, Artificial Sequence
  Non-cyclic GFR-binding peptide
  MOD_RES (5), (6), (39): Xaa is C or S
VGKAXXVPTKLSPISVLYIDDMGVPTYKQYEEGMSVAEX

SEQ ID NO: 18736 - protein, 37 aa, Artificial Sequence
  Non-cyclic GFR-binding peptide
  MOD_RES (3), (4), (35), (37): Xaa is C or S
SPXXVSQDLEPISILYLIGKTPKIKFKYEMIVKSXKX

SEQ ID NO: 18737 - protein, 35 aa, Artificial Sequence
  Non-cyclic GFR-binding peptide
  MOD_RES (2), (3): Xaa is C or S
  MOD_RES (17), (18), (19), (20), (21): Xaa is A or G
  MOD_RES (22), (23), (24), (25): Xaa is A or G or is absent
PXXVPQDLEPISILYLXXXXXXXXXKFKYEMVVKS

SEQ ID NO: 18738 - protein, 36 aa, Artificial Sequence
  Non-cyclic GFR-binding peptide
  MOD_RES (5), (6): Xaa is C or S
VPKPXXAPTQLSPISVLYIDDSSNVIYKQYENMVVR

SEQ ID NO: 18739 - protein, 40 aa, Artificial Sequence
  Non-cyclic GFR-binding peptide
  MOD_RES (5), (37), (39): Xaa is C or S
TKPTXAPTKLEPISVLYLDDSSNVIKFKYENMVVRSXGXH

SEQ ID NO: 18740 - protein, 38 aa, Artificial Sequence
  Non-cyclic GFR-binding peptide
  MOD_RES (1), (2), (37): Xaa is C or S
  MOD_RES (16), (17), (18), (19), (20): Xaa is A or G
  MOD_RES (21), (22), (23), (24): Xaa is A or G or is absent
XXVPTKLSPISVLYIXXXXXXXXXYKQYEEGMSVAEXG

SEQ ID NO: 18741 - protein, 38 aa, Artificial Sequence
  Non-cyclic GFR-binding peptide
  MOD_RES (2), (3), (37): Xaa is C or S
  MOD_RES (17), (18), (19), (20), (21): Xaa is A or G
  MOD_RES (22), (23), (24), (25): Xaa is A or G or is absent
AXXVPTELEPISMLYLXXXXXXXXXKFKYEEMVVEGXG

SEQ ID NO: 18742 - protein, 38 aa, Artificial Sequence
  Non-cyclic GFR-binding peptide
  MOD_RES (5), (6), (37): Xaa is C or S
SASPXXVPQDLEPISILYLVGRTPKVKFKYEMVVKSXK

SEQ ID NO: 18743 - protein, 35 aa, Artificial Sequence
  Non-cyclic GFR-binding peptide
  MOD_RES (1), (2): Xaa is C or S
  MOD_RES (16), (17), (18), (19), (20): Xaa is A or G
  MOD_RES (21), (22), (23), (24): Xaa is A or G or is absent
XXAPTKLEPISVLYLXXXXXXXXXKFKYENMVVKA

SEQ ID NO: 18744 - protein, 35 aa, Artificial Sequence
  Non-cyclic GFR-binding peptide
  MOD_RES (2), (3), (35): Xaa is C or S
AXXVPTELEPISMLYLDENEKVVKFKYEDMVVEGX

SEQ ID NO: 18745 - protein, 37 aa, Artificial Sequence
  Non-cyclic GFR-binding peptide
  MOD_RES (3), (4), (36): Xaa is C or S
KAXXAPTKLSPISVLYIDSSNNVIYKQYENMVVKAXG

SEQ ID NO: 18746 - protein, 35 aa, Artificial Sequence
  Non-cyclic GFR-binding peptide
  MOD_RES (1), (2): Xaa is C or S
  MOD_RES (16), (17), (18), (19), (20): Xaa is A or G
  MOD_RES (21), (22), (23), (24): Xaa is A or G or is absent
XXVPTKLNAISILYFXXXXXXXXXLKKYRGMAVSE

SEQ ID NO: 18747 - protein, 38 aa, Artificial Sequence
  Non-cyclic GFR-binding peptide
  MOD_RES (4), (5): Xaa is C or S
  MOD_RES (19), (20), (21), (22), (23): Xaa is A or G
  MOD_RES (24), (25), (26), (27): Xaa is A or G or is absent
PASXXVPARLEPISILYLXXXXXXXXXKFKYEDMVVEA

SEQ ID NO: 18748 - protein, 39 aa, Artificial Sequence
  Non-cyclic GFR-binding peptide
  MOD_RES (5), (6): Xaa is C or S
  MOD_RES (20), (21), (22), (23), (24): Xaa is A or G
  MOD_RES (25), (26), (27), (28): Xaa is A or G or is absent
VPKAXXAPTKLSPISVLYIXXXXXXXXXYKQYENMVVKA

SEQ ID NO: 18749 - protein, 35 aa, Artificial Sequence
  Non-cyclic GFR-binding peptide
  MOD_RES (4), (5): Xaa is C or S
PASXXVPARLNAISILYFDAANNVVLKKYRDMVVE

SEQ ID NO: 18750 - protein, 41 aa, Artificial Sequence
  Non-cyclic GFR-binding peptide
  MOD_RES (6), (7), (40): Xaa is C or S
  MOD_RES (21), (22), (23), (24), (25): Xaa is A or G
  MOD_RES (26), (27), (28), (29): Xaa is A or G or is absent
ASAAPXXVPQALSPISILYIXXXXXXXXXYKQYEMIVRSXK

SEQ ID NO: 18751 - protein, 34 aa, Artificial Sequence
  Non-cyclic GFR-binding peptide
  MOD_RES (3), (4): Xaa is C or S
ASXXVPARLSPISILYKDAANNVVLKYHYDMVVE

SEQ ID NO: 18752 - protein, 39 aa, Artificial Sequence
  Non-cyclic GFR-binding peptide
  MOD_RES (6), (7), (39): Xaa is C or S
AAPASXXVPARLNAISILYFDAANNVVLKKYRDMVVEAX

SEQ ID NO: 18753 - protein, 36 aa, Artificial Sequence
  Non-cyclic GFR-binding peptide
  MOD_RES (33), (35): Xaa is C or S
VPTKLEPISVLYLDDMGVPTKFKYEEGMSVAEXGXR

SEQ ID NO: 18754 - protein, 36 aa, Artificial Sequence
  Non-cyclic GFR-binding peptide
  MOD_RES (34), (36): Xaa is C or S
  MOD_RES (14), (15), (16), (17), (18): Xaa is A or G
  MOD_RES (19), (20), (21), (22): Xaa is A or G or is absent
VPTELSPISMLYIXXXXXXXXXYKQYEDMVVEGXGX

SEQ ID NO: 18755 - protein, 40 aa, Artificial Sequence
  Non-cyclic GFR-binding peptide
  MOD_RES (4), (5), (39): Xaa is C or S
  MOD_RES (19), (20), (21), (22), (23): Xaa is A or G
  MOD_RES (24), (25), (26), (27): Xaa is A or G or is absent
SKAXXVPTKLSPISILYKXXXXXXXXXLKYHYGMAVSEXG

SEQ ID NO: 18756 - protein, 41 aa, Artificial Sequence
  Non-cyclic GFR-binding peptide
  MOD_RES (6), (7), (39), (41): Xaa is C or S
KASKAXXVPTKLNAISILYFDKGVVTYLKKYRGMAVSEXGX

SEQ ID NO: 18757 - protein, 37 aa, Artificial Sequence
  Non-cyclic GFR-binding peptide
  MOD_RES (6), (7): Xaa is C or S
KIPKAXXVPTELSPISMLYIDENEKVVYKQYEDMVVE

SEQ ID NO: 18758 - protein, 34 aa, Artificial Sequence
  Non-cyclic GFR-binding peptide
  MOD_RES (34), (34): Xaa is C or S
  MOD_RES (14), (15), (16), (17), (18): Xaa is A or G
  MOD_RES (19), (20), (21), (22): Xaa is A or G or is absent
VPTELEPISMLYLXXXXXXXXXKFKYEEMVVEGX

SEQ ID NO: 18759 - protein, 37 aa, Artificial Sequence
  Non-cyclic GFR-binding peptide
  MOD_RES (6), (7): Xaa is C or S
ASASPXXVSQDLEPISILYLIGKTPKIKFKYEMIVKS

SEQ ID NO: 18760 - protein, 39 aa, Artificial Sequence
  Non-cyclic GFR-binding peptide
  MOD_RES (5), (6), (38): Xaa is C or S
APASXXVPARLSPISILYKDAANNVVLKYHYDMVVEAXG

SEQ ID NO: 18761 - protein, 38 aa, Artificial Sequence
  Non-cyclic GFR-binding peptide
  MOD_RES (5), (6): Xaa is C or S
  MOD_RES (20), (21), (22), (23), (24): Xaa is A or G
  MOD_RES (25), (26), (27), (28): Xaa is A or G or is absent
SAAPXXVPQALSPISILYIXXXXXXXXXYKQYEMIVRS

SEQ ID NO: 18762 - protein, 32 aa, Artificial Sequence
  Non-cyclic GFR-binding peptide
  MOD_RES (14), (15), (16), (17), (18): Xaa is A or G
  MOD_RES (19), (20), (21), (22): Xaa is A or G or is absent
VPTKLSPISILYIXXXXXXXXXYKQYEGMAVS

SEQ ID NO: 18763 - protein, 37 aa, Artificial Sequence
  Non-cyclic GFR-binding peptide
  MOD_RES (4), (5): Xaa is C or S
  MOD_RES (19), (20), (21), (22), (23): Xaa is A or G
  MOD_RES (24), (25), (26), (27): Xaa is A or G or is absent
PKAXXVPTELSPISMLYIXXXXXXXXXYKQYEEMVVE

SEQ ID NO: 18764 - protein, 38 aa, Artificial Sequence
  Non-cyclic GFR-binding peptide
  MOD_RES (5), (6): Xaa is C or S
  MOD_RES (20), (21), (22), (23), (24): Xaa is A or G
  MOD_RES (25), (26), (27), (28): Xaa is A or G or is absent
APASXXVPARLEPISILYLXXXXXXXXXKFKYEDMVVE

SEQ ID NO: 18765 - protein, 33 aa, Artificial Sequence
  Non-cyclic GFR-binding peptide
  MOD_RES (1), (1): Xaa is C or S
XVPTKLEPISVLYLDDMGVPTKFKYEEGMSVAE

SEQ ID NO: 18766 - protein, 32 aa, Artificial Sequence
  Non-cyclic GFR-binding peptide
  MOD_RES (1), (1): Xaa is C or S
XVPARLSPISILYKDAANNVVLKYHYDMVVEA

SEQ ID NO: 18767 - protein, 43 aa, Artificial Sequence
  Non-cyclic GFR-binding peptide
  MOD_RES (5), (6), (40), (42): Xaa is C or S
  MOD_RES (20), (21), (22), (23), (24): Xaa is A or G
  MOD_RES (25), (26), (27), (28): Xaa is A or G or is absent
ASKAXXVPTKLSPISILYKXXXXXXXXXLKYHYGMAVSEXGXR

SEQ ID NO: 18768 - protein, 41 aa, Artificial Sequence
  Non-cyclic GFR-binding peptide
  MOD_RES (3), (4), (38), (40): Xaa is C or S
  MOD_RES (18), (19), (20), (21), (22): Xaa is A or G
  MOD_RES (23), (24), (25), (26): Xaa is A or G or is absent
KPXXAPTQLSPISVLYIXXXXXXXXXYKQYENMVVRAXGXH

SEQ ID NO: 18769 - protein, 44 aa, Artificial Sequence
  Non-cyclic GFR-binding peptide
  MOD_RES (7), (41), (43): Xaa is C or S
  MOD_RES (21), (22), (23), (24), (25): Xaa is A or G
  MOD_RES (26), (27), (28), (29): Xaa is A or G or is absent
HVTKPTXAPTKLSPISVLYIXXXXXXXXXYKQYENMVVRSXGXH

SEQ ID NO: 18770 - protein, 42 aa, Artificial Sequence
  Non-cyclic GFR-binding peptide
  MOD_RES (6), (7), (39), (41): Xaa is C or S
SIPKAXXVPTELEPISMLYLDEYDKVVKFKYEEMVVEGXGXR

SEQ ID NO: 18771 - protein, 42 aa, Artificial Sequence
  Non-cyclic GFR-binding peptide
  MOD_RES (4), (5), (39), (41): Xaa is C or S
  MOD_RES (19), (20), (21), (22), (23): Xaa is A or G
  MOD_RES (24), (25), (26), (27): Xaa is A or G or is absent
PKAXXAPTKLSPISVLYIXXXXXXXXXYKQYENMVVKAXGXH

SEQ ID NO: 18772 - protein, 44 aa, Artificial Sequence
  Non-cyclic GFR-binding peptide
  MOD_RES (6), (7), (41), (43): Xaa is C or S
  MOD_RES (21), (22), (23), (24), (25): Xaa is A or G
  MOD_RES (26), (27), (28), (29): Xaa is A or G or is absent
AVPKAXXAPTKLSPISVLYIXXXXXXXXXYKQYENMVVKAXGXH

SEQ ID NO: 18773 - protein, 38 aa, Artificial Sequence
  Non-cyclic GFR-binding peptide
  MOD_RES (4), (5): Xaa is C or S
  MOD_RES (19), (20), (21), (22), (23): Xaa is A or G
  MOD_RES (24), (25), (26), (27): Xaa is A or G or is absent
SKAXXVPTKLSPISILYKXXXXXXXXXLKYHYGMAVSE

SEQ ID NO: 18774 - protein, 38 aa, Artificial Sequence
  Non-cyclic GFR-binding peptide
  MOD_RES (4), (5): Xaa is C or S
  MOD_RES (19), (20), (21), (22), (23): Xaa is A or G
  MOD_RES (24), (25), (26), (27): Xaa is A or G or is absent
PASXXVPARLSPISILYKXXXXXXXXXLKYHYDMVVEA

SEQ ID NO: 18775 - protein, 40 aa, Artificial Sequence
  Non-cyclic GFR-binding peptide
  MOD_RES (6), (7), (38), (40): Xaa is C or S
ASAAPXXVPQALSPISILYIVGRKPKVYKQYEMIVRSXKX

SEQ ID NO: 18776 - protein, 36 aa, Artificial Sequence
  Non-cyclic GFR-binding peptide
  MOD_RES (1), (2), (35): Xaa is C or S
XXVPTKLEPISVLYLDDMGVPTKFKYEEGMSVAEXG

SEQ ID NO: 18777 - protein, 34 aa, Artificial Sequence
  Non-cyclic GFR-binding peptide
  MOD_RES (34), (34): Xaa is C or S
  MOD_RES (14), (15), (16), (17), (18): Xaa is A or G
  MOD_RES (19), (20), (21), (22): Xaa is A or G or is absent
VPTKLNAISILYFXXXXXXXXXLKKYRGMAVSEX

SEQ ID NO: 18778 - protein, 43 aa, Artificial Sequence
  Non-cyclic GFR-binding peptide
  MOD_RES (5), (6), (40), (42): Xaa is C or S
  MOD_RES (20), (21), (22), (23), (24): Xaa is A or G
  MOD_RES (25), (26), (27), (28): Xaa is A or G or is absent
ASKAXXVPTKLSPISILYIXXXXXXXXXYKQYEGMAVSEXGXR

SEQ ID NO: 18779 - protein, 38 aa, Artificial Sequence
  Non-cyclic GFR-binding peptide
  MOD_RES (3), (4), (36), (38): Xaa is C or S
KAXXVPTKLSPISILYKDKGVVTYLKYHYGMAVSEXGX

SEQ ID NO: 18780 - protein, 37 aa, Artificial Sequence
  Non-cyclic GFR-binding peptide
  MOD_RES (4), (5), (37): Xaa is C or S
PKAXXVPTELSPISMLYIDENEKVVYKQYEDMVVEGX

SEQ ID NO: 18781 - protein, 39 aa, Artificial Sequence
  Non-cyclic GFR-binding peptide
  MOD_RES (2), (3), (36), (38): Xaa is C or S
  MOD_RES (17), (18), (19), (20), (21): Xaa is A or G
  MOD_RES (22), (23), (24), (25): Xaa is A or G or is absent
PXXVSQDLEPISILYLXXXXXXXXXKFKYEMIVKSXKXS

SEQ ID NO: 18782 - protein, 37 aa, Artificial Sequence
  Non-cyclic GFR-binding peptide
  MOD_RES (4), (5), (36): Xaa is C or S
AAPXXVPQALEPISILYLVGRKPKVKFKYEMIVRSXK

SEQ ID NO: 18783 - protein, 33 aa, Artificial Sequence
  Non-cyclic GFR-binding peptide
  MOD_RES (2), (3): Xaa is C or S
PXXAPTKLSPISVLYIDDSSNVIYKQYENMVVR

SEQ ID NO: 18784 - protein, 34 aa, Artificial Sequence
  Non-cyclic GFR-binding peptide
  MOD_RES (1), (33): Xaa is C or S
XVPTELEPISMLYLDEYDKVVKFKYEEMVVEGXG

SEQ ID NO: 18785 - protein, 38 aa, Artificial Sequence
  Non-cyclic GFR-binding peptide
  MOD_RES (5), (6), (38): Xaa is C or S
IPKAXXVPTELEPISMLYLDEYDKVVKFKYEEMVVEGX

SEQ ID NO: 18786 - protein, 38 aa, Artificial Sequence
  Non-cyclic GFR-binding peptide
  MOD_RES (2), (3), (36), (38): Xaa is C or S
AXXVPTKLSPISVLYIDDMGVPTYKQYEEGMSVAEXGX

SEQ ID NO: 18787 - protein, 38 aa, Artificial Sequence
  Non-cyclic GFR-binding peptide
  MOD_RES (1), (2), (35), (37): Xaa is C or S
  MOD_RES (16), (17), (18), (19), (20): Xaa is A or G
  MOD_RES (21), (22), (23), (24): Xaa is A or G or is absent
XXVPQALSPISILYIXXXXXXXXXYKQYEMIVRSXKXS

SEQ ID NO: 18788 - protein, 31 aa, Artificial Sequence
  Non-cyclic GFR-binding peptide
VPTELSPISMLYIDENEKVVYKQYEDMVVEG

SEQ ID NO: 18789 - protein, 40 aa, Artificial Sequence
  Non-cyclic GFR-binding peptide
  MOD_RES (4), (5), (39): Xaa is C or S
  MOD_RES (19), (20), (21), (22), (23): Xaa is A or G
  MOD_RES (24), (25), (26), (27): Xaa is A or G or is absent
PKPXXAPTQLSPISVLYIXXXXXXXXXYKQYENMVVRAXG

SEQ ID NO: 18790 - protein, 38 aa, Artificial Sequence
  Non-cyclic GFR-binding peptide
  MOD_RES (5), (6): Xaa is C or S
  MOD_RES (20), (21), (22), (23), (24): Xaa is A or G
  MOD_RES (25), (26), (27), (28): Xaa is A or G or is absent
VPKPXXAPTKLSPISVLYIXXXXXXXXXYKQYENMVVR

SEQ ID NO: 18791 - protein, 35 aa, Artificial Sequence
  Non-cyclic GFR-binding peptide
  MOD_RES (4), (4): Xaa is C or S
KPTXAPTKLEPISVLYLDDSSNVIKFKYENMVVRS

SEQ ID NO: 18792 - protein, 37 aa, Artificial Sequence
  Non-cyclic GFR-binding peptide
  MOD_RES (34), (36): Xaa is C or S
  MOD_RES (14), (15), (16), (17), (18): Xaa is A or G
  MOD_RES (19), (20), (21), (22): Xaa is A or G or is absent
VPTKLSPISILYKXXXXXXXXXLKYHYGMAVSEXGXR

SEQ ID NO: 18793 - protein, 35 aa, Artificial Sequence
  Non-cyclic GFR-binding peptide
  MOD_RES (1), (2): Xaa is C or S
  MOD_RES (16), (17), (18), (19), (20): Xaa is A or G
  MOD_RES (21), (22), (23), (24): Xaa is A or G or is absent
XXAPTKLEPISVLYLXXXXXXXXXKFKYENMVVRS

SEQ ID NO: 18794 - protein, 39 aa, Artificial Sequence
  Non-cyclic GFR-binding peptide
  MOD_RES (3), (4), (38): Xaa is C or S
  MOD_RES (18), (19), (20), (21), (22): Xaa is A or G
  MOD_RES (23), (24), (25), (26): Xaa is A or G or is absent
KPXXAPTKLSPISVLYIXXXXXXXXXYKQYENMVVRSXG

SEQ ID NO: 18795 - protein, 36 aa, Artificial Sequence
  Non-cyclic GFR-binding peptide
  MOD_RES (1), (35): Xaa is C or S
  MOD_RES (15), (16), (17), (18), (19): Xaa is A or G
  MOD_RES (20), (21), (22), (23): Xaa is A or G or is absent
XAPTQLSPISVLYIXXXXXXXXXYKQYENMVVRAXG

SEQ ID NO: 18796 - protein, 38 aa, Artificial Sequence
  Non-cyclic GFR-binding peptide
  MOD_RES (5), (6): Xaa is C or S
  MOD_RES (20), (21), (22), (23), (24): Xaa is A or G
  MOD_RES (25), (26), (27), (28): Xaa is A or G or is absent
VPKPXXAPTQLEPISVLYLXXXXXXXXXKFKYENMVVR

SEQ ID NO: 18797 - protein, 38 aa, Artificial Sequence
  Non-cyclic GFR-binding peptide
  MOD_RES (4), (5): Xaa is C or S
  MOD_RES (19), (20), (21), (22), (23): Xaa is A or G
  MOD_RES (24), (25), (26), (27): Xaa is A or G or is absent
SKAXXVPTKLSPISILYIXXXXXXXXXYKQYEGMAVSE

SEQ ID NO: 18798 - protein, 35 aa, Artificial Sequence
  Non-cyclic GFR-binding peptide
  MOD_RES (32), (34): Xaa is C or S
VPTELEPISMLYLDEYDKVVKFKYEEMVVEGXGXR

SEQ ID NO: 18799 - protein, 35 aa, Artificial Sequence
  Non-cyclic GFR-binding peptide
  MOD_RES (1), (35): Xaa is C or S
  MOD_RES (15), (16), (17), (18), (19): Xaa is A or G
  MOD_RES (20), (21), (22), (23): Xaa is A or G or is absent
XAPTKLSPISVLYIXXXXXXXXXYKQYENMVVRSX

SEQ ID NO: 18800 - protein, 32 aa, Artificial Sequence
  Non-cyclic GFR-binding peptide
  MOD_RES (1), (2): Xaa is C or S
XXVPQDLEPISILYLVGRTPKVKFKYEMVVKS

SEQ ID NO: 18801 - protein, 41 aa, Artificial Sequence
  Non-cyclic GFR-binding peptide
  MOD_RES (5), (6), (38), (40): Xaa is C or S
ASKAXXVPTKLSPISILYIDKGVVTYYKQYEGMAVSEXGXR

SEQ ID NO: 18802 - protein, 35 aa, Artificial Sequence
  Non-cyclic GFR-binding peptide
  MOD_RES (2), (3), (35): Xaa is C or S
AXXVPTKLSPISILYKDKGVVTYLKYHYGMAVSEX

SEQ ID NO: 18803 - protein, 37 aa, Artificial Sequence
  Non-cyclic GFR-binding peptide
  MOD_RES (35), (37): Xaa is C or S
  MOD_RES (14), (15), (16), (17), (18): Xaa is A or G
  MOD_RES (19), (20), (21), (22): Xaa is A or G or is absent
VPTKLSPISVLYIXXXXXXXXXYKQYEEGMSVAEXGX

SEQ ID NO: 18804 - protein, 37 aa, Artificial Sequence
  Non-cyclic GFR-binding peptide
  MOD_RES (1), (34), (36): Xaa is C or S
  MOD_RES (15), (16), (17), (18), (19): Xaa is A or G
  MOD_RES (20), (21), (22), (23): Xaa is A or G or is absent
XVSQDLEPISILYLXXXXXXXXXKFKYEMIVKSXKXS

SEQ ID NO: 18805 - protein, 40 aa, Artificial Sequence
  Non-cyclic GFR-binding peptide
  MOD_RES (5), (6), (38), (40): Xaa is C or S
ASKAXXVPTKLNAISILYFDKGVVTYLKKYRGMAVSEXGX

SEQ ID NO: 18806 - protein, 38 aa, Artificial Sequence
  Non-cyclic GFR-binding peptide
  MOD_RES (4), (5), (37): Xaa is C or S
PKAXXVPTELSPISMLYIDENEKVVYKQYEDMVVEGXG

SEQ ID NO: 18807 - protein, 37 aa, Artificial Sequence
  Non-cyclic GFR-binding peptide
  MOD_RES (2), (3), (37): Xaa is C or S
  MOD_RES (17), (18), (19), (20), (21): Xaa is A or G
  MOD_RES (22), (23), (24), (25): Xaa is A or G or is absent
AXXVPTKLSPISILYIXXXXXXXXXYKQYEGMAVSEX

SEQ ID NO: 18808 - protein, 40 aa, Artificial Sequence
  Non-cyclic GFR-binding peptide
  MOD_RES (5), (6), (38), (40): Xaa is C or S
VPKAXXAPTKLSPISVLYIDSSNNVIYKQYENMVVKAXGX

SEQ ID NO: 18809 - protein, 38 aa, Artificial Sequence
  Non-cyclic GFR-binding peptide
  MOD_RES (5), (6), (37): Xaa is C or S
SASPXXVSQDLEPISILYLIGKTPKIKFKYEMIVKSXK

SEQ ID NO: 18810 - protein, 37 aa, Artificial Sequence
  Non-cyclic GFR-binding peptide
  MOD_RES (1), (35), (37): Xaa is C or S
  MOD_RES (15), (16), (17), (18), (19): Xaa is A or G
  MOD_RES (20), (21), (22), (23): Xaa is A or G or is absent
XVPTKLSPISILYIXXXXXXXXXYKQYEGMAVSEXGX

SEQ ID NO: 18811 - protein, 43 aa, Artificial Sequence
  Non-cyclic GFR-binding peptide
  MOD_RES (5), (6), (40), (42): Xaa is C or S
  MOD_RES (20), (21), (22), (23), (24): Xaa is A or G
  MOD_RES (25), (26), (27), (28): Xaa is A or G or is absent
IPKAXXVPTELEPISMLYLXXXXXXXXXKFKYEDMVVEGXGXR

SEQ ID NO: 18812 - protein, 32 aa, Artificial Sequence
  Non-cyclic GFR-binding peptide
  MOD_RES (32), (32): Xaa is C or S
VPTKLNAISILYFDKGVVTYLKKYRGMAVSEX

SEQ ID NO: 18813 - protein, 40 aa, Artificial Sequence
  Non-cyclic GFR-binding peptide
  MOD_RES (4), (5), (39): Xaa is C or S
  MOD_RES (19), (20), (21), (22), (23): Xaa is A or G
  MOD_RES (24), (25), (26), (27): Xaa is A or G or is absent
SKAXXVPTKLNAISILYFXXXXXXXXXLKKYRGMAVSEXG

SEQ ID NO: 18814 - protein, 33 aa, Artificial Sequence
  Non-cyclic GFR-binding peptide
  MOD_RES (1), (1): Xaa is C or S
  MOD_RES (15), (16), (17), (18), (19): Xaa is A or G
  MOD_RES (20), (21), (22), (23): Xaa is A or G or is absent
XVSQDLSPISILYIXXXXXXXXXYKQYEMIVKS

SEQ ID NO: 18815 - protein, 36 aa, Artificial Sequence
  Non-cyclic GFR-binding peptide
  MOD_RES (2), (3), (35): Xaa is C or S
SXXVPARLEPISILYLDAANNVVKFKYEDMVVEAXG

SEQ ID NO: 18816 - protein, 33 aa, Artificial Sequence
  Non-cyclic GFR-binding peptide
  MOD_RES (1), (1): Xaa is C or S
  MOD_RES (15), (16), (17), (18), (19): Xaa is A or G
  MOD_RES (20), (21), (22), (23): Xaa is A or G or is absent
XVPARLSPISILYKXXXXXXXXXLKYHYDMVVE

SEQ ID NO: 18817 - protein, 32 aa, Artificial Sequence
  Non-cyclic GFR-binding peptide
  MOD_RES (14), (15), (16), (17), (18): Xaa is A or G
  MOD_RES (19), (20), (21), (22): Xaa is A or G or is absent
VPTELEPISMLYLXXXXXXXXXKFKYEDMVVE

SEQ ID NO: 18818 - protein, 36 aa, Artificial Sequence
  Non-cyclic GFR-binding peptide
  MOD_RES (3), (35): Xaa is C or S
PTXAPTKLSPISVLYIDDSSNVIYKQYENMVVRSXG

SEQ ID NO: 18819 - protein, 34 aa, Artificial Sequence
  Non-cyclic GFR-binding peptide
  MOD_RES (2), (3): Xaa is C or S
SXXVPARLNAISILYFDAANNVVLKKYRDMVVEA

SEQ ID NO: 18820 - protein, 32 aa, Artificial Sequence
  Non-cyclic GFR-binding peptide
  MOD_RES (32), (32): Xaa is C or S
VPTKLSPISILYKDKGVVTYLKYHYGMAVSEX

SEQ ID NO: 18821 - protein, 39 aa, Artificial Sequence
  Non-cyclic GFR-binding peptide
  MOD_RES (4), (5), (37), (39): Xaa is C or S
PASXXVPARLEPISILYLDAANNVVKFKYEDMVVEAXGX

SEQ ID NO: 18822 - protein, 33 aa, Artificial Sequence
  Non-cyclic GFR-binding peptide
  MOD_RES (14), (15), (16), (17), (18): Xaa is A or G
  MOD_RES (19), (20), (21), (22): Xaa is A or G or is absent
VPARLNAISILYFXXXXXXXXXLKKYRDMVVEA

SEQ ID NO: 18823 - protein, 36 aa, Artificial Sequence
  Non-cyclic GFR-binding peptide
  MOD_RES (1), (2), (35): Xaa is C or S
  MOD_RES (16), (17), (18), (19), (20): Xaa is A or G
  MOD_RES (21), (22), (23), (24): Xaa is A or G or is absent
XXVSQDLEPISILYLXXXXXXXXXKFKYEMIVKSXK

SEQ ID NO: 18824 - protein, 36 aa, Artificial Sequence
  Non-cyclic GFR-binding peptide
  MOD_RES (3), (4), (36): Xaa is C or S
KAXXAPTKLSPISVLYIDSSNNVIYKQYENMVVKAX

SEQ ID NO: 18825 - protein, 34 aa, Artificial Sequence
  Non-cyclic GFR-binding peptide
  MOD_RES (33), (33): Xaa is C or S
  MOD_RES (14), (15), (16), (17), (18): Xaa is A or G
  MOD_RES (19), (20), (21), (22): Xaa is A or G or is absent
VPQDLEPISILYLXXXXXXXXXKFKYEMVVKSXK

SEQ ID NO: 18826 - protein, 31 aa, Artificial Sequence
  Non-cyclic GFR-binding peptide
  MOD_RES (1), (1): Xaa is C or S
XVPQDLEPISILYLVGRTPKVKFKYEMVVKS

SEQ ID NO: 18827 - protein, 37 aa, Artificial Sequence
  Non-cyclic GFR-binding peptide
  MOD_RES (4), (5), (36): Xaa is C or S
ASPXXVPQDLSPISILYIVGRTPKVYKQYEMVVKSXK

SEQ ID NO: 18828 - protein, 36 aa, Artificial Sequence
  Non-cyclic GFR-binding peptide
  MOD_RES (34), (36): Xaa is C or S
  MOD_RES (14), (15), (16), (17), (18): Xaa is A or G
  MOD_RES (19), (20), (21), (22): Xaa is A or G or is absent
VPTELEPISMLYLXXXXXXXXXKFKYEDMVVEGXGX

SEQ ID NO: 18829 - protein, 34 aa, Artificial Sequence
  Non-cyclic GFR-binding peptide
  MOD_RES (1), (2), (33): Xaa is C or S
XXVSQDLSPISILYIIGKTPKIYKQYEMIVKSXK

SEQ ID NO: 18830 - protein, 41 aa, Artificial Sequence
  Non-cyclic GFR-binding peptide
  MOD_RES (5), (6), (38), (40): Xaa is C or S
VPKPXXAPTKLSPISVLYIDDSSNVIYKQYENMVVRSXGXH

SEQ ID NO: 18831 - protein, 42 aa, Artificial Sequence
  Non-cyclic GFR-binding peptide
  MOD_RES (5), (6), (40), (42): Xaa is C or S
  MOD_RES (20), (21), (22), (23), (24): Xaa is A or G
  MOD_RES (25), (26), (27), (28): Xaa is A or G or is absent
VPKPXXAPTKLSPISVLYIXXXXXXXXXYKQYENMVVRSXGX

SEQ ID NO: 18832 - protein, 35 aa, Artificial Sequence
  Non-cyclic GFR-binding peptide
  MOD_RES (2), (3), (35): Xaa is C or S
AXXVPTKLNAISILYFDKGVVTYLKKYRGMAVSEX

SEQ ID NO: 18833 - protein, 40 aa, Artificial Sequence
  Non-cyclic GFR-binding peptide
  MOD_RES (6), (38), (40): Xaa is C or S
VTKPTXAPTKLEPISVLYLDDSSNVIKFKYENMVVRSXGX

SEQ ID NO: 18834 - protein, 36 aa, Artificial Sequence
  Non-cyclic GFR-binding peptide
  MOD_RES (3), (4), (36): Xaa is C or S
KPXXAPTQLSPISVLYIDDSSNVIYKQYENMVVRAX

SEQ ID NO: 18835 - protein, 37 aa, Artificial Sequence
  Non-cyclic GFR-binding peptide
  MOD_RES (3), (4), (37): Xaa is C or S
  MOD_RES (18), (19), (20), (21), (22): Xaa is A or G
  MOD_RES (23), (24), (25), (26): Xaa is A or G or is absent
APXXVPQALEPISILYLXXXXXXXXXKFKYEMIVRSX

SEQ ID NO: 18836 - protein, 35 aa, Artificial Sequence
  Non-cyclic GFR-binding peptide
  MOD_RES (32), (34): Xaa is C or S
VPTELEPISMLYLDENEKVVKFKYEDMVVEGXGXR

SEQ ID NO: 18837 - protein, 40 aa, Artificial Sequence
  Non-cyclic GFR-binding peptide
  MOD_RES (4), (5), (37), (39): Xaa is C or S
PKAXXAPTKLSPISVLYIDSSNNVIYKQYENMVVKAXGXH

SEQ ID NO: 18838 - protein, 34 aa, Artificial Sequence
  Non-cyclic GFR-binding peptide
  MOD_RES (1), (2), (33): Xaa is C or S
XXVPQDLSPISILYIVGRTPKVYKQYEMVVKSXK

SEQ ID NO: 18839 - protein, 36 aa, Artificial Sequence
  Non-cyclic GFR-binding peptide
  MOD_RES (34), (36): Xaa is C or S
  MOD_RES (14), (15), (16), (17), (18): Xaa is A or G
  MOD_RES (19), (20), (21), (22): Xaa is A or G or is absent
VPTKLNAISILYFXXXXXXXXXLKKYRGMAVSEXGX

SEQ ID NO: 18840 - protein, 39 aa, Artificial Sequence
  Non-cyclic GFR-binding peptide
  MOD_RES (4), (5), (39): Xaa is C or S
  MOD_RES (19), (20), (21), (22), (23): Xaa is A or G
  MOD_RES (24), (25), (26), (27): Xaa is A or G or is absent
SKAXXVPTKLNAISILYFXXXXXXXXXLKKYRGMAVSEX

SEQ ID NO: 18841 - protein, 35 aa, Artificial Sequence
  Non-cyclic GFR-binding peptide
  MOD_RES (1), (2), (34): Xaa is C or S
XXVPTELEPISMLYLDENEKVVKFKYEDMVVEGXG

SEQ ID NO: 18842 - protein, 42 aa, Artificial Sequence
  Non-cyclic GFR-binding peptide
  MOD_RES (5), (6), (39), (41): Xaa is C or S
  MOD_RES (20), (21), (22), (23), (24): Xaa is A or G
  MOD_RES (25), (26), (27), (28): Xaa is A or G or is absent
SASPXXVSQDLSPISILYIXXXXXXXXXYKQYEMIVKSXKXS

SEQ ID NO: 18843 - protein, 35 aa, Artificial Sequence
  Non-cyclic GFR-binding peptide
  MOD_RES (34), (34): Xaa is C or S
  MOD_RES (14), (15), (16), (17), (18): Xaa is A or G
  MOD_RES (19), (20), (21), (22): Xaa is A or G or is absent
APTKLEPISVLYLXXXXXXXXXKFKYENMVVKAXG

SEQ ID NO: 18844 - protein, 35 aa, Artificial Sequence
  Non-cyclic GFR-binding peptide
  MOD_RES (2), (3), (34): Xaa is C or S
PXXVPQDLEPISILYLVGRTPKVKFKYEMVVKSXK

SEQ ID NO: 18845 - protein, 36 aa, Artificial Sequence
  Non-cyclic GFR-binding peptide
  MOD_RES (2), (3), (35): Xaa is C or S
AXXAPTKLEPISVLYLDSSNNVIKFKYENMVVKAXG

SEQ ID NO: 18846 - protein, 38 aa, Artificial Sequence
  Non-cyclic GFR-binding peptide
  MOD_RES (2), (3), (35), (37): Xaa is C or S
SXXVPARLNAISILYFDAANNVVLKKYRDMVVEAXGXR

SEQ ID NO: 18847 - protein, 32 aa, Artificial Sequence
  Non-cyclic GFR-binding peptide
  MOD_RES (32), (32): Xaa is C or S
APTKLEPISVLYLDDSSNVIKFKYENMVVRSX

SEQ ID NO: 18848 - protein, 41 aa, Artificial Sequence
  Non-cyclic GFR-binding peptide
  MOD_RES (7), (41): Xaa is C or S
  MOD_RES (21), (22), (23), (24), (25): Xaa is A or G
  MOD_RES (26), (27), (28), (29): Xaa is A or G or is absent
HVTKPTXAPTKLEPISVLYLXXXXXXXXXKFKYENMVVRSX

SEQ ID NO: 18849 - protein, 35 aa, Artificial Sequence
  Non-cyclic GFR-binding peptide
  MOD_RES (2), (3), (35): Xaa is C or S
SXXVPARLNAISILYFDAANNVVLKKYRDMVVEAX

SEQ ID NO: 18850 - protein, 35 aa, Artificial Sequence
  Non-cyclic GFR-binding peptide
  MOD_RES (3), (4): Xaa is C or S
KAXXVPTKLSPISILYKDKGVVTYLKYHYGMAVSE

SEQ ID NO: 18851 - protein, 34 aa, Artificial Sequence
  Non-cyclic GFR-binding peptide
  MOD_RES (3), (4): Xaa is C or S
KAXXVPTKLNAISILYFDKGVVTYLKKYRGMAVS

SEQ ID NO: 18852 - protein, 38 aa, Artificial Sequence
  Non-cyclic GFR-binding peptide
  MOD_RES (4), (5), (37): Xaa is C or S
SKAXXVPTKLNAISILYFDKGVVTYLKKYRGMAVSEXG

SEQ ID NO: 18853 - protein, 39 aa, Artificial Sequence
  Non-cyclic GFR-binding peptide
  MOD_RES (6), (7), (39): Xaa is C or S
SIPKAXXVPTELEPISMLYLDEYDKVVKFKYEEMVVEGX

SEQ ID NO: 18854 - protein, 39 aa, Artificial Sequence
  Non-cyclic GFR-binding peptide
  MOD_RES (5), (6), (37), (39): Xaa is C or S
SAAPXXVPQALSPISILYIVGRKPKVYKQYEMIVRSXKX

SEQ ID NO: 18855 - protein, 36 aa, Artificial Sequence
  Non-cyclic GFR-binding peptide
  MOD_RES (1), (2), (34), (36): Xaa is C or S
XXAPTQLSPISVLYIDDSSNVIYKQYENMVVRAXGX

SEQ ID NO: 18856 - protein, 36 aa, Artificial Sequence
  Non-cyclic GFR-binding peptide
  MOD_RES (2), (3): Xaa is C or S
  MOD_RES (17), (18), (19), (20), (21): Xaa is A or G
  MOD_RES (22), (23), (24), (25): Xaa is A or G or is absent
AXXAPTKLSPISVLYIXXXXXXXXXYKQYENMVVKA

SEQ ID NO: 18857 - protein, 38 aa, Artificial Sequence
  Non-cyclic GFR-binding peptide
  MOD_RES (1), (2), (36), (38): Xaa is C or S
  MOD_RES (16), (17), (18), (19), (20): Xaa is A or G
  MOD_RES (21), (22), (23), (24): Xaa is A or G or is absent
XXVPARLNAISILYFXXXXXXXXXLKKYRDMVVEAXGX

SEQ ID NO: 18858 - protein, 38 aa, Artificial Sequence
  Non-cyclic GFR-binding peptide
  MOD_RES (5), (6): Xaa is C or S
  MOD_RES (20), (21), (22), (23), (24): Xaa is A or G
  MOD_RES (25), (26), (27), (28): Xaa is A or G or is absent
SASPXXVPQDLEPISILYLXXXXXXXXXKFKYEMVVKS

SEQ ID NO: 18859 - protein, 37 aa, Artificial Sequence
  Non-cyclic GFR-binding peptide
  MOD_RES (6), (7): Xaa is C or S
YVPKPXXAPTKLEPISVLYLDDSSNVIKFKYENMVVR

SEQ ID NO: 18860 - protein, 34 aa, Artificial Sequence
  Non-cyclic GFR-binding peptide
  MOD_RES (2), (3): Xaa is C or S
AXXVPTELEPISMLYLDEYDKVVKFKYEEMVVEG

SEQ ID NO: 18861 - protein, 41 aa, Artificial Sequence
  Non-cyclic GFR-binding peptide
  MOD_RES (4), (38), (40): Xaa is C or S
  MOD_RES (18), (19), (20), (21), (22): Xaa is A or G
  MOD_RES (23), (24), (25), (26): Xaa is A or G or is absent
KPTXAPTKLSPISVLYIXXXXXXXXXYKQYENMVVRSXGXH

SEQ ID NO: 18862 - protein, 40 aa, Artificial Sequence
  Non-cyclic GFR-binding peptide
  MOD_RES (4), (5), (39): Xaa is C or S
  MOD_RES (19), (20), (21), (22), (23): Xaa is A or G
  MOD_RES (24), (25), (26), (27): Xaa is A or G or is absent
PKAXXAPTKLSPISVLYIXXXXXXXXXYKQYENMVVKAXG

SEQ ID NO: 18863 - protein, 38 aa, Artificial Sequence
  Non-cyclic GFR-binding peptide
  MOD_RES (3), (4), (38): Xaa is C or S
  MOD_RES (18), (19), (20), (21), (22): Xaa is A or G
  MOD_RES (23), (24), (25), (26): Xaa is A or G or is absent
ASXXVPARLEPISILYLXXXXXXXXXKFKYEDMVVEAX

SEQ ID NO: 18864 - protein, 35 aa, Artificial Sequence
  Non-cyclic GFR-binding peptide
  MOD_RES (1), (33), (35): Xaa is C or S
XAPTKLEPISVLYLDDSSNVIKFKYENMVVRSXGX

SEQ ID NO: 18865 - protein, 37 aa, Artificial Sequence
  Non-cyclic GFR-binding peptide
  MOD_RES (1), (2), (34), (36): Xaa is C or S
XXVPTELEPISMLYLDENEKVVKFKYEDMVVEGXGXR

SEQ ID NO: 18866 - protein, 33 aa, Artificial Sequence
  Non-cyclic GFR-binding peptide
  MOD_RES (32), (32): Xaa is C or S
VPTELEPISMLYLDEYDKVVKFKYEEMVVEGXG

SEQ ID NO: 18867 - protein, 38 aa, Artificial Sequence
  Non-cyclic GFR-binding peptide
  MOD_RES (3), (37): Xaa is C or S
  MOD_RES (17), (18), (19), (20), (21): Xaa is A or G
  MOD_RES (22), (23), (24), (25): Xaa is A or G or is absent
PTXAPTKLSPISVLYIXXXXXXXXXYKQYENMVVRSXG

SEQ ID NO: 18868 - protein, 42 aa, Artificial Sequence
  Non-cyclic GFR-binding peptide
  MOD_RES (6), (7), (41): Xaa is C or S
  MOD_RES (21), (22), (23), (24), (25): Xaa is A or G
  MOD_RES (26), (27), (28), (29): Xaa is A or G or is absent
KASKAXXVPTKLSPISILYKXXXXXXXXXLKYHYGMAVSEXG

SEQ ID NO: 18869 - protein, 36 aa, Artificial Sequence
  Non-cyclic GFR-binding peptide
  MOD_RES (2), (3), (34), (36): Xaa is C or S
PXXVPQDLSPISILYIVGRTPKVYKQYEMVVKSXKX

SEQ ID NO: 18870 - protein, 36 aa, Artificial Sequence
  Non-cyclic GFR-binding peptide
  MOD_RES (2), (34), (36): Xaa is C or S
TXAPTKLSPISVLYIDDSSNVIYKQYENMVVRSXGX

SEQ ID NO: 18871 - protein, 35 aa, Artificial Sequence
  Non-cyclic GFR-binding peptide
  MOD_RES (1), (32), (34): Xaa is C or S
XVPQDLSPISILYIVGRTPKVYKQYEMVVKSXKXS

SEQ ID NO: 18872 - protein, 36 aa, Artificial Sequence
  Non-cyclic GFR-binding peptide
  MOD_RES (1), (2), (36): Xaa is C or S
  MOD_RES (16), (17), (18), (19), (20): Xaa is A or G
  MOD_RES (21), (22), (23), (24): Xaa is A or G or is absent
XXAPTKLSPISVLYIXXXXXXXXXYKQYENMVVKAX

SEQ ID NO: 18873 - protein, 40 aa, Artificial Sequence
  Non-cyclic GFR-binding peptide
  MOD_RES (6), (7): Xaa is C or S
  MOD_RES (21), (22), (23), (24), (25): Xaa is A or G
  MOD_RES (26), (27), (28), (29): Xaa is A or G or is absent
AAPASXXVPARLEPISILYLXXXXXXXXXKFKYEDMVVEA

SEQ ID NO: 18874 - protein, 37 aa, Artificial Sequence
  Non-cyclic GFR-binding peptide
  MOD_RES (3), (4): Xaa is C or S
  MOD_RES (18), (19), (20), (21), (22): Xaa is A or G
  MOD_RES (23), (24), (25), (26): Xaa is A or G or is absent
KAXXVPTELSPISMLYIXXXXXXXXXYKQYEEMVVEG

SEQ ID NO: 18875 - protein, 34 aa, Artificial Sequence
  Non-cyclic GFR-binding peptide
  MOD_RES (2), (3): Xaa is C or S
PXXAPTKLSPISVLYIDDSSNVIYKQYENMVVRS

SEQ ID NO: 18876 - protein, 39 aa, Artificial Sequence
  Non-cyclic GFR-binding peptide
  MOD_RES (3), (4), (38): Xaa is C or S
  MOD_RES (18), (19), (20), (21), (22): Xaa is A or G
  MOD_RES (23), (24), (25), (26): Xaa is A or G or is absent
ASXXVPARLNAISILYFXXXXXXXXXLKKYRDMVVEAXG

SEQ ID NO: 18877 - protein, 42 aa, Artificial Sequence
  Non-cyclic GFR-binding peptide
  MOD_RES (6), (7), (41): Xaa is C or S
  MOD_RES (21), (22), (23), (24), (25): Xaa is A or G
  MOD_RES (26), (27), (28), (29): Xaa is A or G or is absent
SIPKAXXVPTELSPISMLYIXXXXXXXXXYKQYEEMVVEGXG

SEQ ID NO: 18878 - protein, 42 aa, Artificial Sequence
  Non-cyclic GFR-binding peptide
  MOD_RES (5), (6), (40), (42): Xaa is C or S
  MOD_RES (20), (21), (22), (23), (24): Xaa is A or G
  MOD_RES (25), (26), (27), (28): Xaa is A or G or is absent
VPKPXXAPTKLEPISVLYLXXXXXXXXXKFKYENMVVRSXGX

SEQ ID NO: 18879 - protein, 40 aa, Artificial Sequence
  Non-cyclic GFR-binding peptide
  MOD_RES (3), (4), (38), (40): Xaa is C or S
  MOD_RES (18), (19), (20), (21), (22): Xaa is A or G
  MOD_RES (23), (24), (25), (26): Xaa is A or G or is absent
ASXXVPARLSPISILYKXXXXXXXXXLKYHYDMVVEAXGX

SEQ ID NO: 18880 - protein, 40 aa, Artificial Sequence
  Non-cyclic GFR-binding peptide
  MOD_RES (6), (7), (39): Xaa is C or S
AVPKAXXAPTKLEPISVLYLDSSNNVIKFKYENMVVKAXG

SEQ ID NO: 18881 - protein, 35 aa, Artificial Sequence
  Non-cyclic GFR-binding peptide
  MOD_RES (2), (3), (35): Xaa is C or S
SXXVPARLSPISILYKDAANNVVLKYHYDMVVEAX

SEQ ID NO: 18882 - protein, 39 aa, Artificial Sequence
  Non-cyclic GFR-binding peptide
  MOD_RES (4), (5), (37), (39): Xaa is C or S
PASXXVPARLSPISILYKDAANNVVLKYHYDMVVEAXGX

SEQ ID NO: 18883 - protein, 42 aa, Artificial Sequence
  Non-cyclic GFR-binding peptide
  MOD_RES (5), (6), (40), (42): Xaa is C or S
  MOD_RES (20), (21), (22), (23), (24): Xaa is A or G
  MOD_RES (25), (26), (27), (28): Xaa is A or G or is absent
IPKAXXVPTELEPISMLYLXXXXXXXXXKFKYEEMVVEGXGX

SEQ ID NO: 18884 - protein, 35 aa, Artificial Sequence
  Non-cyclic GFR-binding peptide
  MOD_RES (1), (2): Xaa is C or S
  MOD_RES (16), (17), (18), (19), (20): Xaa is A or G
  MOD_RES (21), (22), (23), (24): Xaa is A or G or is absent
XXVPARLNAISILYFXXXXXXXXXLKKYRDMVVEA

SEQ ID NO: 18885 - protein, 38 aa, Artificial Sequence
  Non-cyclic GFR-binding peptide
  MOD_RES (1), (35), (37): Xaa is C or S
  MOD_RES (15), (16), (17), (18), (19): Xaa is A or G
  MOD_RES (20), (21), (22), (23): Xaa is A or G or is absent
XAPTKLSPISVLYIXXXXXXXXXYKQYENMVVRSXGXH

SEQ ID NO: 18886 - protein, 35 aa, Artificial Sequence
  Non-cyclic GFR-binding peptide
  MOD_RES (3), (4): Xaa is C or S
KAXXVPTKLSPISILYIDKGVVTYYKQYEGMAVSE

SEQ ID NO: 18887 - protein, 36 aa, Artificial Sequence
  Non-cyclic GFR-binding peptide
  MOD_RES (1), (36): Xaa is C or S
  MOD_RES (15), (16), (17), (18), (19): Xaa is A or G
  MOD_RES (20), (21), (22), (23): Xaa is A or G or is absent
XVPTKLEPISVLYLXXXXXXXXXKFKYEEGMSVAEX

SEQ ID NO: 18888 - protein, 34 aa, Artificial Sequence
  Non-cyclic GFR-binding peptide
  MOD_RES (34), (34): Xaa is C or S
  MOD_RES (14), (15), (16), (17), (18): Xaa is A or G
  MOD_RES (19), (20), (21), (22): Xaa is A or G or is absent
VPTELSPISMLYIXXXXXXXXXYKQYEDMVVEGX

SEQ ID NO: 18889 - protein, 41 aa, Artificial Sequence
  Non-cyclic GFR-binding peptide
  MOD_RES (3), (4), (38), (40): Xaa is C or S
  MOD_RES (18), (19), (20), (21), (22): Xaa is A or G
  MOD_RES (23), (24), (25), (26): Xaa is A or G or is absent
KAXXVPTELSPISMLYIXXXXXXXXXYKQYEDMVVEGXGXR

SEQ ID NO: 18890 - protein, 39 aa, Artificial Sequence
  Non-cyclic GFR-binding peptide
  MOD_RES (6), (7), (38): Xaa is C or S
ASASPXXVSQDLEPISILYLIGKTPKIKFKYEMIVKSXK

SEQ ID NO: 18891 - protein, 40 aa, Artificial Sequence
  Non-cyclic GFR-binding peptide
  MOD_RES (6), (7), (39): Xaa is C or S
KASKAXXVPTKLNAISILYFDKGVVTYLKKYRGMAVSEXG

SEQ ID NO: 18892 - protein, 34 aa, Artificial Sequence
  Non-cyclic GFR-binding peptide
  MOD_RES (3), (4): Xaa is C or S
SPXXVSQDLEPISILYLIGKTPKIKFKYEMIVKS

SEQ ID NO: 18893 - protein, 44 aa, Artificial Sequence
  Non-cyclic GFR-binding peptide
  MOD_RES (6), (7), (42), (44): Xaa is C or S
  MOD_RES (21), (22), (23), (24), (25): Xaa is A or G
  MOD_RES (26), (27), (28), (29): Xaa is A or G or is absent
KVGKAXXVPTKLSPISVLYIXXXXXXXXXYKQYEEGMSVAEXGX

SEQ ID NO: 18894 - protein, 33 aa, Artificial Sequence
  Non-cyclic GFR-binding peptide
  MOD_RES (1), (1): Xaa is C or S
  MOD_RES (15), (16), (17), (18), (19): Xaa is A or G
  MOD_RES (20), (21), (22), (23): Xaa is A or G or is absent
XVPARLEPISILYLXXXXXXXXXKFKYEDMVVE

SEQ ID NO: 18895 - protein, 42 aa, Artificial Sequence
  Non-cyclic GFR-binding peptide
  MOD_RES (5), (6), (40), (42): Xaa is C or S
  MOD_RES (20), (21), (22), (23), (24): Xaa is A or G
  MOD_RES (25), (26), (27), (28): Xaa is A or G or is absent
APASXXVPARLSPISILYKXXXXXXXXXLKYHYDMVVEAXGX

SEQ ID NO: 18896 - protein, 34 aa, Artificial Sequence
  Non-cyclic GFR-binding peptide
  MOD_RES (32), (34): Xaa is C or S
APTQLSPISVLYIDDSSNVIYKQYENMVVRAXGX

SEQ ID NO: 18897 - protein, 40 aa, Artificial Sequence
  Non-cyclic GFR-binding peptide
  MOD_RES (7), (39): Xaa is C or S
HVTKPTXAPTKLSPISVLYIDDSSNVIYKQYENMVVRSXG

SEQ ID NO: 18898 - protein, 41 aa, Artificial Sequence
  Non-cyclic GFR-binding peptide
  MOD_RES (6), (7), (41): Xaa is C or S
  MOD_RES (21), (22), (23), (24), (25): Xaa is A or G
  MOD_RES (26), (27), (28), (29): Xaa is A or G or is absent
SIPKAXXVPTELEPISMLYLXXXXXXXXXKFKYEEMVVEGX

SEQ ID NO: 18899 - protein, 38 aa, Artificial Sequence
  Non-cyclic GFR-binding peptide
  MOD_RES (6), (7): Xaa is C or S
KASKAXXVPTKLSPISILYIDKGVVTYYKQYEGMAVSE

SEQ ID NO: 18900 - protein, 36 aa, Artificial Sequence
  Non-cyclic GFR-binding peptide
  MOD_RES (3), (4): Xaa is C or S
KAXXVPTKLSPISVLYIDDMGVPTYKQYEEGMSVAE

SEQ ID NO: 18901 - protein, 41 aa, Artificial Sequence
  Non-cyclic GFR-binding peptide
  MOD_RES (6), (7), (41): Xaa is C or S
  MOD_RES (21), (22), (23), (24), (25): Xaa is A or G
  MOD_RES (26), (27), (28), (29): Xaa is A or G or is absent
TVPKPXXAPTQLEPISVLYLXXXXXXXXXKFKYENMVVRAX

SEQ ID NO: 18902 - protein, 39 aa, Artificial Sequence
  Non-cyclic GFR-binding peptide
  MOD_RES (2), (3), (36), (38): Xaa is C or S
AXXVPTKLSPISVLYIDDMGVPTYKQYEEGMSVAEXGXR

SEQ ID NO: 18903 - protein, 40 aa, Artificial Sequence
  Non-cyclic GFR-binding peptide
  MOD_RES (2), (3), (38), (40): Xaa is C or S
  MOD_RES (17), (18), (19), (20), (21): Xaa is A or G
  MOD_RES (22), (23), (24), (25): Xaa is A or G or is absent
AXXVPTKLEPISVLYLXXXXXXXXXKFKYEEGMSVAEXGX

SEQ ID NO: 18904 - protein, 35 aa, Artificial Sequence
  Non-cyclic GFR-binding peptide
  MOD_RES (1), (2), (34): Xaa is C or S
XXVPTKLSPISILYIDKGVVTYYKQYEGMAVSEXG

SEQ ID NO: 18905 - protein, 41 aa, Artificial Sequence
  Non-cyclic GFR-binding peptide
  MOD_RES (6), (7), (41): Xaa is C or S
  MOD_RES (21), (22), (23), (24), (25): Xaa is A or G
  MOD_RES (26), (27), (28), (29): Xaa is A or G or is absent
KIPKAXXVPTELSPISMLYIXXXXXXXXXYKQYEDMVVEGX

SEQ ID NO: 18906 - protein, 36 aa, Artificial Sequence
  Non-cyclic GFR-binding peptide
  MOD_RES (4), (5): Xaa is C or S
SKAXXVPTKLNAISILYFDKGVVTYLKKYRGMAVSE

SEQ ID NO: 18907 - protein, 38 aa, Artificial Sequence
  Non-cyclic GFR-binding peptide
  MOD_RES (1), (2), (36), (38): Xaa is C or S
  MOD_RES (16), (17), (18), (19), (20): Xaa is A or G
  MOD_RES (21), (22), (23), (24): Xaa is A or G or is absent
XXVPTELEPISMLYLXXXXXXXXXKFKYEDMVVEGXGX

SEQ ID NO: 18908 - protein, 40 aa, Artificial Sequence
  Non-cyclic GFR-binding peptide
  MOD_RES (6), (38), (40): Xaa is C or S
VTKPTXAPTKLSPISVLYIDDSSNVIYKQYENMVVRSXGX

SEQ ID NO: 18909 - protein, 37 aa, Artificial Sequence
  Non-cyclic GFR-binding peptide
  MOD_RES (3), (4), (35), (37): Xaa is C or S
SPXXVPQDLEPISILYLVGRTPKVKFKYEMVVKSXKX

SEQ ID NO: 18910 - protein, 35 aa, Artificial Sequence
  Non-cyclic GFR-binding peptide
  MOD_RES (1), (33), (35): Xaa is C or S
XVPTKLSPISILYIDKGVVTYYKQYEGMAVSEXGX

SEQ ID NO: 18911 - protein, 34 aa, Artificial Sequence
  Non-cyclic GFR-binding peptide
  MOD_RES (34), (34): Xaa is C or S
  MOD_RES (14), (15), (16), (17), (18): Xaa is A or G
  MOD_RES (19), (20), (21), (22): Xaa is A or G or is absent
VPARLNAISILYFXXXXXXXXXLKKYRDMVVEAX

SEQ ID NO: 18912 - protein, 34 aa, Artificial Sequence
  Non-cyclic GFR-binding peptide
  MOD_RES (1), (1): Xaa is C or S
  MOD_RES (15), (16), (17), (18), (19): Xaa is A or G
  MOD_RES (20), (21), (22), (23): Xaa is A or G or is absent
XVPTKLNAISILYFXXXXXXXXXLKKYRGMAVSE

SEQ ID NO: 18913 - protein, 33 aa, Artificial Sequence
  Non-cyclic GFR-binding peptide
  MOD_RES (14), (15), (16), (17), (18): Xaa is A or G
  MOD_RES (19), (20), (21), (22): Xaa is A or G or is absent
APTKLEPISVLYLXXXXXXXXXKFKYENMVVRS

SEQ ID NO: 18914 - protein, 38 aa, Artificial Sequence
  Non-cyclic GFR-binding peptide
  MOD_RES (2), (3), (35), (37): Xaa is C or S
SXXVPARLEPISILYLDAANNVVKFKYEDMVVEAXGXR

SEQ ID NO: 18915 - protein, 39 aa, Artificial Sequence
  Non-cyclic GFR-binding peptide
  MOD_RES (4), (5), (36), (38): Xaa is C or S
ASPXXVPQDLSPISILYIVGRTPKVYKQYEMVVKSXKXS

SEQ ID NO: 18916 - protein, 35 aa, Artificial Sequence
  Non-cyclic GFR-binding peptide
  MOD_RES (34), (34): Xaa is C or S
  MOD_RES (14), (15), (16), (17), (18): Xaa is A or G
  MOD_RES (19), (20), (21), (22): Xaa is A or G or is absent
VPTELEPISMLYLXXXXXXXXXKFKYEDMVVEGXG

SEQ ID NO: 18917 - protein, 38 aa, Artificial Sequence
  Non-cyclic GFR-binding peptide
  MOD_RES (1), (2), (36), (38): Xaa is C or S
  MOD_RES (16), (17), (18), (19), (20): Xaa is A or G
  MOD_RES (21), (22), (23), (24): Xaa is A or G or is absent
XXVPTKLNAISILYFXXXXXXXXXLKKYRGMAVSEXGX

SEQ ID NO: 18918 - protein, 38 aa, Artificial Sequence
  Non-cyclic GFR-binding peptide
  MOD_RES (2), (3), (36), (38): Xaa is C or S
  MOD_RES (17), (18), (19), (20), (21): Xaa is A or G
  MOD_RES (22), (23), (24), (25): Xaa is A or G or is absent
PXXVPQDLSPISILYIXXXXXXXXXYKQYEMVVKSXKX

SEQ ID NO: 18919 - protein, 37 aa, Artificial Sequence
  Non-cyclic GFR-binding peptide
  MOD_RES (1), (34), (36): Xaa is C or S
  MOD_RES (15), (16), (17), (18), (19): Xaa is A or G
  MOD_RES (20), (21), (22), (23): Xaa is A or G or is absent
XVSQDLSPISILYIXXXXXXXXXYKQYEMIVKSXKXS

SEQ ID NO: 18920 - protein, 36 aa, Artificial Sequence
  Non-cyclic GFR-binding peptide
  MOD_RES (5), (6): Xaa is C or S
APASXXVPARLNAISILYFDAANNVVLKKYRDMVVE

SEQ ID NO: 18921 - protein, 35 aa, Artificial Sequence
  Non-cyclic GFR-binding peptide
  MOD_RES (1), (2), (33), (35): Xaa is C or S
XXVSQDLSPISILYIIGKTPKIYKQYEMIVKSXKX

SEQ ID NO: 18922 - protein, 37 aa, Artificial Sequence
  Non-cyclic GFR-binding peptide
  MOD_RES (4), (5): Xaa is C or S
  MOD_RES (19), (20), (21), (22), (23): Xaa is A or G
  MOD_RES (24), (25), (26), (27): Xaa is A or G or is absent
SKAXXVPTKLSPISILYKXXXXXXXXXLKYHYGMAVS

SEQ ID NO: 18923 - protein, 40 aa, Artificial Sequence
  Non-cyclic GFR-binding peptide
  MOD_RES (5), (6), (40): Xaa is C or S
  MOD_RES (20), (21), (22), (23), (24): Xaa is A or G
  MOD_RES (25), (26), (27), (28): Xaa is A or G or is absent
VPKPXXAPTKLSPISVLYIXXXXXXXXXYKQYENMVVRSX

SEQ ID NO: 18924 - protein, 33 aa, Artificial Sequence
  Non-cyclic GFR-binding peptide
  MOD_RES (2), (3): Xaa is C or S
PXXAPTQLEPISVLYLDDSSNVIKFKYENMVVR

SEQ ID NO: 18925 - protein, 40 aa, Artificial Sequence
  Non-cyclic GFR-binding peptide
  MOD_RES (4), (5), (39): Xaa is C or S
  MOD_RES (19), (20), (21), (22), (23): Xaa is A or G
  MOD_RES (24), (25), (26), (27): Xaa is A or G or is absent
PKAXXVPTELSPISMLYIXXXXXXXXXYKQYEDMVVEGXG

SEQ ID NO: 18926 - protein, 37 aa, Artificial Sequence
  Non-cyclic GFR-binding peptide
  MOD_RES (4), (5), (37): Xaa is C or S
PKPXXAPTQLSPISVLYIDDSSNVIYKQYENMVVRAX

SEQ ID NO: 18927 - protein, 38 aa, Artificial Sequence
  Non-cyclic GFR-binding peptide
  MOD_RES (5), (6): Xaa is C or S
VGKAXXVPTKLSPISVLYIDDMGVPTYKQYEEGMSVAE

SEQ ID NO: 18928 - protein, 37 aa, Artificial Sequence
  Non-cyclic GFR-binding peptide
  MOD_RES (1), (35), (37): Xaa is C or S
  MOD_RES (15), (16), (17), (18), (19): Xaa is A or G
  MOD_RES (20), (21), (22), (23): Xaa is A or G or is absent
XAPTKLEPISVLYLXXXXXXXXXKFKYENMVVRSXGX

SEQ ID NO: 18929 - protein, 35 aa, Artificial Sequence
  Non-cyclic GFR-binding peptide
  MOD_RES (33), (35): Xaa is C or S
  MOD_RES (14), (15), (16), (17), (18): Xaa is A or G
  MOD_RES (19), (20), (21), (22): Xaa is A or G or is absent
VPQALSPISILYIXXXXXXXXXYKQYEMIVRSXKX

SEQ ID NO: 18930 - protein, 41 aa, Artificial Sequence
  Non-cyclic GFR-binding peptide
  MOD_RES (6), (7), (40): Xaa is C or S
  MOD_RES (21), (22), (23), (24), (25): Xaa is A or G
  MOD_RES (26), (27), (28), (29): Xaa is A or G or is absent
ASAAPXXVPQALEPISILYLXXXXXXXXXKFKYEMIVRSXK

SEQ ID NO: 18931 - protein, 31 aa, Artificial Sequence
  Non-cyclic GFR-binding peptide
  MOD_RES (31), (31): Xaa is C or S
VPQALSPISILYIVGRKPKVYKQYEMIVRSX

SEQ ID NO: 18932 - protein, 34 aa, Artificial Sequence
  Non-cyclic GFR-binding peptide
  MOD_RES (1), (1): Xaa is C or S
  MOD_RES (15), (16), (17), (18), (19): Xaa is A or G
  MOD_RES (20), (21), (22), (23): Xaa is A or G or is absent
XAPTKLEPISVLYLXXXXXXXXXKFKYENMVVKA

SEQ ID NO: 18933 - protein, 37 aa, Artificial Sequence
  Non-cyclic GFR-binding peptide
  MOD_RES (1), (34), (36): Xaa is C or S
XVPTKLSPISVLYIDDMGVPTYKQYEEGMSVAEXGXR

SEQ ID NO: 18934 - protein, 38 aa, Artificial Sequence
  Non-cyclic GFR-binding peptide
  MOD_RES (6), (7): Xaa is C or S
KIPKAXXVPTELSPISMLYIDENEKVVYKQYEDMVVEG

SEQ ID NO: 18935 - protein, 41 aa, Artificial Sequence
  Non-cyclic GFR-binding peptide
  MOD_RES (5), (6), (40): Xaa is C or S
  MOD_RES (20), (21), (22), (23), (24): Xaa is A or G
  MOD_RES (25), (26), (27), (28): Xaa is A or G or is absent
VPKPXXAPTKLSPISVLYIXXXXXXXXXYKQYENMVVRSXG

SEQ ID NO: 18936 - protein, 32 aa, Artificial Sequence
  Non-cyclic GFR-binding peptide
  MOD_RES (1), (2): Xaa is C or S
XXVPTELSPISMLYIDEYDKVVYKQYEEMVVE

SEQ ID NO: 18937 - protein, 37 aa, Artificial Sequence
  Non-cyclic GFR-binding peptide
  MOD_RES (5), (6), (37): Xaa is C or S
SASPXXVPQDLSPISILYIVGRTPKVYKQYEMVVKSX

SEQ ID NO: 18938 - protein, 32 aa, Artificial Sequence
  Non-cyclic GFR-binding peptide
  MOD_RES (32), (32): Xaa is C or S
VPTELSPISMLYIDEYDKVVYKQYEEMVVEGX

SEQ ID NO: 18939 - protein, 33 aa, Artificial Sequence
  Non-cyclic GFR-binding peptide
  MOD_RES (1), (33): Xaa is C or S
XVPTELEPISMLYLDEYDKVVKFKYEEMVVEGX

SEQ ID NO: 18940 - protein, 33 aa, Artificial Sequence
  Non-cyclic GFR-binding peptide
  MOD_RES (2), (3): Xaa is C or S
AXXAPTKLEPISVLYLDSSNNVIKFKYENMVVK

SEQ ID NO: 18941 - protein, 34 aa, Artificial Sequence
  Non-cyclic GFR-binding peptide
  MOD_RES (1), (2): Xaa is C or S
  MOD_RES (16), (17), (18), (19), (20): Xaa is A or G
  MOD_RES (21), (22), (23), (24): Xaa is A or G or is absent
XXVPTELSPISMLYIXXXXXXXXXYKQYEDMVVE

SEQ ID NO: 18942 - protein, 36 aa, Artificial Sequence
  Non-cyclic GFR-binding peptide
  MOD_RES (2), (3): Xaa is C or S
  MOD_RES (17), (18), (19), (20), (21): Xaa is A or G
  MOD_RES (22), (23), (24), (25): Xaa is A or G or is absent
AXXVPTELEPISMLYLXXXXXXXXXKFKYEEMVVEG

SEQ ID NO: 18943 - protein, 42 aa, Artificial Sequence
  Non-cyclic GFR-binding peptide
  MOD_RES (4), (5), (39), (41): Xaa is C or S
  MOD_RES (19), (20), (21), (22), (23): Xaa is A or G
  MOD_RES (24), (25), (26), (27): Xaa is A or G or is absent
PKPXXAPTKLEPISVLYLXXXXXXXXXKFKYENMVVRSXGXH

SEQ ID NO: 18944 - protein, 39 aa, Artificial Sequence
  Non-cyclic GFR-binding peptide
  MOD_RES (4), (5), (39): Xaa is C or S
  MOD_RES (19), (20), (21), (22), (23): Xaa is A or G
  MOD_RES (24), (25), (26), (27): Xaa is A or G or is absent
PASXXVPARLSPISILYKXXXXXXXXXLKYHYDMVVEAX

SEQ ID NO: 18945 - protein, 32 aa, Artificial Sequence
  Non-cyclic GFR-binding peptide
  MOD_RES (1), (32): Xaa is C or S
XVPQALSPISILYIVGRKPKVYKQYEMIVRSX

SEQ ID NO: 18946 - protein, 41 aa, Artificial Sequence
  Non-cyclic GFR-binding peptide
  MOD_RES (5), (6), (38), (40): Xaa is C or S
IPKAXXVPTELSPISMLYIDENEKVVYKQYEDMVVEGXGXR

SEQ ID NO: 18947 - protein, 38 aa, Artificial Sequence
  Non-cyclic GFR-binding peptide
  MOD_RES (6), (6): Xaa is C or S
  MOD_RES (20), (21), (22), (23), (24): Xaa is A or G
  MOD_RES (25), (26), (27), (28): Xaa is A or G or is absent
VTKPTXAPTKLSPISVLYIXXXXXXXXXYKQYENMVVR

SEQ ID NO: 18948 - protein, 31 aa, Artificial Sequence
  Non-cyclic GFR-binding peptide
  MOD_RES (1), (1): Xaa is C or S
XVPTELSPISMLYIDENEKVVYKQYEDMVVE

SEQ ID NO: 18949 - protein, 40 aa, Artificial Sequence
  Non-cyclic GFR-binding peptide
  MOD_RES (6), (7), (39): Xaa is C or S
AAPASXXVPARLNAISILYFDAANNVVLKKYRDMVVEAXG

SEQ ID NO: 18950 - protein, 32 aa, Artificial Sequence
  Non-cyclic GFR-binding peptide
  MOD_RES (1), (2): Xaa is C or S
XXVPTELSPISMLYIDENEKVVYKQYEDMVVE

SEQ ID NO: 18951 - protein, 34 aa, Artificial Sequence
  Non-cyclic GFR-binding peptide
  MOD_RES (2), (3): Xaa is C or S
AXXVPTKLSPISILYKDKGVVTYLKYHYGMAVSE

SEQ ID NO: 18952 - protein, 34 aa, Artificial Sequence
  Non-cyclic GFR-binding peptide
  MOD_RES (1), (2): Xaa is C or S
XXVPTKLSPISVLYIDDMGVPTYKQYEEGMSVAE

SEQ ID NO: 18953 - protein, 35 aa, Artificial Sequence
  Non-cyclic GFR-binding peptide
  MOD_RES (1), (2), (34): Xaa is C or S
XXAPTQLEPISVLYLDDSSNVIKFKYENMVVRAXG

SEQ ID NO: 18954 - protein, 39 aa, Artificial Sequence
  Non-cyclic GFR-binding peptide
  MOD_RES (1), (2), (36), (38): Xaa is C or S
  MOD_RES (16), (17), (18), (19), (20): Xaa is A or G
  MOD_RES (21), (22), (23), (24): Xaa is A or G or is absent
XXAPTQLSPISVLYIXXXXXXXXXYKQYENMVVRAXGXH

SEQ ID NO: 18955 - protein, 39 aa, Artificial Sequence
  Non-cyclic GFR-binding peptide
  MOD_RES (5), (6), (39): Xaa is C or S
  MOD_RES (20), (21), (22), (23), (24): Xaa is A or G
  MOD_RES (25), (26), (27), (28): Xaa is A or G or is absent
SASPXXVPQDLSPISILYIXXXXXXXXXYKQYEMVVKSX

SEQ ID NO: 18956 - protein, 37 aa, Artificial Sequence
  Non-cyclic GFR-binding peptide
  MOD_RES (4), (5): Xaa is C or S
  MOD_RES (19), (20), (21), (22), (23): Xaa is A or G
  MOD_RES (24), (25), (26), (27): Xaa is A or G or is absent
PKAXXVPTELEPISMLYLXXXXXXXXXKFKYEEMVVE

SEQ ID NO: 18957 - protein, 36 aa, Artificial Sequence
  Non-cyclic GFR-binding peptide
  MOD_RES (3), (4): Xaa is C or S
  MOD_RES (18), (19), (20), (21), (22): Xaa is A or G
  MOD_RES (23), (24), (25), (26): Xaa is A or G or is absent
KAXXVPTKLNAISILYFXXXXXXXXXLKKYRGMAVS

SEQ ID NO: 18958 - protein, 38 aa, Artificial Sequence
  Non-cyclic GFR-binding peptide
  MOD_RES (3), (4), (35), (37): Xaa is C or S
SPXXVSQDLSPISILYIIGKTPKIYKQYEMIVKSXKXS

SEQ ID NO: 18959 - protein, 41 aa, Artificial Sequence
  Non-cyclic GFR-binding peptide
  MOD_RES (4), (5), (40): Xaa is C or S
  MOD_RES (19), (20), (21), (22), (23): Xaa is A or G
  MOD_RES (24), (25), (26), (27): Xaa is A or G or is absent
GKAXXVPTKLEPISVLYLXXXXXXXXXKFKYEEGMSVAEXG

SEQ ID NO: 18960 - protein, 37 aa, Artificial Sequence
  Non-cyclic GFR-binding peptide
  MOD_RES (1), (2), (36): Xaa is C or S
  MOD_RES (16), (17), (18), (19), (20): Xaa is A or G
  MOD_RES (21), (22), (23), (24): Xaa is A or G or is absent
XXAPTKLSPISVLYIXXXXXXXXXYKQYENMVVRSXG

SEQ ID NO: 18961 - protein, 33 aa, Artificial Sequence
  Non-cyclic GFR-binding peptide
  MOD_RES (2), (3): Xaa is C or S
AXXVPTKLSPISILYIDKGVVTYYKQYEGMAVS

SEQ ID NO: 18962 - protein, 36 aa, Artificial Sequence
  Non-cyclic GFR-binding peptide
  MOD_RES (1), (2), (36): Xaa is C or S
  MOD_RES (16), (17), (18), (19), (20): Xaa is A or G
  MOD_RES (21), (22), (23), (24): Xaa is A or G or is absent
XXVPTELSPISMLYIXXXXXXXXXYKQYEEMVVEGX

SEQ ID NO: 18963 - protein, 38 aa, Artificial Sequence
  Non-cyclic GFR-binding peptide
  MOD_RES (4), (5), (38): Xaa is C or S
  MOD_RES (19), (20), (21), (22), (23): Xaa is A or G
  MOD_RES (24), (25), (26), (27): Xaa is A or G or is absent
ASPXXVSQDLSPISILYIXXXXXXXXXYKQYEMIVKSX

SEQ ID NO: 18964 - protein, 41 aa, Artificial Sequence
  Non-cyclic GFR-binding peptide
  MOD_RES (5), (6), (40): Xaa is C or S
  MOD_RES (20), (21), (22), (23), (24): Xaa is A or G
  MOD_RES (25), (26), (27), (28): Xaa is A or G or is absent
ASKAXXVPTKLSPISILYKXXXXXXXXXLKYHYGMAVSEXG

SEQ ID NO: 18965 - protein, 34 aa, Artificial Sequence
  Non-cyclic GFR-binding peptide
  MOD_RES (1), (32), (34): Xaa is C or S
XVPQALEPISILYLVGRKPKVKFKYEMIVRSXKX

SEQ ID NO: 18966 - protein, 36 aa, Artificial Sequence
  Non-cyclic GFR-binding peptide
  MOD_RES (5), (5): Xaa is C or S
TKPTXAPTKLEPISVLYLDDSSNVIKFKYENMVVRS

SEQ ID NO: 18967 - protein, 34 aa, Artificial Sequence
  Non-cyclic GFR-binding peptide
  MOD_RES (2), (3): Xaa is C or S
PXXAPTQLEPISVLYLDDSSNVIKFKYENMVVRA

SEQ ID NO: 18968 - protein, 38 aa, Artificial Sequence
  Non-cyclic GFR-binding peptide
  MOD_RES (1), (2), (36), (38): Xaa is C or S
  MOD_RES (16), (17), (18), (19), (20): Xaa is A or G
  MOD_RES (21), (22), (23), (24): Xaa is A or G or is absent
XXAPTKLEPISVLYLXXXXXXXXXKFKYENMVVKAXGX

SEQ ID NO: 18969 - protein, 38 aa, Artificial Sequence
  Non-cyclic GFR-binding peptide
  MOD_RES (1), (36), (38): Xaa is C or S
  MOD_RES (15), (16), (17), (18), (19): Xaa is A or G
  MOD_RES (20), (21), (22), (23): Xaa is A or G or is absent
XVPTKLSPISVLYIXXXXXXXXXYKQYEEGMSVAEXGX

SEQ ID NO: 18970 - protein, 33 aa, Artificial Sequence
  Non-cyclic GFR-binding peptide
  MOD_RES (32), (32): Xaa is C or S
APTKLSPISVLYIDSSNNVIYKQYENMVVKAXG

SEQ ID NO: 18971 - protein, 40 aa, Artificial Sequence
  Non-cyclic GFR-binding peptide
  MOD_RES (5), (6), (39): Xaa is C or S
  MOD_RES (20), (21), (22), (23), (24): Xaa is A or G
  MOD_RES (25), (26), (27), (28): Xaa is A or G or is absent
SAAPXXVPQALSPISILYIXXXXXXXXXYKQYEMIVRSXK

SEQ ID NO: 18972 - protein, 40 aa, Artificial Sequence
  Non-cyclic GFR-binding peptide
  MOD_RES (2), (3), (37), (39): Xaa is C or S
  MOD_RES (17), (18), (19), (20), (21): Xaa is A or G
  MOD_RES (22), (23), (24), (25): Xaa is A or G or is absent
PXXAPTQLSPISVLYIXXXXXXXXXYKQYENMVVRAXGXH

SEQ ID NO: 18973 - protein, 38 aa, Artificial Sequence
  Non-cyclic GFR-binding peptide
  MOD_RES (4), (5): Xaa is C or S
  MOD_RES (19), (20), (21), (22), (23): Xaa is A or G
  MOD_RES (24), (25), (26), (27): Xaa is A or G or is absent
PKAXXVPTELEPISMLYLXXXXXXXXXKFKYEDMVVEG

SEQ ID NO: 18974 - protein, 41 aa, Artificial Sequence
  Non-cyclic GFR-binding peptide
  MOD_RES (4), (5), (39), (41): Xaa is C or S
  MOD_RES (19), (20), (21), (22), (23): Xaa is A or G
  MOD_RES (24), (25), (26), (27): Xaa is A or G or is absent
PASXXVPARLNAISILYFXXXXXXXXXLKKYRDMVVEAXGX

SEQ ID NO: 18975 - protein, 35 aa, Artificial Sequence
  Non-cyclic GFR-binding peptide
  MOD_RES (3), (4), (35): Xaa is C or S
APXXVPQALEPISILYLVGRKPKVKFKYEMIVRSX

SEQ ID NO: 18976 - protein, 34 aa, Artificial Sequence
  Non-cyclic GFR-binding peptide
  MOD_RES (2), (3): Xaa is C or S
SXXVPARLSPISILYKDAANNVVLKYHYDMVVEA

SEQ ID NO: 18977 - protein, 36 aa, Artificial Sequence
  Non-cyclic GFR-binding peptide
  MOD_RES (3), (4): Xaa is C or S
  MOD_RES (18), (19), (20), (21), (22): Xaa is A or G
  MOD_RES (23), (24), (25), (26): Xaa is A or G or is absent
ASXXVPARLSPISILYKXXXXXXXXXLKYHYDMVVE

SEQ ID NO: 18978 - protein, 32 aa, Artificial Sequence
  Non-cyclic GFR-binding peptide
  MOD_RES (31), (31): Xaa is C or S
VSQDLSPISILYIIGKTPKIYKQYEMIVKSXK

SEQ ID NO: 18979 - protein, 40 aa, Artificial Sequence
  Non-cyclic GFR-binding peptide
  MOD_RES (3), (4), (37), (39): Xaa is C or S
  MOD_RES (18), (19), (20), (21), (22): Xaa is A or G
  MOD_RES (23), (24), (25), (26): Xaa is A or G or is absent
SPXXVPQDLSPISILYIXXXXXXXXXYKQYEMVVKSXKXS

SEQ ID NO: 18980 - protein, 36 aa, Artificial Sequence
  Non-cyclic GFR-binding peptide
  MOD_RES (2), (3), (34), (36): Xaa is C or S
PXXVSQDLSPISILYIIGKTPKIYKQYEMIVKSXKX

SEQ ID NO: 18981 - protein, 37 aa, Artificial Sequence
  Non-cyclic GFR-binding peptide
  MOD_RES (4), (5): Xaa is C or S
  MOD_RES (19), (20), (21), (22), (23): Xaa is A or G
  MOD_RES (24), (25), (26), (27): Xaa is A or G or is absent
PKAXXAPTKLSPISVLYIXXXXXXXXXYKQYENMVVK

SEQ ID NO: 18982 - protein, 38 aa, Artificial Sequence
  Non-cyclic GFR-binding peptide
  MOD_RES (2), (3), (35), (37): Xaa is C or S
PXXAPTKLSPISVLYIDDSSNVIYKQYENMVVRSXGXH

SEQ ID NO: 18983 - protein, 38 aa, Artificial Sequence
  Non-cyclic GFR-binding peptide
  MOD_RES (6), (7), (38): Xaa is C or S
ASAAPXXVPQALSPISILYIVGRKPKVYKQYEMIVRSX

SEQ ID NO: 18984 - protein, 36 aa, Artificial Sequence
  Non-cyclic GFR-binding peptide
  MOD_RES (5), (6): Xaa is C or S
VPKPXXAPTKLSPISVLYIDDSSNVIYKQYENMVVR

SEQ ID NO: 18985 - protein, 38 aa, Artificial Sequence
  Non-cyclic GFR-binding peptide
  MOD_RES (6), (7): Xaa is C or S
YVPKPXXAPTKLEPISVLYLDDSSNVIKFKYENMVVRS

SEQ ID NO: 18986 - protein, 34 aa, Artificial Sequence
  Non-cyclic GFR-binding peptide
  MOD_RES (1), (2), (34): Xaa is C or S
XXVPTELEPISMLYLDEYDKVVKFKYEEMVVEGX

SEQ ID NO: 18987 - protein, 34 aa, Artificial Sequence
  Non-cyclic GFR-binding peptide
  MOD_RES (34), (34): Xaa is C or S
  MOD_RES (14), (15), (16), (17), (18): Xaa is A or G
  MOD_RES (19), (20), (21), (22): Xaa is A or G or is absent
APTKLEPISVLYLXXXXXXXXXKFKYENMVVKAX

SEQ ID NO: 18988 - protein, 34 aa, Artificial Sequence
  Non-cyclic GFR-binding peptide
  MOD_RES (1), (2): Xaa is C or S
  MOD_RES (16), (17), (18), (19), (20): Xaa is A or G
  MOD_RES (21), (22), (23), (24): Xaa is A or G or is absent
XXVSQDLSPISILYIXXXXXXXXXYKQYEMIVKS

SEQ ID NO: 18989 - protein, 37 aa, Artificial Sequence
  Non-cyclic GFR-binding peptide
  MOD_RES (5), (6), (37): Xaa is C or S
SASPXXVSQDLSPISILYIIGKTPKIYKQYEMIVKSX

SEQ ID NO: 18990 - protein, 39 aa, Artificial Sequence
  Non-cyclic GFR-binding peptide
  MOD_RES (4), (5), (37), (39): Xaa is C or S
PKAXXAPTKLEPISVLYLDSSNNVIKFKYENMVVKAXGX

SEQ ID NO: 18991 - protein, 39 aa, Artificial Sequence
  Non-cyclic GFR-binding peptide
  MOD_RES (1), (2), (37), (39): Xaa is C or S
  MOD_RES (16), (17), (18), (19), (20): Xaa is A or G
  MOD_RES (21), (22), (23), (24): Xaa is A or G or is absent
XXVPTKLEPISVLYLXXXXXXXXXKFKYEEGMSVAEXGX

SEQ ID NO: 18992 - protein, 37 aa, Artificial Sequence
  Non-cyclic GFR-binding peptide
  MOD_RES (2), (3), (35), (37): Xaa is C or S
SXXVPARLEPISILYLDAANNVVKFKYEDMVVEAXGX

SEQ ID NO: 18993 - protein, 32 aa, Artificial Sequence
  Non-cyclic GFR-binding peptide
  MOD_RES (1), (2): Xaa is C or S
XXVSQDLEPISILYLIGKTPKIKFKYEMIVKS

SEQ ID NO: 18994 - protein, 37 aa, Artificial Sequence
  Non-cyclic GFR-binding peptide
  MOD_RES (6), (7): Xaa is C or S
KASKAXXVPTKLNAISILYFDKGVVTYLKKYRGMAVS

SEQ ID NO: 18995 - protein, 41 aa, Artificial Sequence
  Non-cyclic GFR-binding peptide
  MOD_RES (4), (5), (39), (41): Xaa is C or S
  MOD_RES (19), (20), (21), (22), (23): Xaa is A or G
  MOD_RES (24), (25), (26), (27): Xaa is A or G or is absent
PKPXXAPTKLEPISVLYLXXXXXXXXXKFKYENMVVRSXGX

SEQ ID NO: 18996 - protein, 37 aa, Artificial Sequence
  Non-cyclic GFR-binding peptide
  MOD_RES (2), (3), (35), (37): Xaa is C or S
PXXAPTKLSPISVLYIDDSSNVIYKQYENMVVRSXGX

SEQ ID NO: 18997 - protein, 31 aa, Artificial Sequence
  Non-cyclic GFR-binding peptide
VPARLNAISILYFDAANNVVLKKYRDMVVEA

SEQ ID NO: 18998 - protein, 38 aa, Artificial Sequence
  Non-cyclic GFR-binding peptide
  MOD_RES (2), (3), (35), (37): Xaa is C or S
PXXAPTKLEPISVLYLDDSSNVIKFKYENMVVRSXGXH

SEQ ID NO: 18999 - protein, 33 aa, Artificial Sequence
  Non-cyclic GFR-binding peptide
  MOD_RES (33), (33): Xaa is C or S
VPTKLEPISVLYLDDMGVPTKFKYEEGMSVAEX

SEQ ID NO: 19000 - protein, 38 aa, Artificial Sequence
  Non-cyclic GFR-binding peptide
  MOD_RES (3), (4), (38): Xaa is C or S
  MOD_RES (18), (19), (20), (21), (22): Xaa is A or G
  MOD_RES (23), (24), (25), (26): Xaa is A or G or is absent
KAXXVPTELEPISMLYLXXXXXXXXXKFKYEEMVVEGX

SEQ ID NO: 19001 - protein, 35 aa, Artificial Sequence
  Non-cyclic GFR-binding peptide
  MOD_RES (2), (3): Xaa is C or S
  MOD_RES (17), (18), (19), (20), (21): Xaa is A or G
  MOD_RES (22), (23), (24), (25): Xaa is A or G or is absent
AXXVPTKLNAISILYFXXXXXXXXXLKKYRGMAVS

SEQ ID NO: 19002 - protein, 39 aa, Artificial Sequence
  Non-cyclic GFR-binding peptide
  MOD_RES (3), (37), (39): Xaa is C or S
  MOD_RES (17), (18), (19), (20), (21): Xaa is A or G
  MOD_RES (22), (23), (24), (25): Xaa is A or G or is absent
PTXAPTKLSPISVLYIXXXXXXXXXYKQYENMVVRSXGX

SEQ ID NO: 19003 - protein, 35 aa, Artificial Sequence
  Non-cyclic GFR-binding peptide
  MOD_RES (2), (3), (35): Xaa is C or S
SXXVPARLEPISILYLDAANNVVKFKYEDMVVEAX

SEQ ID NO: 19004 - protein, 37 aa, Artificial Sequence
  Non-cyclic GFR-binding peptide
  MOD_RES (5), (6): Xaa is C or S
APASXXVPARLNAISILYFDAANNVVLKKYRDMVVEA

SEQ ID NO: 19005 - protein, 41 aa, Artificial Sequence
  Non-cyclic GFR-binding peptide
  MOD_RES (4), (5), (39), (41): Xaa is C or S
  MOD_RES (19), (20), (21), (22), (23): Xaa is A or G
  MOD_RES (24), (25), (26), (27): Xaa is A or G or is absent
PKPXXAPTKLSPISVLYIXXXXXXXXXYKQYENMVVRSXGX

SEQ ID NO: 19006 - protein, 35 aa, Artificial Sequence
  Non-cyclic GFR-binding peptide
  MOD_RES (1), (1): Xaa is C or S
  MOD_RES (15), (16), (17), (18), (19): Xaa is A or G
  MOD_RES (20), (21), (22), (23): Xaa is A or G or is absent
XVPTKLSPISVLYIXXXXXXXXXYKQYEEGMSVAE

SEQ ID NO: 19007 - protein, 33 aa, Artificial Sequence
  Non-cyclic GFR-binding peptide
  MOD_RES (1), (2), (33): Xaa is C or S
XXVPQALSPISILYIVGRKPKVYKQYEMIVRSX

SEQ ID NO: 19008 - protein, 32 aa, Artificial Sequence
  Non-cyclic GFR-binding peptide
  MOD_RES (14), (15), (16), (17), (18): Xaa is A or G
  MOD_RES (19), (20), (21), (22): Xaa is A or G or is absent
VSQDLSPISILYIXXXXXXXXXYKQYEMIVKS

SEQ ID NO: 19009 - protein, 39 aa, Artificial Sequence
  Non-cyclic GFR-binding peptide
  MOD_RES (5), (6): Xaa is C or S
  MOD_RES (20), (21), (22), (23), (24): Xaa is A or G
  MOD_RES (25), (26), (27), (28): Xaa is A or G or is absent
VPKAXXAPTKLEPISVLYLXXXXXXXXXKFKYENMVVKA

SEQ ID NO: 19010 - protein, 38 aa, Artificial Sequence
  Non-cyclic GFR-binding peptide
  MOD_RES (1), (35), (37): Xaa is C or S
  MOD_RES (15), (16), (17), (18), (19): Xaa is A or G
  MOD_RES (20), (21), (22), (23): Xaa is A or G or is absent
XVPTELSPISMLYIXXXXXXXXXYKQYEDMVVEGXGXR

SEQ ID NO: 19011 - protein, 37 aa, Artificial Sequence
  Non-cyclic GFR-binding peptide
  MOD_RES (2), (3), (35), (37): Xaa is C or S
PXXAPTQLSPISVLYIDDSSNVIYKQYENMVVRAXGX

SEQ ID NO: 19012 - protein, 39 aa, Artificial Sequence
  Non-cyclic GFR-binding peptide
  MOD_RES (4), (5), (39): Xaa is C or S
  MOD_RES (19), (20), (21), (22), (23): Xaa is A or G
  MOD_RES (24), (25), (26), (27): Xaa is A or G or is absent
PKPXXAPTQLEPISVLYLXXXXXXXXXKFKYENMVVRAX

SEQ ID NO: 19013 - protein, 33 aa, Artificial Sequence
  Non-cyclic GFR-binding peptide
  MOD_RES (2), (3): Xaa is C or S
PXXVPQALEPISILYLVGRKPKVKFKYEMIVRS

SEQ ID NO: 19014 - protein, 36 aa, Artificial Sequence
  Non-cyclic GFR-binding peptide
  MOD_RES (1), (2), (33), (35): Xaa is C or S
XXVPQDLEPISILYLVGRTPKVKFKYEMVVKSXKXS

SEQ ID NO: 19015 - protein, 32 aa, Artificial Sequence
  Non-cyclic GFR-binding peptide
  MOD_RES (14), (15), (16), (17), (18): Xaa is A or G
  MOD_RES (19), (20), (21), (22): Xaa is A or G or is absent
VPARLSPISILYKXXXXXXXXXLKYHYDMVVE

SEQ ID NO: 19016 - protein, 40 aa, Artificial Sequence
  Non-cyclic GFR-binding peptide
  MOD_RES (6), (7): Xaa is C or S
  MOD_RES (21), (22), (23), (24), (25): Xaa is A or G
  MOD_RES (26), (27), (28), (29): Xaa is A or G or is absent
AAPASXXVPARLSPISILYKXXXXXXXXXLKYHYDMVVEA

SEQ ID NO: 19017 - protein, 37 aa, Artificial Sequence
  Non-cyclic GFR-binding peptide
  MOD_RES (3), (4), (37): Xaa is C or S
  MOD_RES (18), (19), (20), (21), (22): Xaa is A or G
  MOD_RES (23), (24), (25), (26): Xaa is A or G or is absent
SPXXVSQDLEPISILYLXXXXXXXXXKFKYEMIVKSX

SEQ ID NO: 19018 - protein, 35 aa, Artificial Sequence
  Non-cyclic GFR-binding peptide
  MOD_RES (1), (32), (34): Xaa is C or S
XVPQALEPISILYLVGRKPKVKFKYEMIVRSXKXS

SEQ ID NO: 19019 - protein, 39 aa, Artificial Sequence
  Non-cyclic GFR-binding peptide
  MOD_RES (4), (5), (38): Xaa is C or S
  MOD_RES (19), (20), (21), (22), (23): Xaa is A or G
  MOD_RES (24), (25), (26), (27): Xaa is A or G or is absent
ASPXXVSQDLSPISILYIXXXXXXXXXYKQYEMIVKSXK

SEQ ID NO: 19020 - protein, 31 aa, Artificial Sequence
  Non-cyclic GFR-binding peptide
APTKLSPISVLYIDSSNNVIYKQYENMVVKA

SEQ ID NO: 19021 - protein, 33 aa, Artificial Sequence
  Non-cyclic GFR-binding peptide
  MOD_RES (1), (1): Xaa is C or S
  MOD_RES (15), (16), (17), (18), (19): Xaa is A or G
  MOD_RES (20), (21), (22), (23): Xaa is A or G or is absent
XVPTELEPISMLYLXXXXXXXXXKFKYEDMVVE

SEQ ID NO: 19022 - protein, 37 aa, Artificial Sequence
  Non-cyclic GFR-binding peptide
  MOD_RES (2), (3), (35), (37): Xaa is C or S
AXXAPTKLEPISVLYLDSSNNVIKFKYENMVVKAXGX

SEQ ID NO: 19023 - protein, 41 aa, Artificial Sequence
  Non-cyclic GFR-binding peptide
  MOD_RES (6), (7), (38), (40): Xaa is C or S
ASAAPXXVPQALEPISILYLVGRKPKVKFKYEMIVRSXKXS

SEQ ID NO: 19024 - protein, 41 aa, Artificial Sequence
  Non-cyclic GFR-binding peptide
  MOD_RES (5), (6), (39), (41): Xaa is C or S
  MOD_RES (20), (21), (22), (23), (24): Xaa is A or G
  MOD_RES (25), (26), (27), (28): Xaa is A or G or is absent
SAAPXXVPQALSPISILYIXXXXXXXXXYKQYEMIVRSXKX

SEQ ID NO: 19025 - protein, 42 aa, Artificial Sequence
  Non-cyclic GFR-binding peptide
  MOD_RES (4), (5), (39), (41): Xaa is C or S
  MOD_RES (19), (20), (21), (22), (23): Xaa is A or G
  MOD_RES (24), (25), (26), (27): Xaa is A or G or is absent
PKAXXVPTELSPISMLYIXXXXXXXXXYKQYEEMVVEGXGXR

SEQ ID NO: 19026 - protein, 34 aa, Artificial Sequence
  Non-cyclic GFR-binding peptide
  MOD_RES (34), (34): Xaa is C or S
  MOD_RES (14), (15), (16), (17), (18): Xaa is A or G
  MOD_RES (19), (20), (21), (22): Xaa is A or G or is absent
VPTKLSPISILYKXXXXXXXXXLKYHYGMAVSEX

SEQ ID NO: 19027 - protein, 38 aa, Artificial Sequence
  Non-cyclic GFR-binding peptide
  MOD_RES (4), (5), (37): Xaa is C or S
PASXXVPARLSPISILYKDAANNVVLKYHYDMVVEAXG

SEQ ID NO: 19028 - protein, 36 aa, Artificial Sequence
  Non-cyclic GFR-binding peptide
  MOD_RES (35), (35): Xaa is C or S
  MOD_RES (14), (15), (16), (17), (18): Xaa is A or G
  MOD_RES (19), (20), (21), (22): Xaa is A or G or is absent
VPTKLEPISVLYLXXXXXXXXXKFKYEEGMSVAEXG

SEQ ID NO: 19029 - protein, 35 aa, Artificial Sequence
  Non-cyclic GFR-binding peptide
  MOD_RES (35), (35): Xaa is C or S
  MOD_RES (14), (15), (16), (17), (18): Xaa is A or G
  MOD_RES (19), (20), (21), (22): Xaa is A or G or is absent
VPTKLSPISVLYIXXXXXXXXXYKQYEEGMSVAEX

SEQ ID NO: 19030 - protein, 39 aa, Artificial Sequence
  Non-cyclic GFR-binding peptide
  MOD_RES (3), (4), (36), (38): Xaa is C or S
KPXXAPTKLEPISVLYLDDSSNVIKFKYENMVVRSXGXH

SEQ ID NO: 19031 - protein, 39 aa, Artificial Sequence
  Non-cyclic GFR-binding peptide
  MOD_RES (3), (4), (38): Xaa is C or S
  MOD_RES (18), (19), (20), (21), (22): Xaa is A or G
  MOD_RES (23), (24), (25), (26): Xaa is A or G or is absent
KAXXVPTKLSPISILYKXXXXXXXXXLKYHYGMAVSEXG

SEQ ID NO: 19032 - protein, 35 aa, Artificial Sequence
  Non-cyclic GFR-binding peptide
  MOD_RES (1), (34): Xaa is C or S
  MOD_RES (15), (16), (17), (18), (19): Xaa is A or G
  MOD_RES (20), (21), (22), (23): Xaa is A or G or is absent
XVPQDLEPISILYLXXXXXXXXXKFKYEMVVKSXK

SEQ ID NO: 19033 - protein, 36 aa, Artificial Sequence
  Non-cyclic GFR-binding peptide
  MOD_RES (4), (5), (36): Xaa is C or S
ASPXXVSQDLEPISILYLIGKTPKIKFKYEMIVKSX

SEQ ID NO: 19034 - protein, 41 aa, Artificial Sequence
  Non-cyclic GFR-binding peptide
  MOD_RES (5), (6), (41): Xaa is C or S
  MOD_RES (20), (21), (22), (23), (24): Xaa is A or G
  MOD_RES (25), (26), (27), (28): Xaa is A or G or is absent
VGKAXXVPTKLSPISVLYIXXXXXXXXXYKQYEEGMSVAEX

SEQ ID NO: 19035 - protein, 41 aa, Artificial Sequence
  Non-cyclic GFR-binding peptide
  MOD_RES (6), (7), (39), (41): Xaa is C or S
AVPKAXXAPTKLEPISVLYLDSSNNVIKFKYENMVVKAXGX

SEQ ID NO: 19036 - protein, 37 aa, Artificial Sequence
  Non-cyclic GFR-binding peptide
  MOD_RES (6), (7): Xaa is C or S
SIPKAXXVPTELEPISMLYLDEYDKVVKFKYEEMVVE

SEQ ID NO: 19037 - protein, 40 aa, Artificial Sequence
  Non-cyclic GFR-binding peptide
  MOD_RES (5), (6), (38), (40): Xaa is C or S
APASXXVPARLEPISILYLDAANNVVKFKYEDMVVEAXGX

SEQ ID NO: 19038 - protein, 39 aa, Artificial Sequence
  Non-cyclic GFR-binding peptide
  MOD_RES (5), (6), (38): Xaa is C or S
VPKPXXAPTKLEPISVLYLDDSSNVIKFKYENMVVRSXG

SEQ ID NO: 19039 - protein, 40 aa, Artificial Sequence
  Non-cyclic GFR-binding peptide
  MOD_RES (4), (5), (37), (39): Xaa is C or S
PKPXXAPTQLSPISVLYIDDSSNVIYKQYENMVVRAXGXH

SEQ ID NO: 19040 - protein, 37 aa, Artificial Sequence
  Non-cyclic GFR-binding peptide
  MOD_RES (2), (3), (37): Xaa is C or S
  MOD_RES (17), (18), (19), (20), (21): Xaa is A or G
  MOD_RES (22), (23), (24), (25): Xaa is A or G or is absent
SXXVPARLEPISILYLXXXXXXXXXKFKYEDMVVEAX

SEQ ID NO: 19041 - protein, 35 aa, Artificial Sequence
  Non-cyclic GFR-binding peptide
  MOD_RES (1), (2), (34): Xaa is C or S
XXVPARLSPISILYKDAANNVVLKYHYDMVVEAXG

SEQ ID NO: 19042 - protein, 35 aa, Artificial Sequence
  Non-cyclic GFR-binding peptide
  MOD_RES (4), (5): Xaa is C or S
PASXXVPARLSPISILYKDAANNVVLKYHYDMVVE

SEQ ID NO: 19043 - protein, 37 aa, Artificial Sequence
  Non-cyclic GFR-binding peptide
  MOD_RES (5), (37): Xaa is C or S
TKPTXAPTKLEPISVLYLDDSSNVIKFKYENMVVRSX

SEQ ID NO: 19044 - protein, 38 aa, Artificial Sequence
  Non-cyclic GFR-binding peptide
  MOD_RES (3), (4), (36), (38): Xaa is C or S
KAXXVPTKLSPISILYIDKGVVTYYKQYEGMAVSEXGX

SEQ ID NO: 19045 - protein, 43 aa, Artificial Sequence
  Non-cyclic GFR-binding peptide
  MOD_RES (5), (6), (40), (42): Xaa is C or S
  MOD_RES (20), (21), (22), (23), (24): Xaa is A or G
  MOD_RES (25), (26), (27), (28): Xaa is A or G or is absent
VPKAXXAPTKLEPISVLYLXXXXXXXXXKFKYENMVVKAXGXH

SEQ ID NO: 19046 - protein, 37 aa, Artificial Sequence
  Non-cyclic GFR-binding peptide
  MOD_RES (2), (3), (35), (37): Xaa is C or S
AXXVPTKLSPISILYKDKGVVTYLKYHYGMAVSEXGX

SEQ ID NO: 19047 - protein, 36 aa, Artificial Sequence
  Non-cyclic GFR-binding peptide
  MOD_RES (34), (36): Xaa is C or S
  MOD_RES (14), (15), (16), (17), (18): Xaa is A or G
  MOD_RES (19), (20), (21), (22): Xaa is A or G or is absent
APTKLSPISVLYIXXXXXXXXXYKQYENMVVKAXGX

SEQ ID NO: 19048 - protein, 35 aa, Artificial Sequence
  Non-cyclic GFR-binding peptide
  MOD_RES (5), (5): Xaa is C or S
TKPTXAPTKLSPISVLYIDDSSNVIYKQYENMVVR

SEQ ID NO: 19049 - protein, 37 aa, Artificial Sequence
  Non-cyclic GFR-binding peptide
  MOD_RES (3), (4): Xaa is C or S
  MOD_RES (18), (19), (20), (21), (22): Xaa is A or G
  MOD_RES (23), (24), (25), (26): Xaa is A or G or is absent
ASXXVPARLSPISILYKXXXXXXXXXLKYHYDMVVEA

SEQ ID NO: 19050 - protein, 34 aa, Artificial Sequence
  Non-cyclic GFR-binding peptide
  MOD_RES (2), (2): Xaa is C or S
  MOD_RES (16), (17), (18), (19), (20): Xaa is A or G
  MOD_RES (21), (22), (23), (24): Xaa is A or G or is absent
TXAPTKLEPISVLYLXXXXXXXXXKFKYENMVVR

SEQ ID NO: 19051 - protein, 38 aa, Artificial Sequence
  Non-cyclic GFR-binding peptide
  MOD_RES (5), (6): Xaa is C or S
  MOD_RES (20), (21), (22), (23), (24): Xaa is A or G
  MOD_RES (25), (26), (27), (28): Xaa is A or G or is absent
IPKAXXVPTELEPISMLYLXXXXXXXXXKFKYEEMVVE

SEQ ID NO: 19052 - protein, 39 aa, Artificial Sequence
  Non-cyclic GFR-binding peptide
  MOD_RES (5), (6): Xaa is C or S
  MOD_RES (20), (21), (22), (23), (24): Xaa is A or G
  MOD_RES (25), (26), (27), (28): Xaa is A or G or is absent
IPKAXXVPTELSPISMLYIXXXXXXXXXYKQYEDMVVEG

SEQ ID NO: 19053 - protein, 40 aa, Artificial Sequence
  Non-cyclic GFR-binding peptide
  MOD_RES (5), (6), (40): Xaa is C or S
  MOD_RES (20), (21), (22), (23), (24): Xaa is A or G
  MOD_RES (25), (26), (27), (28): Xaa is A or G or is absent
IPKAXXVPTELEPISMLYLXXXXXXXXXKFKYEEMVVEGX

SEQ ID NO: 19054 - protein, 40 aa, Artificial Sequence
  Non-cyclic GFR-binding peptide
  MOD_RES (5), (6), (38), (40): Xaa is C or S
VPKAXXAPTKLEPISVLYLDSSNNVIKFKYENMVVKAXGX

SEQ ID NO: 19055 - protein, 36 aa, Artificial Sequence
  Non-cyclic GFR-binding peptide
  MOD_RES (5), (6): Xaa is C or S
SASPXXVSQDLSPISILYIIGKTPKIYKQYEMIVKS

SEQ ID NO: 19056 - protein, 40 aa, Artificial Sequence
  Non-cyclic GFR-binding peptide
  MOD_RES (5), (39): Xaa is C or S
  MOD_RES (19), (20), (21), (22), (23): Xaa is A or G
  MOD_RES (24), (25), (26), (27): Xaa is A or G or is absent
TKPTXAPTKLEPISVLYLXXXXXXXXXKFKYENMVVRSXG

SEQ ID NO: 19057 - protein, 40 aa, Artificial Sequence
  Non-cyclic GFR-binding peptide
  MOD_RES (2), (3), (37), (39): Xaa is C or S
  MOD_RES (17), (18), (19), (20), (21): Xaa is A or G
  MOD_RES (22), (23), (24), (25): Xaa is A or G or is absent
PXXAPTKLEPISVLYLXXXXXXXXXKFKYENMVVRSXGXH

SEQ ID NO: 19058 - protein, 37 aa, Artificial Sequence
  Non-cyclic GFR-binding peptide
  MOD_RES (4), (5): Xaa is C or S
  MOD_RES (19), (20), (21), (22), (23): Xaa is A or G
  MOD_RES (24), (25), (26), (27): Xaa is A or G or is absent
ASPXXVSQDLSPISILYIXXXXXXXXXYKQYEMIVKS

SEQ ID NO: 19059 - protein, 42 aa, Artificial Sequence
  Non-cyclic GFR-binding peptide
  MOD_RES (6), (7), (39), (41): Xaa is C or S
KASKAXXVPTKLSPISILYKDKGVVTYLKYHYGMAVSEXGXR

SEQ ID NO: 19060 - protein, 41 aa, Artificial Sequence
  Non-cyclic GFR-binding peptide
  MOD_RES (6), (7), (40): Xaa is C or S
KVGKAXXVPTKLSPISVLYIDDMGVPTYKQYEEGMSVAEXG

SEQ ID NO: 19061 - protein, 32 aa, Artificial Sequence
  Non-cyclic GFR-binding peptide
  MOD_RES (32), (32): Xaa is C or S
VPARLSPISILYKDAANNVVLKYHYDMVVEAX

SEQ ID NO: 19062 - protein, 39 aa, Artificial Sequence
  Non-cyclic GFR-binding peptide
  MOD_RES (2), (3), (37), (39): Xaa is C or S
  MOD_RES (17), (18), (19), (20), (21): Xaa is A or G
  MOD_RES (22), (23), (24), (25): Xaa is A or G or is absent
PXXAPTQLEPISVLYLXXXXXXXXXKFKYENMVVRAXGX

SEQ ID NO: 19063 - protein, 38 aa, Artificial Sequence
  Non-cyclic GFR-binding peptide
  MOD_RES (1), (2), (36), (38): Xaa is C or S
  MOD_RES (16), (17), (18), (19), (20): Xaa is A or G
  MOD_RES (21), (22), (23), (24): Xaa is A or G or is absent
XXVPTKLSPISILYKXXXXXXXXXLKYHYGMAVSEXGX

SEQ ID NO: 19064 - protein, 39 aa, Artificial Sequence
  Non-cyclic GFR-binding peptide
  MOD_RES (6), (7), (38): Xaa is C or S
ASASPXXVPQDLSPISILYIVGRTPKVYKQYEMVVKSXK

SEQ ID NO: 19065 - protein, 38 aa, Artificial Sequence
  Non-cyclic GFR-binding peptide
  MOD_RES (2), (3), (37): Xaa is C or S
  MOD_RES (17), (18), (19), (20), (21): Xaa is A or G
  MOD_RES (22), (23), (24), (25): Xaa is A or G or is absent
PXXAPTKLSPISVLYIXXXXXXXXXYKQYENMVVRSXG

SEQ ID NO: 19066 - protein, 40 aa, Artificial Sequence
  Non-cyclic GFR-binding peptide
  MOD_RES (4), (38), (40): Xaa is C or S
  MOD_RES (18), (19), (20), (21), (22): Xaa is A or G
  MOD_RES (23), (24), (25), (26): Xaa is A or G or is absent
KPTXAPTKLSPISVLYIXXXXXXXXXYKQYENMVVRSXGX

SEQ ID NO: 19067 - protein, 38 aa, Artificial Sequence
  Non-cyclic GFR-binding peptide
  MOD_RES (35), (37): Xaa is C or S
  MOD_RES (14), (15), (16), (17), (18): Xaa is A or G
  MOD_RES (19), (20), (21), (22): Xaa is A or G or is absent
VPTKLEPISVLYLXXXXXXXXXKFKYEEGMSVAEXGXR

SEQ ID NO: 19068 - protein, 38 aa, Artificial Sequence
  Non-cyclic GFR-binding peptide
  MOD_RES (5), (6): Xaa is C or S
  MOD_RES (20), (21), (22), (23), (24): Xaa is A or G
  MOD_RES (25), (26), (27), (28): Xaa is A or G or is absent
ASKAXXVPTKLNAISILYFXXXXXXXXXLKKYRGMAVS

SEQ ID NO: 19069 - protein, 39 aa, Artificial Sequence
  Non-cyclic GFR-binding peptide
  MOD_RES (6), (7), (38): Xaa is C or S
ASASPXXVPQDLEPISILYLVGRTPKVKFKYEMVVKSXK

SEQ ID NO: 19070 - protein, 40 aa, Artificial Sequence
  Non-cyclic GFR-binding peptide
  MOD_RES (6), (7), (39): Xaa is C or S
KIPKAXXVPTELSPISMLYIDENEKVVYKQYEDMVVEGXG

SEQ ID NO: 19071 - protein, 38 aa, Artificial Sequence
  Non-cyclic GFR-binding peptide
  MOD_RES (6), (7), (38): Xaa is C or S
ASASPXXVPQDLSPISILYIVGRTPKVYKQYEMVVKSX

SEQ ID NO: 19072 - protein, 38 aa, Artificial Sequence
  Non-cyclic GFR-binding peptide
  MOD_RES (3), (4), (38): Xaa is C or S
  MOD_RES (18), (19), (20), (21), (22): Xaa is A or G
  MOD_RES (23), (24), (25), (26): Xaa is A or G or is absent
KAXXVPTKLNAISILYFXXXXXXXXXLKKYRGMAVSEX

SEQ ID NO: 19073 - protein, 34 aa, Artificial Sequence
  Non-cyclic GFR-binding peptide
  MOD_RES (3), (4): Xaa is C or S
KAXXVPTKLSPISILYKDKGVVTYLKYHYGMAVS

SEQ ID NO: 19074 - protein, 40 aa, Artificial Sequence
  Non-cyclic GFR-binding peptide
  MOD_RES (5), (37), (39): Xaa is C or S
TKPTXAPTKLSPISVLYIDDSSNVIYKQYENMVVRSXGXH

SEQ ID NO: 19075 - protein, 36 aa, Artificial Sequence
  Non-cyclic GFR-binding peptide
  MOD_RES (1), (35): Xaa is C or S
  MOD_RES (15), (16), (17), (18), (19): Xaa is A or G
  MOD_RES (20), (21), (22), (23): Xaa is A or G or is absent
XAPTKLEPISVLYLXXXXXXXXXKFKYENMVVRSXG

SEQ ID NO: 19076 - protein, 35 aa, Artificial Sequence
  Non-cyclic GFR-binding peptide
  MOD_RES (1), (2): Xaa is C or S
  MOD_RES (16), (17), (18), (19), (20): Xaa is A or G
  MOD_RES (21), (22), (23), (24): Xaa is A or G or is absent
XXVPARLSPISILYKXXXXXXXXXLKYHYDMVVEA

SEQ ID NO: 19077 - protein, 31 aa, Artificial Sequence
  Non-cyclic GFR-binding peptide
VPTKLSPISILYKDKGVVTYLKYHYGMAVSE

SEQ ID NO: 19078 - protein, 34 aa, Artificial Sequence
  Non-cyclic GFR-binding peptide
  MOD_RES (31), (33): Xaa is C or S
VPQALSPISILYIVGRKPKVYKQYEMIVRSXKXS

SEQ ID NO: 19079 - protein, 38 aa, Artificial Sequence
  Non-cyclic GFR-binding peptide
  MOD_RES (4), (5): Xaa is C or S
  MOD_RES (19), (20), (21), (22), (23): Xaa is A or G
  MOD_RES (24), (25), (26), (27): Xaa is A or G or is absent
PKPXXAPTQLEPISVLYLXXXXXXXXXKFKYENMVVRA

SEQ ID NO: 19080 - protein, 44 aa, Artificial Sequence
  Non-cyclic GFR-binding peptide
  MOD_RES (6), (7), (41), (43): Xaa is C or S
  MOD_RES (21), (22), (23), (24), (25): Xaa is A or G
  MOD_RES (26), (27), (28), (29): Xaa is A or G or is absent
SIPKAXXVPTELSPISMLYIXXXXXXXXXYKQYEEMVVEGXGXR

SEQ ID NO: 19081 - protein, 38 aa, Artificial Sequence
  Non-cyclic GFR-binding peptide
  MOD_RES (4), (5), (37): Xaa is C or S
PKPXXAPTQLSPISVLYIDDSSNVIYKQYENMVVRAXG

SEQ ID NO: 19082 - protein, 36 aa, Artificial Sequence
  Non-cyclic GFR-binding peptide
  MOD_RES (1), (2), (34), (36): Xaa is C or S
XXVPARLSPISILYKDAANNVVLKYHYDMVVEAXGX

SEQ ID NO: 19083 - protein, 43 aa, Artificial Sequence
  Non-cyclic GFR-binding peptide
  MOD_RES (6), (7), (41), (43): Xaa is C or S
  MOD_RES (21), (22), (23), (24), (25): Xaa is A or G
  MOD_RES (26), (27), (28), (29): Xaa is A or G or is absent
KASKAXXVPTKLSPISILYIXXXXXXXXXYKQYEGMAVSEXGX

SEQ ID NO: 19084 - protein, 38 aa, Artificial Sequence
  Non-cyclic GFR-binding peptide
  MOD_RES (2), (3), (35), (37): Xaa is C or S
SXXVPARLSPISILYKDAANNVVLKYHYDMVVEAXGXR

SEQ ID NO: 19085 - protein, 42 aa, Artificial Sequence
  Non-cyclic GFR-binding peptide
  MOD_RES (4), (5), (39), (41): Xaa is C or S
  MOD_RES (19), (20), (21), (22), (23): Xaa is A or G
  MOD_RES (24), (25), (26), (27): Xaa is A or G or is absent
PASXXVPARLEPISILYLXXXXXXXXXKFKYEDMVVEAXGXR

SEQ ID NO: 19086 - protein, 31 aa, Artificial Sequence
  Non-cyclic GFR-binding peptide
  MOD_RES (31), (31): Xaa is C or S
VPQDLEPISILYLVGRTPKVKFKYEMVVKSX

SEQ ID NO: 19087 - protein, 34 aa, Artificial Sequence
  Non-cyclic GFR-binding peptide
  MOD_RES (33), (33): Xaa is C or S
VPTKLSPISVLYIDDMGVPTYKQYEEGMSVAEXG

SEQ ID NO: 19088 - protein, 35 aa, Artificial Sequence
  Non-cyclic GFR-binding peptide
  MOD_RES (1), (2), (34): Xaa is C or S
XXVPTELSPISMLYIDEYDKVVYKQYEEMVVEGXG

SEQ ID NO: 19089 - protein, 38 aa, Artificial Sequence
  Non-cyclic GFR-binding peptide
  MOD_RES (4), (5): Xaa is C or S
  MOD_RES (19), (20), (21), (22), (23): Xaa is A or G
  MOD_RES (24), (25), (26), (27): Xaa is A or G or is absent
PKAXXVPTELSPISMLYIXXXXXXXXXYKQYEDMVVEG

SEQ ID NO: 19090 - protein, 37 aa, Artificial Sequence
  Non-cyclic GFR-binding peptide
  MOD_RES (1), (35), (37): Xaa is C or S
  MOD_RES (15), (16), (17), (18), (19): Xaa is A or G
  MOD_RES (20), (21), (22), (23): Xaa is A or G or is absent
XVPARLEPISILYLXXXXXXXXXKFKYEDMVVEAXGX

SEQ ID NO: 19091 - protein, 33 aa, Artificial Sequence
  Non-cyclic GFR-binding peptide
  MOD_RES (1), (32): Xaa is C or S
XVSQDLSPISILYIIGKTPKIYKQYEMIVKSXK

SEQ ID NO: 19092 - protein, 38 aa, Artificial Sequence
  Non-cyclic GFR-binding peptide
  MOD_RES (3), (4), (38): Xaa is C or S
  MOD_RES (18), (19), (20), (21), (22): Xaa is A or G
  MOD_RES (23), (24), (25), (26): Xaa is A or G or is absent
KPXXAPTKLSPISVLYIXXXXXXXXXYKQYENMVVRSX

SEQ ID NO: 19093 - protein, 40 aa, Artificial Sequence
  Non-cyclic GFR-binding peptide
  MOD_RES (2), (3), (37), (39): Xaa is C or S
  MOD_RES (17), (18), (19), (20), (21): Xaa is A or G
  MOD_RES (22), (23), (24), (25): Xaa is A or G or is absent
AXXVPTELEPISMLYLXXXXXXXXXKFKYEDMVVEGXGXR

SEQ ID NO: 19094 - protein, 40 aa, Artificial Sequence
  Non-cyclic GFR-binding peptide
  MOD_RES (1), (2), (37), (39): Xaa is C or S
  MOD_RES (16), (17), (18), (19), (20): Xaa is A or G
  MOD_RES (21), (22), (23), (24): Xaa is A or G or is absent
XXVPTKLEPISVLYLXXXXXXXXXKFKYEEGMSVAEXGXR

SEQ ID NO: 19095 - protein, 36 aa, Artificial Sequence
  Non-cyclic GFR-binding peptide
  MOD_RES (4), (5): Xaa is C or S
PKAXXVPTELSPISMLYIDEYDKVVYKQYEEMVVEG

SEQ ID NO: 19096 - protein, 36 aa, Artificial Sequence
  Non-cyclic GFR-binding peptide
  MOD_RES (5), (6): Xaa is C or S
APASXXVPARLSPISILYKDAANNVVLKYHYDMVVE

SEQ ID NO: 19097 - protein, 38 aa, Artificial Sequence
  Non-cyclic GFR-binding peptide
  MOD_RES (3), (4), (38): Xaa is C or S
  MOD_RES (18), (19), (20), (21), (22): Xaa is A or G
  MOD_RES (23), (24), (25), (26): Xaa is A or G or is absent
KAXXAPTKLEPISVLYLXXXXXXXXXKFKYENMVVKAX

SEQ ID NO: 19098 - protein, 37 aa, Artificial Sequence
  Non-cyclic GFR-binding peptide
  MOD_RES (4), (5): Xaa is C or S
  MOD_RES (19), (20), (21), (22), (23): Xaa is A or G
  MOD_RES (24), (25), (26), (27): Xaa is A or G or is absent
PKPXXAPTQLSPISVLYIXXXXXXXXXYKQYENMVVR

SEQ ID NO: 19099 - protein, 34 aa, Artificial Sequence
  Non-cyclic GFR-binding peptide
  MOD_RES (1), (33): Xaa is C or S
XVPARLEPISILYLDAANNVVKFKYEDMVVEAXG

SEQ ID NO: 19100 - protein, 35 aa, Artificial Sequence
  Non-cyclic GFR-binding peptide
  MOD_RES (32), (34): Xaa is C or S
APTKLEPISVLYLDDSSNVIKFKYENMVVRSXGXH

SEQ ID NO: 19101 - protein, 33 aa, Artificial Sequence
  Non-cyclic GFR-binding peptide
  MOD_RES (32), (32): Xaa is C or S
VPTKLSPISILYKDKGVVTYLKYHYGMAVSEXG

SEQ ID NO: 19102 - protein, 36 aa, Artificial Sequence
  Non-cyclic GFR-binding peptide
  MOD_RES (4), (5): Xaa is C or S
PKAXXVPTELEPISMLYLDENEKVVKFKYEDMVVEG

SEQ ID NO: 19103 - protein, 37 aa, Artificial Sequence
  Non-cyclic GFR-binding peptide
  MOD_RES (3), (4): Xaa is C or S
  MOD_RES (18), (19), (20), (21), (22): Xaa is A or G
  MOD_RES (23), (24), (25), (26): Xaa is A or G or is absent
KAXXVPTELEPISMLYLXXXXXXXXXKFKYEDMVVEG

SEQ ID NO: 19104 - protein, 40 aa, Artificial Sequence
  Non-cyclic GFR-binding peptide
  MOD_RES (4), (38), (40): Xaa is C or S
  MOD_RES (18), (19), (20), (21), (22): Xaa is A or G
  MOD_RES (23), (24), (25), (26): Xaa is A or G or is absent
KPTXAPTKLEPISVLYLXXXXXXXXXKFKYENMVVRSXGX

SEQ ID NO: 19105 - protein, 33 aa, Artificial Sequence
  Non-cyclic GFR-binding peptide
  MOD_RES (1), (1): Xaa is C or S
  MOD_RES (15), (16), (17), (18), (19): Xaa is A or G
  MOD_RES (20), (21), (22), (23): Xaa is A or G or is absent
XVPTKLSPISILYKXXXXXXXXXLKYHYGMAVS

SEQ ID NO: 19106 - protein, 36 aa, Artificial Sequence
  Non-cyclic GFR-binding peptide
  MOD_RES (33), (35): Xaa is C or S
  MOD_RES (14), (15), (16), (17), (18): Xaa is A or G
  MOD_RES (19), (20), (21), (22): Xaa is A or G or is absent
VPQALEPISILYLXXXXXXXXXKFKYEMIVRSXKXS

SEQ ID NO: 19107 - protein, 36 aa, Artificial Sequence
  Non-cyclic GFR-binding peptide
  MOD_RES (3), (4): Xaa is C or S
  MOD_RES (18), (19), (20), (21), (22): Xaa is A or G
  MOD_RES (23), (24), (25), (26): Xaa is A or G or is absent
SPXXVSQDLEPISILYLXXXXXXXXXKFKYEMIVKS

SEQ ID NO: 19108 - protein, 39 aa, Artificial Sequence
  Non-cyclic GFR-binding peptide
  MOD_RES (3), (4), (39): Xaa is C or S
  MOD_RES (18), (19), (20), (21), (22): Xaa is A or G
  MOD_RES (23), (24), (25), (26): Xaa is A or G or is absent
KAXXVPTKLEPISVLYLXXXXXXXXXKFKYEEGMSVAEX

SEQ ID NO: 19109 - protein, 35 aa, Artificial Sequence
  Non-cyclic GFR-binding peptide
  MOD_RES (34), (34): Xaa is C or S
  MOD_RES (14), (15), (16), (17), (18): Xaa is A or G
  MOD_RES (19), (20), (21), (22): Xaa is A or G or is absent
VPTKLSPISILYIXXXXXXXXXYKQYEGMAVSEXG

SEQ ID NO: 19110 - protein, 42 aa, Artificial Sequence
  Non-cyclic GFR-binding peptide
  MOD_RES (6), (7), (40), (42): Xaa is C or S
  MOD_RES (21), (22), (23), (24), (25): Xaa is A or G
  MOD_RES (26), (27), (28), (29): Xaa is A or G or is absent
ASASPXXVSQDLEPISILYLXXXXXXXXXKFKYEMIVKSXKX

SEQ ID NO: 19111 - protein, 30 aa, Artificial Sequence
  Non-cyclic GFR-binding peptide
VPTELSPISMLYIDEYDKVVYKQYEEMVVE

SEQ ID NO: 19112 - protein, 37 aa, Artificial Sequence
  Non-cyclic GFR-binding peptide
  MOD_RES (3), (4), (36): Xaa is C or S
KPXXAPTQLSPISVLYIDDSSNVIYKQYENMVVRAXG

SEQ ID NO: 19113 - protein, 39 aa, Artificial Sequence
  Non-cyclic GFR-binding peptide
  MOD_RES (4), (5), (36), (38): Xaa is C or S
AAPXXVPQALEPISILYLVGRKPKVKFKYEMIVRSXKXS

SEQ ID NO: 19114 - protein, 35 aa, Artificial Sequence
  Non-cyclic GFR-binding peptide
  MOD_RES (2), (3), (35): Xaa is C or S
PXXAPTKLEPISVLYLDDSSNVIKFKYENMVVRSX

SEQ ID NO: 19115 - protein, 37 aa, Artificial Sequence
  Non-cyclic GFR-binding peptide
  MOD_RES (2), (3): Xaa is C or S
  MOD_RES (17), (18), (19), (20), (21): Xaa is A or G
  MOD_RES (22), (23), (24), (25): Xaa is A or G or is absent
AXXVPTKLEPISVLYLXXXXXXXXXKFKYEEGMSVAE

SEQ ID NO: 19116 - protein, 40 aa, Artificial Sequence
  Non-cyclic GFR-binding peptide
  MOD_RES (3), (37), (39): Xaa is C or S
  MOD_RES (17), (18), (19), (20), (21): Xaa is A or G
  MOD_RES (22), (23), (24), (25): Xaa is A or G or is absent
PTXAPTKLSPISVLYIXXXXXXXXXYKQYENMVVRSXGXH

SEQ ID NO: 19117 - protein, 38 aa, Artificial Sequence
  Non-cyclic GFR-binding peptide
  MOD_RES (3), (4), (37): Xaa is C or S
  MOD_RES (18), (19), (20), (21), (22): Xaa is A or G
  MOD_RES (23), (24), (25), (26): Xaa is A or G or is absent
APXXVPQALSPISILYIXXXXXXXXXYKQYEMIVRSXK

SEQ ID NO: 19118 - protein, 36 aa, Artificial Sequence
  Non-cyclic GFR-binding peptide
  MOD_RES (1), (35): Xaa is C or S
  MOD_RES (15), (16), (17), (18), (19): Xaa is A or G
  MOD_RES (20), (21), (22), (23): Xaa is A or G or is absent
XVPARLEPISILYLXXXXXXXXXKFKYEDMVVEAXG

SEQ ID NO: 19119 - protein, 38 aa, Artificial Sequence
  Non-cyclic GFR-binding peptide
  MOD_RES (1), (2), (35), (37): Xaa is C or S
XXVPTKLEPISVLYLDDMGVPTKFKYEEGMSVAEXGXR

SEQ ID NO: 19120 - protein, 35 aa, Artificial Sequence
  Non-cyclic GFR-binding peptide
  MOD_RES (32), (34): Xaa is C or S
VPTELSPISMLYIDENEKVVYKQYEDMVVEGXGXR

SEQ ID NO: 19121 - protein, 44 aa, Artificial Sequence
  Non-cyclic GFR-binding peptide
  MOD_RES (7), (41), (43): Xaa is C or S
  MOD_RES (21), (22), (23), (24), (25): Xaa is A or G
  MOD_RES (26), (27), (28), (29): Xaa is A or G or is absent
HVTKPTXAPTKLEPISVLYLXXXXXXXXXKFKYENMVVRSXGXH

SEQ ID NO: 19122 - protein, 32 aa, Artificial Sequence
  Non-cyclic GFR-binding peptide
  MOD_RES (14), (15), (16), (17), (18): Xaa is A or G
  MOD_RES (19), (20), (21), (22): Xaa is A or G or is absent
VPTKLSPISILYKXXXXXXXXXLKYHYGMAVS

SEQ ID NO: 19123 - protein, 32 aa, Artificial Sequence
  Non-cyclic GFR-binding peptide
  MOD_RES (32), (32): Xaa is C or S
VPARLNAISILYFDAANNVVLKKYRDMVVEAX

SEQ ID NO: 19124 - protein, 40 aa, Artificial Sequence
  Non-cyclic GFR-binding peptide
  MOD_RES (3), (4), (37), (39): Xaa is C or S
  MOD_RES (18), (19), (20), (21), (22): Xaa is A or G
  MOD_RES (23), (24), (25), (26): Xaa is A or G or is absent
APXXVPQALEPISILYLXXXXXXXXXKFKYEMIVRSXKXS

SEQ ID NO: 19125 - protein, 37 aa, Artificial Sequence
  Non-cyclic GFR-binding peptide
  MOD_RES (5), (6): Xaa is C or S
VPKAXXAPTKLEPISVLYLDSSNNVIKFKYENMVVKA

SEQ ID NO: 19126 - protein, 36 aa, Artificial Sequence
  Non-cyclic GFR-binding peptide
  MOD_RES (5), (6): Xaa is C or S
ASKAXXVPTKLSPISILYIDKGVVTYYKQYEGMAVS

SEQ ID NO: 19127 - protein, 35 aa, Artificial Sequence
  Non-cyclic GFR-binding peptide
  MOD_RES (1), (35): Xaa is C or S
  MOD_RES (15), (16), (17), (18), (19): Xaa is A or G
  MOD_RES (20), (21), (22), (23): Xaa is A or G or is absent
XVPTELSPISMLYIXXXXXXXXXYKQYEDMVVEGX

SEQ ID NO: 19128 - protein, 34 aa, Artificial Sequence
  Non-cyclic GFR-binding peptide
  MOD_RES (1), (2): Xaa is C or S
  MOD_RES (16), (17), (18), (19), (20): Xaa is A or G
  MOD_RES (21), (22), (23), (24): Xaa is A or G or is absent
XXVPQDLEPISILYLXXXXXXXXXKFKYEMVVKS

SEQ ID NO: 19129 - protein, 40 aa, Artificial Sequence
  Non-cyclic GFR-binding peptide
  MOD_RES (5), (6), (40): Xaa is C or S
  MOD_RES (20), (21), (22), (23), (24): Xaa is A or G
  MOD_RES (25), (26), (27), (28): Xaa is A or G or is absent
ASKAXXVPTKLSPISILYIXXXXXXXXXYKQYEGMAVSEX

SEQ ID NO: 19130 - protein, 39 aa, Artificial Sequence
  Non-cyclic GFR-binding peptide
  MOD_RES (1), (2), (36), (38): Xaa is C or S
  MOD_RES (16), (17), (18), (19), (20): Xaa is A or G
  MOD_RES (21), (22), (23), (24): Xaa is A or G or is absent
XXVPTKLSPISILYKXXXXXXXXXLKYHYGMAVSEXGXR

SEQ ID NO: 19131 - protein, 38 aa, Artificial Sequence
  Non-cyclic GFR-binding peptide
  MOD_RES (1), (2), (36), (38): Xaa is C or S
  MOD_RES (16), (17), (18), (19), (20): Xaa is A or G
  MOD_RES (21), (22), (23), (24): Xaa is A or G or is absent
XXVPTELSPISMLYIXXXXXXXXXYKQYEDMVVEGXGX

SEQ ID NO: 19132 - protein, 32 aa, Artificial Sequence
  Non-cyclic GFR-binding peptide
  MOD_RES (14), (15), (16), (17), (18): Xaa is A or G
  MOD_RES (19), (20), (21), (22): Xaa is A or G or is absent
APTKLSPISVLYIXXXXXXXXXYKQYENMVVK

SEQ ID NO: 19133 - protein, 36 aa, Artificial Sequence
  Non-cyclic GFR-binding peptide
  MOD_RES (1), (33), (35): Xaa is C or S
XVPARLNAISILYFDAANNVVLKKYRDMVVEAXGXR

SEQ ID NO: 19134 - protein, 33 aa, Artificial Sequence
  Non-cyclic GFR-binding peptide
  MOD_RES (1), (1): Xaa is C or S
  MOD_RES (15), (16), (17), (18), (19): Xaa is A or G
  MOD_RES (20), (21), (22), (23): Xaa is A or G or is absent
XAPTKLSPISVLYIXXXXXXXXXYKQYENMVVK

SEQ ID NO: 19135 - protein, 35 aa, Artificial Sequence
  Non-cyclic GFR-binding peptide
  MOD_RES (1), (33), (35): Xaa is C or S
XAPTKLSPISVLYIDSSNNVIYKQYENMVVKAXGX

SEQ ID NO: 19136 - protein, 32 aa, Artificial Sequence
  Non-cyclic GFR-binding peptide
  MOD_RES (14), (15), (16), (17), (18): Xaa is A or G
  MOD_RES (19), (20), (21), (22): Xaa is A or G or is absent
APTKLSPISVLYIXXXXXXXXXYKQYENMVVR

SEQ ID NO: 19137 - protein, 33 aa, Artificial Sequence
  Non-cyclic GFR-binding peptide
  MOD_RES (1), (1): Xaa is C or S
  MOD_RES (15), (16), (17), (18), (19): Xaa is A or G
  MOD_RES (20), (21), (22), (23): Xaa is A or G or is absent
XAPTKLSPISVLYIXXXXXXXXXYKQYENMVVR

SEQ ID NO: 19138 - protein, 39 aa, Artificial Sequence
  Non-cyclic GFR-binding peptide
  MOD_RES (4), (5): Xaa is C or S
  MOD_RES (19), (20), (21), (22), (23): Xaa is A or G
  MOD_RES (24), (25), (26), (27): Xaa is A or G or is absent
GKAXXVPTKLSPISVLYIXXXXXXXXXYKQYEEGMSVAE

SEQ ID NO: 19139 - protein, 36 aa, Artificial Sequence
  Non-cyclic GFR-binding peptide
  MOD_RES (2), (36): Xaa is C or S
  MOD_RES (16), (17), (18), (19), (20): Xaa is A or G
  MOD_RES (21), (22), (23), (24): Xaa is A or G or is absent
TXAPTKLEPISVLYLXXXXXXXXXKFKYENMVVRSX

SEQ ID NO: 19140 - protein, 33 aa, Artificial Sequence
  Non-cyclic GFR-binding peptide
  MOD_RES (14), (15), (16), (17), (18): Xaa is A or G
  MOD_RES (19), (20), (21), (22): Xaa is A or G or is absent
APTKLEPISVLYLXXXXXXXXXKFKYENMVVKA

SEQ ID NO: 19141 - protein, 39 aa, Artificial Sequence
  Non-cyclic GFR-binding peptide
  MOD_RES (5), (6): Xaa is C or S
  MOD_RES (20), (21), (22), (23), (24): Xaa is A or G
  MOD_RES (25), (26), (27), (28): Xaa is A or G or is absent
ASKAXXVPTKLNAISILYFXXXXXXXXXLKKYRGMAVSE

SEQ ID NO: 19142 - protein, 39 aa, Artificial Sequence
  Non-cyclic GFR-binding peptide
  MOD_RES (5), (6), (38): Xaa is C or S
VPKAXXAPTKLSPISVLYIDSSNNVIYKQYENMVVKAXG

SEQ ID NO: 19143 - protein, 32 aa, Artificial Sequence
  Non-cyclic GFR-binding peptide
  MOD_RES (1), (1): Xaa is C or S
XAPTKLEPISVLYLDSSNNVIKFKYENMVVKA

SEQ ID NO: 19144 - protein, 39 aa, Artificial Sequence
  Non-cyclic GFR-binding peptide
  MOD_RES (4), (38): Xaa is C or S
  MOD_RES (18), (19), (20), (21), (22): Xaa is A or G
  MOD_RES (23), (24), (25), (26): Xaa is A or G or is absent
KPTXAPTKLEPISVLYLXXXXXXXXXKFKYENMVVRSXG

SEQ ID NO: 19145 - protein, 39 aa, Artificial Sequence
  Non-cyclic GFR-binding peptide
  MOD_RES (4), (5): Xaa is C or S
  MOD_RES (19), (20), (21), (22), (23): Xaa is A or G
  MOD_RES (24), (25), (26), (27): Xaa is A or G or is absent
GKAXXVPTKLEPISVLYLXXXXXXXXXKFKYEEGMSVAE

SEQ ID NO: 19146 - protein, 37 aa, Artificial Sequence
  Non-cyclic GFR-binding peptide
  MOD_RES (7), (7): Xaa is C or S
HVTKPTXAPTKLEPISVLYLDDSSNVIKFKYENMVVR

SEQ ID NO: 19147 - protein, 40 aa, Artificial Sequence
  Non-cyclic GFR-binding peptide
  MOD_RES (3), (4), (39): Xaa is C or S
  MOD_RES (18), (19), (20), (21), (22): Xaa is A or G
  MOD_RES (23), (24), (25), (26): Xaa is A or G or is absent
KAXXVPTKLSPISVLYIXXXXXXXXXYKQYEEGMSVAEXG

SEQ ID NO: 19148 - protein, 32 aa, Artificial Sequence
  Non-cyclic GFR-binding peptide
  MOD_RES (1), (2): Xaa is C or S
XXVPQALSPISILYIVGRKPKVYKQYEMIVRS

SEQ ID NO: 19149 - protein, 35 aa, Artificial Sequence
  Non-cyclic GFR-binding peptide
  MOD_RES (3), (4): Xaa is C or S
KAXXAPTKLSPISVLYIDSSNNVIYKQYENMVVKA

SEQ ID NO: 19150 - protein, 40 aa, Artificial Sequence
  Non-cyclic GFR-binding peptide
  MOD_RES (6), (7), (39): Xaa is C or S
AAPASXXVPARLEPISILYLDAANNVVKFKYEDMVVEAXG

SEQ ID NO: 19151 - protein, 35 aa, Artificial Sequence
  Non-cyclic GFR-binding peptide
  MOD_RES (2), (3): Xaa is C or S
  MOD_RES (17), (18), (19), (20), (21): Xaa is A or G
  MOD_RES (22), (23), (24), (25): Xaa is A or G or is absent
AXXAPTKLEPISVLYLXXXXXXXXXKFKYENMVVK

SEQ ID NO: 19152 - protein, 40 aa, Artificial Sequence
  Non-cyclic GFR-binding peptide
  MOD_RES (5), (6), (37), (39): Xaa is C or S
SAAPXXVPQALEPISILYLVGRKPKVKFKYEMIVRSXKXS

SEQ ID NO: 19153 - protein, 39 aa, Artificial Sequence
  Non-cyclic GFR-binding peptide
  MOD_RES (4), (5), (39): Xaa is C or S
  MOD_RES (19), (20), (21), (22), (23): Xaa is A or G
  MOD_RES (24), (25), (26), (27): Xaa is A or G or is absent
SKAXXVPTKLSPISILYKXXXXXXXXXLKYHYGMAVSEX

SEQ ID NO: 19154 - protein, 39 aa, Artificial Sequence
  Non-cyclic GFR-binding peptide
  MOD_RES (2), (3), (37), (39): Xaa is C or S
  MOD_RES (17), (18), (19), (20), (21): Xaa is A or G
  MOD_RES (22), (23), (24), (25): Xaa is A or G or is absent
AXXVPTELSPISMLYIXXXXXXXXXYKQYEEMVVEGXGX

SEQ ID NO: 19155 - protein, 32 aa, Artificial Sequence
  Non-cyclic GFR-binding peptide
  MOD_RES (31), (31): Xaa is C or S
VPQDLEPISILYLVGRTPKVKFKYEMVVKSXK

SEQ ID NO: 19156 - protein, 38 aa, Artificial Sequence
  Non-cyclic GFR-binding peptide
  MOD_RES (4), (5): Xaa is C or S
  MOD_RES (19), (20), (21), (22), (23): Xaa is A or G
  MOD_RES (24), (25), (26), (27): Xaa is A or G or is absent
SKAXXVPTKLNAISILYFXXXXXXXXXLKKYRGMAVSE

SEQ ID NO: 19157 - protein, 39 aa, Artificial Sequence
  Non-cyclic GFR-binding peptide
  MOD_RES (1), (2), (36), (38): Xaa is C or S
  MOD_RES (16), (17), (18), (19), (20): Xaa is A or G
  MOD_RES (21), (22), (23), (24): Xaa is A or G or is absent
XXVPTELEPISMLYLXXXXXXXXXKFKYEDMVVEGXGXR

SEQ ID NO: 19158 - protein, 36 aa, Artificial Sequence
  Non-cyclic GFR-binding peptide
  MOD_RES (5), (6): Xaa is C or S
VPKAXXAPTKLEPISVLYLDSSNNVIKFKYENMVVK

SEQ ID NO: 19159 - protein, 36 aa, Artificial Sequence
  Non-cyclic GFR-binding peptide
  MOD_RES (3), (4): Xaa is C or S
  MOD_RES (18), (19), (20), (21), (22): Xaa is A or G
  MOD_RES (23), (24), (25), (26): Xaa is A or G or is absent
KPXXAPTQLEPISVLYLXXXXXXXXXKFKYENMVVR

SEQ ID NO: 19160 - protein, 42 aa, Artificial Sequence
  Non-cyclic GFR-binding peptide
  MOD_RES (6), (7), (40), (42): Xaa is C or S
  MOD_RES (21), (22), (23), (24), (25): Xaa is A or G
  MOD_RES (26), (27), (28), (29): Xaa is A or G or is absent
ASAAPXXVPQALEPISILYLXXXXXXXXXKFKYEMIVRSXKX

SEQ ID NO: 19161 - protein, 39 aa, Artificial Sequence
  Non-cyclic GFR-binding peptide
  MOD_RES (1), (2), (36), (38): Xaa is C or S
  MOD_RES (16), (17), (18), (19), (20): Xaa is A or G
  MOD_RES (21), (22), (23), (24): Xaa is A or G or is absent
XXVPTELSPISMLYIXXXXXXXXXYKQYEEMVVEGXGXR

SEQ ID NO: 19162 - protein, 40 aa, Artificial Sequence
  Non-cyclic GFR-binding peptide
  MOD_RES (5), (6), (40): Xaa is C or S
  MOD_RES (20), (21), (22), (23), (24): Xaa is A or G
  MOD_RES (25), (26), (27), (28): Xaa is A or G or is absent
IPKAXXVPTELSPISMLYIXXXXXXXXXYKQYEDMVVEGX

SEQ ID NO: 19163 - protein, 38 aa, Artificial Sequence
  Non-cyclic GFR-binding peptide
  MOD_RES (4), (5), (37): Xaa is C or S
PKPXXAPTKLSPISVLYIDDSSNVIYKQYENMVVRSXG

SEQ ID NO: 19164 - protein, 40 aa, Artificial Sequence
  Non-cyclic GFR-binding peptide
  MOD_RES (4), (5), (40): Xaa is C or S
  MOD_RES (19), (20), (21), (22), (23): Xaa is A or G
  MOD_RES (24), (25), (26), (27): Xaa is A or G or is absent
GKAXXVPTKLSPISVLYIXXXXXXXXXYKQYEEGMSVAEX

SEQ ID NO: 19165 - protein, 36 aa, Artificial Sequence
  Non-cyclic GFR-binding peptide
  MOD_RES (4), (5): Xaa is C or S
PKPXXAPTQLSPISVLYIDDSSNVIYKQYENMVVRA

SEQ ID NO: 19166 - protein, 42 aa, Artificial Sequence
  Non-cyclic GFR-binding peptide
  MOD_RES (5), (6), (40), (42): Xaa is C or S
  MOD_RES (20), (21), (22), (23), (24): Xaa is A or G
  MOD_RES (25), (26), (27), (28): Xaa is A or G or is absent
ASKAXXVPTKLSPISILYIXXXXXXXXXYKQYEGMAVSEXGX

SEQ ID NO: 19167 - protein, 39 aa, Artificial Sequence
  Non-cyclic GFR-binding peptide
  MOD_RES (5), (6): Xaa is C or S
  MOD_RES (20), (21), (22), (23), (24): Xaa is A or G
  MOD_RES (25), (26), (27), (28): Xaa is A or G or is absent
APASXXVPARLEPISILYLXXXXXXXXXKFKYEDMVVEA

SEQ ID NO: 19168 - protein, 33 aa, Artificial Sequence
  Non-cyclic GFR-binding peptide
  MOD_RES (1), (32): Xaa is C or S
XVPQDLSPISILYIVGRTPKVYKQYEMVVKSXK

SEQ ID NO: 19169 - protein, 37 aa, Artificial Sequence
  Non-cyclic GFR-binding peptide
  MOD_RES (4), (5), (37): Xaa is C or S
PKAXXAPTKLSPISVLYIDSSNNVIYKQYENMVVKAX

SEQ ID NO: 19170 - protein, 34 aa, Artificial Sequence
  Non-cyclic GFR-binding peptide
  MOD_RES (1), (2), (33): Xaa is C or S
XXVPQDLEPISILYLVGRTPKVKFKYEMVVKSXK

SEQ ID NO: 19171 - protein, 36 aa, Artificial Sequence
  Non-cyclic GFR-binding peptide
  MOD_RES (33), (35): Xaa is C or S
  MOD_RES (14), (15), (16), (17), (18): Xaa is A or G
  MOD_RES (19), (20), (21), (22): Xaa is A or G or is absent
VPQALSPISILYIXXXXXXXXXYKQYEMIVRSXKXS

SEQ ID NO: 19172 - protein, 41 aa, Artificial Sequence
  Non-cyclic GFR-binding peptide
  MOD_RES (6), (38), (40): Xaa is C or S
VTKPTXAPTKLEPISVLYLDDSSNVIKFKYENMVVRSXGXH

SEQ ID NO: 19173 - protein, 42 aa, Artificial Sequence
  Non-cyclic GFR-binding peptide
  MOD_RES (6), (7), (39), (41): Xaa is C or S
KASKAXXVPTKLNAISILYFDKGVVTYLKKYRGMAVSEXGXR

SEQ ID NO: 19174 - protein, 38 aa, Artificial Sequence
  Non-cyclic GFR-binding peptide
  MOD_RES (5), (6), (37): Xaa is C or S
SASPXXVSQDLSPISILYIIGKTPKIYKQYEMIVKSXK

SEQ ID NO: 19175 - protein, 36 aa, Artificial Sequence
  Non-cyclic GFR-binding peptide
  MOD_RES (34), (36): Xaa is C or S
  MOD_RES (14), (15), (16), (17), (18): Xaa is A or G
  MOD_RES (19), (20), (21), (22): Xaa is A or G or is absent
VPARLSPISILYKXXXXXXXXXLKYHYDMVVEAXGX

SEQ ID NO: 19176 - protein, 39 aa, Artificial Sequence
  Non-cyclic GFR-binding peptide
  MOD_RES (6), (7): Xaa is C or S
  MOD_RES (21), (22), (23), (24), (25): Xaa is A or G
  MOD_RES (26), (27), (28), (29): Xaa is A or G or is absent
KASKAXXVPTKLSPISILYIXXXXXXXXXYKQYEGMAVS

SEQ ID NO: 19177 - protein, 37 aa, Artificial Sequence
  Non-cyclic GFR-binding peptide
  MOD_RES (2), (3), (36): Xaa is C or S
  MOD_RES (17), (18), (19), (20), (21): Xaa is A or G
  MOD_RES (22), (23), (24), (25): Xaa is A or G or is absent
PXXVPQALSPISILYIXXXXXXXXXYKQYEMIVRSXK

SEQ ID NO: 19178 - protein, 39 aa, Artificial Sequence
  Non-cyclic GFR-binding peptide
  MOD_RES (3), (4), (37), (39): Xaa is C or S
KAXXVPTKLEPISVLYLDDMGVPTKFKYEEGMSVAEXGX

SEQ ID NO: 19179 - protein, 39 aa, Artificial Sequence
  Non-cyclic GFR-binding peptide
  MOD_RES (5), (6), (38): Xaa is C or S
ASKAXXVPTKLNAISILYFDKGVVTYLKKYRGMAVSEXG

SEQ ID NO: 19180 - protein, 34 aa, Artificial Sequence
  Non-cyclic GFR-binding peptide
  MOD_RES (3), (4): Xaa is C or S
SPXXVPQDLEPISILYLVGRTPKVKFKYEMVVKS

SEQ ID NO: 19181 - protein, 41 aa, Artificial Sequence
  Non-cyclic GFR-binding peptide
  MOD_RES (3), (4), (38), (40): Xaa is C or S
  MOD_RES (18), (19), (20), (21), (22): Xaa is A or G
  MOD_RES (23), (24), (25), (26): Xaa is A or G or is absent
KAXXVPTKLNAISILYFXXXXXXXXXLKKYRGMAVSEXGXR

SEQ ID NO: 19182 - protein, 40 aa, Artificial Sequence
  Non-cyclic GFR-binding peptide
  MOD_RES (4), (5), (37), (39): Xaa is C or S
PKAXXAPTKLEPISVLYLDSSNNVIKFKYENMVVKAXGXH

SEQ ID NO: 19183 - protein, 41 aa, Artificial Sequence
  Non-cyclic GFR-binding peptide
  MOD_RES (4), (5), (39), (41): Xaa is C or S
  MOD_RES (19), (20), (21), (22), (23): Xaa is A or G
  MOD_RES (24), (25), (26), (27): Xaa is A or G or is absent
SKAXXVPTKLSPISILYKXXXXXXXXXLKYHYGMAVSEXGX

SEQ ID NO: 19184 - protein, 36 aa, Artificial Sequence
  Non-cyclic GFR-binding peptide
  MOD_RES (1), (34), (36): Xaa is C or S
XVPTKLEPISVLYLDDMGVPTKFKYEEGMSVAEXGX

SEQ ID NO: 19185 - protein, 40 aa, Artificial Sequence
  Non-cyclic GFR-binding peptide
  MOD_RES (3), (4), (38), (40): Xaa is C or S
  MOD_RES (18), (19), (20), (21), (22): Xaa is A or G
  MOD_RES (23), (24), (25), (26): Xaa is A or G or is absent
KAXXVPTKLSPISILYIXXXXXXXXXYKQYEGMAVSEXGX

SEQ ID NO: 19186 - protein, 33 aa, Artificial Sequence
  Non-cyclic GFR-binding peptide
  MOD_RES (2), (3): Xaa is C or S
PXXVPQDLSPISILYIVGRTPKVYKQYEMVVKS

SEQ ID NO: 19187 - protein, 36 aa, Artificial Sequence
  Non-cyclic GFR-binding peptide
  MOD_RES (5), (6): Xaa is C or S
APASXXVPARLEPISILYLDAANNVVKFKYEDMVVE

SEQ ID NO: 19188 - protein, 39 aa, Artificial Sequence
  Non-cyclic GFR-binding peptide
  MOD_RES (2), (3), (37), (39): Xaa is C or S
  MOD_RES (17), (18), (19), (20), (21): Xaa is A or G
  MOD_RES (22), (23), (24), (25): Xaa is A or G or is absent
AXXVPTELEPISMLYLXXXXXXXXXKFKYEEMVVEGXGX

SEQ ID NO: 19189 - protein, 41 aa, Artificial Sequence
  Non-cyclic GFR-binding peptide
  MOD_RES (5), (6), (38), (40): Xaa is C or S
VPKPXXAPTKLEPISVLYLDDSSNVIKFKYENMVVRSXGXH

SEQ ID NO: 19190 - protein, 40 aa, Artificial Sequence
  Non-cyclic GFR-binding peptide
  MOD_RES (5), (6), (40): Xaa is C or S
  MOD_RES (20), (21), (22), (23), (24): Xaa is A or G
  MOD_RES (25), (26), (27), (28): Xaa is A or G or is absent
APASXXVPARLEPISILYLXXXXXXXXXKFKYEDMVVEAX

SEQ ID NO: 19191 - protein, 39 aa, Artificial Sequence
  Non-cyclic GFR-binding peptide
  MOD_RES (5), (6), (39): Xaa is C or S
  MOD_RES (20), (21), (22), (23), (24): Xaa is A or G
  MOD_RES (25), (26), (27), (28): Xaa is A or G or is absent
SASPXXVSQDLEPISILYLXXXXXXXXXKFKYEMIVKSX

SEQ ID NO: 19192 - protein, 37 aa, Artificial Sequence
  Non-cyclic GFR-binding peptide
  MOD_RES (34), (36): Xaa is C or S
  MOD_RES (14), (15), (16), (17), (18): Xaa is A or G
  MOD_RES (19), (20), (21), (22): Xaa is A or G or is absent
APTKLSPISVLYIXXXXXXXXXYKQYENMVVRSXGXH

SEQ ID NO: 19193 - protein, 37 aa, Artificial Sequence
  Non-cyclic GFR-binding peptide
  MOD_RES (1), (2), (34), (36): Xaa is C or S
XXAPTQLEPISVLYLDDSSNVIKFKYENMVVRAXGXH

SEQ ID NO: 19194 - protein, 36 aa, Artificial Sequence
  Non-cyclic GFR-binding peptide
  MOD_RES (1), (35): Xaa is C or S
  MOD_RES (15), (16), (17), (18), (19): Xaa is A or G
  MOD_RES (20), (21), (22), (23): Xaa is A or G or is absent
XVPTKLNAISILYFXXXXXXXXXLKKYRGMAVSEXG

SEQ ID NO: 19195 - protein, 39 aa, Artificial Sequence
  Non-cyclic GFR-binding peptide
  MOD_RES (4), (5), (37), (39): Xaa is C or S
SKAXXVPTKLNAISILYFDKGVVTYLKKYRGMAVSEXGX

SEQ ID NO: 19196 - protein, 33 aa, Artificial Sequence
  Non-cyclic GFR-binding peptide
  MOD_RES (2), (3): Xaa is C or S
PXXVSQDLSPISILYIIGKTPKIYKQYEMIVKS

SEQ ID NO: 19197 - protein, 34 aa, Artificial Sequence
  Non-cyclic GFR-binding peptide
  MOD_RES (1), (2): Xaa is C or S
  MOD_RES (16), (17), (18), (19), (20): Xaa is A or G
  MOD_RES (21), (22), (23), (24): Xaa is A or G or is absent
XXVPTKLSPISILYIXXXXXXXXXYKQYEGMAVS

SEQ ID NO: 19198 - protein, 37 aa, Artificial Sequence
  Non-cyclic GFR-binding peptide
  MOD_RES (3), (4), (36): Xaa is C or S
ASXXVPARLSPISILYKDAANNVVLKYHYDMVVEAXG

SEQ ID NO: 19199 - protein, 37 aa, Artificial Sequence
  Non-cyclic GFR-binding peptide
  MOD_RES (2), (3), (36): Xaa is C or S
  MOD_RES (17), (18), (19), (20), (21): Xaa is A or G
  MOD_RES (22), (23), (24), (25): Xaa is A or G or is absent
PXXVSQDLEPISILYLXXXXXXXXXKFKYEMIVKSXK

SEQ ID NO: 19200 - protein, 39 aa, Artificial Sequence
  Non-cyclic GFR-binding peptide
  MOD_RES (4), (5), (39): Xaa is C or S
  MOD_RES (19), (20), (21), (22), (23): Xaa is A or G
  MOD_RES (24), (25), (26), (27): Xaa is A or G or is absent
PKAXXVPTELSPISMLYIXXXXXXXXXYKQYEEMVVEGX

SEQ ID NO: 19201 - protein, 40 aa, Artificial Sequence
  Non-cyclic GFR-binding peptide
  MOD_RES (3), (4), (37), (39): Xaa is C or S
KAXXVPTKLSPISVLYIDDMGVPTYKQYEEGMSVAEXGXR

SEQ ID NO: 19202 - protein, 36 aa, Artificial Sequence
  Non-cyclic GFR-binding peptide
  MOD_RES (2), (3): Xaa is C or S
  MOD_RES (17), (18), (19), (20), (21): Xaa is A or G
  MOD_RES (22), (23), (24), (25): Xaa is A or G or is absent
AXXAPTKLEPISVLYLXXXXXXXXXKFKYENMVVKA

SEQ ID NO: 19203 - protein, 37 aa, Artificial Sequence
  Non-cyclic GFR-binding peptide
  MOD_RES (6), (7): Xaa is C or S
KASKAXXVPTKLSPISILYKDKGVVTYLKYHYGMAVS

SEQ ID NO: 19204 - protein, 39 aa, Artificial Sequence
  Non-cyclic GFR-binding peptide
  MOD_RES (2), (3), (36), (38): Xaa is C or S
  MOD_RES (17), (18), (19), (20), (21): Xaa is A or G
  MOD_RES (22), (23), (24), (25): Xaa is A or G or is absent
PXXVPQALSPISILYIXXXXXXXXXYKQYEMIVRSXKXS

SEQ ID NO: 19205 - protein, 36 aa, Artificial Sequence
  Non-cyclic GFR-binding peptide
  MOD_RES (1), (34), (36): Xaa is C or S
XVPTKLSPISVLYIDDMGVPTYKQYEEGMSVAEXGX

SEQ ID NO: 19206 - protein, 35 aa, Artificial Sequence
  Non-cyclic GFR-binding peptide
  MOD_RES (2), (3): Xaa is C or S
  MOD_RES (17), (18), (19), (20), (21): Xaa is A or G
  MOD_RES (22), (23), (24), (25): Xaa is A or G or is absent
AXXVPTELEPISMLYLXXXXXXXXXKFKYEEMVVE

SEQ ID NO: 19207 - protein, 38 aa, Artificial Sequence
  Non-cyclic GFR-binding peptide
  MOD_RES (5), (5): Xaa is C or S
  MOD_RES (19), (20), (21), (22), (23): Xaa is A or G
  MOD_RES (24), (25), (26), (27): Xaa is A or G or is absent
TKPTXAPTKLEPISVLYLXXXXXXXXXKFKYENMVVRS

SEQ ID NO: 19208 - protein, 39 aa, Artificial Sequence
  Non-cyclic GFR-binding peptide
  MOD_RES (2), (36), (38): Xaa is C or S
  MOD_RES (16), (17), (18), (19), (20): Xaa is A or G
  MOD_RES (21), (22), (23), (24): Xaa is A or G or is absent
TXAPTKLSPISVLYIXXXXXXXXXYKQYENMVVRSXGXH

SEQ ID NO: 19209 - protein, 37 aa, Artificial Sequence
  Non-cyclic GFR-binding peptide
  MOD_RES (34), (36): Xaa is C or S
  MOD_RES (14), (15), (16), (17), (18): Xaa is A or G
  MOD_RES (19), (20), (21), (22): Xaa is A or G or is absent
VPTELEPISMLYLXXXXXXXXXKFKYEDMVVEGXGXR

SEQ ID NO: 19210 - protein, 32 aa, Artificial Sequence
  Non-cyclic GFR-binding peptide
  MOD_RES (1), (32): Xaa is C or S
XVPQDLEPISILYLVGRTPKVKFKYEMVVKSX

SEQ ID NO: 19211 - protein, 38 aa, Artificial Sequence
  Non-cyclic GFR-binding peptide
  MOD_RES (6), (7): Xaa is C or S
AAPASXXVPARLSPISILYKDAANNVVLKYHYDMVVEA

SEQ ID NO: 19212 - protein, 36 aa, Artificial Sequence
  Non-cyclic GFR-binding peptide
  MOD_RES (4), (5): Xaa is C or S
PKPXXAPTKLEPISVLYLDDSSNVIKFKYENMVVRS

SEQ ID NO: 19213 - protein, 33 aa, Artificial Sequence
  Non-cyclic GFR-binding peptide
  MOD_RES (32), (32): Xaa is C or S
VPARLSPISILYKDAANNVVLKYHYDMVVEAXG

SEQ ID NO: 19214 - protein, 38 aa, Artificial Sequence
  Non-cyclic GFR-binding peptide
  MOD_RES (3), (4), (35), (37): Xaa is C or S
SPXXVPQDLEPISILYLVGRTPKVKFKYEMVVKSXKXS

SEQ ID NO: 19215 - protein, 38 aa, Artificial Sequence
  Non-cyclic GFR-binding peptide
  MOD_RES (2), (3), (37): Xaa is C or S
  MOD_RES (17), (18), (19), (20), (21): Xaa is A or G
  MOD_RES (22), (23), (24), (25): Xaa is A or G or is absent
SXXVPARLNAISILYFXXXXXXXXXLKKYRDMVVEAXG

SEQ ID NO: 19216 - protein, 39 aa, Artificial Sequence
  Non-cyclic GFR-binding peptide
  MOD_RES (5), (37), (39): Xaa is C or S
TKPTXAPTKLEPISVLYLDDSSNVIKFKYENMVVRSXGX

SEQ ID NO: 19217 - protein, 36 aa, Artificial Sequence
  Non-cyclic GFR-binding peptide
  MOD_RES (3), (4): Xaa is C or S
  MOD_RES (18), (19), (20), (21), (22): Xaa is A or G
  MOD_RES (23), (24), (25), (26): Xaa is A or G or is absent
ASXXVPARLEPISILYLXXXXXXXXXKFKYEDMVVE

SEQ ID NO: 19218 - protein, 41 aa, Artificial Sequence
  Non-cyclic GFR-binding peptide
  MOD_RES (5), (6), (40): Xaa is C or S
  MOD_RES (20), (21), (22), (23), (24): Xaa is A or G
  MOD_RES (25), (26), (27), (28): Xaa is A or G or is absent
ASKAXXVPTKLNAISILYFXXXXXXXXXLKKYRGMAVSEXG

SEQ ID NO: 19219 - protein, 34 aa, Artificial Sequence
  Non-cyclic GFR-binding peptide
  MOD_RES (3), (3): Xaa is C or S
PTXAPTKLSPISVLYIDDSSNVIYKQYENMVVRS

SEQ ID NO: 19220 - protein, 35 aa, Artificial Sequence
  Non-cyclic GFR-binding peptide
  MOD_RES (4), (5): Xaa is C or S
PKAXXVPTELSPISMLYIDENEKVVYKQYEDMVVE

SEQ ID NO: 19221 - protein, 38 aa, Artificial Sequence
  Non-cyclic GFR-binding peptide
  MOD_RES (1), (2), (36), (38): Xaa is C or S
  MOD_RES (16), (17), (18), (19), (20): Xaa is A or G
  MOD_RES (21), (22), (23), (24): Xaa is A or G or is absent
XXVPARLSPISILYKXXXXXXXXXLKYHYDMVVEAXGX

SEQ ID NO: 19222 - protein, 36 aa, Artificial Sequence
  Non-cyclic GFR-binding peptide
  MOD_RES (1), (2), (36): Xaa is C or S
  MOD_RES (16), (17), (18), (19), (20): Xaa is A or G
  MOD_RES (21), (22), (23), (24): Xaa is A or G or is absent
XXAPTKLEPISVLYLXXXXXXXXXKFKYENMVVRSX

SEQ ID NO: 19223 - protein, 44 aa, Artificial Sequence
  Non-cyclic GFR-binding peptide
  MOD_RES (6), (7), (41), (43): Xaa is C or S
  MOD_RES (21), (22), (23), (24), (25): Xaa is A or G
  MOD_RES (26), (27), (28), (29): Xaa is A or G or is absent
TVPKPXXAPTQLSPISVLYIXXXXXXXXXYKQYENMVVRAXGXH

SEQ ID NO: 19224 - protein, 44 aa, Artificial Sequence
  Non-cyclic GFR-binding peptide
  MOD_RES (6), (7), (41), (43): Xaa is C or S
  MOD_RES (21), (22), (23), (24), (25): Xaa is A or G
  MOD_RES (26), (27), (28), (29): Xaa is A or G or is absent
KASKAXXVPTKLSPISILYIXXXXXXXXXYKQYEGMAVSEXGXR

SEQ ID NO: 19225 - protein, 37 aa, Artificial Sequence
  Non-cyclic GFR-binding peptide
  MOD_RES (1), (36): Xaa is C or S
  MOD_RES (15), (16), (17), (18), (19): Xaa is A or G
  MOD_RES (20), (21), (22), (23): Xaa is A or G or is absent
XVPTKLSPISVLYIXXXXXXXXXYKQYEEGMSVAEXG

SEQ ID NO: 19226 - protein, 40 aa, Artificial Sequence
  Non-cyclic GFR-binding peptide
  MOD_RES (2), (3), (37), (39): Xaa is C or S
  MOD_RES (17), (18), (19), (20), (21): Xaa is A or G
  MOD_RES (22), (23), (24), (25): Xaa is A or G or is absent
AXXVPTELSPISMLYIXXXXXXXXXYKQYEEMVVEGXGXR

SEQ ID NO: 19227 - protein, 32 aa, Artificial Sequence
  Non-cyclic GFR-binding peptide
  MOD_RES (31), (31): Xaa is C or S
VPQDLSPISILYIVGRTPKVYKQYEMVVKSXK

SEQ ID NO: 19228 - protein, 37 aa, Artificial Sequence
  Non-cyclic GFR-binding peptide
  MOD_RES (3), (4), (37): Xaa is C or S
KAXXVPTKLSPISVLYIDDMGVPTYKQYEEGMSVAEX

SEQ ID NO: 19229 - protein, 35 aa, Artificial Sequence
  Non-cyclic GFR-binding peptide
  MOD_RES (1), (2), (34): Xaa is C or S
XXAPTKLSPISVLYIDSSNNVIYKQYENMVVKAXG

SEQ ID NO: 19230 - protein, 43 aa, Artificial Sequence
  Non-cyclic GFR-binding peptide
  MOD_RES (4), (5), (40), (42): Xaa is C or S
  MOD_RES (19), (20), (21), (22), (23): Xaa is A or G
  MOD_RES (24), (25), (26), (27): Xaa is A or G or is absent
GKAXXVPTKLSPISVLYIXXXXXXXXXYKQYEEGMSVAEXGXR

SEQ ID NO: 19231 - protein, 31 aa, Artificial Sequence
  Non-cyclic GFR-binding peptide
  MOD_RES (1), (1): Xaa is C or S
XVPTKLSPISILYKDKGVVTYLKYHYGMAVS

SEQ ID NO: 19232 - protein, 37 aa, Artificial Sequence
  Non-cyclic GFR-binding peptide
  MOD_RES (2), (3), (37): Xaa is C or S
  MOD_RES (17), (18), (19), (20), (21): Xaa is A or G
  MOD_RES (22), (23), (24), (25): Xaa is A or G or is absent
PXXAPTKLEPISVLYLXXXXXXXXXKFKYENMVVRSX

SEQ ID NO: 19233 - protein, 35 aa, Artificial Sequence
  Non-cyclic GFR-binding peptide
  MOD_RES (34), (34): Xaa is C or S
  MOD_RES (14), (15), (16), (17), (18): Xaa is A or G
  MOD_RES (19), (20), (21), (22): Xaa is A or G or is absent
VPARLNAISILYFXXXXXXXXXLKKYRDMVVEAXG

SEQ ID NO: 19234 - protein, 36 aa, Artificial Sequence
  Non-cyclic GFR-binding peptide
  MOD_RES (1), (34), (36): Xaa is C or S
  MOD_RES (15), (16), (17), (18), (19): Xaa is A or G
  MOD_RES (20), (21), (22), (23): Xaa is A or G or is absent
XVPQALEPISILYLXXXXXXXXXKFKYEMIVRSXKX

SEQ ID NO: 19235 - protein, 37 aa, Artificial Sequence
  Non-cyclic GFR-binding peptide
  MOD_RES (1), (2), (34), (36): Xaa is C or S
XXAPTQLSPISVLYIDDSSNVIYKQYENMVVRAXGXH

SEQ ID NO: 19236 - protein, 35 aa, Artificial Sequence
  Non-cyclic GFR-binding peptide
  MOD_RES (1), (33), (35): Xaa is C or S
XVPTELEPISMLYLDENEKVVKFKYEDMVVEGXGX

SEQ ID NO: 19237 - protein, 44 aa, Artificial Sequence
  Non-cyclic GFR-binding peptide
  MOD_RES (6), (7), (41), (43): Xaa is C or S
  MOD_RES (21), (22), (23), (24), (25): Xaa is A or G
  MOD_RES (26), (27), (28), (29): Xaa is A or G or is absent
AAPASXXVPARLSPISILYKXXXXXXXXXLKYHYDMVVEAXGXR

SEQ ID NO: 19238 - protein, 37 aa, Artificial Sequence
  Non-cyclic GFR-binding peptide
  MOD_RES (4), (5), (36): Xaa is C or S
AAPXXVPQALSPISILYIVGRKPKVYKQYEMIVRSXK

SEQ ID NO: 19239 - protein, 38 aa, Artificial Sequence
  Non-cyclic GFR-binding peptide
  MOD_RES (1), (35), (37): Xaa is C or S
  MOD_RES (15), (16), (17), (18), (19): Xaa is A or G
  MOD_RES (20), (21), (22), (23): Xaa is A or G or is absent
XVPARLSPISILYKXXXXXXXXXLKYHYDMVVEAXGXR

SEQ ID NO: 19240 - protein, 34 aa, Artificial Sequence
  Non-cyclic GFR-binding peptide
  MOD_RES (1), (32), (34): Xaa is C or S
XVPQDLEPISILYLVGRTPKVKFKYEMVVKSXKX

SEQ ID NO: 19241 - protein, 32 aa, Artificial Sequence
  Non-cyclic GFR-binding peptide
  MOD_RES (1), (2): Xaa is C or S
XXVPTKLSPISILYKDKGVVTYLKYHYGMAVS

SEQ ID NO: 19242 - protein, 37 aa, Artificial Sequence
  Non-cyclic GFR-binding peptide
  MOD_RES (4), (5), (37): Xaa is C or S
PKAXXAPTKLEPISVLYLDSSNNVIKFKYENMVVKAX

SEQ ID NO: 19243 - protein, 34 aa, Artificial Sequence
  Non-cyclic GFR-binding peptide
  MOD_RES (1), (33): Xaa is C or S
XAPTKLEPISVLYLDSSNNVIKFKYENMVVKAXG

SEQ ID NO: 19244 - protein, 34 aa, Artificial Sequence
  Non-cyclic GFR-binding peptide
  MOD_RES (1), (2): Xaa is C or S
  MOD_RES (16), (17), (18), (19), (20): Xaa is A or G
  MOD_RES (21), (22), (23), (24): Xaa is A or G or is absent
XXAPTQLEPISVLYLXXXXXXXXXKFKYENMVVR

SEQ ID NO: 19245 - protein, 36 aa, Artificial Sequence
  Non-cyclic GFR-binding peptide
  MOD_RES (1), (2), (34), (36): Xaa is C or S
XXVPTKLSPISILYKDKGVVTYLKYHYGMAVSEXGX

SEQ ID NO: 19246 - protein, 36 aa, Artificial Sequence
  Non-cyclic GFR-binding peptide
  MOD_RES (3), (4), (36): Xaa is C or S
KAXXAPTKLEPISVLYLDSSNNVIKFKYENMVVKAX

SEQ ID NO: 19247 - protein, 42 aa, Artificial Sequence
  Non-cyclic GFR-binding peptide
  MOD_RES (6), (7), (39), (41): Xaa is C or S
SIPKAXXVPTELSPISMLYIDEYDKVVYKQYEEMVVEGXGXR

SEQ ID NO: 19248 - protein, 36 aa, Artificial Sequence
  Non-cyclic GFR-binding peptide
  MOD_RES (1), (2), (34), (36): Xaa is C or S
XXAPTKLEPISVLYLDSSNNVIKFKYENMVVKAXGX

SEQ ID NO: 19249 - protein, 36 aa, Artificial Sequence
  Non-cyclic GFR-binding peptide
  MOD_RES (3), (4): Xaa is C or S
  MOD_RES (18), (19), (20), (21), (22): Xaa is A or G
  MOD_RES (23), (24), (25), (26): Xaa is A or G or is absent
SPXXVPQDLSPISILYIXXXXXXXXXYKQYEMVVKS

SEQ ID NO: 19250 - protein, 41 aa, Artificial Sequence
  Non-cyclic GFR-binding peptide
  MOD_RES (6), (7), (39), (41): Xaa is C or S
TVPKPXXAPTQLEPISVLYLDDSSNVIKFKYENMVVRAXGX

SEQ ID NO: 19251 - protein, 34 aa, Artificial Sequence
  Non-cyclic GFR-binding peptide
  MOD_RES (1), (32), (34): Xaa is C or S
XVSQDLEPISILYLIGKTPKIKFKYEMIVKSXKX

SEQ ID NO: 19252 - protein, 36 aa, Artificial Sequence
  Non-cyclic GFR-binding peptide
  MOD_RES (3), (4), (36): Xaa is C or S
KAXXVPTKLSPISILYIDKGVVTYYKQYEGMAVSEX

SEQ ID NO: 19253 - protein, 33 aa, Artificial Sequence
  Non-cyclic GFR-binding peptide
  MOD_RES (1), (2): Xaa is C or S
XXAPTKLEPISVLYLDSSNNVIKFKYENMVVKA

SEQ ID NO: 19254 - protein, 41 aa, Artificial Sequence
  Non-cyclic GFR-binding peptide
  MOD_RES (6), (7), (41): Xaa is C or S
  MOD_RES (21), (22), (23), (24), (25): Xaa is A or G
  MOD_RES (26), (27), (28), (29): Xaa is A or G or is absent
AAPASXXVPARLEPISILYLXXXXXXXXXKFKYEDMVVEAX

SEQ ID NO: 19255 - protein, 38 aa, Artificial Sequence
  Non-cyclic GFR-binding peptide
  MOD_RES (1), (2), (36), (38): Xaa is C or S
  MOD_RES (16), (17), (18), (19), (20): Xaa is A or G
  MOD_RES (21), (22), (23), (24): Xaa is A or G or is absent
XXAPTKLSPISVLYIXXXXXXXXXYKQYENMVVKAXGX

SEQ ID NO: 19256 - protein, 31 aa, Artificial Sequence
  Non-cyclic GFR-binding peptide
  MOD_RES (31), (31): Xaa is C or S
VSQDLEPISILYLIGKTPKIKFKYEMIVKSX

SEQ ID NO: 19257 - protein, 33 aa, Artificial Sequence
  Non-cyclic GFR-binding peptide
  MOD_RES (31), (33): Xaa is C or S
VPQDLEPISILYLVGRTPKVKFKYEMVVKSXKX

SEQ ID NO: 19258 - protein, 37 aa, Artificial Sequence
  Non-cyclic GFR-binding peptide
  MOD_RES (2), (3), (37): Xaa is C or S
  MOD_RES (17), (18), (19), (20), (21): Xaa is A or G
  MOD_RES (22), (23), (24), (25): Xaa is A or G or is absent
AXXVPTELEPISMLYLXXXXXXXXXKFKYEDMVVEGX

SEQ ID NO: 19259 - protein, 38 aa, Artificial Sequence
  Non-cyclic GFR-binding peptide
  MOD_RES (4), (5), (38): Xaa is C or S
  MOD_RES (19), (20), (21), (22), (23): Xaa is A or G
  MOD_RES (24), (25), (26), (27): Xaa is A or G or is absent
ASPXXVSQDLEPISILYLXXXXXXXXXKFKYEMIVKSX

SEQ ID NO: 19260 - protein, 36 aa, Artificial Sequence
  Non-cyclic GFR-binding peptide
  MOD_RES (1), (35): Xaa is C or S
  MOD_RES (15), (16), (17), (18), (19): Xaa is A or G
  MOD_RES (20), (21), (22), (23): Xaa is A or G or is absent
XVPTELSPISMLYIXXXXXXXXXYKQYEEMVVEGXG

SEQ ID NO: 19261 - protein, 34 aa, Artificial Sequence
  Non-cyclic GFR-binding peptide
  MOD_RES (32), (34): Xaa is C or S
VPTELSPISMLYIDENEKVVYKQYEDMVVEGXGX

SEQ ID NO: 19262 - protein, 38 aa, Artificial Sequence
  Non-cyclic GFR-binding peptide
  MOD_RES (5), (6): Xaa is C or S
  MOD_RES (20), (21), (22), (23), (24): Xaa is A or G
  MOD_RES (25), (26), (27), (28): Xaa is A or G or is absent
APASXXVPARLSPISILYKXXXXXXXXXLKYHYDMVVE

SEQ ID NO: 19263 - protein, 44 aa, Artificial Sequence
  Non-cyclic GFR-binding peptide
  MOD_RES (6), (7), (41), (43): Xaa is C or S
  MOD_RES (21), (22), (23), (24), (25): Xaa is A or G
  MOD_RES (26), (27), (28), (29): Xaa is A or G or is absent
KIPKAXXVPTELEPISMLYLXXXXXXXXXKFKYEDMVVEGXGXR

SEQ ID NO: 19264 - protein, 37 aa, Artificial Sequence
  Non-cyclic GFR-binding peptide
  MOD_RES (2), (3), (34), (36): Xaa is C or S
PXXVPQDLEPISILYLVGRTPKVKFKYEMVVKSXKXS

SEQ ID NO: 19265 - protein, 36 aa, Artificial Sequence
  Non-cyclic GFR-binding peptide
  MOD_RES (4), (5): Xaa is C or S
PASXXVPARLEPISILYLDAANNVVKFKYEDMVVEA

SEQ ID NO: 19266 - protein, 33 aa, Artificial Sequence
  Non-cyclic GFR-binding peptide
  MOD_RES (31), (33): Xaa is C or S
VSQDLEPISILYLIGKTPKIKFKYEMIVKSXKX

SEQ ID NO: 19267 - protein, 40 aa, Artificial Sequence
  Non-cyclic GFR-binding peptide
  MOD_RES (4), (5), (37), (39): Xaa is C or S
SKAXXVPTKLSPISILYIDKGVVTYYKQYEGMAVSEXGXR

SEQ ID NO: 19268 - protein, 33 aa, Artificial Sequence
  Non-cyclic GFR-binding peptide
  MOD_RES (2), (2): Xaa is C or S
TXAPTKLEPISVLYLDDSSNVIKFKYENMVVRS

SEQ ID NO: 19269 - protein, 32 aa, Artificial Sequence
  Non-cyclic GFR-binding peptide
  MOD_RES (1), (32): Xaa is C or S
XVSQDLEPISILYLIGKTPKIKFKYEMIVKSX

SEQ ID NO: 19270 - protein, 37 aa, Artificial Sequence
  Non-cyclic GFR-binding peptide
  MOD_RES (3), (4): Xaa is C or S
  MOD_RES (18), (19), (20), (21), (22): Xaa is A or G
  MOD_RES (23), (24), (25), (26): Xaa is A or G or is absent
ASXXVPARLEPISILYLXXXXXXXXXKFKYEDMVVEA

SEQ ID NO: 19271 - protein, 37 aa, Artificial Sequence
  Non-cyclic GFR-binding peptide
  MOD_RES (3), (4), (36): Xaa is C or S
KAXXVPTELSPISMLYIDENEKVVYKQYEDMVVEGXG

SEQ ID NO: 19272 - protein, 33 aa, Artificial Sequence
  Non-cyclic GFR-binding peptide
  MOD_RES (1), (32): Xaa is C or S
XVPQDLEPISILYLVGRTPKVKFKYEMVVKSXK

SEQ ID NO: 19273 - protein, 39 aa, Artificial Sequence
  Non-cyclic GFR-binding peptide
  MOD_RES (6), (38): Xaa is C or S
VTKPTXAPTKLSPISVLYIDDSSNVIYKQYENMVVRSXG

SEQ ID NO: 19274 - protein, 36 aa, Artificial Sequence
  Non-cyclic GFR-binding peptide
  MOD_RES (34), (36): Xaa is C or S
  MOD_RES (14), (15), (16), (17), (18): Xaa is A or G
  MOD_RES (19), (20), (21), (22): Xaa is A or G or is absent
VPTKLSPISILYKXXXXXXXXXLKYHYGMAVSEXGX

SEQ ID NO: 19275 - protein, 39 aa, Artificial Sequence
  Non-cyclic GFR-binding peptide
  MOD_RES (6), (7): Xaa is C or S
  MOD_RES (21), (22), (23), (24), (25): Xaa is A or G
  MOD_RES (26), (27), (28), (29): Xaa is A or G or is absent
AAPASXXVPARLSPISILYKXXXXXXXXXLKYHYDMVVE

SEQ ID NO: 19276 - protein, 38 aa, Artificial Sequence
  Non-cyclic GFR-binding peptide
  MOD_RES (1), (35), (37): Xaa is C or S
  MOD_RES (15), (16), (17), (18), (19): Xaa is A or G
  MOD_RES (20), (21), (22), (23): Xaa is A or G or is absent
XVPTKLNAISILYFXXXXXXXXXLKKYRGMAVSEXGXR

SEQ ID NO: 19277 - protein, 35 aa, Artificial Sequence
  Non-cyclic GFR-binding peptide
  MOD_RES (4), (5): Xaa is C or S
PKPXXAPTKLSPISVLYIDDSSNVIYKQYENMVVR

SEQ ID NO: 19278 - protein, 39 aa, Artificial Sequence
  Non-cyclic GFR-binding peptide
  MOD_RES (5), (6), (39): Xaa is C or S
  MOD_RES (20), (21), (22), (23), (24): Xaa is A or G
  MOD_RES (25), (26), (27), (28): Xaa is A or G or is absent
SAAPXXVPQALEPISILYLXXXXXXXXXKFKYEMIVRSX

SEQ ID NO: 19279 - protein, 40 aa, Artificial Sequence
  Non-cyclic GFR-binding peptide
  MOD_RES (6), (7): Xaa is C or S
  MOD_RES (21), (22), (23), (24), (25): Xaa is A or G
  MOD_RES (26), (27), (28), (29): Xaa is A or G or is absent
AVPKAXXAPTKLEPISVLYLXXXXXXXXXKFKYENMVVKA

SEQ ID NO: 19280 - protein, 41 aa, Artificial Sequence
  Non-cyclic GFR-binding peptide
  MOD_RES (4), (38), (40): Xaa is C or S
  MOD_RES (18), (19), (20), (21), (22): Xaa is A or G
  MOD_RES (23), (24), (25), (26): Xaa is A or G or is absent
KPTXAPTKLEPISVLYLXXXXXXXXXKFKYENMVVRSXGXH

SEQ ID NO: 19281 - protein, 37 aa, Artificial Sequence
  Non-cyclic GFR-binding peptide
  MOD_RES (3), (4), (35), (37): Xaa is C or S
SPXXVSQDLSPISILYIIGKTPKIYKQYEMIVKSXKX

SEQ ID NO: 19282 - protein, 35 aa, Artificial Sequence
  Non-cyclic GFR-binding peptide
  MOD_RES (1), (33), (35): Xaa is C or S
XVPARLNAISILYFDAANNVVLKKYRDMVVEAXGX

SEQ ID NO: 19283 - protein, 34 aa, Artificial Sequence
  Non-cyclic GFR-binding peptide
  MOD_RES (1), (2), (34): Xaa is C or S
XXVPARLNAISILYFDAANNVVLKKYRDMVVEAX

SEQ ID NO: 19284 - protein, 39 aa, Artificial Sequence
  Non-cyclic GFR-binding peptide
  MOD_RES (2), (3), (37), (39): Xaa is C or S
  MOD_RES (17), (18), (19), (20), (21): Xaa is A or G
  MOD_RES (22), (23), (24), (25): Xaa is A or G or is absent
AXXVPTKLNAISILYFXXXXXXXXXLKKYRGMAVSEXGX

SEQ ID NO: 19285 - protein, 33 aa, Artificial Sequence
  Non-cyclic GFR-binding peptide
  MOD_RES (14), (15), (16), (17), (18): Xaa is A or G
  MOD_RES (19), (20), (21), (22): Xaa is A or G or is absent
VPARLEPISILYLXXXXXXXXXKFKYEDMVVEA

SEQ ID NO: 19286 - protein, 38 aa, Artificial Sequence
  Non-cyclic GFR-binding peptide
  MOD_RES (7), (7): Xaa is C or S
HVTKPTXAPTKLSPISVLYIDDSSNVIYKQYENMVVRS

SEQ ID NO: 19287 - protein, 37 aa, Artificial Sequence
  Non-cyclic GFR-binding peptide
  MOD_RES (2), (3), (37): Xaa is C or S
  MOD_RES (17), (18), (19), (20), (21): Xaa is A or G
  MOD_RES (22), (23), (24), (25): Xaa is A or G or is absent
AXXAPTKLSPISVLYIXXXXXXXXXYKQYENMVVKAX

SEQ ID NO: 19288 - protein, 33 aa, Artificial Sequence
  Non-cyclic GFR-binding peptide
  MOD_RES (1), (2), (33): Xaa is C or S
XXVPQDLSPISILYIVGRTPKVYKQYEMVVKSX

SEQ ID NO: 19289 - protein, 32 aa, Artificial Sequence
  Non-cyclic GFR-binding peptide
  MOD_RES (14), (15), (16), (17), (18): Xaa is A or G
  MOD_RES (19), (20), (21), (22): Xaa is A or G or is absent
VPARLNAISILYFXXXXXXXXXLKKYRDMVVE

SEQ ID NO: 19290 - protein, 39 aa, Artificial Sequence
  Non-cyclic GFR-binding peptide
  MOD_RES (5), (6): Xaa is C or S
  MOD_RES (20), (21), (22), (23), (24): Xaa is A or G
  MOD_RES (25), (26), (27), (28): Xaa is A or G or is absent
ASKAXXVPTKLSPISILYIXXXXXXXXXYKQYEGMAVSE

SEQ ID NO: 19291 - protein, 43 aa, Artificial Sequence
  Non-cyclic GFR-binding peptide
  MOD_RES (6), (7), (40), (42): Xaa is C or S
  MOD_RES (21), (22), (23), (24), (25): Xaa is A or G
  MOD_RES (26), (27), (28), (29): Xaa is A or G or is absent
ASASPXXVPQDLSPISILYIXXXXXXXXXYKQYEMVVKSXKXS

SEQ ID NO: 19292 - protein, 40 aa, Artificial Sequence
  Non-cyclic GFR-binding peptide
  MOD_RES (2), (3), (37), (39): Xaa is C or S
  MOD_RES (17), (18), (19), (20), (21): Xaa is A or G
  MOD_RES (22), (23), (24), (25): Xaa is A or G or is absent
SXXVPARLEPISILYLXXXXXXXXXKFKYEDMVVEAXGXR

SEQ ID NO: 19293 - protein, 37 aa, Artificial Sequence
  Non-cyclic GFR-binding peptide
  MOD_RES (4), (5): Xaa is C or S
  MOD_RES (19), (20), (21), (22), (23): Xaa is A or G
  MOD_RES (24), (25), (26), (27): Xaa is A or G or is absent
PKAXXVPTELSPISMLYIXXXXXXXXXYKQYEDMVVE

SEQ ID NO: 19294 - protein, 35 aa, Artificial Sequence
  Non-cyclic GFR-binding peptide
  MOD_RES (2), (3), (34): Xaa is C or S
PXXVSQDLSPISILYIIGKTPKIYKQYEMIVKSXK

SEQ ID NO: 19295 - protein, 33 aa, Artificial Sequence
  Non-cyclic GFR-binding peptide
  MOD_RES (14), (15), (16), (17), (18): Xaa is A or G
  MOD_RES (19), (20), (21), (22): Xaa is A or G or is absent
VPTELSPISMLYIXXXXXXXXXYKQYEDMVVEG

SEQ ID NO: 19296 - protein, 40 aa, Artificial Sequence
  Non-cyclic GFR-binding peptide
  MOD_RES (2), (3), (37), (39): Xaa is C or S
  MOD_RES (17), (18), (19), (20), (21): Xaa is A or G
  MOD_RES (22), (23), (24), (25): Xaa is A or G or is absent
SXXVPARLNAISILYFXXXXXXXXXLKKYRDMVVEAXGXR

SEQ ID NO: 19297 - protein, 38 aa, Artificial Sequence
  Non-cyclic GFR-binding peptide
  MOD_RES (4), (5), (37): Xaa is C or S
PKAXXAPTKLEPISVLYLDSSNNVIKFKYENMVVKAXG

SEQ ID NO: 19298 - protein, 38 aa, Artificial Sequence
  Non-cyclic GFR-binding peptide
  MOD_RES (6), (7): Xaa is C or S
YVPKPXXAPTKLSPISVLYIDDSSNVIYKQYENMVVRS

SEQ ID NO: 19299 - protein, 38 aa, Artificial Sequence
  Non-cyclic GFR-binding peptide
  MOD_RES (6), (7): Xaa is C or S
KASKAXXVPTKLNAISILYFDKGVVTYLKKYRGMAVSE

SEQ ID NO: 19300 - protein, 41 aa, Artificial Sequence
  Non-cyclic GFR-binding peptide
  MOD_RES (6), (7), (39), (41): Xaa is C or S
SIPKAXXVPTELSPISMLYIDEYDKVVYKQYEEMVVEGXGX

SEQ ID NO: 19301 - protein, 32 aa, Artificial Sequence
  Non-cyclic GFR-binding peptide
  MOD_RES (32), (32): Xaa is C or S
APTQLSPISVLYIDDSSNVIYKQYENMVVRAX

SEQ ID NO: 19302 - protein, 39 aa, Artificial Sequence
  Non-cyclic GFR-binding peptide
  MOD_RES (6), (7), (39): Xaa is C or S
KIPKAXXVPTELEPISMLYLDENEKVVKFKYEDMVVEGX

SEQ ID NO: 19303 - protein, 42 aa, Artificial Sequence
  Non-cyclic GFR-binding peptide
  MOD_RES (6), (7), (39), (41): Xaa is C or S
KIPKAXXVPTELSPISMLYIDENEKVVYKQYEDMVVEGXGXR

SEQ ID NO: 19304 - protein, 35 aa, Artificial Sequence
  Non-cyclic GFR-binding peptide
  MOD_RES (4), (4): Xaa is C or S
KPTXAPTKLSPISVLYIDDSSNVIYKQYENMVVRS

SEQ ID NO: 19305 - protein, 38 aa, Artificial Sequence
  Non-cyclic GFR-binding peptide
  MOD_RES (5), (6), (37): Xaa is C or S
SASPXXVPQDLSPISILYIVGRTPKVYKQYEMVVKSXK

SEQ ID NO: 19306 - protein, 44 aa, Artificial Sequence
  Non-cyclic GFR-binding peptide
  MOD_RES (6), (7), (41), (43): Xaa is C or S
  MOD_RES (21), (22), (23), (24), (25): Xaa is A or G
  MOD_RES (26), (27), (28), (29): Xaa is A or G or is absent
AVPKAXXAPTKLEPISVLYLXXXXXXXXXKFKYENMVVKAXGXH

SEQ ID NO: 19307 - protein, 37 aa, Artificial Sequence
  Non-cyclic GFR-binding peptide
  MOD_RES (4), (5): Xaa is C or S
  MOD_RES (19), (20), (21), (22), (23): Xaa is A or G
  MOD_RES (24), (25), (26), (27): Xaa is A or G or is absent
ASPXXVPQDLEPISILYLXXXXXXXXXKFKYEMVVKS

SEQ ID NO: 19308 - protein, 35 aa, Artificial Sequence
  Non-cyclic GFR-binding peptide
  MOD_RES (4), (5): Xaa is C or S
ASPXXVSQDLEPISILYLIGKTPKIKFKYEMIVKS

SEQ ID NO: 19309 - protein, 36 aa, Artificial Sequence
  Non-cyclic GFR-binding peptide
  MOD_RES (4), (5): Xaa is C or S
SKAXXVPTKLSPISILYIDKGVVTYYKQYEGMAVSE

SEQ ID NO: 19310 - protein, 38 aa, Artificial Sequence
  Non-cyclic GFR-binding peptide
  MOD_RES (4), (5), (36), (38): Xaa is C or S
ASPXXVPQDLSPISILYIVGRTPKVYKQYEMVVKSXKX

SEQ ID NO: 19311 - protein, 37 aa, Artificial Sequence
  Non-cyclic GFR-binding peptide
  MOD_RES (1), (2), (35), (37): Xaa is C or S
  MOD_RES (16), (17), (18), (19), (20): Xaa is A or G
  MOD_RES (21), (22), (23), (24): Xaa is A or G or is absent
XXVSQDLEPISILYLXXXXXXXXXKFKYEMIVKSXKX

SEQ ID NO: 19312 - protein, 33 aa, Artificial Sequence
  Non-cyclic GFR-binding peptide
  MOD_RES (32), (32): Xaa is C or S
VPTELSPISMLYIDEYDKVVYKQYEEMVVEGXG

SEQ ID NO: 19313 - protein, 33 aa, Artificial Sequence
  Non-cyclic GFR-binding peptide
  MOD_RES (2), (3): Xaa is C or S
AXXVPTELEPISMLYLDENEKVVKFKYEDMVVE

SEQ ID NO: 19314 - protein, 34 aa, Artificial Sequence
  Non-cyclic GFR-binding peptide
  MOD_RES (3), (4): Xaa is C or S
SPXXVPQDLSPISILYIVGRTPKVYKQYEMVVKS

SEQ ID NO: 19315 - protein, 34 aa, Artificial Sequence
  Non-cyclic GFR-binding peptide
  MOD_RES (1), (1): Xaa is C or S
  MOD_RES (15), (16), (17), (18), (19): Xaa is A or G
  MOD_RES (20), (21), (22), (23): Xaa is A or G or is absent
XAPTKLSPISVLYIXXXXXXXXXYKQYENMVVRS

SEQ ID NO: 19316 - protein, 39 aa, Artificial Sequence
  Non-cyclic GFR-binding peptide
  MOD_RES (1), (2), (36), (38): Xaa is C or S
  MOD_RES (16), (17), (18), (19), (20): Xaa is A or G
  MOD_RES (21), (22), (23), (24): Xaa is A or G or is absent
XXVPTELEPISMLYLXXXXXXXXXKFKYEEMVVEGXGXR

SEQ ID NO: 19317 - protein, 42 aa, Artificial Sequence
  Non-cyclic GFR-binding peptide
  MOD_RES (4), (5), (39), (41): Xaa is C or S
  MOD_RES (19), (20), (21), (22), (23): Xaa is A or G
  MOD_RES (24), (25), (26), (27): Xaa is A or G or is absent
PKAXXVPTELEPISMLYLXXXXXXXXXKFKYEDMVVEGXGXR

SEQ ID NO: 19318 - protein, 41 aa, Artificial Sequence
  Non-cyclic GFR-binding peptide
  MOD_RES (6), (7), (38), (40): Xaa is C or S
ASASPXXVPQDLSPISILYIVGRTPKVYKQYEMVVKSXKXS

SEQ ID NO: 19319 - protein, 32 aa, Artificial Sequence
  Non-cyclic GFR-binding peptide
  MOD_RES (14), (15), (16), (17), (18): Xaa is A or G
  MOD_RES (19), (20), (21), (22): Xaa is A or G or is absent
APTQLSPISVLYIXXXXXXXXXYKQYENMVVR

SEQ ID NO: 19320 - protein, 39 aa, Artificial Sequence
  Non-cyclic GFR-binding peptide
  MOD_RES (5), (6), (38): Xaa is C or S
VPKPXXAPTQLEPISVLYLDDSSNVIKFKYENMVVRAXG

SEQ ID NO: 19321 - protein, 38 aa, Artificial Sequence
  Non-cyclic GFR-binding peptide
  MOD_RES (3), (4), (38): Xaa is C or S
  MOD_RES (18), (19), (20), (21), (22): Xaa is A or G
  MOD_RES (23), (24), (25), (26): Xaa is A or G or is absent
KAXXVPTKLSPISILYKXXXXXXXXXLKYHYGMAVSEX

SEQ ID NO: 19322 - protein, 38 aa, Artificial Sequence
  Non-cyclic GFR-binding peptide
  MOD_RES (2), (3), (35), (37): Xaa is C or S
PXXAPTQLSPISVLYIDDSSNVIYKQYENMVVRAXGXH

SEQ ID NO: 19323 - protein, 32 aa, Artificial Sequence
  Non-cyclic GFR-binding peptide
  MOD_RES (1), (2): Xaa is C or S
XXAPTQLEPISVLYLDDSSNVIKFKYENMVVR

SEQ ID NO: 19324 - protein, 39 aa, Artificial Sequence
  Non-cyclic GFR-binding peptide
  MOD_RES (4), (5), (36), (38): Xaa is C or S
AAPXXVPQALSPISILYIVGRKPKVYKQYEMIVRSXKXS

SEQ ID NO: 19325 - protein, 39 aa, Artificial Sequence
  Non-cyclic GFR-binding peptide
  MOD_RES (5), (6): Xaa is C or S
  MOD_RES (20), (21), (22), (23), (24): Xaa is A or G
  MOD_RES (25), (26), (27), (28): Xaa is A or G or is absent
VPKPXXAPTQLEPISVLYLXXXXXXXXXKFKYENMVVRA

SEQ ID NO: 19326 - protein, 40 aa, Artificial Sequence
  Non-cyclic GFR-binding peptide
  MOD_RES (6), (7), (40): Xaa is C or S
KVGKAXXVPTKLSPISVLYIDDMGVPTYKQYEEGMSVAEX

SEQ ID NO: 19327 - protein, 39 aa, Artificial Sequence
  Non-cyclic GFR-binding peptide
  MOD_RES (3), (4), (38): Xaa is C or S
  MOD_RES (18), (19), (20), (21), (22): Xaa is A or G
  MOD_RES (23), (24), (25), (26): Xaa is A or G or is absent
KAXXVPTELSPISMLYIXXXXXXXXXYKQYEDMVVEGXG

SEQ ID NO: 19328 - protein, 37 aa, Artificial Sequence
  Non-cyclic GFR-binding peptide
  MOD_RES (4), (5), (37): Xaa is C or S
SKAXXVPTKLSPISILYKDKGVVTYLKYHYGMAVSEX

SEQ ID NO: 19329 - protein, 38 aa, Artificial Sequence
  Non-cyclic GFR-binding peptide
  MOD_RES (5), (6), (37): Xaa is C or S
SAAPXXVPQALEPISILYLVGRKPKVKFKYEMIVRSXK

SEQ ID NO: 19330 - protein, 37 aa, Artificial Sequence
  Non-cyclic GFR-binding peptide
  MOD_RES (6), (7): Xaa is C or S
YVPKPXXAPTKLSPISVLYIDDSSNVIYKQYENMVVR

SEQ ID NO: 19331 - protein, 39 aa, Artificial Sequence
  Non-cyclic GFR-binding peptide
  MOD_RES (5), (6): Xaa is C or S
  MOD_RES (20), (21), (22), (23), (24): Xaa is A or G
  MOD_RES (25), (26), (27), (28): Xaa is A or G or is absent
IPKAXXVPTELEPISMLYLXXXXXXXXXKFKYEDMVVEG

SEQ ID NO: 19332 - protein, 38 aa, Artificial Sequence
  Non-cyclic GFR-binding peptide
  MOD_RES (4), (5): Xaa is C or S
  MOD_RES (19), (20), (21), (22), (23): Xaa is A or G
  MOD_RES (24), (25), (26), (27): Xaa is A or G or is absent
PKPXXAPTQLSPISVLYIXXXXXXXXXYKQYENMVVRA

SEQ ID NO: 19333 - protein, 37 aa, Artificial Sequence
  Non-cyclic GFR-binding peptide
  MOD_RES (3), (4): Xaa is C or S
  MOD_RES (18), (19), (20), (21), (22): Xaa is A or G
  MOD_RES (23), (24), (25), (26): Xaa is A or G or is absent
KPXXAPTQLEPISVLYLXXXXXXXXXKFKYENMVVRA

SEQ ID NO: 19334 - protein, 35 aa, Artificial Sequence
  Non-cyclic GFR-binding peptide
  MOD_RES (1), (35): Xaa is C or S
  MOD_RES (15), (16), (17), (18), (19): Xaa is A or G
  MOD_RES (20), (21), (22), (23): Xaa is A or G or is absent
XVPTELEPISMLYLXXXXXXXXXKFKYEDMVVEGX

SEQ ID NO: 19335 - protein, 36 aa, Artificial Sequence
  Non-cyclic GFR-binding peptide
  MOD_RES (3), (4), (36): Xaa is C or S
KAXXVPTELEPISMLYLDEYDKVVKFKYEEMVVEGX

SEQ ID NO: 19336 - protein, 38 aa, Artificial Sequence
  Non-cyclic GFR-binding peptide
  MOD_RES (4), (5), (37): Xaa is C or S
PKPXXAPTKLEPISVLYLDDSSNVIKFKYENMVVRSXG

SEQ ID NO: 19337 - protein, 31 aa, Artificial Sequence
  Non-cyclic GFR-binding peptide
VPARLSPISILYKDAANNVVLKYHYDMVVEA

SEQ ID NO: 19338 - protein, 31 aa, Artificial Sequence
  Non-cyclic GFR-binding peptide
  MOD_RES (1), (1): Xaa is C or S
XVPTELEPISMLYLDENEKVVKFKYEDMVVE

SEQ ID NO: 19339 - protein, 40 aa, Artificial Sequence
  Non-cyclic GFR-binding peptide
  MOD_RES (5), (6), (37), (39): Xaa is C or S
SASPXXVPQDLSPISILYIVGRTPKVYKQYEMVVKSXKXS

SEQ ID NO: 19340 - protein, 37 aa, Artificial Sequence
  Non-cyclic GFR-binding peptide
  MOD_RES (5), (6): Xaa is C or S
APASXXVPARLSPISILYKDAANNVVLKYHYDMVVEA

SEQ ID NO: 19341 - protein, 39 aa, Artificial Sequence
  Non-cyclic GFR-binding peptide
  MOD_RES (6), (7): Xaa is C or S
  MOD_RES (21), (22), (23), (24), (25): Xaa is A or G
  MOD_RES (26), (27), (28), (29): Xaa is A or G or is absent
ASAAPXXVPQALSPISILYIXXXXXXXXXYKQYEMIVRS

SEQ ID NO: 19342 - protein, 31 aa, Artificial Sequence
  Non-cyclic GFR-binding peptide
VPTELEPISMLYLDENEKVVKFKYEDMVVEG

SEQ ID NO: 19343 - protein, 36 aa, Artificial Sequence
  Non-cyclic GFR-binding peptide
  MOD_RES (2), (3), (35): Xaa is C or S
AXXVPTKLNAISILYFDKGVVTYLKKYRGMAVSEXG

SEQ ID NO: 19344 - protein, 38 aa, Artificial Sequence
  Non-cyclic GFR-binding peptide
  MOD_RES (6), (7): Xaa is C or S
TVPKPXXAPTQLEPISVLYLDDSSNVIKFKYENMVVRA

SEQ ID NO: 19345 - protein, 41 aa, Artificial Sequence
  Non-cyclic GFR-binding peptide
  MOD_RES (5), (6), (40): Xaa is C or S
  MOD_RES (20), (21), (22), (23), (24): Xaa is A or G
  MOD_RES (25), (26), (27), (28): Xaa is A or G or is absent
IPKAXXVPTELEPISMLYLXXXXXXXXXKFKYEDMVVEGXG

SEQ ID NO: 19346 - protein, 38 aa, Artificial Sequence
  Non-cyclic GFR-binding peptide
  MOD_RES (3), (4), (38): Xaa is C or S
  MOD_RES (18), (19), (20), (21), (22): Xaa is A or G
  MOD_RES (23), (24), (25), (26): Xaa is A or G or is absent
KAXXVPTKLSPISILYIXXXXXXXXXYKQYEGMAVSEX

SEQ ID NO: 19347 - protein, 38 aa, Artificial Sequence
  Non-cyclic GFR-binding peptide
  MOD_RES (3), (4), (36), (38): Xaa is C or S
KAXXVPTKLNAISILYFDKGVVTYLKKYRGMAVSEXGX

SEQ ID NO: 19348 - protein, 37 aa, Artificial Sequence
  Non-cyclic GFR-binding peptide
  MOD_RES (2), (3), (35), (37): Xaa is C or S
AXXAPTKLSPISVLYIDSSNNVIYKQYENMVVKAXGX

SEQ ID NO: 19349 - protein, 40 aa, Artificial Sequence
  Non-cyclic GFR-binding peptide
  MOD_RES (3), (4), (38), (40): Xaa is C or S
  MOD_RES (18), (19), (20), (21), (22): Xaa is A or G
  MOD_RES (23), (24), (25), (26): Xaa is A or G or is absent
KPXXAPTKLEPISVLYLXXXXXXXXXKFKYENMVVRSXGX

SEQ ID NO: 19350 - protein, 40 aa, Artificial Sequence
  Non-cyclic GFR-binding peptide
  MOD_RES (5), (6), (38), (40): Xaa is C or S
IPKAXXVPTELSPISMLYIDENEKVVYKQYEDMVVEGXGX

SEQ ID NO: 19351 - protein, 42 aa, Artificial Sequence
  Non-cyclic GFR-binding peptide
  MOD_RES (6), (7), (39), (41): Xaa is C or S
AAPASXXVPARLNAISILYFDAANNVVLKKYRDMVVEAXGXR

SEQ ID NO: 19352 - protein, 31 aa, Artificial Sequence
  Non-cyclic GFR-binding peptide
  MOD_RES (1), (1): Xaa is C or S
XAPTKLSPISVLYIDDSSNVIYKQYENMVVR

SEQ ID NO: 19353 - protein, 39 aa, Artificial Sequence
  Non-cyclic GFR-binding peptide
  MOD_RES (3), (4), (38): Xaa is C or S
  MOD_RES (18), (19), (20), (21), (22): Xaa is A or G
  MOD_RES (23), (24), (25), (26): Xaa is A or G or is absent
KAXXVPTKLSPISILYIXXXXXXXXXYKQYEGMAVSEXG

SEQ ID NO: 19354 - protein, 41 aa, Artificial Sequence
  Non-cyclic GFR-binding peptide
  MOD_RES (3), (4), (38), (40): Xaa is C or S
  MOD_RES (18), (19), (20), (21), (22): Xaa is A or G
  MOD_RES (23), (24), (25), (26): Xaa is A or G or is absent
KPXXAPTQLEPISVLYLXXXXXXXXXKFKYENMVVRAXGXH

SEQ ID NO: 19355 - protein, 35 aa, Artificial Sequence
  Non-cyclic GFR-binding peptide
  MOD_RES (1), (35): Xaa is C or S
  MOD_RES (15), (16), (17), (18), (19): Xaa is A or G
  MOD_RES (20), (21), (22), (23): Xaa is A or G or is absent
XVPARLSPISILYKXXXXXXXXXLKYHYDMVVEAX

SEQ ID NO: 19356 - protein, 33 aa, Artificial Sequence
  Non-cyclic GFR-binding peptide
  MOD_RES (1), (1): Xaa is C or S
  MOD_RES (15), (16), (17), (18), (19): Xaa is A or G
  MOD_RES (20), (21), (22), (23): Xaa is A or G or is absent
XVPTELSPISMLYIXXXXXXXXXYKQYEEMVVE

SEQ ID NO: 19357 - protein, 35 aa, Artificial Sequence
  Non-cyclic GFR-binding peptide
  MOD_RES (35), (35): Xaa is C or S
  MOD_RES (14), (15), (16), (17), (18): Xaa is A or G
  MOD_RES (19), (20), (21), (22): Xaa is A or G or is absent
VPTKLEPISVLYLXXXXXXXXXKFKYEEGMSVAEX

SEQ ID NO: 19358 - protein, 36 aa, Artificial Sequence
  Non-cyclic GFR-binding peptide
  MOD_RES (2), (3), (34), (36): Xaa is C or S
PXXVPQDLEPISILYLVGRTPKVKFKYEMVVKSXKX

SEQ ID NO: 19359 - protein, 40 aa, Artificial Sequence
  Non-cyclic GFR-binding peptide
  MOD_RES (6), (7), (38), (40): Xaa is C or S
ASAAPXXVPQALEPISILYLVGRKPKVKFKYEMIVRSXKX

SEQ ID NO: 19360 - protein, 41 aa, Artificial Sequence
  Non-cyclic GFR-binding peptide
  MOD_RES (3), (4), (39), (41): Xaa is C or S
  MOD_RES (18), (19), (20), (21), (22): Xaa is A or G
  MOD_RES (23), (24), (25), (26): Xaa is A or G or is absent
KAXXVPTKLSPISVLYIXXXXXXXXXYKQYEEGMSVAEXGX

SEQ ID NO: 19361 - protein, 36 aa, Artificial Sequence
  Non-cyclic GFR-binding peptide
  MOD_RES (34), (36): Xaa is C or S
  MOD_RES (14), (15), (16), (17), (18): Xaa is A or G
  MOD_RES (19), (20), (21), (22): Xaa is A or G or is absent
APTQLEPISVLYLXXXXXXXXXKFKYENMVVRAXGX

SEQ ID NO: 19362 - protein, 30 aa, Artificial Sequence
  Non-cyclic GFR-binding peptide
VPARLNAISILYFDAANNVVLKKYRDMVVE

SEQ ID NO: 19363 - protein, 41 aa, Artificial Sequence
  Non-cyclic GFR-binding peptide
  MOD_RES (6), (7), (40): Xaa is C or S
  MOD_RES (21), (22), (23), (24), (25): Xaa is A or G
  MOD_RES (26), (27), (28), (29): Xaa is A or G or is absent
ASASPXXVPQDLSPISILYIXXXXXXXXXYKQYEMVVKSXK

SEQ ID NO: 19364 - protein, 36 aa, Artificial Sequence
  Non-cyclic GFR-binding peptide
  MOD_RES (1), (2), (34), (36): Xaa is C or S
XXVPTKLSPISILYIDKGVVTYYKQYEGMAVSEXGX

SEQ ID NO: 19365 - protein, 40 aa, Artificial Sequence
  Non-cyclic GFR-binding peptide
  MOD_RES (4), (5), (38), (40): Xaa is C or S
GKAXXVPTKLEPISVLYLDDMGVPTKFKYEEGMSVAEXGX

SEQ ID NO: 19366 - protein, 38 aa, Artificial Sequence
  Non-cyclic GFR-binding peptide
  MOD_RES (3), (4), (36), (38): Xaa is C or S
ASXXVPARLEPISILYLDAANNVVKFKYEDMVVEAXGX

SEQ ID NO: 19367 - protein, 37 aa, Artificial Sequence
  Non-cyclic GFR-binding peptide
  MOD_RES (1), (2), (36): Xaa is C or S
  MOD_RES (16), (17), (18), (19), (20): Xaa is A or G
  MOD_RES (21), (22), (23), (24): Xaa is A or G or is absent
XXVPARLEPISILYLXXXXXXXXXKFKYEDMVVEAXG

SEQ ID NO: 19368 - protein, 35 aa, Artificial Sequence
  Non-cyclic GFR-binding peptide
  MOD_RES (3), (3): Xaa is C or S
  MOD_RES (17), (18), (19), (20), (21): Xaa is A or G
  MOD_RES (22), (23), (24), (25): Xaa is A or G or is absent
PTXAPTKLSPISVLYIXXXXXXXXXYKQYENMVVR

SEQ ID NO: 19369 - protein, 36 aa, Artificial Sequence
  Non-cyclic GFR-binding peptide
  MOD_RES (34), (36): Xaa is C or S
  MOD_RES (14), (15), (16), (17), (18): Xaa is A or G
  MOD_RES (19), (20), (21), (22): Xaa is A or G or is absent
APTQLSPISVLYIXXXXXXXXXYKQYENMVVRAXGX

SEQ ID NO: 19370 - protein, 33 aa, Artificial Sequence
  Non-cyclic GFR-binding peptide
  MOD_RES (1), (33): Xaa is C or S
XVPTELSPISMLYIDEYDKVVYKQYEEMVVEGX

SEQ ID NO: 19371 - protein, 34 aa, Artificial Sequence
  Non-cyclic GFR-binding peptide
  MOD_RES (31), (33): Xaa is C or S
VPQDLSPISILYIVGRTPKVYKQYEMVVKSXKXS

SEQ ID NO: 19372 - protein, 39 aa, Artificial Sequence
  Non-cyclic GFR-binding peptide
  MOD_RES (5), (6): Xaa is C or S
  MOD_RES (20), (21), (22), (23), (24): Xaa is A or G
  MOD_RES (25), (26), (27), (28): Xaa is A or G or is absent
APASXXVPARLSPISILYKXXXXXXXXXLKYHYDMVVEA

SEQ ID NO: 19373 - protein, 39 aa, Artificial Sequence
  Non-cyclic GFR-binding peptide
  MOD_RES (2), (3), (36), (38): Xaa is C or S
  MOD_RES (17), (18), (19), (20), (21): Xaa is A or G
  MOD_RES (22), (23), (24), (25): Xaa is A or G or is absent
PXXVPQALEPISILYLXXXXXXXXXKFKYEMIVRSXKXS

SEQ ID NO: 19374 - protein, 34 aa, Artificial Sequence
  Non-cyclic GFR-binding peptide
  MOD_RES (2), (3): Xaa is C or S
AXXVPTELSPISMLYIDEYDKVVYKQYEEMVVEG

SEQ ID NO: 19375 - protein, 42 aa, Artificial Sequence
  Non-cyclic GFR-binding peptide
  MOD_RES (5), (6), (41): Xaa is C or S
  MOD_RES (20), (21), (22), (23), (24): Xaa is A or G
  MOD_RES (25), (26), (27), (28): Xaa is A or G or is absent
VGKAXXVPTKLEPISVLYLXXXXXXXXXKFKYEEGMSVAEXG

SEQ ID NO: 19376 - protein, 35 aa, Artificial Sequence
  Non-cyclic GFR-binding peptide
  MOD_RES (2), (3), (34): Xaa is C or S
PXXVPQALEPISILYLVGRKPKVKFKYEMIVRSXK

SEQ ID NO: 19377 - protein, 40 aa, Artificial Sequence
  Non-cyclic GFR-binding peptide
  MOD_RES (4), (5), (39): Xaa is C or S
  MOD_RES (19), (20), (21), (22), (23): Xaa is A or G
  MOD_RES (24), (25), (26), (27): Xaa is A or G or is absent
PKPXXAPTKLSPISVLYIXXXXXXXXXYKQYENMVVRSXG

SEQ ID NO: 19378 - protein, 38 aa, Artificial Sequence
  Non-cyclic GFR-binding peptide
  MOD_RES (5), (37): Xaa is C or S
TKPTXAPTKLEPISVLYLDDSSNVIKFKYENMVVRSXG

SEQ ID NO: 19379 - protein, 41 aa, Artificial Sequence
  Non-cyclic GFR-binding peptide
  MOD_RES (5), (6), (38), (40): Xaa is C or S
ASKAXXVPTKLNAISILYFDKGVVTYLKKYRGMAVSEXGXR

SEQ ID NO: 19380 - protein, 35 aa, Artificial Sequence
  Non-cyclic GFR-binding peptide
  MOD_RES (34), (34): Xaa is C or S
  MOD_RES (14), (15), (16), (17), (18): Xaa is A or G
  MOD_RES (19), (20), (21), (22): Xaa is A or G or is absent
VPTELEPISMLYLXXXXXXXXXKFKYEEMVVEGXG

SEQ ID NO: 19381 - protein, 31 aa, Artificial Sequence
  Non-cyclic GFR-binding peptide
  MOD_RES (1), (1): Xaa is C or S
XVPQALSPISILYIVGRKPKVYKQYEMIVRS

SEQ ID NO: 19382 - protein, 37 aa, Artificial Sequence
  Non-cyclic GFR-binding peptide
  MOD_RES (1), (34), (36): Xaa is C or S
  MOD_RES (15), (16), (17), (18), (19): Xaa is A or G
  MOD_RES (20), (21), (22), (23): Xaa is A or G or is absent
XVPQALEPISILYLXXXXXXXXXKFKYEMIVRSXKXS

SEQ ID NO: 19383 - protein, 34 aa, Artificial Sequence
  Non-cyclic GFR-binding peptide
  MOD_RES (1), (2), (34): Xaa is C or S
XXVPTELSPISMLYIDENEKVVYKQYEDMVVEGX

SEQ ID NO: 19384 - protein, 40 aa, Artificial Sequence
  Non-cyclic GFR-binding peptide
  MOD_RES (5), (6), (40): Xaa is C or S
  MOD_RES (20), (21), (22), (23), (24): Xaa is A or G
  MOD_RES (25), (26), (27), (28): Xaa is A or G or is absent
VPKPXXAPTQLSPISVLYIXXXXXXXXXYKQYENMVVRAX

SEQ ID NO: 19385 - protein, 38 aa, Artificial Sequence
  Non-cyclic GFR-binding peptide
  MOD_RES (1), (2), (36), (38): Xaa is C or S
  MOD_RES (16), (17), (18), (19), (20): Xaa is A or G
  MOD_RES (21), (22), (23), (24): Xaa is A or G or is absent
XXVPTKLSPISILYIXXXXXXXXXYKQYEGMAVSEXGX

SEQ ID NO: 19386 - protein, 34 aa, Artificial Sequence
  Non-cyclic GFR-binding peptide
  MOD_RES (2), (3): Xaa is C or S
AXXVPTELSPISMLYIDENEKVVYKQYEDMVVEG

SEQ ID NO: 19387 - protein, 39 aa, Artificial Sequence
  Non-cyclic GFR-binding peptide
  MOD_RES (6), (7): Xaa is C or S
  MOD_RES (21), (22), (23), (24), (25): Xaa is A or G
  MOD_RES (26), (27), (28), (29): Xaa is A or G or is absent
ASASPXXVSQDLEPISILYLXXXXXXXXXKFKYEMIVKS

SEQ ID NO: 19388 - protein, 37 aa, Artificial Sequence
  Non-cyclic GFR-binding peptide
  MOD_RES (6), (7): Xaa is C or S
KASKAXXVPTKLSPISILYIDKGVVTYYKQYEGMAVS

SEQ ID NO: 19389 - protein, 34 aa, Artificial Sequence
  Non-cyclic GFR-binding peptide
  MOD_RES (3), (4): Xaa is C or S
KAXXAPTKLEPISVLYLDSSNNVIKFKYENMVVK

SEQ ID NO: 19390 - protein, 38 aa, Artificial Sequence
  Non-cyclic GFR-binding peptide
  MOD_RES (3), (4), (35), (37): Xaa is C or S
SPXXVSQDLEPISILYLIGKTPKIKFKYEMIVKSXKXS

SEQ ID NO: 19391 - protein, 39 aa, Artificial Sequence
  Non-cyclic GFR-binding peptide
  MOD_RES (6), (6): Xaa is C or S
  MOD_RES (20), (21), (22), (23), (24): Xaa is A or G
  MOD_RES (25), (26), (27), (28): Xaa is A or G or is absent
VTKPTXAPTKLSPISVLYIXXXXXXXXXYKQYENMVVRS

SEQ ID NO: 19392 - protein, 35 aa, Artificial Sequence
  Non-cyclic GFR-binding peptide
  MOD_RES (1), (34): Xaa is C or S
XVPTKLSPISVLYIDDMGVPTYKQYEEGMSVAEXG

SEQ ID NO: 19393 - protein, 34 aa, Artificial Sequence
  Non-cyclic GFR-binding peptide
  MOD_RES (1), (1): Xaa is C or S
  MOD_RES (15), (16), (17), (18), (19): Xaa is A or G
  MOD_RES (20), (21), (22), (23): Xaa is A or G or is absent
XAPTKLSPISVLYIXXXXXXXXXYKQYENMVVKA

SEQ ID NO: 19394 - protein, 43 aa, Artificial Sequence
  Non-cyclic GFR-binding peptide
  MOD_RES (6), (7), (40), (42): Xaa is C or S
KVGKAXXVPTKLEPISVLYLDDMGVPTKFKYEEGMSVAEXGXR

SEQ ID NO: 19395 - protein, 40 aa, Artificial Sequence
  Non-cyclic GFR-binding peptide
  MOD_RES (6), (7), (39): Xaa is C or S
YVPKPXXAPTKLSPISVLYIDDSSNVIYKQYENMVVRSXG

SEQ ID NO: 19396 - protein, 40 aa, Artificial Sequence
  Non-cyclic GFR-binding peptide
  MOD_RES (6), (7), (39): Xaa is C or S
KASKAXXVPTKLSPISILYIDKGVVTYYKQYEGMAVSEXG

SEQ ID NO: 19397 - protein, 36 aa, Artificial Sequence
  Non-cyclic GFR-binding peptide
  MOD_RES (2), (3): Xaa is C or S
  MOD_RES (17), (18), (19), (20), (21): Xaa is A or G
  MOD_RES (22), (23), (24), (25): Xaa is A or G or is absent
AXXVPTELEPISMLYLXXXXXXXXXKFKYEDMVVEG

SEQ ID NO: 19398 - protein, 34 aa, Artificial Sequence
  Non-cyclic GFR-binding peptide
  MOD_RES (1), (2), (34): Xaa is C or S
XXVPTELSPISMLYIDEYDKVVYKQYEEMVVEGX

SEQ ID NO: 19399 - protein, 33 aa, Artificial Sequence
  Non-cyclic GFR-binding peptide
  MOD_RES (1), (1): Xaa is C or S
  MOD_RES (15), (16), (17), (18), (19): Xaa is A or G
  MOD_RES (20), (21), (22), (23): Xaa is A or G or is absent
XVPQALSPISILYIXXXXXXXXXYKQYEMIVRS

SEQ ID NO: 19400 - protein, 38 aa, Artificial Sequence
  Non-cyclic GFR-binding peptide
  MOD_RES (5), (6): Xaa is C or S
  MOD_RES (20), (21), (22), (23), (24): Xaa is A or G
  MOD_RES (25), (26), (27), (28): Xaa is A or G or is absent
SASPXXVSQDLSPISILYIXXXXXXXXXYKQYEMIVKS

SEQ ID NO: 19401 - protein, 35 aa, Artificial Sequence
  Non-cyclic GFR-binding peptide
  MOD_RES (32), (34): Xaa is C or S
APTKLSPISVLYIDDSSNVIYKQYENMVVRSXGXH

SEQ ID NO: 19402 - protein, 42 aa, Artificial Sequence
  Non-cyclic GFR-binding peptide
  MOD_RES (6), (7), (41): Xaa is C or S
  MOD_RES (21), (22), (23), (24), (25): Xaa is A or G
  MOD_RES (26), (27), (28), (29): Xaa is A or G or is absent
AAPASXXVPARLNAISILYFXXXXXXXXXLKKYRDMVVEAXG

SEQ ID NO: 19403 - protein, 41 aa, Artificial Sequence
  Non-cyclic GFR-binding peptide
  MOD_RES (3), (4), (38), (40): Xaa is C or S
  MOD_RES (18), (19), (20), (21), (22): Xaa is A or G
  MOD_RES (23), (24), (25), (26): Xaa is A or G or is absent
ASXXVPARLNAISILYFXXXXXXXXXLKKYRDMVVEAXGXR

SEQ ID NO: 19404 - protein, 44 aa, Artificial Sequence
  Non-cyclic GFR-binding peptide
  MOD_RES (6), (7), (41), (43): Xaa is C or S
  MOD_RES (21), (22), (23), (24), (25): Xaa is A or G
  MOD_RES (26), (27), (28), (29): Xaa is A or G or is absent
KASKAXXVPTKLNAISILYFXXXXXXXXXLKKYRGMAVSEXGXR

SEQ ID NO: 19405 - protein, 40 aa, Artificial Sequence
  Non-cyclic GFR-binding peptide
  MOD_RES (3), (4), (37), (39): Xaa is C or S
  MOD_RES (18), (19), (20), (21), (22): Xaa is A or G
  MOD_RES (23), (24), (25), (26): Xaa is A or G or is absent
APXXVPQALSPISILYIXXXXXXXXXYKQYEMIVRSXKXS

SEQ ID NO: 19406 - protein, 40 aa, Artificial Sequence
  Non-cyclic GFR-binding peptide
  MOD_RES (5), (6), (38), (40): Xaa is C or S
ASKAXXVPTKLSPISILYKDKGVVTYLKYHYGMAVSEXGX

SEQ ID NO: 19407 - protein, 35 aa, Artificial Sequence
  Non-cyclic GFR-binding peptide
  MOD_RES (1), (33), (35): Xaa is C or S
XVPTELSPISMLYIDENEKVVYKQYEDMVVEGXGX

SEQ ID NO: 19408 - protein, 44 aa, Artificial Sequence
  Non-cyclic GFR-binding peptide
  MOD_RES (6), (7), (41), (43): Xaa is C or S
  MOD_RES (21), (22), (23), (24), (25): Xaa is A or G
  MOD_RES (26), (27), (28), (29): Xaa is A or G or is absent
YVPKPXXAPTKLSPISVLYIXXXXXXXXXYKQYENMVVRSXGXH

SEQ ID NO: 19409 - protein, 41 aa, Artificial Sequence
  Non-cyclic GFR-binding peptide
  MOD_RES (3), (4), (38), (40): Xaa is C or S
  MOD_RES (18), (19), (20), (21), (22): Xaa is A or G
  MOD_RES (23), (24), (25), (26): Xaa is A or G or is absent
ASXXVPARLEPISILYLXXXXXXXXXKFKYEDMVVEAXGXR

SEQ ID NO: 19410 - protein, 35 aa, Artificial Sequence
  Non-cyclic GFR-binding peptide
  MOD_RES (33), (35): Xaa is C or S
  MOD_RES (14), (15), (16), (17), (18): Xaa is A or G
  MOD_RES (19), (20), (21), (22): Xaa is A or G or is absent
VSQDLEPISILYLXXXXXXXXXKFKYEMIVKSXKX

SEQ ID NO: 19411 - protein, 36 aa, Artificial Sequence
  Non-cyclic GFR-binding peptide
  MOD_RES (2), (3), (36): Xaa is C or S
  MOD_RES (17), (18), (19), (20), (21): Xaa is A or G
  MOD_RES (22), (23), (24), (25): Xaa is A or G or is absent
PXXVPQDLEPISILYLXXXXXXXXXKFKYEMVVKSX

SEQ ID NO: 19412 - protein, 39 aa, Artificial Sequence
  Non-cyclic GFR-binding peptide
  MOD_RES (4), (5), (39): Xaa is C or S
  MOD_RES (19), (20), (21), (22), (23): Xaa is A or G
  MOD_RES (24), (25), (26), (27): Xaa is A or G or is absent
PKAXXVPTELEPISMLYLXXXXXXXXXKFKYEEMVVEGX

SEQ ID NO: 19413 - protein, 41 aa, Artificial Sequence
  Non-cyclic GFR-binding peptide
  MOD_RES (6), (7), (39), (41): Xaa is C or S
KASKAXXVPTKLSPISILYIDKGVVTYYKQYEGMAVSEXGX

SEQ ID NO: 19414 - protein, 41 aa, Artificial Sequence
  Non-cyclic GFR-binding peptide
  MOD_RES (6), (40): Xaa is C or S
  MOD_RES (20), (21), (22), (23), (24): Xaa is A or G
  MOD_RES (25), (26), (27), (28): Xaa is A or G or is absent
VTKPTXAPTKLSPISVLYIXXXXXXXXXYKQYENMVVRSXG

SEQ ID NO: 19415 - protein, 39 aa, Artificial Sequence
  Non-cyclic GFR-binding peptide
  MOD_RES (3), (4), (37), (39): Xaa is C or S
  MOD_RES (18), (19), (20), (21), (22): Xaa is A or G
  MOD_RES (23), (24), (25), (26): Xaa is A or G or is absent
APXXVPQALEPISILYLXXXXXXXXXKFKYEMIVRSXKX

SEQ ID NO: 19416 - protein, 38 aa, Artificial Sequence
  Non-cyclic GFR-binding peptide
  MOD_RES (2), (3), (36), (38): Xaa is C or S
  MOD_RES (17), (18), (19), (20), (21): Xaa is A or G
  MOD_RES (22), (23), (24), (25): Xaa is A or G or is absent
PXXVPQALSPISILYIXXXXXXXXXYKQYEMIVRSXKX

SEQ ID NO: 19417 - protein, 35 aa, Artificial Sequence
  Non-cyclic GFR-binding peptide
  MOD_RES (4), (5): Xaa is C or S
AAPXXVPQALEPISILYLVGRKPKVKFKYEMIVRS

SEQ ID NO: 19418 - protein, 38 aa, Artificial Sequence
  Non-cyclic GFR-binding peptide
  MOD_RES (4), (5): Xaa is C or S
  MOD_RES (19), (20), (21), (22), (23): Xaa is A or G
  MOD_RES (24), (25), (26), (27): Xaa is A or G or is absent
PKAXXVPTELSPISMLYIXXXXXXXXXYKQYEEMVVEG

SEQ ID NO: 19419 - protein, 31 aa, Artificial Sequence
  Non-cyclic GFR-binding peptide
  MOD_RES (1), (1): Xaa is C or S
XVSQDLEPISILYLIGKTPKIKFKYEMIVKS

SEQ ID NO: 19420 - protein, 32 aa, Artificial Sequence
  Non-cyclic GFR-binding peptide
  MOD_RES (14), (15), (16), (17), (18): Xaa is A or G
  MOD_RES (19), (20), (21), (22): Xaa is A or G or is absent
VPTELEPISMLYLXXXXXXXXXKFKYEEMVVE

SEQ ID NO: 19421 - protein, 34 aa, Artificial Sequence
  Non-cyclic GFR-binding peptide
  MOD_RES (4), (4): Xaa is C or S
KPTXAPTKLSPISVLYIDDSSNVIYKQYENMVVR

SEQ ID NO: 19422 - protein, 36 aa, Artificial Sequence
  Non-cyclic GFR-binding peptide
  MOD_RES (3), (4): Xaa is C or S
  MOD_RES (18), (19), (20), (21), (22): Xaa is A or G
  MOD_RES (23), (24), (25), (26): Xaa is A or G or is absent
SPXXVPQDLEPISILYLXXXXXXXXXKFKYEMVVKS

SEQ ID NO: 19423 - protein, 33 aa, Artificial Sequence
  Non-cyclic GFR-binding peptide
  MOD_RES (1), (2): Xaa is C or S
XXVPARLEPISILYLDAANNVVKFKYEDMVVEA

SEQ ID NO: 19424 - protein, 37 aa, Artificial Sequence
  Non-cyclic GFR-binding peptide
  MOD_RES (5), (6): Xaa is C or S
ASKAXXVPTKLSPISILYKDKGVVTYLKYHYGMAVSE

SEQ ID NO: 19425 - protein, 37 aa, Artificial Sequence
  Non-cyclic GFR-binding peptide
  MOD_RES (1), (2), (34), (36): Xaa is C or S
XXAPTKLEPISVLYLDDSSNVIKFKYENMVVRSXGXH

SEQ ID NO: 19426 - protein, 35 aa, Artificial Sequence
  Non-cyclic GFR-binding peptide
  MOD_RES (1), (2): Xaa is C or S
  MOD_RES (16), (17), (18), (19), (20): Xaa is A or G
  MOD_RES (21), (22), (23), (24): Xaa is A or G or is absent
XXAPTQLSPISVLYIXXXXXXXXXYKQYENMVVRA

SEQ ID NO: 19427 - protein, 38 aa, Artificial Sequence
  Non-cyclic GFR-binding peptide
  MOD_RES (6), (7): Xaa is C or S
AAPASXXVPARLNAISILYFDAANNVVLKKYRDMVVEA

SEQ ID NO: 19428 - protein, 41 aa, Artificial Sequence
  Non-cyclic GFR-binding peptide
  MOD_RES (4), (5), (38), (40): Xaa is C or S
  MOD_RES (19), (20), (21), (22), (23): Xaa is A or G
  MOD_RES (24), (25), (26), (27): Xaa is A or G or is absent
ASPXXVSQDLEPISILYLXXXXXXXXXKFKYEMIVKSXKXS

SEQ ID NO: 19429 - protein, 39 aa, Artificial Sequence
  Non-cyclic GFR-binding peptide
  MOD_RES (6), (7), (38): Xaa is C or S
ASASPXXVSQDLSPISILYIIGKTPKIYKQYEMIVKSXK

SEQ ID NO: 19430 - protein, 41 aa, Artificial Sequence
  Non-cyclic GFR-binding peptide
  MOD_RES (6), (38), (40): Xaa is C or S
VTKPTXAPTKLSPISVLYIDDSSNVIYKQYENMVVRSXGXH

SEQ ID NO: 19431 - protein, 39 aa, Artificial Sequence
  Non-cyclic GFR-binding peptide
  MOD_RES (3), (4), (37), (39): Xaa is C or S
  MOD_RES (18), (19), (20), (21), (22): Xaa is A or G
  MOD_RES (23), (24), (25), (26): Xaa is A or G or is absent
SPXXVSQDLEPISILYLXXXXXXXXXKFKYEMIVKSXKX

SEQ ID NO: 19432 - protein, 35 aa, Artificial Sequence
  Non-cyclic GFR-binding peptide
  MOD_RES (1), (2), (35): Xaa is C or S
  MOD_RES (16), (17), (18), (19), (20): Xaa is A or G
  MOD_RES (21), (22), (23), (24): Xaa is A or G or is absent
XXVSQDLEPISILYLXXXXXXXXXKFKYEMIVKSX

SEQ ID NO: 19433 - protein, 39 aa, Artificial Sequence
  Non-cyclic GFR-binding peptide
  MOD_RES (6), (7), (39): Xaa is C or S
AVPKAXXAPTKLEPISVLYLDSSNNVIKFKYENMVVKAX

SEQ ID NO: 19434 - protein, 34 aa, Artificial Sequence
  Non-cyclic GFR-binding peptide
  MOD_RES (32), (34): Xaa is C or S
APTKLSPISVLYIDDSSNVIYKQYENMVVRSXGX

SEQ ID NO: 19435 - protein, 42 aa, Artificial Sequence
  Non-cyclic GFR-binding peptide
  MOD_RES (4), (5), (39), (41): Xaa is C or S
  MOD_RES (19), (20), (21), (22), (23): Xaa is A or G
  MOD_RES (24), (25), (26), (27): Xaa is A or G or is absent
PKAXXVPTELEPISMLYLXXXXXXXXXKFKYEEMVVEGXGXR

SEQ ID NO: 19436 - protein, 38 aa, Artificial Sequence
  Non-cyclic GFR-binding peptide
  MOD_RES (4), (5), (37): Xaa is C or S
PKAXXVPTELEPISMLYLDENEKVVKFKYEDMVVEGXG

SEQ ID NO: 19437 - protein, 32 aa, Artificial Sequence
  Non-cyclic GFR-binding peptide
  MOD_RES (1), (2): Xaa is C or S
XXVPTKLNAISILYFDKGVVTYLKKYRGMAVS

SEQ ID NO: 19438 - protein, 33 aa, Artificial Sequence
  Non-cyclic GFR-binding peptide
  MOD_RES (31), (33): Xaa is C or S
VSQDLSPISILYIIGKTPKIYKQYEMIVKSXKX

SEQ ID NO: 19439 - protein, 40 aa, Artificial Sequence
  Non-cyclic GFR-binding peptide
  MOD_RES (5), (6), (40): Xaa is C or S
  MOD_RES (20), (21), (22), (23), (24): Xaa is A or G
  MOD_RES (25), (26), (27), (28): Xaa is A or G or is absent
VPKAXXAPTKLEPISVLYLXXXXXXXXXKFKYENMVVKAX

SEQ ID NO: 19440 - protein, 39 aa, Artificial Sequence
  Non-cyclic GFR-binding peptide
  MOD_RES (5), (6): Xaa is C or S
  MOD_RES (20), (21), (22), (23), (24): Xaa is A or G
  MOD_RES (25), (26), (27), (28): Xaa is A or G or is absent
VPKPXXAPTKLEPISVLYLXXXXXXXXXKFKYENMVVRS

SEQ ID NO: 19441 - protein, 34 aa, Artificial Sequence
  Non-cyclic GFR-binding peptide
  MOD_RES (1), (32), (34): Xaa is C or S
XVPQDLSPISILYIVGRTPKVYKQYEMVVKSXKX

SEQ ID NO: 19442 - protein, 40 aa, Artificial Sequence
  Non-cyclic GFR-binding peptide
  MOD_RES (5), (6), (37), (39): Xaa is C or S
SASPXXVSQDLEPISILYLIGKTPKIKFKYEMIVKSXKXS

SEQ ID NO: 19443 - protein, 40 aa, Artificial Sequence
  Non-cyclic GFR-binding peptide
  MOD_RES (5), (6), (39): Xaa is C or S
  MOD_RES (20), (21), (22), (23), (24): Xaa is A or G
  MOD_RES (25), (26), (27), (28): Xaa is A or G or is absent
SASPXXVPQDLSPISILYIXXXXXXXXXYKQYEMVVKSXK

SEQ ID NO: 19444 - protein, 39 aa, Artificial Sequence
  Non-cyclic GFR-binding peptide
  MOD_RES (3), (4), (36), (38): Xaa is C or S
KAXXAPTKLSPISVLYIDSSNNVIYKQYENMVVKAXGXH

SEQ ID NO: 19445 - protein, 41 aa, Artificial Sequence
  Non-cyclic GFR-binding peptide
  MOD_RES (4), (5), (38), (40): Xaa is C or S
  MOD_RES (19), (20), (21), (22), (23): Xaa is A or G
  MOD_RES (24), (25), (26), (27): Xaa is A or G or is absent
AAPXXVPQALSPISILYIXXXXXXXXXYKQYEMIVRSXKXS

SEQ ID NO: 19446 - protein, 40 aa, Artificial Sequence
  Non-cyclic GFR-binding peptide
  MOD_RES (4), (5), (39): Xaa is C or S
  MOD_RES (19), (20), (21), (22), (23): Xaa is A or G
  MOD_RES (24), (25), (26), (27): Xaa is A or G or is absent
PASXXVPARLNAISILYFXXXXXXXXXLKKYRDMVVEAXG

SEQ ID NO: 19447 - protein, 35 aa, Artificial Sequence
  Non-cyclic GFR-binding peptide
  MOD_RES (3), (4): Xaa is C or S
KPXXAPTQLSPISVLYIDDSSNVIYKQYENMVVRA

SEQ ID NO: 19448 - protein, 41 aa, Artificial Sequence
  Non-cyclic GFR-binding peptide
  MOD_RES (5), (6), (39), (41): Xaa is C or S
  MOD_RES (20), (21), (22), (23), (24): Xaa is A or G
  MOD_RES (25), (26), (27), (28): Xaa is A or G or is absent
SASPXXVPQDLEPISILYLXXXXXXXXXKFKYEMVVKSXKX

SEQ ID NO: 19449 - protein, 38 aa, Artificial Sequence
  Non-cyclic GFR-binding peptide
  MOD_RES (2), (3), (37): Xaa is C or S
  MOD_RES (17), (18), (19), (20), (21): Xaa is A or G
  MOD_RES (22), (23), (24), (25): Xaa is A or G or is absent
AXXVPTKLNAISILYFXXXXXXXXXLKKYRGMAVSEXG

SEQ ID NO: 19450 - protein, 40 aa, Artificial Sequence
  Non-cyclic GFR-binding peptide
  MOD_RES (5), (6), (39): Xaa is C or S
  MOD_RES (20), (21), (22), (23), (24): Xaa is A or G
  MOD_RES (25), (26), (27), (28): Xaa is A or G or is absent
SAAPXXVPQALEPISILYLXXXXXXXXXKFKYEMIVRSXK

SEQ ID NO: 19451 - protein, 36 aa, Artificial Sequence
  Non-cyclic GFR-binding peptide
  MOD_RES (2), (3): Xaa is C or S
  MOD_RES (17), (18), (19), (20), (21): Xaa is A or G
  MOD_RES (22), (23), (24), (25): Xaa is A or G or is absent
SXXVPARLSPISILYKXXXXXXXXXLKYHYDMVVEA

SEQ ID NO: 19452 - protein, 41 aa, Artificial Sequence
  Non-cyclic GFR-binding peptide
  MOD_RES (6), (7), (41): Xaa is C or S
  MOD_RES (21), (22), (23), (24), (25): Xaa is A or G
  MOD_RES (26), (27), (28), (29): Xaa is A or G or is absent
TVPKPXXAPTQLSPISVLYIXXXXXXXXXYKQYENMVVRAX

SEQ ID NO: 19453 - protein, 41 aa, Artificial Sequence
  Non-cyclic GFR-binding peptide
  MOD_RES (6), (7), (38), (40): Xaa is C or S
ASASPXXVPQDLEPISILYLVGRTPKVKFKYEMVVKSXKXS

SEQ ID NO: 19454 - protein, 34 aa, Artificial Sequence
  Non-cyclic GFR-binding peptide
  MOD_RES (2), (3): Xaa is C or S
PXXAPTKLEPISVLYLDDSSNVIKFKYENMVVRS

SEQ ID NO: 19455 - protein, 37 aa, Artificial Sequence
  Non-cyclic GFR-binding peptide
  MOD_RES (34), (36): Xaa is C or S
  MOD_RES (14), (15), (16), (17), (18): Xaa is A or G
  MOD_RES (19), (20), (21), (22): Xaa is A or G or is absent
VPTELSPISMLYIXXXXXXXXXYKQYEEMVVEGXGXR

SEQ ID NO: 19456 - protein, 37 aa, Artificial Sequence
  Non-cyclic GFR-binding peptide
  MOD_RES (1), (2), (36): Xaa is C or S
  MOD_RES (16), (17), (18), (19), (20): Xaa is A or G
  MOD_RES (21), (22), (23), (24): Xaa is A or G or is absent
XXVPTELSPISMLYIXXXXXXXXXYKQYEEMVVEGXG

SEQ ID NO: 19457 - protein, 38 aa, Artificial Sequence
  Non-cyclic GFR-binding peptide
  MOD_RES (6), (7), (38): Xaa is C or S
ASASPXXVPQDLEPISILYLVGRTPKVKFKYEMVVKSX

SEQ ID NO: 19458 - protein, 37 aa, Artificial Sequence
  Non-cyclic GFR-binding peptide
  MOD_RES (5), (6): Xaa is C or S
ASKAXXVPTKLSPISILYIDKGVVTYYKQYEGMAVSE

SEQ ID NO: 19459 - protein, 40 aa, Artificial Sequence
  Non-cyclic GFR-binding peptide
  MOD_RES (4), (5), (37), (39): Xaa is C or S
PKAXXVPTELEPISMLYLDENEKVVKFKYEDMVVEGXGXR

SEQ ID NO: 19460 - protein, 39 aa, Artificial Sequence
  Non-cyclic GFR-binding peptide
  MOD_RES (5), (6), (39): Xaa is C or S
  MOD_RES (20), (21), (22), (23), (24): Xaa is A or G
  MOD_RES (25), (26), (27), (28): Xaa is A or G or is absent
SAAPXXVPQALSPISILYIXXXXXXXXXYKQYEMIVRSX

SEQ ID NO: 19461 - protein, 38 aa, Artificial Sequence
  Non-cyclic GFR-binding peptide
  MOD_RES (1), (2), (36), (38): Xaa is C or S
  MOD_RES (16), (17), (18), (19), (20): Xaa is A or G
  MOD_RES (21), (22), (23), (24): Xaa is A or G or is absent
XXAPTKLSPISVLYIXXXXXXXXXYKQYENMVVRSXGX

SEQ ID NO: 19462 - protein, 35 aa, Artificial Sequence
  Non-cyclic GFR-binding peptide
  MOD_RES (2), (3), (34): Xaa is C or S
PXXVPQDLSPISILYIVGRTPKVYKQYEMVVKSXK

SEQ ID NO: 19463 - protein, 41 aa, Artificial Sequence
  Non-cyclic GFR-binding peptide
  MOD_RES (7), (41): Xaa is C or S
  MOD_RES (21), (22), (23), (24), (25): Xaa is A or G
  MOD_RES (26), (27), (28), (29): Xaa is A or G or is absent
HVTKPTXAPTKLSPISVLYIXXXXXXXXXYKQYENMVVRSX

SEQ ID NO: 19464 - protein, 41 aa, Artificial Sequence
  Non-cyclic GFR-binding peptide
  MOD_RES (4), (5), (39), (41): Xaa is C or S
  MOD_RES (19), (20), (21), (22), (23): Xaa is A or G
  MOD_RES (24), (25), (26), (27): Xaa is A or G or is absent
PKAXXAPTKLEPISVLYLXXXXXXXXXKFKYENMVVKAXGX

SEQ ID NO: 19465 - protein, 38 aa, Artificial Sequence
  Non-cyclic GFR-binding peptide
  MOD_RES (1), (35), (37): Xaa is C or S
  MOD_RES (15), (16), (17), (18), (19): Xaa is A or G
  MOD_RES (20), (21), (22), (23): Xaa is A or G or is absent
XVPTELSPISMLYIXXXXXXXXXYKQYEEMVVEGXGXR

SEQ ID NO: 19466 - protein, 37 aa, Artificial Sequence
  Non-cyclic GFR-binding peptide
  MOD_RES (1), (34), (36): Xaa is C or S
  MOD_RES (15), (16), (17), (18), (19): Xaa is A or G
  MOD_RES (20), (21), (22), (23): Xaa is A or G or is absent
XVPQALSPISILYIXXXXXXXXXYKQYEMIVRSXKXS

SEQ ID NO: 19467 - protein, 35 aa, Artificial Sequence
  Non-cyclic GFR-binding peptide
  MOD_RES (1), (2), (34): Xaa is C or S
XXAPTQLSPISVLYIDDSSNVIYKQYENMVVRAXG

SEQ ID NO: 19468 - protein, 34 aa, Artificial Sequence
  Non-cyclic GFR-binding peptide
  MOD_RES (1), (2), (34): Xaa is C or S
XXAPTKLSPISVLYIDSSNNVIYKQYENMVVKAX

SEQ ID NO: 19469 - protein, 36 aa, Artificial Sequence
  Non-cyclic GFR-binding peptide
  MOD_RES (34), (36): Xaa is C or S
  MOD_RES (14), (15), (16), (17), (18): Xaa is A or G
  MOD_RES (19), (20), (21), (22): Xaa is A or G or is absent
APTKLEPISVLYLXXXXXXXXXKFKYENMVVKAXGX

SEQ ID NO: 19470 - protein, 36 aa, Artificial Sequence
  Non-cyclic GFR-binding peptide
  MOD_RES (1), (35): Xaa is C or S
  MOD_RES (15), (16), (17), (18), (19): Xaa is A or G
  MOD_RES (20), (21), (22), (23): Xaa is A or G or is absent
XAPTKLSPISVLYIXXXXXXXXXYKQYENMVVKAXG

SEQ ID NO: 19471 - protein, 38 aa, Artificial Sequence
  Non-cyclic GFR-binding peptide
  MOD_RES (4), (38): Xaa is C or S
  MOD_RES (18), (19), (20), (21), (22): Xaa is A or G
  MOD_RES (23), (24), (25), (26): Xaa is A or G or is absent
KPTXAPTKLSPISVLYIXXXXXXXXXYKQYENMVVRSX

SEQ ID NO: 19472 - protein, 36 aa, Artificial Sequence
  Non-cyclic GFR-binding peptide
  MOD_RES (1), (35): Xaa is C or S
  MOD_RES (15), (16), (17), (18), (19): Xaa is A or G
  MOD_RES (20), (21), (22), (23): Xaa is A or G or is absent
XVPTELEPISMLYLXXXXXXXXXKFKYEDMVVEGXG

SEQ ID NO: 19473 - protein, 34 aa, Artificial Sequence
  Non-cyclic GFR-binding peptide
  MOD_RES (1), (1): Xaa is C or S
  MOD_RES (15), (16), (17), (18), (19): Xaa is A or G
  MOD_RES (20), (21), (22), (23): Xaa is A or G or is absent
XAPTQLSPISVLYIXXXXXXXXXYKQYENMVVRA

SEQ ID NO: 19474 - protein, 36 aa, Artificial Sequence
  Non-cyclic GFR-binding peptide
  MOD_RES (5), (6): Xaa is C or S
VPKPXXAPTQLEPISVLYLDDSSNVIKFKYENMVVR

SEQ ID NO: 19475 - protein, 39 aa, Artificial Sequence
  Non-cyclic GFR-binding peptide
  MOD_RES (6), (7): Xaa is C or S
  MOD_RES (21), (22), (23), (24), (25): Xaa is A or G
  MOD_RES (26), (27), (28), (29): Xaa is A or G or is absent
AVPKAXXAPTKLSPISVLYIXXXXXXXXXYKQYENMVVK

SEQ ID NO: 19476 - protein, 36 aa, Artificial Sequence
  Non-cyclic GFR-binding peptide
  MOD_RES (4), (36): Xaa is C or S
KPTXAPTKLEPISVLYLDDSSNVIKFKYENMVVRSX

SEQ ID NO: 19477 - protein, 35 aa, Artificial Sequence
  Non-cyclic GFR-binding peptide
  MOD_RES (1), (1): Xaa is C or S
  MOD_RES (15), (16), (17), (18), (19): Xaa is A or G
  MOD_RES (20), (21), (22), (23): Xaa is A or G or is absent
XVPTKLEPISVLYLXXXXXXXXXKFKYEEGMSVAE

SEQ ID NO: 19478 - protein, 39 aa, Artificial Sequence
  Non-cyclic GFR-binding peptide
  MOD_RES (2), (3), (36), (38): Xaa is C or S
  MOD_RES (17), (18), (19), (20), (21): Xaa is A or G
  MOD_RES (22), (23), (24), (25): Xaa is A or G or is absent
PXXVPQDLEPISILYLXXXXXXXXXKFKYEMVVKSXKXS

SEQ ID NO: 19479 - protein, 41 aa, Artificial Sequence
  Non-cyclic GFR-binding peptide
  MOD_RES (5), (39), (41): Xaa is C or S
  MOD_RES (19), (20), (21), (22), (23): Xaa is A or G
  MOD_RES (24), (25), (26), (27): Xaa is A or G or is absent
TKPTXAPTKLEPISVLYLXXXXXXXXXKFKYENMVVRSXGX

SEQ ID NO: 19480 - protein, 38 aa, Artificial Sequence
  Non-cyclic GFR-binding peptide
  MOD_RES (5), (6), (38): Xaa is C or S
APASXXVPARLEPISILYLDAANNVVKFKYEDMVVEAX

SEQ ID NO: 19481 - protein, 39 aa, Artificial Sequence
  Non-cyclic GFR-binding peptide
  MOD_RES (6), (7): Xaa is C or S
  MOD_RES (21), (22), (23), (24), (25): Xaa is A or G
  MOD_RES (26), (27), (28), (29): Xaa is A or G or is absent
KIPKAXXVPTELSPISMLYIXXXXXXXXXYKQYEDMVVE

SEQ ID NO: 19482 - protein, 38 aa, Artificial Sequence
  Non-cyclic GFR-binding peptide
  MOD_RES (3), (4), (36), (38): Xaa is C or S
KAXXAPTKLEPISVLYLDSSNNVIKFKYENMVVKAXGX

SEQ ID NO: 19483 - protein, 36 aa, Artificial Sequence
  Non-cyclic GFR-binding peptide
  MOD_RES (3), (4), (35): Xaa is C or S
SPXXVPQDLSPISILYIVGRTPKVYKQYEMVVKSXK

SEQ ID NO: 19484 - protein, 37 aa, Artificial Sequence
  Non-cyclic GFR-binding peptide
  MOD_RES (1), (2), (34), (36): Xaa is C or S
XXVPARLNAISILYFDAANNVVLKKYRDMVVEAXGXR

SEQ ID NO: 19485 - protein, 38 aa, Artificial Sequence
  Non-cyclic GFR-binding peptide
  MOD_RES (2), (3), (35), (37): Xaa is C or S
AXXAPTKLEPISVLYLDSSNNVIKFKYENMVVKAXGXH

SEQ ID NO: 19486 - protein, 34 aa, Artificial Sequence
  Non-cyclic GFR-binding peptide
  MOD_RES (2), (3): Xaa is C or S
AXXAPTKLSPISVLYIDSSNNVIYKQYENMVVKA

SEQ ID NO: 19487 - protein, 36 aa, Artificial Sequence
  Non-cyclic GFR-binding peptide
  MOD_RES (4), (5), (36): Xaa is C or S
ASPXXVSQDLSPISILYIIGKTPKIYKQYEMIVKSX

SEQ ID NO: 19488 - protein, 33 aa, Artificial Sequence
  Non-cyclic GFR-binding peptide
  MOD_RES (14), (15), (16), (17), (18): Xaa is A or G
  MOD_RES (19), (20), (21), (22): Xaa is A or G or is absent
VPARLSPISILYKXXXXXXXXXLKYHYDMVVEA

SEQ ID NO: 19489 - protein, 37 aa, Artificial Sequence
  Non-cyclic GFR-binding peptide
  MOD_RES (1), (2), (34), (36): Xaa is C or S
XXAPTKLSPISVLYIDDSSNVIYKQYENMVVRSXGXH

SEQ ID NO: 19490 - protein, 39 aa, Artificial Sequence
  Non-cyclic GFR-binding peptide
  MOD_RES (4), (5), (37), (39): Xaa is C or S
PASXXVPARLNAISILYFDAANNVVLKKYRDMVVEAXGX

SEQ ID NO: 19491 - protein, 36 aa, Artificial Sequence
  Non-cyclic GFR-binding peptide
  MOD_RES (2), (3): Xaa is C or S
  MOD_RES (17), (18), (19), (20), (21): Xaa is A or G
  MOD_RES (22), (23), (24), (25): Xaa is A or G or is absent
AXXVPTKLSPISILYIXXXXXXXXXYKQYEGMAVSE

SEQ ID NO: 19492 - protein, 37 aa, Artificial Sequence
  Non-cyclic GFR-binding peptide
  MOD_RES (4), (5): Xaa is C or S
GKAXXVPTKLSPISVLYIDDMGVPTYKQYEEGMSVAE

SEQ ID NO: 19493 - protein, 42 aa, Artificial Sequence
  Non-cyclic GFR-binding peptide
  MOD_RES (5), (6), (40), (42): Xaa is C or S
  MOD_RES (20), (21), (22), (23), (24): Xaa is A or G
  MOD_RES (25), (26), (27), (28): Xaa is A or G or is absent
VPKAXXAPTKLSPISVLYIXXXXXXXXXYKQYENMVVKAXGX

SEQ ID NO: 19494 - protein, 41 aa, Artificial Sequence
  Non-cyclic GFR-binding peptide
  MOD_RES (6), (7), (41): Xaa is C or S
  MOD_RES (21), (22), (23), (24), (25): Xaa is A or G
  MOD_RES (26), (27), (28), (29): Xaa is A or G or is absent
AVPKAXXAPTKLEPISVLYLXXXXXXXXXKFKYENMVVKAX

SEQ ID NO: 19495 - protein, 40 aa, Artificial Sequence
  Non-cyclic GFR-binding peptide
  MOD_RES (5), (6), (40): Xaa is C or S
  MOD_RES (20), (21), (22), (23), (24): Xaa is A or G
  MOD_RES (25), (26), (27), (28): Xaa is A or G or is absent
VPKAXXAPTKLSPISVLYIXXXXXXXXXYKQYENMVVKAX

SEQ ID NO: 19496 - protein, 39 aa, Artificial Sequence
  Non-cyclic GFR-binding peptide
  MOD_RES (4), (5), (39): Xaa is C or S
  MOD_RES (19), (20), (21), (22), (23): Xaa is A or G
  MOD_RES (24), (25), (26), (27): Xaa is A or G or is absent
PKPXXAPTKLEPISVLYLXXXXXXXXXKFKYENMVVRSX

SEQ ID NO: 19497 - protein, 34 aa, Artificial Sequence
  Non-cyclic GFR-binding peptide
  MOD_RES (1), (2): Xaa is C or S
  MOD_RES (16), (17), (18), (19), (20): Xaa is A or G
  MOD_RES (21), (22), (23), (24): Xaa is A or G or is absent
XXAPTQLSPISVLYIXXXXXXXXXYKQYENMVVR

SEQ ID NO: 19498 - protein, 36 aa, Artificial Sequence
  Non-cyclic GFR-binding peptide
  MOD_RES (3), (4): Xaa is C or S
  MOD_RES (18), (19), (20), (21), (22): Xaa is A or G
  MOD_RES (23), (24), (25), (26): Xaa is A or G or is absent
KAXXAPTKLEPISVLYLXXXXXXXXXKFKYENMVVK

SEQ ID NO: 19499 - protein, 33 aa, Artificial Sequence
  Non-cyclic GFR-binding peptide
  MOD_RES (31), (33): Xaa is C or S
VPQDLSPISILYIVGRTPKVYKQYEMVVKSXKX

SEQ ID NO: 19500 - protein, 36 aa, Artificial Sequence
  Non-cyclic GFR-binding peptide
  MOD_RES (5), (6): Xaa is C or S
ASKAXXVPTKLSPISILYKDKGVVTYLKYHYGMAVS

SEQ ID NO: 19501 - protein, 38 aa, Artificial Sequence
  Non-cyclic GFR-binding peptide
  MOD_RES (5), (6), (38): Xaa is C or S
VPKPXXAPTQLEPISVLYLDDSSNVIKFKYENMVVRAX

SEQ ID NO: 19502 - protein, 37 aa, Artificial Sequence
  Non-cyclic GFR-binding peptide
  MOD_RES (5), (6): Xaa is C or S
IPKAXXVPTELEPISMLYLDEYDKVVKFKYEEMVVEG

SEQ ID NO: 19503 - protein, 42 aa, Artificial Sequence
  Non-cyclic GFR-binding peptide
  MOD_RES (4), (5), (39), (41): Xaa is C or S
  MOD_RES (19), (20), (21), (22), (23): Xaa is A or G
  MOD_RES (24), (25), (26), (27): Xaa is A or G or is absent
SKAXXVPTKLNAISILYFXXXXXXXXXLKKYRGMAVSEXGXR

SEQ ID NO: 19504 - protein, 41 aa, Artificial Sequence
  Non-cyclic GFR-binding peptide
  MOD_RES (5), (6), (38), (40): Xaa is C or S
IPKAXXVPTELEPISMLYLDENEKVVKFKYEDMVVEGXGXR

SEQ ID NO: 19505 - protein, 34 aa, Artificial Sequence
  Non-cyclic GFR-binding peptide
  MOD_RES (1), (1): Xaa is C or S
  MOD_RES (15), (16), (17), (18), (19): Xaa is A or G
  MOD_RES (20), (21), (22), (23): Xaa is A or G or is absent
XVPARLNAISILYFXXXXXXXXXLKKYRDMVVEA

SEQ ID NO: 19506 - protein, 35 aa, Artificial Sequence
  Non-cyclic GFR-binding peptide
  MOD_RES (3), (4), (35): Xaa is C or S
SPXXVSQDLSPISILYIIGKTPKIYKQYEMIVKSX

SEQ ID NO: 19507 - protein, 43 aa, Artificial Sequence
  Non-cyclic GFR-binding peptide
  MOD_RES (6), (7), (40), (42): Xaa is C or S
KVGKAXXVPTKLSPISVLYIDDMGVPTYKQYEEGMSVAEXGXR

SEQ ID NO: 19508 - protein, 38 aa, Artificial Sequence
  Non-cyclic GFR-binding peptide
  MOD_RES (35), (37): Xaa is C or S
  MOD_RES (14), (15), (16), (17), (18): Xaa is A or G
  MOD_RES (19), (20), (21), (22): Xaa is A or G or is absent
VPTKLSPISVLYIXXXXXXXXXYKQYEEGMSVAEXGXR

SEQ ID NO: 19509 - protein, 39 aa, Artificial Sequence
  Non-cyclic GFR-binding peptide
  MOD_RES (2), (3), (37), (39): Xaa is C or S
  MOD_RES (17), (18), (19), (20), (21): Xaa is A or G
  MOD_RES (22), (23), (24), (25): Xaa is A or G or is absent
AXXAPTKLSPISVLYIXXXXXXXXXYKQYENMVVKAXGX

SEQ ID NO: 19510 - protein, 36 aa, Artificial Sequence
  Non-cyclic GFR-binding peptide
  MOD_RES (1), (2), (36): Xaa is C or S
  MOD_RES (16), (17), (18), (19), (20): Xaa is A or G
  MOD_RES (21), (22), (23), (24): Xaa is A or G or is absent
XXVPARLSPISILYKXXXXXXXXXLKYHYDMVVEAX

SEQ ID NO: 19511 - protein, 43 aa, Artificial Sequence
  Non-cyclic GFR-binding peptide
  MOD_RES (6), (40), (42): Xaa is C or S
  MOD_RES (20), (21), (22), (23), (24): Xaa is A or G
  MOD_RES (25), (26), (27), (28): Xaa is A or G or is absent
VTKPTXAPTKLSPISVLYIXXXXXXXXXYKQYENMVVRSXGXH

SEQ ID NO: 19512 - protein, 32 aa, Artificial Sequence
  Non-cyclic GFR-binding peptide
  MOD_RES (32), (32): Xaa is C or S
VPARLEPISILYLDAANNVVKFKYEDMVVEAX

SEQ ID NO: 19513 - protein, 39 aa, Artificial Sequence
  Non-cyclic GFR-binding peptide
  MOD_RES (5), (6), (38): Xaa is C or S
IPKAXXVPTELSPISMLYIDENEKVVYKQYEDMVVEGXG

SEQ ID NO: 19514 - protein, 40 aa, Artificial Sequence
  Non-cyclic GFR-binding peptide
  MOD_RES (4), (5), (38), (40): Xaa is C or S
  MOD_RES (19), (20), (21), (22), (23): Xaa is A or G
  MOD_RES (24), (25), (26), (27): Xaa is A or G or is absent
AAPXXVPQALEPISILYLXXXXXXXXXKFKYEMIVRSXKX

SEQ ID NO: 19515 - protein, 33 aa, Artificial Sequence
  Non-cyclic GFR-binding peptide
  MOD_RES (14), (15), (16), (17), (18): Xaa is A or G
  MOD_RES (19), (20), (21), (22): Xaa is A or G or is absent
VPTKLSPISILYKXXXXXXXXXLKYHYGMAVSE

SEQ ID NO: 19516 - protein, 38 aa, Artificial Sequence
  Non-cyclic GFR-binding peptide
  MOD_RES (2), (3), (37): Xaa is C or S
  MOD_RES (17), (18), (19), (20), (21): Xaa is A or G
  MOD_RES (22), (23), (24), (25): Xaa is A or G or is absent
PXXAPTQLEPISVLYLXXXXXXXXXKFKYENMVVRAXG

SEQ ID NO: 19517 - protein, 40 aa, Artificial Sequence
  Non-cyclic GFR-binding peptide
  MOD_RES (6), (7), (40): Xaa is C or S
  MOD_RES (21), (22), (23), (24), (25): Xaa is A or G
  MOD_RES (26), (27), (28), (29): Xaa is A or G or is absent
ASASPXXVSQDLEPISILYLXXXXXXXXXKFKYEMIVKSX

SEQ ID NO: 19518 - protein, 41 aa, Artificial Sequence
  Non-cyclic GFR-binding peptide
  MOD_RES (6), (7), (40): Xaa is C or S
  MOD_RES (21), (22), (23), (24), (25): Xaa is A or G
  MOD_RES (26), (27), (28), (29): Xaa is A or G or is absent
ASASPXXVSQDLSPISILYIXXXXXXXXXYKQYEMIVKSXK

SEQ ID NO: 19519 - protein, 40 aa, Artificial Sequence
  Non-cyclic GFR-binding peptide
  MOD_RES (6), (7), (39): Xaa is C or S
AAPASXXVPARLSPISILYKDAANNVVLKYHYDMVVEAXG

SEQ ID NO: 19520 - protein, 37 aa, Artificial Sequence
  Non-cyclic GFR-binding peptide
  MOD_RES (1), (34), (36): Xaa is C or S
  MOD_RES (15), (16), (17), (18), (19): Xaa is A or G
  MOD_RES (20), (21), (22), (23): Xaa is A or G or is absent
XVPQDLSPISILYIXXXXXXXXXYKQYEMVVKSXKXS

SEQ ID NO: 19521 - protein, 37 aa, Artificial Sequence
  Non-cyclic GFR-binding peptide
  MOD_RES (3), (4): Xaa is C or S
  MOD_RES (18), (19), (20), (21), (22): Xaa is A or G
  MOD_RES (23), (24), (25), (26): Xaa is A or G or is absent
KAXXVPTELSPISMLYIXXXXXXXXXYKQYEDMVVEG

SEQ ID NO: 19522 - protein, 40 aa, Artificial Sequence
  Non-cyclic GFR-binding peptide
  MOD_RES (3), (4), (37), (39): Xaa is C or S
  MOD_RES (18), (19), (20), (21), (22): Xaa is A or G
  MOD_RES (23), (24), (25), (26): Xaa is A or G or is absent
SPXXVSQDLSPISILYIXXXXXXXXXYKQYEMIVKSXKXS

SEQ ID NO: 19523 - protein, 37 aa, Artificial Sequence
  Non-cyclic GFR-binding peptide
  MOD_RES (2), (3), (37): Xaa is C or S
  MOD_RES (17), (18), (19), (20), (21): Xaa is A or G
  MOD_RES (22), (23), (24), (25): Xaa is A or G or is absent
PXXAPTQLSPISVLYIXXXXXXXXXYKQYENMVVRAX

SEQ ID NO: 19524 - protein, 34 aa, Artificial Sequence
  Non-cyclic GFR-binding peptide
  MOD_RES (31), (33): Xaa is C or S
VSQDLEPISILYLIGKTPKIKFKYEMIVKSXKXS

SEQ ID NO: 19525 - protein, 35 aa, Artificial Sequence
  Non-cyclic GFR-binding peptide
  MOD_RES (1), (2), (34): Xaa is C or S
XXAPTKLEPISVLYLDDSSNVIKFKYENMVVRSXG

SEQ ID NO: 19526 - protein, 37 aa, Artificial Sequence
  Non-cyclic GFR-binding peptide
  MOD_RES (3), (4), (37): Xaa is C or S
  MOD_RES (18), (19), (20), (21), (22): Xaa is A or G
  MOD_RES (23), (24), (25), (26): Xaa is A or G or is absent
SPXXVPQDLSPISILYIXXXXXXXXXYKQYEMVVKSX

SEQ ID NO: 19527 - protein, 37 aa, Artificial Sequence
  Non-cyclic GFR-binding peptide
  MOD_RES (34), (36): Xaa is C or S
  MOD_RES (14), (15), (16), (17), (18): Xaa is A or G
  MOD_RES (19), (20), (21), (22): Xaa is A or G or is absent
VPTKLNAISILYFXXXXXXXXXLKKYRGMAVSEXGXR

SEQ ID NO: 19528 - protein, 36 aa, Artificial Sequence
  Non-cyclic GFR-binding peptide
  MOD_RES (1), (33), (35): Xaa is C or S
XAPTKLEPISVLYLDDSSNVIKFKYENMVVRSXGXH

SEQ ID NO: 19529 - protein, 35 aa, Artificial Sequence
  Non-cyclic GFR-binding peptide
  MOD_RES (34), (34): Xaa is C or S
  MOD_RES (14), (15), (16), (17), (18): Xaa is A or G
  MOD_RES (19), (20), (21), (22): Xaa is A or G or is absent
APTKLSPISVLYIXXXXXXXXXYKQYENMVVKAXG

SEQ ID NO: 19530 - protein, 37 aa, Artificial Sequence
  Non-cyclic GFR-binding peptide
  MOD_RES (1), (35), (37): Xaa is C or S
  MOD_RES (15), (16), (17), (18), (19): Xaa is A or G
  MOD_RES (20), (21), (22), (23): Xaa is A or G or is absent
XVPTKLSPISILYKXXXXXXXXXLKYHYGMAVSEXGX

SEQ ID NO: 19531 - protein, 31 aa, Artificial Sequence
  Non-cyclic GFR-binding peptide
  MOD_RES (1), (1): Xaa is C or S
XVPTELSPISMLYIDEYDKVVYKQYEEMVVE

SEQ ID NO: 19532 - protein, 34 aa, Artificial Sequence
  Non-cyclic GFR-binding peptide
  MOD_RES (1), (34): Xaa is C or S
  MOD_RES (15), (16), (17), (18), (19): Xaa is A or G
  MOD_RES (20), (21), (22), (23): Xaa is A or G or is absent
XVPQALEPISILYLXXXXXXXXXKFKYEMIVRSX

SEQ ID NO: 19533 - protein, 39 aa, Artificial Sequence
  Non-cyclic GFR-binding peptide
  MOD_RES (2), (3), (37), (39): Xaa is C or S
  MOD_RES (17), (18), (19), (20), (21): Xaa is A or G
  MOD_RES (22), (23), (24), (25): Xaa is A or G or is absent
SXXVPARLSPISILYKXXXXXXXXXLKYHYDMVVEAXGX

SEQ ID NO: 19534 - protein, 41 aa, Artificial Sequence
  Non-cyclic GFR-binding peptide
  MOD_RES (5), (6), (40): Xaa is C or S
  MOD_RES (20), (21), (22), (23), (24): Xaa is A or G
  MOD_RES (25), (26), (27), (28): Xaa is A or G or is absent
APASXXVPARLNAISILYFXXXXXXXXXLKKYRDMVVEAXG

SEQ ID NO: 19535 - protein, 34 aa, Artificial Sequence
  Non-cyclic GFR-binding peptide
  MOD_RES (1), (2): Xaa is C or S
  MOD_RES (16), (17), (18), (19), (20): Xaa is A or G
  MOD_RES (21), (22), (23), (24): Xaa is A or G or is absent
XXVPARLNAISILYFXXXXXXXXXLKKYRDMVVE

SEQ ID NO: 19536 - protein, 37 aa, Artificial Sequence
  Non-cyclic GFR-binding peptide
  MOD_RES (5), (6), (37): Xaa is C or S
SASPXXVSQDLEPISILYLIGKTPKIKFKYEMIVKSX

SEQ ID NO: 19537 - protein, 39 aa, Artificial Sequence
  Non-cyclic GFR-binding peptide
  MOD_RES (4), (5), (39): Xaa is C or S
  MOD_RES (19), (20), (21), (22), (23): Xaa is A or G
  MOD_RES (24), (25), (26), (27): Xaa is A or G or is absent
PKAXXVPTELSPISMLYIXXXXXXXXXYKQYEDMVVEGX

SEQ ID NO: 19538 - protein, 35 aa, Artificial Sequence
  Non-cyclic GFR-binding peptide
  MOD_RES (2), (3): Xaa is C or S
  MOD_RES (17), (18), (19), (20), (21): Xaa is A or G
  MOD_RES (22), (23), (24), (25): Xaa is A or G or is absent
PXXAPTQLEPISVLYLXXXXXXXXXKFKYENMVVR

SEQ ID NO: 19539 - protein, 39 aa, Artificial Sequence
  Non-cyclic GFR-binding peptide
  MOD_RES (3), (4), (38): Xaa is C or S
  MOD_RES (18), (19), (20), (21), (22): Xaa is A or G
  MOD_RES (23), (24), (25), (26): Xaa is A or G or is absent
KAXXAPTKLEPISVLYLXXXXXXXXXKFKYENMVVKAXG

SEQ ID NO: 19540 - protein, 36 aa, Artificial Sequence
  Non-cyclic GFR-binding peptide
  MOD_RES (1), (33), (35): Xaa is C or S
XAPTKLSPISVLYIDDSSNVIYKQYENMVVRSXGXH

SEQ ID NO: 19541 - protein, 34 aa, Artificial Sequence
  Non-cyclic GFR-binding peptide
  MOD_RES (3), (4): Xaa is C or S
ASXXVPARLNAISILYFDAANNVVLKKYRDMVVE

SEQ ID NO: 19542 - protein, 33 aa, Artificial Sequence
  Non-cyclic GFR-binding peptide
  MOD_RES (1), (32): Xaa is C or S
XVSQDLEPISILYLIGKTPKIKFKYEMIVKSXK

SEQ ID NO: 19543 - protein, 37 aa, Artificial Sequence
  Non-cyclic GFR-binding peptide
  MOD_RES (4), (5): Xaa is C or S
GKAXXVPTKLEPISVLYLDDMGVPTKFKYEEGMSVAE

SEQ ID NO: 19544 - protein, 33 aa, Artificial Sequence
  Non-cyclic GFR-binding peptide
  MOD_RES (1), (33): Xaa is C or S
XVPARLNAISILYFDAANNVVLKKYRDMVVEAX

SEQ ID NO: 19545 - protein, 41 aa, Artificial Sequence
  Non-cyclic GFR-binding peptide
  MOD_RES (6), (7), (39), (41): Xaa is C or S
SIPKAXXVPTELEPISMLYLDEYDKVVKFKYEEMVVEGXGX

SEQ ID NO: 19546 - protein, 37 aa, Artificial Sequence
  Non-cyclic GFR-binding peptide
  MOD_RES (3), (4): Xaa is C or S
  MOD_RES (18), (19), (20), (21), (22): Xaa is A or G
  MOD_RES (23), (24), (25), (26): Xaa is A or G or is absent
KAXXVPTKLSPISILYKXXXXXXXXXLKYHYGMAVSE

SEQ ID NO: 19547 - protein, 31 aa, Artificial Sequence
  Non-cyclic GFR-binding peptide
  MOD_RES (1), (1): Xaa is C or S
XAPTKLSPISVLYIDSSNNVIYKQYENMVVK

SEQ ID NO: 19548 - protein, 38 aa, Artificial Sequence
  Non-cyclic GFR-binding peptide
  MOD_RES (1), (2), (36), (38): Xaa is C or S
  MOD_RES (16), (17), (18), (19), (20): Xaa is A or G
  MOD_RES (21), (22), (23), (24): Xaa is A or G or is absent
XXAPTQLEPISVLYLXXXXXXXXXKFKYENMVVRAXGX

SEQ ID NO: 19549 - protein, 33 aa, Artificial Sequence
  Non-cyclic GFR-binding peptide
  MOD_RES (1), (33): Xaa is C or S
XAPTKLSPISVLYIDSSNNVIYKQYENMVVKAX

SEQ ID NO: 19550 - protein, 36 aa, Artificial Sequence
  Non-cyclic GFR-binding peptide
  MOD_RES (1), (2), (36): Xaa is C or S
  MOD_RES (16), (17), (18), (19), (20): Xaa is A or G
  MOD_RES (21), (22), (23), (24): Xaa is A or G or is absent
XXVPTKLNAISILYFXXXXXXXXXLKKYRGMAVSEX

SEQ ID NO: 19551 - protein, 37 aa, Artificial Sequence
  Non-cyclic GFR-binding peptide
  MOD_RES (3), (4): Xaa is C or S
  MOD_RES (18), (19), (20), (21), (22): Xaa is A or G
  MOD_RES (23), (24), (25), (26): Xaa is A or G or is absent
KPXXAPTKLEPISVLYLXXXXXXXXXKFKYENMVVRS

SEQ ID NO: 19552 - protein, 38 aa, Artificial Sequence
  Non-cyclic GFR-binding peptide
  MOD_RES (5), (6): Xaa is C or S
  MOD_RES (20), (21), (22), (23), (24): Xaa is A or G
  MOD_RES (25), (26), (27), (28): Xaa is A or G or is absent
ASKAXXVPTKLSPISILYKXXXXXXXXXLKYHYGMAVS

SEQ ID NO: 19553 - protein, 41 aa, Artificial Sequence
  Non-cyclic GFR-binding peptide
  MOD_RES (5), (6), (40): Xaa is C or S
  MOD_RES (20), (21), (22), (23), (24): Xaa is A or G
  MOD_RES (25), (26), (27), (28): Xaa is A or G or is absent
VPKPXXAPTKLEPISVLYLXXXXXXXXXKFKYENMVVRSXG

SEQ ID NO: 19554 - protein, 41 aa, Artificial Sequence
  Non-cyclic GFR-binding peptide
  MOD_RES (5), (6), (39), (41): Xaa is C or S
VGKAXXVPTKLSPISVLYIDDMGVPTYKQYEEGMSVAEXGX

SEQ ID NO: 19555 - protein, 41 aa, Artificial Sequence
  Non-cyclic GFR-binding peptide
  MOD_RES (3), (4), (38), (40): Xaa is C or S
  MOD_RES (18), (19), (20), (21), (22): Xaa is A or G
  MOD_RES (23), (24), (25), (26): Xaa is A or G or is absent
KPXXAPTKLSPISVLYIXXXXXXXXXYKQYENMVVRSXGXH

SEQ ID NO: 19556 - protein, 34 aa, Artificial Sequence
  Non-cyclic GFR-binding peptide
  MOD_RES (1), (2), (33): Xaa is C or S
XXVSQDLEPISILYLIGKTPKIKFKYEMIVKSXK

SEQ ID NO: 19557 - protein, 39 aa, Artificial Sequence
  Non-cyclic GFR-binding peptide
  MOD_RES (5), (6), (39): Xaa is C or S
VGKAXXVPTKLEPISVLYLDDMGVPTKFKYEEGMSVAEX

SEQ ID NO: 19558 - protein, 36 aa, Artificial Sequence
  Non-cyclic GFR-binding peptide
  MOD_RES (3), (4), (36): Xaa is C or S
KPXXAPTQLEPISVLYLDDSSNVIKFKYENMVVRAX

SEQ ID NO: 19559 - protein, 36 aa, Artificial Sequence
  Non-cyclic GFR-binding peptide
  MOD_RES (3), (4), (36): Xaa is C or S
KAXXVPTELSPISMLYIDENEKVVYKQYEDMVVEGX

SEQ ID NO: 19560 - protein, 37 aa, Artificial Sequence
  Non-cyclic GFR-binding peptide
  MOD_RES (2), (3), (35), (37): Xaa is C or S
PXXAPTQLEPISVLYLDDSSNVIKFKYENMVVRAXGX

SEQ ID NO: 19561 - protein, 38 aa, Artificial Sequence
  Non-cyclic GFR-binding peptide
  MOD_RES (4), (5), (37): Xaa is C or S
SKAXXVPTKLSPISILYIDKGVVTYYKQYEGMAVSEXG

SEQ ID NO: 19562 - protein, 37 aa, Artificial Sequence
  Non-cyclic GFR-binding peptide
  MOD_RES (6), (6): Xaa is C or S
VTKPTXAPTKLSPISVLYIDDSSNVIYKQYENMVVRS

SEQ ID NO: 19563 - protein, 36 aa, Artificial Sequence
  Non-cyclic GFR-binding peptide
  MOD_RES (1), (2), (35): Xaa is C or S
XXVPTKLSPISVLYIDDMGVPTYKQYEEGMSVAEXG

SEQ ID NO: 19564 - protein, 43 aa, Artificial Sequence
  Non-cyclic GFR-binding peptide
  MOD_RES (6), (7), (40), (42): Xaa is C or S
  MOD_RES (21), (22), (23), (24), (25): Xaa is A or G
  MOD_RES (26), (27), (28), (29): Xaa is A or G or is absent
ASASPXXVPQDLEPISILYLXXXXXXXXXKFKYEMVVKSXKXS

SEQ ID NO: 19565 - protein, 40 aa, Artificial Sequence
  Non-cyclic GFR-binding peptide
  MOD_RES (5), (6), (39): Xaa is C or S
  MOD_RES (20), (21), (22), (23), (24): Xaa is A or G
  MOD_RES (25), (26), (27), (28): Xaa is A or G or is absent
SASPXXVSQDLSPISILYIXXXXXXXXXYKQYEMIVKSXK

SEQ ID NO: 19566 - protein, 41 aa, Artificial Sequence
  Non-cyclic GFR-binding peptide
  MOD_RES (6), (7), (40): Xaa is C or S
  MOD_RES (21), (22), (23), (24), (25): Xaa is A or G
  MOD_RES (26), (27), (28), (29): Xaa is A or G or is absent
ASASPXXVSQDLEPISILYLXXXXXXXXXKFKYEMIVKSXK

SEQ ID NO: 19567 - protein, 32 aa, Artificial Sequence
  Non-cyclic GFR-binding peptide
  MOD_RES (32), (32): Xaa is C or S
VPTELSPISMLYIDENEKVVYKQYEDMVVEGX

SEQ ID NO: 19568 - protein, 40 aa, Artificial Sequence
  Non-cyclic GFR-binding peptide
  MOD_RES (4), (5), (38), (40): Xaa is C or S
  MOD_RES (19), (20), (21), (22), (23): Xaa is A or G
  MOD_RES (24), (25), (26), (27): Xaa is A or G or is absent
ASPXXVSQDLEPISILYLXXXXXXXXXKFKYEMIVKSXKX

SEQ ID NO: 19569 - protein, 40 aa, Artificial Sequence
  Non-cyclic GFR-binding peptide
  MOD_RES (2), (3), (37), (39): Xaa is C or S
  MOD_RES (17), (18), (19), (20), (21): Xaa is A or G
  MOD_RES (22), (23), (24), (25): Xaa is A or G or is absent
AXXAPTKLSPISVLYIXXXXXXXXXYKQYENMVVKAXGXH

SEQ ID NO: 19570 - protein, 35 aa, Artificial Sequence
  Non-cyclic GFR-binding peptide
  MOD_RES (1), (35): Xaa is C or S
  MOD_RES (15), (16), (17), (18), (19): Xaa is A or G
  MOD_RES (20), (21), (22), (23): Xaa is A or G or is absent
XVPTELEPISMLYLXXXXXXXXXKFKYEEMVVEGX

SEQ ID NO: 19571 - protein, 38 aa, Artificial Sequence
  Non-cyclic GFR-binding peptide
  MOD_RES (2), (3), (37): Xaa is C or S
  MOD_RES (17), (18), (19), (20), (21): Xaa is A or G
  MOD_RES (22), (23), (24), (25): Xaa is A or G or is absent
AXXAPTKLEPISVLYLXXXXXXXXXKFKYENMVVKAXG

SEQ ID NO: 19572 - protein, 39 aa, Artificial Sequence
  Non-cyclic GFR-binding peptide
  MOD_RES (3), (4), (38): Xaa is C or S
  MOD_RES (18), (19), (20), (21), (22): Xaa is A or G
  MOD_RES (23), (24), (25), (26): Xaa is A or G or is absent
KPXXAPTKLEPISVLYLXXXXXXXXXKFKYENMVVRSXG

SEQ ID NO: 19573 - protein, 36 aa, Artificial Sequence
  Non-cyclic GFR-binding peptide
  MOD_RES (1), (33), (35): Xaa is C or S
XVPTELSPISMLYIDEYDKVVYKQYEEMVVEGXGXR

SEQ ID NO: 19574 - protein, 37 aa, Artificial Sequence
  Non-cyclic GFR-binding peptide
  MOD_RES (5), (37): Xaa is C or S
TKPTXAPTKLSPISVLYIDDSSNVIYKQYENMVVRSX

SEQ ID NO: 19575 - protein, 42 aa, Artificial Sequence
  Non-cyclic GFR-binding peptide
  MOD_RES (6), (7), (40), (42): Xaa is C or S
  MOD_RES (21), (22), (23), (24), (25): Xaa is A or G
  MOD_RES (26), (27), (28), (29): Xaa is A or G or is absent
ASASPXXVPQDLEPISILYLXXXXXXXXXKFKYEMVVKSXKX

SEQ ID NO: 19576 - protein, 37 aa, Artificial Sequence
  Non-cyclic GFR-binding peptide
  MOD_RES (5), (6): Xaa is C or S
VPKPXXAPTKLEPISVLYLDDSSNVIKFKYENMVVRS

SEQ ID NO: 19577 - protein, 35 aa, Artificial Sequence
  Non-cyclic GFR-binding peptide
  MOD_RES (32), (34): Xaa is C or S
VPTKLNAISILYFDKGVVTYLKKYRGMAVSEXGXR

SEQ ID NO: 19578 - protein, 32 aa, Artificial Sequence
  Non-cyclic GFR-binding peptide
  MOD_RES (1), (2): Xaa is C or S
XXVPARLNAISILYFDAANNVVLKKYRDMVVE

SEQ ID NO: 19579 - protein, 39 aa, Artificial Sequence
  Non-cyclic GFR-binding peptide
  MOD_RES (4), (5), (37), (39): Xaa is C or S
PKAXXAPTKLSPISVLYIDSSNNVIYKQYENMVVKAXGX

SEQ ID NO: 19580 - protein, 37 aa, Artificial Sequence
  Non-cyclic GFR-binding peptide
  MOD_RES (6), (7): Xaa is C or S
AAPASXXVPARLNAISILYFDAANNVVLKKYRDMVVE

SEQ ID NO: 19581 - protein, 41 aa, Artificial Sequence
  Non-cyclic GFR-binding peptide
  MOD_RES (5), (6), (39), (41): Xaa is C or S
  MOD_RES (20), (21), (22), (23), (24): Xaa is A or G
  MOD_RES (25), (26), (27), (28): Xaa is A or G or is absent
SASPXXVSQDLSPISILYIXXXXXXXXXYKQYEMIVKSXKX

SEQ ID NO: 19582 - protein, 37 aa, Artificial Sequence
  Non-cyclic GFR-binding peptide
  MOD_RES (2), (3), (35), (37): Xaa is C or S
AXXVPTKLNAISILYFDKGVVTYLKKYRGMAVSEXGX

SEQ ID NO: 19583 - protein, 33 aa, Artificial Sequence
  Non-cyclic GFR-binding peptide
  MOD_RES (3), (3): Xaa is C or S
PTXAPTKLEPISVLYLDDSSNVIKFKYENMVVR

SEQ ID NO: 19584 - protein, 39 aa, Artificial Sequence
  Non-cyclic GFR-binding peptide
  MOD_RES (2), (3), (37), (39): Xaa is C or S
  MOD_RES (17), (18), (19), (20), (21): Xaa is A or G
  MOD_RES (22), (23), (24), (25): Xaa is A or G or is absent
AXXAPTKLEPISVLYLXXXXXXXXXKFKYENMVVKAXGX

SEQ ID NO: 19585 - protein, 36 aa, Artificial Sequence
  Non-cyclic GFR-binding peptide
  MOD_RES (1), (35): Xaa is C or S
  MOD_RES (15), (16), (17), (18), (19): Xaa is A or G
  MOD_RES (20), (21), (22), (23): Xaa is A or G or is absent
XVPARLNAISILYFXXXXXXXXXLKKYRDMVVEAXG

SEQ ID NO: 19586 - protein, 34 aa, Artificial Sequence
  Non-cyclic GFR-binding peptide
  MOD_RES (32), (34): Xaa is C or S
VPTELEPISMLYLDENEKVVKFKYEDMVVEGXGX

SEQ ID NO: 19587 - protein, 33 aa, Artificial Sequence
  Non-cyclic GFR-binding peptide
  MOD_RES (1), (2): Xaa is C or S
XXVPTKLNAISILYFDKGVVTYLKKYRGMAVSE

SEQ ID NO: 19588 - protein, 37 aa, Artificial Sequence
  Non-cyclic GFR-binding peptide
  MOD_RES (1), (35), (37): Xaa is C or S
  MOD_RES (15), (16), (17), (18), (19): Xaa is A or G
  MOD_RES (20), (21), (22), (23): Xaa is A or G or is absent
XVPTELEPISMLYLXXXXXXXXXKFKYEEMVVEGXGX

SEQ ID NO: 19589 - protein, 41 aa, Artificial Sequence
  Non-cyclic GFR-binding peptide
  MOD_RES (5), (6), (40): Xaa is C or S
  MOD_RES (20), (21), (22), (23), (24): Xaa is A or G
  MOD_RES (25), (26), (27), (28): Xaa is A or G or is absent
VPKAXXAPTKLEPISVLYLXXXXXXXXXKFKYENMVVKAXG

SEQ ID NO: 19590 - protein, 36 aa, Artificial Sequence
  Non-cyclic GFR-binding peptide
  MOD_RES (1), (2), (33), (35): Xaa is C or S
XXVPQALSPISILYIVGRKPKVYKQYEMIVRSXKXS

SEQ ID NO: 19591 - protein, 35 aa, Artificial Sequence
  Non-cyclic GFR-binding peptide
  MOD_RES (1), (32), (34): Xaa is C or S
XVSQDLEPISILYLIGKTPKIKFKYEMIVKSXKXS

SEQ ID NO: 19592 - protein, 41 aa, Artificial Sequence
  Non-cyclic GFR-binding peptide
  MOD_RES (5), (6), (40): Xaa is C or S
  MOD_RES (20), (21), (22), (23), (24): Xaa is A or G
  MOD_RES (25), (26), (27), (28): Xaa is A or G or is absent
IPKAXXVPTELEPISMLYLXXXXXXXXXKFKYEEMVVEGXG

SEQ ID NO: 19593 - protein, 43 aa, Artificial Sequence
  Non-cyclic GFR-binding peptide
  MOD_RES (6), (7), (41), (43): Xaa is C or S
  MOD_RES (21), (22), (23), (24), (25): Xaa is A or G
  MOD_RES (26), (27), (28), (29): Xaa is A or G or is absent
AVPKAXXAPTKLSPISVLYIXXXXXXXXXYKQYENMVVKAXGX

SEQ ID NO: 19594 - protein, 39 aa, Artificial Sequence
  Non-cyclic GFR-binding peptide
  MOD_RES (1), (2), (36), (38): Xaa is C or S
  MOD_RES (16), (17), (18), (19), (20): Xaa is A or G
  MOD_RES (21), (22), (23), (24): Xaa is A or G or is absent
XXVPTKLNAISILYFXXXXXXXXXLKKYRGMAVSEXGXR

SEQ ID NO: 19595 - protein, 38 aa, Artificial Sequence
  Non-cyclic GFR-binding peptide
  MOD_RES (2), (3), (35), (37): Xaa is C or S
PXXAPTQLEPISVLYLDDSSNVIKFKYENMVVRAXGXH

SEQ ID NO: 19596 - protein, 32 aa, Artificial Sequence
  Non-cyclic GFR-binding peptide
  MOD_RES (14), (15), (16), (17), (18): Xaa is A or G
  MOD_RES (19), (20), (21), (22): Xaa is A or G or is absent
VPARLEPISILYLXXXXXXXXXKFKYEDMVVE

SEQ ID NO: 19597 - protein, 38 aa, Artificial Sequence
  Non-cyclic GFR-binding peptide
  MOD_RES (3), (4), (36), (38): Xaa is C or S
KAXXAPTKLSPISVLYIDSSNNVIYKQYENMVVKAXGX

SEQ ID NO: 19598 - protein, 39 aa, Artificial Sequence
  Non-cyclic GFR-binding peptide
  MOD_RES (6), (7), (38): Xaa is C or S
ASAAPXXVPQALEPISILYLVGRKPKVKFKYEMIVRSXK

SEQ ID NO: 19599 - protein, 33 aa, Artificial Sequence
  Non-cyclic GFR-binding peptide
  MOD_RES (2), (3): Xaa is C or S
AXXVPTELEPISMLYLDEYDKVVKFKYEEMVVE

SEQ ID NO: 19600 - protein, 35 aa, Artificial Sequence
  Non-cyclic GFR-binding peptide
  MOD_RES (1), (2): Xaa is C or S
  MOD_RES (16), (17), (18), (19), (20): Xaa is A or G
  MOD_RES (21), (22), (23), (24): Xaa is A or G or is absent
XXAPTKLSPISVLYIXXXXXXXXXYKQYENMVVKA

SEQ ID NO: 19601 - protein, 38 aa, Artificial Sequence
  Non-cyclic GFR-binding peptide
  MOD_RES (1), (2), (36), (38): Xaa is C or S
  MOD_RES (16), (17), (18), (19), (20): Xaa is A or G
  MOD_RES (21), (22), (23), (24): Xaa is A or G or is absent
XXAPTQLSPISVLYIXXXXXXXXXYKQYENMVVRAXGX

SEQ ID NO: 19602 - protein, 36 aa, Artificial Sequence
  Non-cyclic GFR-binding peptide
  MOD_RES (1), (33), (35): Xaa is C or S
XVPTKLNAISILYFDKGVVTYLKKYRGMAVSEXGXR

SEQ ID NO: 19603 - protein, 38 aa, Artificial Sequence
  Non-cyclic GFR-binding peptide
  MOD_RES (5), (6): Xaa is C or S
  MOD_RES (20), (21), (22), (23), (24): Xaa is A or G
  MOD_RES (25), (26), (27), (28): Xaa is A or G or is absent
APASXXVPARLNAISILYFXXXXXXXXXLKKYRDMVVE

SEQ ID NO: 19604 - protein, 43 aa, Artificial Sequence
  Non-cyclic GFR-binding peptide
  MOD_RES (4), (5), (40), (42): Xaa is C or S
  MOD_RES (19), (20), (21), (22), (23): Xaa is A or G
  MOD_RES (24), (25), (26), (27): Xaa is A or G or is absent
GKAXXVPTKLEPISVLYLXXXXXXXXXKFKYEEGMSVAEXGXR

SEQ ID NO: 19605 - protein, 38 aa, Artificial Sequence
  Non-cyclic GFR-binding peptide
  MOD_RES (6), (7): Xaa is C or S
SIPKAXXVPTELEPISMLYLDEYDKVVKFKYEEMVVEG

SEQ ID NO: 19606 - protein, 35 aa, Artificial Sequence
  Non-cyclic GFR-binding peptide
  MOD_RES (1), (2): Xaa is C or S
  MOD_RES (16), (17), (18), (19), (20): Xaa is A or G
  MOD_RES (21), (22), (23), (24): Xaa is A or G or is absent
XXAPTKLSPISVLYIXXXXXXXXXYKQYENMVVRS

SEQ ID NO: 19607 - protein, 42 aa, Artificial Sequence
  Non-cyclic GFR-binding peptide
  MOD_RES (4), (5), (39), (41): Xaa is C or S
  MOD_RES (19), (20), (21), (22), (23): Xaa is A or G
  MOD_RES (24), (25), (26), (27): Xaa is A or G or is absent
SKAXXVPTKLSPISILYIXXXXXXXXXYKQYEGMAVSEXGXR

SEQ ID NO: 19608 - protein, 38 aa, Artificial Sequence
  Non-cyclic GFR-binding peptide
  MOD_RES (4), (5), (37): Xaa is C or S
PKPXXAPTQLEPISVLYLDDSSNVIKFKYENMVVRAXG

SEQ ID NO: 19609 - protein, 40 aa, Artificial Sequence
  Non-cyclic GFR-binding peptide
  MOD_RES (5), (6), (39): Xaa is C or S
  MOD_RES (20), (21), (22), (23), (24): Xaa is A or G
  MOD_RES (25), (26), (27), (28): Xaa is A or G or is absent
SASPXXVSQDLEPISILYLXXXXXXXXXKFKYEMIVKSXK

SEQ ID NO: 19610 - protein, 33 aa, Artificial Sequence
  Non-cyclic GFR-binding peptide
  MOD_RES (32), (32): Xaa is C or S
APTQLEPISVLYLDDSSNVIKFKYENMVVRAXG

SEQ ID NO: 19611 - protein, 36 aa, Artificial Sequence
  Non-cyclic GFR-binding peptide
  MOD_RES (2), (3), (36): Xaa is C or S
AXXVPTKLSPISVLYIDDMGVPTYKQYEEGMSVAEX

SEQ ID NO: 19612 - protein, 38 aa, Artificial Sequence
  Non-cyclic GFR-binding peptide
  MOD_RES (5), (6), (38): Xaa is C or S
VPKPXXAPTKLSPISVLYIDDSSNVIYKQYENMVVRSX

SEQ ID NO: 19613 - protein, 41 aa, Artificial Sequence
  Non-cyclic GFR-binding peptide
  MOD_RES (3), (4), (38), (40): Xaa is C or S
  MOD_RES (18), (19), (20), (21), (22): Xaa is A or G
  MOD_RES (23), (24), (25), (26): Xaa is A or G or is absent
KAXXAPTKLEPISVLYLXXXXXXXXXKFKYENMVVKAXGXH

SEQ ID NO: 19614 - protein, 40 aa, Artificial Sequence
  Non-cyclic GFR-binding peptide
  MOD_RES (3), (37), (39): Xaa is C or S
  MOD_RES (17), (18), (19), (20), (21): Xaa is A or G
  MOD_RES (22), (23), (24), (25): Xaa is A or G or is absent
PTXAPTKLEPISVLYLXXXXXXXXXKFKYENMVVRSXGXH

SEQ ID NO: 19615 - protein, 35 aa, Artificial Sequence
  Non-cyclic GFR-binding peptide
  MOD_RES (2), (3): Xaa is C or S
  MOD_RES (17), (18), (19), (20), (21): Xaa is A or G
  MOD_RES (22), (23), (24), (25): Xaa is A or G or is absent
PXXAPTKLEPISVLYLXXXXXXXXXKFKYENMVVR

SEQ ID NO: 19616 - protein, 33 aa, Artificial Sequence
  Non-cyclic GFR-binding peptide
  MOD_RES (1), (2): Xaa is C or S
XXAPTQLSPISVLYIDDSSNVIYKQYENMVVRA

SEQ ID NO: 19617 - protein, 34 aa, Artificial Sequence
  Non-cyclic GFR-binding peptide
  MOD_RES (32), (34): Xaa is C or S
VPARLEPISILYLDAANNVVKFKYEDMVVEAXGX

SEQ ID NO: 19618 - protein, 32 aa, Artificial Sequence
  Non-cyclic GFR-binding peptide
  MOD_RES (1), (1): Xaa is C or S
XVPTELEPISMLYLDEYDKVVKFKYEEMVVEG

SEQ ID NO: 19619 - protein, 42 aa, Artificial Sequence
  Non-cyclic GFR-binding peptide
  MOD_RES (6), (7), (41): Xaa is C or S
  MOD_RES (21), (22), (23), (24), (25): Xaa is A or G
  MOD_RES (26), (27), (28), (29): Xaa is A or G or is absent
AVPKAXXAPTKLEPISVLYLXXXXXXXXXKFKYENMVVKAXG

SEQ ID NO: 19620 - protein, 42 aa, Artificial Sequence
  Non-cyclic GFR-binding peptide
  MOD_RES (5), (39), (41): Xaa is C or S
  MOD_RES (19), (20), (21), (22), (23): Xaa is A or G
  MOD_RES (24), (25), (26), (27): Xaa is A or G or is absent
TKPTXAPTKLSPISVLYIXXXXXXXXXYKQYENMVVRSXGXH

SEQ ID NO: 19621 - protein, 38 aa, Artificial Sequence
  Non-cyclic GFR-binding peptide
  MOD_RES (1), (35), (37): Xaa is C or S
  MOD_RES (15), (16), (17), (18), (19): Xaa is A or G
  MOD_RES (20), (21), (22), (23): Xaa is A or G or is absent
XVPTELEPISMLYLXXXXXXXXXKFKYEEMVVEGXGXR

SEQ ID NO: 19622 - protein, 39 aa, Artificial Sequence
  Non-cyclic GFR-binding peptide
  MOD_RES (6), (7): Xaa is C or S
  MOD_RES (21), (22), (23), (24), (25): Xaa is A or G
  MOD_RES (26), (27), (28), (29): Xaa is A or G or is absent
ASASPXXVPQDLSPISILYIXXXXXXXXXYKQYEMVVKS

SEQ ID NO: 19623 - protein, 40 aa, Artificial Sequence
  Non-cyclic GFR-binding peptide
  MOD_RES (4), (5), (38), (40): Xaa is C or S
GKAXXVPTKLSPISVLYIDDMGVPTYKQYEEGMSVAEXGX

SEQ ID NO: 19624 - protein, 38 aa, Artificial Sequence
  Non-cyclic GFR-binding peptide
  MOD_RES (4), (5), (36), (38): Xaa is C or S
ASPXXVSQDLSPISILYIIGKTPKIYKQYEMIVKSXKX

SEQ ID NO: 19625 - protein, 34 aa, Artificial Sequence
  Non-cyclic GFR-binding peptide
  MOD_RES (1), (34): Xaa is C or S
  MOD_RES (15), (16), (17), (18), (19): Xaa is A or G
  MOD_RES (20), (21), (22), (23): Xaa is A or G or is absent
XVSQDLEPISILYLXXXXXXXXXKFKYEMIVKSX

SEQ ID NO: 19626 - protein, 36 aa, Artificial Sequence
  Non-cyclic GFR-binding peptide
  MOD_RES (2), (3): Xaa is C or S
  MOD_RES (17), (18), (19), (20), (21): Xaa is A or G
  MOD_RES (22), (23), (24), (25): Xaa is A or G or is absent
PXXAPTKLSPISVLYIXXXXXXXXXYKQYENMVVRS

SEQ ID NO: 19627 - protein, 34 aa, Artificial Sequence
  Non-cyclic GFR-binding peptide
  MOD_RES (31), (33): Xaa is C or S
VSQDLSPISILYIIGKTPKIYKQYEMIVKSXKXS

SEQ ID NO: 19628 - protein, 39 aa, Artificial Sequence
  Non-cyclic GFR-binding peptide
  MOD_RES (3), (4), (38): Xaa is C or S
  MOD_RES (18), (19), (20), (21), (22): Xaa is A or G
  MOD_RES (23), (24), (25), (26): Xaa is A or G or is absent
KAXXVPTKLNAISILYFXXXXXXXXXLKKYRGMAVSEXG

SEQ ID NO: 19629 - protein, 37 aa, Artificial Sequence
  Non-cyclic GFR-binding peptide
  MOD_RES (3), (4), (37): Xaa is C or S
  MOD_RES (18), (19), (20), (21), (22): Xaa is A or G
  MOD_RES (23), (24), (25), (26): Xaa is A or G or is absent
SPXXVPQDLEPISILYLXXXXXXXXXKFKYEMVVKSX

SEQ ID NO: 19630 - protein, 37 aa, Artificial Sequence
  Non-cyclic GFR-binding peptide
  MOD_RES (2), (3): Xaa is C or S
  MOD_RES (17), (18), (19), (20), (21): Xaa is A or G
  MOD_RES (22), (23), (24), (25): Xaa is A or G or is absent
AXXVPTKLSPISVLYIXXXXXXXXXYKQYEEGMSVAE

SEQ ID NO: 19631 - protein, 36 aa, Artificial Sequence
  Non-cyclic GFR-binding peptide
  MOD_RES (1), (34), (36): Xaa is C or S
  MOD_RES (15), (16), (17), (18), (19): Xaa is A or G
  MOD_RES (20), (21), (22), (23): Xaa is A or G or is absent
XVPQDLSPISILYIXXXXXXXXXYKQYEMVVKSXKX

SEQ ID NO: 19632 - protein, 40 aa, Artificial Sequence
  Non-cyclic GFR-binding peptide
  MOD_RES (4), (5), (39): Xaa is C or S
  MOD_RES (19), (20), (21), (22), (23): Xaa is A or G
  MOD_RES (24), (25), (26), (27): Xaa is A or G or is absent
PKAXXVPTELEPISMLYLXXXXXXXXXKFKYEEMVVEGXG

SEQ ID NO: 19633 - protein, 37 aa, Artificial Sequence
  Non-cyclic GFR-binding peptide
  MOD_RES (34), (36): Xaa is C or S
  MOD_RES (14), (15), (16), (17), (18): Xaa is A or G
  MOD_RES (19), (20), (21), (22): Xaa is A or G or is absent
VPARLEPISILYLXXXXXXXXXKFKYEDMVVEAXGXR

SEQ ID NO: 19634 - protein, 41 aa, Artificial Sequence
  Non-cyclic GFR-binding peptide
  MOD_RES (6), (7), (39), (41): Xaa is C or S
AAPASXXVPARLEPISILYLDAANNVVKFKYEDMVVEAXGX

SEQ ID NO: 19635 - protein, 40 aa, Artificial Sequence
  Non-cyclic GFR-binding peptide
  MOD_RES (5), (6), (40): Xaa is C or S
  MOD_RES (20), (21), (22), (23), (24): Xaa is A or G
  MOD_RES (25), (26), (27), (28): Xaa is A or G or is absent
VPKPXXAPTQLEPISVLYLXXXXXXXXXKFKYENMVVRAX

SEQ ID NO: 19636 - protein, 38 aa, Artificial Sequence
  Non-cyclic GFR-binding peptide
  MOD_RES (5), (6), (38): Xaa is C or S
VPKPXXAPTKLEPISVLYLDDSSNVIKFKYENMVVRSX

SEQ ID NO: 19637 - protein, 34 aa, Artificial Sequence
  Non-cyclic GFR-binding peptide
  MOD_RES (32), (34): Xaa is C or S
APTKLEPISVLYLDDSSNVIKFKYENMVVRSXGX

SEQ ID NO: 19638 - protein, 32 aa, Artificial Sequence
  Non-cyclic GFR-binding peptide
  MOD_RES (1), (2): Xaa is C or S
XXAPTQLSPISVLYIDDSSNVIYKQYENMVVR

SEQ ID NO: 19639 - protein, 32 aa, Artificial Sequence
  Non-cyclic GFR-binding peptide
  MOD_RES (1), (1): Xaa is C or S
XAPTQLSPISVLYIDDSSNVIYKQYENMVVRA

SEQ ID NO: 19640 - protein, 38 aa, Artificial Sequence
  Non-cyclic GFR-binding peptide
  MOD_RES (3), (37): Xaa is C or S
  MOD_RES (17), (18), (19), (20), (21): Xaa is A or G
  MOD_RES (22), (23), (24), (25): Xaa is A or G or is absent
PTXAPTKLEPISVLYLXXXXXXXXXKFKYENMVVRSXG

SEQ ID NO: 19641 - protein, 39 aa, Artificial Sequence
  Non-cyclic GFR-binding peptide
  MOD_RES (5), (6), (38): Xaa is C or S
IPKAXXVPTELSPISMLYIDEYDKVVYKQYEEMVVEGXG

SEQ ID NO: 19642 - protein, 31 aa, Artificial Sequence
  Non-cyclic GFR-binding peptide
VPTELSPISMLYIDEYDKVVYKQYEEMVVEG

SEQ ID NO: 19643 - protein, 35 aa, Artificial Sequence
  Non-cyclic GFR-binding peptide
  MOD_RES (32), (34): Xaa is C or S
APTKLEPISVLYLDSSNNVIKFKYENMVVKAXGXH

SEQ ID NO: 19644 - protein, 36 aa, Artificial Sequence
  Non-cyclic GFR-binding peptide
  MOD_RES (34), (36): Xaa is C or S
  MOD_RES (14), (15), (16), (17), (18): Xaa is A or G
  MOD_RES (19), (20), (21), (22): Xaa is A or G or is absent
VPARLNAISILYFXXXXXXXXXLKKYRDMVVEAXGX

SEQ ID NO: 19645 - protein, 40 aa, Artificial Sequence
  Non-cyclic GFR-binding peptide
  MOD_RES (2), (3), (37), (39): Xaa is C or S
  MOD_RES (17), (18), (19), (20), (21): Xaa is A or G
  MOD_RES (22), (23), (24), (25): Xaa is A or G or is absent
AXXVPTELEPISMLYLXXXXXXXXXKFKYEEMVVEGXGXR

SEQ ID NO: 19646 - protein, 38 aa, Artificial Sequence
  Non-cyclic GFR-binding peptide
  MOD_RES (5), (6), (38): Xaa is C or S
APASXXVPARLNAISILYFDAANNVVLKKYRDMVVEAX

SEQ ID NO: 19647 - protein, 35 aa, Artificial Sequence
  Non-cyclic GFR-binding peptide
  MOD_RES (1), (2): Xaa is C or S
  MOD_RES (16), (17), (18), (19), (20): Xaa is A or G
  MOD_RES (21), (22), (23), (24): Xaa is A or G or is absent
XXVPARLEPISILYLXXXXXXXXXKFKYEDMVVEA

SEQ ID NO: 19648 - protein, 37 aa, Artificial Sequence
  Non-cyclic GFR-binding peptide
  MOD_RES (3), (4), (36): Xaa is C or S
KAXXVPTKLSPISILYIDKGVVTYYKQYEGMAVSEXG

SEQ ID NO: 19649 - protein, 36 aa, Artificial Sequence
  Non-cyclic GFR-binding peptide
  MOD_RES (2), (34), (36): Xaa is C or S
TXAPTKLEPISVLYLDDSSNVIKFKYENMVVRSXGX

SEQ ID NO: 19650 - protein, 40 aa, Artificial Sequence
  Non-cyclic GFR-binding peptide
  MOD_RES (5), (6), (40): Xaa is C or S
  MOD_RES (20), (21), (22), (23), (24): Xaa is A or G
  MOD_RES (25), (26), (27), (28): Xaa is A or G or is absent
ASKAXXVPTKLSPISILYKXXXXXXXXXLKYHYGMAVSEX

SEQ ID NO: 19651 - protein, 38 aa, Artificial Sequence
  Non-cyclic GFR-binding peptide
  MOD_RES (1), (2), (36), (38): Xaa is C or S
  MOD_RES (16), (17), (18), (19), (20): Xaa is A or G
  MOD_RES (21), (22), (23), (24): Xaa is A or G or is absent
XXVPTELSPISMLYIXXXXXXXXXYKQYEEMVVEGXGX

SEQ ID NO: 19652 - protein, 39 aa, Artificial Sequence
  Non-cyclic GFR-binding peptide
  MOD_RES (6), (7): Xaa is C or S
  MOD_RES (21), (22), (23), (24), (25): Xaa is A or G
  MOD_RES (26), (27), (28), (29): Xaa is A or G or is absent
YVPKPXXAPTKLEPISVLYLXXXXXXXXXKFKYENMVVR

SEQ ID NO: 19653 - protein, 30 aa, Artificial Sequence
  Non-cyclic GFR-binding peptide
APTQLEPISVLYLDDSSNVIKFKYENMVVR

SEQ ID NO: 19654 - protein, 31 aa, Artificial Sequence
  Non-cyclic GFR-binding peptide
VPTELEPISMLYLDEYDKVVKFKYEEMVVEG

SEQ ID NO: 19655 - protein, 37 aa, Artificial Sequence
  Non-cyclic GFR-binding peptide
  MOD_RES (2), (3), (37): Xaa is C or S
  MOD_RES (17), (18), (19), (20), (21): Xaa is A or G
  MOD_RES (22), (23), (24), (25): Xaa is A or G or is absent
AXXAPTKLEPISVLYLXXXXXXXXXKFKYENMVVKAX

SEQ ID NO: 19656 - protein, 35 aa, Artificial Sequence
  Non-cyclic GFR-binding peptide
  MOD_RES (32), (34): Xaa is C or S
APTQLEPISVLYLDDSSNVIKFKYENMVVRAXGXH

SEQ ID NO: 19657 - protein, 41 aa, Artificial Sequence
  Non-cyclic GFR-binding peptide
  MOD_RES (5), (6), (38), (40): Xaa is C or S
APASXXVPARLNAISILYFDAANNVVLKKYRDMVVEAXGXR

SEQ ID NO: 19658 - protein, 31 aa, Artificial Sequence
  Non-cyclic GFR-binding peptide
  MOD_RES (1), (1): Xaa is C or S
XVPTKLSPISILYIDKGVVTYYKQYEGMAVS

SEQ ID NO: 19659 - protein, 33 aa, Artificial Sequence
  Non-cyclic GFR-binding peptide
  MOD_RES (1), (1): Xaa is C or S
  MOD_RES (15), (16), (17), (18), (19): Xaa is A or G
  MOD_RES (20), (21), (22), (23): Xaa is A or G or is absent
XAPTQLEPISVLYLXXXXXXXXXKFKYENMVVR

SEQ ID NO: 19660 - protein, 35 aa, Artificial Sequence
  Non-cyclic GFR-binding peptide
  MOD_RES (1), (2), (33), (35): Xaa is C or S
XXVPQDLSPISILYIVGRTPKVYKQYEMVVKSXKX

SEQ ID NO: 19661 - protein, 36 aa, Artificial Sequence
  Non-cyclic GFR-binding peptide
  MOD_RES (3), (4), (35): Xaa is C or S
APXXVPQALEPISILYLVGRKPKVKFKYEMIVRSXK

SEQ ID NO: 19662 - protein, 44 aa, Artificial Sequence
  Non-cyclic GFR-binding peptide
  MOD_RES (6), (7), (41), (43): Xaa is C or S
  MOD_RES (21), (22), (23), (24), (25): Xaa is A or G
  MOD_RES (26), (27), (28), (29): Xaa is A or G or is absent
SIPKAXXVPTELEPISMLYLXXXXXXXXXKFKYEEMVVEGXGXR

SEQ ID NO: 19663 - protein, 39 aa, Artificial Sequence
  Non-cyclic GFR-binding peptide
  MOD_RES (6), (7), (39): Xaa is C or S
SIPKAXXVPTELSPISMLYIDEYDKVVYKQYEEMVVEGX

SEQ ID NO: 19664 - protein, 38 aa, Artificial Sequence
  Non-cyclic GFR-binding peptide
  MOD_RES (2), (3), (37): Xaa is C or S
  MOD_RES (17), (18), (19), (20), (21): Xaa is A or G
  MOD_RES (22), (23), (24), (25): Xaa is A or G or is absent
SXXVPARLSPISILYKXXXXXXXXXLKYHYDMVVEAXG

SEQ ID NO: 19665 - protein, 37 aa, Artificial Sequence
  Non-cyclic GFR-binding peptide
  MOD_RES (2), (36): Xaa is C or S
  MOD_RES (16), (17), (18), (19), (20): Xaa is A or G
  MOD_RES (21), (22), (23), (24): Xaa is A or G or is absent
TXAPTKLSPISVLYIXXXXXXXXXYKQYENMVVRSXG

SEQ ID NO: 19666 - protein, 39 aa, Artificial Sequence
  Non-cyclic GFR-binding peptide
  MOD_RES (3), (37), (39): Xaa is C or S
  MOD_RES (17), (18), (19), (20), (21): Xaa is A or G
  MOD_RES (22), (23), (24), (25): Xaa is A or G or is absent
PTXAPTKLEPISVLYLXXXXXXXXXKFKYENMVVRSXGX

SEQ ID NO: 19667 - protein, 41 aa, Artificial Sequence
  Non-cyclic GFR-binding peptide
  MOD_RES (4), (5), (39), (41): Xaa is C or S
  MOD_RES (19), (20), (21), (22), (23): Xaa is A or G
  MOD_RES (24), (25), (26), (27): Xaa is A or G or is absent
PKAXXAPTKLSPISVLYIXXXXXXXXXYKQYENMVVKAXGX

SEQ ID NO: 19668 - protein, 35 aa, Artificial Sequence
  Non-cyclic GFR-binding peptide
  MOD_RES (2), (3): Xaa is C or S
  MOD_RES (17), (18), (19), (20), (21): Xaa is A or G
  MOD_RES (22), (23), (24), (25): Xaa is A or G or is absent
PXXVPQDLSPISILYIXXXXXXXXXYKQYEMVVKS

SEQ ID NO: 19669 - protein, 35 aa, Artificial Sequence
  Non-cyclic GFR-binding peptide
  MOD_RES (32), (34): Xaa is C or S
VPTELSPISMLYIDEYDKVVYKQYEEMVVEGXGXR

SEQ ID NO: 19670 - protein, 33 aa, Artificial Sequence
  Non-cyclic GFR-binding peptide
  MOD_RES (1), (1): Xaa is C or S
XVPTKLSPISVLYIDDMGVPTYKQYEEGMSVAE

SEQ ID NO: 19671 - protein, 34 aa, Artificial Sequence
  Non-cyclic GFR-binding peptide
  MOD_RES (1), (1): Xaa is C or S
  MOD_RES (15), (16), (17), (18), (19): Xaa is A or G
  MOD_RES (20), (21), (22), (23): Xaa is A or G or is absent
XVPTKLSPISILYKXXXXXXXXXLKYHYGMAVSE

SEQ ID NO: 19672 - protein, 39 aa, Artificial Sequence
  Non-cyclic GFR-binding peptide
  MOD_RES (2), (36), (38): Xaa is C or S
  MOD_RES (16), (17), (18), (19), (20): Xaa is A or G
  MOD_RES (21), (22), (23), (24): Xaa is A or G or is absent
TXAPTKLEPISVLYLXXXXXXXXXKFKYENMVVRSXGXH

SEQ ID NO: 19673 - protein, 33 aa, Artificial Sequence
  Non-cyclic GFR-binding peptide
  MOD_RES (1), (2): Xaa is C or S
XXAPTQLEPISVLYLDDSSNVIKFKYENMVVRA

SEQ ID NO: 19674 - protein, 33 aa, Artificial Sequence
  Non-cyclic GFR-binding peptide
  MOD_RES (2), (3): Xaa is C or S
PXXAPTQLSPISVLYIDDSSNVIYKQYENMVVR

SEQ ID NO: 19675 - protein, 38 aa, Artificial Sequence
  Non-cyclic GFR-binding peptide
  MOD_RES (6), (7): Xaa is C or S
AVPKAXXAPTKLEPISVLYLDSSNNVIKFKYENMVVKA

SEQ ID NO: 19676 - protein, 34 aa, Artificial Sequence
  Non-cyclic GFR-binding peptide
  MOD_RES (1), (34): Xaa is C or S
  MOD_RES (15), (16), (17), (18), (19): Xaa is A or G
  MOD_RES (20), (21), (22), (23): Xaa is A or G or is absent
XVSQDLSPISILYIXXXXXXXXXYKQYEMIVKSX

SEQ ID NO: 19677 - protein, 34 aa, Artificial Sequence
  Non-cyclic GFR-binding peptide
  MOD_RES (34), (34): Xaa is C or S
  MOD_RES (14), (15), (16), (17), (18): Xaa is A or G
  MOD_RES (19), (20), (21), (22): Xaa is A or G or is absent
VPARLEPISILYLXXXXXXXXXKFKYEDMVVEAX

SEQ ID NO: 19678 - protein, 36 aa, Artificial Sequence
  Non-cyclic GFR-binding peptide
  MOD_RES (5), (6): Xaa is C or S
SASPXXVSQDLEPISILYLIGKTPKIKFKYEMIVKS

SEQ ID NO: 19679 - protein, 38 aa, Artificial Sequence
  Non-cyclic GFR-binding peptide
  MOD_RES (1), (2), (36), (38): Xaa is C or S
  MOD_RES (16), (17), (18), (19), (20): Xaa is A or G
  MOD_RES (21), (22), (23), (24): Xaa is A or G or is absent
XXVPARLEPISILYLXXXXXXXXXKFKYEDMVVEAXGX

SEQ ID NO: 19680 - protein, 41 aa, Artificial Sequence
  Non-cyclic GFR-binding peptide
  MOD_RES (3), (4), (38), (40): Xaa is C or S
  MOD_RES (18), (19), (20), (21), (22): Xaa is A or G
  MOD_RES (23), (24), (25), (26): Xaa is A or G or is absent
KPXXAPTKLEPISVLYLXXXXXXXXXKFKYENMVVRSXGXH

SEQ ID NO: 19681 - protein, 35 aa, Artificial Sequence
  Non-cyclic GFR-binding peptide
  MOD_RES (1), (2): Xaa is C or S
  MOD_RES (16), (17), (18), (19), (20): Xaa is A or G
  MOD_RES (21), (22), (23), (24): Xaa is A or G or is absent
XXVPTELSPISMLYIXXXXXXXXXYKQYEDMVVEG

SEQ ID NO: 19682 - protein, 41 aa, Artificial Sequence
  Non-cyclic GFR-binding peptide
  MOD_RES (4), (5), (39), (41): Xaa is C or S
  MOD_RES (19), (20), (21), (22), (23): Xaa is A or G
  MOD_RES (24), (25), (26), (27): Xaa is A or G or is absent
PASXXVPARLSPISILYKXXXXXXXXXLKYHYDMVVEAXGX

SEQ ID NO: 19683 - protein, 35 aa, Artificial Sequence
  Non-cyclic GFR-binding peptide
  MOD_RES (1), (2), (35): Xaa is C or S
  MOD_RES (16), (17), (18), (19), (20): Xaa is A or G
  MOD_RES (21), (22), (23), (24): Xaa is A or G or is absent
XXVPQALSPISILYIXXXXXXXXXYKQYEMIVRSX

SEQ ID NO: 19684 - protein, 37 aa, Artificial Sequence
  Non-cyclic GFR-binding peptide
  MOD_RES (4), (5), (37): Xaa is C or S
PASXXVPARLNAISILYFDAANNVVLKKYRDMVVEAX

SEQ ID NO: 19685 - protein, 41 aa, Artificial Sequence
  Non-cyclic GFR-binding peptide
  MOD_RES (6), (7), (41): Xaa is C or S
  MOD_RES (21), (22), (23), (24), (25): Xaa is A or G
  MOD_RES (26), (27), (28), (29): Xaa is A or G or is absent
AVPKAXXAPTKLSPISVLYIXXXXXXXXXYKQYENMVVKAX

SEQ ID NO: 19686 - protein, 35 aa, Artificial Sequence
  Non-cyclic GFR-binding peptide
  MOD_RES (5), (5): Xaa is C or S
TKPTXAPTKLEPISVLYLDDSSNVIKFKYENMVVR

SEQ ID NO: 19687 - protein, 37 aa, Artificial Sequence
  Non-cyclic GFR-binding peptide
  MOD_RES (3), (4), (36): Xaa is C or S
KAXXVPTELEPISMLYLDENEKVVKFKYEDMVVEGXG

SEQ ID NO: 19688 - protein, 33 aa, Artificial Sequence
  Non-cyclic GFR-binding peptide
  MOD_RES (1), (2): Xaa is C or S
XXAPTKLSPISVLYIDDSSNVIYKQYENMVVRS

SEQ ID NO: 19689 - protein, 36 aa, Artificial Sequence
  Non-cyclic GFR-binding peptide
  MOD_RES (3), (3): Xaa is C or S
  MOD_RES (17), (18), (19), (20), (21): Xaa is A or G
  MOD_RES (22), (23), (24), (25): Xaa is A or G or is absent
PTXAPTKLEPISVLYLXXXXXXXXXKFKYENMVVRS

SEQ ID NO: 19690 - protein, 35 aa, Artificial Sequence
  Non-cyclic GFR-binding peptide
  MOD_RES (1), (35): Xaa is C or S
  MOD_RES (15), (16), (17), (18), (19): Xaa is A or G
  MOD_RES (20), (21), (22), (23): Xaa is A or G or is absent
XVPTKLNAISILYFXXXXXXXXXLKKYRGMAVSEX

SEQ ID NO: 19691 - protein, 36 aa, Artificial Sequence
  Non-cyclic GFR-binding peptide
  MOD_RES (1), (35): Xaa is C or S
  MOD_RES (15), (16), (17), (18), (19): Xaa is A or G
  MOD_RES (20), (21), (22), (23): Xaa is A or G or is absent
XVPTKLSPISILYKXXXXXXXXXLKYHYGMAVSEXG

SEQ ID NO: 19692 - protein, 32 aa, Artificial Sequence
  Non-cyclic GFR-binding peptide
  MOD_RES (32), (32): Xaa is C or S
VPTELEPISMLYLDENEKVVKFKYEDMVVEGX

SEQ ID NO: 19693 - protein, 41 aa, Artificial Sequence
  Non-cyclic GFR-binding peptide
  MOD_RES (3), (4), (38), (40): Xaa is C or S
  MOD_RES (18), (19), (20), (21), (22): Xaa is A or G
  MOD_RES (23), (24), (25), (26): Xaa is A or G or is absent
KAXXVPTKLSPISILYKXXXXXXXXXLKYHYGMAVSEXGXR

SEQ ID NO: 19694 - protein, 33 aa, Artificial Sequence
  Non-cyclic GFR-binding peptide
  MOD_RES (33), (33): Xaa is C or S
  MOD_RES (14), (15), (16), (17), (18): Xaa is A or G
  MOD_RES (19), (20), (21), (22): Xaa is A or G or is absent
VPQDLEPISILYLXXXXXXXXXKFKYEMVVKSX

SEQ ID NO: 19695 - protein, 44 aa, Artificial Sequence
  Non-cyclic GFR-binding peptide
  MOD_RES (6), (7), (41), (43): Xaa is C or S
  MOD_RES (21), (22), (23), (24), (25): Xaa is A or G
  MOD_RES (26), (27), (28), (29): Xaa is A or G or is absent
AAPASXXVPARLNAISILYFXXXXXXXXXLKKYRDMVVEAXGXR

SEQ ID NO: 19696 - protein, 37 aa, Artificial Sequence
  Non-cyclic GFR-binding peptide
  MOD_RES (2), (3), (36): Xaa is C or S
  MOD_RES (17), (18), (19), (20), (21): Xaa is A or G
  MOD_RES (22), (23), (24), (25): Xaa is A or G or is absent
PXXVPQALEPISILYLXXXXXXXXXKFKYEMIVRSXK

SEQ ID NO: 19697 - protein, 39 aa, Artificial Sequence
  Non-cyclic GFR-binding peptide
  MOD_RES (3), (4), (38): Xaa is C or S
  MOD_RES (18), (19), (20), (21), (22): Xaa is A or G
  MOD_RES (23), (24), (25), (26): Xaa is A or G or is absent
KPXXAPTQLEPISVLYLXXXXXXXXXKFKYENMVVRAXG

SEQ ID NO: 19698 - protein, 35 aa, Artificial Sequence
  Non-cyclic GFR-binding peptide
  MOD_RES (1), (2): Xaa is C or S
  MOD_RES (16), (17), (18), (19), (20): Xaa is A or G
  MOD_RES (21), (22), (23), (24): Xaa is A or G or is absent
XXVPTKLSPISILYKXXXXXXXXXLKYHYGMAVSE

SEQ ID NO: 19699 - protein, 43 aa, Artificial Sequence
  Non-cyclic GFR-binding peptide
  MOD_RES (6), (40), (42): Xaa is C or S
  MOD_RES (20), (21), (22), (23), (24): Xaa is A or G
  MOD_RES (25), (26), (27), (28): Xaa is A or G or is absent
VTKPTXAPTKLEPISVLYLXXXXXXXXXKFKYENMVVRSXGXH

SEQ ID NO: 19700 - protein, 35 aa, Artificial Sequence
  Non-cyclic GFR-binding peptide
  MOD_RES (4), (5): Xaa is C or S
ASPXXVSQDLSPISILYIIGKTPKIYKQYEMIVKS

SEQ ID NO: 19701 - protein, 38 aa, Artificial Sequence
  Non-cyclic GFR-binding peptide
  MOD_RES (5), (6), (38): Xaa is C or S
IPKAXXVPTELEPISMLYLDENEKVVKFKYEDMVVEGX

SEQ ID NO: 19702 - protein, 37 aa, Artificial Sequence
  Non-cyclic GFR-binding peptide
  MOD_RES (4), (5): Xaa is C or S
  MOD_RES (19), (20), (21), (22), (23): Xaa is A or G
  MOD_RES (24), (25), (26), (27): Xaa is A or G or is absent
SKAXXVPTKLNAISILYFXXXXXXXXXLKKYRGMAVS

SEQ ID NO: 19703 - protein, 32 aa, Artificial Sequence
  Non-cyclic GFR-binding peptide
  MOD_RES (1), (1): Xaa is C or S
XVPARLEPISILYLDAANNVVKFKYEDMVVEA

SEQ ID NO: 19704 - protein, 35 aa, Artificial Sequence
  Non-cyclic GFR-binding peptide
  MOD_RES (1), (35): Xaa is C or S
  MOD_RES (15), (16), (17), (18), (19): Xaa is A or G
  MOD_RES (20), (21), (22), (23): Xaa is A or G or is absent
XVPARLEPISILYLXXXXXXXXXKFKYEDMVVEAX

SEQ ID NO: 19705 - protein, 42 aa, Artificial Sequence
  Non-cyclic GFR-binding peptide
  MOD_RES (5), (6), (39), (41): Xaa is C or S
  MOD_RES (20), (21), (22), (23), (24): Xaa is A or G
  MOD_RES (25), (26), (27), (28): Xaa is A or G or is absent
SASPXXVPQDLSPISILYIXXXXXXXXXYKQYEMVVKSXKXS

SEQ ID NO: 19706 - protein, 36 aa, Artificial Sequence
  Non-cyclic GFR-binding peptide
  MOD_RES (3), (4), (36): Xaa is C or S
KAXXVPTELEPISMLYLDENEKVVKFKYEDMVVEGX

SEQ ID NO: 19707 - protein, 38 aa, Artificial Sequence
  Non-cyclic GFR-binding peptide
  MOD_RES (1), (35), (37): Xaa is C or S
  MOD_RES (15), (16), (17), (18), (19): Xaa is A or G
  MOD_RES (20), (21), (22), (23): Xaa is A or G or is absent
XVPARLNAISILYFXXXXXXXXXLKKYRDMVVEAXGXR

SEQ ID NO: 19708 - protein, 40 aa, Artificial Sequence
  Non-cyclic GFR-binding peptide
  MOD_RES (6), (7): Xaa is C or S
  MOD_RES (21), (22), (23), (24), (25): Xaa is A or G
  MOD_RES (26), (27), (28), (29): Xaa is A or G or is absent
KIPKAXXVPTELSPISMLYIXXXXXXXXXYKQYEDMVVEG

SEQ ID NO: 19709 - protein, 32 aa, Artificial Sequence
  Non-cyclic GFR-binding peptide
  MOD_RES (32), (32): Xaa is C or S
VPTELEPISMLYLDEYDKVVKFKYEEMVVEGX

SEQ ID NO: 19710 - protein, 37 aa, Artificial Sequence
  Non-cyclic GFR-binding peptide
  MOD_RES (1), (35), (37): Xaa is C or S
  MOD_RES (15), (16), (17), (18), (19): Xaa is A or G
  MOD_RES (20), (21), (22), (23): Xaa is A or G or is absent
XVPTELSPISMLYIXXXXXXXXXYKQYEEMVVEGXGX

SEQ ID NO: 19711 - protein, 36 aa, Artificial Sequence
  Non-cyclic GFR-binding peptide
  MOD_RES (3), (4), (36): Xaa is C or S
KPXXAPTKLEPISVLYLDDSSNVIKFKYENMVVRSX

SEQ ID NO: 19712 - protein, 32 aa, Artificial Sequence
  Non-cyclic GFR-binding peptide
  MOD_RES (31), (31): Xaa is C or S
VSQDLEPISILYLIGKTPKIKFKYEMIVKSXK

SEQ ID NO: 19713 - protein, 36 aa, Artificial Sequence
  Non-cyclic GFR-binding peptide
  MOD_RES (3), (4), (36): Xaa is C or S
KAXXVPTKLSPISILYKDKGVVTYLKYHYGMAVSEX

SEQ ID NO: 19714 - protein, 34 aa, Artificial Sequence
  Non-cyclic GFR-binding peptide
  MOD_RES (32), (34): Xaa is C or S
VPTKLSPISILYKDKGVVTYLKYHYGMAVSEXGX

SEQ ID NO: 19715 - protein, 33 aa, Artificial Sequence
  Non-cyclic GFR-binding peptide
  MOD_RES (1), (2), (33): Xaa is C or S
XXVPQDLEPISILYLVGRTPKVKFKYEMVVKSX

SEQ ID NO: 19716 - protein, 33 aa, Artificial Sequence
  Non-cyclic GFR-binding peptide
  MOD_RES (1), (32): Xaa is C or S
XVPQALEPISILYLVGRKPKVKFKYEMIVRSXK

SEQ ID NO: 19717 - protein, 35 aa, Artificial Sequence
  Non-cyclic GFR-binding peptide
  MOD_RES (4), (5): Xaa is C or S
PKPXXAPTKLEPISVLYLDDSSNVIKFKYENMVVR

SEQ ID NO: 19718 - protein, 37 aa, Artificial Sequence
  Non-cyclic GFR-binding peptide
  MOD_RES (1), (34), (36): Xaa is C or S
  MOD_RES (15), (16), (17), (18), (19): Xaa is A or G
  MOD_RES (20), (21), (22), (23): Xaa is A or G or is absent
XVPQDLEPISILYLXXXXXXXXXKFKYEMVVKSXKXS

SEQ ID NO: 19719 - protein, 35 aa, Artificial Sequence
  Non-cyclic GFR-binding peptide
  MOD_RES (2), (3): Xaa is C or S
  MOD_RES (17), (18), (19), (20), (21): Xaa is A or G
  MOD_RES (22), (23), (24), (25): Xaa is A or G or is absent
PXXVPQALSPISILYIXXXXXXXXXYKQYEMIVRS

SEQ ID NO: 19720 - protein, 39 aa, Artificial Sequence
  Non-cyclic GFR-binding peptide
  MOD_RES (6), (7), (39): Xaa is C or S
TVPKPXXAPTQLEPISVLYLDDSSNVIKFKYENMVVRAX

SEQ ID NO: 19721 - protein, 40 aa, Artificial Sequence
  Non-cyclic GFR-binding peptide
  MOD_RES (3), (4), (38), (40): Xaa is C or S
  MOD_RES (18), (19), (20), (21), (22): Xaa is A or G
  MOD_RES (23), (24), (25), (26): Xaa is A or G or is absent
KPXXAPTKLSPISVLYIXXXXXXXXXYKQYENMVVRSXGX

SEQ ID NO: 19722 - protein, 39 aa, Artificial Sequence
  Non-cyclic GFR-binding peptide
  MOD_RES (2), (3), (36), (38): Xaa is C or S
AXXVPTKLEPISVLYLDDMGVPTKFKYEEGMSVAEXGXR

SEQ ID NO: 19723 - protein, 37 aa, Artificial Sequence
  Non-cyclic GFR-binding peptide
  MOD_RES (3), (4): Xaa is C or S
  MOD_RES (18), (19), (20), (21), (22): Xaa is A or G
  MOD_RES (23), (24), (25), (26): Xaa is A or G or is absent
KAXXVPTELEPISMLYLXXXXXXXXXKFKYEEMVVEG

SEQ ID NO: 19724 - protein, 43 aa, Artificial Sequence
  Non-cyclic GFR-binding peptide
  MOD_RES (6), (7), (42): Xaa is C or S
  MOD_RES (21), (22), (23), (24), (25): Xaa is A or G
  MOD_RES (26), (27), (28), (29): Xaa is A or G or is absent
KVGKAXXVPTKLEPISVLYLXXXXXXXXXKFKYEEGMSVAEXG

SEQ ID NO: 19725 - protein, 34 aa, Artificial Sequence
  Non-cyclic GFR-binding peptide
  MOD_RES (1), (2), (34): Xaa is C or S
XXAPTKLSPISVLYIDDSSNVIYKQYENMVVRSX

SEQ ID NO: 19726 - protein, 34 aa, Artificial Sequence
  Non-cyclic GFR-binding peptide
  MOD_RES (3), (4): Xaa is C or S
APXXVPQALSPISILYIVGRKPKVYKQYEMIVRS

SEQ ID NO: 19727 - protein, 33 aa, Artificial Sequence
  Non-cyclic GFR-binding peptide
  MOD_RES (2), (3): Xaa is C or S
AXXVPTELSPISMLYIDEYDKVVYKQYEEMVVE

SEQ ID NO: 19728 - protein, 39 aa, Artificial Sequence
  Non-cyclic GFR-binding peptide
  MOD_RES (3), (4), (38): Xaa is C or S
  MOD_RES (18), (19), (20), (21), (22): Xaa is A or G
  MOD_RES (23), (24), (25), (26): Xaa is A or G or is absent
KAXXVPTELSPISMLYIXXXXXXXXXYKQYEEMVVEGXG

SEQ ID NO: 19729 - protein, 40 aa, Artificial Sequence
  Non-cyclic GFR-binding peptide
  MOD_RES (3), (4), (37), (39): Xaa is C or S
  MOD_RES (18), (19), (20), (21), (22): Xaa is A or G
  MOD_RES (23), (24), (25), (26): Xaa is A or G or is absent
SPXXVSQDLEPISILYLXXXXXXXXXKFKYEMIVKSXKXS

SEQ ID NO: 19730 - protein, 39 aa, Artificial Sequence
  Non-cyclic GFR-binding peptide
  MOD_RES (4), (5), (38): Xaa is C or S
  MOD_RES (19), (20), (21), (22), (23): Xaa is A or G
  MOD_RES (24), (25), (26), (27): Xaa is A or G or is absent
ASPXXVPQDLEPISILYLXXXXXXXXXKFKYEMVVKSXK

SEQ ID NO: 19731 - protein, 37 aa, Artificial Sequence
  Non-cyclic GFR-binding peptide
  MOD_RES (2), (3), (35), (37): Xaa is C or S
AXXVPTELSPISMLYIDEYDKVVYKQYEEMVVEGXGX

SEQ ID NO: 19732 - protein, 37 aa, Artificial Sequence
  Non-cyclic GFR-binding peptide
  MOD_RES (3), (4), (36): Xaa is C or S
KPXXAPTQLEPISVLYLDDSSNVIKFKYENMVVRAXG

SEQ ID NO: 19733 - protein, 36 aa, Artificial Sequence
  Non-cyclic GFR-binding peptide
  MOD_RES (2), (3): Xaa is C or S
  MOD_RES (17), (18), (19), (20), (21): Xaa is A or G
  MOD_RES (22), (23), (24), (25): Xaa is A or G or is absent
AXXVPTKLNAISILYFXXXXXXXXXLKKYRGMAVSE

SEQ ID NO: 19734 - protein, 37 aa, Artificial Sequence
  Non-cyclic GFR-binding peptide
  MOD_RES (2), (3), (34), (36): Xaa is C or S
PXXVPQALSPISILYIVGRKPKVYKQYEMIVRSXKXS

SEQ ID NO: 19735 - protein, 40 aa, Artificial Sequence
  Non-cyclic GFR-binding peptide
  MOD_RES (4), (5), (39): Xaa is C or S
  MOD_RES (19), (20), (21), (22), (23): Xaa is A or G
  MOD_RES (24), (25), (26), (27): Xaa is A or G or is absent
PKPXXAPTQLEPISVLYLXXXXXXXXXKFKYENMVVRAXG

SEQ ID NO: 19736 - protein, 35 aa, Artificial Sequence
  Non-cyclic GFR-binding peptide
  MOD_RES (2), (3): Xaa is C or S
  MOD_RES (17), (18), (19), (20), (21): Xaa is A or G
  MOD_RES (22), (23), (24), (25): Xaa is A or G or is absent
AXXVPTELEPISMLYLXXXXXXXXXKFKYEDMVVE

SEQ ID NO: 19737 - protein, 34 aa, Artificial Sequence
  Non-cyclic GFR-binding peptide
  MOD_RES (34), (34): Xaa is C or S
  MOD_RES (14), (15), (16), (17), (18): Xaa is A or G
  MOD_RES (19), (20), (21), (22): Xaa is A or G or is absent
VPTELEPISMLYLXXXXXXXXXKFKYEDMVVEGX

SEQ ID NO: 19738 - protein, 43 aa, Artificial Sequence
  Non-cyclic GFR-binding peptide
  MOD_RES (5), (6), (40), (42): Xaa is C or S
  MOD_RES (20), (21), (22), (23), (24): Xaa is A or G
  MOD_RES (25), (26), (27), (28): Xaa is A or G or is absent
VPKAXXAPTKLSPISVLYIXXXXXXXXXYKQYENMVVKAXGXH

SEQ ID NO: 19739 - protein, 38 aa, Artificial Sequence
  Non-cyclic GFR-binding peptide
  MOD_RES (4), (5): Xaa is C or S
  MOD_RES (19), (20), (21), (22), (23): Xaa is A or G
  MOD_RES (24), (25), (26), (27): Xaa is A or G or is absent
PASXXVPARLNAISILYFXXXXXXXXXLKKYRDMVVEA

SEQ ID NO: 19740 - protein, 36 aa, Artificial Sequence
  Non-cyclic GFR-binding peptide
  MOD_RES (4), (5): Xaa is C or S
PKAXXAPTKLSPISVLYIDSSNNVIYKQYENMVVKA

SEQ ID NO: 19741 - protein, 32 aa, Artificial Sequence
  Non-cyclic GFR-binding peptide
  MOD_RES (14), (15), (16), (17), (18): Xaa is A or G
  MOD_RES (19), (20), (21), (22): Xaa is A or G or is absent
VPQALEPISILYLXXXXXXXXXKFKYEMIVRS

SEQ ID NO: 19742 - protein, 42 aa, Artificial Sequence
  Non-cyclic GFR-binding peptide
  MOD_RES (5), (6), (39), (41): Xaa is C or S
  MOD_RES (20), (21), (22), (23), (24): Xaa is A or G
  MOD_RES (25), (26), (27), (28): Xaa is A or G or is absent
SASPXXVPQDLEPISILYLXXXXXXXXXKFKYEMVVKSXKXS

SEQ ID NO: 19743 - protein, 42 aa, Artificial Sequence
  Non-cyclic GFR-binding peptide
  MOD_RES (6), (7), (42): Xaa is C or S
  MOD_RES (21), (22), (23), (24), (25): Xaa is A or G
  MOD_RES (26), (27), (28), (29): Xaa is A or G or is absent
KVGKAXXVPTKLEPISVLYLXXXXXXXXXKFKYEEGMSVAEX

SEQ ID NO: 19744 - protein, 38 aa, Artificial Sequence
  Non-cyclic GFR-binding peptide
  MOD_RES (3), (4), (38): Xaa is C or S
  MOD_RES (18), (19), (20), (21), (22): Xaa is A or G
  MOD_RES (23), (24), (25), (26): Xaa is A or G or is absent
KPXXAPTQLEPISVLYLXXXXXXXXXKFKYENMVVRAX

SEQ ID NO: 19745 - protein, 34 aa, Artificial Sequence
  Non-cyclic GFR-binding peptide
  MOD_RES (1), (2): Xaa is C or S
  MOD_RES (16), (17), (18), (19), (20): Xaa is A or G
  MOD_RES (21), (22), (23), (24): Xaa is A or G or is absent
XXVPTKLSPISILYKXXXXXXXXXLKYHYGMAVS

SEQ ID NO: 19746 - protein, 32 aa, Artificial Sequence
  Non-cyclic GFR-binding peptide
  MOD_RES (1), (1): Xaa is C or S
XVPTKLSPISILYIDKGVVTYYKQYEGMAVSE

SEQ ID NO: 19747 - protein, 41 aa, Artificial Sequence
  Non-cyclic GFR-binding peptide
  MOD_RES (5), (39), (41): Xaa is C or S
  MOD_RES (19), (20), (21), (22), (23): Xaa is A or G
  MOD_RES (24), (25), (26), (27): Xaa is A or G or is absent
TKPTXAPTKLSPISVLYIXXXXXXXXXYKQYENMVVRSXGX

SEQ ID NO: 19748 - protein, 33 aa, Artificial Sequence
  Non-cyclic GFR-binding peptide
  MOD_RES (1), (33): Xaa is C or S
XVPTKLNAISILYFDKGVVTYLKKYRGMAVSEX

SEQ ID NO: 19749 - protein, 34 aa, Artificial Sequence
  Non-cyclic GFR-binding peptide
  MOD_RES (1), (1): Xaa is C or S
  MOD_RES (15), (16), (17), (18), (19): Xaa is A or G
  MOD_RES (20), (21), (22), (23): Xaa is A or G or is absent
XVPARLEPISILYLXXXXXXXXXKFKYEDMVVEA

SEQ ID NO: 19750 - protein, 32 aa, Artificial Sequence
  Non-cyclic GFR-binding peptide
  MOD_RES (32), (32): Xaa is C or S
APTKLSPISVLYIDDSSNVIYKQYENMVVRSX

SEQ ID NO: 19751 - protein, 36 aa, Artificial Sequence
  Non-cyclic GFR-binding peptide
  MOD_RES (3), (4): Xaa is C or S
  MOD_RES (18), (19), (20), (21), (22): Xaa is A or G
  MOD_RES (23), (24), (25), (26): Xaa is A or G or is absent
ASXXVPARLNAISILYFXXXXXXXXXLKKYRDMVVE

SEQ ID NO: 19752 - protein, 36 aa, Artificial Sequence
  Non-cyclic GFR-binding peptide
  MOD_RES (3), (35): Xaa is C or S
PTXAPTKLEPISVLYLDDSSNVIKFKYENMVVRSXG

SEQ ID NO: 19753 - protein, 41 aa, Artificial Sequence
  Non-cyclic GFR-binding peptide
  MOD_RES (6), (7), (39), (41): Xaa is C or S
TVPKPXXAPTQLSPISVLYIDDSSNVIYKQYENMVVRAXGX

SEQ ID NO: 19754 - protein, 39 aa, Artificial Sequence
  Non-cyclic GFR-binding peptide
  MOD_RES (7), (39): Xaa is C or S
HVTKPTXAPTKLEPISVLYLDDSSNVIKFKYENMVVRSX

SEQ ID NO: 19755 - protein, 37 aa, Artificial Sequence
  Non-cyclic GFR-binding peptide
  MOD_RES (1), (2), (36): Xaa is C or S
  MOD_RES (16), (17), (18), (19), (20): Xaa is A or G
  MOD_RES (21), (22), (23), (24): Xaa is A or G or is absent
XXAPTQLEPISVLYLXXXXXXXXXKFKYENMVVRAXG

SEQ ID NO: 19756 - protein, 43 aa, Artificial Sequence
  Non-cyclic GFR-binding peptide
  MOD_RES (5), (6), (40), (42): Xaa is C or S
  MOD_RES (20), (21), (22), (23), (24): Xaa is A or G
  MOD_RES (25), (26), (27), (28): Xaa is A or G or is absent
ASKAXXVPTKLNAISILYFXXXXXXXXXLKKYRGMAVSEXGXR

SEQ ID NO: 19757 - protein, 37 aa, Artificial Sequence
  Non-cyclic GFR-binding peptide
  MOD_RES (1), (2), (36): Xaa is C or S
  MOD_RES (16), (17), (18), (19), (20): Xaa is A or G
  MOD_RES (21), (22), (23), (24): Xaa is A or G or is absent
XXAPTKLEPISVLYLXXXXXXXXXKFKYENMVVKAXG

SEQ ID NO: 19758 - protein, 40 aa, Artificial Sequence
  Non-cyclic GFR-binding peptide
  MOD_RES (4), (5), (37), (39): Xaa is C or S
SKAXXVPTKLNAISILYFDKGVVTYLKKYRGMAVSEXGXR

SEQ ID NO: 19759 - protein, 34 aa, Artificial Sequence
  Non-cyclic GFR-binding peptide
  MOD_RES (1), (33): Xaa is C or S
XVPTKLSPISILYIDKGVVTYYKQYEGMAVSEXG

SEQ ID NO: 19760 - protein, 34 aa, Artificial Sequence
  Non-cyclic GFR-binding peptide
  MOD_RES (34), (34): Xaa is C or S
  MOD_RES (14), (15), (16), (17), (18): Xaa is A or G
  MOD_RES (19), (20), (21), (22): Xaa is A or G or is absent
VPARLSPISILYKXXXXXXXXXLKYHYDMVVEAX

SEQ ID NO: 19761 - protein, 38 aa, Artificial Sequence
  Non-cyclic GFR-binding peptide
  MOD_RES (4), (5): Xaa is C or S
  MOD_RES (19), (20), (21), (22), (23): Xaa is A or G
  MOD_RES (24), (25), (26), (27): Xaa is A or G or is absent
PKPXXAPTKLSPISVLYIXXXXXXXXXYKQYENMVVRS

SEQ ID NO: 19762 - protein, 32 aa, Artificial Sequence
  Non-cyclic GFR-binding peptide
  MOD_RES (1), (1): Xaa is C or S
XVPTELEPISMLYLDENEKVVKFKYEDMVVEG

SEQ ID NO: 19763 - protein, 39 aa, Artificial Sequence
  Non-cyclic GFR-binding peptide
  MOD_RES (4), (5), (37), (39): Xaa is C or S
PKPXXAPTQLSPISVLYIDDSSNVIYKQYENMVVRAXGX

SEQ ID NO: 19764 - protein, 38 aa, Artificial Sequence
  Non-cyclic GFR-binding peptide
  MOD_RES (5), (5): Xaa is C or S
  MOD_RES (19), (20), (21), (22), (23): Xaa is A or G
  MOD_RES (24), (25), (26), (27): Xaa is A or G or is absent
TKPTXAPTKLSPISVLYIXXXXXXXXXYKQYENMVVRS

SEQ ID NO: 19765 - protein, 36 aa, Artificial Sequence
  Non-cyclic GFR-binding peptide
  MOD_RES (1), (33), (35): Xaa is C or S
XAPTKLSPISVLYIDSSNNVIYKQYENMVVKAXGXH

SEQ ID NO: 19766 - protein, 34 aa, Artificial Sequence
  Non-cyclic GFR-binding peptide
  MOD_RES (1), (33): Xaa is C or S
XAPTKLSPISVLYIDDSSNVIYKQYENMVVRSXG

SEQ ID NO: 19767 - protein, 34 aa, Artificial Sequence
  Non-cyclic GFR-binding peptide
  MOD_RES (1), (33): Xaa is C or S
XVPARLSPISILYKDAANNVVLKYHYDMVVEAXG

SEQ ID NO: 19768 - protein, 30 aa, Artificial Sequence
  Non-cyclic GFR-binding peptide
VPTELSPISMLYIDENEKVVYKQYEDMVVE

SEQ ID NO: 19769 - protein, 36 aa, Artificial Sequence
  Non-cyclic GFR-binding peptide
  MOD_RES (1), (33), (35): Xaa is C or S
XAPTKLEPISVLYLDSSNNVIKFKYENMVVKAXGXH

SEQ ID NO: 19770 - protein, 32 aa, Artificial Sequence
  Non-cyclic GFR-binding peptide
  MOD_RES (2), (2): Xaa is C or S
TXAPTKLSPISVLYIDDSSNVIYKQYENMVVR

SEQ ID NO: 19771 - protein, 42 aa, Artificial Sequence
  Non-cyclic GFR-binding peptide
  MOD_RES (6), (7), (41): Xaa is C or S
  MOD_RES (21), (22), (23), (24), (25): Xaa is A or G
  MOD_RES (26), (27), (28), (29): Xaa is A or G or is absent
TVPKPXXAPTQLEPISVLYLXXXXXXXXXKFKYENMVVRAXG

SEQ ID NO: 19772 - protein, 39 aa, Artificial Sequence
  Non-cyclic GFR-binding peptide
  MOD_RES (4), (5), (37), (39): Xaa is C or S
SKAXXVPTKLSPISILYKDKGVVTYLKYHYGMAVSEXGX

SEQ ID NO: 19773 - protein, 37 aa, Artificial Sequence
  Non-cyclic GFR-binding peptide
  MOD_RES (2), (3), (37): Xaa is C or S
  MOD_RES (17), (18), (19), (20), (21): Xaa is A or G
  MOD_RES (22), (23), (24), (25): Xaa is A or G or is absent
AXXVPTKLSPISILYKXXXXXXXXXLKYHYGMAVSEX

SEQ ID NO: 19774 - protein, 42 aa, Artificial Sequence
  Non-cyclic GFR-binding peptide
  MOD_RES (5), (6), (40), (42): Xaa is C or S
  MOD_RES (20), (21), (22), (23), (24): Xaa is A or G
  MOD_RES (25), (26), (27), (28): Xaa is A or G or is absent
APASXXVPARLNAISILYFXXXXXXXXXLKKYRDMVVEAXGX

SEQ ID NO: 19775 - protein, 38 aa, Artificial Sequence
  Non-cyclic GFR-binding peptide
  MOD_RES (3), (4), (38): Xaa is C or S
  MOD_RES (18), (19), (20), (21), (22): Xaa is A or G
  MOD_RES (23), (24), (25), (26): Xaa is A or G or is absent
KAXXAPTKLSPISVLYIXXXXXXXXXYKQYENMVVKAX

SEQ ID NO: 19776 - protein, 41 aa, Artificial Sequence
  Non-cyclic GFR-binding peptide
  MOD_RES (6), (7), (38), (40): Xaa is C or S
ASASPXXVSQDLEPISILYLIGKTPKIKFKYEMIVKSXKXS

SEQ ID NO: 19777 - protein, 40 aa, Artificial Sequence
  Non-cyclic GFR-binding peptide
  MOD_RES (5), (6), (38), (40): Xaa is C or S
IPKAXXVPTELEPISMLYLDENEKVVKFKYEDMVVEGXGX

SEQ ID NO: 19778 - protein, 39 aa, Artificial Sequence
  Non-cyclic GFR-binding peptide
  MOD_RES (2), (3), (36), (38): Xaa is C or S
  MOD_RES (17), (18), (19), (20), (21): Xaa is A or G
  MOD_RES (22), (23), (24), (25): Xaa is A or G or is absent
PXXVSQDLSPISILYIXXXXXXXXXYKQYEMIVKSXKXS

SEQ ID NO: 19779 - protein, 34 aa, Artificial Sequence
  Non-cyclic GFR-binding peptide
  MOD_RES (3), (4): Xaa is C or S
KAXXVPTELEPISMLYLDEYDKVVKFKYEEMVVE

SEQ ID NO: 19780 - protein, 41 aa, Artificial Sequence
  Non-cyclic GFR-binding peptide
  MOD_RES (4), (5), (38), (40): Xaa is C or S
  MOD_RES (19), (20), (21), (22), (23): Xaa is A or G
  MOD_RES (24), (25), (26), (27): Xaa is A or G or is absent
AAPXXVPQALEPISILYLXXXXXXXXXKFKYEMIVRSXKXS

SEQ ID NO: 19781 - protein, 36 aa, Artificial Sequence
  Non-cyclic GFR-binding peptide
  MOD_RES (4), (5): Xaa is C or S
PASXXVPARLSPISILYKDAANNVVLKYHYDMVVEA

SEQ ID NO: 19782 - protein, 32 aa, Artificial Sequence
  Non-cyclic GFR-binding peptide
VPTKLEPISVLYLDDMGVPTKFKYEEGMSVAE

SEQ ID NO: 19783 - protein, 38 aa, Artificial Sequence
  Non-cyclic GFR-binding peptide
  MOD_RES (1), (2), (35), (37): Xaa is C or S
  MOD_RES (16), (17), (18), (19), (20): Xaa is A or G
  MOD_RES (21), (22), (23), (24): Xaa is A or G or is absent
XXVPQDLSPISILYIXXXXXXXXXYKQYEMVVKSXKXS

SEQ ID NO: 19784 - protein, 35 aa, Artificial Sequence
  Non-cyclic GFR-binding peptide
  MOD_RES (2), (2): Xaa is C or S
  MOD_RES (16), (17), (18), (19), (20): Xaa is A or G
  MOD_RES (21), (22), (23), (24): Xaa is A or G or is absent
TXAPTKLEPISVLYLXXXXXXXXXKFKYENMVVRS

SEQ ID NO: 19785 - protein, 40 aa, Artificial Sequence
  Non-cyclic GFR-binding peptide
  MOD_RES (4), (5), (38), (40): Xaa is C or S
  MOD_RES (19), (20), (21), (22), (23): Xaa is A or G
  MOD_RES (24), (25), (26), (27): Xaa is A or G or is absent
ASPXXVPQDLSPISILYIXXXXXXXXXYKQYEMVVKSXKX

SEQ ID NO: 19786 - protein, 33 aa, Artificial Sequence
  Non-cyclic GFR-binding peptide
  MOD_RES (1), (1): Xaa is C or S
  MOD_RES (15), (16), (17), (18), (19): Xaa is A or G
  MOD_RES (20), (21), (22), (23): Xaa is A or G or is absent
XVPTKLSPISILYIXXXXXXXXXYKQYEGMAVS

SEQ ID NO: 19787 - protein, 35 aa, Artificial Sequence
  Non-cyclic GFR-binding peptide
  MOD_RES (33), (35): Xaa is C or S
  MOD_RES (14), (15), (16), (17), (18): Xaa is A or G
  MOD_RES (19), (20), (21), (22): Xaa is A or G or is absent
VPQDLSPISILYIXXXXXXXXXYKQYEMVVKSXKX

SEQ ID NO: 19788 - protein, 36 aa, Artificial Sequence
  Non-cyclic GFR-binding peptide
  MOD_RES (2), (36): Xaa is C or S
  MOD_RES (16), (17), (18), (19), (20): Xaa is A or G
  MOD_RES (21), (22), (23), (24): Xaa is A or G or is absent
TXAPTKLSPISVLYIXXXXXXXXXYKQYENMVVRSX

SEQ ID NO: 19789 - protein, 33 aa, Artificial Sequence
  Non-cyclic GFR-binding peptide
  MOD_RES (32), (32): Xaa is C or S
VPARLEPISILYLDAANNVVKFKYEDMVVEAXG

SEQ ID NO: 19790 - protein, 41 aa, Artificial Sequence
  Non-cyclic GFR-binding peptide
  MOD_RES (4), (5), (38), (40): Xaa is C or S
  MOD_RES (19), (20), (21), (22), (23): Xaa is A or G
  MOD_RES (24), (25), (26), (27): Xaa is A or G or is absent
ASPXXVSQDLSPISILYIXXXXXXXXXYKQYEMIVKSXKXS

SEQ ID NO: 19791 - protein, 34 aa, Artificial Sequence
  Non-cyclic GFR-binding peptide
  MOD_RES (1), (33): Xaa is C or S
XAPTQLSPISVLYIDDSSNVIYKQYENMVVRAXG

SEQ ID NO: 19792 - protein, 43 aa, Artificial Sequence
  Non-cyclic GFR-binding peptide
  MOD_RES (6), (7), (41), (43): Xaa is C or S
  MOD_RES (21), (22), (23), (24), (25): Xaa is A or G
  MOD_RES (26), (27), (28), (29): Xaa is A or G or is absent
AVPKAXXAPTKLEPISVLYLXXXXXXXXXKFKYENMVVKAXGX

SEQ ID NO: 19793 - protein, 35 aa, Artificial Sequence
  Non-cyclic GFR-binding peptide
  MOD_RES (3), (35): Xaa is C or S
PTXAPTKLEPISVLYLDDSSNVIKFKYENMVVRSX

SEQ ID NO: 19794 - protein, 42 aa, Artificial Sequence
  Non-cyclic GFR-binding peptide
  MOD_RES (6), (7), (41): Xaa is C or S
  MOD_RES (21), (22), (23), (24), (25): Xaa is A or G
  MOD_RES (26), (27), (28), (29): Xaa is A or G or is absent
TVPKPXXAPTQLSPISVLYIXXXXXXXXXYKQYENMVVRAXG

SEQ ID NO: 19795 - protein, 38 aa, Artificial Sequence
  Non-cyclic GFR-binding peptide
  MOD_RES (4), (5): Xaa is C or S
  MOD_RES (19), (20), (21), (22), (23): Xaa is A or G
  MOD_RES (24), (25), (26), (27): Xaa is A or G or is absent
PKAXXAPTKLSPISVLYIXXXXXXXXXYKQYENMVVKA

SEQ ID NO: 19796 - protein, 34 aa, Artificial Sequence
  Non-cyclic GFR-binding peptide
  MOD_RES (1), (33): Xaa is C or S
XVPTELEPISMLYLDENEKVVKFKYEDMVVEGXG

SEQ ID NO: 19797 - protein, 42 aa, Artificial Sequence
  Non-cyclic GFR-binding peptide
  MOD_RES (6), (7), (39), (41): Xaa is C or S
YVPKPXXAPTKLSPISVLYIDDSSNVIYKQYENMVVRSXGXH

SEQ ID NO: 19798 - protein, 39 aa, Artificial Sequence
  Non-cyclic GFR-binding peptide
  MOD_RES (5), (6), (39): Xaa is C or S
  MOD_RES (20), (21), (22), (23), (24): Xaa is A or G
  MOD_RES (25), (26), (27), (28): Xaa is A or G or is absent
SASPXXVPQDLEPISILYLXXXXXXXXXKFKYEMVVKSX

SEQ ID NO: 19799 - protein, 33 aa, Artificial Sequence
  Non-cyclic GFR-binding peptide
  MOD_RES (2), (3): Xaa is C or S
AXXAPTKLSPISVLYIDSSNNVIYKQYENMVVK

SEQ ID NO: 19800 - protein, 37 aa, Artificial Sequence
  Non-cyclic GFR-binding peptide
  MOD_RES (2), (3), (36): Xaa is C or S
AXXVPTKLEPISVLYLDDMGVPTKFKYEEGMSVAEXG

SEQ ID NO: 19801 - protein, 35 aa, Artificial Sequence
  Non-cyclic GFR-binding peptide
  MOD_RES (4), (5): Xaa is C or S
PKAXXVPTELSPISMLYIDEYDKVVYKQYEEMVVE

SEQ ID NO: 19802 - protein, 35 aa, Artificial Sequence
  Non-cyclic GFR-binding peptide
  MOD_RES (3), (4): Xaa is C or S
KAXXVPTKLNAISILYFDKGVVTYLKKYRGMAVSE

SEQ ID NO: 19803 - protein, 34 aa, Artificial Sequence
  Non-cyclic GFR-binding peptide
  MOD_RES (1), (2): Xaa is C or S
  MOD_RES (16), (17), (18), (19), (20): Xaa is A or G
  MOD_RES (21), (22), (23), (24): Xaa is A or G or is absent
XXVPARLSPISILYKXXXXXXXXXLKYHYDMVVE

SEQ ID NO: 19804 - protein, 39 aa, Artificial Sequence
  Non-cyclic GFR-binding peptide
  MOD_RES (1), (2), (36), (38): Xaa is C or S
  MOD_RES (16), (17), (18), (19), (20): Xaa is A or G
  MOD_RES (21), (22), (23), (24): Xaa is A or G or is absent
XXAPTKLSPISVLYIXXXXXXXXXYKQYENMVVKAXGXH

SEQ ID NO: 19805 - protein, 37 aa, Artificial Sequence
  Non-cyclic GFR-binding peptide
  MOD_RES (35), (37): Xaa is C or S
  MOD_RES (14), (15), (16), (17), (18): Xaa is A or G
  MOD_RES (19), (20), (21), (22): Xaa is A or G or is absent
VPTKLEPISVLYLXXXXXXXXXKFKYEEGMSVAEXGX

SEQ ID NO: 19806 - protein, 37 aa, Artificial Sequence
  Non-cyclic GFR-binding peptide
  MOD_RES (1), (2), (36): Xaa is C or S
  MOD_RES (16), (17), (18), (19), (20): Xaa is A or G
  MOD_RES (21), (22), (23), (24): Xaa is A or G or is absent
XXVPTELSPISMLYIXXXXXXXXXYKQYEDMVVEGXG

SEQ ID NO: 19807 - protein, 35 aa, Artificial Sequence
  Non-cyclic GFR-binding peptide
  MOD_RES (32), (34): Xaa is C or S
APTKLSPISVLYIDSSNNVIYKQYENMVVKAXGXH

SEQ ID NO: 19808 - protein, 38 aa, Artificial Sequence
  Non-cyclic GFR-binding peptide
  MOD_RES (4), (5), (38): Xaa is C or S
GKAXXVPTKLEPISVLYLDDMGVPTKFKYEEGMSVAEX

SEQ ID NO: 19809 - protein, 33 aa, Artificial Sequence
  Non-cyclic GFR-binding peptide
  MOD_RES (1), (2): Xaa is C or S
XXVPTKLSPISILYIDKGVVTYYKQYEGMAVSE

SEQ ID NO: 19810 - protein, 34 aa, Artificial Sequence
  Non-cyclic GFR-binding peptide
  MOD_RES (1), (2), (34): Xaa is C or S
XXVPTKLNAISILYFDKGVVTYLKKYRGMAVSEX

SEQ ID NO: 19811 - protein, 35 aa, Artificial Sequence
  Non-cyclic GFR-binding peptide
  MOD_RES (2), (3), (34): Xaa is C or S
PXXVSQDLEPISILYLIGKTPKIKFKYEMIVKSXK

SEQ ID NO: 19812 - protein, 42 aa, Artificial Sequence
  Non-cyclic GFR-binding peptide
  MOD_RES (5), (6), (39), (41): Xaa is C or S
  MOD_RES (20), (21), (22), (23), (24): Xaa is A or G
  MOD_RES (25), (26), (27), (28): Xaa is A or G or is absent
SASPXXVSQDLEPISILYLXXXXXXXXXKFKYEMIVKSXKXS

SEQ ID NO: 19813 - protein, 38 aa, Artificial Sequence
  Non-cyclic GFR-binding peptide
  MOD_RES (5), (6), (38): Xaa is C or S
ASKAXXVPTKLSPISILYIDKGVVTYYKQYEGMAVSEX

SEQ ID NO: 19814 - protein, 38 aa, Artificial Sequence
  Non-cyclic GFR-binding peptide
  MOD_RES (5), (6), (37): Xaa is C or S
SAAPXXVPQALSPISILYIVGRKPKVYKQYEMIVRSXK

SEQ ID NO: 19815 - protein, 31 aa, Artificial Sequence
  Non-cyclic GFR-binding peptide
  MOD_RES (1), (1): Xaa is C or S
XVPTELEPISMLYLDEYDKVVKFKYEEMVVE

SEQ ID NO: 19816 - protein, 41 aa, Artificial Sequence
  Non-cyclic GFR-binding peptide
  MOD_RES (6), (7), (41): Xaa is C or S
  MOD_RES (21), (22), (23), (24), (25): Xaa is A or G
  MOD_RES (26), (27), (28), (29): Xaa is A or G or is absent
KASKAXXVPTKLSPISILYIXXXXXXXXXYKQYEGMAVSEX

SEQ ID NO: 19817 - protein, 39 aa, Artificial Sequence
  Non-cyclic GFR-binding peptide
  MOD_RES (6), (7): Xaa is C or S
  MOD_RES (21), (22), (23), (24), (25): Xaa is A or G
  MOD_RES (26), (27), (28), (29): Xaa is A or G or is absent
KASKAXXVPTKLSPISILYKXXXXXXXXXLKYHYGMAVS

SEQ ID NO: 19818 - protein, 33 aa, Artificial Sequence
  Non-cyclic GFR-binding peptide
  MOD_RES (2), (3): Xaa is C or S
PXXAPTKLEPISVLYLDDSSNVIKFKYENMVVR

SEQ ID NO: 19819 - protein, 39 aa, Artificial Sequence
  Non-cyclic GFR-binding peptide
  MOD_RES (4), (5), (37), (39): Xaa is C or S
PKAXXVPTELEPISMLYLDENEKVVKFKYEDMVVEGXGX

SEQ ID NO: 19820 - protein, 36 aa, Artificial Sequence
  Non-cyclic GFR-binding peptide
  MOD_RES (2), (3), (35): Xaa is C or S
SXXVPARLNAISILYFDAANNVVLKKYRDMVVEAXG

SEQ ID NO: 19821 - protein, 35 aa, Artificial Sequence
  Non-cyclic GFR-binding peptide
  MOD_RES (1), (2), (35): Xaa is C or S
XXVPTKLSPISVLYIDDMGVPTYKQYEEGMSVAEX

SEQ ID NO: 19822 - protein, 34 aa, Artificial Sequence
  Non-cyclic GFR-binding peptide
  MOD_RES (3), (4): Xaa is C or S
KPXXAPTQLEPISVLYLDDSSNVIKFKYENMVVR

SEQ ID NO: 19823 - protein, 31 aa, Artificial Sequence
  Non-cyclic GFR-binding peptide
  MOD_RES (1), (1): Xaa is C or S
XAPTKLEPISVLYLDDSSNVIKFKYENMVVR

SEQ ID NO: 19824 - protein, 38 aa, Artificial Sequence
  Non-cyclic GFR-binding peptide
  MOD_RES (2), (3), (37): Xaa is C or S
  MOD_RES (17), (18), (19), (20), (21): Xaa is A or G
  MOD_RES (22), (23), (24), (25): Xaa is A or G or is absent
SXXVPARLEPISILYLXXXXXXXXXKFKYEDMVVEAXG

SEQ ID NO: 19825 - protein, 36 aa, Artificial Sequence
  Non-cyclic GFR-binding peptide
  MOD_RES (4), (4): Xaa is C or S
  MOD_RES (18), (19), (20), (21), (22): Xaa is A or G
  MOD_RES (23), (24), (25), (26): Xaa is A or G or is absent
KPTXAPTKLEPISVLYLXXXXXXXXXKFKYENMVVR

SEQ ID NO: 19826 - protein, 34 aa, Artificial Sequence
  Non-cyclic GFR-binding peptide
  MOD_RES (3), (4): Xaa is C or S
SPXXVSQDLSPISILYIIGKTPKIYKQYEMIVKS

SEQ ID NO: 19827 - protein, 40 aa, Artificial Sequence
  Non-cyclic GFR-binding peptide
  MOD_RES (6), (7): Xaa is C or S
  MOD_RES (21), (22), (23), (24), (25): Xaa is A or G
  MOD_RES (26), (27), (28), (29): Xaa is A or G or is absent
TVPKPXXAPTQLEPISVLYLXXXXXXXXXKFKYENMVVRA

SEQ ID NO: 19828 - protein, 39 aa, Artificial Sequence
  Non-cyclic GFR-binding peptide
  MOD_RES (3), (4), (36), (38): Xaa is C or S
ASXXVPARLNAISILYFDAANNVVLKKYRDMVVEAXGXR

SEQ ID NO: 19829 - protein, 36 aa, Artificial Sequence
  Non-cyclic GFR-binding peptide
  MOD_RES (1), (2), (36): Xaa is C or S
  MOD_RES (16), (17), (18), (19), (20): Xaa is A or G
  MOD_RES (21), (22), (23), (24): Xaa is A or G or is absent
XXVPTELEPISMLYLXXXXXXXXXKFKYEDMVVEGX

SEQ ID NO: 19830 - protein, 36 aa, Artificial Sequence
  Non-cyclic GFR-binding peptide
  MOD_RES (3), (4): Xaa is C or S
  MOD_RES (18), (19), (20), (21), (22): Xaa is A or G
  MOD_RES (23), (24), (25), (26): Xaa is A or G or is absent
APXXVPQALEPISILYLXXXXXXXXXKFKYEMIVRS

SEQ ID NO: 19831 - protein, 40 aa, Artificial Sequence
  Non-cyclic GFR-binding peptide
  MOD_RES (6), (7): Xaa is C or S
  MOD_RES (21), (22), (23), (24), (25): Xaa is A or G
  MOD_RES (26), (27), (28), (29): Xaa is A or G or is absent
SIPKAXXVPTELSPISMLYIXXXXXXXXXYKQYEEMVVEG

SEQ ID NO: 19832 - protein, 37 aa, Artificial Sequence
  Non-cyclic GFR-binding peptide
  MOD_RES (34), (36): Xaa is C or S
  MOD_RES (14), (15), (16), (17), (18): Xaa is A or G
  MOD_RES (19), (20), (21), (22): Xaa is A or G or is absent
VPTELSPISMLYIXXXXXXXXXYKQYEDMVVEGXGXR

SEQ ID NO: 19833 - protein, 39 aa, Artificial Sequence
  Non-cyclic GFR-binding peptide
  MOD_RES (6), (7), (39): Xaa is C or S
TVPKPXXAPTQLSPISVLYIDDSSNVIYKQYENMVVRAX

SEQ ID NO: 19834 - protein, 37 aa, Artificial Sequence
  Non-cyclic GFR-binding peptide
  MOD_RES (6), (7): Xaa is C or S
KIPKAXXVPTELEPISMLYLDENEKVVKFKYEDMVVE

SEQ ID NO: 19835 - protein, 40 aa, Artificial Sequence
  Non-cyclic GFR-binding peptide
  MOD_RES (2), (3), (37), (39): Xaa is C or S
  MOD_RES (17), (18), (19), (20), (21): Xaa is A or G
  MOD_RES (22), (23), (24), (25): Xaa is A or G or is absent
AXXVPTKLNAISILYFXXXXXXXXXLKKYRGMAVSEXGXR

SEQ ID NO: 19836 - protein, 36 aa, Artificial Sequence
  Non-cyclic GFR-binding peptide
  MOD_RES (3), (4), (36): Xaa is C or S
KPXXAPTKLSPISVLYIDDSSNVIYKQYENMVVRSX

SEQ ID NO: 19837 - protein, 36 aa, Artificial Sequence
  Non-cyclic GFR-binding peptide
  MOD_RES (1), (2), (35): Xaa is C or S
  MOD_RES (16), (17), (18), (19), (20): Xaa is A or G
  MOD_RES (21), (22), (23), (24): Xaa is A or G or is absent
XXVPQDLSPISILYIXXXXXXXXXYKQYEMVVKSXK

SEQ ID NO: 19838 - protein, 39 aa, Artificial Sequence
  Non-cyclic GFR-binding peptide
  MOD_RES (6), (7), (39): Xaa is C or S
KASKAXXVPTKLSPISILYKDKGVVTYLKYHYGMAVSEX

SEQ ID NO: 19839 - protein, 41 aa, Artificial Sequence
  Non-cyclic GFR-binding peptide
  MOD_RES (7), (39), (41): Xaa is C or S
HVTKPTXAPTKLSPISVLYIDDSSNVIYKQYENMVVRSXGX

SEQ ID NO: 19840 - protein, 38 aa, Artificial Sequence
  Non-cyclic GFR-binding peptide
  MOD_RES (3), (4), (36), (38): Xaa is C or S
KAXXVPTELEPISMLYLDEYDKVVKFKYEEMVVEGXGX

SEQ ID NO: 19841 - protein, 39 aa, Artificial Sequence
  Non-cyclic GFR-binding peptide
  MOD_RES (3), (4), (37), (39): Xaa is C or S
  MOD_RES (18), (19), (20), (21), (22): Xaa is A or G
  MOD_RES (23), (24), (25), (26): Xaa is A or G or is absent
SPXXVPQDLSPISILYIXXXXXXXXXYKQYEMVVKSXKX

SEQ ID NO: 19842 - protein, 41 aa, Artificial Sequence
  Non-cyclic GFR-binding peptide
  MOD_RES (3), (4), (38), (40): Xaa is C or S
  MOD_RES (18), (19), (20), (21), (22): Xaa is A or G
  MOD_RES (23), (24), (25), (26): Xaa is A or G or is absent
ASXXVPARLSPISILYKXXXXXXXXXLKYHYDMVVEAXGXR

SEQ ID NO: 19843 - protein, 33 aa, Artificial Sequence
  Non-cyclic GFR-binding peptide
  MOD_RES (14), (15), (16), (17), (18): Xaa is A or G
  MOD_RES (19), (20), (21), (22): Xaa is A or G or is absent
VPTELEPISMLYLXXXXXXXXXKFKYEEMVVEG

SEQ ID NO: 19844 - protein, 39 aa, Artificial Sequence
  Non-cyclic GFR-binding peptide
  MOD_RES (2), (3), (36), (38): Xaa is C or S
  MOD_RES (17), (18), (19), (20), (21): Xaa is A or G
  MOD_RES (22), (23), (24), (25): Xaa is A or G or is absent
PXXVPQDLSPISILYIXXXXXXXXXYKQYEMVVKSXKXS

SEQ ID NO: 19845 - protein, 36 aa, Artificial Sequence
  Non-cyclic GFR-binding peptide
  MOD_RES (1), (2): Xaa is C or S
  MOD_RES (16), (17), (18), (19), (20): Xaa is A or G
  MOD_RES (21), (22), (23), (24): Xaa is A or G or is absent
XXVPTKLSPISVLYIXXXXXXXXXYKQYEEGMSVAE

SEQ ID NO: 19846 - protein, 36 aa, Artificial Sequence
  Non-cyclic GFR-binding peptide
  MOD_RES (1), (33), (35): Xaa is C or S
XAPTQLEPISVLYLDDSSNVIKFKYENMVVRAXGXH

SEQ ID NO: 19847 - protein, 37 aa, Artificial Sequence
  Non-cyclic GFR-binding peptide
  MOD_RES (4), (5): Xaa is C or S
  MOD_RES (19), (20), (21), (22), (23): Xaa is A or G
  MOD_RES (24), (25), (26), (27): Xaa is A or G or is absent
AAPXXVPQALEPISILYLXXXXXXXXXKFKYEMIVRS

SEQ ID NO: 19848 - protein, 34 aa, Artificial Sequence
  Non-cyclic GFR-binding peptide
  MOD_RES (31), (33): Xaa is C or S
VPQDLEPISILYLVGRTPKVKFKYEMVVKSXKXS

SEQ ID NO: 19849 - protein, 34 aa, Artificial Sequence
  Non-cyclic GFR-binding peptide
  MOD_RES (1), (2): Xaa is C or S
  MOD_RES (16), (17), (18), (19), (20): Xaa is A or G
  MOD_RES (21), (22), (23), (24): Xaa is A or G or is absent
XXVPTELEPISMLYLXXXXXXXXXKFKYEDMVVE

SEQ ID NO: 19850 - protein, 44 aa, Artificial Sequence
  Non-cyclic GFR-binding peptide
  MOD_RES (6), (7), (41), (43): Xaa is C or S
  MOD_RES (21), (22), (23), (24), (25): Xaa is A or G
  MOD_RES (26), (27), (28), (29): Xaa is A or G or is absent
KASKAXXVPTKLSPISILYKXXXXXXXXXLKYHYGMAVSEXGXR

SEQ ID NO: 19851 - protein, 37 aa, Artificial Sequence
  Non-cyclic GFR-binding peptide
  MOD_RES (34), (36): Xaa is C or S
  MOD_RES (14), (15), (16), (17), (18): Xaa is A or G
  MOD_RES (19), (20), (21), (22): Xaa is A or G or is absent
APTKLEPISVLYLXXXXXXXXXKFKYENMVVRSXGXH

SEQ ID NO: 19852 - protein, 38 aa, Artificial Sequence
  Non-cyclic GFR-binding peptide
  MOD_RES (3), (4), (35), (37): Xaa is C or S
SPXXVPQDLSPISILYIVGRTPKVYKQYEMVVKSXKXS

SEQ ID NO: 19853 - protein, 40 aa, Artificial Sequence
  Non-cyclic GFR-binding peptide
  MOD_RES (6), (7): Xaa is C or S
  MOD_RES (21), (22), (23), (24), (25): Xaa is A or G
  MOD_RES (26), (27), (28), (29): Xaa is A or G or is absent
KASKAXXVPTKLSPISILYIXXXXXXXXXYKQYEGMAVSE

SEQ ID NO: 19854 - protein, 39 aa, Artificial Sequence
  Non-cyclic GFR-binding peptide
  MOD_RES (6), (7), (39): Xaa is C or S
AAPASXXVPARLSPISILYKDAANNVVLKYHYDMVVEAX

SEQ ID NO: 19855 - protein, 36 aa, Artificial Sequence
  Non-cyclic GFR-binding peptide
  MOD_RES (1), (2), (34), (36): Xaa is C or S
XXVPTKLNAISILYFDKGVVTYLKKYRGMAVSEXGX

SEQ ID NO: 19856 - protein, 39 aa, Artificial Sequence
  Non-cyclic GFR-binding peptide
  MOD_RES (5), (6), (38): Xaa is C or S
VPKAXXAPTKLEPISVLYLDSSNNVIKFKYENMVVKAXG

SEQ ID NO: 19857 - protein, 37 aa, Artificial Sequence
  Non-cyclic GFR-binding peptide
  MOD_RES (3), (4), (36): Xaa is C or S
KPXXAPTKLEPISVLYLDDSSNVIKFKYENMVVRSXG

SEQ ID NO: 19858 - protein, 38 aa, Artificial Sequence
  Non-cyclic GFR-binding peptide
  MOD_RES (2), (3), (37): Xaa is C or S
  MOD_RES (17), (18), (19), (20), (21): Xaa is A or G
  MOD_RES (22), (23), (24), (25): Xaa is A or G or is absent
AXXVPTELSPISMLYIXXXXXXXXXYKQYEDMVVEGXG

SEQ ID NO: 19859 - protein, 42 aa, Artificial Sequence
  Non-cyclic GFR-binding peptide
  MOD_RES (6), (7), (39), (41): Xaa is C or S
YVPKPXXAPTKLEPISVLYLDDSSNVIKFKYENMVVRSXGXH

SEQ ID NO: 19860 - protein, 38 aa, Artificial Sequence
  Non-cyclic GFR-binding peptide
  MOD_RES (1), (35), (37): Xaa is C or S
  MOD_RES (15), (16), (17), (18), (19): Xaa is A or G
  MOD_RES (20), (21), (22), (23): Xaa is A or G or is absent
XVPTKLSPISILYKXXXXXXXXXLKYHYGMAVSEXGXR

SEQ ID NO: 19861 - protein, 36 aa, Artificial Sequence
  Non-cyclic GFR-binding peptide
  MOD_RES (1), (34), (36): Xaa is C or S
  MOD_RES (15), (16), (17), (18), (19): Xaa is A or G
  MOD_RES (20), (21), (22), (23): Xaa is A or G or is absent
XVSQDLEPISILYLXXXXXXXXXKFKYEMIVKSXKX

SEQ ID NO: 19862 - protein, 34 aa, Artificial Sequence
  Non-cyclic GFR-binding peptide
  MOD_RES (1), (2): Xaa is C or S
  MOD_RES (16), (17), (18), (19), (20): Xaa is A or G
  MOD_RES (21), (22), (23), (24): Xaa is A or G or is absent
XXAPTKLSPISVLYIXXXXXXXXXYKQYENMVVK

SEQ ID NO: 19863 - protein, 34 aa, Artificial Sequence
  Non-cyclic GFR-binding peptide
  MOD_RES (1), (2): Xaa is C or S
  MOD_RES (16), (17), (18), (19), (20): Xaa is A or G
  MOD_RES (21), (22), (23), (24): Xaa is A or G or is absent
XXAPTKLSPISVLYIXXXXXXXXXYKQYENMVVR

SEQ ID NO: 19864 - protein, 38 aa, Artificial Sequence
  Non-cyclic GFR-binding peptide
  MOD_RES (2), (3), (38): Xaa is C or S
  MOD_RES (17), (18), (19), (20), (21): Xaa is A or G
  MOD_RES (22), (23), (24), (25): Xaa is A or G or is absent
AXXVPTKLEPISVLYLXXXXXXXXXKFKYEEGMSVAEX

SEQ ID NO: 19865 - protein, 38 aa, Artificial Sequence
  Non-cyclic GFR-binding peptide
  MOD_RES (1), (35), (37): Xaa is C or S
  MOD_RES (15), (16), (17), (18), (19): Xaa is A or G
  MOD_RES (20), (21), (22), (23): Xaa is A or G or is absent
XVPTELEPISMLYLXXXXXXXXXKFKYEDMVVEGXGXR

SEQ ID NO: 19866 - protein, 37 aa, Artificial Sequence
  Non-cyclic GFR-binding peptide
  MOD_RES (1), (2), (37): Xaa is C or S
  MOD_RES (16), (17), (18), (19), (20): Xaa is A or G
  MOD_RES (21), (22), (23), (24): Xaa is A or G or is absent
XXVPTKLSPISVLYIXXXXXXXXXYKQYEEGMSVAEX

SEQ ID NO: 19867 - protein, 35 aa, Artificial Sequence
  Non-cyclic GFR-binding peptide
  MOD_RES (4), (5): Xaa is C or S
SKAXXVPTKLSPISILYIDKGVVTYYKQYEGMAVS

SEQ ID NO: 19868 - protein, 41 aa, Artificial Sequence
  Non-cyclic GFR-binding peptide
  MOD_RES (5), (6), (40): Xaa is C or S
  MOD_RES (20), (21), (22), (23), (24): Xaa is A or G
  MOD_RES (25), (26), (27), (28): Xaa is A or G or is absent
VPKPXXAPTQLEPISVLYLXXXXXXXXXKFKYENMVVRAXG

SEQ ID NO: 19869 - protein, 37 aa, Artificial Sequence
  Non-cyclic GFR-binding peptide
  MOD_RES (1), (35), (37): Xaa is C or S
  MOD_RES (15), (16), (17), (18), (19): Xaa is A or G
  MOD_RES (20), (21), (22), (23): Xaa is A or G or is absent
XAPTKLSPISVLYIXXXXXXXXXYKQYENMVVRSXGX

SEQ ID NO: 19870 - protein, 39 aa, Artificial Sequence
  Non-cyclic GFR-binding peptide
  MOD_RES (1), (36), (38): Xaa is C or S
  MOD_RES (15), (16), (17), (18), (19): Xaa is A or G
  MOD_RES (20), (21), (22), (23): Xaa is A or G or is absent
XVPTKLSPISVLYIXXXXXXXXXYKQYEEGMSVAEXGXR

SEQ ID NO: 19871 - protein, 38 aa, Artificial Sequence
  Non-cyclic GFR-binding peptide
  MOD_RES (6), (7): Xaa is C or S
AAPASXXVPARLEPISILYLDAANNVVKFKYEDMVVEA

SEQ ID NO: 19872 - protein, 42 aa, Artificial Sequence
  Non-cyclic GFR-binding peptide
  MOD_RES (5), (6), (40), (42): Xaa is C or S
  MOD_RES (20), (21), (22), (23), (24): Xaa is A or G
  MOD_RES (25), (26), (27), (28): Xaa is A or G or is absent
IPKAXXVPTELSPISMLYIXXXXXXXXXYKQYEEMVVEGXGX

SEQ ID NO: 19873 - protein, 33 aa, Artificial Sequence
  Non-cyclic GFR-binding peptide
  MOD_RES (1), (1): Xaa is C or S
  MOD_RES (15), (16), (17), (18), (19): Xaa is A or G
  MOD_RES (20), (21), (22), (23): Xaa is A or G or is absent
XVPQDLEPISILYLXXXXXXXXXKFKYEMVVKS

SEQ ID NO: 19874 - protein, 36 aa, Artificial Sequence
  Non-cyclic GFR-binding peptide
  MOD_RES (2), (3), (34), (36): Xaa is C or S
PXXVPQALSPISILYIVGRKPKVYKQYEMIVRSXKX

SEQ ID NO: 19875 - protein, 40 aa, Artificial Sequence
  Non-cyclic GFR-binding peptide
  MOD_RES (4), (5), (37), (39): Xaa is C or S
PKPXXAPTKLEPISVLYLDDSSNVIKFKYENMVVRSXGXH

SEQ ID NO: 19876 - protein, 34 aa, Artificial Sequence
  Non-cyclic GFR-binding peptide
  MOD_RES (1), (33): Xaa is C or S
XVPTKLNAISILYFDKGVVTYLKKYRGMAVSEXG

SEQ ID NO: 19877 - protein, 33 aa, Artificial Sequence
  Non-cyclic GFR-binding peptide
  MOD_RES (2), (3): Xaa is C or S
SXXVPARLEPISILYLDAANNVVKFKYEDMVVE

SEQ ID NO: 19878 - protein, 37 aa, Artificial Sequence
  Non-cyclic GFR-binding peptide
  MOD_RES (3), (4), (37): Xaa is C or S
KAXXVPTKLEPISVLYLDDMGVPTKFKYEEGMSVAEX

SEQ ID NO: 19879 - protein, 41 aa, Artificial Sequence
  Non-cyclic GFR-binding peptide
  MOD_RES (6), (7): Xaa is C or S
  MOD_RES (21), (22), (23), (24), (25): Xaa is A or G
  MOD_RES (26), (27), (28), (29): Xaa is A or G or is absent
KVGKAXXVPTKLEPISVLYLXXXXXXXXXKFKYEEGMSVAE

SEQ ID NO: 19880 - protein, 37 aa, Artificial Sequence
  Non-cyclic GFR-binding peptide
  MOD_RES (1), (2), (35), (37): Xaa is C or S
  MOD_RES (16), (17), (18), (19), (20): Xaa is A or G
  MOD_RES (21), (22), (23), (24): Xaa is A or G or is absent
XXVPQALSPISILYIXXXXXXXXXYKQYEMIVRSXKX

SEQ ID NO: 19881 - protein, 39 aa, Artificial Sequence
  Non-cyclic GFR-binding peptide
  MOD_RES (6), (7), (39): Xaa is C or S
KIPKAXXVPTELSPISMLYIDENEKVVYKQYEDMVVEGX

SEQ ID NO: 19882 - protein, 41 aa, Artificial Sequence
  Non-cyclic GFR-binding peptide
  MOD_RES (5), (6), (40): Xaa is C or S
  MOD_RES (20), (21), (22), (23), (24): Xaa is A or G
  MOD_RES (25), (26), (27), (28): Xaa is A or G or is absent
ASKAXXVPTKLSPISILYIXXXXXXXXXYKQYEGMAVSEXG

SEQ ID NO: 19883 - protein, 33 aa, Artificial Sequence
  Non-cyclic GFR-binding peptide
  MOD_RES (1), (1): Xaa is C or S
  MOD_RES (15), (16), (17), (18), (19): Xaa is A or G
  MOD_RES (20), (21), (22), (23): Xaa is A or G or is absent
XAPTKLEPISVLYLXXXXXXXXXKFKYENMVVR

SEQ ID NO: 19884 - protein, 31 aa, Artificial Sequence
  Non-cyclic GFR-binding peptide
  MOD_RES (1), (1): Xaa is C or S
XVSQDLSPISILYIIGKTPKIYKQYEMIVKS

SEQ ID NO: 19885 - protein, 33 aa, Artificial Sequence
  Non-cyclic GFR-binding peptide
  MOD_RES (1), (1): Xaa is C or S
  MOD_RES (15), (16), (17), (18), (19): Xaa is A or G
  MOD_RES (20), (21), (22), (23): Xaa is A or G or is absent
XAPTKLEPISVLYLXXXXXXXXXKFKYENMVVK

SEQ ID NO: 19886 - protein, 33 aa, Artificial Sequence
  Non-cyclic GFR-binding peptide
  MOD_RES (14), (15), (16), (17), (18): Xaa is A or G
  MOD_RES (19), (20), (21), (22): Xaa is A or G or is absent
APTKLSPISVLYIXXXXXXXXXYKQYENMVVKA

SEQ ID NO: 19887 - protein, 36 aa, Artificial Sequence
  Non-cyclic GFR-binding peptide
  MOD_RES (3), (4), (36): Xaa is C or S
ASXXVPARLSPISILYKDAANNVVLKYHYDMVVEAX

SEQ ID NO: 19888 - protein, 36 aa, Artificial Sequence
  Non-cyclic GFR-binding peptide
  MOD_RES (5), (6): Xaa is C or S
VPKAXXAPTKLSPISVLYIDSSNNVIYKQYENMVVK

SEQ ID NO: 19889 - protein, 42 aa, Artificial Sequence
  Non-cyclic GFR-binding peptide
  MOD_RES (6), (40), (42): Xaa is C or S
  MOD_RES (20), (21), (22), (23), (24): Xaa is A or G
  MOD_RES (25), (26), (27), (28): Xaa is A or G or is absent
VTKPTXAPTKLEPISVLYLXXXXXXXXXKFKYENMVVRSXGX

SEQ ID NO: 19890 - protein, 36 aa, Artificial Sequence
  Non-cyclic GFR-binding peptide
  MOD_RES (5), (6): Xaa is C or S
ASKAXXVPTKLNAISILYFDKGVVTYLKKYRGMAVS

SEQ ID NO: 19891 - protein, 35 aa, Artificial Sequence
  Non-cyclic GFR-binding peptide
  MOD_RES (1), (34): Xaa is C or S
  MOD_RES (15), (16), (17), (18), (19): Xaa is A or G
  MOD_RES (20), (21), (22), (23): Xaa is A or G or is absent
XVPQDLSPISILYIXXXXXXXXXYKQYEMVVKSXK

SEQ ID NO: 19892 - protein, 36 aa, Artificial Sequence
  Non-cyclic GFR-binding peptide
  MOD_RES (1), (2), (34), (36): Xaa is C or S
XXAPTKLSPISVLYIDSSNNVIYKQYENMVVKAXGX

SEQ ID NO: 19893 - protein, 36 aa, Artificial Sequence
  Non-cyclic GFR-binding peptide
  MOD_RES (2), (3), (35): Xaa is C or S
AXXVPTELEPISMLYLDENEKVVKFKYEDMVVEGXG

SEQ ID NO: 19894 - protein, 35 aa, Artificial Sequence
  Non-cyclic GFR-binding peptide
  MOD_RES (1), (2), (34): Xaa is C or S
XXVPARLNAISILYFDAANNVVLKKYRDMVVEAXG

SEQ ID NO: 19895 - protein, 39 aa, Artificial Sequence
  Non-cyclic GFR-binding peptide
  MOD_RES (4), (5), (37), (39): Xaa is C or S
PKAXXVPTELEPISMLYLDEYDKVVKFKYEEMVVEGXGX

SEQ ID NO: 19896 - protein, 33 aa, Artificial Sequence
  Non-cyclic GFR-binding peptide
  MOD_RES (1), (1): Xaa is C or S
  MOD_RES (15), (16), (17), (18), (19): Xaa is A or G
  MOD_RES (20), (21), (22), (23): Xaa is A or G or is absent
XVPQDLSPISILYIXXXXXXXXXYKQYEMVVKS

SEQ ID NO: 19897 - protein, 37 aa, Artificial Sequence
  Non-cyclic GFR-binding peptide
  MOD_RES (1), (2), (36): Xaa is C or S
  MOD_RES (16), (17), (18), (19), (20): Xaa is A or G
  MOD_RES (21), (22), (23), (24): Xaa is A or G or is absent
XXAPTKLEPISVLYLXXXXXXXXXKFKYENMVVRSXG

SEQ ID NO: 19898 - protein, 35 aa, Artificial Sequence
  Non-cyclic GFR-binding peptide
  MOD_RES (1), (2), (34): Xaa is C or S
XXAPTKLEPISVLYLDSSNNVIKFKYENMVVKAXG

SEQ ID NO: 19899 - protein, 35 aa, Artificial Sequence
  Non-cyclic GFR-binding peptide
  MOD_RES (1), (2), (34): Xaa is C or S
XXVPARLEPISILYLDAANNVVKFKYEDMVVEAXG

SEQ ID NO: 19900 - protein, 41 aa, Artificial Sequence
  Non-cyclic GFR-binding peptide
  MOD_RES (3), (4), (38), (40): Xaa is C or S
  MOD_RES (18), (19), (20), (21), (22): Xaa is A or G
  MOD_RES (23), (24), (25), (26): Xaa is A or G or is absent
KAXXVPTELSPISMLYIXXXXXXXXXYKQYEEMVVEGXGXR

SEQ ID NO: 19901 - protein, 35 aa, Artificial Sequence
  Non-cyclic GFR-binding peptide
  MOD_RES (1), (2), (34): Xaa is C or S
XXAPTKLSPISVLYIDDSSNVIYKQYENMVVRSXG

SEQ ID NO: 19902 - protein, 39 aa, Artificial Sequence
  Non-cyclic GFR-binding peptide
  MOD_RES (5), (6), (38): Xaa is C or S
VPKPXXAPTQLSPISVLYIDDSSNVIYKQYENMVVRAXG

SEQ ID NO: 19903 - protein, 36 aa, Artificial Sequence
  Non-cyclic GFR-binding peptide
  MOD_RES (5), (6): Xaa is C or S
SAAPXXVPQALEPISILYLVGRKPKVKFKYEMIVRS

SEQ ID NO: 19904 - protein, 31 aa, Artificial Sequence
  Non-cyclic GFR-binding peptide
  MOD_RES (1), (1): Xaa is C or S
XAPTKLEPISVLYLDSSNNVIKFKYENMVVK

SEQ ID NO: 19905 - protein, 35 aa, Artificial Sequence
  Non-cyclic GFR-binding peptide
  MOD_RES (1), (33), (35): Xaa is C or S
XVPARLSPISILYKDAANNVVLKYHYDMVVEAXGX

SEQ ID NO: 19906 - protein, 32 aa, Artificial Sequence
  Non-cyclic GFR-binding peptide
VPTKLSPISVLYIDDMGVPTYKQYEEGMSVAE

SEQ ID NO: 19907 - protein, 42 aa, Artificial Sequence
  Non-cyclic GFR-binding peptide
  MOD_RES (5), (6), (40), (42): Xaa is C or S
  MOD_RES (20), (21), (22), (23), (24): Xaa is A or G
  MOD_RES (25), (26), (27), (28): Xaa is A or G or is absent
IPKAXXVPTELSPISMLYIXXXXXXXXXYKQYEDMVVEGXGX

SEQ ID NO: 19908 - protein, 42 aa, Artificial Sequence
  Non-cyclic GFR-binding peptide
  MOD_RES (3), (4), (39), (41): Xaa is C or S
  MOD_RES (18), (19), (20), (21), (22): Xaa is A or G
  MOD_RES (23), (24), (25), (26): Xaa is A or G or is absent
KAXXVPTKLSPISVLYIXXXXXXXXXYKQYEEGMSVAEXGXR

SEQ ID NO: 19909 - protein, 36 aa, Artificial Sequence
  Non-cyclic GFR-binding peptide
  MOD_RES (1), (33), (35): Xaa is C or S
XVPTELEPISMLYLDEYDKVVKFKYEEMVVEGXGXR

SEQ ID NO: 19910 - protein, 43 aa, Artificial Sequence
  Non-cyclic GFR-binding peptide
  MOD_RES (6), (7), (41), (43): Xaa is C or S
  MOD_RES (21), (22), (23), (24), (25): Xaa is A or G
  MOD_RES (26), (27), (28), (29): Xaa is A or G or is absent
AAPASXXVPARLNAISILYFXXXXXXXXXLKKYRDMVVEAXGX

SEQ ID NO: 19911 - protein, 34 aa, Artificial Sequence
  Non-cyclic GFR-binding peptide
  MOD_RES (1), (2): Xaa is C or S
  MOD_RES (16), (17), (18), (19), (20): Xaa is A or G
  MOD_RES (21), (22), (23), (24): Xaa is A or G or is absent
XXVPQDLSPISILYIXXXXXXXXXYKQYEMVVKS

SEQ ID NO: 19912 - protein, 36 aa, Artificial Sequence
  Non-cyclic GFR-binding peptide
  MOD_RES (3), (4): Xaa is C or S
  MOD_RES (18), (19), (20), (21), (22): Xaa is A or G
  MOD_RES (23), (24), (25), (26): Xaa is A or G or is absent
KAXXVPTKLSPISILYKXXXXXXXXXLKYHYGMAVS

SEQ ID NO: 19913 - protein, 32 aa, Artificial Sequence
  Non-cyclic GFR-binding peptide
  MOD_RES (1), (2): Xaa is C or S
XXVPTKLSPISILYIDKGVVTYYKQYEGMAVS

SEQ ID NO: 19914 - protein, 34 aa, Artificial Sequence
  Non-cyclic GFR-binding peptide
  MOD_RES (2), (3): Xaa is C or S
AXXVPTKLNAISILYFDKGVVTYLKKYRGMAVSE

SEQ ID NO: 19915 - protein, 39 aa, Artificial Sequence
  Non-cyclic GFR-binding peptide
  MOD_RES (5), (6): Xaa is C or S
  MOD_RES (20), (21), (22), (23), (24): Xaa is A or G
  MOD_RES (25), (26), (27), (28): Xaa is A or G or is absent
IPKAXXVPTELEPISMLYLXXXXXXXXXKFKYEEMVVEG

SEQ ID NO: 19916 - protein, 36 aa, Artificial Sequence
  Non-cyclic GFR-binding peptide
  MOD_RES (2), (3), (35): Xaa is C or S
AXXVPTKLSPISILYIDKGVVTYYKQYEGMAVSEXG

SEQ ID NO: 19917 - protein, 41 aa, Artificial Sequence
  Non-cyclic GFR-binding peptide
  MOD_RES (5), (6), (40): Xaa is C or S
  MOD_RES (20), (21), (22), (23), (24): Xaa is A or G
  MOD_RES (25), (26), (27), (28): Xaa is A or G or is absent
IPKAXXVPTELSPISMLYIXXXXXXXXXYKQYEEMVVEGXG

SEQ ID NO: 19918 - protein, 39 aa, Artificial Sequence
  Non-cyclic GFR-binding peptide
  MOD_RES (1), (2), (36), (38): Xaa is C or S
  MOD_RES (16), (17), (18), (19), (20): Xaa is A or G
  MOD_RES (21), (22), (23), (24): Xaa is A or G or is absent
XXVPTELSPISMLYIXXXXXXXXXYKQYEDMVVEGXGXR

SEQ ID NO: 19919 - protein, 35 aa, Artificial Sequence
  Non-cyclic GFR-binding peptide
  MOD_RES (4), (5): Xaa is C or S
AAPXXVPQALSPISILYIVGRKPKVYKQYEMIVRS

SEQ ID NO: 19920 - protein, 34 aa, Artificial Sequence
  Non-cyclic GFR-binding peptide
  MOD_RES (1), (2): Xaa is C or S
  MOD_RES (16), (17), (18), (19), (20): Xaa is A or G
  MOD_RES (21), (22), (23), (24): Xaa is A or G or is absent
XXAPTKLEPISVLYLXXXXXXXXXKFKYENMVVR

SEQ ID NO: 19921 - protein, 39 aa, Artificial Sequence
  Non-cyclic GFR-binding peptide
  MOD_RES (6), (7): Xaa is C or S
  MOD_RES (21), (22), (23), (24), (25): Xaa is A or G
  MOD_RES (26), (27), (28), (29): Xaa is A or G or is absent
YVPKPXXAPTKLSPISVLYIXXXXXXXXXYKQYENMVVR

SEQ ID NO: 19922 - protein, 35 aa, Artificial Sequence
  Non-cyclic GFR-binding peptide
  MOD_RES (3), (35): Xaa is C or S
PTXAPTKLSPISVLYIDDSSNVIYKQYENMVVRSX

SEQ ID NO: 19923 - protein, 39 aa, Artificial Sequence
  Non-cyclic GFR-binding peptide
  MOD_RES (6), (7), (39): Xaa is C or S
YVPKPXXAPTKLEPISVLYLDDSSNVIKFKYENMVVRSX

SEQ ID NO: 19924 - protein, 41 aa, Artificial Sequence
  Non-cyclic GFR-binding peptide
  MOD_RES (7), (39), (41): Xaa is C or S
HVTKPTXAPTKLEPISVLYLDDSSNVIKFKYENMVVRSXGX

SEQ ID NO: 19925 - protein, 35 aa, Artificial Sequence
  Non-cyclic GFR-binding peptide
  MOD_RES (1), (35): Xaa is C or S
  MOD_RES (15), (16), (17), (18), (19): Xaa is A or G
  MOD_RES (20), (21), (22), (23): Xaa is A or G or is absent
XVPTELSPISMLYIXXXXXXXXXYKQYEEMVVEGX

SEQ ID NO: 19926 - protein, 41 aa, Artificial Sequence
  Non-cyclic GFR-binding peptide
  MOD_RES (4), (5), (39), (41): Xaa is C or S
  MOD_RES (19), (20), (21), (22), (23): Xaa is A or G
  MOD_RES (24), (25), (26), (27): Xaa is A or G or is absent
PKAXXVPTELSPISMLYIXXXXXXXXXYKQYEDMVVEGXGX

SEQ ID NO: 19927 - protein, 40 aa, Artificial Sequence
  Non-cyclic GFR-binding peptide
  MOD_RES (6), (7): Xaa is C or S
  MOD_RES (21), (22), (23), (24), (25): Xaa is A or G
  MOD_RES (26), (27), (28), (29): Xaa is A or G or is absent
YVPKPXXAPTKLSPISVLYIXXXXXXXXXYKQYENMVVRS

SEQ ID NO: 19928 - protein, 37 aa, Artificial Sequence
  Non-cyclic GFR-binding peptide
  MOD_RES (5), (6), (37): Xaa is C or S
SASPXXVPQDLEPISILYLVGRTPKVKFKYEMVVKSX

SEQ ID NO: 19929 - protein, 39 aa, Artificial Sequence
  Non-cyclic GFR-binding peptide
  MOD_RES (3), (4), (39): Xaa is C or S
  MOD_RES (18), (19), (20), (21), (22): Xaa is A or G
  MOD_RES (23), (24), (25), (26): Xaa is A or G or is absent
KAXXVPTKLSPISVLYIXXXXXXXXXYKQYEEGMSVAEX

SEQ ID NO: 19930 - protein, 34 aa, Artificial Sequence
  Non-cyclic GFR-binding peptide
  MOD_RES (2), (3): Xaa is C or S
AXXVPTELEPISMLYLDENEKVVKFKYEDMVVEG

SEQ ID NO: 19931 - protein, 38 aa, Artificial Sequence
  Non-cyclic GFR-binding peptide
  MOD_RES (5), (6): Xaa is C or S
  MOD_RES (20), (21), (22), (23), (24): Xaa is A or G
  MOD_RES (25), (26), (27), (28): Xaa is A or G or is absent
IPKAXXVPTELSPISMLYIXXXXXXXXXYKQYEDMVVE

SEQ ID NO: 19932 - protein, 37 aa, Artificial Sequence
  Non-cyclic GFR-binding peptide
  MOD_RES (2), (3), (35), (37): Xaa is C or S
PXXAPTKLEPISVLYLDDSSNVIKFKYENMVVRSXGX

SEQ ID NO: 19933 - protein, 43 aa, Artificial Sequence
  Non-cyclic GFR-binding peptide
  MOD_RES (5), (6), (41), (43): Xaa is C or S
  MOD_RES (20), (21), (22), (23), (24): Xaa is A or G
  MOD_RES (25), (26), (27), (28): Xaa is A or G or is absent
VGKAXXVPTKLSPISVLYIXXXXXXXXXYKQYEEGMSVAEXGX

SEQ ID NO: 19934 - protein, 41 aa, Artificial Sequence
  Non-cyclic GFR-binding peptide
  MOD_RES (5), (6), (41): Xaa is C or S
  MOD_RES (20), (21), (22), (23), (24): Xaa is A or G
  MOD_RES (25), (26), (27), (28): Xaa is A or G or is absent
VGKAXXVPTKLEPISVLYLXXXXXXXXXKFKYEEGMSVAEX

SEQ ID NO: 19935 - protein, 33 aa, Artificial Sequence
  Non-cyclic GFR-binding peptide
  MOD_RES (1), (33): Xaa is C or S
XAPTQLSPISVLYIDDSSNVIYKQYENMVVRAX

SEQ ID NO: 19936 - protein, 34 aa, Artificial Sequence
  Non-cyclic GFR-binding peptide
  MOD_RES (3), (4): Xaa is C or S
KAXXAPTKLSPISVLYIDSSNNVIYKQYENMVVK

SEQ ID NO: 19937 - protein, 38 aa, Artificial Sequence
  Non-cyclic GFR-binding peptide
  MOD_RES (2), (3), (36), (38): Xaa is C or S
  MOD_RES (17), (18), (19), (20), (21): Xaa is A or G
  MOD_RES (22), (23), (24), (25): Xaa is A or G or is absent
PXXVPQDLEPISILYLXXXXXXXXXKFKYEMVVKSXKX

SEQ ID NO: 19938 - protein, 34 aa, Artificial Sequence
  Non-cyclic GFR-binding peptide
  MOD_RES (2), (2): Xaa is C or S
  MOD_RES (16), (17), (18), (19), (20): Xaa is A or G
  MOD_RES (21), (22), (23), (24): Xaa is A or G or is absent
TXAPTKLSPISVLYIXXXXXXXXXYKQYENMVVR

SEQ ID NO: 19939 - protein, 34 aa, Artificial Sequence
  Non-cyclic GFR-binding peptide
  MOD_RES (2), (3): Xaa is C or S
SXXVPARLEPISILYLDAANNVVKFKYEDMVVEA

SEQ ID NO: 19940 - protein, 39 aa, Artificial Sequence
  Non-cyclic GFR-binding peptide
  MOD_RES (5), (6), (37), (39): Xaa is C or S
SASPXXVSQDLEPISILYLIGKTPKIKFKYEMIVKSXKX

SEQ ID NO: 19941 - protein, 40 aa, Artificial Sequence
  Non-cyclic GFR-binding peptide
  MOD_RES (3), (4), (38), (40): Xaa is C or S
  MOD_RES (18), (19), (20), (21), (22): Xaa is A or G
  MOD_RES (23), (24), (25), (26): Xaa is A or G or is absent
KPXXAPTQLEPISVLYLXXXXXXXXXKFKYENMVVRAXGX

SEQ ID NO: 19942 - protein, 42 aa, Artificial Sequence
  Non-cyclic GFR-binding peptide
  MOD_RES (6), (40), (42): Xaa is C or S
  MOD_RES (20), (21), (22), (23), (24): Xaa is A or G
  MOD_RES (25), (26), (27), (28): Xaa is A or G or is absent
VTKPTXAPTKLSPISVLYIXXXXXXXXXYKQYENMVVRSXGX

SEQ ID NO: 19943 - protein, 36 aa, Artificial Sequence
  Non-cyclic GFR-binding peptide
  MOD_RES (3), (4), (36): Xaa is C or S
ASXXVPARLNAISILYFDAANNVVLKKYRDMVVEAX

SEQ ID NO: 19944 - protein, 35 aa, Artificial Sequence
  Non-cyclic GFR-binding peptide
  MOD_RES (34), (34): Xaa is C or S
  MOD_RES (14), (15), (16), (17), (18): Xaa is A or G
  MOD_RES (19), (20), (21), (22): Xaa is A or G or is absent
APTKLEPISVLYLXXXXXXXXXKFKYENMVVRSXG

SEQ ID NO: 19945 - protein, 35 aa, Artificial Sequence
  Non-cyclic GFR-binding peptide
  MOD_RES (1), (32), (34): Xaa is C or S
XVPQALSPISILYIVGRKPKVYKQYEMIVRSXKXS

SEQ ID NO: 19946 - protein, 32 aa, Artificial Sequence
  Non-cyclic GFR-binding peptide
  MOD_RES (32), (32): Xaa is C or S
APTQLEPISVLYLDDSSNVIKFKYENMVVRAX

SEQ ID NO: 19947 - protein, 35 aa, Artificial Sequence
  Non-cyclic GFR-binding peptide
  MOD_RES (1), (33), (35): Xaa is C or S
XVPARLEPISILYLDAANNVVKFKYEDMVVEAXGX

SEQ ID NO: 19948 - protein, 34 aa, Artificial Sequence
  Non-cyclic GFR-binding peptide
  MOD_RES (3), (4): Xaa is C or S
APXXVPQALEPISILYLVGRKPKVKFKYEMIVRS

SEQ ID NO: 19949 - protein, 36 aa, Artificial Sequence
  Non-cyclic GFR-binding peptide
  MOD_RES (1), (2), (33), (35): Xaa is C or S
XXVPQALEPISILYLVGRKPKVKFKYEMIVRSXKXS

SEQ ID NO: 19950 - protein, 36 aa, Artificial Sequence
  Non-cyclic GFR-binding peptide
  MOD_RES (34), (36): Xaa is C or S
  MOD_RES (14), (15), (16), (17), (18): Xaa is A or G
  MOD_RES (19), (20), (21), (22): Xaa is A or G or is absent
VPARLEPISILYLXXXXXXXXXKFKYEDMVVEAXGX

SEQ ID NO: 19951 - protein, 34 aa, Artificial Sequence
  Non-cyclic GFR-binding peptide
  MOD_RES (1), (2): Xaa is C or S
XXVPTKLEPISVLYLDDMGVPTKFKYEEGMSVAE

SEQ ID NO: 19952 - protein, 39 aa, Artificial Sequence
  Non-cyclic GFR-binding peptide
  MOD_RES (3), (4), (38): Xaa is C or S
  MOD_RES (18), (19), (20), (21), (22): Xaa is A or G
  MOD_RES (23), (24), (25), (26): Xaa is A or G or is absent
ASXXVPARLEPISILYLXXXXXXXXXKFKYEDMVVEAXG

SEQ ID NO: 19953 - protein, 39 aa, Artificial Sequence
  Non-cyclic GFR-binding peptide
  MOD_RES (3), (4), (36), (38): Xaa is C or S
KAXXVPTELSPISMLYIDEYDKVVYKQYEEMVVEGXGXR

SEQ ID NO: 19954 - protein, 38 aa, Artificial Sequence
  Non-cyclic GFR-binding peptide
  MOD_RES (4), (36), (38): Xaa is C or S
KPTXAPTKLSPISVLYIDDSSNVIYKQYENMVVRSXGX

SEQ ID NO: 19955 - protein, 31 aa, Artificial Sequence
  Non-cyclic GFR-binding peptide
VPTKLSPISILYIDKGVVTYYKQYEGMAVSE

SEQ ID NO: 19956 - protein, 35 aa, Artificial Sequence
  Non-cyclic GFR-binding peptide
  MOD_RES (34), (34): Xaa is C or S
  MOD_RES (14), (15), (16), (17), (18): Xaa is A or G
  MOD_RES (19), (20), (21), (22): Xaa is A or G or is absent
VPTKLNAISILYFXXXXXXXXXLKKYRGMAVSEXG

SEQ ID NO: 19957 - protein, 33 aa, Artificial Sequence
  Non-cyclic GFR-binding peptide
  MOD_RES (14), (15), (16), (17), (18): Xaa is A or G
  MOD_RES (19), (20), (21), (22): Xaa is A or G or is absent
APTKLSPISVLYIXXXXXXXXXYKQYENMVVRS

SEQ ID NO: 19958 - protein, 40 aa, Artificial Sequence
  Non-cyclic GFR-binding peptide
  MOD_RES (5), (6), (40): Xaa is C or S
  MOD_RES (20), (21), (22), (23), (24): Xaa is A or G
  MOD_RES (25), (26), (27), (28): Xaa is A or G or is absent
IPKAXXVPTELSPISMLYIXXXXXXXXXYKQYEEMVVEGX

SEQ ID NO: 19959 - protein, 38 aa, Artificial Sequence
  Non-cyclic GFR-binding peptide
  MOD_RES (6), (7): Xaa is C or S
TVPKPXXAPTQLSPISVLYIDDSSNVIYKQYENMVVRA

SEQ ID NO: 19960 - protein, 35 aa, Artificial Sequence
  Non-cyclic GFR-binding peptide
  MOD_RES (4), (5): Xaa is C or S
PKAXXVPTELEPISMLYLDENEKVVKFKYEDMVVE

SEQ ID NO: 19961 - protein, 36 aa, Artificial Sequence
  Non-cyclic GFR-binding peptide
  MOD_RES (34), (36): Xaa is C or S
  MOD_RES (14), (15), (16), (17), (18): Xaa is A or G
  MOD_RES (19), (20), (21), (22): Xaa is A or G or is absent
VPTELEPISMLYLXXXXXXXXXKFKYEEMVVEGXGX

SEQ ID NO: 19962 - protein, 32 aa, Artificial Sequence
  Non-cyclic GFR-binding peptide
  MOD_RES (1), (32): Xaa is C or S
XVPQALEPISILYLVGRKPKVKFKYEMIVRSX

SEQ ID NO: 19963 - protein, 39 aa, Artificial Sequence
  Non-cyclic GFR-binding peptide
  MOD_RES (2), (3), (38): Xaa is C or S
  MOD_RES (17), (18), (19), (20), (21): Xaa is A or G
  MOD_RES (22), (23), (24), (25): Xaa is A or G or is absent
AXXVPTKLEPISVLYLXXXXXXXXXKFKYEEGMSVAEXG

SEQ ID NO: 19964 - protein, 31 aa, Artificial Sequence
  Non-cyclic GFR-binding peptide
APTKLEPISVLYLDDSSNVIKFKYENMVVRS

SEQ ID NO: 19965 - protein, 37 aa, Artificial Sequence
  Non-cyclic GFR-binding peptide
  MOD_RES (4), (5), (37): Xaa is C or S
PKPXXAPTKLSPISVLYIDDSSNVIYKQYENMVVRSX

SEQ ID NO: 19966 - protein, 36 aa, Artificial Sequence
  Non-cyclic GFR-binding peptide
  MOD_RES (2), (3): Xaa is C or S
  MOD_RES (17), (18), (19), (20), (21): Xaa is A or G
  MOD_RES (22), (23), (24), (25): Xaa is A or G or is absent
AXXVPTELSPISMLYIXXXXXXXXXYKQYEEMVVEG

SEQ ID NO: 19967 - protein, 34 aa, Artificial Sequence
  Non-cyclic GFR-binding peptide
  MOD_RES (1), (1): Xaa is C or S
  MOD_RES (15), (16), (17), (18), (19): Xaa is A or G
  MOD_RES (20), (21), (22), (23): Xaa is A or G or is absent
XVPTELSPISMLYIXXXXXXXXXYKQYEDMVVEG

SEQ ID NO: 19968 - protein, 42 aa, Artificial Sequence
  Non-cyclic GFR-binding peptide
  MOD_RES (6), (7), (41): Xaa is C or S
  MOD_RES (21), (22), (23), (24), (25): Xaa is A or G
  MOD_RES (26), (27), (28), (29): Xaa is A or G or is absent
KASKAXXVPTKLSPISILYIXXXXXXXXXYKQYEGMAVSEXG

SEQ ID NO: 19969 - protein, 38 aa, Artificial Sequence
  Non-cyclic GFR-binding peptide
  MOD_RES (4), (5), (37): Xaa is C or S
PKAXXAPTKLSPISVLYIDSSNNVIYKQYENMVVKAXG

SEQ ID NO: 19970 - protein, 40 aa, Artificial Sequence
  Non-cyclic GFR-binding peptide
  MOD_RES (6), (7), (39): Xaa is C or S
KASKAXXVPTKLSPISILYKDKGVVTYLKYHYGMAVSEXG

SEQ ID NO: 19971 - protein, 39 aa, Artificial Sequence
  Non-cyclic GFR-binding peptide
  MOD_RES (4), (5), (39): Xaa is C or S
  MOD_RES (19), (20), (21), (22), (23): Xaa is A or G
  MOD_RES (24), (25), (26), (27): Xaa is A or G or is absent
PKAXXVPTELEPISMLYLXXXXXXXXXKFKYEDMVVEGX

SEQ ID NO: 19972 - protein, 33 aa, Artificial Sequence
  Non-cyclic GFR-binding peptide
  MOD_RES (14), (15), (16), (17), (18): Xaa is A or G
  MOD_RES (19), (20), (21), (22): Xaa is A or G or is absent
VPTELSPISMLYIXXXXXXXXXYKQYEEMVVEG

SEQ ID NO: 19973 - protein, 37 aa, Artificial Sequence
  Non-cyclic GFR-binding peptide
  MOD_RES (3), (4), (36): Xaa is C or S
KAXXVPTKLSPISILYKDKGVVTYLKYHYGMAVSEXG

SEQ ID NO: 19974 - protein, 32 aa, Artificial Sequence
  Non-cyclic GFR-binding peptide
  MOD_RES (1), (2): Xaa is C or S
XXVPARLSPISILYKDAANNVVLKYHYDMVVE

SEQ ID NO: 19975 - protein, 33 aa, Artificial Sequence
  Non-cyclic GFR-binding peptide
  MOD_RES (1), (33): Xaa is C or S
XVPTKLSPISILYIDKGVVTYYKQYEGMAVSEX

SEQ ID NO: 19976 - protein, 42 aa, Artificial Sequence
  Non-cyclic GFR-binding peptide
  MOD_RES (6), (7), (40), (42): Xaa is C or S
  MOD_RES (21), (22), (23), (24), (25): Xaa is A or G
  MOD_RES (26), (27), (28), (29): Xaa is A or G or is absent
ASASPXXVPQDLSPISILYIXXXXXXXXXYKQYEMVVKSXKX

SEQ ID NO: 19977 - protein, 40 aa, Artificial Sequence
  Non-cyclic GFR-binding peptide
  MOD_RES (7), (7): Xaa is C or S
  MOD_RES (21), (22), (23), (24), (25): Xaa is A or G
  MOD_RES (26), (27), (28), (29): Xaa is A or G or is absent
HVTKPTXAPTKLEPISVLYLXXXXXXXXXKFKYENMVVRS

SEQ ID NO: 19978 - protein, 41 aa, Artificial Sequence
  Non-cyclic GFR-binding peptide
  MOD_RES (4), (5), (39), (41): Xaa is C or S
  MOD_RES (19), (20), (21), (22), (23): Xaa is A or G
  MOD_RES (24), (25), (26), (27): Xaa is A or G or is absent
PKAXXVPTELEPISMLYLXXXXXXXXXKFKYEDMVVEGXGX

SEQ ID NO: 19979 - protein, 40 aa, Artificial Sequence
  Non-cyclic GFR-binding peptide
  MOD_RES (3), (4), (38), (40): Xaa is C or S
  MOD_RES (18), (19), (20), (21), (22): Xaa is A or G
  MOD_RES (23), (24), (25), (26): Xaa is A or G or is absent
KAXXVPTKLSPISILYKXXXXXXXXXLKYHYGMAVSEXGX

SEQ ID NO: 19980 - protein, 32 aa, Artificial Sequence
  Non-cyclic GFR-binding peptide
  MOD_RES (14), (15), (16), (17), (18): Xaa is A or G
  MOD_RES (19), (20), (21), (22): Xaa is A or G or is absent
VSQDLEPISILYLXXXXXXXXXKFKYEMIVKS

SEQ ID NO: 19981 - protein, 38 aa, Artificial Sequence
  Non-cyclic GFR-binding peptide
  MOD_RES (4), (5), (36), (38): Xaa is C or S
AAPXXVPQALEPISILYLVGRKPKVKFKYEMIVRSXKX

SEQ ID NO: 19982 - protein, 37 aa, Artificial Sequence
  Non-cyclic GFR-binding peptide
  MOD_RES (6), (7): Xaa is C or S
AAPASXXVPARLSPISILYKDAANNVVLKYHYDMVVE

SEQ ID NO: 19983 - protein, 37 aa, Artificial Sequence
  Non-cyclic GFR-binding peptide
  MOD_RES (2), (3), (37): Xaa is C or S
  MOD_RES (17), (18), (19), (20), (21): Xaa is A or G
  MOD_RES (22), (23), (24), (25): Xaa is A or G or is absent
SXXVPARLSPISILYKXXXXXXXXXLKYHYDMVVEAX

SEQ ID NO: 19984 - protein, 38 aa, Artificial Sequence
  Non-cyclic GFR-binding peptide
  MOD_RES (2), (3), (36), (38): Xaa is C or S
  MOD_RES (17), (18), (19), (20), (21): Xaa is A or G
  MOD_RES (22), (23), (24), (25): Xaa is A or G or is absent
PXXVSQDLSPISILYIXXXXXXXXXYKQYEMIVKSXKX

SEQ ID NO: 19985 - protein, 39 aa, Artificial Sequence
  Non-cyclic GFR-binding peptide
  MOD_RES (4), (5), (38): Xaa is C or S
  MOD_RES (19), (20), (21), (22), (23): Xaa is A or G
  MOD_RES (24), (25), (26), (27): Xaa is A or G or is absent
ASPXXVPQDLSPISILYIXXXXXXXXXYKQYEMVVKSXK

SEQ ID NO: 19986 - protein, 37 aa, Artificial Sequence
  Non-cyclic GFR-binding peptide
  MOD_RES (1), (2), (36): Xaa is C or S
  MOD_RES (16), (17), (18), (19), (20): Xaa is A or G
  MOD_RES (21), (22), (23), (24): Xaa is A or G or is absent
XXVPTKLNAISILYFXXXXXXXXXLKKYRGMAVSEXG

SEQ ID NO: 19987 - protein, 39 aa, Artificial Sequence
  Non-cyclic GFR-binding peptide
  MOD_RES (5), (6), (38): Xaa is C or S
ASKAXXVPTKLSPISILYIDKGVVTYYKQYEGMAVSEXG

SEQ ID NO: 19988 - protein, 33 aa, Artificial Sequence
  Non-cyclic GFR-binding peptide
  MOD_RES (1), (33): Xaa is C or S
XAPTKLEPISVLYLDSSNNVIKFKYENMVVKAX

SEQ ID NO: 19989 - protein, 42 aa, Artificial Sequence
  Non-cyclic GFR-binding peptide
  MOD_RES (6), (7), (41): Xaa is C or S
  MOD_RES (21), (22), (23), (24), (25): Xaa is A or G
  MOD_RES (26), (27), (28), (29): Xaa is A or G or is absent
SIPKAXXVPTELEPISMLYLXXXXXXXXXKFKYEEMVVEGXG

SEQ ID NO: 19990 - protein, 40 aa, Artificial Sequence
  Non-cyclic GFR-binding peptide
  MOD_RES (6), (7), (40): Xaa is C or S
  MOD_RES (21), (22), (23), (24), (25): Xaa is A or G
  MOD_RES (26), (27), (28), (29): Xaa is A or G or is absent
ASAAPXXVPQALEPISILYLXXXXXXXXXKFKYEMIVRSX

SEQ ID NO: 19991 - protein, 36 aa, Artificial Sequence
  Non-cyclic GFR-binding peptide
  MOD_RES (3), (4): Xaa is C or S
  MOD_RES (18), (19), (20), (21), (22): Xaa is A or G
  MOD_RES (23), (24), (25), (26): Xaa is A or G or is absent
SPXXVSQDLSPISILYIXXXXXXXXXYKQYEMIVKS

SEQ ID NO: 19992 - protein, 35 aa, Artificial Sequence
  Non-cyclic GFR-binding peptide
  MOD_RES (4), (5): Xaa is C or S
SKAXXVPTKLNAISILYFDKGVVTYLKKYRGMAVS

SEQ ID NO: 19993 - protein, 43 aa, Artificial Sequence
  Non-cyclic GFR-binding peptide
  MOD_RES (5), (6), (40), (42): Xaa is C or S
  MOD_RES (20), (21), (22), (23), (24): Xaa is A or G
  MOD_RES (25), (26), (27), (28): Xaa is A or G or is absent
VPKPXXAPTKLEPISVLYLXXXXXXXXXKFKYENMVVRSXGXH

SEQ ID NO: 19994 - protein, 34 aa, Artificial Sequence
  Non-cyclic GFR-binding peptide
  MOD_RES (34), (34): Xaa is C or S
  MOD_RES (14), (15), (16), (17), (18): Xaa is A or G
  MOD_RES (19), (20), (21), (22): Xaa is A or G or is absent
APTQLSPISVLYIXXXXXXXXXYKQYENMVVRAX

SEQ ID NO: 19995 - protein, 34 aa, Artificial Sequence
  Non-cyclic GFR-binding peptide
  MOD_RES (34), (34): Xaa is C or S
  MOD_RES (14), (15), (16), (17), (18): Xaa is A or G
  MOD_RES (19), (20), (21), (22): Xaa is A or G or is absent
APTKLEPISVLYLXXXXXXXXXKFKYENMVVRSX

SEQ ID NO: 19996 - protein, 39 aa, Artificial Sequence
  Non-cyclic GFR-binding peptide
  MOD_RES (3), (4), (36), (38): Xaa is C or S
KAXXAPTKLEPISVLYLDSSNNVIKFKYENMVVKAXGXH

SEQ ID NO: 19997 - protein, 33 aa, Artificial Sequence
  Non-cyclic GFR-binding peptide
  MOD_RES (32), (32): Xaa is C or S
VPTKLNAISILYFDKGVVTYLKKYRGMAVSEXG

SEQ ID NO: 19998 - protein, 39 aa, Artificial Sequence
  Non-cyclic GFR-binding peptide
  MOD_RES (5), (37), (39): Xaa is C or S
TKPTXAPTKLSPISVLYIDDSSNVIYKQYENMVVRSXGX

SEQ ID NO: 19999 - protein, 40 aa, Artificial Sequence
  Non-cyclic GFR-binding peptide
  MOD_RES (3), (4), (38), (40): Xaa is C or S
  MOD_RES (18), (19), (20), (21), (22): Xaa is A or G
  MOD_RES (23), (24), (25), (26): Xaa is A or G or is absent
KAXXAPTKLEPISVLYLXXXXXXXXXKFKYENMVVKAXGX

SEQ ID NO: 20000 - protein, 37 aa, Artificial Sequence
  Non-cyclic GFR-binding peptide
  MOD_RES (1), (2), (34), (36): Xaa is C or S
XXVPTELEPISMLYLDEYDKVVKFKYEEMVVEGXGXR

SEQ ID NO: 20001 - protein, 37 aa, Artificial Sequence
  Non-cyclic GFR-binding peptide
  MOD_RES (3), (4), (37): Xaa is C or S
  MOD_RES (18), (19), (20), (21), (22): Xaa is A or G
  MOD_RES (23), (24), (25), (26): Xaa is A or G or is absent
APXXVPQALSPISILYIXXXXXXXXXYKQYEMIVRSX

SEQ ID NO: 20002 - protein, 44 aa, Artificial Sequence
  Non-cyclic GFR-binding peptide
  MOD_RES (6), (7), (41), (43): Xaa is C or S
  MOD_RES (21), (22), (23), (24), (25): Xaa is A or G
  MOD_RES (26), (27), (28), (29): Xaa is A or G or is absent
TVPKPXXAPTQLEPISVLYLXXXXXXXXXKFKYENMVVRAXGXH

SEQ ID NO: 20003 - protein, 36 aa, Artificial Sequence
  Non-cyclic GFR-binding peptide
  MOD_RES (1), (2), (34), (36): Xaa is C or S
XXVPTELSPISMLYIDEYDKVVYKQYEEMVVEGXGX

SEQ ID NO: 20004 - protein, 36 aa, Artificial Sequence
  Non-cyclic GFR-binding peptide
  MOD_RES (1), (34), (36): Xaa is C or S
  MOD_RES (15), (16), (17), (18), (19): Xaa is A or G
  MOD_RES (20), (21), (22), (23): Xaa is A or G or is absent
XVPQALSPISILYIXXXXXXXXXYKQYEMIVRSXKX

SEQ ID NO: 20005 - protein, 34 aa, Artificial Sequence
  Non-cyclic GFR-binding peptide
  MOD_RES (1), (2), (33): Xaa is C or S
XXVPQALEPISILYLVGRKPKVKFKYEMIVRSXK

SEQ ID NO: 20006 - protein, 35 aa, Artificial Sequence
  Non-cyclic GFR-binding peptide
  MOD_RES (1), (33), (35): Xaa is C or S
XAPTKLSPISVLYIDDSSNVIYKQYENMVVRSXGX

SEQ ID NO: 20007 - protein, 40 aa, Artificial Sequence
  Non-cyclic GFR-binding peptide
  MOD_RES (2), (3), (37), (39): Xaa is C or S
  MOD_RES (17), (18), (19), (20), (21): Xaa is A or G
  MOD_RES (22), (23), (24), (25): Xaa is A or G or is absent
SXXVPARLSPISILYKXXXXXXXXXLKYHYDMVVEAXGXR

SEQ ID NO: 20008 - protein, 42 aa, Artificial Sequence
  Non-cyclic GFR-binding peptide
  MOD_RES (6), (7), (41): Xaa is C or S
  MOD_RES (21), (22), (23), (24), (25): Xaa is A or G
  MOD_RES (26), (27), (28), (29): Xaa is A or G or is absent
KASKAXXVPTKLNAISILYFXXXXXXXXXLKKYRGMAVSEXG

SEQ ID NO: 20009 - protein, 35 aa, Artificial Sequence
  Non-cyclic GFR-binding peptide
  MOD_RES (2), (3): Xaa is C or S
  MOD_RES (17), (18), (19), (20), (21): Xaa is A or G
  MOD_RES (22), (23), (24), (25): Xaa is A or G or is absent
AXXVPTKLSPISILYKXXXXXXXXXLKYHYGMAVS

SEQ ID NO: 20010 - protein, 37 aa, Artificial Sequence
  Non-cyclic GFR-binding peptide
  MOD_RES (34), (36): Xaa is C or S
  MOD_RES (14), (15), (16), (17), (18): Xaa is A or G
  MOD_RES (19), (20), (21), (22): Xaa is A or G or is absent
VPTKLSPISILYIXXXXXXXXXYKQYEGMAVSEXGXR

SEQ ID NO: 20011 - protein, 35 aa, Artificial Sequence
  Non-cyclic GFR-binding peptide
  MOD_RES (1), (2): Xaa is C or S
  MOD_RES (16), (17), (18), (19), (20): Xaa is A or G
  MOD_RES (21), (22), (23), (24): Xaa is A or G or is absent
XXVPTELEPISMLYLXXXXXXXXXKFKYEEMVVEG

SEQ ID NO: 20012 - protein, 35 aa, Artificial Sequence
  Non-cyclic GFR-binding peptide
  MOD_RES (1), (32), (34): Xaa is C or S
XVPQDLEPISILYLVGRTPKVKFKYEMVVKSXKXS

SEQ ID NO: 20013 - protein, 32 aa, Artificial Sequence
  Non-cyclic GFR-binding peptide
  MOD_RES (14), (15), (16), (17), (18): Xaa is A or G
  MOD_RES (19), (20), (21), (22): Xaa is A or G or is absent
VPTELSPISMLYIXXXXXXXXXYKQYEDMVVE

SEQ ID NO: 20014 - protein, 40 aa, Artificial Sequence
  Non-cyclic GFR-binding peptide
  MOD_RES (5), (6), (39): Xaa is C or S
VGKAXXVPTKLEPISVLYLDDMGVPTKFKYEEGMSVAEXG

SEQ ID NO: 20015 - protein, 43 aa, Artificial Sequence
  Non-cyclic GFR-binding peptide
  MOD_RES (6), (7), (41), (43): Xaa is C or S
  MOD_RES (21), (22), (23), (24), (25): Xaa is A or G
  MOD_RES (26), (27), (28), (29): Xaa is A or G or is absent
KASKAXXVPTKLNAISILYFXXXXXXXXXLKKYRGMAVSEXGX

SEQ ID NO: 20016 - protein, 37 aa, Artificial Sequence
  Non-cyclic GFR-binding peptide
  MOD_RES (4), (5), (36): Xaa is C or S
ASPXXVSQDLSPISILYIIGKTPKIYKQYEMIVKSXK

SEQ ID NO: 20017 - protein, 33 aa, Artificial Sequence
  Non-cyclic GFR-binding peptide
  MOD_RES (1), (1): Xaa is C or S
  MOD_RES (15), (16), (17), (18), (19): Xaa is A or G
  MOD_RES (20), (21), (22), (23): Xaa is A or G or is absent
XVPTELSPISMLYIXXXXXXXXXYKQYEDMVVE

SEQ ID NO: 20018 - protein, 39 aa, Artificial Sequence
  Non-cyclic GFR-binding peptide
  MOD_RES (6), (7), (39): Xaa is C or S
KASKAXXVPTKLSPISILYIDKGVVTYYKQYEGMAVSEX

SEQ ID NO: 20019 - protein, 41 aa, Artificial Sequence
  Non-cyclic GFR-binding peptide
  MOD_RES (4), (5), (39), (41): Xaa is C or S
  MOD_RES (19), (20), (21), (22), (23): Xaa is A or G
  MOD_RES (24), (25), (26), (27): Xaa is A or G or is absent
PKAXXVPTELEPISMLYLXXXXXXXXXKFKYEEMVVEGXGX

SEQ ID NO: 20020 - protein, 33 aa, Artificial Sequence
  Non-cyclic GFR-binding peptide
  MOD_RES (3), (3): Xaa is C or S
PTXAPTKLSPISVLYIDDSSNVIYKQYENMVVR

SEQ ID NO: 20021 - protein, 39 aa, Artificial Sequence
  Non-cyclic GFR-binding peptide
  MOD_RES (6), (7): Xaa is C or S
  MOD_RES (21), (22), (23), (24), (25): Xaa is A or G
  MOD_RES (26), (27), (28), (29): Xaa is A or G or is absent
SIPKAXXVPTELEPISMLYLXXXXXXXXXKFKYEEMVVE

SEQ ID NO: 20022 - protein, 43 aa, Artificial Sequence
  Non-cyclic GFR-binding peptide
  MOD_RES (6), (7), (41), (43): Xaa is C or S
  MOD_RES (21), (22), (23), (24), (25): Xaa is A or G
  MOD_RES (26), (27), (28), (29): Xaa is A or G or is absent
SIPKAXXVPTELSPISMLYIXXXXXXXXXYKQYEEMVVEGXGX

SEQ ID NO: 20023 - protein, 39 aa, Artificial Sequence
  Non-cyclic GFR-binding peptide
  MOD_RES (5), (6), (38): Xaa is C or S
IPKAXXVPTELEPISMLYLDEYDKVVKFKYEEMVVEGXG

SEQ ID NO: 20024 - protein, 37 aa, Artificial Sequence
  Non-cyclic GFR-binding peptide
  MOD_RES (2), (34), (36): Xaa is C or S
TXAPTKLEPISVLYLDDSSNVIKFKYENMVVRSXGXH

SEQ ID NO: 20025 - protein, 36 aa, Artificial Sequence
  Non-cyclic GFR-binding peptide
  MOD_RES (1), (35): Xaa is C or S
  MOD_RES (15), (16), (17), (18), (19): Xaa is A or G
  MOD_RES (20), (21), (22), (23): Xaa is A or G or is absent
XAPTQLEPISVLYLXXXXXXXXXKFKYENMVVRAXG

SEQ ID NO: 20026 - protein, 39 aa, Artificial Sequence
  Non-cyclic GFR-binding peptide
  MOD_RES (3), (4), (36), (38): Xaa is C or S
KAXXVPTELSPISMLYIDENEKVVYKQYEDMVVEGXGXR

SEQ ID NO: 20027 - protein, 38 aa, Artificial Sequence
  Non-cyclic GFR-binding peptide
  MOD_RES (2), (3), (35), (37): Xaa is C or S
AXXAPTKLSPISVLYIDSSNNVIYKQYENMVVKAXGXH

SEQ ID NO: 20028 - protein, 35 aa, Artificial Sequence
  Non-cyclic GFR-binding peptide
  MOD_RES (3), (4): Xaa is C or S
KPXXAPTQLEPISVLYLDDSSNVIKFKYENMVVRA

SEQ ID NO: 20029 - protein, 36 aa, Artificial Sequence
  Non-cyclic GFR-binding peptide
  MOD_RES (4), (4): Xaa is C or S
  MOD_RES (18), (19), (20), (21), (22): Xaa is A or G
  MOD_RES (23), (24), (25), (26): Xaa is A or G or is absent
KPTXAPTKLSPISVLYIXXXXXXXXXYKQYENMVVR

SEQ ID NO: 20030 - protein, 33 aa, Artificial Sequence
  Non-cyclic GFR-binding peptide
  MOD_RES (33), (33): Xaa is C or S
  MOD_RES (14), (15), (16), (17), (18): Xaa is A or G
  MOD_RES (19), (20), (21), (22): Xaa is A or G or is absent
VSQDLSPISILYIXXXXXXXXXYKQYEMIVKSX

SEQ ID NO: 20031 - protein, 34 aa, Artificial Sequence
  Non-cyclic GFR-binding peptide
  MOD_RES (1), (2), (34): Xaa is C or S
XXAPTKLEPISVLYLDSSNNVIKFKYENMVVKAX

SEQ ID NO: 20032 - protein, 36 aa, Artificial Sequence
  Non-cyclic GFR-binding peptide
  MOD_RES (1), (2), (36): Xaa is C or S
  MOD_RES (16), (17), (18), (19), (20): Xaa is A or G
  MOD_RES (21), (22), (23), (24): Xaa is A or G or is absent
XXVPARLEPISILYLXXXXXXXXXKFKYEDMVVEAX

SEQ ID NO: 20033 - protein, 37 aa, Artificial Sequence
  Non-cyclic GFR-binding peptide
  MOD_RES (6), (6): Xaa is C or S
VTKPTXAPTKLEPISVLYLDDSSNVIKFKYENMVVRS

SEQ ID NO: 20034 - protein, 34 aa, Artificial Sequence
  Non-cyclic GFR-binding peptide
  MOD_RES (1), (2): Xaa is C or S
  MOD_RES (16), (17), (18), (19), (20): Xaa is A or G
  MOD_RES (21), (22), (23), (24): Xaa is A or G or is absent
XXVPTKLNAISILYFXXXXXXXXXLKKYRGMAVS

SEQ ID NO: 20035 - protein, 34 aa, Artificial Sequence
  Non-cyclic GFR-binding peptide
  MOD_RES (34), (34): Xaa is C or S
  MOD_RES (14), (15), (16), (17), (18): Xaa is A or G
  MOD_RES (19), (20), (21), (22): Xaa is A or G or is absent
APTKLSPISVLYIXXXXXXXXXYKQYENMVVKAX

SEQ ID NO: 20036 - protein, 35 aa, Artificial Sequence
  Non-cyclic GFR-binding peptide
  MOD_RES (3), (4): Xaa is C or S
KAXXAPTKLEPISVLYLDSSNNVIKFKYENMVVKA

SEQ ID NO: 20037 - protein, 39 aa, Artificial Sequence
  Non-cyclic GFR-binding peptide
  MOD_RES (2), (3), (37), (39): Xaa is C or S
  MOD_RES (17), (18), (19), (20), (21): Xaa is A or G
  MOD_RES (22), (23), (24), (25): Xaa is A or G or is absent
SXXVPARLEPISILYLXXXXXXXXXKFKYEDMVVEAXGX

SEQ ID NO: 20038 - protein, 40 aa, Artificial Sequence
  Non-cyclic GFR-binding peptide
  MOD_RES (4), (5), (39): Xaa is C or S
  MOD_RES (19), (20), (21), (22), (23): Xaa is A or G
  MOD_RES (24), (25), (26), (27): Xaa is A or G or is absent
PKAXXVPTELEPISMLYLXXXXXXXXXKFKYEDMVVEGXG

SEQ ID NO: 20039 - protein, 36 aa, Artificial Sequence
  Non-cyclic GFR-binding peptide
  MOD_RES (5), (6): Xaa is C or S
IPKAXXVPTELEPISMLYLDEYDKVVKFKYEEMVVE

SEQ ID NO: 20040 - protein, 36 aa, Artificial Sequence
  Non-cyclic GFR-binding peptide
  MOD_RES (34), (36): Xaa is C or S
  MOD_RES (14), (15), (16), (17), (18): Xaa is A or G
  MOD_RES (19), (20), (21), (22): Xaa is A or G or is absent
VPTELSPISMLYIXXXXXXXXXYKQYEEMVVEGXGX

SEQ ID NO: 20041 - protein, 38 aa, Artificial Sequence
  Non-cyclic GFR-binding peptide
  MOD_RES (5), (6), (38): Xaa is C or S
ASKAXXVPTKLNAISILYFDKGVVTYLKKYRGMAVSEX

SEQ ID NO: 20042 - protein, 37 aa, Artificial Sequence
  Non-cyclic GFR-binding peptide
  MOD_RES (4), (5), (37): Xaa is C or S
PKAXXVPTELSPISMLYIDEYDKVVYKQYEEMVVEGX

SEQ ID NO: 20043 - protein, 34 aa, Artificial Sequence
  Non-cyclic GFR-binding peptide
  MOD_RES (32), (34): Xaa is C or S
VPTKLNAISILYFDKGVVTYLKKYRGMAVSEXGX

SEQ ID NO: 20044 - protein, 41 aa, Artificial Sequence
  Non-cyclic GFR-binding peptide
  MOD_RES (4), (5), (39), (41): Xaa is C or S
  MOD_RES (19), (20), (21), (22), (23): Xaa is A or G
  MOD_RES (24), (25), (26), (27): Xaa is A or G or is absent
PKAXXVPTELSPISMLYIXXXXXXXXXYKQYEEMVVEGXGX

SEQ ID NO: 20045 - protein, 35 aa, Artificial Sequence
  Non-cyclic GFR-binding peptide
  MOD_RES (3), (4), (35): Xaa is C or S
APXXVPQALSPISILYIVGRKPKVYKQYEMIVRSX

SEQ ID NO: 20046 - protein, 44 aa, Artificial Sequence
  Non-cyclic GFR-binding peptide
  MOD_RES (5), (6), (41), (43): Xaa is C or S
  MOD_RES (20), (21), (22), (23), (24): Xaa is A or G
  MOD_RES (25), (26), (27), (28): Xaa is A or G or is absent
VGKAXXVPTKLSPISVLYIXXXXXXXXXYKQYEEGMSVAEXGXR

SEQ ID NO: 20047 - protein, 34 aa, Artificial Sequence
  Non-cyclic GFR-binding peptide
  MOD_RES (1), (33): Xaa is C or S
XAPTKLEPISVLYLDDSSNVIKFKYENMVVRSXG

SEQ ID NO: 20048 - protein, 34 aa, Artificial Sequence
  Non-cyclic GFR-binding peptide
  MOD_RES (2), (3), (34): Xaa is C or S
PXXVPQDLEPISILYLVGRTPKVKFKYEMVVKSX

SEQ ID NO: 20049 - protein, 38 aa, Artificial Sequence
  Non-cyclic GFR-binding peptide
  MOD_RES (1), (2), (35), (37): Xaa is C or S
  MOD_RES (16), (17), (18), (19), (20): Xaa is A or G
  MOD_RES (21), (22), (23), (24): Xaa is A or G or is absent
XXVPQDLEPISILYLXXXXXXXXXKFKYEMVVKSXKXS

SEQ ID NO: 20050 - protein, 37 aa, Artificial Sequence
  Non-cyclic GFR-binding peptide
  MOD_RES (4), (4): Xaa is C or S
  MOD_RES (18), (19), (20), (21), (22): Xaa is A or G
  MOD_RES (23), (24), (25), (26): Xaa is A or G or is absent
KPTXAPTKLEPISVLYLXXXXXXXXXKFKYENMVVRS

SEQ ID NO: 20051 - protein, 42 aa, Artificial Sequence
  Non-cyclic GFR-binding peptide
  MOD_RES (4), (5), (39), (41): Xaa is C or S
  MOD_RES (19), (20), (21), (22), (23): Xaa is A or G
  MOD_RES (24), (25), (26), (27): Xaa is A or G or is absent
PKAXXVPTELSPISMLYIXXXXXXXXXYKQYEDMVVEGXGXR

SEQ ID NO: 20052 - protein, 36 aa, Artificial Sequence
  Non-cyclic GFR-binding peptide
  MOD_RES (3), (4), (36): Xaa is C or S
KAXXVPTKLNAISILYFDKGVVTYLKKYRGMAVSEX

SEQ ID NO: 20053 - protein, 38 aa, Artificial Sequence
  Non-cyclic GFR-binding peptide
  MOD_RES (3), (4): Xaa is C or S
  MOD_RES (18), (19), (20), (21), (22): Xaa is A or G
  MOD_RES (23), (24), (25), (26): Xaa is A or G or is absent
KAXXVPTKLEPISVLYLXXXXXXXXXKFKYEEGMSVAE

SEQ ID NO: 20054 - protein, 38 aa, Artificial Sequence
  Non-cyclic GFR-binding peptide
  MOD_RES (4), (38): Xaa is C or S
  MOD_RES (18), (19), (20), (21), (22): Xaa is A or G
  MOD_RES (23), (24), (25), (26): Xaa is A or G or is absent
KPTXAPTKLEPISVLYLXXXXXXXXXKFKYENMVVRSX

SEQ ID NO: 20055 - protein, 33 aa, Artificial Sequence
  Non-cyclic GFR-binding peptide
  MOD_RES (2), (3): Xaa is C or S
AXXVPTKLSPISILYKDKGVVTYLKYHYGMAVS

SEQ ID NO: 20056 - protein, 36 aa, Artificial Sequence
  Non-cyclic GFR-binding peptide
  MOD_RES (1), (2), (34), (36): Xaa is C or S
XXVPTELSPISMLYIDENEKVVYKQYEDMVVEGXGX

SEQ ID NO: 20057 - protein, 33 aa, Artificial Sequence
  Non-cyclic GFR-binding peptide
  MOD_RES (1), (33): Xaa is C or S
XVPARLEPISILYLDAANNVVKFKYEDMVVEAX

SEQ ID NO: 20058 - protein, 33 aa, Artificial Sequence
  Non-cyclic GFR-binding peptide
  MOD_RES (33), (33): Xaa is C or S
  MOD_RES (14), (15), (16), (17), (18): Xaa is A or G
  MOD_RES (19), (20), (21), (22): Xaa is A or G or is absent
VPQDLSPISILYIXXXXXXXXXYKQYEMVVKSX

SEQ ID NO: 20059 - protein, 43 aa, Artificial Sequence
  Non-cyclic GFR-binding peptide
  MOD_RES (5), (6), (40), (42): Xaa is C or S
  MOD_RES (20), (21), (22), (23), (24): Xaa is A or G
  MOD_RES (25), (26), (27), (28): Xaa is A or G or is absent
IPKAXXVPTELEPISMLYLXXXXXXXXXKFKYEEMVVEGXGXR

SEQ ID NO: 20060 - protein, 38 aa, Artificial Sequence
  Non-cyclic GFR-binding peptide
  MOD_RES (5), (6), (38): Xaa is C or S
VPKPXXAPTQLSPISVLYIDDSSNVIYKQYENMVVRAX

SEQ ID NO: 20061 - protein, 32 aa, Artificial Sequence
  Non-cyclic GFR-binding peptide
  MOD_RES (14), (15), (16), (17), (18): Xaa is A or G
  MOD_RES (19), (20), (21), (22): Xaa is A or G or is absent
APTKLEPISVLYLXXXXXXXXXKFKYENMVVR

SEQ ID NO: 20062 - protein, 38 aa, Artificial Sequence
  Non-cyclic GFR-binding peptide
  MOD_RES (3), (4), (37): Xaa is C or S
KAXXVPTKLEPISVLYLDDMGVPTKFKYEEGMSVAEXG

SEQ ID NO: 20063 - protein, 32 aa, Artificial Sequence
  Non-cyclic GFR-binding peptide
  MOD_RES (14), (15), (16), (17), (18): Xaa is A or G
  MOD_RES (19), (20), (21), (22): Xaa is A or G or is absent
APTKLEPISVLYLXXXXXXXXXKFKYENMVVK

SEQ ID NO: 20064 - protein, 34 aa, Artificial Sequence
  Non-cyclic GFR-binding peptide
  MOD_RES (1), (2), (34): Xaa is C or S
XXVPTKLSPISILYIDKGVVTYYKQYEGMAVSEX

SEQ ID NO: 20065 - protein, 31 aa, Artificial Sequence
  Non-cyclic GFR-binding peptide
  MOD_RES (1), (1): Xaa is C or S
XVPQALEPISILYLVGRKPKVKFKYEMIVRS

SEQ ID NO: 20066 - protein, 36 aa, Artificial Sequence
  Non-cyclic GFR-binding peptide
  MOD_RES (2), (3), (34), (36): Xaa is C or S
PXXVPQALEPISILYLVGRKPKVKFKYEMIVRSXKX

SEQ ID NO: 20067 - protein, 38 aa, Artificial Sequence
  Non-cyclic GFR-binding peptide
  MOD_RES (2), (3), (37): Xaa is C or S
  MOD_RES (17), (18), (19), (20), (21): Xaa is A or G
  MOD_RES (22), (23), (24), (25): Xaa is A or G or is absent
PXXAPTQLSPISVLYIXXXXXXXXXYKQYENMVVRAXG

SEQ ID NO: 20068 - protein, 42 aa, Artificial Sequence
  Non-cyclic GFR-binding peptide
  MOD_RES (7), (41): Xaa is C or S
  MOD_RES (21), (22), (23), (24), (25): Xaa is A or G
  MOD_RES (26), (27), (28), (29): Xaa is A or G or is absent
HVTKPTXAPTKLEPISVLYLXXXXXXXXXKFKYENMVVRSXG

SEQ ID NO: 20069 - protein, 31 aa, Artificial Sequence
  Non-cyclic GFR-binding peptide
  MOD_RES (31), (31): Xaa is C or S
VPQALEPISILYLVGRKPKVKFKYEMIVRSX

SEQ ID NO: 20070 - protein, 33 aa, Artificial Sequence
  Non-cyclic GFR-binding peptide
  MOD_RES (1), (2), (33): Xaa is C or S
XXVPQALEPISILYLVGRKPKVKFKYEMIVRSX

SEQ ID NO: 20071 - protein, 37 aa, Artificial Sequence
  Non-cyclic GFR-binding peptide
  MOD_RES (4), (5): Xaa is C or S
  MOD_RES (19), (20), (21), (22), (23): Xaa is A or G
  MOD_RES (24), (25), (26), (27): Xaa is A or G or is absent
SKAXXVPTKLSPISILYIXXXXXXXXXYKQYEGMAVS

SEQ ID NO: 20072 - protein, 39 aa, Artificial Sequence
  Non-cyclic GFR-binding peptide
  MOD_RES (6), (7): Xaa is C or S
  MOD_RES (21), (22), (23), (24), (25): Xaa is A or G
  MOD_RES (26), (27), (28), (29): Xaa is A or G or is absent
KASKAXXVPTKLNAISILYFXXXXXXXXXLKKYRGMAVS

SEQ ID NO: 20073 - protein, 38 aa, Artificial Sequence
  Non-cyclic GFR-binding peptide
  MOD_RES (5), (6): Xaa is C or S
  MOD_RES (20), (21), (22), (23), (24): Xaa is A or G
  MOD_RES (25), (26), (27), (28): Xaa is A or G or is absent
VPKPXXAPTKLEPISVLYLXXXXXXXXXKFKYENMVVR

SEQ ID NO: 20074 - protein, 41 aa, Artificial Sequence
  Non-cyclic GFR-binding peptide
  MOD_RES (4), (5), (40): Xaa is C or S
  MOD_RES (19), (20), (21), (22), (23): Xaa is A or G
  MOD_RES (24), (25), (26), (27): Xaa is A or G or is absent
GKAXXVPTKLSPISVLYIXXXXXXXXXYKQYEEGMSVAEXG

SEQ ID NO: 20075 - protein, 43 aa, Artificial Sequence
  Non-cyclic GFR-binding peptide
  MOD_RES (6), (7), (40), (42): Xaa is C or S
  MOD_RES (21), (22), (23), (24), (25): Xaa is A or G
  MOD_RES (26), (27), (28), (29): Xaa is A or G or is absent
ASASPXXVSQDLEPISILYLXXXXXXXXXKFKYEMIVKSXKXS

SEQ ID NO: 20076 - protein, 41 aa, Artificial Sequence
  Non-cyclic GFR-binding peptide
  MOD_RES (4), (5), (38), (40): Xaa is C or S
  MOD_RES (19), (20), (21), (22), (23): Xaa is A or G
  MOD_RES (24), (25), (26), (27): Xaa is A or G or is absent
ASPXXVPQDLEPISILYLXXXXXXXXXKFKYEMVVKSXKXS

SEQ ID NO: 20077 - protein, 38 aa, Artificial Sequence
  Non-cyclic GFR-binding peptide
  MOD_RES (4), (5): Xaa is C or S
  MOD_RES (19), (20), (21), (22), (23): Xaa is A or G
  MOD_RES (24), (25), (26), (27): Xaa is A or G or is absent
PKPXXAPTKLEPISVLYLXXXXXXXXXKFKYENMVVRS

SEQ ID NO: 20078 - protein, 35 aa, Artificial Sequence
  Non-cyclic GFR-binding peptide
  MOD_RES (2), (3): Xaa is C or S
  MOD_RES (17), (18), (19), (20), (21): Xaa is A or G
  MOD_RES (22), (23), (24), (25): Xaa is A or G or is absent
PXXVSQDLEPISILYLXXXXXXXXXKFKYEMIVKS

SEQ ID NO: 20079 - protein, 41 aa, Artificial Sequence
  Non-cyclic GFR-binding peptide
  MOD_RES (6), (7), (38), (40): Xaa is C or S
ASAAPXXVPQALSPISILYIVGRKPKVYKQYEMIVRSXKXS

SEQ ID NO: 20080 - protein, 39 aa, Artificial Sequence
  Non-cyclic GFR-binding peptide
  MOD_RES (3), (4), (36), (38): Xaa is C or S
KAXXVPTELEPISMLYLDENEKVVKFKYEDMVVEGXGXR

SEQ ID NO: 20081 - protein, 43 aa, Artificial Sequence
  Non-cyclic GFR-binding peptide
  MOD_RES (5), (6), (40), (42): Xaa is C or S
  MOD_RES (20), (21), (22), (23), (24): Xaa is A or G
  MOD_RES (25), (26), (27), (28): Xaa is A or G or is absent
VPKPXXAPTQLSPISVLYIXXXXXXXXXYKQYENMVVRAXGXH

SEQ ID NO: 20082 - protein, 34 aa, Artificial Sequence
  Non-cyclic GFR-binding peptide
  MOD_RES (1), (32), (34): Xaa is C or S
XVSQDLSPISILYIIGKTPKIYKQYEMIVKSXKX

SEQ ID NO: 20083 - protein, 34 aa, Artificial Sequence
  Non-cyclic GFR-binding peptide
  MOD_RES (32), (34): Xaa is C or S
APTKLEPISVLYLDSSNNVIKFKYENMVVKAXGX

SEQ ID NO: 20084 - protein, 38 aa, Artificial Sequence
  Non-cyclic GFR-binding peptide
  MOD_RES (5), (6): Xaa is C or S
  MOD_RES (20), (21), (22), (23), (24): Xaa is A or G
  MOD_RES (25), (26), (27), (28): Xaa is A or G or is absent
IPKAXXVPTELEPISMLYLXXXXXXXXXKFKYEDMVVE

SEQ ID NO: 20085 - protein, 41 aa, Artificial Sequence
  Non-cyclic GFR-binding peptide
  MOD_RES (5), (6), (38), (40): Xaa is C or S
IPKAXXVPTELSPISMLYIDEYDKVVYKQYEEMVVEGXGXR

SEQ ID NO: 20086 - protein, 40 aa, Artificial Sequence
  Non-cyclic GFR-binding peptide
  MOD_RES (5), (6), (39): Xaa is C or S
  MOD_RES (20), (21), (22), (23), (24): Xaa is A or G
  MOD_RES (25), (26), (27), (28): Xaa is A or G or is absent
SASPXXVPQDLEPISILYLXXXXXXXXXKFKYEMVVKSXK

SEQ ID NO: 20087 - protein, 36 aa, Artificial Sequence
  Non-cyclic GFR-binding peptide
  MOD_RES (4), (5): Xaa is C or S
PASXXVPARLNAISILYFDAANNVVLKKYRDMVVEA

SEQ ID NO: 20088 - protein, 37 aa, Artificial Sequence
  Non-cyclic GFR-binding peptide
  MOD_RES (34), (36): Xaa is C or S
  MOD_RES (14), (15), (16), (17), (18): Xaa is A or G
  MOD_RES (19), (20), (21), (22): Xaa is A or G or is absent
VPARLNAISILYFXXXXXXXXXLKKYRDMVVEAXGXR

SEQ ID NO: 20089 - protein, 40 aa, Artificial Sequence
  Non-cyclic GFR-binding peptide
  MOD_RES (4), (5), (37), (39): Xaa is C or S
PKAXXVPTELSPISMLYIDENEKVVYKQYEDMVVEGXGXR

SEQ ID NO: 20090 - protein, 32 aa, Artificial Sequence
  Non-cyclic GFR-binding peptide
  MOD_RES (1), (1): Xaa is C or S
XVPARLNAISILYFDAANNVVLKKYRDMVVEA

SEQ ID NO: 20091 - protein, 33 aa, Artificial Sequence
  Non-cyclic GFR-binding peptide
  MOD_RES (14), (15), (16), (17), (18): Xaa is A or G
  MOD_RES (19), (20), (21), (22): Xaa is A or G or is absent
APTQLSPISVLYIXXXXXXXXXYKQYENMVVRA

SEQ ID NO: 20092 - protein, 36 aa, Artificial Sequence
  Non-cyclic GFR-binding peptide
  MOD_RES (3), (4), (35): Xaa is C or S
SPXXVSQDLEPISILYLIGKTPKIKFKYEMIVKSXK

SEQ ID NO: 20093 - protein, 37 aa, Artificial Sequence
  Non-cyclic GFR-binding peptide
  MOD_RES (4), (5), (37): Xaa is C or S
PASXXVPARLEPISILYLDAANNVVKFKYEDMVVEAX

SEQ ID NO: 20094 - protein, 38 aa, Artificial Sequence
  Non-cyclic GFR-binding peptide
  MOD_RES (5), (6), (38): Xaa is C or S
ASKAXXVPTKLSPISILYKDKGVVTYLKYHYGMAVSEX

SEQ ID NO: 20095 - protein, 33 aa, Artificial Sequence
  Non-cyclic GFR-binding peptide
  MOD_RES (33), (33): Xaa is C or S
VPTKLSPISVLYIDDMGVPTYKQYEEGMSVAEX

SEQ ID NO: 20096 - protein, 36 aa, Artificial Sequence
  Non-cyclic GFR-binding peptide
  MOD_RES (1), (36): Xaa is C or S
  MOD_RES (15), (16), (17), (18), (19): Xaa is A or G
  MOD_RES (20), (21), (22), (23): Xaa is A or G or is absent
XVPTKLSPISVLYIXXXXXXXXXYKQYEEGMSVAEX

SEQ ID NO: 20097 - protein, 33 aa, Artificial Sequence
  Non-cyclic GFR-binding peptide
  MOD_RES (14), (15), (16), (17), (18): Xaa is A or G
  MOD_RES (19), (20), (21), (22): Xaa is A or G or is absent
APTQLEPISVLYLXXXXXXXXXKFKYENMVVRA

SEQ ID NO: 20098 - protein, 35 aa, Artificial Sequence
  Non-cyclic GFR-binding peptide
  MOD_RES (3), (4): Xaa is C or S
KPXXAPTKLSPISVLYIDDSSNVIYKQYENMVVRS

SEQ ID NO: 20099 - protein, 35 aa, Artificial Sequence
  Non-cyclic GFR-binding peptide
  MOD_RES (2), (3): Xaa is C or S
AXXVPTKLSPISVLYIDDMGVPTYKQYEEGMSVAE

SEQ ID NO: 20100 - protein, 37 aa, Artificial Sequence
  Non-cyclic GFR-binding peptide
  MOD_RES (2), (3), (35), (37): Xaa is C or S
AXXVPTELEPISMLYLDEYDKVVKFKYEEMVVEGXGX

SEQ ID NO: 20101 - protein, 41 aa, Artificial Sequence
  Non-cyclic GFR-binding peptide
  MOD_RES (5), (6), (39), (41): Xaa is C or S
VGKAXXVPTKLEPISVLYLDDMGVPTKFKYEEGMSVAEXGX

SEQ ID NO: 20102 - protein, 39 aa, Artificial Sequence
  Non-cyclic GFR-binding peptide
  MOD_RES (4), (5), (39): Xaa is C or S
  MOD_RES (19), (20), (21), (22), (23): Xaa is A or G
  MOD_RES (24), (25), (26), (27): Xaa is A or G or is absent
PKPXXAPTKLSPISVLYIXXXXXXXXXYKQYENMVVRSX

SEQ ID NO: 20103 - protein, 42 aa, Artificial Sequence
  Non-cyclic GFR-binding peptide
  MOD_RES (7), (39), (41): Xaa is C or S
HVTKPTXAPTKLEPISVLYLDDSSNVIKFKYENMVVRSXGXH

SEQ ID NO: 20104 - protein, 42 aa, Artificial Sequence
  Non-cyclic GFR-binding peptide
  MOD_RES (7), (39), (41): Xaa is C or S
HVTKPTXAPTKLSPISVLYIDDSSNVIYKQYENMVVRSXGXH

SEQ ID NO: 20105 - protein, 40 aa, Artificial Sequence
  Non-cyclic GFR-binding peptide
  MOD_RES (3), (4), (38), (40): Xaa is C or S
  MOD_RES (18), (19), (20), (21), (22): Xaa is A or G
  MOD_RES (23), (24), (25), (26): Xaa is A or G or is absent
KPXXAPTQLSPISVLYIXXXXXXXXXYKQYENMVVRAXGX

SEQ ID NO: 20106 - protein, 40 aa, Artificial Sequence
  Non-cyclic GFR-binding peptide
  MOD_RES (5), (6), (37), (39): Xaa is C or S
SASPXXVSQDLSPISILYIIGKTPKIYKQYEMIVKSXKXS

SEQ ID NO: 20107 - protein, 42 aa, Artificial Sequence
  Non-cyclic GFR-binding peptide
  MOD_RES (6), (7), (41): Xaa is C or S
  MOD_RES (21), (22), (23), (24), (25): Xaa is A or G
  MOD_RES (26), (27), (28), (29): Xaa is A or G or is absent
YVPKPXXAPTKLEPISVLYLXXXXXXXXXKFKYENMVVRSXG

SEQ ID NO: 20108 - protein, 38 aa, Artificial Sequence
  Non-cyclic GFR-binding peptide
  MOD_RES (6), (38): Xaa is C or S
VTKPTXAPTKLSPISVLYIDDSSNVIYKQYENMVVRSX

SEQ ID NO: 20109 - protein, 30 aa, Artificial Sequence
  Non-cyclic GFR-binding peptide
APTKLSPISVLYIDDSSNVIYKQYENMVVR

SEQ ID NO: 20110 - protein, 39 aa, Artificial Sequence
  Non-cyclic GFR-binding peptide
  MOD_RES (4), (5), (36), (38): Xaa is C or S
ASPXXVPQDLEPISILYLVGRTPKVKFKYEMVVKSXKXS

SEQ ID NO: 20111 - protein, 41 aa, Artificial Sequence
  Non-cyclic GFR-binding peptide
  MOD_RES (6), (7), (41): Xaa is C or S
  MOD_RES (21), (22), (23), (24), (25): Xaa is A or G
  MOD_RES (26), (27), (28), (29): Xaa is A or G or is absent
AAPASXXVPARLNAISILYFXXXXXXXXXLKKYRDMVVEAX

SEQ ID NO: 20112 - protein, 38 aa, Artificial Sequence
  Non-cyclic GFR-binding peptide
  MOD_RES (5), (6): Xaa is C or S
VGKAXXVPTKLEPISVLYLDDMGVPTKFKYEEGMSVAE

SEQ ID NO: 20113 - protein, 40 aa, Artificial Sequence
  Non-cyclic GFR-binding peptide
  MOD_RES (6), (7), (39): Xaa is C or S
YVPKPXXAPTKLEPISVLYLDDSSNVIKFKYENMVVRSXG

SEQ ID NO: 20114 - protein, 31 aa, Artificial Sequence
  Non-cyclic GFR-binding peptide
VPARLEPISILYLDAANNVVKFKYEDMVVEA

SEQ ID NO: 20115 - protein, 34 aa, Artificial Sequence
  Non-cyclic GFR-binding peptide
  MOD_RES (32), (34): Xaa is C or S
APTKLSPISVLYIDSSNNVIYKQYENMVVKAXGX

SEQ ID NO: 20116 - protein, 35 aa, Artificial Sequence
  Non-cyclic GFR-binding peptide
  MOD_RES (1), (35): Xaa is C or S
  MOD_RES (15), (16), (17), (18), (19): Xaa is A or G
  MOD_RES (20), (21), (22), (23): Xaa is A or G or is absent
XAPTKLSPISVLYIXXXXXXXXXYKQYENMVVKAX

SEQ ID NO: 20117 - protein, 44 aa, Artificial Sequence
  Non-cyclic GFR-binding peptide
  MOD_RES (6), (7), (41), (43): Xaa is C or S
  MOD_RES (21), (22), (23), (24), (25): Xaa is A or G
  MOD_RES (26), (27), (28), (29): Xaa is A or G or is absent
YVPKPXXAPTKLEPISVLYLXXXXXXXXXKFKYENMVVRSXGXH

SEQ ID NO: 20118 - protein, 36 aa, Artificial Sequence
  Non-cyclic GFR-binding peptide
  MOD_RES (33), (35): Xaa is C or S
  MOD_RES (14), (15), (16), (17), (18): Xaa is A or G
  MOD_RES (19), (20), (21), (22): Xaa is A or G or is absent
VPQDLEPISILYLXXXXXXXXXKFKYEMVVKSXKXS

SEQ ID NO: 20119 - protein, 32 aa, Artificial Sequence
  Non-cyclic GFR-binding peptide
  MOD_RES (14), (15), (16), (17), (18): Xaa is A or G
  MOD_RES (19), (20), (21), (22): Xaa is A or G or is absent
VPQDLSPISILYIXXXXXXXXXYKQYEMVVKS

SEQ ID NO: 20120 - protein, 33 aa, Artificial Sequence
  Non-cyclic GFR-binding peptide
  MOD_RES (32), (32): Xaa is C or S
VPTELSPISMLYIDENEKVVYKQYEDMVVEGXG

SEQ ID NO: 20121 - protein, 32 aa, Artificial Sequence
  Non-cyclic GFR-binding peptide
  MOD_RES (14), (15), (16), (17), (18): Xaa is A or G
  MOD_RES (19), (20), (21), (22): Xaa is A or G or is absent
VPTKLNAISILYFXXXXXXXXXLKKYRGMAVS

SEQ ID NO: 20122 - protein, 34 aa, Artificial Sequence
  Non-cyclic GFR-binding peptide
  MOD_RES (1), (2), (34): Xaa is C or S
XXVPTELEPISMLYLDENEKVVKFKYEDMVVEGX

SEQ ID NO: 20123 - protein, 36 aa, Artificial Sequence
  Non-cyclic GFR-binding peptide
  MOD_RES (4), (5), (36): Xaa is C or S
AAPXXVPQALEPISILYLVGRKPKVKFKYEMIVRSX

SEQ ID NO: 20124 - protein, 34 aa, Artificial Sequence
  Non-cyclic GFR-binding peptide
  MOD_RES (3), (4): Xaa is C or S
KPXXAPTQLSPISVLYIDDSSNVIYKQYENMVVR

SEQ ID NO: 20125 - protein, 34 aa, Artificial Sequence
  Non-cyclic GFR-binding peptide
  MOD_RES (1), (2): Xaa is C or S
  MOD_RES (16), (17), (18), (19), (20): Xaa is A or G
  MOD_RES (21), (22), (23), (24): Xaa is A or G or is absent
XXVPARLEPISILYLXXXXXXXXXKFKYEDMVVE

SEQ ID NO: 20126 - protein, 36 aa, Artificial Sequence
  Non-cyclic GFR-binding peptide
  MOD_RES (3), (4), (36): Xaa is C or S
KAXXVPTELSPISMLYIDEYDKVVYKQYEEMVVEGX

SEQ ID NO: 20127 - protein, 39 aa, Artificial Sequence
  Non-cyclic GFR-binding peptide
  MOD_RES (2), (3), (37), (39): Xaa is C or S
  MOD_RES (17), (18), (19), (20), (21): Xaa is A or G
  MOD_RES (22), (23), (24), (25): Xaa is A or G or is absent
AXXVPTKLSPISILYKXXXXXXXXXLKYHYGMAVSEXGX

SEQ ID NO: 20128 - protein, 33 aa, Artificial Sequence
  Non-cyclic GFR-binding peptide
  MOD_RES (1), (1): Xaa is C or S
  MOD_RES (15), (16), (17), (18), (19): Xaa is A or G
  MOD_RES (20), (21), (22), (23): Xaa is A or G or is absent
XVPTKLNAISILYFXXXXXXXXXLKKYRGMAVS

SEQ ID NO: 20129 - protein, 34 aa, Artificial Sequence
  Non-cyclic GFR-binding peptide
  MOD_RES (1), (2): Xaa is C or S
  MOD_RES (16), (17), (18), (19), (20): Xaa is A or G
  MOD_RES (21), (22), (23), (24): Xaa is A or G or is absent
XXAPTKLEPISVLYLXXXXXXXXXKFKYENMVVK

SEQ ID NO: 20130 - protein, 38 aa, Artificial Sequence
  Non-cyclic GFR-binding peptide
  MOD_RES (6), (7), (38): Xaa is C or S
ASAAPXXVPQALEPISILYLVGRKPKVKFKYEMIVRSX

SEQ ID NO: 20131 - protein, 36 aa, Artificial Sequence
  Non-cyclic GFR-binding peptide
  MOD_RES (34), (36): Xaa is C or S
  MOD_RES (14), (15), (16), (17), (18): Xaa is A or G
  MOD_RES (19), (20), (21), (22): Xaa is A or G or is absent
APTKLSPISVLYIXXXXXXXXXYKQYENMVVRSXGX

SEQ ID NO: 20132 - protein, 36 aa, Artificial Sequence
  Non-cyclic GFR-binding peptide
  MOD_RES (1), (33), (35): Xaa is C or S
XVPTELEPISMLYLDENEKVVKFKYEDMVVEGXGXR

SEQ ID NO: 20133 - protein, 34 aa, Artificial Sequence
  Non-cyclic GFR-binding peptide
  MOD_RES (2), (3): Xaa is C or S
AXXAPTKLEPISVLYLDSSNNVIKFKYENMVVKA

SEQ ID NO: 20134 - protein, 40 aa, Artificial Sequence
  Non-cyclic GFR-binding peptide
  MOD_RES (2), (3), (37), (39): Xaa is C or S
  MOD_RES (17), (18), (19), (20), (21): Xaa is A or G
  MOD_RES (22), (23), (24), (25): Xaa is A or G or is absent
AXXVPTELSPISMLYIXXXXXXXXXYKQYEDMVVEGXGXR

SEQ ID NO: 20135 - protein, 40 aa, Artificial Sequence
  Non-cyclic GFR-binding peptide
  MOD_RES (6), (7), (38), (40): Xaa is C or S
ASASPXXVSQDLEPISILYLIGKTPKIKFKYEMIVKSXKX

SEQ ID NO: 20136 - protein, 42 aa, Artificial Sequence
  Non-cyclic GFR-binding peptide
  MOD_RES (5), (39), (41): Xaa is C or S
  MOD_RES (19), (20), (21), (22), (23): Xaa is A or G
  MOD_RES (24), (25), (26), (27): Xaa is A or G or is absent
TKPTXAPTKLEPISVLYLXXXXXXXXXKFKYENMVVRSXGXH

SEQ ID NO: 20137 - protein, 41 aa, Artificial Sequence
  Non-cyclic GFR-binding peptide
  MOD_RES (3), (4), (39), (41): Xaa is C or S
  MOD_RES (18), (19), (20), (21), (22): Xaa is A or G
  MOD_RES (23), (24), (25), (26): Xaa is A or G or is absent
KAXXVPTKLEPISVLYLXXXXXXXXXKFKYEEGMSVAEXGX

SEQ ID NO: 20138 - protein, 37 aa, Artificial Sequence
  Non-cyclic GFR-binding peptide
  MOD_RES (1), (35), (37): Xaa is C or S
  MOD_RES (15), (16), (17), (18), (19): Xaa is A or G
  MOD_RES (20), (21), (22), (23): Xaa is A or G or is absent
XVPARLSPISILYKXXXXXXXXXLKYHYDMVVEAXGX

SEQ ID NO: 20139 - protein, 41 aa, Artificial Sequence
  Non-cyclic GFR-binding peptide
  MOD_RES (6), (7), (39), (41): Xaa is C or S
AVPKAXXAPTKLSPISVLYIDSSNNVIYKQYENMVVKAXGX

SEQ ID NO: 20140 - protein, 38 aa, Artificial Sequence
  Non-cyclic GFR-binding peptide
  MOD_RES (3), (4), (38): Xaa is C or S
  MOD_RES (18), (19), (20), (21), (22): Xaa is A or G
  MOD_RES (23), (24), (25), (26): Xaa is A or G or is absent
KPXXAPTKLEPISVLYLXXXXXXXXXKFKYENMVVRSX

SEQ ID NO: 20141 - protein, 42 aa, Artificial Sequence
  Non-cyclic GFR-binding peptide
  MOD_RES (5), (6), (40), (42): Xaa is C or S
  MOD_RES (20), (21), (22), (23), (24): Xaa is A or G
  MOD_RES (25), (26), (27), (28): Xaa is A or G or is absent
ASKAXXVPTKLSPISILYKXXXXXXXXXLKYHYGMAVSEXGX

SEQ ID NO: 20142 - protein, 35 aa, Artificial Sequence
  Non-cyclic GFR-binding peptide
  MOD_RES (2), (34): Xaa is C or S
TXAPTKLEPISVLYLDDSSNVIKFKYENMVVRSXG

SEQ ID NO: 20143 - protein, 40 aa, Artificial Sequence
  Non-cyclic GFR-binding peptide
  MOD_RES (4), (5), (39): Xaa is C or S
  MOD_RES (19), (20), (21), (22), (23): Xaa is A or G
  MOD_RES (24), (25), (26), (27): Xaa is A or G or is absent
PKAXXAPTKLEPISVLYLXXXXXXXXXKFKYENMVVKAXG

SEQ ID NO: 20144 - protein, 36 aa, Artificial Sequence
  Non-cyclic GFR-binding peptide
  MOD_RES (4), (5), (36): Xaa is C or S
ASPXXVPQDLSPISILYIVGRTPKVYKQYEMVVKSX

SEQ ID NO: 20145 - protein, 42 aa, Artificial Sequence
  Non-cyclic GFR-binding peptide
  MOD_RES (5), (6), (40), (42): Xaa is C or S
  MOD_RES (20), (21), (22), (23), (24): Xaa is A or G
  MOD_RES (25), (26), (27), (28): Xaa is A or G or is absent
IPKAXXVPTELEPISMLYLXXXXXXXXXKFKYEDMVVEGXGX

SEQ ID NO: 20146 - protein, 35 aa, Artificial Sequence
  Non-cyclic GFR-binding peptide
  MOD_RES (3), (4), (35): Xaa is C or S
SPXXVSQDLEPISILYLIGKTPKIKFKYEMIVKSX

SEQ ID NO: 20147 - protein, 31 aa, Artificial Sequence
  Non-cyclic GFR-binding peptide
  MOD_RES (1), (1): Xaa is C or S
XVPARLNAISILYFDAANNVVLKKYRDMVVE

SEQ ID NO: 20148 - protein, 40 aa, Artificial Sequence
  Non-cyclic GFR-binding peptide
  MOD_RES (5), (6), (40): Xaa is C or S
  MOD_RES (20), (21), (22), (23), (24): Xaa is A or G
  MOD_RES (25), (26), (27), (28): Xaa is A or G or is absent
APASXXVPARLNAISILYFXXXXXXXXXLKKYRDMVVEAX

SEQ ID NO: 20149 - protein, 33 aa, Artificial Sequence
  Non-cyclic GFR-binding peptide
  MOD_RES (2), (3): Xaa is C or S
PXXVSQDLEPISILYLIGKTPKIKFKYEMIVKS

SEQ ID NO: 20150 - protein, 40 aa, Artificial Sequence
  Non-cyclic GFR-binding peptide
  MOD_RES (5), (6), (38), (40): Xaa is C or S
APASXXVPARLNAISILYFDAANNVVLKKYRDMVVEAXGX

SEQ ID NO: 20151 - protein, 42 aa, Artificial Sequence
  Non-cyclic GFR-binding peptide
  MOD_RES (5), (6), (41): Xaa is C or S
  MOD_RES (20), (21), (22), (23), (24): Xaa is A or G
  MOD_RES (25), (26), (27), (28): Xaa is A or G or is absent
VGKAXXVPTKLSPISVLYIXXXXXXXXXYKQYEEGMSVAEXG

SEQ ID NO: 20152 - protein, 37 aa, Artificial Sequence
  Non-cyclic GFR-binding peptide
  MOD_RES (2), (3), (37): Xaa is C or S
  MOD_RES (17), (18), (19), (20), (21): Xaa is A or G
  MOD_RES (22), (23), (24), (25): Xaa is A or G or is absent
PXXAPTQLEPISVLYLXXXXXXXXXKFKYENMVVRAX

SEQ ID NO: 20153 - protein, 39 aa, Artificial Sequence
  Non-cyclic GFR-binding peptide
  MOD_RES (3), (4), (36), (38): Xaa is C or S
KAXXVPTKLNAISILYFDKGVVTYLKKYRGMAVSEXGXR

SEQ ID NO: 20154 - protein, 35 aa, Artificial Sequence
  Non-cyclic GFR-binding peptide
  MOD_RES (1), (33), (35): Xaa is C or S
XVPTKLSPISILYKDKGVVTYLKYHYGMAVSEXGX

SEQ ID NO: 20155 - protein, 30 aa, Artificial Sequence
  Non-cyclic GFR-binding peptide
VPTELEPISMLYLDENEKVVKFKYEDMVVE

SEQ ID NO: 20156 - protein, 36 aa, Artificial Sequence
  Non-cyclic GFR-binding peptide
  MOD_RES (3), (4), (36): Xaa is C or S
ASXXVPARLEPISILYLDAANNVVKFKYEDMVVEAX

SEQ ID NO: 20157 - protein, 38 aa, Artificial Sequence
  Non-cyclic GFR-binding peptide
  MOD_RES (6), (7): Xaa is C or S
SIPKAXXVPTELSPISMLYIDEYDKVVYKQYEEMVVEG

SEQ ID NO: 20158 - protein, 38 aa, Artificial Sequence
  Non-cyclic GFR-binding peptide
  MOD_RES (3), (4), (36), (38): Xaa is C or S
ASXXVPARLNAISILYFDAANNVVLKKYRDMVVEAXGX

SEQ ID NO: 20159 - protein, 37 aa, Artificial Sequence
  Non-cyclic GFR-binding peptide
  MOD_RES (2), (3), (35), (37): Xaa is C or S
AXXVPTELEPISMLYLDENEKVVKFKYEDMVVEGXGX

SEQ ID NO: 20160 - protein, 39 aa, Artificial Sequence
  Non-cyclic GFR-binding peptide
  MOD_RES (2), (3), (37), (39): Xaa is C or S
  MOD_RES (17), (18), (19), (20), (21): Xaa is A or G
  MOD_RES (22), (23), (24), (25): Xaa is A or G or is absent
PXXAPTKLSPISVLYIXXXXXXXXXYKQYENMVVRSXGX

SEQ ID NO: 20161 - protein, 39 aa, Artificial Sequence
  Non-cyclic GFR-binding peptide
  MOD_RES (4), (5), (39): Xaa is C or S
  MOD_RES (19), (20), (21), (22), (23): Xaa is A or G
  MOD_RES (24), (25), (26), (27): Xaa is A or G or is absent
PASXXVPARLEPISILYLXXXXXXXXXKFKYEDMVVEAX

SEQ ID NO: 20162 - protein, 31 aa, Artificial Sequence
  Non-cyclic GFR-binding peptide
APTQLSPISVLYIDDSSNVIYKQYENMVVRA

SEQ ID NO: 20163 - protein, 40 aa, Artificial Sequence
  Non-cyclic GFR-binding peptide
  MOD_RES (6), (7): Xaa is C or S
  MOD_RES (21), (22), (23), (24), (25): Xaa is A or G
  MOD_RES (26), (27), (28), (29): Xaa is A or G or is absent
KIPKAXXVPTELEPISMLYLXXXXXXXXXKFKYEDMVVEG

SEQ ID NO: 20164 - protein, 37 aa, Artificial Sequence
  Non-cyclic GFR-binding peptide
  MOD_RES (5), (6): Xaa is C or S
IPKAXXVPTELEPISMLYLDENEKVVKFKYEDMVVEG

SEQ ID NO: 20165 - protein, 41 aa, Artificial Sequence
  Non-cyclic GFR-binding peptide
  MOD_RES (4), (5), (39), (41): Xaa is C or S
  MOD_RES (19), (20), (21), (22), (23): Xaa is A or G
  MOD_RES (24), (25), (26), (27): Xaa is A or G or is absent
SKAXXVPTKLSPISILYIXXXXXXXXXYKQYEGMAVSEXGX

SEQ ID NO: 20166 - protein, 34 aa, Artificial Sequence
  Non-cyclic GFR-binding peptide
  MOD_RES (1), (2), (34): Xaa is C or S
XXAPTQLSPISVLYIDDSSNVIYKQYENMVVRAX

SEQ ID NO: 20167 - protein, 37 aa, Artificial Sequence
  Non-cyclic GFR-binding peptide
  MOD_RES (34), (36): Xaa is C or S
  MOD_RES (14), (15), (16), (17), (18): Xaa is A or G
  MOD_RES (19), (20), (21), (22): Xaa is A or G or is absent
VPTELEPISMLYLXXXXXXXXXKFKYEEMVVEGXGXR

SEQ ID NO: 20168 - protein, 35 aa, Artificial Sequence
  Non-cyclic GFR-binding peptide
  MOD_RES (34), (34): Xaa is C or S
  MOD_RES (14), (15), (16), (17), (18): Xaa is A or G
  MOD_RES (19), (20), (21), (22): Xaa is A or G or is absent
APTQLSPISVLYIXXXXXXXXXYKQYENMVVRAXG

SEQ ID NO: 20169 - protein, 31 aa, Artificial Sequence
  Non-cyclic GFR-binding peptide
APTKLEPISVLYLDSSNNVIKFKYENMVVKA

SEQ ID NO: 20170 - protein, 38 aa, Artificial Sequence
  Non-cyclic GFR-binding peptide
  MOD_RES (4), (5), (37): Xaa is C or S
PKAXXVPTELEPISMLYLDEYDKVVKFKYEEMVVEGXG

SEQ ID NO: 20171 - protein, 38 aa, Artificial Sequence
  Non-cyclic GFR-binding peptide
  MOD_RES (5), (6): Xaa is C or S
  MOD_RES (20), (21), (22), (23), (24): Xaa is A or G
  MOD_RES (25), (26), (27), (28): Xaa is A or G or is absent
VPKPXXAPTQLSPISVLYIXXXXXXXXXYKQYENMVVR

SEQ ID NO: 20172 - protein, 41 aa, Artificial Sequence
  Non-cyclic GFR-binding peptide
  MOD_RES (6), (7), (41): Xaa is C or S
  MOD_RES (21), (22), (23), (24), (25): Xaa is A or G
  MOD_RES (26), (27), (28), (29): Xaa is A or G or is absent
KASKAXXVPTKLNAISILYFXXXXXXXXXLKKYRGMAVSEX

SEQ ID NO: 20173 - protein, 40 aa, Artificial Sequence
  Non-cyclic GFR-binding peptide
  MOD_RES (6), (7): Xaa is C or S
  MOD_RES (21), (22), (23), (24), (25): Xaa is A or G
  MOD_RES (26), (27), (28), (29): Xaa is A or G or is absent
YVPKPXXAPTKLEPISVLYLXXXXXXXXXKFKYENMVVRS

SEQ ID NO: 20174 - protein, 35 aa, Artificial Sequence
  Non-cyclic GFR-binding peptide
  MOD_RES (32), (34): Xaa is C or S
VPARLNAISILYFDAANNVVLKKYRDMVVEAXGXR

SEQ ID NO: 20175 - protein, 38 aa, Artificial Sequence
  Non-cyclic GFR-binding peptide
  MOD_RES (1), (35), (37): Xaa is C or S
  MOD_RES (15), (16), (17), (18), (19): Xaa is A or G
  MOD_RES (20), (21), (22), (23): Xaa is A or G or is absent
XVPARLEPISILYLXXXXXXXXXKFKYEDMVVEAXGXR

SEQ ID NO: 20176 - protein, 34 aa, Artificial Sequence
  Non-cyclic GFR-binding peptide
  MOD_RES (1), (33): Xaa is C or S
XAPTQLEPISVLYLDDSSNVIKFKYENMVVRAXG

SEQ ID NO: 20177 - protein, 37 aa, Artificial Sequence
  Non-cyclic GFR-binding peptide
  MOD_RES (1), (2), (35), (37): Xaa is C or S
  MOD_RES (16), (17), (18), (19), (20): Xaa is A or G
  MOD_RES (21), (22), (23), (24): Xaa is A or G or is absent
XXVPQDLSPISILYIXXXXXXXXXYKQYEMVVKSXKX

SEQ ID NO: 20178 - protein, 38 aa, Artificial Sequence
  Non-cyclic GFR-binding peptide
  MOD_RES (1), (2), (36), (38): Xaa is C or S
  MOD_RES (16), (17), (18), (19), (20): Xaa is A or G
  MOD_RES (21), (22), (23), (24): Xaa is A or G or is absent
XXVPTELEPISMLYLXXXXXXXXXKFKYEEMVVEGXGX

SEQ ID NO: 20179 - protein, 37 aa, Artificial Sequence
  Non-cyclic GFR-binding peptide
  MOD_RES (6), (7): Xaa is C or S
AVPKAXXAPTKLEPISVLYLDSSNNVIKFKYENMVVK

SEQ ID NO: 20180 - protein, 37 aa, Artificial Sequence
  Non-cyclic GFR-binding peptide
  MOD_RES (1), (34), (36): Xaa is C or S
XVPTKLEPISVLYLDDMGVPTKFKYEEGMSVAEXGXR

SEQ ID NO: 20181 - protein, 38 aa, Artificial Sequence
  Non-cyclic GFR-binding peptide
  MOD_RES (6), (7), (38): Xaa is C or S
ASASPXXVSQDLEPISILYLIGKTPKIKFKYEMIVKSX

SEQ ID NO: 20182 - protein, 31 aa, Artificial Sequence
  Non-cyclic GFR-binding peptide
  MOD_RES (1), (1): Xaa is C or S
XVPQDLSPISILYIVGRTPKVYKQYEMVVKS

SEQ ID NO: 20183 - protein, 36 aa, Artificial Sequence
  Non-cyclic GFR-binding peptide
  MOD_RES (33), (35): Xaa is C or S
VPTKLSPISVLYIDDMGVPTYKQYEEGMSVAEXGXR

SEQ ID NO: 20184 - protein, 44 aa, Artificial Sequence
  Non-cyclic GFR-binding peptide
  MOD_RES (6), (7), (41), (43): Xaa is C or S
  MOD_RES (21), (22), (23), (24), (25): Xaa is A or G
  MOD_RES (26), (27), (28), (29): Xaa is A or G or is absent
AAPASXXVPARLEPISILYLXXXXXXXXXKFKYEDMVVEAXGXR

SEQ ID NO: 20185 - protein, 36 aa, Artificial Sequence
  Non-cyclic GFR-binding peptide
  MOD_RES (4), (5): Xaa is C or S
SKAXXVPTKLSPISILYKDKGVVTYLKYHYGMAVSE

SEQ ID NO: 20186 - protein, 37 aa, Artificial Sequence
  Non-cyclic GFR-binding peptide
  MOD_RES (2), (3), (37): Xaa is C or S
  MOD_RES (17), (18), (19), (20), (21): Xaa is A or G
  MOD_RES (22), (23), (24), (25): Xaa is A or G or is absent
SXXVPARLNAISILYFXXXXXXXXXLKKYRDMVVEAX

SEQ ID NO: 20187 - protein, 32 aa, Artificial Sequence
  Non-cyclic GFR-binding peptide
  MOD_RES (2), (2): Xaa is C or S
TXAPTKLEPISVLYLDDSSNVIKFKYENMVVR

SEQ ID NO: 20188 - protein, 36 aa, Artificial Sequence
  Non-cyclic GFR-binding peptide
  MOD_RES (2), (3), (36): Xaa is C or S
  MOD_RES (17), (18), (19), (20), (21): Xaa is A or G
  MOD_RES (22), (23), (24), (25): Xaa is A or G or is absent
PXXVPQDLSPISILYIXXXXXXXXXYKQYEMVVKSX

SEQ ID NO: 20189 - protein, 40 aa, Artificial Sequence
  Non-cyclic GFR-binding peptide
  MOD_RES (3), (4), (38), (40): Xaa is C or S
  MOD_RES (18), (19), (20), (21), (22): Xaa is A or G
  MOD_RES (23), (24), (25), (26): Xaa is A or G or is absent
KAXXVPTKLNAISILYFXXXXXXXXXLKKYRGMAVSEXGX

SEQ ID NO: 20190 - protein, 34 aa, Artificial Sequence
  Non-cyclic GFR-binding peptide
  MOD_RES (2), (34): Xaa is C or S
TXAPTKLSPISVLYIDDSSNVIYKQYENMVVRSX

SEQ ID NO: 20191 - protein, 31 aa, Artificial Sequence
  Non-cyclic GFR-binding peptide
  MOD_RES (1), (1): Xaa is C or S
XVPARLSPISILYKDAANNVVLKYHYDMVVE

SEQ ID NO: 20192 - protein, 36 aa, Artificial Sequence
  Non-cyclic GFR-binding peptide
  MOD_RES (1), (2), (35): Xaa is C or S
  MOD_RES (16), (17), (18), (19), (20): Xaa is A or G
  MOD_RES (21), (22), (23), (24): Xaa is A or G or is absent
XXVPQDLEPISILYLXXXXXXXXXKFKYEMVVKSXK

SEQ ID NO: 20193 - protein, 39 aa, Artificial Sequence
  Non-cyclic GFR-binding peptide
  MOD_RES (1), (36), (38): Xaa is C or S
  MOD_RES (15), (16), (17), (18), (19): Xaa is A or G
  MOD_RES (20), (21), (22), (23): Xaa is A or G or is absent
XVPTKLEPISVLYLXXXXXXXXXKFKYEEGMSVAEXGXR

SEQ ID NO: 20194 - protein, 37 aa, Artificial Sequence
  Non-cyclic GFR-binding peptide
  MOD_RES (5), (6): Xaa is C or S
VPKAXXAPTKLSPISVLYIDSSNNVIYKQYENMVVKA

SEQ ID NO: 20195 - protein, 39 aa, Artificial Sequence
  Non-cyclic GFR-binding peptide
  MOD_RES (3), (4), (36), (38): Xaa is C or S
KAXXVPTELEPISMLYLDEYDKVVKFKYEEMVVEGXGXR

SEQ ID NO: 20196 - protein, 36 aa, Artificial Sequence
  Non-cyclic GFR-binding peptide
  MOD_RES (3), (4): Xaa is C or S
  MOD_RES (18), (19), (20), (21), (22): Xaa is A or G
  MOD_RES (23), (24), (25), (26): Xaa is A or G or is absent
KAXXVPTELSPISMLYIXXXXXXXXXYKQYEEMVVE

SEQ ID NO: 20197 - protein, 35 aa, Artificial Sequence
  Non-cyclic GFR-binding peptide
  MOD_RES (33), (35): Xaa is C or S
  MOD_RES (14), (15), (16), (17), (18): Xaa is A or G
  MOD_RES (19), (20), (21), (22): Xaa is A or G or is absent
VPQALEPISILYLXXXXXXXXXKFKYEMIVRSXKX

SEQ ID NO: 20198 - protein, 40 aa, Artificial Sequence
  Non-cyclic GFR-binding peptide
  MOD_RES (6), (7): Xaa is C or S
  MOD_RES (21), (22), (23), (24), (25): Xaa is A or G
  MOD_RES (26), (27), (28), (29): Xaa is A or G or is absent
TVPKPXXAPTQLSPISVLYIXXXXXXXXXYKQYENMVVRA

SEQ ID NO: 20199 - protein, 38 aa, Artificial Sequence
  Non-cyclic GFR-binding peptide
  MOD_RES (1), (35), (37): Xaa is C or S
  MOD_RES (15), (16), (17), (18), (19): Xaa is A or G
  MOD_RES (20), (21), (22), (23): Xaa is A or G or is absent
XAPTKLEPISVLYLXXXXXXXXXKFKYENMVVRSXGXH

SEQ ID NO: 20200 - protein, 38 aa, Artificial Sequence
  Non-cyclic GFR-binding peptide
  MOD_RES (1), (35), (37): Xaa is C or S
  MOD_RES (15), (16), (17), (18), (19): Xaa is A or G
  MOD_RES (20), (21), (22), (23): Xaa is A or G or is absent
XAPTKLSPISVLYIXXXXXXXXXYKQYENMVVKAXGXH

SEQ ID NO: 20201 - protein, 36 aa, Artificial Sequence
  Non-cyclic GFR-binding peptide
  MOD_RES (2), (3), (36): Xaa is C or S
AXXVPTKLEPISVLYLDDMGVPTKFKYEEGMSVAEX

SEQ ID NO: 20202 - protein, 42 aa, Artificial Sequence
  Non-cyclic GFR-binding peptide
  MOD_RES (5), (6), (39), (41): Xaa is C or S
  MOD_RES (20), (21), (22), (23), (24): Xaa is A or G
  MOD_RES (25), (26), (27), (28): Xaa is A or G or is absent
SAAPXXVPQALEPISILYLXXXXXXXXXKFKYEMIVRSXKXS

SEQ ID NO: 20203 - protein, 37 aa, Artificial Sequence
  Non-cyclic GFR-binding peptide
  MOD_RES (5), (6): Xaa is C or S
APASXXVPARLEPISILYLDAANNVVKFKYEDMVVEA

SEQ ID NO: 20204 - protein, 33 aa, Artificial Sequence
  Non-cyclic GFR-binding peptide
  MOD_RES (14), (15), (16), (17), (18): Xaa is A or G
  MOD_RES (19), (20), (21), (22): Xaa is A or G or is absent
VPTELEPISMLYLXXXXXXXXXKFKYEDMVVEG

SEQ ID NO: 20205 - protein, 36 aa, Artificial Sequence
  Non-cyclic GFR-binding peptide
  MOD_RES (1), (2): Xaa is C or S
  MOD_RES (16), (17), (18), (19), (20): Xaa is A or G
  MOD_RES (21), (22), (23), (24): Xaa is A or G or is absent
XXVPTKLEPISVLYLXXXXXXXXXKFKYEEGMSVAE

SEQ ID NO: 20206 - protein, 39 aa, Artificial Sequence
  Non-cyclic GFR-binding peptide
  MOD_RES (5), (6): Xaa is C or S
  MOD_RES (20), (21), (22), (23), (24): Xaa is A or G
  MOD_RES (25), (26), (27), (28): Xaa is A or G or is absent
VPKPXXAPTQLSPISVLYIXXXXXXXXXYKQYENMVVRA

SEQ ID NO: 20207 - protein, 36 aa, Artificial Sequence
  Non-cyclic GFR-binding peptide
  MOD_RES (1), (2), (36): Xaa is C or S
  MOD_RES (16), (17), (18), (19), (20): Xaa is A or G
  MOD_RES (21), (22), (23), (24): Xaa is A or G or is absent
XXVPTELEPISMLYLXXXXXXXXXKFKYEEMVVEGX

SEQ ID NO: 20208 - protein, 35 aa, Artificial Sequence
  Non-cyclic GFR-binding peptide
  MOD_RES (2), (3): Xaa is C or S
  MOD_RES (17), (18), (19), (20), (21): Xaa is A or G
  MOD_RES (22), (23), (24), (25): Xaa is A or G or is absent
AXXVPTELSPISMLYIXXXXXXXXXYKQYEEMVVE

SEQ ID NO: 20209 - protein, 43 aa, Artificial Sequence
  Non-cyclic GFR-binding peptide
  MOD_RES (6), (7), (41), (43): Xaa is C or S
  MOD_RES (21), (22), (23), (24), (25): Xaa is A or G
  MOD_RES (26), (27), (28), (29): Xaa is A or G or is absent
TVPKPXXAPTQLEPISVLYLXXXXXXXXXKFKYENMVVRAXGX

SEQ ID NO: 20210 - protein, 33 aa, Artificial Sequence
  Non-cyclic GFR-binding peptide
  MOD_RES (32), (32): Xaa is C or S
APTQLSPISVLYIDDSSNVIYKQYENMVVRAXG

SEQ ID NO: 20211 - protein, 37 aa, Artificial Sequence
  Non-cyclic GFR-binding peptide
  MOD_RES (1), (2), (34), (36): Xaa is C or S
XXVPTELSPISMLYIDEYDKVVYKQYEEMVVEGXGXR

SEQ ID NO: 20212 - protein, 40 aa, Artificial Sequence
  Non-cyclic GFR-binding peptide
  MOD_RES (6), (7), (39): Xaa is C or S
AVPKAXXAPTKLSPISVLYIDSSNNVIYKQYENMVVKAXG

SEQ ID NO: 20213 - protein, 39 aa, Artificial Sequence
  Non-cyclic GFR-binding peptide
  MOD_RES (6), (7): Xaa is C or S
  MOD_RES (21), (22), (23), (24), (25): Xaa is A or G
  MOD_RES (26), (27), (28), (29): Xaa is A or G or is absent
ASAAPXXVPQALEPISILYLXXXXXXXXXKFKYEMIVRS

SEQ ID NO: 20214 - protein, 34 aa, Artificial Sequence
  Non-cyclic GFR-binding peptide
  MOD_RES (1), (2), (34): Xaa is C or S
XXAPTQLEPISVLYLDDSSNVIKFKYENMVVRAX

SEQ ID NO: 20215 - protein, 39 aa, Artificial Sequence
  Non-cyclic GFR-binding peptide
  MOD_RES (5), (6), (38): Xaa is C or S
APASXXVPARLNAISILYFDAANNVVLKKYRDMVVEAXG

SEQ ID NO: 20216 - protein, 35 aa, Artificial Sequence
  Non-cyclic GFR-binding peptide
  MOD_RES (2), (3), (35): Xaa is C or S
AXXAPTKLEPISVLYLDSSNNVIKFKYENMVVKAX

SEQ ID NO: 20217 - protein, 37 aa, Artificial Sequence
  Non-cyclic GFR-binding peptide
  MOD_RES (1), (2), (36): Xaa is C or S
  MOD_RES (16), (17), (18), (19), (20): Xaa is A or G
  MOD_RES (21), (22), (23), (24): Xaa is A or G or is absent
XXVPTKLSPISILYIXXXXXXXXXYKQYEGMAVSEXG

SEQ ID NO: 20218 - protein, 42 aa, Artificial Sequence
  Non-cyclic GFR-binding peptide
  MOD_RES (6), (7), (39), (41): Xaa is C or S
KIPKAXXVPTELEPISMLYLDENEKVVKFKYEDMVVEGXGXR

SEQ ID NO: 20219 - protein, 30 aa, Artificial Sequence
  Non-cyclic GFR-binding peptide
VPTELEPISMLYLDEYDKVVKFKYEEMVVE

SEQ ID NO: 20220 - protein, 36 aa, Artificial Sequence
  Non-cyclic GFR-binding peptide
  MOD_RES (3), (4), (35): Xaa is C or S
SPXXVPQDLEPISILYLVGRTPKVKFKYEMVVKSXK

SEQ ID NO: 20221 - protein, 39 aa, Artificial Sequence
  Non-cyclic GFR-binding peptide
  MOD_RES (3), (4), (37), (39): Xaa is C or S
  MOD_RES (18), (19), (20), (21), (22): Xaa is A or G
  MOD_RES (23), (24), (25), (26): Xaa is A or G or is absent
SPXXVSQDLSPISILYIXXXXXXXXXYKQYEMIVKSXKX

SEQ ID NO: 20222 - protein, 41 aa, Artificial Sequence
  Non-cyclic GFR-binding peptide
  MOD_RES (3), (4), (38), (40): Xaa is C or S
  MOD_RES (18), (19), (20), (21), (22): Xaa is A or G
  MOD_RES (23), (24), (25), (26): Xaa is A or G or is absent
KAXXVPTKLSPISILYIXXXXXXXXXYKQYEGMAVSEXGXR

SEQ ID NO: 20223 - protein, 36 aa, Artificial Sequence
  Non-cyclic GFR-binding peptide
  MOD_RES (34), (36): Xaa is C or S
  MOD_RES (14), (15), (16), (17), (18): Xaa is A or G
  MOD_RES (19), (20), (21), (22): Xaa is A or G or is absent
VPTKLSPISILYIXXXXXXXXXYKQYEGMAVSEXGX

SEQ ID NO: 20224 - protein, 35 aa, Artificial Sequence
  Non-cyclic GFR-binding peptide
  MOD_RES (34), (34): Xaa is C or S
  MOD_RES (14), (15), (16), (17), (18): Xaa is A or G
  MOD_RES (19), (20), (21), (22): Xaa is A or G or is absent
VPTELSPISMLYIXXXXXXXXXYKQYEDMVVEGXG

SEQ ID NO: 20225 - protein, 36 aa, Artificial Sequence
  Non-cyclic GFR-binding peptide
  MOD_RES (2), (3), (36): Xaa is C or S
  MOD_RES (17), (18), (19), (20), (21): Xaa is A or G
  MOD_RES (22), (23), (24), (25): Xaa is A or G or is absent
PXXVPQALEPISILYLXXXXXXXXXKFKYEMIVRSX

SEQ ID NO: 20226 - protein, 37 aa, Artificial Sequence
  Non-cyclic GFR-binding peptide
  MOD_RES (1), (2), (35), (37): Xaa is C or S
  MOD_RES (16), (17), (18), (19), (20): Xaa is A or G
  MOD_RES (21), (22), (23), (24): Xaa is A or G or is absent
XXVSQDLSPISILYIXXXXXXXXXYKQYEMIVKSXKX

SEQ ID NO: 20227 - protein, 36 aa, Artificial Sequence
  Non-cyclic GFR-binding peptide
  MOD_RES (1), (2), (34), (36): Xaa is C or S
XXVPTELEPISMLYLDEYDKVVKFKYEEMVVEGXGX

SEQ ID NO: 20228 - protein, 38 aa, Artificial Sequence
  Non-cyclic GFR-binding peptide
  MOD_RES (3), (4), (36), (38): Xaa is C or S
KAXXVPTELSPISMLYIDEYDKVVYKQYEEMVVEGXGX

SEQ ID NO: 20229 - protein, 37 aa, Artificial Sequence
  Non-cyclic GFR-binding peptide
  MOD_RES (7), (7): Xaa is C or S
HVTKPTXAPTKLSPISVLYIDDSSNVIYKQYENMVVR

SEQ ID NO: 20230 - protein, 34 aa, Artificial Sequence
  Non-cyclic GFR-binding peptide
  MOD_RES (33), (33): Xaa is C or S
VPTKLEPISVLYLDDMGVPTKFKYEEGMSVAEXG

SEQ ID NO: 20231 - protein, 35 aa, Artificial Sequence
  Non-cyclic GFR-binding peptide
  MOD_RES (2), (3), (35): Xaa is C or S
AXXAPTKLSPISVLYIDSSNNVIYKQYENMVVKAX

SEQ ID NO: 20232 - protein, 33 aa, Artificial Sequence
  Non-cyclic GFR-binding peptide
  MOD_RES (33), (33): Xaa is C or S
  MOD_RES (14), (15), (16), (17), (18): Xaa is A or G
  MOD_RES (19), (20), (21), (22): Xaa is A or G or is absent
VSQDLEPISILYLXXXXXXXXXKFKYEMIVKSX

SEQ ID NO: 20233 - protein, 38 aa, Artificial Sequence
  Non-cyclic GFR-binding peptide
  MOD_RES (3), (4), (35), (37): Xaa is C or S
APXXVPQALEPISILYLVGRKPKVKFKYEMIVRSXKXS

SEQ ID NO: 20234 - protein, 35 aa, Artificial Sequence
  Non-cyclic GFR-binding peptide
  MOD_RES (2), (3), (35): Xaa is C or S
AXXVPTKLSPISILYIDKGVVTYYKQYEGMAVSEX

SEQ ID NO: 20235 - protein, 35 aa, Artificial Sequence
  Non-cyclic GFR-binding peptide
  MOD_RES (4), (5): Xaa is C or S
ASPXXVPQDLEPISILYLVGRTPKVKFKYEMVVKS

SEQ ID NO: 20236 - protein, 37 aa, Artificial Sequence
  Non-cyclic GFR-binding peptide
  MOD_RES (3), (4): Xaa is C or S
  MOD_RES (18), (19), (20), (21), (22): Xaa is A or G
  MOD_RES (23), (24), (25), (26): Xaa is A or G or is absent
KAXXAPTKLEPISVLYLXXXXXXXXXKFKYENMVVKA

SEQ ID NO: 20237 - protein, 42 aa, Artificial Sequence
  Non-cyclic GFR-binding peptide
  MOD_RES (4), (5), (39), (41): Xaa is C or S
  MOD_RES (19), (20), (21), (22), (23): Xaa is A or G
  MOD_RES (24), (25), (26), (27): Xaa is A or G or is absent
PASXXVPARLSPISILYKXXXXXXXXXLKYHYDMVVEAXGXR

SEQ ID NO: 20238 - protein, 41 aa, Artificial Sequence
  Non-cyclic GFR-binding peptide
  MOD_RES (4), (5), (39), (41): Xaa is C or S
  MOD_RES (19), (20), (21), (22), (23): Xaa is A or G
  MOD_RES (24), (25), (26), (27): Xaa is A or G or is absent
PKPXXAPTQLSPISVLYIXXXXXXXXXYKQYENMVVRAXGX

SEQ ID NO: 20239 - protein, 32 aa, Artificial Sequence
  Non-cyclic GFR-binding peptide
  MOD_RES (32), (32): Xaa is C or S
APTKLSPISVLYIDSSNNVIYKQYENMVVKAX

SEQ ID NO: 20240 - protein, 34 aa, Artificial Sequence
  Non-cyclic GFR-binding peptide
  MOD_RES (3), (4): Xaa is C or S
KAXXVPTELEPISMLYLDENEKVVKFKYEDMVVE

SEQ ID NO: 20241 - protein, 32 aa, Artificial Sequence
  Non-cyclic GFR-binding peptide
  MOD_RES (1), (1): Xaa is C or S
XAPTKLSPISVLYIDSSNNVIYKQYENMVVKA

SEQ ID NO: 20242 - protein, 43 aa, Artificial Sequence
  Non-cyclic GFR-binding peptide
  MOD_RES (6), (7), (41), (43): Xaa is C or S
  MOD_RES (21), (22), (23), (24), (25): Xaa is A or G
  MOD_RES (26), (27), (28), (29): Xaa is A or G or is absent
AAPASXXVPARLSPISILYKXXXXXXXXXLKYHYDMVVEAXGX

SEQ ID NO: 20243 - protein, 37 aa, Artificial Sequence
  Non-cyclic GFR-binding peptide
  MOD_RES (1), (35), (37): Xaa is C or S
  MOD_RES (15), (16), (17), (18), (19): Xaa is A or G
  MOD_RES (20), (21), (22), (23): Xaa is A or G or is absent
XVPTELSPISMLYIXXXXXXXXXYKQYEDMVVEGXGX

SEQ ID NO: 20244 - protein, 40 aa, Artificial Sequence
  Non-cyclic GFR-binding peptide
  MOD_RES (3), (4), (38), (40): Xaa is C or S
  MOD_RES (18), (19), (20), (21), (22): Xaa is A or G
  MOD_RES (23), (24), (25), (26): Xaa is A or G or is absent
ASXXVPARLEPISILYLXXXXXXXXXKFKYEDMVVEAXGX

SEQ ID NO: 20245 - protein, 37 aa, Artificial Sequence
  Non-cyclic GFR-binding peptide
  MOD_RES (3), (4), (35), (37): Xaa is C or S
SPXXVPQDLSPISILYIVGRTPKVYKQYEMVVKSXKX

SEQ ID NO: 20246 - protein, 38 aa, Artificial Sequence
  Non-cyclic GFR-binding peptide
  MOD_RES (5), (6): Xaa is C or S
  MOD_RES (20), (21), (22), (23), (24): Xaa is A or G
  MOD_RES (25), (26), (27), (28): Xaa is A or G or is absent
VPKAXXAPTKLSPISVLYIXXXXXXXXXYKQYENMVVK

SEQ ID NO: 20247 - protein, 34 aa, Artificial Sequence
  Non-cyclic GFR-binding peptide
  MOD_RES (34), (34): Xaa is C or S
  MOD_RES (14), (15), (16), (17), (18): Xaa is A or G
  MOD_RES (19), (20), (21), (22): Xaa is A or G or is absent
VPTELSPISMLYIXXXXXXXXXYKQYEEMVVEGX

SEQ ID NO: 20248 - protein, 36 aa, Artificial Sequence
  Non-cyclic GFR-binding peptide
  MOD_RES (4), (5): Xaa is C or S
PKAXXVPTELSPISMLYIDENEKVVYKQYEDMVVEG

SEQ ID NO: 20249 - protein, 35 aa, Artificial Sequence
  Non-cyclic GFR-binding peptide
  MOD_RES (1), (35): Xaa is C or S
  MOD_RES (15), (16), (17), (18), (19): Xaa is A or G
  MOD_RES (20), (21), (22), (23): Xaa is A or G or is absent
XAPTKLEPISVLYLXXXXXXXXXKFKYENMVVRSX

SEQ ID NO: 20250 - protein, 38 aa, Artificial Sequence
  Non-cyclic GFR-binding peptide
  MOD_RES (2), (3), (37): Xaa is C or S
  MOD_RES (17), (18), (19), (20), (21): Xaa is A or G
  MOD_RES (22), (23), (24), (25): Xaa is A or G or is absent
AXXVPTKLSPISILYIXXXXXXXXXYKQYEGMAVSEXG

SEQ ID NO: 20251 - protein, 35 aa, Artificial Sequence
  Non-cyclic GFR-binding peptide
  MOD_RES (3), (4): Xaa is C or S
ASXXVPARLSPISILYKDAANNVVLKYHYDMVVEA

SEQ ID NO: 20252 - protein, 39 aa, Artificial Sequence
  Non-cyclic GFR-binding peptide
  MOD_RES (4), (5), (37), (39): Xaa is C or S
PKAXXVPTELSPISMLYIDEYDKVVYKQYEEMVVEGXGX

SEQ ID NO: 20253 - protein, 41 aa, Artificial Sequence
  Non-cyclic GFR-binding peptide
  MOD_RES (6), (7), (39), (41): Xaa is C or S
AAPASXXVPARLNAISILYFDAANNVVLKKYRDMVVEAXGX

SEQ ID NO: 20254 - protein, 43 aa, Artificial Sequence
  Non-cyclic GFR-binding peptide
  MOD_RES (7), (41), (43): Xaa is C or S
  MOD_RES (21), (22), (23), (24), (25): Xaa is A or G
  MOD_RES (26), (27), (28), (29): Xaa is A or G or is absent
HVTKPTXAPTKLEPISVLYLXXXXXXXXXKFKYENMVVRSXGX

SEQ ID NO: 20255 - protein, 38 aa, Artificial Sequence
  Non-cyclic GFR-binding peptide
  MOD_RES (1), (2), (36), (38): Xaa is C or S
  MOD_RES (16), (17), (18), (19), (20): Xaa is A or G
  MOD_RES (21), (22), (23), (24): Xaa is A or G or is absent
XXAPTKLEPISVLYLXXXXXXXXXKFKYENMVVRSXGX

SEQ ID NO: 20256 - protein, 37 aa, Artificial Sequence
  Non-cyclic GFR-binding peptide
  MOD_RES (4), (4): Xaa is C or S
  MOD_RES (18), (19), (20), (21), (22): Xaa is A or G
  MOD_RES (23), (24), (25), (26): Xaa is A or G or is absent
KPTXAPTKLSPISVLYIXXXXXXXXXYKQYENMVVRS

SEQ ID NO: 20257 - protein, 36 aa, Artificial Sequence
  Non-cyclic GFR-binding peptide
  MOD_RES (1), (2), (34), (36): Xaa is C or S
XXAPTQLEPISVLYLDDSSNVIKFKYENMVVRAXGX

SEQ ID NO: 20258 - protein, 40 aa, Artificial Sequence
  Non-cyclic GFR-binding peptide
  MOD_RES (6), (7): Xaa is C or S
  MOD_RES (21), (22), (23), (24), (25): Xaa is A or G
  MOD_RES (26), (27), (28), (29): Xaa is A or G or is absent
SIPKAXXVPTELEPISMLYLXXXXXXXXXKFKYEEMVVEG

SEQ ID NO: 20259 - protein, 42 aa, Artificial Sequence
  Non-cyclic GFR-binding peptide
  MOD_RES (4), (5), (39), (41): Xaa is C or S
  MOD_RES (19), (20), (21), (22), (23): Xaa is A or G
  MOD_RES (24), (25), (26), (27): Xaa is A or G or is absent
SKAXXVPTKLSPISILYKXXXXXXXXXLKYHYGMAVSEXGXR

SEQ ID NO: 20260 - protein, 42 aa, Artificial Sequence
  Non-cyclic GFR-binding peptide
  MOD_RES (5), (6), (40), (42): Xaa is C or S
  MOD_RES (20), (21), (22), (23), (24): Xaa is A or G
  MOD_RES (25), (26), (27), (28): Xaa is A or G or is absent
VPKAXXAPTKLEPISVLYLXXXXXXXXXKFKYENMVVKAXGX

SEQ ID NO: 20261 - protein, 35 aa, Artificial Sequence
  Non-cyclic GFR-binding peptide
  MOD_RES (1), (35): Xaa is C or S
  MOD_RES (15), (16), (17), (18), (19): Xaa is A or G
  MOD_RES (20), (21), (22), (23): Xaa is A or G or is absent
XAPTQLSPISVLYIXXXXXXXXXYKQYENMVVRAX

SEQ ID NO: 20262 - protein, 39 aa, Artificial Sequence
  Non-cyclic GFR-binding peptide
  MOD_RES (3), (4), (37), (39): Xaa is C or S
  MOD_RES (18), (19), (20), (21), (22): Xaa is A or G
  MOD_RES (23), (24), (25), (26): Xaa is A or G or is absent
APXXVPQALSPISILYIXXXXXXXXXYKQYEMIVRSXKX

SEQ ID NO: 20263 - protein, 37 aa, Artificial Sequence
  Non-cyclic GFR-binding peptide
  MOD_RES (5), (6): Xaa is C or S
ASKAXXVPTKLNAISILYFDKGVVTYLKKYRGMAVSE

SEQ ID NO: 20264 - protein, 35 aa, Artificial Sequence
  Non-cyclic GFR-binding peptide
  MOD_RES (1), (2), (33), (35): Xaa is C or S
XXVPQDLEPISILYLVGRTPKVKFKYEMVVKSXKX

SEQ ID NO: 20265 - protein, 37 aa, Artificial Sequence
  Non-cyclic GFR-binding peptide
  MOD_RES (4), (5): Xaa is C or S
  MOD_RES (19), (20), (21), (22), (23): Xaa is A or G
  MOD_RES (24), (25), (26), (27): Xaa is A or G or is absent
PASXXVPARLNAISILYFXXXXXXXXXLKKYRDMVVE

SEQ ID NO: 20266 - protein, 40 aa, Artificial Sequence
  Non-cyclic GFR-binding peptide
  MOD_RES (5), (6), (40): Xaa is C or S
  MOD_RES (20), (21), (22), (23), (24): Xaa is A or G
  MOD_RES (25), (26), (27), (28): Xaa is A or G or is absent
VPKPXXAPTKLEPISVLYLXXXXXXXXXKFKYENMVVRSX

SEQ ID NO: 20267 - protein, 37 aa, Artificial Sequence
  Non-cyclic GFR-binding peptide
  MOD_RES (1), (36): Xaa is C or S
  MOD_RES (15), (16), (17), (18), (19): Xaa is A or G
  MOD_RES (20), (21), (22), (23): Xaa is A or G or is absent
XVPTKLEPISVLYLXXXXXXXXXKFKYEEGMSVAEXG

SEQ ID NO: 20268 - protein, 33 aa, Artificial Sequence
  Non-cyclic GFR-binding peptide
  MOD_RES (2), (3): Xaa is C or S
SXXVPARLSPISILYKDAANNVVLKYHYDMVVE

SEQ ID NO: 20269 - protein, 30 aa, Artificial Sequence
  Non-cyclic GFR-binding peptide
APTKLSPISVLYIDSSNNVIYKQYENMVVK

SEQ ID NO: 20270 - protein, 35 aa, Artificial Sequence
  Non-cyclic GFR-binding peptide
  MOD_RES (2), (3): Xaa is C or S
  MOD_RES (17), (18), (19), (20), (21): Xaa is A or G
  MOD_RES (22), (23), (24), (25): Xaa is A or G or is absent
AXXVPTKLSPISILYIXXXXXXXXXYKQYEGMAVS

SEQ ID NO: 20271 - protein, 32 aa, Artificial Sequence
  Non-cyclic GFR-binding peptide
  MOD_RES (1), (1): Xaa is C or S
XVPTKLSPISILYKDKGVVTYLKYHYGMAVSE

SEQ ID NO: 20272 - protein, 37 aa, Artificial Sequence
  Non-cyclic GFR-binding peptide
  MOD_RES (6), (7): Xaa is C or S
TVPKPXXAPTQLSPISVLYIDDSSNVIYKQYENMVVR

SEQ ID NO: 20273 - protein, 41 aa, Artificial Sequence
  Non-cyclic GFR-binding peptide
  MOD_RES (6), (7), (40): Xaa is C or S
  MOD_RES (21), (22), (23), (24), (25): Xaa is A or G
  MOD_RES (26), (27), (28), (29): Xaa is A or G or is absent
ASASPXXVPQDLEPISILYLXXXXXXXXXKFKYEMVVKSXK

SEQ ID NO: 20274 - protein, 39 aa, Artificial Sequence
  Non-cyclic GFR-binding peptide
  MOD_RES (6), (7): Xaa is C or S
  MOD_RES (21), (22), (23), (24), (25): Xaa is A or G
  MOD_RES (26), (27), (28), (29): Xaa is A or G or is absent
TVPKPXXAPTQLSPISVLYIXXXXXXXXXYKQYENMVVR

SEQ ID NO: 20275 - protein, 36 aa, Artificial Sequence
  Non-cyclic GFR-binding peptide
  MOD_RES (1), (2), (36): Xaa is C or S
  MOD_RES (16), (17), (18), (19), (20): Xaa is A or G
  MOD_RES (21), (22), (23), (24): Xaa is A or G or is absent
XXAPTKLEPISVLYLXXXXXXXXXKFKYENMVVKAX

SEQ ID NO: 20276 - protein, 38 aa, Artificial Sequence
  Non-cyclic GFR-binding peptide
  MOD_RES (6), (38): Xaa is C or S
VTKPTXAPTKLEPISVLYLDDSSNVIKFKYENMVVRSX

SEQ ID NO: 20277 - protein, 32 aa, Artificial Sequence
  Non-cyclic GFR-binding peptide
  MOD_RES (1), (2): Xaa is C or S
XXVPTELEPISMLYLDENEKVVKFKYEDMVVE

SEQ ID NO: 20278 - protein, 41 aa, Artificial Sequence
  Non-cyclic GFR-binding peptide
  MOD_RES (6), (7), (38), (40): Xaa is C or S
ASASPXXVSQDLSPISILYIIGKTPKIYKQYEMIVKSXKXS

SEQ ID NO: 20279 - protein, 34 aa, Artificial Sequence
  Non-cyclic GFR-binding peptide
  MOD_RES (1), (2), (34): Xaa is C or S
XXVPARLEPISILYLDAANNVVKFKYEDMVVEAX

SEQ ID NO: 20280 - protein, 37 aa, Artificial Sequence
  Non-cyclic GFR-binding peptide
  MOD_RES (1), (2), (34), (36): Xaa is C or S
XXVPTKLNAISILYFDKGVVTYLKKYRGMAVSEXGXR

SEQ ID NO: 20281 - protein, 36 aa, Artificial Sequence
  Non-cyclic GFR-binding peptide
  MOD_RES (6), (6): Xaa is C or S
VTKPTXAPTKLEPISVLYLDDSSNVIKFKYENMVVR

SEQ ID NO: 20282 - protein, 33 aa, Artificial Sequence
  Non-cyclic GFR-binding peptide
  MOD_RES (1), (33): Xaa is C or S
XVPTELSPISMLYIDENEKVVYKQYEDMVVEGX

SEQ ID NO: 20283 - protein, 33 aa, Artificial Sequence
  Non-cyclic GFR-binding peptide
  MOD_RES (2), (3): Xaa is C or S
PXXVPQALSPISILYIVGRKPKVYKQYEMIVRS

SEQ ID NO: 20284 - protein, 39 aa, Artificial Sequence
  Non-cyclic GFR-binding peptide
  MOD_RES (5), (6), (38): Xaa is C or S
IPKAXXVPTELEPISMLYLDENEKVVKFKYEDMVVEGXG

SEQ ID NO: 20285 - protein, 38 aa, Artificial Sequence
  Non-cyclic GFR-binding peptide
  MOD_RES (4), (5), (38): Xaa is C or S
GKAXXVPTKLSPISVLYIDDMGVPTYKQYEEGMSVAEX

SEQ ID NO: 20286 - protein, 42 aa, Artificial Sequence
  Non-cyclic GFR-binding peptide
  MOD_RES (6), (7), (41): Xaa is C or S
  MOD_RES (21), (22), (23), (24), (25): Xaa is A or G
  MOD_RES (26), (27), (28), (29): Xaa is A or G or is absent
KIPKAXXVPTELSPISMLYIXXXXXXXXXYKQYEDMVVEGXG

SEQ ID NO: 20287 - protein, 38 aa, Artificial Sequence
  Non-cyclic GFR-binding peptide
  MOD_RES (1), (36), (38): Xaa is C or S
  MOD_RES (15), (16), (17), (18), (19): Xaa is A or G
  MOD_RES (20), (21), (22), (23): Xaa is A or G or is absent
XVPTKLEPISVLYLXXXXXXXXXKFKYEEGMSVAEXGX

SEQ ID NO: 20288 - protein, 41 aa, Artificial Sequence
  Non-cyclic GFR-binding peptide
  MOD_RES (6), (7), (39), (41): Xaa is C or S
KIPKAXXVPTELEPISMLYLDENEKVVKFKYEDMVVEGXGX

SEQ ID NO: 20289 - protein, 35 aa, Artificial Sequence
  Non-cyclic GFR-binding peptide
  MOD_RES (1), (2), (34): Xaa is C or S
XXVPTKLNAISILYFDKGVVTYLKKYRGMAVSEXG

SEQ ID NO: 20290 - protein, 37 aa, Artificial Sequence
  Non-cyclic GFR-binding peptide
  MOD_RES (1), (35), (37): Xaa is C or S
  MOD_RES (15), (16), (17), (18), (19): Xaa is A or G
  MOD_RES (20), (21), (22), (23): Xaa is A or G or is absent
XAPTKLEPISVLYLXXXXXXXXXKFKYENMVVKAXGX

SEQ ID NO: 20291 - protein, 37 aa, Artificial Sequence
  Non-cyclic GFR-binding peptide
  MOD_RES (1), (2), (34), (36): Xaa is C or S
XXAPTKLEPISVLYLDSSNNVIKFKYENMVVKAXGXH

SEQ ID NO: 20292 - protein, 36 aa, Artificial Sequence
  Non-cyclic GFR-binding peptide
  MOD_RES (2), (3): Xaa is C or S
  MOD_RES (17), (18), (19), (20), (21): Xaa is A or G
  MOD_RES (22), (23), (24), (25): Xaa is A or G or is absent
AXXVPTELSPISMLYIXXXXXXXXXYKQYEDMVVEG

SEQ ID NO: 20293 - protein, 33 aa, Artificial Sequence
  Non-cyclic GFR-binding peptide
  MOD_RES (32), (32): Xaa is C or S
APTKLSPISVLYIDDSSNVIYKQYENMVVRSXG

SEQ ID NO: 20294 - protein, 32 aa, Artificial Sequence
  Non-cyclic GFR-binding peptide
  MOD_RES (1), (32): Xaa is C or S
XVSQDLSPISILYIIGKTPKIYKQYEMIVKSX

SEQ ID NO: 20295 - protein, 43 aa, Artificial Sequence
  Non-cyclic GFR-binding peptide
  MOD_RES (6), (7), (41), (43): Xaa is C or S
  MOD_RES (21), (22), (23), (24), (25): Xaa is A or G
  MOD_RES (26), (27), (28), (29): Xaa is A or G or is absent
KIPKAXXVPTELSPISMLYIXXXXXXXXXYKQYEDMVVEGXGX

SEQ ID NO: 20296 - protein, 34 aa, Artificial Sequence
  Non-cyclic GFR-binding peptide
  MOD_RES (33), (33): Xaa is C or S
  MOD_RES (14), (15), (16), (17), (18): Xaa is A or G
  MOD_RES (19), (20), (21), (22): Xaa is A or G or is absent
VSQDLEPISILYLXXXXXXXXXKFKYEMIVKSXK

SEQ ID NO: 20297 - protein, 34 aa, Artificial Sequence
  Non-cyclic GFR-binding peptide
  MOD_RES (1), (33): Xaa is C or S
XVPTELSPISMLYIDENEKVVYKQYEDMVVEGXG

SEQ ID NO: 20298 - protein, 36 aa, Artificial Sequence
  Non-cyclic GFR-binding peptide
  MOD_RES (4), (5): Xaa is C or S
PKPXXAPTQLEPISVLYLDDSSNVIKFKYENMVVRA

SEQ ID NO: 20299 - protein, 36 aa, Artificial Sequence
  Non-cyclic GFR-binding peptide
  MOD_RES (2), (3): Xaa is C or S
  MOD_RES (17), (18), (19), (20), (21): Xaa is A or G
  MOD_RES (22), (23), (24), (25): Xaa is A or G or is absent
PXXAPTQLSPISVLYIXXXXXXXXXYKQYENMVVRA

SEQ ID NO: 20300 - protein, 39 aa, Artificial Sequence
  Non-cyclic GFR-binding peptide
  MOD_RES (4), (5), (36), (38): Xaa is C or S
ASPXXVSQDLSPISILYIIGKTPKIYKQYEMIVKSXKXS

SEQ ID NO: 20301 - protein, 37 aa, Artificial Sequence
  Non-cyclic GFR-binding peptide
  MOD_RES (1), (35), (37): Xaa is C or S
  MOD_RES (15), (16), (17), (18), (19): Xaa is A or G
  MOD_RES (20), (21), (22), (23): Xaa is A or G or is absent
XVPTELEPISMLYLXXXXXXXXXKFKYEDMVVEGXGX

SEQ ID NO: 20302 - protein, 39 aa, Artificial Sequence
  Non-cyclic GFR-binding peptide
  MOD_RES (4), (5), (37), (39): Xaa is C or S
PKPXXAPTKLEPISVLYLDDSSNVIKFKYENMVVRSXGX

SEQ ID NO: 20303 - protein, 38 aa, Artificial Sequence
  Non-cyclic GFR-binding peptide
  MOD_RES (5), (6), (38): Xaa is C or S
VPKAXXAPTKLEPISVLYLDSSNNVIKFKYENMVVKAX

SEQ ID NO: 20304 - protein, 41 aa, Artificial Sequence
  Non-cyclic GFR-binding peptide
  MOD_RES (4), (5), (39), (41): Xaa is C or S
  MOD_RES (19), (20), (21), (22), (23): Xaa is A or G
  MOD_RES (24), (25), (26), (27): Xaa is A or G or is absent
PKPXXAPTQLEPISVLYLXXXXXXXXXKFKYENMVVRAXGX

SEQ ID NO: 20305 - protein, 36 aa, Artificial Sequence
  Non-cyclic GFR-binding peptide
  MOD_RES (1), (2), (36): Xaa is C or S
  MOD_RES (16), (17), (18), (19), (20): Xaa is A or G
  MOD_RES (21), (22), (23), (24): Xaa is A or G or is absent
XXVPTELSPISMLYIXXXXXXXXXYKQYEDMVVEGX

SEQ ID NO: 20306 - protein, 37 aa, Artificial Sequence
  Non-cyclic GFR-binding peptide
  MOD_RES (4), (5): Xaa is C or S
  MOD_RES (19), (20), (21), (22), (23): Xaa is A or G
  MOD_RES (24), (25), (26), (27): Xaa is A or G or is absent
PKPXXAPTKLSPISVLYIXXXXXXXXXYKQYENMVVR

SEQ ID NO: 20307 - protein, 41 aa, Artificial Sequence
  Non-cyclic GFR-binding peptide
  MOD_RES (6), (7), (41): Xaa is C or S
  MOD_RES (21), (22), (23), (24), (25): Xaa is A or G
  MOD_RES (26), (27), (28), (29): Xaa is A or G or is absent
AAPASXXVPARLSPISILYKXXXXXXXXXLKYHYDMVVEAX

SEQ ID NO: 20308 - protein, 38 aa, Artificial Sequence
  Non-cyclic GFR-binding peptide
  MOD_RES (3), (4), (38): Xaa is C or S
  MOD_RES (18), (19), (20), (21), (22): Xaa is A or G
  MOD_RES (23), (24), (25), (26): Xaa is A or G or is absent
ASXXVPARLNAISILYFXXXXXXXXXLKKYRDMVVEAX

SEQ ID NO: 20309 - protein, 42 aa, Artificial Sequence
  Non-cyclic GFR-binding peptide
  MOD_RES (6), (7), (40), (42): Xaa is C or S
  MOD_RES (21), (22), (23), (24), (25): Xaa is A or G
  MOD_RES (26), (27), (28), (29): Xaa is A or G or is absent
ASAAPXXVPQALSPISILYIXXXXXXXXXYKQYEMIVRSXKX

SEQ ID NO: 20310 - protein, 39 aa, Artificial Sequence
  Non-cyclic GFR-binding peptide
  MOD_RES (4), (36), (38): Xaa is C or S
KPTXAPTKLEPISVLYLDDSSNVIKFKYENMVVRSXGXH

SEQ ID NO: 20311 - protein, 39 aa, Artificial Sequence
  Non-cyclic GFR-binding peptide
  MOD_RES (5), (39): Xaa is C or S
  MOD_RES (19), (20), (21), (22), (23): Xaa is A or G
  MOD_RES (24), (25), (26), (27): Xaa is A or G or is absent
TKPTXAPTKLEPISVLYLXXXXXXXXXKFKYENMVVRSX

SEQ ID NO: 20312 - protein, 40 aa, Artificial Sequence
  Non-cyclic GFR-binding peptide
  MOD_RES (2), (3), (37), (39): Xaa is C or S
  MOD_RES (17), (18), (19), (20), (21): Xaa is A or G
  MOD_RES (22), (23), (24), (25): Xaa is A or G or is absent
AXXAPTKLEPISVLYLXXXXXXXXXKFKYENMVVKAXGXH

SEQ ID NO: 20313 - protein, 34 aa, Artificial Sequence
  Non-cyclic GFR-binding peptide
  MOD_RES (1), (1): Xaa is C or S
  MOD_RES (15), (16), (17), (18), (19): Xaa is A or G
  MOD_RES (20), (21), (22), (23): Xaa is A or G or is absent
XVPTELSPISMLYIXXXXXXXXXYKQYEEMVVEG

SEQ ID NO: 20314 - protein, 35 aa, Artificial Sequence
  Non-cyclic GFR-binding peptide
  MOD_RES (3), (3): Xaa is C or S
  MOD_RES (17), (18), (19), (20), (21): Xaa is A or G
  MOD_RES (22), (23), (24), (25): Xaa is A or G or is absent
PTXAPTKLEPISVLYLXXXXXXXXXKFKYENMVVR

SEQ ID NO: 20315 - protein, 37 aa, Artificial Sequence
  Non-cyclic GFR-binding peptide
  MOD_RES (2), (3), (35), (37): Xaa is C or S
SXXVPARLNAISILYFDAANNVVLKKYRDMVVEAXGX

SEQ ID NO: 20316 - protein, 40 aa, Artificial Sequence
  Non-cyclic GFR-binding peptide
  MOD_RES (3), (4), (38), (40): Xaa is C or S
  MOD_RES (18), (19), (20), (21), (22): Xaa is A or G
  MOD_RES (23), (24), (25), (26): Xaa is A or G or is absent
KAXXVPTELSPISMLYIXXXXXXXXXYKQYEDMVVEGXGX

SEQ ID NO: 20317 - protein, 34 aa, Artificial Sequence
  Non-cyclic GFR-binding peptide
  MOD_RES (1), (34): Xaa is C or S
XVPTKLSPISVLYIDDMGVPTYKQYEEGMSVAEX

SEQ ID NO: 20318 - protein, 33 aa, Artificial Sequence
  Non-cyclic GFR-binding peptide
  MOD_RES (32), (32): Xaa is C or S
VPARLNAISILYFDAANNVVLKKYRDMVVEAXG

SEQ ID NO: 20319 - protein, 33 aa, Artificial Sequence
  Non-cyclic GFR-binding peptide
  MOD_RES (2), (3): Xaa is C or S
AXXVPTELSPISMLYIDENEKVVYKQYEDMVVE

SEQ ID NO: 20320 - protein, 35 aa, Artificial Sequence
  Non-cyclic GFR-binding peptide
  MOD_RES (33), (35): Xaa is C or S
VPTKLEPISVLYLDDMGVPTKFKYEEGMSVAEXGX

SEQ ID NO: 20321 - protein, 32 aa, Artificial Sequence
  Non-cyclic GFR-binding peptide
  MOD_RES (32), (32): Xaa is C or S
VPTKLSPISILYIDKGVVTYYKQYEGMAVSEX

SEQ ID NO: 20322 - protein, 38 aa, Artificial Sequence
  Non-cyclic GFR-binding peptide
  MOD_RES (5), (6), (38): Xaa is C or S
VPKAXXAPTKLSPISVLYIDSSNNVIYKQYENMVVKAX

SEQ ID NO: 20323 - protein, 35 aa, Artificial Sequence
  Non-cyclic GFR-binding peptide
  MOD_RES (1), (34): Xaa is C or S
  MOD_RES (15), (16), (17), (18), (19): Xaa is A or G
  MOD_RES (20), (21), (22), (23): Xaa is A or G or is absent
XVPQALSPISILYIXXXXXXXXXYKQYEMIVRSXK

SEQ ID NO: 20324 - protein, 36 aa, Artificial Sequence
  Non-cyclic GFR-binding peptide
  MOD_RES (2), (3), (36): Xaa is C or S
  MOD_RES (17), (18), (19), (20), (21): Xaa is A or G
  MOD_RES (22), (23), (24), (25): Xaa is A or G or is absent
PXXVPQALSPISILYIXXXXXXXXXYKQYEMIVRSX

SEQ ID NO: 20325 - protein, 34 aa, Artificial Sequence
  Non-cyclic GFR-binding peptide
  MOD_RES (1), (2): Xaa is C or S
  MOD_RES (16), (17), (18), (19), (20): Xaa is A or G
  MOD_RES (21), (22), (23), (24): Xaa is A or G or is absent
XXVSQDLEPISILYLXXXXXXXXXKFKYEMIVKS

SEQ ID NO: 20326 - protein, 38 aa, Artificial Sequence
  Non-cyclic GFR-binding peptide
  MOD_RES (2), (3), (37): Xaa is C or S
  MOD_RES (17), (18), (19), (20), (21): Xaa is A or G
  MOD_RES (22), (23), (24), (25): Xaa is A or G or is absent
PXXAPTKLEPISVLYLXXXXXXXXXKFKYENMVVRSXG

SEQ ID NO: 20327 - protein, 40 aa, Artificial Sequence
  Non-cyclic GFR-binding peptide
  MOD_RES (3), (4), (38), (40): Xaa is C or S
  MOD_RES (18), (19), (20), (21), (22): Xaa is A or G
  MOD_RES (23), (24), (25), (26): Xaa is A or G or is absent
KAXXAPTKLSPISVLYIXXXXXXXXXYKQYENMVVKAXGX

SEQ ID NO: 20328 - protein, 39 aa, Artificial Sequence
  Non-cyclic GFR-binding peptide
  MOD_RES (5), (6), (37), (39): Xaa is C or S
SAAPXXVPQALEPISILYLVGRKPKVKFKYEMIVRSXKX

SEQ ID NO: 20329 - protein, 33 aa, Artificial Sequence
  Non-cyclic GFR-binding peptide
  MOD_RES (2), (2): Xaa is C or S
TXAPTKLSPISVLYIDDSSNVIYKQYENMVVRS

SEQ ID NO: 20330 - protein, 33 aa, Artificial Sequence
  Non-cyclic GFR-binding peptide
  MOD_RES (1), (1): Xaa is C or S
  MOD_RES (15), (16), (17), (18), (19): Xaa is A or G
  MOD_RES (20), (21), (22), (23): Xaa is A or G or is absent
XAPTQLSPISVLYIXXXXXXXXXYKQYENMVVR

SEQ ID NO: 20331 - protein, 32 aa, Artificial Sequence
  Non-cyclic GFR-binding peptide
  MOD_RES (32), (32): Xaa is C or S
APTKLEPISVLYLDSSNNVIKFKYENMVVKAX

SEQ ID NO: 20332 - protein, 38 aa, Artificial Sequence
  Non-cyclic GFR-binding peptide
  MOD_RES (1), (35), (37): Xaa is C or S
  MOD_RES (15), (16), (17), (18), (19): Xaa is A or G
  MOD_RES (20), (21), (22), (23): Xaa is A or G or is absent
XVPTKLSPISILYIXXXXXXXXXYKQYEGMAVSEXGXR

SEQ ID NO: 20333 - protein, 39 aa, Artificial Sequence
  Non-cyclic GFR-binding peptide
  MOD_RES (4), (5), (37), (39): Xaa is C or S
PKPXXAPTQLEPISVLYLDDSSNVIKFKYENMVVRAXGX

SEQ ID NO: 20334 - protein, 35 aa, Artificial Sequence
  Non-cyclic GFR-binding peptide
  MOD_RES (4), (5): Xaa is C or S
SKAXXVPTKLSPISILYKDKGVVTYLKYHYGMAVS

SEQ ID NO: 20335 - protein, 37 aa, Artificial Sequence
  Non-cyclic GFR-binding peptide
  MOD_RES (3), (4), (36): Xaa is C or S
KAXXAPTKLEPISVLYLDSSNNVIKFKYENMVVKAXG

SEQ ID NO: 20336 - protein, 38 aa, Artificial Sequence
  Non-cyclic GFR-binding peptide
  MOD_RES (3), (4), (36), (38): Xaa is C or S
KPXXAPTQLEPISVLYLDDSSNVIKFKYENMVVRAXGX

SEQ ID NO: 20337 - protein, 40 aa, Artificial Sequence
  Non-cyclic GFR-binding peptide
  MOD_RES (6), (7), (39): Xaa is C or S
SIPKAXXVPTELEPISMLYLDEYDKVVKFKYEEMVVEGXG

SEQ ID NO: 20338 - protein, 36 aa, Artificial Sequence
  Non-cyclic GFR-binding peptide
  MOD_RES (2), (3), (34), (36): Xaa is C or S
PXXVSQDLEPISILYLIGKTPKIKFKYEMIVKSXKX

SEQ ID NO: 20339 - protein, 34 aa, Artificial Sequence
  Non-cyclic GFR-binding peptide
  MOD_RES (1), (1): Xaa is C or S
  MOD_RES (15), (16), (17), (18), (19): Xaa is A or G
  MOD_RES (20), (21), (22), (23): Xaa is A or G or is absent
XAPTQLEPISVLYLXXXXXXXXXKFKYENMVVRA

SEQ ID NO: 20340 - protein, 36 aa, Artificial Sequence
  Non-cyclic GFR-binding peptide
  MOD_RES (2), (3), (35): Xaa is C or S
PXXAPTQLEPISVLYLDDSSNVIKFKYENMVVRAXG

SEQ ID NO: 20341 - protein, 33 aa, Artificial Sequence
  Non-cyclic GFR-binding peptide
  MOD_RES (1), (2): Xaa is C or S
XXAPTKLSPISVLYIDSSNNVIYKQYENMVVKA

SEQ ID NO: 20342 - protein, 39 aa, Artificial Sequence
  Non-cyclic GFR-binding peptide
  MOD_RES (1), (2), (36), (38): Xaa is C or S
  MOD_RES (16), (17), (18), (19), (20): Xaa is A or G
  MOD_RES (21), (22), (23), (24): Xaa is A or G or is absent
XXAPTKLEPISVLYLXXXXXXXXXKFKYENMVVKAXGXH

SEQ ID NO: 20343 - protein, 36 aa, Artificial Sequence
  Non-cyclic GFR-binding peptide
  MOD_RES (3), (4), (35): Xaa is C or S
SPXXVSQDLSPISILYIIGKTPKIYKQYEMIVKSXK

SEQ ID NO: 20344 - protein, 37 aa, Artificial Sequence
  Non-cyclic GFR-binding peptide
  MOD_RES (34), (36): Xaa is C or S
  MOD_RES (14), (15), (16), (17), (18): Xaa is A or G
  MOD_RES (19), (20), (21), (22): Xaa is A or G or is absent
APTQLEPISVLYLXXXXXXXXXKFKYENMVVRAXGXH

SEQ ID NO: 20345 - protein, 37 aa, Artificial Sequence
  Non-cyclic GFR-binding peptide
  MOD_RES (1), (2), (36): Xaa is C or S
  MOD_RES (16), (17), (18), (19), (20): Xaa is A or G
  MOD_RES (21), (22), (23), (24): Xaa is A or G or is absent
XXVPARLSPISILYKXXXXXXXXXLKYHYDMVVEAXG

SEQ ID NO: 20346 - protein, 35 aa, Artificial Sequence
  Non-cyclic GFR-binding peptide
  MOD_RES (1), (34): Xaa is C or S
XVPTKLEPISVLYLDDMGVPTKFKYEEGMSVAEXG

SEQ ID NO: 20347 - protein, 35 aa, Artificial Sequence
  Non-cyclic GFR-binding peptide
  MOD_RES (1), (32), (34): Xaa is C or S
XVSQDLSPISILYIIGKTPKIYKQYEMIVKSXKXS

SEQ ID NO: 20348 - protein, 43 aa, Artificial Sequence
  Non-cyclic GFR-binding peptide
  MOD_RES (7), (41), (43): Xaa is C or S
  MOD_RES (21), (22), (23), (24), (25): Xaa is A or G
  MOD_RES (26), (27), (28), (29): Xaa is A or G or is absent
HVTKPTXAPTKLSPISVLYIXXXXXXXXXYKQYENMVVRSXGX

SEQ ID NO: 20349 - protein, 36 aa, Artificial Sequence
  Non-cyclic GFR-binding peptide
  MOD_RES (4), (5): Xaa is C or S
PKAXXVPTELEPISMLYLDEYDKVVKFKYEEMVVEG

SEQ ID NO: 20350 - protein, 37 aa, Artificial Sequence
  Non-cyclic GFR-binding peptide
  MOD_RES (4), (36): Xaa is C or S
KPTXAPTKLSPISVLYIDDSSNVIYKQYENMVVRSXG

SEQ ID NO: 20351 - protein, 32 aa, Artificial Sequence
  Non-cyclic GFR-binding peptide
  MOD_RES (1), (2): Xaa is C or S
XXVSQDLSPISILYIIGKTPKIYKQYEMIVKS

SEQ ID NO: 20352 - protein, 36 aa, Artificial Sequence
  Non-cyclic GFR-binding peptide
  MOD_RES (3), (4): Xaa is C or S
  MOD_RES (18), (19), (20), (21), (22): Xaa is A or G
  MOD_RES (23), (24), (25), (26): Xaa is A or G or is absent
KPXXAPTKLEPISVLYLXXXXXXXXXKFKYENMVVR

SEQ ID NO: 20353 - protein, 36 aa, Artificial Sequence
  Non-cyclic GFR-binding peptide
  MOD_RES (2), (3), (35): Xaa is C or S
PXXAPTKLEPISVLYLDDSSNVIKFKYENMVVRSXG

SEQ ID NO: 20354 - protein, 36 aa, Artificial Sequence
  Non-cyclic GFR-binding peptide
  MOD_RES (2), (3), (35): Xaa is C or S
AXXVPTELSPISMLYIDEYDKVVYKQYEEMVVEGXG

SEQ ID NO: 20355 - protein, 41 aa, Artificial Sequence
  Non-cyclic GFR-binding peptide
  MOD_RES (6), (7): Xaa is C or S
  MOD_RES (21), (22), (23), (24), (25): Xaa is A or G
  MOD_RES (26), (27), (28), (29): Xaa is A or G or is absent
KVGKAXXVPTKLSPISVLYIXXXXXXXXXYKQYEEGMSVAE

SEQ ID NO: 20356 - protein, 36 aa, Artificial Sequence
  Non-cyclic GFR-binding peptide
  MOD_RES (35), (35): Xaa is C or S
  MOD_RES (14), (15), (16), (17), (18): Xaa is A or G
  MOD_RES (19), (20), (21), (22): Xaa is A or G or is absent
VPTKLSPISVLYIXXXXXXXXXYKQYEEGMSVAEXG

SEQ ID NO: 20357 - protein, 36 aa, Artificial Sequence
  Non-cyclic GFR-binding peptide
  MOD_RES (4), (36): Xaa is C or S
KPTXAPTKLSPISVLYIDDSSNVIYKQYENMVVRSX

SEQ ID NO: 20358 - protein, 39 aa, Artificial Sequence
  Non-cyclic GFR-binding peptide
  MOD_RES (4), (5), (37), (39): Xaa is C or S
PKAXXVPTELSPISMLYIDENEKVVYKQYEDMVVEGXGX

SEQ ID NO: 20359 - protein, 39 aa, Artificial Sequence
  Non-cyclic GFR-binding peptide
  MOD_RES (6), (7), (39): Xaa is C or S
AVPKAXXAPTKLSPISVLYIDSSNNVIYKQYENMVVKAX

SEQ ID NO: 20360 - protein, 33 aa, Artificial Sequence
  Non-cyclic GFR-binding peptide
  MOD_RES (1), (2): Xaa is C or S
XXVPARLNAISILYFDAANNVVLKKYRDMVVEA

SEQ ID NO: 20361 - protein, 35 aa, Artificial Sequence
  Non-cyclic GFR-binding peptide
  MOD_RES (1), (2): Xaa is C or S
  MOD_RES (16), (17), (18), (19), (20): Xaa is A or G
  MOD_RES (21), (22), (23), (24): Xaa is A or G or is absent
XXAPTQLEPISVLYLXXXXXXXXXKFKYENMVVRA

SEQ ID NO: 20362 - protein, 39 aa, Artificial Sequence
  Non-cyclic GFR-binding peptide
  MOD_RES (5), (6), (38): Xaa is C or S
ASKAXXVPTKLSPISILYKDKGVVTYLKYHYGMAVSEXG

SEQ ID NO: 20363 - protein, 42 aa, Artificial Sequence
  Non-cyclic GFR-binding peptide
  MOD_RES (6), (7), (40), (42): Xaa is C or S
  MOD_RES (21), (22), (23), (24), (25): Xaa is A or G
  MOD_RES (26), (27), (28), (29): Xaa is A or G or is absent
ASASPXXVSQDLSPISILYIXXXXXXXXXYKQYEMIVKSXKX

SEQ ID NO: 20364 - protein, 38 aa, Artificial Sequence
  Non-cyclic GFR-binding peptide
  MOD_RES (6), (6): Xaa is C or S
  MOD_RES (20), (21), (22), (23), (24): Xaa is A or G
  MOD_RES (25), (26), (27), (28): Xaa is A or G or is absent
VTKPTXAPTKLEPISVLYLXXXXXXXXXKFKYENMVVR

SEQ ID NO: 20365 - protein, 37 aa, Artificial Sequence
  Non-cyclic GFR-binding peptide
  MOD_RES (1), (2), (34), (36): Xaa is C or S
XXVPTKLSPISILYKDKGVVTYLKYHYGMAVSEXGXR

SEQ ID NO: 20366 - protein, 40 aa, Artificial Sequence
  Non-cyclic GFR-binding peptide
  MOD_RES (7), (39): Xaa is C or S
HVTKPTXAPTKLEPISVLYLDDSSNVIKFKYENMVVRSXG

SEQ ID NO: 20367 - protein, 35 aa, Artificial Sequence
  Non-cyclic GFR-binding peptide
  MOD_RES (2), (2): Xaa is C or S
  MOD_RES (16), (17), (18), (19), (20): Xaa is A or G
  MOD_RES (21), (22), (23), (24): Xaa is A or G or is absent
TXAPTKLSPISVLYIXXXXXXXXXYKQYENMVVRS

SEQ ID NO: 20368 - protein, 35 aa, Artificial Sequence
  Non-cyclic GFR-binding peptide
  MOD_RES (33), (35): Xaa is C or S
VPTKLSPISVLYIDDMGVPTYKQYEEGMSVAEXGX

SEQ ID NO: 20369 - protein, 38 aa, Artificial Sequence
  Non-cyclic GFR-binding peptide
  MOD_RES (5), (6): Xaa is C or S
  MOD_RES (20), (21), (22), (23), (24): Xaa is A or G
  MOD_RES (25), (26), (27), (28): Xaa is A or G or is absent
SAAPXXVPQALEPISILYLXXXXXXXXXKFKYEMIVRS

SEQ ID NO: 20370 - protein, 39 aa, Artificial Sequence
  Non-cyclic GFR-binding peptide
  MOD_RES (6), (7), (39): Xaa is C or S
YVPKPXXAPTKLSPISVLYIDDSSNVIYKQYENMVVRSX

SEQ ID NO: 20371 - protein, 36 aa, Artificial Sequence
  Non-cyclic GFR-binding peptide
  MOD_RES (2), (3), (35): Xaa is C or S
AXXAPTKLSPISVLYIDSSNNVIYKQYENMVVKAXG

SEQ ID NO: 20372 - protein, 31 aa, Artificial Sequence
  Non-cyclic GFR-binding peptide
  MOD_RES (1), (1): Xaa is C or S
XVPARLEPISILYLDAANNVVKFKYEDMVVE

SEQ ID NO: 20373 - protein, 36 aa, Artificial Sequence
  Non-cyclic GFR-binding peptide
  MOD_RES (2), (3): Xaa is C or S
  MOD_RES (17), (18), (19), (20), (21): Xaa is A or G
  MOD_RES (22), (23), (24), (25): Xaa is A or G or is absent
SXXVPARLEPISILYLXXXXXXXXXKFKYEDMVVEA

SEQ ID NO: 20374 - protein, 40 aa, Artificial Sequence
  Non-cyclic GFR-binding peptide
  MOD_RES (6), (7), (40): Xaa is C or S
  MOD_RES (21), (22), (23), (24), (25): Xaa is A or G
  MOD_RES (26), (27), (28), (29): Xaa is A or G or is absent
ASASPXXVSQDLSPISILYIXXXXXXXXXYKQYEMIVKSX

SEQ ID NO: 20375 - protein, 34 aa, Artificial Sequence
  Non-cyclic GFR-binding peptide
  MOD_RES (1), (34): Xaa is C or S
  MOD_RES (15), (16), (17), (18), (19): Xaa is A or G
  MOD_RES (20), (21), (22), (23): Xaa is A or G or is absent
XVPQDLSPISILYIXXXXXXXXXYKQYEMVVKSX

SEQ ID NO: 20376 - protein, 41 aa, Artificial Sequence
  Non-cyclic GFR-binding peptide
  MOD_RES (6), (7), (41): Xaa is C or S
  MOD_RES (21), (22), (23), (24), (25): Xaa is A or G
  MOD_RES (26), (27), (28), (29): Xaa is A or G or is absent
KASKAXXVPTKLSPISILYKXXXXXXXXXLKYHYGMAVSEX

SEQ ID NO: 20377 - protein, 40 aa, Artificial Sequence
  Non-cyclic GFR-binding peptide
  MOD_RES (5), (6), (38), (40): Xaa is C or S
VPKPXXAPTQLEPISVLYLDDSSNVIKFKYENMVVRAXGX

SEQ ID NO: 20378 - protein, 34 aa, Artificial Sequence
  Non-cyclic GFR-binding peptide
  MOD_RES (1), (2): Xaa is C or S
  MOD_RES (16), (17), (18), (19), (20): Xaa is A or G
  MOD_RES (21), (22), (23), (24): Xaa is A or G or is absent
XXVPTELEPISMLYLXXXXXXXXXKFKYEEMVVE

SEQ ID NO: 20379 - protein, 35 aa, Artificial Sequence
  Non-cyclic GFR-binding peptide
  MOD_RES (1), (33), (35): Xaa is C or S
XAPTQLSPISVLYIDDSSNVIYKQYENMVVRAXGX

SEQ ID NO: 20380 - protein, 34 aa, Artificial Sequence
  Non-cyclic GFR-binding peptide
  MOD_RES (1), (1): Xaa is C or S
  MOD_RES (15), (16), (17), (18), (19): Xaa is A or G
  MOD_RES (20), (21), (22), (23): Xaa is A or G or is absent
XVPTELEPISMLYLXXXXXXXXXKFKYEDMVVEG

SEQ ID NO: 20381 - protein, 41 aa, Artificial Sequence
  Non-cyclic GFR-binding peptide
  MOD_RES (3), (4), (38), (40): Xaa is C or S
  MOD_RES (18), (19), (20), (21), (22): Xaa is A or G
  MOD_RES (23), (24), (25), (26): Xaa is A or G or is absent
KAXXAPTKLSPISVLYIXXXXXXXXXYKQYENMVVKAXGXH

SEQ ID NO: 20382 - protein, 40 aa, Artificial Sequence
  Non-cyclic GFR-binding peptide
  MOD_RES (4), (5), (40): Xaa is C or S
  MOD_RES (19), (20), (21), (22), (23): Xaa is A or G
  MOD_RES (24), (25), (26), (27): Xaa is A or G or is absent
GKAXXVPTKLEPISVLYLXXXXXXXXXKFKYEEGMSVAEX

SEQ ID NO: 20383 - protein, 32 aa, Artificial Sequence
  Non-cyclic GFR-binding peptide
  MOD_RES (1), (2): Xaa is C or S
XXVPARLEPISILYLDAANNVVKFKYEDMVVE

SEQ ID NO: 20384 - protein, 35 aa, Artificial Sequence
  Non-cyclic GFR-binding peptide
  MOD_RES (32), (34): Xaa is C or S
VPTKLSPISILYIDKGVVTYYKQYEGMAVSEXGXR

SEQ ID NO: 20385 - protein, 39 aa, Artificial Sequence
  Non-cyclic GFR-binding peptide
  MOD_RES (2), (3), (37), (39): Xaa is C or S
  MOD_RES (17), (18), (19), (20), (21): Xaa is A or G
  MOD_RES (22), (23), (24), (25): Xaa is A or G or is absent
PXXAPTKLEPISVLYLXXXXXXXXXKFKYENMVVRSXGX

SEQ ID NO: 20386 - protein, 38 aa, Artificial Sequence
  Non-cyclic GFR-binding peptide
  MOD_RES (2), (3), (36), (38): Xaa is C or S
  MOD_RES (17), (18), (19), (20), (21): Xaa is A or G
  MOD_RES (22), (23), (24), (25): Xaa is A or G or is absent
PXXVPQALEPISILYLXXXXXXXXXKFKYEMIVRSXKX

SEQ ID NO: 20387 - protein, 36 aa, Artificial Sequence
  Non-cyclic GFR-binding peptide
  MOD_RES (3), (4): Xaa is C or S
  MOD_RES (18), (19), (20), (21), (22): Xaa is A or G
  MOD_RES (23), (24), (25), (26): Xaa is A or G or is absent
KAXXVPTELEPISMLYLXXXXXXXXXKFKYEDMVVE

SEQ ID NO: 20388 - protein, 38 aa, Artificial Sequence
  Non-cyclic GFR-binding peptide
  MOD_RES (2), (3), (35), (37): Xaa is C or S
AXXVPTKLNAISILYFDKGVVTYLKKYRGMAVSEXGXR

SEQ ID NO: 20389 - protein, 37 aa, Artificial Sequence
  Non-cyclic GFR-binding peptide
  MOD_RES (2), (3), (34), (36): Xaa is C or S
PXXVPQALEPISILYLVGRKPKVKFKYEMIVRSXKXS

SEQ ID NO: 20390 - protein, 39 aa, Artificial Sequence
  Non-cyclic GFR-binding peptide
  MOD_RES (3), (4), (36), (38): Xaa is C or S
ASXXVPARLEPISILYLDAANNVVKFKYEDMVVEAXGXR

SEQ ID NO: 20391 - protein, 34 aa, Artificial Sequence
  Non-cyclic GFR-binding peptide
  MOD_RES (1), (2): Xaa is C or S
  MOD_RES (16), (17), (18), (19), (20): Xaa is A or G
  MOD_RES (21), (22), (23), (24): Xaa is A or G or is absent
XXVPQALEPISILYLXXXXXXXXXKFKYEMIVRS

SEQ ID NO: 20392 - protein, 35 aa, Artificial Sequence
  Non-cyclic GFR-binding peptide
  MOD_RES (34), (34): Xaa is C or S
  MOD_RES (14), (15), (16), (17), (18): Xaa is A or G
  MOD_RES (19), (20), (21), (22): Xaa is A or G or is absent
VPTKLSPISILYKXXXXXXXXXLKYHYGMAVSEXG

SEQ ID NO: 20393 - protein, 39 aa, Artificial Sequence
  Non-cyclic GFR-binding peptide
  MOD_RES (6), (7), (39): Xaa is C or S
AAPASXXVPARLEPISILYLDAANNVVKFKYEDMVVEAX

SEQ ID NO: 20394 - protein, 31 aa, Artificial Sequence
  Non-cyclic GFR-binding peptide
  MOD_RES (31), (31): Xaa is C or S
VPQDLSPISILYIVGRTPKVYKQYEMVVKSX

SEQ ID NO: 20395 - protein, 45 aa, Artificial Sequence
  Non-cyclic GFR-binding peptide
  MOD_RES (6), (7), (42), (44): Xaa is C or S
  MOD_RES (21), (22), (23), (24), (25): Xaa is A or G
  MOD_RES (26), (27), (28), (29): Xaa is A or G or is absent
KVGKAXXVPTKLEPISVLYLXXXXXXXXXKFKYEEGMSVAEXGXR

SEQ ID NO: 20396 - protein, 32 aa, Artificial Sequence
  Non-cyclic GFR-binding peptide
  MOD_RES (1), (2): Xaa is C or S
XXVPQDLSPISILYIVGRTPKVYKQYEMVVKS

SEQ ID NO: 20397 - protein, 35 aa, Artificial Sequence
  Non-cyclic GFR-binding peptide
  MOD_RES (1), (2): Xaa is C or S
  MOD_RES (16), (17), (18), (19), (20): Xaa is A or G
  MOD_RES (21), (22), (23), (24): Xaa is A or G or is absent
XXVPTELSPISMLYIXXXXXXXXXYKQYEEMVVEG

SEQ ID NO: 20398 - protein, 43 aa, Artificial Sequence
  Non-cyclic GFR-binding peptide
  MOD_RES (6), (7), (40), (42): Xaa is C or S
  MOD_RES (21), (22), (23), (24), (25): Xaa is A or G
  MOD_RES (26), (27), (28), (29): Xaa is A or G or is absent
ASASPXXVSQDLSPISILYIXXXXXXXXXYKQYEMIVKSXKXS

SEQ ID NO: 20399 - protein, 39 aa, Artificial Sequence
  Non-cyclic GFR-binding peptide
  MOD_RES (4), (36), (38): Xaa is C or S
KPTXAPTKLSPISVLYIDDSSNVIYKQYENMVVRSXGXH

SEQ ID NO: 20400 - protein, 33 aa, Artificial Sequence
  Non-cyclic GFR-binding peptide
  MOD_RES (2), (3): Xaa is C or S
SXXVPARLNAISILYFDAANNVVLKKYRDMVVE

SEQ ID NO: 20401 - protein, 38 aa, Artificial Sequence
  Non-cyclic GFR-binding peptide
  MOD_RES (3), (4): Xaa is C or S
  MOD_RES (18), (19), (20), (21), (22): Xaa is A or G
  MOD_RES (23), (24), (25), (26): Xaa is A or G or is absent
KAXXVPTKLSPISVLYIXXXXXXXXXYKQYEEGMSVAE

SEQ ID NO: 20402 - protein, 34 aa, Artificial Sequence
  Non-cyclic GFR-binding peptide
  MOD_RES (33), (33): Xaa is C or S
  MOD_RES (14), (15), (16), (17), (18): Xaa is A or G
  MOD_RES (19), (20), (21), (22): Xaa is A or G or is absent
VPQALSPISILYIXXXXXXXXXYKQYEMIVRSXK

SEQ ID NO: 20403 - protein, 39 aa, Artificial Sequence
  Non-cyclic GFR-binding peptide
  MOD_RES (6), (6): Xaa is C or S
  MOD_RES (20), (21), (22), (23), (24): Xaa is A or G
  MOD_RES (25), (26), (27), (28): Xaa is A or G or is absent
VTKPTXAPTKLEPISVLYLXXXXXXXXXKFKYENMVVRS

SEQ ID NO: 20404 - protein, 31 aa, Artificial Sequence
  Non-cyclic GFR-binding peptide
  MOD_RES (31), (31): Xaa is C or S
VSQDLSPISILYIIGKTPKIYKQYEMIVKSX

SEQ ID NO: 20405 - protein, 36 aa, Artificial Sequence
  Non-cyclic GFR-binding peptide
  MOD_RES (2), (3): Xaa is C or S
  MOD_RES (17), (18), (19), (20), (21): Xaa is A or G
  MOD_RES (22), (23), (24), (25): Xaa is A or G or is absent
AXXVPTKLSPISILYKXXXXXXXXXLKYHYGMAVSE

SEQ ID NO: 20406 - protein, 36 aa, Artificial Sequence
  Non-cyclic GFR-binding peptide
  MOD_RES (1), (2), (34), (36): Xaa is C or S
XXAPTKLEPISVLYLDDSSNVIKFKYENMVVRSXGX

SEQ ID NO: 20407 - protein, 41 aa, Artificial Sequence
  Non-cyclic GFR-binding peptide
  MOD_RES (6), (7), (40): Xaa is C or S
KVGKAXXVPTKLEPISVLYLDDMGVPTKFKYEEGMSVAEXG

SEQ ID NO: 20408 - protein, 38 aa, Artificial Sequence
  Non-cyclic GFR-binding peptide
  MOD_RES (3), (4), (38): Xaa is C or S
  MOD_RES (18), (19), (20), (21), (22): Xaa is A or G
  MOD_RES (23), (24), (25), (26): Xaa is A or G or is absent
KPXXAPTQLSPISVLYIXXXXXXXXXYKQYENMVVRAX

SEQ ID NO: 20409 - protein, 40 aa, Artificial Sequence
  Non-cyclic GFR-binding peptide
  MOD_RES (3), (4), (37), (39): Xaa is C or S
KAXXVPTKLEPISVLYLDDMGVPTKFKYEEGMSVAEXGXR

SEQ ID NO: 20410 - protein, 39 aa, Artificial Sequence
  Non-cyclic GFR-binding peptide
  MOD_RES (4), (5), (38): Xaa is C or S
GKAXXVPTKLSPISVLYIDDMGVPTYKQYEEGMSVAEXG

SEQ ID NO: 20411 - protein, 35 aa, Artificial Sequence
  Non-cyclic GFR-binding peptide
  MOD_RES (1), (34): Xaa is C or S
  MOD_RES (15), (16), (17), (18), (19): Xaa is A or G
  MOD_RES (20), (21), (22), (23): Xaa is A or G or is absent
XVSQDLEPISILYLXXXXXXXXXKFKYEMIVKSXK

SEQ ID NO: 20412 - protein, 35 aa, Artificial Sequence
  Non-cyclic GFR-binding peptide
  MOD_RES (1), (2), (35): Xaa is C or S
  MOD_RES (16), (17), (18), (19), (20): Xaa is A or G
  MOD_RES (21), (22), (23), (24): Xaa is A or G or is absent
XXVSQDLSPISILYIXXXXXXXXXYKQYEMIVKSX

SEQ ID NO: 20413 - protein, 37 aa, Artificial Sequence
  Non-cyclic GFR-binding peptide
  MOD_RES (6), (7): Xaa is C or S
AAPASXXVPARLEPISILYLDAANNVVKFKYEDMVVE

SEQ ID NO: 20414 - protein, 42 aa, Artificial Sequence
  Non-cyclic GFR-binding peptide
  MOD_RES (4), (5), (39), (41): Xaa is C or S
  MOD_RES (19), (20), (21), (22), (23): Xaa is A or G
  MOD_RES (24), (25), (26), (27): Xaa is A or G or is absent
PKAXXAPTKLEPISVLYLXXXXXXXXXKFKYENMVVKAXGXH

SEQ ID NO: 20415 - protein, 41 aa, Artificial Sequence
  Non-cyclic GFR-binding peptide
  MOD_RES (6), (7), (39), (41): Xaa is C or S
YVPKPXXAPTKLEPISVLYLDDSSNVIKFKYENMVVRSXGX

SEQ ID NO: 20416 - protein, 36 aa, Artificial Sequence
  Non-cyclic GFR-binding peptide
  MOD_RES (34), (36): Xaa is C or S
  MOD_RES (14), (15), (16), (17), (18): Xaa is A or G
  MOD_RES (19), (20), (21), (22): Xaa is A or G or is absent
APTKLEPISVLYLXXXXXXXXXKFKYENMVVRSXGX

SEQ ID NO: 20417 - protein, 38 aa, Artificial Sequence
  Non-cyclic GFR-binding peptide
  MOD_RES (2), (3), (35), (37): Xaa is C or S
AXXVPTELSPISMLYIDEYDKVVYKQYEEMVVEGXGXR

SEQ ID NO: 20418 - protein, 37 aa, Artificial Sequence
  Non-cyclic GFR-binding peptide
  MOD_RES (4), (5): Xaa is C or S
  MOD_RES (19), (20), (21), (22), (23): Xaa is A or G
  MOD_RES (24), (25), (26), (27): Xaa is A or G or is absent
ASPXXVPQDLSPISILYIXXXXXXXXXYKQYEMVVKS

SEQ ID NO: 20419 - protein, 40 aa, Artificial Sequence
  Non-cyclic GFR-binding peptide
  MOD_RES (5), (6), (40): Xaa is C or S
  MOD_RES (20), (21), (22), (23), (24): Xaa is A or G
  MOD_RES (25), (26), (27), (28): Xaa is A or G or is absent
APASXXVPARLSPISILYKXXXXXXXXXLKYHYDMVVEAX

SEQ ID NO: 20420 - protein, 38 aa, Artificial Sequence
  Non-cyclic GFR-binding peptide
  MOD_RES (3), (4), (36), (38): Xaa is C or S
KAXXVPTELSPISMLYIDENEKVVYKQYEDMVVEGXGX

SEQ ID NO: 20421 - protein, 39 aa, Artificial Sequence
  Non-cyclic GFR-binding peptide
  MOD_RES (7), (7): Xaa is C or S
  MOD_RES (21), (22), (23), (24), (25): Xaa is A or G
  MOD_RES (26), (27), (28), (29): Xaa is A or G or is absent
HVTKPTXAPTKLEPISVLYLXXXXXXXXXKFKYENMVVR

SEQ ID NO: 20422 - protein, 42 aa, Artificial Sequence
  Non-cyclic GFR-binding peptide
  MOD_RES (5), (6), (40), (42): Xaa is C or S
  MOD_RES (20), (21), (22), (23), (24): Xaa is A or G
  MOD_RES (25), (26), (27), (28): Xaa is A or G or is absent
VPKPXXAPTQLSPISVLYIXXXXXXXXXYKQYENMVVRAXGX

SEQ ID NO: 20423 - protein, 40 aa, Artificial Sequence
  Non-cyclic GFR-binding peptide
  MOD_RES (4), (5), (37), (39): Xaa is C or S
PASXXVPARLNAISILYFDAANNVVLKKYRDMVVEAXGXR

SEQ ID NO: 20424 - protein, 33 aa, Artificial Sequence
  Non-cyclic GFR-binding peptide
  MOD_RES (1), (2): Xaa is C or S
XXVPTKLSPISILYKDKGVVTYLKYHYGMAVSE

SEQ ID NO: 20425 - protein, 38 aa, Artificial Sequence
  Non-cyclic GFR-binding peptide
  MOD_RES (2), (3), (35), (37): Xaa is C or S
AXXVPTELEPISMLYLDEYDKVVKFKYEEMVVEGXGXR

SEQ ID NO: 20426 - protein, 37 aa, Artificial Sequence
  Non-cyclic GFR-binding peptide
  MOD_RES (1), (2), (34), (36): Xaa is C or S
XXAPTKLSPISVLYIDSSNNVIYKQYENMVVKAXGXH

SEQ ID NO: 20427 - protein, 38 aa, Artificial Sequence
  Non-cyclic GFR-binding peptide
  MOD_RES (1), (2), (35), (37): Xaa is C or S
XXVPTKLSPISVLYIDDMGVPTYKQYEEGMSVAEXGXR

SEQ ID NO: 20428 - protein, 36 aa, Artificial Sequence
  Non-cyclic GFR-binding peptide
  MOD_RES (4), (5): Xaa is C or S
PKPXXAPTKLSPISVLYIDDSSNVIYKQYENMVVRS

SEQ ID NO: 20429 - protein, 39 aa, Artificial Sequence
  Non-cyclic GFR-binding peptide
  MOD_RES (1), (2), (36), (38): Xaa is C or S
  MOD_RES (16), (17), (18), (19), (20): Xaa is A or G
  MOD_RES (21), (22), (23), (24): Xaa is A or G or is absent
XXVPARLNAISILYFXXXXXXXXXLKKYRDMVVEAXGXR

SEQ ID NO: 20430 - protein, 34 aa, Artificial Sequence
  Non-cyclic GFR-binding peptide
  MOD_RES (32), (34): Xaa is C or S
VPARLNAISILYFDAANNVVLKKYRDMVVEAXGX

SEQ ID NO: 20431 - protein, 34 aa, Artificial Sequence
  Non-cyclic GFR-binding peptide
  MOD_RES (3), (4): Xaa is C or S
KPXXAPTKLSPISVLYIDDSSNVIYKQYENMVVR

SEQ ID NO: 20432 - protein, 30 aa, Artificial Sequence
  Non-cyclic GFR-binding peptide
APTQLSPISVLYIDDSSNVIYKQYENMVVR

SEQ ID NO: 20433 - protein, 40 aa, Artificial Sequence
  Non-cyclic GFR-binding peptide
  MOD_RES (6), (7), (39): Xaa is C or S
TVPKPXXAPTQLEPISVLYLDDSSNVIKFKYENMVVRAXG

SEQ ID NO: 20434 - protein, 42 aa, Artificial Sequence
  Non-cyclic GFR-binding peptide
  MOD_RES (5), (6), (39), (41): Xaa is C or S
  MOD_RES (20), (21), (22), (23), (24): Xaa is A or G
  MOD_RES (25), (26), (27), (28): Xaa is A or G or is absent
SAAPXXVPQALSPISILYIXXXXXXXXXYKQYEMIVRSXKXS

SEQ ID NO: 20435 - protein, 34 aa, Artificial Sequence
  Non-cyclic GFR-binding peptide
  MOD_RES (3), (3): Xaa is C or S
PTXAPTKLEPISVLYLDDSSNVIKFKYENMVVRS

SEQ ID NO: 20436 - protein, 38 aa, Artificial Sequence
  Non-cyclic GFR-binding peptide
  MOD_RES (5), (37): Xaa is C or S
TKPTXAPTKLSPISVLYIDDSSNVIYKQYENMVVRSXG

SEQ ID NO: 20437 - protein, 38 aa, Artificial Sequence
  Non-cyclic GFR-binding peptide
  MOD_RES (3), (4), (37): Xaa is C or S
  MOD_RES (18), (19), (20), (21), (22): Xaa is A or G
  MOD_RES (23), (24), (25), (26): Xaa is A or G or is absent
SPXXVPQDLSPISILYIXXXXXXXXXYKQYEMVVKSXK

SEQ ID NO: 20438 - protein, 36 aa, Artificial Sequence
  Non-cyclic GFR-binding peptide
  MOD_RES (1), (35): Xaa is C or S
  MOD_RES (15), (16), (17), (18), (19): Xaa is A or G
  MOD_RES (20), (21), (22), (23): Xaa is A or G or is absent
XVPTELEPISMLYLXXXXXXXXXKFKYEEMVVEGXG

SEQ ID NO: 20439 - protein, 40 aa, Artificial Sequence
  Non-cyclic GFR-binding peptide
  MOD_RES (5), (6), (37), (39): Xaa is C or S
SASPXXVPQDLEPISILYLVGRTPKVKFKYEMVVKSXKXS

SEQ ID NO: 20440 - protein, 37 aa, Artificial Sequence
  Non-cyclic GFR-binding peptide
  MOD_RES (6), (7): Xaa is C or S
ASASPXXVSQDLSPISILYIIGKTPKIYKQYEMIVKS

SEQ ID NO: 20441 - protein, 37 aa, Artificial Sequence
  Non-cyclic GFR-binding peptide
  MOD_RES (3), (4), (36): Xaa is C or S
KAXXVPTELEPISMLYLDEYDKVVKFKYEEMVVEGXG

SEQ ID NO: 20442 - protein, 34 aa, Artificial Sequence
  Non-cyclic GFR-binding peptide
  MOD_RES (1), (34): Xaa is C or S
  MOD_RES (15), (16), (17), (18), (19): Xaa is A or G
  MOD_RES (20), (21), (22), (23): Xaa is A or G or is absent
XVPQALSPISILYIXXXXXXXXXYKQYEMIVRSX

SEQ ID NO: 20443 - protein, 39 aa, Artificial Sequence
  Non-cyclic GFR-binding peptide
  MOD_RES (1), (33), (34): Xaa is C or S
XSEVVMDPIKGYVVNNASDFYLINIPSLRTPVXXTPPTS

SEQ ID NO: 20444 - protein, 40 aa, Artificial Sequence
  Non-cyclic GFR-binding peptide
  MOD_RES (34), (35): Xaa is C or S
  MOD_RES (12), (13), (14), (15), (16): Xaa is A or G
  MOD_RES (17), (18), (19), (20): Xaa is A or G or is absent
ARVVMNPIKGYXXXXXXXXXFYLVNIPSLQTPAXXPKPVT

SEQ ID NO: 20445 - protein, 37 aa, Artificial Sequence
  Non-cyclic GFR-binding peptide
  MOD_RES (32), (33): Xaa is C or S
GEVVMDPIKGYVVKENEDFYLMNIPSLETPVXXAKPI

SEQ ID NO: 20446 - protein, 40 aa, Artificial Sequence
  Non-cyclic GFR-binding peptide
  MOD_RES (1), (3), (37), (38): Xaa is C or S
  MOD_RES (15), (16), (17), (18), (19): Xaa is A or G
  MOD_RES (20), (21), (22), (23): Xaa is A or G or is absent
XGXAEVVMDPIKGYXXXXXXXXXFYLINIPSLRAPVXXSA

SEQ ID NO: 20447 - protein, 32 aa, Artificial Sequence
  Non-cyclic GFR-binding peptide
  MOD_RES (2), (2): Xaa is C or S
GXEEVIMPIKGYLLVRGNDFYLMNIPSTKVPA

SEQ ID NO: 20448 - protein, 35 aa, Artificial Sequence
  Non-cyclic GFR-binding peptide
  MOD_RES (32), (33): Xaa is C or S
SEVVMDPIKGYVVNNASDFYLINIPSLRTPVXXTP

SEQ ID NO: 20449 - protein, 42 aa, Artificial Sequence
  Non-cyclic GFR-binding peptide
  MOD_RES (1), (3), (37), (38): Xaa is C or S
  MOD_RES (15), (16), (17), (18), (19): Xaa is A or G
  MOD_RES (20), (21), (22), (23): Xaa is A or G or is absent
XGXSEVVMDPIKGYXXXXXXXXXFYLINIPSLRTPVXXTPPT

SEQ ID NO: 20450 - protein, 39 aa, Artificial Sequence
  Non-cyclic GFR-binding peptide
  MOD_RES (2), (4), (36), (37): Xaa is C or S
RXGXESVAMGPIKGYYTVVGKDFYLINIPSLKTPVXXAK

SEQ ID NO: 20451 - protein, 41 aa, Artificial Sequence
  Non-cyclic GFR-binding peptide
  MOD_RES (1), (3), (37), (38): Xaa is C or S
  MOD_RES (15), (16), (17), (18), (19): Xaa is A or G
  MOD_RES (20), (21), (22), (23): Xaa is A or G or is absent
XGXSRVVMNPIKGYXXXXXXXXXFYLVNIPSLKTPAXXPKP

SEQ ID NO: 20452 - protein, 35 aa, Artificial Sequence
  Non-cyclic GFR-binding peptide
  MOD_RES (1), (33), (34): Xaa is C or S
XGEVVMDPIKGYVVKENEDFYLMNIPSLETPVXXA

SEQ ID NO: 20453 - protein, 35 aa, Artificial Sequence
  Non-cyclic GFR-binding peptide
  MOD_RES (34), (35): Xaa is C or S
  MOD_RES (12), (13), (14), (15), (16): Xaa is A or G
  MOD_RES (17), (18), (19), (20): Xaa is A or G or is absent
ESVAMGPIKGYXXXXXXXXXFYLINIPSLKTPVXX

SEQ ID NO: 20454 - protein, 40 aa, Artificial Sequence
  Non-cyclic GFR-binding peptide
  MOD_RES (1), (3), (35), (36): Xaa is C or S
XGXESVAMGPIKGYYTVVGKDFYLINIPSLKTPVXXAKSA

SEQ ID NO: 20455 - protein, 37 aa, Artificial Sequence
  Non-cyclic GFR-binding peptide
  MOD_RES (2), (34): Xaa is C or S
GXSRVVMNPIKGYIVNSSDDFYLVNIPSLKTPAXTPK

SEQ ID NO: 20456 - protein, 40 aa, Artificial Sequence
  Non-cyclic GFR-binding peptide
  MOD_RES (34), (34): Xaa is C or S
  MOD_RES (12), (13), (14), (15), (16): Xaa is A or G
  MOD_RES (17), (18), (19), (20): Xaa is A or G or is absent
SRVVMNPIKGYXXXXXXXXXFYLVNIPSLKTPAXTPKTVH

SEQ ID NO: 20457 - protein, 34 aa, Artificial Sequence
  Non-cyclic GFR-binding peptide
  MOD_RES (2), (34): Xaa is C or S
GXSRVVMNPIKGYIVNSSDDFYLVNIPSLKTPAX

SEQ ID NO: 20458 - protein, 41 aa, Artificial Sequence
  Non-cyclic GFR-binding peptide
  MOD_RES (1), (3), (37), (38): Xaa is C or S
  MOD_RES (15), (16), (17), (18), (19): Xaa is A or G
  MOD_RES (20), (21), (22), (23): Xaa is A or G or is absent
XGXESVAMGPIKGYXXXXXXXXXFYLINIPSLKTPVXXAKS

SEQ ID NO: 20459 - protein, 40 aa, Artificial Sequence
  Non-cyclic GFR-binding peptide
  MOD_RES (1), (35), (36): Xaa is C or S
  MOD_RES (13), (14), (15), (16), (17): Xaa is A or G
  MOD_RES (18), (19), (20), (21): Xaa is A or G or is absent
XESVAMGPIKGYXXXXXXXXXFYLINIPSLKTPVXXAKSA

SEQ ID NO: 20460 - protein, 35 aa, Artificial Sequence
  Non-cyclic GFR-binding peptide
  MOD_RES (32), (33): Xaa is C or S
GEVVMDPIKGYVVKENEDFYLMNIPSLETPVXXAK

SEQ ID NO: 20461 - protein, 36 aa, Artificial Sequence
  Non-cyclic GFR-binding peptide
  MOD_RES (31), (32): Xaa is C or S
EVVMDPIKGYVVNNASDFYLINIPSLRTPVXXTPPT

SEQ ID NO: 20462 - protein, 39 aa, Artificial Sequence
  Non-cyclic GFR-binding peptide
  MOD_RES (2), (4), (38), (39): Xaa is C or S
  MOD_RES (16), (17), (18), (19), (20): Xaa is A or G
  MOD_RES (21), (22), (23), (24): Xaa is A or G or is absent
RXGXAEVVMDPIKGYXXXXXXXXXFYLINIPSLRAPVXX

SEQ ID NO: 20463 - protein, 35 aa, Artificial Sequence
  Non-cyclic GFR-binding peptide
  MOD_RES (33), (34): Xaa is C or S
  MOD_RES (11), (12), (13), (14), (15): Xaa is A or G
  MOD_RES (16), (17), (18), (19): Xaa is A or G or is absent
EVVMDPIKGYXXXXXXXXXFYLMNIPSLETPVXXA

SEQ ID NO: 20464 - protein, 39 aa, Artificial Sequence
  Non-cyclic GFR-binding peptide
  MOD_RES (2), (4), (37), (38): Xaa is C or S
RXGXEAVSMGEPIKGYTPVGMDDFYLVNIPSLKTPVXXA

SEQ ID NO: 20465 - protein, 39 aa, Artificial Sequence
  Non-cyclic GFR-binding peptide
  MOD_RES (1), (3), (37): Xaa is C or S
  MOD_RES (15), (16), (17), (18), (19): Xaa is A or G
  MOD_RES (20), (21), (22), (23): Xaa is A or G or is absent
XGXSRVVMNPIKGYXXXXXXXXXFYLVNIPSLKTPAXTP

SEQ ID NO: 20466 - protein, 36 aa, Artificial Sequence
  Non-cyclic GFR-binding peptide
  MOD_RES (32), (33): Xaa is C or S
SEVVMDPIKGYVVNNASDFYLINIPSLRTPVXXTPP

SEQ ID NO: 20467 - protein, 37 aa, Artificial Sequence
  Non-cyclic GFR-binding peptide
  MOD_RES (33), (34): Xaa is C or S
  MOD_RES (11), (12), (13), (14), (15): Xaa is A or G
  MOD_RES (16), (17), (18), (19): Xaa is A or G or is absent
RVVMNPIKGYXXXXXXXXXFYLVNIPSLQTPAXXPKP

SEQ ID NO: 20468 - protein, 36 aa, Artificial Sequence
  Non-cyclic GFR-binding peptide
  MOD_RES (2), (34), (35): Xaa is C or S
GXAEVVMDPIKGYVVNNAADFYLINIPSLRAPVXXS

SEQ ID NO: 20469 - protein, 42 aa, Artificial Sequence
  Non-cyclic GFR-binding peptide
  MOD_RES (2), (4), (37), (38): Xaa is C or S
RXGXEAVSMGEPIKGYTPVGMDDFYLVNIPSLKTPVXXAKGV

SEQ ID NO: 20470 - protein, 33 aa, Artificial Sequence
  Non-cyclic GFR-binding peptide
  MOD_RES (32), (33): Xaa is C or S
ESVAMGPIKGYYTVVGKDFYLINIPSLKTPVXX

SEQ ID NO: 20471 - protein, 35 aa, Artificial Sequence
  Non-cyclic GFR-binding peptide
  MOD_RES (1), (3), (35): Xaa is C or S
XGXGEVVMEPIKGYVVKDYEDFYLMNIPSLETPVX

SEQ ID NO: 20472 - protein, 39 aa, Artificial Sequence
  Non-cyclic GFR-binding peptide
  MOD_RES (2), (4), (36), (37): Xaa is C or S
RXGXAEVVMDPIKGYVVNNAADFYLINIPSLRAPVXXSA

SEQ ID NO: 20473 - protein, 35 aa, Artificial Sequence
  Non-cyclic GFR-binding peptide
  MOD_RES (1), (34), (35): Xaa is C or S
XEAVSMGEPIKGYTPVGMDDFYLVNIPSLKTPVXX

SEQ ID NO: 20474 - protein, 38 aa, Artificial Sequence
  Non-cyclic GFR-binding peptide
  MOD_RES (2), (33), (34): Xaa is C or S
GXEEVIMPIKGYLLVRGNDFYLMNIPSTKVPAXXTSPV

SEQ ID NO: 20475 - protein, 43 aa, Artificial Sequence
  Non-cyclic GFR-binding peptide
  MOD_RES (2), (4), (38), (39): Xaa is C or S
  MOD_RES (16), (17), (18), (19), (20): Xaa is A or G
  MOD_RES (21), (22), (23), (24): Xaa is A or G or is absent
RXGXESVAMGPIKGYXXXXXXXXXFYLINIPSLKTPVXXAKSA

SEQ ID NO: 20476 - protein, 43 aa, Artificial Sequence
  Non-cyclic GFR-binding peptide
  MOD_RES (1), (3), (37), (38): Xaa is C or S
  MOD_RES (15), (16), (17), (18), (19): Xaa is A or G
  MOD_RES (20), (21), (22), (23): Xaa is A or G or is absent
XGXAKVVMNPIKGYXXXXXXXXXFYLVNIPSLKTPAXXAKPVA

SEQ ID NO: 20477 - protein, 36 aa, Artificial Sequence
  Non-cyclic GFR-binding peptide
  MOD_RES (1), (3): Xaa is C or S
  MOD_RES (15), (16), (17), (18), (19): Xaa is A or G
  MOD_RES (20), (21), (22), (23): Xaa is A or G or is absent
XGXESVAMGPIKGYXXXXXXXXXFYLINIPSLKTPV

SEQ ID NO: 20478 - protein, 40 aa, Artificial Sequence
  Non-cyclic GFR-binding peptide
  MOD_RES (1), (3), (37): Xaa is C or S
  MOD_RES (15), (16), (17), (18), (19): Xaa is A or G
  MOD_RES (20), (21), (22), (23): Xaa is A or G or is absent
XGXSRVVMNPIKGYXXXXXXXXXFYLVNIPSLKTPAXTPK

SEQ ID NO: 20479 - protein, 44 aa, Artificial Sequence
  Non-cyclic GFR-binding peptide
  MOD_RES (2), (4), (38), (39): Xaa is C or S
  MOD_RES (16), (17), (18), (19), (20): Xaa is A or G
  MOD_RES (21), (22), (23), (24): Xaa is A or G or is absent
HXGXAKVVMNPIKGYXXXXXXXXXFYLVNIPSLKTPAXXAKPVA

SEQ ID NO: 20480 - protein, 39 aa, Artificial Sequence
  Non-cyclic GFR-binding peptide
  MOD_RES (1), (33), (34): Xaa is C or S
XGEVVMDPIKGYVVKENEDFYLMNIPSLETPVXXAKPIK

SEQ ID NO: 20481 - protein, 43 aa, Artificial Sequence
  Non-cyclic GFR-binding peptide
  MOD_RES (1), (3), (37), (38): Xaa is C or S
  MOD_RES (15), (16), (17), (18), (19): Xaa is A or G
  MOD_RES (20), (21), (22), (23): Xaa is A or G or is absent
XGXESVAMGPIKGYXXXXXXXXXFYLINIPSLKTPVXXAKSAK

SEQ ID NO: 20482 - protein, 34 aa, Artificial Sequence
  Non-cyclic GFR-binding peptide
  MOD_RES (32), (33): Xaa is C or S
ARVVMNPIKGYIVNSSDDFYLVNIPSLQTPAXXP

SEQ ID NO: 20483 - protein, 37 aa, Artificial Sequence
  Non-cyclic GFR-binding peptide
  MOD_RES (2), (4), (36): Xaa is C or S
HXGXSRVVMNPIKGYIVNSSDDFYLVNIPSLKTPAXT

SEQ ID NO: 20484 - protein, 35 aa, Artificial Sequence
  Non-cyclic GFR-binding peptide
  MOD_RES (1), (1): Xaa is C or S
  MOD_RES (14), (15), (16), (17), (18): Xaa is A or G
  MOD_RES (19), (20), (21), (22): Xaa is A or G or is absent
XEAVSMGEPIKGYXXXXXXXXXFYLVNIPSLKTPV

SEQ ID NO: 20485 - protein, 39 aa, Artificial Sequence
  Non-cyclic GFR-binding peptide
  MOD_RES (2), (4), (36), (37): Xaa is C or S
HXGXAKVVMNPIKGYIVNNSSDFYLVNIPSLKTPAXXAK

SEQ ID NO: 20486 - protein, 37 aa, Artificial Sequence
  Non-cyclic GFR-binding peptide
  MOD_RES (2), (35), (36): Xaa is C or S
GXEAVSMGEPIKGYTPVGMDDFYLVNIPSLKTPVXXA

SEQ ID NO: 20487 - protein, 42 aa, Artificial Sequence
  Non-cyclic GFR-binding peptide
  MOD_RES (2), (4), (38), (39): Xaa is C or S
  MOD_RES (16), (17), (18), (19), (20): Xaa is A or G
  MOD_RES (21), (22), (23), (24): Xaa is A or G or is absent
HXGXAKVVMNPIKGYXXXXXXXXXFYLVNIPSLKTPAXXAKP

SEQ ID NO: 20488 - protein, 34 aa, Artificial Sequence
  Non-cyclic GFR-binding peptide
  MOD_RES (1), (3), (34): Xaa is C or S
XGXEEVIMPIKGYLLVRGNDFYLMNIPSTKVPAX

SEQ ID NO: 20489 - protein, 42 aa, Artificial Sequence
  Non-cyclic GFR-binding peptide
  MOD_RES (2), (4), (38), (39): Xaa is C or S
  MOD_RES (16), (17), (18), (19), (20): Xaa is A or G
  MOD_RES (21), (22), (23), (24): Xaa is A or G or is absent
RXGXSEVVMDPIKGYXXXXXXXXXFYLINIPSLRTPVXXTPP

SEQ ID NO: 20490 - protein, 36 aa, Artificial Sequence
  Non-cyclic GFR-binding peptide
  MOD_RES (2), (4), (36): Xaa is C or S
RXGXGEVVMDPIKGYVVKENEDFYLMNIPSLETPVX

SEQ ID NO: 20491 - protein, 37 aa, Artificial Sequence
  Non-cyclic GFR-binding peptide
  MOD_RES (31), (32): Xaa is C or S
SVAMGPIKGYYTVVGKDFYLINIPSLKTPVXXAKSAK

SEQ ID NO: 20492 - protein, 40 aa, Artificial Sequence
  Non-cyclic GFR-binding peptide
  MOD_RES (2), (34), (35): Xaa is C or S
GXARVVMNPIKGYIVNSSDDFYLVNIPSLQTPAXXPKPVT

SEQ ID NO: 20493 - protein, 40 aa, Artificial Sequence
  Non-cyclic GFR-binding peptide
  MOD_RES (2), (36), (37): Xaa is C or S
  MOD_RES (14), (15), (16), (17), (18): Xaa is A or G
  MOD_RES (19), (20), (21), (22): Xaa is A or G or is absent
GXSEVVMDPIKGYXXXXXXXXXFYLINIPSLRTPVXXTPP

SEQ ID NO: 20494 - protein, 35 aa, Artificial Sequence
  Non-cyclic GFR-binding peptide
  MOD_RES (34), (35): Xaa is C or S
  MOD_RES (12), (13), (14), (15), (16): Xaa is A or G
  MOD_RES (17), (18), (19), (20): Xaa is A or G or is absent
SRVVMNPIKGYXXXXXXXXXFYLVNIPSLKTPAXX

SEQ ID NO: 20495 - protein, 39 aa, Artificial Sequence
  Non-cyclic GFR-binding peptide
  MOD_RES (34), (35): Xaa is C or S
  MOD_RES (12), (13), (14), (15), (16): Xaa is A or G
  MOD_RES (17), (18), (19), (20): Xaa is A or G or is absent
GEVVMDPIKGYXXXXXXXXXFYLMNIPSLETPVXXAKPI

SEQ ID NO: 20496 - protein, 35 aa, Artificial Sequence
  Non-cyclic GFR-binding peptide
  MOD_RES (1), (3), (35): Xaa is C or S
XGXESVAMGPIKGYYTVVGKDFYLINIPSLKTPVX

SEQ ID NO: 20497 - protein, 35 aa, Artificial Sequence
  Non-cyclic GFR-binding peptide
  MOD_RES (2), (2): Xaa is C or S
  MOD_RES (14), (15), (16), (17), (18): Xaa is A or G
  MOD_RES (19), (20), (21), (22): Xaa is A or G or is absent
GXARVVMNPIKGYXXXXXXXXXFYLVNIPSLQTPA

SEQ ID NO: 20498 - protein, 36 aa, Artificial Sequence
  Non-cyclic GFR-binding peptide
  MOD_RES (31), (32): Xaa is C or S
EVVMEPIKGYVVKDYEDFYLMNIPSLETPVXXAKPI

SEQ ID NO: 20499 - protein, 38 aa, Artificial Sequence
  Non-cyclic GFR-binding peptide
  MOD_RES (1), (3), (35), (36): Xaa is C or S
XGXGEVVMEPIKGYVVKDYEDFYLMNIPSLETPVXXAK

SEQ ID NO: 20500 - protein, 42 aa, Artificial Sequence
  Non-cyclic GFR-binding peptide
  MOD_RES (2), (4), (38), (39): Xaa is C or S
  MOD_RES (16), (17), (18), (19), (20): Xaa is A or G
  MOD_RES (21), (22), (23), (24): Xaa is A or G or is absent
RXGXGEVVMDPIKGYXXXXXXXXXFYLMNIPSLETPVXXAKP

SEQ ID NO: 20501 - protein, 41 aa, Artificial Sequence
  Non-cyclic GFR-binding peptide
  MOD_RES (1), (3), (38), (39): Xaa is C or S
  MOD_RES (16), (17), (18), (19), (20): Xaa is A or G
  MOD_RES (21), (22), (23), (24): Xaa is A or G or is absent
XGXEAVSMGEPIKGYXXXXXXXXXFYLVNIPSLKTPVXXAK

SEQ ID NO: 20502 - protein, 39 aa, Artificial Sequence
  Non-cyclic GFR-binding peptide
  MOD_RES (2), (35), (36): Xaa is C or S
  MOD_RES (13), (14), (15), (16), (17): Xaa is A or G
  MOD_RES (18), (19), (20), (21): Xaa is A or G or is absent
GXEEVIMPIKGYXXXXXXXXXFYLMNIPSTKVPAXXTSP

SEQ ID NO: 20503 - protein, 39 aa, Artificial Sequence
  Non-cyclic GFR-binding peptide
  MOD_RES (2), (34): Xaa is C or S
GXSRVVMNPIKGYIVNSSDDFYLVNIPSLKTPAXTPKTV

SEQ ID NO: 20504 - protein, 42 aa, Artificial Sequence
  Non-cyclic GFR-binding peptide
  MOD_RES (2), (37), (38): Xaa is C or S
  MOD_RES (15), (16), (17), (18), (19): Xaa is A or G
  MOD_RES (20), (21), (22), (23): Xaa is A or G or is absent
GXEAVSMGEPIKGYXXXXXXXXXFYLVNIPSLKTPVXXAKGV

SEQ ID NO: 20505 - protein, 40 aa, Artificial Sequence
  Non-cyclic GFR-binding peptide
  MOD_RES (2), (34), (35): Xaa is C or S
GXSEVVMDPIKGYVVNNASDFYLINIPSLRTPVXXTPPTS

SEQ ID NO: 20506 - protein, 38 aa, Artificial Sequence
  Non-cyclic GFR-binding peptide
  MOD_RES (1), (35), (36): Xaa is C or S
  MOD_RES (13), (14), (15), (16), (17): Xaa is A or G
  MOD_RES (18), (19), (20), (21): Xaa is A or G or is absent
XSRVVMNPIKGYXXXXXXXXXFYLVNIPSLKTPAXXPK

SEQ ID NO: 20507 - protein, 34 aa, Artificial Sequence
  Non-cyclic GFR-binding peptide
  MOD_RES (13), (14), (15), (16), (17): Xaa is A or G
  MOD_RES (18), (19), (20), (21): Xaa is A or G or is absent
EAVSMGEPIKGYXXXXXXXXXFYLVNIPSLKTPV

SEQ ID NO: 20508 - protein, 32 aa, Artificial Sequence
  Non-cyclic GFR-binding peptide
  MOD_RES (32), (32): Xaa is C or S
GEVVMDPIKGYVVKENEDFYLMNIPSLETPVX

SEQ ID NO: 20509 - protein, 37 aa, Artificial Sequence
  Non-cyclic GFR-binding peptide
  MOD_RES (2), (34), (35): Xaa is C or S
GXGEVVMEPIKGYVVKDYEDFYLMNIPSLETPVXXAK

SEQ ID NO: 20510 - protein, 41 aa, Artificial Sequence
  Non-cyclic GFR-binding peptide
  MOD_RES (1), (3), (37), (38): Xaa is C or S
  MOD_RES (15), (16), (17), (18), (19): Xaa is A or G
  MOD_RES (20), (21), (22), (23): Xaa is A or G or is absent
XGXAKVVMNPIKGYXXXXXXXXXFYLVNIPSLKTPAXXAKP

SEQ ID NO: 20511 - protein, 40 aa, Artificial Sequence
  Non-cyclic GFR-binding peptide
  MOD_RES (1), (3), (35), (36): Xaa is C or S
XGXSRVVMNPIKGYIVNSSDDFYLVNIPSLKTPAXXPKPV

SEQ ID NO: 20512 - protein, 36 aa, Artificial Sequence
  Non-cyclic GFR-binding peptide
  MOD_RES (1), (3): Xaa is C or S
  MOD_RES (15), (16), (17), (18), (19): Xaa is A or G
  MOD_RES (20), (21), (22), (23): Xaa is A or G or is absent
XGXAKVVMNPIKGYXXXXXXXXXFYLVNIPSLKTPA

SEQ ID NO: 20513 - protein, 34 aa, Artificial Sequence
  Non-cyclic GFR-binding peptide
  MOD_RES (2), (34): Xaa is C or S
GXSEVVMDPIKGYVVNNASDFYLINIPSLRTPVX

SEQ ID NO: 20514 - protein, 37 aa, Artificial Sequence
  Non-cyclic GFR-binding peptide
  MOD_RES (32), (33): Xaa is C or S
AEVVMDPIKGYVVNNAADFYLINIPSLRAPVXXSAPA

SEQ ID NO: 20515 - protein, 35 aa, Artificial Sequence
  Non-cyclic GFR-binding peptide
  MOD_RES (2), (4): Xaa is C or S
RXGXGEVVMDPIKGYVVKENEDFYLMNIPSLETPV

SEQ ID NO: 20516 - protein, 41 aa, Artificial Sequence
  Non-cyclic GFR-binding peptide
  MOD_RES (2), (4), (36), (37): Xaa is C or S
RXGXGEVVMEPIKGYVVKDYEDFYLMNIPSLETPVXXAKPI

SEQ ID NO: 20517 - protein, 34 aa, Artificial Sequence
  Non-cyclic GFR-binding peptide
  MOD_RES (31), (32): Xaa is C or S
EVVMDPIKGYVVKENEDFYLMNIPSLETPVXXAK

SEQ ID NO: 20518 - protein, 41 aa, Artificial Sequence
  Non-cyclic GFR-binding peptide
  MOD_RES (1), (3), (35): Xaa is C or S
XGXSRVVMNPIKGYIVNSSDDFYLVNIPSLKTPAXTPKTVH

SEQ ID NO: 20519 - protein, 35 aa, Artificial Sequence
  Non-cyclic GFR-binding peptide
  MOD_RES (31), (32): Xaa is C or S
RVVMNPIKGYIVNSSDDFYLVNIPSLKTPAXXPKP

SEQ ID NO: 20520 - protein, 41 aa, Artificial Sequence
  Non-cyclic GFR-binding peptide
  MOD_RES (1), (3), (35), (36): Xaa is C or S
XGXSRVVMNPIKGYIVNSSDDFYLVNIPSLKTPAXXPKPVH

SEQ ID NO: 20521 - protein, 38 aa, Artificial Sequence
  Non-cyclic GFR-binding peptide
  MOD_RES (2), (36), (37): Xaa is C or S
  MOD_RES (14), (15), (16), (17), (18): Xaa is A or G
  MOD_RES (19), (20), (21), (22): Xaa is A or G or is absent
GXGEVVMEPIKGYXXXXXXXXXFYLMNIPSLETPVXXA

SEQ ID NO: 20522 - protein, 38 aa, Artificial Sequence
  Non-cyclic GFR-binding peptide
  MOD_RES (1), (3), (37), (38): Xaa is C or S
  MOD_RES (15), (16), (17), (18), (19): Xaa is A or G
  MOD_RES (20), (21), (22), (23): Xaa is A or G or is absent
XGXARVVMNPIKGYXXXXXXXXXFYLVNIPSLQTPAXX

SEQ ID NO: 20523 - protein, 38 aa, Artificial Sequence
  Non-cyclic GFR-binding peptide
  MOD_RES (1), (33), (34): Xaa is C or S
XGEVVMEPIKGYVVKDYEDFYLMNIPSLETPVXXAKPI

SEQ ID NO: 20524 - protein, 37 aa, Artificial Sequence
  Non-cyclic GFR-binding peptide
  MOD_RES (1), (34), (35): Xaa is C or S
  MOD_RES (12), (13), (14), (15), (16): Xaa is A or G
  MOD_RES (17), (18), (19), (20): Xaa is A or G or is absent
XEEVIMPIKGYXXXXXXXXXFYLMNIPSTKVPAXXTS

SEQ ID NO: 20525 - protein, 35 aa, Artificial Sequence
  Non-cyclic GFR-binding peptide
  MOD_RES (31), (32): Xaa is C or S
EVVMEPIKGYVVKDYEDFYLMNIPSLETPVXXAKP

SEQ ID NO: 20526 - protein, 41 aa, Artificial Sequence
  Non-cyclic GFR-binding peptide
  MOD_RES (2), (4), (38): Xaa is C or S
  MOD_RES (16), (17), (18), (19), (20): Xaa is A or G
  MOD_RES (21), (22), (23), (24): Xaa is A or G or is absent
HXGXSRVVMNPIKGYXXXXXXXXXFYLVNIPSLKTPAXTPK

SEQ ID NO: 20527 - protein, 39 aa, Artificial Sequence
  Non-cyclic GFR-binding peptide
  MOD_RES (33), (34): Xaa is C or S
EAVSMGEPIKGYTPVGMDDFYLVNIPSLKTPVXXAKGVK

SEQ ID NO: 20528 - protein, 31 aa, Artificial Sequence
  Non-cyclic GFR-binding peptide
AEVVMDPIKGYVVNNAADFYLINIPSLRAPV

SEQ ID NO: 20529 - protein, 32 aa, Artificial Sequence
  Non-cyclic GFR-binding peptide
  MOD_RES (11), (12), (13), (14), (15): Xaa is A or G
  MOD_RES (16), (17), (18), (19): Xaa is A or G or is absent
KVVMNPIKGYXXXXXXXXXFYLVNIPSLKTPA

SEQ ID NO: 20530 - protein, 43 aa, Artificial Sequence
  Non-cyclic GFR-binding peptide
  MOD_RES (2), (4), (38), (39): Xaa is C or S
  MOD_RES (16), (17), (18), (19), (20): Xaa is A or G
  MOD_RES (21), (22), (23), (24): Xaa is A or G or is absent
RXGXGEVVMDPIKGYXXXXXXXXXFYLMNIPSLETPVXXAKPI

SEQ ID NO: 20531 - protein, 42 aa, Artificial Sequence
  Non-cyclic GFR-binding peptide
  MOD_RES (2), (36), (37): Xaa is C or S
  MOD_RES (14), (15), (16), (17), (18): Xaa is A or G
  MOD_RES (19), (20), (21), (22): Xaa is A or G or is absent
GXGEVVMDPIKGYXXXXXXXXXFYLMNIPSLETPVXXAKPIK

SEQ ID NO: 20532 - protein, 32 aa, Artificial Sequence
  Non-cyclic GFR-binding peptide
  MOD_RES (11), (12), (13), (14), (15): Xaa is A or G
  MOD_RES (16), (17), (18), (19): Xaa is A or G or is absent
EEVIMPIKGYXXXXXXXXXFYLMNIPSTKVPA

SEQ ID NO: 20533 - protein, 38 aa, Artificial Sequence
  Non-cyclic GFR-binding peptide
  MOD_RES (1), (3), (35), (36): Xaa is C or S
XGXGEVVMDPIKGYVVKENEDFYLMNIPSLETPVXXAK

SEQ ID NO: 20534 - protein, 33 aa, Artificial Sequence
  Non-cyclic GFR-binding peptide
  MOD_RES (33), (33): Xaa is C or S
  MOD_RES (11), (12), (13), (14), (15): Xaa is A or G
  MOD_RES (16), (17), (18), (19): Xaa is A or G or is absent
EVVMDPIKGYXXXXXXXXXFYLINIPSLRAPVX

SEQ ID NO: 20535 - protein, 34 aa, Artificial Sequence
  Non-cyclic GFR-binding peptide
  MOD_RES (2), (34): Xaa is C or S
GXGEVVMDPIKGYVVKENEDFYLMNIPSLETPVX

SEQ ID NO: 20536 - protein, 35 aa, Artificial Sequence
  Non-cyclic GFR-binding peptide
  MOD_RES (2), (34), (35): Xaa is C or S
GXARVVMNPIKGYIVNSSDDFYLVNIPSLQTPAXX

SEQ ID NO: 20537 - protein, 31 aa, Artificial Sequence
  Non-cyclic GFR-binding peptide
GEVVMEPIKGYVVKDYEDFYLMNIPSLETPV

SEQ ID NO: 20538 - protein, 40 aa, Artificial Sequence
  Non-cyclic GFR-binding peptide
  MOD_RES (2), (4), (36), (37): Xaa is C or S
RXGXGEVVMDPIKGYVVKENEDFYLMNIPSLETPVXXAKP

SEQ ID NO: 20539 - protein, 38 aa, Artificial Sequence
  Non-cyclic GFR-binding peptide
  MOD_RES (2), (4), (36), (37): Xaa is C or S
RXGXESVAMGPIKGYYTVVGKDFYLINIPSLKTPVXXA

SEQ ID NO: 20540 - protein, 37 aa, Artificial Sequence
  Non-cyclic GFR-binding peptide
  MOD_RES (2), (4): Xaa is C or S
  MOD_RES (16), (17), (18), (19), (20): Xaa is A or G
  MOD_RES (21), (22), (23), (24): Xaa is A or G or is absent
RXGXESVAMGPIKGYXXXXXXXXXFYLINIPSLKTPV

SEQ ID NO: 20541 - protein, 40 aa, Artificial Sequence
  Non-cyclic GFR-binding peptide
  MOD_RES (2), (34), (35): Xaa is C or S
GXAKVVMNPIKGYIVNNSSDFYLVNIPSLKTPAXXAKPVA

SEQ ID NO: 20542 - protein, 36 aa, Artificial Sequence
  Non-cyclic GFR-binding peptide
  MOD_RES (2), (34), (35): Xaa is C or S
GXAKVVMNPIKGYIVNNSSDFYLVNIPSLKTPAXXA

SEQ ID NO: 20543 - protein, 34 aa, Artificial Sequence
  Non-cyclic GFR-binding peptide
  MOD_RES (1), (3): Xaa is C or S
XGXSEVVMDPIKGYVVNNASDFYLINIPSLRTPV

SEQ ID NO: 20544 - protein, 37 aa, Artificial Sequence
  Non-cyclic GFR-binding peptide
  MOD_RES (31), (32): Xaa is C or S
RVVMNPIKGYIVNSSDDFYLVNIPSLKTPAXXPKPVY

SEQ ID NO: 20545 - protein, 39 aa, Artificial Sequence
  Non-cyclic GFR-binding peptide
  MOD_RES (2), (34), (35): Xaa is C or S
GXGEVVMEPIKGYVVKDYEDFYLMNIPSLETPVXXAKPI

SEQ ID NO: 20546 - protein, 32 aa, Artificial Sequence
  Non-cyclic GFR-binding peptide
  MOD_RES (32), (32): Xaa is C or S
SRVVMNPIKGYIVNSSDDFYLVNIPSLKTPAX

SEQ ID NO: 20547 - protein, 35 aa, Artificial Sequence
  Non-cyclic GFR-binding peptide
  MOD_RES (1), (3), (35): Xaa is C or S
XGXAKVVMNPIKGYIVNNSSDFYLVNIPSLKTPAX

SEQ ID NO: 20548 - protein, 36 aa, Artificial Sequence
  Non-cyclic GFR-binding peptide
  MOD_RES (32), (33): Xaa is C or S
GEVVMDPIKGYVVKENEDFYLMNIPSLETPVXXAKP

SEQ ID NO: 20549 - protein, 40 aa, Artificial Sequence
  Non-cyclic GFR-binding peptide
  MOD_RES (2), (36), (37): Xaa is C or S
  MOD_RES (14), (15), (16), (17), (18): Xaa is A or G
  MOD_RES (19), (20), (21), (22): Xaa is A or G or is absent
GXAEVVMDPIKGYXXXXXXXXXFYLINIPSLRAPVXXSAP

SEQ ID NO: 20550 - protein, 35 aa, Artificial Sequence
  Non-cyclic GFR-binding peptide
  MOD_RES (1), (32), (33): Xaa is C or S
XEEVIMPIKGYLLVRGNDFYLMNIPSTKVPAXXTS

SEQ ID NO: 20551 - protein, 36 aa, Artificial Sequence
  Non-cyclic GFR-binding peptide
  MOD_RES (31), (31): Xaa is C or S
RVVMNPIKGYIVNSSDDFYLVNIPSLKTPAXTPKTV

SEQ ID NO: 20552 - protein, 39 aa, Artificial Sequence
  Non-cyclic GFR-binding peptide
  MOD_RES (1), (33), (34): Xaa is C or S
XSRVVMNPIKGYIVNSSDDFYLVNIPSLKTPAXXPKPVH

SEQ ID NO: 20553 - protein, 40 aa, Artificial Sequence
  Non-cyclic GFR-binding peptide
  MOD_RES (1), (3), (34), (35): Xaa is C or S
XGXEEVIMPIKGYLLVRGNDFYLMNIPSTKVPAXXTSPVR

SEQ ID NO: 20554 - protein, 38 aa, Artificial Sequence
  Non-cyclic GFR-binding peptide
  MOD_RES (2), (34), (35): Xaa is C or S
GXSRVVMNPIKGYIVNSSDDFYLVNIPSLKTPAXXPKP

SEQ ID NO: 20555 - protein, 36 aa, Artificial Sequence
  Non-cyclic GFR-binding peptide
  MOD_RES (1), (33), (34): Xaa is C or S
XARVVMNPIKGYIVNSSDDFYLVNIPSLQTPAXXPK

SEQ ID NO: 20556 - protein, 36 aa, Artificial Sequence
  Non-cyclic GFR-binding peptide
  MOD_RES (34), (35): Xaa is C or S
  MOD_RES (12), (13), (14), (15), (16): Xaa is A or G
  MOD_RES (17), (18), (19), (20): Xaa is A or G or is absent
SRVVMNPIKGYXXXXXXXXXFYLVNIPSLKTPAXXP

SEQ ID NO: 20557 - protein, 36 aa, Artificial Sequence
  Non-cyclic GFR-binding peptide
  MOD_RES (2), (33), (34): Xaa is C or S
GXEEVIMPIKGYLLVRGNDFYLMNIPSTKVPAXXTS

SEQ ID NO: 20558 - protein, 40 aa, Artificial Sequence
  Non-cyclic GFR-binding peptide
  MOD_RES (34), (35): Xaa is C or S
  MOD_RES (12), (13), (14), (15), (16): Xaa is A or G
  MOD_RES (17), (18), (19), (20): Xaa is A or G or is absent
AKVVMNPIKGYXXXXXXXXXFYLVNIPSLKTPAXXAKPVA

SEQ ID NO: 20559 - protein, 32 aa, Artificial Sequence
  Non-cyclic GFR-binding peptide
  MOD_RES (31), (32): Xaa is C or S
EVVMDPIKGYVVKENEDFYLMNIPSLETPVXX

SEQ ID NO: 20560 - protein, 35 aa, Artificial Sequence
  Non-cyclic GFR-binding peptide
  MOD_RES (1), (35): Xaa is C or S
  MOD_RES (13), (14), (15), (16), (17): Xaa is A or G
  MOD_RES (18), (19), (20), (21): Xaa is A or G or is absent
XARVVMNPIKGYXXXXXXXXXFYLVNIPSLQTPAX

SEQ ID NO: 20561 - protein, 44 aa, Artificial Sequence
  Non-cyclic GFR-binding peptide
  MOD_RES (2), (4), (38), (39): Xaa is C or S
  MOD_RES (16), (17), (18), (19), (20): Xaa is A or G
  MOD_RES (21), (22), (23), (24): Xaa is A or G or is absent
HXGXSRVVMNPIKGYXXXXXXXXXFYLVNIPSLKTPAXXPKPVY

SEQ ID NO: 20562 - protein, 39 aa, Artificial Sequence
  Non-cyclic GFR-binding peptide
  MOD_RES (33), (34): Xaa is C or S
  MOD_RES (11), (12), (13), (14), (15): Xaa is A or G
  MOD_RES (16), (17), (18), (19): Xaa is A or G or is absent
EEVIMPIKGYXXXXXXXXXFYLMNIPSTKVPAXXTSPVR

SEQ ID NO: 20563 - protein, 34 aa, Artificial Sequence
  Non-cyclic GFR-binding peptide
  MOD_RES (1), (1): Xaa is C or S
  MOD_RES (13), (14), (15), (16), (17): Xaa is A or G
  MOD_RES (18), (19), (20), (21): Xaa is A or G or is absent
XGEVVMEPIKGYXXXXXXXXXFYLMNIPSLETPV

SEQ ID NO: 20564 - protein, 38 aa, Artificial Sequence
  Non-cyclic GFR-binding peptide
  MOD_RES (34), (35): Xaa is C or S
  MOD_RES (12), (13), (14), (15), (16): Xaa is A or G
  MOD_RES (17), (18), (19), (20): Xaa is A or G or is absent
SEVVMDPIKGYXXXXXXXXXFYLINIPSLRTPVXXTPP

SEQ ID NO: 20565 - protein, 36 aa, Artificial Sequence
  Non-cyclic GFR-binding peptide
  MOD_RES (2), (4): Xaa is C or S
  MOD_RES (15), (16), (17), (18), (19): Xaa is A or G
  MOD_RES (20), (21), (22), (23): Xaa is A or G or is absent
LXGXEEVIMPIKGYXXXXXXXXXFYLMNIPSTKVPA

SEQ ID NO: 20566 - protein, 33 aa, Artificial Sequence
  Non-cyclic GFR-binding peptide
  MOD_RES (32), (33): Xaa is C or S
SRVVMNPIKGYIVNSSDDFYLVNIPSLKTPAXX

SEQ ID NO: 20567 - protein, 35 aa, Artificial Sequence
  Non-cyclic GFR-binding peptide
  MOD_RES (1), (3), (35): Xaa is C or S
XGXAEVVMDPIKGYVVNNAADFYLINIPSLRAPVX

SEQ ID NO: 20568 - protein, 37 aa, Artificial Sequence
  Non-cyclic GFR-binding peptide
  MOD_RES (2), (34), (35): Xaa is C or S
GXARVVMNPIKGYIVNSSDDFYLVNIPSLQTPAXXPK

SEQ ID NO: 20569 - protein, 37 aa, Artificial Sequence
  Non-cyclic GFR-binding peptide
  MOD_RES (1), (36), (37): Xaa is C or S
  MOD_RES (14), (15), (16), (17), (18): Xaa is A or G
  MOD_RES (19), (20), (21), (22): Xaa is A or G or is absent
XEAVSMGEPIKGYXXXXXXXXXFYLVNIPSLKTPVXX

SEQ ID NO: 20570 - protein, 33 aa, Artificial Sequence
  Non-cyclic GFR-binding peptide
  MOD_RES (33), (33): Xaa is C or S
  MOD_RES (11), (12), (13), (14), (15): Xaa is A or G
  MOD_RES (16), (17), (18), (19): Xaa is A or G or is absent
EVVMDPIKGYXXXXXXXXXFYLINIPSLRTPVX

SEQ ID NO: 20571 - protein, 39 aa, Artificial Sequence
  Non-cyclic GFR-binding peptide
  MOD_RES (1), (3), (34), (35): Xaa is C or S
XGXEEVIMPIKGYLLVRGNDFYLMNIPSTKVPAXXTSPV

SEQ ID NO: 20572 - protein, 34 aa, Artificial Sequence
  Non-cyclic GFR-binding peptide
  MOD_RES (31), (32): Xaa is C or S
KVVMNPIKGYIVNNSSDFYLVNIPSLKTPAXXAK

SEQ ID NO: 20573 - protein, 37 aa, Artificial Sequence
  Non-cyclic GFR-binding peptide
  MOD_RES (1), (3), (37): Xaa is C or S
  MOD_RES (15), (16), (17), (18), (19): Xaa is A or G
  MOD_RES (20), (21), (22), (23): Xaa is A or G or is absent
XGXAEVVMDPIKGYXXXXXXXXXFYLINIPSLRAPVX

SEQ ID NO: 20574 - protein, 42 aa, Artificial Sequence
  Non-cyclic GFR-binding peptide
  MOD_RES (2), (4), (36), (37): Xaa is C or S
HXGXSRVVMNPIKGYIVNSSDDFYLVNIPSLKTPAXXPKPVY

SEQ ID NO: 20575 - protein, 35 aa, Artificial Sequence
  Non-cyclic GFR-binding peptide
  MOD_RES (35), (35): Xaa is C or S
  MOD_RES (13), (14), (15), (16), (17): Xaa is A or G
  MOD_RES (18), (19), (20), (21): Xaa is A or G or is absent
EAVSMGEPIKGYXXXXXXXXXFYLVNIPSLKTPVX

SEQ ID NO: 20576 - protein, 36 aa, Artificial Sequence
  Non-cyclic GFR-binding peptide
  MOD_RES (2), (34), (35): Xaa is C or S
GXSEVVMDPIKGYVVNNASDFYLINIPSLRTPVXXT

SEQ ID NO: 20577 - protein, 38 aa, Artificial Sequence
  Non-cyclic GFR-binding peptide
  MOD_RES (32), (33): Xaa is C or S
GEVVMEPIKGYVVKDYEDFYLMNIPSLETPVXXAKPIS

SEQ ID NO: 20578 - protein, 38 aa, Artificial Sequence
  Non-cyclic GFR-binding peptide
  MOD_RES (1), (3), (37), (38): Xaa is C or S
  MOD_RES (15), (16), (17), (18), (19): Xaa is A or G
  MOD_RES (20), (21), (22), (23): Xaa is A or G or is absent
XGXGEVVMEPIKGYXXXXXXXXXFYLMNIPSLETPVXX

SEQ ID NO: 20579 - protein, 36 aa, Artificial Sequence
  Non-cyclic GFR-binding peptide
  MOD_RES (1), (35), (36): Xaa is C or S
  MOD_RES (13), (14), (15), (16), (17): Xaa is A or G
  MOD_RES (18), (19), (20), (21): Xaa is A or G or is absent
XARVVMNPIKGYXXXXXXXXXFYLVNIPSLQTPAXX

SEQ ID NO: 20580 - protein, 36 aa, Artificial Sequence
  Non-cyclic GFR-binding peptide
  MOD_RES (31), (32): Xaa is C or S
KVVMNPIKGYIVNNSSDFYLVNIPSLKTPAXXAKPV

SEQ ID NO: 20581 - protein, 43 aa, Artificial Sequence
  Non-cyclic GFR-binding peptide
  MOD_RES (1), (3), (37), (38): Xaa is C or S
  MOD_RES (15), (16), (17), (18), (19): Xaa is A or G
  MOD_RES (20), (21), (22), (23): Xaa is A or G or is absent
XGXARVVMNPIKGYXXXXXXXXXFYLVNIPSLQTPAXXPKPVT

SEQ ID NO: 20582 - protein, 37 aa, Artificial Sequence
  Non-cyclic GFR-binding peptide
  MOD_RES (33), (34): Xaa is C or S
  MOD_RES (11), (12), (13), (14), (15): Xaa is A or G
  MOD_RES (16), (17), (18), (19): Xaa is A or G or is absent
KVVMNPIKGYXXXXXXXXXFYLVNIPSLKTPAXXAKP

SEQ ID NO: 20583 - protein, 35 aa, Artificial Sequence
  Non-cyclic GFR-binding peptide
  MOD_RES (34), (35): Xaa is C or S
  MOD_RES (12), (13), (14), (15), (16): Xaa is A or G
  MOD_RES (17), (18), (19), (20): Xaa is A or G or is absent
AKVVMNPIKGYXXXXXXXXXFYLVNIPSLKTPAXX

SEQ ID NO: 20584 - protein, 31 aa, Artificial Sequence
  Non-cyclic GFR-binding peptide
AKVVMNPIKGYIVNNSSDFYLVNIPSLKTPA

SEQ ID NO: 20585 - protein, 41 aa, Artificial Sequence
  Non-cyclic GFR-binding peptide
  MOD_RES (2), (4), (38), (39): Xaa is C or S
  MOD_RES (16), (17), (18), (19), (20): Xaa is A or G
  MOD_RES (21), (22), (23), (24): Xaa is A or G or is absent
RXGXGEVVMEPIKGYXXXXXXXXXFYLMNIPSLETPVXXAK

SEQ ID NO: 20586 - protein, 40 aa, Artificial Sequence
  Non-cyclic GFR-binding peptide
  MOD_RES (1), (3), (35), (36): Xaa is C or S
XGXARVVMNPIKGYIVNSSDDFYLVNIPSLQTPAXXPKPV

SEQ ID NO: 20587 - protein, 37 aa, Artificial Sequence
  Non-cyclic GFR-binding peptide
  MOD_RES (1), (33), (34): Xaa is C or S
XSRVVMNPIKGYIVNSSDDFYLVNIPSLKTPAXXPKP

SEQ ID NO: 20588 - protein, 37 aa, Artificial Sequence
  Non-cyclic GFR-binding peptide
  MOD_RES (31), (32): Xaa is C or S
EVVMDPIKGYVVNNAADFYLINIPSLRAPVXXSAPAA

SEQ ID NO: 20589 - protein, 34 aa, Artificial Sequence
  Non-cyclic GFR-binding peptide
  MOD_RES (1), (32), (33): Xaa is C or S
XEEVIMPIKGYLLVRGNDFYLMNIPSTKVPAXXT

SEQ ID NO: 20590 - protein, 36 aa, Artificial Sequence
  Non-cyclic GFR-binding peptide
  MOD_RES (34), (35): Xaa is C or S
  MOD_RES (12), (13), (14), (15), (16): Xaa is A or G
  MOD_RES (17), (18), (19), (20): Xaa is A or G or is absent
SEVVMDPIKGYXXXXXXXXXFYLINIPSLRTPVXXT

SEQ ID NO: 20591 - protein, 31 aa, Artificial Sequence
  Non-cyclic GFR-binding peptide
  MOD_RES (31), (31): Xaa is C or S
RVVMNPIKGYIVNSSDDFYLVNIPSLKTPAX

SEQ ID NO: 20592 - protein, 41 aa, Artificial Sequence
  Non-cyclic GFR-binding peptide
  MOD_RES (2), (35), (36): Xaa is C or S
GXEAVSMGEPIKGYTPVGMDDFYLVNIPSLKTPVXXAKGVK

SEQ ID NO: 20593 - protein, 37 aa, Artificial Sequence
  Non-cyclic GFR-binding peptide
  MOD_RES (35), (36): Xaa is C or S
  MOD_RES (13), (14), (15), (16), (17): Xaa is A or G
  MOD_RES (18), (19), (20), (21): Xaa is A or G or is absent
EAVSMGEPIKGYXXXXXXXXXFYLVNIPSLKTPVXXA

SEQ ID NO: 20594 - protein, 37 aa, Artificial Sequence
  Non-cyclic GFR-binding peptide
  MOD_RES (2), (36), (37): Xaa is C or S
  MOD_RES (14), (15), (16), (17), (18): Xaa is A or G
  MOD_RES (19), (20), (21), (22): Xaa is A or G or is absent
GXSRVVMNPIKGYXXXXXXXXXFYLVNIPSLKTPAXX

SEQ ID NO: 20595 - protein, 32 aa, Artificial Sequence
  Non-cyclic GFR-binding peptide
  MOD_RES (31), (32): Xaa is C or S
EVVMDPIKGYVVNNASDFYLINIPSLRTPVXX

SEQ ID NO: 20596 - protein, 34 aa, Artificial Sequence
  Non-cyclic GFR-binding peptide
  MOD_RES (33), (34): Xaa is C or S
  MOD_RES (11), (12), (13), (14), (15): Xaa is A or G
  MOD_RES (16), (17), (18), (19): Xaa is A or G or is absent
EVVMDPIKGYXXXXXXXXXFYLINIPSLRAPVXX

SEQ ID NO: 20597 - protein, 38 aa, Artificial Sequence
  Non-cyclic GFR-binding peptide
  MOD_RES (1), (3), (36), (37): Xaa is C or S
XGXEAVSMGEPIKGYTPVGMDDFYLVNIPSLKTPVXXA

SEQ ID NO: 20598 - protein, 36 aa, Artificial Sequence
  Non-cyclic GFR-binding peptide
  MOD_RES (2), (34), (35): Xaa is C or S
GXSRVVMNPIKGYIVNSSDDFYLVNIPSLKTPAXXP

SEQ ID NO: 20599 - protein, 34 aa, Artificial Sequence
  Non-cyclic GFR-binding peptide
  MOD_RES (31), (32): Xaa is C or S
SVAMGPIKGYYTVVGKDFYLINIPSLKTPVXXAK

SEQ ID NO: 20600 - protein, 43 aa, Artificial Sequence
  Non-cyclic GFR-binding peptide
  MOD_RES (2), (4), (38), (39): Xaa is C or S
  MOD_RES (16), (17), (18), (19), (20): Xaa is A or G
  MOD_RES (21), (22), (23), (24): Xaa is A or G or is absent
RXGXSEVVMDPIKGYXXXXXXXXXFYLINIPSLRTPVXXTPPT

SEQ ID NO: 20601 - protein, 32 aa, Artificial Sequence
  Non-cyclic GFR-binding peptide
  MOD_RES (31), (32): Xaa is C or S
EVVMDPIKGYVVNNAADFYLINIPSLRAPVXX

SEQ ID NO: 20602 - protein, 36 aa, Artificial Sequence
  Non-cyclic GFR-binding peptide
  MOD_RES (1), (3), (35), (36): Xaa is C or S
XGXSEVVMDPIKGYVVNNASDFYLINIPSLRTPVXX

SEQ ID NO: 20603 - protein, 37 aa, Artificial Sequence
  Non-cyclic GFR-binding peptide
  MOD_RES (34), (34): Xaa is C or S
  MOD_RES (12), (13), (14), (15), (16): Xaa is A or G
  MOD_RES (17), (18), (19), (20): Xaa is A or G or is absent
SRVVMNPIKGYXXXXXXXXXFYLVNIPSLKTPAXTPK

SEQ ID NO: 20604 - protein, 38 aa, Artificial Sequence
  Non-cyclic GFR-binding peptide
  MOD_RES (1), (33), (34): Xaa is C or S
XESVAMGPIKGYYTVVGKDFYLINIPSLKTPVXXAKSA

SEQ ID NO: 20605 - protein, 38 aa, Artificial Sequence
  Non-cyclic GFR-binding peptide
  MOD_RES (1), (35), (36): Xaa is C or S
  MOD_RES (13), (14), (15), (16), (17): Xaa is A or G
  MOD_RES (18), (19), (20), (21): Xaa is A or G or is absent
XGEVVMDPIKGYXXXXXXXXXFYLMNIPSLETPVXXAK

SEQ ID NO: 20606 - protein, 37 aa, Artificial Sequence
  Non-cyclic GFR-binding peptide
  MOD_RES (1), (3), (35), (36): Xaa is C or S
XGXARVVMNPIKGYIVNSSDDFYLVNIPSLQTPAXXP

SEQ ID NO: 20607 - protein, 38 aa, Artificial Sequence
  Non-cyclic GFR-binding peptide
  MOD_RES (33), (34): Xaa is C or S
  MOD_RES (11), (12), (13), (14), (15): Xaa is A or G
  MOD_RES (16), (17), (18), (19): Xaa is A or G or is absent
RVVMNPIKGYXXXXXXXXXFYLVNIPSLQTPAXXPKPV

SEQ ID NO: 20608 - protein, 35 aa, Artificial Sequence
  Non-cyclic GFR-binding peptide
  MOD_RES (34), (35): Xaa is C or S
  MOD_RES (12), (13), (14), (15), (16): Xaa is A or G
  MOD_RES (17), (18), (19), (20): Xaa is A or G or is absent
GEVVMDPIKGYXXXXXXXXXFYLMNIPSLETPVXX

SEQ ID NO: 20609 - protein, 33 aa, Artificial Sequence
  Non-cyclic GFR-binding peptide
  MOD_RES (12), (13), (14), (15), (16): Xaa is A or G
  MOD_RES (17), (18), (19), (20): Xaa is A or G or is absent
AEVVMDPIKGYXXXXXXXXXFYLINIPSLRAPV

SEQ ID NO: 20610 - protein, 34 aa, Artificial Sequence
  Non-cyclic GFR-binding peptide
  MOD_RES (31), (32): Xaa is C or S
EVVMDPIKGYVVNNASDFYLINIPSLRTPVXXTP

SEQ ID NO: 20611 - protein, 36 aa, Artificial Sequence
  Non-cyclic GFR-binding peptide
  MOD_RES (33), (34): Xaa is C or S
  MOD_RES (11), (12), (13), (14), (15): Xaa is A or G
  MOD_RES (16), (17), (18), (19): Xaa is A or G or is absent
EVVMDPIKGYXXXXXXXXXFYLINIPSLRAPVXXSA

SEQ ID NO: 20612 - protein, 40 aa, Artificial Sequence
  Non-cyclic GFR-binding peptide
  MOD_RES (2), (4), (36): Xaa is C or S
HXGXSRVVMNPIKGYIVNSSDDFYLVNIPSLKTPAXTPKT

SEQ ID NO: 20613 - protein, 39 aa, Artificial Sequence
  Non-cyclic GFR-binding peptide
  MOD_RES (1), (3), (35), (36): Xaa is C or S
XGXAKVVMNPIKGYIVNNSSDFYLVNIPSLKTPAXXAKP

SEQ ID NO: 20614 - protein, 42 aa, Artificial Sequence
  Non-cyclic GFR-binding peptide
  MOD_RES (1), (3), (38), (39): Xaa is C or S
  MOD_RES (16), (17), (18), (19), (20): Xaa is A or G
  MOD_RES (21), (22), (23), (24): Xaa is A or G or is absent
XGXEAVSMGEPIKGYXXXXXXXXXFYLVNIPSLKTPVXXAKG

SEQ ID NO: 20615 - protein, 39 aa, Artificial Sequence
  Non-cyclic GFR-binding peptide
  MOD_RES (34), (35): Xaa is C or S
  MOD_RES (12), (13), (14), (15), (16): Xaa is A or G
  MOD_RES (17), (18), (19), (20): Xaa is A or G or is absent
GEVVMEPIKGYXXXXXXXXXFYLMNIPSLETPVXXAKPI

SEQ ID NO: 20616 - protein, 34 aa, Artificial Sequence
  Non-cyclic GFR-binding peptide
  MOD_RES (33), (34): Xaa is C or S
  MOD_RES (11), (12), (13), (14), (15): Xaa is A or G
  MOD_RES (16), (17), (18), (19): Xaa is A or G or is absent
EVVMDPIKGYXXXXXXXXXFYLINIPSLRTPVXX

SEQ ID NO: 20617 - protein, 37 aa, Artificial Sequence
  Non-cyclic GFR-binding peptide
  MOD_RES (34), (35): Xaa is C or S
  MOD_RES (12), (13), (14), (15), (16): Xaa is A or G
  MOD_RES (17), (18), (19), (20): Xaa is A or G or is absent
GEVVMEPIKGYXXXXXXXXXFYLMNIPSLETPVXXAK

SEQ ID NO: 20618 - protein, 34 aa, Artificial Sequence
  Non-cyclic GFR-binding peptide
  MOD_RES (32), (33): Xaa is C or S
GEVVMEPIKGYVVKDYEDFYLMNIPSLETPVXXA

SEQ ID NO: 20619 - protein, 38 aa, Artificial Sequence
  Non-cyclic GFR-binding peptide
  MOD_RES (2), (4), (36), (37): Xaa is C or S
RXGXSEVVMDPIKGYVVNNASDFYLINIPSLRTPVXXT

SEQ ID NO: 20620 - protein, 33 aa, Artificial Sequence
  Non-cyclic GFR-binding peptide
  MOD_RES (31), (32): Xaa is C or S
RVVMNPIKGYIVNSSDDFYLVNIPSLKTPAXXP

SEQ ID NO: 20621 - protein, 38 aa, Artificial Sequence
  Non-cyclic GFR-binding peptide
  MOD_RES (2), (4), (38): Xaa is C or S
  MOD_RES (16), (17), (18), (19), (20): Xaa is A or G
  MOD_RES (21), (22), (23), (24): Xaa is A or G or is absent
RXGXESVAMGPIKGYXXXXXXXXXFYLINIPSLKTPVX

SEQ ID NO: 20622 - protein, 33 aa, Artificial Sequence
  Non-cyclic GFR-binding peptide
  MOD_RES (2), (2): Xaa is C or S
GXAKVVMNPIKGYIVNNSSDFYLVNIPSLKTPA

SEQ ID NO: 20623 - protein, 37 aa, Artificial Sequence
  Non-cyclic GFR-binding peptide
  MOD_RES (1), (35), (36): Xaa is C or S
  MOD_RES (13), (14), (15), (16), (17): Xaa is A or G
  MOD_RES (18), (19), (20), (21): Xaa is A or G or is absent
XSRVVMNPIKGYXXXXXXXXXFYLVNIPSLKTPAXXP

SEQ ID NO: 20624 - protein, 39 aa, Artificial Sequence
  Non-cyclic GFR-binding peptide
  MOD_RES (2), (4), (38), (39): Xaa is C or S
  MOD_RES (16), (17), (18), (19), (20): Xaa is A or G
  MOD_RES (21), (22), (23), (24): Xaa is A or G or is absent
RXGXGEVVMEPIKGYXXXXXXXXXFYLMNIPSLETPVXX

SEQ ID NO: 20625 - protein, 41 aa, Artificial Sequence
  Non-cyclic GFR-binding peptide
  MOD_RES (2), (4), (38), (39): Xaa is C or S
  MOD_RES (16), (17), (18), (19), (20): Xaa is A or G
  MOD_RES (21), (22), (23), (24): Xaa is A or G or is absent
RXGXAEVVMDPIKGYXXXXXXXXXFYLINIPSLRAPVXXSA

SEQ ID NO: 20626 - protein, 40 aa, Artificial Sequence
  Non-cyclic GFR-binding peptide
  MOD_RES (1), (3), (38), (39): Xaa is C or S
  MOD_RES (16), (17), (18), (19), (20): Xaa is A or G
  MOD_RES (21), (22), (23), (24): Xaa is A or G or is absent
XGXEAVSMGEPIKGYXXXXXXXXXFYLVNIPSLKTPVXXA

SEQ ID NO: 20627 - protein, 39 aa, Artificial Sequence
  Non-cyclic GFR-binding peptide
  MOD_RES (1), (3), (35), (36): Xaa is C or S
XGXGEVVMDPIKGYVVKENEDFYLMNIPSLETPVXXAKP

SEQ ID NO: 20628 - protein, 33 aa, Artificial Sequence
  Non-cyclic GFR-binding peptide
  MOD_RES (2), (2): Xaa is C or S
GXAEVVMDPIKGYVVNNAADFYLINIPSLRAPV

SEQ ID NO: 20629 - protein, 35 aa, Artificial Sequence
  Non-cyclic GFR-binding peptide
  MOD_RES (2), (2): Xaa is C or S
  MOD_RES (14), (15), (16), (17), (18): Xaa is A or G
  MOD_RES (19), (20), (21), (22): Xaa is A or G or is absent
GXESVAMGPIKGYXXXXXXXXXFYLINIPSLKTPV

SEQ ID NO: 20630 - protein, 33 aa, Artificial Sequence
  Non-cyclic GFR-binding peptide
  MOD_RES (2), (2): Xaa is C or S
GXSRVVMNPIKGYIVNSSDDFYLVNIPSLKTPA

SEQ ID NO: 20631 - protein, 39 aa, Artificial Sequence
  Non-cyclic GFR-binding peptide
  MOD_RES (1), (3), (37), (38): Xaa is C or S
  MOD_RES (15), (16), (17), (18), (19): Xaa is A or G
  MOD_RES (20), (21), (22), (23): Xaa is A or G or is absent
XGXSEVVMDPIKGYXXXXXXXXXFYLINIPSLRTPVXXT

SEQ ID NO: 20632 - protein, 37 aa, Artificial Sequence
  Non-cyclic GFR-binding peptide
  MOD_RES (1), (35), (36): Xaa is C or S
  MOD_RES (13), (14), (15), (16), (17): Xaa is A or G
  MOD_RES (18), (19), (20), (21): Xaa is A or G or is absent
XGEVVMDPIKGYXXXXXXXXXFYLMNIPSLETPVXXA

SEQ ID NO: 20633 - protein, 33 aa, Artificial Sequence
  Non-cyclic GFR-binding peptide
  MOD_RES (1), (33): Xaa is C or S
XESVAMGPIKGYYTVVGKDFYLINIPSLKTPVX

SEQ ID NO: 20634 - protein, 36 aa, Artificial Sequence
  Non-cyclic GFR-binding peptide
  MOD_RES (1), (35), (36): Xaa is C or S
  MOD_RES (13), (14), (15), (16), (17): Xaa is A or G
  MOD_RES (18), (19), (20), (21): Xaa is A or G or is absent
XGEVVMDPIKGYXXXXXXXXXFYLMNIPSLETPVXX

SEQ ID NO: 20635 - protein, 35 aa, Artificial Sequence
  Non-cyclic GFR-binding peptide
  MOD_RES (33), (34): Xaa is C or S
EAVSMGEPIKGYTPVGMDDFYLVNIPSLKTPVXXA

SEQ ID NO: 20636 - protein, 42 aa, Artificial Sequence
  Non-cyclic GFR-binding peptide
  MOD_RES (1), (36), (37): Xaa is C or S
  MOD_RES (14), (15), (16), (17), (18): Xaa is A or G
  MOD_RES (19), (20), (21), (22): Xaa is A or G or is absent
XEAVSMGEPIKGYXXXXXXXXXFYLVNIPSLKTPVXXAKGVK

SEQ ID NO: 20637 - protein, 39 aa, Artificial Sequence
  Non-cyclic GFR-binding peptide
  MOD_RES (1), (3), (35), (36): Xaa is C or S
XGXSEVVMDPIKGYVVNNASDFYLINIPSLRTPVXXTPP

SEQ ID NO: 20638 - protein, 38 aa, Artificial Sequence
  Non-cyclic GFR-binding peptide
  MOD_RES (33), (34): Xaa is C or S
  MOD_RES (11), (12), (13), (14), (15): Xaa is A or G
  MOD_RES (16), (17), (18), (19): Xaa is A or G or is absent
EVVMDPIKGYXXXXXXXXXFYLINIPSLRAPVXXSAPA

SEQ ID NO: 20639 - protein, 37 aa, Artificial Sequence
  Non-cyclic GFR-binding peptide
  MOD_RES (2), (36), (37): Xaa is C or S
  MOD_RES (14), (15), (16), (17), (18): Xaa is A or G
  MOD_RES (19), (20), (21), (22): Xaa is A or G or is absent
GXGEVVMDPIKGYXXXXXXXXXFYLMNIPSLETPVXX

SEQ ID NO: 20640 - protein, 38 aa, Artificial Sequence
  Non-cyclic GFR-binding peptide
  MOD_RES (34), (35): Xaa is C or S
  MOD_RES (12), (13), (14), (15), (16): Xaa is A or G
  MOD_RES (17), (18), (19), (20): Xaa is A or G or is absent
SRVVMNPIKGYXXXXXXXXXFYLVNIPSLKTPAXXPKP

SEQ ID NO: 20641 - protein, 33 aa, Artificial Sequence
  Non-cyclic GFR-binding peptide
  MOD_RES (2), (2): Xaa is C or S
GXSEVVMDPIKGYVVNNASDFYLINIPSLRTPV

SEQ ID NO: 20642 - protein, 35 aa, Artificial Sequence
  Non-cyclic GFR-binding peptide
  MOD_RES (32), (33): Xaa is C or S
AEVVMDPIKGYVVNNAADFYLINIPSLRAPVXXSA

SEQ ID NO: 20643 - protein, 35 aa, Artificial Sequence
  Non-cyclic GFR-binding peptide
  MOD_RES (1), (3), (34), (35): Xaa is C or S
XGXEEVIMPIKGYLLVRGNDFYLMNIPSTKVPAXX

SEQ ID NO: 20644 - protein, 42 aa, Artificial Sequence
  Non-cyclic GFR-binding peptide
  MOD_RES (2), (4), (36), (37): Xaa is C or S
RXGXESVAMGPIKGYYTVVGKDFYLINIPSLKTPVXXAKSAK

SEQ ID NO: 20645 - protein, 35 aa, Artificial Sequence
  Non-cyclic GFR-binding peptide
  MOD_RES (33), (34): Xaa is C or S
  MOD_RES (11), (12), (13), (14), (15): Xaa is A or G
  MOD_RES (16), (17), (18), (19): Xaa is A or G or is absent
EEVIMPIKGYXXXXXXXXXFYLMNIPSTKVPAXXT

SEQ ID NO: 20646 - protein, 39 aa, Artificial Sequence
  Non-cyclic GFR-binding peptide
  MOD_RES (1), (3), (37), (38): Xaa is C or S
  MOD_RES (15), (16), (17), (18), (19): Xaa is A or G
  MOD_RES (20), (21), (22), (23): Xaa is A or G or is absent
XGXAKVVMNPIKGYXXXXXXXXXFYLVNIPSLKTPAXXA

SEQ ID NO: 20647 - protein, 33 aa, Artificial Sequence
  Non-cyclic GFR-binding peptide
  MOD_RES (32), (33): Xaa is C or S
GEVVMDPIKGYVVKENEDFYLMNIPSLETPVXX

SEQ ID NO: 20648 - protein, 38 aa, Artificial Sequence
  Non-cyclic GFR-binding peptide
  MOD_RES (34), (35): Xaa is C or S
  MOD_RES (12), (13), (14), (15), (16): Xaa is A or G
  MOD_RES (17), (18), (19), (20): Xaa is A or G or is absent
GEVVMDPIKGYXXXXXXXXXFYLMNIPSLETPVXXAKP

SEQ ID NO: 20649 - protein, 35 aa, Artificial Sequence
  Non-cyclic GFR-binding peptide
  MOD_RES (1), (3), (35): Xaa is C or S
XGXGEVVMDPIKGYVVKENEDFYLMNIPSLETPVX

SEQ ID NO: 20650 - protein, 40 aa, Artificial Sequence
  Non-cyclic GFR-binding peptide
  MOD_RES (2), (4), (36), (37): Xaa is C or S
HXGXARVVMNPIKGYIVNSSDDFYLVNIPSLQTPAXXPKP

SEQ ID NO: 20651 - protein, 41 aa, Artificial Sequence
  Non-cyclic GFR-binding peptide
  MOD_RES (1), (3), (35), (36): Xaa is C or S
XGXESVAMGPIKGYYTVVGKDFYLINIPSLKTPVXXAKSAK

SEQ ID NO: 20652 - protein, 32 aa, Artificial Sequence
  Non-cyclic GFR-binding peptide
  MOD_RES (31), (32): Xaa is C or S
RVVMNPIKGYIVNSSDDFYLVNIPSLKTPAXX

SEQ ID NO: 20653 - protein, 43 aa, Artificial Sequence
  Non-cyclic GFR-binding peptide
  MOD_RES (1), (3), (37), (38): Xaa is C or S
  MOD_RES (15), (16), (17), (18), (19): Xaa is A or G
  MOD_RES (20), (21), (22), (23): Xaa is A or G or is absent
XGXSEVVMDPIKGYXXXXXXXXXFYLINIPSLRTPVXXTPPTS

SEQ ID NO: 20654 - protein, 38 aa, Artificial Sequence
  Non-cyclic GFR-binding peptide
  MOD_RES (1), (3), (35), (36): Xaa is C or S
XGXESVAMGPIKGYYTVVGKDFYLINIPSLKTPVXXAK

SEQ ID NO: 20655 - protein, 38 aa, Artificial Sequence
  Non-cyclic GFR-binding peptide
  MOD_RES (32), (33): Xaa is C or S
AEVVMDPIKGYVVNNAADFYLINIPSLRAPVXXSAPAA

SEQ ID NO: 20656 - protein, 44 aa, Artificial Sequence
  Non-cyclic GFR-binding peptide
  MOD_RES (2), (4), (38), (39): Xaa is C or S
  MOD_RES (16), (17), (18), (19), (20): Xaa is A or G
  MOD_RES (21), (22), (23), (24): Xaa is A or G or is absent
RXGXSEVVMDPIKGYXXXXXXXXXFYLINIPSLRTPVXXTPPTS

SEQ ID NO: 20657 - protein, 41 aa, Artificial Sequence
  Non-cyclic GFR-binding peptide
  MOD_RES (2), (4), (36), (37): Xaa is C or S
RXGXSEVVMDPIKGYVVNNASDFYLINIPSLRTPVXXTPPT

SEQ ID NO: 20658 - protein, 36 aa, Artificial Sequence
  Non-cyclic GFR-binding peptide
  MOD_RES (2), (4): Xaa is C or S
RXGXEAVSMGEPIKGYTPVGMDDFYLVNIPSLKTPV

SEQ ID NO: 20659 - protein, 41 aa, Artificial Sequence
  Non-cyclic GFR-binding peptide
  MOD_RES (1), (3), (35), (36): Xaa is C or S
XGXARVVMNPIKGYIVNSSDDFYLVNIPSLQTPAXXPKPVT

SEQ ID NO: 20660 - protein, 33 aa, Artificial Sequence
  Non-cyclic GFR-binding peptide
  MOD_RES (33), (33): Xaa is C or S
  MOD_RES (11), (12), (13), (14), (15): Xaa is A or G
  MOD_RES (16), (17), (18), (19): Xaa is A or G or is absent
RVVMNPIKGYXXXXXXXXXFYLVNIPSLQTPAX

SEQ ID NO: 20661 - protein, 35 aa, Artificial Sequence
  Non-cyclic GFR-binding peptide
  MOD_RES (2), (33), (34): Xaa is C or S
GXEEVIMPIKGYLLVRGNDFYLMNIPSTKVPAXXT

SEQ ID NO: 20662 - protein, 34 aa, Artificial Sequence
  Non-cyclic GFR-binding peptide
  MOD_RES (1), (33), (34): Xaa is C or S
XSEVVMDPIKGYVVNNASDFYLINIPSLRTPVXX

SEQ ID NO: 20663 - protein, 35 aa, Artificial Sequence
  Non-cyclic GFR-binding peptide
  MOD_RES (32), (33): Xaa is C or S
ESVAMGPIKGYYTVVGKDFYLINIPSLKTPVXXAK

SEQ ID NO: 20664 - protein, 43 aa, Artificial Sequence
  Non-cyclic GFR-binding peptide
  MOD_RES (2), (37), (38): Xaa is C or S
  MOD_RES (15), (16), (17), (18), (19): Xaa is A or G
  MOD_RES (20), (21), (22), (23): Xaa is A or G or is absent
GXEAVSMGEPIKGYXXXXXXXXXFYLVNIPSLKTPVXXAKGVK

SEQ ID NO: 20665 - protein, 43 aa, Artificial Sequence
  Non-cyclic GFR-binding peptide
  MOD_RES (2), (4), (38), (39): Xaa is C or S
  MOD_RES (16), (17), (18), (19), (20): Xaa is A or G
  MOD_RES (21), (22), (23), (24): Xaa is A or G or is absent
HXGXARVVMNPIKGYXXXXXXXXXFYLVNIPSLQTPAXXPKPV

SEQ ID NO: 20666 - protein, 40 aa, Artificial Sequence
  Non-cyclic GFR-binding peptide
  MOD_RES (1), (3), (35), (36): Xaa is C or S
XGXSEVVMDPIKGYVVNNASDFYLINIPSLRTPVXXTPPT

SEQ ID NO: 20667 - protein, 33 aa, Artificial Sequence
  Non-cyclic GFR-binding peptide
  MOD_RES (33), (33): Xaa is C or S
EAVSMGEPIKGYTPVGMDDFYLVNIPSLKTPVX

SEQ ID NO: 20668 - protein, 38 aa, Artificial Sequence
  Non-cyclic GFR-binding peptide
  MOD_RES (33), (33): Xaa is C or S
  MOD_RES (11), (12), (13), (14), (15): Xaa is A or G
  MOD_RES (16), (17), (18), (19): Xaa is A or G or is absent
RVVMNPIKGYXXXXXXXXXFYLVNIPSLKTPAXTPKTV

SEQ ID NO: 20669 - protein, 44 aa, Artificial Sequence
  Non-cyclic GFR-binding peptide
  MOD_RES (1), (3), (38), (39): Xaa is C or S
  MOD_RES (16), (17), (18), (19), (20): Xaa is A or G
  MOD_RES (21), (22), (23), (24): Xaa is A or G or is absent
XGXEAVSMGEPIKGYXXXXXXXXXFYLVNIPSLKTPVXXAKGVK

SEQ ID NO: 20670 - protein, 38 aa, Artificial Sequence
  Non-cyclic GFR-binding peptide
  MOD_RES (2), (34), (35): Xaa is C or S
GXESVAMGPIKGYYTVVGKDFYLINIPSLKTPVXXAKS

SEQ ID NO: 20671 - protein, 39 aa, Artificial Sequence
  Non-cyclic GFR-binding peptide
  MOD_RES (35), (36): Xaa is C or S
  MOD_RES (13), (14), (15), (16), (17): Xaa is A or G
  MOD_RES (18), (19), (20), (21): Xaa is A or G or is absent
EAVSMGEPIKGYXXXXXXXXXFYLVNIPSLKTPVXXAKG

SEQ ID NO: 20672 - protein, 41 aa, Artificial Sequence
  Non-cyclic GFR-binding peptide
  MOD_RES (1), (35), (36): Xaa is C or S
  MOD_RES (13), (14), (15), (16), (17): Xaa is A or G
  MOD_RES (18), (19), (20), (21): Xaa is A or G or is absent
XSRVVMNPIKGYXXXXXXXXXFYLVNIPSLKTPAXXPKPVY

SEQ ID NO: 20673 - protein, 41 aa, Artificial Sequence
  Non-cyclic GFR-binding peptide
  MOD_RES (1), (35), (36): Xaa is C or S
  MOD_RES (13), (14), (15), (16), (17): Xaa is A or G
  MOD_RES (18), (19), (20), (21): Xaa is A or G or is absent
XAEVVMDPIKGYXXXXXXXXXFYLINIPSLRAPVXXSAPAA

SEQ ID NO: 20674 - protein, 33 aa, Artificial Sequence
  Non-cyclic GFR-binding peptide
  MOD_RES (1), (33): Xaa is C or S
XARVVMNPIKGYIVNSSDDFYLVNIPSLQTPAX

SEQ ID NO: 20675 - protein, 34 aa, Artificial Sequence
  Non-cyclic GFR-binding peptide
  MOD_RES (1), (1): Xaa is C or S
  MOD_RES (13), (14), (15), (16), (17): Xaa is A or G
  MOD_RES (18), (19), (20), (21): Xaa is A or G or is absent
XAKVVMNPIKGYXXXXXXXXXFYLVNIPSLKTPA

SEQ ID NO: 20676 - protein, 33 aa, Artificial Sequence
  Non-cyclic GFR-binding peptide
  MOD_RES (1), (1): Xaa is C or S
  MOD_RES (12), (13), (14), (15), (16): Xaa is A or G
  MOD_RES (17), (18), (19), (20): Xaa is A or G or is absent
XEEVIMPIKGYXXXXXXXXXFYLMNIPSTKVPA

SEQ ID NO: 20677 - protein, 35 aa, Artificial Sequence
  Non-cyclic GFR-binding peptide
  MOD_RES (2), (4): Xaa is C or S
RXGXSEVVMDPIKGYVVNNASDFYLINIPSLRTPV

SEQ ID NO: 20678 - protein, 39 aa, Artificial Sequence
  Non-cyclic GFR-binding peptide
  MOD_RES (1), (3), (36), (37): Xaa is C or S
XGXEAVSMGEPIKGYTPVGMDDFYLVNIPSLKTPVXXAK

SEQ ID NO: 20679 - protein, 34 aa, Artificial Sequence
  Non-cyclic GFR-binding peptide
  MOD_RES (32), (33): Xaa is C or S
AKVVMNPIKGYIVNNSSDFYLVNIPSLKTPAXXA

SEQ ID NO: 20680 - protein, 32 aa, Artificial Sequence
  Non-cyclic GFR-binding peptide
  MOD_RES (32), (32): Xaa is C or S
ARVVMNPIKGYIVNSSDDFYLVNIPSLQTPAX

SEQ ID NO: 20681 - protein, 39 aa, Artificial Sequence
  Non-cyclic GFR-binding peptide
  MOD_RES (1), (3), (35), (36): Xaa is C or S
XGXGEVVMEPIKGYVVKDYEDFYLMNIPSLETPVXXAKP

SEQ ID NO: 20682 - protein, 38 aa, Artificial Sequence
  Non-cyclic GFR-binding peptide
  MOD_RES (33), (34): Xaa is C or S
  MOD_RES (11), (12), (13), (14), (15): Xaa is A or G
  MOD_RES (16), (17), (18), (19): Xaa is A or G or is absent
SVAMGPIKGYXXXXXXXXXFYLINIPSLKTPVXXAKSA

SEQ ID NO: 20683 - protein, 42 aa, Artificial Sequence
  Non-cyclic GFR-binding peptide
  MOD_RES (1), (3), (37), (38): Xaa is C or S
  MOD_RES (15), (16), (17), (18), (19): Xaa is A or G
  MOD_RES (20), (21), (22), (23): Xaa is A or G or is absent
XGXGEVVMEPIKGYXXXXXXXXXFYLMNIPSLETPVXXAKPI

SEQ ID NO: 20684 - protein, 36 aa, Artificial Sequence
  Non-cyclic GFR-binding peptide
  MOD_RES (1), (33), (34): Xaa is C or S
XSEVVMDPIKGYVVNNASDFYLINIPSLRTPVXXTP

SEQ ID NO: 20685 - protein, 41 aa, Artificial Sequence
  Non-cyclic GFR-binding peptide
  MOD_RES (1), (36), (37): Xaa is C or S
  MOD_RES (14), (15), (16), (17), (18): Xaa is A or G
  MOD_RES (19), (20), (21), (22): Xaa is A or G or is absent
XEAVSMGEPIKGYXXXXXXXXXFYLVNIPSLKTPVXXAKGV

SEQ ID NO: 20686 - protein, 34 aa, Artificial Sequence
  Non-cyclic GFR-binding peptide
  MOD_RES (33), (34): Xaa is C or S
  MOD_RES (11), (12), (13), (14), (15): Xaa is A or G
  MOD_RES (16), (17), (18), (19): Xaa is A or G or is absent
SVAMGPIKGYXXXXXXXXXFYLINIPSLKTPVXX

SEQ ID NO: 20687 - protein, 32 aa, Artificial Sequence
  Non-cyclic GFR-binding peptide
  MOD_RES (31), (32): Xaa is C or S
SVAMGPIKGYYTVVGKDFYLINIPSLKTPVXX

SEQ ID NO: 20688 - protein, 38 aa, Artificial Sequence
  Non-cyclic GFR-binding peptide
  MOD_RES (2), (4), (36), (37): Xaa is C or S
HXGXAKVVMNPIKGYIVNNSSDFYLVNIPSLKTPAXXA

SEQ ID NO: 20689 - protein, 37 aa, Artificial Sequence
  Non-cyclic GFR-binding peptide
  MOD_RES (2), (36), (37): Xaa is C or S
  MOD_RES (14), (15), (16), (17), (18): Xaa is A or G
  MOD_RES (19), (20), (21), (22): Xaa is A or G or is absent
GXAKVVMNPIKGYXXXXXXXXXFYLVNIPSLKTPAXX

SEQ ID NO: 20690 - protein, 36 aa, Artificial Sequence
  Non-cyclic GFR-binding peptide
  MOD_RES (32), (33): Xaa is C or S
AEVVMDPIKGYVVNNAADFYLINIPSLRAPVXXSAP

SEQ ID NO: 20691 - protein, 31 aa, Artificial Sequence
  Non-cyclic GFR-binding peptide
  MOD_RES (1), (1): Xaa is C or S
XEEVIMPIKGYLLVRGNDFYLMNIPSTKVPA

SEQ ID NO: 20692 - protein, 34 aa, Artificial Sequence
  Non-cyclic GFR-binding peptide
  MOD_RES (2), (4): Xaa is C or S
LXGXEEVIMPIKGYLLVRGNDFYLMNIPSTKVPA

SEQ ID NO: 20693 - protein, 40 aa, Artificial Sequence
  Non-cyclic GFR-binding peptide
  MOD_RES (1), (3), (37), (38): Xaa is C or S
  MOD_RES (15), (16), (17), (18), (19): Xaa is A or G
  MOD_RES (20), (21), (22), (23): Xaa is A or G or is absent
XGXGEVVMDPIKGYXXXXXXXXXFYLMNIPSLETPVXXAK

SEQ ID NO: 20694 - protein, 39 aa, Artificial Sequence
  Non-cyclic GFR-binding peptide
  MOD_RES (1), (33), (34): Xaa is C or S
XAKVVMNPIKGYIVNNSSDFYLVNIPSLKTPAXXAKPVA

SEQ ID NO: 20695 - protein, 35 aa, Artificial Sequence
  Non-cyclic GFR-binding peptide
  MOD_RES (33), (34): Xaa is C or S
  MOD_RES (11), (12), (13), (14), (15): Xaa is A or G
  MOD_RES (16), (17), (18), (19): Xaa is A or G or is absent
EVVMEPIKGYXXXXXXXXXFYLMNIPSLETPVXXA

SEQ ID NO: 20696 - protein, 42 aa, Artificial Sequence
  Non-cyclic GFR-binding peptide
  MOD_RES (2), (4), (36), (37): Xaa is C or S
RXGXSEVVMDPIKGYVVNNASDFYLINIPSLRTPVXXTPPTS

SEQ ID NO: 20697 - protein, 41 aa, Artificial Sequence
  Non-cyclic GFR-binding peptide
  MOD_RES (2), (4), (36), (37): Xaa is C or S
RXGXESVAMGPIKGYYTVVGKDFYLINIPSLKTPVXXAKSA

SEQ ID NO: 20698 - protein, 39 aa, Artificial Sequence
  Non-cyclic GFR-binding peptide
  MOD_RES (2), (4), (38), (39): Xaa is C or S
  MOD_RES (16), (17), (18), (19), (20): Xaa is A or G
  MOD_RES (21), (22), (23), (24): Xaa is A or G or is absent
RXGXSEVVMDPIKGYXXXXXXXXXFYLINIPSLRTPVXX

SEQ ID NO: 20699 - protein, 37 aa, Artificial Sequence
  Non-cyclic GFR-binding peptide
  MOD_RES (2), (36), (37): Xaa is C or S
  MOD_RES (14), (15), (16), (17), (18): Xaa is A or G
  MOD_RES (19), (20), (21), (22): Xaa is A or G or is absent
GXARVVMNPIKGYXXXXXXXXXFYLVNIPSLQTPAXX

SEQ ID NO: 20700 - protein, 39 aa, Artificial Sequence
  Non-cyclic GFR-binding peptide
  MOD_RES (2), (36), (37): Xaa is C or S
  MOD_RES (14), (15), (16), (17), (18): Xaa is A or G
  MOD_RES (19), (20), (21), (22): Xaa is A or G or is absent
GXAEVVMDPIKGYXXXXXXXXXFYLINIPSLRAPVXXSA

SEQ ID NO: 20701 - protein, 37 aa, Artificial Sequence
  Non-cyclic GFR-binding peptide
  MOD_RES (1), (33), (34): Xaa is C or S
XGEVVMDPIKGYVVKENEDFYLMNIPSLETPVXXAKP

SEQ ID NO: 20702 - protein, 41 aa, Artificial Sequence
  Non-cyclic GFR-binding peptide
  MOD_RES (2), (4), (36), (37): Xaa is C or S
HXGXSRVVMNPIKGYIVNSSDDFYLVNIPSLKTPAXXPKPV

SEQ ID NO: 20703 - protein, 39 aa, Artificial Sequence
  Non-cyclic GFR-binding peptide
  MOD_RES (34), (35): Xaa is C or S
  MOD_RES (12), (13), (14), (15), (16): Xaa is A or G
  MOD_RES (17), (18), (19), (20): Xaa is A or G or is absent
SEVVMDPIKGYXXXXXXXXXFYLINIPSLRTPVXXTPPT

SEQ ID NO: 20704 - protein, 36 aa, Artificial Sequence
  Non-cyclic GFR-binding peptide
  MOD_RES (1), (3): Xaa is C or S
  MOD_RES (15), (16), (17), (18), (19): Xaa is A or G
  MOD_RES (20), (21), (22), (23): Xaa is A or G or is absent
XGXSRVVMNPIKGYXXXXXXXXXFYLVNIPSLKTPA

SEQ ID NO: 20705 - protein, 37 aa, Artificial Sequence
  Non-cyclic GFR-binding peptide
  MOD_RES (1), (3), (35), (36): Xaa is C or S
XGXGEVVMDPIKGYVVKENEDFYLMNIPSLETPVXXA

SEQ ID NO: 20706 - protein, 33 aa, Artificial Sequence
  Non-cyclic GFR-binding peptide
  MOD_RES (2), (33): Xaa is C or S
GXEEVIMPIKGYLLVRGNDFYLMNIPSTKVPAX

SEQ ID NO: 20707 - protein, 36 aa, Artificial Sequence
  Non-cyclic GFR-binding peptide
  MOD_RES (2), (35), (36): Xaa is C or S
  MOD_RES (13), (14), (15), (16), (17): Xaa is A or G
  MOD_RES (18), (19), (20), (21): Xaa is A or G or is absent
GXEEVIMPIKGYXXXXXXXXXFYLMNIPSTKVPAXX

SEQ ID NO: 20708 - protein, 34 aa, Artificial Sequence
  Non-cyclic GFR-binding peptide
  MOD_RES (1), (1): Xaa is C or S
  MOD_RES (13), (14), (15), (16), (17): Xaa is A or G
  MOD_RES (18), (19), (20), (21): Xaa is A or G or is absent
XSEVVMDPIKGYXXXXXXXXXFYLINIPSLRTPV

SEQ ID NO: 20709 - protein, 35 aa, Artificial Sequence
  Non-cyclic GFR-binding peptide
  MOD_RES (2), (34), (35): Xaa is C or S
GXAKVVMNPIKGYIVNNSSDFYLVNIPSLKTPAXX

SEQ ID NO: 20710 - protein, 41 aa, Artificial Sequence
  Non-cyclic GFR-binding peptide
  MOD_RES (2), (4), (38), (39): Xaa is C or S
  MOD_RES (16), (17), (18), (19), (20): Xaa is A or G
  MOD_RES (21), (22), (23), (24): Xaa is A or G or is absent
HXGXARVVMNPIKGYXXXXXXXXXFYLVNIPSLQTPAXXPK

SEQ ID NO: 20711 - protein, 43 aa, Artificial Sequence
  Non-cyclic GFR-binding peptide
  MOD_RES (1), (3), (37), (38): Xaa is C or S
  MOD_RES (15), (16), (17), (18), (19): Xaa is A or G
  MOD_RES (20), (21), (22), (23): Xaa is A or G or is absent
XGXAEVVMDPIKGYXXXXXXXXXFYLINIPSLRAPVXXSAPAA

SEQ ID NO: 20712 - protein, 36 aa, Artificial Sequence
  Non-cyclic GFR-binding peptide
  MOD_RES (1), (33): Xaa is C or S
XSRVVMNPIKGYIVNSSDDFYLVNIPSLKTPAXTPK

SEQ ID NO: 20713 - protein, 35 aa, Artificial Sequence
  Non-cyclic GFR-binding peptide
  MOD_RES (33), (34): Xaa is C or S
  MOD_RES (11), (12), (13), (14), (15): Xaa is A or G
  MOD_RES (16), (17), (18), (19): Xaa is A or G or is absent
RVVMNPIKGYXXXXXXXXXFYLVNIPSLKTPAXXP

SEQ ID NO: 20714 - protein, 41 aa, Artificial Sequence
  Non-cyclic GFR-binding peptide
  MOD_RES (2), (4), (35), (36): Xaa is C or S
LXGXEEVIMPIKGYLLVRGNDFYLMNIPSTKVPAXXTSPVR

SEQ ID NO: 20715 - protein, 36 aa, Artificial Sequence
  Non-cyclic GFR-binding peptide
  MOD_RES (2), (36): Xaa is C or S
  MOD_RES (14), (15), (16), (17), (18): Xaa is A or G
  MOD_RES (19), (20), (21), (22): Xaa is A or G or is absent
GXSEVVMDPIKGYXXXXXXXXXFYLINIPSLRTPVX

SEQ ID NO: 20716 - protein, 35 aa, Artificial Sequence
  Non-cyclic GFR-binding peptide
  MOD_RES (1), (34), (35): Xaa is C or S
  MOD_RES (12), (13), (14), (15), (16): Xaa is A or G
  MOD_RES (17), (18), (19), (20): Xaa is A or G or is absent
XEEVIMPIKGYXXXXXXXXXFYLMNIPSTKVPAXX

SEQ ID NO: 20717 - protein, 32 aa, Artificial Sequence
  Non-cyclic GFR-binding peptide
  MOD_RES (11), (12), (13), (14), (15): Xaa is A or G
  MOD_RES (16), (17), (18), (19): Xaa is A or G or is absent
EVVMDPIKGYXXXXXXXXXFYLINIPSLRTPV

SEQ ID NO: 20718 - protein, 32 aa, Artificial Sequence
  Non-cyclic GFR-binding peptide
  MOD_RES (31), (32): Xaa is C or S
EEVIMPIKGYLLVRGNDFYLMNIPSTKVPAXX

SEQ ID NO: 20719 - protein, 40 aa, Artificial Sequence
  Non-cyclic GFR-binding peptide
  MOD_RES (1), (36), (37): Xaa is C or S
  MOD_RES (14), (15), (16), (17), (18): Xaa is A or G
  MOD_RES (19), (20), (21), (22): Xaa is A or G or is absent
XEAVSMGEPIKGYXXXXXXXXXFYLVNIPSLKTPVXXAKG

SEQ ID NO: 20720 - protein, 32 aa, Artificial Sequence
  Non-cyclic GFR-binding peptide
  MOD_RES (11), (12), (13), (14), (15): Xaa is A or G
  MOD_RES (16), (17), (18), (19): Xaa is A or G or is absent
EVVMDPIKGYXXXXXXXXXFYLINIPSLRAPV

SEQ ID NO: 20721 - protein, 36 aa, Artificial Sequence
  Non-cyclic GFR-binding peptide
  MOD_RES (2), (4), (36): Xaa is C or S
RXGXGEVVMEPIKGYVVKDYEDFYLMNIPSLETPVX

SEQ ID NO: 20722 - protein, 42 aa, Artificial Sequence
  Non-cyclic GFR-binding peptide
  MOD_RES (1), (3), (37), (38): Xaa is C or S
  MOD_RES (15), (16), (17), (18), (19): Xaa is A or G
  MOD_RES (20), (21), (22), (23): Xaa is A or G or is absent
XGXESVAMGPIKGYXXXXXXXXXFYLINIPSLKTPVXXAKSA

SEQ ID NO: 20723 - protein, 39 aa, Artificial Sequence
  Non-cyclic GFR-binding peptide
  MOD_RES (1), (34), (35): Xaa is C or S
  MOD_RES (12), (13), (14), (15), (16): Xaa is A or G
  MOD_RES (17), (18), (19), (20): Xaa is A or G or is absent
XEEVIMPIKGYXXXXXXXXXFYLMNIPSTKVPAXXTSPV

SEQ ID NO: 20724 - protein, 43 aa, Artificial Sequence
  Non-cyclic GFR-binding peptide
  MOD_RES (1), (3), (37), (38): Xaa is C or S
  MOD_RES (15), (16), (17), (18), (19): Xaa is A or G
  MOD_RES (20), (21), (22), (23): Xaa is A or G or is absent
XGXGEVVMEPIKGYXXXXXXXXXFYLMNIPSLETPVXXAKPIS

SEQ ID NO: 20725 - protein, 43 aa, Artificial Sequence
  Non-cyclic GFR-binding peptide
  MOD_RES (2), (4), (38), (39): Xaa is C or S
  MOD_RES (16), (17), (18), (19), (20): Xaa is A or G
  MOD_RES (21), (22), (23), (24): Xaa is A or G or is absent
RXGXAEVVMDPIKGYXXXXXXXXXFYLINIPSLRAPVXXSAPA

SEQ ID NO: 20726 - protein, 42 aa, Artificial Sequence
  Non-cyclic GFR-binding peptide
  MOD_RES (2), (4), (36), (37): Xaa is C or S
RXGXAEVVMDPIKGYVVNNAADFYLINIPSLRAPVXXSAPAA

SEQ ID NO: 20727 - protein, 35 aa, Artificial Sequence
  Non-cyclic GFR-binding peptide
  MOD_RES (34), (35): Xaa is C or S
  MOD_RES (12), (13), (14), (15), (16): Xaa is A or G
  MOD_RES (17), (18), (19), (20): Xaa is A or G or is absent
SEVVMDPIKGYXXXXXXXXXFYLINIPSLRTPVXX

SEQ ID NO: 20728 - protein, 37 aa, Artificial Sequence
  Non-cyclic GFR-binding peptide
  MOD_RES (1), (3), (37): Xaa is C or S
  MOD_RES (15), (16), (17), (18), (19): Xaa is A or G
  MOD_RES (20), (21), (22), (23): Xaa is A or G or is absent
XGXSRVVMNPIKGYXXXXXXXXXFYLVNIPSLKTPAX

SEQ ID NO: 20729 - protein, 33 aa, Artificial Sequence
  Non-cyclic GFR-binding peptide
  MOD_RES (33), (33): Xaa is C or S
  MOD_RES (11), (12), (13), (14), (15): Xaa is A or G
  MOD_RES (16), (17), (18), (19): Xaa is A or G or is absent
EEVIMPIKGYXXXXXXXXXFYLMNIPSTKVPAX

SEQ ID NO: 20730 - protein, 37 aa, Artificial Sequence
  Non-cyclic GFR-binding peptide
  MOD_RES (31), (32): Xaa is C or S
RVVMNPIKGYIVNSSDDFYLVNIPSLKTPAXXPKPVH

SEQ ID NO: 20731 - protein, 41 aa, Artificial Sequence
  Non-cyclic GFR-binding peptide
  MOD_RES (2), (36): Xaa is C or S
  MOD_RES (14), (15), (16), (17), (18): Xaa is A or G
  MOD_RES (19), (20), (21), (22): Xaa is A or G or is absent
GXSRVVMNPIKGYXXXXXXXXXFYLVNIPSLKTPAXTPKTV

SEQ ID NO: 20732 - protein, 37 aa, Artificial Sequence
  Non-cyclic GFR-binding peptide
  MOD_RES (2), (4), (37): Xaa is C or S
RXGXEAVSMGEPIKGYTPVGMDDFYLVNIPSLKTPVX

SEQ ID NO: 20733 - protein, 40 aa, Artificial Sequence
  Non-cyclic GFR-binding peptide
  MOD_RES (1), (3), (37), (38): Xaa is C or S
  MOD_RES (15), (16), (17), (18), (19): Xaa is A or G
  MOD_RES (20), (21), (22), (23): Xaa is A or G or is absent
XGXSRVVMNPIKGYXXXXXXXXXFYLVNIPSLKTPAXXPK

SEQ ID NO: 20734 - protein, 38 aa, Artificial Sequence
  Non-cyclic GFR-binding peptide
  MOD_RES (2), (34), (35): Xaa is C or S
GXARVVMNPIKGYIVNSSDDFYLVNIPSLQTPAXXPKP

SEQ ID NO: 20735 - protein, 33 aa, Artificial Sequence
  Non-cyclic GFR-binding peptide
  MOD_RES (31), (32): Xaa is C or S
EVVMDPIKGYVVKENEDFYLMNIPSLETPVXXA

SEQ ID NO: 20736 - protein, 36 aa, Artificial Sequence
  Non-cyclic GFR-binding peptide
  MOD_RES (33), (34): Xaa is C or S
  MOD_RES (11), (12), (13), (14), (15): Xaa is A or G
  MOD_RES (16), (17), (18), (19): Xaa is A or G or is absent
EVVMDPIKGYXXXXXXXXXFYLINIPSLRTPVXXTP

SEQ ID NO: 20737 - protein, 39 aa, Artificial Sequence
  Non-cyclic GFR-binding peptide
  MOD_RES (2), (36), (37): Xaa is C or S
  MOD_RES (14), (15), (16), (17), (18): Xaa is A or G
  MOD_RES (19), (20), (21), (22): Xaa is A or G or is absent
GXGEVVMEPIKGYXXXXXXXXXFYLMNIPSLETPVXXAK

SEQ ID NO: 20738 - protein, 38 aa, Artificial Sequence
  Non-cyclic GFR-binding peptide
  MOD_RES (1), (35): Xaa is C or S
  MOD_RES (13), (14), (15), (16), (17): Xaa is A or G
  MOD_RES (18), (19), (20), (21): Xaa is A or G or is absent
XSRVVMNPIKGYXXXXXXXXXFYLVNIPSLKTPAXTPK

SEQ ID NO: 20739 - protein, 38 aa, Artificial Sequence
  Non-cyclic GFR-binding peptide
  MOD_RES (2), (4), (36): Xaa is C or S
HXGXSRVVMNPIKGYIVNSSDDFYLVNIPSLKTPAXTP

SEQ ID NO: 20740 - protein, 42 aa, Artificial Sequence
  Non-cyclic GFR-binding peptide
  MOD_RES (2), (36), (37): Xaa is C or S
  MOD_RES (14), (15), (16), (17), (18): Xaa is A or G
  MOD_RES (19), (20), (21), (22): Xaa is A or G or is absent
GXSRVVMNPIKGYXXXXXXXXXFYLVNIPSLKTPAXXPKPVH

SEQ ID NO: 20741 - protein, 41 aa, Artificial Sequence
  Non-cyclic GFR-binding peptide
  MOD_RES (1), (3), (37): Xaa is C or S
  MOD_RES (15), (16), (17), (18), (19): Xaa is A or G
  MOD_RES (20), (21), (22), (23): Xaa is A or G or is absent
XGXSRVVMNPIKGYXXXXXXXXXFYLVNIPSLKTPAXTPKT

SEQ ID NO: 20742 - protein, 40 aa, Artificial Sequence
  Non-cyclic GFR-binding peptide
  MOD_RES (2), (34), (35): Xaa is C or S
GXGEVVMDPIKGYVVKENEDFYLMNIPSLETPVXXAKPIK

SEQ ID NO: 20743 - protein, 39 aa, Artificial Sequence
  Non-cyclic GFR-binding peptide
  MOD_RES (2), (4), (36), (37): Xaa is C or S
RXGXGEVVMEPIKGYVVKDYEDFYLMNIPSLETPVXXAK

SEQ ID NO: 20744 - protein, 37 aa, Artificial Sequence
  Non-cyclic GFR-binding peptide
  MOD_RES (2), (4), (35), (36): Xaa is C or S
LXGXEEVIMPIKGYLLVRGNDFYLMNIPSTKVPAXXT

SEQ ID NO: 20745 - protein, 40 aa, Artificial Sequence
  Non-cyclic GFR-binding peptide
  MOD_RES (2), (4), (39), (40): Xaa is C or S
  MOD_RES (17), (18), (19), (20), (21): Xaa is A or G
  MOD_RES (22), (23), (24), (25): Xaa is A or G or is absent
RXGXEAVSMGEPIKGYXXXXXXXXXFYLVNIPSLKTPVXX

SEQ ID NO: 20746 - protein, 43 aa, Artificial Sequence
  Non-cyclic GFR-binding peptide
  MOD_RES (2), (4), (38): Xaa is C or S
  MOD_RES (16), (17), (18), (19), (20): Xaa is A or G
  MOD_RES (21), (22), (23), (24): Xaa is A or G or is absent
HXGXSRVVMNPIKGYXXXXXXXXXFYLVNIPSLKTPAXTPKTV

SEQ ID NO: 20747 - protein, 33 aa, Artificial Sequence
  Non-cyclic GFR-binding peptide
  MOD_RES (1), (33): Xaa is C or S
XAKVVMNPIKGYIVNNSSDFYLVNIPSLKTPAX

SEQ ID NO: 20748 - protein, 33 aa, Artificial Sequence
  Non-cyclic GFR-binding peptide
  MOD_RES (33), (33): Xaa is C or S
  MOD_RES (11), (12), (13), (14), (15): Xaa is A or G
  MOD_RES (16), (17), (18), (19): Xaa is A or G or is absent
KVVMNPIKGYXXXXXXXXXFYLVNIPSLKTPAX

SEQ ID NO: 20749 - protein, 36 aa, Artificial Sequence
  Non-cyclic GFR-binding peptide
  MOD_RES (2), (34), (35): Xaa is C or S
GXGEVVMDPIKGYVVKENEDFYLMNIPSLETPVXXA

SEQ ID NO: 20750 - protein, 38 aa, Artificial Sequence
  Non-cyclic GFR-binding peptide
  MOD_RES (2), (36): Xaa is C or S
  MOD_RES (14), (15), (16), (17), (18): Xaa is A or G
  MOD_RES (19), (20), (21), (22): Xaa is A or G or is absent
GXSRVVMNPIKGYXXXXXXXXXFYLVNIPSLKTPAXTP

SEQ ID NO: 20751 - protein, 37 aa, Artificial Sequence
  Non-cyclic GFR-binding peptide
  MOD_RES (33), (34): Xaa is C or S
EAVSMGEPIKGYTPVGMDDFYLVNIPSLKTPVXXAKG

SEQ ID NO: 20752 - protein, 33 aa, Artificial Sequence
  Non-cyclic GFR-binding peptide
  MOD_RES (33), (33): Xaa is C or S
  MOD_RES (11), (12), (13), (14), (15): Xaa is A or G
  MOD_RES (16), (17), (18), (19): Xaa is A or G or is absent
RVVMNPIKGYXXXXXXXXXFYLVNIPSLKTPAX

SEQ ID NO: 20753 - protein, 34 aa, Artificial Sequence
  Non-cyclic GFR-binding peptide
  MOD_RES (34), (34): Xaa is C or S
  MOD_RES (12), (13), (14), (15), (16): Xaa is A or G
  MOD_RES (17), (18), (19), (20): Xaa is A or G or is absent
AKVVMNPIKGYXXXXXXXXXFYLVNIPSLKTPAX

SEQ ID NO: 20754 - protein, 38 aa, Artificial Sequence
  Non-cyclic GFR-binding peptide
  MOD_RES (2), (36), (37): Xaa is C or S
  MOD_RES (14), (15), (16), (17), (18): Xaa is A or G
  MOD_RES (19), (20), (21), (22): Xaa is A or G or is absent
GXGEVVMDPIKGYXXXXXXXXXFYLMNIPSLETPVXXA

SEQ ID NO: 20755 - protein, 41 aa, Artificial Sequence
  Non-cyclic GFR-binding peptide
  MOD_RES (2), (36), (37): Xaa is C or S
  MOD_RES (14), (15), (16), (17), (18): Xaa is A or G
  MOD_RES (19), (20), (21), (22): Xaa is A or G or is absent
GXGEVVMDPIKGYXXXXXXXXXFYLMNIPSLETPVXXAKPI

SEQ ID NO: 20756 - protein, 37 aa, Artificial Sequence
  Non-cyclic GFR-binding peptide
  MOD_RES (34), (35): Xaa is C or S
  MOD_RES (12), (13), (14), (15), (16): Xaa is A or G
  MOD_RES (17), (18), (19), (20): Xaa is A or G or is absent
GEVVMDPIKGYXXXXXXXXXFYLMNIPSLETPVXXAK

SEQ ID NO: 20757 - protein, 37 aa, Artificial Sequence
  Non-cyclic GFR-binding peptide
  MOD_RES (1), (35), (36): Xaa is C or S
  MOD_RES (13), (14), (15), (16), (17): Xaa is A or G
  MOD_RES (18), (19), (20), (21): Xaa is A or G or is absent
XGEVVMEPIKGYXXXXXXXXXFYLMNIPSLETPVXXA

SEQ ID NO: 20758 - protein, 38 aa, Artificial Sequence
  Non-cyclic GFR-binding peptide
  MOD_RES (1), (33), (34): Xaa is C or S
XAEVVMDPIKGYVVNNAADFYLINIPSLRAPVXXSAPA

SEQ ID NO: 20759 - protein, 38 aa, Artificial Sequence
  Non-cyclic GFR-binding peptide
  MOD_RES (2), (4), (38): Xaa is C or S
  MOD_RES (16), (17), (18), (19), (20): Xaa is A or G
  MOD_RES (21), (22), (23), (24): Xaa is A or G or is absent
HXGXAKVVMNPIKGYXXXXXXXXXFYLVNIPSLKTPAX

SEQ ID NO: 20760 - protein, 42 aa, Artificial Sequence
  Non-cyclic GFR-binding peptide
  MOD_RES (1), (3), (37), (38): Xaa is C or S
  MOD_RES (15), (16), (17), (18), (19): Xaa is A or G
  MOD_RES (20), (21), (22), (23): Xaa is A or G or is absent
XGXARVVMNPIKGYXXXXXXXXXFYLVNIPSLQTPAXXPKPV

SEQ ID NO: 20761 - protein, 36 aa, Artificial Sequence
  Non-cyclic GFR-binding peptide
  MOD_RES (2), (36): Xaa is C or S
  MOD_RES (14), (15), (16), (17), (18): Xaa is A or G
  MOD_RES (19), (20), (21), (22): Xaa is A or G or is absent
GXAKVVMNPIKGYXXXXXXXXXFYLVNIPSLKTPAX

SEQ ID NO: 20762 - protein, 36 aa, Artificial Sequence
  Non-cyclic GFR-binding peptide
  MOD_RES (2), (4), (35), (36): Xaa is C or S
LXGXEEVIMPIKGYLLVRGNDFYLMNIPSTKVPAXX

SEQ ID NO: 20763 - protein, 30 aa, Artificial Sequence
  Non-cyclic GFR-binding peptide
RVVMNPIKGYIVNSSDDFYLVNIPSLQTPA

SEQ ID NO: 20764 - protein, 37 aa, Artificial Sequence
  Non-cyclic GFR-binding peptide
  MOD_RES (1), (34), (35): Xaa is C or S
XEAVSMGEPIKGYTPVGMDDFYLVNIPSLKTPVXXAK

SEQ ID NO: 20765 - protein, 38 aa, Artificial Sequence
  Non-cyclic GFR-binding peptide
  MOD_RES (2), (4), (36), (37): Xaa is C or S
HXGXSRVVMNPIKGYIVNSSDDFYLVNIPSLKTPAXXP

SEQ ID NO: 20766 - protein, 33 aa, Artificial Sequence
  Non-cyclic GFR-binding peptide
  MOD_RES (1), (33): Xaa is C or S
XGEVVMEPIKGYVVKDYEDFYLMNIPSLETPVX

SEQ ID NO: 20767 - protein, 37 aa, Artificial Sequence
  Non-cyclic GFR-binding peptide
  MOD_RES (33), (33): Xaa is C or S
  MOD_RES (11), (12), (13), (14), (15): Xaa is A or G
  MOD_RES (16), (17), (18), (19): Xaa is A or G or is absent
RVVMNPIKGYXXXXXXXXXFYLVNIPSLKTPAXTPKT

SEQ ID NO: 20768 - protein, 35 aa, Artificial Sequence
  Non-cyclic GFR-binding peptide
  MOD_RES (1), (33), (34): Xaa is C or S
XSRVVMNPIKGYIVNSSDDFYLVNIPSLKTPAXXP

SEQ ID NO: 20769 - protein, 43 aa, Artificial Sequence
  Non-cyclic GFR-binding peptide
  MOD_RES (1), (3), (38), (39): Xaa is C or S
  MOD_RES (16), (17), (18), (19), (20): Xaa is A or G
  MOD_RES (21), (22), (23), (24): Xaa is A or G or is absent
XGXEAVSMGEPIKGYXXXXXXXXXFYLVNIPSLKTPVXXAKGV

SEQ ID NO: 20770 - protein, 34 aa, Artificial Sequence
  Non-cyclic GFR-binding peptide
  MOD_RES (34), (34): Xaa is C or S
  MOD_RES (12), (13), (14), (15), (16): Xaa is A or G
  MOD_RES (17), (18), (19), (20): Xaa is A or G or is absent
GEVVMDPIKGYXXXXXXXXXFYLMNIPSLETPVX

SEQ ID NO: 20771 - protein, 37 aa, Artificial Sequence
  Non-cyclic GFR-binding peptide
  MOD_RES (32), (33): Xaa is C or S
AKVVMNPIKGYIVNNSSDFYLVNIPSLKTPAXXAKPV

SEQ ID NO: 20772 - protein, 39 aa, Artificial Sequence
  Non-cyclic GFR-binding peptide
  MOD_RES (1), (3), (38), (39): Xaa is C or S
  MOD_RES (16), (17), (18), (19), (20): Xaa is A or G
  MOD_RES (21), (22), (23), (24): Xaa is A or G or is absent
XGXEAVSMGEPIKGYXXXXXXXXXFYLVNIPSLKTPVXX

SEQ ID NO: 20773 - protein, 35 aa, Artificial Sequence
  Non-cyclic GFR-binding peptide
  MOD_RES (2), (35): Xaa is C or S
GXEAVSMGEPIKGYTPVGMDDFYLVNIPSLKTPVX

SEQ ID NO: 20774 - protein, 38 aa, Artificial Sequence
  Non-cyclic GFR-binding peptide
  MOD_RES (2), (36), (37): Xaa is C or S
  MOD_RES (14), (15), (16), (17), (18): Xaa is A or G
  MOD_RES (19), (20), (21), (22): Xaa is A or G or is absent
GXSEVVMDPIKGYXXXXXXXXXFYLINIPSLRTPVXXT

SEQ ID NO: 20775 - protein, 43 aa, Artificial Sequence
  Non-cyclic GFR-binding peptide
  MOD_RES (2), (4), (37), (38): Xaa is C or S
RXGXEAVSMGEPIKGYTPVGMDDFYLVNIPSLKTPVXXAKGVK

SEQ ID NO: 20776 - protein, 36 aa, Artificial Sequence
  Non-cyclic GFR-binding peptide
  MOD_RES (1), (34), (35): Xaa is C or S
XEAVSMGEPIKGYTPVGMDDFYLVNIPSLKTPVXXA

SEQ ID NO: 20777 - protein, 41 aa, Artificial Sequence
  Non-cyclic GFR-binding peptide
  MOD_RES (35), (36): Xaa is C or S
  MOD_RES (13), (14), (15), (16), (17): Xaa is A or G
  MOD_RES (18), (19), (20), (21): Xaa is A or G or is absent
EAVSMGEPIKGYXXXXXXXXXFYLVNIPSLKTPVXXAKGVK

SEQ ID NO: 20778 - protein, 39 aa, Artificial Sequence
  Non-cyclic GFR-binding peptide
  MOD_RES (2), (4), (38), (39): Xaa is C or S
  MOD_RES (16), (17), (18), (19), (20): Xaa is A or G
  MOD_RES (21), (22), (23), (24): Xaa is A or G or is absent
HXGXARVVMNPIKGYXXXXXXXXXFYLVNIPSLQTPAXX

SEQ ID NO: 20779 - protein, 33 aa, Artificial Sequence
  Non-cyclic GFR-binding peptide
  MOD_RES (31), (32): Xaa is C or S
EVVMEPIKGYVVKDYEDFYLMNIPSLETPVXXA

SEQ ID NO: 20780 - protein, 34 aa, Artificial Sequence
  Non-cyclic GFR-binding peptide
  MOD_RES (2), (34): Xaa is C or S
GXARVVMNPIKGYIVNSSDDFYLVNIPSLQTPAX

SEQ ID NO: 20781 - protein, 36 aa, Artificial Sequence
  Non-cyclic GFR-binding peptide
  MOD_RES (1), (33), (34): Xaa is C or S
XGEVVMEPIKGYVVKDYEDFYLMNIPSLETPVXXAK

SEQ ID NO: 20782 - protein, 38 aa, Artificial Sequence
  Non-cyclic GFR-binding peptide
  MOD_RES (34), (35): Xaa is C or S
  MOD_RES (12), (13), (14), (15), (16): Xaa is A or G
  MOD_RES (17), (18), (19), (20): Xaa is A or G or is absent
GEVVMEPIKGYXXXXXXXXXFYLMNIPSLETPVXXAKP

SEQ ID NO: 20783 - protein, 41 aa, Artificial Sequence
  Non-cyclic GFR-binding peptide
  MOD_RES (1), (3), (36), (37): Xaa is C or S
XGXEAVSMGEPIKGYTPVGMDDFYLVNIPSLKTPVXXAKGV

SEQ ID NO: 20784 - protein, 40 aa, Artificial Sequence
  Non-cyclic GFR-binding peptide
  MOD_RES (2), (4), (36), (37): Xaa is C or S
RXGXGEVVMEPIKGYVVKDYEDFYLMNIPSLETPVXXAKP

SEQ ID NO: 20785 - protein, 35 aa, Artificial Sequence
  Non-cyclic GFR-binding peptide
  MOD_RES (2), (34), (35): Xaa is C or S
GXAEVVMDPIKGYVVNNAADFYLINIPSLRAPVXX

SEQ ID NO: 20786 - protein, 41 aa, Artificial Sequence
  Non-cyclic GFR-binding peptide
  MOD_RES (2), (36), (37): Xaa is C or S
  MOD_RES (14), (15), (16), (17), (18): Xaa is A or G
  MOD_RES (19), (20), (21), (22): Xaa is A or G or is absent
GXARVVMNPIKGYXXXXXXXXXFYLVNIPSLQTPAXXPKPV

SEQ ID NO: 20787 - protein, 38 aa, Artificial Sequence
  Non-cyclic GFR-binding peptide
  MOD_RES (1), (3), (35), (36): Xaa is C or S
XGXAEVVMDPIKGYVVNNAADFYLINIPSLRAPVXXSA

SEQ ID NO: 20788 - protein, 40 aa, Artificial Sequence
  Non-cyclic GFR-binding peptide
  MOD_RES (34), (35): Xaa is C or S
  MOD_RES (12), (13), (14), (15), (16): Xaa is A or G
  MOD_RES (17), (18), (19), (20): Xaa is A or G or is absent
AEVVMDPIKGYXXXXXXXXXFYLINIPSLRAPVXXSAPAA

SEQ ID NO: 20789 - protein, 40 aa, Artificial Sequence
  Non-cyclic GFR-binding peptide
  MOD_RES (1), (3), (37), (38): Xaa is C or S
  MOD_RES (15), (16), (17), (18), (19): Xaa is A or G
  MOD_RES (20), (21), (22), (23): Xaa is A or G or is absent
XGXAKVVMNPIKGYXXXXXXXXXFYLVNIPSLKTPAXXAK

SEQ ID NO: 20790 - protein, 40 aa, Artificial Sequence
  Non-cyclic GFR-binding peptide
  MOD_RES (2), (35), (36): Xaa is C or S
GXEAVSMGEPIKGYTPVGMDDFYLVNIPSLKTPVXXAKGV

SEQ ID NO: 20791 - protein, 36 aa, Artificial Sequence
  Non-cyclic GFR-binding peptide
  MOD_RES (33), (34): Xaa is C or S
EAVSMGEPIKGYTPVGMDDFYLVNIPSLKTPVXXAK

SEQ ID NO: 20792 - protein, 39 aa, Artificial Sequence
  Non-cyclic GFR-binding peptide
  MOD_RES (2), (4), (38), (39): Xaa is C or S
  MOD_RES (16), (17), (18), (19), (20): Xaa is A or G
  MOD_RES (21), (22), (23), (24): Xaa is A or G or is absent
RXGXGEVVMDPIKGYXXXXXXXXXFYLMNIPSLETPVXX

SEQ ID NO: 20793 - protein, 39 aa, Artificial Sequence
  Non-cyclic GFR-binding peptide
  MOD_RES (1), (3), (35): Xaa is C or S
XGXSRVVMNPIKGYIVNSSDDFYLVNIPSLKTPAXTPKT

SEQ ID NO: 20794 - protein, 38 aa, Artificial Sequence
  Non-cyclic GFR-binding peptide
  MOD_RES (34), (35): Xaa is C or S
  MOD_RES (12), (13), (14), (15), (16): Xaa is A or G
  MOD_RES (17), (18), (19), (20): Xaa is A or G or is absent
ARVVMNPIKGYXXXXXXXXXFYLVNIPSLQTPAXXPKP

SEQ ID NO: 20795 - protein, 36 aa, Artificial Sequence
  Non-cyclic GFR-binding peptide
  MOD_RES (34), (35): Xaa is C or S
  MOD_RES (12), (13), (14), (15), (16): Xaa is A or G
  MOD_RES (17), (18), (19), (20): Xaa is A or G or is absent
ESVAMGPIKGYXXXXXXXXXFYLINIPSLKTPVXXA

SEQ ID NO: 20796 - protein, 34 aa, Artificial Sequence
  Non-cyclic GFR-binding peptide
  MOD_RES (33), (34): Xaa is C or S
  MOD_RES (11), (12), (13), (14), (15): Xaa is A or G
  MOD_RES (16), (17), (18), (19): Xaa is A or G or is absent
EEVIMPIKGYXXXXXXXXXFYLMNIPSTKVPAXX

SEQ ID NO: 20797 - protein, 33 aa, Artificial Sequence
  Non-cyclic GFR-binding peptide
  MOD_RES (31), (32): Xaa is C or S
EVVMDPIKGYVVNNAADFYLINIPSLRAPVXXS

SEQ ID NO: 20798 - protein, 38 aa, Artificial Sequence
  Non-cyclic GFR-binding peptide
  MOD_RES (1), (3), (38): Xaa is C or S
  MOD_RES (16), (17), (18), (19), (20): Xaa is A or G
  MOD_RES (21), (22), (23), (24): Xaa is A or G or is absent
XGXEAVSMGEPIKGYXXXXXXXXXFYLVNIPSLKTPVX

SEQ ID NO: 20799 - protein, 35 aa, Artificial Sequence
  Non-cyclic GFR-binding peptide
  MOD_RES (2), (2): Xaa is C or S
  MOD_RES (14), (15), (16), (17), (18): Xaa is A or G
  MOD_RES (19), (20), (21), (22): Xaa is A or G or is absent
GXGEVVMEPIKGYXXXXXXXXXFYLMNIPSLETPV

SEQ ID NO: 20800 - protein, 32 aa, Artificial Sequence
  Non-cyclic GFR-binding peptide
  MOD_RES (32), (32): Xaa is C or S
GEVVMEPIKGYVVKDYEDFYLMNIPSLETPVX

SEQ ID NO: 20801 - protein, 34 aa, Artificial Sequence
  Non-cyclic GFR-binding peptide
  MOD_RES (2), (34): Xaa is C or S
GXESVAMGPIKGYYTVVGKDFYLINIPSLKTPVX

SEQ ID NO: 20802 - protein, 40 aa, Artificial Sequence
  Non-cyclic GFR-binding peptide
  MOD_RES (2), (4), (37), (38): Xaa is C or S
  MOD_RES (15), (16), (17), (18), (19): Xaa is A or G
  MOD_RES (20), (21), (22), (23): Xaa is A or G or is absent
LXGXEEVIMPIKGYXXXXXXXXXFYLMNIPSTKVPAXXTS

SEQ ID NO: 20803 - protein, 37 aa, Artificial Sequence
  Non-cyclic GFR-binding peptide
  MOD_RES (2), (36), (37): Xaa is C or S
  MOD_RES (14), (15), (16), (17), (18): Xaa is A or G
  MOD_RES (19), (20), (21), (22): Xaa is A or G or is absent
GXAEVVMDPIKGYXXXXXXXXXFYLINIPSLRAPVXX

SEQ ID NO: 20804 - protein, 35 aa, Artificial Sequence
  Non-cyclic GFR-binding peptide
  MOD_RES (34), (35): Xaa is C or S
  MOD_RES (12), (13), (14), (15), (16): Xaa is A or G
  MOD_RES (17), (18), (19), (20): Xaa is A or G or is absent
ARVVMNPIKGYXXXXXXXXXFYLVNIPSLQTPAXX

SEQ ID NO: 20805 - protein, 34 aa, Artificial Sequence
  Non-cyclic GFR-binding peptide
  MOD_RES (1), (33), (34): Xaa is C or S
XGEVVMDPIKGYVVKENEDFYLMNIPSLETPVXX

SEQ ID NO: 20806 - protein, 38 aa, Artificial Sequence
  Non-cyclic GFR-binding peptide
  MOD_RES (32), (33): Xaa is C or S
ARVVMNPIKGYIVNSSDDFYLVNIPSLQTPAXXPKPVT

SEQ ID NO: 20807 - protein, 34 aa, Artificial Sequence
  Non-cyclic GFR-binding peptide
  MOD_RES (33), (34): Xaa is C or S
  MOD_RES (11), (12), (13), (14), (15): Xaa is A or G
  MOD_RES (16), (17), (18), (19): Xaa is A or G or is absent
RVVMNPIKGYXXXXXXXXXFYLVNIPSLKTPAXX

SEQ ID NO: 20808 - protein, 34 aa, Artificial Sequence
  Non-cyclic GFR-binding peptide
  MOD_RES (33), (34): Xaa is C or S
  MOD_RES (11), (12), (13), (14), (15): Xaa is A or G
  MOD_RES (16), (17), (18), (19): Xaa is A or G or is absent
KVVMNPIKGYXXXXXXXXXFYLVNIPSLKTPAXX

SEQ ID NO: 20809 - protein, 36 aa, Artificial Sequence
  Non-cyclic GFR-binding peptide
  MOD_RES (2), (2): Xaa is C or S
  MOD_RES (15), (16), (17), (18), (19): Xaa is A or G
  MOD_RES (20), (21), (22), (23): Xaa is A or G or is absent
GXEAVSMGEPIKGYXXXXXXXXXFYLVNIPSLKTPV

SEQ ID NO: 20810 - protein, 38 aa, Artificial Sequence
  Non-cyclic GFR-binding peptide
  MOD_RES (2), (34), (35): Xaa is C or S
GXGEVVMEPIKGYVVKDYEDFYLMNIPSLETPVXXAKP

SEQ ID NO: 20811 - protein, 36 aa, Artificial Sequence
  Non-cyclic GFR-binding peptide
  MOD_RES (2), (36): Xaa is C or S
  MOD_RES (14), (15), (16), (17), (18): Xaa is A or G
  MOD_RES (19), (20), (21), (22): Xaa is A or G or is absent
GXGEVVMEPIKGYXXXXXXXXXFYLMNIPSLETPVX

SEQ ID NO: 20812 - protein, 43 aa, Artificial Sequence
  Non-cyclic GFR-binding peptide
  MOD_RES (1), (3), (37): Xaa is C or S
  MOD_RES (15), (16), (17), (18), (19): Xaa is A or G
  MOD_RES (20), (21), (22), (23): Xaa is A or G or is absent
XGXSRVVMNPIKGYXXXXXXXXXFYLVNIPSLKTPAXTPKTVH

SEQ ID NO: 20813 - protein, 36 aa, Artificial Sequence
  Non-cyclic GFR-binding peptide
  MOD_RES (35), (36): Xaa is C or S
  MOD_RES (13), (14), (15), (16), (17): Xaa is A or G
  MOD_RES (18), (19), (20), (21): Xaa is A or G or is absent
EAVSMGEPIKGYXXXXXXXXXFYLVNIPSLKTPVXX

SEQ ID NO: 20814 - protein, 32 aa, Artificial Sequence
  Non-cyclic GFR-binding peptide
  MOD_RES (1), (1): Xaa is C or S
XGEVVMDPIKGYVVKENEDFYLMNIPSLETPV

SEQ ID NO: 20815 - protein, 40 aa, Artificial Sequence
  Non-cyclic GFR-binding peptide
  MOD_RES (2), (4), (38), (39): Xaa is C or S
  MOD_RES (16), (17), (18), (19), (20): Xaa is A or G
  MOD_RES (21), (22), (23), (24): Xaa is A or G or is absent
RXGXSEVVMDPIKGYXXXXXXXXXFYLINIPSLRTPVXXT

SEQ ID NO: 20816 - protein, 39 aa, Artificial Sequence
  Non-cyclic GFR-binding peptide
  MOD_RES (1), (35), (36): Xaa is C or S
  MOD_RES (13), (14), (15), (16), (17): Xaa is A or G
  MOD_RES (18), (19), (20), (21): Xaa is A or G or is absent
XSRVVMNPIKGYXXXXXXXXXFYLVNIPSLKTPAXXPKP

SEQ ID NO: 20817 - protein, 38 aa, Artificial Sequence
  Non-cyclic GFR-binding peptide
  MOD_RES (34), (35): Xaa is C or S
  MOD_RES (12), (13), (14), (15), (16): Xaa is A or G
  MOD_RES (17), (18), (19), (20): Xaa is A or G or is absent
AEVVMDPIKGYXXXXXXXXXFYLINIPSLRAPVXXSAP

SEQ ID NO: 20818 - protein, 38 aa, Artificial Sequence
  Non-cyclic GFR-binding peptide
  MOD_RES (2), (4), (35), (36): Xaa is C or S
LXGXEEVIMPIKGYLLVRGNDFYLMNIPSTKVPAXXTS

SEQ ID NO: 20819 - protein, 36 aa, Artificial Sequence
  Non-cyclic GFR-binding peptide
  MOD_RES (33), (34): Xaa is C or S
  MOD_RES (11), (12), (13), (14), (15): Xaa is A or G
  MOD_RES (16), (17), (18), (19): Xaa is A or G or is absent
SVAMGPIKGYXXXXXXXXXFYLINIPSLKTPVXXAK

SEQ ID NO: 20820 - protein, 34 aa, Artificial Sequence
  Non-cyclic GFR-binding peptide
  MOD_RES (1), (3): Xaa is C or S
XGXAKVVMNPIKGYIVNNSSDFYLVNIPSLKTPA

SEQ ID NO: 20821 - protein, 39 aa, Artificial Sequence
  Non-cyclic GFR-binding peptide
  MOD_RES (1), (35), (36): Xaa is C or S
  MOD_RES (13), (14), (15), (16), (17): Xaa is A or G
  MOD_RES (18), (19), (20), (21): Xaa is A or G or is absent
XGEVVMDPIKGYXXXXXXXXXFYLMNIPSLETPVXXAKP

SEQ ID NO: 20822 - protein, 40 aa, Artificial Sequence
  Non-cyclic GFR-binding peptide
  MOD_RES (1), (3), (35), (36): Xaa is C or S
XGXGEVVMDPIKGYVVKENEDFYLMNIPSLETPVXXAKPI

SEQ ID NO: 20823 - protein, 34 aa, Artificial Sequence
  Non-cyclic GFR-binding peptide
  MOD_RES (1), (33), (34): Xaa is C or S
XGEVVMEPIKGYVVKDYEDFYLMNIPSLETPVXX

SEQ ID NO: 20824 - protein, 33 aa, Artificial Sequence
  Non-cyclic GFR-binding peptide
  MOD_RES (12), (13), (14), (15), (16): Xaa is A or G
  MOD_RES (17), (18), (19), (20): Xaa is A or G or is absent
ARVVMNPIKGYXXXXXXXXXFYLVNIPSLQTPA

SEQ ID NO: 20825 - protein, 40 aa, Artificial Sequence
  Non-cyclic GFR-binding peptide
  MOD_RES (2), (4), (38), (39): Xaa is C or S
  MOD_RES (16), (17), (18), (19), (20): Xaa is A or G
  MOD_RES (21), (22), (23), (24): Xaa is A or G or is absent
HXGXARVVMNPIKGYXXXXXXXXXFYLVNIPSLQTPAXXP

SEQ ID NO: 20826 - protein, 36 aa, Artificial Sequence
  Non-cyclic GFR-binding peptide
  MOD_RES (1), (3): Xaa is C or S
  MOD_RES (15), (16), (17), (18), (19): Xaa is A or G
  MOD_RES (20), (21), (22), (23): Xaa is A or G or is absent
XGXSEVVMDPIKGYXXXXXXXXXFYLINIPSLRTPV

SEQ ID NO: 20827 - protein, 39 aa, Artificial Sequence
  Non-cyclic GFR-binding peptide
  MOD_RES (1), (35), (36): Xaa is C or S
  MOD_RES (13), (14), (15), (16), (17): Xaa is A or G
  MOD_RES (18), (19), (20), (21): Xaa is A or G or is absent
XSEVVMDPIKGYXXXXXXXXXFYLINIPSLRTPVXXTPP

SEQ ID NO: 20828 - protein, 37 aa, Artificial Sequence
  Non-cyclic GFR-binding peptide
  MOD_RES (2), (4), (36), (37): Xaa is C or S
RXGXGEVVMEPIKGYVVKDYEDFYLMNIPSLETPVXX

SEQ ID NO: 20829 - protein, 39 aa, Artificial Sequence
  Non-cyclic GFR-binding peptide
  MOD_RES (34), (35): Xaa is C or S
  MOD_RES (12), (13), (14), (15), (16): Xaa is A or G
  MOD_RES (17), (18), (19), (20): Xaa is A or G or is absent
AEVVMDPIKGYXXXXXXXXXFYLINIPSLRAPVXXSAPA

SEQ ID NO: 20830 - protein, 37 aa, Artificial Sequence
  Non-cyclic GFR-binding peptide
  MOD_RES (2), (4), (36), (37): Xaa is C or S
RXGXSEVVMDPIKGYVVNNASDFYLINIPSLRTPVXX

SEQ ID NO: 20831 - protein, 37 aa, Artificial Sequence
  Non-cyclic GFR-binding peptide
  MOD_RES (2), (34), (35): Xaa is C or S
GXESVAMGPIKGYYTVVGKDFYLINIPSLKTPVXXAK

SEQ ID NO: 20832 - protein, 36 aa, Artificial Sequence
  Non-cyclic GFR-binding peptide
  MOD_RES (34), (35): Xaa is C or S
  MOD_RES (12), (13), (14), (15), (16): Xaa is A or G
  MOD_RES (17), (18), (19), (20): Xaa is A or G or is absent
AKVVMNPIKGYXXXXXXXXXFYLVNIPSLKTPAXXA

SEQ ID NO: 20833 - protein, 38 aa, Artificial Sequence
  Non-cyclic GFR-binding peptide
  MOD_RES (1), (3), (35), (36): Xaa is C or S
XGXAKVVMNPIKGYIVNNSSDFYLVNIPSLKTPAXXAK

SEQ ID NO: 20834 - protein, 36 aa, Artificial Sequence
  Non-cyclic GFR-binding peptide
  MOD_RES (32), (33): Xaa is C or S
SRVVMNPIKGYIVNSSDDFYLVNIPSLKTPAXXPKP

SEQ ID NO: 20835 - protein, 38 aa, Artificial Sequence
  Non-cyclic GFR-binding peptide
  MOD_RES (1), (36), (37): Xaa is C or S
  MOD_RES (14), (15), (16), (17), (18): Xaa is A or G
  MOD_RES (19), (20), (21), (22): Xaa is A or G or is absent
XEAVSMGEPIKGYXXXXXXXXXFYLVNIPSLKTPVXXA

SEQ ID NO: 20836 - protein, 35 aa, Artificial Sequence
  Non-cyclic GFR-binding peptide
  MOD_RES (2), (34), (35): Xaa is C or S
GXSRVVMNPIKGYIVNSSDDFYLVNIPSLKTPAXX

SEQ ID NO: 20837 - protein, 41 aa, Artificial Sequence
  Non-cyclic GFR-binding peptide
  MOD_RES (2), (4), (38), (39): Xaa is C or S
  MOD_RES (16), (17), (18), (19), (20): Xaa is A or G
  MOD_RES (21), (22), (23), (24): Xaa is A or G or is absent
HXGXSRVVMNPIKGYXXXXXXXXXFYLVNIPSLKTPAXXPK

SEQ ID NO: 20838 - protein, 42 aa, Artificial Sequence
  Non-cyclic GFR-binding peptide
  MOD_RES (2), (4), (38): Xaa is C or S
  MOD_RES (16), (17), (18), (19), (20): Xaa is A or G
  MOD_RES (21), (22), (23), (24): Xaa is A or G or is absent
HXGXSRVVMNPIKGYXXXXXXXXXFYLVNIPSLKTPAXTPKT

SEQ ID NO: 20839 - protein, 38 aa, Artificial Sequence
  Non-cyclic GFR-binding peptide
  MOD_RES (1), (3), (35), (36): Xaa is C or S
XGXSEVVMDPIKGYVVNNASDFYLINIPSLRTPVXXTP

SEQ ID NO: 20840 - protein, 38 aa, Artificial Sequence
  Non-cyclic GFR-binding peptide
  MOD_RES (32), (32): Xaa is C or S
SRVVMNPIKGYIVNSSDDFYLVNIPSLKTPAXTPKTVH

SEQ ID NO: 20841 - protein, 37 aa, Artificial Sequence
  Non-cyclic GFR-binding peptide
  MOD_RES (1), (3), (37): Xaa is C or S
  MOD_RES (15), (16), (17), (18), (19): Xaa is A or G
  MOD_RES (20), (21), (22), (23): Xaa is A or G or is absent
XGXARVVMNPIKGYXXXXXXXXXFYLVNIPSLQTPAX

SEQ ID NO: 20842 - protein, 34 aa, Artificial Sequence
  Non-cyclic GFR-binding peptide
  MOD_RES (1), (3): Xaa is C or S
XGXSRVVMNPIKGYIVNSSDDFYLVNIPSLKTPA

SEQ ID NO: 20843 - protein, 40 aa, Artificial Sequence
  Non-cyclic GFR-binding peptide
  MOD_RES (1), (3), (35), (36): Xaa is C or S
XGXGEVVMEPIKGYVVKDYEDFYLMNIPSLETPVXXAKPI

SEQ ID NO: 20844 - protein, 42 aa, Artificial Sequence
  Non-cyclic GFR-binding peptide
  MOD_RES (2), (36), (37): Xaa is C or S
  MOD_RES (14), (15), (16), (17), (18): Xaa is A or G
  MOD_RES (19), (20), (21), (22): Xaa is A or G or is absent
GXARVVMNPIKGYXXXXXXXXXFYLVNIPSLQTPAXXPKPVT

SEQ ID NO: 20845 - protein, 40 aa, Artificial Sequence
  Non-cyclic GFR-binding peptide
  MOD_RES (34), (35): Xaa is C or S
  MOD_RES (12), (13), (14), (15), (16): Xaa is A or G
  MOD_RES (17), (18), (19), (20): Xaa is A or G or is absent
SRVVMNPIKGYXXXXXXXXXFYLVNIPSLKTPAXXPKPVY

SEQ ID NO: 20846 - protein, 33 aa, Artificial Sequence
  Non-cyclic GFR-binding peptide
  MOD_RES (1), (3): Xaa is C or S
XGXEEVIMPIKGYLLVRGNDFYLMNIPSTKVPA

SEQ ID NO: 20847 - protein, 35 aa, Artificial Sequence
  Non-cyclic GFR-binding peptide
  MOD_RES (1), (35): Xaa is C or S
  MOD_RES (13), (14), (15), (16), (17): Xaa is A or G
  MOD_RES (18), (19), (20), (21): Xaa is A or G or is absent
XGEVVMDPIKGYXXXXXXXXXFYLMNIPSLETPVX

SEQ ID NO: 20848 - protein, 37 aa, Artificial Sequence
  Non-cyclic GFR-binding peptide
  MOD_RES (31), (32): Xaa is C or S
EVVMEPIKGYVVKDYEDFYLMNIPSLETPVXXAKPIS

SEQ ID NO: 20849 - protein, 37 aa, Artificial Sequence
  Non-cyclic GFR-binding peptide
  MOD_RES (32), (33): Xaa is C or S
SRVVMNPIKGYIVNSSDDFYLVNIPSLKTPAXXPKPV

SEQ ID NO: 20850 - protein, 43 aa, Artificial Sequence
  Non-cyclic GFR-binding peptide
  MOD_RES (2), (4), (38), (39): Xaa is C or S
  MOD_RES (16), (17), (18), (19), (20): Xaa is A or G
  MOD_RES (21), (22), (23), (24): Xaa is A or G or is absent
HXGXSRVVMNPIKGYXXXXXXXXXFYLVNIPSLKTPAXXPKPV

SEQ ID NO: 20851 - protein, 37 aa, Artificial Sequence
  Non-cyclic GFR-binding peptide
  MOD_RES (1), (3), (37): Xaa is C or S
  MOD_RES (15), (16), (17), (18), (19): Xaa is A or G
  MOD_RES (20), (21), (22), (23): Xaa is A or G or is absent
XGXGEVVMDPIKGYXXXXXXXXXFYLMNIPSLETPVX

SEQ ID NO: 20852 - protein, 36 aa, Artificial Sequence
  Non-cyclic GFR-binding peptide
  MOD_RES (1), (3), (35), (36): Xaa is C or S
XGXARVVMNPIKGYIVNSSDDFYLVNIPSLQTPAXX

SEQ ID NO: 20853 - protein, 39 aa, Artificial Sequence
  Non-cyclic GFR-binding peptide
  MOD_RES (2), (4), (39): Xaa is C or S
  MOD_RES (17), (18), (19), (20), (21): Xaa is A or G
  MOD_RES (22), (23), (24), (25): Xaa is A or G or is absent
RXGXEAVSMGEPIKGYXXXXXXXXXFYLVNIPSLKTPVX

SEQ ID NO: 20854 - protein, 33 aa, Artificial Sequence
  Non-cyclic GFR-binding peptide
  MOD_RES (33), (33): Xaa is C or S
  MOD_RES (11), (12), (13), (14), (15): Xaa is A or G
  MOD_RES (16), (17), (18), (19): Xaa is A or G or is absent
SVAMGPIKGYXXXXXXXXXFYLINIPSLKTPVX

SEQ ID NO: 20855 - protein, 40 aa, Artificial Sequence
  Non-cyclic GFR-binding peptide
  MOD_RES (1), (3), (36), (37): Xaa is C or S
XGXEAVSMGEPIKGYTPVGMDDFYLVNIPSLKTPVXXAKG

SEQ ID NO: 20856 - protein, 37 aa, Artificial Sequence
  Non-cyclic GFR-binding peptide
  MOD_RES (31), (32): Xaa is C or S
EVVMDPIKGYVVNNASDFYLINIPSLRTPVXXTPPTS

SEQ ID NO: 20857 - protein, 36 aa, Artificial Sequence
  Non-cyclic GFR-binding peptide
  MOD_RES (1), (33), (34): Xaa is C or S
XAEVVMDPIKGYVVNNAADFYLINIPSLRAPVXXSA

SEQ ID NO: 20858 - protein, 37 aa, Artificial Sequence
  Non-cyclic GFR-binding peptide
  MOD_RES (1), (3), (37): Xaa is C or S
  MOD_RES (15), (16), (17), (18), (19): Xaa is A or G
  MOD_RES (20), (21), (22), (23): Xaa is A or G or is absent
XGXESVAMGPIKGYXXXXXXXXXFYLINIPSLKTPVX

SEQ ID NO: 20859 - protein, 38 aa, Artificial Sequence
  Non-cyclic GFR-binding peptide
  MOD_RES (2), (4), (38): Xaa is C or S
  MOD_RES (16), (17), (18), (19), (20): Xaa is A or G
  MOD_RES (21), (22), (23), (24): Xaa is A or G or is absent
RXGXGEVVMEPIKGYXXXXXXXXXFYLMNIPSLETPVX

SEQ ID NO: 20860 - protein, 40 aa, Artificial Sequence
  Non-cyclic GFR-binding peptide
  MOD_RES (2), (36), (37): Xaa is C or S
  MOD_RES (14), (15), (16), (17), (18): Xaa is A or G
  MOD_RES (19), (20), (21), (22): Xaa is A or G or is absent
GXARVVMNPIKGYXXXXXXXXXFYLVNIPSLQTPAXXPKP

SEQ ID NO: 20861 - protein, 36 aa, Artificial Sequence
  Non-cyclic GFR-binding peptide
  MOD_RES (1), (3), (35): Xaa is C or S
XGXSRVVMNPIKGYIVNSSDDFYLVNIPSLKTPAXT

SEQ ID NO: 20862 - protein, 34 aa, Artificial Sequence
  Non-cyclic GFR-binding peptide
  MOD_RES (34), (34): Xaa is C or S
  MOD_RES (12), (13), (14), (15), (16): Xaa is A or G
  MOD_RES (17), (18), (19), (20): Xaa is A or G or is absent
SRVVMNPIKGYXXXXXXXXXFYLVNIPSLKTPAX

SEQ ID NO: 20863 - protein, 36 aa, Artificial Sequence
  Non-cyclic GFR-binding peptide
  MOD_RES (2), (4), (36): Xaa is C or S
RXGXSEVVMDPIKGYVVNNASDFYLINIPSLRTPVX

SEQ ID NO: 20864 - protein, 41 aa, Artificial Sequence
  Non-cyclic GFR-binding peptide
  MOD_RES (1), (3), (37), (38): Xaa is C or S
  MOD_RES (15), (16), (17), (18), (19): Xaa is A or G
  MOD_RES (20), (21), (22), (23): Xaa is A or G or is absent
XGXSEVVMDPIKGYXXXXXXXXXFYLINIPSLRTPVXXTPP

SEQ ID NO: 20865 - protein, 37 aa, Artificial Sequence
  Non-cyclic GFR-binding peptide
  MOD_RES (1), (35), (36): Xaa is C or S
  MOD_RES (13), (14), (15), (16), (17): Xaa is A or G
  MOD_RES (18), (19), (20), (21): Xaa is A or G or is absent
XAKVVMNPIKGYXXXXXXXXXFYLVNIPSLKTPAXXA

SEQ ID NO: 20866 - protein, 37 aa, Artificial Sequence
  Non-cyclic GFR-binding peptide
  MOD_RES (1), (3), (35): Xaa is C or S
XGXSRVVMNPIKGYIVNSSDDFYLVNIPSLKTPAXTP

SEQ ID NO: 20867 - protein, 39 aa, Artificial Sequence
  Non-cyclic GFR-binding peptide
  MOD_RES (34), (35): Xaa is C or S
  MOD_RES (12), (13), (14), (15), (16): Xaa is A or G
  MOD_RES (17), (18), (19), (20): Xaa is A or G or is absent
ARVVMNPIKGYXXXXXXXXXFYLVNIPSLQTPAXXPKPV

SEQ ID NO: 20868 - protein, 37 aa, Artificial Sequence
  Non-cyclic GFR-binding peptide
  MOD_RES (1), (33), (34): Xaa is C or S
XAEVVMDPIKGYVVNNAADFYLINIPSLRAPVXXSAP

SEQ ID NO: 20869 - protein, 37 aa, Artificial Sequence
  Non-cyclic GFR-binding peptide
  MOD_RES (1), (3), (37): Xaa is C or S
  MOD_RES (15), (16), (17), (18), (19): Xaa is A or G
  MOD_RES (20), (21), (22), (23): Xaa is A or G or is absent
XGXGEVVMEPIKGYXXXXXXXXXFYLMNIPSLETPVX

SEQ ID NO: 20870 - protein, 39 aa, Artificial Sequence
  Non-cyclic GFR-binding peptide
  MOD_RES (1), (34), (35): Xaa is C or S
XEAVSMGEPIKGYTPVGMDDFYLVNIPSLKTPVXXAKGV

SEQ ID NO: 20871 - protein, 37 aa, Artificial Sequence
  Non-cyclic GFR-binding peptide
  MOD_RES (33), (34): Xaa is C or S
  MOD_RES (11), (12), (13), (14), (15): Xaa is A or G
  MOD_RES (16), (17), (18), (19): Xaa is A or G or is absent
EVVMEPIKGYXXXXXXXXXFYLMNIPSLETPVXXAKP

SEQ ID NO: 20872 - protein, 35 aa, Artificial Sequence
  Non-cyclic GFR-binding peptide
  MOD_RES (1), (35): Xaa is C or S
  MOD_RES (13), (14), (15), (16), (17): Xaa is A or G
  MOD_RES (18), (19), (20), (21): Xaa is A or G or is absent
XSRVVMNPIKGYXXXXXXXXXFYLVNIPSLKTPAX

SEQ ID NO: 20873 - protein, 34 aa, Artificial Sequence
  Non-cyclic GFR-binding peptide
  MOD_RES (1), (1): Xaa is C or S
  MOD_RES (13), (14), (15), (16), (17): Xaa is A or G
  MOD_RES (18), (19), (20), (21): Xaa is A or G or is absent
XESVAMGPIKGYXXXXXXXXXFYLINIPSLKTPV

SEQ ID NO: 20874 - protein, 38 aa, Artificial Sequence
  Non-cyclic GFR-binding peptide
  MOD_RES (2), (4), (36), (37): Xaa is C or S
RXGXAEVVMDPIKGYVVNNAADFYLINIPSLRAPVXXS

SEQ ID NO: 20875 - protein, 38 aa, Artificial Sequence
  Non-cyclic GFR-binding peptide
  MOD_RES (33), (34): Xaa is C or S
  MOD_RES (11), (12), (13), (14), (15): Xaa is A or G
  MOD_RES (16), (17), (18), (19): Xaa is A or G or is absent
EVVMEPIKGYXXXXXXXXXFYLMNIPSLETPVXXAKPI

SEQ ID NO: 20876 - protein, 32 aa, Artificial Sequence
  Non-cyclic GFR-binding peptide
  MOD_RES (11), (12), (13), (14), (15): Xaa is A or G
  MOD_RES (16), (17), (18), (19): Xaa is A or G or is absent
RVVMNPIKGYXXXXXXXXXFYLVNIPSLKTPA

SEQ ID NO: 20877 - protein, 36 aa, Artificial Sequence
  Non-cyclic GFR-binding peptide
  MOD_RES (33), (34): Xaa is C or S
  MOD_RES (11), (12), (13), (14), (15): Xaa is A or G
  MOD_RES (16), (17), (18), (19): Xaa is A or G or is absent
KVVMNPIKGYXXXXXXXXXFYLVNIPSLKTPAXXAK

SEQ ID NO: 20878 - protein, 44 aa, Artificial Sequence
  Non-cyclic GFR-binding peptide
  MOD_RES (2), (4), (38), (39): Xaa is C or S
  MOD_RES (16), (17), (18), (19), (20): Xaa is A or G
  MOD_RES (21), (22), (23), (24): Xaa is A or G or is absent
HXGXSRVVMNPIKGYXXXXXXXXXFYLVNIPSLKTPAXXPKPVH

SEQ ID NO: 20879 - protein, 32 aa, Artificial Sequence
  Non-cyclic GFR-binding peptide
  MOD_RES (32), (32): Xaa is C or S
ESVAMGPIKGYYTVVGKDFYLINIPSLKTPVX

SEQ ID NO: 20880 - protein, 40 aa, Artificial Sequence
  Non-cyclic GFR-binding peptide
  MOD_RES (2), (4), (38), (39): Xaa is C or S
  MOD_RES (16), (17), (18), (19), (20): Xaa is A or G
  MOD_RES (21), (22), (23), (24): Xaa is A or G or is absent
RXGXGEVVMDPIKGYXXXXXXXXXFYLMNIPSLETPVXXA

SEQ ID NO: 20881 - protein, 38 aa, Artificial Sequence
  Non-cyclic GFR-binding peptide
  MOD_RES (33), (34): Xaa is C or S
EAVSMGEPIKGYTPVGMDDFYLVNIPSLKTPVXXAKGV

SEQ ID NO: 20882 - protein, 43 aa, Artificial Sequence
  Non-cyclic GFR-binding peptide
  MOD_RES (1), (3), (37), (38): Xaa is C or S
  MOD_RES (15), (16), (17), (18), (19): Xaa is A or G
  MOD_RES (20), (21), (22), (23): Xaa is A or G or is absent
XGXSRVVMNPIKGYXXXXXXXXXFYLVNIPSLKTPAXXPKPVH

SEQ ID NO: 20883 - protein, 32 aa, Artificial Sequence
  Non-cyclic GFR-binding peptide
  MOD_RES (31), (31): Xaa is C or S
RVVMNPIKGYIVNSSDDFYLVNIPSLKTPAXT

SEQ ID NO: 20884 - protein, 37 aa, Artificial Sequence
  Non-cyclic GFR-binding peptide
  MOD_RES (33), (34): Xaa is C or S
  MOD_RES (11), (12), (13), (14), (15): Xaa is A or G
  MOD_RES (16), (17), (18), (19): Xaa is A or G or is absent
RVVMNPIKGYXXXXXXXXXFYLVNIPSLKTPAXXPKP

SEQ ID NO: 20885 - protein, 37 aa, Artificial Sequence
  Non-cyclic GFR-binding peptide
  MOD_RES (2), (4), (36), (37): Xaa is C or S
RXGXGEVVMDPIKGYVVKENEDFYLMNIPSLETPVXX

SEQ ID NO: 20886 - protein, 37 aa, Artificial Sequence
  Non-cyclic GFR-binding peptide
  MOD_RES (1), (3), (35), (36): Xaa is C or S
XGXSRVVMNPIKGYIVNSSDDFYLVNIPSLKTPAXXP

SEQ ID NO: 20887 - protein, 37 aa, Artificial Sequence
  Non-cyclic GFR-binding peptide
  MOD_RES (1), (3), (35), (36): Xaa is C or S
XGXSEVVMDPIKGYVVNNASDFYLINIPSLRTPVXXT

SEQ ID NO: 20888 - protein, 41 aa, Artificial Sequence
  Non-cyclic GFR-binding peptide
  MOD_RES (2), (4), (36), (37): Xaa is C or S
HXGXAKVVMNPIKGYIVNNSSDFYLVNIPSLKTPAXXAKPV

SEQ ID NO: 20889 - protein, 39 aa, Artificial Sequence
  Non-cyclic GFR-binding peptide
  MOD_RES (2), (4), (38), (39): Xaa is C or S
  MOD_RES (16), (17), (18), (19), (20): Xaa is A or G
  MOD_RES (21), (22), (23), (24): Xaa is A or G or is absent
HXGXSRVVMNPIKGYXXXXXXXXXFYLVNIPSLKTPAXX

SEQ ID NO: 20890 - protein, 35 aa, Artificial Sequence
  Non-cyclic GFR-binding peptide
  MOD_RES (2), (34): Xaa is C or S
GXSRVVMNPIKGYIVNSSDDFYLVNIPSLKTPAXT

SEQ ID NO: 20891 - protein, 34 aa, Artificial Sequence
  Non-cyclic GFR-binding peptide
  MOD_RES (2), (34): Xaa is C or S
GXAEVVMDPIKGYVVNNAADFYLINIPSLRAPVX

SEQ ID NO: 20892 - protein, 35 aa, Artificial Sequence
  Non-cyclic GFR-binding peptide
  MOD_RES (31), (32): Xaa is C or S
EVVMDPIKGYVVNNASDFYLINIPSLRTPVXXTPP

SEQ ID NO: 20893 - protein, 34 aa, Artificial Sequence
  Non-cyclic GFR-binding peptide
  MOD_RES (1), (33), (34): Xaa is C or S
XAKVVMNPIKGYIVNNSSDFYLVNIPSLKTPAXX

SEQ ID NO: 20894 - protein, 40 aa, Artificial Sequence
  Non-cyclic GFR-binding peptide
  MOD_RES (2), (34), (35): Xaa is C or S
GXSRVVMNPIKGYIVNSSDDFYLVNIPSLKTPAXXPKPVY

SEQ ID NO: 20895 - protein, 36 aa, Artificial Sequence
  Non-cyclic GFR-binding peptide
  MOD_RES (34), (34): Xaa is C or S
  MOD_RES (12), (13), (14), (15), (16): Xaa is A or G
  MOD_RES (17), (18), (19), (20): Xaa is A or G or is absent
SRVVMNPIKGYXXXXXXXXXFYLVNIPSLKTPAXTP

SEQ ID NO: 20896 - protein, 39 aa, Artificial Sequence
  Non-cyclic GFR-binding peptide
  MOD_RES (2), (34), (35): Xaa is C or S
GXESVAMGPIKGYYTVVGKDFYLINIPSLKTPVXXAKSA

SEQ ID NO: 20897 - protein, 37 aa, Artificial Sequence
  Non-cyclic GFR-binding peptide
  MOD_RES (2), (4): Xaa is C or S
  MOD_RES (16), (17), (18), (19), (20): Xaa is A or G
  MOD_RES (21), (22), (23), (24): Xaa is A or G or is absent
HXGXAKVVMNPIKGYXXXXXXXXXFYLVNIPSLKTPA

SEQ ID NO: 20898 - protein, 38 aa, Artificial Sequence
  Non-cyclic GFR-binding peptide
  MOD_RES (2), (34), (35): Xaa is C or S
GXAKVVMNPIKGYIVNNSSDFYLVNIPSLKTPAXXAKP

SEQ ID NO: 20899 - protein, 32 aa, Artificial Sequence
  Non-cyclic GFR-binding peptide
  MOD_RES (1), (1): Xaa is C or S
XAEVVMDPIKGYVVNNAADFYLINIPSLRAPV

SEQ ID NO: 20900 - protein, 39 aa, Artificial Sequence
  Non-cyclic GFR-binding peptide
  MOD_RES (2), (37), (38): Xaa is C or S
  MOD_RES (15), (16), (17), (18), (19): Xaa is A or G
  MOD_RES (20), (21), (22), (23): Xaa is A or G or is absent
GXEAVSMGEPIKGYXXXXXXXXXFYLVNIPSLKTPVXXA

SEQ ID NO: 20901 - protein, 35 aa, Artificial Sequence
  Non-cyclic GFR-binding peptide
  MOD_RES (31), (32): Xaa is C or S
KVVMNPIKGYIVNNSSDFYLVNIPSLKTPAXXAKP

SEQ ID NO: 20902 - protein, 34 aa, Artificial Sequence
  Non-cyclic GFR-binding peptide
  MOD_RES (2), (2): Xaa is C or S
  MOD_RES (13), (14), (15), (16), (17): Xaa is A or G
  MOD_RES (18), (19), (20), (21): Xaa is A or G or is absent
GXEEVIMPIKGYXXXXXXXXXFYLMNIPSTKVPA

SEQ ID NO: 20903 - protein, 34 aa, Artificial Sequence
  Non-cyclic GFR-binding peptide
  MOD_RES (31), (32): Xaa is C or S
RVVMNPIKGYIVNSSDDFYLVNIPSLKTPAXXPK

SEQ ID NO: 20904 - protein, 41 aa, Artificial Sequence
  Non-cyclic GFR-binding peptide
  MOD_RES (1), (3), (35), (36): Xaa is C or S
XGXGEVVMDPIKGYVVKENEDFYLMNIPSLETPVXXAKPIK

SEQ ID NO: 20905 - protein, 37 aa, Artificial Sequence
  Non-cyclic GFR-binding peptide
  MOD_RES (2), (36): Xaa is C or S
  MOD_RES (14), (15), (16), (17), (18): Xaa is A or G
  MOD_RES (19), (20), (21), (22): Xaa is A or G or is absent
GXSRVVMNPIKGYXXXXXXXXXFYLVNIPSLKTPAXT

SEQ ID NO: 20906 - protein, 35 aa, Artificial Sequence
  Non-cyclic GFR-binding peptide
  MOD_RES (31), (32): Xaa is C or S
SVAMGPIKGYYTVVGKDFYLINIPSLKTPVXXAKS

SEQ ID NO: 20907 - protein, 36 aa, Artificial Sequence
  Non-cyclic GFR-binding peptide
  MOD_RES (33), (34): Xaa is C or S
  MOD_RES (11), (12), (13), (14), (15): Xaa is A or G
  MOD_RES (16), (17), (18), (19): Xaa is A or G or is absent
EEVIMPIKGYXXXXXXXXXFYLMNIPSTKVPAXXTS

SEQ ID NO: 20908 - protein, 39 aa, Artificial Sequence
  Non-cyclic GFR-binding peptide
  MOD_RES (1), (3), (37), (38): Xaa is C or S
  MOD_RES (15), (16), (17), (18), (19): Xaa is A or G
  MOD_RES (20), (21), (22), (23): Xaa is A or G or is absent
XGXGEVVMEPIKGYXXXXXXXXXFYLMNIPSLETPVXXA

SEQ ID NO: 20909 - protein, 38 aa, Artificial Sequence
  Non-cyclic GFR-binding peptide
  MOD_RES (2), (34), (35): Xaa is C or S
GXAEVVMDPIKGYVVNNAADFYLINIPSLRAPVXXSAP

SEQ ID NO: 20910 - protein, 39 aa, Artificial Sequence
  Non-cyclic GFR-binding peptide
  MOD_RES (1), (3), (35), (36): Xaa is C or S
XGXAEVVMDPIKGYVVNNAADFYLINIPSLRAPVXXSAP

SEQ ID NO: 20911 - protein, 35 aa, Artificial Sequence
  Non-cyclic GFR-binding peptide
  MOD_RES (2), (2): Xaa is C or S
  MOD_RES (14), (15), (16), (17), (18): Xaa is A or G
  MOD_RES (19), (20), (21), (22): Xaa is A or G or is absent
GXSEVVMDPIKGYXXXXXXXXXFYLINIPSLRTPV

SEQ ID NO: 20912 - protein, 40 aa, Artificial Sequence
  Non-cyclic GFR-binding peptide
  MOD_RES (1), (35), (36): Xaa is C or S
  MOD_RES (13), (14), (15), (16), (17): Xaa is A or G
  MOD_RES (18), (19), (20), (21): Xaa is A or G or is absent
XSRVVMNPIKGYXXXXXXXXXFYLVNIPSLKTPAXXPKPV

SEQ ID NO: 20913 - protein, 37 aa, Artificial Sequence
  Non-cyclic GFR-binding peptide
  MOD_RES (1), (35): Xaa is C or S
  MOD_RES (13), (14), (15), (16), (17): Xaa is A or G
  MOD_RES (18), (19), (20), (21): Xaa is A or G or is absent
XSRVVMNPIKGYXXXXXXXXXFYLVNIPSLKTPAXTP

SEQ ID NO: 20914 - protein, 35 aa, Artificial Sequence
  Non-cyclic GFR-binding peptide
  MOD_RES (2), (2): Xaa is C or S
  MOD_RES (14), (15), (16), (17), (18): Xaa is A or G
  MOD_RES (19), (20), (21), (22): Xaa is A or G or is absent
GXSRVVMNPIKGYXXXXXXXXXFYLVNIPSLKTPA

SEQ ID NO: 20915 - protein, 38 aa, Artificial Sequence
  Non-cyclic GFR-binding peptide
  MOD_RES (33), (34): Xaa is C or S
  MOD_RES (11), (12), (13), (14), (15): Xaa is A or G
  MOD_RES (16), (17), (18), (19): Xaa is A or G or is absent
EVVMDPIKGYXXXXXXXXXFYLMNIPSLETPVXXAKPI

SEQ ID NO: 20916 - protein, 32 aa, Artificial Sequence
  Non-cyclic GFR-binding peptide
  MOD_RES (32), (32): Xaa is C or S
AKVVMNPIKGYIVNNSSDFYLVNIPSLKTPAX

SEQ ID NO: 20917 - protein, 38 aa, Artificial Sequence
  Non-cyclic GFR-binding peptide
  MOD_RES (32), (33): Xaa is C or S
AKVVMNPIKGYIVNNSSDFYLVNIPSLKTPAXXAKPVA

SEQ ID NO: 20918 - protein, 34 aa, Artificial Sequence
  Non-cyclic GFR-binding peptide
  MOD_RES (2), (2): Xaa is C or S
GXEAVSMGEPIKGYTPVGMDDFYLVNIPSLKTPV

SEQ ID NO: 20919 - protein, 40 aa, Artificial Sequence
  Non-cyclic GFR-binding peptide
  MOD_RES (1), (3), (35): Xaa is C or S
XGXSRVVMNPIKGYIVNSSDDFYLVNIPSLKTPAXTPKTV

SEQ ID NO: 20920 - protein, 37 aa, Artificial Sequence
  Non-cyclic GFR-binding peptide
  MOD_RES (32), (33): Xaa is C or S
ARVVMNPIKGYIVNSSDDFYLVNIPSLQTPAXXPKPV

SEQ ID NO: 20921 - protein, 37 aa, Artificial Sequence
  Non-cyclic GFR-binding peptide
  MOD_RES (31), (32): Xaa is C or S
KVVMNPIKGYIVNNSSDFYLVNIPSLKTPAXXAKPVA

SEQ ID NO: 20922 - protein, 35 aa, Artificial Sequence
  Non-cyclic GFR-binding peptide
  MOD_RES (32), (33): Xaa is C or S
GEVVMEPIKGYVVKDYEDFYLMNIPSLETPVXXAK

SEQ ID NO: 20923 - protein, 40 aa, Artificial Sequence
  Non-cyclic GFR-binding peptide
  MOD_RES (2), (4), (38), (39): Xaa is C or S
  MOD_RES (16), (17), (18), (19), (20): Xaa is A or G
  MOD_RES (21), (22), (23), (24): Xaa is A or G or is absent
RXGXAEVVMDPIKGYXXXXXXXXXFYLINIPSLRAPVXXS

SEQ ID NO: 20924 - protein, 36 aa, Artificial Sequence
  Non-cyclic GFR-binding peptide
  MOD_RES (31), (32): Xaa is C or S
RVVMNPIKGYIVNSSDDFYLVNIPSLQTPAXXPKPV

SEQ ID NO: 20925 - protein, 39 aa, Artificial Sequence
  Non-cyclic GFR-binding peptide
  MOD_RES (2), (36), (37): Xaa is C or S
  MOD_RES (14), (15), (16), (17), (18): Xaa is A or G
  MOD_RES (19), (20), (21), (22): Xaa is A or G or is absent
GXSEVVMDPIKGYXXXXXXXXXFYLINIPSLRTPVXXTP

SEQ ID NO: 20926 - protein, 32 aa, Artificial Sequence
  Non-cyclic GFR-binding peptide
  MOD_RES (11), (12), (13), (14), (15): Xaa is A or G
  MOD_RES (16), (17), (18), (19): Xaa is A or G or is absent
SVAMGPIKGYXXXXXXXXXFYLINIPSLKTPV

SEQ ID NO: 20927 - protein, 40 aa, Artificial Sequence
  Non-cyclic GFR-binding peptide
  MOD_RES (2), (4), (38), (39): Xaa is C or S
  MOD_RES (16), (17), (18), (19), (20): Xaa is A or G
  MOD_RES (21), (22), (23), (24): Xaa is A or G or is absent
HXGXSRVVMNPIKGYXXXXXXXXXFYLVNIPSLKTPAXXP

SEQ ID NO: 20928 - protein, 40 aa, Artificial Sequence
  Non-cyclic GFR-binding peptide
  MOD_RES (2), (36), (37): Xaa is C or S
  MOD_RES (14), (15), (16), (17), (18): Xaa is A or G
  MOD_RES (19), (20), (21), (22): Xaa is A or G or is absent
GXGEVVMEPIKGYXXXXXXXXXFYLMNIPSLETPVXXAKP

SEQ ID NO: 20929 - protein, 42 aa, Artificial Sequence
  Non-cyclic GFR-binding peptide
  MOD_RES (2), (4), (38), (39): Xaa is C or S
  MOD_RES (16), (17), (18), (19), (20): Xaa is A or G
  MOD_RES (21), (22), (23), (24): Xaa is A or G or is absent
RXGXESVAMGPIKGYXXXXXXXXXFYLINIPSLKTPVXXAKS

SEQ ID NO: 20930 - protein, 42 aa, Artificial Sequence
  Non-cyclic GFR-binding peptide
  MOD_RES (2), (4), (36): Xaa is C or S
HXGXSRVVMNPIKGYIVNSSDDFYLVNIPSLKTPAXTPKTVH

SEQ ID NO: 20931 - protein, 38 aa, Artificial Sequence
  Non-cyclic GFR-binding peptide
  MOD_RES (2), (4), (38): Xaa is C or S
  MOD_RES (16), (17), (18), (19), (20): Xaa is A or G
  MOD_RES (21), (22), (23), (24): Xaa is A or G or is absent
RXGXSEVVMDPIKGYXXXXXXXXXFYLINIPSLRTPVX

SEQ ID NO: 20932 - protein, 33 aa, Artificial Sequence
  Non-cyclic GFR-binding peptide
  MOD_RES (1), (32), (33): Xaa is C or S
XEEVIMPIKGYLLVRGNDFYLMNIPSTKVPAXX

SEQ ID NO: 20933 - protein, 36 aa, Artificial Sequence
  Non-cyclic GFR-binding peptide
  MOD_RES (1), (35), (36): Xaa is C or S
  MOD_RES (13), (14), (15), (16), (17): Xaa is A or G
  MOD_RES (18), (19), (20), (21): Xaa is A or G or is absent
XAKVVMNPIKGYXXXXXXXXXFYLVNIPSLKTPAXX

SEQ ID NO: 20934 - protein, 42 aa, Artificial Sequence
  Non-cyclic GFR-binding peptide
  MOD_RES (2), (4), (38), (39): Xaa is C or S
  MOD_RES (16), (17), (18), (19), (20): Xaa is A or G
  MOD_RES (21), (22), (23), (24): Xaa is A or G or is absent
HXGXSRVVMNPIKGYXXXXXXXXXFYLVNIPSLKTPAXXPKP

SEQ ID NO: 20935 - protein, 39 aa, Artificial Sequence
  Non-cyclic GFR-binding peptide
  MOD_RES (1), (35): Xaa is C or S
  MOD_RES (13), (14), (15), (16), (17): Xaa is A or G
  MOD_RES (18), (19), (20), (21): Xaa is A or G or is absent
XSRVVMNPIKGYXXXXXXXXXFYLVNIPSLKTPAXTPKT

SEQ ID NO: 20936 - protein, 35 aa, Artificial Sequence
  Non-cyclic GFR-binding peptide
  MOD_RES (2), (4): Xaa is C or S
RXGXAEVVMDPIKGYVVNNAADFYLINIPSLRAPV

SEQ ID NO: 20937 - protein, 41 aa, Artificial Sequence
  Non-cyclic GFR-binding peptide
  MOD_RES (2), (4), (37), (38): Xaa is C or S
RXGXEAVSMGEPIKGYTPVGMDDFYLVNIPSLKTPVXXAKG

SEQ ID NO: 20938 - protein, 32 aa, Artificial Sequence
  Non-cyclic GFR-binding peptide
  MOD_RES (1), (1): Xaa is C or S
XARVVMNPIKGYIVNSSDDFYLVNIPSLQTPA

SEQ ID NO: 20939 - protein, 41 aa, Artificial Sequence
  Non-cyclic GFR-binding peptide
  MOD_RES (2), (4), (36), (37): Xaa is C or S
RXGXGEVVMDPIKGYVVKENEDFYLMNIPSLETPVXXAKPI

SEQ ID NO: 20940 - protein, 39 aa, Artificial Sequence
  Non-cyclic GFR-binding peptide
  MOD_RES (2), (4), (35), (36): Xaa is C or S
LXGXEEVIMPIKGYLLVRGNDFYLMNIPSTKVPAXXTSP

SEQ ID NO: 20941 - protein, 34 aa, Artificial Sequence
  Non-cyclic GFR-binding peptide
  MOD_RES (1), (1): Xaa is C or S
  MOD_RES (13), (14), (15), (16), (17): Xaa is A or G
  MOD_RES (18), (19), (20), (21): Xaa is A or G or is absent
XGEVVMDPIKGYXXXXXXXXXFYLMNIPSLETPV

SEQ ID NO: 20942 - protein, 38 aa, Artificial Sequence
  Non-cyclic GFR-binding peptide
  MOD_RES (1), (33), (34): Xaa is C or S
XARVVMNPIKGYIVNSSDDFYLVNIPSLQTPAXXPKPV

SEQ ID NO: 20943 - protein, 39 aa, Artificial Sequence
  Non-cyclic GFR-binding peptide
  MOD_RES (1), (3), (37), (38): Xaa is C or S
  MOD_RES (15), (16), (17), (18), (19): Xaa is A or G
  MOD_RES (20), (21), (22), (23): Xaa is A or G or is absent
XGXESVAMGPIKGYXXXXXXXXXFYLINIPSLKTPVXXA

SEQ ID NO: 20944 - protein, 35 aa, Artificial Sequence
  Non-cyclic GFR-binding peptide
  MOD_RES (31), (32): Xaa is C or S
EEVIMPIKGYLLVRGNDFYLMNIPSTKVPAXXTSP

SEQ ID NO: 20945 - protein, 42 aa, Artificial Sequence
  Non-cyclic GFR-binding peptide
  MOD_RES (2), (4), (39), (40): Xaa is C or S
  MOD_RES (17), (18), (19), (20), (21): Xaa is A or G
  MOD_RES (22), (23), (24), (25): Xaa is A or G or is absent
RXGXEAVSMGEPIKGYXXXXXXXXXFYLVNIPSLKTPVXXAK

SEQ ID NO: 20946 - protein, 37 aa, Artificial Sequence
  Non-cyclic GFR-binding peptide
  MOD_RES (34), (35): Xaa is C or S
  MOD_RES (12), (13), (14), (15), (16): Xaa is A or G
  MOD_RES (17), (18), (19), (20): Xaa is A or G or is absent
ARVVMNPIKGYXXXXXXXXXFYLVNIPSLQTPAXXPK

SEQ ID NO: 20947 - protein, 35 aa, Artificial Sequence
  Non-cyclic GFR-binding peptide
  MOD_RES (1), (33), (34): Xaa is C or S
XAEVVMDPIKGYVVNNAADFYLINIPSLRAPVXXS

SEQ ID NO: 20948 - protein, 38 aa, Artificial Sequence
  Non-cyclic GFR-binding peptide
  MOD_RES (2), (36), (37): Xaa is C or S
  MOD_RES (14), (15), (16), (17), (18): Xaa is A or G
  MOD_RES (19), (20), (21), (22): Xaa is A or G or is absent
GXSRVVMNPIKGYXXXXXXXXXFYLVNIPSLKTPAXXP

SEQ ID NO: 20949 - protein, 34 aa, Artificial Sequence
  Non-cyclic GFR-binding peptide
  MOD_RES (1), (1): Xaa is C or S
  MOD_RES (13), (14), (15), (16), (17): Xaa is A or G
  MOD_RES (18), (19), (20), (21): Xaa is A or G or is absent
XSRVVMNPIKGYXXXXXXXXXFYLVNIPSLKTPA

SEQ ID NO: 20950 - protein, 35 aa, Artificial Sequence
  Non-cyclic GFR-binding peptide
  MOD_RES (1), (33), (34): Xaa is C or S
XESVAMGPIKGYYTVVGKDFYLINIPSLKTPVXXA

SEQ ID NO: 20951 - protein, 43 aa, Artificial Sequence
  Non-cyclic GFR-binding peptide
  MOD_RES (1), (3), (37), (38): Xaa is C or S
  MOD_RES (15), (16), (17), (18), (19): Xaa is A or G
  MOD_RES (20), (21), (22), (23): Xaa is A or G or is absent
XGXSRVVMNPIKGYXXXXXXXXXFYLVNIPSLKTPAXXPKPVY

SEQ ID NO: 20952 - protein, 41 aa, Artificial Sequence
  Non-cyclic GFR-binding peptide
  MOD_RES (1), (3), (37), (38): Xaa is C or S
  MOD_RES (15), (16), (17), (18), (19): Xaa is A or G
  MOD_RES (20), (21), (22), (23): Xaa is A or G or is absent
XGXARVVMNPIKGYXXXXXXXXXFYLVNIPSLQTPAXXPKP

SEQ ID NO: 20953 - protein, 35 aa, Artificial Sequence
  Non-cyclic GFR-binding peptide
  MOD_RES (2), (35): Xaa is C or S
  MOD_RES (13), (14), (15), (16), (17): Xaa is A or G
  MOD_RES (18), (19), (20), (21): Xaa is A or G or is absent
GXEEVIMPIKGYXXXXXXXXXFYLMNIPSTKVPAX

SEQ ID NO: 20954 - protein, 37 aa, Artificial Sequence
  Non-cyclic GFR-binding peptide
  MOD_RES (1), (33), (34): Xaa is C or S
XARVVMNPIKGYIVNSSDDFYLVNIPSLQTPAXXPKP

SEQ ID NO: 20955 - protein, 39 aa, Artificial Sequence
  Non-cyclic GFR-binding peptide
  MOD_RES (1), (3), (37), (38): Xaa is C or S
  MOD_RES (15), (16), (17), (18), (19): Xaa is A or G
  MOD_RES (20), (21), (22), (23): Xaa is A or G or is absent
XGXGEVVMDPIKGYXXXXXXXXXFYLMNIPSLETPVXXA

SEQ ID NO: 20956 - protein, 34 aa, Artificial Sequence
  Non-cyclic GFR-binding peptide
  MOD_RES (33), (34): Xaa is C or S
EAVSMGEPIKGYTPVGMDDFYLVNIPSLKTPVXX

SEQ ID NO: 20957 - protein, 35 aa, Artificial Sequence
  Non-cyclic GFR-binding peptide
  MOD_RES (1), (35): Xaa is C or S
  MOD_RES (13), (14), (15), (16), (17): Xaa is A or G
  MOD_RES (18), (19), (20), (21): Xaa is A or G or is absent
XESVAMGPIKGYXXXXXXXXXFYLINIPSLKTPVX

SEQ ID NO: 20958 - protein, 35 aa, Artificial Sequence
  Non-cyclic GFR-binding peptide
  MOD_RES (1), (33), (34): Xaa is C or S
XARVVMNPIKGYIVNSSDDFYLVNIPSLQTPAXXP

SEQ ID NO: 20959 - protein, 39 aa, Artificial Sequence
  Non-cyclic GFR-binding peptide
  MOD_RES (2), (4), (38): Xaa is C or S
  MOD_RES (16), (17), (18), (19), (20): Xaa is A or G
  MOD_RES (21), (22), (23), (24): Xaa is A or G or is absent
HXGXSRVVMNPIKGYXXXXXXXXXFYLVNIPSLKTPAXT

SEQ ID NO: 20960 - protein, 40 aa, Artificial Sequence
  Non-cyclic GFR-binding peptide
  MOD_RES (2), (4), (36), (37): Xaa is C or S
RXGXAEVVMDPIKGYVVNNAADFYLINIPSLRAPVXXSAP

SEQ ID NO: 20961 - protein, 36 aa, Artificial Sequence
  Non-cyclic GFR-binding peptide
  MOD_RES (1), (3), (35), (36): Xaa is C or S
XGXAEVVMDPIKGYVVNNAADFYLINIPSLRAPVXX

SEQ ID NO: 20962 - protein, 40 aa, Artificial Sequence
  Non-cyclic GFR-binding peptide
  MOD_RES (2), (4), (36), (37): Xaa is C or S
HXGXAKVVMNPIKGYIVNNSSDFYLVNIPSLKTPAXXAKP

SEQ ID NO: 20963 - protein, 37 aa, Artificial Sequence
  Non-cyclic GFR-binding peptide
  MOD_RES (1), (33): Xaa is C or S
XSRVVMNPIKGYIVNSSDDFYLVNIPSLKTPAXTPKT

SEQ ID NO: 20964 - protein, 41 aa, Artificial Sequence
  Non-cyclic GFR-binding peptide
  MOD_RES (2), (4), (36), (37): Xaa is C or S
RXGXAEVVMDPIKGYVVNNAADFYLINIPSLRAPVXXSAPA

SEQ ID NO: 20965 - protein, 42 aa, Artificial Sequence
  Non-cyclic GFR-binding peptide
  MOD_RES (1), (3), (37), (38): Xaa is C or S
  MOD_RES (15), (16), (17), (18), (19): Xaa is A or G
  MOD_RES (20), (21), (22), (23): Xaa is A or G or is absent
XGXAEVVMDPIKGYXXXXXXXXXFYLINIPSLRAPVXXSAPA

SEQ ID NO: 20966 - protein, 35 aa, Artificial Sequence
  Non-cyclic GFR-binding peptide
  MOD_RES (1), (35): Xaa is C or S
  MOD_RES (13), (14), (15), (16), (17): Xaa is A or G
  MOD_RES (18), (19), (20), (21): Xaa is A or G or is absent
XGEVVMEPIKGYXXXXXXXXXFYLMNIPSLETPVX

SEQ ID NO: 20967 - protein, 36 aa, Artificial Sequence
  Non-cyclic GFR-binding peptide
  MOD_RES (2), (34), (35): Xaa is C or S
GXGEVVMEPIKGYVVKDYEDFYLMNIPSLETPVXXA

SEQ ID NO: 20968 - protein, 37 aa, Artificial Sequence
  Non-cyclic GFR-binding peptide
  MOD_RES (2), (4): Xaa is C or S
  MOD_RES (16), (17), (18), (19), (20): Xaa is A or G
  MOD_RES (21), (22), (23), (24): Xaa is A or G or is absent
RXGXSEVVMDPIKGYXXXXXXXXXFYLINIPSLRTPV

SEQ ID NO: 20969 - protein, 32 aa, Artificial Sequence
  Non-cyclic GFR-binding peptide
EAVSMGEPIKGYTPVGMDDFYLVNIPSLKTPV

SEQ ID NO: 20970 - protein, 38 aa, Artificial Sequence
  Non-cyclic GFR-binding peptide
  MOD_RES (1), (3), (36), (37): Xaa is C or S
  MOD_RES (14), (15), (16), (17), (18): Xaa is A or G
  MOD_RES (19), (20), (21), (22): Xaa is A or G or is absent
XGXEEVIMPIKGYXXXXXXXXXFYLMNIPSTKVPAXXT

SEQ ID NO: 20971 - protein, 38 aa, Artificial Sequence
  Non-cyclic GFR-binding peptide
  MOD_RES (1), (35), (36): Xaa is C or S
  MOD_RES (13), (14), (15), (16), (17): Xaa is A or G
  MOD_RES (18), (19), (20), (21): Xaa is A or G or is absent
XSEVVMDPIKGYXXXXXXXXXFYLINIPSLRTPVXXTP

SEQ ID NO: 20972 - protein, 40 aa, Artificial Sequence
  Non-cyclic GFR-binding peptide
  MOD_RES (1), (3), (36), (37): Xaa is C or S
  MOD_RES (14), (15), (16), (17), (18): Xaa is A or G
  MOD_RES (19), (20), (21), (22): Xaa is A or G or is absent
XGXEEVIMPIKGYXXXXXXXXXFYLMNIPSTKVPAXXTSP

SEQ ID NO: 20973 - protein, 35 aa, Artificial Sequence
  Non-cyclic GFR-binding peptide
  MOD_RES (2), (34), (35): Xaa is C or S
GXESVAMGPIKGYYTVVGKDFYLINIPSLKTPVXX

SEQ ID NO: 20974 - protein, 36 aa, Artificial Sequence
  Non-cyclic GFR-binding peptide
  MOD_RES (31), (32): Xaa is C or S
EVVMDPIKGYVVKENEDFYLMNIPSLETPVXXAKPI

SEQ ID NO: 20975 - protein, 40 aa, Artificial Sequence
  Non-cyclic GFR-binding peptide
  MOD_RES (2), (34): Xaa is C or S
GXSRVVMNPIKGYIVNSSDDFYLVNIPSLKTPAXTPKTVH

SEQ ID NO: 20976 - protein, 39 aa, Artificial Sequence
  Non-cyclic GFR-binding peptide
  MOD_RES (2), (4), (36), (37): Xaa is C or S
RXGXGEVVMDPIKGYVVKENEDFYLMNIPSLETPVXXAK

SEQ ID NO: 20977 - protein, 35 aa, Artificial Sequence
  Non-cyclic GFR-binding peptide
  MOD_RES (1), (3): Xaa is C or S
XGXEAVSMGEPIKGYTPVGMDDFYLVNIPSLKTPV

SEQ ID NO: 20978 - protein, 36 aa, Artificial Sequence
  Non-cyclic GFR-binding peptide
  MOD_RES (31), (32): Xaa is C or S
RVVMNPIKGYIVNSSDDFYLVNIPSLKTPAXXPKPV

SEQ ID NO: 20979 - protein, 37 aa, Artificial Sequence
  Non-cyclic GFR-binding peptide
  MOD_RES (1), (3), (34), (35): Xaa is C or S
XGXEEVIMPIKGYLLVRGNDFYLMNIPSTKVPAXXTS

SEQ ID NO: 20980 - protein, 41 aa, Artificial Sequence
  Non-cyclic GFR-binding peptide
  MOD_RES (1), (3), (35), (36): Xaa is C or S
XGXSEVVMDPIKGYVVNNASDFYLINIPSLRTPVXXTPPTS

SEQ ID NO: 20981 - protein, 36 aa, Artificial Sequence
  Non-cyclic GFR-binding peptide
  MOD_RES (34), (35): Xaa is C or S
  MOD_RES (12), (13), (14), (15), (16): Xaa is A or G
  MOD_RES (17), (18), (19), (20): Xaa is A or G or is absent
AEVVMDPIKGYXXXXXXXXXFYLINIPSLRAPVXXS

SEQ ID NO: 20982 - protein, 36 aa, Artificial Sequence
  Non-cyclic GFR-binding peptide
  MOD_RES (33), (34): Xaa is C or S
  MOD_RES (11), (12), (13), (14), (15): Xaa is A or G
  MOD_RES (16), (17), (18), (19): Xaa is A or G or is absent
RVVMNPIKGYXXXXXXXXXFYLVNIPSLQTPAXXPK

SEQ ID NO: 20983 - protein, 36 aa, Artificial Sequence
  Non-cyclic GFR-binding peptide
  MOD_RES (2), (36): Xaa is C or S
  MOD_RES (14), (15), (16), (17), (18): Xaa is A or G
  MOD_RES (19), (20), (21), (22): Xaa is A or G or is absent
GXESVAMGPIKGYXXXXXXXXXFYLINIPSLKTPVX

SEQ ID NO: 20984 - protein, 32 aa, Artificial Sequence
  Non-cyclic GFR-binding peptide
  MOD_RES (11), (12), (13), (14), (15): Xaa is A or G
  MOD_RES (16), (17), (18), (19): Xaa is A or G or is absent
RVVMNPIKGYXXXXXXXXXFYLVNIPSLQTPA

SEQ ID NO: 20985 - protein, 40 aa, Artificial Sequence
  Non-cyclic GFR-binding peptide
  MOD_RES (1), (35), (36): Xaa is C or S
  MOD_RES (13), (14), (15), (16), (17): Xaa is A or G
  MOD_RES (18), (19), (20), (21): Xaa is A or G or is absent
XSEVVMDPIKGYXXXXXXXXXFYLINIPSLRTPVXXTPPT

SEQ ID NO: 20986 - protein, 39 aa, Artificial Sequence
  Non-cyclic GFR-binding peptide
  MOD_RES (2), (34), (35): Xaa is C or S
GXSEVVMDPIKGYVVNNASDFYLINIPSLRTPVXXTPPT

SEQ ID NO: 20987 - protein, 35 aa, Artificial Sequence
  Non-cyclic GFR-binding peptide
  MOD_RES (1), (3): Xaa is C or S
  MOD_RES (14), (15), (16), (17), (18): Xaa is A or G
  MOD_RES (19), (20), (21), (22): Xaa is A or G or is absent
XGXEEVIMPIKGYXXXXXXXXXFYLMNIPSTKVPA

SEQ ID NO: 20988 - protein, 36 aa, Artificial Sequence
  Non-cyclic GFR-binding peptide
  MOD_RES (31), (32): Xaa is C or S
EEVIMPIKGYLLVRGNDFYLMNIPSTKVPAXXTSPV

SEQ ID NO: 20989 - protein, 37 aa, Artificial Sequence
  Non-cyclic GFR-binding peptide
  MOD_RES (1), (3), (35), (36): Xaa is C or S
XGXAKVVMNPIKGYIVNNSSDFYLVNIPSLKTPAXXA

SEQ ID NO: 20990 - protein, 40 aa, Artificial Sequence
  Non-cyclic GFR-binding peptide
  MOD_RES (1), (3), (37), (38): Xaa is C or S
  MOD_RES (15), (16), (17), (18), (19): Xaa is A or G
  MOD_RES (20), (21), (22), (23): Xaa is A or G or is absent
XGXGEVVMEPIKGYXXXXXXXXXFYLMNIPSLETPVXXAK

SEQ ID NO: 20991 - protein, 37 aa, Artificial Sequence
  Non-cyclic GFR-binding peptide
  MOD_RES (2), (4), (37): Xaa is C or S
  MOD_RES (15), (16), (17), (18), (19): Xaa is A or G
  MOD_RES (20), (21), (22), (23): Xaa is A or G or is absent
LXGXEEVIMPIKGYXXXXXXXXXFYLMNIPSTKVPAX

SEQ ID NO: 20992 - protein, 41 aa, Artificial Sequence
  Non-cyclic GFR-binding peptide
  MOD_RES (2), (4), (36): Xaa is C or S
HXGXSRVVMNPIKGYIVNSSDDFYLVNIPSLKTPAXTPKTV

SEQ ID NO: 20993 - protein, 37 aa, Artificial Sequence
  Non-cyclic GFR-binding peptide
  MOD_RES (2), (4): Xaa is C or S
  MOD_RES (16), (17), (18), (19), (20): Xaa is A or G
  MOD_RES (21), (22), (23), (24): Xaa is A or G or is absent
HXGXSRVVMNPIKGYXXXXXXXXXFYLVNIPSLKTPA

SEQ ID NO: 20994 - protein, 45 aa, Artificial Sequence
  Non-cyclic GFR-binding peptide
  MOD_RES (2), (4), (39), (40): Xaa is C or S
  MOD_RES (17), (18), (19), (20), (21): Xaa is A or G
  MOD_RES (22), (23), (24), (25): Xaa is A or G or is absent
RXGXEAVSMGEPIKGYXXXXXXXXXFYLVNIPSLKTPVXXAKGVK

SEQ ID NO: 20995 - protein, 33 aa, Artificial Sequence
  Non-cyclic GFR-binding peptide
  MOD_RES (32), (33): Xaa is C or S
AKVVMNPIKGYIVNNSSDFYLVNIPSLKTPAXX

SEQ ID NO: 20996 - protein, 36 aa, Artificial Sequence
  Non-cyclic GFR-binding peptide
  MOD_RES (2), (4), (36): Xaa is C or S
HXGXSRVVMNPIKGYIVNSSDDFYLVNIPSLKTPAX

SEQ ID NO: 20997 - protein, 39 aa, Artificial Sequence
  Non-cyclic GFR-binding peptide
  MOD_RES (33), (34): Xaa is C or S
  MOD_RES (11), (12), (13), (14), (15): Xaa is A or G
  MOD_RES (16), (17), (18), (19): Xaa is A or G or is absent
EVVMEPIKGYXXXXXXXXXFYLMNIPSLETPVXXAKPIS

SEQ ID NO: 20998 - protein, 32 aa, Artificial Sequence
  Non-cyclic GFR-binding peptide
  MOD_RES (1), (1): Xaa is C or S
XSEVVMDPIKGYVVNNASDFYLINIPSLRTPV

SEQ ID NO: 20999 - protein, 35 aa, Artificial Sequence
  Non-cyclic GFR-binding peptide
  MOD_RES (33), (34): Xaa is C or S
  MOD_RES (11), (12), (13), (14), (15): Xaa is A or G
  MOD_RES (16), (17), (18), (19): Xaa is A or G or is absent
KVVMNPIKGYXXXXXXXXXFYLVNIPSLKTPAXXA

SEQ ID NO: 21000 - protein, 39 aa, Artificial Sequence
  Non-cyclic GFR-binding peptide
  MOD_RES (1), (35), (36): Xaa is C or S
  MOD_RES (13), (14), (15), (16), (17): Xaa is A or G
  MOD_RES (18), (19), (20), (21): Xaa is A or G or is absent
XARVVMNPIKGYXXXXXXXXXFYLVNIPSLQTPAXXPKP

SEQ ID NO: 21001 - protein, 38 aa, Artificial Sequence
  Non-cyclic GFR-binding peptide
  MOD_RES (33), (34): Xaa is C or S
  MOD_RES (11), (12), (13), (14), (15): Xaa is A or G
  MOD_RES (16), (17), (18), (19): Xaa is A or G or is absent
RVVMNPIKGYXXXXXXXXXFYLVNIPSLKTPAXXPKPV

SEQ ID NO: 21002 - protein, 32 aa, Artificial Sequence
  Non-cyclic GFR-binding peptide
  MOD_RES (11), (12), (13), (14), (15): Xaa is A or G
  MOD_RES (16), (17), (18), (19): Xaa is A or G or is absent
EVVMEPIKGYXXXXXXXXXFYLMNIPSLETPV

SEQ ID NO: 21003 - protein, 36 aa, Artificial Sequence
  Non-cyclic GFR-binding peptide
  MOD_RES (2), (4), (36): Xaa is C or S
HXGXAKVVMNPIKGYIVNNSSDFYLVNIPSLKTPAX

SEQ ID NO: 21004 - protein, 31 aa, Artificial Sequence
  Non-cyclic GFR-binding peptide
  MOD_RES (31), (31): Xaa is C or S
EEVIMPIKGYLLVRGNDFYLMNIPSTKVPAX

SEQ ID NO: 21005 - protein, 41 aa, Artificial Sequence
  Non-cyclic GFR-binding peptide
  MOD_RES (2), (36), (37): Xaa is C or S
  MOD_RES (14), (15), (16), (17), (18): Xaa is A or G
  MOD_RES (19), (20), (21), (22): Xaa is A or G or is absent
GXESVAMGPIKGYXXXXXXXXXFYLINIPSLKTPVXXAKSA

SEQ ID NO: 21006 - protein, 34 aa, Artificial Sequence
  Non-cyclic GFR-binding peptide
  MOD_RES (32), (33): Xaa is C or S
ESVAMGPIKGYYTVVGKDFYLINIPSLKTPVXXA

SEQ ID NO: 21007 - protein, 34 aa, Artificial Sequence
  Non-cyclic GFR-binding peptide
  MOD_RES (1), (3): Xaa is C or S
XGXGEVVMDPIKGYVVKENEDFYLMNIPSLETPV

SEQ ID NO: 21008 - protein, 34 aa, Artificial Sequence
  Non-cyclic GFR-binding peptide
  MOD_RES (32), (33): Xaa is C or S
SEVVMDPIKGYVVNNASDFYLINIPSLRTPVXXT

SEQ ID NO: 21009 - protein, 41 aa, Artificial Sequence
  Non-cyclic GFR-binding peptide
  MOD_RES (2), (4), (38), (39): Xaa is C or S
  MOD_RES (16), (17), (18), (19), (20): Xaa is A or G
  MOD_RES (21), (22), (23), (24): Xaa is A or G or is absent
HXGXAKVVMNPIKGYXXXXXXXXXFYLVNIPSLKTPAXXAK

SEQ ID NO: 21010 - protein, 40 aa, Artificial Sequence
  Non-cyclic GFR-binding peptide
  MOD_RES (2), (34), (35): Xaa is C or S
GXGEVVMEPIKGYVVKDYEDFYLMNIPSLETPVXXAKPIS

SEQ ID NO: 21011 - protein, 40 aa, Artificial Sequence
  Non-cyclic GFR-binding peptide
  MOD_RES (2), (4), (38): Xaa is C or S
  MOD_RES (16), (17), (18), (19), (20): Xaa is A or G
  MOD_RES (21), (22), (23), (24): Xaa is A or G or is absent
HXGXSRVVMNPIKGYXXXXXXXXXFYLVNIPSLKTPAXTP

SEQ ID NO: 21012 - protein, 33 aa, Artificial Sequence
  Non-cyclic GFR-binding peptide
  MOD_RES (12), (13), (14), (15), (16): Xaa is A or G
  MOD_RES (17), (18), (19), (20): Xaa is A or G or is absent
GEVVMDPIKGYXXXXXXXXXFYLMNIPSLETPV

SEQ ID NO: 21013 - protein, 40 aa, Artificial Sequence
  Non-cyclic GFR-binding peptide
  MOD_RES (2), (34), (35): Xaa is C or S
GXESVAMGPIKGYYTVVGKDFYLINIPSLKTPVXXAKSAK

SEQ ID NO: 21014 - protein, 33 aa, Artificial Sequence
  Non-cyclic GFR-binding peptide
  MOD_RES (12), (13), (14), (15), (16): Xaa is A or G
  MOD_RES (17), (18), (19), (20): Xaa is A or G or is absent
AKVVMNPIKGYXXXXXXXXXFYLVNIPSLKTPA
